United States Patent Application Publication US 2005/0244851 A1 - sequence listing, part 101

SEQ ID NO: 3937296 - DNA, 25 bp, Homo sapien
cctagattctcctggtgcagtcact

SEQ ID NO: 3937297 - DNA, 25 bp, Homo sapien
tggctccacttactgtttgctaaac

SEQ ID NO: 3937298 - DNA, 25 bp, Homo sapien
cagcttttctccttcgtggcagttc

SEQ ID NO: 3937299 - DNA, 25 bp, Homo sapien
gctgagcttagtgcattcctcctgg

SEQ ID NO: 3937300 - DNA, 25 bp, Homo sapien
tattgcacgtggctaggtttctctg

SEQ ID NO: 3937301 - DNA, 25 bp, Homo sapien
aaggtggtggagtatctacataatc

SEQ ID NO: 3937302 - DNA, 25 bp, Homo sapien
cagcctacacgtaaggactgggaag

SEQ ID NO: 3937303 - DNA, 25 bp, Homo sapien
tcttgtggaattctgttctggagag

SEQ ID NO: 3937304 - DNA, 25 bp, Homo sapien
gtagtaggatcacttacccagttgt

SEQ ID NO: 3937305 - DNA, 25 bp, Homo sapien
tacaacacatcagcctgtgtgacaa

SEQ ID NO: 3937306 - DNA, 25 bp, Homo sapien
agtacaacacatcagcctgtgtgac

SEQ ID NO: 3937307 - DNA, 25 bp, Homo sapien
tcacttacccagttgtttgaggctg

SEQ ID NO: 3937308 - DNA, 25 bp, Homo sapien
tgcactactttttgttgatatagat

SEQ ID NO: 3937309 - DNA, 25 bp, Homo sapien
tgttagaaatttacactacatcgta

SEQ ID NO: 3937310 - DNA, 25 bp, Homo sapien
ttacgtcttgcccaggtaaccactg

SEQ ID NO: 3937311 - DNA, 25 bp, Homo sapien
tgttgatatagatgaattttgcagt

SEQ ID NO: 3937312 - DNA, 25 bp, Homo sapien
cacagtgcgcaggagtttcagtttc

SEQ ID NO: 3937313 - DNA, 25 bp, Homo sapien
agtttacatgcccgcccacagtgcg

SEQ ID NO: 3937314 - DNA, 25 bp, Homo sapien
cacagtggctatcccagtttacatg

SEQ ID NO: 3937315 - DNA, 25 bp, Homo sapien
tggatatgggttggttcctgttttc

SEQ ID NO: 3937316 - DNA, 25 bp, Homo sapien
cgaacatcgattgggcatttaccat

SEQ ID NO: 3937317 - DNA, 25 bp, Homo sapien
cagtttctgacattccgcgaacatc

SEQ ID NO: 3937318 - DNA, 25 bp, Homo sapien
tgcgttgaggcctgaactagttgtc

SEQ ID NO: 3937319 - DNA, 25 bp, Homo sapien
gcctgaactagttgtcagtttctga

SEQ ID NO: 3937320 - DNA, 25 bp, Homo sapien
acgctggtggccgagacaggccgtg

SEQ ID NO: 3937321 - DNA, 25 bp, Homo sapien
ctgcgagcgaggtggctgggcgctc

SEQ ID NO: 3937322 - DNA, 25 bp, Homo sapien
ctgggcgctcgctggaacacgctgg

SEQ ID NO: 3937323 - DNA, 25 bp, Homo sapien
ctggaacacgctggtggccgagaca

SEQ ID NO: 3937324 - DNA, 25 bp, Homo sapien
gagtcgggtgagtctcgggagtcca

SEQ ID NO: 3937325 - DNA, 25 bp, Homo sapien
gctactgccgcttcagttctcccgg

SEQ ID NO: 3937326 - DNA, 25 bp, Homo sapien
tcactgggtttcggcgtctggcaag

SEQ ID NO: 3937327 - DNA, 25 bp, Homo sapien
tctggcaagcggttcagctgtctgc

SEQ ID NO: 3937328 - DNA, 25 bp, Homo sapien
tcaaagccaccaattgcagttcccg

SEQ ID NO: 3937329 - DNA, 25 bp, Homo sapien
tgtgctcggcttgtggcttagacgc

SEQ ID NO: 3937330 - DNA, 25 bp, Homo sapien
tacacataggctccgttaggacctg

SEQ ID NO: 3937331 - DNA, 25 bp, Homo sapien
ttaggacctggcttatgtgctcggc

SEQ ID NO: 3937332 - DNA, 25 bp, Homo sapien
cacaacgtgcgacaattgcgaaaaa

SEQ ID NO: 3937333 - DNA, 25 bp, Homo sapien
agcgccaatcctgcgcctcacaacg

SEQ ID NO: 3937334 - DNA, 25 bp, Homo sapien
caattgcgaaaaagccacccccgag

SEQ ID NO: 3937335 - DNA, 25 bp, Homo sapien
ctgcgcctcacaacgtgcgacaatt

SEQ ID NO: 3937336 - DNA, 25 bp, Homo sapien
ttcctttctctgtcggaaatttaca

SEQ ID NO: 3937337 - DNA, 25 bp, Homo sapien
ggattgttgtcagttcattcatggg

SEQ ID NO: 3937338 - DNA, 25 bp, Homo sapien
ggtcctcttgatgaactcagcaaca

SEQ ID NO: 3937339 - DNA, 25 bp, Homo sapien
tggggattttcaagatggtcctctt

SEQ ID NO: 3937340 - DNA, 25 bp, Homo sapien
cagggcagcatcactgatacttgca

SEQ ID NO: 3937341 - DNA, 25 bp, Homo sapien
gtctaacagggcagcatcactgata

SEQ ID NO: 3937342 - DNA, 25 bp, Homo sapien
catcactgatacttgcacgcttttc

SEQ ID NO: 3937343 - DNA, 25 bp, Homo sapien
gcagcatcactgatacttgcacgct

SEQ ID NO: 3937344 - DNA, 25 bp, Homo sapien
aaacttcccaaactttctggtgctg

SEQ ID NO: 3937345 - DNA, 25 bp, Homo sapien
ctggtcctttactcatctgaaaaac

SEQ ID NO: 3937346 - DNA, 25 bp, Homo sapien
tcctttactcatctgaaaaacttcc

SEQ ID NO: 3937347 - DNA, 25 bp, Homo sapien
actttctggtgctgatgaaattgca

SEQ ID NO: 3937348 - DNA, 25 bp, Homo sapien
ctgaagaattttcttgaacgaattt

SEQ ID NO: 3937349 - DNA, 25 bp, Homo sapien
aattgtttcatatcaaaaaggtcaa

SEQ ID NO: 3937350 - DNA, 25 bp, Homo sapien
ttgtttcatatcaaaaaggtcaaca

SEQ ID NO: 3937351 - DNA, 25 bp, Homo sapien
attttttaatgctctctgaagaatt

SEQ ID NO: 3937352 - DNA, 25 bp, Homo sapien
caccacgtaggtaggtttgtactgg

SEQ ID NO: 3937353 - DNA, 25 bp, Homo sapien
agaagcggtgtattgcgcctcagca

SEQ ID NO: 3937354 - DNA, 25 bp, Homo sapien
acgtgaaggcgtacggagtctggga

SEQ ID NO: 3937355 - DNA, 25 bp, Homo sapien
tgggagtagtacaccacgtaggtag

SEQ ID NO: 3937356 - DNA, 25 bp, Homo sapien
gacaagtttgccttaagatacacaa

SEQ ID NO: 3937357 - DNA, 25 bp, Homo sapien
atgaacattagtccgcgcagtggct

SEQ ID NO: 3937358 - DNA, 25 bp, Homo sapien
gaaatgaacattagtccgcgcagtg

SEQ ID NO: 3937359 - DNA, 25 bp, Homo sapien
gagaacagacaagtttgccttaaga

SEQ ID NO: 3937360 - DNA, 25 bp, Homo sapien
aaaatttgcaagactattactagga

SEQ ID NO: 3937361 - DNA, 25 bp, Homo sapien
taagagctgcaattagggaatagtt

SEQ ID NO: 3937362 - DNA, 25 bp, Homo sapien
aaaatgtaagagctgcaattaggga

SEQ ID NO: 3937363 - DNA, 25 bp, Homo sapien
actaggattactgcctctgtgttta

SEQ ID NO: 3937364 - DNA, 25 bp, Homo sapien
cacaatctgatggtgtttgctagca

SEQ ID NO: 3937365 - DNA, 25 bp, Homo sapien
aggtccattttcacaatctgatggt

SEQ ID NO: 3937366 - DNA, 25 bp, Homo sapien
cattttcacaatctgatggtgtttg

SEQ ID NO: 3937367 - DNA, 25 bp, Homo sapien
ttcacaatctgatggtgtttgctag

SEQ ID NO: 3937368 - DNA, 25 bp, Homo sapien
aacaatagccttaagagagtccaga

SEQ ID NO: 3937369 - DNA, 25 bp, Homo sapien
aaaacaatagccttaagagagtcca

SEQ ID NO: 3937370 - DNA, 25 bp, Homo sapien
aatagccttaagagagtccagatac

SEQ ID NO: 3937371 - DNA, 25 bp, Homo sapien
taaaaacaatagccttaagagagtc

SEQ ID NO: 3937372 - DNA, 25 bp, Homo sapien
ctttaaagagagtcactgattggct

SEQ ID NO: 3937373 - DNA, 25 bp, Homo sapien
tttaaagagagtcactgattggctc

SEQ ID NO: 3937374 - DNA, 25 bp, Homo sapien
ctgtgtcaaagagaaaataaagatt

SEQ ID NO: 3937375 - DNA, 25 bp, Homo sapien
gtgtcaaagagaaaataaagattta

SEQ ID NO: 3937376 - DNA, 25 bp, Homo sapien
tgtcaaagagaaaataaagatttac

SEQ ID NO: 3937377 - DNA, 25 bp, Homo sapien
tgtgtcaaagagaaaataaagattt

SEQ ID NO: 3937378 - DNA, 25 bp, Homo sapien
tgatctcctcttgtcggaggtagat

SEQ ID NO: 3937379 - DNA, 25 bp, Homo sapien
tgcaagctttcttcatttcggtaat

SEQ ID NO: 3937380 - DNA, 25 bp, Homo sapien
cttcatttcggtaatatctaaaatg

SEQ ID NO: 3937381 - DNA, 25 bp, Homo sapien
ctcttgtcggaggtagattttccca

SEQ ID NO: 3937382 - DNA, 25 bp, Homo sapien
tgtggtatttcagcgtcgtcagtgc

SEQ ID NO: 3937383 - DNA, 25 bp, Homo sapien
cagagcccagggaatctacggaagc

SEQ ID NO: 3937384 - DNA, 25 bp, Homo sapien
tatagttctgtgcttgacaacgtgg

SEQ ID NO: 3937385 - DNA, 25 bp, Homo sapien
gctgagttgagcaggacactgacaa

SEQ ID NO: 3937386 - DNA, 25 bp, Homo sapien
tgtcgtagagttgtgagtttcaaag

SEQ ID NO: 3937387 - DNA, 25 bp, Homo sapien
aggtgtcgtagagttgtgagtttca

SEQ ID NO: 3937388 - DNA, 25 bp, Homo sapien
ggtgtcgtagagttgtgagtttcaa

SEQ ID NO: 3937389 - DNA, 25 bp, Homo sapien
tcgtagagttgtgagtttcaaaggt

SEQ ID NO: 3937390 - DNA, 25 bp, Homo sapien
ggaatgatgcatttccaaaattcag

SEQ ID NO: 3937391 - DNA, 25 bp, Homo sapien
aaattcagtttcatattaacacaca

SEQ ID NO: 3937392 - DNA, 25 bp, Homo sapien
cagtttcatattaacacacacgtac

SEQ ID NO: 3937393 - DNA, 25 bp, Homo sapien
tgcatttccaaaattcagtttcata

SEQ ID NO: 3937394 - DNA, 25 bp, Homo sapien
ggagaactatggtagattagctttc

SEQ ID NO: 3937395 - DNA, 25 bp, Homo sapien
taaaggagaactatggtagattagc

SEQ ID NO: 3937396 - DNA, 25 bp, Homo sapien
gaactatggtagattagctttcctc

SEQ ID NO: 3937397 - DNA, 25 bp, Homo sapien
aattctaaaggagaactatggtaga

SEQ ID NO: 3937398 - DNA, 25 bp, Homo sapien
agctgtgtgactttgcctagagagt

SEQ ID NO: 3937399 - DNA, 25 bp, Homo sapien
tggcgcttattcacaggactactgt

SEQ ID NO: 3937400 - DNA, 25 bp, Homo sapien
agtttcctgatgaatggcgcttatt

SEQ ID NO: 3937401 - DNA, 25 bp, Homo sapien
gagagttaccatacctccctgaaac

SEQ ID NO: 3937402 - DNA, 25 bp, Homo sapien
tgggctccagatccagacgtacctg

SEQ ID NO: 3937403 - DNA, 25 bp, Homo sapien
ttctagaagtttatccagcgcatta

SEQ ID NO: 3937404 - DNA, 25 bp, Homo sapien
ccagcgcattaagagcatgggctcc

SEQ ID NO: 3937405 - DNA, 25 bp, Homo sapien
gcatgggctccagatccagacgtac

SEQ ID NO: 3937406 - DNA, 25 bp, Homo sapien
tgggttttctagtgagagacttcag

SEQ ID NO: 3937407 - DNA, 25 bp, Homo sapien
cagttcctatgacactggaaaatca

SEQ ID NO: 3937408 - DNA, 25 bp, Homo sapien
tctttacctaagatgagatcaacag

SEQ ID NO: 3937409 - DNA, 25 bp, Homo sapien
ttcattgccaaatctctactaagag

SEQ ID NO: 3937410 - DNA, 25 bp, Homo sapien
gtttagtttataacagtggcactgt

SEQ ID NO: 3937411 - DNA, 25 bp, Homo sapien
ctatgggtggaagatttcaaataaa

SEQ ID NO: 3937412 - DNA, 25 bp, Homo sapien
tgaagtacaggttgataaaagagaa

SEQ ID NO: 3937413 - DNA, 25 bp, Homo sapien
taagcactgttagcattttagtata

SEQ ID NO: 3937414 - DNA, 25 bp, Homo sapien
aataaaacagccgttaggaatatat

SEQ ID NO: 3937415 - DNA, 25 bp, Homo sapien
tgttttcatgaatgatccttgaatc

SEQ ID NO: 3937416 - DNA, 25 bp, Homo sapien
gagttattcgttggactctctcttt

SEQ ID NO: 3937417 - DNA, 25 bp, Homo sapien
gtttcttgagttattcgttggactc

SEQ ID NO: 3937418 - DNA, 25 bp, Homo sapien
gttttcatgaatgatccttgaatcc

SEQ ID NO: 3937419 - DNA, 25 bp, Homo sapien
ccgctggtgctaaggatttcaatgc

SEQ ID NO: 3937420 - DNA, 25 bp, Homo sapien
tcaatgcttccagaagatgtgggct

SEQ ID NO: 3937421 - DNA, 25 bp, Homo sapien
gagaactttattaggcatcggaggg

SEQ ID NO: 3937422 - DNA, 25 bp, Homo sapien
tccagaagatgtgggctagagaact

SEQ ID NO: 3937423 - DNA, 25 bp, Homo sapien
tctcttgttgggtatgcaagtgagc

SEQ ID NO: 3937424 - DNA, 25 bp, Homo sapien
ttcattctcttgttgggtatgcaag

SEQ ID NO: 3937425 - DNA, 25 bp, Homo sapien
cttgttgggtatgcaagtgagcagt

SEQ ID NO: 3937426 - DNA, 25 bp, Homo sapien
cattctcttgttgggtatgcaagtg

SEQ ID NO: 3937427 - DNA, 25 bp, Homo sapien
tacagctagccatgaactgaagtgc

SEQ ID NO: 3937428 - DNA, 25 bp, Homo sapien
gtttacagacggaagctatacagct

SEQ ID NO: 3937429 - DNA, 25 bp, Homo sapien
tgcaatatcaagaaggaggagctgt

SEQ ID NO: 3937430 - DNA, 25 bp, Homo sapien
caaaagtcttgagcgctgtgccata

SEQ ID NO: 3937431 - DNA, 25 bp, Homo sapien
ggaaatgtgcgtcagttaagcctct

SEQ ID NO: 3937432 - DNA, 25 bp, Homo sapien
aaaagacatgctggcgggcgtggta

SEQ ID NO: 3937433 - DNA, 25 bp, Homo sapien
cttgagtcatgggaacgatttcccc

SEQ ID NO: 3937434 - DNA, 25 bp, Homo sapien
ccaaatcctctctgaaacaagataa

SEQ ID NO: 3937435 - DNA, 25 bp, Homo sapien
cagaagtgtgagagtacactaggag

SEQ ID NO: 3937436 - DNA, 25 bp, Homo sapien
cactaggagaaacctcctgaagtgc

SEQ ID NO: 3937437 - DNA, 25 bp, Homo sapien
tcccccacatatctggtatcagaag

SEQ ID NO: 3937438 - DNA, 25 bp, Homo sapien
gtttcacacttgcttaatgtgtggg

SEQ ID NO: 3937439 - DNA, 25 bp, Homo sapien
ggcaactggcttagtacaaaaatcc

SEQ ID NO: 3937440 - DNA, 25 bp, Homo sapien
agattcagctagaagccacttgtgt

SEQ ID NO: 3937441 - DNA, 25 bp, Homo sapien
cagtggtcatcgcaatttggcccaa

SEQ ID NO: 3937442 - DNA, 25 bp, Homo sapien
caattcaaaggttcaaggtaagctc

SEQ ID NO: 3937443 - DNA, 25 bp, Homo sapien
tgacaccatttaatgtcatccaagg

SEQ ID NO: 3937444 - DNA, 25 bp, Homo sapien
gacaccatttaatgtcatccaaggg

SEQ ID NO: 3937445 - DNA, 25 bp, Homo sapien
tgatcaagatccgaggcagcatagc

SEQ ID NO: 3937446 - DNA, 25 bp, Homo sapien
taatcattggttggttggccacaga

SEQ ID NO: 3937447 - DNA, 25 bp, Homo sapien
tgtcaagtcagtgcacatccaagct

SEQ ID NO: 3937448 - DNA, 25 bp, Homo sapien
tggcttccagaatagcagagcagct

SEQ ID NO: 3937449 - DNA, 25 bp, Homo sapien
acagcgggctgctgcgtcgcccccg

SEQ ID NO: 3937450 - DNA, 25 bp, Homo sapien
ggacagcgggctgctgcgtcgcccc

SEQ ID NO: 3937451 - DNA, 25 bp, Homo sapien
gggacagcgggctgctgcgtcgccc

SEQ ID NO: 3937452 - DNA, 25 bp, Homo sapien
cggggacagcgggctgctgcgtcgc

SEQ ID NO: 3937453 - DNA, 25 bp, Homo sapien
atgttggtccgcacggcccgggaca

SEQ ID NO: 3937454 - DNA, 25 bp, Homo sapien
tgcacaggatgttggtccgcacggc

SEQ ID NO: 3937455 - DNA, 25 bp, Homo sapien
acaggatgttggtccgcacggcccg

SEQ ID NO: 3937456 - DNA, 25 bp, Homo sapien
gatgttggtccgcacggcccgggac

SEQ ID NO: 3937457 - DNA, 25 bp, Homo sapien
tcagaagcctgactatgggcagaca

SEQ ID NO: 3937458 - DNA, 25 bp, Homo sapien
aaaagctacatattcgcagaactgc

SEQ ID NO: 3937459 - DNA, 25 bp, Homo sapien
cccggtttagatggtggtaagagca

SEQ ID NO: 3937460 - DNA, 25 bp, Homo sapien
aattgagaacgttgttgcatcccgg

SEQ ID NO: 3937461 - DNA, 25 bp, Homo sapien
catcgtcagtgaagctcggtaatcc

SEQ ID NO: 3937462 - DNA, 25 bp, Homo sapien
tcattacaccgaagagaacgccttc

SEQ ID NO: 3937463 - DNA, 25 bp, Homo sapien
catgcctgggtaagagaccactgaa

SEQ ID NO: 3937464 - DNA, 25 bp, Homo sapien
cacaacaggctggagtggaaacgga

SEQ ID NO: 3937465 - DNA, 25 bp, Homo sapien
tcttattgttggattgactatgcca

SEQ ID NO: 3937466 - DNA, 25 bp, Homo sapien
ttcttattgttggattgactatgcc

SEQ ID NO: 3937467 - DNA, 25 bp, Homo sapien
cttattgttggattgactatgccat

SEQ ID NO: 3937468 - DNA, 25 bp, Homo sapien
ttattgttggattgactatgccatc

SEQ ID NO: 3937469 - DNA, 25 bp, Homo sapien
tcagttctagacatattccctccag

SEQ ID NO: 3937470 - DNA, 25 bp, Homo sapien
tttataccaactgggagacacgcag

SEQ ID NO: 3937471 - DNA, 25 bp, Homo sapien
tccacttgtgtaacagcatactcag

SEQ ID NO: 3937472 - DNA, 25 bp, Homo sapien
taagtaatcagaatgcacaataggt

SEQ ID NO: 3937473 - DNA, 25 bp, Homo sapien
tctgtaccgtacgaattgctgcact

SEQ ID NO: 3937474 - DNA, 25 bp, Homo sapien
ttctactggcgtagggacagccgca

SEQ ID NO: 3937475 - DNA, 25 bp, Homo sapien
ccagttcggtagatgtgagactgca

SEQ ID NO: 3937476 - DNA, 25 bp, Homo sapien
gccgcatgtgcaccggaaggtcttg

SEQ ID NO: 3937477 - DNA, 25 bp, Homo sapien
aatggtcttgttggataacttctgg

SEQ ID NO: 3937478 - DNA, 25 bp, Homo sapien
agttcttgagtgtctggtctaggga

SEQ ID NO: 3937479 - DNA, 25 bp, Homo sapien
ggttggttgttcaatgattcaatgg

SEQ ID NO: 3937480 - DNA, 25 bp, Homo sapien
cttctggttttgtgcacagttttcc

SEQ ID NO: 3937481 - DNA, 25 bp, Homo sapien
tctcggtggtgttgtaagagtctgc

SEQ ID NO: 3937482 - DNA, 25 bp, Homo sapien
gctgtctgagtttcgttgctggtga

SEQ ID NO: 3937483 - DNA, 25 bp, Homo sapien
gcaacttctgaggatatctcggtgg

SEQ ID NO: 3937484 - DNA, 25 bp, Homo sapien
tatttttagcagtggagactccttc

SEQ ID NO: 3937485 - DNA, 25 bp, Homo sapien
cactacgtgcttgttgctggcgact

SEQ ID NO: 3937486 - DNA, 25 bp, Homo sapien
taaatcctacggtggcagcatccgg

SEQ ID NO: 3937487 - DNA, 25 bp, Homo sapien
ggataacctacgctcatttagcagg

SEQ ID NO: 3937488 - DNA, 25 bp, Homo sapien
tgtcaaagctgacgaaggtccaggc

SEQ ID NO: 3937489 - DNA, 25 bp, Homo sapien
ttaaggcaatacaataagtcatatt

SEQ ID NO: 3937490 - DNA, 25 bp, Homo sapien
atgagtacgttcaagaattcacaaa

SEQ ID NO: 3937491 - DNA, 25 bp, Homo sapien
gagtacgttcaagaattcacaaaaa

SEQ ID NO: 3937492 - DNA, 25 bp, Homo sapien
cttaaggcaatacaataagtcatat

SEQ ID NO: 3937493 - DNA, 25 bp, Homo sapien
gacagcattaaggtttgtagcctgg

SEQ ID NO: 3937494 - DNA, 25 bp, Homo sapien
ttggtcaggacagcattaaggtttg

SEQ ID NO: 3937495 - DNA, 25 bp, Homo sapien
taatcctgcatgtatgcatgggaat

SEQ ID NO: 3937496 - DNA, 25 bp, Homo sapien
tatgcatgggaatcagggatcattt

SEQ ID NO: 3937497 - DNA, 25 bp, Homo sapien
ttactttgcatctaatgtttggaaa

SEQ ID NO: 3937498 - DNA, 25 bp, Homo sapien
acatgcttcctctggcattactttg

SEQ ID NO: 3937499 - DNA, 25 bp, Homo sapien
catattcccaccgttctatctaaat

SEQ ID NO: 3937500 - DNA, 25 bp, Homo sapien
tgtgattatcatcccacatgcttcc

SEQ ID NO: 3937501 - DNA, 25 bp, Homo sapien
gttggtattgaactcctgacgtcgt

SEQ ID NO: 3937502 - DNA, 25 bp, Homo sapien
ggttggtattgaactcctgacgtcg

SEQ ID NO: 3937503 - DNA, 25 bp, Homo sapien
tgtctgattggcactggattcccag

SEQ ID NO: 3937504 - DNA, 25 bp, Homo sapien
gtctgattggcactggattcccagg

SEQ ID NO: 3937505 - DNA, 25 bp, Homo sapien
caaaatctaggcttcttccattctg

SEQ ID NO: 3937506 - DNA, 25 bp, Homo sapien
tggtgccgctaactcaacatctgac

SEQ ID NO: 3937507 - DNA, 25 bp, Homo sapien
ccatgcatagtctgatgagggttta

SEQ ID NO: 3937508 - DNA, 25 bp, Homo sapien
ggctggagtcattaagttttttctc

SEQ ID NO: 3937509 - DNA, 25 bp, Homo sapien
caacaagcagttcctcagatctcat

SEQ ID NO: 3937510 - DNA, 25 bp, Homo sapien
ggacagactggtgtagcaacaagca

SEQ ID NO: 3937511 - DNA, 25 bp, Homo sapien
ggtgtagcaacaagcagttcctcag

SEQ ID NO: 3937512 - DNA, 25 bp, Homo sapien
ctgtataggacagactggtgtagca

SEQ ID NO: 3937513 - DNA, 25 bp, Homo sapien
gattggaatagatgtggtctgatcg

SEQ ID NO: 3937514 - DNA, 25 bp, Homo sapien
ggtgtagaaactgcgctccttggca

SEQ ID NO: 3937515 - DNA, 25 bp, Homo sapien
ctaggtacttagtgaattcattaat

SEQ ID NO: 3937516 - DNA, 25 bp, Homo sapien
cattctgtgaaatacttgaggttcc

SEQ ID NO: 3937517 - DNA, 25 bp, Homo sapien
aaagtgaggacgtttctggccgcct

SEQ ID NO: 3937518 - DNA, 25 bp, Homo sapien
agcgtggtcgtaacccaaggcaacg

SEQ ID NO: 3937519 - DNA, 25 bp, Homo sapien
gctttgttgggctacgtcacttccg

SEQ ID NO: 3937520 - DNA, 25 bp, Homo sapien
taaatatcctagcaggcacaagggc

SEQ ID NO: 3937521 - DNA, 25 bp, Homo sapien
ttctaatatgcaaggtcttgcactg

SEQ ID NO: 3937522 - DNA, 25 bp, Homo sapien
tcaagagccgtgctccccaagtaag

SEQ ID NO: 3937523 - DNA, 25 bp, Homo sapien
agagggtcctgatcaattgatcaaa

SEQ ID NO: 3937524 - DNA, 25 bp, Homo sapien
gggtcctgatcaattgatcaaatgg

SEQ ID NO: 3937525 - DNA, 25 bp, Homo sapien
tatggtctcggctccctgtgtagca

SEQ ID NO: 3937526 - DNA, 25 bp, Homo sapien
ctccatgagttcatttgtcgctaaa

SEQ ID NO: 3937527 - DNA, 25 bp, Homo sapien
gagttcatttgtcgctaaactatct

SEQ ID NO: 3937528 - DNA, 25 bp, Homo sapien
catttgtcgctaaactatcttaacg

SEQ ID NO: 3937529 - DNA, 25 bp, Homo sapien
gtcgctaaactatcttaacgtttca

SEQ ID NO: 3937530 - DNA, 25 bp, Homo sapien
tgatccgtagagttcaagcccagtc

SEQ ID NO: 3937531 - DNA, 25 bp, Homo sapien
agtaggatcacttgatccgtagagt

SEQ ID NO: 3937532 - DNA, 25 bp, Homo sapien
cttgatccgtagagttcaagcccag

SEQ ID NO: 3937533 - DNA, 25 bp, Homo sapien
tcacttgatccgtagagttcaagcc

SEQ ID NO: 3937534 - DNA, 25 bp, Homo sapien
aacaaaattggttgggcatcatggt

SEQ ID NO: 3937535 - DNA, 25 bp, Homo sapien
caaaacaaaattggttgggcatcat

SEQ ID NO: 3937536 - DNA, 25 bp, Homo sapien
caaaattggttgggcatcatggtac

SEQ ID NO: 3937537 - DNA, 25 bp, Homo sapien
aattggttgggcatcatggtacaca

SEQ ID NO: 3937538 - DNA, 25 bp, Homo sapien
ggtgccgagggagatcgattttaac

SEQ ID NO: 3937539 - DNA, 25 bp, Homo sapien
gctcagggtgccgagggagatcgat

SEQ ID NO: 3937540 - DNA, 25 bp, Homo sapien
agggagatcgattttaacagcaaac

SEQ ID NO: 3937541 - DNA, 25 bp, Homo sapien
agcaaacaggtgctcctctgtgttc

SEQ ID NO: 3937542 - DNA, 25 bp, Homo sapien
tattcctgccaaatattatatccat

SEQ ID NO: 3937543 - DNA, 25 bp, Homo sapien
gttctttcctattcctgccaaatat

SEQ ID NO: 3937544 - DNA, 25 bp, Homo sapien
agctgttctttcctattcctgccaa

SEQ ID NO: 3937545 - DNA, 25 bp, Homo sapien
gtcactttggccctcacaggctcca

SEQ ID NO: 3937546 - DNA, 25 bp, Homo sapien
aggcccattgcggagcagggttccc

SEQ ID NO: 3937547 - DNA, 25 bp, Homo sapien
ggcccattgcggagcagggttccct

SEQ ID NO: 3937548 - DNA, 25 bp, Homo sapien
caggcccattgcggagcagggttcc

SEQ ID NO: 3937549 - DNA, 25 bp, Homo sapien
cgaaccaatggttgtatctggactc

SEQ ID NO: 3937550 - DNA, 25 bp, Homo sapien
atctggactccccaactgtgtgcat

SEQ ID NO: 3937551 - DNA, 25 bp, Homo sapien
tgtatctggactccccaactgtgtg

SEQ ID NO: 3937552 - DNA, 25 bp, Homo sapien
cagggcaaggccgtcgaaccaatgg

SEQ ID NO: 3937553 - DNA, 25 bp, Homo sapien
aactcagacaccacaatcctgtttg

SEQ ID NO: 3937554 - DNA, 25 bp, Homo sapien
caatattggtgttgtaggtatcgct

SEQ ID NO: 3937555 - DNA, 25 bp, Homo sapien
tatttgctcctgtaatagacttcac

SEQ ID NO: 3937556 - DNA, 25 bp, Homo sapien
taggccattgttccaaactcagaca

SEQ ID NO: 3937557 - DNA, 25 bp, Homo sapien
tgaggtcgcgtagaagtcttctccg

SEQ ID NO: 3937558 - DNA, 25 bp, Homo sapien
tgttgatcaggcagttgtcggtgaa

SEQ ID NO: 3937559 - DNA, 25 bp, Homo sapien
tgatgtaattggtctctgaggtcgc

SEQ ID NO: 3937560 - DNA, 25 bp, Homo sapien
cttctccgcacttcatgatgttgat

SEQ ID NO: 3937561 - DNA, 25 bp, Homo sapien
ggctcccctggtaagctgcttgcag

SEQ ID NO: 3937562 - DNA, 25 bp, Homo sapien
taggacttggttacatcagccccag

SEQ ID NO: 3937563 - DNA, 25 bp, Homo sapien
tagggcacgggatccaacggtgtta

SEQ ID NO: 3937564 - DNA, 25 bp, Homo sapien
tagcatctagcagtaagtgtggcgc

SEQ ID NO: 3937565 - DNA, 25 bp, Homo sapien
ccgccacgtatttacgataatcaac

SEQ ID NO: 3937566 - DNA, 25 bp, Homo sapien
gggatgtgacgttgccagatttacc

SEQ ID NO: 3937567 - DNA, 25 bp, Homo sapien
cagatttaccgccacgtatttacga

SEQ ID NO: 3937568 - DNA, 25 bp, Homo sapien
gttgccagatttaccgccacgtatt

SEQ ID NO: 3937569 - DNA, 25 bp, Homo sapien
tttattcaattccccagagtggcct

SEQ ID NO: 3937570 - DNA, 25 bp, Homo sapien
tgttttattcaattccccagagtgg

SEQ ID NO: 3937571 - DNA, 25 bp, Homo sapien
ttttattcaattccccagagtggcc

SEQ ID NO: 3937572 - DNA, 25 bp, Homo sapien
tattcaattccccagagtggcctac

SEQ ID NO: 3937573 - DNA, 25 bp, Homo sapien
tccaaagctgtggtagtagcttggg

SEQ ID NO: 3937574 - DNA, 25 bp, Homo sapien
gatgacatagttctcggtgactcca

SEQ ID NO: 3937575 - DNA, 25 bp, Homo sapien
cattctccggatgtatgcggttgcc

SEQ ID NO: 3937576 - DNA, 25 bp, Homo sapien
tcttgagaatatccaacctgaaagg

SEQ ID NO: 3937577 - DNA, 25 bp, Homo sapien
gcgttgacgtgatggaagaccacca

SEQ ID NO: 3937578 - DNA, 25 bp, Homo sapien
aatgacgtcaaacacgatgcagccg

SEQ ID NO: 3937579 - DNA, 25 bp, Homo sapien
gatgcagccgtcctcttcgtaggcg

SEQ ID NO: 3937580 - DNA, 25 bp, Homo sapien
catggcgtctgtgtaaaacttggtc

SEQ ID NO: 3937581 - DNA, 25 bp, Homo sapien
tcataaagaaattccggctggcagt

SEQ ID NO: 3937582 - DNA, 25 bp, Homo sapien
gattaaatttgtgcccacttctgca

SEQ ID NO: 3937583 - DNA, 25 bp, Homo sapien
ggctggcagtagacttggccatctt

SEQ ID NO: 3937584 - DNA, 25 bp, Homo sapien
gctgttgtagatgccactttgatta

SEQ ID NO: 3937585 - DNA, 25 bp, Homo sapien
ccactgaactcctgtagcaaagaca

SEQ ID NO: 3937586 - DNA, 25 bp, Homo sapien
gctttccattgtgagcataattgac

SEQ ID NO: 3937587 - DNA, 25 bp, Homo sapien
taattgacccgtggaagctctaagc

SEQ ID NO: 3937588 - DNA, 25 bp, Homo sapien
aagacatatcggtattgctttccat

SEQ ID NO: 3937589 - DNA, 25 bp, Homo sapien
tttgacgtagtctcccaatgacagc

SEQ ID NO: 3937590 - DNA, 25 bp, Homo sapien
ccatcggatgtagacttttgacgta

SEQ ID NO: 3937591 - DNA, 25 bp, Homo sapien
tgcatgaagatccacacagaggaga

SEQ ID NO: 3937592 - DNA, 25 bp, Homo sapien
tgtacatccaacgaggaaaaacaca

SEQ ID NO: 3937593 - DNA, 25 bp, Homo sapien
ttggcacctggcgcgggcacaaaca

SEQ ID NO: 3937594 - DNA, 25 bp, Homo sapien
cgcgggcacaaacaggggttccgct

SEQ ID NO: 3937595 - DNA, 25 bp, Homo sapien
acaggggttccgctggccagcagtc

SEQ ID NO: 3937596 - DNA, 25 bp, Homo sapien
gccagcagtcgtcctctctccattt

SEQ ID NO: 3937597 - DNA, 25 bp, Homo sapien
tgggcagggcatttctgaagcattt

SEQ ID NO: 3937598 - DNA, 25 bp, Homo sapien
gctgtgggcagggcatttctgaagc

SEQ ID NO: 3937599 - DNA, 25 bp, Homo sapien
tgtgggcagggcatttctgaagcat

SEQ ID NO: 3937600 - DNA, 25 bp, Homo sapien
ctccttagcctcctcagggctgtgg

SEQ ID NO: 3937601 - DNA, 25 bp, Homo sapien
gaggcacgggccaattccgtaaagc

SEQ ID NO: 3937602 - DNA, 25 bp, Homo sapien
tccatgtgcatatcgacatcaacag

SEQ ID NO: 3937603 - DNA, 25 bp, Homo sapien
tgaataatccatggagatccatgtg

SEQ ID NO: 3937604 - DNA, 25 bp, Homo sapien
cagtccatgtctgtaatgaataatc

SEQ ID NO: 3937605 - DNA, 25 bp, Homo sapien
tcctcagaagcggcctgcttttttg

SEQ ID NO: 3937606 - DNA, 25 bp, Homo sapien
ctgttcctcagaagcggcctgcttt

SEQ ID NO: 3937607 - DNA, 25 bp, Homo sapien
tgttcctcagaagcggcctgctttt

SEQ ID NO: 3937608 - DNA, 25 bp, Homo sapien
gttcctcagaagcggcctgcttttt

SEQ ID NO: 3937609 - DNA, 25 bp, Homo sapien
catgtaacttaactcatcaggcctg

SEQ ID NO: 3937610 - DNA, 25 bp, Homo sapien
tctctaataggttagtggctcgttc

SEQ ID NO: 3937611 - DNA, 25 bp, Homo sapien
ggcataaccttcctggtcatgtaac

SEQ ID NO: 3937612 - DNA, 25 bp, Homo sapien
caatctctgattcatggtcaaggtc

SEQ ID NO: 3937613 - DNA, 25 bp, Homo sapien
tctagctgaagataataacagtaac

SEQ ID NO: 3937614 - DNA, 25 bp, Homo sapien
acagccacccaaatacagggtaggg

SEQ ID NO: 3937615 - DNA, 25 bp, Homo sapien
tatgaatcaagccaaacctttggcc

SEQ ID NO: 3937616 - DNA, 25 bp, Homo sapien
tgagcctcaaatatccaagattgtc

SEQ ID NO: 3937617 - DNA, 25 bp, Homo sapien
caatcgattggcttcacaacaggcc

SEQ ID NO: 3937618 - DNA, 25 bp, Homo sapien
gccaagattggccaccgtagataac

SEQ ID NO: 3937619 - DNA, 25 bp, Homo sapien
ggagcccagtgaacaggataatcca

SEQ ID NO: 3937620 - DNA, 25 bp, Homo sapien
taatccatgggttactcaacaatcg

SEQ ID NO: 3937621 - DNA, 25 bp, Homo sapien
taaatgccagtgatcgtgtcttcaa

SEQ ID NO: 3937622 - DNA, 25 bp, Homo sapien
aagtccaggtctttgtgcctggtgc

SEQ ID NO: 3937623 - DNA, 25 bp, Homo sapien
tgcttgaggtgtccaccatcgggcc

SEQ ID NO: 3937624 - DNA, 25 bp, Homo sapien
gaattcctgaacagagtcagctgat

SEQ ID NO: 3937625 - DNA, 25 bp, Homo sapien
agcctagtatattcccacctcaggg

SEQ ID NO: 3937626 - DNA, 25 bp, Homo sapien
gaacaagcctagtatattcccacct

SEQ ID NO: 3937627 - DNA, 25 bp, Homo sapien
cttttgcactggctaattgctcagc

SEQ ID NO: 3937628 - DNA, 25 bp, Homo sapien
cttgaacaagcctagtatattccca

SEQ ID NO: 3937629 - DNA, 25 bp, Homo sapien
gcccgagtcctgcgcgcgcgcccgc

SEQ ID NO: 3937630 - DNA, 25 bp, Homo sapien
ctgccgacgggtccggctcccgaca

SEQ ID NO: 3937631 - DNA, 25 bp, Homo sapien
tgccgacgggtccggctcccgacac

SEQ ID NO: 3937632 - DNA, 25 bp, Homo sapien
gacccctcgagcggcccgagtcctg

SEQ ID NO: 3937633 - DNA, 25 bp, Homo sapien
tgcgcgtcgcagaagcgagactcct

SEQ ID NO: 3937634 - DNA, 25 bp, Homo sapien
aagagctgagcgctcgcagcagacg

SEQ ID NO: 3937635 - DNA, 25 bp, Homo sapien
cgtgctgagggtcagacacggcact

SEQ ID NO: 3937636 - DNA, 25 bp, Homo sapien
tccccgtcgaggaccaggtgcgcgt

SEQ ID NO: 3937637 - DNA, 25 bp, Homo sapien
ggccgccgccaggatgttcttctgc

SEQ ID NO: 3937638 - DNA, 25 bp, Homo sapien
ctggccgccgccaggatgttcttct

SEQ ID NO: 3937639 - DNA, 25 bp, Homo sapien
ctgatgtacgggctggccgccgcca

SEQ ID NO: 3937640 - DNA, 25 bp, Homo sapien
ggctggccgccgccaggatgttctt

SEQ ID NO: 3937641 - DNA, 25 bp, Homo sapien
catttactgagctgagggaccgcag

SEQ ID NO: 3937642 - DNA, 25 bp, Homo sapien
gcccagcctgtcaactacttttagg

SEQ ID NO: 3937643 - DNA, 25 bp, Homo sapien
ccaaagagaaaatctcacccaggaa

SEQ ID NO: 3937644 - DNA, 25 bp, Homo sapien
aagagaaaatctcacccaggaacca

SEQ ID NO: 3937645 - DNA, 25 bp, Homo sapien
taaaagagactcaagcccagcttat

SEQ ID NO: 3937646 - DNA, 25 bp, Homo sapien
gcactaagaaacttcacaggctaca

SEQ ID NO: 3937647 - DNA, 25 bp, Homo sapien
taactgaacccctgagcactaagaa

SEQ ID NO: 3937648 - DNA, 25 bp, Homo sapien
tctgagcagttgttaggaacgcctt

SEQ ID NO: 3937649 - DNA, 25 bp, Homo sapien
ctccccaggtagcccccatggatgc

SEQ ID NO: 3937650 - DNA, 25 bp, Homo sapien
ccaggtagcccccatggatgctggc

SEQ ID NO: 3937651 - DNA, 25 bp, Homo sapien
cccaggtagcccccatggatgctgg

SEQ ID NO: 3937652 - DNA, 25 bp, Homo sapien
gcccccatggatgctggcactccgt

SEQ ID NO: 3937653 - DNA, 25 bp, Homo sapien
tttccacactaaatgaggcgatgat

SEQ ID NO: 3937654 - DNA, 25 bp, Homo sapien
tcagagctggactcttcactatttc

SEQ ID NO: 3937655 - DNA, 25 bp, Homo sapien
gagctggactcttcactatttcctt

SEQ ID NO: 3937656 - DNA, 25 bp, Homo sapien
ctgagctcagagctggactcttcac

SEQ ID NO: 3937657 - DNA, 25 bp, Homo sapien
agctcagagctggactcttcactat

SEQ ID NO: 3937658 - DNA, 25 bp, Homo sapien
cgcttttcgattccttgcgatgggt

SEQ ID NO: 3937659 - DNA, 25 bp, Homo sapien
ttttgaacgcttttcgattccttgc

SEQ ID NO: 3937660 - DNA, 25 bp, Homo sapien
gaacgcttttcgattccttgcgatg

SEQ ID NO: 3937661 - DNA, 25 bp, Homo sapien
ggaggagaagaggtattctcttctc

SEQ ID NO: 3937662 - DNA, 25 bp, Homo sapien
tataagttgatccatcatcttttgg

SEQ ID NO: 3937663 - DNA, 25 bp, Homo sapien
ggatctctctcataaccattaccga

SEQ ID NO: 3937664 - DNA, 25 bp, Homo sapien
tgcccactgaagatgtaatccagga

SEQ ID NO: 3937665 - DNA, 25 bp, Homo sapien
taccgatatcccttcaagttcaatc

SEQ ID NO: 3937666 - DNA, 25 bp, Homo sapien
gttttaaggtccgtcagtagcagca

SEQ ID NO: 3937667 - DNA, 25 bp, Homo sapien
cgtgctgctgacgtctcggaaatga

SEQ ID NO: 3937668 - DNA, 25 bp, Homo sapien
gcaaagtcacggataccaatacagt

SEQ ID NO: 3937669 - DNA, 25 bp, Homo sapien
caaggtaatgaacgtgatggaggca

SEQ ID NO: 3937670 - DNA, 25 bp, Homo sapien
tgttcccgtaaataactggagtcca

SEQ ID NO: 3937671 - DNA, 25 bp, Homo sapien
tctgttcccgtaaataactggagtc

SEQ ID NO: 3937672 - DNA, 25 bp, Homo sapien
ttcagcatctgttcccgtaaataac

SEQ ID NO: 3937673 - DNA, 25 bp, Homo sapien
gcatctgttcccgtaaataactgga

SEQ ID NO: 3937674 - DNA, 25 bp, Homo sapien
tcacgatgcactcagagtagccccg

SEQ ID NO: 3937675 - DNA, 25 bp, Homo sapien
gctggctgagcggtatattgctaca

SEQ ID NO: 3937676 - DNA, 25 bp, Homo sapien
tgctacactctttgacaatttctcg

SEQ ID NO: 3937677 - DNA, 25 bp, Homo sapien
tttgacaatttctcgtactaatggt

SEQ ID NO: 3937678 - DNA, 25 bp, Homo sapien
ctccatggttaattctcggcatgct

SEQ ID NO: 3937679 - DNA, 25 bp, Homo sapien
catagagagggcacatgcatcgcat

SEQ ID NO: 3937680 - DNA, 25 bp, Homo sapien
aagctgcctgttagggtcatagaga

SEQ ID NO: 3937681 - DNA, 25 bp, Homo sapien
gggccagttcgatccaaagctgcct

SEQ ID NO: 3937682 - DNA, 25 bp, Homo sapien
tcgttcataggtggcaatgctgtcc

SEQ ID NO: 3937683 - DNA, 25 bp, Homo sapien
tggatcatacttttctcctgagcta

SEQ ID NO: 3937684 - DNA, 25 bp, Homo sapien
gctgtccatgtatttgcatctggat

SEQ ID NO: 3937685 - DNA, 25 bp, Homo sapien
tattttcatcttggcccccgaatac

SEQ ID NO: 3937686 - DNA, 25 bp, Homo sapien
tcaaatcaggttgctttgtccaggt

SEQ ID NO: 3937687 - DNA, 25 bp, Homo sapien
ccacaattccgaagttatgtcttgc

SEQ ID NO: 3937688 - DNA, 25 bp, Homo sapien
gaataaatatcgtaacactccatgg

SEQ ID NO: 3937689 - DNA, 25 bp, Homo sapien
tctgaccatggtcaaatcaggttgc

SEQ ID NO: 3937690 - DNA, 25 bp, Homo sapien
caggtcaggtgaacagatattaaac

SEQ ID NO: 3937691 - DNA, 25 bp, Homo sapien
acagggtctcgttcagttgccttgg

SEQ ID NO: 3937692 - DNA, 25 bp, Homo sapien
tacaacaccggactttaaaatgaga

SEQ ID NO: 3937693 - DNA, 25 bp, Homo sapien
ctgtctgggccatacttaaagagat

SEQ ID NO: 3937694 - DNA, 25 bp, Homo sapien
ccacccatggcgtagattttctttt

SEQ ID NO: 3937695 - DNA, 25 bp, Homo sapien
tatggcagtccactgctgggtcctg

SEQ ID NO: 3937696 - DNA, 25 bp, Homo sapien
tgggatcataacactctacagactc

SEQ ID NO: 3937697 - DNA, 25 bp, Homo sapien
tcaaaaagctttccgtaggagcctc

SEQ ID NO: 3937698 - DNA, 25 bp, Homo sapien
ctcatcatggtagaactcggacttg

SEQ ID NO: 3937699 - DNA, 25 bp, Homo sapien
ctgggcgtcctcacgacttcggact

SEQ ID NO: 3937700 - DNA, 25 bp, Homo sapien
ggacttgcaagttaccatctcgcta

SEQ ID NO: 3937701 - DNA, 25 bp, Homo sapien
gttaccatctcgctaccctgggcgt

SEQ ID NO: 3937702 - DNA, 25 bp, Homo sapien
tcagcatgtccagctagagtggtgc

SEQ ID NO: 3937703 - DNA, 25 bp, Homo sapien
gagcaacagaaaccatccaatctga

SEQ ID NO: 3937704 - DNA, 25 bp, Homo sapien
aagttgaaggctttcatggtgtgcc

SEQ ID NO: 3937705 - DNA, 25 bp, Homo sapien
aaatgatactgcagactgaatggtc

SEQ ID NO: 3937706 - DNA, 25 bp, Homo sapien
tgaggcgtctgcttccagtatggca

SEQ ID NO: 3937707 - DNA, 25 bp, Homo sapien
tggacaaactacaactacctgagca

SEQ ID NO: 3937708 - DNA, 25 bp, Homo sapien
gtcagccgtaaactctggacaaact

SEQ ID NO: 3937709 - DNA, 25 bp, Homo sapien
aatggctcctcagttgctccaagtg

SEQ ID NO: 3937710 - DNA, 25 bp, Homo sapien
tcaggaggaccttgggaatgcatct

SEQ ID NO: 3937711 - DNA, 25 bp, Homo sapien
actcttctaaggcaggtggcttcca

SEQ ID NO: 3937712 - DNA, 25 bp, Homo sapien
tgggatacagattttggcccctgcc

SEQ ID NO: 3937713 - DNA, 25 bp, Homo sapien
tagctaacaggcatagccaggtcac

SEQ ID NO: 3937714 - DNA, 25 bp, Homo sapien
aaatgtctgtttaaaggtttgctca

SEQ ID NO: 3937715 - DNA, 25 bp, Homo sapien
ggctgatctcaggttccagggctca

SEQ ID NO: 3937716 - DNA, 25 bp, Homo sapien
tgtctgtttaaaggtttgctcactt

SEQ ID NO: 3937717 - DNA, 25 bp, Homo sapien
tgctcactttaaaactgggggccag

SEQ ID NO: 3937718 - DNA, 25 bp, Homo sapien
cataaatactggctcctataggtac

SEQ ID NO: 3937719 - DNA, 25 bp, Homo sapien
attctggtcgttaagatagatccac

SEQ ID NO: 3937720 - DNA, 25 bp, Homo sapien
ggctcctataggtacagctccataa

SEQ ID NO: 3937721 - DNA, 25 bp, Homo sapien
gaactggcggggatgcataaattct

SEQ ID NO: 3937722 - DNA, 25 bp, Homo sapien
tcgcaatgcgtaaggctgcacatcc

SEQ ID NO: 3937723 - DNA, 25 bp, Homo sapien
cacgaatacggaataagccttgctg

SEQ ID NO: 3937724 - DNA, 25 bp, Homo sapien
tgcacatcctgtacggcgaaggtcg

SEQ ID NO: 3937725 - DNA, 25 bp, Homo sapien
tcttttaaactcacgcacgtagtcg

SEQ ID NO: 3937726 - DNA, 25 bp, Homo sapien
ccccagaaaggatgcgtgacgtgtc

SEQ ID NO: 3937727 - DNA, 25 bp, Homo sapien
gatctaagtcaacacagaagcgagc

SEQ ID NO: 3937728 - DNA, 25 bp, Homo sapien
agagttaccataccaaagcccagca

SEQ ID NO: 3937729 - DNA, 25 bp, Homo sapien
taatatatccttccaagtgcagtgg

SEQ ID NO: 3937730 - DNA, 25 bp, Homo sapien
taatgttccccaattacagctgctg

SEQ ID NO: 3937731 - DNA, 25 bp, Homo sapien
gacgcattgtactgacttccagcag

SEQ ID NO: 3937732 - DNA, 25 bp, Homo sapien
tagaaccccataggcacagcatctt

SEQ ID NO: 3937733 - DNA, 25 bp, Homo sapien
gattgaattacatgactgtgcggca

SEQ ID NO: 3937734 - DNA, 25 bp, Homo sapien
gtgccttatcaagaaagaagtatca

SEQ ID NO: 3937735 - DNA, 25 bp, Homo sapien
taagacctatcctgagccaccaatt

SEQ ID NO: 3937736 - DNA, 25 bp, Homo sapien
aattccaacacacacctggtaaaag

SEQ ID NO: 3937737 - DNA, 25 bp, Homo sapien
ttattctaacctgagacaactttcc

SEQ ID NO: 3937738 - DNA, 25 bp, Homo sapien
gaaataataatagggttccttctga

SEQ ID NO: 3937739 - DNA, 25 bp, Homo sapien
cactgagacttaactgccagcaggc

SEQ ID NO: 3937740 - DNA, 25 bp, Homo sapien
tgtatacattagaccaaaccatctg

SEQ ID NO: 3937741 - DNA, 25 bp, Homo sapien
agaacaaactttctacggagcgtgg

SEQ ID NO: 3937742 - DNA, 25 bp, Homo sapien
aacaggccttagagaattgtattcc

SEQ ID NO: 3937743 - DNA, 25 bp, Homo sapien
tgtattcctcaaggcctctgactgc

SEQ ID NO: 3937744 - DNA, 25 bp, Homo sapien
gttgaattcttctcaattggcaggg

SEQ ID NO: 3937745 - DNA, 25 bp, Homo sapien
gaacagagtttttcctataaacaca

SEQ ID NO: 3937746 - DNA, 25 bp, Homo sapien
cataactcttttggccacggcatca

SEQ ID NO: 3937747 - DNA, 25 bp, Homo sapien
tgagctaagtcaacagggtgctaac

SEQ ID NO: 3937748 - DNA, 25 bp, Homo sapien
tagaatgtgtacaactgtgccctga

SEQ ID NO: 3937749 - DNA, 25 bp, Homo sapien
gagtagtaagtgtggcagaagcccc

SEQ ID NO: 3937750 - DNA, 25 bp, Homo sapien
tgcagtagactttcaccagggagga

SEQ ID NO: 3937751 - DNA, 25 bp, Homo sapien
tggaaagctataaggcctgggacac

SEQ ID NO: 3937752 - DNA, 25 bp, Homo sapien
tagcaacgtgctttcttgaaccgag

SEQ ID NO: 3937753 - DNA, 25 bp, Homo sapien
caaacaggatgctgctagagtagct

SEQ ID NO: 3937754 - DNA, 25 bp, Homo sapien
gacacagccggctagctctgaagac

SEQ ID NO: 3937755 - DNA, 25 bp, Homo sapien
taaaaacaacgactccgaacatggc

SEQ ID NO: 3937756 - DNA, 25 bp, Homo sapien
gatgcgccgactgcgaagtgcctgt

SEQ ID NO: 3937757 - DNA, 25 bp, Homo sapien
tgacggcaatccctaagctggcaga

SEQ ID NO: 3937758 - DNA, 25 bp, Homo sapien
cagagggcctgtcacacaagaggcc

SEQ ID NO: 3937759 - DNA, 25 bp, Homo sapien
actgggtgctgaggtagtgagcggg

SEQ ID NO: 3937760 - DNA, 25 bp, Homo sapien
ggtgcctaaggcgctgggatgtgtc

SEQ ID NO: 3937761 - DNA, 25 bp, Homo sapien
cgggccgagcacgtccgggagcctg

SEQ ID NO: 3937762 - DNA, 25 bp, Homo sapien
aagggtatcaccattacgtcgccgg

SEQ ID NO: 3937763 - DNA, 25 bp, Homo sapien
gaaatactattctgcaggtcccatg

SEQ ID NO: 3937764 - DNA, 25 bp, Homo sapien
gcagaagacctatacccgtgatgga

SEQ ID NO: 3937765 - DNA, 25 bp, Homo sapien
ggagcatccgcgataccgtttctga

SEQ ID NO: 3937766 - DNA, 25 bp, Homo sapien
gatgatttagcaggaaccactctaa

SEQ ID NO: 3937767 - DNA, 25 bp, Homo sapien
tgataatgatgatttagcaggaacc

SEQ ID NO: 3937768 - DNA, 25 bp, Homo sapien
tagcaggaaccactctaaaaatcag

SEQ ID NO: 3937769 - DNA, 25 bp, Homo sapien
gcaggaaccactctaaaaatcagaa

SEQ ID NO: 3937770 - DNA, 25 bp, Homo sapien
ccagcactgaccctgaacttggttt

SEQ ID NO: 3937771 - DNA, 25 bp, Homo sapien
cactgaccctgaacttggtttgctt

SEQ ID NO: 3937772 - DNA, 25 bp, Homo sapien
tgctttcagcctgtgccacaatctg

SEQ ID NO: 3937773 - DNA, 25 bp, Homo sapien
ctgcatcctccacgcctgccacagg

SEQ ID NO: 3937774 - DNA, 25 bp, Homo sapien
aaggctctgagccttgtcccttgcc

SEQ ID NO: 3937775 - DNA, 25 bp, Homo sapien
cttcagctgcccgatgctggcaaat

SEQ ID NO: 3937776 - DNA, 25 bp, Homo sapien
ggcaaatcttcccattggccaattg

SEQ ID NO: 3937777 - DNA, 25 bp, Homo sapien
ctctggctcaggttcgcactccctt

SEQ ID NO: 3937778 - DNA, 25 bp, Homo sapien
gcctgcttatcatctaagttagtgg

SEQ ID NO: 3937779 - DNA, 25 bp, Homo sapien
aagttagtggtgacaagtccctggg

SEQ ID NO: 3937780 - DNA, 25 bp, Homo sapien
tcatctaagttagtggtgacaagtc

SEQ ID NO: 3937781 - DNA, 25 bp, Homo sapien
gcttatcatctaagttagtggtgac

SEQ ID NO: 3937782 - DNA, 25 bp, Homo sapien
tagacagacacatcatcgcaatctc

SEQ ID NO: 3937783 - DNA, 25 bp, Homo sapien
agacagacacatcatcgcaatctct

SEQ ID NO: 3937784 - DNA, 25 bp, Homo sapien
gacagacacatcatcgcaatctctg

SEQ ID NO: 3937785 - DNA, 25 bp, Homo sapien
gtagacagacacatcatcgcaatct

SEQ ID NO: 3937786 - DNA, 25 bp, Homo sapien
ttctgtatcagttccatggagctgc

SEQ ID NO: 3937787 - DNA, 25 bp, Homo sapien
cctcaaagccaggtttctgtatcag

SEQ ID NO: 3937788 - DNA, 25 bp, Homo sapien
gtgatttctatacagccaggcctcc

SEQ ID NO: 3937789 - DNA, 25 bp, Homo sapien
tcttccagagagacggcctcaaagc

SEQ ID NO: 3937790 - DNA, 25 bp, Homo sapien
cagctgtatgtgtctttgattgatt

SEQ ID NO: 3937791 - DNA, 25 bp, Homo sapien
gatttaccgtcaagtggagtcgtca

SEQ ID NO: 3937792 - DNA, 25 bp, Homo sapien
gattgatttaccgtcaagtggagtc

SEQ ID NO: 3937793 - DNA, 25 bp, Homo sapien
tctttgattgatttaccgtcaagtg

SEQ ID NO: 3937794 - DNA, 25 bp, Homo sapien
gctacccaggctgccattaaggaat

SEQ ID NO: 3937795 - DNA, 25 bp, Homo sapien
ccgctacccaggctgccattaagga

SEQ ID NO: 3937796 - DNA, 25 bp, Homo sapien
tacccaggctgccattaaggaattt

SEQ ID NO: 3937797 - DNA, 25 bp, Homo sapien
ccaggctgccattaaggaatttgat

SEQ ID NO: 3937798 - DNA, 25 bp, Homo sapien
gatgtaggcggtgagcaagcagcac

SEQ ID NO: 3937799 - DNA, 25 bp, Homo sapien
tgcaaacccagggactagagcagtg

SEQ ID NO: 3937800 - DNA, 25 bp, Homo sapien
ggcacagatgagcattgcagaggag

SEQ ID NO: 3937801 - DNA, 25 bp, Homo sapien
tgcaaaggagtgacttgtacatggc

SEQ ID NO: 3937802 - DNA, 25 bp, Homo sapien
agcagcggcttggtctcctcgatct

SEQ ID NO: 3937803 - DNA, 25 bp, Homo sapien
ccagcagcggcttggtctcctcgat

SEQ ID NO: 3937804 - DNA, 25 bp, Homo sapien
gcagcggcttggtctcctcgatctg

SEQ ID NO: 3937805 - DNA, 25 bp, Homo sapien
agcggcttggtctcctcgatctgcc

SEQ ID NO: 3937806 - DNA, 25 bp, Homo sapien
aatttcgaggtgaggatcttgctga

SEQ ID NO: 3937807 - DNA, 25 bp, Homo sapien
gccaggctgttgtcggccagcgtta

SEQ ID NO: 3937808 - DNA, 25 bp, Homo sapien
tacctcatcccgttgcaaagcagaa

SEQ ID NO: 3937809 - DNA, 25 bp, Homo sapien
tgacacagacctgaatgtcgccctc

SEQ ID NO: 3937810 - DNA, 25 bp, Homo sapien
cattttaagggtctctcctgagccc

SEQ ID NO: 3937811 - DNA, 25 bp, Homo sapien
ggtgggccgagtctccagcatttta

SEQ ID NO: 3937812 - DNA, 25 bp, Homo sapien
cagccaccagaaacacaagagctgg

SEQ ID NO: 3937813 - DNA, 25 bp, Homo sapien
gtcggctggtttgggcttcagactc

SEQ ID NO: 3937814 - DNA, 25 bp, Homo sapien
cagaaagggaagcaccccgttctgc

SEQ ID NO: 3937815 - DNA, 25 bp, Homo sapien
ctcaatgtgcgaatgagattttcag

SEQ ID NO: 3937816 - DNA, 25 bp, Homo sapien
ctctcaatgtgcgaatgagattttc

SEQ ID NO: 3937817 - DNA, 25 bp, Homo sapien
caatgtgcgaatgagattttcagaa

SEQ ID NO: 3937818 - DNA, 25 bp, Homo sapien
ggtttttcctctccgactcatccag

SEQ ID NO: 3937819 - DNA, 25 bp, Homo sapien
aatggtttttcctctccgactcatc

SEQ ID NO: 3937820 - DNA, 25 bp, Homo sapien
caatggtttttcctctccgactcat

SEQ ID NO: 3937821 - DNA, 25 bp, Homo sapien
tccgactcatccagctgacccagtc

SEQ ID NO: 3937822 - DNA, 25 bp, Homo sapien
ctgtctttctccacgtacgaagaag

SEQ ID NO: 3937823 - DNA, 25 bp, Homo sapien
gtctttctccacgtacgaagaaggc

SEQ ID NO: 3937824 - DNA, 25 bp, Homo sapien
tgtctttctccacgtacgaagaagg

SEQ ID NO: 3937825 - DNA, 25 bp, Homo sapien
ttagtaaacaggatcacggtggccc

SEQ ID NO: 3937826 - DNA, 25 bp, Homo sapien
gatgccagggaaatgtctacacacg

SEQ ID NO: 3937827 - DNA, 25 bp, Homo sapien
tgacatgccatgtaagcgacaccct

SEQ ID NO: 3937828 - DNA, 25 bp, Homo sapien
ggtgctctaagcatgtcggacccca

SEQ ID NO: 3937829 - DNA, 25 bp, Homo sapien
gcctcgagagctggctttccggaaa

SEQ ID NO: 3937830 - DNA, 25 bp, Homo sapien
cagatatacctcctgagcaatcgga

SEQ ID NO: 3937831 - DNA, 25 bp, Homo sapien
tggccttcccatggcaggtcactgt

SEQ ID NO: 3937832 - DNA, 25 bp, Homo sapien
tttccggaaacaggacggtagcagc

SEQ ID NO: 3937833 - DNA, 25 bp, Homo sapien
ggaaaggcccacactaccgatggtg

SEQ ID NO: 3937834 - DNA, 25 bp, Homo sapien
tcagtccccagtactagacaggtgc

SEQ ID NO: 3937835 - DNA, 25 bp, Homo sapien
tcttgctccatggataagcctcagt

SEQ ID NO: 3937836 - DNA, 25 bp, Homo sapien
gattacataatgtccaggcctcagg

SEQ ID NO: 3937837 - DNA, 25 bp, Homo sapien
gtttttgttctagggaactgcactc

SEQ ID NO: 3937838 - DNA, 25 bp, Homo sapien
tgttctagggaactgcactcaaatt

SEQ ID NO: 3937839 - DNA, 25 bp, Homo sapien
ttctcaatagagtgcttgggccgca

SEQ ID NO: 3937840 - DNA, 25 bp, Homo sapien
ctcatatttctcaatagagtgcttg

SEQ ID NO: 3937841 - DNA, 25 bp, Homo sapien
catacttggaatatcgggagctcag

SEQ ID NO: 3937842 - DNA, 25 bp, Homo sapien
gcaaagtttacaggcaggccaggcg

SEQ ID NO: 3937843 - DNA, 25 bp, Homo sapien
gatttaatcagtaactggcccagga

SEQ ID NO: 3937844 - DNA, 25 bp, Homo sapien
taaaaggtgtacctagccggtgtca

SEQ ID NO: 3937845 - DNA, 25 bp, Homo sapien
gtcagctgtcgcctatctgcttcct

SEQ ID NO: 3937846 - DNA, 25 bp, Homo sapien
gcttcctcctttgtttacgagcatt

SEQ ID NO: 3937847 - DNA, 25 bp, Homo sapien
aatggggcaccacattcaggccaca

SEQ ID NO: 3937848 - DNA, 25 bp, Homo sapien
gcatttcggatccaaagtctccaag

SEQ ID NO: 3937849 - DNA, 25 bp, Homo sapien
cctagcaggtgatcaaattcaaccc

SEQ ID NO: 3937850 - DNA, 25 bp, Homo sapien
gaaacaaagcctacagacaaagccc

SEQ ID NO: 3937851 - DNA, 25 bp, Homo sapien
cacagacgagagcagcaaaatggat

SEQ ID NO: 3937852 - DNA, 25 bp, Homo sapien
tctgcccacggacaaacatgcctag

SEQ ID NO: 3937853 - DNA, 25 bp, Homo sapien
gcagcagttgaggtaccctgggaca

SEQ ID NO: 3937854 - DNA, 25 bp, Homo sapien
cagcagttgaggtaccctgggacag

SEQ ID NO: 3937855 - DNA, 25 bp, Homo sapien
agcagttgaggtaccctgggacagc

SEQ ID NO: 3937856 - DNA, 25 bp, Homo sapien
tcggtgcctgttgaatacactgggt

SEQ ID NO: 3937857 - DNA, 25 bp, Homo sapien
tctgctgatgtaagcgaagcttcct

SEQ ID NO: 3937858 - DNA, 25 bp, Homo sapien
cacccttcggttagggctctgctga

SEQ ID NO: 3937859 - DNA, 25 bp, Homo sapien
tcctttcaaaatgcgcacagtctcc

SEQ ID NO: 3937860 - DNA, 25 bp, Homo sapien
ggtagaactcgcacttacgcagagg

SEQ ID NO: 3937861 - DNA, 25 bp, Homo sapien
cagcctgatgggatcaccttcgaga

SEQ ID NO: 3937862 - DNA, 25 bp, Homo sapien
tcgtgaaacatgaaccaaccagggc

SEQ ID NO: 3937863 - DNA, 25 bp, Homo sapien
cctgtgtgcacaccgagaaaggctg

SEQ ID NO: 3937864 - DNA, 25 bp, Homo sapien
cacaggcagtgatactctggagcca

SEQ ID NO: 3937865 - DNA, 25 bp, Homo sapien
cccagtgcagtcagggtagaccctt

SEQ ID NO: 3937866 - DNA, 25 bp, Homo sapien
acaagctgggtaagtagggacctct

SEQ ID NO: 3937867 - DNA, 25 bp, Homo sapien
caccccaggttcaacgagggcaggt

SEQ ID NO: 3937868 - DNA, 25 bp, Homo sapien
tgatagagactcagtaaaggatcca

SEQ ID NO: 3937869 - DNA, 25 bp, Homo sapien
ttcacatcagctgaatttgccaggt

SEQ ID NO: 3937870 - DNA, 25 bp, Homo sapien
ggtagcctccatgatagagactcag

SEQ ID NO: 3937871 - DNA, 25 bp, Homo sapien
tgaatttgccaggtagcctccatga

SEQ ID NO: 3937872 - DNA, 25 bp, Homo sapien
aaggaaggagcccattagacctgca

SEQ ID NO: 3937873 - DNA, 25 bp, Homo sapien
aggaaggagcccattagacctgcac

SEQ ID NO: 3937874 - DNA, 25 bp, Homo sapien
gaaggaaggagcccattagacctgc

SEQ ID NO: 3937875 - DNA, 25 bp, Homo sapien
aagtgacgttttgctctagggtgtg

SEQ ID NO: 3937876 - DNA, 25 bp, Homo sapien
ttaagtgacgttttgctctagggtg

SEQ ID NO: 3937877 - DNA, 25 bp, Homo sapien
agtgacgttttgctctagggtgtgg

SEQ ID NO: 3937878 - DNA, 25 bp, Homo sapien
taagtgacgttttgctctagggtgt

SEQ ID NO: 3937879 - DNA, 25 bp, Homo sapien
tcaccctcgtttgcgggcactggaa

SEQ ID NO: 3937880 - DNA, 25 bp, Homo sapien
ggcactggaaccgattgtccataac

SEQ ID NO: 3937881 - DNA, 25 bp, Homo sapien
ctggcctgagcggacccattcttgg

SEQ ID NO: 3937882 - DNA, 25 bp, Homo sapien
gagcggacccattcttggatcagca

SEQ ID NO: 3937883 - DNA, 25 bp, Homo sapien
gattggctgacacatttgcgggtgc

SEQ ID NO: 3937884 - DNA, 25 bp, Homo sapien
gagacgtcacacaacttgcccaaag

SEQ ID NO: 3937885 - DNA, 25 bp, Homo sapien
tgatcagtgcctacaagacccaggg

SEQ ID NO: 3937886 - DNA, 25 bp, Homo sapien
agatgagccaccatgaaggacactg

SEQ ID NO: 3937887 - DNA, 25 bp, Homo sapien
aaacacgaaggaagacacgtcagtg

SEQ ID NO: 3937888 - DNA, 25 bp, Homo sapien
gacagccgcagcctgttcacgtcgt

SEQ ID NO: 3937889 - DNA, 25 bp, Homo sapien
cacgaaggaagacacgtcagtgaca

SEQ ID NO: 3937890 - DNA, 25 bp, Homo sapien
ttatatgccccccacggcaaacacg

SEQ ID NO: 3937891 - DNA, 25 bp, Homo sapien
gttctgcaaagacaagcactggtcg

SEQ ID NO: 3937892 - DNA, 25 bp, Homo sapien
tatttcttccgctgagtggttacac

SEQ ID NO: 3937893 - DNA, 25 bp, Homo sapien
tccatgttgctgaaggctccttaag

SEQ ID NO: 3937894 - DNA, 25 bp, Homo sapien
gctccttaagtgaagtgacatccca

SEQ ID NO: 3937895 - DNA, 25 bp, Homo sapien
ctgtggacaacttgaataaagtttg

SEQ ID NO: 3937896 - DNA, 25 bp, Homo sapien
actgtggacaacttgaataaagttt

SEQ ID NO: 3937897 - DNA, 25 bp, Homo sapien
taactgtggacaacttgaataaagt

SEQ ID NO: 3937898 - DNA, 25 bp, Homo sapien
gtggacaacttgaataaagtttgac

SEQ ID NO: 3937899 - DNA, 25 bp, Homo sapien
cagcccggccggcttggtttgttgt

SEQ ID NO: 3937900 - DNA, 25 bp, Homo sapien
ctcctcgcaggaaacagagcggcag

SEQ ID NO: 3937901 - DNA, 25 bp, Homo sapien
cgccagggcggagatctgtaacttc

SEQ ID NO: 3937902 - DNA, 25 bp, Homo sapien
tcaaacggttatgccatgcacgccc

SEQ ID NO: 3937903 - DNA, 25 bp, Homo sapien
cattgctcacatggaggcagtgcca

SEQ ID NO: 3937904 - DNA, 25 bp, Homo sapien
tacccggcattgcagggacagcagt

SEQ ID NO: 3937905 - DNA, 25 bp, Homo sapien
tgaaacatcaacgaggaggccagag

SEQ ID NO: 3937906 - DNA, 25 bp, Homo sapien
tcaggcaacctcagaacaaggcagt

SEQ ID NO: 3937907 - DNA, 25 bp, Homo sapien
cagaggtcaagatctcagcagggct

SEQ ID NO: 3937908 - DNA, 25 bp, Homo sapien
cagggctttgtgaaggtcagaaaac

SEQ ID NO: 3937909 - DNA, 25 bp, Homo sapien
gtactggtcaggatcagaacggtcc

SEQ ID NO: 3937910 - DNA, 25 bp, Homo sapien
gagcataactgaggcaagatccacc

SEQ ID NO: 3937911 - DNA, 25 bp, Homo sapien
gaaaatccttgaatctcgtggctgt

SEQ ID NO: 3937912 - DNA, 25 bp, Homo sapien
ccttccgaagaagggtgagtcctca

SEQ ID NO: 3937913 - DNA, 25 bp, Homo sapien
ggaacggtaggatgctaatgccaac

SEQ ID NO: 3937914 - DNA, 25 bp, Homo sapien
tggccactgttaattcacggtcccg

SEQ ID NO: 3937915 - DNA, 25 bp, Homo sapien
taagtaagcaaacactctctacagc

SEQ ID NO: 3937916 - DNA, 25 bp, Homo sapien
tgactacctgggcagctgaaatgca

SEQ ID NO: 3937917 - DNA, 25 bp, Homo sapien
ggctcacagccgctttgctataccg

SEQ ID NO: 3937918 - DNA, 25 bp, Homo sapien
cattgttcaagaagtgggatcctgt

SEQ ID NO: 3937919 - DNA, 25 bp, Homo sapien
tataaagcacattcctgttcccagg

SEQ ID NO: 3937920 - DNA, 25 bp, Homo sapien
cacatgccaccgctaatttaaagag

SEQ ID NO: 3937921 - DNA, 25 bp, Homo sapien
cagggagctccccacaatttagcca

SEQ ID NO: 3937922 - DNA, 25 bp, Homo sapien
atttaaagaggatgcgaaacccagg

SEQ ID NO: 3937923 - DNA, 25 bp, Homo sapien
atccgctcagcaagcaatgatgcag

SEQ ID NO: 3937924 - DNA, 25 bp, Homo sapien
gctaccatggcaaccgtgcagtacc

SEQ ID NO: 3937925 - DNA, 25 bp, Homo sapien
tcaggaaggcttgccgaaaggcctc

SEQ ID NO: 3937926 - DNA, 25 bp, Homo sapien
ggccactcaggaaggcttgccgaaa

SEQ ID NO: 3937927 - DNA, 25 bp, Homo sapien
gggcagctcgtgtttgctattcggg

SEQ ID NO: 3937928 - DNA, 25 bp, Homo sapien
ttctacagagcagaacgacagcggg

SEQ ID NO: 3937929 - DNA, 25 bp, Homo sapien
tggcggtcaccggtggttctacaga

SEQ ID NO: 3937930 - DNA, 25 bp, Homo sapien
gataactaaaacctctgctgtcttc

SEQ ID NO: 3937931 - DNA, 25 bp, Homo sapien
ggtggtgactcagctcaccttcttc

SEQ ID NO: 3937932 - DNA, 25 bp, Homo sapien
tggtggtgactcagctcaccttctt

SEQ ID NO: 3937933 - DNA, 25 bp, Homo sapien
ctggtggtgactcagctcaccttct

SEQ ID NO: 3937934 - DNA, 25 bp, Homo sapien
cctctagtaagaaggctggagcctc

SEQ ID NO: 3937935 - DNA, 25 bp, Homo sapien
ggaccctggtaggaatggatcagat

SEQ ID NO: 3937936 - DNA, 25 bp, Homo sapien
tttcacgcagtgatgatggtcttac

SEQ ID NO: 3937937 - DNA, 25 bp, Homo sapien
tagcggcctgactgaaagatggact

SEQ ID NO: 3937938 - DNA, 25 bp, Homo sapien
tcggaggtagcagccacgcgggcac

SEQ ID NO: 3937939 - DNA, 25 bp, Homo sapien
ctggaggaggctcgaagctctgaca

SEQ ID NO: 3937940 - DNA, 25 bp, Homo sapien
tgacactcggtgacatttccactac

SEQ ID NO: 3937941 - DNA, 25 bp, Homo sapien
gacatttccactacccggtgacaca

SEQ ID NO: 3937942 - DNA, 25 bp, Homo sapien
gaagaagctgaactgatcgaagata

SEQ ID NO: 3937943 - DNA, 25 bp, Homo sapien
cacaaatgccacttagtgatgccac

SEQ ID NO: 3937944 - DNA, 25 bp, Homo sapien
atgtatgtaaaagagggtacgtgcc

SEQ ID NO: 3937945 - DNA, 25 bp, Homo sapien
ggtacgtgcctagcacacaaatgcc

SEQ ID NO: 3937946 - DNA, 25 bp, Homo sapien
gaactacagaataaagcgcccgact

SEQ ID NO: 3937947 - DNA, 25 bp, Homo sapien
agcggaaacacttcggacctgggca

SEQ ID NO: 3937948 - DNA, 25 bp, Homo sapien
tctaatgatgaggtgatccgtggcc

SEQ ID NO: 3937949 - DNA, 25 bp, Homo sapien
tggaagctatcaaatcgcaggacag

SEQ ID NO: 3937950 - DNA, 25 bp, Homo sapien
ggctcaatgtattggcctggcagga

SEQ ID NO: 3937951 - DNA, 25 bp, Homo sapien
tcagggatttatctgttgggctcaa

SEQ ID NO: 3937952 - DNA, 25 bp, Homo sapien
tagagactgcgaataagttcaggga

SEQ ID NO: 3937953 - DNA, 25 bp, Homo sapien
taatcattgagagatcagccaagca

SEQ ID NO: 3937954 - DNA, 25 bp, Homo sapien
caacttactcttaaagtcacactaa

SEQ ID NO: 3937955 - DNA, 25 bp, Homo sapien
catgccaaacaactgcacagatgtg

SEQ ID NO: 3937956 - DNA, 25 bp, Homo sapien
tatgtcatgggaaaaatgccagaca

SEQ ID NO: 3937957 - DNA, 25 bp, Homo sapien
tgtggagttcacaagcgggcaaaac

SEQ ID NO: 3937958 - DNA, 25 bp, Homo sapien
cattgtgacggccaggacggtgagc

SEQ ID NO: 3937959 - DNA, 25 bp, Homo sapien
ttgtgacggccaggacggtgagcag

SEQ ID NO: 3937960 - DNA, 25 bp, Homo sapien
acgtgaacattgtgacggccaggac

SEQ ID NO: 3937961 - DNA, 25 bp, Homo sapien
tgaacattgtgacggccaggacggt

SEQ ID NO: 3937962 - DNA, 25 bp, Homo sapien
ggatgccccgacactccaggccaag

SEQ ID NO: 3937963 - DNA, 25 bp, Homo sapien
tatttctcaggatgccccgacactc

SEQ ID NO: 3937964 - DNA, 25 bp, Homo sapien
ccccagcctatatggggcgtttcta

SEQ ID NO: 3937965 - DNA, 25 bp, Homo sapien
tatatggggcgtttctatccaactt

SEQ ID NO: 3937966 - DNA, 25 bp, Homo sapien
ctgacccacagtgaacttgtaaata

SEQ ID NO: 3937967 - DNA, 25 bp, Homo sapien
taatcggcccatcggtgtgtgctct

SEQ ID NO: 3937968 - DNA, 25 bp, Homo sapien
gctcttcctcggcactatctaatcg

SEQ ID NO: 3937969 - DNA, 25 bp, Homo sapien
ttcaagcgaatggagaatctgagct

SEQ ID NO: 3937970 - DNA, 25 bp, Homo sapien
ctgcgtcacaaaagggatatcccca

SEQ ID NO: 3937971 - DNA, 25 bp, Homo sapien
tgcgtcacaaaagggatatccccag

SEQ ID NO: 3937972 - DNA, 25 bp, Homo sapien
tgcaattgagatgccggcctggaaa

SEQ ID NO: 3937973 - DNA, 25 bp, Homo sapien
gctgatggaaacattcccaaaatgt

SEQ ID NO: 3937974 - DNA, 25 bp, Homo sapien
tacacccaactgtttcgctgcaaga

SEQ ID NO: 3937975 - DNA, 25 bp, Homo sapien
tttctcacaggaggctacacccaac

SEQ ID NO: 3937976 - DNA, 25 bp, Homo sapien
acacaaaaaggccagcgatgctggt

SEQ ID NO: 3937977 - DNA, 25 bp, Homo sapien
cgtctttccgtttggatggatgtgc

SEQ ID NO: 3937978 - DNA, 25 bp, Homo sapien
tcaaatcagtgtgctctgacgagac

SEQ ID NO: 3937979 - DNA, 25 bp, Homo sapien
tgagcaagtactttcggcccttgct

SEQ ID NO: 3937980 - DNA, 25 bp, Homo sapien
gcaggtgagacaagaggaccgcttc

SEQ ID NO: 3937981 - DNA, 25 bp, Homo sapien
gccaaatgtcctaccatgcccagga

SEQ ID NO: 3937982 - DNA, 25 bp, Homo sapien
cccaggacagtgcccgcaataaaga

SEQ ID NO: 3937983 - DNA, 25 bp, Homo sapien
cagtgcccgcaataaagactgatcc

SEQ ID NO: 3937984 - DNA, 25 bp, Homo sapien
gctaattagctagaagtgactaatc

SEQ ID NO: 3937985 - DNA, 25 bp, Homo sapien
gctttattgtcccatttgtcacttg

SEQ ID NO: 3937986 - DNA, 25 bp, Homo sapien
tgtcacttgctaattagctagaagt

SEQ ID NO: 3937987 - DNA, 25 bp, Homo sapien
caggtcccatgtgccatgtctgtgg

SEQ ID NO: 3937988 - DNA, 25 bp, Homo sapien
cacgagtgaattcaaccaacatgca

SEQ ID NO: 3937989 - DNA, 25 bp, Homo sapien
tgttgacacctttcagaccatggaa

SEQ ID NO: 3937990 - DNA, 25 bp, Homo sapien
taagtgaattcaaccaacatgagtg

SEQ ID NO: 3937991 - DNA, 25 bp, Homo sapien
tttggcattgacatggccttggcct

SEQ ID NO: 3937992 - DNA, 25 bp, Homo sapien
cccagggctgcagatatacagcagt

SEQ ID NO: 3937993 - DNA, 25 bp, Homo sapien
agctgctaacaagtcaagtcaacaa

SEQ ID NO: 3937994 - DNA, 25 bp, Homo sapien
gcccagggctgcagatatacagcag

SEQ ID NO: 3937995 - DNA, 25 bp, Homo sapien
acaagtcaagtcaacaactatttat

SEQ ID NO: 3937996 - DNA, 25 bp, Homo sapien
gagcgaccgcgttcattcacagaaa

SEQ ID NO: 3937997 - DNA, 25 bp, Homo sapien
taggaatgactgcaggaaagaaccc

SEQ ID NO: 3937998 - DNA, 25 bp, Homo sapien
acaggaccgcgtttttgccagggag

SEQ ID NO: 3937999 - DNA, 25 bp, Homo sapien
gaaaagctcacggtcatccagtcta

SEQ ID NO: 3938000 - DNA, 25 bp, Homo sapien
gcgcaaccaggcactaagtaagcat

SEQ ID NO: 3938001 - DNA, 25 bp, Homo sapien
gaaaagtcttacagtttagccagtc

SEQ ID NO: 3938002 - DNA, 25 bp, Homo sapien
gatgagataatacctagtgactgct

SEQ ID NO: 3938003 - DNA, 25 bp, Homo sapien
taaatgctagtatctaccctagagg

SEQ ID NO: 3938004 - DNA, 25 bp, Homo sapien
gcacgggcttatctgccatggaact

SEQ ID NO: 3938005 - DNA, 25 bp, Homo sapien
tgaaggcttccctgcaatggcacgg

SEQ ID NO: 3938006 - DNA, 25 bp, Homo sapien
tttccgacgccagtgcaggaaggga

SEQ ID NO: 3938007 - DNA, 25 bp, Homo sapien
ccatggaacttttccgacgccagtg

SEQ ID NO: 3938008 - DNA, 25 bp, Homo sapien
ccgttcatgaaagcgttccctcttg

SEQ ID NO: 3938009 - DNA, 25 bp, Homo sapien
gggcattccgctcgccgttcatgaa

SEQ ID NO: 3938010 - DNA, 25 bp, Homo sapien
cccgccgactttgtgctgttgggca

SEQ ID NO: 3938011 - DNA, 25 bp, Homo sapien
aagcgttccctcttgcttcatcctg

SEQ ID NO: 3938012 - DNA, 25 bp, Homo sapien
ccttccttgcagaagcgttccttta

SEQ ID NO: 3938013 - DNA, 25 bp, Homo sapien
acatgaaccccttccttgcagaagc

SEQ ID NO: 3938014 - DNA, 25 bp, Homo sapien
cacagccacatgaaccccttccttg

SEQ ID NO: 3938015 - DNA, 25 bp, Homo sapien
gaaccccttccttgcagaagcgttc

SEQ ID NO: 3938016 - DNA, 25 bp, Homo sapien
tgaatcgctaagtagtgctcctccc

SEQ ID NO: 3938017 - DNA, 25 bp, Homo sapien
gcaccttagctggtgtccagagtaa

SEQ ID NO: 3938018 - DNA, 25 bp, Homo sapien
ccagatactgggtcaactgctcaaa

SEQ ID NO: 3938019 - DNA, 25 bp, Homo sapien
taaagacctcatgtgtgccagatac

SEQ ID NO: 3938020 - DNA, 25 bp, Homo sapien
tctagcgtgtgccagtttccaaaac

SEQ ID NO: 3938021 - DNA, 25 bp, Homo sapien
taagagctgtcacctaaggactgaa

SEQ ID NO: 3938022 - DNA, 25 bp, Homo sapien
caatgctgtagccacctgtgggcca

SEQ ID NO: 3938023 - DNA, 25 bp, Homo sapien
gaggcctcctaggtgcaaccctatg

SEQ ID NO: 3938024 - DNA, 25 bp, Homo sapien
cagaaggtgaaacggagggagggct

SEQ ID NO: 3938025 - DNA, 25 bp, Homo sapien
gagagcaggagtaaagagtgtcaca

SEQ ID NO: 3938026 - DNA, 25 bp, Homo sapien
cctggagaggctggtaggtccacct

SEQ ID NO: 3938027 - DNA, 25 bp, Homo sapien
agaccccacggccagtgcaaaggct

SEQ ID NO: 3938028 - DNA, 25 bp, Homo sapien
cagagccacgttccaagatggaaaa

SEQ ID NO: 3938029 - DNA, 25 bp, Homo sapien
tgcccagaaagcaccgatttctctt

SEQ ID NO: 3938030 - DNA, 25 bp, Homo sapien
tctccccacggatatgcatcctcca

SEQ ID NO: 3938031 - DNA, 25 bp, Homo sapien
acggatatgcatcctccactcggcc

SEQ ID NO: 3938032 - DNA, 25 bp, Homo sapien
tcaattgcgctgtaggagactgagt

SEQ ID NO: 3938033 - DNA, 25 bp, Homo sapien
ccccaggaatcgtgagctgtaaaca

SEQ ID NO: 3938034 - DNA, 25 bp, Homo sapien
caggacagcagctgaacgtcttcaa

SEQ ID NO: 3938035 - DNA, 25 bp, Homo sapien
agtacttcggggcattctcccagga

SEQ ID NO: 3938036 - DNA, 25 bp, Homo sapien
ctgtgctgcagccatcggatgggca

SEQ ID NO: 3938037 - DNA, 25 bp, Homo sapien
caagaaggagcgagtgaagaggcag

SEQ ID NO: 3938038 - DNA, 25 bp, Homo sapien
aaccctgtgattgcccgccccatct

SEQ ID NO: 3938039 - DNA, 25 bp, Homo sapien
ctccgttggccactgaaccctgtga

SEQ ID NO: 3938040 - DNA, 25 bp, Homo sapien
tgctgctccctcattagctcggagt

SEQ ID NO: 3938041 - DNA, 25 bp, Homo sapien
gtctgctgctccctcattagctcgg

SEQ ID NO: 3938042 - DNA, 25 bp, Homo sapien
tccctcattagctcggagtccggct

SEQ ID NO: 3938043 - DNA, 25 bp, Homo sapien
gaagggttgggaggccgtgtctgct

SEQ ID NO: 3938044 - DNA, 25 bp, Homo sapien
gctccccgaggtctgcaagaggcat

SEQ ID NO: 3938045 - DNA, 25 bp, Homo sapien
ctccccgaggtctgcaagaggcatt

SEQ ID NO: 3938046 - DNA, 25 bp, Homo sapien
gcaagaggcattgattcaaattcta

SEQ ID NO: 3938047 - DNA, 25 bp, Homo sapien
ttccaggtctcttccctccgggctc

SEQ ID NO: 3938048 - DNA, 25 bp, Homo sapien
agacttgctggggtcatcatttgtg

SEQ ID NO: 3938049 - DNA, 25 bp, Homo sapien
tggggtcatcatttgtgtcatttcc

SEQ ID NO: 3938050 - DNA, 25 bp, Homo sapien
gtgtcatttccaggtctcttccctc

SEQ ID NO: 3938051 - DNA, 25 bp, Homo sapien
agaacaggacagcaaggtccggtca

SEQ ID NO: 3938052 - DNA, 25 bp, Homo sapien
aaggtccggtcatcagcttgcggca

SEQ ID NO: 3938053 - DNA, 25 bp, Homo sapien
ggacagcaaggtccggtcatcagct

SEQ ID NO: 3938054 - DNA, 25 bp, Homo sapien
ctgtaacgacaagaacaggacagca

SEQ ID NO: 3938055 - DNA, 25 bp, Homo sapien
cactggtctcgcaggtagctattgg

SEQ ID NO: 3938056 - DNA, 25 bp, Homo sapien
ggtctcgcaggtagctattggcagc

SEQ ID NO: 3938057 - DNA, 25 bp, Homo sapien
cagagaatggaaccactggtctcgc

SEQ ID NO: 3938058 - DNA, 25 bp, Homo sapien
aatggaaccactggtctcgcaggta

SEQ ID NO: 3938059 - DNA, 25 bp, Homo sapien
ttccctttatgtgccagaaagctct

SEQ ID NO: 3938060 - DNA, 25 bp, Homo sapien
ccctgggtctccaagaagatgaagt

SEQ ID NO: 3938061 - DNA, 25 bp, Homo sapien
tgcccctgggtctccaagaagatga

SEQ ID NO: 3938062 - DNA, 25 bp, Homo sapien
aagaagatgaagttccctttatgtg

SEQ ID NO: 3938063 - DNA, 25 bp, Homo sapien
tctcagagaaaagcacggtgtgatc

SEQ ID NO: 3938064 - DNA, 25 bp, Homo sapien
tgaaccagaaatgacctagccagcc

SEQ ID NO: 3938065 - DNA, 25 bp, Homo sapien
tattctgacagtatgtgcaccgcag

SEQ ID NO: 3938066 - DNA, 25 bp, Homo sapien
tctgctgggcaactgtaggcaagtc

SEQ ID NO: 3938067 - DNA, 25 bp, Homo sapien
gatgagggtgatggatcccgccctc

SEQ ID NO: 3938068 - DNA, 25 bp, Homo sapien
cataaccctagtggtgatgggagac

SEQ ID NO: 3938069 - DNA, 25 bp, Homo sapien
gcgcagccaattcacataaccctag

SEQ ID NO: 3938070 - DNA, 25 bp, Homo sapien
gccaattcacataaccctagtggtg

SEQ ID NO: 3938071 - DNA, 25 bp, Homo sapien
atcacgcgcagccaattcacataac

SEQ ID NO: 3938072 - DNA, 25 bp, Homo sapien
tgtcagaaactcagtctccctatgt

SEQ ID NO: 3938073 - DNA, 25 bp, Homo sapien
tccttcctgtcagaaactcagtctc

SEQ ID NO: 3938074 - DNA, 25 bp, Homo sapien
tcagtctccctatgtggatgacagc

SEQ ID NO: 3938075 - DNA, 25 bp, Homo sapien
aaagttccatccaccttaaactctg

SEQ ID NO: 3938076 - DNA, 25 bp, Homo sapien
cagcaaaccgccttgtactgcctct

SEQ ID NO: 3938077 - DNA, 25 bp, Homo sapien
cctgggcagcaaaccgccttgtact

SEQ ID NO: 3938078 - DNA, 25 bp, Homo sapien
gcaaaccgccttgtactgcctctgg

SEQ ID NO: 3938079 - DNA, 25 bp, Homo sapien
ggcttccgtgttggggggctgcgag

SEQ ID NO: 3938080 - DNA, 25 bp, Homo sapien
cctaggagtgagttcaatggtgttc

SEQ ID NO: 3938081 - DNA, 25 bp, Homo sapien
gagaagctcagcgtcctaggagtga

SEQ ID NO: 3938082 - DNA, 25 bp, Homo sapien
gtgagttcaatggtgttcaccacag

SEQ ID NO: 3938083 - DNA, 25 bp, Homo sapien
tcagcgtcctaggagtgagttcaat

SEQ ID NO: 3938084 - DNA, 25 bp, Homo sapien
tgttgctcctccacgggagacaagt

SEQ ID NO: 3938085 - DNA, 25 bp, Homo sapien
aggagtgactcagaatgcactggaa

SEQ ID NO: 3938086 - DNA, 25 bp, Homo sapien
tcagaatgcactggaagcacgtcgc

SEQ ID NO: 3938087 - DNA, 25 bp, Homo sapien
tcgtcagcaggaatgtgccccttgc

SEQ ID NO: 3938088 - DNA, 25 bp, Homo sapien
ccttcctagttactgtcaaccaaag

SEQ ID NO: 3938089 - DNA, 25 bp, Homo sapien
ttactgtcaaccaaagccgccctgt

SEQ ID NO: 3938090 - DNA, 25 bp, Homo sapien
ctggaaccataaccagcctccttcc

SEQ ID NO: 3938091 - DNA, 25 bp, Homo sapien
tagttactgtcaaccaaagccgccc

SEQ ID NO: 3938092 - DNA, 25 bp, Homo sapien
tcattaacgatgagacgcacccagt

SEQ ID NO: 3938093 - DNA, 25 bp, Homo sapien
gatggtgacagtgactactggctga

SEQ ID NO: 3938094 - DNA, 25 bp, Homo sapien
tgcagttgatgttgacgatggtgac

SEQ ID NO: 3938095 - DNA, 25 bp, Homo sapien
ttgccagccattggagaccctacga

SEQ ID NO: 3938096 - DNA, 25 bp, Homo sapien
catgacagacaggattaaggccagg

SEQ ID NO: 3938097 - DNA, 25 bp, Homo sapien
cagaaacatgtgctcgggctctcaa

SEQ ID NO: 3938098 - DNA, 25 bp, Homo sapien
tcccaaggattcaagcgcagtaaga

SEQ ID NO: 3938099 - DNA, 25 bp, Homo sapien
caggaattagactccggccaggtag

SEQ ID NO: 3938100 - DNA, 25 bp, Homo sapien
cagtttcgagacgatttccagtggg

SEQ ID NO: 3938101 - DNA, 25 bp, Homo sapien
tcccagcggcttgggttactcagca

SEQ ID NO: 3938102 - DNA, 25 bp, Homo sapien
cagggtccggatctctttcaagaca

SEQ ID NO: 3938103 - DNA, 25 bp, Homo sapien
gcctggttgatggagtcatcctgca

SEQ ID NO: 3938104 - DNA, 25 bp, Homo sapien
ccacacggagctctgcctgcgcctg

SEQ ID NO: 3938105 - DNA, 25 bp, Homo sapien
ccttcggcagcagggcaacaacaca

SEQ ID NO: 3938106 - DNA, 25 bp, Homo sapien
ctccttcggcagcagggcaacaaca

SEQ ID NO: 3938107 - DNA, 25 bp, Homo sapien
acacagcccacacggagctctgcct

SEQ ID NO: 3938108 - DNA, 25 bp, Homo sapien
agacacggagggccggtgccaggcc

SEQ ID NO: 3938109 - DNA, 25 bp, Homo sapien
cagacacggagggccggtgccaggc

SEQ ID NO: 3938110 - DNA, 25 bp, Homo sapien
gacacggagggccggtgccaggccc

SEQ ID NO: 3938111 - DNA, 25 bp, Homo sapien
acagacacggagggccggtgccagg

SEQ ID NO: 3938112 - DNA, 25 bp, Homo sapien
tctacagggagccttctctccccca

SEQ ID NO: 3938113 - DNA, 25 bp, Homo sapien
ttttccacccctggtagagcatgtc

SEQ ID NO: 3938114 - DNA, 25 bp, Homo sapien
ggtagagcatgtccaccaatagcca

SEQ ID NO: 3938115 - DNA, 25 bp, Homo sapien
ccattttccacccctggtagagcat

SEQ ID NO: 3938116 - DNA, 25 bp, Homo sapien
ggaaggctttggcgaccacggacat

SEQ ID NO: 3938117 - DNA, 25 bp, Homo sapien
aaggctttggcgaccacggacatca

SEQ ID NO: 3938118 - DNA, 25 bp, Homo sapien
gctttggcgaccacggacatcattt

SEQ ID NO: 3938119 - DNA, 25 bp, Homo sapien
ggctttggcgaccacggacatcatt

SEQ ID NO: 3938120 - DNA, 25 bp, Homo sapien
gctcctgggtggtcaagtttgtgtt

SEQ ID NO: 3938121 - DNA, 25 bp, Homo sapien
aatgatgttttcatgctcctgggtg

SEQ ID NO: 3938122 - DNA, 25 bp, Homo sapien
cacaatgatgttttcatgctcctgg

SEQ ID NO: 3938123 - DNA, 25 bp, Homo sapien
atgctcctgggtggtcaagtttgtg

SEQ ID NO: 3938124 - DNA, 25 bp, Homo sapien
gagaggaaggcagtacctccttcca

SEQ ID NO: 3938125 - DNA, 25 bp, Homo sapien
ccaggcactcagtgggacccacagg

SEQ ID NO: 3938126 - DNA, 25 bp, Homo sapien
tcagccacattagctggataaatgc

SEQ ID NO: 3938127 - DNA, 25 bp, Homo sapien
cagctctcatgcttgctcctggttc

SEQ ID NO: 3938128 - DNA, 25 bp, Homo sapien
tggtgggtggttgttttccagcaaa

SEQ ID NO: 3938129 - DNA, 25 bp, Homo sapien
tgttttccagcaaaggagcgattgc

SEQ ID NO: 3938130 - DNA, 25 bp, Homo sapien
agaattcacagagatctggtggtgg

SEQ ID NO: 3938131 - DNA, 25 bp, Homo sapien
ttcacagagatctggtggtgggtgg

SEQ ID NO: 3938132 - DNA, 25 bp, Homo sapien
cagccacagccccagctcagcaatc

SEQ ID NO: 3938133 - DNA, 25 bp, Homo sapien
ccacagccccagctcagcaatcccg

SEQ ID NO: 3938134 - DNA, 25 bp, Homo sapien
acagccccagctcagcaatcccgta

SEQ ID NO: 3938135 - DNA, 25 bp, Homo sapien
cagccccagctcagcaatcccgtac

SEQ ID NO: 3938136 - DNA, 25 bp, Homo sapien
tacacataggcgttctgacagggtc

SEQ ID NO: 3938137 - DNA, 25 bp, Homo sapien
gaaatacctacgagtgccatagcct

SEQ ID NO: 3938138 - DNA, 25 bp, Homo sapien
tctggtagtcatgaatacagctgct

SEQ ID NO: 3938139 - DNA, 25 bp, Homo sapien
tacagctgctgtaacgtcggcatgt

SEQ ID NO: 3938140 - DNA, 25 bp, Homo sapien
cctgggcacgcaggccagcaggcat

SEQ ID NO: 3938141 - DNA, 25 bp, Homo sapien
ggcacgcaggccagcaggcatgtgg

SEQ ID NO: 3938142 - DNA, 25 bp, Homo sapien
cagcaggcatgtggggcactggaaa

SEQ ID NO: 3938143 - DNA, 25 bp, Homo sapien
catgtggggcactggaaaaggaatc

SEQ ID NO: 3938144 - DNA, 25 bp, Homo sapien
acctcgatgaccaccatggaccggg

SEQ ID NO: 3938145 - DNA, 25 bp, Homo sapien
catgttatgcttgaggattcgctgc

SEQ ID NO: 3938146 - DNA, 25 bp, Homo sapien
gggtgaacacctcgatgaccaccat

SEQ ID NO: 3938147 - DNA, 25 bp, Homo sapien
ccacgggggtgaacacctcgatgac

SEQ ID NO: 3938148 - DNA, 25 bp, Homo sapien
tgtgccaacgcaaaaggccagggag

SEQ ID NO: 3938149 - DNA, 25 bp, Homo sapien
gattcttcctgttgccgtaatggag

SEQ ID NO: 3938150 - DNA, 25 bp, Homo sapien
taatggaggacaagctgtacaaaac

SEQ ID NO: 3938151 - DNA, 25 bp, Homo sapien
ttccccaaatctgtgccaacgcaaa

SEQ ID NO: 3938152 - DNA, 25 bp, Homo sapien
cagttgttttcacgtgctccaggag

SEQ ID NO: 3938153 - DNA, 25 bp, Homo sapien
gttgtatggtgaagccccgagagcc

SEQ ID NO: 3938154 - DNA, 25 bp, Homo sapien
taaaatctaacgtggtggctggctc

SEQ ID NO: 3938155 - DNA, 25 bp, Homo sapien
taatacatggtcaacactccaggcc

SEQ ID NO: 3938156 - DNA, 25 bp, Homo sapien
tcaccacttccatccccgcgttgag

SEQ ID NO: 3938157 - DNA, 25 bp, Homo sapien
gagtaaacagcctcagtcgcgggca

SEQ ID NO: 3938158 - DNA, 25 bp, Homo sapien
gcaaggatgtactcctgagtaaaca

SEQ ID NO: 3938159 - DNA, 25 bp, Homo sapien
tgagctcgttcaaggcaaggatgta

SEQ ID NO: 3938160 - DNA, 25 bp, Homo sapien
cttcatagcaggagtagatggcagc

SEQ ID NO: 3938161 - DNA, 25 bp, Homo sapien
ggagtagatggcagccaggcacacg

SEQ ID NO: 3938162 - DNA, 25 bp, Homo sapien
tagatggcagccaggcacacggcca

SEQ ID NO: 3938163 - DNA, 25 bp, Homo sapien
ttcatagcaggagtagatggcagcc

SEQ ID NO: 3938164 - DNA, 25 bp, Homo sapien
tccacgtggatctcactggaggcca

SEQ ID NO: 3938165 - DNA, 25 bp, Homo sapien
ttgaggatttccacgtagcagccga

SEQ ID NO: 3938166 - DNA, 25 bp, Homo sapien
gcagccgttccggatttccttcagg

SEQ ID NO: 3938167 - DNA, 25 bp, Homo sapien
ctcgatgctcatggtgctgcaggcg

SEQ ID NO: 3938168 - DNA, 25 bp, Homo sapien
cgggaacccgtcctggcttgccctg

SEQ ID NO: 3938169 - DNA, 25 bp, Homo sapien
catcgggaacccgtcctggcttgcc

SEQ ID NO: 3938170 - DNA, 25 bp, Homo sapien
tgcgtagccccatcgggaacccgtc

SEQ ID NO: 3938171 - DNA, 25 bp, Homo sapien
ctgctcctctgcgtagccccatcgg

SEQ ID NO: 3938172 - DNA, 25 bp, Homo sapien
aagtcacgggcagaacgtggcggcc

SEQ ID NO: 3938173 - DNA, 25 bp, Homo sapien
gcaagtcacgggcagaacgtggcgg

SEQ ID NO: 3938174 - DNA, 25 bp, Homo sapien
agaacgtggcggcctcacggtggcc

SEQ ID NO: 3938175 - DNA, 25 bp, Homo sapien
cctgcaagtcacgggcagaacgtgg

SEQ ID NO: 3938176 - DNA, 25 bp, Homo sapien
tgacagcaggtcctctggactgcag

SEQ ID NO: 3938177 - DNA, 25 bp, Homo sapien
ctgggaggcagatgaggactgacag

SEQ ID NO: 3938178 - DNA, 25 bp, Homo sapien
gggaggcagatgaggactgacagca

SEQ ID NO: 3938179 - DNA, 25 bp, Homo sapien
gaggcagatgaggactgacagcagg

SEQ ID NO: 3938180 - DNA, 25 bp, Homo sapien
ttaatctccagagcggtatgtgagg

SEQ ID NO: 3938181 - DNA, 25 bp, Homo sapien
ccagagcggtatgtgagggcagagg

SEQ ID NO: 3938182 - DNA, 25 bp, Homo sapien
atctccagagcggtatgtgagggca

SEQ ID NO: 3938183 - DNA, 25 bp, Homo sapien
cagagcggtatgtgagggcagaggg

SEQ ID NO: 3938184 - DNA, 25 bp, Homo sapien
ggcaatacctttcaggacataaaca

SEQ ID NO: 3938185 - DNA, 25 bp, Homo sapien
aggcaatacctttcaggacataaac

SEQ ID NO: 3938186 - DNA, 25 bp, Homo sapien
acctttcaggacataaacatgggca

SEQ ID NO: 3938187 - DNA, 25 bp, Homo sapien
aatacctttcaggacataaacatgg

SEQ ID NO: 3938188 - DNA, 25 bp, Homo sapien
gttgatgctaaatacccaggaatcc

SEQ ID NO: 3938189 - DNA, 25 bp, Homo sapien
ttctaagagttgatgctaaataccc

SEQ ID NO: 3938190 - DNA, 25 bp, Homo sapien
cttttctaagagttgatgctaaata

SEQ ID NO: 3938191 - DNA, 25 bp, Homo sapien
taagagttgatgctaaatacccagg

SEQ ID NO: 3938192 - DNA, 25 bp, Homo sapien
gattataggcgtgcgccactatgcc

SEQ ID NO: 3938193 - DNA, 25 bp, Homo sapien
atgctggtcttgaactcctggcctc

SEQ ID NO: 3938194 - DNA, 25 bp, Homo sapien
gtgcctcagccttccgagcagctgg

SEQ ID NO: 3938195 - DNA, 25 bp, Homo sapien
ttataggcgtgcgccactatgccca

SEQ ID NO: 3938196 - DNA, 25 bp, Homo sapien
gacggtctccagtcatcatagtctg

SEQ ID NO: 3938197 - DNA, 25 bp, Homo sapien
caaactggccagagacggtctccag

SEQ ID NO: 3938198 - DNA, 25 bp, Homo sapien
tggccagagacggtctccagtcatc

SEQ ID NO: 3938199 - DNA, 25 bp, Homo sapien
ggaatggaatgggttgaagcaaact

SEQ ID NO: 3938200 - DNA, 25 bp, Homo sapien
aattgttccacgattaaggcgggcg

SEQ ID NO: 3938201 - DNA, 25 bp, Homo sapien
gacgtcacgactctgctgagactga

SEQ ID NO: 3938202 - DNA, 25 bp, Homo sapien
ttactgcacacatcagcggccatgg

SEQ ID NO: 3938203 - DNA, 25 bp, Homo sapien
gatttctccggcctcaagtactggg

SEQ ID NO: 3938204 - DNA, 25 bp, Homo sapien
ggtgaacttctcatgtgcgagagct

SEQ ID NO: 3938205 - DNA, 25 bp, Homo sapien
cttcggcgaacctctgaatcacgta

SEQ ID NO: 3938206 - DNA, 25 bp, Homo sapien
cctctgaatcacgtacttcagttcc

SEQ ID NO: 3938207 - DNA, 25 bp, Homo sapien
tcttgcctggggtcttcggcgaacc

SEQ ID NO: 3938208 - DNA, 25 bp, Homo sapien
ggcgaacctctgaatcacgtacttc

SEQ ID NO: 3938209 - DNA, 25 bp, Homo sapien
cctttaggaaaggacgattggctgc

SEQ ID NO: 3938210 - DNA, 25 bp, Homo sapien
catctttgccggcccgcacgctcag

SEQ ID NO: 3938211 - DNA, 25 bp, Homo sapien
gtcatcgtcgcaggccacccctccg

SEQ ID NO: 3938212 - DNA, 25 bp, Homo sapien
ggcgaacagctccccgtcatcgtcg

SEQ ID NO: 3938213 - DNA, 25 bp, Homo sapien
tagagctggaaccagccatctttgc

SEQ ID NO: 3938214 - DNA, 25 bp, Homo sapien
ggcatacaaatgcaatctctcgggc

SEQ ID NO: 3938215 - DNA, 25 bp, Homo sapien
tgtgacatcagaggagaacccgaga

SEQ ID NO: 3938216 - DNA, 25 bp, Homo sapien
tgcaccgaatcctcacattgtaggg

SEQ ID NO: 3938217 - DNA, 25 bp, Homo sapien
catgttcctagatgcgcagggccct

SEQ ID NO: 3938218 - DNA, 25 bp, Homo sapien
atgcagggacccagcttgttttctg

SEQ ID NO: 3938219 - DNA, 25 bp, Homo sapien
gagcaggaattttttggtcttgtaa

SEQ ID NO: 3938220 - DNA, 25 bp, Homo sapien
tgcagggacccagcttgttttctgc

SEQ ID NO: 3938221 - DNA, 25 bp, Homo sapien
ggtcttgtaacaggagcccatgagg

SEQ ID NO: 3938222 - DNA, 25 bp, Homo sapien
tagctcccacggctttgactgaggg

SEQ ID NO: 3938223 - DNA, 25 bp, Homo sapien
cactgcatgatgaaggctcgaggct

SEQ ID NO: 3938224 - DNA, 25 bp, Homo sapien
cagcagatgctctatcggcacggac

SEQ ID NO: 3938225 - DNA, 25 bp, Homo sapien
catgccatggtgctcagttctagaa

SEQ ID NO: 3938226 - DNA, 25 bp, Homo sapien
ggtgtctggacatggggcaggcccc

SEQ ID NO: 3938227 - DNA, 25 bp, Homo sapien
tgcggtgtctggacatggggcaggc

SEQ ID NO: 3938228 - DNA, 25 bp, Homo sapien
caggcccccgggggatgtttgcagg

SEQ ID NO: 3938229 - DNA, 25 bp, Homo sapien
cgtgcggtgtctggacatggggcag

SEQ ID NO: 3938230 - DNA, 25 bp, Homo sapien
tccagggttgagatgatctgcagtt

SEQ ID NO: 3938231 - DNA, 25 bp, Homo sapien
tgatgttgtattccagcatcaagca

SEQ ID NO: 3938232 - DNA, 25 bp, Homo sapien
gggtgtcgttgttgtcgatgatgtt

SEQ ID NO: 3938233 - DNA, 25 bp, Homo sapien
tcacacagctgctcgtacatgcgct

SEQ ID NO: 3938234 - DNA, 25 bp, Homo sapien
agtgttagcctggtgggcccgcctt

SEQ ID NO: 3938235 - DNA, 25 bp, Homo sapien
tgttagcctggtgggcccgcctttc

SEQ ID NO: 3938236 - DNA, 25 bp, Homo sapien
agggcagtgttagcctggtgggccc

SEQ ID NO: 3938237 - DNA, 25 bp, Homo sapien
ggcagtgttagcctggtgggcccgc

SEQ ID NO: 3938238 - DNA, 25 bp, Homo sapien
tggaccacaggttcagctgcttgag

SEQ ID NO: 3938239 - DNA, 25 bp, Homo sapien
tccaggtttccgaaggagccggagc

SEQ ID NO: 3938240 - DNA, 25 bp, Homo sapien
cggcgcaggcactggttacattggt

SEQ ID NO: 3938241 - DNA, 25 bp, Homo sapien
ctcagcaaacgagccaagtcagcgt

SEQ ID NO: 3938242 - DNA, 25 bp, Homo sapien
cactcctggggaagtgactctgagg

SEQ ID NO: 3938243 - DNA, 25 bp, Homo sapien
tctcccggccactcctggggaagtg

SEQ ID NO: 3938244 - DNA, 25 bp, Homo sapien
ctgtagagcacagaaactctcagcc

SEQ ID NO: 3938245 - DNA, 25 bp, Homo sapien
tagagcacagaaactctcagccctc

SEQ ID NO: 3938246 - DNA, 25 bp, Homo sapien
aggtgttccgacaggagccgaaggc

SEQ ID NO: 3938247 - DNA, 25 bp, Homo sapien
cagcgtctgtgaccggggtctcgca

SEQ ID NO: 3938248 - DNA, 25 bp, Homo sapien
ctggagcatggtgaggtgttccgac

SEQ ID NO: 3938249 - DNA, 25 bp, Homo sapien
tctcgcacaggttcagcacctggag

SEQ ID NO: 3938250 - DNA, 25 bp, Homo sapien
gttcatgtttaaactgcagagactc

SEQ ID NO: 3938251 - DNA, 25 bp, Homo sapien
tgtttaaactgcagagactcttcat

SEQ ID NO: 3938252 - DNA, 25 bp, Homo sapien
gctgttcatgtttaaactgcagaga

SEQ ID NO: 3938253 - DNA, 25 bp, Homo sapien
catgtttaaactgcagagactcttc

SEQ ID NO: 3938254 - DNA, 25 bp, Homo sapien
gcaataagagtccttgtcacgtgta

SEQ ID NO: 3938255 - DNA, 25 bp, Homo sapien
tgtgggctacctgggctcttggagg

SEQ ID NO: 3938256 - DNA, 25 bp, Homo sapien
tggctccacccgcattgccggctgg

SEQ ID NO: 3938257 - DNA, 25 bp, Homo sapien
tcacgtgtaggccattcccttgcag

SEQ ID NO: 3938258 - DNA, 25 bp, Homo sapien
cttccttcaaattgggaagcttggc

SEQ ID NO: 3938259 - DNA, 25 bp, Homo sapien
caggcttcggtgtagcggacgtcca

SEQ ID NO: 3938260 - DNA, 25 bp, Homo sapien
cggtgtagcggacgtccacttcctt

SEQ ID NO: 3938261 - DNA, 25 bp, Homo sapien
ccacttccttcaaattgggaagctt

SEQ ID NO: 3938262 - DNA, 25 bp, Homo sapien
tcagctcggagcctctaggaagaaa

SEQ ID NO: 3938263 - DNA, 25 bp, Homo sapien
ctttgcatagcaatggtgaggacac

SEQ ID NO: 3938264 - DNA, 25 bp, Homo sapien
gttgacttttcccacacgacggcat

SEQ ID NO: 3938265 - DNA, 25 bp, Homo sapien
tttgtcgcggttgcaaacgtcttcc

SEQ ID NO: 3938266 - DNA, 25 bp, Homo sapien
ccagacccgcaatttgtcaacatgt

SEQ ID NO: 3938267 - DNA, 25 bp, Homo sapien
ttcataaataagaggcgggtcccag

SEQ ID NO: 3938268 - DNA, 25 bp, Homo sapien
aaagacttcataaataagaggcggg

SEQ ID NO: 3938269 - DNA, 25 bp, Homo sapien
gcgggtcccagacccgcaatttgtc

SEQ ID NO: 3938270 - DNA, 25 bp, Homo sapien
ccgacagctgactggtttatacagt

SEQ ID NO: 3938271 - DNA, 25 bp, Homo sapien
cattcaagtctaaaaggtgccgaga

SEQ ID NO: 3938272 - DNA, 25 bp, Homo sapien
gacagacagacgagagagcattagc

SEQ ID NO: 3938273 - DNA, 25 bp, Homo sapien
cacctcgtgagggagttggagacat

SEQ ID NO: 3938274 - DNA, 25 bp, Homo sapien
tggcggaggcgacacatctctcttt

SEQ ID NO: 3938275 - DNA, 25 bp, Homo sapien
gcctgaaagtatttcacatctcttt

SEQ ID NO: 3938276 - DNA, 25 bp, Homo sapien
tctttgtacacagctacgtgacagt

SEQ ID NO: 3938277 - DNA, 25 bp, Homo sapien
gacagtagtattaaccatcaggaaa

SEQ ID NO: 3938278 - DNA, 25 bp, Homo sapien
cacttacagtttatttttgcctgaa

SEQ ID NO: 3938279 - DNA, 25 bp, Homo sapien
ccaccagggcatagagagaggtggg

SEQ ID NO: 3938280 - DNA, 25 bp, Homo sapien
ggggcaactccagacacagagtctc

SEQ ID NO: 3938281 - DNA, 25 bp, Homo sapien
gccaccagggcatagagagaggtgg

SEQ ID NO: 3938282 - DNA, 25 bp, Homo sapien
ggcagggggcaactccagacacaga

SEQ ID NO: 3938283 - DNA, 25 bp, Homo sapien
tttttccatagcgcctgctctccgt

SEQ ID NO: 3938284 - DNA, 25 bp, Homo sapien
tccatagcgcctgctctccgtgtga

SEQ ID NO: 3938285 - DNA, 25 bp, Homo sapien
tcctttttccatagcgcctgctctc

SEQ ID NO: 3938286 - DNA, 25 bp, Homo sapien
ccgcagtcaagagccctcctgtcct

SEQ ID NO: 3938287 - DNA, 25 bp, Homo sapien
tcttccagcggggagcctgcattct

SEQ ID NO: 3938288 - DNA, 25 bp, Homo sapien
cttccagcggggagcctgcattctc

SEQ ID NO: 3938289 - DNA, 25 bp, Homo sapien
cagcttcacccagtgggcagaggag

SEQ ID NO: 3938290 - DNA, 25 bp, Homo sapien
tctccagcttcacccagtgggcaga

SEQ ID NO: 3938291 - DNA, 25 bp, Homo sapien
agcagcccacggagggaggcaactc

SEQ ID NO: 3938292 - DNA, 25 bp, Homo sapien
gtgagcagcccacggagggaggcaa

SEQ ID NO: 3938293 - DNA, 25 bp, Homo sapien
gagcagcccacggagggaggcaact

SEQ ID NO: 3938294 - DNA, 25 bp, Homo sapien
agcaacgggcacagcggctgggatg

SEQ ID NO: 3938295 - DNA, 25 bp, Homo sapien
gggagtacgtggtgtaactcagtgc

SEQ ID NO: 3938296 - DNA, 25 bp, Homo sapien
ggagtacgtggtgtaactcagtgca

SEQ ID NO: 3938297 - DNA, 25 bp, Homo sapien
gagtacgtggtgtaactcagtgcag

SEQ ID NO: 3938298 - DNA, 25 bp, Homo sapien
ggggagtacgtggtgtaactcagtg

SEQ ID NO: 3938299 - DNA, 25 bp, Homo sapien
caccaacagttgctggttttacttg

SEQ ID NO: 3938300 - DNA, 25 bp, Homo sapien
tcctcgcagagacccctcagagaga

SEQ ID NO: 3938301 - DNA, 25 bp, Homo sapien
ccatttggggctggcaccaacagtt

SEQ ID NO: 3938302 - DNA, 25 bp, Homo sapien
gatggtcattgaggtaggtcctcgc

SEQ ID NO: 3938303 - DNA, 25 bp, Homo sapien
cttggggtttgatgggacagtgctc

SEQ ID NO: 3938304 - DNA, 25 bp, Homo sapien
gcctgagacctttagtgcttggggt

SEQ ID NO: 3938305 - DNA, 25 bp, Homo sapien
cagtgctccccggtggcttggaaag

SEQ ID NO: 3938306 - DNA, 25 bp, Homo sapien
tggaaagcctctccgtaaacatgca

SEQ ID NO: 3938307 - DNA, 25 bp, Homo sapien
ctctgcaagtccattctgccagaac

SEQ ID NO: 3938308 - DNA, 25 bp, Homo sapien
cattctgccagaacccattccagga

SEQ ID NO: 3938309 - DNA, 25 bp, Homo sapien
tctgcaagtccattctgccagaacc

SEQ ID NO: 3938310 - DNA, 25 bp, Homo sapien
tctgccagaacccattccaggaggt

SEQ ID NO: 3938311 - DNA, 25 bp, Homo sapien
ggctcccgcagctgcaacgctgggc

SEQ ID NO: 3938312 - DNA, 25 bp, Homo sapien
cagctgcaacgctgggcagggaagc

SEQ ID NO: 3938313 - DNA, 25 bp, Homo sapien
ccgcagctgcaacgctgggcaggga

SEQ ID NO: 3938314 - DNA, 25 bp, Homo sapien
ctgggcagggaagccgggtctccat

SEQ ID NO: 3938315 - DNA, 25 bp, Homo sapien
gaccaccatttgaacatccctgttg

SEQ ID NO: 3938316 - DNA, 25 bp, Homo sapien
gaacatccctgttgtcagccagaga

SEQ ID NO: 3938317 - DNA, 25 bp, Homo sapien
catccctgttgtcagccagagaagc

SEQ ID NO: 3938318 - DNA, 25 bp, Homo sapien
ctggaccaccatttgaacatccctg

SEQ ID NO: 3938319 - DNA, 25 bp, Homo sapien
actttctgggagtcaagtggacacc

SEQ ID NO: 3938320 - DNA, 25 bp, Homo sapien
caggtgatgcttgatcttcatgctg

SEQ ID NO: 3938321 - DNA, 25 bp, Homo sapien
gatagcttcctgttatgccacccag

SEQ ID NO: 3938322 - DNA, 25 bp, Homo sapien
caggaggcagtaagcctgagatagc

SEQ ID NO: 3938323 - DNA, 25 bp, Homo sapien
ggcacgggcgaactgtcttattcaa

SEQ ID NO: 3938324 - DNA, 25 bp, Homo sapien
tctaaacacagaggcacgcaaggcc

SEQ ID NO: 3938325 - DNA, 25 bp, Homo sapien
gaaaccgtggtgatccttgcgtgaa

SEQ ID NO: 3938326 - DNA, 25 bp, Homo sapien
aaggccagccaggaaatacaggtgg

SEQ ID NO: 3938327 - DNA, 25 bp, Homo sapien
acccagacactgagtaccagtggct

SEQ ID NO: 3938328 - DNA, 25 bp, Homo sapien
cagacactgagtaccagtggctctt

SEQ ID NO: 3938329 - DNA, 25 bp, Homo sapien
accagtggctcttgggcccctggag

SEQ ID NO: 3938330 - DNA, 25 bp, Homo sapien
taccagtggctcttgggcccctgga

SEQ ID NO: 3938331 - DNA, 25 bp, Homo sapien
tctcaacagccgcaggtgctgggag

SEQ ID NO: 3938332 - DNA, 25 bp, Homo sapien
actaataccccaggctgtggtcgac

SEQ ID NO: 3938333 - DNA, 25 bp, Homo sapien
gagaagctaggggtgaactaatacc

SEQ ID NO: 3938334 - DNA, 25 bp, Homo sapien
agcttctctggtctcaacagccgca

SEQ ID NO: 3938335 - DNA, 25 bp, Homo sapien
ttgccactgccacaagcgcaagttg

SEQ ID NO: 3938336 - DNA, 25 bp, Homo sapien
tccgcttgcacgtaagcagatagag

SEQ ID NO: 3938337 - DNA, 25 bp, Homo sapien
tgcagacccgccactgttgctctct

SEQ ID NO: 3938338 - DNA, 25 bp, Homo sapien
gggcctatttcttccgcttgcacgt

SEQ ID NO: 3938339 - DNA, 25 bp, Homo sapien
gcggaaaatgccgtggcctgaagac

SEQ ID NO: 3938340 - DNA, 25 bp, Homo sapien
caggctccactcgagcggaaaatgc

SEQ ID NO: 3938341 - DNA, 25 bp, Homo sapien
ggaaaatgccgtggcctgaagactc

SEQ ID NO: 3938342 - DNA, 25 bp, Homo sapien
ggctccactcgagcggaaaatgccg

SEQ ID NO: 3938343 - DNA, 25 bp, Homo sapien
tcacagttggtgagaggcggagcca

SEQ ID NO: 3938344 - DNA, 25 bp, Homo sapien
aatctgtccttttaggggcagccgc

SEQ ID NO: 3938345 - DNA, 25 bp, Homo sapien
ggattcagccccaggccgtctggct

SEQ ID NO: 3938346 - DNA, 25 bp, Homo sapien
acgtgcttaaccaccatgccacatt

SEQ ID NO: 3938347 - DNA, 25 bp, Homo sapien
cgagtaactgtgattgcaggcatgg

SEQ ID NO: 3938348 - DNA, 25 bp, Homo sapien
gagtaactgtgattgcaggcatggg

SEQ ID NO: 3938349 - DNA, 25 bp, Homo sapien
gtggtcgacagccccactgaaccag

SEQ ID NO: 3938350 - DNA, 25 bp, Homo sapien
ggtcgacagccccactgaaccagct

SEQ ID NO: 3938351 - DNA, 25 bp, Homo sapien
tcgacagccccactgaaccagcttc

SEQ ID NO: 3938352 - DNA, 25 bp, Homo sapien
ctgtggtcgacagccccactgaacc

SEQ ID NO: 3938353 - DNA, 25 bp, Homo sapien
gatgcagtcattggctgtgcctacg

SEQ ID NO: 3938354 - DNA, 25 bp, Homo sapien
tgcctacgtcacatactctgtaggg

SEQ ID NO: 3938355 - DNA, 25 bp, Homo sapien
ccctgtgactggtcgaagcactggg

SEQ ID NO: 3938356 - DNA, 25 bp, Homo sapien
ccttgaccctgtgactggtcgaagc

SEQ ID NO: 3938357 - DNA, 25 bp, Homo sapien
gcgatctgcctgcttgggactccaa

SEQ ID NO: 3938358 - DNA, 25 bp, Homo sapien
tagtcagggtccatgttatctcggt

SEQ ID NO: 3938359 - DNA, 25 bp, Homo sapien
caggtcatccaagaaggcttccggc

SEQ ID NO: 3938360 - DNA, 25 bp, Homo sapien
catgggtcagcactaggtcatatgc

SEQ ID NO: 3938361 - DNA, 25 bp, Homo sapien
gattttcagtgactaccctaaggga

SEQ ID NO: 3938362 - DNA, 25 bp, Homo sapien
tacatgcagcccataatagggagca

SEQ ID NO: 3938363 - DNA, 25 bp, Homo sapien
gttgacatccagctggtaattacca

SEQ ID NO: 3938364 - DNA, 25 bp, Homo sapien
tttcttacagaagctaccagactgc

SEQ ID NO: 3938365 - DNA, 25 bp, Homo sapien
ccttgagaacagtaaatccacataa

SEQ ID NO: 3938366 - DNA, 25 bp, Homo sapien
tacagggaaaatgcgaaacattggc

SEQ ID NO: 3938367 - DNA, 25 bp, Homo sapien
gaccctaatgtcagccaaggtcaga

SEQ ID NO: 3938368 - DNA, 25 bp, Homo sapien
cattggcattctagacctaacctac

SEQ ID NO: 3938369 - DNA, 25 bp, Homo sapien
tgaactcggcctctgaatggatagc

SEQ ID NO: 3938370 - DNA, 25 bp, Homo sapien
ggctcttggactacgtgaaaacgac

SEQ ID NO: 3938371 - DNA, 25 bp, Homo sapien
cagcggccgtttcgactacatttcc

SEQ ID NO: 3938372 - DNA, 25 bp, Homo sapien
gaatgcagtgcgttcaccgctgcgg

SEQ ID NO: 3938373 - DNA, 25 bp, Homo sapien
gcagacatgaatggcatcacagaag

SEQ ID NO: 3938374 - DNA, 25 bp, Homo sapien
tgcccggcatcctagactgctgttt

SEQ ID NO: 3938375 - DNA, 25 bp, Homo sapien
aaaggagctttagtgagcaccacag

SEQ ID NO: 3938376 - DNA, 25 bp, Homo sapien
cccaaccagtagtgtgagaacatgt

SEQ ID NO: 3938377 - DNA, 25 bp, Homo sapien
tcaaaccctggtttggctgcccggc

SEQ ID NO: 3938378 - DNA, 25 bp, Homo sapien
tctttctaggtcagcaaatccagcc

SEQ ID NO: 3938379 - DNA, 25 bp, Homo sapien
aaccatggtaccttgcattccgccg

SEQ ID NO: 3938380 - DNA, 25 bp, Homo sapien
tggacatgtatccttgaacagtggg

SEQ ID NO: 3938381 - DNA, 25 bp, Homo sapien
cattccgccgcgtagatggattaca

SEQ ID NO: 3938382 - DNA, 25 bp, Homo sapien
gggaggtgcccagtgctaggctgga

SEQ ID NO: 3938383 - DNA, 25 bp, Homo sapien
agcactggccctcacttccctgggc

SEQ ID NO: 3938384 - DNA, 25 bp, Homo sapien
tacagtcacgtccttcatggaagtt

SEQ ID NO: 3938385 - DNA, 25 bp, Homo sapien
caaggagtgggcctcgtctacagtc

SEQ ID NO: 3938386 - DNA, 25 bp, Homo sapien
ctaaagctcgtgctgtgtggacctg

SEQ ID NO: 3938387 - DNA, 25 bp, Homo sapien
ctcgtgctgtgtggacctgagcttg

SEQ ID NO: 3938388 - DNA, 25 bp, Homo sapien
tgtgtggacctgagcttggttgcac

SEQ ID NO: 3938389 - DNA, 25 bp, Homo sapien
gctgtgtggacctgagcttggttgc

SEQ ID NO: 3938390 - DNA, 25 bp, Homo sapien
gcagagatagtttcagaagctgatg

SEQ ID NO: 3938391 - DNA, 25 bp, Homo sapien
ctgcagagatagtttcagaagctga

SEQ ID NO: 3938392 - DNA, 25 bp, Homo sapien
tgcagagatagtttcagaagctgat

SEQ ID NO: 3938393 - DNA, 25 bp, Homo sapien
tccagatggacttcgtggaatgttc

SEQ ID NO: 3938394 - DNA, 25 bp, Homo sapien
ccgtcttccagatggacttcgtgga

SEQ ID NO: 3938395 - DNA, 25 bp, Homo sapien
ggaccgtcttccagatggacttcgt

SEQ ID NO: 3938396 - DNA, 25 bp, Homo sapien
gatggacttcgtggaatgttctttt

SEQ ID NO: 3938397 - DNA, 25 bp, Homo sapien
tagaattctgcagcagtgcagatat

SEQ ID NO: 3938398 - DNA, 25 bp, Homo sapien
agaattctgcagcagtgcagatatt

SEQ ID NO: 3938399 - DNA, 25 bp, Homo sapien
aattctgcagcagtgcagatattac

SEQ ID NO: 3938400 - DNA, 25 bp, Homo sapien
gaattctgcagcagtgcagatatta

SEQ ID NO: 3938401 - DNA, 25 bp, Homo sapien
tacacagcagctgtccacaggggac

SEQ ID NO: 3938402 - DNA, 25 bp, Homo sapien
cacagcagctgtccacaggggacat

SEQ ID NO: 3938403 - DNA, 25 bp, Homo sapien
gctacacagcagctgtccacagggg

SEQ ID NO: 3938404 - DNA, 25 bp, Homo sapien
cttggctacacagcagctgtccaca

SEQ ID NO: 3938405 - DNA, 25 bp, Homo sapien
actccatgaacaatactgaacactt

SEQ ID NO: 3938406 - DNA, 25 bp, Homo sapien
gagacatctgtcactccatgaacaa

SEQ ID NO: 3938407 - DNA, 25 bp, Homo sapien
tgtcactccatgaacaatactgaac

SEQ ID NO: 3938408 - DNA, 25 bp, Homo sapien
tctgtcactccatgaacaatactga

SEQ ID NO: 3938409 - DNA, 25 bp, Homo sapien
gttgaagtcaagaccagttgaagtc

SEQ ID NO: 3938410 - DNA, 25 bp, Homo sapien
ctactgaaagccttagagcagaaga

SEQ ID NO: 3938411 - DNA, 25 bp, Homo sapien
caagaccagttgaagtcattcttcc

SEQ ID NO: 3938412 - DNA, 25 bp, Homo sapien
cttagagcagaagaatgacctggac

SEQ ID NO: 3938413 - DNA, 25 bp, Homo sapien
tcctggaggtgacggtccctaagct

SEQ ID NO: 3938414 - DNA, 25 bp, Homo sapien
caatacaagtgataatcccaaagag

SEQ ID NO: 3938415 - DNA, 25 bp, Homo sapien
tgttggatacaaaagagcataaggg

SEQ ID NO: 3938416 - DNA, 25 bp, Homo sapien
aaagggtgaattttgctgaatgcaa

SEQ ID NO: 3938417 - DNA, 25 bp, Homo sapien
actgtttcaatagaaccctcattca

SEQ ID NO: 3938418 - DNA, 25 bp, Homo sapien
taagcactgtttcaatagaaccctc

SEQ ID NO: 3938419 - DNA, 25 bp, Homo sapien
cttaagcactgtttcaatagaaccc

SEQ ID NO: 3938420 - DNA, 25 bp, Homo sapien
gcactgtttcaatagaaccctcatt

SEQ ID NO: 3938421 - DNA, 25 bp, Homo sapien
ttcagaaagaccagctcatcactca

SEQ ID NO: 3938422 - DNA, 25 bp, Homo sapien
tgcggcaaccatttcagaaagacca

SEQ ID NO: 3938423 - DNA, 25 bp, Homo sapien
accatttcagaaagaccagctcatc

SEQ ID NO: 3938424 - DNA, 25 bp, Homo sapien
ctgcggcaaccatttcagaaagacc

SEQ ID NO: 3938425 - DNA, 25 bp, Homo sapien
ggtaacctcagaactgggtcctgag

SEQ ID NO: 3938426 - DNA, 25 bp, Homo sapien
tgcctcatggagctgcgaagacttc

SEQ ID NO: 3938427 - DNA, 25 bp, Homo sapien
tcaacccactgtaccctatattagg

SEQ ID NO: 3938428 - DNA, 25 bp, Homo sapien
atcaggcaagggctaatcctctgcc

SEQ ID NO: 3938429 - DNA, 25 bp, Homo sapien
ccaggtgaacgactgaaggaatcag

SEQ ID NO: 3938430 - DNA, 25 bp, Homo sapien
caggtttctctgtttaatctatgcc

SEQ ID NO: 3938431 - DNA, 25 bp, Homo sapien
tgcctgtgagcctatagtatttttg

SEQ ID NO: 3938432 - DNA, 25 bp, Homo sapien
gagataatggtcatcgtaaatggca

SEQ ID NO: 3938433 - DNA, 25 bp, Homo sapien
aaagcctatcttgacagatgccaat

SEQ ID NO: 3938434 - DNA, 25 bp, Homo sapien
tatcttgacagatgccaattctggc

SEQ ID NO: 3938435 - DNA, 25 bp, Homo sapien
gcctatcttgacagatgccaattct

SEQ ID NO: 3938436 - DNA, 25 bp, Homo sapien
ctaaaagcctatcttgacagatgcc

SEQ ID NO: 3938437 - DNA, 25 bp, Homo sapien
gagaccactctagggagccgtggct

SEQ ID NO: 3938438 - DNA, 25 bp, Homo sapien
atgtgtggagaccactctagggagc

SEQ ID NO: 3938439 - DNA, 25 bp, Homo sapien
ttacaaagtctacatggatagggga

SEQ ID NO: 3938440 - DNA, 25 bp, Homo sapien
gattgcatataatcagaatgtgtgg

SEQ ID NO: 3938441 - DNA, 25 bp, Homo sapien
actcgggtcactcagcgccgctcac

SEQ ID NO: 3938442 - DNA, 25 bp, Homo sapien
gtgccgcccgggcacagctgcccgc

SEQ ID NO: 3938443 - DNA, 25 bp, Homo sapien
gcagcccgcgtcccgactcgggtca

SEQ ID NO: 3938444 - DNA, 25 bp, Homo sapien
ctggccgtgccgcccgggcacagct

SEQ ID NO: 3938445 - DNA, 25 bp, Homo sapien
aaagggctattcatggggtctgtgc

SEQ ID NO: 3938446 - DNA, 25 bp, Homo sapien
ttccagaggaactgcccatactcca

SEQ ID NO: 3938447 - DNA, 25 bp, Homo sapien
agaggaactgcccatactccagtcg

SEQ ID NO: 3938448 - DNA, 25 bp, Homo sapien
acccaatgagtgcaaaagggctatt

SEQ ID NO: 3938449 - DNA, 25 bp, Homo sapien
gtgcctgaccaagaaatgttttcaa

SEQ ID NO: 3938450 - DNA, 25 bp, Homo sapien
cgtgcctgaccaagaaatgttttca

SEQ ID NO: 3938451 - DNA, 25 bp, Homo sapien
accgtgcctgaccaagaaatgtttt

SEQ ID NO: 3938452 - DNA, 25 bp, Homo sapien
ccgtgcctgaccaagaaatgttttc

SEQ ID NO: 3938453 - DNA, 25 bp, Homo sapien
cagttacttccagcttcgaagccca

SEQ ID NO: 3938454 - DNA, 25 bp, Homo sapien
tcgaagcccagtggatcaactcagc

SEQ ID NO: 3938455 - DNA, 25 bp, Homo sapien
ttgtaatagctgctcacaggttgcc

SEQ ID NO: 3938456 - DNA, 25 bp, Homo sapien
tccatgctgcgtctcaccaattgct

SEQ ID NO: 3938457 - DNA, 25 bp, Homo sapien
cactctgggagggccttggacttaa

SEQ ID NO: 3938458 - DNA, 25 bp, Homo sapien
tcactctgggagggccttggactta

SEQ ID NO: 3938459 - DNA, 25 bp, Homo sapien
gaaggaaggaatcgggagaaatcag

SEQ ID NO: 3938460 - DNA, 25 bp, Homo sapien
ttgtcagcggtcttgctccaggcca

SEQ ID NO: 3938461 - DNA, 25 bp, Homo sapien
tggacttgcggaagctgaacacagt

SEQ ID NO: 3938462 - DNA, 25 bp, Homo sapien
gaatctacattgaccgtggtggaca

SEQ ID NO: 3938463 - DNA, 25 bp, Homo sapien
ggctcttctcatattccgcaaggga

SEQ ID NO: 3938464 - DNA, 25 bp, Homo sapien
cacagtaatgacaagacaggaaggt

SEQ ID NO: 3938465 - DNA, 25 bp, Homo sapien
tccacacaaactggcaatgctttca

SEQ ID NO: 3938466 - DNA, 25 bp, Homo sapien
caaaccaacaacaatcacagtaatg

SEQ ID NO: 3938467 - DNA, 25 bp, Homo sapien
gaacacatcaaaccaacaacaatca

SEQ ID NO: 3938468 - DNA, 25 bp, Homo sapien
atgccatatccttcagctcagaaat

SEQ ID NO: 3938469 - DNA, 25 bp, Homo sapien
tgccatatccttcagctcagaaata

SEQ ID NO: 3938470 - DNA, 25 bp, Homo sapien
gagactgagcggtgacactgacagt

SEQ ID NO: 3938471 - DNA, 25 bp, Homo sapien
gagataaaacgtcacccttctcagc

SEQ ID NO: 3938472 - DNA, 25 bp, Homo sapien
tctaagctcttcacacataattggc

SEQ ID NO: 3938473 - DNA, 25 bp, Homo sapien
gaaggcctgctctctcaaggtgtga

SEQ ID NO: 3938474 - DNA, 25 bp, Homo sapien
aacgttcactctgcgccacgctggg

SEQ ID NO: 3938475 - DNA, 25 bp, Homo sapien
caggaaactggcgtaacgttcactc

SEQ ID NO: 3938476 - DNA, 25 bp, Homo sapien
ctccttcagtcatgctactacctgg

SEQ ID NO: 3938477 - DNA, 25 bp, Homo sapien
cagtcatgctactacctggtgtagg

SEQ ID NO: 3938478 - DNA, 25 bp, Homo sapien
gatggcaaagctggtagacacactt

SEQ ID NO: 3938479 - DNA, 25 bp, Homo sapien
atgaagctccctggccacaagctga

SEQ ID NO: 3938480 - DNA, 25 bp, Homo sapien
gaaaggttctactgtgattacccag

SEQ ID NO: 3938481 - DNA, 25 bp, Homo sapien
cctaaatctaggacagatggcaaag

SEQ ID NO: 3938482 - DNA, 25 bp, Homo sapien
ccagactatatctctgcccctgtct

SEQ ID NO: 3938483 - DNA, 25 bp, Homo sapien
cagactatatctctgcccctgtctc

SEQ ID NO: 3938484 - DNA, 25 bp, Homo sapien
cccagactatatctctgcccctgtc

SEQ ID NO: 3938485 - DNA, 25 bp, Homo sapien
agactatatctctgcccctgtctca

SEQ ID NO: 3938486 - DNA, 25 bp, Homo sapien
ggagctccatttccgtgcagccgat

SEQ ID NO: 3938487 - DNA, 25 bp, Homo sapien
cagagaaaaggtatgcccggctagt

SEQ ID NO: 3938488 - DNA, 25 bp, Homo sapien
tgcagccgatgagtatccccaagat

SEQ ID NO: 3938489 - DNA, 25 bp, Homo sapien
ggctagttggctctgtcctggctat

SEQ ID NO: 3938490 - DNA, 25 bp, Homo sapien
agatcctagtttgggtccagtgctc

SEQ ID NO: 3938491 - DNA, 25 bp, Homo sapien
cagatcctagtttgggtccagtgct

SEQ ID NO: 3938492 - DNA, 25 bp, Homo sapien
cataatccttaaagatgaaatagga

SEQ ID NO: 3938493 - DNA, 25 bp, Homo sapien
gaaataggacatcttcacagaaaag

SEQ ID NO: 3938494 - DNA, 25 bp, Homo sapien
gaagtcgaatgcaaaacacagtcta

SEQ ID NO: 3938495 - DNA, 25 bp, Homo sapien
agagggaagtgagggaaccctctct

SEQ ID NO: 3938496 - DNA, 25 bp, Homo sapien
gtctcaattagggtggtggttacac

SEQ ID NO: 3938497 - DNA, 25 bp, Homo sapien
tctcctgcgatggaaggtgttctgt

SEQ ID NO: 3938498 - DNA, 25 bp, Homo sapien
aaaagacactccctatttgcagcat

SEQ ID NO: 3938499 - DNA, 25 bp, Homo sapien
tctctgcagcgtaagggtgctttgc

SEQ ID NO: 3938500 - DNA, 25 bp, Homo sapien
tgataacaagctctagggcaagcac

SEQ ID NO: 3938501 - DNA, 25 bp, Homo sapien
tgtgaacacactggatccacctggg

SEQ ID NO: 3938502 - DNA, 25 bp, Homo sapien
gtgtggcacacgaggaacatggtga

SEQ ID NO: 3938503 - DNA, 25 bp, Homo sapien
tgtggcacacgaggaacatggtgag

SEQ ID NO: 3938504 - DNA, 25 bp, Homo sapien
cagtgtggcacacgaggaacatggt

SEQ ID NO: 3938505 - DNA, 25 bp, Homo sapien
agtgtggcacacgaggaacatggtg

SEQ ID NO: 3938506 - DNA, 25 bp, Homo sapien
tctggcacagccttgcggacttttg

SEQ ID NO: 3938507 - DNA, 25 bp, Homo sapien
gcacagccttgcggacttttggccc

SEQ ID NO: 3938508 - DNA, 25 bp, Homo sapien
acagccttgcggacttttggcccct

SEQ ID NO: 3938509 - DNA, 25 bp, Homo sapien
tggcacagccttgcggacttttggc

SEQ ID NO: 3938510 - DNA, 25 bp, Homo sapien
ctgtgaacattaaggaggcagatcc

SEQ ID NO: 3938511 - DNA, 25 bp, Homo sapien
agctgtaatcacaactctgcacacc

SEQ ID NO: 3938512 - DNA, 25 bp, Homo sapien
cctcgatgacctgtgtaaataggag

SEQ ID NO: 3938513 - DNA, 25 bp, Homo sapien
tatgtaccgacatgacaaaaactcc

SEQ ID NO: 3938514 - DNA, 25 bp, Homo sapien
taaagcagtacgttatccccacagt

SEQ ID NO: 3938515 - DNA, 25 bp, Homo sapien
ttgtcttccagcaatagccagattt

SEQ ID NO: 3938516 - DNA, 25 bp, Homo sapien
attatctcttgtctatggaggcagc

SEQ ID NO: 3938517 - DNA, 25 bp, Homo sapien
ctttgaactggcctatggtgagcat

SEQ ID NO: 3938518 - DNA, 25 bp, Homo sapien
tgaactccagcactcctggagatga

SEQ ID NO: 3938519 - DNA, 25 bp, Homo sapien
aggacagaacgaagtccagaggtga

SEQ ID NO: 3938520 - DNA, 25 bp, Homo sapien
caggagaggttcgtggccattcaca

SEQ ID NO: 3938521 - DNA, 25 bp, Homo sapien
gagcaaaggcatcttagagtcatag

SEQ ID NO: 3938522 - DNA, 25 bp, Homo sapien
taatggactgttactaatgggccac

SEQ ID NO: 3938523 - DNA, 25 bp, Homo sapien
tgagccaattagaagctggagttcc

SEQ ID NO: 3938524 - DNA, 25 bp, Homo sapien
gcagcctaaaggtcaactgtccggt

SEQ ID NO: 3938525 - DNA, 25 bp, Homo sapien
aaagctatctctgcgtctggactca

SEQ ID NO: 3938526 - DNA, 25 bp, Homo sapien
caagctgagcgtgctgaggacgaac

SEQ ID NO: 3938527 - DNA, 25 bp, Homo sapien
ttttgctcgctcgaaatctttggag

SEQ ID NO: 3938528 - DNA, 25 bp, Homo sapien
tctttggagttcttccctgggcgga

SEQ ID NO: 3938529 - DNA, 25 bp, Homo sapien
tgccatataggatggtgaagcagca

SEQ ID NO: 3938530 - DNA, 25 bp, Homo sapien
taatcatcacttattcagctctcag

SEQ ID NO: 3938531 - DNA, 25 bp, Homo sapien
cagactgtaggggagtgatgcaatc

SEQ ID NO: 3938532 - DNA, 25 bp, Homo sapien
acacttaacatactcctcacaatac

SEQ ID NO: 3938533 - DNA, 25 bp, Homo sapien
ttacagggatgagcccagcgtacat

SEQ ID NO: 3938534 - DNA, 25 bp, Homo sapien
gacaagtgggttatttcctgtgcca

SEQ ID NO: 3938535 - DNA, 25 bp, Homo sapien
tcatgatgagctttgtaccacaggg

SEQ ID NO: 3938536 - DNA, 25 bp, Homo sapien
tcacgaagatgggagaagcctatgc

SEQ ID NO: 3938537 - DNA, 25 bp, Homo sapien
aattcctgggaagacgtctgcttac

SEQ ID NO: 3938538 - DNA, 25 bp, Homo sapien
cagagagccagttaactgcatcctc

SEQ ID NO: 3938539 - DNA, 25 bp, Homo sapien
cttcctggtgtaagattttcaagcc

SEQ ID NO: 3938540 - DNA, 25 bp, Homo sapien
tgggcgtggacgcattcatcgcttc

SEQ ID NO: 3938541 - DNA, 25 bp, Homo sapien
tctcgataatggtgggcgtggacgc

SEQ ID NO: 3938542 - DNA, 25 bp, Homo sapien
gaggtcttcatcaacccaggaggga

SEQ ID NO: 3938543 - DNA, 25 bp, Homo sapien
gagtcctacggaatgtgcacaaaag

SEQ ID NO: 3938544 - DNA, 25 bp, Homo sapien
ggaaaaggcctatctaagccaagat

SEQ ID NO: 3938545 - DNA, 25 bp, Homo sapien
ggaagcagtttcctcctagtgtgga

SEQ ID NO: 3938546 - DNA, 25 bp, Homo sapien
agaatatatctgctttctcagccaa

SEQ ID NO: 3938547 - DNA, 25 bp, Homo sapien
ctgtttcttctggtttgatccacag

SEQ ID NO: 3938548 - DNA, 25 bp, Homo sapien
ttgatccacagaatatatctgcttt

SEQ ID NO: 3938549 - DNA, 25 bp, Homo sapien
tctggtttgatccacagaatatatc

SEQ ID NO: 3938550 - DNA, 25 bp, Homo sapien
tttaaagatagaatgaggatcgaaa

SEQ ID NO: 3938551 - DNA, 25 bp, Homo sapien
gaatgaggatcgaaatccaaagtga

SEQ ID NO: 3938552 - DNA, 25 bp, Homo sapien
gatagaatgaggatcgaaatccaaa

SEQ ID NO: 3938553 - DNA, 25 bp, Homo sapien
atgaggatcgaaatccaaagtgatc

SEQ ID NO: 3938554 - DNA, 25 bp, Homo sapien
tggcagagatcatctctgaggctgt

SEQ ID NO: 3938555 - DNA, 25 bp, Homo sapien
gaggtccaaatgccccatggcagag

SEQ ID NO: 3938556 - DNA, 25 bp, Homo sapien
gagatcatctctgaggctgtacttg

SEQ ID NO: 3938557 - DNA, 25 bp, Homo sapien
ccaaatgccccatggcagagatcat

SEQ ID NO: 3938558 - DNA, 25 bp, Homo sapien
acaggacgggcttggcagaatcagc

SEQ ID NO: 3938559 - DNA, 25 bp, Homo sapien
ccaaaaccacaggacgggcttggca

SEQ ID NO: 3938560 - DNA, 25 bp, Homo sapien
agctgaatttgactctagtctgaca

SEQ ID NO: 3938561 - DNA, 25 bp, Homo sapien
cagaatcagccaggaaagacccagc

SEQ ID NO: 3938562 - DNA, 25 bp, Homo sapien
taactatgacactcttcatgtagcc

SEQ ID NO: 3938563 - DNA, 25 bp, Homo sapien
ccttcaggaatggtcatggaggaag

SEQ ID NO: 3938564 - DNA, 25 bp, Homo sapien
atgaccagataatctcaatacaaaa

SEQ ID NO: 3938565 - DNA, 25 bp, Homo sapien
tgccaaaggcccaatataggtgttg

SEQ ID NO: 3938566 - DNA, 25 bp, Homo sapien
gatccccagtatagggtgatgtccc

SEQ ID NO: 3938567 - DNA, 25 bp, Homo sapien
tacactggagatccccagtataggg

SEQ ID NO: 3938568 - DNA, 25 bp, Homo sapien
ccagtatagggtgatgtcccagtga

SEQ ID NO: 3938569 - DNA, 25 bp, Homo sapien
tggagatccccagtatagggtgatg

SEQ ID NO: 3938570 - DNA, 25 bp, Homo sapien
cagggacataggtcacataagagat

SEQ ID NO: 3938571 - DNA, 25 bp, Homo sapien
tgccccaataaggagggctggtctc

SEQ ID NO: 3938572 - DNA, 25 bp, Homo sapien
cccttcaggtatgtccagggacata

SEQ ID NO: 3938573 - DNA, 25 bp, Homo sapien
taagagatttatagcgtacagtgat

SEQ ID NO: 3938574 - DNA, 25 bp, Homo sapien
ttgatcaggggcaagatggtcttca

SEQ ID NO: 3938575 - DNA, 25 bp, Homo sapien
ctgctcactttaaagttgatcaggg

SEQ ID NO: 3938576 - DNA, 25 bp, Homo sapien
ggtcttcaactctcggagactgatg

SEQ ID NO: 3938577 - DNA, 25 bp, Homo sapien
ctttaaggaacttggcactgctcac

SEQ ID NO: 3938578 - DNA, 25 bp, Homo sapien
agttttttatagaagagatggaact

SEQ ID NO: 3938579 - DNA, 25 bp, Homo sapien
taagttttttatagaagagatggaa

SEQ ID NO: 3938580 - DNA, 25 bp, Homo sapien
gttttttatagaagagatggaactg

SEQ ID NO: 3938581 - DNA, 25 bp, Homo sapien
tcttgccagccactgacaataagaa

SEQ ID NO: 3938582 - DNA, 25 bp, Homo sapien
gtcacagaacgctcatcactcactt

SEQ ID NO: 3938583 - DNA, 25 bp, Homo sapien
caataagaataaactgcaagatctc

SEQ ID NO: 3938584 - DNA, 25 bp, Homo sapien
tccacaaacatcgtcacagaacgct

SEQ ID NO: 3938585 - DNA, 25 bp, Homo sapien
gtggtacttaggctgtagaaaccat

SEQ ID NO: 3938586 - DNA, 25 bp, Homo sapien
tcagtggtacttaggctgtagaaac

SEQ ID NO: 3938587 - DNA, 25 bp, Homo sapien
cagtggtacttaggctgtagaaacc

SEQ ID NO: 3938588 - DNA, 25 bp, Homo sapien
tggtacttaggctgtagaaaccatt

SEQ ID NO: 3938589 - DNA, 25 bp, Homo sapien
gtgccagtttttctacagagtagag

SEQ ID NO: 3938590 - DNA, 25 bp, Homo sapien
tgtgccagtttttctacagagtaga

SEQ ID NO: 3938591 - DNA, 25 bp, Homo sapien
gccagtttttctacagagtagagtc

SEQ ID NO: 3938592 - DNA, 25 bp, Homo sapien
ttgtgccagtttttctacagagtag

SEQ ID NO: 3938593 - DNA, 25 bp, Homo sapien
cccaggatgaacacggacgaatcct

SEQ ID NO: 3938594 - DNA, 25 bp, Homo sapien
cacggacgaatcctttttgaattca

SEQ ID NO: 3938595 - DNA, 25 bp, Homo sapien
aggatgaacacggacgaatcctttt

SEQ ID NO: 3938596 - DNA, 25 bp, Homo sapien
tgaacacggacgaatcctttttgaa

SEQ ID NO: 3938597 - DNA, 25 bp, Homo sapien
gggaggctccgtctcgaatatacat

SEQ ID NO: 3938598 - DNA, 25 bp, Homo sapien
gctccgtctcgaatatacatactat

SEQ ID NO: 3938599 - DNA, 25 bp, Homo sapien
ggctccgtctcgaatatacatacta

SEQ ID NO: 3938600 - DNA, 25 bp, Homo sapien
gaggctccgtctcgaatatacatac

SEQ ID NO: 3938601 - DNA, 25 bp, Homo sapien
caagcagaggttaggtatcaggtag

SEQ ID NO: 3938602 - DNA, 25 bp, Homo sapien
aaagacacttccctggaccaagcag

SEQ ID NO: 3938603 - DNA, 25 bp, Homo sapien
gaagccacgatccagagttccctgg

SEQ ID NO: 3938604 - DNA, 25 bp, Homo sapien
gttccctgggtcattgagtgctctg

SEQ ID NO: 3938605 - DNA, 25 bp, Homo sapien
cctctggaagtcatgcaggtaaaca

SEQ ID NO: 3938606 - DNA, 25 bp, Homo sapien
cagcagaggcatccggcctgtcagt

SEQ ID NO: 3938607 - DNA, 25 bp, Homo sapien
aacctctggaagtcatgcaggtaaa

SEQ ID NO: 3938608 - DNA, 25 bp, Homo sapien
taaacagcagaggcatccggcctgt

SEQ ID NO: 3938609 - DNA, 25 bp, Homo sapien
gcagaagggtgagactagtccccag

SEQ ID NO: 3938610 - DNA, 25 bp, Homo sapien
gggtgagactagtccccagcagcat

SEQ ID NO: 3938611 - DNA, 25 bp, Homo sapien
ggcggcagaagggtgagactagtcc

SEQ ID NO: 3938612 - DNA, 25 bp, Homo sapien
aagggtgagactagtccccagcagc

SEQ ID NO: 3938613 - DNA, 25 bp, Homo sapien
aggcacccaccacaatgcctgccta

SEQ ID NO: 3938614 - DNA, 25 bp, Homo sapien
gcacccaccacaatgcctgcctaat

SEQ ID NO: 3938615 - DNA, 25 bp, Homo sapien
ggcacccaccacaatgcctgcctaa

SEQ ID NO: 3938616 - DNA, 25 bp, Homo sapien
caggcacccaccacaatgcctgcct

SEQ ID NO: 3938617 - DNA, 25 bp, Homo sapien
gctcagcagtttcacgcatggtgtc

SEQ ID NO: 3938618 - DNA, 25 bp, Homo sapien
tgaactttgtcatccgctcacggac

SEQ ID NO: 3938619 - DNA, 25 bp, Homo sapien
tccacaaacaagaaaggctcagcag

SEQ ID NO: 3938620 - DNA, 25 bp, Homo sapien
tcacgcatggtgtcatcaatgaact

SEQ ID NO: 3938621 - DNA, 25 bp, Homo sapien
tgttatgtgacgaggagatccagta

SEQ ID NO: 3938622 - DNA, 25 bp, Homo sapien
cagatgctgttttctcgtgaaaaca

SEQ ID NO: 3938623 - DNA, 25 bp, Homo sapien
ctcgtgaaaacaggtacgtgaggaa

SEQ ID NO: 3938624 - DNA, 25 bp, Homo sapien
gcgtcatacttctcatcccagatgc

SEQ ID NO: 3938625 - DNA, 25 bp, Homo sapien
gagttcttccatgtagaaagactca

SEQ ID NO: 3938626 - DNA, 25 bp, Homo sapien
tacacaatcccacggtcacactggg

SEQ ID NO: 3938627 - DNA, 25 bp, Homo sapien
ctgaagtcaggccacaatcgcagga

SEQ ID NO: 3938628 - DNA, 25 bp, Homo sapien
gctaaggcctaggacagaaatacac

SEQ ID NO: 3938629 - DNA, 25 bp, Homo sapien
gcgcaggcagcggatgtaagcttct

SEQ ID NO: 3938630 - DNA, 25 bp, Homo sapien
gctccgcagctggtcacctgtaagg

SEQ ID NO: 3938631 - DNA, 25 bp, Homo sapien
agcccatgcgcaggcagcggatgta

SEQ ID NO: 3938632 - DNA, 25 bp, Homo sapien
taagcttctggggacgactcgctcc

SEQ ID NO: 3938633 - DNA, 25 bp, Homo sapien
gtagatgaccggcttcccatcgggc

SEQ ID NO: 3938634 - DNA, 25 bp, Homo sapien
tagtccgcgtccagccatggtagat

SEQ ID NO: 3938635 - DNA, 25 bp, Homo sapien
tctttgatggcctgcacgacgtcgt

SEQ ID NO: 3938636 - DNA, 25 bp, Homo sapien
caaacttgatcttggtagtccgcgt

SEQ ID NO: 3938637 - DNA, 25 bp, Homo sapien
ttggcacttagaagggctaggaccc

SEQ ID NO: 3938638 - DNA, 25 bp, Homo sapien
tcaccaagtgcgaaaagacgtccat

SEQ ID NO: 3938639 - DNA, 25 bp, Homo sapien
tataggtgttagatgattccagccc

SEQ ID NO: 3938640 - DNA, 25 bp, Homo sapien
aatcatagcctcatcactcctggga

SEQ ID NO: 3938641 - DNA, 25 bp, Homo sapien
ctcgatggacaggatcactgggaag

SEQ ID NO: 3938642 - DNA, 25 bp, Homo sapien
agcaggtcgccaaatacttccttga

SEQ ID NO: 3938643 - DNA, 25 bp, Homo sapien
atgatgatcttctcccgcagctggc

SEQ ID NO: 3938644 - DNA, 25 bp, Homo sapien
gcactggcctccgtgggcttcgtca

SEQ ID NO: 3938645 - DNA, 25 bp, Homo sapien
ccttggccatgtgacgctgttgctc

SEQ ID NO: 3938646 - DNA, 25 bp, Homo sapien
tttgccctggacacccttggacttc

SEQ ID NO: 3938647 - DNA, 25 bp, Homo sapien
tgctctgagctggaactcggatgtg

SEQ ID NO: 3938648 - DNA, 25 bp, Homo sapien
cagaaaccatttgccctggacaccc

SEQ ID NO: 3938649 - DNA, 25 bp, Homo sapien
ccttggacttcccgtgctctgagct

SEQ ID NO: 3938650 - DNA, 25 bp, Homo sapien
tggtgtttctctgttgacgggtttg

SEQ ID NO: 3938651 - DNA, 25 bp, Homo sapien
tttctctgttgacgggtttgtctcc

SEQ ID NO: 3938652 - DNA, 25 bp, Homo sapien
atcccctcctctggttgtgcttggc

SEQ ID NO: 3938653 - DNA, 25 bp, Homo sapien
gtgtttctctgttgacgggtttgtc

SEQ ID NO: 3938654 - DNA, 25 bp, Homo sapien
acagtcttggccaaacactccccgt

SEQ ID NO: 3938655 - DNA, 25 bp, Homo sapien
cactccccgtgcactgatgctctta

SEQ ID NO: 3938656 - DNA, 25 bp, Homo sapien
caaacactccccgtgcactgatgct

SEQ ID NO: 3938657 - DNA, 25 bp, Homo sapien
ttggccaaacactccccgtgcactg

SEQ ID NO: 3938658 - DNA, 25 bp, Homo sapien
cctgttgcttgtgttcgtccttctt

SEQ ID NO: 3938659 - DNA, 25 bp, Homo sapien
catgttgacatccacatcgcctcgg

SEQ ID NO: 3938660 - DNA, 25 bp, Homo sapien
acatgtacagctccccctgttgctt

SEQ ID NO: 3938661 - DNA, 25 bp, Homo sapien
ttgacatccacatcgcctcgggggc

SEQ ID NO: 3938662 - DNA, 25 bp, Homo sapien
tcgcgcctggcccaacttaattctt

SEQ ID NO: 3938663 - DNA, 25 bp, Homo sapien
gcgaaacactatctctactaaggct

SEQ ID NO: 3938664 - DNA, 25 bp, Homo sapien
aatattgccatttttggctgggtac

SEQ ID NO: 3938665 - DNA, 25 bp, Homo sapien
caatggagcaagactatctaaaata

SEQ ID NO: 3938666 - DNA, 25 bp, Homo sapien
agcttggcatcggcaatggcgcagt

SEQ ID NO: 3938667 - DNA, 25 bp, Homo sapien
ctcctccatagtctgttcaatgtca

SEQ ID NO: 3938668 - DNA, 25 bp, Homo sapien
ttggcatcggcaatggcgcagtagt

SEQ ID NO: 3938669 - DNA, 25 bp, Homo sapien
tggcgcagtagtgccgagtccattt

SEQ ID NO: 3938670 - DNA, 25 bp, Homo sapien
tagtcattggggaaggtctcgctct

SEQ ID NO: 3938671 - DNA, 25 bp, Homo sapien
cccgtctccatgcagtattcctgca

SEQ ID NO: 3938672 - DNA, 25 bp, Homo sapien
cctgcagcaacttctcggcactcgt

SEQ ID NO: 3938673 - DNA, 25 bp, Homo sapien
ctcgctctcccgaaccaggaaggtg

SEQ ID NO: 3938674 - DNA, 25 bp, Homo sapien
gcgcagcgcaggtgcgtctcgcggt

SEQ ID NO: 3938675 - DNA, 25 bp, Homo sapien
gtccgtgagccgcagctcgaactcg

SEQ ID NO: 3938676 - DNA, 25 bp, Homo sapien
ggatgagggcatagatgctgctgaa

SEQ ID NO: 3938677 - DNA, 25 bp, Homo sapien
cctccatggtggagcggatccggca

SEQ ID NO: 3938678 - DNA, 25 bp, Homo sapien
gcttccggatcaggaaggccccgtc

SEQ ID NO: 3938679 - DNA, 25 bp, Homo sapien
tcccctctcgcttccggatcaggaa

SEQ ID NO: 3938680 - DNA, 25 bp, Homo sapien
tctccgcggctcaggctgtcatagt

SEQ ID NO: 3938681 - DNA, 25 bp, Homo sapien
atggcataggagtcgctcccctctc

SEQ ID NO: 3938682 - DNA, 25 bp, Homo sapien
taagcgatttcgtcaaaaagtcctg

SEQ ID NO: 3938683 - DNA, 25 bp, Homo sapien
gatggacacaccagctagaaaactg

SEQ ID NO: 3938684 - DNA, 25 bp, Homo sapien
ttctaccaggacctctctactgaga

SEQ ID NO: 3938685 - DNA, 25 bp, Homo sapien
ttttaaatgtctggatggacacacc

SEQ ID NO: 3938686 - DNA, 25 bp, Homo sapien
aaagtgccggccgtcccggttgatg

SEQ ID NO: 3938687 - DNA, 25 bp, Homo sapien
tagtaactgacgagctccaccagac

SEQ ID NO: 3938688 - DNA, 25 bp, Homo sapien
gactctcaaaataggcggaggtccc

SEQ ID NO: 3938689 - DNA, 25 bp, Homo sapien
gcagtctcatctttcggtagagtga

SEQ ID NO: 3938690 - DNA, 25 bp, Homo sapien
cgtagagggagtttatatctctttc

SEQ ID NO: 3938691 - DNA, 25 bp, Homo sapien
cacatacattctgctgacgtcgtag

SEQ ID NO: 3938692 - DNA, 25 bp, Homo sapien
acatacattctgctgacgtcgtaga

SEQ ID NO: 3938693 - DNA, 25 bp, Homo sapien
tccacatacattctgctgacgtcgt

SEQ ID NO: 3938694 - DNA, 25 bp, Homo sapien
aacaagaaggaaaaggtcaggccag

SEQ ID NO: 3938695 - DNA, 25 bp, Homo sapien
ggaaaaggtcaggccagggacagga

SEQ ID NO: 3938696 - DNA, 25 bp, Homo sapien
caagaaggaaaaggtcaggccaggg

SEQ ID NO: 3938697 - DNA, 25 bp, Homo sapien
aaggaaaaggtcaggccagggacag

SEQ ID NO: 3938698 - DNA, 25 bp, Homo sapien
tcatcgcttcgcttggctttgtagt

SEQ ID NO: 3938699 - DNA, 25 bp, Homo sapien
cagctcatcgcttcgcttggctttg

SEQ ID NO: 3938700 - DNA, 25 bp, Homo sapien
agaagctcagctcatcgcttcgctt

SEQ ID NO: 3938701 - DNA, 25 bp, Homo sapien
tgtggatgagggcaccacggcagaa

SEQ ID NO: 3938702 - DNA, 25 bp, Homo sapien
cacttcgagtggagggacttcggca

SEQ ID NO: 3938703 - DNA, 25 bp, Homo sapien
agacctcaactctgtgccacttcga

SEQ ID NO: 3938704 - DNA, 25 bp, Homo sapien
ccagtgcgcaccaggatgttgacca

SEQ ID NO: 3938705 - DNA, 25 bp, Homo sapien
ccagtgagggaacgccagtgtgcct

SEQ ID NO: 3938706 - DNA, 25 bp, Homo sapien
tgagatgtcctcgacgtagttggat

SEQ ID NO: 3938707 - DNA, 25 bp, Homo sapien
tttctagctcctcgaagtctgcagt

SEQ ID NO: 3938708 - DNA, 25 bp, Homo sapien
cgaagtctgcagttgagatgtcctc

SEQ ID NO: 3938709 - DNA, 25 bp, Homo sapien
acgtagttggatgggaagtactgct

SEQ ID NO: 3938710 - DNA, 25 bp, Homo sapien
gaccctaagggattgtcttcaataa

SEQ ID NO: 3938711 - DNA, 25 bp, Homo sapien
gagaccctaagggattgtcttcaat

SEQ ID NO: 3938712 - DNA, 25 bp, Homo sapien
taggtattgaggtccaatattcctc

SEQ ID NO: 3938713 - DNA, 25 bp, Homo sapien
cgacgttataggtattgaggtccaa

SEQ ID NO: 3938714 - DNA, 25 bp, Homo sapien
cagggaaggagctggcattcaagac

SEQ ID NO: 3938715 - DNA, 25 bp, Homo sapien
taatagcagacatagcatcatactc

SEQ ID NO: 3938716 - DNA, 25 bp, Homo sapien
tagtagagattaatagcagacatag

SEQ ID NO: 3938717 - DNA, 25 bp, Homo sapien
caggctaagatgatgtgtgcacgta

SEQ ID NO: 3938718 - DNA, 25 bp, Homo sapien
aggctgacagctcagctttccttcg

SEQ ID NO: 3938719 - DNA, 25 bp, Homo sapien
cttcgcaacgcatgggaaacacaga

SEQ ID NO: 3938720 - DNA, 25 bp, Homo sapien
tccttcgcaacgcatgggaaacaca

SEQ ID NO: 3938721 - DNA, 25 bp, Homo sapien
gctttccttcgcaacgcatgggaaa

SEQ ID NO: 3938722 - DNA, 25 bp, Homo sapien
tcacctgagtcctaggggagcatgc

SEQ ID NO: 3938723 - DNA, 25 bp, Homo sapien
cattggcaatagaagcaggaagttc

SEQ ID NO: 3938724 - DNA, 25 bp, Homo sapien
agagtcccttcacatgggagctgca

SEQ ID NO: 3938725 - DNA, 25 bp, Homo sapien
aaggaggcccgctacagagtccctt

SEQ ID NO: 3938726 - DNA, 25 bp, Homo sapien
cagcacatgtggtggtcggtcactt

SEQ ID NO: 3938727 - DNA, 25 bp, Homo sapien
gatgatacaaagagcaccagaagtg

SEQ ID NO: 3938728 - DNA, 25 bp, Homo sapien
gctaggcccattttgcaggaggcaa

SEQ ID NO: 3938729 - DNA, 25 bp, Homo sapien
tctggtaatcggagcaaagaatccc

SEQ ID NO: 3938730 - DNA, 25 bp, Homo sapien
ttttttgagacagggtggcactctg

SEQ ID NO: 3938731 - DNA, 25 bp, Homo sapien
tacatataatcttttacatataaag

SEQ ID NO: 3938732 - DNA, 25 bp, Homo sapien
ttgagacagggtggcactctgtcac

SEQ ID NO: 3938733 - DNA, 25 bp, Homo sapien
ttttgagacagggtggcactctgtc

SEQ ID NO: 3938734 - DNA, 25 bp, Homo sapien
tagggtcctccgaaaagatgtgtca

SEQ ID NO: 3938735 - DNA, 25 bp, Homo sapien
ccaatcagcctattagagggccaca

SEQ ID NO: 3938736 - DNA, 25 bp, Homo sapien
tcacagatgactactcaagggatgc

SEQ ID NO: 3938737 - DNA, 25 bp, Homo sapien
tatgaccacggttagcactgatggg

SEQ ID NO: 3938738 - DNA, 25 bp, Homo sapien
ccaggtgatctctcggatgctctga

SEQ ID NO: 3938739 - DNA, 25 bp, Homo sapien
accggaggatcgccctgctgcttgg

SEQ ID NO: 3938740 - DNA, 25 bp, Homo sapien
ggtgatctctcggatgctctgaaac

SEQ ID NO: 3938741 - DNA, 25 bp, Homo sapien
cctgtctgtggcaaactccaccgga

SEQ ID NO: 3938742 - DNA, 25 bp, Homo sapien
gcgcagctggctacaagctcatggt

SEQ ID NO: 3938743 - DNA, 25 bp, Homo sapien
gagatggtttcactgggaaagccag

SEQ ID NO: 3938744 - DNA, 25 bp, Homo sapien
gagtcaaggatcctctcgtgaccag

SEQ ID NO: 3938745 - DNA, 25 bp, Homo sapien
gactggccaagatgtgaggccctcc

SEQ ID NO: 3938746 - DNA, 25 bp, Homo sapien
gagctggagtgcactatttggagat

SEQ ID NO: 3938747 - DNA, 25 bp, Homo sapien
tgtgcctcagagctgtactgtggca

SEQ ID NO: 3938748 - DNA, 25 bp, Homo sapien
tttccacattaagcaaagtagagag

SEQ ID NO: 3938749 - DNA, 25 bp, Homo sapien
cagagccttctagggaaataacact

SEQ ID NO: 3938750 - DNA, 25 bp, Homo sapien
tttcttgcacactcggatctttaat

SEQ ID NO: 3938751 - DNA, 25 bp, Homo sapien
tgcacactcggatctttaatatggt

SEQ ID NO: 3938752 - DNA, 25 bp, Homo sapien
cggatctttaatatggttgaatgtt

SEQ ID NO: 3938753 - DNA, 25 bp, Homo sapien
cactcggatctttaatatggttgaa

SEQ ID NO: 3938754 - DNA, 25 bp, Homo sapien
gtttggagttcactgtctttagtgc

SEQ ID NO: 3938755 - DNA, 25 bp, Homo sapien
ttggagttcactgtctttagtgccc

SEQ ID NO: 3938756 - DNA, 25 bp, Homo sapien
agttcactgtctttagtgcccgccc

SEQ ID NO: 3938757 - DNA, 25 bp, Homo sapien
ggagttcactgtctttagtgcccgc

SEQ ID NO: 3938758 - DNA, 25 bp, Homo sapien
gctggttggtttgcagtagacaacc

SEQ ID NO: 3938759 - DNA, 25 bp, Homo sapien
tggcgatggactggttcttctccca

SEQ ID NO: 3938760 - DNA, 25 bp, Homo sapien
ccaggtcagagagctcgatggcgat

SEQ ID NO: 3938761 - DNA, 25 bp, Homo sapien
tttgcagtagacaaccaggtcagag

SEQ ID NO: 3938762 - DNA, 25 bp, Homo sapien
gggcatgttcttgggaaagatgtta

SEQ ID NO: 3938763 - DNA, 25 bp, Homo sapien
gggccatctactgggagtagttaag

SEQ ID NO: 3938764 - DNA, 25 bp, Homo sapien
taatacaccaaaaaagcttctgcca

SEQ ID NO: 3938765 - DNA, 25 bp, Homo sapien
tcattggagttatagggcatgttct

SEQ ID NO: 3938766 - DNA, 25 bp, Homo sapien
cactttatatggcagaacagacttt

SEQ ID NO: 3938767 - DNA, 25 bp, Homo sapien
ggcaccctgatgttgacctcatgat

SEQ ID NO: 3938768 - DNA, 25 bp, Homo sapien
attaaggagcttgaaatgggaggct

SEQ ID NO: 3938769 - DNA, 25 bp, Homo sapien
ggtggacctaatgcatcacaagggt

SEQ ID NO: 3938770 - DNA, 25 bp, Homo sapien
aaggagcggatttctcggaagtcag

SEQ ID NO: 3938771 - DNA, 25 bp, Homo sapien
cggatttctcggaagtcaggatttt

SEQ ID NO: 3938772 - DNA, 25 bp, Homo sapien
cacaaaggagcggatttctcggaag

SEQ ID NO: 3938773 - DNA, 25 bp, Homo sapien
ctccacaaaggagcggatttctcgg

SEQ ID NO: 3938774 - DNA, 25 bp, Homo sapien
gcccttttgattgtacttcaggagg

SEQ ID NO: 3938775 - DNA, 25 bp, Homo sapien
tgtccctttgggtagacgcgggtca

SEQ ID NO: 3938776 - DNA, 25 bp, Homo sapien
tacttcaggaggtcgacgggcttct

SEQ ID NO: 3938777 - DNA, 25 bp, Homo sapien
ttgagtgccaccatctgagaaccgc

SEQ ID NO: 3938778 - DNA, 25 bp, Homo sapien
cagggacgggactaccttcagtcgg

SEQ ID NO: 3938779 - DNA, 25 bp, Homo sapien
cttgcagggacgggactaccttcag

SEQ ID NO: 3938780 - DNA, 25 bp, Homo sapien
ttgcagggacgggactaccttcagt

SEQ ID NO: 3938781 - DNA, 25 bp, Homo sapien
tgcagggacgggactaccttcagtc

SEQ ID NO: 3938782 - DNA, 25 bp, Homo sapien
tatcgctgacccaaggtgactcggc

SEQ ID NO: 3938783 - DNA, 25 bp, Homo sapien
tacaatcacgaagcctgcgtaagcc

SEQ ID NO: 3938784 - DNA, 25 bp, Homo sapien
caaagccccgtgatttatgcgatca

SEQ ID NO: 3938785 - DNA, 25 bp, Homo sapien
taaccattactctgctgaaccgtgc

SEQ ID NO: 3938786 - DNA, 25 bp, Homo sapien
gcagctgttcaaataggtatctcac

SEQ ID NO: 3938787 - DNA, 25 bp, Homo sapien
caagtatgtcaccaaatcccgaatc

SEQ ID NO: 3938788 - DNA, 25 bp, Homo sapien
tgtaagtcaggcatgagcacgctgg

SEQ ID NO: 3938789 - DNA, 25 bp, Homo sapien
gaaagtgaacgcctgctgtaagtca

SEQ ID NO: 3938790 - DNA, 25 bp, Homo sapien
gactcgggtggcatcgggtcatatt

SEQ ID NO: 3938791 - DNA, 25 bp, Homo sapien
agaacgtagcccgtgcgcccattga

SEQ ID NO: 3938792 - DNA, 25 bp, Homo sapien
cccgtgcgcccattgagagaaaaca

SEQ ID NO: 3938793 - DNA, 25 bp, Homo sapien
gaaaacaatgcgtgattcatctgca

SEQ ID NO: 3938794 - DNA, 25 bp, Homo sapien
aatgcacacatccatgcccaagcag

SEQ ID NO: 3938795 - DNA, 25 bp, Homo sapien
caagcaggtgcctctgatcaaggca

SEQ ID NO: 3938796 - DNA, 25 bp, Homo sapien
atgaatgcacacatccatgcccaag

SEQ ID NO: 3938797 - DNA, 25 bp, Homo sapien
tgagctcatgaatgcacacatccat

SEQ ID NO: 3938798 - DNA, 25 bp, Homo sapien
ttcactggaaaagccggagcaacct

SEQ ID NO: 3938799 - DNA, 25 bp, Homo sapien
acaggcagcctagcgtggattgcag

SEQ ID NO: 3938800 - DNA, 25 bp, Homo sapien
ctgggacaccaaagggaagcattgg

SEQ ID NO: 3938801 - DNA, 25 bp, Homo sapien
gcagctgggttctagagtgacactg

SEQ ID NO: 3938802 - DNA, 25 bp, Homo sapien
tctacaaagggacaggcaatacttc

SEQ ID NO: 3938803 - DNA, 25 bp, Homo sapien
aagggacaggcaatacttcgtccaa

SEQ ID NO: 3938804 - DNA, 25 bp, Homo sapien
tgtcatactcggctccacagatctc

SEQ ID NO: 3938805 - DNA, 25 bp, Homo sapien
tcgtcttgaacttgttgttgtcata

SEQ ID NO: 3938806 - DNA, 25 bp, Homo sapien
cccagatagggctgaggccattatc

SEQ ID NO: 3938807 - DNA, 25 bp, Homo sapien
gcccagatagggctgaggccattat

SEQ ID NO: 3938808 - DNA, 25 bp, Homo sapien
ccagatagggctgaggccattatca

SEQ ID NO: 3938809 - DNA, 25 bp, Homo sapien
cagatagggctgaggccattatcat

SEQ ID NO: 3938810 - DNA, 25 bp, Homo sapien
tttaatggggtaagtggcatgagca

SEQ ID NO: 3938811 - DNA, 25 bp, Homo sapien
cagaaatgccaggtttgggtcataa

SEQ ID NO: 3938812 - DNA, 25 bp, Homo sapien
caagaaagttgggatcgctgaacat

SEQ ID NO: 3938813 - DNA, 25 bp, Homo sapien
tcataaaccacaaagcgcagaaatg

SEQ ID NO: 3938814 - DNA, 25 bp, Homo sapien
cagtcatctgggattcagcagggtt

SEQ ID NO: 3938815 - DNA, 25 bp, Homo sapien
tcttaagagctggtcgtatgaccca

SEQ ID NO: 3938816 - DNA, 25 bp, Homo sapien
tatctcagctgtgtaggaagggctc

SEQ ID NO: 3938817 - DNA, 25 bp, Homo sapien
ctagaagcagcagggtcccaaatcc

SEQ ID NO: 3938818 - DNA, 25 bp, Homo sapien
caatgcatctggctttgagcaccca

SEQ ID NO: 3938819 - DNA, 25 bp, Homo sapien
cagctctggtcctacaggtgtgtga

SEQ ID NO: 3938820 - DNA, 25 bp, Homo sapien
aagtcatagtctctcggcctcaaag

SEQ ID NO: 3938821 - DNA, 25 bp, Homo sapien
tcctgcgctccaactggtttaaaag

SEQ ID NO: 3938822 - DNA, 25 bp, Homo sapien
aggactggccgcatctcacagaaaa

SEQ ID NO: 3938823 - DNA, 25 bp, Homo sapien
gagggaagccagctctatgtcctcg

SEQ ID NO: 3938824 - DNA, 25 bp, Homo sapien
caggactggccgcatctcacagaaa

SEQ ID NO: 3938825 - DNA, 25 bp, Homo sapien
tctatgtcctcgctgtacccattct

SEQ ID NO: 3938826 - DNA, 25 bp, Homo sapien
ccttaactggtgtttctccactcac

SEQ ID NO: 3938827 - DNA, 25 bp, Homo sapien
cagcaggcatagctcagggaaccct

SEQ ID NO: 3938828 - DNA, 25 bp, Homo sapien
agctcagggaacccttaactggtgt

SEQ ID NO: 3938829 - DNA, 25 bp, Homo sapien
cccttaactggtgtttctccactca

SEQ ID NO: 3938830 - DNA, 25 bp, Homo sapien
tttaaggcaagcactttcctcttct

SEQ ID NO: 3938831 - DNA, 25 bp, Homo sapien
taaagttttctaacgaatgcaatca

SEQ ID NO: 3938832 - DNA, 25 bp, Homo sapien
tacttagtagtacatacgtcttcat

SEQ ID NO: 3938833 - DNA, 25 bp, Homo sapien
gaatctagtccagttacagccaatg

SEQ ID NO: 3938834 - DNA, 25 bp, Homo sapien
tgtgttatggtttttgtcagtatca

SEQ ID NO: 3938835 - DNA, 25 bp, Homo sapien
tcagtatcacaaatgggatgtccca

SEQ ID NO: 3938836 - DNA, 25 bp, Homo sapien
ttcttatataagttctgtaccttta

SEQ ID NO: 3938837 - DNA, 25 bp, Homo sapien
taaattactcctaaatgtgttatgg

SEQ ID NO: 3938838 - DNA, 25 bp, Homo sapien
cctaggcccctttgatgtgcttcca

SEQ ID NO: 3938839 - DNA, 25 bp, Homo sapien
ggaaatcaaccacttgtctaaggag

SEQ ID NO: 3938840 - DNA, 25 bp, Homo sapien
gagcgctccctggttggttcctagg

SEQ ID NO: 3938841 - DNA, 25 bp, Homo sapien
taagttctaggcactcagcagagtg

SEQ ID NO: 3938842 - DNA, 25 bp, Homo sapien
cagctgcacgcttaaagtggaaccc

SEQ ID NO: 3938843 - DNA, 25 bp, Homo sapien
taagcagctgcacgcttaaagtgga

SEQ ID NO: 3938844 - DNA, 25 bp, Homo sapien
tgtctaagcagctgcacgcttaaag

SEQ ID NO: 3938845 - DNA, 25 bp, Homo sapien
tgcacgcttaaagtggaacccagca

SEQ ID NO: 3938846 - DNA, 25 bp, Homo sapien
cattgcgcaagttctggtgtgtgtc

SEQ ID NO: 3938847 - DNA, 25 bp, Homo sapien
taaccagggcatcccggttggcatt

SEQ ID NO: 3938848 - DNA, 25 bp, Homo sapien
taacactgaactctttaaccagggc

SEQ ID NO: 3938849 - DNA, 25 bp, Homo sapien
ctggcgacaggaggagtaaagttcc

SEQ ID NO: 3938850 - DNA, 25 bp, Homo sapien
ctatgagtaaaacttgctgttgctg

SEQ ID NO: 3938851 - DNA, 25 bp, Homo sapien
aacttgctgttgctgactctcttct

SEQ ID NO: 3938852 - DNA, 25 bp, Homo sapien
acttgctgttgctgactctcttctc

SEQ ID NO: 3938853 - DNA, 25 bp, Homo sapien
agtaaaacttgctgttgctgactct

SEQ ID NO: 3938854 - DNA, 25 bp, Homo sapien
gattagcgtcttcccagagtgtgaa

SEQ ID NO: 3938855 - DNA, 25 bp, Homo sapien
gccagttgggtcttaagaaatgtcc

SEQ ID NO: 3938856 - DNA, 25 bp, Homo sapien
agagtgtgaatagggcacgttctcc

SEQ ID NO: 3938857 - DNA, 25 bp, Homo sapien
ggaaattaccccaactcatgccagt

SEQ ID NO: 3938858 - DNA, 25 bp, Homo sapien
gacatcagttacctggatcattaga

SEQ ID NO: 3938859 - DNA, 25 bp, Homo sapien
cctccatggacatcagttacctgga

SEQ ID NO: 3938860 - DNA, 25 bp, Homo sapien
ggtcgtgcaacagaaggcttaattg

SEQ ID NO: 3938861 - DNA, 25 bp, Homo sapien
tgttcactgcacaggtcgtgcaaca

SEQ ID NO: 3938862 - DNA, 25 bp, Homo sapien
gaagttgtgactctaccaaccacct

SEQ ID NO: 3938863 - DNA, 25 bp, Homo sapien
tcatgaactaggtagatctgcccca

SEQ ID NO: 3938864 - DNA, 25 bp, Homo sapien
ggccagccgcacatactgtcatgaa

SEQ ID NO: 3938865 - DNA, 25 bp, Homo sapien
gatgcagaggtgtaaagccctggcc

SEQ ID NO: 3938866 - DNA, 25 bp, Homo sapien
tggattccggttgtagcaccaggag

SEQ ID NO: 3938867 - DNA, 25 bp, Homo sapien
cacgcatggattttacacagcagca

SEQ ID NO: 3938868 - DNA, 25 bp, Homo sapien
taccatgtgtgcctttcctgagaga

SEQ ID NO: 3938869 - DNA, 25 bp, Homo sapien
tgtagcatcacatagactctgggaa

SEQ ID NO: 3938870 - DNA, 25 bp, Homo sapien
agcagtaggtcttcaaatgtgttcc

SEQ ID NO: 3938871 - DNA, 25 bp, Homo sapien
ggctgccttcttaatagagcagtag

SEQ ID NO: 3938872 - DNA, 25 bp, Homo sapien
tggcaaaaagattctgagatcgaat

SEQ ID NO: 3938873 - DNA, 25 bp, Homo sapien
ctatagataagtcccatgagacact

SEQ ID NO: 3938874 - DNA, 25 bp, Homo sapien
ctcttcgacggagcgcgcagcttcg

SEQ ID NO: 3938875 - DNA, 25 bp, Homo sapien
tcgacggagcgcgcagcttcgggag

SEQ ID NO: 3938876 - DNA, 25 bp, Homo sapien
gtcgtcctcttcgacggagcgcgca

SEQ ID NO: 3938877 - DNA, 25 bp, Homo sapien
tcttcgacggagcgcgcagcttcgg

SEQ ID NO: 3938878 - DNA, 25 bp, Homo sapien
tcatcacttagtggccctagatcag

SEQ ID NO: 3938879 - DNA, 25 bp, Homo sapien
aaaccagggacaaattattgagtat

SEQ ID NO: 3938880 - DNA, 25 bp, Homo sapien
tgtcacacaggttgaaggttaagct

SEQ ID NO: 3938881 - DNA, 25 bp, Homo sapien
acagccaacatctgtgtgactcatt

SEQ ID NO: 3938882 - DNA, 25 bp, Homo sapien
tattaatcgtacaaacttgagtttc

SEQ ID NO: 3938883 - DNA, 25 bp, Homo sapien
caagtattaatcgtacaaacttgag

SEQ ID NO: 3938884 - DNA, 25 bp, Homo sapien
cagagtgagtttttgctgaagataa

SEQ ID NO: 3938885 - DNA, 25 bp, Homo sapien
caacacagagtgagtttttgctgaa

SEQ ID NO: 3938886 - DNA, 25 bp, Homo sapien
ctgattatgcttcatgtacctcccc

SEQ ID NO: 3938887 - DNA, 25 bp, Homo sapien
tctgattatgcttcatgtacctccc

SEQ ID NO: 3938888 - DNA, 25 bp, Homo sapien
ctctgattatgcttcatgtacctcc

SEQ ID NO: 3938889 - DNA, 25 bp, Homo sapien
gcaaaatagatttactggtggaaga

SEQ ID NO: 3938890 - DNA, 25 bp, Homo sapien
cacgcggtcgtatgaaagcaaacac

SEQ ID NO: 3938891 - DNA, 25 bp, Homo sapien
tctgggtatgtagcagtattctacc

SEQ ID NO: 3938892 - DNA, 25 bp, Homo sapien
aagcaaacactggttcggtggttca

SEQ ID NO: 3938893 - DNA, 25 bp, Homo sapien
aaggtaatgcccaaactgctcccac

SEQ ID NO: 3938894 - DNA, 25 bp, Homo sapien
tcacaggactcaggtcagtaccaag

SEQ ID NO: 3938895 - DNA, 25 bp, Homo sapien
gatgcacctgggttattggtacaga

SEQ ID NO: 3938896 - DNA, 25 bp, Homo sapien
tggtggaagagccaagtctaatgcc

SEQ ID NO: 3938897 - DNA, 25 bp, Homo sapien
gagaagatgggccacctccaattca

SEQ ID NO: 3938898 - DNA, 25 bp, Homo sapien
gccaagagataaggagacaggactc

SEQ ID NO: 3938899 - DNA, 25 bp, Homo sapien
tactggtaatctagaatggtgagcc

SEQ ID NO: 3938900 - DNA, 25 bp, Homo sapien
gggtactatcttcacctacagggct

SEQ ID NO: 3938901 - DNA, 25 bp, Homo sapien
aatctcagtgtcagtccacaggagg

SEQ ID NO: 3938902 - DNA, 25 bp, Homo sapien
catgtaccaactaaatgtggtaatg

SEQ ID NO: 3938903 - DNA, 25 bp, Homo sapien
gtaccaactaaatgtggtaatggcc

SEQ ID NO: 3938904 - DNA, 25 bp, Homo sapien
cccatgtaccaactaaatgtggtaa

SEQ ID NO: 3938905 - DNA, 25 bp, Homo sapien
tgtaccaactaaatgtggtaatggc

SEQ ID NO: 3938906 - DNA, 25 bp, Homo sapien
cagtccacctctggagcgatgacta

SEQ ID NO: 3938907 - DNA, 25 bp, Homo sapien
gaataacaggaagatcctctagctc

SEQ ID NO: 3938908 - DNA, 25 bp, Homo sapien
ctctggagcgatgactaactggata

SEQ ID NO: 3938909 - DNA, 25 bp, Homo sapien
acaggaagatcctctagctcacagg

SEQ ID NO: 3938910 - DNA, 25 bp, Homo sapien
ccagcccctttcaactgagcataga

SEQ ID NO: 3938911 - DNA, 25 bp, Homo sapien
tcaactgagcatagattaagcataa

SEQ ID NO: 3938912 - DNA, 25 bp, Homo sapien
gcatagattaagcataatcatattc

SEQ ID NO: 3938913 - DNA, 25 bp, Homo sapien
ctgtgaacagagagtcaagaaggga

SEQ ID NO: 3938914 - DNA, 25 bp, Homo sapien
tcagtgacttgctgcaccttcaagt

SEQ ID NO: 3938915 - DNA, 25 bp, Homo sapien
ccagtgagtctagcgggcaaaggct

SEQ ID NO: 3938916 - DNA, 25 bp, Homo sapien
gctcagggccagtgagtctagcggg

SEQ ID NO: 3938917 - DNA, 25 bp, Homo sapien
gacttgctgcaccttcaagtgctca

SEQ ID NO: 3938918 - DNA, 25 bp, Homo sapien
agtatacatgaggaagcatgacacc

SEQ ID NO: 3938919 - DNA, 25 bp, Homo sapien
gacaggatgagcaggcagactgcac

SEQ ID NO: 3938920 - DNA, 25 bp, Homo sapien
gatccatgctgtgtccgagaagaaa

SEQ ID NO: 3938921 - DNA, 25 bp, Homo sapien
catgacaccgagaagaggatcaagc

SEQ ID NO: 3938922 - DNA, 25 bp, Homo sapien
tgtcaccaggactgccttctgatcc

SEQ ID NO: 3938923 - DNA, 25 bp, Homo sapien
caccaggactgccttctgatccaca

SEQ ID NO: 3938924 - DNA, 25 bp, Homo sapien
ccaggactgccttctgatccacagg

SEQ ID NO: 3938925 - DNA, 25 bp, Homo sapien
caggactgccttctgatccacaggt

SEQ ID NO: 3938926 - DNA, 25 bp, Homo sapien
tagaacttggcttgtaagcgttctt

SEQ ID NO: 3938927 - DNA, 25 bp, Homo sapien
gggacaagtagaacttggcttgtaa

SEQ ID NO: 3938928 - DNA, 25 bp, Homo sapien
agcaagggacaagtagaacttggct

SEQ ID NO: 3938929 - DNA, 25 bp, Homo sapien
caagtagaacttggcttgtaagcgt

SEQ ID NO: 3938930 - DNA, 25 bp, Homo sapien
ccgcgcccggccatctatatgattt

SEQ ID NO: 3938931 - DNA, 25 bp, Homo sapien
gccttgtcgcccaggcagacagtgc

SEQ ID NO: 3938932 - DNA, 25 bp, Homo sapien
cgcccggccatctatatgattttta

SEQ ID NO: 3938933 - DNA, 25 bp, Homo sapien
tgccttgtcgcccaggcagacagtg

SEQ ID NO: 3938934 - DNA, 25 bp, Homo sapien
ggagtagccctagaacaaatgacgg

SEQ ID NO: 3938935 - DNA, 25 bp, Homo sapien
tataaagcgcaagacatccagtgga

SEQ ID NO: 3938936 - DNA, 25 bp, Homo sapien
gattcaagaagctgtcccgaggtgg

SEQ ID NO: 3938937 - DNA, 25 bp, Homo sapien
cgagccgtggacatatctaggtgca

SEQ ID NO: 3938938 - DNA, 25 bp, Homo sapien
gtcaccctagtgttaagccctgcat

SEQ ID NO: 3938939 - DNA, 25 bp, Homo sapien
gataatctctctaaccctggcggga

SEQ ID NO: 3938940 - DNA, 25 bp, Homo sapien
gaaggcacttgcctgcctagcagtc

SEQ ID NO: 3938941 - DNA, 25 bp, Homo sapien
caataggccccgatgtgtgctgtta

SEQ ID NO: 3938942 - DNA, 25 bp, Homo sapien
tcttcactagaaatcacagccagag

SEQ ID NO: 3938943 - DNA, 25 bp, Homo sapien
tcttgacttaatgagcatggtgacc

SEQ ID NO: 3938944 - DNA, 25 bp, Homo sapien
gcatggatagacctgccttaggtca

SEQ ID NO: 3938945 - DNA, 25 bp, Homo sapien
gtaaggactccagcacataatctct

SEQ ID NO: 3938946 - DNA, 25 bp, Homo sapien
taaatagatggaaataggtatcggt

SEQ ID NO: 3938947 - DNA, 25 bp, Homo sapien
atagatggaaataggtatcggtcct

SEQ ID NO: 3938948 - DNA, 25 bp, Homo sapien
tttaaatagatggaaataggtatcg

SEQ ID NO: 3938949 - DNA, 25 bp, Homo sapien
aatagatggaaataggtatcggtcc

SEQ ID NO: 3938950 - DNA, 25 bp, Homo sapien
gtcattaaactcaatagcaaatggg

SEQ ID NO: 3938951 - DNA, 25 bp, Homo sapien
gggctaagtcctcttgaagagtaac

SEQ ID NO: 3938952 - DNA, 25 bp, Homo sapien
tcatgcacatggagatatgggctaa

SEQ ID NO: 3938953 - DNA, 25 bp, Homo sapien
gaggtcattaaactcaatagcaaat

SEQ ID NO: 3938954 - DNA, 25 bp, Homo sapien
agtgtttcgtggacagcctttccca

SEQ ID NO: 3938955 - DNA, 25 bp, Homo sapien
ggtgagaccaagtgtttcgtggaca

SEQ ID NO: 3938956 - DNA, 25 bp, Homo sapien
gagaccaagtgtttcgtggacagcc

SEQ ID NO: 3938957 - DNA, 25 bp, Homo sapien
tgctgggtgagaccaagtgtttcgt

SEQ ID NO: 3938958 - DNA, 25 bp, Homo sapien
tcctgggcctttttccctatccatg

SEQ ID NO: 3938959 - DNA, 25 bp, Homo sapien
ggtctgccctgagccatggaataga

SEQ ID NO: 3938960 - DNA, 25 bp, Homo sapien
tttccctatccatggtctgccctga

SEQ ID NO: 3938961 - DNA, 25 bp, Homo sapien
ctgagccatggaatagacgtcaagc

SEQ ID NO: 3938962 - DNA, 25 bp, Homo sapien
cttgcacaaagcatggccaagcccg

SEQ ID NO: 3938963 - DNA, 25 bp, Homo sapien
agcatggccaagcccgcaatcacca

SEQ ID NO: 3938964 - DNA, 25 bp, Homo sapien
cacaaagcatggccaagcccgcaat

SEQ ID NO: 3938965 - DNA, 25 bp, Homo sapien
aaagcatggccaagcccgcaatcac

SEQ ID NO: 3938966 - DNA, 25 bp, Homo sapien
gatgtccatttggagcaccgagagg

SEQ ID NO: 3938967 - DNA, 25 bp, Homo sapien
tcattcaaaactccggcaaataccg

SEQ ID NO: 3938968 - DNA, 25 bp, Homo sapien
gcaaataccgtgaagcccagctcat

SEQ ID NO: 3938969 - DNA, 25 bp, Homo sapien
gagcaggttcttcgcaattcctcag

SEQ ID NO: 3938970 - DNA, 25 bp, Homo sapien
aagtgaataacacaacctgcaatac

SEQ ID NO: 3938971 - DNA, 25 bp, Homo sapien
gaagtgaataacacaacctgcaata

SEQ ID NO: 3938972 - DNA, 25 bp, Homo sapien
tggagacagaaaaccataatgagtg

SEQ ID NO: 3938973 - DNA, 25 bp, Homo sapien
ctggagacagaaaaccataatgagt

SEQ ID NO: 3938974 - DNA, 25 bp, Homo sapien
gaagaagctccccatcagttggaaa

SEQ ID NO: 3938975 - DNA, 25 bp, Homo sapien
cacggccatgcattgtttgtagtca

SEQ ID NO: 3938976 - DNA, 25 bp, Homo sapien
aaaaacgtctttgtgacctccacag

SEQ ID NO: 3938977 - DNA, 25 bp, Homo sapien
cagcattgttgatcacagcccacag

SEQ ID NO: 3938978 - DNA, 25 bp, Homo sapien
gggcaccccatgaccatgtgtgaaa

SEQ ID NO: 3938979 - DNA, 25 bp, Homo sapien
catgccctgcatttttgttcgccca

SEQ ID NO: 3938980 - DNA, 25 bp, Homo sapien
tgttcgcccacatagaatgccatga

SEQ ID NO: 3938981 - DNA, 25 bp, Homo sapien
caatttgactaatcctgacccaacc

SEQ ID NO: 3938982 - DNA, 25 bp, Homo sapien
caaaagtcaggtcgatggatcttcc

SEQ ID NO: 3938983 - DNA, 25 bp, Homo sapien
aatcttcgggttaacaatagcaggc

SEQ ID NO: 3938984 - DNA, 25 bp, Homo sapien
gaaaagagggcatgctatgacacgc

SEQ ID NO: 3938985 - DNA, 25 bp, Homo sapien
taaactgaacaagagcccaaggaac

SEQ ID NO: 3938986 - DNA, 25 bp, Homo sapien
tgggcctacagcacatactgcacat

SEQ ID NO: 3938987 - DNA, 25 bp, Homo sapien
cactgggcctacagcacatactgca

SEQ ID NO: 3938988 - DNA, 25 bp, Homo sapien
cctacagcacatactgcacattttg

SEQ ID NO: 3938989 - DNA, 25 bp, Homo sapien
agacactgggcctacagcacatact

SEQ ID NO: 3938990 - DNA, 25 bp, Homo sapien
ttttcactcgttcatacacttgcat

SEQ ID NO: 3938991 - DNA, 25 bp, Homo sapien
tttcactcgttcatacacttgcatt

SEQ ID NO: 3938992 - DNA, 25 bp, Homo sapien
tcactcgttcatacacttgcatttc

SEQ ID NO: 3938993 - DNA, 25 bp, Homo sapien
cactcgttcatacacttgcatttct

SEQ ID NO: 3938994 - DNA, 25 bp, Homo sapien
gtttgctattggcatactaatgcct

SEQ ID NO: 3938995 - DNA, 25 bp, Homo sapien
ttctgattgtttgctattggcatac

SEQ ID NO: 3938996 - DNA, 25 bp, Homo sapien
tgattgtttgctattggcatactaa

SEQ ID NO: 3938997 - DNA, 25 bp, Homo sapien
tctctttctgattgtttgctattgg

SEQ ID NO: 3938998 - DNA, 25 bp, Homo sapien
tggactgagacagaactcaaggctg

SEQ ID NO: 3938999 - DNA, 25 bp, Homo sapien
tatagagagctactatcgtgccact

SEQ ID NO: 3939000 - DNA, 25 bp, Homo sapien
agtccaggaatgatcccacagtctg

SEQ ID NO: 3939001 - DNA, 25 bp, Homo sapien
tttaaatagcttgggacggcctcag

SEQ ID NO: 3939002 - DNA, 25 bp, Homo sapien
tttatttcctttacattgtgatata

SEQ ID NO: 3939003 - DNA, 25 bp, Homo sapien
cattgtgatatattgttgacagtag

SEQ ID NO: 3939004 - DNA, 25 bp, Homo sapien
attgtgatatattgttgacagtagg

SEQ ID NO: 3939005 - DNA, 25 bp, Homo sapien
ttacattgtgatatattgttgacag

SEQ ID NO: 3939006 - DNA, 25 bp, Homo sapien
actttgttgattattctggtggtca

SEQ ID NO: 3939007 - DNA, 25 bp, Homo sapien
ctttgttgattattctggtggtcat

SEQ ID NO: 3939008 - DNA, 25 bp, Homo sapien
tctgaggttcctggtaaacatatct

SEQ ID NO: 3939009 - DNA, 25 bp, Homo sapien
tgaggttcctggtaaacatatcttt

SEQ ID NO: 3939010 - DNA, 25 bp, Homo sapien
ttcctggtaaacatatctttttgtg

SEQ ID NO: 3939011 - DNA, 25 bp, Homo sapien
cctggtaaacatatctttttgtggg

SEQ ID NO: 3939012 - DNA, 25 bp, Homo sapien
ctttgatgagccataagatgccagc

SEQ ID NO: 3939013 - DNA, 25 bp, Homo sapien
aagatgccagcctttccattggggc

SEQ ID NO: 3939014 - DNA, 25 bp, Homo sapien
tgatgagccataagatgccagcctt

SEQ ID NO: 3939015 - DNA, 25 bp, Homo sapien
gatgccagcctttccattggggccc

SEQ ID NO: 3939016 - DNA, 25 bp, Homo sapien
aggttggatggaagcaactttaatt

SEQ ID NO: 3939017 - DNA, 25 bp, Homo sapien
cagtctcataactgatgagaacatg

SEQ ID NO: 3939018 - DNA, 25 bp, Homo sapien
ccagtctcataactgatgagaacat

SEQ ID NO: 3939019 - DNA, 25 bp, Homo sapien
tccaggttggatggaagcaacttta

SEQ ID NO: 3939020 - DNA, 25 bp, Homo sapien
tgctcatctttgacaacaatgaggg

SEQ ID NO: 3939021 - DNA, 25 bp, Homo sapien
caatgaggggttcaatgtgtgctct

SEQ ID NO: 3939022 - DNA, 25 bp, Homo sapien
tttcacccctttaactgatctctgg

SEQ ID NO: 3939023 - DNA, 25 bp, Homo sapien
tctgtcagaccaagaggaccttcgg

SEQ ID NO: 3939024 - DNA, 25 bp, Homo sapien
tgaagtgtcattctccaaacatgag

SEQ ID NO: 3939025 - DNA, 25 bp, Homo sapien
cagatccccacccaagggcatgtta

SEQ ID NO: 3939026 - DNA, 25 bp, Homo sapien
tctcaaattttccaccatcacggtg

SEQ ID NO: 3939027 - DNA, 25 bp, Homo sapien
cacggtgtacgtgggataccagatc

SEQ ID NO: 3939028 - DNA, 25 bp, Homo sapien
tgctagcttcggtgactcctggata

SEQ ID NO: 3939029 - DNA, 25 bp, Homo sapien
tttccaaaaagcttgcggtctccca

SEQ ID NO: 3939030 - DNA, 25 bp, Homo sapien
agtcctcaaagtacagcctggtcga

SEQ ID NO: 3939031 - DNA, 25 bp, Homo sapien
tgtgagtgacaaagccatcagcctt

SEQ ID NO: 3939032 - DNA, 25 bp, Homo sapien
caatggtgcttatctctagtcccag

SEQ ID NO: 3939033 - DNA, 25 bp, Homo sapien
cacaatggtgcttatctctagtccc

SEQ ID NO: 3939034 - DNA, 25 bp, Homo sapien
aatggtgcttatctctagtcccagc

SEQ ID NO: 3939035 - DNA, 25 bp, Homo sapien
gggcacaatggtgcttatctctagt

SEQ ID NO: 3939036 - DNA, 25 bp, Homo sapien
aaggaagtcagggagcaggcgcttg

SEQ ID NO: 3939037 - DNA, 25 bp, Homo sapien
agtcagggagcaggcgcttgtctct

SEQ ID NO: 3939038 - DNA, 25 bp, Homo sapien
gatggccctttgcaaatgacgttta

SEQ ID NO: 3939039 - DNA, 25 bp, Homo sapien
aaggatggccctttgcaaatgacgt

SEQ ID NO: 3939040 - DNA, 25 bp, Homo sapien
gcaaaagggctcttcgccaagatag

SEQ ID NO: 3939041 - DNA, 25 bp, Homo sapien
gaaattccgctgtgctaagatgtag

SEQ ID NO: 3939042 - DNA, 25 bp, Homo sapien
aagatagcatgctggatgtcccgca

SEQ ID NO: 3939043 - DNA, 25 bp, Homo sapien
agagaagtccttgctggctaacgag

SEQ ID NO: 3939044 - DNA, 25 bp, Homo sapien
tcaagactatgacattccgacttct

SEQ ID NO: 3939045 - DNA, 25 bp, Homo sapien
gacattccgacttctttgagggctt

SEQ ID NO: 3939046 - DNA, 25 bp, Homo sapien
gactatgacattccgacttctttga

SEQ ID NO: 3939047 - DNA, 25 bp, Homo sapien
ctttcatttcaagactatgacattc

SEQ ID NO: 3939048 - DNA, 25 bp, Homo sapien
ttcatgtttactctcatcactttcg

SEQ ID NO: 3939049 - DNA, 25 bp, Homo sapien
cccattttctctgttaagcgttatt

SEQ ID NO: 3939050 - DNA, 25 bp, Homo sapien
tttactctcatcactttcgttctcc

SEQ ID NO: 3939051 - DNA, 25 bp, Homo sapien
cattgaaacattgcccattttctct

SEQ ID NO: 3939052 - DNA, 25 bp, Homo sapien
catttgtgggagattgtcagcctca

SEQ ID NO: 3939053 - DNA, 25 bp, Homo sapien
ttccatttgtgggagattgtcagcc

SEQ ID NO: 3939054 - DNA, 25 bp, Homo sapien
tttgtgggagattgtcagcctcacc

SEQ ID NO: 3939055 - DNA, 25 bp, Homo sapien
tgtgggagattgtcagcctcaccct

SEQ ID NO: 3939056 - DNA, 25 bp, Homo sapien
tgatgatggtataaattagaatgcg

SEQ ID NO: 3939057 - DNA, 25 bp, Homo sapien
tagaatgcggtgcttgcaagtaacg

SEQ ID NO: 3939058 - DNA, 25 bp, Homo sapien
ttagccataagcctttgaaaacact

SEQ ID NO: 3939059 - DNA, 25 bp, Homo sapien
cttgcaagtaacgtaaagtgaattc

SEQ ID NO: 3939060 - DNA, 25 bp, Homo sapien
tttcattgtccacacccaaagctga

SEQ ID NO: 3939061 - DNA, 25 bp, Homo sapien
ttcattgtccacacccaaagctgaa

SEQ ID NO: 3939062 - DNA, 25 bp, Homo sapien
atgaaaactcatcgttgtacttcaa

SEQ ID NO: 3939063 - DNA, 25 bp, Homo sapien
taatgacatgaaaactcatcgttgt

SEQ ID NO: 3939064 - DNA, 25 bp, Homo sapien
gactataaccgtgactaatgacatg

SEQ ID NO: 3939065 - DNA, 25 bp, Homo sapien
aaaactcatcgttgtacttcaacta

SEQ ID NO: 3939066 - DNA, 25 bp, Homo sapien
gggatagaggccataatctgttgaa

SEQ ID NO: 3939067 - DNA, 25 bp, Homo sapien
gccactatcttgtgtaaggttcacc

SEQ ID NO: 3939068 - DNA, 25 bp, Homo sapien
ttgaacaagtcttctcttgaaagca

SEQ ID NO: 3939069 - DNA, 25 bp, Homo sapien
ccagtgccagcaggcaacctaacat

SEQ ID NO: 3939070 - DNA, 25 bp, Homo sapien
ggtggtgacagaagcaacctcagac

SEQ ID NO: 3939071 - DNA, 25 bp, Homo sapien
ggtgacagaagcaacctcagacttg

SEQ ID NO: 3939072 - DNA, 25 bp, Homo sapien
gacagaagcaacctcagacttgtgc

SEQ ID NO: 3939073 - DNA, 25 bp, Homo sapien
tgacagaagcaacctcagacttgtg

SEQ ID NO: 3939074 - DNA, 25 bp, Homo sapien
caccggaatgtgtcagcagtatgcc

SEQ ID NO: 3939075 - DNA, 25 bp, Homo sapien
caccaccaccaagagatgcatttaa

SEQ ID NO: 3939076 - DNA, 25 bp, Homo sapien
gacgactagtgtttcttccatatgg

SEQ ID NO: 3939077 - DNA, 25 bp, Homo sapien
attaaacagggccagccttccactt

SEQ ID NO: 3939078 - DNA, 25 bp, Homo sapien
tgaatagaaacgacaagagtagtcc

SEQ ID NO: 3939079 - DNA, 25 bp, Homo sapien
tgaagtgctgttttcgtcaatgccc

SEQ ID NO: 3939080 - DNA, 25 bp, Homo sapien
tctgatcacagttgggaaagcattt

SEQ ID NO: 3939081 - DNA, 25 bp, Homo sapien
gatcagtggtcagagatactccttt

SEQ ID NO: 3939082 - DNA, 25 bp, Homo sapien
tgactctcgtctaatgaatcattgg

SEQ ID NO: 3939083 - DNA, 25 bp, Homo sapien
tatggttaattccttatgactctcg

SEQ ID NO: 3939084 - DNA, 25 bp, Homo sapien
gcagcatgcacatcattaactcaag

SEQ ID NO: 3939085 - DNA, 25 bp, Homo sapien
tgaggtagaaatcaaaggacatgtc

SEQ ID NO: 3939086 - DNA, 25 bp, Homo sapien
gacacccagtccttaaggtctccag

SEQ ID NO: 3939087 - DNA, 25 bp, Homo sapien
ccatggaagcatttaggacagaggc

SEQ ID NO: 3939088 - DNA, 25 bp, Homo sapien
gaggcactgattttactggcactca

SEQ ID NO: 3939089 - DNA, 25 bp, Homo sapien
tagctttacctatgtcagacgggcg

SEQ ID NO: 3939090 - DNA, 25 bp, Homo sapien
tctgctatgggagtgaagagtcaca

SEQ ID NO: 3939091 - DNA, 25 bp, Homo sapien
caagcatctatgcactaggcaccac

SEQ ID NO: 3939092 - DNA, 25 bp, Homo sapien
gactcaaaactgtgtgaagacctat

SEQ ID NO: 3939093 - DNA, 25 bp, Homo sapien
tctttggctgggtaactacaacagg

SEQ ID NO: 3939094 - DNA, 25 bp, Homo sapien
ggggtggcaatttaggctgccatcc

SEQ ID NO: 3939095 - DNA, 25 bp, Homo sapien
atccaatggtggtagttaagtcttg

SEQ ID NO: 3939096 - DNA, 25 bp, Homo sapien
tagttaagtcttggccaaatgttac

SEQ ID NO: 3939097 - DNA, 25 bp, Homo sapien
cttggccaaatgttactcagcagag

SEQ ID NO: 3939098 - DNA, 25 bp, Homo sapien
taacatctatgtatagtaatcattc

SEQ ID NO: 3939099 - DNA, 25 bp, Homo sapien
caatctcaattcacgtatgttcact

SEQ ID NO: 3939100 - DNA, 25 bp, Homo sapien
cttggtcattatgtaattgcactta

SEQ ID NO: 3939101 - DNA, 25 bp, Homo sapien
taaccctggtgatttacatgaatca

SEQ ID NO: 3939102 - DNA, 25 bp, Homo sapien
caatgttaaggattgcggccccacc

SEQ ID NO: 3939103 - DNA, 25 bp, Homo sapien
taagggtctctcttaacaggtccca

SEQ ID NO: 3939104 - DNA, 25 bp, Homo sapien
cagtgtagatataaagcaggctgtc

SEQ ID NO: 3939105 - DNA, 25 bp, Homo sapien
gaaatacctgacttcacagtgccgc

SEQ ID NO: 3939106 - DNA, 25 bp, Homo sapien
tctaaataaacaggctttaagcata

SEQ ID NO: 3939107 - DNA, 25 bp, Homo sapien
ttctaaataaacaggctttaagcat

SEQ ID NO: 3939108 - DNA, 25 bp, Homo sapien
attctaaataaacaggctttaagca

SEQ ID NO: 3939109 - DNA, 25 bp, Homo sapien
tattctaaataaacaggctttaagc

SEQ ID NO: 3939110 - DNA, 25 bp, Homo sapien
tggtgtggcactgttcaccgtagcc

SEQ ID NO: 3939111 - DNA, 25 bp, Homo sapien
gtggcactgttcaccgtagccttgg

SEQ ID NO: 3939112 - DNA, 25 bp, Homo sapien
tgatgggagctggtgtggcactgtt

SEQ ID NO: 3939113 - DNA, 25 bp, Homo sapien
gctggtgtggcactgttcaccgtag

SEQ ID NO: 3939114 - DNA, 25 bp, Homo sapien
tcattgtacaccaattttgctgatg

SEQ ID NO: 3939115 - DNA, 25 bp, Homo sapien
gtacaccaattttgctgatgacatg

SEQ ID NO: 3939116 - DNA, 25 bp, Homo sapien
tttaacatgcatgattttgacaatt

SEQ ID NO: 3939117 - DNA, 25 bp, Homo sapien
aaatttaacatgcatgattttgaca

SEQ ID NO: 3939118 - DNA, 25 bp, Homo sapien
aagtgtcccccacaaccatggctaa

SEQ ID NO: 3939119 - DNA, 25 bp, Homo sapien
gggcaccaaaagtgtctctatgtgg

SEQ ID NO: 3939120 - DNA, 25 bp, Homo sapien
ggatgctaccaaatgaatctgagct

SEQ ID NO: 3939121 - DNA, 25 bp, Homo sapien
caaccatggctaaatcagacatagg

SEQ ID NO: 3939122 - DNA, 25 bp, Homo sapien
aaccttgatgcctgcgagagctcca

SEQ ID NO: 3939123 - DNA, 25 bp, Homo sapien
caagaagcaaggatctgagggtagc

SEQ ID NO: 3939124 - DNA, 25 bp, Homo sapien
gagagctccatagttcaggctgtga

SEQ ID NO: 3939125 - DNA, 25 bp, Homo sapien
gggattactgagagcaccgcaacct

SEQ ID NO: 3939126 - DNA, 25 bp, Homo sapien
tcagacgtgaaggcggctgtcttct

SEQ ID NO: 3939127 - DNA, 25 bp, Homo sapien
gagtgtctgctaaggctctgcccat

SEQ ID NO: 3939128 - DNA, 25 bp, Homo sapien
ggaacacccagagtgtctgctaagg

SEQ ID NO: 3939129 - DNA, 25 bp, Homo sapien
cggaagctccacttctttcaggaac

SEQ ID NO: 3939130 - DNA, 25 bp, Homo sapien
ttctttcaggaacacccagagtgtc

SEQ ID NO: 3939131 - DNA, 25 bp, Homo sapien
gcacataccttggtaggcagccagt

SEQ ID NO: 3939132 - DNA, 25 bp, Homo sapien
tgaacaccgcttattatgggctctc

SEQ ID NO: 3939133 - DNA, 25 bp, Homo sapien
tcacaagtggtagggaattcctgcg

SEQ ID NO: 3939134 - DNA, 25 bp, Homo sapien
gatgccacattagaacaggacggga

SEQ ID NO: 3939135 - DNA, 25 bp, Homo sapien
ccttcttttcggcacagtcccaatc

SEQ ID NO: 3939136 - DNA, 25 bp, Homo sapien
tcggcacagtcccaatcagagctaa

SEQ ID NO: 3939137 - DNA, 25 bp, Homo sapien
aatcagagctaaccatgatggacag

SEQ ID NO: 3939138 - DNA, 25 bp, Homo sapien
tgatggacaggccaacataggggct

SEQ ID NO: 3939139 - DNA, 25 bp, Homo sapien
actgaagcagcctgagtcccaatca

SEQ ID NO: 3939140 - DNA, 25 bp, Homo sapien
agcctgagtcccaatcaggaagttc

SEQ ID NO: 3939141 - DNA, 25 bp, Homo sapien
gaagcagcctgagtcccaatcagga

SEQ ID NO: 3939142 - DNA, 25 bp, Homo sapien
agcagcctgagtcccaatcaggaag

SEQ ID NO: 3939143 - DNA, 25 bp, Homo sapien
gcaagtgtgctttcttccgatgtct

SEQ ID NO: 3939144 - DNA, 25 bp, Homo sapien
gattgcctgatgcagacctctgtcg

SEQ ID NO: 3939145 - DNA, 25 bp, Homo sapien
ggctgcttaccagcatctccaagga

SEQ ID NO: 3939146 - DNA, 25 bp, Homo sapien
tccgatgtctcacaatcactgggct

SEQ ID NO: 3939147 - DNA, 25 bp, Homo sapien
tccagctctcaatctgtgccgacat

SEQ ID NO: 3939148 - DNA, 25 bp, Homo sapien
tccagccatggctgtttgtcattat

SEQ ID NO: 3939149 - DNA, 25 bp, Homo sapien
gccatggctgtttgtcattatcctg

SEQ ID NO: 3939150 - DNA, 25 bp, Homo sapien
gcctttgtccagctctcaatctgtg

SEQ ID NO: 3939151 - DNA, 25 bp, Homo sapien
tcaaaagctgctacctttccatcac

SEQ ID NO: 3939152 - DNA, 25 bp, Homo sapien
catcactgccaacatctgcaatcat

SEQ ID NO: 3939153 - DNA, 25 bp, Homo sapien
aaagctgctacctttccatcactgc

SEQ ID NO: 3939154 - DNA, 25 bp, Homo sapien
cctcaaaagctgctacctttccatc

SEQ ID NO: 3939155 - DNA, 25 bp, Homo sapien
tatccttccaattgatgaggatgtc

SEQ ID NO: 3939156 - DNA, 25 bp, Homo sapien
gatgaggatgtcctgcccttgtaga

SEQ ID NO: 3939157 - DNA, 25 bp, Homo sapien
ttccaattgatgaggatgtcctgcc

SEQ ID NO: 3939158 - DNA, 25 bp, Homo sapien
agactatccttccaattgatgagga

SEQ ID NO: 3939159 - DNA, 25 bp, Homo sapien
taaaaggccagagaatatgtatcgg

SEQ ID NO: 3939160 - DNA, 25 bp, Homo sapien
ggccagagaatatgtatcgggtgcc

SEQ ID NO: 3939161 - DNA, 25 bp, Homo sapien
aaaggccagagaatatgtatcgggt

SEQ ID NO: 3939162 - DNA, 25 bp, Homo sapien
aggccagagaatatgtatcgggtgc

SEQ ID NO: 3939163 - DNA, 25 bp, Homo sapien
tgtgcccgccacatcataacaaggc

SEQ ID NO: 3939164 - DNA, 25 bp, Homo sapien
atgtgcccgccacatcataacaagg

SEQ ID NO: 3939165 - DNA, 25 bp, Homo sapien
gactgctctgcagagtctgttctcg

SEQ ID NO: 3939166 - DNA, 25 bp, Homo sapien
tccgctggggtgcaaagactgctct

SEQ ID NO: 3939167 - DNA, 25 bp, Homo sapien
caggtcacatttatccaaagggatc

SEQ ID NO: 3939168 - DNA, 25 bp, Homo sapien
gtctgttctcggcaaacagccaggc

SEQ ID NO: 3939169 - DNA, 25 bp, Homo sapien
gttcctcaagagtggtgctggtgac

SEQ ID NO: 3939170 - DNA, 25 bp, Homo sapien
tggtgacagctgcaacattttgcat

SEQ ID NO: 3939171 - DNA, 25 bp, Homo sapien
tcctcaagagtggtgctggtgacag

SEQ ID NO: 3939172 - DNA, 25 bp, Homo sapien
cttgttcctcaagagtggtgctggt

SEQ ID NO: 3939173 - DNA, 25 bp, Homo sapien
tgaagaacgtggacgaagcaacagc

SEQ ID NO: 3939174 - DNA, 25 bp, Homo sapien
gaaaggacccggcagtgttgaagta

SEQ ID NO: 3939175 - DNA, 25 bp, Homo sapien
caaatgtggcacagtataagggcct

SEQ ID NO: 3939176 - DNA, 25 bp, Homo sapien
tcttcaagggagtggcaaatgtggc

SEQ ID NO: 3939177 - DNA, 25 bp, Homo sapien
ccatttgaagggactgggaagtgtc

SEQ ID NO: 3939178 - DNA, 25 bp, Homo sapien
cccaggattgagaaagaagggccat

SEQ ID NO: 3939179 - DNA, 25 bp, Homo sapien
gggagcccctctgacttcctgtaag

SEQ ID NO: 3939180 - DNA, 25 bp, Homo sapien
cctgtaagccttggatggatatccc

SEQ ID NO: 3939181 - DNA, 25 bp, Homo sapien
accaagtgtgactgtacacaaggca

SEQ ID NO: 3939182 - DNA, 25 bp, Homo sapien
tgtgcatgttgtatgggccatgttc

SEQ ID NO: 3939183 - DNA, 25 bp, Homo sapien
ttcactgtgcatgttgtatgggcca

SEQ ID NO: 3939184 - DNA, 25 bp, Homo sapien
ggccatgttcaaccaaaacaggtat

SEQ ID NO: 3939185 - DNA, 25 bp, Homo sapien
agaagtaccgatttctgcctgagac

SEQ ID NO: 3939186 - DNA, 25 bp, Homo sapien
cacttatctgtgctggaacctgatc

SEQ ID NO: 3939187 - DNA, 25 bp, Homo sapien
accctgttggtatgcatggcagcag

SEQ ID NO: 3939188 - DNA, 25 bp, Homo sapien
ccatcattctgtgggacaggagccc

SEQ ID NO: 3939189 - DNA, 25 bp, Homo sapien
tcaacctccatcagtgtcaattcca

SEQ ID NO: 3939190 - DNA, 25 bp, Homo sapien
caccatcaacctccatcagtgtcaa

SEQ ID NO: 3939191 - DNA, 25 bp, Homo sapien
catcaacctccatcagtgtcaattc

SEQ ID NO: 3939192 - DNA, 25 bp, Homo sapien
cccaccatcaacctccatcagtgtc

SEQ ID NO: 3939193 - DNA, 25 bp, Homo sapien
gcatccctggtagctcactggcaaa

SEQ ID NO: 3939194 - DNA, 25 bp, Homo sapien
gcaaagtgtgcgtttctgacaggct

SEQ ID NO: 3939195 - DNA, 25 bp, Homo sapien
agttgaaattgttcagctagcccca

SEQ ID NO: 3939196 - DNA, 25 bp, Homo sapien
tagccccatgttgaggacttgcgaa

SEQ ID NO: 3939197 - DNA, 25 bp, Homo sapien
atgtcaatgaacaagtggtcatgca

SEQ ID NO: 3939198 - DNA, 25 bp, Homo sapien
atgagaaagacaggactcctttttg

SEQ ID NO: 3939199 - DNA, 25 bp, Homo sapien
ggatcattgtccagacatgtcaatg

SEQ ID NO: 3939200 - DNA, 25 bp, Homo sapien
acttgattatccctgggctgaagac

SEQ ID NO: 3939201 - DNA, 25 bp, Homo sapien
ctaccccagtcccctaagtagctgg

SEQ ID NO: 3939202 - DNA, 25 bp, Homo sapien
atgtatcaccacacctagttaaatt

SEQ ID NO: 3939203 - DNA, 25 bp, Homo sapien
gcatgtatcaccacacctagttaaa

SEQ ID NO: 3939204 - DNA, 25 bp, Homo sapien
gtgatcctcctaccccagtccccta

SEQ ID NO: 3939205 - DNA, 25 bp, Homo sapien
tttacaataagcatcctccaggttc

SEQ ID NO: 3939206 - DNA, 25 bp, Homo sapien
ttacaataagcatcctccaggttca

SEQ ID NO: 3939207 - DNA, 25 bp, Homo sapien
ttttacaataagcatcctccaggtt

SEQ ID NO: 3939208 - DNA, 25 bp, Homo sapien
tcacaccatatgtcctgtttgttcc

SEQ ID NO: 3939209 - DNA, 25 bp, Homo sapien
tcctcacaccatatgtcctgtttgt

SEQ ID NO: 3939210 - DNA, 25 bp, Homo sapien
cataatcgctttttgggctttcctt

SEQ ID NO: 3939211 - DNA, 25 bp, Homo sapien
ctctcttgccataattccataatcg

SEQ ID NO: 3939212 - DNA, 25 bp, Homo sapien
taatcaaggcaatgatcgtgagttt

SEQ ID NO: 3939213 - DNA, 25 bp, Homo sapien
gatcgtgagtttcttaaaagcccta

SEQ ID NO: 3939214 - DNA, 25 bp, Homo sapien
tattgtcagatcagttctgtgggtc

SEQ ID NO: 3939215 - DNA, 25 bp, Homo sapien
ggaccgtgtctttgaacatgagctc

SEQ ID NO: 3939216 - DNA, 25 bp, Homo sapien
gctgaatgggagaaatgctcctgtg

SEQ ID NO: 3939217 - DNA, 25 bp, Homo sapien
cgtcactaggctgaatgggagaaat

SEQ ID NO: 3939218 - DNA, 25 bp, Homo sapien
taggctgaatgggagaaatgctcct

SEQ ID NO: 3939219 - DNA, 25 bp, Homo sapien
aatgggagaaatgctcctgtggaca

SEQ ID NO: 3939220 - DNA, 25 bp, Homo sapien
gatgcagtagccttgaaggtggttt

SEQ ID NO: 3939221 - DNA, 25 bp, Homo sapien
tcatcgttgttccgcaaagtccatt

SEQ ID NO: 3939222 - DNA, 25 bp, Homo sapien
tcgttgttccgcaaagtccattgct

SEQ ID NO: 3939223 - DNA, 25 bp, Homo sapien
gctttgatgcagtagccttgaaggt

SEQ ID NO: 3939224 - DNA, 25 bp, Homo sapien
tgaatagaccaaggtcaggaccact

SEQ ID NO: 3939225 - DNA, 25 bp, Homo sapien
ctatgtgtagctcagggaacgggca

SEQ ID NO: 3939226 - DNA, 25 bp, Homo sapien
gatgattccttgactcaccaaatgg

SEQ ID NO: 3939227 - DNA, 25 bp, Homo sapien
taatcggtggaagcaagttaagcac

SEQ ID NO: 3939228 - DNA, 25 bp, Homo sapien
tgcactgagcatattttccgtggga

SEQ ID NO: 3939229 - DNA, 25 bp, Homo sapien
cccggcggcgttttcattcatgcac

SEQ ID NO: 3939230 - DNA, 25 bp, Homo sapien
tttgtccgactagaagcgcccggcg

SEQ ID NO: 3939231 - DNA, 25 bp, Homo sapien
gagaggctctgcctcgccagccagc

SEQ ID NO: 3939232 - DNA, 25 bp, Homo sapien
acagaacgagcggagttctcggctg

SEQ ID NO: 3939233 - DNA, 25 bp, Homo sapien
gaacgagcggagttctcggctgcat

SEQ ID NO: 3939234 - DNA, 25 bp, Homo sapien
gagaacgcacagaacgagcggagtt

SEQ ID NO: 3939235 - DNA, 25 bp, Homo sapien
aacgcacagaacgagcggagttctc

SEQ ID NO: 3939236 - DNA, 25 bp, Homo sapien
ccgagcagcgcttcggccgctgggc

SEQ ID NO: 3939237 - DNA, 25 bp, Homo sapien
agcgcttcggccgctgggcgttggg

SEQ ID NO: 3939238 - DNA, 25 bp, Homo sapien
cccgcaatccggacccgagcagcgc

SEQ ID NO: 3939239 - DNA, 25 bp, Homo sapien
ccgcaatccggacccgagcagcgct

SEQ ID NO: 3939240 - DNA, 25 bp, Homo sapien
gatctggccggagctccagctggct

SEQ ID NO: 3939241 - DNA, 25 bp, Homo sapien
ctttgagcgacagcagcagccgggc

SEQ ID NO: 3939242 - DNA, 25 bp, Homo sapien
tctgggagcaaaaggaccccgatgc

SEQ ID NO: 3939243 - DNA, 25 bp, Homo sapien
ggtgggcaaggcttgaacttttctc

SEQ ID NO: 3939244 - DNA, 25 bp, Homo sapien
ttgaaagggcacgataggccgggcg

SEQ ID NO: 3939245 - DNA, 25 bp, Homo sapien
ttcttcatctgttgaaagggcacga

SEQ ID NO: 3939246 - DNA, 25 bp, Homo sapien
gggggaaccatgcagtgcaggtggg

SEQ ID NO: 3939247 - DNA, 25 bp, Homo sapien
gcaggtgggtcacgcccaggcatct

SEQ ID NO: 3939248 - DNA, 25 bp, Homo sapien
ggggaaccatgcagtgcaggtgggt

SEQ ID NO: 3939249 - DNA, 25 bp, Homo sapien
gctgcaggtgggtcacgcccaggca

SEQ ID NO: 3939250 - DNA, 25 bp, Homo sapien
tctgctatgatgcttccaaagtcat

SEQ ID NO: 3939251 - DNA, 25 bp, Homo sapien
ctgctatgatgcttccaaagtcatg

SEQ ID NO: 3939252 - DNA, 25 bp, Homo sapien
tgctatgatgcttccaaagtcatga

SEQ ID NO: 3939253 - DNA, 25 bp, Homo sapien
atatatcacatgtcaaagacgaggc

SEQ ID NO: 3939254 - DNA, 25 bp, Homo sapien
ctagggctttggcatactggtacca

SEQ ID NO: 3939255 - DNA, 25 bp, Homo sapien
gacgaggccctaaggtagcattcta

SEQ ID NO: 3939256 - DNA, 25 bp, Homo sapien
taaggtagcattctagggctttggc

SEQ ID NO: 3939257 - DNA, 25 bp, Homo sapien
ctacagccaacagcgaaggcaagcg

SEQ ID NO: 3939258 - DNA, 25 bp, Homo sapien
tacagccaacagcgaaggcaagcgc

SEQ ID NO: 3939259 - DNA, 25 bp, Homo sapien
acagccaacagcgaaggcaagcgcc

SEQ ID NO: 3939260 - DNA, 25 bp, Homo sapien
cctacagccaacagcgaaggcaagc

SEQ ID NO: 3939261 - DNA, 25 bp, Homo sapien
taagtaaagcaagtagagtatcacc

SEQ ID NO: 3939262 - DNA, 25 bp, Homo sapien
caaacagcctgggtcttaatcctga

SEQ ID NO: 3939263 - DNA, 25 bp, Homo sapien
tctgatctcagtagggtggacaatg

SEQ ID NO: 3939264 - DNA, 25 bp, Homo sapien
gatcttttgaggagtcgcagtgtta

SEQ ID NO: 3939265 - DNA, 25 bp, Homo sapien
aatcgcttgaactctggagatggag

SEQ ID NO: 3939266 - DNA, 25 bp, Homo sapien
atcgcttgaactctggagatggagg

SEQ ID NO: 3939267 - DNA, 25 bp, Homo sapien
tgaactgagagcctctccgcccttg

SEQ ID NO: 3939268 - DNA, 25 bp, Homo sapien
cagataggggcaacgtgacatcaga

SEQ ID NO: 3939269 - DNA, 25 bp, Homo sapien
ctgggctctgtccaacttcagatag

SEQ ID NO: 3939270 - DNA, 25 bp, Homo sapien
ttcttaactcggtagaggagcccca

SEQ ID NO: 3939271 - DNA, 25 bp, Homo sapien
aatttactccctcggatgtggatgg

SEQ ID NO: 3939272 - DNA, 25 bp, Homo sapien
gatcccgctaatttactccctcgga

SEQ ID NO: 3939273 - DNA, 25 bp, Homo sapien
tcatccgtggcttgtggatcccgct

SEQ ID NO: 3939274 - DNA, 25 bp, Homo sapien
tggcttgtggatcccgctaatttac

SEQ ID NO: 3939275 - DNA, 25 bp, Homo sapien
ctctgctaatgtttaagccttccat

SEQ ID NO: 3939276 - DNA, 25 bp, Homo sapien
gctctgctaatgtttaagccttcca

SEQ ID NO: 3939277 - DNA, 25 bp, Homo sapien
cctgctctgctaatgtttaagcctt

SEQ ID NO: 3939278 - DNA, 25 bp, Homo sapien
tgctctgctaatgtttaagccttcc

SEQ ID NO: 3939279 - DNA, 25 bp, Homo sapien
tggaagactggcaccaactctctct

SEQ ID NO: 3939280 - DNA, 25 bp, Homo sapien
tcctgtgggctcatactcgtgatgt

SEQ ID NO: 3939281 - DNA, 25 bp, Homo sapien
cattccaaagaagacccgtgtgtta

SEQ ID NO: 3939282 - DNA, 25 bp, Homo sapien
gagtggatagggacaagcaaattcc

SEQ ID NO: 3939283 - DNA, 25 bp, Homo sapien
gataattcattgtccagccatatcc

SEQ ID NO: 3939284 - DNA, 25 bp, Homo sapien
cacttcagtataactttgctgtcca

SEQ ID NO: 3939285 - DNA, 25 bp, Homo sapien
tcagcacttcagtataactttgctg

SEQ ID NO: 3939286 - DNA, 25 bp, Homo sapien
acagataattcattgtccagccata

SEQ ID NO: 3939287 - DNA, 25 bp, Homo sapien
caggttttgacataggtatatggta

SEQ ID NO: 3939288 - DNA, 25 bp, Homo sapien
tttgtggtcagcaagactgttacta

SEQ ID NO: 3939289 - DNA, 25 bp, Homo sapien
cataggtatatggtaggcctcactg

SEQ ID NO: 3939290 - DNA, 25 bp, Homo sapien
gactgttactatctcgggctttatt

SEQ ID NO: 3939291 - DNA, 25 bp, Homo sapien
gcgaacagtcaagaacataagaaga

SEQ ID NO: 3939292 - DNA, 25 bp, Homo sapien
cacagggtagtgagtttgaaagcca

SEQ ID NO: 3939293 - DNA, 25 bp, Homo sapien
acataagaagagttcagggagtcag

SEQ ID NO: 3939294 - DNA, 25 bp, Homo sapien
gactgaagtgtggattatggaacac

SEQ ID NO: 3939295 - DNA, 25 bp, Homo sapien
ctgagcacttccaagatatgatctc

SEQ ID NO: 3939296 - DNA, 25 bp, Homo sapien
gatatgatctcactggattcctaca

SEQ ID NO: 3939297 - DNA, 25 bp, Homo sapien
aagatatgatctcactggattccta

SEQ ID NO: 3939298 - DNA, 25 bp, Homo sapien
aagggtatgatttgagtacttatcc

SEQ ID NO: 3939299 - DNA, 25 bp, Homo sapien
cagcagccaagtgtgactaacttca

SEQ ID NO: 3939300 - DNA, 25 bp, Homo sapien
gccaagtgtgactaacttcagcaag

SEQ ID NO: 3939301 - DNA, 25 bp, Homo sapien
gcagccaagtgtgactaacttcagc

SEQ ID NO: 3939302 - DNA, 25 bp, Homo sapien
cagccaagtgtgactaacttcagca

SEQ ID NO: 3939303 - DNA, 25 bp, Homo sapien
tgaaggtcaactttagacatcttgg

SEQ ID NO: 3939304 - DNA, 25 bp, Homo sapien
gatgttggactagactgaaggtcaa

SEQ ID NO: 3939305 - DNA, 25 bp, Homo sapien
gactagactgaaggtcaactttaga

SEQ ID NO: 3939306 - DNA, 25 bp, Homo sapien
gactgaaggtcaactttagacatct

SEQ ID NO: 3939307 - DNA, 25 bp, Homo sapien
ctattgcccccaacatcatctgtta

SEQ ID NO: 3939308 - DNA, 25 bp, Homo sapien
aaatcatttacaacagcttcagaaa

SEQ ID NO: 3939309 - DNA, 25 bp, Homo sapien
tttggtgcaactcctccatggactg

SEQ ID NO: 3939310 - DNA, 25 bp, Homo sapien
agcatcgctgcttttggagttaacc

SEQ ID NO: 3939311 - DNA, 25 bp, Homo sapien
tcctccaggaatcacacacagatgt

SEQ ID NO: 3939312 - DNA, 25 bp, Homo sapien
tgtttacaaccgctgccctctgaag

SEQ ID NO: 3939313 - DNA, 25 bp, Homo sapien
ctcctgcaggactgtttatgtcagg

SEQ ID NO: 3939314 - DNA, 25 bp, Homo sapien
ccttgctgctggctactacatcaat

SEQ ID NO: 3939315 - DNA, 25 bp, Homo sapien
ccagacccttcatatgtccttgctg

SEQ ID NO: 3939316 - DNA, 25 bp, Homo sapien
tgtcacagggacaagtccacctatt

SEQ ID NO: 3939317 - DNA, 25 bp, Homo sapien
cccatgtgggcgcaatgaaaacaaa

SEQ ID NO: 3939318 - DNA, 25 bp, Homo sapien
tgcatgcaggccttgatagtctcac

SEQ ID NO: 3939319 - DNA, 25 bp, Homo sapien
aatacttgccggtatgtccagctgc

SEQ ID NO: 3939320 - DNA, 25 bp, Homo sapien
ttcagagactcccactaagcatggc

SEQ ID NO: 3939321 - DNA, 25 bp, Homo sapien
tctccggaaagatgtatgatggctt

SEQ ID NO: 3939322 - DNA, 25 bp, Homo sapien
tattttcaaactctccggaaagatg

SEQ ID NO: 3939323 - DNA, 25 bp, Homo sapien
caggagttgtgagtcagcctttgga

SEQ ID NO: 3939324 - DNA, 25 bp, Homo sapien
cagtccgtggaatacaacttaattc

SEQ ID NO: 3939325 - DNA, 25 bp, Homo sapien
catgctgcccttgcaaatgctcatt

SEQ ID NO: 3939326 - DNA, 25 bp, Homo sapien
ttactaacaggcgacacaatggctt

SEQ ID NO: 3939327 - DNA, 25 bp, Homo sapien
tcactgggtgatgcactgatgccgc

SEQ ID NO: 3939328 - DNA, 25 bp, Homo sapien
ctcacaggttgattgaaattcccca

SEQ ID NO: 3939329 - DNA, 25 bp, Homo sapien
gattgcaagcatctcgagcagcaca

SEQ ID NO: 3939330 - DNA, 25 bp, Homo sapien
gggagcgccctgttgattgcaagca

SEQ ID NO: 3939331 - DNA, 25 bp, Homo sapien
gcagcacagtcatctacatcacaga

SEQ ID NO: 3939332 - DNA, 25 bp, Homo sapien
gatgcagtcatctctaagccttcta

SEQ ID NO: 3939333 - DNA, 25 bp, Homo sapien
catcttcctgcttcaagtgttgcac

SEQ ID NO: 3939334 - DNA, 25 bp, Homo sapien
gggaaaattctgagactcccatctt

SEQ ID NO: 3939335 - DNA, 25 bp, Homo sapien
tgccccagcctgtcccatatttttc

SEQ ID NO: 3939336 - DNA, 25 bp, Homo sapien
gtcccatatttttctaactgcaagg

SEQ ID NO: 3939337 - DNA, 25 bp, Homo sapien
gcagcataatggttttcgtagacca

SEQ ID NO: 3939338 - DNA, 25 bp, Homo sapien
gttttcgtagaccaacccacagcca

SEQ ID NO: 3939339 - DNA, 25 bp, Homo sapien
agttgcttttgtgccagtgagggag

SEQ ID NO: 3939340 - DNA, 25 bp, Homo sapien
gcataatggttttcgtagaccaacc

SEQ ID NO: 3939341 - DNA, 25 bp, Homo sapien
tgtggccctacgtaaagagctgctg

SEQ ID NO: 3939342 - DNA, 25 bp, Homo sapien
caggtgcagccgttggagaaacact

SEQ ID NO: 3939343 - DNA, 25 bp, Homo sapien
tacacataggtccacaggtgcagcc

SEQ ID NO: 3939344 - DNA, 25 bp, Homo sapien
aatctgagcagagtcaatagtctcc

SEQ ID NO: 3939345 - DNA, 25 bp, Homo sapien
gagtaaatctcataggtgttggtgg

SEQ ID NO: 3939346 - DNA, 25 bp, Homo sapien
taaatctcataggtgttggtggcca

SEQ ID NO: 3939347 - DNA, 25 bp, Homo sapien
tctcataggtgttggtggccatcct

SEQ ID NO: 3939348 - DNA, 25 bp, Homo sapien
aatctcataggtgttggtggccatc

SEQ ID NO: 3939349 - DNA, 25 bp, Homo sapien
cacagggcaaggctaaactactcat

SEQ ID NO: 3939350 - DNA, 25 bp, Homo sapien
gcacagggcaaggctaaactactca

SEQ ID NO: 3939351 - DNA, 25 bp, Homo sapien
tccctcttgggaacaaagatggtaa

SEQ ID NO: 3939352 - DNA, 25 bp, Homo sapien
tagatttgagcgtcatcacttacac

SEQ ID NO: 3939353 - DNA, 25 bp, Homo sapien
tatgggatgctaagggaagtacgta

SEQ ID NO: 3939354 - DNA, 25 bp, Homo sapien
gacttgttagcgaaacggctcagaa

SEQ ID NO: 3939355 - DNA, 25 bp, Homo sapien
aaacatgagagcgtgctaaggcacc

SEQ ID NO: 3939356 - DNA, 25 bp, Homo sapien
gggttgtcagcaactaagtaattcc

SEQ ID NO: 3939357 - DNA, 25 bp, Homo sapien
tcttacttcgatcaatgatggaggg

SEQ ID NO: 3939358 - DNA, 25 bp, Homo sapien
aagtaattcctaatcactgttggca

SEQ ID NO: 3939359 - DNA, 25 bp, Homo sapien
taatgagccgctgtcctaggtcctc

SEQ ID NO: 3939360 - DNA, 25 bp, Homo sapien
gcaggcatttgtttcctccctaact

SEQ ID NO: 3939361 - DNA, 25 bp, Homo sapien
gagaaaggacgggttctgcctaatg

SEQ ID NO: 3939362 - DNA, 25 bp, Homo sapien
atctcctccttctgttcggcaggca

SEQ ID NO: 3939363 - DNA, 25 bp, Homo sapien
tgcttccaagactctactgcgtggc

SEQ ID NO: 3939364 - DNA, 25 bp, Homo sapien
ggctgttccgactccctacagagct

SEQ ID NO: 3939365 - DNA, 25 bp, Homo sapien
taagtaccctactgtgcattcaggt

SEQ ID NO: 3939366 - DNA, 25 bp, Homo sapien
gagctgtctgctaaccatgcagtac

SEQ ID NO: 3939367 - DNA, 25 bp, Homo sapien
tcagtttgcaagcttccacaggagc

SEQ ID NO: 3939368 - DNA, 25 bp, Homo sapien
gatcatttccgctgtaactgatggc

SEQ ID NO: 3939369 - DNA, 25 bp, Homo sapien
gctgaagttcaaggattaagtagtc

SEQ ID NO: 3939370 - DNA, 25 bp, Homo sapien
gttcaaggattaagtagtcatcagt

SEQ ID NO: 3939371 - DNA, 25 bp, Homo sapien
cagaggcatctcctgttagtagaca

SEQ ID NO: 3939372 - DNA, 25 bp, Homo sapien
gactaaggtaaaacacgcctgcgct

SEQ ID NO: 3939373 - DNA, 25 bp, Homo sapien
aaatcatcgataaaaagcccttgga

SEQ ID NO: 3939374 - DNA, 25 bp, Homo sapien
tatattctagtaacggccacagcaa

SEQ ID NO: 3939375 - DNA, 25 bp, Homo sapien
aaggttatacgctcccttaatgtga

SEQ ID NO: 3939376 - DNA, 25 bp, Homo sapien
tcaggcggtatgaaaggttatacgc

SEQ ID NO: 3939377 - DNA, 25 bp, Homo sapien
aatgtgatccacacggagaagaacc

SEQ ID NO: 3939378 - DNA, 25 bp, Homo sapien
tcccttaatgtgatccacacggaga

SEQ ID NO: 3939379 - DNA, 25 bp, Homo sapien
cttgggtagccgtgaaaacagaaat

SEQ ID NO: 3939380 - DNA, 25 bp, Homo sapien
caatggcttaacaggcaagcagaca

SEQ ID NO: 3939381 - DNA, 25 bp, Homo sapien
caagagtatataacagtcaatggct

SEQ ID NO: 3939382 - DNA, 25 bp, Homo sapien
gattttctctgtcttccgactgcac

SEQ ID NO: 3939383 - DNA, 25 bp, Homo sapien
tattgataagtaccaagtgtcctcc

SEQ ID NO: 3939384 - DNA, 25 bp, Homo sapien
catctgatatggtcctcaaaggaga

SEQ ID NO: 3939385 - DNA, 25 bp, Homo sapien
tactcaagagtcaacaccaggtatg

SEQ ID NO: 3939386 - DNA, 25 bp, Homo sapien
tcacacgtggacagaatgggctatg

SEQ ID NO: 3939387 - DNA, 25 bp, Homo sapien
gactcttaatgcatttagggtcaac

SEQ ID NO: 3939388 - DNA, 25 bp, Homo sapien
catttagggtcaacagtaacatctt

SEQ ID NO: 3939389 - DNA, 25 bp, Homo sapien
cttaatgcatttagggtcaacagta

SEQ ID NO: 3939390 - DNA, 25 bp, Homo sapien
cagtaacatcttcatacataaaata

SEQ ID NO: 3939391 - DNA, 25 bp, Homo sapien
cagctggctgattgatatggaacac

SEQ ID NO: 3939392 - DNA, 25 bp, Homo sapien
tgaaatccaggagtgcagtccaaat

SEQ ID NO: 3939393 - DNA, 25 bp, Homo sapien
aaatcttctgcagatgttagcagca

SEQ ID NO: 3939394 - DNA, 25 bp, Homo sapien
tgattgatatggaacactttctgct

SEQ ID NO: 3939395 - DNA, 25 bp, Homo sapien
tagcgtggaacgtaaacctgagacc

SEQ ID NO: 3939396 - DNA, 25 bp, Homo sapien
tgttaagcaaggtactcaagagcct

SEQ ID NO: 3939397 - DNA, 25 bp, Homo sapien
aaagaccttggagcgtatgatcagc

SEQ ID NO: 3939398 - DNA, 25 bp, Homo sapien
tggccaggccctcattcaagaattt

SEQ ID NO: 3939399 - DNA, 25 bp, Homo sapien
gcatgttaacatagatgccatttgg

SEQ ID NO: 3939400 - DNA, 25 bp, Homo sapien
tcgcatttccaagcatgttaacata

SEQ ID NO: 3939401 - DNA, 25 bp, Homo sapien
tcagggtcgcttcgcatttccaagc

SEQ ID NO: 3939402 - DNA, 25 bp, Homo sapien
catgttaacatagatgccatttggg

SEQ ID NO: 3939403 - DNA, 25 bp, Homo sapien
gcaccctcaaaagccatgactcatg

SEQ ID NO: 3939404 - DNA, 25 bp, Homo sapien
catggtggcatgaccaagtaacgtc

SEQ ID NO: 3939405 - DNA, 25 bp, Homo sapien
tatagtcaattaaaagcaccctcaa

SEQ ID NO: 3939406 - DNA, 25 bp, Homo sapien
tggaggacctggctgctaaccaagg

SEQ ID NO: 3939407 - DNA, 25 bp, Homo sapien
tcaaagtctttgatcaacaccagcc

SEQ ID NO: 3939408 - DNA, 25 bp, Homo sapien
agtctttgatcaacaccagccagcc

SEQ ID NO: 3939409 - DNA, 25 bp, Homo sapien
tgtatcaacaattcaaaacactgaa

SEQ ID NO: 3939410 - DNA, 25 bp, Homo sapien
cagatttcaaagtctttgatcaaca

SEQ ID NO: 3939411 - DNA, 25 bp, Homo sapien
tgagttctgagtgtacaccaacctc

SEQ ID NO: 3939412 - DNA, 25 bp, Homo sapien
actctgcggcagtactgagttctga

SEQ ID NO: 3939413 - DNA, 25 bp, Homo sapien
ggatgggtctgccttactctgcggc

SEQ ID NO: 3939414 - DNA, 25 bp, Homo sapien
gagttctgagtgtacaccaacctca

SEQ ID NO: 3939415 - DNA, 25 bp, Homo sapien
aacagccactcacggggcttttggg

SEQ ID NO: 3939416 - DNA, 25 bp, Homo sapien
gaagccagtaggagcaggtgccctc

SEQ ID NO: 3939417 - DNA, 25 bp, Homo sapien
ccagtaggagcaggtgccctcagct

SEQ ID NO: 3939418 - DNA, 25 bp, Homo sapien
tcaaaacagccactcacggggcttt

SEQ ID NO: 3939419 - DNA, 25 bp, Homo sapien
gctggttatcctgtgttgatcagag

SEQ ID NO: 3939420 - DNA, 25 bp, Homo sapien
cctgctggttatcctgtgttgatca

SEQ ID NO: 3939421 - DNA, 25 bp, Homo sapien
tgctggttatcctgtgttgatcaga

SEQ ID NO: 3939422 - DNA, 25 bp, Homo sapien
ctggttatcctgtgttgatcagagg

SEQ ID NO: 3939423 - DNA, 25 bp, Homo sapien
aaatgaagcacccaattggtcagga

SEQ ID NO: 3939424 - DNA, 25 bp, Homo sapien
aagcacccaattggtcaggatcttg

SEQ ID NO: 3939425 - DNA, 25 bp, Homo sapien
gatcttgaactcaggatcctggctt

SEQ ID NO: 3939426 - DNA, 25 bp, Homo sapien
gaagcacccaattggtcaggatctt

SEQ ID NO: 3939427 - DNA, 25 bp, Homo sapien
tcagatggtacatgacaggtagaag

SEQ ID NO: 3939428 - DNA, 25 bp, Homo sapien
ggtacatgacaggtagaagtggcac

SEQ ID NO: 3939429 - DNA, 25 bp, Homo sapien
tacatgacaggtagaagtggcactt

SEQ ID NO: 3939430 - DNA, 25 bp, Homo sapien
atggtacatgacaggtagaagtggc

SEQ ID NO: 3939431 - DNA, 25 bp, Homo sapien
aatgcacttgaaggcctttgggcag

SEQ ID NO: 3939432 - DNA, 25 bp, Homo sapien
caggtgaatgcacttgaaggccttt

SEQ ID NO: 3939433 - DNA, 25 bp, Homo sapien
cacttgaaggcctttgggcagggcg

SEQ ID NO: 3939434 - DNA, 25 bp, Homo sapien
ttgaaggcctttgggcagggcgtgc

SEQ ID NO: 3939435 - DNA, 25 bp, Homo sapien
tcaggtattggttacagctgtcaga

SEQ ID NO: 3939436 - DNA, 25 bp, Homo sapien
actgtagaagtctaagcacgttgta

SEQ ID NO: 3939437 - DNA, 25 bp, Homo sapien
ggaagccttgctcctcgccaaaata

SEQ ID NO: 3939438 - DNA, 25 bp, Homo sapien
ctgtcagatcatgaacactgctggg

SEQ ID NO: 3939439 - DNA, 25 bp, Homo sapien
cattttattatgtatggagaagatt

SEQ ID NO: 3939440 - DNA, 25 bp, Homo sapien
tgctgataaagacagtaggggcttc

SEQ ID NO: 3939441 - DNA, 25 bp, Homo sapien
tcaactctttcacaaatcatctggg

SEQ ID NO: 3939442 - DNA, 25 bp, Homo sapien
atcatctggggccttcattttatta

SEQ ID NO: 3939443 - DNA, 25 bp, Homo sapien
catggatttacatccaggtaactgg

SEQ ID NO: 3939444 - DNA, 25 bp, Homo sapien
ccagagtcacggcattgtgcacaca

SEQ ID NO: 3939445 - DNA, 25 bp, Homo sapien
ttctctttggcgtgtgctcctgttc

SEQ ID NO: 3939446 - DNA, 25 bp, Homo sapien
tgctcctgttccagcgtctgagggt

SEQ ID NO: 3939447 - DNA, 25 bp, Homo sapien
tcgggaggtctcaaaagcccgcagc

SEQ ID NO: 3939448 - DNA, 25 bp, Homo sapien
aggcaggaaaaagctcaccacatac

SEQ ID NO: 3939449 - DNA, 25 bp, Homo sapien
agctcaccacatactccttgttggt

SEQ ID NO: 3939450 - DNA, 25 bp, Homo sapien
tcaccacatactccttgttggtctg

SEQ ID NO: 3939451 - DNA, 25 bp, Homo sapien
ggaaaaagctcaccacatactcctt

SEQ ID NO: 3939452 - DNA, 25 bp, Homo sapien
cagaataagtttataggatcctgat

SEQ ID NO: 3939453 - DNA, 25 bp, Homo sapien
gaataagtttataggatcctgatat

SEQ ID NO: 3939454 - DNA, 25 bp, Homo sapien
ccagaataagtttataggatcctga

SEQ ID NO: 3939455 - DNA, 25 bp, Homo sapien
taagtttataggatcctgatattcc

SEQ ID NO: 3939456 - DNA, 25 bp, Homo sapien
agtgagcacaccaatacactccagc

SEQ ID NO: 3939457 - DNA, 25 bp, Homo sapien
cacagccttttcaaaacatgagtcc

SEQ ID NO: 3939458 - DNA, 25 bp, Homo sapien
acacgttgcagtgagcacaccaata

SEQ ID NO: 3939459 - DNA, 25 bp, Homo sapien
gactaacacagacaaactctactaa

SEQ ID NO: 3939460 - DNA, 25 bp, Homo sapien
taattccctggggattgaatgtgct

SEQ ID NO: 3939461 - DNA, 25 bp, Homo sapien
cagactaattccctggggattgaat

SEQ ID NO: 3939462 - DNA, 25 bp, Homo sapien
ttccctggggattgaatgtgctcat

SEQ ID NO: 3939463 - DNA, 25 bp, Homo sapien
gactaattccctggggattgaatgt

SEQ ID NO: 3939464 - DNA, 25 bp, Homo sapien
tgcatggacgaacagagttttgccc

SEQ ID NO: 3939465 - DNA, 25 bp, Homo sapien
tcgagacctcatagcgtagcttgtc

SEQ ID NO: 3939466 - DNA, 25 bp, Homo sapien
caccttgaagtatgggctcgagacc

SEQ ID NO: 3939467 - DNA, 25 bp, Homo sapien
ttctcagagcaactaagccgccatc

SEQ ID NO: 3939468 - DNA, 25 bp, Homo sapien
ccttgaacccaagttatctcaaaca

SEQ ID NO: 3939469 - DNA, 25 bp, Homo sapien
ttgaacccaagttatctcaaacaga

SEQ ID NO: 3939470 - DNA, 25 bp, Homo sapien
cttgaacccaagttatctcaaacag

SEQ ID NO: 3939471 - DNA, 25 bp, Homo sapien
ttgactcctggacatctctataaag

SEQ ID NO: 3939472 - DNA, 25 bp, Homo sapien
tgactcctggacatctctataaaga

SEQ ID NO: 3939473 - DNA, 25 bp, Homo sapien
ttccccagtaaccaacaaagatgag

SEQ ID NO: 3939474 - DNA, 25 bp, Homo sapien
tgagtgcagcgaaatccagtttttc

SEQ ID NO: 3939475 - DNA, 25 bp, Homo sapien
cagtaaccaacaaagatgagaatag

SEQ ID NO: 3939476 - DNA, 25 bp, Homo sapien
tctttatttgatgagtgcagcgaaa

SEQ ID NO: 3939477 - DNA, 25 bp, Homo sapien
catcagtgaggtcacaagaatgcat

SEQ ID NO: 3939478 - DNA, 25 bp, Homo sapien
catggttggaatttggacaagagca

SEQ ID NO: 3939479 - DNA, 25 bp, Homo sapien
aaacgacgcccctgtcatcagtgag

SEQ ID NO: 3939480 - DNA, 25 bp, Homo sapien
gcatttgttagaataaacgacgccc

SEQ ID NO: 3939481 - DNA, 25 bp, Homo sapien
tcttgcagttattctgacgatcact

SEQ ID NO: 3939482 - DNA, 25 bp, Homo sapien
catcacacaagtgagagggtagcat

SEQ ID NO: 3939483 - DNA, 25 bp, Homo sapien
ctgaacgtcatcacacaagtgagag

SEQ ID NO: 3939484 - DNA, 25 bp, Homo sapien
gaacgtcatcacacaagtgagaggg

SEQ ID NO: 3939485 - DNA, 25 bp, Homo sapien
cgtcatcacacaagtgagagggtag

SEQ ID NO: 3939486 - DNA, 25 bp, Homo sapien
tggcttgctcaacattcgccaaacc

SEQ ID NO: 3939487 - DNA, 25 bp, Homo sapien
tattggcttgctcaacattcgccaa

SEQ ID NO: 3939488 - DNA, 25 bp, Homo sapien
ttggcttgctcaacattcgccaaac

SEQ ID NO: 3939489 - DNA, 25 bp, Homo sapien
cttattggcttgctcaacattcgcc

SEQ ID NO: 3939490 - DNA, 25 bp, Homo sapien
ccatcaactacactgattgccgatt

SEQ ID NO: 3939491 - DNA, 25 bp, Homo sapien
cactgattgccgatttctgtctgca

SEQ ID NO: 3939492 - DNA, 25 bp, Homo sapien
tctttttctggtatccatcaactac

SEQ ID NO: 3939493 - DNA, 25 bp, Homo sapien
ttttctggtatccatcaactacact

SEQ ID NO: 3939494 - DNA, 25 bp, Homo sapien
tttccgactgagaactctttgaggg

SEQ ID NO: 3939495 - DNA, 25 bp, Homo sapien
tctttgagggaagaattccttggac

SEQ ID NO: 3939496 - DNA, 25 bp, Homo sapien
ccaggctattactcgcttgcttaac

SEQ ID NO: 3939497 - DNA, 25 bp, Homo sapien
tctgcctcttttacggagttcccac

SEQ ID NO: 3939498 - DNA, 25 bp, Homo sapien
gaattaagatatgcaggtcccagct

SEQ ID NO: 3939499 - DNA, 25 bp, Homo sapien
cattgacacacgactggaaagcgca

SEQ ID NO: 3939500 - DNA, 25 bp, Homo sapien
tcatgatggtcggttgctgaactcc

SEQ ID NO: 3939501 - DNA, 25 bp, Homo sapien
tactcaggagatgtggtcatagccc

SEQ ID NO: 3939502 - DNA, 25 bp, Homo sapien
gcaccagtgagatcatccttacagc

SEQ ID NO: 3939503 - DNA, 25 bp, Homo sapien
aggaaggagttgtcacccaggcatc

SEQ ID NO: 3939504 - DNA, 25 bp, Homo sapien
gattactggggtattggctgcacca

SEQ ID NO: 3939505 - DNA, 25 bp, Homo sapien
tacagccttccttggtaactctgct

SEQ ID NO: 3939506 - DNA, 25 bp, Homo sapien
agagtgcacttcccacataaactct

SEQ ID NO: 3939507 - DNA, 25 bp, Homo sapien
tccttggctatcccagtcaggcaag

SEQ ID NO: 3939508 - DNA, 25 bp, Homo sapien
cttccttggctatcccagtcaggca

SEQ ID NO: 3939509 - DNA, 25 bp, Homo sapien
gagtgcacttcccacataaactcta

SEQ ID NO: 3939510 - DNA, 25 bp, Homo sapien
tatctggaccatcccaatagtatcc

SEQ ID NO: 3939511 - DNA, 25 bp, Homo sapien
taaagcaaccactaggatgacaaag

SEQ ID NO: 3939512 - DNA, 25 bp, Homo sapien
gtagagtttacaacctatgagcaac

SEQ ID NO: 3939513 - DNA, 25 bp, Homo sapien
tctttgttataagccagacccttca

SEQ ID NO: 3939514 - DNA, 25 bp, Homo sapien
ccttcttcaaagtctgcattggcaa

SEQ ID NO: 3939515 - DNA, 25 bp, Homo sapien
tcagtctccttcttcaaagtctgca

SEQ ID NO: 3939516 - DNA, 25 bp, Homo sapien
cttcaaagtctgcattggcaaatac

SEQ ID NO: 3939517 - DNA, 25 bp, Homo sapien
tctccttcttcaaagtctgcattgg

SEQ ID NO: 3939518 - DNA, 25 bp, Homo sapien
gtcaggagtgtgtcaaggtcagccc

SEQ ID NO: 3939519 - DNA, 25 bp, Homo sapien
agaaggggctgcagcgccatccact

SEQ ID NO: 3939520 - DNA, 25 bp, Homo sapien
gctgcagcgccatccactgactggt

SEQ ID NO: 3939521 - DNA, 25 bp, Homo sapien
cgccatccactgactggtcaggagt

SEQ ID NO: 3939522 - DNA, 25 bp, Homo sapien
gaacacaatcccctcagtcacagga

SEQ ID NO: 3939523 - DNA, 25 bp, Homo sapien
gagcagatgtacatgcaacagacat

SEQ ID NO: 3939524 - DNA, 25 bp, Homo sapien
cgcacttccagtgtgctgaacacaa

SEQ ID NO: 3939525 - DNA, 25 bp, Homo sapien
tgcctagacccacggacatatgcca

SEQ ID NO: 3939526 - DNA, 25 bp, Homo sapien
tagacctgttgacgttgaggagcct

SEQ ID NO: 3939527 - DNA, 25 bp, Homo sapien
tagagtagacctgttgacgttgagg

SEQ ID NO: 3939528 - DNA, 25 bp, Homo sapien
acctgttgacgttgaggagcctgct

SEQ ID NO: 3939529 - DNA, 25 bp, Homo sapien
tgctagagtagacctgttgacgttg

SEQ ID NO: 3939530 - DNA, 25 bp, Homo sapien
gagggaggtaataagatctcttgac

SEQ ID NO: 3939531 - DNA, 25 bp, Homo sapien
tcagcgtaaaggagggaggtaataa

SEQ ID NO: 3939532 - DNA, 25 bp, Homo sapien
aggagggaggtaataagatctcttg

SEQ ID NO: 3939533 - DNA, 25 bp, Homo sapien
taaaggagggaggtaataagatctc

SEQ ID NO: 3939534 - DNA, 25 bp, Homo sapien
gaccgtgtaagaaccatcatacatg

SEQ ID NO: 3939535 - DNA, 25 bp, Homo sapien
ctttgatcgagtctgtgctaatgag

SEQ ID NO: 3939536 - DNA, 25 bp, Homo sapien
gtgtgttctgccatatgtttctgta

SEQ ID NO: 3939537 - DNA, 25 bp, Homo sapien
tgtttctgtatgactgggaccgtgt

SEQ ID NO: 3939538 - DNA, 25 bp, Homo sapien
caatggacctcttttgtcttgggac

SEQ ID NO: 3939539 - DNA, 25 bp, Homo sapien
taaaccatttggtctcttatcatag

SEQ ID NO: 3939540 - DNA, 25 bp, Homo sapien
gctggtcaccaagacagtcatactc

SEQ ID NO: 3939541 - DNA, 25 bp, Homo sapien
tctcttatcatagacagatgaagac

SEQ ID NO: 3939542 - DNA, 25 bp, Homo sapien
tcttttcatgactaaaccatttggt

SEQ ID NO: 3939543 - DNA, 25 bp, Homo sapien
tgttctgattcatgggacagtgttt

SEQ ID NO: 3939544 - DNA, 25 bp, Homo sapien
agtgttttccatatccgattctgga

SEQ ID NO: 3939545 - DNA, 25 bp, Homo sapien
agctattgttctgattcatgggaca

SEQ ID NO: 3939546 - DNA, 25 bp, Homo sapien
ccgattctggatatgattagtatga

SEQ ID NO: 3939547 - DNA, 25 bp, Homo sapien
tttgtgatgaaagcagaatctctaa

SEQ ID NO: 3939548 - DNA, 25 bp, Homo sapien
gcatttcataaatgacttgtctttc

SEQ ID NO: 3939549 - DNA, 25 bp, Homo sapien
ggtttgtgatgaaagcagaatctct

SEQ ID NO: 3939550 - DNA, 25 bp, Homo sapien
tgtgatgaaagcagaatctctaata

SEQ ID NO: 3939551 - DNA, 25 bp, Homo sapien
caatcaaagcggagtcctggttgag

SEQ ID NO: 3939552 - DNA, 25 bp, Homo sapien
cggagtcctggttgagtggttttca

SEQ ID NO: 3939553 - DNA, 25 bp, Homo sapien
gacacaatcaaagcggagtcctggt

SEQ ID NO: 3939554 - DNA, 25 bp, Homo sapien
gttcatgacacaatcaaagcggagt

SEQ ID NO: 3939555 - DNA, 25 bp, Homo sapien
ggaacagctatgagagcccagtttc

SEQ ID NO: 3939556 - DNA, 25 bp, Homo sapien
tgtttgatcgtctgtccactaacaa

SEQ ID NO: 3939557 - DNA, 25 bp, Homo sapien
cactaacaagattgtactgaagctg

SEQ ID NO: 3939558 - DNA, 25 bp, Homo sapien
tcaggctgcggaacatccctggtgt

SEQ ID NO: 3939559 - DNA, 25 bp, Homo sapien
aatattgctatccaagtagttcaca

SEQ ID NO: 3939560 - DNA, 25 bp, Homo sapien
aataccattcgttctgcatgtaaga

SEQ ID NO: 3939561 - DNA, 25 bp, Homo sapien
catttaatggtacttgacatattgg

SEQ ID NO: 3939562 - DNA, 25 bp, Homo sapien
ccatgaagctaaatacagggaactc

SEQ ID NO: 3939563 - DNA, 25 bp, Homo sapien
taacggcaacagtcctcatgacatg

SEQ ID NO: 3939564 - DNA, 25 bp, Homo sapien
gagaataagcctagcatgaatcaga

SEQ ID NO: 3939565 - DNA, 25 bp, Homo sapien
tgtctgctgaacaattaagccagtg

SEQ ID NO: 3939566 - DNA, 25 bp, Homo sapien
gcattgtcatcgctaataacggcaa

SEQ ID NO: 3939567 - DNA, 25 bp, Homo sapien
gtaataaagccaacacgggagccca

SEQ ID NO: 3939568 - DNA, 25 bp, Homo sapien
cgggagcccaggctactccaacttg

SEQ ID NO: 3939569 - DNA, 25 bp, Homo sapien
gaaagggtcttgataacgtggaaca

SEQ ID NO: 3939570 - DNA, 25 bp, Homo sapien
gaattgatacgagagctttgggaaa

SEQ ID NO: 3939571 - DNA, 25 bp, Homo sapien
tgtaatgccttcattcaagagaagt

SEQ ID NO: 3939572 - DNA, 25 bp, Homo sapien
ttgtaatgcatggatttaaatctgc

SEQ ID NO: 3939573 - DNA, 25 bp, Homo sapien
taatgtcgccaaataggatgttcat

SEQ ID NO: 3939574 - DNA, 25 bp, Homo sapien
tcgctgttaataggattgtgggttc

SEQ ID NO: 3939575 - DNA, 25 bp, Homo sapien
atttaaacacatcattctgtagaga

SEQ ID NO: 3939576 - DNA, 25 bp, Homo sapien
gaaaatggatttgaaataccgagtg

SEQ ID NO: 3939577 - DNA, 25 bp, Homo sapien
aaaatggatttgaaataccgagtgc

SEQ ID NO: 3939578 - DNA, 25 bp, Homo sapien
taaacacatcattctgtagagaaaa

SEQ ID NO: 3939579 - DNA, 25 bp, Homo sapien
cagcgattacttctctgtccaaggt

SEQ ID NO: 3939580 - DNA, 25 bp, Homo sapien
cagtgagccggaacttggacctttc

SEQ ID NO: 3939581 - DNA, 25 bp, Homo sapien
tttaggctcttgatccactcccttt

SEQ ID NO: 3939582 - DNA, 25 bp, Homo sapien
tccgtgtcacggagacgctccctgt

SEQ ID NO: 3939583 - DNA, 25 bp, Homo sapien
aaagaaaatgccgccaagtaatttg

SEQ ID NO: 3939584 - DNA, 25 bp, Homo sapien
gaaaatgccgccaagtaatttgaag

SEQ ID NO: 3939585 - DNA, 25 bp, Homo sapien
gaagtagacctggttgtagttagac

SEQ ID NO: 3939586 - DNA, 25 bp, Homo sapien
agtagacctggttgtagttagacaa

SEQ ID NO: 3939587 - DNA, 25 bp, Homo sapien
ctaatgtgactttggtggagttcat

SEQ ID NO: 3939588 - DNA, 25 bp, Homo sapien
actaatgtgactttggtggagttca

SEQ ID NO: 3939589 - DNA, 25 bp, Homo sapien
cactgaacaggaactaatgtgactt

SEQ ID NO: 3939590 - DNA, 25 bp, Homo sapien
agaaacactgaacaggaactaatgt

SEQ ID NO: 3939591 - DNA, 25 bp, Homo sapien
cattgtcgtggtcgtcactgggtga

SEQ ID NO: 3939592 - DNA, 25 bp, Homo sapien
gcaagcactgcttatgatcatcaac

SEQ ID NO: 3939593 - DNA, 25 bp, Homo sapien
gagggtaagggtcggcttcacgcat

SEQ ID NO: 3939594 - DNA, 25 bp, Homo sapien
caaggactggtgacgtagcatctgt

SEQ ID NO: 3939595 - DNA, 25 bp, Homo sapien
tttccctcaggagtaaggaaataga

SEQ ID NO: 3939596 - DNA, 25 bp, Homo sapien
gctggaattagttttccctcaggag

SEQ ID NO: 3939597 - DNA, 25 bp, Homo sapien
aagacaaatggcctttgctggaatt

SEQ ID NO: 3939598 - DNA, 25 bp, Homo sapien
ctagatcttaaggtaccaaagacaa

SEQ ID NO: 3939599 - DNA, 25 bp, Homo sapien
taagaccctcctggtgtcatggtgt

SEQ ID NO: 3939600 - DNA, 25 bp, Homo sapien
tggtggctggcgaagtaagaccctc

SEQ ID NO: 3939601 - DNA, 25 bp, Homo sapien
tccaacttgaggagctgaacctgct

SEQ ID NO: 3939602 - DNA, 25 bp, Homo sapien
cagacaattacccagcatgatgccc

SEQ ID NO: 3939603 - DNA, 25 bp, Homo sapien
cccactttgacctccggatctttgc

SEQ ID NO: 3939604 - DNA, 25 bp, Homo sapien
ttccagggttgccaagaaggggtca

SEQ ID NO: 3939605 - DNA, 25 bp, Homo sapien
ctacttccagggttgccaagaaggg

SEQ ID NO: 3939606 - DNA, 25 bp, Homo sapien
ccactttgacctccggatctttgca

SEQ ID NO: 3939607 - DNA, 25 bp, Homo sapien
ccaggtaacaaatcccaagggcaat

SEQ ID NO: 3939608 - DNA, 25 bp, Homo sapien
gcctgtatggttccttcaaaatcag

SEQ ID NO: 3939609 - DNA, 25 bp, Homo sapien
cccaacatatagcaggcgagcaaca

SEQ ID NO: 3939610 - DNA, 25 bp, Homo sapien
tctgtattcctaggtgcctgtatgg

SEQ ID NO: 3939611 - DNA, 25 bp, Homo sapien
gaacgaagatgggtgggacaaagaa

SEQ ID NO: 3939612 - DNA, 25 bp, Homo sapien
acgaagatgggtgggacaaagaaag

SEQ ID NO: 3939613 - DNA, 25 bp, Homo sapien
cagggaacgaagatgggtgggacaa

SEQ ID NO: 3939614 - DNA, 25 bp, Homo sapien
catcagggaacgaagatgggtggga

SEQ ID NO: 3939615 - DNA, 25 bp, Homo sapien
ttggccaaaccacatcacgaagatc

SEQ ID NO: 3939616 - DNA, 25 bp, Homo sapien
tgagttcagtacaacactatcagcc

SEQ ID NO: 3939617 - DNA, 25 bp, Homo sapien
ggagcaagcagacaaccaactaagc

SEQ ID NO: 3939618 - DNA, 25 bp, Homo sapien
taggtcttgcgatgagctcgactcc

SEQ ID NO: 3939619 - DNA, 25 bp, Homo sapien
ggtgtctagatccaacacaagaatg

SEQ ID NO: 3939620 - DNA, 25 bp, Homo sapien
cacaagaatgttgctggtggcctta

SEQ ID NO: 3939621 - DNA, 25 bp, Homo sapien
agttaacagacttcatccagaaagg

SEQ ID NO: 3939622 - DNA, 25 bp, Homo sapien
tatgaactctgcctcaatgtgcggt

SEQ ID NO: 3939623 - DNA, 25 bp, Homo sapien
gaataactaactgaagcctgtggca

SEQ ID NO: 3939624 - DNA, 25 bp, Homo sapien
ccaaaactagggtgaaagactgctc

SEQ ID NO: 3939625 - DNA, 25 bp, Homo sapien
catgtgaggctagaaaccaggttca

SEQ ID NO: 3939626 - DNA, 25 bp, Homo sapien
aaaaatttgatgagccccggactgc

SEQ ID NO: 3939627 - DNA, 25 bp, Homo sapien
ctcttatcataggatttggccctta

SEQ ID NO: 3939628 - DNA, 25 bp, Homo sapien
cccttatcagatatgagtagtgcaa

SEQ ID NO: 3939629 - DNA, 25 bp, Homo sapien
gaccgctcataaaagcccaatgcat

SEQ ID NO: 3939630 - DNA, 25 bp, Homo sapien
gtgcaaagaccgctcataaaagccc

SEQ ID NO: 3939631 - DNA, 25 bp, Homo sapien
tatctcccaaattagagcaaggacc

SEQ ID NO: 3939632 - DNA, 25 bp, Homo sapien
tgttaagatgaccaaatcctcgttt

SEQ ID NO: 3939633 - DNA, 25 bp, Homo sapien
ccctgagatagaaataacctctgaa

SEQ ID NO: 3939634 - DNA, 25 bp, Homo sapien
gatgacgacattctagactgctgac

SEQ ID NO: 3939635 - DNA, 25 bp, Homo sapien
ttagtcattgcaaaaatccctttgg

SEQ ID NO: 3939636 - DNA, 25 bp, Homo sapien
ctcaccatataaatctgacttcgat

SEQ ID NO: 3939637 - DNA, 25 bp, Homo sapien
tggtaggcaagcactcggtataacg

SEQ ID NO: 3939638 - DNA, 25 bp, Homo sapien
gacttcgatatagatcttttcccaa

SEQ ID NO: 3939639 - DNA, 25 bp, Homo sapien
tgtaatatgggtagtaagtcatgca

SEQ ID NO: 3939640 - DNA, 25 bp, Homo sapien
tgcataaaaccctataaaagctcat

SEQ ID NO: 3939641 - DNA, 25 bp, Homo sapien
cttagcaatgtaatatgggtagtaa

SEQ ID NO: 3939642 - DNA, 25 bp, Homo sapien
ggtagtaagtcatgcataaaaccct

SEQ ID NO: 3939643 - DNA, 25 bp, Homo sapien
gattcagtactgagttggcctctgt

SEQ ID NO: 3939644 - DNA, 25 bp, Homo sapien
tgctacattggtcctactgtctggg

SEQ ID NO: 3939645 - DNA, 25 bp, Homo sapien
ccacactctggggattcagtactga

SEQ ID NO: 3939646 - DNA, 25 bp, Homo sapien
tttccctatctgtgctacattggtc

SEQ ID NO: 3939647 - DNA, 25 bp, Homo sapien
tacaatttcggaggatttcacaaca

SEQ ID NO: 3939648 - DNA, 25 bp, Homo sapien
tttcggaggatttcacaacaccatg

SEQ ID NO: 3939649 - DNA, 25 bp, Homo sapien
caatttcggaggatttcacaacacc

SEQ ID NO: 3939650 - DNA, 25 bp, Homo sapien
tttacaatttcggaggatttcacaa

SEQ ID NO: 3939651 - DNA, 25 bp, Homo sapien
atcacaatgacttccagaggcaccg

SEQ ID NO: 3939652 - DNA, 25 bp, Homo sapien
gagagttttgccattgacatcagtg

SEQ ID NO: 3939653 - DNA, 25 bp, Homo sapien
aaagatcggtcggttgtcattctga

SEQ ID NO: 3939654 - DNA, 25 bp, Homo sapien
tgtgggtgacccttccatgacgtgg

SEQ ID NO: 3939655 - DNA, 25 bp, Homo sapien
ctaaaggtaagccaatgtgacatac

SEQ ID NO: 3939656 - DNA, 25 bp, Homo sapien
tttccaagccattacgctaaaggta

SEQ ID NO: 3939657 - DNA, 25 bp, Homo sapien
acaaagatcaaagtgtgcctctttc

SEQ ID NO: 3939658 - DNA, 25 bp, Homo sapien
gacagtccctagaatccacaaagat

SEQ ID NO: 3939659 - DNA, 25 bp, Homo sapien
tcaaagccctgctatagcacaaagt

SEQ ID NO: 3939660 - DNA, 25 bp, Homo sapien
tcggccatgccttagagacttagat

SEQ ID NO: 3939661 - DNA, 25 bp, Homo sapien
ggactttcacaaaggtaagctggat

SEQ ID NO: 3939662 - DNA, 25 bp, Homo sapien
tatttacatggtgcccaacatcggc

SEQ ID NO: 3939663 - DNA, 25 bp, Homo sapien
cttctataacagtaggcacatgcat

SEQ ID NO: 3939664 - DNA, 25 bp, Homo sapien
tcatgcacatcttctaagggaaggg

SEQ ID NO: 3939665 - DNA, 25 bp, Homo sapien
ttccagagagagatatcaaacatcc

SEQ ID NO: 3939666 - DNA, 25 bp, Homo sapien
cattatacttaggagtgacttcagc

SEQ ID NO: 3939667 - DNA, 25 bp, Homo sapien
catcaaaagcagctcacagagaggg

SEQ ID NO: 3939668 - DNA, 25 bp, Homo sapien
ggcctctttaatcgctttcctcatt

SEQ ID NO: 3939669 - DNA, 25 bp, Homo sapien
tgcacatcagctcgtttaagaagat

SEQ ID NO: 3939670 - DNA, 25 bp, Homo sapien
catcaaaccgaaattctagggtgtt

SEQ ID NO: 3939671 - DNA, 25 bp, Homo sapien
cactgcgtgctttatagtccaaccc

SEQ ID NO: 3939672 - DNA, 25 bp, Homo sapien
gattctatttcactgcgtgctttat

SEQ ID NO: 3939673 - DNA, 25 bp, Homo sapien
cgtgctttatagtccaacccagagg

SEQ ID NO: 3939674 - DNA, 25 bp, Homo sapien
tatttcactgcgtgctttatagtcc

SEQ ID NO: 3939675 - DNA, 25 bp, Homo sapien
tccaggaatgattcaccaaaacaat

SEQ ID NO: 3939676 - DNA, 25 bp, Homo sapien
caaagaccattatgttctgctgatc

SEQ ID NO: 3939677 - DNA, 25 bp, Homo sapien
gctgagcagccggaatggtctcctg

SEQ ID NO: 3939678 - DNA, 25 bp, Homo sapien
caataccccggagttcagtgctgag

SEQ ID NO: 3939679 - DNA, 25 bp, Homo sapien
atgtctgtggctctgcaaaagcaac

SEQ ID NO: 3939680 - DNA, 25 bp, Homo sapien
tcaatgtctgtggctctgcaaaagc

SEQ ID NO: 3939681 - DNA, 25 bp, Homo sapien
tgtggctctgcaaaagcaacagctc

SEQ ID NO: 3939682 - DNA, 25 bp, Homo sapien
gtggctctgcaaaagcaacagctca

SEQ ID NO: 3939683 - DNA, 25 bp, Homo sapien
taaatacgggcagagagatccaagt

SEQ ID NO: 3939684 - DNA, 25 bp, Homo sapien
cgcgcctagccaacgatatgaaagt

SEQ ID NO: 3939685 - DNA, 25 bp, Homo sapien
ccaagtggaggagatcgtttcagat

SEQ ID NO: 3939686 - DNA, 25 bp, Homo sapien
tacttgagtagcaggagatattgga

SEQ ID NO: 3939687 - DNA, 25 bp, Homo sapien
tgtgaacagagcagcacatacactg

SEQ ID NO: 3939688 - DNA, 25 bp, Homo sapien
tcctgaagtgggtacgagttccaac

SEQ ID NO: 3939689 - DNA, 25 bp, Homo sapien
gaggaacacacagcgcaaggtactt

SEQ ID NO: 3939690 - DNA, 25 bp, Homo sapien
gacaatgtacaatgcacaacccagg

SEQ ID NO: 3939691 - DNA, 25 bp, Homo sapien
gcaggcaattagttctcagtggaga

SEQ ID NO: 3939692 - DNA, 25 bp, Homo sapien
gaaagaacagcccttaagttgagga

SEQ ID NO: 3939693 - DNA, 25 bp, Homo sapien
agtgagccgaaacctgctgcaggca

SEQ ID NO: 3939694 - DNA, 25 bp, Homo sapien
tagtaaacaactagaagtgagccga

SEQ ID NO: 3939695 - DNA, 25 bp, Homo sapien
gggcttcgatgaaattgagtgtttc

SEQ ID NO: 3939696 - DNA, 25 bp, Homo sapien
agccacagaccccataatgtatgca

SEQ ID NO: 3939697 - DNA, 25 bp, Homo sapien
cagaccccataatgtatgcattcaa

SEQ ID NO: 3939698 - DNA, 25 bp, Homo sapien
caaagctgtatgaaggggcttcgat

SEQ ID NO: 3939699 - DNA, 25 bp, Homo sapien
tgctcagagagaaccgtcagtacct

SEQ ID NO: 3939700 - DNA, 25 bp, Homo sapien
tcccagatgagggcttggaactgct

SEQ ID NO: 3939701 - DNA, 25 bp, Homo sapien
gtcccagatgagggcttggaactgc

SEQ ID NO: 3939702 - DNA, 25 bp, Homo sapien
gctcagagagaaccgtcagtacctt

SEQ ID NO: 3939703 - DNA, 25 bp, Homo sapien
gcacgtcagtaaagatgaactttgt

SEQ ID NO: 3939704 - DNA, 25 bp, Homo sapien
tgtctcctccgcacaaaactgtggg

SEQ ID NO: 3939705 - DNA, 25 bp, Homo sapien
ttcctggcagccatggcacgtcagt

SEQ ID NO: 3939706 - DNA, 25 bp, Homo sapien
ggcttagcagctgccctggttcctg

SEQ ID NO: 3939707 - DNA, 25 bp, Homo sapien
gttcaggcaattctcttgtctcagg

SEQ ID NO: 3939708 - DNA, 25 bp, Homo sapien
ttcaggcaattctcttgtctcaggc

SEQ ID NO: 3939709 - DNA, 25 bp, Homo sapien
tcaggcaattctcttgtctcaggct

SEQ ID NO: 3939710 - DNA, 25 bp, Homo sapien
aatctttgtctgtgtgagtgtaggg

SEQ ID NO: 3939711 - DNA, 25 bp, Homo sapien
aagtccatcagataatgttctgcat

SEQ ID NO: 3939712 - DNA, 25 bp, Homo sapien
cttataaaataaagtccatcagata

SEQ ID NO: 3939713 - DNA, 25 bp, Homo sapien
tcagataatgttctgcatattaacc

SEQ ID NO: 3939714 - DNA, 25 bp, Homo sapien
aataaagtccatcagataatgttct

SEQ ID NO: 3939715 - DNA, 25 bp, Homo sapien
tgaacacctgttgcggaagggcctc

SEQ ID NO: 3939716 - DNA, 25 bp, Homo sapien
gaatgtgctcctaatgatggtcctg

SEQ ID NO: 3939717 - DNA, 25 bp, Homo sapien
gcaaaaacgcagctagaactccatc

SEQ ID NO: 3939718 - DNA, 25 bp, Homo sapien
tgtgggtgcagtgctccaagctcac

SEQ ID NO: 3939719 - DNA, 25 bp, Homo sapien
ccagggaccacgtacttcaaattca

SEQ ID NO: 3939720 - DNA, 25 bp, Homo sapien
gagagaacatccaggcttatgggcc

SEQ ID NO: 3939721 - DNA, 25 bp, Homo sapien
ttgttgctggtccaaccccagggac

SEQ ID NO: 3939722 - DNA, 25 bp, Homo sapien
gatacagctgtatttggcatgccta

SEQ ID NO: 3939723 - DNA, 25 bp, Homo sapien
gaatacttctctagacatcacaaac

SEQ ID NO: 3939724 - DNA, 25 bp, Homo sapien
tttcaccgaggtacttctcttgttc

SEQ ID NO: 3939725 - DNA, 25 bp, Homo sapien
tatcacttcatccacgaatacttct

SEQ ID NO: 3939726 - DNA, 25 bp, Homo sapien
acattatttctttcaccgaggtact

SEQ ID NO: 3939727 - DNA, 25 bp, Homo sapien
aatgaacattcacgtccttggagaa

SEQ ID NO: 3939728 - DNA, 25 bp, Homo sapien
cagagacacggcagcaatggatgga

SEQ ID NO: 3939729 - DNA, 25 bp, Homo sapien
tccagaaggtgcactaaaatgaaca

SEQ ID NO: 3939730 - DNA, 25 bp, Homo sapien
ggtgggccagtgatcacaccaggct

SEQ ID NO: 3939731 - DNA, 25 bp, Homo sapien
gaggtctgctttgagtgttccatat

SEQ ID NO: 3939732 - DNA, 25 bp, Homo sapien
ggtctgctttgagtgttccatataa

SEQ ID NO: 3939733 - DNA, 25 bp, Homo sapien
gctttgagtgttccatataattccc

SEQ ID NO: 3939734 - DNA, 25 bp, Homo sapien
gagtgttccatataattccccaaca

SEQ ID NO: 3939735 - DNA, 25 bp, Homo sapien
tcagtgcctatactcagctgcgcag

SEQ ID NO: 3939736 - DNA, 25 bp, Homo sapien
gcctatactcagctgcgcaggcaac

SEQ ID NO: 3939737 - DNA, 25 bp, Homo sapien
gtgcctatactcagctgcgcaggca

SEQ ID NO: 3939738 - DNA, 25 bp, Homo sapien
atggccccagaactgcaccggctca

SEQ ID NO: 3939739 - DNA, 25 bp, Homo sapien
ctgggcaatagcagtgcagcagtgt

SEQ ID NO: 3939740 - DNA, 25 bp, Homo sapien
gggcaatagcagtgcagcagtgtgc

SEQ ID NO: 3939741 - DNA, 25 bp, Homo sapien
aatagcagtgcagcagtgtgcccat

SEQ ID NO: 3939742 - DNA, 25 bp, Homo sapien
gcaatagcagtgcagcagtgtgccc

SEQ ID NO: 3939743 - DNA, 25 bp, Homo sapien
gaacatgttgggagatggcttgtca

SEQ ID NO: 3939744 - DNA, 25 bp, Homo sapien
ttataccgcaggagggcattatcgg

SEQ ID NO: 3939745 - DNA, 25 bp, Homo sapien
caggcgtctgctgacggatattata

SEQ ID NO: 3939746 - DNA, 25 bp, Homo sapien
gcaggtgacacaacagtgacaatgt

SEQ ID NO: 3939747 - DNA, 25 bp, Homo sapien
aaggtggcctggcacccgaatgcag

SEQ ID NO: 3939748 - DNA, 25 bp, Homo sapien
gaggggctctagcttcagaaaatcg

SEQ ID NO: 3939749 - DNA, 25 bp, Homo sapien
tccctcacatgaggggctctagctt

SEQ ID NO: 3939750 - DNA, 25 bp, Homo sapien
cctggcacccgaatgcaggcattta

SEQ ID NO: 3939751 - DNA, 25 bp, Homo sapien
ctcctctccctgaataagagctgat

SEQ ID NO: 3939752 - DNA, 25 bp, Homo sapien
gaataagagctgatgttgaggtaga

SEQ ID NO: 3939753 - DNA, 25 bp, Homo sapien
cataagagtgagtggagacagagtt

SEQ ID NO: 3939754 - DNA, 25 bp, Homo sapien
cttctccagcgtgacaccagctgct

SEQ ID NO: 3939755 - DNA, 25 bp, Homo sapien
tctggcataagagtgagtggagaca

SEQ ID NO: 3939756 - DNA, 25 bp, Homo sapien
ctggtcctctggcataagagtgagt

SEQ ID NO: 3939757 - DNA, 25 bp, Homo sapien
ttcctgggtgttcatgcaaatgttg

SEQ ID NO: 3939758 - DNA, 25 bp, Homo sapien
tcctgggtgttcatgcaaatgttgt

SEQ ID NO: 3939759 - DNA, 25 bp, Homo sapien
cattctaatgcaaggatcataggtt

SEQ ID NO: 3939760 - DNA, 25 bp, Homo sapien
gaaaaccattctaatgcaaggatca

SEQ ID NO: 3939761 - DNA, 25 bp, Homo sapien
aaccattctaatgcaaggatcatag

SEQ ID NO: 3939762 - DNA, 25 bp, Homo sapien
ctaatgcaaggatcataggtttctc

SEQ ID NO: 3939763 - DNA, 25 bp, Homo sapien
cagagcactcttgatctgtcagagc

SEQ ID NO: 3939764 - DNA, 25 bp, Homo sapien
agagcactcttgatctgtcagagca

SEQ ID NO: 3939765 - DNA, 25 bp, Homo sapien
cagccacgttggagaatacatttcc

SEQ ID NO: 3939766 - DNA, 25 bp, Homo sapien
gagtcagaacaagtcatcacccctg

SEQ ID NO: 3939767 - DNA, 25 bp, Homo sapien
gaaagctttgccagacgtgttgaca

SEQ ID NO: 3939768 - DNA, 25 bp, Homo sapien
gagaatgctttgagttcaccctggc

SEQ ID NO: 3939769 - DNA, 25 bp, Homo sapien
ttccacaggttcagtggtcacctcc

SEQ ID NO: 3939770 - DNA, 25 bp, Homo sapien
ccacaggttcagtggtcacctccat

SEQ ID NO: 3939771 - DNA, 25 bp, Homo sapien
cttccacaggttcagtggtcacctc

SEQ ID NO: 3939772 - DNA, 25 bp, Homo sapien
tccacaggttcagtggtcacctcca

SEQ ID NO: 3939773 - DNA, 25 bp, Homo sapien
cttggtcgtgattcgcgaagctacc

SEQ ID NO: 3939774 - DNA, 25 bp, Homo sapien
ggcctggtatgacttggtcgtgatt

SEQ ID NO: 3939775 - DNA, 25 bp, Homo sapien
gttacatgggaatcttaacagggcc

SEQ ID NO: 3939776 - DNA, 25 bp, Homo sapien
tgggaatcttaacagggcctggtat

SEQ ID NO: 3939777 - DNA, 25 bp, Homo sapien
atggcaaatataaattcggagtgat

SEQ ID NO: 3939778 - DNA, 25 bp, Homo sapien
gagatggcaaatataaattcggagt

SEQ ID NO: 3939779 - DNA, 25 bp, Homo sapien
ctgagatggcaaatataaattcgga

SEQ ID NO: 3939780 - DNA, 25 bp, Homo sapien
gatggcaaatataaattcggagtga

SEQ ID NO: 3939781 - DNA, 25 bp, Homo sapien
gtgtaaaattgggaaactgctattc

SEQ ID NO: 3939782 - DNA, 25 bp, Homo sapien
tattcctgtcattcgccaagcactc

SEQ ID NO: 3939783 - DNA, 25 bp, Homo sapien
cttgggtttcaatttattaccatct

SEQ ID NO: 3939784 - DNA, 25 bp, Homo sapien
cgccaagcactctccgaaagcaaat

SEQ ID NO: 3939785 - DNA, 25 bp, Homo sapien
tcttggtacgaatgtgaacattcac

SEQ ID NO: 3939786 - DNA, 25 bp, Homo sapien
ctcttggtacgaatgtgaacattca

SEQ ID NO: 3939787 - DNA, 25 bp, Homo sapien
ccaggtgaattcctgctcctttgct

SEQ ID NO: 3939788 - DNA, 25 bp, Homo sapien
tcttgctccaggtgaattcctgctc

SEQ ID NO: 3939789 - DNA, 25 bp, Homo sapien
ttgctccaggtgaattcctgctcct

SEQ ID NO: 3939790 - DNA, 25 bp, Homo sapien
tctagttcttgctccaggtgaattc

SEQ ID NO: 3939791 - DNA, 25 bp, Homo sapien
tccagccatatcttgagcctcgatg

SEQ ID NO: 3939792 - DNA, 25 bp, Homo sapien
tgtggccgtgcctgttaatccaaca

SEQ ID NO: 3939793 - DNA, 25 bp, Homo sapien
ttgtcatcgatcatgatcgtggctg

SEQ ID NO: 3939794 - DNA, 25 bp, Homo sapien
tcttggtgaattttggtgagtgatc

SEQ ID NO: 3939795 - DNA, 25 bp, Homo sapien
tgtggtacgtgaattaacatcaatc

SEQ ID NO: 3939796 - DNA, 25 bp, Homo sapien
gctgtggtacgtgaattaacatcaa

SEQ ID NO: 3939797 - DNA, 25 bp, Homo sapien
aggtgctgtggtacgtgaattaaca

SEQ ID NO: 3939798 - DNA, 25 bp, Homo sapien
tgctgtggtacgtgaattaacatca

SEQ ID NO: 3939799 - DNA, 25 bp, Homo sapien
tcatcgtatgcagtgaagctgttct

SEQ ID NO: 3939800 - DNA, 25 bp, Homo sapien
catcgtatgcagtgaagctgttctg

SEQ ID NO: 3939801 - DNA, 25 bp, Homo sapien
cttcaggaagcgttcagcaaatgct

SEQ ID NO: 3939802 - DNA, 25 bp, Homo sapien
tcaggaagcgttcagcaaatgctct

SEQ ID NO: 3939803 - DNA, 25 bp, Homo sapien
tcagtatttgttgggcatcaaccat

SEQ ID NO: 3939804 - DNA, 25 bp, Homo sapien
gcgtttccaacctaaatttgcatga

SEQ ID NO: 3939805 - DNA, 25 bp, Homo sapien
gagtttattaatccccatgacctga

SEQ ID NO: 3939806 - DNA, 25 bp, Homo sapien
gaagtcatacgtacaagctattagg

SEQ ID NO: 3939807 - DNA, 25 bp, Homo sapien
gctccgaggccgaaggggacgacca

SEQ ID NO: 3939808 - DNA, 25 bp, Homo sapien
ctccgaggccgaaggggacgaccat

SEQ ID NO: 3939809 - DNA, 25 bp, Homo sapien
aggaagatgaaaccggcacacgcgg

SEQ ID NO: 3939810 - DNA, 25 bp, Homo sapien
tcaacacgtcctgatggctggtgct

SEQ ID NO: 3939811 - DNA, 25 bp, Homo sapien
aacaattacaacgaggaggaagatg

SEQ ID NO: 3939812 - DNA, 25 bp, Homo sapien
tctagcattgactccggtcatgaaa

SEQ ID NO: 3939813 - DNA, 25 bp, Homo sapien
gatgatggcttggcagaaataaatt

SEQ ID NO: 3939814 - DNA, 25 bp, Homo sapien
atgatggcttggcagaaataaattg

SEQ ID NO: 3939815 - DNA, 25 bp, Homo sapien
tgcgctcgttgactgcatctgctgg

SEQ ID NO: 3939816 - DNA, 25 bp, Homo sapien
cactagaaccatgccagcaaatgca

SEQ ID NO: 3939817 - DNA, 25 bp, Homo sapien
atctgctggctgcaaaatgcctttc

SEQ ID NO: 3939818 - DNA, 25 bp, Homo sapien
gcctttcttacattcactagaacca

SEQ ID NO: 3939819 - DNA, 25 bp, Homo sapien
ccgacatcttgcaaagctgccttgt

SEQ ID NO: 3939820 - DNA, 25 bp, Homo sapien
tgatcccgacatcttgcaaagctgc

SEQ ID NO: 3939821 - DNA, 25 bp, Homo sapien
cctgatcccgacatcttgcaaagct

SEQ ID NO: 3939822 - DNA, 25 bp, Homo sapien
ttggcccctgatcccgacatcttgc

SEQ ID NO: 3939823 - DNA, 25 bp, Homo sapien
ggtgtctggcacatcctaagaagtg

SEQ ID NO: 3939824 - DNA, 25 bp, Homo sapien
cagacagacacaaaggatgccaaag

SEQ ID NO: 3939825 - DNA, 25 bp, Homo sapien
gaatcaaggtgagagatttgccaac

SEQ ID NO: 3939826 - DNA, 25 bp, Homo sapien
gaagtgggtacctgctatccaaagg

SEQ ID NO: 3939827 - DNA, 25 bp, Homo sapien
ctctgtaagcctcggtacttcctta

SEQ ID NO: 3939828 - DNA, 25 bp, Homo sapien
ctttgtcactcaacagctgggtgcc

SEQ ID NO: 3939829 - DNA, 25 bp, Homo sapien
tgtcactcaacagctgggtgccctg

SEQ ID NO: 3939830 - DNA, 25 bp, Homo sapien
cttgccattcgggcctctgctcagt

SEQ ID NO: 3939831 - DNA, 25 bp, Homo sapien
tcgttctctctgacagactcttgtc

SEQ ID NO: 3939832 - DNA, 25 bp, Homo sapien
tgtcgttctctctgacagactcttg

SEQ ID NO: 3939833 - DNA, 25 bp, Homo sapien
ctgtgtcgttctctctgacagactc

SEQ ID NO: 3939834 - DNA, 25 bp, Homo sapien
gttctctctgacagactcttgtctt

SEQ ID NO: 3939835 - DNA, 25 bp, Homo sapien
gctgttctatggcaaggagttcaca

SEQ ID NO: 3939836 - DNA, 25 bp, Homo sapien
gctggcagtgctgaaggatgccact

SEQ ID NO: 3939837 - DNA, 25 bp, Homo sapien
tgcgaattcttgctgttctatggca

SEQ ID NO: 3939838 - DNA, 25 bp, Homo sapien
cactggcagggaatgttgcgaattc

SEQ ID NO: 3939839 - DNA, 25 bp, Homo sapien
ccttgctggtgaggatacgggacct

SEQ ID NO: 3939840 - DNA, 25 bp, Homo sapien
catgagaccttgctggtgaggatat

SEQ ID NO: 3939841 - DNA, 25 bp, Homo sapien
gacatgagaccttgctggtgaggat

SEQ ID NO: 3939842 - DNA, 25 bp, Homo sapien
tgaggacatgagaccttgctggtga

SEQ ID NO: 3939843 - DNA, 25 bp, Homo sapien
accttgctggtgaggatacgggacc

SEQ ID NO: 3939844 - DNA, 25 bp, Homo sapien
ccttgctggtgaggatacgggacct

SEQ ID NO: 3939845 - DNA, 25 bp, Homo sapien
tgaggacatgagaccttgctggtga

SEQ ID NO: 3939846 - DNA, 25 bp, Homo sapien
acatgagaccttgctggtgaggata

SEQ ID NO: 3939847 - DNA, 25 bp, Homo sapien
aagaacttggcacagacttccctgc

SEQ ID NO: 3939848 - DNA, 25 bp, Homo sapien
cctgaagagtcggagtcatgtctct

SEQ ID NO: 3939849 - DNA, 25 bp, Homo sapien
catgggaggtagctcacacaggaaa

SEQ ID NO: 3939850 - DNA, 25 bp, Homo sapien
cagatgctagaggtgagaattccag

SEQ ID NO: 3939851 - DNA, 25 bp, Homo sapien
caatcacaagtaggaagagggactt

SEQ ID NO: 3939852 - DNA, 25 bp, Homo sapien
tacaccaagaatgcatgttcttcct

SEQ ID NO: 3939853 - DNA, 25 bp, Homo sapien
tggatgagccacaaagacaatcaca

SEQ ID NO: 3939854 - DNA, 25 bp, Homo sapien
tttattatacaccaagaatgcatgt

SEQ ID NO: 3939855 - DNA, 25 bp, Homo sapien
tcatagacattcaggatgaggctgc

SEQ ID NO: 3939856 - DNA, 25 bp, Homo sapien
atcatagacattcaggatgaggctg

SEQ ID NO: 3939857 - DNA, 25 bp, Homo sapien
ggtagaaacgctgtcatgtccagtg

SEQ ID NO: 3939858 - DNA, 25 bp, Homo sapien
tgtccagtgcataagtgagaagttg

SEQ ID NO: 3939859 - DNA, 25 bp, Homo sapien
cttagaaaaccaggtatcaatcatg

SEQ ID NO: 3939860 - DNA, 25 bp, Homo sapien
tcatgtgggcatgaaatgggctaag

SEQ ID NO: 3939861 - DNA, 25 bp, Homo sapien
ctgcaaacaaagcagatggtaatgg

SEQ ID NO: 3939862 - DNA, 25 bp, Homo sapien
caaacaaagcagatggtaatggtca

SEQ ID NO: 3939863 - DNA, 25 bp, Homo sapien
tgcaaacaaagcagatggtaatggt

SEQ ID NO: 3939864 - DNA, 25 bp, Homo sapien
gcaaacaaagcagatggtaatggtc

SEQ ID NO: 3939865 - DNA, 25 bp, Homo sapien
ttgatgatggtgtaggcagccctcc

SEQ ID NO: 3939866 - DNA, 25 bp, Homo sapien
tttgacaacagaaagcatcccttcg

SEQ ID NO: 3939867 - DNA, 25 bp, Homo sapien
gggtcatccttatcttcaactgtca

SEQ ID NO: 3939868 - DNA, 25 bp, Homo sapien
tgtggatttcaaagctctgcccggg

SEQ ID NO: 3939869 - DNA, 25 bp, Homo sapien
tcggagattggtagattcagaggcc

SEQ ID NO: 3939870 - DNA, 25 bp, Homo sapien
gcaagagatttcttgactgcaatgt

SEQ ID NO: 3939871 - DNA, 25 bp, Homo sapien
ccaagtgttataggtctggagcgag

SEQ ID NO: 3939872 - DNA, 25 bp, Homo sapien
atttctcggagattggtagattcag

SEQ ID NO: 3939873 - DNA, 25 bp, Homo sapien
gcagacagaagggtctcaggatgca

SEQ ID NO: 3939874 - DNA, 25 bp, Homo sapien
cagacagaagggtctcaggatgcac

SEQ ID NO: 3939875 - DNA, 25 bp, Homo sapien
cgtcgggtacgagtgggtcttcatt

SEQ ID NO: 3939876 - DNA, 25 bp, Homo sapien
aagactgggccctcgttgacatcca

SEQ ID NO: 3939877 - DNA, 25 bp, Homo sapien
tggaaggcagaaatttcatagtcca

SEQ ID NO: 3939878 - DNA, 25 bp, Homo sapien
gggtccgtggcattcactgtcagca

SEQ ID NO: 3939879 - DNA, 25 bp, Homo sapien
cgtctgtggttccggagccactcac

SEQ ID NO: 3939880 - DNA, 25 bp, Homo sapien
cccgtctgtggttccggagccactc

SEQ ID NO: 3939881 - DNA, 25 bp, Homo sapien
tcccgtctgtggttccggagccact

SEQ ID NO: 3939882 - DNA, 25 bp, Homo sapien
ccgtctgtggttccggagccactca

SEQ ID NO: 3939883 - DNA, 25 bp, Homo sapien
tgggaacatcatcccggttgatcac

SEQ ID NO: 3939884 - DNA, 25 bp, Homo sapien
aacatcatcccggttgatcactagc

SEQ ID NO: 3939885 - DNA, 25 bp, Homo sapien
cccggttgatcactagccaaggtgc

SEQ ID NO: 3939886 - DNA, 25 bp, Homo sapien
tcagtcagcggccctctgtgctgtg

SEQ ID NO: 3939887 - DNA, 25 bp, Homo sapien
ccctctgatgtttggacaccccttg

SEQ ID NO: 3939888 - DNA, 25 bp, Homo sapien
cttggagatcaaggcgccctttgct

SEQ ID NO: 3939889 - DNA, 25 bp, Homo sapien
ggcgccctttgctgacttgagcatt

SEQ ID NO: 3939890 - DNA, 25 bp, Homo sapien
tttagtgagaagattccctctgatg

SEQ ID NO: 3939891 - DNA, 25 bp, Homo sapien
tgcacctggaggaacggttgctacg

SEQ ID NO: 3939892 - DNA, 25 bp, Homo sapien
tgtgcacctggaggaacggttgcta

SEQ ID NO: 3939893 - DNA, 25 bp, Homo sapien
gtgcacctggaggaacggttgctac

SEQ ID NO: 3939894 - DNA, 25 bp, Homo sapien
tactccagccagaaagacatagcca

SEQ ID NO: 3939895 - DNA, 25 bp, Homo sapien
gtactccagccagaaagacatagcc

SEQ ID NO: 3939896 - DNA, 25 bp, Homo sapien
tccagccagaaagacatagccagac

SEQ ID NO: 3939897 - DNA, 25 bp, Homo sapien
agccagaaagacatagccagactct

SEQ ID NO: 3939898 - DNA, 25 bp, Homo sapien
caatgaaagctgtcataaatccatc

SEQ ID NO: 3939899 - DNA, 25 bp, Homo sapien
aatgaaagctgtcataaatccatca

SEQ ID NO: 3939900 - DNA, 25 bp, Homo sapien
gcaatgaaagctgtcataaatccat

SEQ ID NO: 3939901 - DNA, 25 bp, Homo sapien
agcaatgaaagctgtcataaatcca

SEQ ID NO: 3939902 - DNA, 25 bp, Homo sapien
gtagtggtgcagtctcagctcacca

SEQ ID NO: 3939903 - DNA, 25 bp, Homo sapien
caacctctgcctcccaggttcaagt

SEQ ID NO: 3939904 - DNA, 25 bp, Homo sapien
tgattctcttgcctcagcctcctga

SEQ ID NO: 3939905 - DNA, 25 bp, Homo sapien
ccacagccctgttctgtagcattct

SEQ ID NO: 3939906 - DNA, 25 bp, Homo sapien
cgtggtgctgaagtggggctggatc

SEQ ID NO: 3939907 - DNA, 25 bp, Homo sapien
agtggggctggatcgtagtaacgtc

SEQ ID NO: 3939908 - DNA, 25 bp, Homo sapien
tggtgctgaagtggggctggatcgt

SEQ ID NO: 3939909 - DNA, 25 bp, Homo sapien
gctgaagtggggctggatcgtagta

SEQ ID NO: 3939910 - DNA, 25 bp, Homo sapien
agtgctgggcaattggtgggtgctg

SEQ ID NO: 3939911 - DNA, 25 bp, Homo sapien
tgctgggcaattggtgggtgctgac

SEQ ID NO: 3939912 - DNA, 25 bp, Homo sapien
caggagtgctgggcaattggtgggt

SEQ ID NO: 3939913 - DNA, 25 bp, Homo sapien
ggagtgctgggcaattggtgggtgc

SEQ ID NO: 3939914 - DNA, 25 bp, Homo sapien
aagtgttacggaccatgcagtattt

SEQ ID NO: 3939915 - DNA, 25 bp, Homo sapien
ttacggaccatgcagtatttgaaac

SEQ ID NO: 3939916 - DNA, 25 bp, Homo sapien
gtgttacggaccatgcagtatttga

SEQ ID NO: 3939917 - DNA, 25 bp, Homo sapien
gaaagtgttacggaccatgcagtat

SEQ ID NO: 3939918 - DNA, 25 bp, Homo sapien
tcttgcacttgataaggcactctgg

SEQ ID NO: 3939919 - DNA, 25 bp, Homo sapien
cctctatgggtggtgagtcttgcac

SEQ ID NO: 3939920 - DNA, 25 bp, Homo sapien
catgtggccatgagcaaaaggacgc

SEQ ID NO: 3939921 - DNA, 25 bp, Homo sapien
aaaggacgcttttgtcgtctgcagg

SEQ ID NO: 3939922 - DNA, 25 bp, Homo sapien
acatcttgcaaccaggcctctttgc

SEQ ID NO: 3939923 - DNA, 25 bp, Homo sapien
tcacatcttgcaaccaggcctcttt

SEQ ID NO: 3939924 - DNA, 25 bp, Homo sapien
tgtacaggtacagcacctgtgcttc

SEQ ID NO: 3939925 - DNA, 25 bp, Homo sapien
ttgccttgctggcttgtacaggtac

SEQ ID NO: 3939926 - DNA, 25 bp, Homo sapien
ccagtggagcgtggcaaaggtgtct

SEQ ID NO: 3939927 - DNA, 25 bp, Homo sapien
tgggtttgggattgcatcaatttca

SEQ ID NO: 3939928 - DNA, 25 bp, Homo sapien
tgtctggcaccctgtctttgctgct

SEQ ID NO: 3939929 - DNA, 25 bp, Homo sapien
gctctcatgagtcggattccctctt

SEQ ID NO: 3939930 - DNA, 25 bp, Homo sapien
tggttgtgtccctgctgacacttca

SEQ ID NO: 3939931 - DNA, 25 bp, Homo sapien
ccagctggttgtgtccctgctgaca

SEQ ID NO: 3939932 - DNA, 25 bp, Homo sapien
gctgacacttcatcaatcatcttgc

SEQ ID NO: 3939933 - DNA, 25 bp, Homo sapien
agctggttgtgtccctgctgacact

SEQ ID NO: 3939934 - DNA, 25 bp, Homo sapien
catgtaacatgaactaagagctggg

SEQ ID NO: 3939935 - DNA, 25 bp, Homo sapien
ctttttgaccaatcggccaggcgcg

SEQ ID NO: 3939936 - DNA, 25 bp, Homo sapien
gggagaacagctcaagaccacggaa

SEQ ID NO: 3939937 - DNA, 25 bp, Homo sapien
gacagacggacactcatttgctgag

SEQ ID NO: 3939938 - DNA, 25 bp, Homo sapien
cagtagaattaatcacctcactagg

SEQ ID NO: 3939939 - DNA, 25 bp, Homo sapien
ctttcccagtagaattaatcacctc

SEQ ID NO: 3939940 - DNA, 25 bp, Homo sapien
gtttcaagaccccactcatacgtct

SEQ ID NO: 3939941 - DNA, 25 bp, Homo sapien
tacgtctcctctcgttcatccagtg

SEQ ID NO: 3939942 - DNA, 25 bp, Homo sapien
acatccgactcagcagagcctaggg

SEQ ID NO: 3939943 - DNA, 25 bp, Homo sapien
cctaggggaacaatgttttgatgct

SEQ ID NO: 3939944 - DNA, 25 bp, Homo sapien
gtttcagaaacatccgactcagcag

SEQ ID NO: 3939945 - DNA, 25 bp, Homo sapien
tcagaaacatccgactcagcagagc

SEQ ID NO: 3939946 - DNA, 25 bp, Homo sapien
tgaaaaaaatccccacaatgtcaga

SEQ ID NO: 3939947 - DNA, 25 bp, Homo sapien
ctgaaaaaaatccccacaatgtcag

SEQ ID NO: 3939948 - DNA, 25 bp, Homo sapien
gaaaaaaatccccacaatgtcagac

SEQ ID NO: 3939949 - DNA, 25 bp, Homo sapien
aaaaaaatccccacaatgtcagact

SEQ ID NO: 3939950 - DNA, 25 bp, Homo sapien
taatattcagccaacctgctgggtc

SEQ ID NO: 3939951 - DNA, 25 bp, Homo sapien
gaagagagcagtgtacacgctgttg

SEQ ID NO: 3939952 - DNA, 25 bp, Homo sapien
cacagctgtggtgtcaacagtccca

SEQ ID NO: 3939953 - DNA, 25 bp, Homo sapien
tgtacacgctgttgtcgacaaatgg

SEQ ID NO: 3939954 - DNA, 25 bp, Homo sapien
ttgatggtctttgtcaagtactcac

SEQ ID NO: 3939955 - DNA, 25 bp, Homo sapien
cagaaaagtatacccttgatggtct

SEQ ID NO: 3939956 - DNA, 25 bp, Homo sapien
ccttgatggtctttgtcaagtactc

SEQ ID NO: 3939957 - DNA, 25 bp, Homo sapien
agcagaaaagtatacccttgatggt

SEQ ID NO: 3939958 - DNA, 25 bp, Homo sapien
ctggttccctgttctatcaaatgaa

SEQ ID NO: 3939959 - DNA, 25 bp, Homo sapien
tccctgttctatcaaatgaatcatc

SEQ ID NO: 3939960 - DNA, 25 bp, Homo sapien
atatttcatcgtgtcagtttcctcc

SEQ ID NO: 3939961 - DNA, 25 bp, Homo sapien
ctgatatttcatcgtgtcagtttcc

SEQ ID NO: 3939962 - DNA, 25 bp, Homo sapien
tggaagttatgagtacaagtggttt

SEQ ID NO: 3939963 - DNA, 25 bp, Homo sapien
cttggaagttatgagtacaagtggt

SEQ ID NO: 3939964 - DNA, 25 bp, Homo sapien
ttggaagttatgagtacaagtggtt

SEQ ID NO: 3939965 - DNA, 25 bp, Homo sapien
atgaggaaatgaggacttgtaggca

SEQ ID NO: 3939966 - DNA, 25 bp, Homo sapien
tgaggaaatgaggacttgtaggcac

SEQ ID NO: 3939967 - DNA, 25 bp, Homo sapien
gatgctcccaaaatgactacactga

SEQ ID NO: 3939968 - DNA, 25 bp, Homo sapien
tcctccagggttatcagcaaagtcc

SEQ ID NO: 3939969 - DNA, 25 bp, Homo sapien
ggagatcttccagactttatcagga

SEQ ID NO: 3939970 - DNA, 25 bp, Homo sapien
ggcatcatcacagacttcagctact

SEQ ID NO: 3939971 - DNA, 25 bp, Homo sapien
gcaatgactaatgtgatgctcacct

SEQ ID NO: 3939972 - DNA, 25 bp, Homo sapien
tgggaacccgcaacatagagactgg

SEQ ID NO: 3939973 - DNA, 25 bp, Homo sapien
gagactggatctttaagcttcccct

SEQ ID NO: 3939974 - DNA, 25 bp, Homo sapien
ccctgatgtcatgtgcggtggcaat

SEQ ID NO: 3939975 - DNA, 25 bp, Homo sapien
tttccctgaatctgtcaccatgatg

SEQ ID NO: 3939976 - DNA, 25 bp, Homo sapien
ccatgatgggcaggttgtagtttgc

SEQ ID NO: 3939977 - DNA, 25 bp, Homo sapien
tgtaccctgagatctgtgatattcg

SEQ ID NO: 3939978 - DNA, 25 bp, Homo sapien
cccctgccgcgttgcagtccacttt

SEQ ID NO: 3939979 - DNA, 25 bp, Homo sapien
taccacctagtttgcaggctagcaa

SEQ ID NO: 3939980 - DNA, 25 bp, Homo sapien
cataatgtagagagaaacaggcctc

SEQ ID NO: 3939981 - DNA, 25 bp, Homo sapien
tagactagttaactaatctgggcgc

SEQ ID NO: 3939982 - DNA, 25 bp, Homo sapien
tctgggcgcattttcattagctcaa

SEQ ID NO: 3939983 - DNA, 25 bp, Homo sapien
cgaattatctgtgctttgacaaggt

SEQ ID NO: 3939984 - DNA, 25 bp, Homo sapien
tcccatctctaacccttcatctgaa

SEQ ID NO: 3939985 - DNA, 25 bp, Homo sapien
caacgtttagcccaattgctgtaca

SEQ ID NO: 3939986 - DNA, 25 bp, Homo sapien
tgctgtacagccgaattatctgtgc

SEQ ID NO: 3939987 - DNA, 25 bp, Homo sapien
aatggtagcacacgtgggtcggcca

SEQ ID NO: 3939988 - DNA, 25 bp, Homo sapien
gaagtgggaaatccttggcaacctg

SEQ ID NO: 3939989 - DNA, 25 bp, Homo sapien
acaggtgcccctacttacagtgaga

SEQ ID NO: 3939990 - DNA, 25 bp, Homo sapien
gatgggatggctccccttagacgag

SEQ ID NO: 3939991 - DNA, 25 bp, Homo sapien
caccgtgcccaggtaatttttatag

SEQ ID NO: 3939992 - DNA, 25 bp, Homo sapien
ccgtgcccaggtaatttttatagct

SEQ ID NO: 3939993 - DNA, 25 bp, Homo sapien
gacaaagccattattagagaaagca

SEQ ID NO: 3939994 - DNA, 25 bp, Homo sapien
gcaggccgtgtctgtccataatacg

SEQ ID NO: 3939995 - DNA, 25 bp, Homo sapien
gactagggcgtggtataaaattctg

SEQ ID NO: 3939996 - DNA, 25 bp, Homo sapien
gggtttaatgcctttgcaggccgtg

SEQ ID NO: 3939997 - DNA, 25 bp, Homo sapien
aaaggcatctcatggcagactgtgt

SEQ ID NO: 3939998 - DNA, 25 bp, Homo sapien
catagtgtgcgttcaagagcctgtc

SEQ ID NO: 3939999 - DNA, 25 bp, Homo sapien
tgtctgtgcaattccagcagaggcg

SEQ ID NO: 3940000 - DNA, 25 bp, Homo sapien
aggtgcctgcccgaagtctcttttg

SEQ ID NO: 3940001 - DNA, 25 bp, Homo sapien
cagtacgactgtggattcgggacac

SEQ ID NO: 3940002 - DNA, 25 bp, Homo sapien
gcatcaaaacgaggcttctccagga

SEQ ID NO: 3940003 - DNA, 25 bp, Homo sapien
tcaggatcacggcatcagatggcag

SEQ ID NO: 3940004 - DNA, 25 bp, Homo sapien
catgctgaccttgatgcgggaggcc

SEQ ID NO: 3940005 - DNA, 25 bp, Homo sapien
tcaccttaccctagttcgtggcgag

SEQ ID NO: 3940006 - DNA, 25 bp, Homo sapien
tcgtggcgagctctaataaaaagcc

SEQ ID NO: 3940007 - DNA, 25 bp, Homo sapien
cctacagaaggctaactgaaagcac

SEQ ID NO: 3940008 - DNA, 25 bp, Homo sapien
taaaaagccacaagctgtcactagt

SEQ ID NO: 3940009 - DNA, 25 bp, Homo sapien
tgacaccctcagatcatatcatgag

SEQ ID NO: 3940010 - DNA, 25 bp, Homo sapien
tcatgaggtggacaagatgagtcca

SEQ ID NO: 3940011 - DNA, 25 bp, Homo sapien
gagaatggtccgtctcatctttgag

SEQ ID NO: 3940012 - DNA, 25 bp, Homo sapien
cccatgctgagaactggtacttctg

SEQ ID NO: 3940013 - DNA, 25 bp, Homo sapien
agatggtctaagactaaacacacaa

SEQ ID NO: 3940014 - DNA, 25 bp, Homo sapien
gtgtttagaccagactgtactaaag

SEQ ID NO: 3940015 - DNA, 25 bp, Homo sapien
attcttttaccatccacaacaccgg

SEQ ID NO: 3940016 - DNA, 25 bp, Homo sapien
gtttcacaaacaagttgcacatttc

SEQ ID NO: 3940017 - DNA, 25 bp, Homo sapien
tacacttccgtttgtccgctcagtc

SEQ ID NO: 3940018 - DNA, 25 bp, Homo sapien
gagtagtagtttctcccgcaccgga

SEQ ID NO: 3940019 - DNA, 25 bp, Homo sapien
cgcgcgcttccgttccaaggagcgg

SEQ ID NO: 3940020 - DNA, 25 bp, Homo sapien
ttctcgcgacgagactggcagctcg

SEQ ID NO: 3940021 - DNA, 25 bp, Homo sapien
ccccgatgcccagcttggcggtgat

SEQ ID NO: 3940022 - DNA, 25 bp, Homo sapien
ctccccgatgcccagcttggcggtg

SEQ ID NO: 3940023 - DNA, 25 bp, Homo sapien
ccgatgcccagcttggcggtgatgt

SEQ ID NO: 3940024 - DNA, 25 bp, Homo sapien
cccgatgcccagcttggcggtgatg

SEQ ID NO: 3940025 - DNA, 25 bp, Homo sapien
ccgaggtgaggtcctgcacggtctt

SEQ ID NO: 3940026 - DNA, 25 bp, Homo sapien
caccgaggtgaggtcctgcacggtc

SEQ ID NO: 3940027 - DNA, 25 bp, Homo sapien
aggtcctgcacggtcttggggtcag

SEQ ID NO: 3940028 - DNA, 25 bp, Homo sapien
gtcctgcacggtcttggggtcagtc

SEQ ID NO: 3940029 - DNA, 25 bp, Homo sapien
ggaaggccgcggcctccggccctca

SEQ ID NO: 3940030 - DNA, 25 bp, Homo sapien
gaaggccgcggcctccggccctcac

SEQ ID NO: 3940031 - DNA, 25 bp, Homo sapien
cagggcttggcccggcgccgcccgg

SEQ ID NO: 3940032 - DNA, 25 bp, Homo sapien
tgtccagcagggcttggcccggcgc

SEQ ID NO: 3940033 - DNA, 25 bp, Homo sapien
aatgatctggtcagacatggtctga

SEQ ID NO: 3940034 - DNA, 25 bp, Homo sapien
ccaatgatctggtcagacatggtct

SEQ ID NO: 3940035 - DNA, 25 bp, Homo sapien
ttctcccaatgatctggtcagacat

SEQ ID NO: 3940036 - DNA, 25 bp, Homo sapien
tcccaatgatctggtcagacatggt

SEQ ID NO: 3940037 - DNA, 25 bp, Homo sapien
gaggtccgcgatattcttttccaga

SEQ ID NO: 3940038 - DNA, 25 bp, Homo sapien
catgaggtccgcgatattcttttcc

SEQ ID NO: 3940039 - DNA, 25 bp, Homo sapien
tgtgtcatgaggtccgcgatattct

SEQ ID NO: 3940040 - DNA, 25 bp, Homo sapien
agcctgtgtcatgaggtccgcgata

SEQ ID NO: 3940041 - DNA, 25 bp, Homo sapien
tatcttgctgtgtaggtactttgaa

SEQ ID NO: 3940042 - DNA, 25 bp, Homo sapien
tatgtcaagttaccaagaaagtctc

SEQ ID NO: 3940043 - DNA, 25 bp, Homo sapien
ggtaaaagcttaatgtggccacaat

SEQ ID NO: 3940044 - DNA, 25 bp, Homo sapien
gaaagtctccagaatttaagccatt

SEQ ID NO: 3940045 - DNA, 25 bp, Homo sapien
tcttgtggtaagataatcagtcagt

SEQ ID NO: 3940046 - DNA, 25 bp, Homo sapien
tctctggataagaataacgatgaca

SEQ ID NO: 3940047 - DNA, 25 bp, Homo sapien
gatttactcacacagtgaatgaacc

SEQ ID NO: 3940048 - DNA, 25 bp, Homo sapien
cagtcagttgatggcagttttgatt

SEQ ID NO: 3940049 - DNA, 25 bp, Homo sapien
ggaaaaatgccagattccagtataa

SEQ ID NO: 3940050 - DNA, 25 bp, Homo sapien
aaatgccagattccagtataaatta

SEQ ID NO: 3940051 - DNA, 25 bp, Homo sapien
tataatataaaacctgtctacacat

SEQ ID NO: 3940052 - DNA, 25 bp, Homo sapien
gctgcaaaaagccattcgatcttct

SEQ ID NO: 3940053 - DNA, 25 bp, Homo sapien
tacaaactaactatatactaggtga

SEQ ID NO: 3940054 - DNA, 25 bp, Homo sapien
atatactaggtgataagaatgcata

SEQ ID NO: 3940055 - DNA, 25 bp, Homo sapien
tatactaggtgataagaatgcatac

SEQ ID NO: 3940056 - DNA, 25 bp, Homo sapien
gggaaatcactctacaaactaacta

SEQ ID NO: 3940057 - DNA, 25 bp, Homo sapien
tccaaacagcaactactacaaaagg

SEQ ID NO: 3940058 - DNA, 25 bp, Homo sapien
aaaaaatctgacaatgttatgcaag

SEQ ID NO: 3940059 - DNA, 25 bp, Homo sapien
acacatcaacttttatccaaacagc

SEQ ID NO: 3940060 - DNA, 25 bp, Homo sapien
aaatgacttcacagaaatacactaa

SEQ ID NO: 3940061 - DNA, 25 bp, Homo sapien
catcaccagggacgcaggtttcgga

SEQ ID NO: 3940062 - DNA, 25 bp, Homo sapien
tccattacttgaggaggtcgactcc

SEQ ID NO: 3940063 - DNA, 25 bp, Homo sapien
tattctagccaagcaactggcatgg

SEQ ID NO: 3940064 - DNA, 25 bp, Homo sapien
ttcggatggtctggtcaatgctgca

SEQ ID NO: 3940065 - DNA, 25 bp, Homo sapien
gatttcaggcacctttattcatggc

SEQ ID NO: 3940066 - DNA, 25 bp, Homo sapien
gaattacatcatcggacggttcgca

SEQ ID NO: 3940067 - DNA, 25 bp, Homo sapien
gaaaagttctcaagtggctgcagct

SEQ ID NO: 3940068 - DNA, 25 bp, Homo sapien
taaattttgagatccagccagtggg

SEQ ID NO: 3940069 - DNA, 25 bp, Homo sapien
tgatacgggtgaaagcagctagcgc

SEQ ID NO: 3940070 - DNA, 25 bp, Homo sapien
aagattcttaattatggccccagcg

SEQ ID NO: 3940071 - DNA, 25 bp, Homo sapien
ttctgataggaaaccgagccctggg

SEQ ID NO: 3940072 - DNA, 25 bp, Homo sapien
aacacaggttctaattgaggcgcac

SEQ ID NO: 3940073 - DNA, 25 bp, Homo sapien
tcaagtcttcatggcgtgagggctc

SEQ ID NO: 3940074 - DNA, 25 bp, Homo sapien
tttccaagctgcaagcactgtgtcg

SEQ ID NO: 3940075 - DNA, 25 bp, Homo sapien
gtcactagcacaaagctccccattg

SEQ ID NO: 3940076 - DNA, 25 bp, Homo sapien
gcaagcactgtgtcgtactcccagt

SEQ ID NO: 3940077 - DNA, 25 bp, Homo sapien
tgtcgtactcccagtcactagcaca

SEQ ID NO: 3940078 - DNA, 25 bp, Homo sapien
cctctgtgaatagtgtggatgggat

SEQ ID NO: 3940079 - DNA, 25 bp, Homo sapien
tctgtgaatagtgtggatgggatag

SEQ ID NO: 3940080 - DNA, 25 bp, Homo sapien
tgtgaatagtgtggatgggatagga

SEQ ID NO: 3940081 - DNA, 25 bp, Homo sapien
ctctgtgaatagtgtggatgggata

SEQ ID NO: 3940082 - DNA, 25 bp, Homo sapien
agaatctggaggtgagtcggaggat

SEQ ID NO: 3940083 - DNA, 25 bp, Homo sapien
gggtgctttcatgaagtagaatctg

SEQ ID NO: 3940084 - DNA, 25 bp, Homo sapien
gcaggttcctgggacaagatggtga

SEQ ID NO: 3940085 - DNA, 25 bp, Homo sapien
tggactgaccattttaaggggtgct

SEQ ID NO: 3940086 - DNA, 25 bp, Homo sapien
agcccgttgcctgcggttgagcctg

SEQ ID NO: 3940087 - DNA, 25 bp, Homo sapien
tgccacacgaatgcaaccagcccgt

SEQ ID NO: 3940088 - DNA, 25 bp, Homo sapien
cgcgcgctcctgtctacacaacagg

SEQ ID NO: 3940089 - DNA, 25 bp, Homo sapien
cgtgaactgggattgccctcctggc

SEQ ID NO: 3940090 - DNA, 25 bp, Homo sapien
ttttgcttcaggaaattgcccagtt

SEQ ID NO: 3940091 - DNA, 25 bp, Homo sapien
gacaccacgcatattgcaggaatat

SEQ ID NO: 3940092 - DNA, 25 bp, Homo sapien
cacatttatgagacaccacgcatat

SEQ ID NO: 3940093 - DNA, 25 bp, Homo sapien
tattttgcttcaggaaattgcccag

SEQ ID NO: 3940094 - DNA, 25 bp, Homo sapien
tctccacggaaacgatgtccagact

SEQ ID NO: 3940095 - DNA, 25 bp, Homo sapien
ggctcttctccacggaaacgatgtc

SEQ ID NO: 3940096 - DNA, 25 bp, Homo sapien
tcttctccacggaaacgatgtccag

SEQ ID NO: 3940097 - DNA, 25 bp, Homo sapien
tccacggaaacgatgtccagactct

SEQ ID NO: 3940098 - DNA, 25 bp, Homo sapien
tcaccgcctggacctgagaagtgct

SEQ ID NO: 3940099 - DNA, 25 bp, Homo sapien
gcctggacctgagaagtgcttccct

SEQ ID NO: 3940100 - DNA, 25 bp, Homo sapien
ccgcctggacctgagaagtgcttcc

SEQ ID NO: 3940101 - DNA, 25 bp, Homo sapien
ggtcaccgcctggacctgagaagtg

SEQ ID NO: 3940102 - DNA, 25 bp, Homo sapien
cccagttcacacgatggaggcccac

SEQ ID NO: 3940103 - DNA, 25 bp, Homo sapien
aggcccacggggctctcggcaccgc

SEQ ID NO: 3940104 - DNA, 25 bp, Homo sapien
ccacggggctctcggcaccgcatca

SEQ ID NO: 3940105 - DNA, 25 bp, Homo sapien
gatggaggcccacggggctctcggc

SEQ ID NO: 3940106 - DNA, 25 bp, Homo sapien
tccaatgatggtaattaacacagag

SEQ ID NO: 3940107 - DNA, 25 bp, Homo sapien
gggtaatagtgagcatttcaaagcc

SEQ ID NO: 3940108 - DNA, 25 bp, Homo sapien
tcctcgtccctcagtagttctttct

SEQ ID NO: 3940109 - DNA, 25 bp, Homo sapien
ttctgtctgaagaagccctttagtt

SEQ ID NO: 3940110 - DNA, 25 bp, Homo sapien
cacaaatgcttgaggcttggtgcag

SEQ ID NO: 3940111 - DNA, 25 bp, Homo sapien
gttgacatctggctagtaaatttcc

SEQ ID NO: 3940112 - DNA, 25 bp, Homo sapien
ccatagagttgaatacatgctttga

SEQ ID NO: 3940113 - DNA, 25 bp, Homo sapien
gtgcctagccaggttccatagagtt

SEQ ID NO: 3940114 - DNA, 25 bp, Homo sapien
cagacgaggcttgttccctggatgc

SEQ ID NO: 3940115 - DNA, 25 bp, Homo sapien
tacagacgaggcttgttccctggat

SEQ ID NO: 3940116 - DNA, 25 bp, Homo sapien
catctttacagacgaggcttgttcc

SEQ ID NO: 3940117 - DNA, 25 bp, Homo sapien
tttctgcatctttacagacgaggct

SEQ ID NO: 3940118 - DNA, 25 bp, Homo sapien
caaccgcagcgggaggagacgcctg

SEQ ID NO: 3940119 - DNA, 25 bp, Homo sapien
gaggagacgcctggccgtcaagcct

SEQ ID NO: 3940120 - DNA, 25 bp, Homo sapien
gcagcgggaggagacgcctggccgt

SEQ ID NO: 3940121 - DNA, 25 bp, Homo sapien
gccgcgggggcaaccgcagcgggag

SEQ ID NO: 3940122 - DNA, 25 bp, Homo sapien
tgtcttctcgcgcagctcgtaggcc

SEQ ID NO: 3940123 - DNA, 25 bp, Homo sapien
aagaggccgcgatagcgcggcacca

SEQ ID NO: 3940124 - DNA, 25 bp, Homo sapien
cgccgtccagcttgctgatgtggtg

SEQ ID NO: 3940125 - DNA, 25 bp, Homo sapien
agcccaccgtagaagctcacgaagt

SEQ ID NO: 3940126 - DNA, 25 bp, Homo sapien
gaatgaatcgtgattaggaagtagc

SEQ ID NO: 3940127 - DNA, 25 bp, Homo sapien
aaaattgtgcatacgttttcctggg

SEQ ID NO: 3940128 - DNA, 25 bp, Homo sapien
tgggatcctctcacactcttacgtg

SEQ ID NO: 3940129 - DNA, 25 bp, Homo sapien
tacgtgctaaaaaccataggccctg

SEQ ID NO: 3940130 - DNA, 25 bp, Homo sapien
tcatgggcagtcagatgtggactca

SEQ ID NO: 3940131 - DNA, 25 bp, Homo sapien
ctttgacgcctgagaaagagttgca

SEQ ID NO: 3940132 - DNA, 25 bp, Homo sapien
cctgttaaagggtgaaaggactcag

SEQ ID NO: 3940133 - DNA, 25 bp, Homo sapien
taagcactagggcacgaaagaggcc

SEQ ID NO: 3940134 - DNA, 25 bp, Homo sapien
taatagcgtatctggcaaccaatgc

SEQ ID NO: 3940135 - DNA, 25 bp, Homo sapien
gaattgacttgaccacccaagatac

SEQ ID NO: 3940136 - DNA, 25 bp, Homo sapien
tgccccgccgtaactggcagcattt

SEQ ID NO: 3940137 - DNA, 25 bp, Homo sapien
aaccaatgcatttcagagttgatga

SEQ ID NO: 3940138 - DNA, 25 bp, Homo sapien
tgaagcacttcacacggtgaatgcc

SEQ ID NO: 3940139 - DNA, 25 bp, Homo sapien
tgaatgccaggtaacccgttctagg

SEQ ID NO: 3940140 - DNA, 25 bp, Homo sapien
ggaaaaccattctgagagcattcct

SEQ ID NO: 3940141 - DNA, 25 bp, Homo sapien
gagagcattcctttcagcaccccat

SEQ ID NO: 3940142 - DNA, 25 bp, Homo sapien
ccatccagttttttacaggatgcac

SEQ ID NO: 3940143 - DNA, 25 bp, Homo sapien
gtccatccagttttttacaggatgc

SEQ ID NO: 3940144 - DNA, 25 bp, Homo sapien
tccatccagttttttacaggatgca

SEQ ID NO: 3940145 - DNA, 25 bp, Homo sapien
tgctggagatgtcaccagtcagtgc

SEQ ID NO: 3940146 - DNA, 25 bp, Homo sapien
agtgccacgtgcaaaacgaccaggg

SEQ ID NO: 3940147 - DNA, 25 bp, Homo sapien
ttctgtagggcccaacgcggcgctt

SEQ ID NO: 3940148 - DNA, 25 bp, Homo sapien
tgagaaaagaagtaacaccttctgt

SEQ ID NO: 3940149 - DNA, 25 bp, Homo sapien
tgcagcccacgaggcaagcctgttg

SEQ ID NO: 3940150 - DNA, 25 bp, Homo sapien
ctgcagcccacgaggcaagcctgtt

SEQ ID NO: 3940151 - DNA, 25 bp, Homo sapien
ccaacgatggttctaagggtggcct

SEQ ID NO: 3940152 - DNA, 25 bp, Homo sapien
caccaacgatggttctaagggtggc

SEQ ID NO: 3940153 - DNA, 25 bp, Homo sapien
aacaccaacgatggttctaagggtg

SEQ ID NO: 3940154 - DNA, 25 bp, Homo sapien
acaccaacgatggttctaagggtgg

SEQ ID NO: 3940155 - DNA, 25 bp, Homo sapien
ctgggtcaagctgatggaataaaag

SEQ ID NO: 3940156 - DNA, 25 bp, Homo sapien
gatcgcagcagtgattttgttcttc

SEQ ID NO: 3940157 - DNA, 25 bp, Homo sapien
tgcaactccttgacgactcgcttta

SEQ ID NO: 3940158 - DNA, 25 bp, Homo sapien
ctcgctttatgaggaatgttcccag

SEQ ID NO: 3940159 - DNA, 25 bp, Homo sapien
cacggttcaatcgttattgtcccaa

SEQ ID NO: 3940160 - DNA, 25 bp, Homo sapien
gggacgctgcgggtatctctccata

SEQ ID NO: 3940161 - DNA, 25 bp, Homo sapien
tcggcaaaaccgagactagagtgtt

SEQ ID NO: 3940162 - DNA, 25 bp, Homo sapien
cagcaggaaatatttatcaggaacc

SEQ ID NO: 3940163 - DNA, 25 bp, Homo sapien
tctctccatacaggtaccaggcgca

SEQ ID NO: 3940164 - DNA, 25 bp, Homo sapien
tgacagacttgaaaacaccccaagg

SEQ ID NO: 3940165 - DNA, 25 bp, Homo sapien
tcgtttgcgagttcagaagccccag

SEQ ID NO: 3940166 - DNA, 25 bp, Homo sapien
caggaagtagcggtagttggccatc

SEQ ID NO: 3940167 - DNA, 25 bp, Homo sapien
ttcttttgaaactgggccactaggc

SEQ ID NO: 3940168 - DNA, 25 bp, Homo sapien
tcttttgaaactgggccactaggct

SEQ ID NO: 3940169 - DNA, 25 bp, Homo sapien
tctgcattgcatggtgagaaacggc

SEQ ID NO: 3940170 - DNA, 25 bp, Homo sapien
taactgggaagtgtagcacagccct

SEQ ID NO: 3940171 - DNA, 25 bp, Homo sapien
cacctattcttatctgggccacgcg

SEQ ID NO: 3940172 - DNA, 25 bp, Homo sapien
gaagatgtaggtaccacagcaccag

SEQ ID NO: 3940173 - DNA, 25 bp, Homo sapien
aggcagcggatgtgcagctcttcct

SEQ ID NO: 3940174 - DNA, 25 bp, Homo sapien
gttgcagtctcggacacgcctgcca

SEQ ID NO: 3940175 - DNA, 25 bp, Homo sapien
ggagttgcagtctcggacacgcctg

SEQ ID NO: 3940176 - DNA, 25 bp, Homo sapien
gaggcagcggatgtgcagctcttcc

SEQ ID NO: 3940177 - DNA, 25 bp, Homo sapien
ccttccattaaccctccaccatcca

SEQ ID NO: 3940178 - DNA, 25 bp, Homo sapien
cattaaccctccaccatccatctgt

SEQ ID NO: 3940179 - DNA, 25 bp, Homo sapien
atcttccttccatctattcgtccat

SEQ ID NO: 3940180 - DNA, 25 bp, Homo sapien
cagccatctattcatatacccatct

SEQ ID NO: 3940181 - DNA, 25 bp, Homo sapien
cttccattaacactctgccctccac

SEQ ID NO: 3940182 - DNA, 25 bp, Homo sapien
ttccattaacactctgccctccacc

SEQ ID NO: 3940183 - DNA, 25 bp, Homo sapien
tccattaacactctgccctccacca

SEQ ID NO: 3940184 - DNA, 25 bp, Homo sapien
ccattaacactctgccctccaccat

SEQ ID NO: 3940185 - DNA, 25 bp, Homo sapien
cagtatcatagagggacgacaggct

SEQ ID NO: 3940186 - DNA, 25 bp, Homo sapien
tagttcagaacactaggacccagtg

SEQ ID NO: 3940187 - DNA, 25 bp, Homo sapien
tttattgtgcagctacggtgagccc

SEQ ID NO: 3940188 - DNA, 25 bp, Homo sapien
taagaatgggtggtcagatcatccc

SEQ ID NO: 3940189 - DNA, 25 bp, Homo sapien
gcctgcacagagcactgagattccc

SEQ ID NO: 3940190 - DNA, 25 bp, Homo sapien
tgagattccctcacttctgaggcca

SEQ ID NO: 3940191 - DNA, 25 bp, Homo sapien
cagtgaaggtcaagccctcagaggg

SEQ ID NO: 3940192 - DNA, 25 bp, Homo sapien
cagagctcagaataagcacatgcct

SEQ ID NO: 3940193 - DNA, 25 bp, Homo sapien
gcacgagagccaggtccgggttcct

SEQ ID NO: 3940194 - DNA, 25 bp, Homo sapien
gaccgatacggccagcactgtgcat

SEQ ID NO: 3940195 - DNA, 25 bp, Homo sapien
cctcgctggcctggattttatgctt

SEQ ID NO: 3940196 - DNA, 25 bp, Homo sapien
ttttatgctttggtgggagctcagc

SEQ ID NO: 3940197 - DNA, 25 bp, Homo sapien
gctatcggtagttaggagacagcag

SEQ ID NO: 3940198 - DNA, 25 bp, Homo sapien
gtcctaactgaacacttcagagtga

SEQ ID NO: 3940199 - DNA, 25 bp, Homo sapien
ggcactagtgcccttgctatcggta

SEQ ID NO: 3940200 - DNA, 25 bp, Homo sapien
ctcccggaagccgagaggaatggct

SEQ ID NO: 3940201 - DNA, 25 bp, Homo sapien
gagtgtacccaagtaaccagcgtgg

SEQ ID NO: 3940202 - DNA, 25 bp, Homo sapien
tagggcaagccagcgttcagtgcag

SEQ ID NO: 3940203 - DNA, 25 bp, Homo sapien
tgtgacctagtcaagccaccaggga

SEQ ID NO: 3940204 - DNA, 25 bp, Homo sapien
acttccccggatggattaggtgtca

SEQ ID NO: 3940205 - DNA, 25 bp, Homo sapien
gtccttgtgttcacagctgggcagc

SEQ ID NO: 3940206 - DNA, 25 bp, Homo sapien
cattcacaggacgaaatcggaggtg

SEQ ID NO: 3940207 - DNA, 25 bp, Homo sapien
tccgtaaagagcctgccatgcggca

SEQ ID NO: 3940208 - DNA, 25 bp, Homo sapien
ttcagcatcaaagtgcgtccctgcg

SEQ ID NO: 3940209 - DNA, 25 bp, Homo sapien
cgcccaagcgcagagcagaggaggc

SEQ ID NO: 3940210 - DNA, 25 bp, Homo sapien
taggaattttaacattcagcgccca

SEQ ID NO: 3940211 - DNA, 25 bp, Homo sapien
aagcgattcacctgttaggaatttt

SEQ ID NO: 3940212 - DNA, 25 bp, Homo sapien
agcgcccaagcgcagagcagaggag

SEQ ID NO: 3940213 - DNA, 25 bp, Homo sapien
tccaagttgtcaagcgggagacgca

SEQ ID NO: 3940214 - DNA, 25 bp, Homo sapien
tgccgattattgttgtgaaagcccc

SEQ ID NO: 3940215 - DNA, 25 bp, Homo sapien
cataagtgacgatgccaggctcagg

SEQ ID NO: 3940216 - DNA, 25 bp, Homo sapien
gattgcaacacttgggcagcagagg

SEQ ID NO: 3940217 - DNA, 25 bp, Homo sapien
gttgatgcaggctttccagtcggag

SEQ ID NO: 3940218 - DNA, 25 bp, Homo sapien
ggaagataaggcagatgacatcaga

SEQ ID NO: 3940219 - DNA, 25 bp, Homo sapien
acctgggcctttgcagatcagaagg

SEQ ID NO: 3940220 - DNA, 25 bp, Homo sapien
tcagaaatgttcagagggtcgtcca

SEQ ID NO: 3940221 - DNA, 25 bp, Homo sapien
gtggacaccggcactttgccccaga

SEQ ID NO: 3940222 - DNA, 25 bp, Homo sapien
agatcccagggtgaatagcgctgct

SEQ ID NO: 3940223 - DNA, 25 bp, Homo sapien
aatagcgctgctgcttaaggacagc

SEQ ID NO: 3940224 - DNA, 25 bp, Homo sapien
tggacaccggcactttgccccagat

SEQ ID NO: 3940225 - DNA, 25 bp, Homo sapien
gggaggagtggacacactggggttg

SEQ ID NO: 3940226 - DNA, 25 bp, Homo sapien
ggagtggacacactggggttggccc

SEQ ID NO: 3940227 - DNA, 25 bp, Homo sapien
cagaggtgaccagtttggccgggga

SEQ ID NO: 3940228 - DNA, 25 bp, Homo sapien
acagaggtgaccagtttggccgggg

SEQ ID NO: 3940229 - DNA, 25 bp, Homo sapien
gaccacagaggcagcggttagaacc

SEQ ID NO: 3940230 - DNA, 25 bp, Homo sapien
ttagaaccaagggacgcctggagcc

SEQ ID NO: 3940231 - DNA, 25 bp, Homo sapien
tgtcgggaatctgtaaatgcggcct

SEQ ID NO: 3940232 - DNA, 25 bp, Homo sapien
cagttagggatcttcgaatgagacc

SEQ ID NO: 3940233 - DNA, 25 bp, Homo sapien
gctccaagtcgctgctgagacgccg

SEQ ID NO: 3940234 - DNA, 25 bp, Homo sapien
ggctccaagtcgctgctgagacgcc

SEQ ID NO: 3940235 - DNA, 25 bp, Homo sapien
cctccgctcccgaaggaacatgaag

SEQ ID NO: 3940236 - DNA, 25 bp, Homo sapien
cgctcccgaaggaacatgaagtggc

SEQ ID NO: 3940237 - DNA, 25 bp, Homo sapien
cactgtcggtaagagcaggaagctt

SEQ ID NO: 3940238 - DNA, 25 bp, Homo sapien
gtgtcatccactgtcggtaagagca

SEQ ID NO: 3940239 - DNA, 25 bp, Homo sapien
tctttctggccagagaattggcgcg

SEQ ID NO: 3940240 - DNA, 25 bp, Homo sapien
cccttgcaggatgctttaagcccga

SEQ ID NO: 3940241 - DNA, 25 bp, Homo sapien
ctgttacttgttcatccggcacggg

SEQ ID NO: 3940242 - DNA, 25 bp, Homo sapien
aattggcgcgggacacctgttactt

SEQ ID NO: 3940243 - DNA, 25 bp, Homo sapien
agccactctggtgcttctgtcttcc

SEQ ID NO: 3940244 - DNA, 25 bp, Homo sapien
gaagccactctggtgcttctgtctt

SEQ ID NO: 3940245 - DNA, 25 bp, Homo sapien
ccactctggtgcttctgtcttccca

SEQ ID NO: 3940246 - DNA, 25 bp, Homo sapien
ctttgaagccactctggtgcttctg

SEQ ID NO: 3940247 - DNA, 25 bp, Homo sapien
taactgacagtcatgtgagccatgc

SEQ ID NO: 3940248 - DNA, 25 bp, Homo sapien
taacaagcgtgtgaccattccagca

SEQ ID NO: 3940249 - DNA, 25 bp, Homo sapien
tccataggcacagcaagaatgacag

SEQ ID NO: 3940250 - DNA, 25 bp, Homo sapien
taccaggaggtcactttgcagcatg

SEQ ID NO: 3940251 - DNA, 25 bp, Homo sapien
gagctaagactgagtcactgcactt

SEQ ID NO: 3940252 - DNA, 25 bp, Homo sapien
agctaagactgagtcactgcacttc

SEQ ID NO: 3940253 - DNA, 25 bp, Homo sapien
aattaatttcacccatctcttttca

SEQ ID NO: 3940254 - DNA, 25 bp, Homo sapien
taatttcacccatctcttttcattt

SEQ ID NO: 3940255 - DNA, 25 bp, Homo sapien
aaatatctgacatactgggatagat

SEQ ID NO: 3940256 - DNA, 25 bp, Homo sapien
ctgacatactgggatagatagaaca

SEQ ID NO: 3940257 - DNA, 25 bp, Homo sapien
tatctgacatactgggatagataga

SEQ ID NO: 3940258 - DNA, 25 bp, Homo sapien
catactgggatagatagaacatatt

SEQ ID NO: 3940259 - DNA, 25 bp, Homo sapien
ttcaggcgtgctcacaagagggttt

SEQ ID NO: 3940260 - DNA, 25 bp, Homo sapien
aaattcaggcgtgctcacaagaggg

SEQ ID NO: 3940261 - DNA, 25 bp, Homo sapien
cttgtgacgtgatcctccaaattca

SEQ ID NO: 3940262 - DNA, 25 bp, Homo sapien
tggctattgagagcttgtgacgtga

SEQ ID NO: 3940263 - DNA, 25 bp, Homo sapien
ggcaggcaaaagggcgatggttaga

SEQ ID NO: 3940264 - DNA, 25 bp, Homo sapien
aggcaaaagggcgatggttagaggg

SEQ ID NO: 3940265 - DNA, 25 bp, Homo sapien
gcaggcaaaagggcgatggttagag

SEQ ID NO: 3940266 - DNA, 25 bp, Homo sapien
caggcaaaagggcgatggttagagg

SEQ ID NO: 3940267 - DNA, 25 bp, Homo sapien
agcttgactaagacaaaggccgata

SEQ ID NO: 3940268 - DNA, 25 bp, Homo sapien
ggtgattatcggtaacagaattgct

SEQ ID NO: 3940269 - DNA, 25 bp, Homo sapien
tgttaggtgattatcggtaacagaa

SEQ ID NO: 3940270 - DNA, 25 bp, Homo sapien
aattgctgagttgctcctcgaaagc

SEQ ID NO: 3940271 - DNA, 25 bp, Homo sapien
aactgtggggcgagacgtggacttt

SEQ ID NO: 3940272 - DNA, 25 bp, Homo sapien
gagtgctcaactccttaaggctggg

SEQ ID NO: 3940273 - DNA, 25 bp, Homo sapien
gactttcctccctgccatcttgttt

SEQ ID NO: 3940274 - DNA, 25 bp, Homo sapien
aatttgaagatttgctgatatgggg

SEQ ID NO: 3940275 - DNA, 25 bp, Homo sapien
cccacggtgcctggtctgtggcttc

SEQ ID NO: 3940276 - DNA, 25 bp, Homo sapien
ggcttcccagtggttttgaatgtgt

SEQ ID NO: 3940277 - DNA, 25 bp, Homo sapien
tgtggcttcccagtggttttgaatg

SEQ ID NO: 3940278 - DNA, 25 bp, Homo sapien
ctgtggcttcccagtggttttgaat

SEQ ID NO: 3940279 - DNA, 25 bp, Homo sapien
cactgcatatttccccggcagcagc

SEQ ID NO: 3940280 - DNA, 25 bp, Homo sapien
tctgcactgcatatttccccggcag

SEQ ID NO: 3940281 - DNA, 25 bp, Homo sapien
tgcactgcatatttccccggcagca

SEQ ID NO: 3940282 - DNA, 25 bp, Homo sapien
gtctgcactgcatatttccccggca

SEQ ID NO: 3940283 - DNA, 25 bp, Homo sapien
tctgaatgtgcagctccaacacacc

SEQ ID NO: 3940284 - DNA, 25 bp, Homo sapien
ctgtggccttgtgaccaacactctg

SEQ ID NO: 3940285 - DNA, 25 bp, Homo sapien
cactctgacgctctgaatgtgcagc

SEQ ID NO: 3940286 - DNA, 25 bp, Homo sapien
tgtgaccaacactctgacgctctga

SEQ ID NO: 3940287 - DNA, 25 bp, Homo sapien
agggtaccggagcatctgccagcag

SEQ ID NO: 3940288 - DNA, 25 bp, Homo sapien
gctggttcctggtagaaaacaactc

SEQ ID NO: 3940289 - DNA, 25 bp, Homo sapien
ctggttcctggtagaaaacaactct

SEQ ID NO: 3940290 - DNA, 25 bp, Homo sapien
cacagcccagggtaccggagcatct

SEQ ID NO: 3940291 - DNA, 25 bp, Homo sapien
cacagtatgtattctggtgatggga

SEQ ID NO: 3940292 - DNA, 25 bp, Homo sapien
atgggagtgctttgctgcccctaaa

SEQ ID NO: 3940293 - DNA, 25 bp, Homo sapien
catggacacagtatgtattctggtg

SEQ ID NO: 3940294 - DNA, 25 bp, Homo sapien
gtgatgggagtgctttgctgcccct

SEQ ID NO: 3940295 - DNA, 25 bp, Homo sapien
gatcacagagtcccccgcgagatcg

SEQ ID NO: 3940296 - DNA, 25 bp, Homo sapien
ccgcgagatcgggacacccattacc

SEQ ID NO: 3940297 - DNA, 25 bp, Homo sapien
agagtcccccgcgagatcgggacac

SEQ ID NO: 3940298 - DNA, 25 bp, Homo sapien
acagagtcccccgcgagatcgggac

SEQ ID NO: 3940299 - DNA, 25 bp, Homo sapien
agcccagtgagcccggccaagttgt

SEQ ID NO: 3940300 - DNA, 25 bp, Homo sapien
gcccagtgagcccggccaagttgtg

SEQ ID NO: 3940301 - DNA, 25 bp, Homo sapien
ggagcccagtgagcccggccaagtt

SEQ ID NO: 3940302 - DNA, 25 bp, Homo sapien
ccagtgagcccggccaagttgtgca

SEQ ID NO: 3940303 - DNA, 25 bp, Homo sapien
ctaggagcggcggtcacatggccca

SEQ ID NO: 3940304 - DNA, 25 bp, Homo sapien
gcggtcacatggcccagggtacgct

SEQ ID NO: 3940305 - DNA, 25 bp, Homo sapien
acatggcccagggtacgctgggact

SEQ ID NO: 3940306 - DNA, 25 bp, Homo sapien
cccagggtacgctgggactgtggcc

SEQ ID NO: 3940307 - DNA, 25 bp, Homo sapien
cacaccagctagcagcggacaccag

SEQ ID NO: 3940308 - DNA, 25 bp, Homo sapien
cccacaccagctagcagcggacacc

SEQ ID NO: 3940309 - DNA, 25 bp, Homo sapien
accagcctcacccgagggccacatg

SEQ ID NO: 3940310 - DNA, 25 bp, Homo sapien
caccagcctcacccgagggccacat

SEQ ID NO: 3940311 - DNA, 25 bp, Homo sapien
tggggggcttggggctggcagcgga

SEQ ID NO: 3940312 - DNA, 25 bp, Homo sapien
ggggggcttggggctggcagcggac

SEQ ID NO: 3940313 - DNA, 25 bp, Homo sapien
ggtggggggcttggggctggcagcg

SEQ ID NO: 3940314 - DNA, 25 bp, Homo sapien
ctggtggggggcttggggctggcag

SEQ ID NO: 3940315 - DNA, 25 bp, Homo sapien
tggcgccgaggtggtcctttctgga

SEQ ID NO: 3940316 - DNA, 25 bp, Homo sapien
ctggcgccgaggtggtcctttctgg

SEQ ID NO: 3940317 - DNA, 25 bp, Homo sapien
caggtaggacaggcagataccagag

SEQ ID NO: 3940318 - DNA, 25 bp, Homo sapien
ggtggatggcatctggcttcgtgta

SEQ ID NO: 3940319 - DNA, 25 bp, Homo sapien
tgtgtagccggagagcaggtaggac

SEQ ID NO: 3940320 - DNA, 25 bp, Homo sapien
catctggcttcgtgtagggtgtgta

SEQ ID NO: 3940321 - DNA, 25 bp, Homo sapien
cccagagctctggccccaggctgac

SEQ ID NO: 3940322 - DNA, 25 bp, Homo sapien
agagctctggccccaggctgaccca

SEQ ID NO: 3940323 - DNA, 25 bp, Homo sapien
gagctctggccccaggctgacccac

SEQ ID NO: 3940324 - DNA, 25 bp, Homo sapien
atgtactacccagagctctggcccc

SEQ ID NO: 3940325 - DNA, 25 bp, Homo sapien
tccttgagaacaaccggcctagggc

SEQ ID NO: 3940326 - DNA, 25 bp, Homo sapien
gtggactctcgaattctttgtttag

SEQ ID NO: 3940327 - DNA, 25 bp, Homo sapien
gcatagtgagccctagatcgtgtgg

SEQ ID NO: 3940328 - DNA, 25 bp, Homo sapien
cacgatctccgtggctgactttgtg

SEQ ID NO: 3940329 - DNA, 25 bp, Homo sapien
ccctgggggtagtttgaagctctcg

SEQ ID NO: 3940330 - DNA, 25 bp, Homo sapien
ggtctcagagagatgcgcaccctgg

SEQ ID NO: 3940331 - DNA, 25 bp, Homo sapien
gtctcagagagatgcgcaccctggg

SEQ ID NO: 3940332 - DNA, 25 bp, Homo sapien
tttgaggtctttctaggaggccaag

SEQ ID NO: 3940333 - DNA, 25 bp, Homo sapien
gagggcggggtcgtcttcccagagc

SEQ ID NO: 3940334 - DNA, 25 bp, Homo sapien
ggccttcggacaggtagtccaggtc

SEQ ID NO: 3940335 - DNA, 25 bp, Homo sapien
tctgggcgtagaagggcatcaaaga

SEQ ID NO: 3940336 - DNA, 25 bp, Homo sapien
tttgggatcggccttcgaggccttc

SEQ ID NO: 3940337 - DNA, 25 bp, Homo sapien
tgtctgggcgtagaagggcatcaaa

SEQ ID NO: 3940338 - DNA, 25 bp, Homo sapien
tggcgtgctccttccggtgcttcca

SEQ ID NO: 3940339 - DNA, 25 bp, Homo sapien
cccagaaccacgtgggggatggcgt

SEQ ID NO: 3940340 - DNA, 25 bp, Homo sapien
gggatggcgtgctccttccggtgct

SEQ ID NO: 3940341 - DNA, 25 bp, Homo sapien
gatggcgtgctccttccggtgcttc

SEQ ID NO: 3940342 - DNA, 25 bp, Homo sapien
tccaggtccgggagccccatccact

SEQ ID NO: 3940343 - DNA, 25 bp, Homo sapien
ggatcaccatggagccttcgatgga

SEQ ID NO: 3940344 - DNA, 25 bp, Homo sapien
tcaggatcaccatggagccttcgat

SEQ ID NO: 3940345 - DNA, 25 bp, Homo sapien
tgcatccagtccttgacctccaggt

SEQ ID NO: 3940346 - DNA, 25 bp, Homo sapien
gcccagctttccagaccgaaccaat

SEQ ID NO: 3940347 - DNA, 25 bp, Homo sapien
ttcacaggcccaaccttccgtgtcc

SEQ ID NO: 3940348 - DNA, 25 bp, Homo sapien
tggcccagctttccagaccgaacca

SEQ ID NO: 3940349 - DNA, 25 bp, Homo sapien
ttctgggttcacaggcccaaccttc

SEQ ID NO: 3940350 - DNA, 25 bp, Homo sapien
gggaggatgcaggacgccagagtca

SEQ ID NO: 3940351 - DNA, 25 bp, Homo sapien
ggatgcaggacgccagagtcagaca

SEQ ID NO: 3940352 - DNA, 25 bp, Homo sapien
gaggatgcaggacgccagagtcaga

SEQ ID NO: 3940353 - DNA, 25 bp, Homo sapien
tggggaggatgcaggacgccagagt

SEQ ID NO: 3940354 - DNA, 25 bp, Homo sapien
catctggtgcaccttgtggtactcg

SEQ ID NO: 3940355 - DNA, 25 bp, Homo sapien
agtggcccggctgttgcgaagacct

SEQ ID NO: 3940356 - DNA, 25 bp, Homo sapien
ggactgctcccgcatcatctggtgc

SEQ ID NO: 3940357 - DNA, 25 bp, Homo sapien
tacagcaccggacacaaagttatgc

SEQ ID NO: 3940358 - DNA, 25 bp, Homo sapien
gggagctggccacagccaaggcgcc

SEQ ID NO: 3940359 - DNA, 25 bp, Homo sapien
cctggtctccttccttagcagggag

SEQ ID NO: 3940360 - DNA, 25 bp, Homo sapien
ttagggtggcttcctggtctccttc

SEQ ID NO: 3940361 - DNA, 25 bp, Homo sapien
gtctccttccttagcagggagctgg

SEQ ID NO: 3940362 - DNA, 25 bp, Homo sapien
tttggacgggtcctgcatccagcag

SEQ ID NO: 3940363 - DNA, 25 bp, Homo sapien
caaaggccagcaacgtgggctgaca

SEQ ID NO: 3940364 - DNA, 25 bp, Homo sapien
gggatccctactcctcttgacccca

SEQ ID NO: 3940365 - DNA, 25 bp, Homo sapien
ccacaaatcccaggtctaggccaac

SEQ ID NO: 3940366 - DNA, 25 bp, Homo sapien
gtccaggatgacggcggtgcccccg

SEQ ID NO: 3940367 - DNA, 25 bp, Homo sapien
cggtgcccccgcgcggcgaggctgg

SEQ ID NO: 3940368 - DNA, 25 bp, Homo sapien
gactcccggggctcgcccatcctgg

SEQ ID NO: 3940369 - DNA, 25 bp, Homo sapien
ccggagcagcctgtgcgcgccggcc

SEQ ID NO: 3940370 - DNA, 25 bp, Homo sapien
gtaaaggacagatgccctcgccccc

SEQ ID NO: 3940371 - DNA, 25 bp, Homo sapien
cctctgtcctcgccttggggtaaag

SEQ ID NO: 3940372 - DNA, 25 bp, Homo sapien
tctgtcctcgccttggggtaaagga

SEQ ID NO: 3940373 - DNA, 25 bp, Homo sapien
aaggacagatgccctcgccccccat

SEQ ID NO: 3940374 - DNA, 25 bp, Homo sapien
tccaaggctggcctgaacctacaag

SEQ ID NO: 3940375 - DNA, 25 bp, Homo sapien
acgaagttccggctgcattaggcag

SEQ ID NO: 3940376 - DNA, 25 bp, Homo sapien
ggagaaacaggacgccaagagttca

SEQ ID NO: 3940377 - DNA, 25 bp, Homo sapien
caagagttcagaaaagcagccgcag

SEQ ID NO: 3940378 - DNA, 25 bp, Homo sapien
agtccacgtggcttcacccaccgcc

SEQ ID NO: 3940379 - DNA, 25 bp, Homo sapien
ctgctcccagccacgctgacacaca

SEQ ID NO: 3940380 - DNA, 25 bp, Homo sapien
aggcccacggccatccctgcaggtg

SEQ ID NO: 3940381 - DNA, 25 bp, Homo sapien
ggccatccctgcaggtgtaggtcca

SEQ ID NO: 3940382 - DNA, 25 bp, Homo sapien
agaaaagagaggcggagtcagccct

SEQ ID NO: 3940383 - DNA, 25 bp, Homo sapien
gatactgggatccttctcttctccc

SEQ ID NO: 3940384 - DNA, 25 bp, Homo sapien
ggagaggcaagcgcttcctgcagcc

SEQ ID NO: 3940385 - DNA, 25 bp, Homo sapien
gggaactgatgagggatgttgcaga

SEQ ID NO: 3940386 - DNA, 25 bp, Homo sapien
catttttgtccgcacggcggaaaat

SEQ ID NO: 3940387 - DNA, 25 bp, Homo sapien
ttccccatgaagcacgaggacagaa

SEQ ID NO: 3940388 - DNA, 25 bp, Homo sapien
ccttccccatgaagcacgaggacag

SEQ ID NO: 3940389 - DNA, 25 bp, Homo sapien
ggttgcgcttgtctcctatccctga

SEQ ID NO: 3940390 - DNA, 25 bp, Homo sapien
ctttaggttcaaggttgcgcttgtc

SEQ ID NO: 3940391 - DNA, 25 bp, Homo sapien
caaggaaggaagcagagaaaggagc

SEQ ID NO: 3940392 - DNA, 25 bp, Homo sapien
aggaagcagagaaaggagctggtgt

SEQ ID NO: 3940393 - DNA, 25 bp, Homo sapien
aaggaagcagagaaaggagctggtg

SEQ ID NO: 3940394 - DNA, 25 bp, Homo sapien
ctgcaaggaaggaagcagagaaagg

SEQ ID NO: 3940395 - DNA, 25 bp, Homo sapien
ttggtgttgtcagagtcaatcgtgt

SEQ ID NO: 3940396 - DNA, 25 bp, Homo sapien
gaagagctggaattcctccaaggac

SEQ ID NO: 3940397 - DNA, 25 bp, Homo sapien
cattaaggacgccatctgcaaagaa

SEQ ID NO: 3940398 - DNA, 25 bp, Homo sapien
ctgcaaagaagagctggaattcctc

SEQ ID NO: 3940399 - DNA, 25 bp, Homo sapien
gcagccctccagaagcttgggtcct

SEQ ID NO: 3940400 - DNA, 25 bp, Homo sapien
ttgggtcctcatcacgcgagtaggc

SEQ ID NO: 3940401 - DNA, 25 bp, Homo sapien
tgtactctaccccttgcacactggt

SEQ ID NO: 3940402 - DNA, 25 bp, Homo sapien
cttaccaaatgtgccctaagcagcc

SEQ ID NO: 3940403 - DNA, 25 bp, Homo sapien
acacagctccttggtgtccacatgg

SEQ ID NO: 3940404 - DNA, 25 bp, Homo sapien
cacacagctccttggtgtccacatg

SEQ ID NO: 3940405 - DNA, 25 bp, Homo sapien
ccacctgcgctacctccagcctccc

SEQ ID NO: 3940406 - DNA, 25 bp, Homo sapien
cctgcgctacctccagcctcccctg

SEQ ID NO: 3940407 - DNA, 25 bp, Homo sapien
tcccacctgcgctacctccagcctc

SEQ ID NO: 3940408 - DNA, 25 bp, Homo sapien
ctcccacctgcgctacctccagcct

SEQ ID NO: 3940409 - DNA, 25 bp, Homo sapien
aggacagagtgattcaaggtctcca

SEQ ID NO: 3940410 - DNA, 25 bp, Homo sapien
ggacagagtgattcaaggtctccag

SEQ ID NO: 3940411 - DNA, 25 bp, Homo sapien
gacagagtgattcaaggtctccagg

SEQ ID NO: 3940412 - DNA, 25 bp, Homo sapien
gaggccaggacatcctcatagtcac

SEQ ID NO: 3940413 - DNA, 25 bp, Homo sapien
ctggatctgattggccgtctccttc

SEQ ID NO: 3940414 - DNA, 25 bp, Homo sapien
cgactggatctgattggccgtctcc

SEQ ID NO: 3940415 - DNA, 25 bp, Homo sapien
ctcagcagcgactggatctgattgg

SEQ ID NO: 3940416 - DNA, 25 bp, Homo sapien
gcagcgactggatctgattggccgt

SEQ ID NO: 3940417 - DNA, 25 bp, Homo sapien
tgaaaactgcgcagccatactatct

SEQ ID NO: 3940418 - DNA, 25 bp, Homo sapien
aaactgcgcagccatactatctgtt

SEQ ID NO: 3940419 - DNA, 25 bp, Homo sapien
caggtgggtgtaactgctgacgcgt

SEQ ID NO: 3940420 - DNA, 25 bp, Homo sapien
actgctgacgcgtgatggagctgac

SEQ ID NO: 3940421 - DNA, 25 bp, Homo sapien
ccatagccatgagcttgtggttggg

SEQ ID NO: 3940422 - DNA, 25 bp, Homo sapien
ttgccttgttccatagccatgagct

SEQ ID NO: 3940423 - DNA, 25 bp, Homo sapien
ggagtggggcttccacaccaggtct

SEQ ID NO: 3940424 - DNA, 25 bp, Homo sapien
acaccaggtctgtgccgcgctgtgg

SEQ ID NO: 3940425 - DNA, 25 bp, Homo sapien
caagcggctgatctgggcttccaga

SEQ ID NO: 3940426 - DNA, 25 bp, Homo sapien
ggctgatctgggcttccagaccctc

SEQ ID NO: 3940427 - DNA, 25 bp, Homo sapien
agcggctgatctgggcttccagacc

SEQ ID NO: 3940428 - DNA, 25 bp, Homo sapien
gccaagcggctgatctgggcttcca

SEQ ID NO: 3940429 - DNA, 25 bp, Homo sapien
ccatcttcatctgacaggcgctgct

SEQ ID NO: 3940430 - DNA, 25 bp, Homo sapien
catcttcatctgacaggcgctgctg

SEQ ID NO: 3940431 - DNA, 25 bp, Homo sapien
ccccgcagatactggcgcagagagt

SEQ ID NO: 3940432 - DNA, 25 bp, Homo sapien
gaagcagttcctcacgccagtggtc

SEQ ID NO: 3940433 - DNA, 25 bp, Homo sapien
tggaagcagttcctcacgccagtgg

SEQ ID NO: 3940434 - DNA, 25 bp, Homo sapien
ccagaaactcgctcagttgctcggg

SEQ ID NO: 3940435 - DNA, 25 bp, Homo sapien
gctggagcccttcacacttgagatt

SEQ ID NO: 3940436 - DNA, 25 bp, Homo sapien
gaatttgaaggtaaggccgcttgcc

SEQ ID NO: 3940437 - DNA, 25 bp, Homo sapien
gaagggcaactacatgacttgggca

SEQ ID NO: 3940438 - DNA, 25 bp, Homo sapien
ttaccaaggagctacatcagcctgg

SEQ ID NO: 3940439 - DNA, 25 bp, Homo sapien
ccatctgagagcctcacggcagtga

SEQ ID NO: 3940440 - DNA, 25 bp, Homo sapien
catctgagagcctcacggcagtgat

SEQ ID NO: 3940441 - DNA, 25 bp, Homo sapien
atctgagagcctcacggcagtgatg

SEQ ID NO: 3940442 - DNA, 25 bp, Homo sapien
gacgtgccggaacgccttacacagg

SEQ ID NO: 3940443 - DNA, 25 bp, Homo sapien
ctggcaccaagatcctggagagggc

SEQ ID NO: 3940444 - DNA, 25 bp, Homo sapien
ggctcagtgtgtccaccttgacgtg

SEQ ID NO: 3940445 - DNA, 25 bp, Homo sapien
tgtgtccaccttgacgtgccggaac

SEQ ID NO: 3940446 - DNA, 25 bp, Homo sapien
tcccgtcccaccgtgcaccaagcag

SEQ ID NO: 3940447 - DNA, 25 bp, Homo sapien
cagtcccgtcccaccgtgcaccaag

SEQ ID NO: 3940448 - DNA, 25 bp, Homo sapien
agtcccgtcccaccgtgcaccaagc

SEQ ID NO: 3940449 - DNA, 25 bp, Homo sapien
tcagtcccgtcccaccgtgcaccaa

SEQ ID NO: 3940450 - DNA, 25 bp, Homo sapien
agaagaatgtcaccgaagagggcag

SEQ ID NO: 3940451 - DNA, 25 bp, Homo sapien
caggggcggcctccttcacttaaca

SEQ ID NO: 3940452 - DNA, 25 bp, Homo sapien
tgtgggtcatgcgtggccatgtgag

SEQ ID NO: 3940453 - DNA, 25 bp, Homo sapien
cagtgtgggtcatgcgtggccatgt

SEQ ID NO: 3940454 - DNA, 25 bp, Homo sapien
acagtggtggctacctggctaggtt

SEQ ID NO: 3940455 - DNA, 25 bp, Homo sapien
ggtttatttggcgcctgggcacagt

SEQ ID NO: 3940456 - DNA, 25 bp, Homo sapien
ccagggtttatttggcgcctgggca

SEQ ID NO: 3940457 - DNA, 25 bp, Homo sapien
gggcactacaggggcatgactccta

SEQ ID NO: 3940458 - DNA, 25 bp, Homo sapien
cttcctaaagggctctgtgaccctg

SEQ ID NO: 3940459 - DNA, 25 bp, Homo sapien
ttcaggccacgcttctctgccttgg

SEQ ID NO: 3940460 - DNA, 25 bp, Homo sapien
gttcaggccacgcttctctgccttg

SEQ ID NO: 3940461 - DNA, 25 bp, Homo sapien
agttcaggccacgcttctctgcctt

SEQ ID NO: 3940462 - DNA, 25 bp, Homo sapien
atctttgggcagagcacggcggcag

SEQ ID NO: 3940463 - DNA, 25 bp, Homo sapien
tgtctggcactactaactgtctttt

SEQ ID NO: 3940464 - DNA, 25 bp, Homo sapien
gctgtgcccctatacgcagagctgc

SEQ ID NO: 3940465 - DNA, 25 bp, Homo sapien
ttcccttatattggactcagctgtg

SEQ ID NO: 3940466 - DNA, 25 bp, Homo sapien
ctgaggtgctggtgcacggaggtcc

SEQ ID NO: 3940467 - DNA, 25 bp, Homo sapien
ttaccaccggatctcagctttgtag

SEQ ID NO: 3940468 - DNA, 25 bp, Homo sapien
ccaccggatctcagctttgtagcca

SEQ ID NO: 3940469 - DNA, 25 bp, Homo sapien
gtagccattgagctcgtctcttccc

SEQ ID NO: 3940470 - DNA, 25 bp, Homo sapien
tcttcccttgaccatcagtgagctc

SEQ ID NO: 3940471 - DNA, 25 bp, Homo sapien
agaagtgggactcgtggcaccgtcc

SEQ ID NO: 3940472 - DNA, 25 bp, Homo sapien
tgtgcgcccgatacggatcaatcac

SEQ ID NO: 3940473 - DNA, 25 bp, Homo sapien
ttccgcctgtgggtagcagtttggc

SEQ ID NO: 3940474 - DNA, 25 bp, Homo sapien
caatcacacatgcttgatggagtgg

SEQ ID NO: 3940475 - DNA, 25 bp, Homo sapien
tttgtaagtatcacctgccaccatg

SEQ ID NO: 3940476 - DNA, 25 bp, Homo sapien
ccattgtcggtgaagaaaattttca

SEQ ID NO: 3940477 - DNA, 25 bp, Homo sapien
gaggtcttgatttcaccattgtcgg

SEQ ID NO: 3940478 - DNA, 25 bp, Homo sapien
gaaggaaacatgcacaaatctgtaa

SEQ ID NO: 3940479 - DNA, 25 bp, Homo sapien
gagtctgttctacatgggcctgccc

SEQ ID NO: 3940480 - DNA, 25 bp, Homo sapien
gaagattcctgtggatcccgtcagg

SEQ ID NO: 3940481 - DNA, 25 bp, Homo sapien
tgtgcgcaccaaagactcgggagaa

SEQ ID NO: 3940482 - DNA, 25 bp, Homo sapien
cagaggctcctggtacatcgagaag

SEQ ID NO: 3940483 - DNA, 25 bp, Homo sapien
tgaacttcctagactagtacctaga

SEQ ID NO: 3940484 - DNA, 25 bp, Homo sapien
cagtggcatttaggtggccgtggac

SEQ ID NO: 3940485 - DNA, 25 bp, Homo sapien
ggccgtggacgcaaatggcatttca

SEQ ID NO: 3940486 - DNA, 25 bp, Homo sapien
ggcatttcacatctccccgtagatc

SEQ ID NO: 3940487 - DNA, 25 bp, Homo sapien
ccagcttggcgttgactttcagcct

SEQ ID NO: 3940488 - DNA, 25 bp, Homo sapien
cattcaggcagttgccgagctggga

SEQ ID NO: 3940489 - DNA, 25 bp, Homo sapien
taggactggacgtctttgctttcac

SEQ ID NO: 3940490 - DNA, 25 bp, Homo sapien
tcttgcctgcctagggaacctctac

SEQ ID NO: 3940491 - DNA, 25 bp, Homo sapien
acgcgcagagcggaccaagggttcc

SEQ ID NO: 3940492 - DNA, 25 bp, Homo sapien
gctttcgcgcccgtgctccttttcg

SEQ ID NO: 3940493 - DNA, 25 bp, Homo sapien
atcctagagcgacgcgcagagcgga

SEQ ID NO: 3940494 - DNA, 25 bp, Homo sapien
gagtccatgacagcaggcccgcggg

SEQ ID NO: 3940495 - DNA, 25 bp, Homo sapien
gtgcctggacgtggacccctgcagg

SEQ ID NO: 3940496 - DNA, 25 bp, Homo sapien
catcttaacgagctaccgcccgggt

SEQ ID NO: 3940497 - DNA, 25 bp, Homo sapien
gtcgggaggcccagtctgtcgtccc

SEQ ID NO: 3940498 - DNA, 25 bp, Homo sapien
gaccggacacttcgccatcttaacg

SEQ ID NO: 3940499 - DNA, 25 bp, Homo sapien
aaaagagcaaacacgtggcgttaca

SEQ ID NO: 3940500 - DNA, 25 bp, Homo sapien
gagcaaacacgtggcgttacaaagg

SEQ ID NO: 3940501 - DNA, 25 bp, Homo sapien
tacaaaggtcctccgtttcgcacgc

SEQ ID NO: 3940502 - DNA, 25 bp, Homo sapien
cacgtggcgttacaaaggtcctccg

SEQ ID NO: 3940503 - DNA, 25 bp, Homo sapien
tccccgtgtgcaactccatgagagg

SEQ ID NO: 3940504 - DNA, 25 bp, Homo sapien
ccaaggatgatctactgcgggcagt

SEQ ID NO: 3940505 - DNA, 25 bp, Homo sapien
agtgactcaggtgcgatcttgcccg

SEQ ID NO: 3940506 - DNA, 25 bp, Homo sapien
cagtagtgccctcaggcttagcgct

SEQ ID NO: 3940507 - DNA, 25 bp, Homo sapien
agcaccctgggagttacataatcag

SEQ ID NO: 3940508 - DNA, 25 bp, Homo sapien
tatatgtgatgtacccaagggacca

SEQ ID NO: 3940509 - DNA, 25 bp, Homo sapien
gccagtccagatcttcccgttttca

SEQ ID NO: 3940510 - DNA, 25 bp, Homo sapien
cagaggtaggtctcttagacaagag

SEQ ID NO: 3940511 - DNA, 25 bp, Homo sapien
gccaaccatttttgaggaccatgta

SEQ ID NO: 3940512 - DNA, 25 bp, Homo sapien
aatatggacaaattacgtgtgtgac

SEQ ID NO: 3940513 - DNA, 25 bp, Homo sapien
ggaccatgtacctagtgctttgaaa

SEQ ID NO: 3940514 - DNA, 25 bp, Homo sapien
tatgcacaaaccctcacaatacgcg

SEQ ID NO: 3940515 - DNA, 25 bp, Homo sapien
gagccacagcagtctaatattgaaa

SEQ ID NO: 3940516 - DNA, 25 bp, Homo sapien
tgtcagggtgacttaacatggactc

SEQ ID NO: 3940517 - DNA, 25 bp, Homo sapien
taccgtcagagtgctgtgaaaaacc

SEQ ID NO: 3940518 - DNA, 25 bp, Homo sapien
tcctgggaacctcgatattctgaca

SEQ ID NO: 3940519 - DNA, 25 bp, Homo sapien
tcccagctgaactatgaggaagagg

SEQ ID NO: 3940520 - DNA, 25 bp, Homo sapien
tataggcttggagcaactcatttcc

SEQ ID NO: 3940521 - DNA, 25 bp, Homo sapien
gaaggacggagccacatactgctga

SEQ ID NO: 3940522 - DNA, 25 bp, Homo sapien
cctttttgtagcgagagccttactc

SEQ ID NO: 3940523 - DNA, 25 bp, Homo sapien
ttgctcgtgttgactgggccttgcc

SEQ ID NO: 3940524 - DNA, 25 bp, Homo sapien
ccagcaatcgcctcctttgtcggtg

SEQ ID NO: 3940525 - DNA, 25 bp, Homo sapien
cagccaggatttccgagtttgctcg

SEQ ID NO: 3940526 - DNA, 25 bp, Homo sapien
aaatggaaatatgcagcggtcgtgg

SEQ ID NO: 3940527 - DNA, 25 bp, Homo sapien
tagtctttacagcccaacgcttccc

SEQ ID NO: 3940528 - DNA, 25 bp, Homo sapien
ttccttcttcgccagccgctggcgc

SEQ ID NO: 3940529 - DNA, 25 bp, Homo sapien
aggttcgcggcggacgtcgctacgg

SEQ ID NO: 3940530 - DNA, 25 bp, Homo sapien
agccagagagtaccctctttccttc

SEQ ID NO: 3940531 - DNA, 25 bp, Homo sapien
cttcggcgacaccgaacgccccgca

SEQ ID NO: 3940532 - DNA, 25 bp, Homo sapien
ttcggcgacaccgaacgccccgcag

SEQ ID NO: 3940533 - DNA, 25 bp, Homo sapien
accacctgtcgcaggctccgagggc

SEQ ID NO: 3940534 - DNA, 25 bp, Homo sapien
tcggcctgcgctcccgtggtcaccc

SEQ ID NO: 3940535 - DNA, 25 bp, Homo sapien
ctcctgcgcgcaatccagctctgct

SEQ ID NO: 3940536 - DNA, 25 bp, Homo sapien
cgggctcctgcgcgcaatccagctc

SEQ ID NO: 3940537 - DNA, 25 bp, Homo sapien
tacgaaatggcgagagaagccccta

SEQ ID NO: 3940538 - DNA, 25 bp, Homo sapien
ctgtcactgactagccgagggttat

SEQ ID NO: 3940539 - DNA, 25 bp, Homo sapien
ttattatttggctgtgaagatcggg

SEQ ID NO: 3940540 - DNA, 25 bp, Homo sapien
gaagcccctactgcagagcgttgct

SEQ ID NO: 3940541 - DNA, 25 bp, Homo sapien
gtcagaagaacccacacatatttcc

SEQ ID NO: 3940542 - DNA, 25 bp, Homo sapien
cacatatttccttaggatcattaat

SEQ ID NO: 3940543 - DNA, 25 bp, Homo sapien
gaacccacacatatttccttaggat

SEQ ID NO: 3940544 - DNA, 25 bp, Homo sapien
taggatgtgtcagaagaacccacac

SEQ ID NO: 3940545 - DNA, 25 bp, Homo sapien
tgacccattatcaccactctgtttc

SEQ ID NO: 3940546 - DNA, 25 bp, Homo sapien
acctgacccattatcaccactctgt

SEQ ID NO: 3940547 - DNA, 25 bp, Homo sapien
aagtgaccacctgacccattatcac

SEQ ID NO: 3940548 - DNA, 25 bp, Homo sapien
tctcttgggtgtgcgaagtgaccac

SEQ ID NO: 3940549 - DNA, 25 bp, Homo sapien
taaatacagcgtatcattcaatgct

SEQ ID NO: 3940550 - DNA, 25 bp, Homo sapien
aagtgtaaatacagcgtatcattca

SEQ ID NO: 3940551 - DNA, 25 bp, Homo sapien
tgctggggtaatataaagcttgtgc

SEQ ID NO: 3940552 - DNA, 25 bp, Homo sapien
atacagcgtatcattcaatgctggg

SEQ ID NO: 3940553 - DNA, 25 bp, Homo sapien
tgtactcttccaggttctcaatgcg

SEQ ID NO: 3940554 - DNA, 25 bp, Homo sapien
tccaggttctcaattttacggagca

SEQ ID NO: 3940555 - DNA, 25 bp, Homo sapien
cgcaactcagtttgggcctccaggt

SEQ ID NO: 3940556 - DNA, 25 bp, Homo sapien
tgcaagaagaggcaacgcaactcag

SEQ ID NO: 3940557 - DNA, 25 bp, Homo sapien
cacggtctccaggtgattgtgggcc

SEQ ID NO: 3940558 - DNA, 25 bp, Homo sapien
gggtcactcagcttgttgtgcgaaa

SEQ ID NO: 3940559 - DNA, 25 bp, Homo sapien
caaatcgggcatgctttccagaatg

SEQ ID NO: 3940560 - DNA, 25 bp, Homo sapien
tgcgaaaggtcaaggacacaaagcc

SEQ ID NO: 3940561 - DNA, 25 bp, Homo sapien
tgccgcaggatggacggcccttctt

SEQ ID NO: 3940562 - DNA, 25 bp, Homo sapien
gaaggggctcggcaatccgacctgc

SEQ ID NO: 3940563 - DNA, 25 bp, Homo sapien
cgctgtcacttaggaccagggagga

SEQ ID NO: 3940564 - DNA, 25 bp, Homo sapien
tcaaagaagtttaatgcttagtggg

SEQ ID NO: 3940565 - DNA, 25 bp, Homo sapien
gaatctgtctgataaccgggtttcc

SEQ ID NO: 3940566 - DNA, 25 bp, Homo sapien
tgtaattaggaatctgtctgataac

SEQ ID NO: 3940567 - DNA, 25 bp, Homo sapien
tctgataaccgggtttcccatcaaa

SEQ ID NO: 3940568 - DNA, 25 bp, Homo sapien
attaggaatctgtctgataaccggg

SEQ ID NO: 3940569 - DNA, 25 bp, Homo sapien
ctttggaaacactggtctatcatcc

SEQ ID NO: 3940570 - DNA, 25 bp, Homo sapien
gtcctttggaaacactggtctatca

SEQ ID NO: 3940571 - DNA, 25 bp, Homo sapien
ctgtcctttggaaacactggtctat

SEQ ID NO: 3940572 - DNA, 25 bp, Homo sapien
cctttggaaacactggtctatcatc

SEQ ID NO: 3940573 - DNA, 25 bp, Homo sapien
ttaagagagaagaagcagatccctg

SEQ ID NO: 3940574 - DNA, 25 bp, Homo sapien
cttaagagagaagaagcagatccct

SEQ ID NO: 3940575 - DNA, 25 bp, Homo sapien
tcctccttttcagctgcgtaccctc

SEQ ID NO: 3940576 - DNA, 25 bp, Homo sapien
tcccctagcccaggcctccgcacaa

SEQ ID NO: 3940577 - DNA, 25 bp, Homo sapien
cctagcccaggcctccgcacaagct

SEQ ID NO: 3940578 - DNA, 25 bp, Homo sapien
tttcagctgcgtaccctcccctagc

SEQ ID NO: 3940579 - DNA, 25 bp, Homo sapien
cctctgcccgctgcttgatcatggc

SEQ ID NO: 3940580 - DNA, 25 bp, Homo sapien
ctctgcccgctgcttgatcatggcc

SEQ ID NO: 3940581 - DNA, 25 bp, Homo sapien
tctgcccgctgcttgatcatggcca

SEQ ID NO: 3940582 - DNA, 25 bp, Homo sapien
ctctcttttagcctccacaggcggc

SEQ ID NO: 3940583 - DNA, 25 bp, Homo sapien
tcttttagcctccacaggcggctcc

SEQ ID NO: 3940584 - DNA, 25 bp, Homo sapien
tgccttccgcactggcgggcacatt

SEQ ID NO: 3940585 - DNA, 25 bp, Homo sapien
tttccgggcagagctcgtccttggc

SEQ ID NO: 3940586 - DNA, 25 bp, Homo sapien
ctctcctttaacctccacaggtgac

SEQ ID NO: 3940587 - DNA, 25 bp, Homo sapien
cacaggtgacgacagtagcagggtc

SEQ ID NO: 3940588 - DNA, 25 bp, Homo sapien
tctcctttaacctccacaggtgacg

SEQ ID NO: 3940589 - DNA, 25 bp, Homo sapien
tccacaggtgacgacagtagcaggg

SEQ ID NO: 3940590 - DNA, 25 bp, Homo sapien
ccttcacaggcggtgacagtagcag

SEQ ID NO: 3940591 - DNA, 25 bp, Homo sapien
cttcacaggcggtgacagtagcagg

SEQ ID NO: 3940592 - DNA, 25 bp, Homo sapien
ttaaccttcacaggcggtgacagta

SEQ ID NO: 3940593 - DNA, 25 bp, Homo sapien
cctttaaccttcacaggcggtgaca

SEQ ID NO: 3940594 - DNA, 25 bp, Homo sapien
gtgtgtgtttctccgctcacattac

SEQ ID NO: 3940595 - DNA, 25 bp, Homo sapien
aggtcccacagagacgtgagtcgaa

SEQ ID NO: 3940596 - DNA, 25 bp, Homo sapien
ctgtgtgtgtttctccgctcacatt

SEQ ID NO: 3940597 - DNA, 25 bp, Homo sapien
ccacagagacgtgagtcgaaggctg

SEQ ID NO: 3940598 - DNA, 25 bp, Homo sapien
taatctggaggcgaatcccatgaga

SEQ ID NO: 3940599 - DNA, 25 bp, Homo sapien
gcccttttctgtaatctggaggcga

SEQ ID NO: 3940600 - DNA, 25 bp, Homo sapien
agagcaccggccaggagtcaaagca

SEQ ID NO: 3940601 - DNA, 25 bp, Homo sapien
agaacggaacggctgcccttttctg

SEQ ID NO: 3940602 - DNA, 25 bp, Homo sapien
tccgttctcgttccatcaagttctg

SEQ ID NO: 3940603 - DNA, 25 bp, Homo sapien
tgtaacgaatacaccctcagtggcc

SEQ ID NO: 3940604 - DNA, 25 bp, Homo sapien
agtctaatggtttctaaatcttccg

SEQ ID NO: 3940605 - DNA, 25 bp, Homo sapien
ctcctttgtctccagtctaatggtt

SEQ ID NO: 3940606 - DNA, 25 bp, Homo sapien
catgtgcacgaatcacctagggcag

SEQ ID NO: 3940607 - DNA, 25 bp, Homo sapien
gtagcgatttgggtcagggctcccc

SEQ ID NO: 3940608 - DNA, 25 bp, Homo sapien
tattcgtgccccatcaaaggacagt

SEQ ID NO: 3940609 - DNA, 25 bp, Homo sapien
tgagagcctaagctacctgctgggc

SEQ ID NO: 3940610 - DNA, 25 bp, Homo sapien
catcatcatcttccaagtcaggtag

SEQ ID NO: 3940611 - DNA, 25 bp, Homo sapien
ctggtcttccagagatttgcctgtt

SEQ ID NO: 3940612 - DNA, 25 bp, Homo sapien
catcatcttccaagtcaggtaggtc

SEQ ID NO: 3940613 - DNA, 25 bp, Homo sapien
agagatttgcctgtttcatcatcat

SEQ ID NO: 3940614 - DNA, 25 bp, Homo sapien
cgacaagaacgaaggtggaattaag

SEQ ID NO: 3940615 - DNA, 25 bp, Homo sapien
gaacgaaggtggaattaagctgcct

SEQ ID NO: 3940616 - DNA, 25 bp, Homo sapien
caagaacgaaggtggaattaagctg

SEQ ID NO: 3940617 - DNA, 25 bp, Homo sapien
agaacgaaggtggaattaagctgcc

SEQ ID NO: 3940618 - DNA, 25 bp, Homo sapien
cccacagtaactgtgtctgttttct

SEQ ID NO: 3940619 - DNA, 25 bp, Homo sapien
gctcctggtaatgccagtaatggcc

SEQ ID NO: 3940620 - DNA, 25 bp, Homo sapien
tctccctcagggtacgggtctggca

SEQ ID NO: 3940621 - DNA, 25 bp, Homo sapien
tctgggacttagctccttggacagc

SEQ ID NO: 3940622 - DNA, 25 bp, Homo sapien
tgttttcacaacagaatcgctctac

SEQ ID NO: 3940623 - DNA, 25 bp, Homo sapien
ccagttctgctttttcacccaatgt

SEQ ID NO: 3940624 - DNA, 25 bp, Homo sapien
agaatcgctctacaatgcaccatgc

SEQ ID NO: 3940625 - DNA, 25 bp, Homo sapien
attctgttgccacatccaagaaagg

SEQ ID NO: 3940626 - DNA, 25 bp, Homo sapien
tctccactggaagtgagtggtgcag

SEQ ID NO: 3940627 - DNA, 25 bp, Homo sapien
ttttccagcacagggagtgacgtgt

SEQ ID NO: 3940628 - DNA, 25 bp, Homo sapien
gatgacctcaatcttcggaaagcac

SEQ ID NO: 3940629 - DNA, 25 bp, Homo sapien
gtgacgtgtagtccagttcagggtc

SEQ ID NO: 3940630 - DNA, 25 bp, Homo sapien
gtggaaggaagggtgacctgtgctt

SEQ ID NO: 3940631 - DNA, 25 bp, Homo sapien
ctgtggaaggaagggtgacctgtgc

SEQ ID NO: 3940632 - DNA, 25 bp, Homo sapien
ggaaggaagggtgacctgtgctttc

SEQ ID NO: 3940633 - DNA, 25 bp, Homo sapien
aaggaagggtgacctgtgctttctc

SEQ ID NO: 3940634 - DNA, 25 bp, Homo sapien
ggcaactccgacacacgtctctggg

SEQ ID NO: 3940635 - DNA, 25 bp, Homo sapien
ctatgatgctttcggtgctgggaat

SEQ ID NO: 3940636 - DNA, 25 bp, Homo sapien
aatgcagtgaggtcccacgtgggca

SEQ ID NO: 3940637 - DNA, 25 bp, Homo sapien
ggtgtggcggcgctctcagtcggca

SEQ ID NO: 3940638 - DNA, 25 bp, Homo sapien
tgcctaagggagacatttatgatta

SEQ ID NO: 3940639 - DNA, 25 bp, Homo sapien
aatgtttatcatgcctaagggagac

SEQ ID NO: 3940640 - DNA, 25 bp, Homo sapien
taaaatgtttatcatgcctaaggga

SEQ ID NO: 3940641 - DNA, 25 bp, Homo sapien
taagggagacatttatgattaaacc

SEQ ID NO: 3940642 - DNA, 25 bp, Homo sapien
gcacctgtgggctgtcgatagtgcc

SEQ ID NO: 3940643 - DNA, 25 bp, Homo sapien
tggcacctgtgggctgtcgatagtg

SEQ ID NO: 3940644 - DNA, 25 bp, Homo sapien
acctgtgggctgtcgatagtgccct

SEQ ID NO: 3940645 - DNA, 25 bp, Homo sapien
cacctgtgggctgtcgatagtgccc

SEQ ID NO: 3940646 - DNA, 25 bp, Homo sapien
gttcagggactaaatacacttggca

SEQ ID NO: 3940647 - DNA, 25 bp, Homo sapien
aggttcagggactaaatacacttgg

SEQ ID NO: 3940648 - DNA, 25 bp, Homo sapien
ttcagggactaaatacacttggcag

SEQ ID NO: 3940649 - DNA, 25 bp, Homo sapien
ggttcagggactaaatacacttggc

SEQ ID NO: 3940650 - DNA, 25 bp, Homo sapien
agttctcacgccttcctgtccagtg

SEQ ID NO: 3940651 - DNA, 25 bp, Homo sapien
agggctccgctgcgcctcagctgtg

SEQ ID NO: 3940652 - DNA, 25 bp, Homo sapien
ttcgcctgaagatcatcccgcaagg

SEQ ID NO: 3940653 - DNA, 25 bp, Homo sapien
agtgctggctcctcgtgtttggtga

SEQ ID NO: 3940654 - DNA, 25 bp, Homo sapien
cttgagaagcagagctcgccacctt

SEQ ID NO: 3940655 - DNA, 25 bp, Homo sapien
cctccggaagaagcctcgaatgggc

SEQ ID NO: 3940656 - DNA, 25 bp, Homo sapien
gatgatgagccaagcaatttggagc

SEQ ID NO: 3940657 - DNA, 25 bp, Homo sapien
acacaaggtgggctgccctcaagcc

SEQ ID NO: 3940658 - DNA, 25 bp, Homo sapien
ggccatgtggatccctcagaggaca

SEQ ID NO: 3940659 - DNA, 25 bp, Homo sapien
cagtggccatgtggatccctcagag

SEQ ID NO: 3940660 - DNA, 25 bp, Homo sapien
ccatgtggatccctcagaggacacc

SEQ ID NO: 3940661 - DNA, 25 bp, Homo sapien
agaggacaccagctcccctcatagc

SEQ ID NO: 3940662 - DNA, 25 bp, Homo sapien
ccacagtcggtgctaacaggcaggt

SEQ ID NO: 3940663 - DNA, 25 bp, Homo sapien
caaccctggatgaatctgtggccca

SEQ ID NO: 3940664 - DNA, 25 bp, Homo sapien
tgtggcccaaacacgcagtggatcc

SEQ ID NO: 3940665 - DNA, 25 bp, Homo sapien
ccttagtagagcttcgaggtgcagc

SEQ ID NO: 3940666 - DNA, 25 bp, Homo sapien
tctccttcactaggttcaggctgtg

SEQ ID NO: 3940667 - DNA, 25 bp, Homo sapien
gttgcgtacatggttctctccttca

SEQ ID NO: 3940668 - DNA, 25 bp, Homo sapien
ttctcacacacttcactgctctagg

SEQ ID NO: 3940669 - DNA, 25 bp, Homo sapien
aggctgtgctcaaacgccaccttct

SEQ ID NO: 3940670 - DNA, 25 bp, Homo sapien
ccggccccttgtgatagaaatttat

SEQ ID NO: 3940671 - DNA, 25 bp, Homo sapien
caacccctagtgcattttctgggag

SEQ ID NO: 3940672 - DNA, 25 bp, Homo sapien
cagtaggaagacgatgctcagatgc

SEQ ID NO: 3940673 - DNA, 25 bp, Homo sapien
tatggctgctcatacttctagagga

SEQ ID NO: 3940674 - DNA, 25 bp, Homo sapien
tggcctcatgagaagaatccgactg

SEQ ID NO: 3940675 - DNA, 25 bp, Homo sapien
tcgtttcaggctatgcggttccaag

SEQ ID NO: 3940676 - DNA, 25 bp, Homo sapien
cacgctagctagagtttgaagacca

SEQ ID NO: 3940677 - DNA, 25 bp, Homo sapien
attttccagacgaccacgacgaggc

SEQ ID NO: 3940678 - DNA, 25 bp, Homo sapien
cgccaacgaagatctgaggcgctag

SEQ ID NO: 3940679 - DNA, 25 bp, Homo sapien
gccctttcacacgcgcagggcgggt

SEQ ID NO: 3940680 - DNA, 25 bp, Homo sapien
aggcgctaggccctatctcgcgctg

SEQ ID NO: 3940681 - DNA, 25 bp, Homo sapien
tgctctcgccctttcacacgcgcag

SEQ ID NO: 3940682 - DNA, 25 bp, Homo sapien
gactgccgtcgtcgtcagcgccctg

SEQ ID NO: 3940683 - DNA, 25 bp, Homo sapien
tgccgtcgtcgtcagcgccctgaga

SEQ ID NO: 3940684 - DNA, 25 bp, Homo sapien
ccgtcgtcgtcagcgccctgagaag

SEQ ID NO: 3940685 - DNA, 25 bp, Homo sapien
actgccgtcgtcgtcagcgccctga

SEQ ID NO: 3940686 - DNA, 25 bp, Homo sapien
cctgggcgggtagcggtcgccaggg

SEQ ID NO: 3940687 - DNA, 25 bp, Homo sapien
gggctgggggctgatctgcaacgat

SEQ ID NO: 3940688 - DNA, 25 bp, Homo sapien
tgggcgggtagcggtcgccaggggc

SEQ ID NO: 3940689 - DNA, 25 bp, Homo sapien
atctgcaacgatgcagccaggcggg

SEQ ID NO: 3940690 - DNA, 25 bp, Homo sapien
cctccgcgcgatacgtcgcgggcgc

SEQ ID NO: 3940691 - DNA, 25 bp, Homo sapien
cgccctccgcgcgatacgtcgcggg

SEQ ID NO: 3940692 - DNA, 25 bp, Homo sapien
cgcgcgatacgtcgcgggcgcgggc

SEQ ID NO: 3940693 - DNA, 25 bp, Homo sapien
gccacccgccctccgcgcgatacgt

SEQ ID NO: 3940694 - DNA, 25 bp, Homo sapien
cgtactccgtgagcaaggacacggc

SEQ ID NO: 3940695 - DNA, 25 bp, Homo sapien
caggctggccgcgtactccgtgagc

SEQ ID NO: 3940696 - DNA, 25 bp, Homo sapien
ccgcgtactccgtgagcaaggacac

SEQ ID NO: 3940697 - DNA, 25 bp, Homo sapien
tggccgcgtactccgtgagcaagga

SEQ ID NO: 3940698 - DNA, 25 bp, Homo sapien
tctctgagcatagggaccaaggtcc

SEQ ID NO: 3940699 - DNA, 25 bp, Homo sapien
ggtcctgctccggcggtgtctctga

SEQ ID NO: 3940700 - DNA, 25 bp, Homo sapien
cagttgagcatctggtgtggctggt

SEQ ID NO: 3940701 - DNA, 25 bp, Homo sapien
gtcccaagctcaggccaggtcctgc

SEQ ID NO: 3940702 - DNA, 25 bp, Homo sapien
gcaagatcgcacacttcctggtgag

SEQ ID NO: 3940703 - DNA, 25 bp, Homo sapien
gaaggacattcgcaaaactactggc

SEQ ID NO: 3940704 - DNA, 25 bp, Homo sapien
gccatgaggtcattactgggacaac

SEQ ID NO: 3940705 - DNA, 25 bp, Homo sapien
tgagatgcgtgccaaagactcgaca

SEQ ID NO: 3940706 - DNA, 25 bp, Homo sapien
cccacgccaccctgttctcaggagg

SEQ ID NO: 3940707 - DNA, 25 bp, Homo sapien
ccacagcagggatgcgtgactccat

SEQ ID NO: 3940708 - DNA, 25 bp, Homo sapien
ggcaggcggtttgcccaacttgagt

SEQ ID NO: 3940709 - DNA, 25 bp, Homo sapien
acttccacctgccacagacacattg

SEQ ID NO: 3940710 - DNA, 25 bp, Homo sapien
agcaggctccatcgccaccccatgc

SEQ ID NO: 3940711 - DNA, 25 bp, Homo sapien
caggctgtgacccatcgctgattca

SEQ ID NO: 3940712 - DNA, 25 bp, Homo sapien
catcgctgattcaaccaagtcctca

SEQ ID NO: 3940713 - DNA, 25 bp, Homo sapien
gccgcgcacacccttgagtgcctct

SEQ ID NO: 3940714 - DNA, 25 bp, Homo sapien
ctggccttcgccctgtgacaggtac

SEQ ID NO: 3940715 - DNA, 25 bp, Homo sapien
gacggtcagaataatgagaccctca

SEQ ID NO: 3940716 - DNA, 25 bp, Homo sapien
ctcctcctgacacctgatatcgagg

SEQ ID NO: 3940717 - DNA, 25 bp, Homo sapien
cacctgatatcgaggacggtcagaa

SEQ ID NO: 3940718 - DNA, 25 bp, Homo sapien
tcttgctattcgcagtgcccgcagg

SEQ ID NO: 3940719 - DNA, 25 bp, Homo sapien
tgcctgctgtttggcctccgtcttg

SEQ ID NO: 3940720 - DNA, 25 bp, Homo sapien
tccagttccgcgctcaccgagaagg

SEQ ID NO: 3940721 - DNA, 25 bp, Homo sapien
ctgactccggatgtagcagagggca

SEQ ID NO: 3940722 - DNA, 25 bp, Homo sapien
gacacaggacattacacgagctgct

SEQ ID NO: 3940723 - DNA, 25 bp, Homo sapien
tgcaggtgacgtcctgatgctcaga

SEQ ID NO: 3940724 - DNA, 25 bp, Homo sapien
gtgaaagcagggaccggcacatgta

SEQ ID NO: 3940725 - DNA, 25 bp, Homo sapien
cgagctgctcttctagcggtcccta

SEQ ID NO: 3940726 - DNA, 25 bp, Homo sapien
ggccagtggaggccggctggaggtc

SEQ ID NO: 3940727 - DNA, 25 bp, Homo sapien
tcaggggggccagtggaggccggct

SEQ ID NO: 3940728 - DNA, 25 bp, Homo sapien
aggggggccagtggaggccggctgg

SEQ ID NO: 3940729 - DNA, 25 bp, Homo sapien
ctacgctcaggggggccagtggagg

SEQ ID NO: 3940730 - DNA, 25 bp, Homo sapien
gctgcgcagcgctgctcatgggtca

SEQ ID NO: 3940731 - DNA, 25 bp, Homo sapien
agcgctcgtccaacaggaggtcaaa

SEQ ID NO: 3940732 - DNA, 25 bp, Homo sapien
tcaaagccggcgctcaccaacgctg

SEQ ID NO: 3940733 - DNA, 25 bp, Homo sapien
caacgctgcgcagcgctgctcatgg

SEQ ID NO: 3940734 - DNA, 25 bp, Homo sapien
atgactccagccacagtccccttac

SEQ ID NO: 3940735 - DNA, 25 bp, Homo sapien
tctccaggatgactccagccacagt

SEQ ID NO: 3940736 - DNA, 25 bp, Homo sapien
ggatgactccagccacagtcccctt

SEQ ID NO: 3940737 - DNA, 25 bp, Homo sapien
ccctctccaggatgactccagccac

SEQ ID NO: 3940738 - DNA, 25 bp, Homo sapien
ctgtgcaggagggggcagagacggc

SEQ ID NO: 3940739 - DNA, 25 bp, Homo sapien
tgtgcaggagggggcagagacggcc

SEQ ID NO: 3940740 - DNA, 25 bp, Homo sapien
caggagggggcagagacggcccagc

SEQ ID NO: 3940741 - DNA, 25 bp, Homo sapien
tgcaggagggggcagagacggccca

SEQ ID NO: 3940742 - DNA, 25 bp, Homo sapien
tcacgtggcccctggcacgcgggat

SEQ ID NO: 3940743 - DNA, 25 bp, Homo sapien
caggccatggcagtcgtggagctgc

SEQ ID NO: 3940744 - DNA, 25 bp, Homo sapien
tcagcagggccctgcgggcgatgac

SEQ ID NO: 3940745 - DNA, 25 bp, Homo sapien
gctgctggcccgagaactccagcca

SEQ ID NO: 3940746 - DNA, 25 bp, Homo sapien
cccttgggggtgttgctgatgtaga

SEQ ID NO: 3940747 - DNA, 25 bp, Homo sapien
gaagacgcggggcttgagggtgaat

SEQ ID NO: 3940748 - DNA, 25 bp, Homo sapien
agaggtgcaggaagacgcggggctt

SEQ ID NO: 3940749 - DNA, 25 bp, Homo sapien
tagatgtcacgggccgcgcccttgg

SEQ ID NO: 3940750 - DNA, 25 bp, Homo sapien
ctgtgcgggaggccaccttccgagg

SEQ ID NO: 3940751 - DNA, 25 bp, Homo sapien
gtgcgggaggccaccttccgaggtg

SEQ ID NO: 3940752 - DNA, 25 bp, Homo sapien
tgtgcgggaggccaccttccgaggt

SEQ ID NO: 3940753 - DNA, 25 bp, Homo sapien
tgcgggaggccaccttccgaggtgg

SEQ ID NO: 3940754 - DNA, 25 bp, Homo sapien
ttcagctgcccgagcacatgggcct

SEQ ID NO: 3940755 - DNA, 25 bp, Homo sapien
ggcgccacgtagcacacaggcttca

SEQ ID NO: 3940756 - DNA, 25 bp, Homo sapien
tgacaggcagcccacgtgggtgtca

SEQ ID NO: 3940757 - DNA, 25 bp, Homo sapien
cgtgccagcttgtcactggctgaca

SEQ ID NO: 3940758 - DNA, 25 bp, Homo sapien
caccaggtgggccagcagggcacca

SEQ ID NO: 3940759 - DNA, 25 bp, Homo sapien
gatgaggctggtgctgtagagtggg

SEQ ID NO: 3940760 - DNA, 25 bp, Homo sapien
caggatgaggctggtgctgtagagt

SEQ ID NO: 3940761 - DNA, 25 bp, Homo sapien
aggtgggccagcagggcaccaccca

SEQ ID NO: 3940762 - DNA, 25 bp, Homo sapien
agtcggagggtcgtggcatgagtca

SEQ ID NO: 3940763 - DNA, 25 bp, Homo sapien
gatggccctgctcagagtcggaggg

SEQ ID NO: 3940764 - DNA, 25 bp, Homo sapien
cccaggctccagttgaggctcaggc

SEQ ID NO: 3940765 - DNA, 25 bp, Homo sapien
gtgcagggcggtccggacgtaggga

SEQ ID NO: 3940766 - DNA, 25 bp, Homo sapien
cttggcagcctcgtaggtcttcaag

SEQ ID NO: 3940767 - DNA, 25 bp, Homo sapien
caggaggtagggcttccccacagcc

SEQ ID NO: 3940768 - DNA, 25 bp, Homo sapien
ctcgtaggtcttcaaggccaggagg

SEQ ID NO: 3940769 - DNA, 25 bp, Homo sapien
cgcctggtgaaaggcccggagaaag

SEQ ID NO: 3940770 - DNA, 25 bp, Homo sapien
tgcgagcctcctggtagggcccagc

SEQ ID NO: 3940771 - DNA, 25 bp, Homo sapien
cagctgcctgcgagcctcctggtag

SEQ ID NO: 3940772 - DNA, 25 bp, Homo sapien
tgcctgcgagcctcctggtagggcc

SEQ ID NO: 3940773 - DNA, 25 bp, Homo sapien
agctgcctgcgagcctcctggtagg

SEQ ID NO: 3940774 - DNA, 25 bp, Homo sapien
tttattcaagcccaaacgtgcagca

SEQ ID NO: 3940775 - DNA, 25 bp, Homo sapien
agtttcaccccgcacaacccatgtt

SEQ ID NO: 3940776 - DNA, 25 bp, Homo sapien
tccccacaacgctcctcagataggg

SEQ ID NO: 3940777 - DNA, 25 bp, Homo sapien
tacagcttggctccgggacctcggt

SEQ ID NO: 3940778 - DNA, 25 bp, Homo sapien
ctggagaggtgctgcctgcggaagc

SEQ ID NO: 3940779 - DNA, 25 bp, Homo sapien
tgcctgcggaagctgctgaggaagc

SEQ ID NO: 3940780 - DNA, 25 bp, Homo sapien
gtgctgcctgcggaagctgctgagg

SEQ ID NO: 3940781 - DNA, 25 bp, Homo sapien
tggagaggtgctgcctgcggaagct

SEQ ID NO: 3940782 - DNA, 25 bp, Homo sapien
gtcaagtgtccatacccgggaggga

SEQ ID NO: 3940783 - DNA, 25 bp, Homo sapien
gagggacactgggtacaagaagaca

SEQ ID NO: 3940784 - DNA, 25 bp, Homo sapien
cagtagcactaagccaaaaggtggc

SEQ ID NO: 3940785 - DNA, 25 bp, Homo sapien
ctgacgggactgaacaccaggctga

SEQ ID NO: 3940786 - DNA, 25 bp, Homo sapien
gatccatgggacagtagagcacact

SEQ ID NO: 3940787 - DNA, 25 bp, Homo sapien
agacgccgcatggaacccttcgttc

SEQ ID NO: 3940788 - DNA, 25 bp, Homo sapien
actggatgccattcaaccacgggcc

SEQ ID NO: 3940789 - DNA, 25 bp, Homo sapien
cactgtcacgacctgcatggagacg

SEQ ID NO: 3940790 - DNA, 25 bp, Homo sapien
tgcctgatgatccgcagccatccag

SEQ ID NO: 3940791 - DNA, 25 bp, Homo sapien
gcctgatgatccgcagccatccaga

SEQ ID NO: 3940792 - DNA, 25 bp, Homo sapien
ctgcctgatgatccgcagccatcca

SEQ ID NO: 3940793 - DNA, 25 bp, Homo sapien
cctgatgatccgcagccatccagag

SEQ ID NO: 3940794 - DNA, 25 bp, Homo sapien
tttccggagaacagtgacagagctg

SEQ ID NO: 3940795 - DNA, 25 bp, Homo sapien
gctttccggagaacagtgacagagc

SEQ ID NO: 3940796 - DNA, 25 bp, Homo sapien
ctttccggagaacagtgacagagct

SEQ ID NO: 3940797 - DNA, 25 bp, Homo sapien
tgagtccctggtgatatcgctgagc

SEQ ID NO: 3940798 - DNA, 25 bp, Homo sapien
aacactgacatgatggcgtttggca

SEQ ID NO: 3940799 - DNA, 25 bp, Homo sapien
gccctttgaggtgccgattactatt

SEQ ID NO: 3940800 - DNA, 25 bp, Homo sapien
gaatttagtcaatctcggagccagc

SEQ ID NO: 3940801 - DNA, 25 bp, Homo sapien
aagggggccatcagtcagaaggcaa

SEQ ID NO: 3940802 - DNA, 25 bp, Homo sapien
gttccctccgtcatgaagggggcca

SEQ ID NO: 3940803 - DNA, 25 bp, Homo sapien
ccatggcgggccctggtgatgacgg

SEQ ID NO: 3940804 - DNA, 25 bp, Homo sapien
ggcaaaatgtcagcgggttccctcc

SEQ ID NO: 3940805 - DNA, 25 bp, Homo sapien
ggtcaaagtcagacgatccaggaag

SEQ ID NO: 3940806 - DNA, 25 bp, Homo sapien
tgcggcaggtcaaagtcagacgatc

SEQ ID NO: 3940807 - DNA, 25 bp, Homo sapien
caggaagatgttggtgttggcttca

SEQ ID NO: 3940808 - DNA, 25 bp, Homo sapien
tcagggtcctctgcggcaggtcaaa

SEQ ID NO: 3940809 - DNA, 25 bp, Homo sapien
ggccgctttctcgcactccaaaaag

SEQ ID NO: 3940810 - DNA, 25 bp, Homo sapien
actcccggccgctttctcgcactcc

SEQ ID NO: 3940811 - DNA, 25 bp, Homo sapien
ggactgttctcccagtcaggggact

SEQ ID NO: 3940812 - DNA, 25 bp, Homo sapien
ttcacttatggtcctctcccccttc

SEQ ID NO: 3940813 - DNA, 25 bp, Homo sapien
acaggagcgtgcacagtctgctgga

SEQ ID NO: 3940814 - DNA, 25 bp, Homo sapien
agcacatgccccttcctcgatggtg

SEQ ID NO: 3940815 - DNA, 25 bp, Homo sapien
cagcagggtccctcggatcatgtgt

SEQ ID NO: 3940816 - DNA, 25 bp, Homo sapien
gctggactttcttagttccacccag

SEQ ID NO: 3940817 - DNA, 25 bp, Homo sapien
cctgggcagcgaccttccagacgca

SEQ ID NO: 3940818 - DNA, 25 bp, Homo sapien
acacagaagaggggcccccctcgct

SEQ ID NO: 3940819 - DNA, 25 bp, Homo sapien
acagaagaggggcccccctcgctgc

SEQ ID NO: 3940820 - DNA, 25 bp, Homo sapien
tgggcagcgaccttccagacgcaca

SEQ ID NO: 3940821 - DNA, 25 bp, Homo sapien
agagcccggatgatctgcctcctgc

SEQ ID NO: 3940822 - DNA, 25 bp, Homo sapien
agaggcacagagcccggatgatctg

SEQ ID NO: 3940823 - DNA, 25 bp, Homo sapien
ggcaatgcccgtttccagatattct

SEQ ID NO: 3940824 - DNA, 25 bp, Homo sapien
ctcgcaggcaatgcccgtttccaga

SEQ ID NO: 3940825 - DNA, 25 bp, Homo sapien
cagcgtgcgtagatgaatgccattt

SEQ ID NO: 3940826 - DNA, 25 bp, Homo sapien
ctggtgcccggggcccttaacactg

SEQ ID NO: 3940827 - DNA, 25 bp, Homo sapien
agcgtgcgtagatgaatgccatttc

SEQ ID NO: 3940828 - DNA, 25 bp, Homo sapien
tcagcgtgcgtagatgaatgccatt

SEQ ID NO: 3940829 - DNA, 25 bp, Homo sapien
ctggtgtctacactcaggatggagt

SEQ ID NO: 3940830 - DNA, 25 bp, Homo sapien
aggatggagtgtacacccaggcggg

SEQ ID NO: 3940831 - DNA, 25 bp, Homo sapien
tcaggatggagtgtacacccaggcg

SEQ ID NO: 3940832 - DNA, 25 bp, Homo sapien
gctggtgtctacactcaggatggag

SEQ ID NO: 3940833 - DNA, 25 bp, Homo sapien
cacccaggatggcatctatgcccag

SEQ ID NO: 3940834 - DNA, 25 bp, Homo sapien
agaacttccctcctggggtatcctg

SEQ ID NO: 3940835 - DNA, 25 bp, Homo sapien
gaacttccctcctggggtatcctga

SEQ ID NO: 3940836 - DNA, 25 bp, Homo sapien
tccctcctggggtatcctgagtctg

SEQ ID NO: 3940837 - DNA, 25 bp, Homo sapien
ctcctggggtatcctgagtctgcac

SEQ ID NO: 3940838 - DNA, 25 bp, Homo sapien
gctgccgggggccgccgggcgcgcc

SEQ ID NO: 3940839 - DNA, 25 bp, Homo sapien
ggccgccgggcgcgcccgcctcctc

SEQ ID NO: 3940840 - DNA, 25 bp, Homo sapien
cgccgggcgcgcccgcctcctcggc

SEQ ID NO: 3940841 - DNA, 25 bp, Homo sapien
ggctgccgggggccgccgggcgcgc

SEQ ID NO: 3940842 - DNA, 25 bp, Homo sapien
cggggggcagcgtccgcggaggcgg

SEQ ID NO: 3940843 - DNA, 25 bp, Homo sapien
agcttctaggcaggcgtaggcgcat

SEQ ID NO: 3940844 - DNA, 25 bp, Homo sapien
caggcgtaggcgcatccgttgtagc

SEQ ID NO: 3940845 - DNA, 25 bp, Homo sapien
taggcgcatccgttgtagcagcagc

SEQ ID NO: 3940846 - DNA, 25 bp, Homo sapien
gcggcacagcttctaggcaggcgta

SEQ ID NO: 3940847 - DNA, 25 bp, Homo sapien
tctgtgcactgctcaaaagcacctg

SEQ ID NO: 3940848 - DNA, 25 bp, Homo sapien
gacacagggctgataacagtcatct

SEQ ID NO: 3940849 - DNA, 25 bp, Homo sapien
gatattcctggcaatgaaggacccc

SEQ ID NO: 3940850 - DNA, 25 bp, Homo sapien
catcaagctgtgtgagcgtgaaacg

SEQ ID NO: 3940851 - DNA, 25 bp, Homo sapien
gagtagtgaaacttggtccgggctc

SEQ ID NO: 3940852 - DNA, 25 bp, Homo sapien
tgtttggagtagtgaaacttggtcc

SEQ ID NO: 3940853 - DNA, 25 bp, Homo sapien
catcagaccacgtgttaggaaacat

SEQ ID NO: 3940854 - DNA, 25 bp, Homo sapien
ttcaggtgggaaacgtagtaatatg

SEQ ID NO: 3940855 - DNA, 25 bp, Homo sapien
cacacagtttatgggaaggccttca

SEQ ID NO: 3940856 - DNA, 25 bp, Homo sapien
gctgggtccctagatggctttgcga

SEQ ID NO: 3940857 - DNA, 25 bp, Homo sapien
tgacctccaaaacaggaatgacgcg

SEQ ID NO: 3940858 - DNA, 25 bp, Homo sapien
tattctacagagataggcggtctcc

SEQ ID NO: 3940859 - DNA, 25 bp, Homo sapien
caccaagccatcgaggtttcggctg

SEQ ID NO: 3940860 - DNA, 25 bp, Homo sapien
gccaccaagccatcgaggtttcggc

SEQ ID NO: 3940861 - DNA, 25 bp, Homo sapien
ccaccaagccatcgaggtttcggct

SEQ ID NO: 3940862 - DNA, 25 bp, Homo sapien
tgccaccaagccatcgaggtttcgg

SEQ ID NO: 3940863 - DNA, 25 bp, Homo sapien
acacagttgcatatacggccgcaca

SEQ ID NO: 3940864 - DNA, 25 bp, Homo sapien
caacacacagatggacgtggagtca

SEQ ID NO: 3940865 - DNA, 25 bp, Homo sapien
tcatcattagagagcggtgaacccc

SEQ ID NO: 3940866 - DNA, 25 bp, Homo sapien
catttacacaagcaagtcagacgca

SEQ ID NO: 3940867 - DNA, 25 bp, Homo sapien
tgggtctcactcagcggcatgtggc

SEQ ID NO: 3940868 - DNA, 25 bp, Homo sapien
cacaggcagtccaagctcacctgat

SEQ ID NO: 3940869 - DNA, 25 bp, Homo sapien
gatcccaaacatactctcacaggct

SEQ ID NO: 3940870 - DNA, 25 bp, Homo sapien
catatagacatgttcacggatacac

SEQ ID NO: 3940871 - DNA, 25 bp, Homo sapien
acacacgctggggtctagaaggccg

SEQ ID NO: 3940872 - DNA, 25 bp, Homo sapien
tagaaggccgactcccaggacaggt

SEQ ID NO: 3940873 - DNA, 25 bp, Homo sapien
tgcaggagggacacacgctggggtc

SEQ ID NO: 3940874 - DNA, 25 bp, Homo sapien
gtctagaaggccgactcccaggaca

SEQ ID NO: 3940875 - DNA, 25 bp, Homo sapien
gcttgacgcactgcccacggttggg

SEQ ID NO: 3940876 - DNA, 25 bp, Homo sapien
gataccttcggccacgtcacctggg

SEQ ID NO: 3940877 - DNA, 25 bp, Homo sapien
aggatgtggcactcatagcccgagg

SEQ ID NO: 3940878 - DNA, 25 bp, Homo sapien
gttcggccccatcctccgtggtgct

SEQ ID NO: 3940879 - DNA, 25 bp, Homo sapien
gctgcttcctggggcaggtcgtcca

SEQ ID NO: 3940880 - DNA, 25 bp, Homo sapien
gggcaggtcgtccatgcgggtgaga

SEQ ID NO: 3940881 - DNA, 25 bp, Homo sapien
cttcctggggcaggtcgtccatgcg

SEQ ID NO: 3940882 - DNA, 25 bp, Homo sapien
ggcaggtcgtccatgcgggtgagag

SEQ ID NO: 3940883 - DNA, 25 bp, Homo sapien
tgtaaagtttgtgtcgtaggattcg

SEQ ID NO: 3940884 - DNA, 25 bp, Homo sapien
aagtttgtgtcgtaggattcgccca

SEQ ID NO: 3940885 - DNA, 25 bp, Homo sapien
agtttgtgtcgtaggattcgcccat

SEQ ID NO: 3940886 - DNA, 25 bp, Homo sapien
taaagtttgtgtcgtaggattcgcc

SEQ ID NO: 3940887 - DNA, 25 bp, Homo sapien
caccatcagaccacaggtcttctat

SEQ ID NO: 3940888 - DNA, 25 bp, Homo sapien
tcttcacataagaaactttcactgc

SEQ ID NO: 3940889 - DNA, 25 bp, Homo sapien
ccattttgttccctatatctcagcc

SEQ ID NO: 3940890 - DNA, 25 bp, Homo sapien
tatatctcagccctgggcttttatt

SEQ ID NO: 3940891 - DNA, 25 bp, Homo sapien
ggccaaattgcttccgacctcaaga

SEQ ID NO: 3940892 - DNA, 25 bp, Homo sapien
cgactgggtctgtcatgttcacaaa

SEQ ID NO: 3940893 - DNA, 25 bp, Homo sapien
tagtatccagcatgtgatgtcagga

SEQ ID NO: 3940894 - DNA, 25 bp, Homo sapien
tctcacaacctggactaaggtgtcc

SEQ ID NO: 3940895 - DNA, 25 bp, Homo sapien
actgaaagtgcttctgttgtcccct

SEQ ID NO: 3940896 - DNA, 25 bp, Homo sapien
ttactgaaagtgcttctgttgtccc

SEQ ID NO: 3940897 - DNA, 25 bp, Homo sapien
tactgaaagtgcttctgttgtcccc

SEQ ID NO: 3940898 - DNA, 25 bp, Homo sapien
tgaaagtgcttctgttgtccccttc

SEQ ID NO: 3940899 - DNA, 25 bp, Homo sapien
tggctgcccacatttaccctggcca

SEQ ID NO: 3940900 - DNA, 25 bp, Homo sapien
ggctgcccacatttaccctggccat

SEQ ID NO: 3940901 - DNA, 25 bp, Homo sapien
tgcatctgacctactccagggacgg

SEQ ID NO: 3940902 - DNA, 25 bp, Homo sapien
tcaggtttagggctgcaactccaca

SEQ ID NO: 3940903 - DNA, 25 bp, Homo sapien
tgtagccgtcccctaccaggatgtg

SEQ ID NO: 3940904 - DNA, 25 bp, Homo sapien
gaactaccgctgagcaaccaagagg

SEQ ID NO: 3940905 - DNA, 25 bp, Homo sapien
atttaggcctcagcacatccggtgg

SEQ ID NO: 3940906 - DNA, 25 bp, Homo sapien
cagaaatgctttcatgggtggcggc

SEQ ID NO: 3940907 - DNA, 25 bp, Homo sapien
tccggtggctacaactaggaatcac

SEQ ID NO: 3940908 - DNA, 25 bp, Homo sapien
gatgggtacatacctcccagagcca

SEQ ID NO: 3940909 - DNA, 25 bp, Homo sapien
ctctgcctgccacagacacccagaa

SEQ ID NO: 3940910 - DNA, 25 bp, Homo sapien
tctgcctgccacagacacccagaac

SEQ ID NO: 3940911 - DNA, 25 bp, Homo sapien
acacccagaaccctgctgcctccat

SEQ ID NO: 3940912 - DNA, 25 bp, Homo sapien
gccacagacacccagaaccctgctg

SEQ ID NO: 3940913 - DNA, 25 bp, Homo sapien
tttctctctgcactgatttgtgtgc

SEQ ID NO: 3940914 - DNA, 25 bp, Homo sapien
gcactgatttgtgtgctactgctgc

SEQ ID NO: 3940915 - DNA, 25 bp, Homo sapien
catgagctctgaagaccggcctttc

SEQ ID NO: 3940916 - DNA, 25 bp, Homo sapien
tgaaagaaatctcagatcagaagaa

SEQ ID NO: 3940917 - DNA, 25 bp, Homo sapien
ttacaagcaaccgaactgactctgg

SEQ ID NO: 3940918 - DNA, 25 bp, Homo sapien
gcctggttacaagcaaccgaactga

SEQ ID NO: 3940919 - DNA, 25 bp, Homo sapien
tatcagttggaaatcgcctggttac

SEQ ID NO: 3940920 - DNA, 25 bp, Homo sapien
tggaaatcgcctggttacaagcaac

SEQ ID NO: 3940921 - DNA, 25 bp, Homo sapien
ctcccgagggttgactccaggccac

SEQ ID NO: 3940922 - DNA, 25 bp, Homo sapien
ccgagggttgactccaggccacgaa

SEQ ID NO: 3940923 - DNA, 25 bp, Homo sapien
gagggttgactccaggccacgaaaa

SEQ ID NO: 3940924 - DNA, 25 bp, Homo sapien
tcccgagggttgactccaggccacg

SEQ ID NO: 3940925 - DNA, 25 bp, Homo sapien
gaggcccgggatggctgcgcgcgcc

SEQ ID NO: 3940926 - DNA, 25 bp, Homo sapien
gcgaggcccgggatggctgcgcgcg

SEQ ID NO: 3940927 - DNA, 25 bp, Homo sapien
cggcgaggcccgggatggctgcgcg

SEQ ID NO: 3940928 - DNA, 25 bp, Homo sapien
tccccggcgaggcccgggatggctg

SEQ ID NO: 3940929 - DNA, 25 bp, Homo sapien
tgagcgggcgcaggcgttgcctgcg

SEQ ID NO: 3940930 - DNA, 25 bp, Homo sapien
gagcgggcgcaggcgttgcctgcgt

SEQ ID NO: 3940931 - DNA, 25 bp, Homo sapien
gcgggcgcaggcgttgcctgcgtcc

SEQ ID NO: 3940932 - DNA, 25 bp, Homo sapien
agcgggcgcaggcgttgcctgcgtc

SEQ ID NO: 3940933 - DNA, 25 bp, Homo sapien
aggaactcggagacgcgtccctcga

SEQ ID NO: 3940934 - DNA, 25 bp, Homo sapien
gaagccgagtttcttcaggaactcg

SEQ ID NO: 3940935 - DNA, 25 bp, Homo sapien
ccgcccgagaagccgagtttcttca

SEQ ID NO: 3940936 - DNA, 25 bp, Homo sapien
gagaagccgagtttcttcaggaact

SEQ ID NO: 3940937 - DNA, 25 bp, Homo sapien
ttaaaattggcattcgtaggctgct

SEQ ID NO: 3940938 - DNA, 25 bp, Homo sapien
cttgctggcagttggacttgagttt

SEQ ID NO: 3940939 - DNA, 25 bp, Homo sapien
ggcattcgtaggctgcttgctggca

SEQ ID NO: 3940940 - DNA, 25 bp, Homo sapien
tgagtttgagtctgattatcctaaa

SEQ ID NO: 3940941 - DNA, 25 bp, Homo sapien
caagcaggtgccttacatgaatcca

SEQ ID NO: 3940942 - DNA, 25 bp, Homo sapien
gtgccttacatgaatccagtctttg

SEQ ID NO: 3940943 - DNA, 25 bp, Homo sapien
cagtctttgtacgtagcagctggca

SEQ ID NO: 3940944 - DNA, 25 bp, Homo sapien
tttgtacgtagcagctggcaccgtc

SEQ ID NO: 3940945 - DNA, 25 bp, Homo sapien
ccgagaccagcagatgagtgaggcc

SEQ ID NO: 3940946 - DNA, 25 bp, Homo sapien
ggctcacccgagaccagcagatgag

SEQ ID NO: 3940947 - DNA, 25 bp, Homo sapien
gctgtgggctcacccgagaccagca

SEQ ID NO: 3940948 - DNA, 25 bp, Homo sapien
ctgctgtgggctcacccgagaccag

SEQ ID NO: 3940949 - DNA, 25 bp, Homo sapien
aatcgtgaggaaggttgatcagcca

SEQ ID NO: 3940950 - DNA, 25 bp, Homo sapien
ctcagggtaaatcgtgaggaaggtt

SEQ ID NO: 3940951 - DNA, 25 bp, Homo sapien
gaaacaaactcagggtaaatcgtga

SEQ ID NO: 3940952 - DNA, 25 bp, Homo sapien
ggtaaatcgtgaggaaggttgatca

SEQ ID NO: 3940953 - DNA, 25 bp, Homo sapien
tttcatgcggctgcttctcactcat

SEQ ID NO: 3940954 - DNA, 25 bp, Homo sapien
ctcggtttcatgcggctgcttctca

SEQ ID NO: 3940955 - DNA, 25 bp, Homo sapien
gtttcatgcggctgcttctcactca

SEQ ID NO: 3940956 - DNA, 25 bp, Homo sapien
cggtttcatgcggctgcttctcact

SEQ ID NO: 3940957 - DNA, 25 bp, Homo sapien
ccaggctgagcgaacttattttaca

SEQ ID NO: 3940958 - DNA, 25 bp, Homo sapien
tatcacagcctggttctatgggaca

SEQ ID NO: 3940959 - DNA, 25 bp, Homo sapien
tatgtagaatcctgaacctcgaact

SEQ ID NO: 3940960 - DNA, 25 bp, Homo sapien
tattgcagagagtgcctcctactga

SEQ ID NO: 3940961 - DNA, 25 bp, Homo sapien
ctctttctcgatggctttcagctca

SEQ ID NO: 3940962 - DNA, 25 bp, Homo sapien
atggctttcagctcactctgttcat

SEQ ID NO: 3940963 - DNA, 25 bp, Homo sapien
ttcttctctttctcgatggctttca

SEQ ID NO: 3940964 - DNA, 25 bp, Homo sapien
tggctttcagctcactctgttcatc

SEQ ID NO: 3940965 - DNA, 25 bp, Homo sapien
tctggcatttgcacgcttccttggg

SEQ ID NO: 3940966 - DNA, 25 bp, Homo sapien
tcctctttctggcatttgcacgctt

SEQ ID NO: 3940967 - DNA, 25 bp, Homo sapien
tttgcacgcttccttggggggcagg

SEQ ID NO: 3940968 - DNA, 25 bp, Homo sapien
acaaaacgctctggccaaatcctct

SEQ ID NO: 3940969 - DNA, 25 bp, Homo sapien
attagctccagatgcaaattcaatt

SEQ ID NO: 3940970 - DNA, 25 bp, Homo sapien
tagctccagatgcaaattcaattct

SEQ ID NO: 3940971 - DNA, 25 bp, Homo sapien
cagggctttgtgttgctttctttta

SEQ ID NO: 3940972 - DNA, 25 bp, Homo sapien
aacataaaaccttatcacaattagc

SEQ ID NO: 3940973 - DNA, 25 bp, Homo sapien
ctccacggattataaaagacgacgg

SEQ ID NO: 3940974 - DNA, 25 bp, Homo sapien
cgacggtgggaataccggatgacca

SEQ ID NO: 3940975 - DNA, 25 bp, Homo sapien
gctttcatgtgaaacagctggactc

SEQ ID NO: 3940976 - DNA, 25 bp, Homo sapien
tgggctgtgctacctctaacactgg

SEQ ID NO: 3940977 - DNA, 25 bp, Homo sapien
tacaaccatgttcgtagcactgttc

SEQ ID NO: 3940978 - DNA, 25 bp, Homo sapien
gctccaagagatgtttgtacaacca

SEQ ID NO: 3940979 - DNA, 25 bp, Homo sapien
cctgagaacgaaagaaaatgctgac

SEQ ID NO: 3940980 - DNA, 25 bp, Homo sapien
taaaaagggagctaccagatccagc

SEQ ID NO: 3940981 - DNA, 25 bp, Homo sapien
gcagaaaagacgactctggtcttaa

SEQ ID NO: 3940982 - DNA, 25 bp, Homo sapien
aattacagcagaaaagacgactctg

SEQ ID NO: 3940983 - DNA, 25 bp, Homo sapien
gacttgttcaaagaccccgtgcaga

SEQ ID NO: 3940984 - DNA, 25 bp, Homo sapien
ggtgctgggacttgttcaaagaccc

SEQ ID NO: 3940985 - DNA, 25 bp, Homo sapien
ggaatgaggcaacagggtacagact

SEQ ID NO: 3940986 - DNA, 25 bp, Homo sapien
agactcccactctgaaaggcagcgg

SEQ ID NO: 3940987 - DNA, 25 bp, Homo sapien
cactcatgggcgcagcaaggaatga

SEQ ID NO: 3940988 - DNA, 25 bp, Homo sapien
ggtcaggcacaagctcactcatggg

SEQ ID NO: 3940989 - DNA, 25 bp, Homo sapien
caggtatttcttccacacaggttcg

SEQ ID NO: 3940990 - DNA, 25 bp, Homo sapien
tccgacagcccagtgtgtaagtcca

SEQ ID NO: 3940991 - DNA, 25 bp, Homo sapien
cacaggttcgctgttgtcagcaaca

SEQ ID NO: 3940992 - DNA, 25 bp, Homo sapien
gctgcgtcaccgagaactccgacag

SEQ ID NO: 3940993 - DNA, 25 bp, Homo sapien
ttgctgccaaaacgcatcgatgaat

SEQ ID NO: 3940994 - DNA, 25 bp, Homo sapien
aaaacgcatcgatgaataacattcc

SEQ ID NO: 3940995 - DNA, 25 bp, Homo sapien
attttgctgccaaaacgcatcgatg

SEQ ID NO: 3940996 - DNA, 25 bp, Homo sapien
gccaaaacgcatcgatgaataacat

SEQ ID NO: 3940997 - DNA, 25 bp, Homo sapien
gcgatgctgacggcgtcctcatact

SEQ ID NO: 3940998 - DNA, 25 bp, Homo sapien
atgctgacggcgtcctcatactcct

SEQ ID NO: 3940999 - DNA, 25 bp, Homo sapien
gatgctgacggcgtcctcatactcc

SEQ ID NO: 3941000 - DNA, 25 bp, Homo sapien
tgctgacggcgtcctcatactcctt

SEQ ID NO: 3941001 - DNA, 25 bp, Homo sapien
aaggcgacagtgaccacgacaagca

SEQ ID NO: 3941002 - DNA, 25 bp, Homo sapien
ggatgaaggcgacagtgaccacgac

SEQ ID NO: 3941003 - DNA, 25 bp, Homo sapien
ggcgacagtgaccacgacaagcact

SEQ ID NO: 3941004 - DNA, 25 bp, Homo sapien
atgaaggcgacagtgaccacgacaa

SEQ ID NO: 3941005 - DNA, 25 bp, Homo sapien
tggggactccatgaagctcctgtcc

SEQ ID NO: 3941006 - DNA, 25 bp, Homo sapien
cttaccctgactgggacctcaggaa

SEQ ID NO: 3941007 - DNA, 25 bp, Homo sapien
atgaagctcctgtcccgcccagctt

SEQ ID NO: 3941008 - DNA, 25 bp, Homo sapien
cagcttaccctgactgggacctcag

SEQ ID NO: 3941009 - DNA, 25 bp, Homo sapien
cattctggaggaaccatcttggtca

SEQ ID NO: 3941010 - DNA, 25 bp, Homo sapien
ccagagatttctccgacctgtactc

SEQ ID NO: 3941011 - DNA, 25 bp, Homo sapien
tcttccagagatttctccgacctgt

SEQ ID NO: 3941012 - DNA, 25 bp, Homo sapien
cagttacattctggaggaaccatct

SEQ ID NO: 3941013 - DNA, 25 bp, Homo sapien
gacatggtaaaaagcaaaagcatcc

SEQ ID NO: 3941014 - DNA, 25 bp, Homo sapien
ttgacatggtaaaaagcaaaagcat

SEQ ID NO: 3941015 - DNA, 25 bp, Homo sapien
agcatccatgctgacatttgttttt

SEQ ID NO: 3941016 - DNA, 25 bp, Homo sapien
tggtaaaaagcaaaagcatccatgc

SEQ ID NO: 3941017 - DNA, 25 bp, Homo sapien
caggaaccagttctcgagcaagcag

SEQ ID NO: 3941018 - DNA, 25 bp, Homo sapien
atgtctgcagggatccggtctccga

SEQ ID NO: 3941019 - DNA, 25 bp, Homo sapien
tccgatcgagagagatacgacatca

SEQ ID NO: 3941020 - DNA, 25 bp, Homo sapien
gagatacgacatcaccaggaaccag

SEQ ID NO: 3941021 - DNA, 25 bp, Homo sapien
ggaaaacgtggaaaatgtgagccca

SEQ ID NO: 3941022 - DNA, 25 bp, Homo sapien
aaatctgaaggtcacggcagagagg

SEQ ID NO: 3941023 - DNA, 25 bp, Homo sapien
ccctgccctgcctggaaatctgaag

SEQ ID NO: 3941024 - DNA, 25 bp, Homo sapien
gagaggatcaatgtccgagtggcca

SEQ ID NO: 3941025 - DNA, 25 bp, Homo sapien
catgggcaacggatacatggaggaa

SEQ ID NO: 3941026 - DNA, 25 bp, Homo sapien
aagtaagcggtcatctgccacagca

SEQ ID NO: 3941027 - DNA, 25 bp, Homo sapien
tgttgatttccacccagtgaaaacg

SEQ ID NO: 3941028 - DNA, 25 bp, Homo sapien
gcctggaccctgttagcactgttga

SEQ ID NO: 3941029 - DNA, 25 bp, Homo sapien
gttttactacatggctcggcttccc

SEQ ID NO: 3941030 - DNA, 25 bp, Homo sapien
agggtccccatgaagacgatgttgc

SEQ ID NO: 3941031 - DNA, 25 bp, Homo sapien
tggtgaggtccccaccgcctgtcaa

SEQ ID NO: 3941032 - DNA, 25 bp, Homo sapien
ggcttccccggtgaaactggattca

SEQ ID NO: 3941033 - DNA, 25 bp, Homo sapien
acacttctccgaactgagagctttc

SEQ ID NO: 3941034 - DNA, 25 bp, Homo sapien
atcttaaacacttctccgaactgag

SEQ ID NO: 3941035 - DNA, 25 bp, Homo sapien
ttaaacacttctccgaactgagagc

SEQ ID NO: 3941036 - DNA, 25 bp, Homo sapien
tcatcttaaacacttctccgaactg

SEQ ID NO: 3941037 - DNA, 25 bp, Homo sapien
aggagaagagtgtcagttgctttcc

SEQ ID NO: 3941038 - DNA, 25 bp, Homo sapien
gaccccgatcgtgaacatactcagg

SEQ ID NO: 3941039 - DNA, 25 bp, Homo sapien
ctgaccccgatcgtgaacatactca

SEQ ID NO: 3941040 - DNA, 25 bp, Homo sapien
catactcaggagttgtttcccttgc

SEQ ID NO: 3941041 - DNA, 25 bp, Homo sapien
tttcccttgcgaccagccaatgagc

SEQ ID NO: 3941042 - DNA, 25 bp, Homo sapien
tacaaaagggacaccctggatcatt

SEQ ID NO: 3941043 - DNA, 25 bp, Homo sapien
gcaaggggcggccatagcactctta

SEQ ID NO: 3941044 - DNA, 25 bp, Homo sapien
cattcgccgggcactctgtacctgt

SEQ ID NO: 3941045 - DNA, 25 bp, Homo sapien
ccattgaccaccctggcaaggcaag

SEQ ID NO: 3941046 - DNA, 25 bp, Homo sapien
tgctgtccgcgtgtggccttgggct

SEQ ID NO: 3941047 - DNA, 25 bp, Homo sapien
ccttgggctctacatccattgccgc

SEQ ID NO: 3941048 - DNA, 25 bp, Homo sapien
gccttgggctctacatccattgccg

SEQ ID NO: 3941049 - DNA, 25 bp, Homo sapien
gtggccttgggctctacatccattg

SEQ ID NO: 3941050 - DNA, 25 bp, Homo sapien
tgacagccacaggaatatgcacacc

SEQ ID NO: 3941051 - DNA, 25 bp, Homo sapien
tcctaactcctggtacacgtgaatg

SEQ ID NO: 3941052 - DNA, 25 bp, Homo sapien
gctatacacagtaacaccgaaggat

SEQ ID NO: 3941053 - DNA, 25 bp, Homo sapien
tatctatgtgctcaggactgcctgt

SEQ ID NO: 3941054 - DNA, 25 bp, Homo sapien
aatacgtgaaatcggccagggcgag

SEQ ID NO: 3941055 - DNA, 25 bp, Homo sapien
agaagcccctcgagacacgcccggt

SEQ ID NO: 3941056 - DNA, 25 bp, Homo sapien
agcaagcccacgtggcgatcccaga

SEQ ID NO: 3941057 - DNA, 25 bp, Homo sapien
gcccaggaaatacgtgaaatcggcc

SEQ ID NO: 3941058 - DNA, 25 bp, Homo sapien
tccccagtgtcctggttctagtctc

SEQ ID NO: 3941059 - DNA, 25 bp, Homo sapien
ggtgaagcttgtcttaggtgtcccc

SEQ ID NO: 3941060 - DNA, 25 bp, Homo sapien
ttggctggtgaagcttgtcttaggt

SEQ ID NO: 3941061 - DNA, 25 bp, Homo sapien
ccagtgtcctggttctagtctccat

SEQ ID NO: 3941062 - DNA, 25 bp, Homo sapien
tggatcgaaaggtcaaatgagtccc

SEQ ID NO: 3941063 - DNA, 25 bp, Homo sapien
ctggatcgaaaggtcaaatgagtcc

SEQ ID NO: 3941064 - DNA, 25 bp, Homo sapien
gatcgaaaggtcaaatgagtcccct

SEQ ID NO: 3941065 - DNA, 25 bp, Homo sapien
ggatcgaaaggtcaaatgagtcccc

SEQ ID NO: 3941066 - DNA, 25 bp, Homo sapien
ggtaacttcttcacgatgacccgct

SEQ ID NO: 3941067 - DNA, 25 bp, Homo sapien
taaagtctccacgatgggtaacttc

SEQ ID NO: 3941068 - DNA, 25 bp, Homo sapien
ccaggaccagcgtcaccatgacgac

SEQ ID NO: 3941069 - DNA, 25 bp, Homo sapien
gacgacgatgggcagaccctctgga

SEQ ID NO: 3941070 - DNA, 25 bp, Homo sapien
tgacgttacaagctgggtcactgtc

SEQ ID NO: 3941071 - DNA, 25 bp, Homo sapien
cgtcttgtcagaacagagaacgctg

SEQ ID NO: 3941072 - DNA, 25 bp, Homo sapien
cactgtcatttcattggcagtcaga

SEQ ID NO: 3941073 - DNA, 25 bp, Homo sapien
ggcacgaagcccatctgacgttaca

SEQ ID NO: 3941074 - DNA, 25 bp, Homo sapien
taatgacttccttggatggtagaag

SEQ ID NO: 3941075 - DNA, 25 bp, Homo sapien
ccttggatggtagaagacacacagt

SEQ ID NO: 3941076 - DNA, 25 bp, Homo sapien
gacacacagtcccttgaccgtcata

SEQ ID NO: 3941077 - DNA, 25 bp, Homo sapien
gaccgtcatacccaactccgctgac

SEQ ID NO: 3941078 - DNA, 25 bp, Homo sapien
gatgaccgcattgttggcaacacag

SEQ ID NO: 3941079 - DNA, 25 bp, Homo sapien
ggccatcaatgcaccctcggtgggc

SEQ ID NO: 3941080 - DNA, 25 bp, Homo sapien
gggctgccccatcacggcgttcttt

SEQ ID NO: 3941081 - DNA, 25 bp, Homo sapien
gcgttctttctgatgaccgcattgt

SEQ ID NO: 3941082 - DNA, 25 bp, Homo sapien
gcatttcaccgccatccacttctgc

SEQ ID NO: 3941083 - DNA, 25 bp, Homo sapien
cagtcttcagactgcatttcaccgc

SEQ ID NO: 3941084 - DNA, 25 bp, Homo sapien
gactgcatttcaccgccatccactt

SEQ ID NO: 3941085 - DNA, 25 bp, Homo sapien
tcttcagactgcatttcaccgccat

SEQ ID NO: 3941086 - DNA, 25 bp, Homo sapien
ccgttgttgtacatggtgcagtagc

SEQ ID NO: 3941087 - DNA, 25 bp, Homo sapien
tgtacatggtgcagtagcggatcac

SEQ ID NO: 3941088 - DNA, 25 bp, Homo sapien
gggatgcccccgttgttgtacatgg

SEQ ID NO: 3941089 - DNA, 25 bp, Homo sapien
cagtagcggatcacctcttccaagg

SEQ ID NO: 3941090 - DNA, 25 bp, Homo sapien
cccgcaaaccgagcgaccccatcct

SEQ ID NO: 3941091 - DNA, 25 bp, Homo sapien
caaaccgagcgaccccatcctcttc

SEQ ID NO: 3941092 - DNA, 25 bp, Homo sapien
cgcaaaccgagcgaccccatcctct

SEQ ID NO: 3941093 - DNA, 25 bp, Homo sapien
gcaaaccgagcgaccccatcctctt

SEQ ID NO: 3941094 - DNA, 25 bp, Homo sapien
gacgggtgacctccttgactaggga

SEQ ID NO: 3941095 - DNA, 25 bp, Homo sapien
cacattattgccgtcagcatgctgc

SEQ ID NO: 3941096 - DNA, 25 bp, Homo sapien
gactagggaccctgcttgaatgcac

SEQ ID NO: 3941097 - DNA, 25 bp, Homo sapien
tgcctgactccttgggacgggtgac

SEQ ID NO: 3941098 - DNA, 25 bp, Homo sapien
gttctcattacgctctcccgcaagg

SEQ ID NO: 3941099 - DNA, 25 bp, Homo sapien
gaacgcgtcattacgctccgcagca

SEQ ID NO: 3941100 - DNA, 25 bp, Homo sapien
agcaagtccctggaacgcgtcatta

SEQ ID NO: 3941101 - DNA, 25 bp, Homo sapien
tccgcagcagacatccgggcgaagg

SEQ ID NO: 3941102 - DNA, 25 bp, Homo sapien
tctgcagagggctcaggcaacaagt

SEQ ID NO: 3941103 - DNA, 25 bp, Homo sapien
gcagagggctcaggcaacaagtccc

SEQ ID NO: 3941104 - DNA, 25 bp, Homo sapien
ctgcagagggctcaggcaacaagtc

SEQ ID NO: 3941105 - DNA, 25 bp, Homo sapien
gagggctcaggcaacaagtccctag

SEQ ID NO: 3941106 - DNA, 25 bp, Homo sapien
gactcggagagaacctggactgctt

SEQ ID NO: 3941107 - DNA, 25 bp, Homo sapien
gtcaatgatgcccacaagaccgaga

SEQ ID NO: 3941108 - DNA, 25 bp, Homo sapien
agggcatcccccgttatcatcttca

SEQ ID NO: 3941109 - DNA, 25 bp, Homo sapien
tcacagacacaccagactcggagag

SEQ ID NO: 3941110 - DNA, 25 bp, Homo sapien
ttccccacgcggtcggccagctcgc

SEQ ID NO: 3941111 - DNA, 25 bp, Homo sapien
gcttcccgttgcacaggccgatgtt

SEQ ID NO: 3941112 - DNA, 25 bp, Homo sapien
tcccgttgcacaggccgatgtttct

SEQ ID NO: 3941113 - DNA, 25 bp, Homo sapien
cttccccacgcggtcggccagctcg

SEQ ID NO: 3941114 - DNA, 25 bp, Homo sapien
cacggagacggggaagacgaagaat

SEQ ID NO: 3941115 - DNA, 25 bp, Homo sapien
cggagacggggaagacgaagaatca

SEQ ID NO: 3941116 - DNA, 25 bp, Homo sapien
ctggacacggagacggggaagacga

SEQ ID NO: 3941117 - DNA, 25 bp, Homo sapien
gacacggagacggggaagacgaaga

SEQ ID NO: 3941118 - DNA, 25 bp, Homo sapien
tgggctggtcctgaagaacacggac

SEQ ID NO: 3941119 - DNA, 25 bp, Homo sapien
tttgggctggtcctgaagaacacgg

SEQ ID NO: 3941120 - DNA, 25 bp, Homo sapien
ggctggtcctgaagaacacggacac

SEQ ID NO: 3941121 - DNA, 25 bp, Homo sapien
gctttgggctggtcctgaagaacac

SEQ ID NO: 3941122 - DNA, 25 bp, Homo sapien
tgagctcctcgagccacagtgtctc

SEQ ID NO: 3941123 - DNA, 25 bp, Homo sapien
tcctcgagccacagtgtctctggcc

SEQ ID NO: 3941124 - DNA, 25 bp, Homo sapien
gctcctcgagccacagtgtctctgg

SEQ ID NO: 3941125 - DNA, 25 bp, Homo sapien
agctcctcgagccacagtgtctctg

SEQ ID NO: 3941126 - DNA, 25 bp, Homo sapien
agggccactgcgtcgttcaccccat

SEQ ID NO: 3941127 - DNA, 25 bp, Homo sapien
tggcgatcccaatgtctgcagactt

SEQ ID NO: 3941128 - DNA, 25 bp, Homo sapien
gttggcggcctctttgctgacgtcc

SEQ ID NO: 3941129 - DNA, 25 bp, Homo sapien
gtcatggccacgatcgcccctgact

SEQ ID NO: 3941130 - DNA, 25 bp, Homo sapien
gagagccatttactcacggagcggg

SEQ ID NO: 3941131 - DNA, 25 bp, Homo sapien
gattgatgttatacttgggcccctg

SEQ ID NO: 3941132 - DNA, 25 bp, Homo sapien
gaccatgaattactctccggccgag

SEQ ID NO: 3941133 - DNA, 25 bp, Homo sapien
tggtgttctaacaggtgcccctcgg

SEQ ID NO: 3941134 - DNA, 25 bp, Homo sapien
gtgctcagctggaatcggacaaagt

SEQ ID NO: 3941135 - DNA, 25 bp, Homo sapien
gctggaatcggacaaagtttttgat

SEQ ID NO: 3941136 - DNA, 25 bp, Homo sapien
cagctggaatcggacaaagtttttg

SEQ ID NO: 3941137 - DNA, 25 bp, Homo sapien
gctcagctggaatcggacaaagttt

SEQ ID NO: 3941138 - DNA, 25 bp, Homo sapien
gcgtggtgcttaatgacactcggaa

SEQ ID NO: 3941139 - DNA, 25 bp, Homo sapien
tgcttaatgacactcggaatgctgg

SEQ ID NO: 3941140 - DNA, 25 bp, Homo sapien
cgccaggcgtggtgcttaatgacac

SEQ ID NO: 3941141 - DNA, 25 bp, Homo sapien
actcggaatgctggcctctacttac

SEQ ID NO: 3941142 - DNA, 25 bp, Homo sapien
ttgatccataggatctgcatggcgt

SEQ ID NO: 3941143 - DNA, 25 bp, Homo sapien
tgatgagactcagggcggagatgct

SEQ ID NO: 3941144 - DNA, 25 bp, Homo sapien
ggcccatccatgatgatgttgatcc

SEQ ID NO: 3941145 - DNA, 25 bp, Homo sapien
ttgaacacggtggacagagtgatga

SEQ ID NO: 3941146 - DNA, 25 bp, Homo sapien
tcctctgccttctactcccagtctc

SEQ ID NO: 3941147 - DNA, 25 bp, Homo sapien
ctctgccggcccaggtactttctcc

SEQ ID NO: 3941148 - DNA, 25 bp, Homo sapien
tgccggcccaggtactttctcctct

SEQ ID NO: 3941149 - DNA, 25 bp, Homo sapien
ctgccttctactcccagtctcactg

SEQ ID NO: 3941150 - DNA, 25 bp, Homo sapien
aatgagccatgcaggttgcccagag

SEQ ID NO: 3941151 - DNA, 25 bp, Homo sapien
tacggttacgcacacgtggccagat

SEQ ID NO: 3941152 - DNA, 25 bp, Homo sapien
tcagggatgaaacacaaactccgcc

SEQ ID NO: 3941153 - DNA, 25 bp, Homo sapien
tatcactggtgataacagcagcact

SEQ ID NO: 3941154 - DNA, 25 bp, Homo sapien
caggcatcgcacctgccctcctcgg

SEQ ID NO: 3941155 - DNA, 25 bp, Homo sapien
cagtgaaggaagaccaccccgtaag

SEQ ID NO: 3941156 - DNA, 25 bp, Homo sapien
tgtgcccctccatctgtcccgcaga

SEQ ID NO: 3941157 - DNA, 25 bp, Homo sapien
caggcatttgctgaacgcccccagg

SEQ ID NO: 3941158 - DNA, 25 bp, Homo sapien
aaggcgtctttgtcaacgggctcta

SEQ ID NO: 3941159 - DNA, 25 bp, Homo sapien
ccgcggacatgaggatcttcaggat

SEQ ID NO: 3941160 - DNA, 25 bp, Homo sapien
acactccgtggtggctgcctgaagg

SEQ ID NO: 3941161 - DNA, 25 bp, Homo sapien
aagataaagagggtcccgctgatga

SEQ ID NO: 3941162 - DNA, 25 bp, Homo sapien
gaacaggccggggtgaccctcgctc

SEQ ID NO: 3941163 - DNA, 25 bp, Homo sapien
agaacaggccggggtgaccctcgct

SEQ ID NO: 3941164 - DNA, 25 bp, Homo sapien
acaggccggggtgaccctcgctcac

SEQ ID NO: 3941165 - DNA, 25 bp, Homo sapien
aacaggccggggtgaccctcgctca

SEQ ID NO: 3941166 - DNA, 25 bp, Homo sapien
tctgatggcatcacattgtccggtg

SEQ ID NO: 3941167 - DNA, 25 bp, Homo sapien
aatcacctctagagtgtaacacagg

SEQ ID NO: 3941168 - DNA, 25 bp, Homo sapien
gcttcctgcacatgggcaatctgtg

SEQ ID NO: 3941169 - DNA, 25 bp, Homo sapien
cctgcaggccatgaaaaggtgaccc

SEQ ID NO: 3941170 - DNA, 25 bp, Homo sapien
ggtgtgaggtcagtggctgctaccc

SEQ ID NO: 3941171 - DNA, 25 bp, Homo sapien
ccccagcacatgctgatttgctgcc

SEQ ID NO: 3941172 - DNA, 25 bp, Homo sapien
tgtgaggtcagtggctgctacccca

SEQ ID NO: 3941173 - DNA, 25 bp, Homo sapien
caggtgtgaggtcagtggctgctac

SEQ ID NO: 3941174 - DNA, 25 bp, Homo sapien
ttaggcgggaagagacaacctccat

SEQ ID NO: 3941175 - DNA, 25 bp, Homo sapien
ctggaaggtgagcacaaaggtgaga

SEQ ID NO: 3941176 - DNA, 25 bp, Homo sapien
cacaaaggtgagaggttaggcggga

SEQ ID NO: 3941177 - DNA, 25 bp, Homo sapien
tcctgaaccaaagggcacaggcctg

SEQ ID NO: 3941178 - DNA, 25 bp, Homo sapien
gtgcggggagtgcttgctctgtctt

SEQ ID NO: 3941179 - DNA, 25 bp, Homo sapien
gcggggagtgcttgctctgtcttca

SEQ ID NO: 3941180 - DNA, 25 bp, Homo sapien
cgtcgtggtgcggggagtgcttgct

SEQ ID NO: 3941181 - DNA, 25 bp, Homo sapien
cgtggtgcggggagtgcttgctctg

SEQ ID NO: 3941182 - DNA, 25 bp, Homo sapien
ctgagagcggcaggtcaaggcgttg

SEQ ID NO: 3941183 - DNA, 25 bp, Homo sapien
cgttgaagagatcgaaaaacacaaa

SEQ ID NO: 3941184 - DNA, 25 bp, Homo sapien
caggtcaaggcgttgaagagatcga

SEQ ID NO: 3941185 - DNA, 25 bp, Homo sapien
caaggcgttgaagagatcgaaaaac

SEQ ID NO: 3941186 - DNA, 25 bp, Homo sapien
ggcgctgctgtcgagaacacacagc

SEQ ID NO: 3941187 - DNA, 25 bp, Homo sapien
cagagccgctcaatgctgcgggcag

SEQ ID NO: 3941188 - DNA, 25 bp, Homo sapien
tctgactgcccacgctgagccagag

SEQ ID NO: 3941189 - DNA, 25 bp, Homo sapien
tcggggcgctgctgtcgagaacaca

SEQ ID NO: 3941190 - DNA, 25 bp, Homo sapien
gagaaagccgatctcaaatatcagc

SEQ ID NO: 3941191 - DNA, 25 bp, Homo sapien
gtggttcctgagaaagccgatctca

SEQ ID NO: 3941192 - DNA, 25 bp, Homo sapien
agccgatctcaaatatcagcttggt

SEQ ID NO: 3941193 - DNA, 25 bp, Homo sapien
cctgagaaagccgatctcaaatatc

SEQ ID NO: 3941194 - DNA, 25 bp, Homo sapien
gctcccaggttctccgtctggaaga

SEQ ID NO: 3941195 - DNA, 25 bp, Homo sapien
gggatgtaaatgaccgccagctgcc

SEQ ID NO: 3941196 - DNA, 25 bp, Homo sapien
ttctccgtctggaagaccctctgca

SEQ ID NO: 3941197 - DNA, 25 bp, Homo sapien
aagcgctcccaggttctccgtctgg

SEQ ID NO: 3941198 - DNA, 25 bp, Homo sapien
tcctaggggtttctgtgcatccgtc

SEQ ID NO: 3941199 - DNA, 25 bp, Homo sapien
tgacaggcctcttcctaggggtttc

SEQ ID NO: 3941200 - DNA, 25 bp, Homo sapien
tgcatccgtcacatcacccacgtta

SEQ ID NO: 3941201 - DNA, 25 bp, Homo sapien
tccgtcacatcacccacgttagagt

SEQ ID NO: 3941202 - DNA, 25 bp, Homo sapien
catcttcagggtgcatctggactct

SEQ ID NO: 3941203 - DNA, 25 bp, Homo sapien
gaggagctctgacaaaatgaagacg

SEQ ID NO: 3941204 - DNA, 25 bp, Homo sapien
aaatgaagacggatgaggccaatcc

SEQ ID NO: 3941205 - DNA, 25 bp, Homo sapien
tacacatcttcagggtgcatctgga

SEQ ID NO: 3941206 - DNA, 25 bp, Homo sapien
gaaggctgcggcctcctaaaagtct

SEQ ID NO: 3941207 - DNA, 25 bp, Homo sapien
aactgatccggtgatggaaggctgc

SEQ ID NO: 3941208 - DNA, 25 bp, Homo sapien
tctcccctgacgaggagacacggca

SEQ ID NO: 3941209 - DNA, 25 bp, Homo sapien
cagtcacaaccagatcgagatgatt

SEQ ID NO: 3941210 - DNA, 25 bp, Homo sapien
ttgtatctgccacgagtggcctgcc

SEQ ID NO: 3941211 - DNA, 25 bp, Homo sapien
gcagagtgtgaccatcctacccact

SEQ ID NO: 3941212 - DNA, 25 bp, Homo sapien
ggcacagatacgtagttagacatgg

SEQ ID NO: 3941213 - DNA, 25 bp, Homo sapien
cccggcatagcactttatttaaaag

SEQ ID NO: 3941214 - DNA, 25 bp, Homo sapien
cgtggccattaacacatggctgtgg

SEQ ID NO: 3941215 - DNA, 25 bp, Homo sapien
tggctgtgggtttccaacctggccc

SEQ ID NO: 3941216 - DNA, 25 bp, Homo sapien
tcatgatggattgctgctcacccca

SEQ ID NO: 3941217 - DNA, 25 bp, Homo sapien
tctttatgtccaaaagccgaggcct

SEQ ID NO: 3941218 - DNA, 25 bp, Homo sapien
aagagcagatcggtttttggaagtc

SEQ ID NO: 3941219 - DNA, 25 bp, Homo sapien
acagcatggagacctctctcctctg

SEQ ID NO: 3941220 - DNA, 25 bp, Homo sapien
gggcagtgggaaatcaagcttgtct

SEQ ID NO: 3941221 - DNA, 25 bp, Homo sapien
tctgccatctgtcacgtggaagagc

SEQ ID NO: 3941222 - DNA, 25 bp, Homo sapien
ctctagtgaggcctgactagtaaat

SEQ ID NO: 3941223 - DNA, 25 bp, Homo sapien
tagtaaatggggggttctagctctg

SEQ ID NO: 3941224 - DNA, 25 bp, Homo sapien
tagtgaggcctgactagtaaatggg

SEQ ID NO: 3941225 - DNA, 25 bp, Homo sapien
ctagtaaatggggggttctagctct

SEQ ID NO: 3941226 - DNA, 25 bp, Homo sapien
gaggcactccttagcagactgtgga

SEQ ID NO: 3941227 - DNA, 25 bp, Homo sapien
tctgtgtctcactaggaatggccca

SEQ ID NO: 3941228 - DNA, 25 bp, Homo sapien
cagcagtgtgcccaaggatcctgaa

SEQ ID NO: 3941229 - DNA, 25 bp, Homo sapien
gaagtaaatgtctcgggccagcagt

SEQ ID NO: 3941230 - DNA, 25 bp, Homo sapien
tattttctccgacctttgcactgtg

SEQ ID NO: 3941231 - DNA, 25 bp, Homo sapien
aatttttcggcaaatgcttggctgc

SEQ ID NO: 3941232 - DNA, 25 bp, Homo sapien
ttctgtatgaattgaggtctctctc

SEQ ID NO: 3941233 - DNA, 25 bp, Homo sapien
cccattgacttctaatgatactttg

SEQ ID NO: 3941234 - DNA, 25 bp, Homo sapien
tcaggaaggaatgtcgtgttttatc

SEQ ID NO: 3941235 - DNA, 25 bp, Homo sapien
tttactaattgcttatatctgatca

SEQ ID NO: 3941236 - DNA, 25 bp, Homo sapien
gaaccatccttgcataagtgggata

SEQ ID NO: 3941237 - DNA, 25 bp, Homo sapien
taattgcttatatctgatcatatgg

SEQ ID NO: 3941238 - DNA, 25 bp, Homo sapien
tagcgttccaccgtctgcagctggg

SEQ ID NO: 3941239 - DNA, 25 bp, Homo sapien
aatatcgtttatgtgtgccttgctg

SEQ ID NO: 3941240 - DNA, 25 bp, Homo sapien
ttatggactgcgtgatgtcccacca

SEQ ID NO: 3941241 - DNA, 25 bp, Homo sapien
caccatatggatgctctcgggccta

SEQ ID NO: 3941242 - DNA, 25 bp, Homo sapien
ggacagccgcctgccgctggacatt

SEQ ID NO: 3941243 - DNA, 25 bp, Homo sapien
cttgcaggctcttcgagttgatgca

SEQ ID NO: 3941244 - DNA, 25 bp, Homo sapien
tgccgctggacattgagtccaggct

SEQ ID NO: 3941245 - DNA, 25 bp, Homo sapien
agcacccagactcagccggtgcagc

SEQ ID NO: 3941246 - DNA, 25 bp, Homo sapien
ctgttcccaggccatgtaggtggcc

SEQ ID NO: 3941247 - DNA, 25 bp, Homo sapien
gagctgataactgttcccaggccat

SEQ ID NO: 3941248 - DNA, 25 bp, Homo sapien
gataactgttcccaggccatgtagg

SEQ ID NO: 3941249 - DNA, 25 bp, Homo sapien
tcaagctgccccttcgcacaagggc

SEQ ID NO: 3941250 - DNA, 25 bp, Homo sapien
aaccggctgaagaggcgcacgtggg

SEQ ID NO: 3941251 - DNA, 25 bp, Homo sapien
ttcagacgtcttggagtgaacggga

SEQ ID NO: 3941252 - DNA, 25 bp, Homo sapien
gagctggcgcctgatggctgccggg

SEQ ID NO: 3941253 - DNA, 25 bp, Homo sapien
tggagggagtctgtttagccaggct

SEQ ID NO: 3941254 - DNA, 25 bp, Homo sapien
gctggaaacagggtctagtccttca

SEQ ID NO: 3941255 - DNA, 25 bp, Homo sapien
tctaaaggcccgtgtgtcttgggca

SEQ ID NO: 3941256 - DNA, 25 bp, Homo sapien
tgtgtcttgggcatcaggagccctg

SEQ ID NO: 3941257 - DNA, 25 bp, Homo sapien
tagtccttcatgtctaaaggcccgt

SEQ ID NO: 3941258 - DNA, 25 bp, Homo sapien
tgcagtgagctgagccgtgattgca

SEQ ID NO: 3941259 - DNA, 25 bp, Homo sapien
gtgagctgagccgtgattgcatcac

SEQ ID NO: 3941260 - DNA, 25 bp, Homo sapien
cagtgagctgagccgtgattgcatc

SEQ ID NO: 3941261 - DNA, 25 bp, Homo sapien
agctgagccgtgattgcatcactgc

SEQ ID NO: 3941262 - DNA, 25 bp, Homo sapien
tttgcgactctcctagcaggcggtg

SEQ ID NO: 3941263 - DNA, 25 bp, Homo sapien
tctgtggcccatgtttcaagttgac

SEQ ID NO: 3941264 - DNA, 25 bp, Homo sapien
tcctggtgttctacggaaggtctcc

SEQ ID NO: 3941265 - DNA, 25 bp, Homo sapien
gaagtccctcttgccgtgtcaggta

SEQ ID NO: 3941266 - DNA, 25 bp, Homo sapien
tcccaggtagtaaaatgtggatgct

SEQ ID NO: 3941267 - DNA, 25 bp, Homo sapien
gatgaggattgccagataacaggat

SEQ ID NO: 3941268 - DNA, 25 bp, Homo sapien
tttgaaactcaaacttagctgggct

SEQ ID NO: 3941269 - DNA, 25 bp, Homo sapien
gatgctgacttaccattagctttcc

SEQ ID NO: 3941270 - DNA, 25 bp, Homo sapien
tggtgcaaggcaaattcaggactcc

SEQ ID NO: 3941271 - DNA, 25 bp, Homo sapien
gaaaggaaggaaccattgcagagga

SEQ ID NO: 3941272 - DNA, 25 bp, Homo sapien
ggaccaagctgacggatcccatctt

SEQ ID NO: 3941273 - DNA, 25 bp, Homo sapien
cgatgagccgctgtgattgattccg

SEQ ID NO: 3941274 - DNA, 25 bp, Homo sapien
acacaggacagcattggccgtgacc

SEQ ID NO: 3941275 - DNA, 25 bp, Homo sapien
gttttgcggtgatcgcgagcgccac

SEQ ID NO: 3941276 - DNA, 25 bp, Homo sapien
taaaaaccatcacggtagccatgtg

SEQ ID NO: 3941277 - DNA, 25 bp, Homo sapien
caggacagcattggccgtgaccaac

SEQ ID NO: 3941278 - DNA, 25 bp, Homo sapien
ctaaaaccattgtaagatttcttat

SEQ ID NO: 3941279 - DNA, 25 bp, Homo sapien
tctaaaaccattgtaagatttctta

SEQ ID NO: 3941280 - DNA, 25 bp, Homo sapien
caccactctcggtgagcagctgttt

SEQ ID NO: 3941281 - DNA, 25 bp, Homo sapien
tgtggtgacacaatcacaactcgct

SEQ ID NO: 3941282 - DNA, 25 bp, Homo sapien
tgactctttgtagggttgagggacc

SEQ ID NO: 3941283 - DNA, 25 bp, Homo sapien
tgttatccgaaagaccgccagggtg

SEQ ID NO: 3941284 - DNA, 25 bp, Homo sapien
gaaactgaggacttccgtcaccagc

SEQ ID NO: 3941285 - DNA, 25 bp, Homo sapien
ttctgtaaagatccgtgcaaagcct

SEQ ID NO: 3941286 - DNA, 25 bp, Homo sapien
agccctggctgcacgttgtcactgg

SEQ ID NO: 3941287 - DNA, 25 bp, Homo sapien
gggcctgttcaccatataaggcaat

SEQ ID NO: 3941288 - DNA, 25 bp, Homo sapien
agtctgggcaccgactccctggttg

SEQ ID NO: 3941289 - DNA, 25 bp, Homo sapien
ttagtctgggcaccgactccctggt

SEQ ID NO: 3941290 - DNA, 25 bp, Homo sapien
tccctggttgccctcgatgcctggt

SEQ ID NO: 3941291 - DNA, 25 bp, Homo sapien
acttctggaaaggtggcttgctgcc

SEQ ID NO: 3941292 - DNA, 25 bp, Homo sapien
tttccccgcaaaacagcaggcggca

SEQ ID NO: 3941293 - DNA, 25 bp, Homo sapien
ccgcaaaacagcaggcggcagatga

SEQ ID NO: 3941294 - DNA, 25 bp, Homo sapien
ccccgcaaaacagcaggcggcagat

SEQ ID NO: 3941295 - DNA, 25 bp, Homo sapien
cctttccccgcaaaacagcaggcgg

SEQ ID NO: 3941296 - DNA, 25 bp, Homo sapien
gaaaatccacgggaagcttctcgtg

SEQ ID NO: 3941297 - DNA, 25 bp, Homo sapien
gcttctcgtggcggttgcctccagg

SEQ ID NO: 3941298 - DNA, 25 bp, Homo sapien
gaagcttctcgtggcggttgcctcc

SEQ ID NO: 3941299 - DNA, 25 bp, Homo sapien
tgggaaaatccacgggaagcttctc

SEQ ID NO: 3941300 - DNA, 25 bp, Homo sapien
tctgcttcccgtgtgtccatgttta

SEQ ID NO: 3941301 - DNA, 25 bp, Homo sapien
tccatgtttaaaggctgtaggtgga

SEQ ID NO: 3941302 - DNA, 25 bp, Homo sapien
tcccgtgtgtccatgtttaaaggct

SEQ ID NO: 3941303 - DNA, 25 bp, Homo sapien
tcaaggagtaagacagtcgtctgct

SEQ ID NO: 3941304 - DNA, 25 bp, Homo sapien
ctgggagccgggacaccaccagatt

SEQ ID NO: 3941305 - DNA, 25 bp, Homo sapien
aaatctgcttagaccgttagcccgg

SEQ ID NO: 3941306 - DNA, 25 bp, Homo sapien
gctggtgctgccagacaaaaggcag

SEQ ID NO: 3941307 - DNA, 25 bp, Homo sapien
ccgttagcccggctggtgctgccag

SEQ ID NO: 3941308 - DNA, 25 bp, Homo sapien
tttgtgctttctgacggggatttgc

SEQ ID NO: 3941309 - DNA, 25 bp, Homo sapien
cctgtgtgatttcgagcaagtcaga

SEQ ID NO: 3941310 - DNA, 25 bp, Homo sapien
cacagccagtggatgtgcagagcgt

SEQ ID NO: 3941311 - DNA, 25 bp, Homo sapien
gagttagatccgaggtgtgagcccc

SEQ ID NO: 3941312 - DNA, 25 bp, Homo sapien
tagatagctggctcaggtcacacag

SEQ ID NO: 3941313 - DNA, 25 bp, Homo sapien
gctgaaacactagttccctctttga

SEQ ID NO: 3941314 - DNA, 25 bp, Homo sapien
gaaacagttgtgacccctttatgac

SEQ ID NO: 3941315 - DNA, 25 bp, Homo sapien
aacatcgagggtttgggtgtccaag

SEQ ID NO: 3941316 - DNA, 25 bp, Homo sapien
gtgtccaagtgagagaagtaaccca

SEQ ID NO: 3941317 - DNA, 25 bp, Homo sapien
tttatggctgagaggttgtcagtcc

SEQ ID NO: 3941318 - DNA, 25 bp, Homo sapien
ccccggtggcatcggcagaaggcct

SEQ ID NO: 3941319 - DNA, 25 bp, Homo sapien
atcccccggtggcatcggcagaagg

SEQ ID NO: 3941320 - DNA, 25 bp, Homo sapien
tggctgagaggttgtcagtcccctg

SEQ ID NO: 3941321 - DNA, 25 bp, Homo sapien
gggagctgcagtcaaaggaaaccaa

SEQ ID NO: 3941322 - DNA, 25 bp, Homo sapien
tccaggaggtattctgagtgtcgca

SEQ ID NO: 3941323 - DNA, 25 bp, Homo sapien
aatcacatctactgtcagggagctg

SEQ ID NO: 3941324 - DNA, 25 bp, Homo sapien
tctcgtacctctgtactccaggagg

SEQ ID NO: 3941325 - DNA, 25 bp, Homo sapien
ccgccgcgctagctgtgagctgagc

SEQ ID NO: 3941326 - DNA, 25 bp, Homo sapien
ttgtaaagaacatctctgcactcag

SEQ ID NO: 3941327 - DNA, 25 bp, Homo sapien
ctgtggcttcagtcctgcgtctgca

SEQ ID NO: 3941328 - DNA, 25 bp, Homo sapien
aaaggtgagattggcttggttcttc

SEQ ID NO: 3941329 - DNA, 25 bp, Homo sapien
gaccgaaatttccttgtgacacaga

SEQ ID NO: 3941330 - DNA, 25 bp, Homo sapien
tgctgcacggtctgaaaccacctgt

SEQ ID NO: 3941331 - DNA, 25 bp, Homo sapien
acaagatcgttagggagagaggccc

SEQ ID NO: 3941332 - DNA, 25 bp, Homo sapien
gaagatttcatcaagagcgagctga

SEQ ID NO: 3941333 - DNA, 25 bp, Homo sapien
gacacatgttgctgtgcagtctctg

SEQ ID NO: 3941334 - DNA, 25 bp, Homo sapien
agggcttggcagtctagagcagccc

SEQ ID NO: 3941335 - DNA, 25 bp, Homo sapien
agccacaggtgacggtgcccccaga

SEQ ID NO: 3941336 - DNA, 25 bp, Homo sapien
tgacggtgcccccagactgacacat

SEQ ID NO: 3941337 - DNA, 25 bp, Homo sapien
ttcaggcacagtccccggggcatgg

SEQ ID NO: 3941338 - DNA, 25 bp, Homo sapien
caggctgatgtttgggaattcaggc

SEQ ID NO: 3941339 - DNA, 25 bp, Homo sapien
gctgatgtttgggaattcaggcaca

SEQ ID NO: 3941340 - DNA, 25 bp, Homo sapien
gaattcaggcacagtccccggggca

SEQ ID NO: 3941341 - DNA, 25 bp, Homo sapien
tgtcggataagcacgcagcagtcac

SEQ ID NO: 3941342 - DNA, 25 bp, Homo sapien
gctttggcaattaggaggcccctgt

SEQ ID NO: 3941343 - DNA, 25 bp, Homo sapien
tgacaatagcccgacatagacgagg

SEQ ID NO: 3941344 - DNA, 25 bp, Homo sapien
caacaagaatctgtgaccctccggg

SEQ ID NO: 3941345 - DNA, 25 bp, Homo sapien
cagacttgtcccatttctcctgtga

SEQ ID NO: 3941346 - DNA, 25 bp, Homo sapien
gattaacagacttgtcccatttctc

SEQ ID NO: 3941347 - DNA, 25 bp, Homo sapien
taacagacttgtcccatttctcctg

SEQ ID NO: 3941348 - DNA, 25 bp, Homo sapien
tagattaacagacttgtcccatttc

SEQ ID NO: 3941349 - DNA, 25 bp, Homo sapien
cactgccgctgaccggctgagagta

SEQ ID NO: 3941350 - DNA, 25 bp, Homo sapien
ccggctgagagtactggcaccaata

SEQ ID NO: 3941351 - DNA, 25 bp, Homo sapien
tactggcaccaatagtggtactgcc

SEQ ID NO: 3941352 - DNA, 25 bp, Homo sapien
aatagtggtactgccctggctggca

SEQ ID NO: 3941353 - DNA, 25 bp, Homo sapien
ggagagctcttcacagttgcacgcc

SEQ ID NO: 3941354 - DNA, 25 bp, Homo sapien
tgtgcatgtataagtccctggagag

SEQ ID NO: 3941355 - DNA, 25 bp, Homo sapien
tcatcctctggttgtgcatgtataa

SEQ ID NO: 3941356 - DNA, 25 bp, Homo sapien
gctcttcacagttgcacgccatggg

SEQ ID NO: 3941357 - DNA, 25 bp, Homo sapien
ttctccatctctaaatgaagcgctt

SEQ ID NO: 3941358 - DNA, 25 bp, Homo sapien
tgaactgggccagcaacttagctcc

SEQ ID NO: 3941359 - DNA, 25 bp, Homo sapien
tggctactcccagctgtgtgaactg

SEQ ID NO: 3941360 - DNA, 25 bp, Homo sapien
tctgctttgcctggattggagtcct

SEQ ID NO: 3941361 - DNA, 25 bp, Homo sapien
ggcaggacgcgctacggacgcggcg

SEQ ID NO: 3941362 - DNA, 25 bp, Homo sapien
caggacgcgctacggacgcggcggg

SEQ ID NO: 3941363 - DNA, 25 bp, Homo sapien
ctggcaggacgcgctacggacgcgg

SEQ ID NO: 3941364 - DNA, 25 bp, Homo sapien
gcgctacggacgcggcggggacagc

SEQ ID NO: 3941365 - DNA, 25 bp, Homo sapien
gggctggagggtgggcgcgcgcgga

SEQ ID NO: 3941366 - DNA, 25 bp, Homo sapien
tggagggtgggcgcgcgcggaggcc

SEQ ID NO: 3941367 - DNA, 25 bp, Homo sapien
cttcctggcggtcccgggctggagg

SEQ ID NO: 3941368 - DNA, 25 bp, Homo sapien
agggtgggcgcgcgcggaggcccac

SEQ ID NO: 3941369 - DNA, 25 bp, Homo sapien
ggacgccgctgtcgttcgctcggac

SEQ ID NO: 3941370 - DNA, 25 bp, Homo sapien
tcagcgttggagaaagcgacgctgc

SEQ ID NO: 3941371 - DNA, 25 bp, Homo sapien
aggcggaactcagcgcaacggccgc

SEQ ID NO: 3941372 - DNA, 25 bp, Homo sapien
aagcgacgctgctgacaccggctcg

SEQ ID NO: 3941373 - DNA, 25 bp, Homo sapien
gaggatgtggtacagtgatgactac

SEQ ID NO: 3941374 - DNA, 25 bp, Homo sapien
aggtgaaataagctgcccggcgtca

SEQ ID NO: 3941375 - DNA, 25 bp, Homo sapien
tctagacacacactgtccccaagtg

SEQ ID NO: 3941376 - DNA, 25 bp, Homo sapien
gatgactaccatgtacacagtacat

SEQ ID NO: 3941377 - DNA, 25 bp, Homo sapien
tggccgagacactcgcgtctgcctg

SEQ ID NO: 3941378 - DNA, 25 bp, Homo sapien
tgatgattcgctgatcttgtatggc

SEQ ID NO: 3941379 - DNA, 25 bp, Homo sapien
tcttgtatggccgagacactcgcgt

SEQ ID NO: 3941380 - DNA, 25 bp, Homo sapien
gctgatcttgtatggccgagacact

SEQ ID NO: 3941381 - DNA, 25 bp, Homo sapien
agaacagagggcattacgaatattt

SEQ ID NO: 3941382 - DNA, 25 bp, Homo sapien
cagagggcattacgaatatttataa

SEQ ID NO: 3941383 - DNA, 25 bp, Homo sapien
tggctcccccactctttaccaacag

SEQ ID NO: 3941384 - DNA, 25 bp, Homo sapien
taccaggaacctcataccaatggct

SEQ ID NO: 3941385 - DNA, 25 bp, Homo sapien
gcttctaattatgcaggaatggtca

SEQ ID NO: 3941386 - DNA, 25 bp, Homo sapien
ggaatggtcagtgcttctacagaca

SEQ ID NO: 3941387 - DNA, 25 bp, Homo sapien
gtgctaggcctcagcttctaattat

SEQ ID NO: 3941388 - DNA, 25 bp, Homo sapien
cttctacagacattgactggaggcc

SEQ ID NO: 3941389 - DNA, 25 bp, Homo sapien
ctataaagaagattggaggccgcat

SEQ ID NO: 3941390 - DNA, 25 bp, Homo sapien
ccttgagcccaatgtaggaggcgcc

SEQ ID NO: 3941391 - DNA, 25 bp, Homo sapien
tcttggcgtccaggtagcaggtgtc

SEQ ID NO: 3941392 - DNA, 25 bp, Homo sapien
taaaggacagcgtgccgaagtggtt

SEQ ID NO: 3941393 - DNA, 25 bp, Homo sapien
tccactgtttacagcgggggtcata

SEQ ID NO: 3941394 - DNA, 25 bp, Homo sapien
atccactgtttacagcgggggtcat

SEQ ID NO: 3941395 - DNA, 25 bp, Homo sapien
ccactgtttacagcgggggtcatac

SEQ ID NO: 3941396 - DNA, 25 bp, Homo sapien
gaagcaggatagttgtcaaggcccc

SEQ ID NO: 3941397 - DNA, 25 bp, Homo sapien
ttaacagagcaggacgtggcattcg

SEQ ID NO: 3941398 - DNA, 25 bp, Homo sapien
ccgtatcgggaagtacagacagacc

SEQ ID NO: 3941399 - DNA, 25 bp, Homo sapien
gatgctctgaatccccaaaagtggg

SEQ ID NO: 3941400 - DNA, 25 bp, Homo sapien
ggagttgagatacctgtaccttccc

SEQ ID NO: 3941401 - DNA, 25 bp, Homo sapien
gcatcaacatctggcgctgcggttc

SEQ ID NO: 3941402 - DNA, 25 bp, Homo sapien
tcccaaatgtgtctgcggaatgcac

SEQ ID NO: 3941403 - DNA, 25 bp, Homo sapien
cccgaacccgggacagcatcaacat

SEQ ID NO: 3941404 - DNA, 25 bp, Homo sapien
ccagcatgtcttcgatggaggcaag

SEQ ID NO: 3941405 - DNA, 25 bp, Homo sapien
tccacacggcgctggttcatggagg

SEQ ID NO: 3941406 - DNA, 25 bp, Homo sapien
gaggcaaggtagaaatccacacggc

SEQ ID NO: 3941407 - DNA, 25 bp, Homo sapien
agagagcgctccgttctcattccgg

SEQ ID NO: 3941408 - DNA, 25 bp, Homo sapien
gaacagcctgccgtcttagagggcc

SEQ ID NO: 3941409 - DNA, 25 bp, Homo sapien
gccatgaggatttaagaatataggg

SEQ ID NO: 3941410 - DNA, 25 bp, Homo sapien
cgtcattagcaaagaaatggcaggg

SEQ ID NO: 3941411 - DNA, 25 bp, Homo sapien
tgaacactctatagacagtagccgt

SEQ ID NO: 3941412 - DNA, 25 bp, Homo sapien
gaagcgctccatggactcgatgttg

SEQ ID NO: 3941413 - DNA, 25 bp, Homo sapien
tacacctgcacggtcttggagaagg

SEQ ID NO: 3941414 - DNA, 25 bp, Homo sapien
tctttgtagatggtgcccgcgtggc

SEQ ID NO: 3941415 - DNA, 25 bp, Homo sapien
tgtagccgcccaggatgtagatgcg

SEQ ID NO: 3941416 - DNA, 25 bp, Homo sapien
ctgctggtctacagagccctgggag

SEQ ID NO: 3941417 - DNA, 25 bp, Homo sapien
gacggtgaggatggtcccaagaggc

SEQ ID NO: 3941418 - DNA, 25 bp, Homo sapien
taagttgtacataatgtttccggaa

SEQ ID NO: 3941419 - DNA, 25 bp, Homo sapien
tactaagaagttgctgctggtctac

SEQ ID NO: 3941420 - DNA, 25 bp, Homo sapien
gatccaagacaaagccacatgaggc

SEQ ID NO: 3941421 - DNA, 25 bp, Homo sapien
tcatagtatcaggagagacaccaca

SEQ ID NO: 3941422 - DNA, 25 bp, Homo sapien
tccccagcgggaagtcatcatgtct

SEQ ID NO: 3941423 - DNA, 25 bp, Homo sapien
cacaaaatatgaagcgcaggacgtc

SEQ ID NO: 3941424 - DNA, 25 bp, Homo sapien
gggttctttttcatacgggcagaga

SEQ ID NO: 3941425 - DNA, 25 bp, Homo sapien
ttttcatacgggcagagaaattagg

SEQ ID NO: 3941426 - DNA, 25 bp, Homo sapien
aataaccacacaagactaggaatgt

SEQ ID NO: 3941427 - DNA, 25 bp, Homo sapien
agagaaattaggaccagacatcatt

SEQ ID NO: 3941428 - DNA, 25 bp, Homo sapien
tctgcgggccgtgttatctgaaatc

SEQ ID NO: 3941429 - DNA, 25 bp, Homo sapien
attggagccctgaattacagcttgc

SEQ ID NO: 3941430 - DNA, 25 bp, Homo sapien
acagcttgctctgcgggccgtgtta

SEQ ID NO: 3941431 - DNA, 25 bp, Homo sapien
tcattaaacaccaacatcaaagtca

SEQ ID NO: 3941432 - DNA, 25 bp, Homo sapien
gaagatcccgttgccgcgcattcat

SEQ ID NO: 3941433 - DNA, 25 bp, Homo sapien
cattagatccccgaggagggtctgg

SEQ ID NO: 3941434 - DNA, 25 bp, Homo sapien
ccgggcctcgggagtgttcgcatta

SEQ ID NO: 3941435 - DNA, 25 bp, Homo sapien
agggtctggtttatgaagatcccgt

SEQ ID NO: 3941436 - DNA, 25 bp, Homo sapien
ttctcgcccgcacatacacactcgc

SEQ ID NO: 3941437 - DNA, 25 bp, Homo sapien
ttgggactccgcgatcctccggctg

SEQ ID NO: 3941438 - DNA, 25 bp, Homo sapien
tttcattgggactccgcgatcctcc

SEQ ID NO: 3941439 - DNA, 25 bp, Homo sapien
ctgcccgtttcattgggactccgcg

SEQ ID NO: 3941440 - DNA, 25 bp, Homo sapien
acagaatggcagtgctggtagagct

SEQ ID NO: 3941441 - DNA, 25 bp, Homo sapien
cctattccaggagagggcaaccagg

SEQ ID NO: 3941442 - DNA, 25 bp, Homo sapien
ccagggcatgatgtttcaagacggg

SEQ ID NO: 3941443 - DNA, 25 bp, Homo sapien
tgggttctcaagtcatctgatgaaa

SEQ ID NO: 3941444 - DNA, 25 bp, Homo sapien
aatgaatagggaggctaggcgcggt

SEQ ID NO: 3941445 - DNA, 25 bp, Homo sapien
gaagctgaagcagaagggatccctt

SEQ ID NO: 3941446 - DNA, 25 bp, Homo sapien
agctgaagcagaagggatcccttga

SEQ ID NO: 3941447 - DNA, 25 bp, Homo sapien
agaatgaatagggaggctaggcgcg

SEQ ID NO: 3941448 - DNA, 25 bp, Homo sapien
ctcctccgcgagagaaacaatgcct

SEQ ID NO: 3941449 - DNA, 25 bp, Homo sapien
tagggcaggtgacttaccaatctcc

SEQ ID NO: 3941450 - DNA, 25 bp, Homo sapien
tgtaaacacgtcacttccacgggaa

SEQ ID NO: 3941451 - DNA, 25 bp, Homo sapien
taacgtccggccaccaaaatctgtg

SEQ ID NO: 3941452 - DNA, 25 bp, Homo sapien
gagttgctaccaacttcactcagtc

SEQ ID NO: 3941453 - DNA, 25 bp, Homo sapien
aaatgtcaccgttctacaagagacg

SEQ ID NO: 3941454 - DNA, 25 bp, Homo sapien
cagctatcttaacacagagttgcta

SEQ ID NO: 3941455 - DNA, 25 bp, Homo sapien
tgcccttgtccgtgtgcttctctgc

SEQ ID NO: 3941456 - DNA, 25 bp, Homo sapien
cggctgcttccggctcatccatgtg

SEQ ID NO: 3941457 - DNA, 25 bp, Homo sapien
gcttccggctcatccatgtggtgtt

SEQ ID NO: 3941458 - DNA, 25 bp, Homo sapien
gctgcttccggctcatccatgtggt

SEQ ID NO: 3941459 - DNA, 25 bp, Homo sapien
tgcttccggctcatccatgtggtgt

SEQ ID NO: 3941460 - DNA, 25 bp, Homo sapien
tcttccagtctgaggagtccaggag

SEQ ID NO: 3941461 - DNA, 25 bp, Homo sapien
agtacagatgatttgccaaggagaa

SEQ ID NO: 3941462 - DNA, 25 bp, Homo sapien
cagatagtacagatgatttgccaag

SEQ ID NO: 3941463 - DNA, 25 bp, Homo sapien
aaggagaaaggacaatcttccagtc

SEQ ID NO: 3941464 - DNA, 25 bp, Homo sapien
aacagaaggccagctactggaggcc

SEQ ID NO: 3941465 - DNA, 25 bp, Homo sapien
gaacttccaccttaatgagcggctt

SEQ ID NO: 3941466 - DNA, 25 bp, Homo sapien
aaatacgctggaaccggaccaacag

SEQ ID NO: 3941467 - DNA, 25 bp, Homo sapien
ttagctggtaaatagactcctctcc

SEQ ID NO: 3941468 - DNA, 25 bp, Homo sapien
gagaagttttgttccctcactaata

SEQ ID NO: 3941469 - DNA, 25 bp, Homo sapien
tactgcaattgagtgtctacttccc

SEQ ID NO: 3941470 - DNA, 25 bp, Homo sapien
caaagaggtcctgagaagcgaacaa

SEQ ID NO: 3941471 - DNA, 25 bp, Homo sapien
tatcacaaagtcactctcacaggca

SEQ ID NO: 3941472 - DNA, 25 bp, Homo sapien
ttcacacgggagactaaaaagcacg

SEQ ID NO: 3941473 - DNA, 25 bp, Homo sapien
caacctagtgaagagggaaatgcca

SEQ ID NO: 3941474 - DNA, 25 bp, Homo sapien
tccgtatgagtgtgtatttgcagac

SEQ ID NO: 3941475 - DNA, 25 bp, Homo sapien
taatcttaacaacaggtggatctgg

SEQ ID NO: 3941476 - DNA, 25 bp, Homo sapien
tagaaacgtggctactctgtgcaca

SEQ ID NO: 3941477 - DNA, 25 bp, Homo sapien
tatcaatagtagaaacgtggctact

SEQ ID NO: 3941478 - DNA, 25 bp, Homo sapien
tgcacattgcctatggcgtagccct

SEQ ID NO: 3941479 - DNA, 25 bp, Homo sapien
tgaattcgagaaatacaagaatgat

SEQ ID NO: 3941480 - DNA, 25 bp, Homo sapien
catttccgctttctctgccaaacat

SEQ ID NO: 3941481 - DNA, 25 bp, Homo sapien
ctccatttccgctttctctgccaaa

SEQ ID NO: 3941482 - DNA, 25 bp, Homo sapien
tccatttccgctttctctgccaaac

SEQ ID NO: 3941483 - DNA, 25 bp, Homo sapien
atttccgctttctctgccaaacata

SEQ ID NO: 3941484 - DNA, 25 bp, Homo sapien
aataagagagtcactgatcacataa

SEQ ID NO: 3941485 - DNA, 25 bp, Homo sapien
aaaaaataagagagtcactgatcac

SEQ ID NO: 3941486 - DNA, 25 bp, Homo sapien
gagagtcactgatcacataaaatat

SEQ ID NO: 3941487 - DNA, 25 bp, Homo sapien
gtcactgatcacataaaatatacaa

SEQ ID NO: 3941488 - DNA, 25 bp, Homo sapien
tcaactgaagatcgaggagtcacaa

SEQ ID NO: 3941489 - DNA, 25 bp, Homo sapien
aactgaagatcgaggagtcacaaag

SEQ ID NO: 3941490 - DNA, 25 bp, Homo sapien
ctgaagatcgaggagtcacaaagaa

SEQ ID NO: 3941491 - DNA, 25 bp, Homo sapien
ctcaactgaagatcgaggagtcaca

SEQ ID NO: 3941492 - DNA, 25 bp, Homo sapien
ttatccacagcctgtgtgccacaca

SEQ ID NO: 3941493 - DNA, 25 bp, Homo sapien
cagaactgttccactgtatggagga

SEQ ID NO: 3941494 - DNA, 25 bp, Homo sapien
gtgccacacagaactgttccactgt

SEQ ID NO: 3941495 - DNA, 25 bp, Homo sapien
catcaggtagtttatccacagcctg

SEQ ID NO: 3941496 - DNA, 25 bp, Homo sapien
tggacgccatgtgccttgcaccgca

SEQ ID NO: 3941497 - DNA, 25 bp, Homo sapien
ggacgccatgtgccttgcaccgcat

SEQ ID NO: 3941498 - DNA, 25 bp, Homo sapien
atggacgccatgtgccttgcaccgc

SEQ ID NO: 3941499 - DNA, 25 bp, Homo sapien
aatggacgccatgtgccttgcaccg

SEQ ID NO: 3941500 - DNA, 25 bp, Homo sapien
cagagcctgggtactggcagtcgat

SEQ ID NO: 3941501 - DNA, 25 bp, Homo sapien
tcagacgttgctattaacacacagg

SEQ ID NO: 3941502 - DNA, 25 bp, Homo sapien
cataccgtggagcagaattacttga

SEQ ID NO: 3941503 - DNA, 25 bp, Homo sapien
tctataagcccagttgatgaggtct

SEQ ID NO: 3941504 - DNA, 25 bp, Homo sapien
taagacataggcatccttcagacgt

SEQ ID NO: 3941505 - DNA, 25 bp, Homo sapien
agcccgggagtaataggctgcacca

SEQ ID NO: 3941506 - DNA, 25 bp, Homo sapien
taaaactcggctttgctcagtactg

SEQ ID NO: 3941507 - DNA, 25 bp, Homo sapien
tcagtagtaacacgctggacaggtt

SEQ ID NO: 3941508 - DNA, 25 bp, Homo sapien
taaatcaacgtagtacagcctaagt

SEQ ID NO: 3941509 - DNA, 25 bp, Homo sapien
aaaggcaataccagcatcgtaaact

SEQ ID NO: 3941510 - DNA, 25 bp, Homo sapien
caaatcagcccactgaaattgttta

SEQ ID NO: 3941511 - DNA, 25 bp, Homo sapien
cataagctatgattattcttacaca

SEQ ID NO: 3941512 - DNA, 25 bp, Homo sapien
taccagcatcgtaaacttttatgtc

SEQ ID NO: 3941513 - DNA, 25 bp, Homo sapien
gccagctcaatacagacatcagaat

SEQ ID NO: 3941514 - DNA, 25 bp, Homo sapien
gatgagcacgcatgtaaatacataa

SEQ ID NO: 3941515 - DNA, 25 bp, Homo sapien
accacgctcagctatagcaaagatg

SEQ ID NO: 3941516 - DNA, 25 bp, Homo sapien
agcaaagatgagcacgcatgtaaat

SEQ ID NO: 3941517 - DNA, 25 bp, Homo sapien
cattcattgtgcggcagatcactcc

SEQ ID NO: 3941518 - DNA, 25 bp, Homo sapien
tcattcattgtgcggcagatcactc

SEQ ID NO: 3941519 - DNA, 25 bp, Homo sapien
ttcattgtgcggcagatcactccgc

SEQ ID NO: 3941520 - DNA, 25 bp, Homo sapien
cattgtgcggcagatcactccgcac

SEQ ID NO: 3941521 - DNA, 25 bp, Homo sapien
caggaagatgcagcgaagtttctgg

SEQ ID NO: 3941522 - DNA, 25 bp, Homo sapien
gacaggatcatgggtgcaaggagct

SEQ ID NO: 3941523 - DNA, 25 bp, Homo sapien
agacaggatcatgggtgcaaggagc

SEQ ID NO: 3941524 - DNA, 25 bp, Homo sapien
agatgcagcgaagtttctgggtggg

SEQ ID NO: 3941525 - DNA, 25 bp, Homo sapien
cgcaggggcagcgtgtaggagtggg

SEQ ID NO: 3941526 - DNA, 25 bp, Homo sapien
gaagggtagagaagtgagaagcacg

SEQ ID NO: 3941527 - DNA, 25 bp, Homo sapien
tgcaggctgctcagccagaagccgg

SEQ ID NO: 3941528 - DNA, 25 bp, Homo sapien
cagcgtgtaggagtgaagacagcaa

SEQ ID NO: 3941529 - DNA, 25 bp, Homo sapien
ttgataatcacacaaacatacgcac

SEQ ID NO: 3941530 - DNA, 25 bp, Homo sapien
ctgggttcaacagattgataatcac

SEQ ID NO: 3941531 - DNA, 25 bp, Homo sapien
caccatacccaatcataattattat

SEQ ID NO: 3941532 - DNA, 25 bp, Homo sapien
gggttcaacagattgataatcacac

SEQ ID NO: 3941533 - DNA, 25 bp, Homo sapien
ttccccacaggcttaaagtctattg

SEQ ID NO: 3941534 - DNA, 25 bp, Homo sapien
cacaggcttaaagtctattgacagt

SEQ ID NO: 3941535 - DNA, 25 bp, Homo sapien
cccacaggcttaaagtctattgaca

SEQ ID NO: 3941536 - DNA, 25 bp, Homo sapien
caggcttaaagtctattgacagtgg

SEQ ID NO: 3941537 - DNA, 25 bp, Homo sapien
aatgacctgtgaacctgggtccacc

SEQ ID NO: 3941538 - DNA, 25 bp, Homo sapien
tgtcagagatagttaccaaccccat

SEQ ID NO: 3941539 - DNA, 25 bp, Homo sapien
tgggtccacctgactcaagaggttg

SEQ ID NO: 3941540 - DNA, 25 bp, Homo sapien
tatggaataccgaactgggccttga

SEQ ID NO: 3941541 - DNA, 25 bp, Homo sapien
ggttgcaacgacactggtttatgga

SEQ ID NO: 3941542 - DNA, 25 bp, Homo sapien
gttccctttattgatcagcccacgg

SEQ ID NO: 3941543 - DNA, 25 bp, Homo sapien
gattagggttacattctccagcaac

SEQ ID NO: 3941544 - DNA, 25 bp, Homo sapien
agcccacggggttgcaacgacactg

SEQ ID NO: 3941545 - DNA, 25 bp, Homo sapien
ctgcaacaagctggccttgcggacg

SEQ ID NO: 3941546 - DNA, 25 bp, Homo sapien
gggacagctgcaacaagctggcctt

SEQ ID NO: 3941547 - DNA, 25 bp, Homo sapien
agctgcaacaagctggccttgcgga

SEQ ID NO: 3941548 - DNA, 25 bp, Homo sapien
acaagctggccttgcggacggcgtc

SEQ ID NO: 3941549 - DNA, 25 bp, Homo sapien
gtggcagtaaggaagcgtaaaggaa

SEQ ID NO: 3941550 - DNA, 25 bp, Homo sapien
taaggaagcgtaaaggaaatgaaca

SEQ ID NO: 3941551 - DNA, 25 bp, Homo sapien
cagtaaggaagcgtaaaggaaatga

SEQ ID NO: 3941552 - DNA, 25 bp, Homo sapien
aaggaagcgtaaaggaaatgaacag

SEQ ID NO: 3941553 - DNA, 25 bp, Homo sapien
aggaatgaacttcatcaggtggtac

SEQ ID NO: 3941554 - DNA, 25 bp, Homo sapien
ggaatgaacttcatcaggtggtaca

SEQ ID NO: 3941555 - DNA, 25 bp, Homo sapien
gaatgaacttcatcaggtggtacat

SEQ ID NO: 3941556 - DNA, 25 bp, Homo sapien
tactggcatattagtgaactcattc

SEQ ID NO: 3941557 - DNA, 25 bp, Homo sapien
tattagtgaactcattcattagccg

SEQ ID NO: 3941558 - DNA, 25 bp, Homo sapien
agtgaactcattcattagccgaaca

SEQ ID NO: 3941559 - DNA, 25 bp, Homo sapien
tttggaggtactggcatattagtga

SEQ ID NO: 3941560 - DNA, 25 bp, Homo sapien
cttttcagacaggcttgacttgtta

SEQ ID NO: 3941561 - DNA, 25 bp, Homo sapien
ttttcagacaggcttgacttgttaa

SEQ ID NO: 3941562 - DNA, 25 bp, Homo sapien
ggtcaaatataatcacgttactgtg

SEQ ID NO: 3941563 - DNA, 25 bp, Homo sapien
ctgatcactgtcaaaggcctgcagg

SEQ ID NO: 3941564 - DNA, 25 bp, Homo sapien
cgttactgtgaactgatcactgtca

SEQ ID NO: 3941565 - DNA, 25 bp, Homo sapien
aaaggtcaaatataatcacgttact

SEQ ID NO: 3941566 - DNA, 25 bp, Homo sapien
gtccatttagaatgaagcctaagta

SEQ ID NO: 3941567 - DNA, 25 bp, Homo sapien
gaagtccatttagaatgaagcctaa

SEQ ID NO: 3941568 - DNA, 25 bp, Homo sapien
ttagaatgaagcctaagtattcctc

SEQ ID NO: 3941569 - DNA, 25 bp, Homo sapien
aatgaagcctaagtattcctcagca

SEQ ID NO: 3941570 - DNA, 25 bp, Homo sapien
catatgagtatgcaacacctgttta

SEQ ID NO: 3941571 - DNA, 25 bp, Homo sapien
aatataaccttctcgatggtgtaag

SEQ ID NO: 3941572 - DNA, 25 bp, Homo sapien
gaactcttgcacaactctgcggcaa

SEQ ID NO: 3941573 - DNA, 25 bp, Homo sapien
gcagaggttcgggataaactgtaat

SEQ ID NO: 3941574 - DNA, 25 bp, Homo sapien
ggcaaccaatcacaacaggcgcaat

SEQ ID NO: 3941575 - DNA, 25 bp, Homo sapien
tgctctgcaaagtcggtattaccgt

SEQ ID NO: 3941576 - DNA, 25 bp, Homo sapien
ggtctacattaggagccacggcaac

SEQ ID NO: 3941577 - DNA, 25 bp, Homo sapien
gacatccctgggacaactggcgaaa

SEQ ID NO: 3941578 - DNA, 25 bp, Homo sapien
tgtgtccaccaaaaatgccggtgat

SEQ ID NO: 3941579 - DNA, 25 bp, Homo sapien
tgatgtgtccaccaaaaatgccggt

SEQ ID NO: 3941580 - DNA, 25 bp, Homo sapien
cttcattgaccgagtggtttttggg

SEQ ID NO: 3941581 - DNA, 25 bp, Homo sapien
ctcttcttcattgaccgagtggttt

SEQ ID NO: 3941582 - DNA, 25 bp, Homo sapien
attaagttattccagaaaagcacaa

SEQ ID NO: 3941583 - DNA, 25 bp, Homo sapien
taagttattccagaaaagcacaaac

SEQ ID NO: 3941584 - DNA, 25 bp, Homo sapien
ttaagttattccagaaaagcacaaa

SEQ ID NO: 3941585 - DNA, 25 bp, Homo sapien
tcggtgacctagtttctcaacggaa

SEQ ID NO: 3941586 - DNA, 25 bp, Homo sapien
taaaatgggtgtggacaggtactca

SEQ ID NO: 3941587 - DNA, 25 bp, Homo sapien
taaaaattgtgtgttcggcccatct

SEQ ID NO: 3941588 - DNA, 25 bp, Homo sapien
tccagaacagatgcggtgaagagct

SEQ ID NO: 3941589 - DNA, 25 bp, Homo sapien
tgtggtataaccttggacagattct

SEQ ID NO: 3941590 - DNA, 25 bp, Homo sapien
tttttgtggtataaccttggacaga

SEQ ID NO: 3941591 - DNA, 25 bp, Homo sapien
tggatatccaactgcaacgtgaaaa

SEQ ID NO: 3941592 - DNA, 25 bp, Homo sapien
gactggatatccaactgcaacgtga

SEQ ID NO: 3941593 - DNA, 25 bp, Homo sapien
tttgcaggaatgctatggaccgtcc

SEQ ID NO: 3941594 - DNA, 25 bp, Homo sapien
tggaccgtccataattatcagcctg

SEQ ID NO: 3941595 - DNA, 25 bp, Homo sapien
tagctataagctggcacatctggac

SEQ ID NO: 3941596 - DNA, 25 bp, Homo sapien
aggaactaataagctctcacagggc

SEQ ID NO: 3941597 - DNA, 25 bp, Homo sapien
cagaagctctgagatctaccaatgc

SEQ ID NO: 3941598 - DNA, 25 bp, Homo sapien
ccttccgctcaaagacgtcctctga

SEQ ID NO: 3941599 - DNA, 25 bp, Homo sapien
tacttgcaacagctaacaccacatc

SEQ ID NO: 3941600 - DNA, 25 bp, Homo sapien
cctgtggcaggacttcatggctttt

SEQ ID NO: 3941601 - DNA, 25 bp, Homo sapien
aatcgtttcaggtgcagcacgagga

SEQ ID NO: 3941602 - DNA, 25 bp, Homo sapien
aacgaatcgtttcaggtgcagcacg

SEQ ID NO: 3941603 - DNA, 25 bp, Homo sapien
cataaacgaatcgtttcaggtgcag

SEQ ID NO: 3941604 - DNA, 25 bp, Homo sapien
tctcataaacgaatcgtttcaggtg

SEQ ID NO: 3941605 - DNA, 25 bp, Homo sapien
gagccgataggttcggtggcattta

SEQ ID NO: 3941606 - DNA, 25 bp, Homo sapien
cgataggttcggtggcatttaaaat

SEQ ID NO: 3941607 - DNA, 25 bp, Homo sapien
caaagagccgataggttcggtggca

SEQ ID NO: 3941608 - DNA, 25 bp, Homo sapien
ctgcaaagagccgataggttcggtg

SEQ ID NO: 3941609 - DNA, 25 bp, Homo sapien
gatgcatcctatgtgtaaaacccct

SEQ ID NO: 3941610 - DNA, 25 bp, Homo sapien
tgagaacagcactgcacacgaatca

SEQ ID NO: 3941611 - DNA, 25 bp, Homo sapien
acgaatcattacaggtctccgccga

SEQ ID NO: 3941612 - DNA, 25 bp, Homo sapien
taagaatggtgatgcgggaatacgc

SEQ ID NO: 3941613 - DNA, 25 bp, Homo sapien
gccagccattcagaccgatctggaa

SEQ ID NO: 3941614 - DNA, 25 bp, Homo sapien
cattcagaccgatctggaagacgtc

SEQ ID NO: 3941615 - DNA, 25 bp, Homo sapien
gcactgttgccgtgatggtagacca

SEQ ID NO: 3941616 - DNA, 25 bp, Homo sapien
actgtctggtcatcgatgcgcagcc

SEQ ID NO: 3941617 - DNA, 25 bp, Homo sapien
ttattctactaagcaatgagactgg

SEQ ID NO: 3941618 - DNA, 25 bp, Homo sapien
ggatttattctactaagcaatgaga

SEQ ID NO: 3941619 - DNA, 25 bp, Homo sapien
gagactggggatcaaatccactttc

SEQ ID NO: 3941620 - DNA, 25 bp, Homo sapien
tgttgtgcacgaaccccaaggcatc

SEQ ID NO: 3941621 - DNA, 25 bp, Homo sapien
agcagtttctctcagtacaattatt

SEQ ID NO: 3941622 - DNA, 25 bp, Homo sapien
aagcagtttctctcagtacaattat

SEQ ID NO: 3941623 - DNA, 25 bp, Homo sapien
aatggaaaattgaggcactgacttc

SEQ ID NO: 3941624 - DNA, 25 bp, Homo sapien
agaatgtcagggtctcttgccagcc

SEQ ID NO: 3941625 - DNA, 25 bp, Homo sapien
gccaagggtgcatatttcaatggaa

SEQ ID NO: 3941626 - DNA, 25 bp, Homo sapien
tgcagagcccaggagtaaactgtat

SEQ ID NO: 3941627 - DNA, 25 bp, Homo sapien
gggctggtaatgaccaagagcagcc

SEQ ID NO: 3941628 - DNA, 25 bp, Homo sapien
agagatgacagggctagggttgagg

SEQ ID NO: 3941629 - DNA, 25 bp, Homo sapien
ggtaatgaccaagagcagcctagca

SEQ ID NO: 3941630 - DNA, 25 bp, Homo sapien
gacgctgatttcaggggctggtaat

SEQ ID NO: 3941631 - DNA, 25 bp, Homo sapien
ccagggtaaactctgctttaaatgt

SEQ ID NO: 3941632 - DNA, 25 bp, Homo sapien
acaccgaaaccttcagaattccagg

SEQ ID NO: 3941633 - DNA, 25 bp, Homo sapien
aaatgcaaaccatacctcaacaccg

SEQ ID NO: 3941634 - DNA, 25 bp, Homo sapien
acctcaacaccgaaaccttcagaat

SEQ ID NO: 3941635 - DNA, 25 bp, Homo sapien
tcaagccgcatagaagacatcttca

SEQ ID NO: 3941636 - DNA, 25 bp, Homo sapien
tacagcttgtgaacgtcagacgggc

SEQ ID NO: 3941637 - DNA, 25 bp, Homo sapien
tgggtttgctgtataaccttcaggc

SEQ ID NO: 3941638 - DNA, 25 bp, Homo sapien
ctccgaagtcaaagtcaaggtgggt

SEQ ID NO: 3941639 - DNA, 25 bp, Homo sapien
aaactgggctggagtaacgccctgg

SEQ ID NO: 3941640 - DNA, 25 bp, Homo sapien
tcaccatgagaattaacgagaccag

SEQ ID NO: 3941641 - DNA, 25 bp, Homo sapien
tacaggcgtaatgaggctcagcctt

SEQ ID NO: 3941642 - DNA, 25 bp, Homo sapien
ctttgacccaagaggtggaatggct

SEQ ID NO: 3941643 - DNA, 25 bp, Homo sapien
aggaccttccacgaccttccatgac

SEQ ID NO: 3941644 - DNA, 25 bp, Homo sapien
cttccacgaccttccatgacctcat

SEQ ID NO: 3941645 - DNA, 25 bp, Homo sapien
ccttccacgaccttccatgacctca

SEQ ID NO: 3941646 - DNA, 25 bp, Homo sapien
accttccacgaccttccatgacctc

SEQ ID NO: 3941647 - DNA, 25 bp, Homo sapien
gtagaagccacatcagtccctcctt

SEQ ID NO: 3941648 - DNA, 25 bp, Homo sapien
ggtccacttgacgcaggtagaagcc

SEQ ID NO: 3941649 - DNA, 25 bp, Homo sapien
tggtccacttgacgcaggtagaagc

SEQ ID NO: 3941650 - DNA, 25 bp, Homo sapien
agaagccacatcagtccctcctttc

SEQ ID NO: 3941651 - DNA, 25 bp, Homo sapien
ctctagcccgagtggtgtcactgca

SEQ ID NO: 3941652 - DNA, 25 bp, Homo sapien
cagatgcaaaattggatagcggcca

SEQ ID NO: 3941653 - DNA, 25 bp, Homo sapien
aggacgaccaatgcaagagcctccg

SEQ ID NO: 3941654 - DNA, 25 bp, Homo sapien
tctagcaatcgatgaacacttccca

SEQ ID NO: 3941655 - DNA, 25 bp, Homo sapien
aggccacgcccccagatcgctggcg

SEQ ID NO: 3941656 - DNA, 25 bp, Homo sapien
gccctgggatgcgagtgggtgccgg

SEQ ID NO: 3941657 - DNA, 25 bp, Homo sapien
tcagcgtaccgcctcttgtaggctc

SEQ ID NO: 3941658 - DNA, 25 bp, Homo sapien
tgggtgccggggctcagcgtaccgc

SEQ ID NO: 3941659 - DNA, 25 bp, Homo sapien
cgcgtccagcagacgcggtagcagc

SEQ ID NO: 3941660 - DNA, 25 bp, Homo sapien
gctggcgtctcccgcgtccagcaga

SEQ ID NO: 3941661 - DNA, 25 bp, Homo sapien
ggcgtctcccgcgtccagcagacgc

SEQ ID NO: 3941662 - DNA, 25 bp, Homo sapien
tctcccgcgtccagcagacgcggta

SEQ ID NO: 3941663 - DNA, 25 bp, Homo sapien
ggagaggacaagacacactgagagg

SEQ ID NO: 3941664 - DNA, 25 bp, Homo sapien
caagtcttctacctcccaagaagct

SEQ ID NO: 3941665 - DNA, 25 bp, Homo sapien
tgggctcaagtcttctacctcccaa

SEQ ID NO: 3941666 - DNA, 25 bp, Homo sapien
acactgagaggacaccagctaattt

SEQ ID NO: 3941667 - DNA, 25 bp, Homo sapien
ctcttatttaatgcactatgtgaaa

SEQ ID NO: 3941668 - DNA, 25 bp, Homo sapien
tgaaaagcaggtgcattcgatgcaa

SEQ ID NO: 3941669 - DNA, 25 bp, Homo sapien
gcaagccaaggtgatatataagaaa

SEQ ID NO: 3941670 - DNA, 25 bp, Homo sapien
tcattgtttacatactatgctaagc

SEQ ID NO: 3941671 - DNA, 25 bp, Homo sapien
ttaaaggcgacaccagccccacaag

SEQ ID NO: 3941672 - DNA, 25 bp, Homo sapien
caacagtccactcagcttaaaggcg

SEQ ID NO: 3941673 - DNA, 25 bp, Homo sapien
tgcactgtgctgaattccccatctc

SEQ ID NO: 3941674 - DNA, 25 bp, Homo sapien
cccaggacagccaacagtccactca

SEQ ID NO: 3941675 - DNA, 25 bp, Homo sapien
ggtcggggtgttctctaggctctac

SEQ ID NO: 3941676 - DNA, 25 bp, Homo sapien
gcgactctcttaaacatcagggcag

SEQ ID NO: 3941677 - DNA, 25 bp, Homo sapien
tgcaccactcagctgagacccatgg

SEQ ID NO: 3941678 - DNA, 25 bp, Homo sapien
cacgcagcgactctcttaaacatca

SEQ ID NO: 3941679 - DNA, 25 bp, Homo sapien
tgcatgcgccactcctagagagatg

SEQ ID NO: 3941680 - DNA, 25 bp, Homo sapien
tgaaatatcactagggaccgcggga

SEQ ID NO: 3941681 - DNA, 25 bp, Homo sapien
tgagcccataagaccacaagtaaga

SEQ ID NO: 3941682 - DNA, 25 bp, Homo sapien
cgcgggacaacacagcagaaatgct

SEQ ID NO: 3941683 - DNA, 25 bp, Homo sapien
actcctgcagcaactatgggactca

SEQ ID NO: 3941684 - DNA, 25 bp, Homo sapien
ctgcagcaactatgggactcacggg

SEQ ID NO: 3941685 - DNA, 25 bp, Homo sapien
tcctgcagcaactatgggactcacg

SEQ ID NO: 3941686 - DNA, 25 bp, Homo sapien
ccactcctgcagcaactatgggact

SEQ ID NO: 3941687 - DNA, 25 bp, Homo sapien
cctctaagagagtgacgttgggcag

SEQ ID NO: 3941688 - DNA, 25 bp, Homo sapien
tactccatgttggaggcctgaggct

SEQ ID NO: 3941689 - DNA, 25 bp, Homo sapien
cttgggatccgcagaccaggaacag

SEQ ID NO: 3941690 - DNA, 25 bp, Homo sapien
acctggccccgaagcttgttgtgca

SEQ ID NO: 3941691 - DNA, 25 bp, Homo sapien
catcacacgcactggctggggaaca

SEQ ID NO: 3941692 - DNA, 25 bp, Homo sapien
cagggcatgacgattgtgccattgc

SEQ ID NO: 3941693 - DNA, 25 bp, Homo sapien
cccggtgccagcctctgcggccgga

SEQ ID NO: 3941694 - DNA, 25 bp, Homo sapien
aaacagaacagagccgggatcctcc

SEQ ID NO: 3941695 - DNA, 25 bp, Homo sapien
tttaaaatctagctgggcaccatgg

SEQ ID NO: 3941696 - DNA, 25 bp, Homo sapien
tcctctgtagttctggaaaaccagc

SEQ ID NO: 3941697 - DNA, 25 bp, Homo sapien
ccagtggagctaccaagagtgacat

SEQ ID NO: 3941698 - DNA, 25 bp, Homo sapien
agtcatggcaaccacgcgaggaagg

SEQ ID NO: 3941699 - DNA, 25 bp, Homo sapien
cagtgactctgagggaaggcttgca

SEQ ID NO: 3941700 - DNA, 25 bp, Homo sapien
tggcacgagggaacgcagtgactct

SEQ ID NO: 3941701 - DNA, 25 bp, Homo sapien
tccaggagcctttctcacggtgcgg

SEQ ID NO: 3941702 - DNA, 25 bp, Homo sapien
gaaaaccagtgtagccctgacccat

SEQ ID NO: 3941703 - DNA, 25 bp, Homo sapien
attttagactctcactggccacccg

SEQ ID NO: 3941704 - DNA, 25 bp, Homo sapien
tgcaaagaaaagcagacgagggccc

SEQ ID NO: 3941705 - DNA, 25 bp, Homo sapien
tttatccacgtcagcgacacacagg

SEQ ID NO: 3941706 - DNA, 25 bp, Homo sapien
gccccgagatgaatggatgccgcat

SEQ ID NO: 3941707 - DNA, 25 bp, Homo sapien
ccagcagactggtgggcccgtgctc

SEQ ID NO: 3941708 - DNA, 25 bp, Homo sapien
ggttctgcccgatggacaccagcag

SEQ ID NO: 3941709 - DNA, 25 bp, Homo sapien
cgtgctcccagatgcactgactggc

SEQ ID NO: 3941710 - DNA, 25 bp, Homo sapien
tgccccagtgagcgcccaggttctg

SEQ ID NO: 3941711 - DNA, 25 bp, Homo sapien
gaatacattttgtcagtcactcagg

SEQ ID NO: 3941712 - DNA, 25 bp, Homo sapien
gggtcagccaaccaagcttgaatac

SEQ ID NO: 3941713 - DNA, 25 bp, Homo sapien
ctttgcaggctaaacttgataaggg

SEQ ID NO: 3941714 - DNA, 25 bp, Homo sapien
gatgggacgggtggtctctctcact

SEQ ID NO: 3941715 - DNA, 25 bp, Homo sapien
gcaaaatggatgtcaatccaggtcc

SEQ ID NO: 3941716 - DNA, 25 bp, Homo sapien
aaatggatgtcaatccaggtcctgg

SEQ ID NO: 3941717 - DNA, 25 bp, Homo sapien
taaagcccattccaacttttcaata

SEQ ID NO: 3941718 - DNA, 25 bp, Homo sapien
ctacattttaagaggctgtctaaag

SEQ ID NO: 3941719 - DNA, 25 bp, Homo sapien
caattactgtctggaagcggagcgc

SEQ ID NO: 3941720 - DNA, 25 bp, Homo sapien
aatgctgtaaaactacgtcggcgcc

SEQ ID NO: 3941721 - DNA, 25 bp, Homo sapien
catttgcagggcgacattcatgaca

SEQ ID NO: 3941722 - DNA, 25 bp, Homo sapien
gaatctgcaagagccaacgggtcaa

SEQ ID NO: 3941723 - DNA, 25 bp, Homo sapien
ctgcacatggaaccccggagagcga

SEQ ID NO: 3941724 - DNA, 25 bp, Homo sapien
ctcgtcataccaggactgcacatgg

SEQ ID NO: 3941725 - DNA, 25 bp, Homo sapien
accaggggttgcactcgctcgggta

SEQ ID NO: 3941726 - DNA, 25 bp, Homo sapien
tgtgtagtgcgtgcacatgggcccc

SEQ ID NO: 3941727 - DNA, 25 bp, Homo sapien
tggagaataattgcagacaaagtag

SEQ ID NO: 3941728 - DNA, 25 bp, Homo sapien
agacaaagtagaccgcgttctccca

SEQ ID NO: 3941729 - DNA, 25 bp, Homo sapien
ggtgttcacagcacaaccgatcttg

SEQ ID NO: 3941730 - DNA, 25 bp, Homo sapien
ccagacagtcatcttccggcaggtg

SEQ ID NO: 3941731 - DNA, 25 bp, Homo sapien
agaacttcccgcggccccagaagca

SEQ ID NO: 3941732 - DNA, 25 bp, Homo sapien
gaacttcccgcggccccagaagcac

SEQ ID NO: 3941733 - DNA, 25 bp, Homo sapien
cttcccgcggccccagaagcaccct

SEQ ID NO: 3941734 - DNA, 25 bp, Homo sapien
tagggggcttctccaatccagttcc

SEQ ID NO: 3941735 - DNA, 25 bp, Homo sapien
gtaacacaagttgttcctgcagctg

SEQ ID NO: 3941736 - DNA, 25 bp, Homo sapien
ctcggtaacacaagttgttcctgca

SEQ ID NO: 3941737 - DNA, 25 bp, Homo sapien
tcttgtagggggcttctccaatcca

SEQ ID NO: 3941738 - DNA, 25 bp, Homo sapien
tgagggcaaattcattgcaaaagtg

SEQ ID NO: 3941739 - DNA, 25 bp, Homo sapien
gcaaattcattgcaaaagtgttggg

SEQ ID NO: 3941740 - DNA, 25 bp, Homo sapien
tcagactgagggcaaattcattgca

SEQ ID NO: 3941741 - DNA, 25 bp, Homo sapien
tgcaaaagtgttgggagtaaatttc

SEQ ID NO: 3941742 - DNA, 25 bp, Homo sapien
ccatgtcaatgctcaccaaaaggtg

SEQ ID NO: 3941743 - DNA, 25 bp, Homo sapien
cataggacgactcattctgtggaca

SEQ ID NO: 3941744 - DNA, 25 bp, Homo sapien
ctaaaaaagtgtggcagtgggctca

SEQ ID NO: 3941745 - DNA, 25 bp, Homo sapien
tacaggtttacccattttgcgtgca

SEQ ID NO: 3941746 - DNA, 25 bp, Homo sapien
gcttgactggattgaagaatgcaaa

SEQ ID NO: 3941747 - DNA, 25 bp, Homo sapien
tcagcttgactggattgaagaatgc

SEQ ID NO: 3941748 - DNA, 25 bp, Homo sapien
tgtcagcttgactggattgaagaat

SEQ ID NO: 3941749 - DNA, 25 bp, Homo sapien
agaactcctggcctgtgatggttaa

SEQ ID NO: 3941750 - DNA, 25 bp, Homo sapien
caggtacttcccactagtgagctca

SEQ ID NO: 3941751 - DNA, 25 bp, Homo sapien
ggaggactgatcctacccagctgtc

SEQ ID NO: 3941752 - DNA, 25 bp, Homo sapien
caggagtaaagggtcaaacagcccg

SEQ ID NO: 3941753 - DNA, 25 bp, Homo sapien
gaatatcacgttgtttgcttttact

SEQ ID NO: 3941754 - DNA, 25 bp, Homo sapien
cttcagaggagacttgctgcgtgct

SEQ ID NO: 3941755 - DNA, 25 bp, Homo sapien
ttctgcagataagctgcttcagagg

SEQ ID NO: 3941756 - DNA, 25 bp, Homo sapien
ctggatatgctcttggtaaatagct

SEQ ID NO: 3941757 - DNA, 25 bp, Homo sapien
atagcttctgcagataagctgcttc

SEQ ID NO: 3941758 - DNA, 25 bp, Homo sapien
ctcgtccgtttcaggttttggagtg

SEQ ID NO: 3941759 - DNA, 25 bp, Homo sapien
gaatgggagccgtttccacctcatt

SEQ ID NO: 3941760 - DNA, 25 bp, Homo sapien
gcttggtgggtctcatcaccctcgg

SEQ ID NO: 3941761 - DNA, 25 bp, Homo sapien
tcatgtagttgaccgcagaggtttt

SEQ ID NO: 3941762 - DNA, 25 bp, Homo sapien
ccctcggttggagccaaacatggtt

SEQ ID NO: 3941763 - DNA, 25 bp, Homo sapien
tgttacacgtggaccctttgcacct

SEQ ID NO: 3941764 - DNA, 25 bp, Homo sapien
ctgttacacgtggaccctttgcacc

SEQ ID NO: 3941765 - DNA, 25 bp, Homo sapien
gaactgcctcgatgttgtctgacaa

SEQ ID NO: 3941766 - DNA, 25 bp, Homo sapien
ccatgaacagaaaacaggtgtgcca

SEQ ID NO: 3941767 - DNA, 25 bp, Homo sapien
aatgaggatgctcccacagtggcac

SEQ ID NO: 3941768 - DNA, 25 bp, Homo sapien
tgtgggccggcttctacagagagaa

SEQ ID NO: 3941769 - DNA, 25 bp, Homo sapien
tccaaagatcttcgccttgtggttc

SEQ ID NO: 3941770 - DNA, 25 bp, Homo sapien
gagttccaaagatcttcgccttgtg

SEQ ID NO: 3941771 - DNA, 25 bp, Homo sapien
aaagatcttcgccttgtggttcagg

SEQ ID NO: 3941772 - DNA, 25 bp, Homo sapien
atcttcgccttgtggttcaggcagc

SEQ ID NO: 3941773 - DNA, 25 bp, Homo sapien
ccattgagaggaggactggccacac

SEQ ID NO: 3941774 - DNA, 25 bp, Homo sapien
acaggatcccacacaagccattgag

SEQ ID NO: 3941775 - DNA, 25 bp, Homo sapien
gccattgagaggaggactggccaca

SEQ ID NO: 3941776 - DNA, 25 bp, Homo sapien
ctgctttaaacatatgcaacaggat

SEQ ID NO: 3941777 - DNA, 25 bp, Homo sapien
ctgagggactgcacgccgtgtctct

SEQ ID NO: 3941778 - DNA, 25 bp, Homo sapien
ccttgtcatccaggatcccgtagtg

SEQ ID NO: 3941779 - DNA, 25 bp, Homo sapien
tggcggcgcggcatatgctagacga

SEQ ID NO: 3941780 - DNA, 25 bp, Homo sapien
accttcccgttcctggtgatatcca

SEQ ID NO: 3941781 - DNA, 25 bp, Homo sapien
aaaccgtttcacagagccccgatca

SEQ ID NO: 3941782 - DNA, 25 bp, Homo sapien
tcataaacaggaaaaccgtttcaca

SEQ ID NO: 3941783 - DNA, 25 bp, Homo sapien
tcacagagccccgatcacagagtag

SEQ ID NO: 3941784 - DNA, 25 bp, Homo sapien
agagccccgatcacagagtagttac

SEQ ID NO: 3941785 - DNA, 25 bp, Homo sapien
ctttcacttttgacaccatgaatga

SEQ ID NO: 3941786 - DNA, 25 bp, Homo sapien
tttcacttttgacaccatgaatgag

SEQ ID NO: 3941787 - DNA, 25 bp, Homo sapien
gaaacagttctaatactggccacct

SEQ ID NO: 3941788 - DNA, 25 bp, Homo sapien
tagagctccttctgacataccacct

SEQ ID NO: 3941789 - DNA, 25 bp, Homo sapien
tcagagagctcagagtgcccttccc

SEQ ID NO: 3941790 - DNA, 25 bp, Homo sapien
gctcctcacagcaggtgttactcta

SEQ ID NO: 3941791 - DNA, 25 bp, Homo sapien
caggagcaagggggaaagggtcagg

SEQ ID NO: 3941792 - DNA, 25 bp, Homo sapien
gtcaggtcccagcacgcctgggcct

SEQ ID NO: 3941793 - DNA, 25 bp, Homo sapien
aaagggtcaggtcccagcacgcctg

SEQ ID NO: 3941794 - DNA, 25 bp, Homo sapien
gggaaagggtcaggtcccagcacgc

SEQ ID NO: 3941795 - DNA, 25 bp, Homo sapien
ggcacagctgagcaacggtcgtgta

SEQ ID NO: 3941796 - DNA, 25 bp, Homo sapien
tttcaaacgggcacagctgagcaac

SEQ ID NO: 3941797 - DNA, 25 bp, Homo sapien
tgggcagtgagttgctggcttttca

SEQ ID NO: 3941798 - DNA, 25 bp, Homo sapien
caacggtcgtgtagcagtccaaatc

SEQ ID NO: 3941799 - DNA, 25 bp, Homo sapien
caccggagcccagtaggaaggttcg

SEQ ID NO: 3941800 - DNA, 25 bp, Homo sapien
gatgttggttccaaacaccggagcc

SEQ ID NO: 3941801 - DNA, 25 bp, Homo sapien
aaggttcgtctttgcagtgtgccgg

SEQ ID NO: 3941802 - DNA, 25 bp, Homo sapien
tctttgcagtgtgccggacaatgga

SEQ ID NO: 3941803 - DNA, 25 bp, Homo sapien
ttaacaggctttgcgagatagttgt

SEQ ID NO: 3941804 - DNA, 25 bp, Homo sapien
caggctttgcgagatagttgttgaa

SEQ ID NO: 3941805 - DNA, 25 bp, Homo sapien
aacaggctttgcgagatagttgttg

SEQ ID NO: 3941806 - DNA, 25 bp, Homo sapien
acaggctttgcgagatagttgttga

SEQ ID NO: 3941807 - DNA, 25 bp, Homo sapien
tagctaagaggcactggaataaagt

SEQ ID NO: 3941808 - DNA, 25 bp, Homo sapien
tcttggagcttgcatgttgaggtct

SEQ ID NO: 3941809 - DNA, 25 bp, Homo sapien
aagtttcaagtatccagatcttgga

SEQ ID NO: 3941810 - DNA, 25 bp, Homo sapien
taattaatttagctaagaggcactg

SEQ ID NO: 3941811 - DNA, 25 bp, Homo sapien
tcagagaggaatattgccactcttg

SEQ ID NO: 3941812 - DNA, 25 bp, Homo sapien
gaatttggttcaaacatttggtgta

SEQ ID NO: 3941813 - DNA, 25 bp, Homo sapien
atttggctgggattgctttgcccag

SEQ ID NO: 3941814 - DNA, 25 bp, Homo sapien
ccttttcctgtaaattgtatcttct

SEQ ID NO: 3941815 - DNA, 25 bp, Homo sapien
gactgaactccattcctgagcgagc

SEQ ID NO: 3941816 - DNA, 25 bp, Homo sapien
tctttttatccacgggcatcacgtc

SEQ ID NO: 3941817 - DNA, 25 bp, Homo sapien
cgtgcacggctgtcttgcagatgct

SEQ ID NO: 3941818 - DNA, 25 bp, Homo sapien
actctcgttgctgatgactcccgcg

SEQ ID NO: 3941819 - DNA, 25 bp, Homo sapien
agagcttgccttttggcatcaccca

SEQ ID NO: 3941820 - DNA, 25 bp, Homo sapien
acacacagacgggattaaggagggt

SEQ ID NO: 3941821 - DNA, 25 bp, Homo sapien
cacccaacacacagacgggattaag

SEQ ID NO: 3941822 - DNA, 25 bp, Homo sapien
ttgccttttggcatcacccaacaca

SEQ ID NO: 3941823 - DNA, 25 bp, Homo sapien
tgcatccccctcaattgccttgaaa

SEQ ID NO: 3941824 - DNA, 25 bp, Homo sapien
gtggggctgcatccccctcaattgc

SEQ ID NO: 3941825 - DNA, 25 bp, Homo sapien
catccccctcaattgccttgaaagt

SEQ ID NO: 3941826 - DNA, 25 bp, Homo sapien
ggctgcatccccctcaattgccttg

SEQ ID NO: 3941827 - DNA, 25 bp, Homo sapien
cgccacaggtaaaaattcccgcagg

SEQ ID NO: 3941828 - DNA, 25 bp, Homo sapien
tcccgcaggtttgggcaccaagaaa

SEQ ID NO: 3941829 - DNA, 25 bp, Homo sapien
gttggtgccatccaccgccacaggt

SEQ ID NO: 3941830 - DNA, 25 bp, Homo sapien
tccccagttgttcatgcctcaagca

SEQ ID NO: 3941831 - DNA, 25 bp, Homo sapien
cctcctgcttgctcccgtagtggaa

SEQ ID NO: 3941832 - DNA, 25 bp, Homo sapien
agggcccgttactgagagatctgga

SEQ ID NO: 3941833 - DNA, 25 bp, Homo sapien
gacacttccttgaagccgccagaca

SEQ ID NO: 3941834 - DNA, 25 bp, Homo sapien
gaaagagggcccgttactgagagat

SEQ ID NO: 3941835 - DNA, 25 bp, Homo sapien
tgacagcaaagatccggaaggcctt

SEQ ID NO: 3941836 - DNA, 25 bp, Homo sapien
cagcaaagatccggaaggcctttcc

SEQ ID NO: 3941837 - DNA, 25 bp, Homo sapien
gaaggcctttccatcccgaggagtc

SEQ ID NO: 3941838 - DNA, 25 bp, Homo sapien
gcaaagatccggaaggcctttccat

SEQ ID NO: 3941839 - DNA, 25 bp, Homo sapien
agtccggctgagcaccttgggatgc

SEQ ID NO: 3941840 - DNA, 25 bp, Homo sapien
gagaggacgtccagatggagacccc

SEQ ID NO: 3941841 - DNA, 25 bp, Homo sapien
cacaggccacaaagtgatggacact

SEQ ID NO: 3941842 - DNA, 25 bp, Homo sapien
cagaagaacacatagcaaggaacat

SEQ ID NO: 3941843 - DNA, 25 bp, Homo sapien
tggcgcttgctcaaaaggcctcttc

SEQ ID NO: 3941844 - DNA, 25 bp, Homo sapien
tccgacgccgtgaatgcttcacaat

SEQ ID NO: 3941845 - DNA, 25 bp, Homo sapien
caattgtgagcttcaaatggtttgt

SEQ ID NO: 3941846 - DNA, 25 bp, Homo sapien
ttcctgaaactcattggcgcttgct

SEQ ID NO: 3941847 - DNA, 25 bp, Homo sapien
gtgactgctgaactctacataaacc

SEQ ID NO: 3941848 - DNA, 25 bp, Homo sapien
cattttcctctattggtagggacgg

SEQ ID NO: 3941849 - DNA, 25 bp, Homo sapien
cctcttactctagcccatttgtctg

SEQ ID NO: 3941850 - DNA, 25 bp, Homo sapien
gagccatcctgaatgcggccattga

SEQ ID NO: 3941851 - DNA, 25 bp, Homo sapien
gaaaaaataggtcatcgggtgcgtg

SEQ ID NO: 3941852 - DNA, 25 bp, Homo sapien
tgtcatgaggccacagacggtttca

SEQ ID NO: 3941853 - DNA, 25 bp, Homo sapien
cacgtaaaccagtccgaggcagggt

SEQ ID NO: 3941854 - DNA, 25 bp, Homo sapien
cagtggaaccttacgagaccaggag

SEQ ID NO: 3941855 - DNA, 25 bp, Homo sapien
gctttggaagcgagcccactgggat

SEQ ID NO: 3941856 - DNA, 25 bp, Homo sapien
ctaattctgcaaaccccacagggcg

SEQ ID NO: 3941857 - DNA, 25 bp, Homo sapien
cacgctttggaatacggtagggcaa

SEQ ID NO: 3941858 - DNA, 25 bp, Homo sapien
tctatcctgctaggaaggcccagtg

SEQ ID NO: 3941859 - DNA, 25 bp, Homo sapien
aattgttcagatttgttcataaaag

SEQ ID NO: 3941860 - DNA, 25 bp, Homo sapien
ttccatacacatgcaaacctgccag

SEQ ID NO: 3941861 - DNA, 25 bp, Homo sapien
cagtgggacggaccctttgggagct

SEQ ID NO: 3941862 - DNA, 25 bp, Homo sapien
tgggacggaccctttgggagctctg

SEQ ID NO: 3941863 - DNA, 25 bp, Homo sapien
acctgccagtgggacggaccctttg

SEQ ID NO: 3941864 - DNA, 25 bp, Homo sapien
tgctgggatggttctcctctgatga

SEQ ID NO: 3941865 - DNA, 25 bp, Homo sapien
gacggtgtagttcatggtgtccagt

SEQ ID NO: 3941866 - DNA, 25 bp, Homo sapien
tgtccagtgaagaccagctgtggct

SEQ ID NO: 3941867 - DNA, 25 bp, Homo sapien
gaacggctgctgttggcgggagtga

SEQ ID NO: 3941868 - DNA, 25 bp, Homo sapien
gtggacgtcaggggagcagggttgt

SEQ ID NO: 3941869 - DNA, 25 bp, Homo sapien
gggttgtggggtgcccccagcacag

SEQ ID NO: 3941870 - DNA, 25 bp, Homo sapien
acagccacctcttgctcctccttga

SEQ ID NO: 3941871 - DNA, 25 bp, Homo sapien
gcagggttgtggggtgcccccagca

SEQ ID NO: 3941872 - DNA, 25 bp, Homo sapien
tgacatggtcggtcacagaggtctc

SEQ ID NO: 3941873 - DNA, 25 bp, Homo sapien
gaccagatgacatggtcggtcacag

SEQ ID NO: 3941874 - DNA, 25 bp, Homo sapien
ggaccagatgacatggtcggtcaca

SEQ ID NO: 3941875 - DNA, 25 bp, Homo sapien
cagatgacatggtcggtcacagagg

SEQ ID NO: 3941876 - DNA, 25 bp, Homo sapien
cagatgttcacatgcttggcggtgg

SEQ ID NO: 3941877 - DNA, 25 bp, Homo sapien
tttggaaggtcagcaccgggatgat

SEQ ID NO: 3941878 - DNA, 25 bp, Homo sapien
ctatcgatagatttggaaggtcagc

SEQ ID NO: 3941879 - DNA, 25 bp, Homo sapien
gggcccagatgttcacatgcttggc

SEQ ID NO: 3941880 - DNA, 25 bp, Homo sapien
tttgctgtcgcctcctgcacgtgca

SEQ ID NO: 3941881 - DNA, 25 bp, Homo sapien
gtcgcctcctgcacgtgcacagtgg

SEQ ID NO: 3941882 - DNA, 25 bp, Homo sapien
cacgtgctgagcgtctttgctgtcg

SEQ ID NO: 3941883 - DNA, 25 bp, Homo sapien
agaccttcagcgcttaccacgtgct

SEQ ID NO: 3941884 - DNA, 25 bp, Homo sapien
cccctttgagggtgatgagaccctt

SEQ ID NO: 3941885 - DNA, 25 bp, Homo sapien
ccctggtggtgggcaattctgcact

SEQ ID NO: 3941886 - DNA, 25 bp, Homo sapien
gacccttgagcgctgtctgaagccg

SEQ ID NO: 3941887 - DNA, 25 bp, Homo sapien
agtggtagcaattggaccctggtgc

SEQ ID NO: 3941888 - DNA, 25 bp, Homo sapien
caaatgaaggcagtgttcctatttg

SEQ ID NO: 3941889 - DNA, 25 bp, Homo sapien
ggctgtgcaaatgaaggcagtgttc

SEQ ID NO: 3941890 - DNA, 25 bp, Homo sapien
tgatggcaacactggctgtgcaaat

SEQ ID NO: 3941891 - DNA, 25 bp, Homo sapien
aatgaaggcagtgttcctatttggc

SEQ ID NO: 3941892 - DNA, 25 bp, Homo sapien
tatgaaccacctactgcagccagca

SEQ ID NO: 3941893 - DNA, 25 bp, Homo sapien
gtccagtgccctcgttccaggtcag

SEQ ID NO: 3941894 - DNA, 25 bp, Homo sapien
tcattcctccatcaggacatatgaa

SEQ ID NO: 3941895 - DNA, 25 bp, Homo sapien
tcctccatcaggacatatgaaccac

SEQ ID NO: 3941896 - DNA, 25 bp, Homo sapien
ctcgctcatggccacagcatccgca

SEQ ID NO: 3941897 - DNA, 25 bp, Homo sapien
gctcatggccacagcatccgcagca

SEQ ID NO: 3941898 - DNA, 25 bp, Homo sapien
cctcgctcatggccacagcatccgc

SEQ ID NO: 3941899 - DNA, 25 bp, Homo sapien
tcgctcatggccacagcatccgcag

SEQ ID NO: 3941900 - DNA, 25 bp, Homo sapien
tcctgctggctgctgggggtcccac

SEQ ID NO: 3941901 - DNA, 25 bp, Homo sapien
ctccccgtcctgctggctgctgggg

SEQ ID NO: 3941902 - DNA, 25 bp, Homo sapien
cgtcctgctggctgctgggggtccc

SEQ ID NO: 3941903 - DNA, 25 bp, Homo sapien
cccgtcctgctggctgctgggggtc

SEQ ID NO: 3941904 - DNA, 25 bp, Homo sapien
aaaaagaactttcggtgagctggca

SEQ ID NO: 3941905 - DNA, 25 bp, Homo sapien
tcgaggacccgtctgcttggtgtgt

SEQ ID NO: 3941906 - DNA, 25 bp, Homo sapien
gaacgaggacaggttttcctgcagc

SEQ ID NO: 3941907 - DNA, 25 bp, Homo sapien
aaagggcttctggaacgctcgttag

SEQ ID NO: 3941908 - DNA, 25 bp, Homo sapien
ttatttagccaattcagtgaagtta

SEQ ID NO: 3941909 - DNA, 25 bp, Homo sapien
tatttagccaattcagtgaagttag

SEQ ID NO: 3941910 - DNA, 25 bp, Homo sapien
agagaaccgtgagccgggtggccct

SEQ ID NO: 3941911 - DNA, 25 bp, Homo sapien
gatggctttgcctgaataaagagaa

SEQ ID NO: 3941912 - DNA, 25 bp, Homo sapien
ttgatggctttgcctgaataaagag

SEQ ID NO: 3941913 - DNA, 25 bp, Homo sapien
tgaataaagagaaccgtgagccggg

SEQ ID NO: 3941914 - DNA, 25 bp, Homo sapien
gctctggtttcttcgatagtcgcat

SEQ ID NO: 3941915 - DNA, 25 bp, Homo sapien
tctggctctggtttcttcgatagtc

SEQ ID NO: 3941916 - DNA, 25 bp, Homo sapien
ggctctggtttcttcgatagtcgca

SEQ ID NO: 3941917 - DNA, 25 bp, Homo sapien
tggctctggtttcttcgatagtcgc

SEQ ID NO: 3941918 - DNA, 25 bp, Homo sapien
ctgctgatcgttccccgctgcggga

SEQ ID NO: 3941919 - DNA, 25 bp, Homo sapien
ttcccaatctctgctgatcgttccc

SEQ ID NO: 3941920 - DNA, 25 bp, Homo sapien
ctgcgggaatgctgccctcggccga

SEQ ID NO: 3941921 - DNA, 25 bp, Homo sapien
tgcgggaatgctgccctcggccgac

SEQ ID NO: 3941922 - DNA, 25 bp, Homo sapien
aaaggtgcagggatgcgtgggctcc

SEQ ID NO: 3941923 - DNA, 25 bp, Homo sapien
gacacgggacgcagctggcccatgc

SEQ ID NO: 3941924 - DNA, 25 bp, Homo sapien
ggaaaaggactgtgctcaaaggtgc

SEQ ID NO: 3941925 - DNA, 25 bp, Homo sapien
ggataatttagggagcgctcaggaa

SEQ ID NO: 3941926 - DNA, 25 bp, Homo sapien
tgggaagagcaggccccgaagtcac

SEQ ID NO: 3941927 - DNA, 25 bp, Homo sapien
ttgggaagagcaggccccgaagtca

SEQ ID NO: 3941928 - DNA, 25 bp, Homo sapien
ggaagagcaggccccgaagtcacac

SEQ ID NO: 3941929 - DNA, 25 bp, Homo sapien
gttgggaagagcaggccccgaagtc

SEQ ID NO: 3941930 - DNA, 25 bp, Homo sapien
aactgctgcagctccggtttggaac

SEQ ID NO: 3941931 - DNA, 25 bp, Homo sapien
ttcaggtgttcatcaaggcacaggc

SEQ ID NO: 3941932 - DNA, 25 bp, Homo sapien
gagttgagcgtctctgggtctcgct

SEQ ID NO: 3941933 - DNA, 25 bp, Homo sapien
gggtctcgcttcaggtgttcatcaa

SEQ ID NO: 3941934 - DNA, 25 bp, Homo sapien
tctgtttggtttattgtgacaacca

SEQ ID NO: 3941935 - DNA, 25 bp, Homo sapien
gagaacacagtggagtttctcaaca

SEQ ID NO: 3941936 - DNA, 25 bp, Homo sapien
aggtgctgcagcgttggacgtggca

SEQ ID NO: 3941937 - DNA, 25 bp, Homo sapien
cgttggacgtggcaaagttctcttc

SEQ ID NO: 3941938 - DNA, 25 bp, Homo sapien
atggccaggactgcacgaacatccc

SEQ ID NO: 3941939 - DNA, 25 bp, Homo sapien
cgtccgcagagttaaattggccaca

SEQ ID NO: 3941940 - DNA, 25 bp, Homo sapien
tcgtgcctatcagtgaggctccgag

SEQ ID NO: 3941941 - DNA, 25 bp, Homo sapien
cgaacatccccagcgtcattctgaa

SEQ ID NO: 3941942 - DNA, 25 bp, Homo sapien
aacgacagcaccgagagatccgtgg

SEQ ID NO: 3941943 - DNA, 25 bp, Homo sapien
gcgttatccacaacatacacgatgt

SEQ ID NO: 3941944 - DNA, 25 bp, Homo sapien
tttggccaggtgtctgctgtagcct

SEQ ID NO: 3941945 - DNA, 25 bp, Homo sapien
ggacctctgtgagttaccagcgtta

SEQ ID NO: 3941946 - DNA, 25 bp, Homo sapien
tgatgggcacggcactccagaggtt

SEQ ID NO: 3941947 - DNA, 25 bp, Homo sapien
cagcatgtacgaaggcctgaggcag

SEQ ID NO: 3941948 - DNA, 25 bp, Homo sapien
ggtggcccttaggtgacatttgaac

SEQ ID NO: 3941949 - DNA, 25 bp, Homo sapien
taaataataacttgaggtctcagag

SEQ ID NO: 3941950 - DNA, 25 bp, Homo sapien
gaaacttccggagctatttcataac

SEQ ID NO: 3941951 - DNA, 25 bp, Homo sapien
ggtcgtgataggagaagaggtgctg

SEQ ID NO: 3941952 - DNA, 25 bp, Homo sapien
agagcctggtcgtgataggagaaga

SEQ ID NO: 3941953 - DNA, 25 bp, Homo sapien
aagaaacttccggagctatttcata

SEQ ID NO: 3941954 - DNA, 25 bp, Homo sapien
agccgcctccttgctgtttgccttt

SEQ ID NO: 3941955 - DNA, 25 bp, Homo sapien
tacgcggccctgagagcaggttttc

SEQ ID NO: 3941956 - DNA, 25 bp, Homo sapien
tacaaaagggcaccggtcattacgc

SEQ ID NO: 3941957 - DNA, 25 bp, Homo sapien
tttgtttgctttccccgtctccatc

SEQ ID NO: 3941958 - DNA, 25 bp, Homo sapien
ggtgtgaaggtggcttcaggcctca

SEQ ID NO: 3941959 - DNA, 25 bp, Homo sapien
tgtgaaggtggcttcaggcctcatg

SEQ ID NO: 3941960 - DNA, 25 bp, Homo sapien
gtgtgaaggtggcttcaggcctcat

SEQ ID NO: 3941961 - DNA, 25 bp, Homo sapien
acgggccttgcctgtcattgtgggt

SEQ ID NO: 3941962 - DNA, 25 bp, Homo sapien
tgcaggacgggccttgcctgtcatt

SEQ ID NO: 3941963 - DNA, 25 bp, Homo sapien
gccttgcctgtcattgtgggtgtca

SEQ ID NO: 3941964 - DNA, 25 bp, Homo sapien
gcctgtcattgtgggtgtcaaagta

SEQ ID NO: 3941965 - DNA, 25 bp, Homo sapien
agagtcggggaaggggcagcgagag

SEQ ID NO: 3941966 - DNA, 25 bp, Homo sapien
ccaaggggagctctgcctttcccag

SEQ ID NO: 3941967 - DNA, 25 bp, Homo sapien
gctggttccacttctagcagagtcg

SEQ ID NO: 3941968 - DNA, 25 bp, Homo sapien
cgtgtctgccacttggctttcctcc

SEQ ID NO: 3941969 - DNA, 25 bp, Homo sapien
ctggcacagggtaacggaatgaccc

SEQ ID NO: 3941970 - DNA, 25 bp, Homo sapien
tggcacagggtaacggaatgaccca

SEQ ID NO: 3941971 - DNA, 25 bp, Homo sapien
ggcacagggtaacggaatgacccat

SEQ ID NO: 3941972 - DNA, 25 bp, Homo sapien
caagccccgggtatgtggttgacag

SEQ ID NO: 3941973 - DNA, 25 bp, Homo sapien
tatcgcctcctagcacggcatagtg

SEQ ID NO: 3941974 - DNA, 25 bp, Homo sapien
atccgtccctggttcctcgcggtat

SEQ ID NO: 3941975 - DNA, 25 bp, Homo sapien
tatgtggttgacaggtgctgcatcc

SEQ ID NO: 3941976 - DNA, 25 bp, Homo sapien
ctcctcacaaaagcgccagggagca

SEQ ID NO: 3941977 - DNA, 25 bp, Homo sapien
gccagctcctcacaaaagcgccagg

SEQ ID NO: 3941978 - DNA, 25 bp, Homo sapien
ccatccctcgtgtgccagctcctca

SEQ ID NO: 3941979 - DNA, 25 bp, Homo sapien
tcaaacccttagctcggccagctcc

SEQ ID NO: 3941980 - DNA, 25 bp, Homo sapien
gggttggcccctcagcgtgtgctgc

SEQ ID NO: 3941981 - DNA, 25 bp, Homo sapien
aaacgggttggcccctcagcgtgtg

SEQ ID NO: 3941982 - DNA, 25 bp, Homo sapien
acgggttggcccctcagcgtgtgct

SEQ ID NO: 3941983 - DNA, 25 bp, Homo sapien
gttggcccctcagcgtgtgctgcat

SEQ ID NO: 3941984 - DNA, 25 bp, Homo sapien
catgggggccaaaagctgccacttt

SEQ ID NO: 3941985 - DNA, 25 bp, Homo sapien
ccacgtcaccgatggtggccacatg

SEQ ID NO: 3941986 - DNA, 25 bp, Homo sapien
tgatcatccagaagcacagaactcc

SEQ ID NO: 3941987 - DNA, 25 bp, Homo sapien
gccactttgtggatctgcccacgtc

SEQ ID NO: 3941988 - DNA, 25 bp, Homo sapien
gcattccagacacgcggaaatgaga

SEQ ID NO: 3941989 - DNA, 25 bp, Homo sapien
ctggtggcattccagacacgcggaa

SEQ ID NO: 3941990 - DNA, 25 bp, Homo sapien
ggagactcgaacacggaggcgcaca

SEQ ID NO: 3941991 - DNA, 25 bp, Homo sapien
ccagacacgcggaaatgagaaggag

SEQ ID NO: 3941992 - DNA, 25 bp, Homo sapien
tgctgatgcaaaaccacaaagggac

SEQ ID NO: 3941993 - DNA, 25 bp, Homo sapien
tggacttggtcaccgcagaagcgtg

SEQ ID NO: 3941994 - DNA, 25 bp, Homo sapien
tgatcctggagacgccagtttccga

SEQ ID NO: 3941995 - DNA, 25 bp, Homo sapien
tgaatcctgtgagacttggcaagtg

SEQ ID NO: 3941996 - DNA, 25 bp, Homo sapien
caggatggcgccctcttgttggagt

SEQ ID NO: 3941997 - DNA, 25 bp, Homo sapien
taaaataggatccttggtgcggagc

SEQ ID NO: 3941998 - DNA, 25 bp, Homo sapien
ggacgcatcaagaagcaatctgtga

SEQ ID NO: 3941999 - DNA, 25 bp, Homo sapien
cgctccagtcgggaatggccaggat

SEQ ID NO: 3942000 - DNA, 25 bp, Homo sapien
ggcagggcccagccattgggcacct

SEQ ID NO: 3942001 - DNA, 25 bp, Homo sapien
tataaatggcacctaggtaagagca

SEQ ID NO: 3942002 - DNA, 25 bp, Homo sapien
tgcggctcggtgacttgatacttgg

SEQ ID NO: 3942003 - DNA, 25 bp, Homo sapien
tagcagtgtataaatggcacctagg

SEQ ID NO: 3942004 - DNA, 25 bp, Homo sapien
cctaggtaagagcagagctgcggct

SEQ ID NO: 3942005 - DNA, 25 bp, Homo sapien
tacctgccgcttagttaggccctgg

SEQ ID NO: 3942006 - DNA, 25 bp, Homo sapien
taaattaggaggcagatccacaggc

SEQ ID NO: 3942007 - DNA, 25 bp, Homo sapien
tggagcctatggtcagtcccacaag

SEQ ID NO: 3942008 - DNA, 25 bp, Homo sapien
tgcgaagcctaactgccctggaagg

SEQ ID NO: 3942009 - DNA, 25 bp, Homo sapien
gagttccaggtttcttagcgtggca

SEQ ID NO: 3942010 - DNA, 25 bp, Homo sapien
tggaatgctgaattcccttctgtgc

SEQ ID NO: 3942011 - DNA, 25 bp, Homo sapien
tgtctgttgtctttattgacacttt

SEQ ID NO: 3942012 - DNA, 25 bp, Homo sapien
tgtgctgtgtcacatgattgtcctc

SEQ ID NO: 3942013 - DNA, 25 bp, Homo sapien
agcctccttccgacctgcccggcgg

SEQ ID NO: 3942014 - DNA, 25 bp, Homo sapien
gggaccaagccgagccgagccgcgg

SEQ ID NO: 3942015 - DNA, 25 bp, Homo sapien
tccagccaaggctccgggctgaggc

SEQ ID NO: 3942016 - DNA, 25 bp, Homo sapien
tcgtcgggttcacttccggcgctcg

SEQ ID NO: 3942017 - DNA, 25 bp, Homo sapien
tccccgcatatagtacaggccactg

SEQ ID NO: 3942018 - DNA, 25 bp, Homo sapien
gtacacactccgctaagggcattcc

SEQ ID NO: 3942019 - DNA, 25 bp, Homo sapien
ttctcctccggacttcagtttggcg

SEQ ID NO: 3942020 - DNA, 25 bp, Homo sapien
cttcggtcacatccccgcatatagt

SEQ ID NO: 3942021 - DNA, 25 bp, Homo sapien
gccatttccactcccgctcccttac

SEQ ID NO: 3942022 - DNA, 25 bp, Homo sapien
ggctccgcggacctcaggagtcagg

SEQ ID NO: 3942023 - DNA, 25 bp, Homo sapien
tccgcggacctcaggagtcaggcct

SEQ ID NO: 3942024 - DNA, 25 bp, Homo sapien
ttttcccaagtgctttctggctcag

SEQ ID NO: 3942025 - DNA, 25 bp, Homo sapien
tacgcaagctataccagtaactaaa

SEQ ID NO: 3942026 - DNA, 25 bp, Homo sapien
gcaagggtacaattttacgcaagct

SEQ ID NO: 3942027 - DNA, 25 bp, Homo sapien
gagaacatggccatcaccctcaatc

SEQ ID NO: 3942028 - DNA, 25 bp, Homo sapien
gttataacagggctactgcactcca

SEQ ID NO: 3942029 - DNA, 25 bp, Homo sapien
cgggcagcgaaccggcgccgtcaga

SEQ ID NO: 3942030 - DNA, 25 bp, Homo sapien
gaaccggcgccgtcagactcggctg

SEQ ID NO: 3942031 - DNA, 25 bp, Homo sapien
agcgaaccggcgccgtcagactcgg

SEQ ID NO: 3942032 - DNA, 25 bp, Homo sapien
ggcggaccgggcagcgaaccggcgc

SEQ ID NO: 3942033 - DNA, 25 bp, Homo sapien
aggctgttcctgctcaatctggagg

SEQ ID NO: 3942034 - DNA, 25 bp, Homo sapien
tcaactttttcattgcgagccaatt

SEQ ID NO: 3942035 - DNA, 25 bp, Homo sapien
tgtttcaaaggcgtaagcagtccta

SEQ ID NO: 3942036 - DNA, 25 bp, Homo sapien
cgtcctgtgtttcaaaggcgtaagc

SEQ ID NO: 3942037 - DNA, 25 bp, Homo sapien
aatttcaatagcctttcgtcctgtg

SEQ ID NO: 3942038 - DNA, 25 bp, Homo sapien
cataaggatcatgaatgcttctcgt

SEQ ID NO: 3942039 - DNA, 25 bp, Homo sapien
gtaaaaacgtccacatccctgtcat

SEQ ID NO: 3942040 - DNA, 25 bp, Homo sapien
catgaatgcttctcgtaaaaacgtc

SEQ ID NO: 3942041 - DNA, 25 bp, Homo sapien
tgtctcgcaaatcataaggatcatg

SEQ ID NO: 3942042 - DNA, 25 bp, Homo sapien
caatcagaagtgaggagattcactg

SEQ ID NO: 3942043 - DNA, 25 bp, Homo sapien
aatcagaagtgaggagattcactgt

SEQ ID NO: 3942044 - DNA, 25 bp, Homo sapien
atcagaagtgaggagattcactgtc

SEQ ID NO: 3942045 - DNA, 25 bp, Homo sapien
gcaatcagaagtgaggagattcact

SEQ ID NO: 3942046 - DNA, 25 bp, Homo sapien
cctgctgggaggggtaaagatgttg

SEQ ID NO: 3942047 - DNA, 25 bp, Homo sapien
ctgctgtggcgtccctgctgggagg

SEQ ID NO: 3942048 - DNA, 25 bp, Homo sapien
tgctgggaggggtaaagatgttgtg

SEQ ID NO: 3942049 - DNA, 25 bp, Homo sapien
ctgctgggaggggtaaagatgttgt

SEQ ID NO: 3942050 - DNA, 25 bp, Homo sapien
gaggaggcttctacatacgccaccg

SEQ ID NO: 3942051 - DNA, 25 bp, Homo sapien
taagtggcagggcatcgtattcacc

SEQ ID NO: 3942052 - DNA, 25 bp, Homo sapien
ttccaaattacacacgggaggaggc

SEQ ID NO: 3942053 - DNA, 25 bp, Homo sapien
tgccagtgccagtcaccagataagt

SEQ ID NO: 3942054 - DNA, 25 bp, Homo sapien
cctgggattttgacagccaggtgga

SEQ ID NO: 3942055 - DNA, 25 bp, Homo sapien
tgggggctccgggaagatgtcctgg

SEQ ID NO: 3942056 - DNA, 25 bp, Homo sapien
gaagcagggtacctgacggctcggc

SEQ ID NO: 3942057 - DNA, 25 bp, Homo sapien
agaggaagcagggtacctgacggct

SEQ ID NO: 3942058 - DNA, 25 bp, Homo sapien
gaggaacaggcagcgaagggggcaa

SEQ ID NO: 3942059 - DNA, 25 bp, Homo sapien
gcctgccacggaatgggggacagac

SEQ ID NO: 3942060 - DNA, 25 bp, Homo sapien
agaggaacaggcagcgaagggggca

SEQ ID NO: 3942061 - DNA, 25 bp, Homo sapien
cagtagggctactgcctgctcgtcc

SEQ ID NO: 3942062 - DNA, 25 bp, Homo sapien
ccagtagggctactgcctgctcgtc

SEQ ID NO: 3942063 - DNA, 25 bp, Homo sapien
gaaagtacgggaacactgtgacagt

SEQ ID NO: 3942064 - DNA, 25 bp, Homo sapien
tcctctattgagcaaggcgggcctc

SEQ ID NO: 3942065 - DNA, 25 bp, Homo sapien
tcaagtaaggtctgtggcgtaacac

SEQ ID NO: 3942066 - DNA, 25 bp, Homo sapien
ggagctatgaagatcccgtgttaca

SEQ ID NO: 3942067 - DNA, 25 bp, Homo sapien
aggccaggaaaatgtctccaaacac

SEQ ID NO: 3942068 - DNA, 25 bp, Homo sapien
ctgtgatgtaaaggccaggaaaatg

SEQ ID NO: 3942069 - DNA, 25 bp, Homo sapien
gatgtaaaggccaggaaaatgtctc

SEQ ID NO: 3942070 - DNA, 25 bp, Homo sapien
gccaggaaaatgtctccaaacacac

SEQ ID NO: 3942071 - DNA, 25 bp, Homo sapien
gtccacacgcactgactctggcatt

SEQ ID NO: 3942072 - DNA, 25 bp, Homo sapien
cattggtcacttttgccactgagtc

SEQ ID NO: 3942073 - DNA, 25 bp, Homo sapien
attttcccctagctcattggtcact

SEQ ID NO: 3942074 - DNA, 25 bp, Homo sapien
tgagtcatctgcttgtgagtcacgc

SEQ ID NO: 3942075 - DNA, 25 bp, Homo sapien
cagtgaacacggagagaaccctggg

SEQ ID NO: 3942076 - DNA, 25 bp, Homo sapien
tggaaaacttcgaactaaacataca

SEQ ID NO: 3942077 - DNA, 25 bp, Homo sapien
cagaaggtataaaggagaaccaaat

SEQ ID NO: 3942078 - DNA, 25 bp, Homo sapien
acccactagataggctcaacggcag

SEQ ID NO: 3942079 - DNA, 25 bp, Homo sapien
taagctcagtcacgggagaagcgtg

SEQ ID NO: 3942080 - DNA, 25 bp, Homo sapien
tgcttggccacaaaagtaagctcag

SEQ ID NO: 3942081 - DNA, 25 bp, Homo sapien
gctggaggaacggtggtccaaagag

SEQ ID NO: 3942082 - DNA, 25 bp, Homo sapien
gaagcgtggcagagctgataactga

SEQ ID NO: 3942083 - DNA, 25 bp, Homo sapien
ttctgagacagtgggccagatccct

SEQ ID NO: 3942084 - DNA, 25 bp, Homo sapien
cacacaaaggagctactgaggcctc

SEQ ID NO: 3942085 - DNA, 25 bp, Homo sapien
tggctaaaaggctagacaggcacac

SEQ ID NO: 3942086 - DNA, 25 bp, Homo sapien
tatccagaggcgagcaagagtgtgc

SEQ ID NO: 3942087 - DNA, 25 bp, Homo sapien
catgtctccatcgatacctttctga

SEQ ID NO: 3942088 - DNA, 25 bp, Homo sapien
ctgacactccccgtggaaaggatag

SEQ ID NO: 3942089 - DNA, 25 bp, Homo sapien
ttccatgtctccatcgatacctttc

SEQ ID NO: 3942090 - DNA, 25 bp, Homo sapien
ataggctcgcgtgctgacggtcgaa

SEQ ID NO: 3942091 - DNA, 25 bp, Homo sapien
ggcggtgttgagagggggcctcgga

SEQ ID NO: 3942092 - DNA, 25 bp, Homo sapien
tgttgagagggggcctcggaaaggc

SEQ ID NO: 3942093 - DNA, 25 bp, Homo sapien
gcggtgttgagagggggcctcggaa

SEQ ID NO: 3942094 - DNA, 25 bp, Homo sapien
ttccagggcgtttgaaagacttctc

SEQ ID NO: 3942095 - DNA, 25 bp, Homo sapien
ccgtcgccctgtacacttggtgatg

SEQ ID NO: 3942096 - DNA, 25 bp, Homo sapien
gaagactgtcagtaaaatgccctgc

SEQ ID NO: 3942097 - DNA, 25 bp, Homo sapien
cagggcactgcgcaaacaagaacaa

SEQ ID NO: 3942098 - DNA, 25 bp, Homo sapien
tctcggctgcatgaaagtgtacacg

SEQ ID NO: 3942099 - DNA, 25 bp, Homo sapien
aggtgagctccacccaaaggggctg

SEQ ID NO: 3942100 - DNA, 25 bp, Homo sapien
aaggtgagctccacccaaaggggct

SEQ ID NO: 3942101 - DNA, 25 bp, Homo sapien
gagctccacccaaaggggctgcatc

SEQ ID NO: 3942102 - DNA, 25 bp, Homo sapien
ttttcttcactgcagtattcccggg

SEQ ID NO: 3942103 - DNA, 25 bp, Homo sapien
ccaacacaagttccctgggagtcag

SEQ ID NO: 3942104 - DNA, 25 bp, Homo sapien
agatcccaggacaatactccaccaa

SEQ ID NO: 3942105 - DNA, 25 bp, Homo sapien
gtggcccaggactgaagatcccagg

SEQ ID NO: 3942106 - DNA, 25 bp, Homo sapien
gaccacagaccattcatgcctgaat

SEQ ID NO: 3942107 - DNA, 25 bp, Homo sapien
tcagtagggcttttgacaagtgtca

SEQ ID NO: 3942108 - DNA, 25 bp, Homo sapien
tctgaagagggcctgaagtgccgag

SEQ ID NO: 3942109 - DNA, 25 bp, Homo sapien
gccgaggttctgatttgataaccaa

SEQ ID NO: 3942110 - DNA, 25 bp, Homo sapien
caatcaaactggacgatcgtggcta

SEQ ID NO: 3942111 - DNA, 25 bp, Homo sapien
aagccgttcaagcagtagcagggcc

SEQ ID NO: 3942112 - DNA, 25 bp, Homo sapien
tctccggaagccgttcaagcagtag

SEQ ID NO: 3942113 - DNA, 25 bp, Homo sapien
gatcgtggctatttctgatccagcc

SEQ ID NO: 3942114 - DNA, 25 bp, Homo sapien
ggagcccaccaagctcacaagttgc

SEQ ID NO: 3942115 - DNA, 25 bp, Homo sapien
agttgccagtaactgccggctacca

SEQ ID NO: 3942116 - DNA, 25 bp, Homo sapien
agtaactgccggctaccaagaatga

SEQ ID NO: 3942117 - DNA, 25 bp, Homo sapien
gcctggtgtcccaggtgcgttagta

SEQ ID NO: 3942118 - DNA, 25 bp, Homo sapien
tcttctccacgtagccacgcatgaa

SEQ ID NO: 3942119 - DNA, 25 bp, Homo sapien
tcaggcccaaagtcgattagcgagc

SEQ ID NO: 3942120 - DNA, 25 bp, Homo sapien
actgtccgcagactcagtggtctca

SEQ ID NO: 3942121 - DNA, 25 bp, Homo sapien
catcctgggtagactcggtgctctg

SEQ ID NO: 3942122 - DNA, 25 bp, Homo sapien
ctgggcactcacgtatcgagcaaac

SEQ ID NO: 3942123 - DNA, 25 bp, Homo sapien
cactgctgcagtactctccaaactt

SEQ ID NO: 3942124 - DNA, 25 bp, Homo sapien
gcactcacgtatcgagcaaaccact

SEQ ID NO: 3942125 - DNA, 25 bp, Homo sapien
tactctccaaacttggctttctcct

SEQ ID NO: 3942126 - DNA, 25 bp, Homo sapien
ccaggcggtagaaggttgcctctga

SEQ ID NO: 3942127 - DNA, 25 bp, Homo sapien
ctgcaaaagactgcaccaggcggta

SEQ ID NO: 3942128 - DNA, 25 bp, Homo sapien
tgcaccaggcggtagaaggttgcct

SEQ ID NO: 3942129 - DNA, 25 bp, Homo sapien
caccaggcggtagaaggttgcctct

SEQ ID NO: 3942130 - DNA, 25 bp, Homo sapien
tcttggcaggcccaaagtcatccat

SEQ ID NO: 3942131 - DNA, 25 bp, Homo sapien
tagtaggtgaagcacatggtcatga

SEQ ID NO: 3942132 - DNA, 25 bp, Homo sapien
cgatgtggtagtaggtgaagcacat

SEQ ID NO: 3942133 - DNA, 25 bp, Homo sapien
cacatggtcatgaggttcttggcag

SEQ ID NO: 3942134 - DNA, 25 bp, Homo sapien
agccagctgtttgcggatttcaggt

SEQ ID NO: 3942135 - DNA, 25 bp, Homo sapien
gatgtccttcttttcggccagccag

SEQ ID NO: 3942136 - DNA, 25 bp, Homo sapien
tcagcagccgctcggcgatgtcctt

SEQ ID NO: 3942137 - DNA, 25 bp, Homo sapien
cagtcctggccgaggtgttcttcag

SEQ ID NO: 3942138 - DNA, 25 bp, Homo sapien
gccgcttctcctggggtttgttctc

SEQ ID NO: 3942139 - DNA, 25 bp, Homo sapien
gcttctcctggggtttgttctcgtc

SEQ ID NO: 3942140 - DNA, 25 bp, Homo sapien
tctcctggggtttgttctcgtcttc

SEQ ID NO: 3942141 - DNA, 25 bp, Homo sapien
cctgggccgcttctcctggggtttg

SEQ ID NO: 3942142 - DNA, 25 bp, Homo sapien
gttgcttcaggtgcgtgtacaggta

SEQ ID NO: 3942143 - DNA, 25 bp, Homo sapien
ctgttgcttcaggtgcgtgtacagg

SEQ ID NO: 3942144 - DNA, 25 bp, Homo sapien
tgttgcttcaggtgcgtgtacaggt

SEQ ID NO: 3942145 - DNA, 25 bp, Homo sapien
ttgcttcaggtgcgtgtacaggtag

SEQ ID NO: 3942146 - DNA, 25 bp, Homo sapien
actgctggccccgtcagtaagaggg

SEQ ID NO: 3942147 - DNA, 25 bp, Homo sapien
cactctggtgagtgtgagaattctg

SEQ ID NO: 3942148 - DNA, 25 bp, Homo sapien
ttttattctgccactctggtgagtg

SEQ ID NO: 3942149 - DNA, 25 bp, Homo sapien
ctggccccgtcagtaagagggtgac

SEQ ID NO: 3942150 - DNA, 25 bp, Homo sapien
aggtctatccctgctacagcgtgga

SEQ ID NO: 3942151 - DNA, 25 bp, Homo sapien
ctaaaatatgtcgaggagaggcttc

SEQ ID NO: 3942152 - DNA, 25 bp, Homo sapien
gctggctaatagtccatgcaacgga

SEQ ID NO: 3942153 - DNA, 25 bp, Homo sapien
tcagagagattaacgcagcacgacc

SEQ ID NO: 3942154 - DNA, 25 bp, Homo sapien
agcgtcaaaaaaggctgcattccag

SEQ ID NO: 3942155 - DNA, 25 bp, Homo sapien
ctggtagtgggagatcgctttgtcc

SEQ ID NO: 3942156 - DNA, 25 bp, Homo sapien
tttgtcctctcacaatggacagcgt

SEQ ID NO: 3942157 - DNA, 25 bp, Homo sapien
acaatggacagcgtcaaaaaaggct

SEQ ID NO: 3942158 - DNA, 25 bp, Homo sapien
ctggtcctttttcctgaggccaaat

SEQ ID NO: 3942159 - DNA, 25 bp, Homo sapien
gttgcgagcggcaactgcattcccc

SEQ ID NO: 3942160 - DNA, 25 bp, Homo sapien
ctttgcttgctatggcatcggcccc

SEQ ID NO: 3942161 - DNA, 25 bp, Homo sapien
tcgctgtcatgtcgctgcacatggt

SEQ ID NO: 3942162 - DNA, 25 bp, Homo sapien
gatgtgctttattaatgaggagacc

SEQ ID NO: 3942163 - DNA, 25 bp, Homo sapien
tcttctcctcctcctctccagcatc

SEQ ID NO: 3942164 - DNA, 25 bp, Homo sapien
ctcttctcctcctcctctccagcat

SEQ ID NO: 3942165 - DNA, 25 bp, Homo sapien
ttctcctcctcctctccagcatccc

SEQ ID NO: 3942166 - DNA, 25 bp, Homo sapien
ctcctcctcctctccagcatcccct

SEQ ID NO: 3942167 - DNA, 25 bp, Homo sapien
caggctgcacctgcgtctgggctgt

SEQ ID NO: 3942168 - DNA, 25 bp, Homo sapien
gggacgcattgccagcctgccctag

SEQ ID NO: 3942169 - DNA, 25 bp, Homo sapien
ttctgggacgcattgccagcctgcc

SEQ ID NO: 3942170 - DNA, 25 bp, Homo sapien
cagcctgccctagcgctggcctcac

SEQ ID NO: 3942171 - DNA, 25 bp, Homo sapien
gcccagttctgggacgcattgccag

SEQ ID NO: 3942172 - DNA, 25 bp, Homo sapien
taaagagacgtggaaatgaaagtgc

SEQ ID NO: 3942173 - DNA, 25 bp, Homo sapien
caggcactctacaggcagcgagggt

SEQ ID NO: 3942174 - DNA, 25 bp, Homo sapien
cagagccttactacggttggagagt

SEQ ID NO: 3942175 - DNA, 25 bp, Homo sapien
aggcacggagcaccacgcggctatc

SEQ ID NO: 3942176 - DNA, 25 bp, Homo sapien
tcagatggtgctgtccttgccccag

SEQ ID NO: 3942177 - DNA, 25 bp, Homo sapien
gggctcagatggtgctgtccttgcc

SEQ ID NO: 3942178 - DNA, 25 bp, Homo sapien
caggaggtgacagaagcggggctca

SEQ ID NO: 3942179 - DNA, 25 bp, Homo sapien
tggtgctgtccttgccccagctcct

SEQ ID NO: 3942180 - DNA, 25 bp, Homo sapien
aaggtgatgttctcgttgaaccgga

SEQ ID NO: 3942181 - DNA, 25 bp, Homo sapien
aaccggaggctgtcgtcgcgctcct

SEQ ID NO: 3942182 - DNA, 25 bp, Homo sapien
gttctcgttgaaccggaggctgtcg

SEQ ID NO: 3942183 - DNA, 25 bp, Homo sapien
cccagctgcccgaaggtgatgttct

SEQ ID NO: 3942184 - DNA, 25 bp, Homo sapien
agcttcttgttcagtccaaaggcca

SEQ ID NO: 3942185 - DNA, 25 bp, Homo sapien
ccaaaggccagcatgttgtgcgtga

SEQ ID NO: 3942186 - DNA, 25 bp, Homo sapien
cttcatccaggttgccaatcacagc

SEQ ID NO: 3942187 - DNA, 25 bp, Homo sapien
cttcttcaggaagtcattgcacagc

SEQ ID NO: 3942188 - DNA, 25 bp, Homo sapien
tgtcccccgatactcatgatggcag

SEQ ID NO: 3942189 - DNA, 25 bp, Homo sapien
ttgtcccccgatactcatgatggca

SEQ ID NO: 3942190 - DNA, 25 bp, Homo sapien
ccttgtcccccgatactcatgatgg

SEQ ID NO: 3942191 - DNA, 25 bp, Homo sapien
cccccgatactcatgatggcagtgt

SEQ ID NO: 3942192 - DNA, 25 bp, Homo sapien
taagtgtaagtccttttcgatgaag

SEQ ID NO: 3942193 - DNA, 25 bp, Homo sapien
taagtccttttcgatgaagaagaac

SEQ ID NO: 3942194 - DNA, 25 bp, Homo sapien
cttttcgatgaagaagaaccaacgc

SEQ ID NO: 3942195 - DNA, 25 bp, Homo sapien
cacgcctaagtgtaagtccttttcg

SEQ ID NO: 3942196 - DNA, 25 bp, Homo sapien
tgtggtcactaagcagcttgtattg

SEQ ID NO: 3942197 - DNA, 25 bp, Homo sapien
caatgtggtcactaagcagcttgta

SEQ ID NO: 3942198 - DNA, 25 bp, Homo sapien
tggtcactaagcagcttgtattgct

SEQ ID NO: 3942199 - DNA, 25 bp, Homo sapien
gctcaatgtggtcactaagcagctt

SEQ ID NO: 3942200 - DNA, 25 bp, Homo sapien
gcctatttcgcagtcagggaccacg

SEQ ID NO: 3942201 - DNA, 25 bp, Homo sapien
tgactaagaacgctgacgacgaggc

SEQ ID NO: 3942202 - DNA, 25 bp, Homo sapien
cacgcacggtgaaacagaaggctct

SEQ ID NO: 3942203 - DNA, 25 bp, Homo sapien
tggttcactaggattggcacagccc

SEQ ID NO: 3942204 - DNA, 25 bp, Homo sapien
tctgtggtcttagcctgtgcgagcc

SEQ ID NO: 3942205 - DNA, 25 bp, Homo sapien
ctggcccgcggcagcaagggttcct

SEQ ID NO: 3942206 - DNA, 25 bp, Homo sapien
ggcctgtgtggctccgggaagccct

SEQ ID NO: 3942207 - DNA, 25 bp, Homo sapien
gtgcagctggcatccgactcccctt

SEQ ID NO: 3942208 - DNA, 25 bp, Homo sapien
caggttcaagaaggcggcaggtcaa

SEQ ID NO: 3942209 - DNA, 25 bp, Homo sapien
gagacgccactgatagttccaacgg

SEQ ID NO: 3942210 - DNA, 25 bp, Homo sapien
taatgtctggatgtgagcaccgcga

SEQ ID NO: 3942211 - DNA, 25 bp, Homo sapien
tttgtagaacatcaccgagcgggac

SEQ ID NO: 3942212 - DNA, 25 bp, Homo sapien
gggctacggtcattgccttcaaaag

SEQ ID NO: 3942213 - DNA, 25 bp, Homo sapien
gccacagaaatagccctcagcaaga

SEQ ID NO: 3942214 - DNA, 25 bp, Homo sapien
gcttcaaaggaattaatacggtata

SEQ ID NO: 3942215 - DNA, 25 bp, Homo sapien
tacggtatatgctttcctggatttg

SEQ ID NO: 3942216 - DNA, 25 bp, Homo sapien
ggagtaaagtatctgtcctgctgtc

SEQ ID NO: 3942217 - DNA, 25 bp, Homo sapien
ctggatcaggcccagtgtctgaagg

SEQ ID NO: 3942218 - DNA, 25 bp, Homo sapien
aggagtaaagtatctgtcctgctgt

SEQ ID NO: 3942219 - DNA, 25 bp, Homo sapien
tggaactgcatcccggcttggaaat

SEQ ID NO: 3942220 - DNA, 25 bp, Homo sapien
ctggaactgcatcccggcttggaaa

SEQ ID NO: 3942221 - DNA, 25 bp, Homo sapien
actgcatcccggcttggaaatgggc

SEQ ID NO: 3942222 - DNA, 25 bp, Homo sapien
gaactgcatcccggcttggaaatgg

SEQ ID NO: 3942223 - DNA, 25 bp, Homo sapien
ttcccagatgtgcaccgcgggtgat

SEQ ID NO: 3942224 - DNA, 25 bp, Homo sapien
tgataaaaggcgcactggttcctgt

SEQ ID NO: 3942225 - DNA, 25 bp, Homo sapien
cagatgtttgcaacgtgtgcgctgg

SEQ ID NO: 3942226 - DNA, 25 bp, Homo sapien
aggcaccgggatggcctggctggct

SEQ ID NO: 3942227 - DNA, 25 bp, Homo sapien
caggaaagaggtgccggcagctttc

SEQ ID NO: 3942228 - DNA, 25 bp, Homo sapien
aggaaagaggtgccggcagctttca

SEQ ID NO: 3942229 - DNA, 25 bp, Homo sapien
acaggaaagaggtgccggcagcttt

SEQ ID NO: 3942230 - DNA, 25 bp, Homo sapien
gtcccagttttgcccgaggctgtcc

SEQ ID NO: 3942231 - DNA, 25 bp, Homo sapien
ctgtttcgaggcacggggtccacgt

SEQ ID NO: 3942232 - DNA, 25 bp, Homo sapien
gggtccacgtgtctctcacagatgg

SEQ ID NO: 3942233 - DNA, 25 bp, Homo sapien
ggcagctgttgcacaaaggtgttcc

SEQ ID NO: 3942234 - DNA, 25 bp, Homo sapien
tcacagatgggccacggcagctgtt

SEQ ID NO: 3942235 - DNA, 25 bp, Homo sapien
cctggaagttcgtaccgctggagtc

SEQ ID NO: 3942236 - DNA, 25 bp, Homo sapien
gactgcactgaacgccactgaattg

SEQ ID NO: 3942237 - DNA, 25 bp, Homo sapien
gcaaaggttacacgagatgccccag

SEQ ID NO: 3942238 - DNA, 25 bp, Homo sapien
gatatttggatcgttgccagctcga

SEQ ID NO: 3942239 - DNA, 25 bp, Homo sapien
tcttggctgcttcttggggagcagc

SEQ ID NO: 3942240 - DNA, 25 bp, Homo sapien
cagcccttgcaaccccatcttggct

SEQ ID NO: 3942241 - DNA, 25 bp, Homo sapien
tgcacacgtgcagcccttgcaaccc

SEQ ID NO: 3942242 - DNA, 25 bp, Homo sapien
gtgcagcccttgcaaccccatcttg

SEQ ID NO: 3942243 - DNA, 25 bp, Homo sapien
aaacagccatggacaggtgccgcgg

SEQ ID NO: 3942244 - DNA, 25 bp, Homo sapien
tggaaaacagccatggacaggtgcc

SEQ ID NO: 3942245 - DNA, 25 bp, Homo sapien
gaaaacagccatggacaggtgccgc

SEQ ID NO: 3942246 - DNA, 25 bp, Homo sapien
gctgggggggcttagcagagggtaa

SEQ ID NO: 3942247 - DNA, 25 bp, Homo sapien
tgagtcaccgaagcatgttccaaac

SEQ ID NO: 3942248 - DNA, 25 bp, Homo sapien
tcttcatacgtgtacagcaagctgc

SEQ ID NO: 3942249 - DNA, 25 bp, Homo sapien
gaagtgtcgcctccgtacagaaaag

SEQ ID NO: 3942250 - DNA, 25 bp, Homo sapien
gactgaggcatgtgtctgacgctac

SEQ ID NO: 3942251 - DNA, 25 bp, Homo sapien
tacctgtaggttcgtcttagcccag

SEQ ID NO: 3942252 - DNA, 25 bp, Homo sapien
ttagcccagaaaccgcaggtatctg

SEQ ID NO: 3942253 - DNA, 25 bp, Homo sapien
tttgcagctacctgtaggttcgtct

SEQ ID NO: 3942254 - DNA, 25 bp, Homo sapien
ttcgtcttagcccagaaaccgcagg

SEQ ID NO: 3942255 - DNA, 25 bp, Homo sapien
tcattggttgggactttgggccttc

SEQ ID NO: 3942256 - DNA, 25 bp, Homo sapien
ccagaggaatgctgtgtcagcaaaa

SEQ ID NO: 3942257 - DNA, 25 bp, Homo sapien
ggccttcaccctggcccagaggaat

SEQ ID NO: 3942258 - DNA, 25 bp, Homo sapien
gcaaaactgtcctgaaggaatgttg

SEQ ID NO: 3942259 - DNA, 25 bp, Homo sapien
tgccgccgccgcagatgaagcagga

SEQ ID NO: 3942260 - DNA, 25 bp, Homo sapien
atgccgccgccgcagatgaagcagg

SEQ ID NO: 3942261 - DNA, 25 bp, Homo sapien
cttgccgcgcccgatgccgccgccg

SEQ ID NO: 3942262 - DNA, 25 bp, Homo sapien
ttcagctccttgccgcgcccgatgc

SEQ ID NO: 3942263 - DNA, 25 bp, Homo sapien
gggcgcgctcgaaggcggcccactg

SEQ ID NO: 3942264 - DNA, 25 bp, Homo sapien
agcggcacacggcgcacaccaacac

SEQ ID NO: 3942265 - DNA, 25 bp, Homo sapien
aggcggcccactgctcgcccaggaa

SEQ ID NO: 3942266 - DNA, 25 bp, Homo sapien
acaccaacacgcagccgtcggccgg

SEQ ID NO: 3942267 - DNA, 25 bp, Homo sapien
gcctgcgcccgcgtcgcactggtgg

SEQ ID NO: 3942268 - DNA, 25 bp, Homo sapien
cgcgtaggcgacgttccactcgcgg

SEQ ID NO: 3942269 - DNA, 25 bp, Homo sapien
tggtggggccgcttgagccagtaca

SEQ ID NO: 3942270 - DNA, 25 bp, Homo sapien
gccggtggcgctgcccagcgcgtag

SEQ ID NO: 3942271 - DNA, 25 bp, Homo sapien
gctccgacaggtcggagtctcgcgt

SEQ ID NO: 3942272 - DNA, 25 bp, Homo sapien
agctccgacaggtcggagtctcgcg

SEQ ID NO: 3942273 - DNA, 25 bp, Homo sapien
ggctggcggcgtcccgcgcgggcgg

SEQ ID NO: 3942274 - DNA, 25 bp, Homo sapien
gagcgggtcccggagccggcctcca

SEQ ID NO: 3942275 - DNA, 25 bp, Homo sapien
ggagccggcctccactcctggccgc

SEQ ID NO: 3942276 - DNA, 25 bp, Homo sapien
ctggtgggggctggcggcgtcccgc

SEQ ID NO: 3942277 - DNA, 25 bp, Homo sapien
gaatgctcctcaggacgctggcccg

SEQ ID NO: 3942278 - DNA, 25 bp, Homo sapien
aggccctttcatgccgtctgcaggg

SEQ ID NO: 3942279 - DNA, 25 bp, Homo sapien
cctgggaaaggctgttccttgtggt

SEQ ID NO: 3942280 - DNA, 25 bp, Homo sapien
tcttggacaagagggccttgccagg

SEQ ID NO: 3942281 - DNA, 25 bp, Homo sapien
cttctgcacgtggacctggtggtgc

SEQ ID NO: 3942282 - DNA, 25 bp, Homo sapien
gtactgccgccctcgctgatgggct

SEQ ID NO: 3942283 - DNA, 25 bp, Homo sapien
aagcagctggcgcacaccaaggtac

SEQ ID NO: 3942284 - DNA, 25 bp, Homo sapien
gccccgcagatgtagcagcaaaggc

SEQ ID NO: 3942285 - DNA, 25 bp, Homo sapien
tcctgcccttagaggccatgccggg

SEQ ID NO: 3942286 - DNA, 25 bp, Homo sapien
agcctcctgcccttagaggccatgc

SEQ ID NO: 3942287 - DNA, 25 bp, Homo sapien
gagcctcctgcccttagaggccatg

SEQ ID NO: 3942288 - DNA, 25 bp, Homo sapien
cctcctgcccttagaggccatgccg

SEQ ID NO: 3942289 - DNA, 25 bp, Homo sapien
tgatgagctcctcgttctggcaggc

SEQ ID NO: 3942290 - DNA, 25 bp, Homo sapien
cttgctcgcagggtgtataggaaca

SEQ ID NO: 3942291 - DNA, 25 bp, Homo sapien
tcagccccacagatgtagcagatgg

SEQ ID NO: 3942292 - DNA, 25 bp, Homo sapien
aaatgcatggcgctcctggcgttgc

SEQ ID NO: 3942293 - DNA, 25 bp, Homo sapien
gtcccttgcaaagccggatcccaaa

SEQ ID NO: 3942294 - DNA, 25 bp, Homo sapien
tgagccccgtctggctcctcgcggg

SEQ ID NO: 3942295 - DNA, 25 bp, Homo sapien
gcttggtcccttgcaaagccggatc

SEQ ID NO: 3942296 - DNA, 25 bp, Homo sapien
gcaaagccggatcccaaattaactg

SEQ ID NO: 3942297 - DNA, 25 bp, Homo sapien
gccacaaagacagcttgaaagtcca

SEQ ID NO: 3942298 - DNA, 25 bp, Homo sapien
ctgtgacgggagacgacgtgctcat

SEQ ID NO: 3942299 - DNA, 25 bp, Homo sapien
aagctgtcatcagtagaaaaggaaa

SEQ ID NO: 3942300 - DNA, 25 bp, Homo sapien
ttaaaacgagagaccatcccaccaa

SEQ ID NO: 3942301 - DNA, 25 bp, Homo sapien
gctgcactgctatatgccgaagagg

SEQ ID NO: 3942302 - DNA, 25 bp, Homo sapien
aggggctgcactgctatatgccgaa

SEQ ID NO: 3942303 - DNA, 25 bp, Homo sapien
gcactgctatatgccgaagaggaga

SEQ ID NO: 3942304 - DNA, 25 bp, Homo sapien
gggctgcactgctatatgccgaaga

SEQ ID NO: 3942305 - DNA, 25 bp, Homo sapien
tcttggacaacagggctgaacccag

SEQ ID NO: 3942306 - DNA, 25 bp, Homo sapien
caccatggggctcacacgtgaggcc

SEQ ID NO: 3942307 - DNA, 25 bp, Homo sapien
gccgccaggggagtgacaccttgtc

SEQ ID NO: 3942308 - DNA, 25 bp, Homo sapien
acacgtgaggccacctgaaggccag

SEQ ID NO: 3942309 - DNA, 25 bp, Homo sapien
tgtgcagaacacgtcaacagctttg

SEQ ID NO: 3942310 - DNA, 25 bp, Homo sapien
gcttagcaaatatgccagtgcctgg

SEQ ID NO: 3942311 - DNA, 25 bp, Homo sapien
tcctgagggaaaacatgactttgca

SEQ ID NO: 3942312 - DNA, 25 bp, Homo sapien
gagtgagttcgccatccctggaagg

SEQ ID NO: 3942313 - DNA, 25 bp, Homo sapien
ccagtgggtattccaagcgtgctca

SEQ ID NO: 3942314 - DNA, 25 bp, Homo sapien
caaagcgactgttggagtagagaaa

SEQ ID NO: 3942315 - DNA, 25 bp, Homo sapien
tggccacctggcaatcatgaaacca

SEQ ID NO: 3942316 - DNA, 25 bp, Homo sapien
gatctggccaatatgctcagaacca

SEQ ID NO: 3942317 - DNA, 25 bp, Homo sapien
gaaatcaggacaaaatctcacgatg

SEQ ID NO: 3942318 - DNA, 25 bp, Homo sapien
aatgtgaaatcaggacaaaatctca

SEQ ID NO: 3942319 - DNA, 25 bp, Homo sapien
caggacaaaatctcacgatgggtgg

SEQ ID NO: 3942320 - DNA, 25 bp, Homo sapien
cactgtacccaacctgttttacatg

SEQ ID NO: 3942321 - DNA, 25 bp, Homo sapien
aatgcccctccgtctctcagatgag

SEQ ID NO: 3942322 - DNA, 25 bp, Homo sapien
ccagaacagtgagaacggaggaaca

SEQ ID NO: 3942323 - DNA, 25 bp, Homo sapien
gataaggtcccactctaacacccag

SEQ ID NO: 3942324 - DNA, 25 bp, Homo sapien
aaagtagccctcctgattcacctgg

SEQ ID NO: 3942325 - DNA, 25 bp, Homo sapien
tacactgtaaccagagggctcccta

SEQ ID NO: 3942326 - DNA, 25 bp, Homo sapien
ttaccaagatgtgccagatgccggg

SEQ ID NO: 3942327 - DNA, 25 bp, Homo sapien
aacccgttttgaagtccgatggctg

SEQ ID NO: 3942328 - DNA, 25 bp, Homo sapien
gggtcactcttgtttgcgagggcat

SEQ ID NO: 3942329 - DNA, 25 bp, Homo sapien
ctttccgggacagtctcagcagtgc

SEQ ID NO: 3942330 - DNA, 25 bp, Homo sapien
ttccgggacagtctcagcagtgcgg

SEQ ID NO: 3942331 - DNA, 25 bp, Homo sapien
tttccgggacagtctcagcagtgcg

SEQ ID NO: 3942332 - DNA, 25 bp, Homo sapien
tccgggacagtctcagcagtgcggt

SEQ ID NO: 3942333 - DNA, 25 bp, Homo sapien
gagaaccacgctgatttttgctcca

SEQ ID NO: 3942334 - DNA, 25 bp, Homo sapien
acgagaaccacgctgatttttgctc

SEQ ID NO: 3942335 - DNA, 25 bp, Homo sapien
atttttgctccaacagccccgtggg

SEQ ID NO: 3942336 - DNA, 25 bp, Homo sapien
gctggcggtgctacccggacaaacc

SEQ ID NO: 3942337 - DNA, 25 bp, Homo sapien
tgaatagaatgtcccaatgtcatcc

SEQ ID NO: 3942338 - DNA, 25 bp, Homo sapien
gaatgtcccaatgtcatcctttttg

SEQ ID NO: 3942339 - DNA, 25 bp, Homo sapien
cttctgaatagaatgtcccaatgtc

SEQ ID NO: 3942340 - DNA, 25 bp, Homo sapien
tagaatgtcccaatgtcatcctttt

SEQ ID NO: 3942341 - DNA, 25 bp, Homo sapien
gataaaggtgaggttggcgagccca

SEQ ID NO: 3942342 - DNA, 25 bp, Homo sapien
ataaaggtgaggttggcgagcccac

SEQ ID NO: 3942343 - DNA, 25 bp, Homo sapien
cccagtgtagagccctggagccaaa

SEQ ID NO: 3942344 - DNA, 25 bp, Homo sapien
gtgtagagccctggagccaaagagg

SEQ ID NO: 3942345 - DNA, 25 bp, Homo sapien
cagtgtagagccctggagccaaaga

SEQ ID NO: 3942346 - DNA, 25 bp, Homo sapien
ccccagtgtagagccctggagccaa

SEQ ID NO: 3942347 - DNA, 25 bp, Homo sapien
gccagggcttctggccgagaggagc

SEQ ID NO: 3942348 - DNA, 25 bp, Homo sapien
cccgcagagcggagcctgagtgagg

SEQ ID NO: 3942349 - DNA, 25 bp, Homo sapien
ctggcccgcagagcggagcctgagt

SEQ ID NO: 3942350 - DNA, 25 bp, Homo sapien
gggggtcccagattcggctccacat

SEQ ID NO: 3942351 - DNA, 25 bp, Homo sapien
gccggcacggaccaggtcctcagca

SEQ ID NO: 3942352 - DNA, 25 bp, Homo sapien
ggggccggcacggaccaggtcctca

SEQ ID NO: 3942353 - DNA, 25 bp, Homo sapien
ccaggtcctcagcaggaacctgctg

SEQ ID NO: 3942354 - DNA, 25 bp, Homo sapien
agaccttcccagttggaatccagga

SEQ ID NO: 3942355 - DNA, 25 bp, Homo sapien
gtcccagtgcatctgtcatgtccac

SEQ ID NO: 3942356 - DNA, 25 bp, Homo sapien
gcatctgtcatgtccactgccatca

SEQ ID NO: 3942357 - DNA, 25 bp, Homo sapien
aggtcccagtgcatctgtcatgtcc

SEQ ID NO: 3942358 - DNA, 25 bp, Homo sapien
tgcatctgtcatgtccactgccatc

SEQ ID NO: 3942359 - DNA, 25 bp, Homo sapien
actgatgattccttccgccagcgac

SEQ ID NO: 3942360 - DNA, 25 bp, Homo sapien
tgccacgggcgatggctgagaactc

SEQ ID NO: 3942361 - DNA, 25 bp, Homo sapien
tccgcagaccgttcagggagcactg

SEQ ID NO: 3942362 - DNA, 25 bp, Homo sapien
tggcggagtgcatccccagcatgtg

SEQ ID NO: 3942363 - DNA, 25 bp, Homo sapien
ccgcctcgccgtatggatgactgaa

SEQ ID NO: 3942364 - DNA, 25 bp, Homo sapien
gaagtgaggccctaaggaactccca

SEQ ID NO: 3942365 - DNA, 25 bp, Homo sapien
gtctaaggtgacacagcgcggcagt

SEQ ID NO: 3942366 - DNA, 25 bp, Homo sapien
ggctcgccgccagtgacttgtctaa

SEQ ID NO: 3942367 - DNA, 25 bp, Homo sapien
tgatgcgtgtgagtccaggctctag

SEQ ID NO: 3942368 - DNA, 25 bp, Homo sapien
gacacgtgacacttcggctcggaaa

SEQ ID NO: 3942369 - DNA, 25 bp, Homo sapien
gctggctgttgcaatccgtgcagga

SEQ ID NO: 3942370 - DNA, 25 bp, Homo sapien
ttgctgactatcacacacgggctgg

SEQ ID NO: 3942371 - DNA, 25 bp, Homo sapien
ttaaggggtcggaatgatggtggaa

SEQ ID NO: 3942372 - DNA, 25 bp, Homo sapien
gaacgagagagaaggggcagaagcc

SEQ ID NO: 3942373 - DNA, 25 bp, Homo sapien
ggctgggccaccctctcgctcagtc

SEQ ID NO: 3942374 - DNA, 25 bp, Homo sapien
ctgggctgggccaccctctcgctca

SEQ ID NO: 3942375 - DNA, 25 bp, Homo sapien
tgctgcccacctgttccaaaggaag

SEQ ID NO: 3942376 - DNA, 25 bp, Homo sapien
cctgttccaaaggaagtcctgtcac

SEQ ID NO: 3942377 - DNA, 25 bp, Homo sapien
ggaaatgctgcccacctgttccaaa

SEQ ID NO: 3942378 - DNA, 25 bp, Homo sapien
tgcccacctgttccaaaggaagtcc

SEQ ID NO: 3942379 - DNA, 25 bp, Homo sapien
ccctggcaaaccagccgcacagtgg

SEQ ID NO: 3942380 - DNA, 25 bp, Homo sapien
ggcaaaccagccgcacagtggggct

SEQ ID NO: 3942381 - DNA, 25 bp, Homo sapien
ctgcagatgccgaccctgtgaccat

SEQ ID NO: 3942382 - DNA, 25 bp, Homo sapien
cctggcaaaccagccgcacagtggg

SEQ ID NO: 3942383 - DNA, 25 bp, Homo sapien
ttgtttgatccgacaaagagatgtt

SEQ ID NO: 3942384 - DNA, 25 bp, Homo sapien
gcagagacggagacacgtttttaat

SEQ ID NO: 3942385 - DNA, 25 bp, Homo sapien
gtttgatccgacaaagagatgttgg

SEQ ID NO: 3942386 - DNA, 25 bp, Homo sapien
tcccggcagtccacgcagagacgga

SEQ ID NO: 3942387 - DNA, 25 bp, Homo sapien
ttatgttcctcttttgcatgcaaaa

SEQ ID NO: 3942388 - DNA, 25 bp, Homo sapien
aatttttatgttcctcttttgcatg

SEQ ID NO: 3942389 - DNA, 25 bp, Homo sapien
tttatgttcctcttttgcatgcaaa

SEQ ID NO: 3942390 - DNA, 25 bp, Homo sapien
tttttatgttcctcttttgcatgca

SEQ ID NO: 3942391 - DNA, 25 bp, Homo sapien
ccaccgttgaggtccgtgagaagag

SEQ ID NO: 3942392 - DNA, 25 bp, Homo sapien
tgagaagaggcctgcgtgcagtagc

SEQ ID NO: 3942393 - DNA, 25 bp, Homo sapien
agaggcctgcgtgcagtagccttca

SEQ ID NO: 3942394 - DNA, 25 bp, Homo sapien
gtccgtgagaagaggcctgcgtgca

SEQ ID NO: 3942395 - DNA, 25 bp, Homo sapien
gggatggcgagtgtcgcaccctccc

SEQ ID NO: 3942396 - DNA, 25 bp, Homo sapien
cacaactccccagcggatgtgtttc

SEQ ID NO: 3942397 - DNA, 25 bp, Homo sapien
tgtgctccacaactccccagcggat

SEQ ID NO: 3942398 - DNA, 25 bp, Homo sapien
ggatggcgagtgtcgcaccctccca

SEQ ID NO: 3942399 - DNA, 25 bp, Homo sapien
tgtatcgaaggccaacgccttgctt

SEQ ID NO: 3942400 - DNA, 25 bp, Homo sapien
caagggatgtatcgaaggccaacgc

SEQ ID NO: 3942401 - DNA, 25 bp, Homo sapien
tgctttatgtctccccagcaccgcc

SEQ ID NO: 3942402 - DNA, 25 bp, Homo sapien
ctcccaagggatgtatcgaaggcca

SEQ ID NO: 3942403 - DNA, 25 bp, Homo sapien
agtgggatccgctagctcagagcca

SEQ ID NO: 3942404 - DNA, 25 bp, Homo sapien
gaaacgtcactatccagagttgctg

SEQ ID NO: 3942405 - DNA, 25 bp, Homo sapien
ggaggtggtgctcatgtgatcccca

SEQ ID NO: 3942406 - DNA, 25 bp, Homo sapien
gcctcctggcgttgggaacgtcaca

SEQ ID NO: 3942407 - DNA, 25 bp, Homo sapien
tacagatgtctggtcccatctctga

SEQ ID NO: 3942408 - DNA, 25 bp, Homo sapien
cccatctacagatgtctggtcccat

SEQ ID NO: 3942409 - DNA, 25 bp, Homo sapien
gatgtctggtcccatctctgagggt

SEQ ID NO: 3942410 - DNA, 25 bp, Homo sapien
catctacagatgtctggtcccatct

SEQ ID NO: 3942411 - DNA, 25 bp, Homo sapien
ggggagttctgcaagggcaggtggc

SEQ ID NO: 3942412 - DNA, 25 bp, Homo sapien
agttcattcggggagttctgcaagg

SEQ ID NO: 3942413 - DNA, 25 bp, Homo sapien
ggagttctgcaagggcaggtggctg

SEQ ID NO: 3942414 - DNA, 25 bp, Homo sapien
tcattcggggagttctgcaagggca

SEQ ID NO: 3942415 - DNA, 25 bp, Homo sapien
gtgttgggtccaacagcaccacagg

SEQ ID NO: 3942416 - DNA, 25 bp, Homo sapien
ccccaggcctgtgttgggtccaaca

SEQ ID NO: 3942417 - DNA, 25 bp, Homo sapien
cctgtgttgggtccaacagcaccac

SEQ ID NO: 3942418 - DNA, 25 bp, Homo sapien
ttgggtccaacagcaccacaggcca

SEQ ID NO: 3942419 - DNA, 25 bp, Homo sapien
gggcagaggatgtctccggaacacc

SEQ ID NO: 3942420 - DNA, 25 bp, Homo sapien
ccaagggctgacgaaactgcagcac

SEQ ID NO: 3942421 - DNA, 25 bp, Homo sapien
aacaccgccccccttggatggctgc

SEQ ID NO: 3942422 - DNA, 25 bp, Homo sapien
gagccaagggctgacgaaactgcag

SEQ ID NO: 3942423 - DNA, 25 bp, Homo sapien
aggacacacgccgaggccagggcgg

SEQ ID NO: 3942424 - DNA, 25 bp, Homo sapien
gagatcctgcggcaagccgcctgga

SEQ ID NO: 3942425 - DNA, 25 bp, Homo sapien
gccccttcccaggacacacgccgag

SEQ ID NO: 3942426 - DNA, 25 bp, Homo sapien
gatcctgcggcaagccgcctggagc

SEQ ID NO: 3942427 - DNA, 25 bp, Homo sapien
tagggtgaaaaccatcagccctgct

SEQ ID NO: 3942428 - DNA, 25 bp, Homo sapien
catggaagatggaaacggcctcctc

SEQ ID NO: 3942429 - DNA, 25 bp, Homo sapien
gagaagcaacgagcccaaggtctcg

SEQ ID NO: 3942430 - DNA, 25 bp, Homo sapien
ggtcacgcagctaggaagtatcaga

SEQ ID NO: 3942431 - DNA, 25 bp, Homo sapien
cagcggggtccccacaagatgagca

SEQ ID NO: 3942432 - DNA, 25 bp, Homo sapien
gcggggtccccacaagatgagcagc

SEQ ID NO: 3942433 - DNA, 25 bp, Homo sapien
ctgcccagcggggtccccacaagat

SEQ ID NO: 3942434 - DNA, 25 bp, Homo sapien
gcccagcggggtccccacaagatga

SEQ ID NO: 3942435 - DNA, 25 bp, Homo sapien
aaggggccaagtcagagacgggctc

SEQ ID NO: 3942436 - DNA, 25 bp, Homo sapien
ggccaagtcagagacgggctctggg

SEQ ID NO: 3942437 - DNA, 25 bp, Homo sapien
tagggaaggggccaagtcagagacg

SEQ ID NO: 3942438 - DNA, 25 bp, Homo sapien
agggaaggggccaagtcagagacgg

SEQ ID NO: 3942439 - DNA, 25 bp, Homo sapien
ttctgcgaggggtccccgctatccc

SEQ ID NO: 3942440 - DNA, 25 bp, Homo sapien
aggcccacagagtgctggcccgact

SEQ ID NO: 3942441 - DNA, 25 bp, Homo sapien
gtgccacagtcctcgctgtgagcat

SEQ ID NO: 3942442 - DNA, 25 bp, Homo sapien
actgggcctccgcaagtgccacagt

SEQ ID NO: 3942443 - DNA, 25 bp, Homo sapien
tgctgttgctccacggagtgacaat

SEQ ID NO: 3942444 - DNA, 25 bp, Homo sapien
cggagtgacaatccgtgagaagtct

SEQ ID NO: 3942445 - DNA, 25 bp, Homo sapien
caatccgtgagaagtcttggtgctg

SEQ ID NO: 3942446 - DNA, 25 bp, Homo sapien
tgaaacgggctgacggcagcctcac

SEQ ID NO: 3942447 - DNA, 25 bp, Homo sapien
cggttgtgtgcagccccctaatgca

SEQ ID NO: 3942448 - DNA, 25 bp, Homo sapien
ccctaatgcagacaggagccgggtg

SEQ ID NO: 3942449 - DNA, 25 bp, Homo sapien
gctgcattactcaggccccttgatg

SEQ ID NO: 3942450 - DNA, 25 bp, Homo sapien
gggataggggttccgcacacccagc

SEQ ID NO: 3942451 - DNA, 25 bp, Homo sapien
ggaagctggcaacagcgaccgccgc

SEQ ID NO: 3942452 - DNA, 25 bp, Homo sapien
tgggcccatctgctccggcaccggg

SEQ ID NO: 3942453 - DNA, 25 bp, Homo sapien
tctgctccggcaccgggatccggtg

SEQ ID NO: 3942454 - DNA, 25 bp, Homo sapien
gagccggaagctggcaacagcgacc

SEQ ID NO: 3942455 - DNA, 25 bp, Homo sapien
tccagaaagggccagctctgagcac

SEQ ID NO: 3942456 - DNA, 25 bp, Homo sapien
gcacacccgtggcttctccagaaag

SEQ ID NO: 3942457 - DNA, 25 bp, Homo sapien
gaaagggccagctctgagcacggct

SEQ ID NO: 3942458 - DNA, 25 bp, Homo sapien
agggccagctctgagcacggctcca

SEQ ID NO: 3942459 - DNA, 25 bp, Homo sapien
caggtctgtgtctgcggatcggctg

SEQ ID NO: 3942460 - DNA, 25 bp, Homo sapien
gtgtctgcggatcggctgatgctcc

SEQ ID NO: 3942461 - DNA, 25 bp, Homo sapien
tctgtgtctgcggatcggctgatgc

SEQ ID NO: 3942462 - DNA, 25 bp, Homo sapien
tgcggatcggctgatgctccatgtc

SEQ ID NO: 3942463 - DNA, 25 bp, Homo sapien
gggacccgctgaccccagcaggaag

SEQ ID NO: 3942464 - DNA, 25 bp, Homo sapien
aaggagccccgaggtggaggccagg

SEQ ID NO: 3942465 - DNA, 25 bp, Homo sapien
gccaggaggaatccacaggccagtc

SEQ ID NO: 3942466 - DNA, 25 bp, Homo sapien
ccatgggctctagggacccgctgac

SEQ ID NO: 3942467 - DNA, 25 bp, Homo sapien
cagcttgaattcagaccccggactt

SEQ ID NO: 3942468 - DNA, 25 bp, Homo sapien
attcagaccccggacttcagccagg

SEQ ID NO: 3942469 - DNA, 25 bp, Homo sapien
ttcagaccccggacttcagccaggg

SEQ ID NO: 3942470 - DNA, 25 bp, Homo sapien
cttgaattcagaccccggacttcag

SEQ ID NO: 3942471 - DNA, 25 bp, Homo sapien
gggctcaggtgctcaggaggcccca

SEQ ID NO: 3942472 - DNA, 25 bp, Homo sapien
ggctcaggtgctcaggaggccccat

SEQ ID NO: 3942473 - DNA, 25 bp, Homo sapien
ccaggcactggagcaaacccagatg

SEQ ID NO: 3942474 - DNA, 25 bp, Homo sapien
tgtcaccgccgatgttctctgcttc

SEQ ID NO: 3942475 - DNA, 25 bp, Homo sapien
acctgggcaggcaacgccaggacct

SEQ ID NO: 3942476 - DNA, 25 bp, Homo sapien
caattcagcccgaggacccacggga

SEQ ID NO: 3942477 - DNA, 25 bp, Homo sapien
gcccacggtgaccaggtaggaggga

SEQ ID NO: 3942478 - DNA, 25 bp, Homo sapien
ctgaaaaccacgtccatgcaccttg

SEQ ID NO: 3942479 - DNA, 25 bp, Homo sapien
gcaccttggttttgcccacggtgac

SEQ ID NO: 3942480 - DNA, 25 bp, Homo sapien
accacgtccatgcaccttggttttg

SEQ ID NO: 3942481 - DNA, 25 bp, Homo sapien
catgagaactctgaaccgggctttc

SEQ ID NO: 3942482 - DNA, 25 bp, Homo sapien
aacacacatgagaactctgaaccgg

SEQ ID NO: 3942483 - DNA, 25 bp, Homo sapien
tctgaaccgggctttcagcaaaaaa

SEQ ID NO: 3942484 - DNA, 25 bp, Homo sapien
tgaaccgggctttcagcaaaaaaca

SEQ ID NO: 3942485 - DNA, 25 bp, Homo sapien
gagccttggaagcagatccccctgc

SEQ ID NO: 3942486 - DNA, 25 bp, Homo sapien
aaccatgcgcctaccgtgggaggga

SEQ ID NO: 3942487 - DNA, 25 bp, Homo sapien
ggtcatccaagcagccttgtgcaga

SEQ ID NO: 3942488 - DNA, 25 bp, Homo sapien
ggagacaggaaaccatgcgcctacc

SEQ ID NO: 3942489 - DNA, 25 bp, Homo sapien
gctagtacctcccaggttgggccat

SEQ ID NO: 3942490 - DNA, 25 bp, Homo sapien
gggttccagcctctaccctggtcag

SEQ ID NO: 3942491 - DNA, 25 bp, Homo sapien
agtacctcccaggttgggccatcca

SEQ ID NO: 3942492 - DNA, 25 bp, Homo sapien
gggccatccaaggggttccagcctc

SEQ ID NO: 3942493 - DNA, 25 bp, Homo sapien
tccggagagcccgagtgagcaagcc

SEQ ID NO: 3942494 - DNA, 25 bp, Homo sapien
aaaaaggggatccagctgcaagcca

SEQ ID NO: 3942495 - DNA, 25 bp, Homo sapien
ccagaacaaggtgcgtgtgcagccc

SEQ ID NO: 3942496 - DNA, 25 bp, Homo sapien
catttggttaggacgcagcgaggac

SEQ ID NO: 3942497 - DNA, 25 bp, Homo sapien
gggccttcgccaactactctgcctg

SEQ ID NO: 3942498 - DNA, 25 bp, Homo sapien
cagctgcaggacgatagcctgggtc

SEQ ID NO: 3942499 - DNA, 25 bp, Homo sapien
tactctgcctgagttaggccatgcc

SEQ ID NO: 3942500 - DNA, 25 bp, Homo sapien
tgcaggacgatagcctgggtccctc

SEQ ID NO: 3942501 - DNA, 25 bp, Homo sapien
cagccttccccttagtattccatga

SEQ ID NO: 3942502 - DNA, 25 bp, Homo sapien
actgccaggacggcagcggagcagg

SEQ ID NO: 3942503 - DNA, 25 bp, Homo sapien
gacagccttccccttagtattccat

SEQ ID NO: 3942504 - DNA, 25 bp, Homo sapien
tgccaggacggcagcggagcaggca

SEQ ID NO: 3942505 - DNA, 25 bp, Homo sapien
gcttcatgtcacaggcacaccgtgt

SEQ ID NO: 3942506 - DNA, 25 bp, Homo sapien
gaggtaaccctgctgctggtgtaca

SEQ ID NO: 3942507 - DNA, 25 bp, Homo sapien
ctttgagtagtgaagggctggtcca

SEQ ID NO: 3942508 - DNA, 25 bp, Homo sapien
cagcctttactgtggacagggatca

SEQ ID NO: 3942509 - DNA, 25 bp, Homo sapien
cttgtgatgttcagacaaatggcat

SEQ ID NO: 3942510 - DNA, 25 bp, Homo sapien
tgtctgccagggcacgccacgaagt

SEQ ID NO: 3942511 - DNA, 25 bp, Homo sapien
cacgaagtcctgttttcccacgtgg

SEQ ID NO: 3942512 - DNA, 25 bp, Homo sapien
ccacgtggttccttgtgatgttcag

SEQ ID NO: 3942513 - DNA, 25 bp, Homo sapien
taacatgctcggagcacggggccct

SEQ ID NO: 3942514 - DNA, 25 bp, Homo sapien
tcatcaccgcccagtctgctgacct

SEQ ID NO: 3942515 - DNA, 25 bp, Homo sapien
cctttgctggcacttgttcatcacc

SEQ ID NO: 3942516 - DNA, 25 bp, Homo sapien
gagcacggggccctttgctggcact

SEQ ID NO: 3942517 - DNA, 25 bp, Homo sapien
tacttccgtgcctactgtgcgcagg

SEQ ID NO: 3942518 - DNA, 25 bp, Homo sapien
gtgcccggccaatagcgcttatttc

SEQ ID NO: 3942519 - DNA, 25 bp, Homo sapien
tccacaaatacttccgtgcctactg

SEQ ID NO: 3942520 - DNA, 25 bp, Homo sapien
gccaatagcgcttatttcatgatga

SEQ ID NO: 3942521 - DNA, 25 bp, Homo sapien
acagtacaggtgagtccttgtgggg

SEQ ID NO: 3942522 - DNA, 25 bp, Homo sapien
aggcctggacacgagtgtgtcaggg

SEQ ID NO: 3942523 - DNA, 25 bp, Homo sapien
cacagtacaggtgagtccttgtggg

SEQ ID NO: 3942524 - DNA, 25 bp, Homo sapien
ggagctgagctggacacgggtggcc

SEQ ID NO: 3942525 - DNA, 25 bp, Homo sapien
tgccatccccattgcacagagggcg

SEQ ID NO: 3942526 - DNA, 25 bp, Homo sapien
gactctgactggagccatatgccct

SEQ ID NO: 3942527 - DNA, 25 bp, Homo sapien
tcagcacatgacctcctttggaaag

SEQ ID NO: 3942528 - DNA, 25 bp, Homo sapien
tcaggttttcaagagtgggctgctc

SEQ ID NO: 3942529 - DNA, 25 bp, Homo sapien
gattagctgtgattatgtatgccac

SEQ ID NO: 3942530 - DNA, 25 bp, Homo sapien
taaatggcttgtcgctgtcacgtca

SEQ ID NO: 3942531 - DNA, 25 bp, Homo sapien
gagatagcacagtcccaagctggga

SEQ ID NO: 3942532 - DNA, 25 bp, Homo sapien
gctagtgcaaaaccggctgagacca

SEQ ID NO: 3942533 - DNA, 25 bp, Homo sapien
tgtgacctgtcactacctgaatgca

SEQ ID NO: 3942534 - DNA, 25 bp, Homo sapien
gaagaggcgtccagatccaaagctg

SEQ ID NO: 3942535 - DNA, 25 bp, Homo sapien
cagtagtatctagcaggaaaggcca

SEQ ID NO: 3942536 - DNA, 25 bp, Homo sapien
tggcccaatgggatgtccacgcaga

SEQ ID NO: 3942537 - DNA, 25 bp, Homo sapien
catacagtaaagaggcggagccagc

SEQ ID NO: 3942538 - DNA, 25 bp, Homo sapien
cacgggaaactcaaacaagggtcag

SEQ ID NO: 3942539 - DNA, 25 bp, Homo sapien
gaataaccggcagtgaatacgctga

SEQ ID NO: 3942540 - DNA, 25 bp, Homo sapien
taattacatgcgcaggcacgggagt

SEQ ID NO: 3942541 - DNA, 25 bp, Homo sapien
ggtgcagacacctcactaaagcggc

SEQ ID NO: 3942542 - DNA, 25 bp, Homo sapien
caccagtaaggtctggtccgtcctc

SEQ ID NO: 3942543 - DNA, 25 bp, Homo sapien
atgcttccagagatccacaaacagg

SEQ ID NO: 3942544 - DNA, 25 bp, Homo sapien
gcaccagtaaggtctggtccgtcct

SEQ ID NO: 3942545 - DNA, 25 bp, Homo sapien
ccagacggccacttcaaatgcaaca

SEQ ID NO: 3942546 - DNA, 25 bp, Homo sapien
tcagtccgtttgggccttgcctgcc

SEQ ID NO: 3942547 - DNA, 25 bp, Homo sapien
cagccccagggttcctcatggcctt

SEQ ID NO: 3942548 - DNA, 25 bp, Homo sapien
gtccgtttgggccttgcctgccaga

SEQ ID NO: 3942549 - DNA, 25 bp, Homo sapien
gcctcaggttgaggggctgaacccc

SEQ ID NO: 3942550 - DNA, 25 bp, Homo sapien
aaggctacgctctgcaatgaacctg

SEQ ID NO: 3942551 - DNA, 25 bp, Homo sapien
tactgaatgtggtccccaaggacgc

SEQ ID NO: 3942552 - DNA, 25 bp, Homo sapien
tccttctttcgtgttcccagcttga

SEQ ID NO: 3942553 - DNA, 25 bp, Homo sapien
gcacccttacggccctgtggttcca

SEQ ID NO: 3942554 - DNA, 25 bp, Homo sapien
ttgctttctacaagcttcaccttcc

SEQ ID NO: 3942555 - DNA, 25 bp, Homo sapien
gagtccaggtatgcacactgaaagc

SEQ ID NO: 3942556 - DNA, 25 bp, Homo sapien
tggtgtcaaagcactcggcagcgga

SEQ ID NO: 3942557 - DNA, 25 bp, Homo sapien
gagtcacacgctagcaagggaacca

SEQ ID NO: 3942558 - DNA, 25 bp, Homo sapien
gaaaccagatcccagtctaagtagg

SEQ ID NO: 3942559 - DNA, 25 bp, Homo sapien
caggagcactttccacttggggctc

SEQ ID NO: 3942560 - DNA, 25 bp, Homo sapien
ccctggcctggtagcccgaggagca

SEQ ID NO: 3942561 - DNA, 25 bp, Homo sapien
cggtggcctcggtcatcagtcagct

SEQ ID NO: 3942562 - DNA, 25 bp, Homo sapien
agcagcggtggcctcggtcatcagt

SEQ ID NO: 3942563 - DNA, 25 bp, Homo sapien
tggacaaggagccggcatcccatgg

SEQ ID NO: 3942564 - DNA, 25 bp, Homo sapien
ggacaaggagccggcatcccatggc

SEQ ID NO: 3942565 - DNA, 25 bp, Homo sapien
gacaaggagccggcatcccatggcc

SEQ ID NO: 3942566 - DNA, 25 bp, Homo sapien
acaaggagccggcatcccatggcca

SEQ ID NO: 3942567 - DNA, 25 bp, Homo sapien
tgaagatgaggcgggaacctccctc

SEQ ID NO: 3942568 - DNA, 25 bp, Homo sapien
cctggtgaagatgaggcgggaacct

SEQ ID NO: 3942569 - DNA, 25 bp, Homo sapien
gcctggtgaagatgaggcgggaacc

SEQ ID NO: 3942570 - DNA, 25 bp, Homo sapien
gatgaggcgggaacctccctcatgg

SEQ ID NO: 3942571 - DNA, 25 bp, Homo sapien
ctctttgtgacacccgctgcttccc

SEQ ID NO: 3942572 - DNA, 25 bp, Homo sapien
aaacccaccgcttaagccctgcatg

SEQ ID NO: 3942573 - DNA, 25 bp, Homo sapien
tcagggtcttggcatccggctgccc

SEQ ID NO: 3942574 - DNA, 25 bp, Homo sapien
cttcccagatatgggggctggactg

SEQ ID NO: 3942575 - DNA, 25 bp, Homo sapien
gggcagttgctcaggcccaaggaga

SEQ ID NO: 3942576 - DNA, 25 bp, Homo sapien
gttgctcaggcccaaggagaaatcc

SEQ ID NO: 3942577 - DNA, 25 bp, Homo sapien
gaggccaagttggagtgtggggtct

SEQ ID NO: 3942578 - DNA, 25 bp, Homo sapien
tgctcaggcccaaggagaaatccac

SEQ ID NO: 3942579 - DNA, 25 bp, Homo sapien
gaggtcgagctcctcgatcatcccc

SEQ ID NO: 3942580 - DNA, 25 bp, Homo sapien
gatcatccccatttcccggagagag

SEQ ID NO: 3942581 - DNA, 25 bp, Homo sapien
tctgcggccatctcaccatgttctg

SEQ ID NO: 3942582 - DNA, 25 bp, Homo sapien
cagaacagcgggtgcagagcttgtt

SEQ ID NO: 3942583 - DNA, 25 bp, Homo sapien
gggtgcagatgacggagccgataga

SEQ ID NO: 3942584 - DNA, 25 bp, Homo sapien
gatgacggagccgatagagcccttc

SEQ ID NO: 3942585 - DNA, 25 bp, Homo sapien
ggtgggggtctgtctccaagagacg

SEQ ID NO: 3942586 - DNA, 25 bp, Homo sapien
gacggagccgatagagcccttcctg

SEQ ID NO: 3942587 - DNA, 25 bp, Homo sapien
gactcctcacgcagcccttctgcgg

SEQ ID NO: 3942588 - DNA, 25 bp, Homo sapien
cgggactcctcacgcagcccttctg

SEQ ID NO: 3942589 - DNA, 25 bp, Homo sapien
ggactcctcacgcagcccttctgcg

SEQ ID NO: 3942590 - DNA, 25 bp, Homo sapien
ccgccgggactcctcacgcagccct

SEQ ID NO: 3942591 - DNA, 25 bp, Homo sapien
gcctctggcagtggccaggcagtgg

SEQ ID NO: 3942592 - DNA, 25 bp, Homo sapien
gaaggtgttggcaggcagaggagcg

SEQ ID NO: 3942593 - DNA, 25 bp, Homo sapien
agctgcctctggcagtggccaggca

SEQ ID NO: 3942594 - DNA, 25 bp, Homo sapien
gccaggcagtggaaggtgttggcag

SEQ ID NO: 3942595 - DNA, 25 bp, Homo sapien
tgtggcctcccacttgtgtagcgtc

SEQ ID NO: 3942596 - DNA, 25 bp, Homo sapien
gtgtagcgtccggacatccatcctg

SEQ ID NO: 3942597 - DNA, 25 bp, Homo sapien
gtcctgaactgagcagaaatcctgc

SEQ ID NO: 3942598 - DNA, 25 bp, Homo sapien
ggtcctgagaatggcctgaacgtcc

SEQ ID NO: 3942599 - DNA, 25 bp, Homo sapien
atttagtaccgtgacaagcctgggc

SEQ ID NO: 3942600 - DNA, 25 bp, Homo sapien
tcagtctccagatttagtaccgtga

SEQ ID NO: 3942601 - DNA, 25 bp, Homo sapien
cagggtccatgcgaggagatacacg

SEQ ID NO: 3942602 - DNA, 25 bp, Homo sapien
agagaccacatgttccaggcagggt

SEQ ID NO: 3942603 - DNA, 25 bp, Homo sapien
gcaaaggcgatgcaggtgtgaggct

SEQ ID NO: 3942604 - DNA, 25 bp, Homo sapien
gaatttaaatcagaccttcaggagg

SEQ ID NO: 3942605 - DNA, 25 bp, Homo sapien
caggctgagtcagaacccgaaggct

SEQ ID NO: 3942606 - DNA, 25 bp, Homo sapien
tcacacctccttctatgcgggctgg

SEQ ID NO: 3942607 - DNA, 25 bp, Homo sapien
actcggggcggcctgagaggactct

SEQ ID NO: 3942608 - DNA, 25 bp, Homo sapien
cggggcggcctgagaggactctgtg

SEQ ID NO: 3942609 - DNA, 25 bp, Homo sapien
ccactcggggcggcctgagaggact

SEQ ID NO: 3942610 - DNA, 25 bp, Homo sapien
gccccactcggggcggcctgagagg

SEQ ID NO: 3942611 - DNA, 25 bp, Homo sapien
ggcttctgaaagcccgcaaggatgg

SEQ ID NO: 3942612 - DNA, 25 bp, Homo sapien
tctgaaagcccgcaaggatgggggc

SEQ ID NO: 3942613 - DNA, 25 bp, Homo sapien
aaagcccgcaaggatgggggctgtg

SEQ ID NO: 3942614 - DNA, 25 bp, Homo sapien
gcttctgaaagcccgcaaggatggg

SEQ ID NO: 3942615 - DNA, 25 bp, Homo sapien
gacttggcaggtcacactccatggg

SEQ ID NO: 3942616 - DNA, 25 bp, Homo sapien
tcagtagctccgtgtggccgtgaca

SEQ ID NO: 3942617 - DNA, 25 bp, Homo sapien
gcccctgtgtttgcgctgggcctgc

SEQ ID NO: 3942618 - DNA, 25 bp, Homo sapien
gctgtgcgcccagtgtgacttggca

SEQ ID NO: 3942619 - DNA, 25 bp, Homo sapien
tcccgtcaggaatggtggaacccag

SEQ ID NO: 3942620 - DNA, 25 bp, Homo sapien
cagagtgtgccgtaagctgcgttcc

SEQ ID NO: 3942621 - DNA, 25 bp, Homo sapien
gacaaacggcacaggatgctaccct

SEQ ID NO: 3942622 - DNA, 25 bp, Homo sapien
gtgccccaagggaagcaactgtgtc

SEQ ID NO: 3942623 - DNA, 25 bp, Homo sapien
gttcaatgaagtgataacggatcca

SEQ ID NO: 3942624 - DNA, 25 bp, Homo sapien
ggcctgcctgccaataaaactgtca

SEQ ID NO: 3942625 - DNA, 25 bp, Homo sapien
aatagcctacaatccttctagcggg

SEQ ID NO: 3942626 - DNA, 25 bp, Homo sapien
caaagccatggcctcaacactgtaa

SEQ ID NO: 3942627 - DNA, 25 bp, Homo sapien
gcaccactgtctaatgaataaaaag

SEQ ID NO: 3942628 - DNA, 25 bp, Homo sapien
ttagacgatagttgcaaaagctgca

SEQ ID NO: 3942629 - DNA, 25 bp, Homo sapien
tgtttgacttatggctgcaccactg

SEQ ID NO: 3942630 - DNA, 25 bp, Homo sapien
aaaggtgcaaattataggcccggct

SEQ ID NO: 3942631 - DNA, 25 bp, Homo sapien
tctagacactttagggcagggactt

SEQ ID NO: 3942632 - DNA, 25 bp, Homo sapien
tcagcattcacagacccatgataac

SEQ ID NO: 3942633 - DNA, 25 bp, Homo sapien
gggccttcctagctcagactttgcc

SEQ ID NO: 3942634 - DNA, 25 bp, Homo sapien
tggccccgatgtcaagctcagcatt

SEQ ID NO: 3942635 - DNA, 25 bp, Homo sapien
ttacactccacccagggcgagagga

SEQ ID NO: 3942636 - DNA, 25 bp, Homo sapien
gtggtcatagtggaatctgagcacc

SEQ ID NO: 3942637 - DNA, 25 bp, Homo sapien
tttgtgagtcgcgtcactggaggac

SEQ ID NO: 3942638 - DNA, 25 bp, Homo sapien
cacccctgagagtgctgacggatca

SEQ ID NO: 3942639 - DNA, 25 bp, Homo sapien
aggtggaaaccgttcacaagctcgg

SEQ ID NO: 3942640 - DNA, 25 bp, Homo sapien
cccaggtggaaaccgttcacaagct

SEQ ID NO: 3942641 - DNA, 25 bp, Homo sapien
gcctgcaaatgagcagctgccagca

SEQ ID NO: 3942642 - DNA, 25 bp, Homo sapien
cagcagccccgaaaacctgccttct

SEQ ID NO: 3942643 - DNA, 25 bp, Homo sapien
tggggctgaacgggatcccttcgaa

SEQ ID NO: 3942644 - DNA, 25 bp, Homo sapien
gctgtggggctgaacgggatccctt

SEQ ID NO: 3942645 - DNA, 25 bp, Homo sapien
ccagaggaggccggccttgaagctt

SEQ ID NO: 3942646 - DNA, 25 bp, Homo sapien
gctgaacgggatcccttcgaaagcc

SEQ ID NO: 3942647 - DNA, 25 bp, Homo sapien
ggtcttccccgaagatgtcccacga

SEQ ID NO: 3942648 - DNA, 25 bp, Homo sapien
tcttccccgaagatgtcccacgagg

SEQ ID NO: 3942649 - DNA, 25 bp, Homo sapien
tcagggggtcttccccgaagatgtc

SEQ ID NO: 3942650 - DNA, 25 bp, Homo sapien
tccccgaagatgtcccacgaggctg

SEQ ID NO: 3942651 - DNA, 25 bp, Homo sapien
actggggctgacatcctggatgggg

SEQ ID NO: 3942652 - DNA, 25 bp, Homo sapien
tactggggctgacatcctggatggg

SEQ ID NO: 3942653 - DNA, 25 bp, Homo sapien
ggtactggggctgacatcctggatg

SEQ ID NO: 3942654 - DNA, 25 bp, Homo sapien
aggtactggggctgacatcctggat

SEQ ID NO: 3942655 - DNA, 25 bp, Homo sapien
tggacgtgtgcatttcaggcccacc

SEQ ID NO: 3942656 - DNA, 25 bp, Homo sapien
tcaggtgtggcccagcatatgcgtt

SEQ ID NO: 3942657 - DNA, 25 bp, Homo sapien
agcatatgcgttggcctcccgggag

SEQ ID NO: 3942658 - DNA, 25 bp, Homo sapien
tggcccagggctcgaattgccacga

SEQ ID NO: 3942659 - DNA, 25 bp, Homo sapien
gttgcctctccaactaaaccagact

SEQ ID NO: 3942660 - DNA, 25 bp, Homo sapien
ggttcctcaggctgtccggtgttgc

SEQ ID NO: 3942661 - DNA, 25 bp, Homo sapien
actcggcagctctcaacgccagcgg

SEQ ID NO: 3942662 - DNA, 25 bp, Homo sapien
accagactcggcagctctcaacgcc

SEQ ID NO: 3942663 - DNA, 25 bp, Homo sapien
ccaagcagacggcagaggtcctggg

SEQ ID NO: 3942664 - DNA, 25 bp, Homo sapien
gacacctgcaaccagggcactgcca

SEQ ID NO: 3942665 - DNA, 25 bp, Homo sapien
cactgccaagctggcaggccgtgac

SEQ ID NO: 3942666 - DNA, 25 bp, Homo sapien
tgccaagctggcaggccgtgacctt

SEQ ID NO: 3942667 - DNA, 25 bp, Homo sapien
gagctctccctcgagccaggagagg

SEQ ID NO: 3942668 - DNA, 25 bp, Homo sapien
ggagctctccctcgagccaggagag

SEQ ID NO: 3942669 - DNA, 25 bp, Homo sapien
gggagctctccctcgagccaggaga

SEQ ID NO: 3942670 - DNA, 25 bp, Homo sapien
ttgttcctccgttccccagggctga

SEQ ID NO: 3942671 - DNA, 25 bp, Homo sapien
tgagctccaacacacggtaggtctc

SEQ ID NO: 3942672 - DNA, 25 bp, Homo sapien
gcagagaacccgctcgatggcgtct

SEQ ID NO: 3942673 - DNA, 25 bp, Homo sapien
acatgagcccggtcatcgcagaacc

SEQ ID NO: 3942674 - DNA, 25 bp, Homo sapien
ggcccatggagcacccgacattgtg

SEQ ID NO: 3942675 - DNA, 25 bp, Homo sapien
aaatagaggctcagctcaaggcgtg

SEQ ID NO: 3942676 - DNA, 25 bp, Homo sapien
tggagcacccgacattgtgctggag

SEQ ID NO: 3942677 - DNA, 25 bp, Homo sapien
tgtgctggaggggtcggacgagcca

SEQ ID NO: 3942678 - DNA, 25 bp, Homo sapien
aggctggtctcgaacgcctaacctt

SEQ ID NO: 3942679 - DNA, 25 bp, Homo sapien
agtagagacagggggcagggggatg

SEQ ID NO: 3942680 - DNA, 25 bp, Homo sapien
ttagtagagacagggggcaggggga

SEQ ID NO: 3942681 - DNA, 25 bp, Homo sapien
ggggcagggggatggtttcaccata

SEQ ID NO: 3942682 - DNA, 25 bp, Homo sapien
tcagacagcttgactctcaaaacat

SEQ ID NO: 3942683 - DNA, 25 bp, Homo sapien
gggacaaagatgcatcttcagccat

SEQ ID NO: 3942684 - DNA, 25 bp, Homo sapien
aatccaattattcgcgccggacacg

SEQ ID NO: 3942685 - DNA, 25 bp, Homo sapien
gccagggtggcaaacggcttcagca

SEQ ID NO: 3942686 - DNA, 25 bp, Homo sapien
gacgtggacccatagaaggctgcat

SEQ ID NO: 3942687 - DNA, 25 bp, Homo sapien
tgagcccagccaaaagggcactgtg

SEQ ID NO: 3942688 - DNA, 25 bp, Homo sapien
ggaggagtgccgttctaagaaacag

SEQ ID NO: 3942689 - DNA, 25 bp, Homo sapien
tgacgcgtctacacggcaaggagtg

SEQ ID NO: 3942690 - DNA, 25 bp, Homo sapien
ttacgaagcctcgtgggatgcaccc

SEQ ID NO: 3942691 - DNA, 25 bp, Homo sapien
taaggtgcctgcacagaacctggca

SEQ ID NO: 3942692 - DNA, 25 bp, Homo sapien
gaatgaggccctgctctgaataacc

SEQ ID NO: 3942693 - DNA, 25 bp, Homo sapien
tctcctgtgaagagggaccctgggt

SEQ ID NO: 3942694 - DNA, 25 bp, Homo sapien
ctcccgggtcactgcaggcacgagg

SEQ ID NO: 3942695 - DNA, 25 bp, Homo sapien
cagggttggacccacctccaggagc

SEQ ID NO: 3942696 - DNA, 25 bp, Homo sapien
ctgccagggttggacccacctccag

SEQ ID NO: 3942697 - DNA, 25 bp, Homo sapien
gccctgccagggttggacccacctc

SEQ ID NO: 3942698 - DNA, 25 bp, Homo sapien
tctcgctgcctaactgtgccagtga

SEQ ID NO: 3942699 - DNA, 25 bp, Homo sapien
gggctctgtgactcttaccctctcg

SEQ ID NO: 3942700 - DNA, 25 bp, Homo sapien
gatgcgaggccttgatgccaggagt

SEQ ID NO: 3942701 - DNA, 25 bp, Homo sapien
tctctccgatgggactcatggcgct

SEQ ID NO: 3942702 - DNA, 25 bp, Homo sapien
gcccctcagcctgaggacctcagtg

SEQ ID NO: 3942703 - DNA, 25 bp, Homo sapien
gggaccttggtagcctgagttgctg

SEQ ID NO: 3942704 - DNA, 25 bp, Homo sapien
atgggaagaagcagtcctgaggcca

SEQ ID NO: 3942705 - DNA, 25 bp, Homo sapien
ccccgcccattctctgtcactggag

SEQ ID NO: 3942706 - DNA, 25 bp, Homo sapien
cctggatatcggagtgaccggatct

SEQ ID NO: 3942707 - DNA, 25 bp, Homo sapien
aaccgctgcatgcagccgggaacca

SEQ ID NO: 3942708 - DNA, 25 bp, Homo sapien
acactcctggatatcggagtgaccg

SEQ ID NO: 3942709 - DNA, 25 bp, Homo sapien
tcggagtgaccggatctttctggag

SEQ ID NO: 3942710 - DNA, 25 bp, Homo sapien
ggtgggcgggggcagcccatggagg

SEQ ID NO: 3942711 - DNA, 25 bp, Homo sapien
agcccaggcaccaagcagagatgcg

SEQ ID NO: 3942712 - DNA, 25 bp, Homo sapien
gcaccaagcagagatgcgaagggcc

SEQ ID NO: 3942713 - DNA, 25 bp, Homo sapien
caggcaccaagcagagatgcgaagg

SEQ ID NO: 3942714 - DNA, 25 bp, Homo sapien
gcatgagattcggttggcaggagag

SEQ ID NO: 3942715 - DNA, 25 bp, Homo sapien
aacaacaacatagaccatgaggagg

SEQ ID NO: 3942716 - DNA, 25 bp, Homo sapien
catactcagtagcttggaagattct

SEQ ID NO: 3942717 - DNA, 25 bp, Homo sapien
ggtggcatttaagctaggccttgaa

SEQ ID NO: 3942718 - DNA, 25 bp, Homo sapien
tcccttgaggaacgtctgtctgata

SEQ ID NO: 3942719 - DNA, 25 bp, Homo sapien
acagggatccgcagggttcacacag

SEQ ID NO: 3942720 - DNA, 25 bp, Homo sapien
ctggcagccatgacagggatccgca

SEQ ID NO: 3942721 - DNA, 25 bp, Homo sapien
ggcccacgggcgctggcagccatga

SEQ ID NO: 3942722 - DNA, 25 bp, Homo sapien
gaggccatggaatctcaggggcaga

SEQ ID NO: 3942723 - DNA, 25 bp, Homo sapien
gccagtgtgcgccaggagggcccct

SEQ ID NO: 3942724 - DNA, 25 bp, Homo sapien
aggaccgacgagctcagctgccagt

SEQ ID NO: 3942725 - DNA, 25 bp, Homo sapien
taactcctcaggaccgacgagctca

SEQ ID NO: 3942726 - DNA, 25 bp, Homo sapien
tcaggaccgacgagctcagctgcca

SEQ ID NO: 3942727 - DNA, 25 bp, Homo sapien
ttgccacccgcagtgagtcttcaag

SEQ ID NO: 3942728 - DNA, 25 bp, Homo sapien
ggccacctggccctatctataaggc

SEQ ID NO: 3942729 - DNA, 25 bp, Homo sapien
cacaaatgataccaccgtcattgcc

SEQ ID NO: 3942730 - DNA, 25 bp, Homo sapien
tcaagaatgccaaaggcatggccac

SEQ ID NO: 3942731 - DNA, 25 bp, Homo sapien
tcagacgggaaaatgaccttcctcc

SEQ ID NO: 3942732 - DNA, 25 bp, Homo sapien
ggatttttgcaaggcgcatttcaga

SEQ ID NO: 3942733 - DNA, 25 bp, Homo sapien
gcgcatttcagacgggaaaatgacc

SEQ ID NO: 3942734 - DNA, 25 bp, Homo sapien
catttcagacgggaaaatgaccttc

SEQ ID NO: 3942735 - DNA, 25 bp, Homo sapien
atcaaccgaggattcaggcacctcc

SEQ ID NO: 3942736 - DNA, 25 bp, Homo sapien
tgccgtgggcacagcatgaacagcc

SEQ ID NO: 3942737 - DNA, 25 bp, Homo sapien
cacagcatgaacagcccagctggct

SEQ ID NO: 3942738 - DNA, 25 bp, Homo sapien
tccagcaagttctgggtgccgtggg

SEQ ID NO: 3942739 - DNA, 25 bp, Homo sapien
gctggatcactgaggggcgccgagc

SEQ ID NO: 3942740 - DNA, 25 bp, Homo sapien
cactccaagtcagtgggaagacccc

SEQ ID NO: 3942741 - DNA, 25 bp, Homo sapien
agaggcactccaagtcagtgggaag

SEQ ID NO: 3942742 - DNA, 25 bp, Homo sapien
ggcactccaagtcagtgggaagacc

SEQ ID NO: 3942743 - DNA, 25 bp, Homo sapien
tcacagcgtttctccaccccagcag

SEQ ID NO: 3942744 - DNA, 25 bp, Homo sapien
tcatttcccggtggcagaagcagac

SEQ ID NO: 3942745 - DNA, 25 bp, Homo sapien
gatcttgtccttagcctttaggccg

SEQ ID NO: 3942746 - DNA, 25 bp, Homo sapien
gctgtgccgggctgcgctatgcctc

SEQ ID NO: 3942747 - DNA, 25 bp, Homo sapien
tggtgacagcttcccggatcttgtc

SEQ ID NO: 3942748 - DNA, 25 bp, Homo sapien
gccacattagtggtagcacagagga

SEQ ID NO: 3942749 - DNA, 25 bp, Homo sapien
cctgggccacattagtggtagcaca

SEQ ID NO: 3942750 - DNA, 25 bp, Homo sapien
ggacatggggtcgccctgactgcat

SEQ ID NO: 3942751 - DNA, 25 bp, Homo sapien
cattagtggtagcacagaggacatg

SEQ ID NO: 3942752 - DNA, 25 bp, Homo sapien
gattccactgagcgccatcccaggt

SEQ ID NO: 3942753 - DNA, 25 bp, Homo sapien
tgaacgtcaacccagcctcggcagg

SEQ ID NO: 3942754 - DNA, 25 bp, Homo sapien
ttgccacaggaactcccacccgatt

SEQ ID NO: 3942755 - DNA, 25 bp, Homo sapien
ggcaggtgcctgcaagttgccacag

SEQ ID NO: 3942756 - DNA, 25 bp, Homo sapien
aacgcatattcggaatcttcactga

SEQ ID NO: 3942757 - DNA, 25 bp, Homo sapien
tttagttttggccaaagactcagga

SEQ ID NO: 3942758 - DNA, 25 bp, Homo sapien
tacattaaacaaaacgcatattcgg

SEQ ID NO: 3942759 - DNA, 25 bp, Homo sapien
ctgtatacgtgttttgggcacccgg

SEQ ID NO: 3942760 - DNA, 25 bp, Homo sapien
tcacaggagtgtcgaggcccaagag

SEQ ID NO: 3942761 - DNA, 25 bp, Homo sapien
cccaagagggctcagaaacagggtg

SEQ ID NO: 3942762 - DNA, 25 bp, Homo sapien
gcccaagagggctcagaaacagggt

SEQ ID NO: 3942763 - DNA, 25 bp, Homo sapien
cagtcacaggagtgtcgaggcccaa

SEQ ID NO: 3942764 - DNA, 25 bp, Homo sapien
tctcaacatctagcgcaagggaggc

SEQ ID NO: 3942765 - DNA, 25 bp, Homo sapien
catggagcgggaaagaatcactgca

SEQ ID NO: 3942766 - DNA, 25 bp, Homo sapien
gatttaaatcaattgcccggcaggc

SEQ ID NO: 3942767 - DNA, 25 bp, Homo sapien
tagctcattggtagcacacgggacg

SEQ ID NO: 3942768 - DNA, 25 bp, Homo sapien
tcagagcaagaggccccagagttct

SEQ ID NO: 3942769 - DNA, 25 bp, Homo sapien
ctctcaaggccgaggtccttcacta

SEQ ID NO: 3942770 - DNA, 25 bp, Homo sapien
gcaagaggccccagagttctctcaa

SEQ ID NO: 3942771 - DNA, 25 bp, Homo sapien
tctcaaggccgaggtccttcactag

SEQ ID NO: 3942772 - DNA, 25 bp, Homo sapien
gacactacagtttctaattacaggg

SEQ ID NO: 3942773 - DNA, 25 bp, Homo sapien
tagtcttgtatcaaatgacggccgc

SEQ ID NO: 3942774 - DNA, 25 bp, Homo sapien
tacagggtctgtcatcggcgaggtt

SEQ ID NO: 3942775 - DNA, 25 bp, Homo sapien
tacctgcagctaatgggttcacggg

SEQ ID NO: 3942776 - DNA, 25 bp, Homo sapien
tcgggtgtccctgatcgcatggcag

SEQ ID NO: 3942777 - DNA, 25 bp, Homo sapien
caggagcactcgctgtgactgatgt

SEQ ID NO: 3942778 - DNA, 25 bp, Homo sapien
tatacacgccagaccctgagcatgt

SEQ ID NO: 3942779 - DNA, 25 bp, Homo sapien
tttcacagcgatggacactgatgcc

SEQ ID NO: 3942780 - DNA, 25 bp, Homo sapien
tgaacaggacaccagatgggagcca

SEQ ID NO: 3942781 - DNA, 25 bp, Homo sapien
cctcgtatctgtacctggagctggg

SEQ ID NO: 3942782 - DNA, 25 bp, Homo sapien
tgaccccttcgtactctggagctgg

SEQ ID NO: 3942783 - DNA, 25 bp, Homo sapien
ggtgaccaaggacgatgaccccttc

SEQ ID NO: 3942784 - DNA, 25 bp, Homo sapien
gaggcatttttcagcctaccacaca

SEQ ID NO: 3942785 - DNA, 25 bp, Homo sapien
gggggaggcatttttcagcctacca

SEQ ID NO: 3942786 - DNA, 25 bp, Homo sapien
cctggaggggggaggcatttttcag

SEQ ID NO: 3942787 - DNA, 25 bp, Homo sapien
gcatttttcagcctaccacacatag

SEQ ID NO: 3942788 - DNA, 25 bp, Homo sapien
tcagcaggccggaaatacacaggca

SEQ ID NO: 3942789 - DNA, 25 bp, Homo sapien
caaggccttgtctggtgatgcaccg

SEQ ID NO: 3942790 - DNA, 25 bp, Homo sapien
cagcggcaagcgtacaggactgttt

SEQ ID NO: 3942791 - DNA, 25 bp, Homo sapien
gctgtgggtcccgagaaagcagaca

SEQ ID NO: 3942792 - DNA, 25 bp, Homo sapien
tgagtgggtgccggctctgtctccc

SEQ ID NO: 3942793 - DNA, 25 bp, Homo sapien
accacactccaacattcccgcccac

SEQ ID NO: 3942794 - DNA, 25 bp, Homo sapien
accgcccccttgaactctggtgagt

SEQ ID NO: 3942795 - DNA, 25 bp, Homo sapien
gatcacaggtgctggcaccagatca

SEQ ID NO: 3942796 - DNA, 25 bp, Homo sapien
agtgctgcttagaaccaatggttcc

SEQ ID NO: 3942797 - DNA, 25 bp, Homo sapien
ggtgacacaagttttagacctccta

SEQ ID NO: 3942798 - DNA, 25 bp, Homo sapien
tatggctggccttgagccaacagct

SEQ ID NO: 3942799 - DNA, 25 bp, Homo sapien
ctaaataatccagccagcacgctgg

SEQ ID NO: 3942800 - DNA, 25 bp, Homo sapien
ccagcgggtcatgcctgaactgatg

SEQ ID NO: 3942801 - DNA, 25 bp, Homo sapien
gcctgagctgtcctttacttgccct

SEQ ID NO: 3942802 - DNA, 25 bp, Homo sapien
tctttctggactgtccccgtggcct

SEQ ID NO: 3942803 - DNA, 25 bp, Homo sapien
ttttagtgcgacagaccagagtggg

SEQ ID NO: 3942804 - DNA, 25 bp, Homo sapien
gaaaacaggcattgcgaacagccct

SEQ ID NO: 3942805 - DNA, 25 bp, Homo sapien
tctgctggacaagaagtcactgcca

SEQ ID NO: 3942806 - DNA, 25 bp, Homo sapien
tccccatttgtggatgacacgcaga

SEQ ID NO: 3942807 - DNA, 25 bp, Homo sapien
gatgtggtttctatgagcggcttca

SEQ ID NO: 3942808 - DNA, 25 bp, Homo sapien
gcctccagggttcaagtgaatcttg

SEQ ID NO: 3942809 - DNA, 25 bp, Homo sapien
ctccagggttcaagtgaatcttgtg

SEQ ID NO: 3942810 - DNA, 25 bp, Homo sapien
ccagggttcaagtgaatcttgtgcc

SEQ ID NO: 3942811 - DNA, 25 bp, Homo sapien
cagggttcaagtgaatcttgtgcct

SEQ ID NO: 3942812 - DNA, 25 bp, Homo sapien
taagaaaacgatcaactgcacagag

SEQ ID NO: 3942813 - DNA, 25 bp, Homo sapien
tatcagatccgggaaggcatgcttc

SEQ ID NO: 3942814 - DNA, 25 bp, Homo sapien
catgcttccaggcaaatagacctaa

SEQ ID NO: 3942815 - DNA, 25 bp, Homo sapien
tgcaccatagtaacgaaagccccgg

SEQ ID NO: 3942816 - DNA, 25 bp, Homo sapien
ccgtttgcaaacagtgggcggctgc

SEQ ID NO: 3942817 - DNA, 25 bp, Homo sapien
ggtgctccccttcgctccgaagcgg

SEQ ID NO: 3942818 - DNA, 25 bp, Homo sapien
cggctgcccaactccgcgctctggc

SEQ ID NO: 3942819 - DNA, 25 bp, Homo sapien
tgccgctgccgaaggcagggtgctc

SEQ ID NO: 3942820 - DNA, 25 bp, Homo sapien
tgaggtaattgacgaccaaggacgg

SEQ ID NO: 3942821 - DNA, 25 bp, Homo sapien
ccccgcaagatgatcaaaaggctct

SEQ ID NO: 3942822 - DNA, 25 bp, Homo sapien
gaggcggcttcaatccaaacatggt

SEQ ID NO: 3942823 - DNA, 25 bp, Homo sapien
aagccacggcgctcaaaaatgtcca

SEQ ID NO: 3942824 - DNA, 25 bp, Homo sapien
tagatggaagccgaaatgcctgtcc

SEQ ID NO: 3942825 - DNA, 25 bp, Homo sapien
tatgcaagaccttggtccctgcggg

SEQ ID NO: 3942826 - DNA, 25 bp, Homo sapien
taacgtcccatgacaagcctgaggc

SEQ ID NO: 3942827 - DNA, 25 bp, Homo sapien
tctgagtcagatcccattaggccta

SEQ ID NO: 3942828 - DNA, 25 bp, Homo sapien
cacaggccattaagcaagcagccaa

SEQ ID NO: 3942829 - DNA, 25 bp, Homo sapien
aatgttccgtgacttcctgacccca

SEQ ID NO: 3942830 - DNA, 25 bp, Homo sapien
ggtcagagggcgcttcctgtctcac

SEQ ID NO: 3942831 - DNA, 25 bp, Homo sapien
gtgggatcaccctctggagataaga

SEQ ID NO: 3942832 - DNA, 25 bp, Homo sapien
tcgaagctccatacttccaaagcct

SEQ ID NO: 3942833 - DNA, 25 bp, Homo sapien
cctaatgtgctgagtcttgtaagag

SEQ ID NO: 3942834 - DNA, 25 bp, Homo sapien
gtacttgtcaccctgattactcaat

SEQ ID NO: 3942835 - DNA, 25 bp, Homo sapien
cacacctgacatgaacctaatgtgc

SEQ ID NO: 3942836 - DNA, 25 bp, Homo sapien
gctagcccaggatggaggactcttt

SEQ ID NO: 3942837 - DNA, 25 bp, Homo sapien
caggtactgcatagagtaggcgctc

SEQ ID NO: 3942838 - DNA, 25 bp, Homo sapien
tcctgggctagtgcgaaggagaaat

SEQ ID NO: 3942839 - DNA, 25 bp, Homo sapien
taagcttcagctctggctagcccag

SEQ ID NO: 3942840 - DNA, 25 bp, Homo sapien
gggagcacaaacattcagcctgtga

SEQ ID NO: 3942841 - DNA, 25 bp, Homo sapien
ttctggccgagagctcacgtgacgg

SEQ ID NO: 3942842 - DNA, 25 bp, Homo sapien
tcatagttcttaaggctggaaggcc

SEQ ID NO: 3942843 - DNA, 25 bp, Homo sapien
ggacactaatcctagcagagcaggg

SEQ ID NO: 3942844 - DNA, 25 bp, Homo sapien
taagtctctaagtctccgcagaggg

SEQ ID NO: 3942845 - DNA, 25 bp, Homo sapien
tgacccactcgatagaccaggatgc

SEQ ID NO: 3942846 - DNA, 25 bp, Homo sapien
gattagacattcacacaggcaggcg

SEQ ID NO: 3942847 - DNA, 25 bp, Homo sapien
taaccaagccgggtaatgaatggcg

SEQ ID NO: 3942848 - DNA, 25 bp, Homo sapien
tacacagtgaggcatgaaacatacc

SEQ ID NO: 3942849 - DNA, 25 bp, Homo sapien
tacggatgttcctatcagcatggct

SEQ ID NO: 3942850 - DNA, 25 bp, Homo sapien
aaaggactgaggtgctaatccacgc

SEQ ID NO: 3942851 - DNA, 25 bp, Homo sapien
gaagacacgatgctggatggaagaa

SEQ ID NO: 3942852 - DNA, 25 bp, Homo sapien
cctgagaaggttaattggcctgcct

SEQ ID NO: 3942853 - DNA, 25 bp, Homo sapien
tggatccgccaataagtatcaggga

SEQ ID NO: 3942854 - DNA, 25 bp, Homo sapien
tggatcccggacacgttctttctgg

SEQ ID NO: 3942855 - DNA, 25 bp, Homo sapien
tccgtgggccaggaggtaaagatca

SEQ ID NO: 3942856 - DNA, 25 bp, Homo sapien
gacgctataatttacgcaccacacg

SEQ ID NO: 3942857 - DNA, 25 bp, Homo sapien
ccttgcggccttggccggacgctat

SEQ ID NO: 3942858 - DNA, 25 bp, Homo sapien
ggccttggccggacgctataattta

SEQ ID NO: 3942859 - DNA, 25 bp, Homo sapien
tttacgcaccacacggtggctcggc

SEQ ID NO: 3942860 - DNA, 25 bp, Homo sapien
ctggagccaccgtcgcccagtgttt

SEQ ID NO: 3942861 - DNA, 25 bp, Homo sapien
gtcgcccagtgtttgtctaaactgc

SEQ ID NO: 3942862 - DNA, 25 bp, Homo sapien
gctccacctcggctgatacatgctg

SEQ ID NO: 3942863 - DNA, 25 bp, Homo sapien
gctgatacatgctggagccaccgtc

SEQ ID NO: 3942864 - DNA, 25 bp, Homo sapien
gtctgagcaactaacagccctgcgg

SEQ ID NO: 3942865 - DNA, 25 bp, Homo sapien
acaattctggcgtgtgtcaacccca

SEQ ID NO: 3942866 - DNA, 25 bp, Homo sapien
tccaagtacatgcaggtctgagcaa

SEQ ID NO: 3942867 - DNA, 25 bp, Homo sapien
catcgacacggtaactccatgaggg

SEQ ID NO: 3942868 - DNA, 25 bp, Homo sapien
aagaggaggctgagacgcttgctca

SEQ ID NO: 3942869 - DNA, 25 bp, Homo sapien
aggaggctgagacgcttgctcacaa

SEQ ID NO: 3942870 - DNA, 25 bp, Homo sapien
aggctgagacgcttgctcacaagga

SEQ ID NO: 3942871 - DNA, 25 bp, Homo sapien
gctgagacgcttgctcacaaggacc

SEQ ID NO: 3942872 - DNA, 25 bp, Homo sapien
ggatcctgacctggaacaagaaggg

SEQ ID NO: 3942873 - DNA, 25 bp, Homo sapien
ggaggaaagagcaacacagcgcctg

SEQ ID NO: 3942874 - DNA, 25 bp, Homo sapien
catactggacttgcttcccaaggtc

SEQ ID NO: 3942875 - DNA, 25 bp, Homo sapien
gacacccttgaagctgcagtcctgc

SEQ ID NO: 3942876 - DNA, 25 bp, Homo sapien
gggcctggcctctgcgtgtcccccg

SEQ ID NO: 3942877 - DNA, 25 bp, Homo sapien
cgtgtcccccgcaccgggctgccat

SEQ ID NO: 3942878 - DNA, 25 bp, Homo sapien
gctgctctctgctccgcaccgccag

SEQ ID NO: 3942879 - DNA, 25 bp, Homo sapien
ggctgccaatgagggcccgtcctcg

SEQ ID NO: 3942880 - DNA, 25 bp, Homo sapien
ccctcccggccagtggtgacagcgg

SEQ ID NO: 3942881 - DNA, 25 bp, Homo sapien
cggcggcggcaccagaggtctgagc

SEQ ID NO: 3942882 - DNA, 25 bp, Homo sapien
ctggtcgcggtggaaagcatcccta

SEQ ID NO: 3942883 - DNA, 25 bp, Homo sapien
ccgctgggcaccagggcgccattga

SEQ ID NO: 3942884 - DNA, 25 bp, Homo sapien
gcaaagctggaggatggcgcggcct

SEQ ID NO: 3942885 - DNA, 25 bp, Homo sapien
cctgtttggcgagcttgcgcagcgc

SEQ ID NO: 3942886 - DNA, 25 bp, Homo sapien
gggacgactcgctgctcagtgagga

SEQ ID NO: 3942887 - DNA, 25 bp, Homo sapien
gacacgggggacgactcgctgctca

SEQ ID NO: 3942888 - DNA, 25 bp, Homo sapien
gggcacgcgcttgggtgtgctggcg

SEQ ID NO: 3942889 - DNA, 25 bp, Homo sapien
gctgtggttggtggccggagaggac

SEQ ID NO: 3942890 - DNA, 25 bp, Homo sapien
tttggttggagcgatggtcaccacg

SEQ ID NO: 3942891 - DNA, 25 bp, Homo sapien
ccattcacggttttggttggagcga

SEQ ID NO: 3942892 - DNA, 25 bp, Homo sapien
ccaggggggacgatgatagggccca

SEQ ID NO: 3942893 - DNA, 25 bp, Homo sapien
cggttttggttggagcgatggtcac

SEQ ID NO: 3942894 - DNA, 25 bp, Homo sapien
gcccacagacataaggagccccgaa

SEQ ID NO: 3942895 - DNA, 25 bp, Homo sapien
cagacataaggagccccgaaaactt

SEQ ID NO: 3942896 - DNA, 25 bp, Homo sapien
gggcccacagacataaggagccccg

SEQ ID NO: 3942897 - DNA, 25 bp, Homo sapien
ccacagacataaggagccccgaaaa

SEQ ID NO: 3942898 - DNA, 25 bp, Homo sapien
aggtggctccaatacccatgtcctc

SEQ ID NO: 3942899 - DNA, 25 bp, Homo sapien
tgatgagcaggtggctccaataccc

SEQ ID NO: 3942900 - DNA, 25 bp, Homo sapien
tagagggcagacaggccctgatgat

SEQ ID NO: 3942901 - DNA, 25 bp, Homo sapien
gccctgatgatgagcaggtggctcc

SEQ ID NO: 3942902 - DNA, 25 bp, Homo sapien
gaagcgagtgccacgatgtagccaa

SEQ ID NO: 3942903 - DNA, 25 bp, Homo sapien
tggccgcagatgtcctggccctggt

SEQ ID NO: 3942904 - DNA, 25 bp, Homo sapien
gggcaaaggaagctggcactgcccc

SEQ ID NO: 3942905 - DNA, 25 bp, Homo sapien
aagacgtcaactgcgccgacagctg

SEQ ID NO: 3942906 - DNA, 25 bp, Homo sapien
ttgagtggcgggaagcgggaatcct

SEQ ID NO: 3942907 - DNA, 25 bp, Homo sapien
gcgggaatcctgcacaactgagctg

SEQ ID NO: 3942908 - DNA, 25 bp, Homo sapien
ggagcgggggctccacaatgaggcg

SEQ ID NO: 3942909 - DNA, 25 bp, Homo sapien
aatgaggcgttcccgacctccactg

SEQ ID NO: 3942910 - DNA, 25 bp, Homo sapien
aggtagtcctcggtcacggtactgg

SEQ ID NO: 3942911 - DNA, 25 bp, Homo sapien
cggaagcttctcaggtagtcctcgg

SEQ ID NO: 3942912 - DNA, 25 bp, Homo sapien
accacgtggtgcacgggccgctgga

SEQ ID NO: 3942913 - DNA, 25 bp, Homo sapien
tagggccggaagcttctcaggtagt

SEQ ID NO: 3942914 - DNA, 25 bp, Homo sapien
gcagtggccgggtccaggccgaggg

SEQ ID NO: 3942915 - DNA, 25 bp, Homo sapien
cagcagtggccgggtccaggccgag

SEQ ID NO: 3942916 - DNA, 25 bp, Homo sapien
agcagtggccgggtccaggccgagg

SEQ ID NO: 3942917 - DNA, 25 bp, Homo sapien
cagtggccgggtccaggccgagggg

SEQ ID NO: 3942918 - DNA, 25 bp, Homo sapien
gacatgcgctccgagtgcagcgctg

SEQ ID NO: 3942919 - DNA, 25 bp, Homo sapien
ctcgggagggtagcggaccccagag

SEQ ID NO: 3942920 - DNA, 25 bp, Homo sapien
tctccgcgctgaggccagacatgcg

SEQ ID NO: 3942921 - DNA, 25 bp, Homo sapien
gggagagctcgggagggtagcggac

SEQ ID NO: 3942922 - DNA, 25 bp, Homo sapien
ctccttctcacgctcacgctccttc

SEQ ID NO: 3942923 - DNA, 25 bp, Homo sapien
tcgcgttcgcgctcacgttccttct

SEQ ID NO: 3942924 - DNA, 25 bp, Homo sapien
ctccttctcttgctcgcgctccttc

SEQ ID NO: 3942925 - DNA, 25 bp, Homo sapien
tccttctcccgctcgcggtcagcct

SEQ ID NO: 3942926 - DNA, 25 bp, Homo sapien
gggccttggcggccagcagctcctt

SEQ ID NO: 3942927 - DNA, 25 bp, Homo sapien
ctgggctccagggccttggcggcca

SEQ ID NO: 3942928 - DNA, 25 bp, Homo sapien
ccagggccttggcggccagcagctc

SEQ ID NO: 3942929 - DNA, 25 bp, Homo sapien
tgggctccagggccttggcggccag

SEQ ID NO: 3942930 - DNA, 25 bp, Homo sapien
cctcagtggcatggccacgcagccc

SEQ ID NO: 3942931 - DNA, 25 bp, Homo sapien
gagggcttgccccgctcctcagtgg

SEQ ID NO: 3942932 - DNA, 25 bp, Homo sapien
gctcgggttggggtcagctgctccg

SEQ ID NO: 3942933 - DNA, 25 bp, Homo sapien
gggttggggtcagctgctccgaggg

SEQ ID NO: 3942934 - DNA, 25 bp, Homo sapien
ggccctacgggagctttcaagaagc

SEQ ID NO: 3942935 - DNA, 25 bp, Homo sapien
agagaaaccagagcccttccaaagg

SEQ ID NO: 3942936 - DNA, 25 bp, Homo sapien
agctttcaagaagcatgtcttgtcc

SEQ ID NO: 3942937 - DNA, 25 bp, Homo sapien
caagatattcagaaggggccctacg

SEQ ID NO: 3942938 - DNA, 25 bp, Homo sapien
tgccggaactcggacacctgagact

SEQ ID NO: 3942939 - DNA, 25 bp, Homo sapien
ctcattggtgcgctggatcagcagg

SEQ ID NO: 3942940 - DNA, 25 bp, Homo sapien
cagcactgctgctaggcagagagaa

SEQ ID NO: 3942941 - DNA, 25 bp, Homo sapien
gtgttggacgggcttgggcgcctgc

SEQ ID NO: 3942942 - DNA, 25 bp, Homo sapien
gtgctctccggcctgtgctctgcct

SEQ ID NO: 3942943 - DNA, 25 bp, Homo sapien
gtggtgctctccggcctgtgctctg

SEQ ID NO: 3942944 - DNA, 25 bp, Homo sapien
tggtggtgctctccggcctgtgctc

SEQ ID NO: 3942945 - DNA, 25 bp, Homo sapien
ctggtggtgctctccggcctgtgct

SEQ ID NO: 3942946 - DNA, 25 bp, Homo sapien
accatatttgtgctggacttagctg

SEQ ID NO: 3942947 - DNA, 25 bp, Homo sapien
cacctagtgggtatagtacactaca

SEQ ID NO: 3942948 - DNA, 25 bp, Homo sapien
gctggacttagctgggacacctagt

SEQ ID NO: 3942949 - DNA, 25 bp, Homo sapien
tagctgggacacctagtgggtatag

SEQ ID NO: 3942950 - DNA, 25 bp, Homo sapien
gcccgccgcgtctccaaggtgttgt

SEQ ID NO: 3942951 - DNA, 25 bp, Homo sapien
tgggctcaaatgcagccgggtggct

SEQ ID NO: 3942952 - DNA, 25 bp, Homo sapien
cacctggctcgtgacggtttggtcc

SEQ ID NO: 3942953 - DNA, 25 bp, Homo sapien
cagagagtggctttcggcccgccgc

SEQ ID NO: 3942954 - DNA, 25 bp, Homo sapien
ggcggcggaggtggctggtacttgt

SEQ ID NO: 3942955 - DNA, 25 bp, Homo sapien
gcggcggaggtggctggtacttgtc

SEQ ID NO: 3942956 - DNA, 25 bp, Homo sapien
cggcggaggtggctggtacttgtcc

SEQ ID NO: 3942957 - DNA, 25 bp, Homo sapien
agctccccgaaggtggccgcctgtg

SEQ ID NO: 3942958 - DNA, 25 bp, Homo sapien
tcatcatagatgtaggcagggtcgg

SEQ ID NO: 3942959 - DNA, 25 bp, Homo sapien
actgggggccggtagggcgagccag

SEQ ID NO: 3942960 - DNA, 25 bp, Homo sapien
ccaggcttcaggggtccgctgagct

SEQ ID NO: 3942961 - DNA, 25 bp, Homo sapien
tcctgggcctcccgccgcctgcgct

SEQ ID NO: 3942962 - DNA, 25 bp, Homo sapien
tcccgccgcctgcgctcctccaggt

SEQ ID NO: 3942963 - DNA, 25 bp, Homo sapien
cgccgcctgcgctcctccaggtcca

SEQ ID NO: 3942964 - DNA, 25 bp, Homo sapien
gctcctccaggtccagcttgctgac

SEQ ID NO: 3942965 - DNA, 25 bp, Homo sapien
tgtgcagagcacctatcaggccagg

SEQ ID NO: 3942966 - DNA, 25 bp, Homo sapien
gagctcagcactggacaggacctga

SEQ ID NO: 3942967 - DNA, 25 bp, Homo sapien
tgaaggccagttcctttcaaccgag

SEQ ID NO: 3942968 - DNA, 25 bp, Homo sapien
tgtgtccacggcaacacagggctgc

SEQ ID NO: 3942969 - DNA, 25 bp, Homo sapien
tgctcggccacgcaacggaggtggg

SEQ ID NO: 3942970 - DNA, 25 bp, Homo sapien
tcctcatcgctctcgtcgtaagagt

SEQ ID NO: 3942971 - DNA, 25 bp, Homo sapien
gagtcatcgaggtcgtagtagtacc

SEQ ID NO: 3942972 - DNA, 25 bp, Homo sapien
ctcagaggacgtgtccagtttgagg

SEQ ID NO: 3942973 - DNA, 25 bp, Homo sapien
tgcgcctggtgggagaagagcttca

SEQ ID NO: 3942974 - DNA, 25 bp, Homo sapien
gcagtggtatgcttgcactgtcccg

SEQ ID NO: 3942975 - DNA, 25 bp, Homo sapien
tgtggacgctaggaacgagagccca

SEQ ID NO: 3942976 - DNA, 25 bp, Homo sapien
cttcggaggaacctagcaacagtgg

SEQ ID NO: 3942977 - DNA, 25 bp, Homo sapien
tagacagcgccagtctcggtgaagg

SEQ ID NO: 3942978 - DNA, 25 bp, Homo sapien
ggactgttgttcatctcatcagggc

SEQ ID NO: 3942979 - DNA, 25 bp, Homo sapien
tcttctcagcgctgatgtgggtcag

SEQ ID NO: 3942980 - DNA, 25 bp, Homo sapien
tcatcagggctgtagcgggtagaca

SEQ ID NO: 3942981 - DNA, 25 bp, Homo sapien
tcactggagcactcggctcaaagag

SEQ ID NO: 3942982 - DNA, 25 bp, Homo sapien
gagcactcggctcaaagagcgcctt

SEQ ID NO: 3942983 - DNA, 25 bp, Homo sapien
tcggctcaaagagcgccttctcggg

SEQ ID NO: 3942984 - DNA, 25 bp, Homo sapien
tggtcactggagcactcggctcaaa

SEQ ID NO: 3942985 - DNA, 25 bp, Homo sapien
aaagatgaccccacgatgttccacg

SEQ ID NO: 3942986 - DNA, 25 bp, Homo sapien
gaaaggaagcaaccatctcaaagcg

SEQ ID NO: 3942987 - DNA, 25 bp, Homo sapien
aaagcagcctgagattaacgagcca

SEQ ID NO: 3942988 - DNA, 25 bp, Homo sapien
aaagacagctgtccgtgcggtgacg

SEQ ID NO: 3942989 - DNA, 25 bp, Homo sapien
tcatggcacggagcatttcaacaag

SEQ ID NO: 3942990 - DNA, 25 bp, Homo sapien
tgtccctcggagagtttgtcaagga

SEQ ID NO: 3942991 - DNA, 25 bp, Homo sapien
cactcagggagacggcaggactgtc

SEQ ID NO: 3942992 - DNA, 25 bp, Homo sapien
tttgtcaaggagtcggccactgctg

SEQ ID NO: 3942993 - DNA, 25 bp, Homo sapien
cacatccagagaggcttgctgcgtg

SEQ ID NO: 3942994 - DNA, 25 bp, Homo sapien
tgcagcgccccggatatagtgaagc

SEQ ID NO: 3942995 - DNA, 25 bp, Homo sapien
gactcgtggaactgatgtgcaaact

SEQ ID NO: 3942996 - DNA, 25 bp, Homo sapien
tccgcggcctttgggatgtcagaca

SEQ ID NO: 3942997 - DNA, 25 bp, Homo sapien
ggagacaacgcagccctgagtgcta

SEQ ID NO: 3942998 - DNA, 25 bp, Homo sapien
agtcaacatgactgcagggctccgg

SEQ ID NO: 3942999 - DNA, 25 bp, Homo sapien
ccaagatgacatcgcgtagagagga

SEQ ID NO: 3943000 - DNA, 25 bp, Homo sapien
gctagttgattctggtacgtggacc

SEQ ID NO: 3943001 - DNA, 25 bp, Homo sapien
ttgtagtggacggacgtgtcaacct

SEQ ID NO: 3943002 - DNA, 25 bp, Homo sapien
ggacgtgtcaaccttgtggttctgc

SEQ ID NO: 3943003 - DNA, 25 bp, Homo sapien
ctcaggaatgttgtagtggacggac

SEQ ID NO: 3943004 - DNA, 25 bp, Homo sapien
actgcagctcaggaatgttgtagtg

SEQ ID NO: 3943005 - DNA, 25 bp, Homo sapien
cgatcccttgccacttgcgcttggg

SEQ ID NO: 3943006 - DNA, 25 bp, Homo sapien
tcgatcccttgccacttgcgcttgg

SEQ ID NO: 3943007 - DNA, 25 bp, Homo sapien
ctggtaagcttcaaaaacggcctcg

SEQ ID NO: 3943008 - DNA, 25 bp, Homo sapien
ttcaaaaacggcctcgatcccttgc

SEQ ID NO: 3943009 - DNA, 25 bp, Homo sapien
gataccaggcctagtttcaacagga

SEQ ID NO: 3943010 - DNA, 25 bp, Homo sapien
tattttccgtatgcaggagcccgaa

SEQ ID NO: 3943011 - DNA, 25 bp, Homo sapien
gaaagtgctcacaatctggatacca

SEQ ID NO: 3943012 - DNA, 25 bp, Homo sapien
gggtggtgcgcaataaactcaaaga

SEQ ID NO: 3943013 - DNA, 25 bp, Homo sapien
gccacgctgtgggagagctgctctg

SEQ ID NO: 3943014 - DNA, 25 bp, Homo sapien
tgaggctgtagtgccgggcctccag

SEQ ID NO: 3943015 - DNA, 25 bp, Homo sapien
gggcctccagtcgtctacattgtgt

SEQ ID NO: 3943016 - DNA, 25 bp, Homo sapien
tacattgtgtctgtaacacctgccg

SEQ ID NO: 3943017 - DNA, 25 bp, Homo sapien
tcgtgatccgccaaattttgatctc

SEQ ID NO: 3943018 - DNA, 25 bp, Homo sapien
tatctgcatgggtgtttctgaaccc

SEQ ID NO: 3943019 - DNA, 25 bp, Homo sapien
ctgaacccaaactcaaaaggttgcg

SEQ ID NO: 3943020 - DNA, 25 bp, Homo sapien
ggttgcgtgtttgaaggtttccatc

SEQ ID NO: 3943021 - DNA, 25 bp, Homo sapien
cctaggccagtgcattgcaggcaag

SEQ ID NO: 3943022 - DNA, 25 bp, Homo sapien
tgcctggagccgctccctttctgag

SEQ ID NO: 3943023 - DNA, 25 bp, Homo sapien
caaggcactttcgtaagtggtccag

SEQ ID NO: 3943024 - DNA, 25 bp, Homo sapien
agttctgcctggagccgctcccttt

SEQ ID NO: 3943025 - DNA, 25 bp, Homo sapien
tcgctgcggcaaaagcaaactgggc

SEQ ID NO: 3943026 - DNA, 25 bp, Homo sapien
ggtttgatccactcatatgcacagg

SEQ ID NO: 3943027 - DNA, 25 bp, Homo sapien
tataggttcggcctagtgcaaggga

SEQ ID NO: 3943028 - DNA, 25 bp, Homo sapien
tgctcgctgaatgacaacggtgatt

SEQ ID NO: 3943029 - DNA, 25 bp, Homo sapien
accacatattaaaaatggcaggctt

SEQ ID NO: 3943030 - DNA, 25 bp, Homo sapien
cacatattaaaaatggcaggctttt

SEQ ID NO: 3943031 - DNA, 25 bp, Homo sapien
aaccacatattaaaaatggcaggct

SEQ ID NO: 3943032 - DNA, 25 bp, Homo sapien
ccacatattaaaaatggcaggcttt

SEQ ID NO: 3943033 - DNA, 25 bp, Homo sapien
aaaatgaagtgatcgcataggcgcc

SEQ ID NO: 3943034 - DNA, 25 bp, Homo sapien
tagcgcatggctttctacggcagct

SEQ ID NO: 3943035 - DNA, 25 bp, Homo sapien
gatgagcccagtttctgaccgttcc

SEQ ID NO: 3943036 - DNA, 25 bp, Homo sapien
tattttaatgtcctgaccagcagca

SEQ ID NO: 3943037 - DNA, 25 bp, Homo sapien
aatactggcggtacattcgtctgag

SEQ ID NO: 3943038 - DNA, 25 bp, Homo sapien
tcttggcagacgtacaaagcaaact

SEQ ID NO: 3943039 - DNA, 25 bp, Homo sapien
gataaagcgacacgatgccagctgc

SEQ ID NO: 3943040 - DNA, 25 bp, Homo sapien
tcgtctgagtttgctaataactgga

SEQ ID NO: 3943041 - DNA, 25 bp, Homo sapien
cctgagagcggaagtgctaagatgt

SEQ ID NO: 3943042 - DNA, 25 bp, Homo sapien
tgtgactcttaagccttcagaccag

SEQ ID NO: 3943043 - DNA, 25 bp, Homo sapien
ccctgatagtttgtagcagactccc

SEQ ID NO: 3943044 - DNA, 25 bp, Homo sapien
acctcaagtaggttttcagtggaga

SEQ ID NO: 3943045 - DNA, 25 bp, Homo sapien
gatggtaagggatgagctacgtttt

SEQ ID NO: 3943046 - DNA, 25 bp, Homo sapien
gggagaagccaactattgctagcac

SEQ ID NO: 3943047 - DNA, 25 bp, Homo sapien
gcagacctctcatggtgtgccacct

SEQ ID NO: 3943048 - DNA, 25 bp, Homo sapien
caagaagctcaagggccgggcagaa

SEQ ID NO: 3943049 - DNA, 25 bp, Homo sapien
agtagagtactcagatcgccacaag

SEQ ID NO: 3943050 - DNA, 25 bp, Homo sapien
cacaggtggcataatcgactccaga

SEQ ID NO: 3943051 - DNA, 25 bp, Homo sapien
gagccgagggctttcaggtgcatcc

SEQ ID NO: 3943052 - DNA, 25 bp, Homo sapien
tctgaatactcttaagggtgcaacc

SEQ ID NO: 3943053 - DNA, 25 bp, Homo sapien
tagcatggtcttcctcaggtcaagg

SEQ ID NO: 3943054 - DNA, 25 bp, Homo sapien
gaatcggtttgtgctgaccatctcc

SEQ ID NO: 3943055 - DNA, 25 bp, Homo sapien
cagagtgaccgaggcaccggtgttc

SEQ ID NO: 3943056 - DNA, 25 bp, Homo sapien
cacttgtgtgaaacatgtggctcag

SEQ ID NO: 3943057 - DNA, 25 bp, Homo sapien
aaacttagctccctgggacattctt

SEQ ID NO: 3943058 - DNA, 25 bp, Homo sapien
gattcaggatgttgttggagaaaca

SEQ ID NO: 3943059 - DNA, 25 bp, Homo sapien
ggattcaggatgttgttggagaaac

SEQ ID NO: 3943060 - DNA, 25 bp, Homo sapien
aaaacttagctccctgggacattct

SEQ ID NO: 3943061 - DNA, 25 bp, Homo sapien
gagccatttgagaacgcctggccca

SEQ ID NO: 3943062 - DNA, 25 bp, Homo sapien
cctggcccagccgtaatgtgcgcgg

SEQ ID NO: 3943063 - DNA, 25 bp, Homo sapien
caccatgtcggagccatttgagaac

SEQ ID NO: 3943064 - DNA, 25 bp, Homo sapien
catgtcggagccatttgagaacgcc

SEQ ID NO: 3943065 - DNA, 25 bp, Homo sapien
aaagcaaggctgatccgcgttgcca

SEQ ID NO: 3943066 - DNA, 25 bp, Homo sapien
catgaatgaacacgcgcaaggaacc

SEQ ID NO: 3943067 - DNA, 25 bp, Homo sapien
gaaccggacgcttcatcaaaggctg

SEQ ID NO: 3943068 - DNA, 25 bp, Homo sapien
taaaaaagcttcgtgaatggctccc

SEQ ID NO: 3943069 - DNA, 25 bp, Homo sapien
tatcgcctgtgatgacctagtctct

SEQ ID NO: 3943070 - DNA, 25 bp, Homo sapien
cacgtggctgccaagttggttctgg

SEQ ID NO: 3943071 - DNA, 25 bp, Homo sapien
agaacctctccctgggcggcttggg

SEQ ID NO: 3943072 - DNA, 25 bp, Homo sapien
cctagtctctgaagtcacatcacat

SEQ ID NO: 3943073 - DNA, 25 bp, Homo sapien
tacatggactcttactacagtggac

SEQ ID NO: 3943074 - DNA, 25 bp, Homo sapien
catgggttcctctatcctgttctcg

SEQ ID NO: 3943075 - DNA, 25 bp, Homo sapien
aacatcaacctgtggctcaatcagg

SEQ ID NO: 3943076 - DNA, 25 bp, Homo sapien
tccctgagcgagacaggacgtcgct

SEQ ID NO: 3943077 - DNA, 25 bp, Homo sapien
ctgttggctagaggccttgattcct

SEQ ID NO: 3943078 - DNA, 25 bp, Homo sapien
tgattcctcacccacgtgagctgct

SEQ ID NO: 3943079 - DNA, 25 bp, Homo sapien
tctggctcagggtcgatcatgatgt

SEQ ID NO: 3943080 - DNA, 25 bp, Homo sapien
gcttgagcatcctcgtaacatggtg

SEQ ID NO: 3943081 - DNA, 25 bp, Homo sapien
ggctcaccacactgtacctacaccc

SEQ ID NO: 3943082 - DNA, 25 bp, Homo sapien
gtcttgaacagaattgctgggctca

SEQ ID NO: 3943083 - DNA, 25 bp, Homo sapien
tgtccaggcctgtcttgaacagaat

SEQ ID NO: 3943084 - DNA, 25 bp, Homo sapien
tggacctggcctttggaatctgggc

SEQ ID NO: 3943085 - DNA, 25 bp, Homo sapien
acccggccagatccattcttattaa

SEQ ID NO: 3943086 - DNA, 25 bp, Homo sapien
tgagtagccggtattacaagcaccc

SEQ ID NO: 3943087 - DNA, 25 bp, Homo sapien
gagtagccggtattacaagcaccca

SEQ ID NO: 3943088 - DNA, 25 bp, Homo sapien
ccaccatgcctggctcattttttta

SEQ ID NO: 3943089 - DNA, 25 bp, Homo sapien
ctgagtagccggtattacaagcacc

SEQ ID NO: 3943090 - DNA, 25 bp, Homo sapien
gacatgtcaaaatccaccgggtggg

SEQ ID NO: 3943091 - DNA, 25 bp, Homo sapien
caaaccctgggttgagacatgtcaa

SEQ ID NO: 3943092 - DNA, 25 bp, Homo sapien
gatgtcgagtctggcttaccagcag

SEQ ID NO: 3943093 - DNA, 25 bp, Homo sapien
aaatccgagtactttgtgcagggcc

SEQ ID NO: 3943094 - DNA, 25 bp, Homo sapien
gaccagaacgccattcctgagagct

SEQ ID NO: 3943095 - DNA, 25 bp, Homo sapien
ctttgggaaacttggcccggctctg

SEQ ID NO: 3943096 - DNA, 25 bp, Homo sapien
aagcaggtttgcaaccgcgaagggc

SEQ ID NO: 3943097 - DNA, 25 bp, Homo sapien
gcgccgtcacgagttccttgggaat

SEQ ID NO: 3943098 - DNA, 25 bp, Homo sapien
caaagttcagagagcggtacctttc

SEQ ID NO: 3943099 - DNA, 25 bp, Homo sapien
ggaaaaaagttcagacatcgctaca

SEQ ID NO: 3943100 - DNA, 25 bp, Homo sapien
tcccgagttgtgcagagtgacgtct

SEQ ID NO: 3943101 - DNA, 25 bp, Homo sapien
ttcagccacgcagaaagctcacgtg

SEQ ID NO: 3943102 - DNA, 25 bp, Homo sapien
tacacttgtgctaggcaggcaccgc

SEQ ID NO: 3943103 - DNA, 25 bp, Homo sapien
tctagaagaggtgcagacatcccgt

SEQ ID NO: 3943104 - DNA, 25 bp, Homo sapien
ggcctttccactacgttgaagaaga

SEQ ID NO: 3943105 - DNA, 25 bp, Homo sapien
tagcctgtgtggaaagctgaccgtt

SEQ ID NO: 3943106 - DNA, 25 bp, Homo sapien
tgtgctgacccctgcgatttcttca

SEQ ID NO: 3943107 - DNA, 25 bp, Homo sapien
gaaaataccaagatcacaaaggtgg

SEQ ID NO: 3943108 - DNA, 25 bp, Homo sapien
gcaaaacgtatttacctgtcaggga

SEQ ID NO: 3943109 - DNA, 25 bp, Homo sapien
ccagggcaaggttcgtccattgcac

SEQ ID NO: 3943110 - DNA, 25 bp, Homo sapien
tggtgcaaagatcatagctacgtga

SEQ ID NO: 3943111 - DNA, 25 bp, Homo sapien
cgtgattgctggttattatcaagct

SEQ ID NO: 3943112 - DNA, 25 bp, Homo sapien
gattgattcatggtgcaaagatcat

SEQ ID NO: 3943113 - DNA, 25 bp, Homo sapien
gatcatagctacgtgattgctggtt

SEQ ID NO: 3943114 - DNA, 25 bp, Homo sapien
tgtcacaggaaactacccttattag

SEQ ID NO: 3943115 - DNA, 25 bp, Homo sapien
tgatgcctagttccagattccggac

SEQ ID NO: 3943116 - DNA, 25 bp, Homo sapien
gaggcttggccgagtctccgttcct

SEQ ID NO: 3943117 - DNA, 25 bp, Homo sapien
agtgctgaggcttggccgagtctcc

SEQ ID NO: 3943118 - DNA, 25 bp, Homo sapien
caccaccagcaagccccatcctctt

SEQ ID NO: 3943119 - DNA, 25 bp, Homo sapien
agcccactccactccagggcactct

SEQ ID NO: 3943120 - DNA, 25 bp, Homo sapien
tgagggcaggatcctgcagccactg

SEQ ID NO: 3943121 - DNA, 25 bp, Homo sapien
ccactccactccagggcactctcac

SEQ ID NO: 3943122 - DNA, 25 bp, Homo sapien
cacttagatccaccgcagcttttca

SEQ ID NO: 3943123 - DNA, 25 bp, Homo sapien
tagttgccttgactcctagctgcca

SEQ ID NO: 3943124 - DNA, 25 bp, Homo sapien
tcgtacagcgaagcagggacatgga

SEQ ID NO: 3943125 - DNA, 25 bp, Homo sapien
tcgcttcggaggaagctagttgcct

SEQ ID NO: 3943126 - DNA, 25 bp, Homo sapien
ctgcgccgtcaacgggctcctggtg

SEQ ID NO: 3943127 - DNA, 25 bp, Homo sapien
tggccgagaagcagaagccgcgtaa

SEQ ID NO: 3943128 - DNA, 25 bp, Homo sapien
aagatggtgctgcacggcgccaagt

SEQ ID NO: 3943129 - DNA, 25 bp, Homo sapien
gcatgcccggggtgaaactgaccac

SEQ ID NO: 3943130 - DNA, 25 bp, Homo sapien
gggatcgaggaagactccgcccgca

SEQ ID NO: 3943131 - DNA, 25 bp, Homo sapien
cggaaaagggtagcgctgcgaacgt

SEQ ID NO: 3943132 - DNA, 25 bp, Homo sapien
ccggccgcacggaggtcaccgtgga

SEQ ID NO: 3943133 - DNA, 25 bp, Homo sapien
tcccgcgaccggaagagagcaaggc

SEQ ID NO: 3943134 - DNA, 25 bp, Homo sapien
ttcctgctgaagccgagcggccagg

SEQ ID NO: 3943135 - DNA, 25 bp, Homo sapien
tccgaggcccattcggtgcttcctg

SEQ ID NO: 3943136 - DNA, 25 bp, Homo sapien
gacgtgcagacttgatggctcccgg

SEQ ID NO: 3943137 - DNA, 25 bp, Homo sapien
gtgcagacttgatggctcccggccc

SEQ ID NO: 3943138 - DNA, 25 bp, Homo sapien
catgagctcgtacacacacagaggt

SEQ ID NO: 3943139 - DNA, 25 bp, Homo sapien
atgagctcgtacacacacagaggtg

SEQ ID NO: 3943140 - DNA, 25 bp, Homo sapien
tcttagaaacgaggatcatggagcc

SEQ ID NO: 3943141 - DNA, 25 bp, Homo sapien
ccaggactgagtgagaaatcgtgct

SEQ ID NO: 3943142 - DNA, 25 bp, Homo sapien
ctggtctggaggtacaatgcccgca

SEQ ID NO: 3943143 - DNA, 25 bp, Homo sapien
ccagttacctgcagacgtgggccaa

SEQ ID NO: 3943144 - DNA, 25 bp, Homo sapien
caccccaaggtgatacttctgaaaa

SEQ ID NO: 3943145 - DNA, 25 bp, Homo sapien
gaggcagcacttcctacattaacag

SEQ ID NO: 3943146 - DNA, 25 bp, Homo sapien
aaaccgaaacacagacatgtgcacg

SEQ ID NO: 3943147 - DNA, 25 bp, Homo sapien
gtgcacgccttgaaaccctggatca

SEQ ID NO: 3943148 - DNA, 25 bp, Homo sapien
gagcgaaaagtcttcgctcttcaca

SEQ ID NO: 3943149 - DNA, 25 bp, Homo sapien
acatgggccacctccggcaaggggt

SEQ ID NO: 3943150 - DNA, 25 bp, Homo sapien
gtggtcacgccgatccatataagct

SEQ ID NO: 3943151 - DNA, 25 bp, Homo sapien
tataagctgggagcgaaaagtcttc

SEQ ID NO: 3943152 - DNA, 25 bp, Homo sapien
ctgctgggcgcgcctgtgggtccct

SEQ ID NO: 3943153 - DNA, 25 bp, Homo sapien
acgcttccgagagctgctgggcgcg

SEQ ID NO: 3943154 - DNA, 25 bp, Homo sapien
gagagctgctgggcgcgcctgtggg

SEQ ID NO: 3943155 - DNA, 25 bp, Homo sapien
gagctgctgggcgcgcctgtgggtc

SEQ ID NO: 3943156 - DNA, 25 bp, Homo sapien
catacagttcgcttcaggtgcaaat

SEQ ID NO: 3943157 - DNA, 25 bp, Homo sapien
tcctgtgcaagactgcctctagaca

SEQ ID NO: 3943158 - DNA, 25 bp, Homo sapien
gccacatcatgttcacgcacgtacg

SEQ ID NO: 3943159 - DNA, 25 bp, Homo sapien
gagctgaaggatacaccaacccagg

SEQ ID NO: 3943160 - DNA, 25 bp, Homo sapien
aaccgatgaagaacatggcaccgcc

SEQ ID NO: 3943161 - DNA, 25 bp, Homo sapien
tctgccacatgataacgagcgcggt

SEQ ID NO: 3943162 - DNA, 25 bp, Homo sapien
tagtgcttctgccacatgataacga

SEQ ID NO: 3943163 - DNA, 25 bp, Homo sapien
taacgagcgcggtgaaaccgatgaa

SEQ ID NO: 3943164 - DNA, 25 bp, Homo sapien
gaagagtcattaccacgagcgagca

SEQ ID NO: 3943165 - DNA, 25 bp, Homo sapien
aattgctactgaaaacgtggtgtgc

SEQ ID NO: 3943166 - DNA, 25 bp, Homo sapien
cacacaaactatcaggtcgggaccc

SEQ ID NO: 3943167 - DNA, 25 bp, Homo sapien
tagcctcaaggtatggaggtccccg

SEQ ID NO: 3943168 - DNA, 25 bp, Homo sapien
gatctgacaaacagagcccaaggtg

SEQ ID NO: 3943169 - DNA, 25 bp, Homo sapien
aacacacggtttctgaccactgaca

SEQ ID NO: 3943170 - DNA, 25 bp, Homo sapien
tcaacaggttgtttctaggccaatc

SEQ ID NO: 3943171 - DNA, 25 bp, Homo sapien
taggccaatccctcacacaggttaa

SEQ ID NO: 3943172 - DNA, 25 bp, Homo sapien
ctgcttggccacccactctttgtca

SEQ ID NO: 3943173 - DNA, 25 bp, Homo sapien
cttggccacccactctttgtcaaag

SEQ ID NO: 3943174 - DNA, 25 bp, Homo sapien
ctggatggggttcaccttcatgtcc

SEQ ID NO: 3943175 - DNA, 25 bp, Homo sapien
ggttcaccttcatgtccagcatcct

SEQ ID NO: 3943176 - DNA, 25 bp, Homo sapien
tcgtagtcccacttggaggctaagc

SEQ ID NO: 3943177 - DNA, 25 bp, Homo sapien
ttttcgtagtcccacttggaggcta

SEQ ID NO: 3943178 - DNA, 25 bp, Homo sapien
tcttttcgtagtcccacttggaggc

SEQ ID NO: 3943179 - DNA, 25 bp, Homo sapien
ttcgtagtcccacttggaggctaag

SEQ ID NO: 3943180 - DNA, 25 bp, Homo sapien
gtttccagtaaataggcatggagtt

SEQ ID NO: 3943181 - DNA, 25 bp, Homo sapien
tagaggcttcctatggcacagaccc

SEQ ID NO: 3943182 - DNA, 25 bp, Homo sapien
ttaactgcaggatgcgactctcggg

SEQ ID NO: 3943183 - DNA, 25 bp, Homo sapien
catctgtaggaacggtctattgcca

SEQ ID NO: 3943184 - DNA, 25 bp, Homo sapien
tcctgttgacgcaggtacatctgct

SEQ ID NO: 3943185 - DNA, 25 bp, Homo sapien
tttcatggccagtgaccaacgctcg

SEQ ID NO: 3943186 - DNA, 25 bp, Homo sapien
ctccacgagcagagattgggcggca

SEQ ID NO: 3943187 - DNA, 25 bp, Homo sapien
caaaaacttcacgaagggtttcatg

SEQ ID NO: 3943188 - DNA, 25 bp, Homo sapien
ctgctctgcagggagagagtgtgga

SEQ ID NO: 3943189 - DNA, 25 bp, Homo sapien
ggccacacagacgtgggaggatcct

SEQ ID NO: 3943190 - DNA, 25 bp, Homo sapien
ccacacagacgtgggaggatccttt

SEQ ID NO: 3943191 - DNA, 25 bp, Homo sapien
gtggagactcatgcccgagttcacc

SEQ ID NO: 3943192 - DNA, 25 bp, Homo sapien
aggatcctttggtgagtggagactc

SEQ ID NO: 3943193 - DNA, 25 bp, Homo sapien
tgtccctgagtcagaacgccctggg

SEQ ID NO: 3943194 - DNA, 25 bp, Homo sapien
gacaccacttctgccgtgtagtcgc

SEQ ID NO: 3943195 - DNA, 25 bp, Homo sapien
ctccatgcgtgtcccgcgtgcgagg

SEQ ID NO: 3943196 - DNA, 25 bp, Homo sapien
cgtgtagtcgctgaaagctgtccct

SEQ ID NO: 3943197 - DNA, 25 bp, Homo sapien
ctttgaaatgtctgtgcagaagcca

SEQ ID NO: 3943198 - DNA, 25 bp, Homo sapien
cacgcagtttcttggcgagctcggg

SEQ ID NO: 3943199 - DNA, 25 bp, Homo sapien
agaagccaggtcataaacacgcagt

SEQ ID NO: 3943200 - DNA, 25 bp, Homo sapien
ctgcacagtctcttgctttgaaatg

SEQ ID NO: 3943201 - DNA, 25 bp, Homo sapien
gaacttccgttgcagccaccctgag

SEQ ID NO: 3943202 - DNA, 25 bp, Homo sapien
agcaggctgtgtggcgtggcccggc

SEQ ID NO: 3943203 - DNA, 25 bp, Homo sapien
tgcttgcaggatgaagcgcaggtag

SEQ ID NO: 3943204 - DNA, 25 bp, Homo sapien
acatgtgcgaacttccgttgcagcc

SEQ ID NO: 3943205 - DNA, 25 bp, Homo sapien
cattagggcctgaagtcccagtctc

SEQ ID NO: 3943206 - DNA, 25 bp, Homo sapien
ccaaattatagctgccattagggcc

SEQ ID NO: 3943207 - DNA, 25 bp, Homo sapien
tcatgcatcagctctaagagctccc

SEQ ID NO: 3943208 - DNA, 25 bp, Homo sapien
cttggctgcctgtatgcaggaatca

SEQ ID NO: 3943209 - DNA, 25 bp, Homo sapien
tggcgtctaacacaacggagtgctg

SEQ ID NO: 3943210 - DNA, 25 bp, Homo sapien
taagatgatgagcaagatcctggcc

SEQ ID NO: 3943211 - DNA, 25 bp, Homo sapien
tcttggacaaacagcctgagggcct

SEQ ID NO: 3943212 - DNA, 25 bp, Homo sapien
tagacaaggtaaagtcagggcccag

SEQ ID NO: 3943213 - DNA, 25 bp, Homo sapien
ggagcgtgtgtggccatccctccac

SEQ ID NO: 3943214 - DNA, 25 bp, Homo sapien
gagtcttcatcccttcgcttccttg

SEQ ID NO: 3943215 - DNA, 25 bp, Homo sapien
tgctccaacgtctgttcctcacttc

SEQ ID NO: 3943216 - DNA, 25 bp, Homo sapien
ttgaacacgtagaccggactctcct

SEQ ID NO: 3943217 - DNA, 25 bp, Homo sapien
gccacatcagcgtgtactttccaag

SEQ ID NO: 3943218 - DNA, 25 bp, Homo sapien
tgttggttctcagcggccacatcag

SEQ ID NO: 3943219 - DNA, 25 bp, Homo sapien
tccaagctgcgttctccaatgggca

SEQ ID NO: 3943220 - DNA, 25 bp, Homo sapien
gccgaaacgtgcatccagggcagat

SEQ ID NO: 3943221 - DNA, 25 bp, Homo sapien
ctttgcagatgtgcagcaggtgcat

SEQ ID NO: 3943222 - DNA, 25 bp, Homo sapien
gagccagtgtggggtccttccctcc

SEQ ID NO: 3943223 - DNA, 25 bp, Homo sapien
gccagtgtggggtccttccctccag

SEQ ID NO: 3943224 - DNA, 25 bp, Homo sapien
agagagccagtgtggggtccttccc

SEQ ID NO: 3943225 - DNA, 25 bp, Homo sapien
tcagcagagagccagtgtggggtcc

SEQ ID NO: 3943226 - DNA, 25 bp, Homo sapien
ggagcgacctggaggcgtcctccgc

SEQ ID NO: 3943227 - DNA, 25 bp, Homo sapien
caacgagccggacggtgcagaccgt

SEQ ID NO: 3943228 - DNA, 25 bp, Homo sapien
tcccgagcgagccactagcaacgag

SEQ ID NO: 3943229 - DNA, 25 bp, Homo sapien
gaggccccgcggagcgacctggagg

SEQ ID NO: 3943230 - DNA, 25 bp, Homo sapien
gcgttcccacgcttgctgccgcgct

SEQ ID NO: 3943231 - DNA, 25 bp, Homo sapien
ttcccacgcttgctgccgcgctcca

SEQ ID NO: 3943232 - DNA, 25 bp, Homo sapien
gccgcccgcgttcccacgcttgctg

SEQ ID NO: 3943233 - DNA, 25 bp, Homo sapien
ccgcgctccaggcgatgcgccagcg

SEQ ID NO: 3943234 - DNA, 25 bp, Homo sapien
tccccgaaaacaagttagcagctct

SEQ ID NO: 3943235 - DNA, 25 bp, Homo sapien
gagaggctgtatctcaagagaccca

SEQ ID NO: 3943236 - DNA, 25 bp, Homo sapien
cagaattctaaagcaggccactgtg

SEQ ID NO: 3943237 - DNA, 25 bp, Homo sapien
cctagattgaggaatgagctgcaca

SEQ ID NO: 3943238 - DNA, 25 bp, Homo sapien
gaaccaactgggctaccagatgccc

SEQ ID NO: 3943239 - DNA, 25 bp, Homo sapien
tgagcagcccattatccgaagaacc

SEQ ID NO: 3943240 - DNA, 25 bp, Homo sapien
tgatagaatactgcgtccgtgccgt

SEQ ID NO: 3943241 - DNA, 25 bp, Homo sapien
acattccctgatagaatactgcgtc

SEQ ID NO: 3943242 - DNA, 25 bp, Homo sapien
agggactccgggacacctgccatga

SEQ ID NO: 3943243 - DNA, 25 bp, Homo sapien
ttcagggactccgggacacctgcca

SEQ ID NO: 3943244 - DNA, 25 bp, Homo sapien
agattcagggactccgggacacctg

SEQ ID NO: 3943245 - DNA, 25 bp, Homo sapien
gattcagggactccgggacacctgc

SEQ ID NO: 3943246 - DNA, 25 bp, Homo sapien
tacatgctactgtcaatctgctcga

SEQ ID NO: 3943247 - DNA, 25 bp, Homo sapien
tgccagcgtgtttccaagggatccg

SEQ ID NO: 3943248 - DNA, 25 bp, Homo sapien
caaatcagtcctggatacatgctac

SEQ ID NO: 3943249 - DNA, 25 bp, Homo sapien
tgattataatcttgcttgccagcgt

SEQ ID NO: 3943250 - DNA, 25 bp, Homo sapien
agtggggaagggagctgggctcttt

SEQ ID NO: 3943251 - DNA, 25 bp, Homo sapien
tggggaagggagctgggctctttac

SEQ ID NO: 3943252 - DNA, 25 bp, Homo sapien
gtggggaagggagctgggctcttta

SEQ ID NO: 3943253 - DNA, 25 bp, Homo sapien
caacactgttgaaacggccatgaag

SEQ ID NO: 3943254 - DNA, 25 bp, Homo sapien
gattgccacatcaggcgactgcgta

SEQ ID NO: 3943255 - DNA, 25 bp, Homo sapien
gagaagcttcgtctccgtcagcatg

SEQ ID NO: 3943256 - DNA, 25 bp, Homo sapien
acatgatgggctcttgctggcgcca

SEQ ID NO: 3943257 - DNA, 25 bp, Homo sapien
gcgtaacctcgtcttccaagtggct

SEQ ID NO: 3943258 - DNA, 25 bp, Homo sapien
tctgggctcttattcaaagcacagc

SEQ ID NO: 3943259 - DNA, 25 bp, Homo sapien
gctcggaaatgtccagttgggaccg

SEQ ID NO: 3943260 - DNA, 25 bp, Homo sapien
ctcaggaacaattcggtaaactttg

SEQ ID NO: 3943261 - DNA, 25 bp, Homo sapien
aaagcatgttctaaaccagcgctgg

SEQ ID NO: 3943262 - DNA, 25 bp, Homo sapien
cacagcgggaagagtgcaaacttca

SEQ ID NO: 3943263 - DNA, 25 bp, Homo sapien
gctacaattcatggcagcggcacag

SEQ ID NO: 3943264 - DNA, 25 bp, Homo sapien
tacaggcattcgtggactactcaga

SEQ ID NO: 3943265 - DNA, 25 bp, Homo sapien
gggcatttgaaaacactcaccgatt

SEQ ID NO: 3943266 - DNA, 25 bp, Homo sapien
caagcatttgctaacttaagaaggt

SEQ ID NO: 3943267 - DNA, 25 bp, Homo sapien
tcctggcaaaacgtgttggcaggtt

SEQ ID NO: 3943268 - DNA, 25 bp, Homo sapien
tatcagatatactttacagcaagca

SEQ ID NO: 3943269 - DNA, 25 bp, Homo sapien
ctccttgatcagctcgtcgatttca

SEQ ID NO: 3943270 - DNA, 25 bp, Homo sapien
tcgtcgatttcagagcgaccgcact

SEQ ID NO: 3943271 - DNA, 25 bp, Homo sapien
gtaacttcattcacgcagccagcag

SEQ ID NO: 3943272 - DNA, 25 bp, Homo sapien
gccagcagttgccacgcctagtttg

SEQ ID NO: 3943273 - DNA, 25 bp, Homo sapien
gaattcactcagtcggctgccaaag

SEQ ID NO: 3943274 - DNA, 25 bp, Homo sapien
tttgcaacctgaaaggccctaggcc

SEQ ID NO: 3943275 - DNA, 25 bp, Homo sapien
tgcttttcttgtgaccccggtgtgg

SEQ ID NO: 3943276 - DNA, 25 bp, Homo sapien
aaacaggacattggtggagggccac

SEQ ID NO: 3943277 - DNA, 25 bp, Homo sapien
tccccatgtaatcgtccacagaagg

SEQ ID NO: 3943278 - DNA, 25 bp, Homo sapien
ggagctgactccgacaggcctccgg

SEQ ID NO: 3943279 - DNA, 25 bp, Homo sapien
gaaggagctgactccgacaggcctc

SEQ ID NO: 3943280 - DNA, 25 bp, Homo sapien
tcatccccatgtaatcgtccacaga

SEQ ID NO: 3943281 - DNA, 25 bp, Homo sapien
gcctggcaaccttcaaggcctccgg

SEQ ID NO: 3943282 - DNA, 25 bp, Homo sapien
ttccggatggtgttcctgcagcaca

SEQ ID NO: 3943283 - DNA, 25 bp, Homo sapien
agggacctcttactcgacacccaag

SEQ ID NO: 3943284 - DNA, 25 bp, Homo sapien
ggtgcaagctagctttccggatggt

SEQ ID NO: 3943285 - DNA, 25 bp, Homo sapien
cagaataccactggactgcataccc

SEQ ID NO: 3943286 - DNA, 25 bp, Homo sapien
caaaagtcccttaaaaggctgcaca

SEQ ID NO: 3943287 - DNA, 25 bp, Homo sapien
gtgtggtgtacagggagtaacccca

SEQ ID NO: 3943288 - DNA, 25 bp, Homo sapien
tacagggagtaaccccaatcgctcc

SEQ ID NO: 3943289 - DNA, 25 bp, Homo sapien
aaggctgcacatggcgtgccagagg

SEQ ID NO: 3943290 - DNA, 25 bp, Homo sapien
gtggtgtaccccgtcaccagcggca

SEQ ID NO: 3943291 - DNA, 25 bp, Homo sapien
gcgtcgtaggtggtgtaccccgtca

SEQ ID NO: 3943292 - DNA, 25 bp, Homo sapien
gtgcgcgtcgtaggtggtgtacccc

SEQ ID NO: 3943293 - DNA, 25 bp, Homo sapien
tgaatggtgcgcgtcgtaggtggtg

SEQ ID NO: 3943294 - DNA, 25 bp, Homo sapien
aaacagtgcccacgcccctctcagc

SEQ ID NO: 3943295 - DNA, 25 bp, Homo sapien
cttcaaacagtgcccacgcccctct

SEQ ID NO: 3943296 - DNA, 25 bp, Homo sapien
tcaaacagtgcccacgcccctctca

SEQ ID NO: 3943297 - DNA, 25 bp, Homo sapien
cacgcccctctcagcccggaccacc

SEQ ID NO: 3943298 - DNA, 25 bp, Homo sapien
tgctcatcctcggaacggagcctcg

SEQ ID NO: 3943299 - DNA, 25 bp, Homo sapien
cgcaaccctgcttgggttatctggg

SEQ ID NO: 3943300 - DNA, 25 bp, Homo sapien
tgctcatcctcagaaccgggcctag

SEQ ID NO: 3943301 - DNA, 25 bp, Homo sapien
tgctcatcctcggaacggagcctag

SEQ ID NO: 3943302 - DNA, 25 bp, Homo sapien
gaggaggagaaattggggcctcgac

SEQ ID NO: 3943303 - DNA, 25 bp, Homo sapien
gaggagaaattggggcctcgacttc

SEQ ID NO: 3943304 - DNA, 25 bp, Homo sapien
gtgaggaggagaaattggggcctcg

SEQ ID NO: 3943305 - DNA, 25 bp, Homo sapien
agaaattggggcctcgacttccaca

SEQ ID NO: 3943306 - DNA, 25 bp, Homo sapien
tggacaagagggacacgatgacggt

SEQ ID NO: 3943307 - DNA, 25 bp, Homo sapien
gtggacaagagggacacgatgacgg

SEQ ID NO: 3943308 - DNA, 25 bp, Homo sapien
ggacaagagggacacgatgacggtg

SEQ ID NO: 3943309 - DNA, 25 bp, Homo sapien
ctgtggacaagagggacacgatgac

SEQ ID NO: 3943310 - DNA, 25 bp, Homo sapien
ggcccatacagcttggtgccgggca

SEQ ID NO: 3943311 - DNA, 25 bp, Homo sapien
ctcatcacgctccagcttgttgggc

SEQ ID NO: 3943312 - DNA, 25 bp, Homo sapien
ctggcacagccgcttgacgaacacg

SEQ ID NO: 3943313 - DNA, 25 bp, Homo sapien
gaagaactggctggtgtcgaagacc

SEQ ID NO: 3943314 - DNA, 25 bp, Homo sapien
tatccggaaactcttccccaaagca

SEQ ID NO: 3943315 - DNA, 25 bp, Homo sapien
gccggccctggctgttatagaactg

SEQ ID NO: 3943316 - DNA, 25 bp, Homo sapien
cacgagaatgagtttggagcgcaag

SEQ ID NO: 3943317 - DNA, 25 bp, Homo sapien
caagggggccatatccggaaactct

SEQ ID NO: 3943318 - DNA, 25 bp, Homo sapien
catccggaagacctggtctggcggc

SEQ ID NO: 3943319 - DNA, 25 bp, Homo sapien
ttagacggtgatctgttggttttct

SEQ ID NO: 3943320 - DNA, 25 bp, Homo sapien
cagttgccggacatacagctgctca

SEQ ID NO: 3943321 - DNA, 25 bp, Homo sapien
aatatctggaaacatccggaagacc

SEQ ID NO: 3943322 - DNA, 25 bp, Homo sapien
caaatccaccatgagacttgggaga

SEQ ID NO: 3943323 - DNA, 25 bp, Homo sapien
catccacacgtaaaggacctctggg

SEQ ID NO: 3943324 - DNA, 25 bp, Homo sapien
tctttaatcatgatgcgggccactg

SEQ ID NO: 3943325 - DNA, 25 bp, Homo sapien
taaacgtctactcctccgagaatgc

SEQ ID NO: 3943326 - DNA, 25 bp, Homo sapien
tagctctcgcctaatgaacggttca

SEQ ID NO: 3943327 - DNA, 25 bp, Homo sapien
tgtgttggaaacgtgctgccgctca

SEQ ID NO: 3943328 - DNA, 25 bp, Homo sapien
gcaagagttacgatcaccaggagcc

SEQ ID NO: 3943329 - DNA, 25 bp, Homo sapien
tctatcagccaaagcgttagtggtg

SEQ ID NO: 3943330 - DNA, 25 bp, Homo sapien
ttgggctgcttccagccatctccat

SEQ ID NO: 3943331 - DNA, 25 bp, Homo sapien
gttgggctgcttccagccatctcca

SEQ ID NO: 3943332 - DNA, 25 bp, Homo sapien
agctgctcaggaagatgcggcgtca

SEQ ID NO: 3943333 - DNA, 25 bp, Homo sapien
gagatcctgaaaccgaacctgcctt

SEQ ID NO: 3943334 - DNA, 25 bp, Homo sapien
tccaacggcaacgaaacatgggact

SEQ ID NO: 3943335 - DNA, 25 bp, Homo sapien
cctagccaagcgcagtgtggagtcc

SEQ ID NO: 3943336 - DNA, 25 bp, Homo sapien
ctgcaagggatctgctgcctaaatt

SEQ ID NO: 3943337 - DNA, 25 bp, Homo sapien
tctgctgcctaaattcacaagaaag

SEQ ID NO: 3943338 - DNA, 25 bp, Homo sapien
gggatctgctgcctaaattcacaag

SEQ ID NO: 3943339 - DNA, 25 bp, Homo sapien
gcaagggatctgctgcctaaattca

SEQ ID NO: 3943340 - DNA, 25 bp, Homo sapien
tacagtcgtagtaccagcgtcggtc

SEQ ID NO: 3943341 - DNA, 25 bp, Homo sapien
taccagcgtcggtcatagaggcggt

SEQ ID NO: 3943342 - DNA, 25 bp, Homo sapien
tagtaccagcgtcggtcatagaggc

SEQ ID NO: 3943343 - DNA, 25 bp, Homo sapien
gctacagtcgtagtaccagcgtcgg

SEQ ID NO: 3943344 - DNA, 25 bp, Homo sapien
gaacagcaggcgttgattctctgac

SEQ ID NO: 3943345 - DNA, 25 bp, Homo sapien
tatgaccacaagtttagcagcttgg

SEQ ID NO: 3943346 - DNA, 25 bp, Homo sapien
tatggctgccataacatatgaccac

SEQ ID NO: 3943347 - DNA, 25 bp, Homo sapien
taaatgtagccttgtatagtgagac

SEQ ID NO: 3943348 - DNA, 25 bp, Homo sapien
catggctaagtcacctgctagggtc

SEQ ID NO: 3943349 - DNA, 25 bp, Homo sapien
tgtgctacacaggaaacgcttgatg

SEQ ID NO: 3943350 - DNA, 25 bp, Homo sapien
gaaatgcgctcaaggacgttcccaa

SEQ ID NO: 3943351 - DNA, 25 bp, Homo sapien
ggtcccacggcaattacaggcagag

SEQ ID NO: 3943352 - DNA, 25 bp, Homo sapien
taccacagcaagtaccctgatctgg

SEQ ID NO: 3943353 - DNA, 25 bp, Homo sapien
tctagggaagtaccttcctgcctct

SEQ ID NO: 3943354 - DNA, 25 bp, Homo sapien
aaatatattctctcccagctccgga

SEQ ID NO: 3943355 - DNA, 25 bp, Homo sapien
agtctccctcgtatttgctttctgg

SEQ ID NO: 3943356 - DNA, 25 bp, Homo sapien
tttgagcagagccaacaccctgaga

SEQ ID NO: 3943357 - DNA, 25 bp, Homo sapien
tgtgagaattgcttcttccccaggc

SEQ ID NO: 3943358 - DNA, 25 bp, Homo sapien
tcaggtgaccaactcgaagaaggcc

SEQ ID NO: 3943359 - DNA, 25 bp, Homo sapien
ctgggaaaataatagaggcaccgcg

SEQ ID NO: 3943360 - DNA, 25 bp, Homo sapien
tccagccaaatctgcagggaccctg

SEQ ID NO: 3943361 - DNA, 25 bp, Homo sapien
agctccagccaaatctgcagggacc

SEQ ID NO: 3943362 - DNA, 25 bp, Homo sapien
ccagccaaatctgcagggaccctga

SEQ ID NO: 3943363 - DNA, 25 bp, Homo sapien
aaatctgcagggaccctgacaccct

SEQ ID NO: 3943364 - DNA, 25 bp, Homo sapien
aagggtgttaataggccgtctcagc

SEQ ID NO: 3943365 - DNA, 25 bp, Homo sapien
catttctctcgctcatggaagccca

SEQ ID NO: 3943366 - DNA, 25 bp, Homo sapien
gaagcccaagctctgatctgcaaag

SEQ ID NO: 3943367 - DNA, 25 bp, Homo sapien
cacaccccgagggtaggaggatgaa

SEQ ID NO: 3943368 - DNA, 25 bp, Homo sapien
tctttaacatcaagaaggaccagct

SEQ ID NO: 3943369 - DNA, 25 bp, Homo sapien
ctttacatgcaccacgtacccagca

SEQ ID NO: 3943370 - DNA, 25 bp, Homo sapien
acctctttaacatcaagaaggacca

SEQ ID NO: 3943371 - DNA, 25 bp, Homo sapien
ttgtcctttacatgcaccacgtacc

SEQ ID NO: 3943372 - DNA, 25 bp, Homo sapien
tatcgcgtctgttaaaaggcagacc

SEQ ID NO: 3943373 - DNA, 25 bp, Homo sapien
tttctatcgcgtctgttaaaaggca

SEQ ID NO: 3943374 - DNA, 25 bp, Homo sapien
tctgttaaaaggcagacccctctgg

SEQ ID NO: 3943375 - DNA, 25 bp, Homo sapien
ccctctggtttctatcgcgtctgtt

SEQ ID NO: 3943376 - DNA, 25 bp, Homo sapien
tatatacaatgtcatctgagggtgg

SEQ ID NO: 3943377 - DNA, 25 bp, Homo sapien
tgtgtcctatatacaatgtcatctg

SEQ ID NO: 3943378 - DNA, 25 bp, Homo sapien
tgctgagtctgtgtcctatatacaa

SEQ ID NO: 3943379 - DNA, 25 bp, Homo sapien
aatgtcatctgagggtggcaccgaa

SEQ ID NO: 3943380 - DNA, 25 bp, Homo sapien
tctccttgggacctgttggaaccag

SEQ ID NO: 3943381 - DNA, 25 bp, Homo sapien
ctttgacgaattggacggtgtgacc

SEQ ID NO: 3943382 - DNA, 25 bp, Homo sapien
tacaccagacgcttaggagtgacca

SEQ ID NO: 3943383 - DNA, 25 bp, Homo sapien
tgtaattcccaagcatgccatgaag

SEQ ID NO: 3943384 - DNA, 25 bp, Homo sapien
tctgtgtgcctcgatagagtccgaa

SEQ ID NO: 3943385 - DNA, 25 bp, Homo sapien
gttggtcctatctccgggccttgga

SEQ ID NO: 3943386 - DNA, 25 bp, Homo sapien
ccagggctctggcaaatgttaaggc

SEQ ID NO: 3943387 - DNA, 25 bp, Homo sapien
aatgccatttctgcagccgtccagg

SEQ ID NO: 3943388 - DNA, 25 bp, Homo sapien
tgatcccggcttcatttcaggctga

SEQ ID NO: 3943389 - DNA, 25 bp, Homo sapien
atcagcaaccatttgatcccggctt

SEQ ID NO: 3943390 - DNA, 25 bp, Homo sapien
tttcttcggtgctgggttgatcctg

SEQ ID NO: 3943391 - DNA, 25 bp, Homo sapien
cgagttccctacatttctcgagtct

SEQ ID NO: 3943392 - DNA, 25 bp, Homo sapien
ggctatctgtctccagtggggtcag

SEQ ID NO: 3943393 - DNA, 25 bp, Homo sapien
ggccggccctggagcaggcagagct

SEQ ID NO: 3943394 - DNA, 25 bp, Homo sapien
caggctatctgtctccagtggggtc

SEQ ID NO: 3943395 - DNA, 25 bp, Homo sapien
ccggccctggagcaggcagagcttc

SEQ ID NO: 3943396 - DNA, 25 bp, Homo sapien
cccccacagatggttccaggtggtc

SEQ ID NO: 3943397 - DNA, 25 bp, Homo sapien
tgacagggaaggagagcctagggta

SEQ ID NO: 3943398 - DNA, 25 bp, Homo sapien
tttcaacgcccccacagatggttcc

SEQ ID NO: 3943399 - DNA, 25 bp, Homo sapien
cagggaaggagagcctagggtatag

SEQ ID NO: 3943400 - DNA, 25 bp, Homo sapien
aaatggaggaaagctctgcccgtcg

SEQ ID NO: 3943401 - DNA, 25 bp, Homo sapien
tgcccgtcgtgggtggtcttcctcg

SEQ ID NO: 3943402 - DNA, 25 bp, Homo sapien
taaaattaaatggaggaaagctctg

SEQ ID NO: 3943403 - DNA, 25 bp, Homo sapien
gggtaatgacagcaatcatgatagc

SEQ ID NO: 3943404 - DNA, 25 bp, Homo sapien
tccaaatcttgacagggccagcatc

SEQ ID NO: 3943405 - DNA, 25 bp, Homo sapien
tctctgcagtgtatgatgtggccgc

SEQ ID NO: 3943406 - DNA, 25 bp, Homo sapien
cttcccaagtagatccaaatcttga

SEQ ID NO: 3943407 - DNA, 25 bp, Homo sapien
acaacggcaggacacggcatctctg

SEQ ID NO: 3943408 - DNA, 25 bp, Homo sapien
gcccttacagttttcgagaaagatg

SEQ ID NO: 3943409 - DNA, 25 bp, Homo sapien
cagtggctgcggaaagctggttctg

SEQ ID NO: 3943410 - DNA, 25 bp, Homo sapien
ccagatgggcgatggtgcccttaca

SEQ ID NO: 3943411 - DNA, 25 bp, Homo sapien
caatgtgcgtcaggtccagatgggc

SEQ ID NO: 3943412 - DNA, 25 bp, Homo sapien
ttctgtaaacatttgacccatttcg

SEQ ID NO: 3943413 - DNA, 25 bp, Homo sapien
caatggaattcacgatcgacggcgg

SEQ ID NO: 3943414 - DNA, 25 bp, Homo sapien
cggcggtaacattttacctattgca

SEQ ID NO: 3943415 - DNA, 25 bp, Homo sapien
ccatttcgaaatccaatccaaaagg

SEQ ID NO: 3943416 - DNA, 25 bp, Homo sapien
tgccatgggccctatagtctccagt

SEQ ID NO: 3943417 - DNA, 25 bp, Homo sapien
tgaagatccctttgcggtgaaacgt

SEQ ID NO: 3943418 - DNA, 25 bp, Homo sapien
cagttgtctaaggtaacaatgtccc

SEQ ID NO: 3943419 - DNA, 25 bp, Homo sapien
taattgactgtagggtgtgccatgg

SEQ ID NO: 3943420 - DNA, 25 bp, Homo sapien
ctcagggcacttgcattcttaggca

SEQ ID NO: 3943421 - DNA, 25 bp, Homo sapien
cagggcacttgcattcttaggcaat

SEQ ID NO: 3943422 - DNA, 25 bp, Homo sapien
agctcagggcacttgcattcttagg

SEQ ID NO: 3943423 - DNA, 25 bp, Homo sapien
gggcacttgcattcttaggcaatgt

SEQ ID NO: 3943424 - DNA, 25 bp, Homo sapien
tacaagcaagtctccatgcttgggc

SEQ ID NO: 3943425 - DNA, 25 bp, Homo sapien
gcactgtggaaggacctatgggcaa

SEQ ID NO: 3943426 - DNA, 25 bp, Homo sapien
cagacatctacaagcaagtctccat

SEQ ID NO: 3943427 - DNA, 25 bp, Homo sapien
ggacctatgggcaatggacactctc

SEQ ID NO: 3943428 - DNA, 25 bp, Homo sapien
ggagaaagggtaggcctcgcaggtg

SEQ ID NO: 3943429 - DNA, 25 bp, Homo sapien
acgggagaaagggtaggcctcgcag

SEQ ID NO: 3943430 - DNA, 25 bp, Homo sapien
aggcctcgcaggtgcacgtgggaga

SEQ ID NO: 3943431 - DNA, 25 bp, Homo sapien
aagggtaggcctcgcaggtgcacgt

SEQ ID NO: 3943432 - DNA, 25 bp, Homo sapien
gtctgaggtcttcgctgatgccagc

SEQ ID NO: 3943433 - DNA, 25 bp, Homo sapien
gctcactcatcccttcccgtctgag

SEQ ID NO: 3943434 - DNA, 25 bp, Homo sapien
ccttcccgtctgaggtcttcgctga

SEQ ID NO: 3943435 - DNA, 25 bp, Homo sapien
tcccgtctgaggtcttcgctgatgc

SEQ ID NO: 3943436 - DNA, 25 bp, Homo sapien
ccttcctggtcctccgatgactccg

SEQ ID NO: 3943437 - DNA, 25 bp, Homo sapien
tgaaaggggctgggcaatgataatt

SEQ ID NO: 3943438 - DNA, 25 bp, Homo sapien
tgtgcttctggggtgagaggtgtgg

SEQ ID NO: 3943439 - DNA, 25 bp, Homo sapien
gtcctccgatgactccgacgacgac

SEQ ID NO: 3943440 - DNA, 25 bp, Homo sapien
tgcttccattcgaaactcacgtact

SEQ ID NO: 3943441 - DNA, 25 bp, Homo sapien
tggcataacagtgcttccattcgaa

SEQ ID NO: 3943442 - DNA, 25 bp, Homo sapien
cattcgaaactcacgtactcatact

SEQ ID NO: 3943443 - DNA, 25 bp, Homo sapien
catttctgtcaatgcagggtgtttg

SEQ ID NO: 3943444 - DNA, 25 bp, Homo sapien
ggctgggaatcgaaccttgctcgca

SEQ ID NO: 3943445 - DNA, 25 bp, Homo sapien
gtttacaagtgtatcagccagcaag

SEQ ID NO: 3943446 - DNA, 25 bp, Homo sapien
aaaggctaacggcaccctgggatgt

SEQ ID NO: 3943447 - DNA, 25 bp, Homo sapien
tcctttaaacgcagggctgtgtcca

SEQ ID NO: 3943448 - DNA, 25 bp, Homo sapien
ccagcaacgggtacaggaaggagcc

SEQ ID NO: 3943449 - DNA, 25 bp, Homo sapien
gagccatgggctggccacctatgcc

SEQ ID NO: 3943450 - DNA, 25 bp, Homo sapien
gcgccccttgacagatgcacgtaag

SEQ ID NO: 3943451 - DNA, 25 bp, Homo sapien
gcgagcacatgctgcacgtcagctt

SEQ ID NO: 3943452 - DNA, 25 bp, Homo sapien
gcagaacgttcggtgcaatcacaac

SEQ ID NO: 3943453 - DNA, 25 bp, Homo sapien
ggaaaccctacgcaactaagcagtg

SEQ ID NO: 3943454 - DNA, 25 bp, Homo sapien
tttcaggtccatagagggctccttc

SEQ ID NO: 3943455 - DNA, 25 bp, Homo sapien
tactgacaaccactaacgagacctg

SEQ ID NO: 3943456 - DNA, 25 bp, Homo sapien
gcatctgtgggccagtatccatgcc

SEQ ID NO: 3943457 - DNA, 25 bp, Homo sapien
gcatctgtgggccagtatccatgtc

SEQ ID NO: 3943458 - DNA, 25 bp, Homo sapien
gtgggccagtatccatgcccagcat

SEQ ID NO: 3943459 - DNA, 25 bp, Homo sapien
tctgtgggccagtatccatgtccag

SEQ ID NO: 3943460 - DNA, 25 bp, Homo sapien
ggcactgatctttatttcgaccttc

SEQ ID NO: 3943461 - DNA, 25 bp, Homo sapien
caggcactgatctttatttcgacct

SEQ ID NO: 3943462 - DNA, 25 bp, Homo sapien
ttcaggcactgatctttatttcgac

SEQ ID NO: 3943463 - DNA, 25 bp, Homo sapien
cactgatctttatttcgaccttctg

SEQ ID NO: 3943464 - DNA, 25 bp, Homo sapien
tgctgctagacagcaccttccatcc

SEQ ID NO: 3943465 - DNA, 25 bp, Homo sapien
gtttgagggctcgagcccccgtgct

SEQ ID NO: 3943466 - DNA, 25 bp, Homo sapien
ggttgacctgcagagtctgaccggg

SEQ ID NO: 3943467 - DNA, 25 bp, Homo sapien
gacagcaccttccatccatttctag

SEQ ID NO: 3943468 - DNA, 25 bp, Homo sapien
gctggacctccgtgtctgcatgtga

SEQ ID NO: 3943469 - DNA, 25 bp, Homo sapien
tgagccgtttatcgcaggaaagcct

SEQ ID NO: 3943470 - DNA, 25 bp, Homo sapien
ggaaagcctccatcattgttgtcaa

SEQ ID NO: 3943471 - DNA, 25 bp, Homo sapien
gattccagggaagattgagccgttt

SEQ ID NO: 3943472 - DNA, 25 bp, Homo sapien
tgagagctatgatgagagtggaggt

SEQ ID NO: 3943473 - DNA, 25 bp, Homo sapien
gagtggaggtgaatgcagctggtaa

SEQ ID NO: 3943474 - DNA, 25 bp, Homo sapien
gaatgcagctggtaagaaagccagc

SEQ ID NO: 3943475 - DNA, 25 bp, Homo sapien
aggtgaatgcagctggtaagaaagc

SEQ ID NO: 3943476 - DNA, 25 bp, Homo sapien
tgggagaaagttgcacagcagctgc

SEQ ID NO: 3943477 - DNA, 25 bp, Homo sapien
cagctgctttgcatggaggaccttc

SEQ ID NO: 3943478 - DNA, 25 bp, Homo sapien
tggtgcagacgcttctgcaaaggtc

SEQ ID NO: 3943479 - DNA, 25 bp, Homo sapien
catggcccctggatttcgccctggt

SEQ ID NO: 3943480 - DNA, 25 bp, Homo sapien
gctccacgaatctgaaggacagagg

SEQ ID NO: 3943481 - DNA, 25 bp, Homo sapien
tcagaaagtatcgaggaactcaggt

SEQ ID NO: 3943482 - DNA, 25 bp, Homo sapien
gtgtttgggtgttggctgatcaaca

SEQ ID NO: 3943483 - DNA, 25 bp, Homo sapien
ctgatcaacatggtcaggccaaggg

SEQ ID NO: 3943484 - DNA, 25 bp, Homo sapien
ttttgtgagctctactgcacatatg

SEQ ID NO: 3943485 - DNA, 25 bp, Homo sapien
gggccagcagcgaactgtctagctt

SEQ ID NO: 3943486 - DNA, 25 bp, Homo sapien
gagctctactgcacatatgatcttc

SEQ ID NO: 3943487 - DNA, 25 bp, Homo sapien
ctgacatgatgccaatttcaaacac

SEQ ID NO: 3943488 - DNA, 25 bp, Homo sapien
gggaggcctcacactcatggcagag

SEQ ID NO: 3943489 - DNA, 25 bp, Homo sapien
aggcctcacactcatggcagaggac

SEQ ID NO: 3943490 - DNA, 25 bp, Homo sapien
ggaggcctcacactcatggcagagg

SEQ ID NO: 3943491 - DNA, 25 bp, Homo sapien
gaggcctcacactcatggcagagga

SEQ ID NO: 3943492 - DNA, 25 bp, Homo sapien
cacgcaccatgctgtttgaagaaag

SEQ ID NO: 3943493 - DNA, 25 bp, Homo sapien
ggaatgatgagacccgtgacttcag

SEQ ID NO: 3943494 - DNA, 25 bp, Homo sapien
tcagcagccattagccacgagtggc

SEQ ID NO: 3943495 - DNA, 25 bp, Homo sapien
taagcagacacctgtggtgagcagc

SEQ ID NO: 3943496 - DNA, 25 bp, Homo sapien
gagagtgtcagctcccagcgtggct

SEQ ID NO: 3943497 - DNA, 25 bp, Homo sapien
ggcatcacaggtagtgggtccagca

SEQ ID NO: 3943498 - DNA, 25 bp, Homo sapien
agccagccacgtggtgagccagaag

SEQ ID NO: 3943499 - DNA, 25 bp, Homo sapien
gggtatttgaggtacaggatgatcc

SEQ ID NO: 3943500 - DNA, 25 bp, Homo sapien
tgccagtgccgaattacagcaatct

SEQ ID NO: 3943501 - DNA, 25 bp, Homo sapien
aaaacctcatagcttcgaaccccag

SEQ ID NO: 3943502 - DNA, 25 bp, Homo sapien
agcaatcttggtgcctgctgaggtg

SEQ ID NO: 3943503 - DNA, 25 bp, Homo sapien
aaagatatcttcttgaggagaggcc

SEQ ID NO: 3943504 - DNA, 25 bp, Homo sapien
caaactggaatttcttccatacttt

SEQ ID NO: 3943505 - DNA, 25 bp, Homo sapien
ctgtagaccatcaaactggaatttc

SEQ ID NO: 3943506 - DNA, 25 bp, Homo sapien
tcttccatactttcttcttatgcat

SEQ ID NO: 3943507 - DNA, 25 bp, Homo sapien
ttcttccatactttcttcttatgca

SEQ ID NO: 3943508 - DNA, 25 bp, Homo sapien
agtcctccttctcctccttggaagt

SEQ ID NO: 3943509 - DNA, 25 bp, Homo sapien
tcctccttctcctccttggaagtta

SEQ ID NO: 3943510 - DNA, 25 bp, Homo sapien
ctccttctcctccttggaagttagt

SEQ ID NO: 3943511 - DNA, 25 bp, Homo sapien
tcagtcctccttctcctccttggaa

SEQ ID NO: 3943512 - DNA, 25 bp, Homo sapien
tcctttgccaccttggacactttgg

SEQ ID NO: 3943513 - DNA, 25 bp, Homo sapien
gaacatcaggaacaccacccttgaa

SEQ ID NO: 3943514 - DNA, 25 bp, Homo sapien
tgccacagcagtagatgaacatcag

SEQ ID NO: 3943515 - DNA, 25 bp, Homo sapien
gtgggttccaatgcctgctacagga

SEQ ID NO: 3943516 - DNA, 25 bp, Homo sapien
tgtgacttcttggaagcggggtcca

SEQ ID NO: 3943517 - DNA, 25 bp, Homo sapien
gggtccaagtcgaccgctggtgtct

SEQ ID NO: 3943518 - DNA, 25 bp, Homo sapien
gatgccccctgaaggcacacacaag

SEQ ID NO: 3943519 - DNA, 25 bp, Homo sapien
tgtgtgcgggtccatgacatgtgac

SEQ ID NO: 3943520 - DNA, 25 bp, Homo sapien
gctgcgtggcatggaagcacacata

SEQ ID NO: 3943521 - DNA, 25 bp, Homo sapien
tcatggtgctctggctcaaaggagt

SEQ ID NO: 3943522 - DNA, 25 bp, Homo sapien
ccaagaggtagaccgtgacagtgca

SEQ ID NO: 3943523 - DNA, 25 bp, Homo sapien
taaatcctgagtcaaacacagctgg

SEQ ID NO: 3943524 - DNA, 25 bp, Homo sapien
aggagccctgtggttggaaagctct

SEQ ID NO: 3943525 - DNA, 25 bp, Homo sapien
tactgcttgccggtgttggcctgca

SEQ ID NO: 3943526 - DNA, 25 bp, Homo sapien
gaaagctctttgatggtccttctac

SEQ ID NO: 3943527 - DNA, 25 bp, Homo sapien
gtcccaaagcccgtgtactgcttgc

SEQ ID NO: 3943528 - DNA, 25 bp, Homo sapien
ttcttaatggcatcttggcccaggg

SEQ ID NO: 3943529 - DNA, 25 bp, Homo sapien
tcttaatggcatcttggcccaggga

SEQ ID NO: 3943530 - DNA, 25 bp, Homo sapien
cttaatggcatcttggcccagggag

SEQ ID NO: 3943531 - DNA, 25 bp, Homo sapien
taatggcatcttggcccagggagtc

SEQ ID NO: 3943532 - DNA, 25 bp, Homo sapien
tggcccctgcgtctgtgggttgagg

SEQ ID NO: 3943533 - DNA, 25 bp, Homo sapien
caatcctccatggactgatgctgct

SEQ ID NO: 3943534 - DNA, 25 bp, Homo sapien
tgggttgagggtgaccgatctcagc

SEQ ID NO: 3943535 - DNA, 25 bp, Homo sapien
agcccaatcctccatggactgatgc

SEQ ID NO: 3943536 - DNA, 25 bp, Homo sapien
gccttgggtccgatggaggctgctg

SEQ ID NO: 3943537 - DNA, 25 bp, Homo sapien
gctgaggttcgtcagggcggtcgga

SEQ ID NO: 3943538 - DNA, 25 bp, Homo sapien
ctctgcgttgcaagtttcccctcgc

SEQ ID NO: 3943539 - DNA, 25 bp, Homo sapien
tcgctgcctgcgaaagaaacctctc

SEQ ID NO: 3943540 - DNA, 25 bp, Homo sapien
caagtgagaagagagcccgcgggaa

SEQ ID NO: 3943541 - DNA, 25 bp, Homo sapien
ccttgagcggcaggactcctgtggc

SEQ ID NO: 3943542 - DNA, 25 bp, Homo sapien
agagcccgcgggaaccgccttgagc

SEQ ID NO: 3943543 - DNA, 25 bp, Homo sapien
gggaaccgccttgagcggcaggact

SEQ ID NO: 3943544 - DNA, 25 bp, Homo sapien
ctttaaagttgagaagactttgatg

SEQ ID NO: 3943545 - DNA, 25 bp, Homo sapien
gactttgatgcaaataccctggcaa

SEQ ID NO: 3943546 - DNA, 25 bp, Homo sapien
gaagactttgatgcaaataccctgg

SEQ ID NO: 3943547 - DNA, 25 bp, Homo sapien
aataccctggcaaaggctctgccca

SEQ ID NO: 3943548 - DNA, 25 bp, Homo sapien
ggtagagctgttatgtagagttctc

SEQ ID NO: 3943549 - DNA, 25 bp, Homo sapien
ttgagtggaacaccaaaactgacat

SEQ ID NO: 3943550 - DNA, 25 bp, Homo sapien
cagaggagtttcaacctctttccag

SEQ ID NO: 3943551 - DNA, 25 bp, Homo sapien
ctctttccaggaaattgagtggaac

SEQ ID NO: 3943552 - DNA, 25 bp, Homo sapien
ctgatcattcgaggtcagcatctcc

SEQ ID NO: 3943553 - DNA, 25 bp, Homo sapien
ttgttggcacagtcccctgatcatt

SEQ ID NO: 3943554 - DNA, 25 bp, Homo sapien
agccaacctgaggatgaagacaaag

SEQ ID NO: 3943555 - DNA, 25 bp, Homo sapien
cagaaagccaacctgaggatgaaga

SEQ ID NO: 3943556 - DNA, 25 bp, Homo sapien
ggcactgcagcctactcgtcaaaag

SEQ ID NO: 3943557 - DNA, 25 bp, Homo sapien
gacggaggtgcttatcatgtaccca

SEQ ID NO: 3943558 - DNA, 25 bp, Homo sapien
tgtgtgctcttaggtaatcgcctgg

SEQ ID NO: 3943559 - DNA, 25 bp, Homo sapien
gacacagtgatggtatcttgcagct

SEQ ID NO: 3943560 - DNA, 25 bp, Homo sapien
caacacgggtttgagtccacgtatc

SEQ ID NO: 3943561 - DNA, 25 bp, Homo sapien
gaaaacgcaactacagtggaccctg

SEQ ID NO: 3943562 - DNA, 25 bp, Homo sapien
caacgtaggtatgaactggttcaac

SEQ ID NO: 3943563 - DNA, 25 bp, Homo sapien
tgtgccccatttgctcagtttctag

SEQ ID NO: 3943564 - DNA, 25 bp, Homo sapien
tgtccacgactaatggtgaggttgg

SEQ ID NO: 3943565 - DNA, 25 bp, Homo sapien
ggctgtccacgactaatggtgaggt

SEQ ID NO: 3943566 - DNA, 25 bp, Homo sapien
gagggctgtccacgactaatggtga

SEQ ID NO: 3943567 - DNA, 25 bp, Homo sapien
tggtgaggttggtgcacgttgtcat

SEQ ID NO: 3943568 - DNA, 25 bp, Homo sapien
tcataagagcacttttccaaacagg

SEQ ID NO: 3943569 - DNA, 25 bp, Homo sapien
gaagaggtgacccaaatttcaagac

SEQ ID NO: 3943570 - DNA, 25 bp, Homo sapien
tcaagacaatgttggatgcaaacgg

SEQ ID NO: 3943571 - DNA, 25 bp, Homo sapien
gctctgcccgtgtcttccgaagata

SEQ ID NO: 3943572 - DNA, 25 bp, Homo sapien
accccgggcagtacctgccctggca

SEQ ID NO: 3943573 - DNA, 25 bp, Homo sapien
tggacagtcgcagctttggtgggtg

SEQ ID NO: 3943574 - DNA, 25 bp, Homo sapien
gagttgccgtgatttgctgagatca

SEQ ID NO: 3943575 - DNA, 25 bp, Homo sapien
gggcagaccatcaccccgggcagta

SEQ ID NO: 3943576 - DNA, 25 bp, Homo sapien
ctggccaaagactgcacccggctgc

SEQ ID NO: 3943577 - DNA, 25 bp, Homo sapien
gacgctgcgggagccgctttctcca

SEQ ID NO: 3943578 - DNA, 25 bp, Homo sapien
aactcgcctgcgagctggtagggcc

SEQ ID NO: 3943579 - DNA, 25 bp, Homo sapien
gatgctgagccctgaactcgcctgc

SEQ ID NO: 3943580 - DNA, 25 bp, Homo sapien
tgtgtagccttgacgttgagcagcc

SEQ ID NO: 3943581 - DNA, 25 bp, Homo sapien
gacactcccttgacgggttgtgtag

SEQ ID NO: 3943582 - DNA, 25 bp, Homo sapien
cttcttcgggccgtggaggtcacag

SEQ ID NO: 3943583 - DNA, 25 bp, Homo sapien
tatgatttgtcaaacccgtgcgcac

SEQ ID NO: 3943584 - DNA, 25 bp, Homo sapien
tccaccgcggtttgggctaatgatg

SEQ ID NO: 3943585 - DNA, 25 bp, Homo sapien
cagagcgcgtttcttttggcgtgga

SEQ ID NO: 3943586 - DNA, 25 bp, Homo sapien
ttaagcaaccgaggcgcactctggt

SEQ ID NO: 3943587 - DNA, 25 bp, Homo sapien
tgttctagctctgcaaccgagcgct

SEQ ID NO: 3943588 - DNA, 25 bp, Homo sapien
tacccaaatgtacgcattttccatg

SEQ ID NO: 3943589 - DNA, 25 bp, Homo sapien
tgttcttcaaggaagtatttgacaa

SEQ ID NO: 3943590 - DNA, 25 bp, Homo sapien
cagaaacagaaagcgcctgagacag

SEQ ID NO: 3943591 - DNA, 25 bp, Homo sapien
gccctcttcccggtgagattttcag

SEQ ID NO: 3943592 - DNA, 25 bp, Homo sapien
tgagatacttctcgcacgctctaag

SEQ ID NO: 3943593 - DNA, 25 bp, Homo sapien
caaagtctcccttggcagaagagtg

SEQ ID NO: 3943594 - DNA, 25 bp, Homo sapien
cgctctaagtgtgcacgcgtcatgc

SEQ ID NO: 3943595 - DNA, 25 bp, Homo sapien
tgtggcccgcacagccagcacaggg

SEQ ID NO: 3943596 - DNA, 25 bp, Homo sapien
tccgccagatctgcgctcgcgggag

SEQ ID NO: 3943597 - DNA, 25 bp, Homo sapien
ctcgcgggagaagagagccgccttc

SEQ ID NO: 3943598 - DNA, 25 bp, Homo sapien
cttcctggctcggacgccttcattt

SEQ ID NO: 3943599 - DNA, 25 bp, Homo sapien
cattttcggcgggagacgcctgtcg

SEQ ID NO: 3943600 - DNA, 25 bp, Homo sapien
ccagggttccgagttgagaagaggg

SEQ ID NO: 3943601 - DNA, 25 bp, Homo sapien
aaggtggtgccgagagcggagcgca

SEQ ID NO: 3943602 - DNA, 25 bp, Homo sapien
ggtgagtgctgctctcgcagcgact

SEQ ID NO: 3943603 - DNA, 25 bp, Homo sapien
gttttcgcgggtcatcgcgaagagc

SEQ ID NO: 3943604 - DNA, 25 bp, Homo sapien
cgcagcacgagtcgcggccgctttg

SEQ ID NO: 3943605 - DNA, 25 bp, Homo sapien
tgcgccgctcccgggatttttcgga

SEQ ID NO: 3943606 - DNA, 25 bp, Homo sapien
agcgcaggcggaaaacgaaagcgca

SEQ ID NO: 3943607 - DNA, 25 bp, Homo sapien
gactcgcccagcagcttgcgagcgg

SEQ ID NO: 3943608 - DNA, 25 bp, Homo sapien
cgggcgccgaagacatcgggtggct

SEQ ID NO: 3943609 - DNA, 25 bp, Homo sapien
gcgccgaagacatcgggtggctgct

SEQ ID NO: 3943610 - DNA, 25 bp, Homo sapien
ctcgggcgccgaagacatcgggtgg

SEQ ID NO: 3943611 - DNA, 25 bp, Homo sapien
ggcgccgaagacatcgggtggctgc

SEQ ID NO: 3943612 - DNA, 25 bp, Homo sapien
cgtcaggcgcttggtgggtgaactc

SEQ ID NO: 3943613 - DNA, 25 bp, Homo sapien
ccggatgccggcgttggtcttcttg

SEQ ID NO: 3943614 - DNA, 25 bp, Homo sapien
gatgtaggaatagggcggcttctcc

SEQ ID NO: 3943615 - DNA, 25 bp, Homo sapien
tggcatttccttcggaagccgcgcg

SEQ ID NO: 3943616 - DNA, 25 bp, Homo sapien
agcgccaggctgttgggcgggcacg

SEQ ID NO: 3943617 - DNA, 25 bp, Homo sapien
cgagccctggaagccgtaggtgtcc

SEQ ID NO: 3943618 - DNA, 25 bp, Homo sapien
gaagccgagcccgttcatcatgctg

SEQ ID NO: 3943619 - DNA, 25 bp, Homo sapien
cgttgcccggcaagtggccgttcat

SEQ ID NO: 3943620 - DNA, 25 bp, Homo sapien
cgtggtgcgggtactcgccggccgc

SEQ ID NO: 3943621 - DNA, 25 bp, Homo sapien
ctgtcgtggtgcgggtactcgccgg

SEQ ID NO: 3943622 - DNA, 25 bp, Homo sapien
tggtgcgggtactcgccggccgccg

SEQ ID NO: 3943623 - DNA, 25 bp, Homo sapien
gtcgtggtgcgggtactcgccggcc

SEQ ID NO: 3943624 - DNA, 25 bp, Homo sapien
gctgttctggtgcagatacggctgc

SEQ ID NO: 3943625 - DNA, 25 bp, Homo sapien
agtagacggcgtgcggctccatgac

SEQ ID NO: 3943626 - DNA, 25 bp, Homo sapien
gccgccgagcccgagtagacggcgt

SEQ ID NO: 3943627 - DNA, 25 bp, Homo sapien
tgcttgatataagaggcgccgctgt

SEQ ID NO: 3943628 - DNA, 25 bp, Homo sapien
ctggtcaggcctggagcagctggca

SEQ ID NO: 3943629 - DNA, 25 bp, Homo sapien
tggtcaggcctggagcagctggcag

SEQ ID NO: 3943630 - DNA, 25 bp, Homo sapien
aggaggcgaggctgctgcatctccc

SEQ ID NO: 3943631 - DNA, 25 bp, Homo sapien
tgcatctcccttggcagatgcttct

SEQ ID NO: 3943632 - DNA, 25 bp, Homo sapien
tcactccagctttttccagagctgg

SEQ ID NO: 3943633 - DNA, 25 bp, Homo sapien
gtgtggggacctgaaaacttggatc

SEQ ID NO: 3943634 - DNA, 25 bp, Homo sapien
cgccatggcgttgaaagagaagaca

SEQ ID NO: 3943635 - DNA, 25 bp, Homo sapien
cacgcaaggcttgatgtcttggtag

SEQ ID NO: 3943636 - DNA, 25 bp, Homo sapien
gacaaactcctttcggtcacacatg

SEQ ID NO: 3943637 - DNA, 25 bp, Homo sapien
ccccgccggccgagtgcatggaaga

SEQ ID NO: 3943638 - DNA, 25 bp, Homo sapien
tgtttaaagacggacagtggcttcc

SEQ ID NO: 3943639 - DNA, 25 bp, Homo sapien
tactgataaacggaggagcctacgc

SEQ ID NO: 3943640 - DNA, 25 bp, Homo sapien
gctccctgcaaaagacggctctaaa

SEQ ID NO: 3943641 - DNA, 25 bp, Homo sapien
tctcaggcgggttcaacaggatcaa

SEQ ID NO: 3943642 - DNA, 25 bp, Homo sapien
tctagttgatacaattttaaaggcc

SEQ ID NO: 3943643 - DNA, 25 bp, Homo sapien
caattttatttctagttgatacaat

SEQ ID NO: 3943644 - DNA, 25 bp, Homo sapien
atgcaattttatttctagttgatac

SEQ ID NO: 3943645 - DNA, 25 bp, Homo sapien
ttatttctagttgatacaattttaa

SEQ ID NO: 3943646 - DNA, 25 bp, Homo sapien
ctcggtagccgggaactggaataga

SEQ ID NO: 3943647 - DNA, 25 bp, Homo sapien
gaggacgaactgtgacttaggagat

SEQ ID NO: 3943648 - DNA, 25 bp, Homo sapien
aatgttacaggattggaaaggtgcc

SEQ ID NO: 3943649 - DNA, 25 bp, Homo sapien
tggaaggaccgcaccaacaatgtga

SEQ ID NO: 3943650 - DNA, 25 bp, Homo sapien
cagagcaccggagaaattaccccca

SEQ ID NO: 3943651 - DNA, 25 bp, Homo sapien
aattgcccaggcgagtttattgata

SEQ ID NO: 3943652 - DNA, 25 bp, Homo sapien
acactaattgcccaggcgagtttat

SEQ ID NO: 3943653 - DNA, 25 bp, Homo sapien
tgcccaggcgagtttattgataatt

SEQ ID NO: 3943654 - DNA, 25 bp, Homo sapien
gaaaagtctctctccagctatgtga

SEQ ID NO: 3943655 - DNA, 25 bp, Homo sapien
tgtcgcggcgagaaaagccaggtct

SEQ ID NO: 3943656 - DNA, 25 bp, Homo sapien
gggaatttagctgtccccacactgg

SEQ ID NO: 3943657 - DNA, 25 bp, Homo sapien
tcctttgagcgaaagctgcctgctg

SEQ ID NO: 3943658 - DNA, 25 bp, Homo sapien
tctcagctggtctaaggggacccca

SEQ ID NO: 3943659 - DNA, 25 bp, Homo sapien
gcccagaagtttccatagagtgtgg

SEQ ID NO: 3943660 - DNA, 25 bp, Homo sapien
cagaactctgacgtactggtgccca

SEQ ID NO: 3943661 - DNA, 25 bp, Homo sapien
tgcagaagacgccggaaaagggcct

SEQ ID NO: 3943662 - DNA, 25 bp, Homo sapien
tgaagccgcgattgcagcgacagct

SEQ ID NO: 3943663 - DNA, 25 bp, Homo sapien
aataaccaatcgaggcttgctaagc

SEQ ID NO: 3943664 - DNA, 25 bp, Homo sapien
catttcccgtagtccttgcagtcac

SEQ ID NO: 3943665 - DNA, 25 bp, Homo sapien
agaggagtcagtttgcccaccgtgc

SEQ ID NO: 3943666 - DNA, 25 bp, Homo sapien
acaagtctagttctgcagtttgttg

SEQ ID NO: 3943667 - DNA, 25 bp, Homo sapien
aggatgaccgcaggcaggcaaaggt

SEQ ID NO: 3943668 - DNA, 25 bp, Homo sapien
caaagtgtttgacaagtctagttct

SEQ ID NO: 3943669 - DNA, 25 bp, Homo sapien
gtttgacaagtctagttctgcagtt

SEQ ID NO: 3943670 - DNA, 25 bp, Homo sapien
cacagggttttttcacatatggttt

SEQ ID NO: 3943671 - DNA, 25 bp, Homo sapien
ctgtattgacattcacagggttttt

SEQ ID NO: 3943672 - DNA, 25 bp, Homo sapien
cattcacagggttttttcacatatg

SEQ ID NO: 3943673 - DNA, 25 bp, Homo sapien
ttcacagggttttttcacatatggt

SEQ ID NO: 3943674 - DNA, 25 bp, Homo sapien
tctgcaccctcagctgagcggcagg

SEQ ID NO: 3943675 - DNA, 25 bp, Homo sapien
gctgtgacacaggtgccggcgttcc

SEQ ID NO: 3943676 - DNA, 25 bp, Homo sapien
agctgagcggcagggctgtgacaca

SEQ ID NO: 3943677 - DNA, 25 bp, Homo sapien
tgtgacacaggtgccggcgttcccg

SEQ ID NO: 3943678 - DNA, 25 bp, Homo sapien
ctggctgctggcccctggcatgttc

SEQ ID NO: 3943679 - DNA, 25 bp, Homo sapien
gctgctggcccctggcatgttctta

SEQ ID NO: 3943680 - DNA, 25 bp, Homo sapien
ggctgctggcccctggcatgttctt

SEQ ID NO: 3943681 - DNA, 25 bp, Homo sapien
ctgctggcccctggcatgttcttac

SEQ ID NO: 3943682 - DNA, 25 bp, Homo sapien
tcttcacgacagcaggggctggagc

SEQ ID NO: 3943683 - DNA, 25 bp, Homo sapien
gctggagccaccttcttccccttag

SEQ ID NO: 3943684 - DNA, 25 bp, Homo sapien
tggagccaccttcttccccttagcc

SEQ ID NO: 3943685 - DNA, 25 bp, Homo sapien
ccttagccttctttcctttcagcat

SEQ ID NO: 3943686 - DNA, 25 bp, Homo sapien
tgtccaataccaaaatccttaggcc

SEQ ID NO: 3943687 - DNA, 25 bp, Homo sapien
ctgtccaataccaaaatccttaggc

SEQ ID NO: 3943688 - DNA, 25 bp, Homo sapien
taggccttttctcaaacgggattca

SEQ ID NO: 3943689 - DNA, 25 bp, Homo sapien
ctgatataacggggccatttcacaa

SEQ ID NO: 3943690 - DNA, 25 bp, Homo sapien
tgaggtcccttttgggctggatgtc

SEQ ID NO: 3943691 - DNA, 25 bp, Homo sapien
ttcacaaagcaggtgaggtcccttt

SEQ ID NO: 3943692 - DNA, 25 bp, Homo sapien
catttcacaaagcaggtgaggtccc

SEQ ID NO: 3943693 - DNA, 25 bp, Homo sapien
gccagcctaagcagctgaggagcta

SEQ ID NO: 3943694 - DNA, 25 bp, Homo sapien
cagcctaagcagctgaggagctatt

SEQ ID NO: 3943695 - DNA, 25 bp, Homo sapien
cctaagcagctgaggagctatttgg

SEQ ID NO: 3943696 - DNA, 25 bp, Homo sapien
ctgaggagctatttggtggtccggg

SEQ ID NO: 3943697 - DNA, 25 bp, Homo sapien
gacagtcgtacagatctccctgtgg

SEQ ID NO: 3943698 - DNA, 25 bp, Homo sapien
ggctcaatgggctccacgtcgtgtg

SEQ ID NO: 3943699 - DNA, 25 bp, Homo sapien
aactggctcaatgggctccacgtcg

SEQ ID NO: 3943700 - DNA, 25 bp, Homo sapien
tgaaggcgacagtcgtacagatctc

SEQ ID NO: 3943701 - DNA, 25 bp, Homo sapien
ggagcaccacttgggcaaccttgac

SEQ ID NO: 3943702 - DNA, 25 bp, Homo sapien
cactgcgggttgtgtgaacgttagc

SEQ ID NO: 3943703 - DNA, 25 bp, Homo sapien
cccttgtgtcaagagtggaccctgg

SEQ ID NO: 3943704 - DNA, 25 bp, Homo sapien
tagccgaaacgatgtgcctgaggtg

SEQ ID NO: 3943705 - DNA, 25 bp, Homo sapien
tggagacttcgcaaagaaaacgcag

SEQ ID NO: 3943706 - DNA, 25 bp, Homo sapien
aagaaaatgttctcgggacactcgg

SEQ ID NO: 3943707 - DNA, 25 bp, Homo sapien
gatcccgggcaacaagtcaaaataa

SEQ ID NO: 3943708 - DNA, 25 bp, Homo sapien
agaagcgcttttgcaattgatcccg

SEQ ID NO: 3943709 - DNA, 25 bp, Homo sapien
gctcccgatggaccccatcagaaga

SEQ ID NO: 3943710 - DNA, 25 bp, Homo sapien
ctcacctcaaggcttctggtgctgt

SEQ ID NO: 3943711 - DNA, 25 bp, Homo sapien
cagaagagcagtgcttacccggagg

SEQ ID NO: 3943712 - DNA, 25 bp, Homo sapien
tcagagccaagtaactttcagttct

SEQ ID NO: 3943713 - DNA, 25 bp, Homo sapien
ggcttggcaaaacgcctgtcacggg

SEQ ID NO: 3943714 - DNA, 25 bp, Homo sapien
tgtttcaaccggcaatgggtcccga

SEQ ID NO: 3943715 - DNA, 25 bp, Homo sapien
gggcggcgctcgacaatgactagct

SEQ ID NO: 3943716 - DNA, 25 bp, Homo sapien
tacatgaggagcaatcaaggccggc

SEQ ID NO: 3943717 - DNA, 25 bp, Homo sapien
tcctaaggaggtcaaacggcacatt

SEQ ID NO: 3943718 - DNA, 25 bp, Homo sapien
tgatgtaccaggcacgtggctacgg

SEQ ID NO: 3943719 - DNA, 25 bp, Homo sapien
cattcgctcagggagtggttcctag

SEQ ID NO: 3943720 - DNA, 25 bp, Homo sapien
tgttgcggacaccacataggaagag

SEQ ID NO: 3943721 - DNA, 25 bp, Homo sapien
catggaactgaagagaatgcccttc

SEQ ID NO: 3943722 - DNA, 25 bp, Homo sapien
ttttgagcacagctgggtaacagaa

SEQ ID NO: 3943723 - DNA, 25 bp, Homo sapien
gccaggctgaccatcggagagactt

SEQ ID NO: 3943724 - DNA, 25 bp, Homo sapien
ccatgaaaggcggaaaggacatcca

SEQ ID NO: 3943725 - DNA, 25 bp, Homo sapien
ttgtaagtcagtgagccgaacgcgg

SEQ ID NO: 3943726 - DNA, 25 bp, Homo sapien
gtgttcctggaataataagcggcga

SEQ ID NO: 3943727 - DNA, 25 bp, Homo sapien
gactccgtgggtgttggcgtcatct

SEQ ID NO: 3943728 - DNA, 25 bp, Homo sapien
ggcgtcatcttgaggccaaccaggg

SEQ ID NO: 3943729 - DNA, 25 bp, Homo sapien
cgggcggatcggcatcctggagggc

SEQ ID NO: 3943730 - DNA, 25 bp, Homo sapien
gctgcttccgagacggctcgccggc

SEQ ID NO: 3943731 - DNA, 25 bp, Homo sapien
gggtccgagcggctgccccgctgag

SEQ ID NO: 3943732 - DNA, 25 bp, Homo sapien
ccagcgaatcggcagccccgagggt

SEQ ID NO: 3943733 - DNA, 25 bp, Homo sapien
tcaccaggtccttaggcgccgcggg

SEQ ID NO: 3943734 - DNA, 25 bp, Homo sapien
gcccggtagtaattctgctcgctca

SEQ ID NO: 3943735 - DNA, 25 bp, Homo sapien
ggtggccggaatagacgcccatggg

SEQ ID NO: 3943736 - DNA, 25 bp, Homo sapien
cttctcgggcgcgttctggatggcc

SEQ ID NO: 3943737 - DNA, 25 bp, Homo sapien
cgcctcgctcttgatcaccaccttc

SEQ ID NO: 3943738 - DNA, 25 bp, Homo sapien
cttggtgatgaccggcagcgccggg

SEQ ID NO: 3943739 - DNA, 25 bp, Homo sapien
gacgccgcctcgctcttgatcacca

SEQ ID NO: 3943740 - DNA, 25 bp, Homo sapien
ctccttgggggcgtccgctaggtgg

SEQ ID NO: 3943741 - DNA, 25 bp, Homo sapien
aggcagcccgttgggcgccgcggcg

SEQ ID NO: 3943742 - DNA, 25 bp, Homo sapien
tggtgctccggcagcgagccgtcgg

SEQ ID NO: 3943743 - DNA, 25 bp, Homo sapien
gggtcatgatgttctccacgctgaa

SEQ ID NO: 3943744 - DNA, 25 bp, Homo sapien
ggcggcgacgttcgcagggtcatga

SEQ ID NO: 3943745 - DNA, 25 bp, Homo sapien
cggctggccgtaggcggcgggcggc

SEQ ID NO: 3943746 - DNA, 25 bp, Homo sapien
ggcgcggcggcgtagggcagcgcca

SEQ ID NO: 3943747 - DNA, 25 bp, Homo sapien
gcacggctggccgtaggcggcgggc

SEQ ID NO: 3943748 - DNA, 25 bp, Homo sapien
cggcgcggcggcgtagggcagcgcc

SEQ ID NO: 3943749 - DNA, 25 bp, Homo sapien
acaggctcatcgctcgcatgctgca

SEQ ID NO: 3943750 - DNA, 25 bp, Homo sapien
ggtgtacaggctcatcgctcgcatg

SEQ ID NO: 3943751 - DNA, 25 bp, Homo sapien
tcgctcgcatgctgcactggtagcc

SEQ ID NO: 3943752 - DNA, 25 bp, Homo sapien
gctcggccccggtgtacaggctcat

SEQ ID NO: 3943753 - DNA, 25 bp, Homo sapien
ggccgctcgggtggtccgagagggc

SEQ ID NO: 3943754 - DNA, 25 bp, Homo sapien
cctcgtccagggcgggcgggacgca

SEQ ID NO: 3943755 - DNA, 25 bp, Homo sapien
ggtggtccgagagggcctcgtccag

SEQ ID NO: 3943756 - DNA, 25 bp, Homo sapien
tcgggtggtccgagagggcctcgtc

SEQ ID NO: 3943757 - DNA, 25 bp, Homo sapien
ctggccggcggcgaggttgagagcg

SEQ ID NO: 3943758 - DNA, 25 bp, Homo sapien
tggtggtggcccgtggcggcgagcg

SEQ ID NO: 3943759 - DNA, 25 bp, Homo sapien
ccctcctggccggcggcgaggttga

SEQ ID NO: 3943760 - DNA, 25 bp, Homo sapien
ccggcggcgaggttgagagcgctca

SEQ ID NO: 3943761 - DNA, 25 bp, Homo sapien
ctgtggttgagataccaggaggccg

SEQ ID NO: 3943762 - DNA, 25 bp, Homo sapien
tgtggttgagataccaggaggccgc

SEQ ID NO: 3943763 - DNA, 25 bp, Homo sapien
aaagtttgctgctgggccgcgaacg

SEQ ID NO: 3943764 - DNA, 25 bp, Homo sapien
ggcattgccactcacctgggactcc

SEQ ID NO: 3943765 - DNA, 25 bp, Homo sapien
ccagccggtgggagttgaacatctc

SEQ ID NO: 3943766 - DNA, 25 bp, Homo sapien
gactccccgagggtcgagttctcaa

SEQ ID NO: 3943767 - DNA, 25 bp, Homo sapien
tcagtatttcgtgcagtcgtaggag

SEQ ID NO: 3943768 - DNA, 25 bp, Homo sapien
ggctgcgtggcgatagagaggcggc

SEQ ID NO: 3943769 - DNA, 25 bp, Homo sapien
gaggcggcgtggatctgtagggcag

SEQ ID NO: 3943770 - DNA, 25 bp, Homo sapien
tatttcgtgcagtcgtaggagtagg

SEQ ID NO: 3943771 - DNA, 25 bp, Homo sapien
ggaatactcagggtggaacctacta

SEQ ID NO: 3943772 - DNA, 25 bp, Homo sapien
cacatttgtacagcacggttggaga

SEQ ID NO: 3943773 - DNA, 25 bp, Homo sapien
agttacctgcgctcttcacagacgg

SEQ ID NO: 3943774 - DNA, 25 bp, Homo sapien
tactcattttgttgggctgcgtccc

SEQ ID NO: 3943775 - DNA, 25 bp, Homo sapien
tgcccggatgctccagaaggactgg

SEQ ID NO: 3943776 - DNA, 25 bp, Homo sapien
tgtagattcataagcctcggatccc

SEQ ID NO: 3943777 - DNA, 25 bp, Homo sapien
gtcacttggtgagggctcacctccc

SEQ ID NO: 3943778 - DNA, 25 bp, Homo sapien
ctcggatcccagaaaagcgcgtcat

SEQ ID NO: 3943779 - DNA, 25 bp, Homo sapien
tctcgggaccgtacagatacagcat

SEQ ID NO: 3943780 - DNA, 25 bp, Homo sapien
cggcccgaggcagctagagcagccg

SEQ ID NO: 3943781 - DNA, 25 bp, Homo sapien
cagccggggatcgaagaggtgactc

SEQ ID NO: 3943782 - DNA, 25 bp, Homo sapien
tacagcatgggcgaggcggccaggg

SEQ ID NO: 3943783 - DNA, 25 bp, Homo sapien
agccctgccggttgtcgtggtagaa

SEQ ID NO: 3943784 - DNA, 25 bp, Homo sapien
gctcgggcgcgtcctggatcgccat

SEQ ID NO: 3943785 - DNA, 25 bp, Homo sapien
tgctcgggcgcgtcctggatcgcca

SEQ ID NO: 3943786 - DNA, 25 bp, Homo sapien
tctgccagccctgccggttgtcgtg

SEQ ID NO: 3943787 - DNA, 25 bp, Homo sapien
cttgcccggccgccctttctcgcgg

SEQ ID NO: 3943788 - DNA, 25 bp, Homo sapien
tgcccttgcccggccgccctttctc

SEQ ID NO: 3943789 - DNA, 25 bp, Homo sapien
ctgcccttgcccggccgccctttct

SEQ ID NO: 3943790 - DNA, 25 bp, Homo sapien
ccttgcccggccgccctttctcgcg

SEQ ID NO: 3943791 - DNA, 25 bp, Homo sapien
caggatgctgtctatgctgaagctc

SEQ ID NO: 3943792 - DNA, 25 bp, Homo sapien
cgccctggacatgcgggtcgagcat

SEQ ID NO: 3943793 - DNA, 25 bp, Homo sapien
tggacttgtcggagctcttcggaga

SEQ ID NO: 3943794 - DNA, 25 bp, Homo sapien
ctaggagttcgtcccctgaaggcgg

SEQ ID NO: 3943795 - DNA, 25 bp, Homo sapien
tggaagtggagtaccgtgtcgggaa

SEQ ID NO: 3943796 - DNA, 25 bp, Homo sapien
cacctgcgcgcaatggttggtaaca

SEQ ID NO: 3943797 - DNA, 25 bp, Homo sapien
gatgggctcaaaaccaaggcctgag

SEQ ID NO: 3943798 - DNA, 25 bp, Homo sapien
ggtcaaacgtcaaggaatctcccgc

SEQ ID NO: 3943799 - DNA, 25 bp, Homo sapien
tgaagaccacactccattagacagg

SEQ ID NO: 3943800 - DNA, 25 bp, Homo sapien
gaagattacccagctagagatggca

SEQ ID NO: 3943801 - DNA, 25 bp, Homo sapien
tagaggtcggttgcatttccccgga

SEQ ID NO: 3943802 - DNA, 25 bp, Homo sapien
gaagttcttccaatcaaggctggcc

SEQ ID NO: 3943803 - DNA, 25 bp, Homo sapien
aaaatatagcgaccaccaagcctgg

SEQ ID NO: 3943804 - DNA, 25 bp, Homo sapien
gccaggcagagcaagagtcctttgt

SEQ ID NO: 3943805 - DNA, 25 bp, Homo sapien
gcccaggaggccgtttgtttctaga

SEQ ID NO: 3943806 - DNA, 25 bp, Homo sapien
cagctattcggattggtaagaccca

SEQ ID NO: 3943807 - DNA, 25 bp, Homo sapien
tctttaacatacacacgggcataca

SEQ ID NO: 3943808 - DNA, 25 bp, Homo sapien
ttttatcgtcccaacttcttctgga

SEQ ID NO: 3943809 - DNA, 25 bp, Homo sapien
ggcttaacacggacactgccctggg

SEQ ID NO: 3943810 - DNA, 25 bp, Homo sapien
tgggcttaacacggacactgccctg

SEQ ID NO: 3943811 - DNA, 25 bp, Homo sapien
tttatcgtcccaacttcttctggat

SEQ ID NO: 3943812 - DNA, 25 bp, Homo sapien
aagaggtggataggagatggtgacc

SEQ ID NO: 3943813 - DNA, 25 bp, Homo sapien
tgttcccattgttgggtgtgttgga

SEQ ID NO: 3943814 - DNA, 25 bp, Homo sapien
gatgcaattacagcaattgttccca

SEQ ID NO: 3943815 - DNA, 25 bp, Homo sapien
tgtgttggagtggacctggaagagg

SEQ ID NO: 3943816 - DNA, 25 bp, Homo sapien
tggctgcagctagtcacacatcaag

SEQ ID NO: 3943817 - DNA, 25 bp, Homo sapien
cacggagtccggcaaacttggtgtt

SEQ ID NO: 3943818 - DNA, 25 bp, Homo sapien
tgggctcgccgaagatgaaaagaat

SEQ ID NO: 3943819 - DNA, 25 bp, Homo sapien
cctgcttctaaagggtggcaccaaa

SEQ ID NO: 3943820 - DNA, 25 bp, Homo sapien
gaattcatcccgtgctaatcgcagg

SEQ ID NO: 3943821 - DNA, 25 bp, Homo sapien
acacggtgccgtgaagtcgttctgg

SEQ ID NO: 3943822 - DNA, 25 bp, Homo sapien
tctctccaacatgccaaaagccagg

SEQ ID NO: 3943823 - DNA, 25 bp, Homo sapien
tcttggaggcacgtaactgcattac

SEQ ID NO: 3943824 - DNA, 25 bp, Homo sapien
ggttcataccctagtaaccagtgca

SEQ ID NO: 3943825 - DNA, 25 bp, Homo sapien
atgggctcccctggttcatacccta

SEQ ID NO: 3943826 - DNA, 25 bp, Homo sapien
cagtgcatcgcgtgagtgaagaaaa

SEQ ID NO: 3943827 - DNA, 25 bp, Homo sapien
taccctagtaaccagtgcatcgcgt

SEQ ID NO: 3943828 - DNA, 25 bp, Homo sapien
ctggccaggtgagtccgaggactct

SEQ ID NO: 3943829 - DNA, 25 bp, Homo sapien
gcagtagacgtgacagcagccagcc

SEQ ID NO: 3943830 - DNA, 25 bp, Homo sapien
ctgatggagagatagcgcagtagac

SEQ ID NO: 3943831 - DNA, 25 bp, Homo sapien
ccaggtgagtccgaggactctctgg

SEQ ID NO: 3943832 - DNA, 25 bp, Homo sapien
ccagccatggtttccagccatgttg

SEQ ID NO: 3943833 - DNA, 25 bp, Homo sapien
ctgatcgtgacggactggatttagg

SEQ ID NO: 3943834 - DNA, 25 bp, Homo sapien
tggagatttctgctgatcgtgacgg

SEQ ID NO: 3943835 - DNA, 25 bp, Homo sapien
gagagaatcccgctgaggttctcac

SEQ ID NO: 3943836 - DNA, 25 bp, Homo sapien
ggagtggtttgccctccggctccac

SEQ ID NO: 3943837 - DNA, 25 bp, Homo sapien
atggagtggtttgccctccggctcc

SEQ ID NO: 3943838 - DNA, 25 bp, Homo sapien
tgatggagtggtttgccctccggct

SEQ ID NO: 3943839 - DNA, 25 bp, Homo sapien
agtggtttgccctccggctccactt

SEQ ID NO: 3943840 - DNA, 25 bp, Homo sapien
agaggtcacactgagaggaggtgac

SEQ ID NO: 3943841 - DNA, 25 bp, Homo sapien
gagcctctccacctggagtcacagg

SEQ ID NO: 3943842 - DNA, 25 bp, Homo sapien
tggcagaggtcacactgagaggagg

SEQ ID NO: 3943843 - DNA, 25 bp, Homo sapien
ggtcacactgagaggaggtgacagg

SEQ ID NO: 3943844 - DNA, 25 bp, Homo sapien
ctgcctgtcgggtgttggtcccaga

SEQ ID NO: 3943845 - DNA, 25 bp, Homo sapien
gcagatgctgagtggatggcatccc

SEQ ID NO: 3943846 - DNA, 25 bp, Homo sapien
tttgcttgggcagcgactctttgga

SEQ ID NO: 3943847 - DNA, 25 bp, Homo sapien
tcagtgtccccattagtgcaggggc

SEQ ID NO: 3943848 - DNA, 25 bp, Homo sapien
ggtgagcctggcaaagcccagaagc

SEQ ID NO: 3943849 - DNA, 25 bp, Homo sapien
catgaagctgagctgaggtgagcct

SEQ ID NO: 3943850 - DNA, 25 bp, Homo sapien
tgaggtgagcctggcaaagcccaga

SEQ ID NO: 3943851 - DNA, 25 bp, Homo sapien
gctgaggtgagcctggcaaagccca

SEQ ID NO: 3943852 - DNA, 25 bp, Homo sapien
ctgggcacacatctgaacgttctgg

SEQ ID NO: 3943853 - DNA, 25 bp, Homo sapien
agggctgggcacacatctgaacgtt

SEQ ID NO: 3943854 - DNA, 25 bp, Homo sapien
ggctgggcacacatctgaacgttct

SEQ ID NO: 3943855 - DNA, 25 bp, Homo sapien
gggcacacatctgaacgttctggga

SEQ ID NO: 3943856 - DNA, 25 bp, Homo sapien
tcaggagtcttccatgggccaggca

SEQ ID NO: 3943857 - DNA, 25 bp, Homo sapien
cataggctggaccagaagctccctg

SEQ ID NO: 3943858 - DNA, 25 bp, Homo sapien
cacagaacatgtggaatgccttcat

SEQ ID NO: 3943859 - DNA, 25 bp, Homo sapien
ctcctaataacgtggtaacatctct

SEQ ID NO: 3943860 - DNA, 25 bp, Homo sapien
tgggcaaaaagagcaaaactgtctc

SEQ ID NO: 3943861 - DNA, 25 bp, Homo sapien
aggtcaggagtggctgggcgcggtg

SEQ ID NO: 3943862 - DNA, 25 bp, Homo sapien
aaagagcaaaactgtctcagaaaaa

SEQ ID NO: 3943863 - DNA, 25 bp, Homo sapien
ggcaaaaagagcaaaactgtctcag

SEQ ID NO: 3943864 - DNA, 25 bp, Homo sapien
tcctctccctcgagctccagtttct

SEQ ID NO: 3943865 - DNA, 25 bp, Homo sapien
tgcatgtgcaggtcatagtcgatgc

SEQ ID NO: 3943866 - DNA, 25 bp, Homo sapien
ggtcatagtcgatgccctgggaagt

SEQ ID NO: 3943867 - DNA, 25 bp, Homo sapien
tgcaggtcatagtcgatgccctggg

SEQ ID NO: 3943868 - DNA, 25 bp, Homo sapien
gactaaggctagatgacactttcac

SEQ ID NO: 3943869 - DNA, 25 bp, Homo sapien
ccagtgatcttgacccaatgccaga

SEQ ID NO: 3943870 - DNA, 25 bp, Homo sapien
ccatatggttaatctgcaggcacag

SEQ ID NO: 3943871 - DNA, 25 bp, Homo sapien
ttggtgcagataaagcgactgtgct

SEQ ID NO: 3943872 - DNA, 25 bp, Homo sapien
gaaatgtccatcgtgtctgcatccc

SEQ ID NO: 3943873 - DNA, 25 bp, Homo sapien
gcataatcgctctggaaacattcgg

SEQ ID NO: 3943874 - DNA, 25 bp, Homo sapien
cagatggtctccaatacggatcaaa

SEQ ID NO: 3943875 - DNA, 25 bp, Homo sapien
cagcagagaacagaaacgtggccag

SEQ ID NO: 3943876 - DNA, 25 bp, Homo sapien
ggtttgtccatgcaaagcagcattc

SEQ ID NO: 3943877 - DNA, 25 bp, Homo sapien
tcagagaggcttgaagaaggtcccc

SEQ ID NO: 3943878 - DNA, 25 bp, Homo sapien
aaacagcgctgggaatcgaactcag

SEQ ID NO: 3943879 - DNA, 25 bp, Homo sapien
gatcagatcccacatccgataaaca

SEQ ID NO: 3943880 - DNA, 25 bp, Homo sapien
tgtcatccaacaggagcatccagtt

SEQ ID NO: 3943881 - DNA, 25 bp, Homo sapien
ccggctccacgtggcacaccagggc

SEQ ID NO: 3943882 - DNA, 25 bp, Homo sapien
tgttgatgtcatccaacaggagcat

SEQ ID NO: 3943883 - DNA, 25 bp, Homo sapien
tcgtggcctccctcattatccacgg

SEQ ID NO: 3943884 - DNA, 25 bp, Homo sapien
ccggctgccagggccagcctggtgc

SEQ ID NO: 3943885 - DNA, 25 bp, Homo sapien
ccagcctggtgctggaacccctcat

SEQ ID NO: 3943886 - DNA, 25 bp, Homo sapien
agcctggtgctggaacccctcatac

SEQ ID NO: 3943887 - DNA, 25 bp, Homo sapien
ctggctcccggctgccagggccagc

SEQ ID NO: 3943888 - DNA, 25 bp, Homo sapien
ctttccccaagttgtctgtaagatc

SEQ ID NO: 3943889 - DNA, 25 bp, Homo sapien
tgatgtcaagaatctcgggccgggc

SEQ ID NO: 3943890 - DNA, 25 bp, Homo sapien
agttgtctgtaagatctgcagtgat

SEQ ID NO: 3943891 - DNA, 25 bp, Homo sapien
ctgcagtgatgtcaagaatctcggg

SEQ ID NO: 3943892 - DNA, 25 bp, Homo sapien
cactttggagaccacgcattttgag

SEQ ID NO: 3943893 - DNA, 25 bp, Homo sapien
tacatgccatggtgtcaatgccttc

SEQ ID NO: 3943894 - DNA, 25 bp, Homo sapien
caaatcacaaagaacaggagctggc

SEQ ID NO: 3943895 - DNA, 25 bp, Homo sapien
tgaggtggtctgacccacaagcacc

SEQ ID NO: 3943896 - DNA, 25 bp, Homo sapien
tggctgtcttctccggtcacgtctg

SEQ ID NO: 3943897 - DNA, 25 bp, Homo sapien
atatcgggtccctgaacgctggctg

SEQ ID NO: 3943898 - DNA, 25 bp, Homo sapien
actcagcagcctgggtttccgtcac

SEQ ID NO: 3943899 - DNA, 25 bp, Homo sapien
cagagcgcatttggtgtagacggcc

SEQ ID NO: 3943900 - DNA, 25 bp, Homo sapien
tcttattggtcccatgcacccgtgg

SEQ ID NO: 3943901 - DNA, 25 bp, Homo sapien
tggtcccatgcacccgtgggatcag

SEQ ID NO: 3943902 - DNA, 25 bp, Homo sapien
tcttcttattggtcccatgcacccg

SEQ ID NO: 3943903 - DNA, 25 bp, Homo sapien
ccatgcacccgtgggatcagcagat

SEQ ID NO: 3943904 - DNA, 25 bp, Homo sapien
gccttcttcttcaccggagctgaga

SEQ ID NO: 3943905 - DNA, 25 bp, Homo sapien
tgtctcgcaggtgcccctcgccctg

SEQ ID NO: 3943906 - DNA, 25 bp, Homo sapien
tggatgtctcgcaggtgcccctcgc

SEQ ID NO: 3943907 - DNA, 25 bp, Homo sapien
gatgtctcgcaggtgcccctcgccc

SEQ ID NO: 3943908 - DNA, 25 bp, Homo sapien
actggatgtctcgcaggtgcccctc

SEQ ID NO: 3943909 - DNA, 25 bp, Homo sapien
ggactggtgtctccgtaataagagg

SEQ ID NO: 3943910 - DNA, 25 bp, Homo sapien
taaggtagaatgaggtcaccagcat

SEQ ID NO: 3943911 - DNA, 25 bp, Homo sapien
cacccggtctgtggcactttatgtt

SEQ ID NO: 3943912 - DNA, 25 bp, Homo sapien
ttattgtgggctgggttgcatcccc

SEQ ID NO: 3943913 - DNA, 25 bp, Homo sapien
tccactgcacctaattcgtagtcat

SEQ ID NO: 3943914 - DNA, 25 bp, Homo sapien
gttaggcttgttatttattacagga

SEQ ID NO: 3943915 - DNA, 25 bp, Homo sapien
ttcgaacacaatgttgaggagatgc

SEQ ID NO: 3943916 - DNA, 25 bp, Homo sapien
cacggcttccgagggtgaggaacag

SEQ ID NO: 3943917 - DNA, 25 bp, Homo sapien
gaatctctgttgtgtgtcaggcaca

SEQ ID NO: 3943918 - DNA, 25 bp, Homo sapien
cacggacgcgcatggaagtgatctt

SEQ ID NO: 3943919 - DNA, 25 bp, Homo sapien
tggtggccctctaaaaataggatcc

SEQ ID NO: 3943920 - DNA, 25 bp, Homo sapien
gaatttcagtactgcgtcccaccat

SEQ ID NO: 3943921 - DNA, 25 bp, Homo sapien
tctacgggtcgtgtgtccagacatc

SEQ ID NO: 3943922 - DNA, 25 bp, Homo sapien
gcacccagctggcaagaaactattg

SEQ ID NO: 3943923 - DNA, 25 bp, Homo sapien
tcttcgtggctcacaggcgataacc

SEQ ID NO: 3943924 - DNA, 25 bp, Homo sapien
cataggatcacattcagaggagaca

SEQ ID NO: 3943925 - DNA, 25 bp, Homo sapien
cacatctttccacccacggccggtg

SEQ ID NO: 3943926 - DNA, 25 bp, Homo sapien
cacccacggccggtgaagaacatga

SEQ ID NO: 3943927 - DNA, 25 bp, Homo sapien
acccacggccggtgaagaacatgaa

SEQ ID NO: 3943928 - DNA, 25 bp, Homo sapien
tctttccacccacggccggtgaaga

SEQ ID NO: 3943929 - DNA, 25 bp, Homo sapien
ttccttattagctgaaaagacattc

SEQ ID NO: 3943930 - DNA, 25 bp, Homo sapien
cagccccctcattcctttgttatgc

SEQ ID NO: 3943931 - DNA, 25 bp, Homo sapien
ccctcattcctttgttatgccatac

SEQ ID NO: 3943932 - DNA, 25 bp, Homo sapien
tatgccatacatctgcttccttatt

SEQ ID NO: 3943933 - DNA, 25 bp, Homo sapien
ccctttctggaagtcgagccctgga

SEQ ID NO: 3943934 - DNA, 25 bp, Homo sapien
tagaaaacactggtaccgtgcaggc

SEQ ID NO: 3943935 - DNA, 25 bp, Homo sapien
aaaccgcagtgtctgagtcaagtcc

SEQ ID NO: 3943936 - DNA, 25 bp, Homo sapien
tgtgacgatgccatctgggagccct

SEQ ID NO: 3943937 - DNA, 25 bp, Homo sapien
agatagcaatctccctttgggctcc

SEQ ID NO: 3943938 - DNA, 25 bp, Homo sapien
ccagtatctgtgatgatggaggagc

SEQ ID NO: 3943939 - DNA, 25 bp, Homo sapien
gatggttctgagacaaattccagta

SEQ ID NO: 3943940 - DNA, 25 bp, Homo sapien
gaggacgtcgtttgcatagtgatgc

SEQ ID NO: 3943941 - DNA, 25 bp, Homo sapien
aatgtcagtagccaatccatgagta

SEQ ID NO: 3943942 - DNA, 25 bp, Homo sapien
tcaagatggaagacagcgatgattc

SEQ ID NO: 3943943 - DNA, 25 bp, Homo sapien
gattgatcccctgtcacatgttagg

SEQ ID NO: 3943944 - DNA, 25 bp, Homo sapien
cgatgattcgtatttgtgtttaccc

SEQ ID NO: 3943945 - DNA, 25 bp, Homo sapien
gagtatgataacagcgcgttggacc

SEQ ID NO: 3943946 - DNA, 25 bp, Homo sapien
ctactggtgttatcgcgaggaagca

SEQ ID NO: 3943947 - DNA, 25 bp, Homo sapien
tctcggtgacatgccgtgcgtaaac

SEQ ID NO: 3943948 - DNA, 25 bp, Homo sapien
cttcctggaaggtagatcgctgaga

SEQ ID NO: 3943949 - DNA, 25 bp, Homo sapien
taaaaggcggatttccagtcaatgc

SEQ ID NO: 3943950 - DNA, 25 bp, Homo sapien
acacatttcacagggacttccggca

SEQ ID NO: 3943951 - DNA, 25 bp, Homo sapien
ccttttaggaactgcggccatgagc

SEQ ID NO: 3943952 - DNA, 25 bp, Homo sapien
ctttggcatatgagacgcgcttgga

SEQ ID NO: 3943953 - DNA, 25 bp, Homo sapien
gcaacacccgttcagaaaggccaga

SEQ ID NO: 3943954 - DNA, 25 bp, Homo sapien
ggcacctgcgaaggcttacagcaaa

SEQ ID NO: 3943955 - DNA, 25 bp, Homo sapien
cagcttagaacccactgcagtgagt

SEQ ID NO: 3943956 - DNA, 25 bp, Homo sapien
tgcacttacaacacggcctgatggt

SEQ ID NO: 3943957 - DNA, 25 bp, Homo sapien
caaagattcttttgtcccctcgagg

SEQ ID NO: 3943958 - DNA, 25 bp, Homo sapien
taggatgcgtagacccttcagggtt

SEQ ID NO: 3943959 - DNA, 25 bp, Homo sapien
tcttttggttgggtaccagtgccaa

SEQ ID NO: 3943960 - DNA, 25 bp, Homo sapien
taaatacagccaagttgcccggttc

SEQ ID NO: 3943961 - DNA, 25 bp, Homo sapien
tagaagttgacgcagagtctcaagt

SEQ ID NO: 3943962 - DNA, 25 bp, Homo sapien
gacgcagagtctcaagtggcaactc

SEQ ID NO: 3943963 - DNA, 25 bp, Homo sapien
gttggtgatgatgggccgggcgtcc

SEQ ID NO: 3943964 - DNA, 25 bp, Homo sapien
ggccgggcgtcccaggaggaagatg

SEQ ID NO: 3943965 - DNA, 25 bp, Homo sapien
tgggagagatgtagacactttccct

SEQ ID NO: 3943966 - DNA, 25 bp, Homo sapien
agatgtagacactttccctcctgtt

SEQ ID NO: 3943967 - DNA, 25 bp, Homo sapien
ctgttcccacatcgccttcttcttg

SEQ ID NO: 3943968 - DNA, 25 bp, Homo sapien
tagtccttttcccacagcgtggtga

SEQ ID NO: 3943969 - DNA, 25 bp, Homo sapien
tcagaaatggcaacagcgagctgtg

SEQ ID NO: 3943970 - DNA, 25 bp, Homo sapien
ctcgtggagccgttctgagaatgca

SEQ ID NO: 3943971 - DNA, 25 bp, Homo sapien
taacatacatgcacggatgtgactc

SEQ ID NO: 3943972 - DNA, 25 bp, Homo sapien
caccgtcaactctgtgggaccgagg

SEQ ID NO: 3943973 - DNA, 25 bp, Homo sapien
tgtgggagcgaagaagctggcctca

SEQ ID NO: 3943974 - DNA, 25 bp, Homo sapien
cgtggggtgtgggagcgaagaagct

SEQ ID NO: 3943975 - DNA, 25 bp, Homo sapien
ctgtgtgcagctgaaagtgcgtggg

SEQ ID NO: 3943976 - DNA, 25 bp, Homo sapien
tgctgacaggcagtccctgtttctt

SEQ ID NO: 3943977 - DNA, 25 bp, Homo sapien
attctaccccggatggatatttggc

SEQ ID NO: 3943978 - DNA, 25 bp, Homo sapien
tctctttccacctatcctatcccca

SEQ ID NO: 3943979 - DNA, 25 bp, Homo sapien
atatttggctgtgttgtcggggtca

SEQ ID NO: 3943980 - DNA, 25 bp, Homo sapien
atcccattctaccccggatggatat

SEQ ID NO: 3943981 - DNA, 25 bp, Homo sapien
tcctttgactctgacagcaagtgga

SEQ ID NO: 3943982 - DNA, 25 bp, Homo sapien
acagcaagtggagccacgctgggct

SEQ ID NO: 3943983 - DNA, 25 bp, Homo sapien
gactctgacagcaagtggagccacg

SEQ ID NO: 3943984 - DNA, 25 bp, Homo sapien
tgccatggggaacgcgttgcaaggg

SEQ ID NO: 3943985 - DNA, 25 bp, Homo sapien
tgctgggtggtcacataacagccaa

SEQ ID NO: 3943986 - DNA, 25 bp, Homo sapien
tgtggttgttgatgggaagagacat

SEQ ID NO: 3943987 - DNA, 25 bp, Homo sapien
aaatcctgcagttgtggttgttgat

SEQ ID NO: 3943988 - DNA, 25 bp, Homo sapien
cagttgtggttgttgatgggaagag

SEQ ID NO: 3943989 - DNA, 25 bp, Homo sapien
gcagacaatggccaaggggccttcg

SEQ ID NO: 3943990 - DNA, 25 bp, Homo sapien
gagggctcgtgggacggggcaagga

SEQ ID NO: 3943991 - DNA, 25 bp, Homo sapien
gacaatggccaaggggccttcgatg

SEQ ID NO: 3943992 - DNA, 25 bp, Homo sapien
ggcagagggctcgtgggacggggca

SEQ ID NO: 3943993 - DNA, 25 bp, Homo sapien
gcaagggagccaagctcagaaaagc

SEQ ID NO: 3943994 - DNA, 25 bp, Homo sapien
tgggaataagccgatcatcagcaag

SEQ ID NO: 3943995 - DNA, 25 bp, Homo sapien
gctgattcaagaagccctcgtcacc

SEQ ID NO: 3943996 - DNA, 25 bp, Homo sapien
cctcatggggctgaatgggaataag

SEQ ID NO: 3943997 - DNA, 25 bp, Homo sapien
cctggcgctcaggtcctcgcagctg

SEQ ID NO: 3943998 - DNA, 25 bp, Homo sapien
aggggcttttattggagacaacaga

SEQ ID NO: 3943999 - DNA, 25 bp, Homo sapien
cctcgtcttccctaggacagcggga

SEQ ID NO: 3944000 - DNA, 25 bp, Homo sapien
gacttggcacagccgggacactgtc

SEQ ID NO: 3944001 - DNA, 25 bp, Homo sapien
cctggatctgcagatgctcccgtgg

SEQ ID NO: 3944002 - DNA, 25 bp, Homo sapien
tgggccggatcacaccacggctgtg

SEQ ID NO: 3944003 - DNA, 25 bp, Homo sapien
ctcgccaggagaccgtcaggatgcc

SEQ ID NO: 3944004 - DNA, 25 bp, Homo sapien
ggcctggatggtctgcgtactttcg

SEQ ID NO: 3944005 - DNA, 25 bp, Homo sapien
cattacgttgtggatgagggcttca

SEQ ID NO: 3944006 - DNA, 25 bp, Homo sapien
ctaatcccagcatgagagtcccatc

SEQ ID NO: 3944007 - DNA, 25 bp, Homo sapien
gggacactgttcagtccttagtaga

SEQ ID NO: 3944008 - DNA, 25 bp, Homo sapien
tcttcccggcttgtggagggctgcc

SEQ ID NO: 3944009 - DNA, 25 bp, Homo sapien
tatatgcttacaggcctaaaacatc

SEQ ID NO: 3944010 - DNA, 25 bp, Homo sapien
taagtgcactctaagatgttaacag

SEQ ID NO: 3944011 - DNA, 25 bp, Homo sapien
tctgaaaatataggcacccctggga

SEQ ID NO: 3944012 - DNA, 25 bp, Homo sapien
gccttggagcaatagactctaccgt

SEQ ID NO: 3944013 - DNA, 25 bp, Homo sapien
agggcagccagaccctggcggcttc

SEQ ID NO: 3944014 - DNA, 25 bp, Homo sapien
gtgggaccacggaggaagaacgtga

SEQ ID NO: 3944015 - DNA, 25 bp, Homo sapien
agaccctggcggcttcgtggcagct

SEQ ID NO: 3944016 - DNA, 25 bp, Homo sapien
aacgtgaacgcctggactcccactt

SEQ ID NO: 3944017 - DNA, 25 bp, Homo sapien
agagaggctcgtgtggatccagacc

SEQ ID NO: 3944018 - DNA, 25 bp, Homo sapien
aacttgtctgagcgtgtggccggca

SEQ ID NO: 3944019 - DNA, 25 bp, Homo sapien
tgcatgggctgagagcattggagct

SEQ ID NO: 3944020 - DNA, 25 bp, Homo sapien
tcgtgtggatccagaccccacgtac

SEQ ID NO: 3944021 - DNA, 25 bp, Homo sapien
agagcgtacacacccgtcactttga

SEQ ID NO: 3944022 - DNA, 25 bp, Homo sapien
cagcttcagggcataacttttcaca

SEQ ID NO: 3944023 - DNA, 25 bp, Homo sapien
cacaagcggagatgtcggtatttat

SEQ ID NO: 3944024 - DNA, 25 bp, Homo sapien
ttttcacacgaagagcgtacacacc

SEQ ID NO: 3944025 - DNA, 25 bp, Homo sapien
cctgctggggcccaatgcctccagg

SEQ ID NO: 3944026 - DNA, 25 bp, Homo sapien
gctggccgtgaatattttcagtgtc

SEQ ID NO: 3944027 - DNA, 25 bp, Homo sapien
atgttctaggtgctttgctgtggct

SEQ ID NO: 3944028 - DNA, 25 bp, Homo sapien
gggaagtcctggcttgcatggagct

SEQ ID NO: 3944029 - DNA, 25 bp, Homo sapien
tcagagtcccaggttgcactggagc

SEQ ID NO: 3944030 - DNA, 25 bp, Homo sapien
gaagtcctggcttgcatggagctca

SEQ ID NO: 3944031 - DNA, 25 bp, Homo sapien
gggacagactgagaacgtcgttcat

SEQ ID NO: 3944032 - DNA, 25 bp, Homo sapien
gagaacgtcgttcatccactgtcca

SEQ ID NO: 3944033 - DNA, 25 bp, Homo sapien
cactgtccatcctaccagtcttctc

SEQ ID NO: 3944034 - DNA, 25 bp, Homo sapien
cccggggacagactgagaacgtcgt

SEQ ID NO: 3944035 - DNA, 25 bp, Homo sapien
tcatcaacccgctgcaagcaaattg

SEQ ID NO: 3944036 - DNA, 25 bp, Homo sapien
gcaaattggcaaagggaatgcaaca

SEQ ID NO: 3944037 - DNA, 25 bp, Homo sapien
agaattcctccttccggaactgctg

SEQ ID NO: 3944038 - DNA, 25 bp, Homo sapien
gaatctgctttccaactatggcaaa

SEQ ID NO: 3944039 - DNA, 25 bp, Homo sapien
actgtaatttatgaatcgcacaagc

SEQ ID NO: 3944040 - DNA, 25 bp, Homo sapien
tgaatcgcacaagccaggtagaaag

SEQ ID NO: 3944041 - DNA, 25 bp, Homo sapien
caggtagaaagttggctccaggtcc

SEQ ID NO: 3944042 - DNA, 25 bp, Homo sapien
tagaaagttggctccaggtccagtg

SEQ ID NO: 3944043 - DNA, 25 bp, Homo sapien
tcgggctgggccgtgcctactcgca

SEQ ID NO: 3944044 - DNA, 25 bp, Homo sapien
tgctgcaagcgtcctctgcattgct

SEQ ID NO: 3944045 - DNA, 25 bp, Homo sapien
gggtctcttattgtacagctgcaca

SEQ ID NO: 3944046 - DNA, 25 bp, Homo sapien
tgtagcagcatctcattcgttccca

SEQ ID NO: 3944047 - DNA, 25 bp, Homo sapien
cagccaccagcaatctaattctttc

SEQ ID NO: 3944048 - DNA, 25 bp, Homo sapien
ctttcttgttcatcaacgatgactt

SEQ ID NO: 3944049 - DNA, 25 bp, Homo sapien
ctttccgaggtttcatcttgaaagg

SEQ ID NO: 3944050 - DNA, 25 bp, Homo sapien
tcctggtactggttaccacccttgc

SEQ ID NO: 3944051 - DNA, 25 bp, Homo sapien
caggtcgtgacatcacagcttgcag

SEQ ID NO: 3944052 - DNA, 25 bp, Homo sapien
aggtcgtgacatcacagcttgcagg

SEQ ID NO: 3944053 - DNA, 25 bp, Homo sapien
gtgatccaatgggtccaacgtggac

SEQ ID NO: 3944054 - DNA, 25 bp, Homo sapien
gacgtccgggaagaagtgatccaat

SEQ ID NO: 3944055 - DNA, 25 bp, Homo sapien
ggctccacagattgccatgcccgtg

SEQ ID NO: 3944056 - DNA, 25 bp, Homo sapien
acaggcagggccatcgctatgctgg

SEQ ID NO: 3944057 - DNA, 25 bp, Homo sapien
cactgtctgtgaggaatagaccttg

SEQ ID NO: 3944058 - DNA, 25 bp, Homo sapien
gtctaaggcattttgctacagcaac

SEQ ID NO: 3944059 - DNA, 25 bp, Homo sapien
gaggaatagaccttgaatctgccaa

SEQ ID NO: 3944060 - DNA, 25 bp, Homo sapien
tgaggatgcatagaaggcactgtct

SEQ ID NO: 3944061 - DNA, 25 bp, Homo sapien
tgcacacgggcgtcctgaagactgc

SEQ ID NO: 3944062 - DNA, 25 bp, Homo sapien
ggcgtcctgaagactgcccctcttg

SEQ ID NO: 3944063 - DNA, 25 bp, Homo sapien
gagatgtgcacacgggcgtcctgaa

SEQ ID NO: 3944064 - DNA, 25 bp, Homo sapien
cccactagtatgatcagagcctcct

SEQ ID NO: 3944065 - DNA, 25 bp, Homo sapien
cccacacgcttgtaaacgaccagat

SEQ ID NO: 3944066 - DNA, 25 bp, Homo sapien
gagggccccacacgcttgtaaacga

SEQ ID NO: 3944067 - DNA, 25 bp, Homo sapien
ctaggaggatggtgccaaattattc

SEQ ID NO: 3944068 - DNA, 25 bp, Homo sapien
atcatgagaacaggactaggaggat

SEQ ID NO: 3944069 - DNA, 25 bp, Homo sapien
cgtgggtggatagggccagcttgag

SEQ ID NO: 3944070 - DNA, 25 bp, Homo sapien
ggtgcaagcttggggcttagaccca

SEQ ID NO: 3944071 - DNA, 25 bp, Homo sapien
tcacacgtgggtggatagggccagc

SEQ ID NO: 3944072 - DNA, 25 bp, Homo sapien
cagccacctggggatttcgactgac

SEQ ID NO: 3944073 - DNA, 25 bp, Homo sapien
tcctgccgatgccatagcatgaggg

SEQ ID NO: 3944074 - DNA, 25 bp, Homo sapien
gccaagtgttgctgatgtcccacag

SEQ ID NO: 3944075 - DNA, 25 bp, Homo sapien
taaatcatccagactcctattcgga

SEQ ID NO: 3944076 - DNA, 25 bp, Homo sapien
gagtatgctcatctgaggacttgga

SEQ ID NO: 3944077 - DNA, 25 bp, Homo sapien
ggccacacggccatattccagaggc

SEQ ID NO: 3944078 - DNA, 25 bp, Homo sapien
ggcactgactgcatggaatcatgga

SEQ ID NO: 3944079 - DNA, 25 bp, Homo sapien
cctcggggaccttgtgcagaaagca

SEQ ID NO: 3944080 - DNA, 25 bp, Homo sapien
ggcttgtggttcaggagcggacagc

SEQ ID NO: 3944081 - DNA, 25 bp, Homo sapien
tgagaaatggcacggggtgaactcc

SEQ ID NO: 3944082 - DNA, 25 bp, Homo sapien
cggcccagccgacggccagtgagaa

SEQ ID NO: 3944083 - DNA, 25 bp, Homo sapien
ggtgaactcctgtttccgcccattc

SEQ ID NO: 3944084 - DNA, 25 bp, Homo sapien
tgagtccatgatcgcccctgtaggt

SEQ ID NO: 3944085 - DNA, 25 bp, Homo sapien
tatttgtcacttagcgctgggtcac

SEQ ID NO: 3944086 - DNA, 25 bp, Homo sapien
tagttcatgtcctgagcaagccggc

SEQ ID NO: 3944087 - DNA, 25 bp, Homo sapien
tactgaatgatcgtccacttggagg

SEQ ID NO: 3944088 - DNA, 25 bp, Homo sapien
gctatgaacaagagaccagggcgac

SEQ ID NO: 3944089 - DNA, 25 bp, Homo sapien
gggagtgaatcctgcaggatacacc

SEQ ID NO: 3944090 - DNA, 25 bp, Homo sapien
tgcaggatacaccacgtttcacgtc

SEQ ID NO: 3944091 - DNA, 25 bp, Homo sapien
caccccgtgaaattctcttggaagg

SEQ ID NO: 3944092 - DNA, 25 bp, Homo sapien
cctgcaccccgtgaaattctcttgg

SEQ ID NO: 3944093 - DNA, 25 bp, Homo sapien
aatcacatttgtgacagctctaata

SEQ ID NO: 3944094 - DNA, 25 bp, Homo sapien
acatttgtgacagctctaataggcc

SEQ ID NO: 3944095 - DNA, 25 bp, Homo sapien
ctctaataggccattcaacagcaaa

SEQ ID NO: 3944096 - DNA, 25 bp, Homo sapien
tgtttatttccagaaatcacatttg

SEQ ID NO: 3944097 - DNA, 25 bp, Homo sapien
tctcccagggtgtatccatcgggct

SEQ ID NO: 3944098 - DNA, 25 bp, Homo sapien
tgtccgctgtccagtagatggcgct

SEQ ID NO: 3944099 - DNA, 25 bp, Homo sapien
gattaaagagctccatcacaaggag

SEQ ID NO: 3944100 - DNA, 25 bp, Homo sapien
ttcaccaaagcgttcagggtccagg

SEQ ID NO: 3944101 - DNA, 25 bp, Homo sapien
taaaatacggccctactgcaacagg

SEQ ID NO: 3944102 - DNA, 25 bp, Homo sapien
caaagttacccttgttgctgaggct

SEQ ID NO: 3944103 - DNA, 25 bp, Homo sapien
tgctgaggctaattgcaggacccag

SEQ ID NO: 3944104 - DNA, 25 bp, Homo sapien
tctgggtccttgaaacacacatgcg

SEQ ID NO: 3944105 - DNA, 25 bp, Homo sapien
ctcaccttcacacgctaaggcctgc

SEQ ID NO: 3944106 - DNA, 25 bp, Homo sapien
ccctcaccttcacacgctaaggcct

SEQ ID NO: 3944107 - DNA, 25 bp, Homo sapien
accttcacacgctaaggcctgcgtg

SEQ ID NO: 3944108 - DNA, 25 bp, Homo sapien
tagaggtgaaggtcccctcaccttc

SEQ ID NO: 3944109 - DNA, 25 bp, Homo sapien
aagactgtccatacaattggctggg

SEQ ID NO: 3944110 - DNA, 25 bp, Homo sapien
agggctctgcgcattctgcatgcag

SEQ ID NO: 3944111 - DNA, 25 bp, Homo sapien
caaaaggagaaatgccaaagccgcc

SEQ ID NO: 3944112 - DNA, 25 bp, Homo sapien
cagcaccgtcctccgtgtggtattg

SEQ ID NO: 3944113 - DNA, 25 bp, Homo sapien
ttatttgaggccgacagcaccgtca

SEQ ID NO: 3944114 - DNA, 25 bp, Homo sapien
tcatcaggcgctaatgagtggcctc

SEQ ID NO: 3944115 - DNA, 25 bp, Homo sapien
ggttttcgagcatttggctgcccca

SEQ ID NO: 3944116 - DNA, 25 bp, Homo sapien
gaagctctccgtggctcgtaaaggg

SEQ ID NO: 3944117 - DNA, 25 bp, Homo sapien
aaaggcaggcgctggatgagattcc

SEQ ID NO: 3944118 - DNA, 25 bp, Homo sapien
ccaagttgccgggaagacaggcctt

SEQ ID NO: 3944119 - DNA, 25 bp, Homo sapien
ggctgttgtcgcatttgctcgctga

SEQ ID NO: 3944120 - DNA, 25 bp, Homo sapien
aaatcagacattagcggcgcacgca

SEQ ID NO: 3944121 - DNA, 25 bp, Homo sapien
taaaaatcccctgtagtggtgacat

SEQ ID NO: 3944122 - DNA, 25 bp, Homo sapien
ggcgtgttatgtttgttacaaccca

SEQ ID NO: 3944123 - DNA, 25 bp, Homo sapien
taaagtccacagtctgcatcagggt

SEQ ID NO: 3944124 - DNA, 25 bp, Homo sapien
tatccagccctagagtatcatacaa

SEQ ID NO: 3944125 - DNA, 25 bp, Homo sapien
ttggggtctccttaggtctcgccat

SEQ ID NO: 3944126 - DNA, 25 bp, Homo sapien
tcacattaggtctagcagccatgtg

SEQ ID NO: 3944127 - DNA, 25 bp, Homo sapien
gggtcacattaggtctagcagccat

SEQ ID NO: 3944128 - DNA, 25 bp, Homo sapien
tggactggggtcacattaggtctag

SEQ ID NO: 3944129 - DNA, 25 bp, Homo sapien
ccagccgcgtgaggcagtgtccacg

SEQ ID NO: 3944130 - DNA, 25 bp, Homo sapien
tcagccagtgatgggtgctttccga

SEQ ID NO: 3944131 - DNA, 25 bp, Homo sapien
gctcagccagtgatgggtgctttcc

SEQ ID NO: 3944132 - DNA, 25 bp, Homo sapien
gcagtgtccacgctcagccagtgat

SEQ ID NO: 3944133 - DNA, 25 bp, Homo sapien
ttggagatgccgtaggaagaagcag

SEQ ID NO: 3944134 - DNA, 25 bp, Homo sapien
gagggtgggatcagcctcaaaagcc

SEQ ID NO: 3944135 - DNA, 25 bp, Homo sapien
ccctcttcagttgagaggcctgctg

SEQ ID NO: 3944136 - DNA, 25 bp, Homo sapien
gaagcaggcttccagtgagatagac

SEQ ID NO: 3944137 - DNA, 25 bp, Homo sapien
ctgttcatctgtcttgacatctgta

SEQ ID NO: 3944138 - DNA, 25 bp, Homo sapien
tctgtatctgtaaaggaggctgctg

SEQ ID NO: 3944139 - DNA, 25 bp, Homo sapien
ttgacatctgtatctgtaaaggagg

SEQ ID NO: 3944140 - DNA, 25 bp, Homo sapien
gacatctgtatctgtaaaggaggct

SEQ ID NO: 3944141 - DNA, 25 bp, Homo sapien
catcttcgaaacctacaaggaaacg

SEQ ID NO: 3944142 - DNA, 25 bp, Homo sapien
cactttgtctaaaccacgtgcgagt

SEQ ID NO: 3944143 - DNA, 25 bp, Homo sapien
gccctgcaaagtatcttgctcctaa

SEQ ID NO: 3944144 - DNA, 25 bp, Homo sapien
tgttttctaatggtttgccctgcaa

SEQ ID NO: 3944145 - DNA, 25 bp, Homo sapien
gatgaatcagctgcgaccatttctc

SEQ ID NO: 3944146 - DNA, 25 bp, Homo sapien
ggacacagcctgataggcttagttt

SEQ ID NO: 3944147 - DNA, 25 bp, Homo sapien
ttgggaaccagggaacaggatccat

SEQ ID NO: 3944148 - DNA, 25 bp, Homo sapien
gctactcaggatccaaagtcccagg

SEQ ID NO: 3944149 - DNA, 25 bp, Homo sapien
catcgcgctgcccaactgggcagtt

SEQ ID NO: 3944150 - DNA, 25 bp, Homo sapien
cttcccatcgcgctgcccaactggg

SEQ ID NO: 3944151 - DNA, 25 bp, Homo sapien
tggttaaacatccacagtcgtgggt

SEQ ID NO: 3944152 - DNA, 25 bp, Homo sapien
ccacagtcgtgggtgggctccttcc

SEQ ID NO: 3944153 - DNA, 25 bp, Homo sapien
ccctcaggccacccagtctttcctg

SEQ ID NO: 3944154 - DNA, 25 bp, Homo sapien
cttgccctcaggccacccagtcttt

SEQ ID NO: 3944155 - DNA, 25 bp, Homo sapien
ctcaggccacccagtctttcctgct

SEQ ID NO: 3944156 - DNA, 25 bp, Homo sapien
tgccctcaggccacccagtctttcc

SEQ ID NO: 3944157 - DNA, 25 bp, Homo sapien
caggtccaggttgcaatgttggcca

SEQ ID NO: 3944158 - DNA, 25 bp, Homo sapien
catttttcaggtagtgggaggccgc

SEQ ID NO: 3944159 - DNA, 25 bp, Homo sapien
tggccactttggtcaccttttctga

SEQ ID NO: 3944160 - DNA, 25 bp, Homo sapien
tgggaagattgcagtttaggaatca

SEQ ID NO: 3944161 - DNA, 25 bp, Homo sapien
tggccaaacagaagccacctgaggg

SEQ ID NO: 3944162 - DNA, 25 bp, Homo sapien
acctgaggggtgaatccagctgaag

SEQ ID NO: 3944163 - DNA, 25 bp, Homo sapien
caagctgcccgaggataattaaatc

SEQ ID NO: 3944164 - DNA, 25 bp, Homo sapien
ggtacatggaaatgtggaatgctga

SEQ ID NO: 3944165 - DNA, 25 bp, Homo sapien
tggaatgctgagactatgacaagct

SEQ ID NO: 3944166 - DNA, 25 bp, Homo sapien
gactatgacaagctgcccgaggata

SEQ ID NO: 3944167 - DNA, 25 bp, Homo sapien
gaaacagggcctcaagggctctctg

SEQ ID NO: 3944168 - DNA, 25 bp, Homo sapien
gggccactctagtctgagcctccag

SEQ ID NO: 3944169 - DNA, 25 bp, Homo sapien
cctcctgctgcggagagctcagagg

SEQ ID NO: 3944170 - DNA, 25 bp, Homo sapien
gagggtggctgtcaaacccaaaggc

SEQ ID NO: 3944171 - DNA, 25 bp, Homo sapien
tatctgtgggacatccatgtggatg

SEQ ID NO: 3944172 - DNA, 25 bp, Homo sapien
gtgtggcgcagcaccttcgagaccg

SEQ ID NO: 3944173 - DNA, 25 bp, Homo sapien
tgtggatgtctctgtccttggaatt

SEQ ID NO: 3944174 - DNA, 25 bp, Homo sapien
aggcaagtcggaggagctgtcaccc

SEQ ID NO: 3944175 - DNA, 25 bp, Homo sapien
agtgtgtgtacacgcccgtgtgcca

SEQ ID NO: 3944176 - DNA, 25 bp, Homo sapien
gatgaggtgtgagtcagacgagtgt

SEQ ID NO: 3944177 - DNA, 25 bp, Homo sapien
tgaagcgaaagggaggatgaggtgt

SEQ ID NO: 3944178 - DNA, 25 bp, Homo sapien
tgagtcagacgagtgtgtgtacacg

SEQ ID NO: 3944179 - DNA, 25 bp, Homo sapien
tgttttaagatgtttgctcgctgca

SEQ ID NO: 3944180 - DNA, 25 bp, Homo sapien
gtttgctcgctgcattcttgggcaa

SEQ ID NO: 3944181 - DNA, 25 bp, Homo sapien
agttttcagaggctctccgtggtgt

SEQ ID NO: 3944182 - DNA, 25 bp, Homo sapien
aatggttctaatcagttttcagagg

SEQ ID NO: 3944183 - DNA, 25 bp, Homo sapien
tgctgggggtcaggtctgcgctggg

SEQ ID NO: 3944184 - DNA, 25 bp, Homo sapien
ctgcgctgggggtcaggtccgcgcc

SEQ ID NO: 3944185 - DNA, 25 bp, Homo sapien
taggtccacacctgggggtcaggtc

SEQ ID NO: 3944186 - DNA, 25 bp, Homo sapien
tgctgggggtcaggtccgtgctggg

SEQ ID NO: 3944187 - DNA, 25 bp, Homo sapien
ggtcaggtccaagctcggggatcag

SEQ ID NO: 3944188 - DNA, 25 bp, Homo sapien
caggtccaagctcggggatcaggtc

SEQ ID NO: 3944189 - DNA, 25 bp, Homo sapien
tcaggtccaagctcggggatcaggt

SEQ ID NO: 3944190 - DNA, 25 bp, Homo sapien
ggggtcaggtccaagctcggggatc

SEQ ID NO: 3944191 - DNA, 25 bp, Homo sapien
tttttgtccaacgagggccgctgtc

SEQ ID NO: 3944192 - DNA, 25 bp, Homo sapien
tacatggtgacccttccgttggtgc

SEQ ID NO: 3944193 - DNA, 25 bp, Homo sapien
ctcagtagctccaagaatcacaggg

SEQ ID NO: 3944194 - DNA, 25 bp, Homo sapien
taataatggtttgtgcgttacccac

SEQ ID NO: 3944195 - DNA, 25 bp, Homo sapien
ccatgatgcaagtggtgtgaatcca

SEQ ID NO: 3944196 - DNA, 25 bp, Homo sapien
ggaacagctgtcatgtatagatcag

SEQ ID NO: 3944197 - DNA, 25 bp, Homo sapien
caggtggtggaacgtgtggaacagc

SEQ ID NO: 3944198 - DNA, 25 bp, Homo sapien
gaaagggcccatttggaagtgctct

SEQ ID NO: 3944199 - DNA, 25 bp, Homo sapien
gtttgatctttgctccacgtgggta

SEQ ID NO: 3944200 - DNA, 25 bp, Homo sapien
cacgtgggtatctctggctgttgcc

SEQ ID NO: 3944201 - DNA, 25 bp, Homo sapien
catggtcacgtaggacaaccacagt

SEQ ID NO: 3944202 - DNA, 25 bp, Homo sapien
tgggtctgaagaacatgcgcatggt

SEQ ID NO: 3944203 - DNA, 25 bp, Homo sapien
tccctgcacgctggcatttggcttt

SEQ ID NO: 3944204 - DNA, 25 bp, Homo sapien
gctgattccctgcacgctggcattt

SEQ ID NO: 3944205 - DNA, 25 bp, Homo sapien
cattctaaggggctctttgactctg

SEQ ID NO: 3944206 - DNA, 25 bp, Homo sapien
ctaaggggctctttgactctgaaca

SEQ ID NO: 3944207 - DNA, 25 bp, Homo sapien
gctgctgggttctgcaagccggaca

SEQ ID NO: 3944208 - DNA, 25 bp, Homo sapien
gctttccttacgagcacgaggtact

SEQ ID NO: 3944209 - DNA, 25 bp, Homo sapien
tcctctgctaactgggactggagag

SEQ ID NO: 3944210 - DNA, 25 bp, Homo sapien
acgaggtactcgtgccctattgact

SEQ ID NO: 3944211 - DNA, 25 bp, Homo sapien
cttgcttatggacggggctcccttg

SEQ ID NO: 3944212 - DNA, 25 bp, Homo sapien
cccaatcttgcttatggacggggct

SEQ ID NO: 3944213 - DNA, 25 bp, Homo sapien
ccagggcactgagcgactgtggctt

SEQ ID NO: 3944214 - DNA, 25 bp, Homo sapien
gctcccttggctcggtcatcctcct

SEQ ID NO: 3944215 - DNA, 25 bp, Homo sapien
tagggaagtgttaatgccttgagca

SEQ ID NO: 3944216 - DNA, 25 bp, Homo sapien
tgcagctggtgagaaaaatacgcac

SEQ ID NO: 3944217 - DNA, 25 bp, Homo sapien
cttgattctaatggatggcagccac

SEQ ID NO: 3944218 - DNA, 25 bp, Homo sapien
gaagacgcaccagaggaagacgtag

SEQ ID NO: 3944219 - DNA, 25 bp, Homo sapien
caccagccaggcaattgtgtccttc

SEQ ID NO: 3944220 - DNA, 25 bp, Homo sapien
ttcccagcacactggcagggtgtga

SEQ ID NO: 3944221 - DNA, 25 bp, Homo sapien
gcggcattccggaggaggccacctt

SEQ ID NO: 3944222 - DNA, 25 bp, Homo sapien
tccagaaatcacaggacaccagctc

SEQ ID NO: 3944223 - DNA, 25 bp, Homo sapien
tgagagactttagcatagaagcccc

SEQ ID NO: 3944224 - DNA, 25 bp, Homo sapien
tgaaacttggcgttaggagccacaa

SEQ ID NO: 3944225 - DNA, 25 bp, Homo sapien
gaataacccagtgacaatgttgctg

SEQ ID NO: 3944226 - DNA, 25 bp, Homo sapien
gcctgcaggcgttgtcgtgaaactt

SEQ ID NO: 3944227 - DNA, 25 bp, Homo sapien
gaggaagcgccatcggagcagagac

SEQ ID NO: 3944228 - DNA, 25 bp, Homo sapien
gcagagacctgaagacaattccagg

SEQ ID NO: 3944229 - DNA, 25 bp, Homo sapien
aagcgccatcggagcagagacctga

SEQ ID NO: 3944230 - DNA, 25 bp, Homo sapien
tcaccagtcagggaggaagcgccat

SEQ ID NO: 3944231 - DNA, 25 bp, Homo sapien
tgctgtcgttgtagcaaggtctgag

SEQ ID NO: 3944232 - DNA, 25 bp, Homo sapien
atgggtaatgtgctgtcgttgtagc

SEQ ID NO: 3944233 - DNA, 25 bp, Homo sapien
cacacatgtgcatgagtacccagtt

SEQ ID NO: 3944234 - DNA, 25 bp, Homo sapien
acatgtgcatgagtacccagttatc

SEQ ID NO: 3944235 - DNA, 25 bp, Homo sapien
tccggcccatccgtcggaaatgatg

SEQ ID NO: 3944236 - DNA, 25 bp, Homo sapien
gaagcgcctatgcaagacgcagggc

SEQ ID NO: 3944237 - DNA, 25 bp, Homo sapien
ttgcaggctaccgagaccctggctg

SEQ ID NO: 3944238 - DNA, 25 bp, Homo sapien
aggacctaccccagcgggcatggcg

SEQ ID NO: 3944239 - DNA, 25 bp, Homo sapien
attcgagccccacctgaggacgcag

SEQ ID NO: 3944240 - DNA, 25 bp, Homo sapien
tctaaaagtcacgattcgagcccca

SEQ ID NO: 3944241 - DNA, 25 bp, Homo sapien
tgaggacgcagcgatccagcgccaa

SEQ ID NO: 3944242 - DNA, 25 bp, Homo sapien
ctcattatctgagataaaggagtga

SEQ ID NO: 3944243 - DNA, 25 bp, Homo sapien
agagcttcggtgcttgcacgcccag

SEQ ID NO: 3944244 - DNA, 25 bp, Homo sapien
tacacgcgttccagcgaaaagagcg

SEQ ID NO: 3944245 - DNA, 25 bp, Homo sapien
ggtgacgactgcttccaattccgcg

SEQ ID NO: 3944246 - DNA, 25 bp, Homo sapien
cagcaactgcccaaagtacacgcgt

SEQ ID NO: 3944247 - DNA, 25 bp, Homo sapien
ttaggaaagcgctgtgccatctgat

SEQ ID NO: 3944248 - DNA, 25 bp, Homo sapien
gaatgggaatgagactgtgcaaacc

SEQ ID NO: 3944249 - DNA, 25 bp, Homo sapien
taggtaggaccggagcaatcctggc

SEQ ID NO: 3944250 - DNA, 25 bp, Homo sapien
tgtgcaaaccgtggactaccctgtg

SEQ ID NO: 3944251 - DNA, 25 bp, Homo sapien
gagcctcgctctaagggacgcagtc

SEQ ID NO: 3944252 - DNA, 25 bp, Homo sapien
tgggcatgtagactggcaccttgaa

SEQ ID NO: 3944253 - DNA, 25 bp, Homo sapien
tttttaccaagagcccgagcctcgc

SEQ ID NO: 3944254 - DNA, 25 bp, Homo sapien
gacgcagtcctagaggcgtgccctt

SEQ ID NO: 3944255 - DNA, 25 bp, Homo sapien
gtgggttttgattgacatactgttg

SEQ ID NO: 3944256 - DNA, 25 bp, Homo sapien
gagctggcggctttatcatatgtgg

SEQ ID NO: 3944257 - DNA, 25 bp, Homo sapien
tgctgaagtttgagtgtcgttataa

SEQ ID NO: 3944258 - DNA, 25 bp, Homo sapien
tcctattgtgatgtagcgccagttg

SEQ ID NO: 3944259 - DNA, 25 bp, Homo sapien
tgggcaagggcttttcaatacaagg

SEQ ID NO: 3944260 - DNA, 25 bp, Homo sapien
caaggggacaagcactgagaggctc

SEQ ID NO: 3944261 - DNA, 25 bp, Homo sapien
caggtgattgggcaagggcttttca

SEQ ID NO: 3944262 - DNA, 25 bp, Homo sapien
gtcgcatgtctgtctcactatttct

SEQ ID NO: 3944263 - DNA, 25 bp, Homo sapien
ccagttcctttaacttacagatgaa

SEQ ID NO: 3944264 - DNA, 25 bp, Homo sapien
aatcgtaggatgttgagagctcgga

SEQ ID NO: 3944265 - DNA, 25 bp, Homo sapien
gctgacagatgatccggtccagttc

SEQ ID NO: 3944266 - DNA, 25 bp, Homo sapien
ttttatctccaactagaatcgtagg

SEQ ID NO: 3944267 - DNA, 25 bp, Homo sapien
ttggttaaacgtggctgaaactgga

SEQ ID NO: 3944268 - DNA, 25 bp, Homo sapien
gggtcatctcgggaagaagtgaaag

SEQ ID NO: 3944269 - DNA, 25 bp, Homo sapien
agaagtgaaagggacaagttagtgg

SEQ ID NO: 3944270 - DNA, 25 bp, Homo sapien
aacttggctttagggtgtggtggtg

SEQ ID NO: 3944271 - DNA, 25 bp, Homo sapien
gacagcgagccggacacagaccccg

SEQ ID NO: 3944272 - DNA, 25 bp, Homo sapien
ggccgacagcgagccggacacagac

SEQ ID NO: 3944273 - DNA, 25 bp, Homo sapien
ccgacagcgagccggacacagaccc

SEQ ID NO: 3944274 - DNA, 25 bp, Homo sapien
cggccgacagcgagccggacacaga

SEQ ID NO: 3944275 - DNA, 25 bp, Homo sapien
tcataatctgaaggtcgtgagttcg

SEQ ID NO: 3944276 - DNA, 25 bp, Homo sapien
gtcgtgagttcgagcctcacacggg

SEQ ID NO: 3944277 - DNA, 25 bp, Homo sapien
gagcagcctcgttagcgcagtaggc

SEQ ID NO: 3944278 - DNA, 25 bp, Homo sapien
taacgttttgcactcggcatcacca

SEQ ID NO: 3944279 - DNA, 25 bp, Homo sapien
gcccagtgcatgtggcgccatctcg

SEQ ID NO: 3944280 - DNA, 25 bp, Homo sapien
tgcccagtgcatgtggcgccatctc

SEQ ID NO: 3944281 - DNA, 25 bp, Homo sapien
ctctggtttccagattccgaaattt

SEQ ID NO: 3944282 - DNA, 25 bp, Homo sapien
gaagctgtgccttcacatgatctag

SEQ ID NO: 3944283 - DNA, 25 bp, Homo sapien
cacatgatctaggacagcgttcaga

SEQ ID NO: 3944284 - DNA, 25 bp, Homo sapien
cagcgttcagaagatggctacagtc

SEQ ID NO: 3944285 - DNA, 25 bp, Homo sapien
tctgatagtcatacaattaataaag

SEQ ID NO: 3944286 - DNA, 25 bp, Homo sapien
gacatctctgatagtcatacaatta

SEQ ID NO: 3944287 - DNA, 25 bp, Homo sapien
cagacatctctgatagtcatacaat

SEQ ID NO: 3944288 - DNA, 25 bp, Homo sapien
catctctgatagtcatacaattaat

SEQ ID NO: 3944289 - DNA, 25 bp, Homo sapien
caactgcttttgtcccgagccttca

SEQ ID NO: 3944290 - DNA, 25 bp, Homo sapien
gagccttcattctgggcgcagtccc

SEQ ID NO: 3944291 - DNA, 25 bp, Homo sapien
ggcgcgtttgcgcaactgcttttgt

SEQ ID NO: 3944292 - DNA, 25 bp, Homo sapien
tcgacgcccagccttggcgcgtttg

SEQ ID NO: 3944293 - DNA, 25 bp, Homo sapien
tgaggcccctgaggtgacggttgtg

SEQ ID NO: 3944294 - DNA, 25 bp, Homo sapien
tgctgcggcggcgaatccgactctg

SEQ ID NO: 3944295 - DNA, 25 bp, Homo sapien
tggcgatagccacttcccttgtatc

SEQ ID NO: 3944296 - DNA, 25 bp, Homo sapien
agcctggtcaggtgactcgcgacgc

SEQ ID NO: 3944297 - DNA, 25 bp, Homo sapien
gcttgaaggtcttctccgacggcat

SEQ ID NO: 3944298 - DNA, 25 bp, Homo sapien
cgaaggtgcggcgctgcttgaaggt

SEQ ID NO: 3944299 - DNA, 25 bp, Homo sapien
aaggtgcggcgctgcttgaaggtct

SEQ ID NO: 3944300 - DNA, 25 bp, Homo sapien
ctgcttgaaggtcttctccgacggc

SEQ ID NO: 3944301 - DNA, 25 bp, Homo sapien
agggcgcggggtgattcagcaggcc

SEQ ID NO: 3944302 - DNA, 25 bp, Homo sapien
tcccaggcctccgagaggtccgcag

SEQ ID NO: 3944303 - DNA, 25 bp, Homo sapien
ctcacggcgtcccaggccctgccgc

SEQ ID NO: 3944304 - DNA, 25 bp, Homo sapien
tgccgccctccacagctcggacccc

SEQ ID NO: 3944305 - DNA, 25 bp, Homo sapien
cgtaatcgcaaacccaagagaagtc

SEQ ID NO: 3944306 - DNA, 25 bp, Homo sapien
tggtgccaaggtgagaacgtaatcg

SEQ ID NO: 3944307 - DNA, 25 bp, Homo sapien
gatctgcggcgttctcttgctcaag

SEQ ID NO: 3944308 - DNA, 25 bp, Homo sapien
cactgaggtctgtaagaggcactcg

SEQ ID NO: 3944309 - DNA, 25 bp, Homo sapien
ccggtgtctggaacttaggcaacaa

SEQ ID NO: 3944310 - DNA, 25 bp, Homo sapien
gatgaacacggtgcttcccttccaa

SEQ ID NO: 3944311 - DNA, 25 bp, Homo sapien
tgctaaccaacggactgcctcaaga

SEQ ID NO: 3944312 - DNA, 25 bp, Homo sapien
gactccgggaaactaggcaaaagca

SEQ ID NO: 3944313 - DNA, 25 bp, Homo sapien
ccaggaaattccttgttcggatgtg

SEQ ID NO: 3944314 - DNA, 25 bp, Homo sapien
tacaaggtccatacatcaatgggaa

SEQ ID NO: 3944315 - DNA, 25 bp, Homo sapien
gttatgagaaaaagggcatctctcc

SEQ ID NO: 3944316 - DNA, 25 bp, Homo sapien
cctcagggccacttttaggttccag

SEQ ID NO: 3944317 - DNA, 25 bp, Homo sapien
taagtatgagacatcttcctatgcc

SEQ ID NO: 3944318 - DNA, 25 bp, Homo sapien
aaaattcctgtgttcaagtacagcc

SEQ ID NO: 3944319 - DNA, 25 bp, Homo sapien
tggccacaatggtgatagcccatct

SEQ ID NO: 3944320 - DNA, 25 bp, Homo sapien
tctaaaagtagaaacgttcaggcag

SEQ ID NO: 3944321 - DNA, 25 bp, Homo sapien
gaaatggaatccattataaaccagg

SEQ ID NO: 3944322 - DNA, 25 bp, Homo sapien
cagctttttaatgatatggtgccta

SEQ ID NO: 3944323 - DNA, 25 bp, Homo sapien
aatttttcccttatcacttccagct

SEQ ID NO: 3944324 - DNA, 25 bp, Homo sapien
caagagaatggaatatgatgcctgt

SEQ ID NO: 3944325 - DNA, 25 bp, Homo sapien
acagaagcattactaagggccaggc

SEQ ID NO: 3944326 - DNA, 25 bp, Homo sapien
cagaagcattactaagggccaggca

SEQ ID NO: 3944327 - DNA, 25 bp, Homo sapien
agaagcattactaagggccaggcag

SEQ ID NO: 3944328 - DNA, 25 bp, Homo sapien
gaaatgaagagacagaagcattact

SEQ ID NO: 3944329 - DNA, 25 bp, Homo sapien
ttggatgctgctctcgaataagtcg

SEQ ID NO: 3944330 - DNA, 25 bp, Homo sapien
tgctgctctcgaataagtcggacat

SEQ ID NO: 3944331 - DNA, 25 bp, Homo sapien
taagtcggacatcttctactctttg

SEQ ID NO: 3944332 - DNA, 25 bp, Homo sapien
gctctcgaataagtcggacatcttc

SEQ ID NO: 3944333 - DNA, 25 bp, Homo sapien
cagaaatcttggcacctgaggccag

SEQ ID NO: 3944334 - DNA, 25 bp, Homo sapien
taaaaacccgtcaagtggatgcact

SEQ ID NO: 3944335 - DNA, 25 bp, Homo sapien
tcatgactgaaaccgaggcctgaga

SEQ ID NO: 3944336 - DNA, 25 bp, Homo sapien
tgtgtaaggccgagtcaagctgtca

SEQ ID NO: 3944337 - DNA, 25 bp, Homo sapien
acgctgcggacatcttttctatata

SEQ ID NO: 3944338 - DNA, 25 bp, Homo sapien
tctgtgtttactgaacgctgcggac

SEQ ID NO: 3944339 - DNA, 25 bp, Homo sapien
ctgaacgctgcggacatcttttcta

SEQ ID NO: 3944340 - DNA, 25 bp, Homo sapien
gtttactgaacgctgcggacatctt

SEQ ID NO: 3944341 - DNA, 25 bp, Homo sapien
tcacccttgtatcgttctattatca

SEQ ID NO: 3944342 - DNA, 25 bp, Homo sapien
cacccttgtatcgttctattatcac

SEQ ID NO: 3944343 - DNA, 25 bp, Homo sapien
gcagtctagcaagtaatataaaacc

SEQ ID NO: 3944344 - DNA, 25 bp, Homo sapien
ttaaacaggaaacatctaaacgatg

SEQ ID NO: 3944345 - DNA, 25 bp, Homo sapien
aaagaaacgggctctgcagtctagc

SEQ ID NO: 3944346 - DNA, 25 bp, Homo sapien
taactagctttgctgtacaatacct

SEQ ID NO: 3944347 - DNA, 25 bp, Homo sapien
gctgaccatgctgtgtccgttcacc

SEQ ID NO: 3944348 - DNA, 25 bp, Homo sapien
caatttcatcccgaacgtctcctgg

SEQ ID NO: 3944349 - DNA, 25 bp, Homo sapien
acctctgagattggtgtggagacgc

SEQ ID NO: 3944350 - DNA, 25 bp, Homo sapien
tcctgggaggcatagaccatgtaca

SEQ ID NO: 3944351 - DNA, 25 bp, Homo sapien
tccaaagctgaatgtgctcacttgg

SEQ ID NO: 3944352 - DNA, 25 bp, Homo sapien
tttaaacaattctagaagagctgca

SEQ ID NO: 3944353 - DNA, 25 bp, Homo sapien
ggtgggaacactactgtttcatgat

SEQ ID NO: 3944354 - DNA, 25 bp, Homo sapien
gatctcagttggtaacatccctttt

SEQ ID NO: 3944355 - DNA, 25 bp, Homo sapien
taccctgcgtttgtgccaactgtga

SEQ ID NO: 3944356 - DNA, 25 bp, Homo sapien
gaattctgatggctgtctgacctaa

SEQ ID NO: 3944357 - DNA, 25 bp, Homo sapien
gaccttcagcagtttacagtcaggg

SEQ ID NO: 3944358 - DNA, 25 bp, Homo sapien
tagtgaaccccatgcaagtactggg

SEQ ID NO: 3944359 - DNA, 25 bp, Homo sapien
ctacttaaacgggagctgggctcag

SEQ ID NO: 3944360 - DNA, 25 bp, Homo sapien
tgactcggcattgtacagaatcgct

SEQ ID NO: 3944361 - DNA, 25 bp, Homo sapien
aaagatgttccagcacgagttcacg

SEQ ID NO: 3944362 - DNA, 25 bp, Homo sapien
ggcaatgtggccctaccctgaagta

SEQ ID NO: 3944363 - DNA, 25 bp, Homo sapien
taagtaggagctacacagcgcagag

SEQ ID NO: 3944364 - DNA, 25 bp, Homo sapien
cagtcgtcttgaacgtgcatgggcg

SEQ ID NO: 3944365 - DNA, 25 bp, Homo sapien
cagcgttgaggtagatgagttccga

SEQ ID NO: 3944366 - DNA, 25 bp, Homo sapien
tcgagaatcgtcagctgtaagtagg

SEQ ID NO: 3944367 - DNA, 25 bp, Homo sapien
tgcagaattaacagacctcttctcc

SEQ ID NO: 3944368 - DNA, 25 bp, Homo sapien
cctcatggtacacagtattacagtg

SEQ ID NO: 3944369 - DNA, 25 bp, Homo sapien
gagaactgacacaactttgccttaa

SEQ ID NO: 3944370 - DNA, 25 bp, Homo sapien
ccttaaagagtactagactggacct

SEQ ID NO: 3944371 - DNA, 25 bp, Homo sapien
cagaggctactcgacttaggacgca

SEQ ID NO: 3944372 - DNA, 25 bp, Homo sapien
taggctcacacgtcaattccagggc

SEQ ID NO: 3944373 - DNA, 25 bp, Homo sapien
tgcaagttgctttatctcccacggg

SEQ ID NO: 3944374 - DNA, 25 bp, Homo sapien
taaatctctgcggttctgggagcca

SEQ ID NO: 3944375 - DNA, 25 bp, Homo sapien
tagaaatcggaggagcagtagctca

SEQ ID NO: 3944376 - DNA, 25 bp, Homo sapien
cgttgtctcacaagaggagccgggt

SEQ ID NO: 3944377 - DNA, 25 bp, Homo sapien
ttgcttgggcaaaatgatcaggtcc

SEQ ID NO: 3944378 - DNA, 25 bp, Homo sapien
gcccagaggccacgttttaagtcag

SEQ ID NO: 3944379 - DNA, 25 bp, Homo sapien
aagagacacgctgtcagcagcgcgg

SEQ ID NO: 3944380 - DNA, 25 bp, Homo sapien
gaaagagacacgctgtcagcagcgc

SEQ ID NO: 3944381 - DNA, 25 bp, Homo sapien
ttgaaagagacacgctgtcagcagc

SEQ ID NO: 3944382 - DNA, 25 bp, Homo sapien
cttgaaagagacacgctgtcagcag

SEQ ID NO: 3944383 - DNA, 25 bp, Homo sapien
ccctttttcagttgctacgttagag

SEQ ID NO: 3944384 - DNA, 25 bp, Homo sapien
ggctgtgtgatctaacttgtaagac

SEQ ID NO: 3944385 - DNA, 25 bp, Homo sapien
gacatcaccattcttattccagctt

SEQ ID NO: 3944386 - DNA, 25 bp, Homo sapien
tactggtttctaaatgtaggtgttg

SEQ ID NO: 3944387 - DNA, 25 bp, Homo sapien
aagacatttggcggaaaactactgg

SEQ ID NO: 3944388 - DNA, 25 bp, Homo sapien
agacatttggcggaaaactactggt

SEQ ID NO: 3944389 - DNA, 25 bp, Homo sapien
aaagacatttggcggaaaactactg

SEQ ID NO: 3944390 - DNA, 25 bp, Homo sapien
tcagccagtattgaagtattctttc

SEQ ID NO: 3944391 - DNA, 25 bp, Homo sapien
tgagaaacctttggtcttgtcccac

SEQ ID NO: 3944392 - DNA, 25 bp, Homo sapien
gactccagttctcatgtatgagaaa

SEQ ID NO: 3944393 - DNA, 25 bp, Homo sapien
cagatctgaggtgaagctcagttca

SEQ ID NO: 3944394 - DNA, 25 bp, Homo sapien
tgtcatagtggtacatctgtcctcc

SEQ ID NO: 3944395 - DNA, 25 bp, Homo sapien
gtcatagtggtacatctgtcctcca

SEQ ID NO: 3944396 - DNA, 25 bp, Homo sapien
tcatagtggtacatctgtcctccag

SEQ ID NO: 3944397 - DNA, 25 bp, Homo sapien
gagtgcacttgcacagacctgggtg

SEQ ID NO: 3944398 - DNA, 25 bp, Homo sapien
gaatcttagaggatccctggtccgt

SEQ ID NO: 3944399 - DNA, 25 bp, Homo sapien
catgatacgggaattgaggcataca

SEQ ID NO: 3944400 - DNA, 25 bp, Homo sapien
cagctgatcttgttgtgtgagcacc

SEQ ID NO: 3944401 - DNA, 25 bp, Homo sapien
ctgtatgatgtacgcgtgtgtcgca

SEQ ID NO: 3944402 - DNA, 25 bp, Homo sapien
catgtgggcatgtatatgtgcacac

SEQ ID NO: 3944403 - DNA, 25 bp, Homo sapien
gactcccagagccttaaatgcccgt

SEQ ID NO: 3944404 - DNA, 25 bp, Homo sapien
tgatcgtttttaagagccgggctac

SEQ ID NO: 3944405 - DNA, 25 bp, Homo sapien
gcggcccgcagtgacagaccctgcg

SEQ ID NO: 3944406 - DNA, 25 bp, Homo sapien
cgcagtgacagaccctgcggcgcgg

SEQ ID NO: 3944407 - DNA, 25 bp, Homo sapien
gggcggcccgcagtgacagaccctg

SEQ ID NO: 3944408 - DNA, 25 bp, Homo sapien
gcccgcagtgacagaccctgcggcg

SEQ ID NO: 3944409 - DNA, 25 bp, Homo sapien
tgttcacgttctttcactaccttag

SEQ ID NO: 3944410 - DNA, 25 bp, Homo sapien
cacattaagaagtgaggtccaggac

SEQ ID NO: 3944411 - DNA, 25 bp, Homo sapien
gccagttccctggaatcacattaag

SEQ ID NO: 3944412 - DNA, 25 bp, Homo sapien
ccaggacaacgacgattaatttaat

SEQ ID NO: 3944413 - DNA, 25 bp, Homo sapien
catcagctgtgcgacctcaggtcaa

SEQ ID NO: 3944414 - DNA, 25 bp, Homo sapien
aataacagccttatgaagcctcagg

SEQ ID NO: 3944415 - DNA, 25 bp, Homo sapien
ttaacgctaagaacccaggagccat

SEQ ID NO: 3944416 - DNA, 25 bp, Homo sapien
ggaaacccttgttgcgtggcaggct

SEQ ID NO: 3944417 - DNA, 25 bp, Homo sapien
tgtccacgggctgcggaatccgttg

SEQ ID NO: 3944418 - DNA, 25 bp, Homo sapien
aaggaagaaagtgtgtccacgggct

SEQ ID NO: 3944419 - DNA, 25 bp, Homo sapien
cagagaaatagccacgtgaacggga

SEQ ID NO: 3944420 - DNA, 25 bp, Homo sapien
cggggattcatctggcagacctggc

SEQ ID NO: 3944421 - DNA, 25 bp, Homo sapien
taacgccatgttgcaagagggcacc

SEQ ID NO: 3944422 - DNA, 25 bp, Homo sapien
ggatgttcccatggcaccacgctat

SEQ ID NO: 3944423 - DNA, 25 bp, Homo sapien
tctctggtcctgaaaaagcaacgtg

SEQ ID NO: 3944424 - DNA, 25 bp, Homo sapien
tataaagcaatggagccggaaccca

SEQ ID NO: 3944425 - DNA, 25 bp, Homo sapien
agaacagactgttcacaatggctgg

SEQ ID NO: 3944426 - DNA, 25 bp, Homo sapien
gaacagactgttcacaatggctggt

SEQ ID NO: 3944427 - DNA, 25 bp, Homo sapien
acagaacagactgttcacaatggct

SEQ ID NO: 3944428 - DNA, 25 bp, Homo sapien
cagaacagactgttcacaatggctg

SEQ ID NO: 3944429 - DNA, 25 bp, Homo sapien
gagtaatacccctatggctttgtcc

SEQ ID NO: 3944430 - DNA, 25 bp, Homo sapien
catgcctctcctccaacaaggtgga

SEQ ID NO: 3944431 - DNA, 25 bp, Homo sapien
taataactggaaattaccttgctaa

SEQ ID NO: 3944432 - DNA, 25 bp, Homo sapien
caaggtggaactacagactgatgtc

SEQ ID NO: 3944433 - DNA, 25 bp, Homo sapien
ttaatcctcaatggctgatgatgtc

SEQ ID NO: 3944434 - DNA, 25 bp, Homo sapien
tacatctgagtttacgctaatgagg

SEQ ID NO: 3944435 - DNA, 25 bp, Homo sapien
gggctggagatcgacttaatcctca

SEQ ID NO: 3944436 - DNA, 25 bp, Homo sapien
gatgtcatcaatcatacctgtctaa

SEQ ID NO: 3944437 - DNA, 25 bp, Homo sapien
caacaggatctgagtgtttggactc

SEQ ID NO: 3944438 - DNA, 25 bp, Homo sapien
cctgttcagtgtctcggcgttgctg

SEQ ID NO: 3944439 - DNA, 25 bp, Homo sapien
tgtctcggcgttgctgggtagaccc

SEQ ID NO: 3944440 - DNA, 25 bp, Homo sapien
acaacaggatctgagtgtttggact

SEQ ID NO: 3944441 - DNA, 25 bp, Homo sapien
gctggaaacgggtgggaaggctgtc

SEQ ID NO: 3944442 - DNA, 25 bp, Homo sapien
gcctctgaaggtgggcgtgagtcag

SEQ ID NO: 3944443 - DNA, 25 bp, Homo sapien
tgggagaaatcgaccgcccttgccg

SEQ ID NO: 3944444 - DNA, 25 bp, Homo sapien
gctcctgggagaaatcgaccgccct

SEQ ID NO: 3944445 - DNA, 25 bp, Homo sapien
agcgctgtcttcctggatgcagcca

SEQ ID NO: 3944446 - DNA, 25 bp, Homo sapien
agcagcgctgtcttcctggatgcag

SEQ ID NO: 3944447 - DNA, 25 bp, Homo sapien
gctgtcttcctggatgcagccagcc

SEQ ID NO: 3944448 - DNA, 25 bp, Homo sapien
cagcagcgctgtcttcctggatgca

SEQ ID NO: 3944449 - DNA, 25 bp, Homo sapien
gctgtgttcccgagaggttccaagg

SEQ ID NO: 3944450 - DNA, 25 bp, Homo sapien
ccagtcttgcggacgttgttctaga

SEQ ID NO: 3944451 - DNA, 25 bp, Homo sapien
tttgagtggtctgaaacaaagccga

SEQ ID NO: 3944452 - DNA, 25 bp, Homo sapien
caatgaaagcggacacatagggcgc

SEQ ID NO: 3944453 - DNA, 25 bp, Homo sapien
ccatgcggtgcctgcctgagtggaa

SEQ ID NO: 3944454 - DNA, 25 bp, Homo sapien
gtgcctgcctgagtggaaggttcca

SEQ ID NO: 3944455 - DNA, 25 bp, Homo sapien
catttttaggatgattttcggacca

SEQ ID NO: 3944456 - DNA, 25 bp, Homo sapien
atgattttcggaccacacgcggcag

SEQ ID NO: 3944457 - DNA, 25 bp, Homo sapien
cagaccagcccttccctgccctgag

SEQ ID NO: 3944458 - DNA, 25 bp, Homo sapien
gaccagcccttccctgccctgagtg

SEQ ID NO: 3944459 - DNA, 25 bp, Homo sapien
gagaggtcagaccagcccttccctg

SEQ ID NO: 3944460 - DNA, 25 bp, Homo sapien
ctgagaggtcagaccagcccttccc

SEQ ID NO: 3944461 - DNA, 25 bp, Homo sapien
gtgtccaggccggaacactgtgctc

SEQ ID NO: 3944462 - DNA, 25 bp, Homo sapien
ggcggatgacggctgtgtgtgtcca

SEQ ID NO: 3944463 - DNA, 25 bp, Homo sapien
tttggccgtcgtaaagacgaacaga

SEQ ID NO: 3944464 - DNA, 25 bp, Homo sapien
acgaacagacgtggtcggcacactg

SEQ ID NO: 3944465 - DNA, 25 bp, Homo sapien
tgtccccgaaacacacggaggtgga

SEQ ID NO: 3944466 - DNA, 25 bp, Homo sapien
gtggagcctcgtggaccgggtgtgc

SEQ ID NO: 3944467 - DNA, 25 bp, Homo sapien
cacagctcgagcgtggtggagcctc

SEQ ID NO: 3944468 - DNA, 25 bp, Homo sapien
tcattgaccccacttgagaggccac

SEQ ID NO: 3944469 - DNA, 25 bp, Homo sapien
ccaggcaaatggcaggggccgtcca

SEQ ID NO: 3944470 - DNA, 25 bp, Homo sapien
gaacaaccaggcaaatggcaggggc

SEQ ID NO: 3944471 - DNA, 25 bp, Homo sapien
tcgagggcactcgggtaggggaaca

SEQ ID NO: 3944472 - DNA, 25 bp, Homo sapien
ggccagaggggaaaatcgagggcac

SEQ ID NO: 3944473 - DNA, 25 bp, Homo sapien
acaggtagcaagaagatgggtggat

SEQ ID NO: 3944474 - DNA, 25 bp, Homo sapien
tgagccacttgctgacaggtagcaa

SEQ ID NO: 3944475 - DNA, 25 bp, Homo sapien
ttgctgacaggtagcaagaagatgg

SEQ ID NO: 3944476 - DNA, 25 bp, Homo sapien
tgggtggattgtacggcccccggca

SEQ ID NO: 3944477 - DNA, 25 bp, Homo sapien
caaatgagcctgcaggatttttacc

SEQ ID NO: 3944478 - DNA, 25 bp, Homo sapien
cggcaaatgagcctgcaggattttt

SEQ ID NO: 3944479 - DNA, 25 bp, Homo sapien
tgagcctgcaggatttttacccaaa

SEQ ID NO: 3944480 - DNA, 25 bp, Homo sapien
aatgagcctgcaggatttttaccca

SEQ ID NO: 3944481 - DNA, 25 bp, Homo sapien
gttgtggttattgctcgtaggaggc

SEQ ID NO: 3944482 - DNA, 25 bp, Homo sapien
ggccgtgcgctgtccatgagcccca

SEQ ID NO: 3944483 - DNA, 25 bp, Homo sapien
aggccgtgcgctgtccatgagcccc

SEQ ID NO: 3944484 - DNA, 25 bp, Homo sapien
tattgctcgtaggaggccgtgggca

SEQ ID NO: 3944485 - DNA, 25 bp, Homo sapien
cacatggcagggaccagggtcatcc

SEQ ID NO: 3944486 - DNA, 25 bp, Homo sapien
ggaaagtcgctttgcacagggaaag

SEQ ID NO: 3944487 - DNA, 25 bp, Homo sapien
taccccttagcacgaggtggctgct

SEQ ID NO: 3944488 - DNA, 25 bp, Homo sapien
ggtggctgctcctcgaatcttggtt

SEQ ID NO: 3944489 - DNA, 25 bp, Homo sapien
tccaaggcagatcctggagatgtga

SEQ ID NO: 3944490 - DNA, 25 bp, Homo sapien
tcctgagcctccaaggcagatcctg

SEQ ID NO: 3944491 - DNA, 25 bp, Homo sapien
gagctgtttcccctgagccacacgg

SEQ ID NO: 3944492 - DNA, 25 bp, Homo sapien
acggcagagggacgctctggcccat

SEQ ID NO: 3944493 - DNA, 25 bp, Homo sapien
acttggctttgtggaaccttctgga

SEQ ID NO: 3944494 - DNA, 25 bp, Homo sapien
cttctggatgaagggggtaagcctc

SEQ ID NO: 3944495 - DNA, 25 bp, Homo sapien
ctacttggctttgtggaaccttctg

SEQ ID NO: 3944496 - DNA, 25 bp, Homo sapien
ggctttgtggaaccttctggatgaa

SEQ ID NO: 3944497 - DNA, 25 bp, Homo sapien
catggaacctaagatgccaccaagt

SEQ ID NO: 3944498 - DNA, 25 bp, Homo sapien
tgtcgtcacacaattgcagatggcc

SEQ ID NO: 3944499 - DNA, 25 bp, Homo sapien
tgtaactaccgcatgcacaggacgc

SEQ ID NO: 3944500 - DNA, 25 bp, Homo sapien
caggcctgtgcgcaattgtcgtcac

SEQ ID NO: 3944501 - DNA, 25 bp, Homo sapien
gtgtgttcaccgccaggcttgacat

SEQ ID NO: 3944502 - DNA, 25 bp, Homo sapien
gcagtgtgttcaccgccaggcttga

SEQ ID NO: 3944503 - DNA, 25 bp, Homo sapien
ggcagtgtgttcaccgccaggcttg

SEQ ID NO: 3944504 - DNA, 25 bp, Homo sapien
agtgtgttcaccgccaggcttgaca

SEQ ID NO: 3944505 - DNA, 25 bp, Homo sapien
tgtggctggcgcgtgacaccactgt

SEQ ID NO: 3944506 - DNA, 25 bp, Homo sapien
gccagtggcgagtgtagttgcttct

SEQ ID NO: 3944507 - DNA, 25 bp, Homo sapien
cagtgcgttcatttggccagtggcg

SEQ ID NO: 3944508 - DNA, 25 bp, Homo sapien
gcgtgacaccactgtagaagctcag

SEQ ID NO: 3944509 - DNA, 25 bp, Homo sapien
atgggacatccgagggcttcccgga

SEQ ID NO: 3944510 - DNA, 25 bp, Homo sapien
cagaatgagagctcaagtggaaccc

SEQ ID NO: 3944511 - DNA, 25 bp, Homo sapien
aatgagagctcaagtggaaccccac

SEQ ID NO: 3944512 - DNA, 25 bp, Homo sapien
cacactgtcgccagagccgatggga

SEQ ID NO: 3944513 - DNA, 25 bp, Homo sapien
cttctttgtgaggacgctcacccgc

SEQ ID NO: 3944514 - DNA, 25 bp, Homo sapien
tctttgtgaggacgctcacccgcat

SEQ ID NO: 3944515 - DNA, 25 bp, Homo sapien
tgtgaggacgctcacccgcatccat

SEQ ID NO: 3944516 - DNA, 25 bp, Homo sapien
tttgtgaggacgctcacccgcatcc

SEQ ID NO: 3944517 - DNA, 25 bp, Homo sapien
gtccagcatccttgccggtgtgagg

SEQ ID NO: 3944518 - DNA, 25 bp, Homo sapien
cagtgtgagggcgtccagcatcctt

SEQ ID NO: 3944519 - DNA, 25 bp, Homo sapien
ccatccagcgttctcgccagtgtgg

SEQ ID NO: 3944520 - DNA, 25 bp, Homo sapien
gcattcagcatccttgccggtgtgg

SEQ ID NO: 3944521 - DNA, 25 bp, Homo sapien
tgagggcgtccatccagtgtcctca

SEQ ID NO: 3944522 - DNA, 25 bp, Homo sapien
cggtgtgagggcgtccatccagtgt

SEQ ID NO: 3944523 - DNA, 25 bp, Homo sapien
gagggcgtccatccagtgtcctcac

SEQ ID NO: 3944524 - DNA, 25 bp, Homo sapien
gccggaagaggttcgtgaatctgct

SEQ ID NO: 3944525 - DNA, 25 bp, Homo sapien
gaggttcgtgaatctgctgcttcat

SEQ ID NO: 3944526 - DNA, 25 bp, Homo sapien
cgtgaatccgtccatccctgtggaa

SEQ ID NO: 3944527 - DNA, 25 bp, Homo sapien
caggaaggcaacgacagttgcagag

SEQ ID NO: 3944528 - DNA, 25 bp, Homo sapien
ggagcctgaccagcgtctcgcgctc

SEQ ID NO: 3944529 - DNA, 25 bp, Homo sapien
attccttttcgagctgcgccgcgga

SEQ ID NO: 3944530 - DNA, 25 bp, Homo sapien
tccggaggaatttcagtcaatcggg

SEQ ID NO: 3944531 - DNA, 25 bp, Homo sapien
cgccggctccggaggaatttcagtc

SEQ ID NO: 3944532 - DNA, 25 bp, Homo sapien
ccgcaaacggtgaaaacggactcag

SEQ ID NO: 3944533 - DNA, 25 bp, Homo sapien
aaaacggactcaggcgatcgacaca

SEQ ID NO: 3944534 - DNA, 25 bp, Homo sapien
gcatgtaactcggttccagatcccg

SEQ ID NO: 3944535 - DNA, 25 bp, Homo sapien
gatcgacacagcagagtcgcggccg

SEQ ID NO: 3944536 - DNA, 25 bp, Homo sapien
cagtaggaccctccgtcgtcaaaat

SEQ ID NO: 3944537 - DNA, 25 bp, Homo sapien
tccacgagccggtgtattcgccttg

SEQ ID NO: 3944538 - DNA, 25 bp, Homo sapien
gtagcgccccttgaatccgtgcgtc

SEQ ID NO: 3944539 - DNA, 25 bp, Homo sapien
ccaggtgccctggtacgtgttgccg

SEQ ID NO: 3944540 - DNA, 25 bp, Homo sapien
cgcaggaacaccagaagcgaagctg

SEQ ID NO: 3944541 - DNA, 25 bp, Homo sapien
tcggcttgggcagattcggggctga

SEQ ID NO: 3944542 - DNA, 25 bp, Homo sapien
tttctctcggcttgggcagattcgg

SEQ ID NO: 3944543 - DNA, 25 bp, Homo sapien
ccgcaggaacaccagaagcgaagct

SEQ ID NO: 3944544 - DNA, 25 bp, Homo sapien
tagaatgaaggcacagatcgattcc

SEQ ID NO: 3944545 - DNA, 25 bp, Homo sapien
aactaatggtgaaaacgatgcagcc

SEQ ID NO: 3944546 - DNA, 25 bp, Homo sapien
agcagcctgcttcgacagcgctagt

SEQ ID NO: 3944547 - DNA, 25 bp, Homo sapien
gcagccactgaaagacgagattcct

SEQ ID NO: 3944548 - DNA, 25 bp, Homo sapien
gcacacgtacgctcaggatttttat

SEQ ID NO: 3944549 - DNA, 25 bp, Homo sapien
ctgaggataagctcccacatgggag

SEQ ID NO: 3944550 - DNA, 25 bp, Homo sapien
ttctcggcagaagcacaagtcattg

SEQ ID NO: 3944551 - DNA, 25 bp, Homo sapien
gctccatgcgtgtcaggtgcactga

SEQ ID NO: 3944552 - DNA, 25 bp, Homo sapien
tgcagacggtaggagctactcagct

SEQ ID NO: 3944553 - DNA, 25 bp, Homo sapien
ggagctactcagctcaatcagggag

SEQ ID NO: 3944554 - DNA, 25 bp, Homo sapien
ctactcagctcaatcagggagtacc

SEQ ID NO: 3944555 - DNA, 25 bp, Homo sapien
gacggtaggagctactcagctcaat

SEQ ID NO: 3944556 - DNA, 25 bp, Homo sapien
ctagtactcacaagtctttttgtca

SEQ ID NO: 3944557 - DNA, 25 bp, Homo sapien
cactcaggtgagaagggattcggaa

SEQ ID NO: 3944558 - DNA, 25 bp, Homo sapien
ataggacccaggtgcgtcttgaccc

SEQ ID NO: 3944559 - DNA, 25 bp, Homo sapien
ggttcgtgatctccccagaaggaca

SEQ ID NO: 3944560 - DNA, 25 bp, Homo sapien
caaaagcaccgtttgcagacaccat

SEQ ID NO: 3944561 - DNA, 25 bp, Homo sapien
gagagacacccaaccaagatacagt

SEQ ID NO: 3944562 - DNA, 25 bp, Homo sapien
gaattctcagtctctagcgaggtga

SEQ ID NO: 3944563 - DNA, 25 bp, Homo sapien
tatgtctgccggaattcactatggg

SEQ ID NO: 3944564 - DNA, 25 bp, Homo sapien
tatatgaacagtcaacggtcctcag

SEQ ID NO: 3944565 - DNA, 25 bp, Homo sapien
cttgcccgtgaaacgccgactagaa

SEQ ID NO: 3944566 - DNA, 25 bp, Homo sapien
atggcccaaacaccgagagaggaag

SEQ ID NO: 3944567 - DNA, 25 bp, Homo sapien
cacagactcgcagagagcggatgag

SEQ ID NO: 3944568 - DNA, 25 bp, Homo sapien
gaagctgcattcctaatgctcaagg

SEQ ID NO: 3944569 - DNA, 25 bp, Homo sapien
caagcaccccagggcccgggcccag

SEQ ID NO: 3944570 - DNA, 25 bp, Homo sapien
agcaccccagggcccgggcccagag

SEQ ID NO: 3944571 - DNA, 25 bp, Homo sapien
gcaccccagggcccgggcccagagc

SEQ ID NO: 3944572 - DNA, 25 bp, Homo sapien
cagggcccgggcccagagcccccat

SEQ ID NO: 3944573 - DNA, 25 bp, Homo sapien
gaatcccatgggctccaagccagcc

SEQ ID NO: 3944574 - DNA, 25 bp, Homo sapien
tccaatcgaatcccatgggctccaa

SEQ ID NO: 3944575 - DNA, 25 bp, Homo sapien
caatcgaatcccatgggctccaagc

SEQ ID NO: 3944576 - DNA, 25 bp, Homo sapien
atcgaatcccatgggctccaagcca

SEQ ID NO: 3944577 - DNA, 25 bp, Homo sapien
gcctcgctgcgaaaggagctctgct

SEQ ID NO: 3944578 - DNA, 25 bp, Homo sapien
gatgaggttcttgcgcttgccgccg

SEQ ID NO: 3944579 - DNA, 25 bp, Homo sapien
ttgccgccgacgaggatgttctgct

SEQ ID NO: 3944580 - DNA, 25 bp, Homo sapien
tcttggactccgacttgcgcagctt

SEQ ID NO: 3944581 - DNA, 25 bp, Homo sapien
cctggctccacaggtgcgcatggac

SEQ ID NO: 3944582 - DNA, 25 bp, Homo sapien
tccacaggtgcgcatggacgtgctg

SEQ ID NO: 3944583 - DNA, 25 bp, Homo sapien
tgcagccgtacaccctggctccaca

SEQ ID NO: 3944584 - DNA, 25 bp, Homo sapien
catggacgtgctggctgtgcacagc

SEQ ID NO: 3944585 - DNA, 25 bp, Homo sapien
ggcaagggtgagacgccagttccta

SEQ ID NO: 3944586 - DNA, 25 bp, Homo sapien
gctggatgtgggtctgcgggtctca

SEQ ID NO: 3944587 - DNA, 25 bp, Homo sapien
acgccgaggccactacagggagcag

SEQ ID NO: 3944588 - DNA, 25 bp, Homo sapien
tagtgcccctttgaggcctgacacc

SEQ ID NO: 3944589 - DNA, 25 bp, Homo sapien
caaaaatactgtgtagcctcccacc

SEQ ID NO: 3944590 - DNA, 25 bp, Homo sapien
actctccagggcggcagactctctt

SEQ ID NO: 3944591 - DNA, 25 bp, Homo sapien
ctgtgggcgcctgagccagccattc

SEQ ID NO: 3944592 - DNA, 25 bp, Homo sapien
gccagccattcatcagcttcactct

SEQ ID NO: 3944593 - DNA, 25 bp, Homo sapien
gagcctcgaaggctccgaacactgg

SEQ ID NO: 3944594 - DNA, 25 bp, Homo sapien
gagggtatccatcctgtgccttaga

SEQ ID NO: 3944595 - DNA, 25 bp, Homo sapien
gaacactgggcgcatcccaaacaat

SEQ ID NO: 3944596 - DNA, 25 bp, Homo sapien
tgtcacatggccgaggagggtatcc

SEQ ID NO: 3944597 - DNA, 25 bp, Homo sapien
cacagcaacgtttgcacgagacgca

SEQ ID NO: 3944598 - DNA, 25 bp, Homo sapien
cttgagatgtctccttcaccctggg

SEQ ID NO: 3944599 - DNA, 25 bp, Homo sapien
gggtcccagcagaaacaatcccatc

SEQ ID NO: 3944600 - DNA, 25 bp, Homo sapien
gcagccaatgggtcacacttgagat

SEQ ID NO: 3944601 - DNA, 25 bp, Homo sapien
tttcaaggccatcatcaacaaggat

SEQ ID NO: 3944602 - DNA, 25 bp, Homo sapien
caaggccatcatcaacaaggatccc

SEQ ID NO: 3944603 - DNA, 25 bp, Homo sapien
acatttcaaggccatcatcaacaag

SEQ ID NO: 3944604 - DNA, 25 bp, Homo sapien
catttcaaggccatcatcaacaagg

SEQ ID NO: 3944605 - DNA, 25 bp, Homo sapien
gaatatcagccaggcaacagccgaa

SEQ ID NO: 3944606 - DNA, 25 bp, Homo sapien
agagatgaccgcaccaaagatgggc

SEQ ID NO: 3944607 - DNA, 25 bp, Homo sapien
gaaaacaaggccagaactccatgag

SEQ ID NO: 3944608 - DNA, 25 bp, Homo sapien
cacaatgtattcgtggaccgcccag

SEQ ID NO: 3944609 - DNA, 25 bp, Homo sapien
tccggcagggatttatcacacgttc

SEQ ID NO: 3944610 - DNA, 25 bp, Homo sapien
acacgttcttgtcgaaggccaccag

SEQ ID NO: 3944611 - DNA, 25 bp, Homo sapien
accagtggacatgcgtggttacgcc

SEQ ID NO: 3944612 - DNA, 25 bp, Homo sapien
ctggtttgcggtgacagcgttttcc

SEQ ID NO: 3944613 - DNA, 25 bp, Homo sapien
ctggcccctggctaaggaaacttgc

SEQ ID NO: 3944614 - DNA, 25 bp, Homo sapien
actggcccctggctaaggaaacttg

SEQ ID NO: 3944615 - DNA, 25 bp, Homo sapien
agaaaccctacacccatgaagaagc

SEQ ID NO: 3944616 - DNA, 25 bp, Homo sapien
tcagtacattcaacgctgtgcatcg

SEQ ID NO: 3944617 - DNA, 25 bp, Homo sapien
tgtgcatcggtcaccggtccacttg

SEQ ID NO: 3944618 - DNA, 25 bp, Homo sapien
tccacttgcagggtactgtcgtcgc

SEQ ID NO: 3944619 - DNA, 25 bp, Homo sapien
cttcacactgaagcgtgggccgcat

SEQ ID NO: 3944620 - DNA, 25 bp, Homo sapien
caggttggtgttgggcccattaaca

SEQ ID NO: 3944621 - DNA, 25 bp, Homo sapien
gttgggcccattaacacacaggtgg

SEQ ID NO: 3944622 - DNA, 25 bp, Homo sapien
acacacaggtggtgtcttcacactg

SEQ ID NO: 3944623 - DNA, 25 bp, Homo sapien
agccgtcgcgacaaagccaggcatg

SEQ ID NO: 3944624 - DNA, 25 bp, Homo sapien
caccacacccgtctgttccagcagc

SEQ ID NO: 3944625 - DNA, 25 bp, Homo sapien
gtctgttccagcagccgtcgcgaca

SEQ ID NO: 3944626 - DNA, 25 bp, Homo sapien
ctgcatggctttcgctgtggccgcc

SEQ ID NO: 3944627 - DNA, 25 bp, Homo sapien
ctgtccactgcgaggtgcggctttg

SEQ ID NO: 3944628 - DNA, 25 bp, Homo sapien
tgcggctttgccccgagctgtggct

SEQ ID NO: 3944629 - DNA, 25 bp, Homo sapien
ggctttgccccgagctgtggcttcc

SEQ ID NO: 3944630 - DNA, 25 bp, Homo sapien
gaggtgcggctttgccccgagctgt

SEQ ID NO: 3944631 - DNA, 25 bp, Homo sapien
cagcagccccgaaggggtgctggaa

SEQ ID NO: 3944632 - DNA, 25 bp, Homo sapien
tgctggaagtccgtgaaaggagccg

SEQ ID NO: 3944633 - DNA, 25 bp, Homo sapien
tccgtgaaaggagccggtgcttttc

SEQ ID NO: 3944634 - DNA, 25 bp, Homo sapien
aagtccgtgaaaggagccggtgctt

SEQ ID NO: 3944635 - DNA, 25 bp, Homo sapien
aggccagtgatctcccccataaaga

SEQ ID NO: 3944636 - DNA, 25 bp, Homo sapien
agtgatctcccccataaagactgtg

SEQ ID NO: 3944637 - DNA, 25 bp, Homo sapien
gatctcccccataaagactgtggtg

SEQ ID NO: 3944638 - DNA, 25 bp, Homo sapien
cccccataaagactgtggtgctcat

SEQ ID NO: 3944639 - DNA, 25 bp, Homo sapien
tctgccccatggatcgagcgggcct

SEQ ID NO: 3944640 - DNA, 25 bp, Homo sapien
ggcatcctgcactaccatttgctga

SEQ ID NO: 3944641 - DNA, 25 bp, Homo sapien
tctgcacaccctggtttagtacctg

SEQ ID NO: 3944642 - DNA, 25 bp, Homo sapien
gaggtgccagctgcgaccaggctga

SEQ ID NO: 3944643 - DNA, 25 bp, Homo sapien
atgcgggatccccagggcaaaccag

SEQ ID NO: 3944644 - DNA, 25 bp, Homo sapien
agccggtgtgcgctcaggatttgca

SEQ ID NO: 3944645 - DNA, 25 bp, Homo sapien
gataagtttctgaagccacagagcc

SEQ ID NO: 3944646 - DNA, 25 bp, Homo sapien
ccagatcgacgaagccagaagataa

SEQ ID NO: 3944647 - DNA, 25 bp, Homo sapien
gtgccggctccggcctccagatcca

SEQ ID NO: 3944648 - DNA, 25 bp, Homo sapien
tgtgccggctccggcctccagatcc

SEQ ID NO: 3944649 - DNA, 25 bp, Homo sapien
atgtgccggctccggcctccagatc

SEQ ID NO: 3944650 - DNA, 25 bp, Homo sapien
tgccggctccggcctccagatccag

SEQ ID NO: 3944651 - DNA, 25 bp, Homo sapien
ccaaacatggaccacgaaaaacaag

SEQ ID NO: 3944652 - DNA, 25 bp, Homo sapien
aaacatggaccacgaaaaacaagag

SEQ ID NO: 3944653 - DNA, 25 bp, Homo sapien
atggaccacgaaaaacaagagacag

SEQ ID NO: 3944654 - DNA, 25 bp, Homo sapien
acatggaccacgaaaaacaagagac

SEQ ID NO: 3944655 - DNA, 25 bp, Homo sapien
gctccacagggacatccctccccat

SEQ ID NO: 3944656 - DNA, 25 bp, Homo sapien
gcgagggagaggagatccacggagc

SEQ ID NO: 3944657 - DNA, 25 bp, Homo sapien
agaggagatccacggagcacggcct

SEQ ID NO: 3944658 - DNA, 25 bp, Homo sapien
agatccacggagcacggcctccggg

SEQ ID NO: 3944659 - DNA, 25 bp, Homo sapien
ttggatcctggtgcccagtgcagtg

SEQ ID NO: 3944660 - DNA, 25 bp, Homo sapien
tagaataatcggtggcaagtccagg

SEQ ID NO: 3944661 - DNA, 25 bp, Homo sapien
ccactgcttggatcctggtgcccag

SEQ ID NO: 3944662 - DNA, 25 bp, Homo sapien
cattgatagaataatcggtggcaag

SEQ ID NO: 3944663 - DNA, 25 bp, Homo sapien
tgcgtaggcccctgttgaagtgaca

SEQ ID NO: 3944664 - DNA, 25 bp, Homo sapien
aggaaaggtggatcgcacagcccag

SEQ ID NO: 3944665 - DNA, 25 bp, Homo sapien
cttggaaggataaccaacaggaggc

SEQ ID NO: 3944666 - DNA, 25 bp, Homo sapien
ccagtgggtgctccagagatttgcc

SEQ ID NO: 3944667 - DNA, 25 bp, Homo sapien
atgctggatatgtgcaggccccagg

SEQ ID NO: 3944668 - DNA, 25 bp, Homo sapien
gggcacacccacatgctggatatgt

SEQ ID NO: 3944669 - DNA, 25 bp, Homo sapien
agacagggcacacccacatgctgga

SEQ ID NO: 3944670 - DNA, 25 bp, Homo sapien
cacccacatgctggatatgtgcagg

SEQ ID NO: 3944671 - DNA, 25 bp, Homo sapien
aattctgtgattgtggttcgtggag

SEQ ID NO: 3944672 - DNA, 25 bp, Homo sapien
ttcgtggagacaggagcgggtctgc

SEQ ID NO: 3944673 - DNA, 25 bp, Homo sapien
caggagcgggtctgcctggtacaca

SEQ ID NO: 3944674 - DNA, 25 bp, Homo sapien
tacacactcgtaggtgggtgttcag

SEQ ID NO: 3944675 - DNA, 25 bp, Homo sapien
agcaataaaggaagtggtgtccagg

SEQ ID NO: 3944676 - DNA, 25 bp, Homo sapien
gccgggcacgtcacccctctggccg

SEQ ID NO: 3944677 - DNA, 25 bp, Homo sapien
cgtcacccctctggccgctccctga

SEQ ID NO: 3944678 - DNA, 25 bp, Homo sapien
tgggcagccgggcacgtcacccctc

SEQ ID NO: 3944679 - DNA, 25 bp, Homo sapien
ggcacgtcacccctctggccgctcc

SEQ ID NO: 3944680 - DNA, 25 bp, Homo sapien
acacccatgtgtgacacgaaggagc

SEQ ID NO: 3944681 - DNA, 25 bp, Homo sapien
aaagatgacgccgacacccatgtgt

SEQ ID NO: 3944682 - DNA, 25 bp, Homo sapien
gacgccgacacccatgtgtgacacg

SEQ ID NO: 3944683 - DNA, 25 bp, Homo sapien
agccgaaagatgacgccgacaccca

SEQ ID NO: 3944684 - DNA, 25 bp, Homo sapien
ggcttgggcagctgggcagttccct

SEQ ID NO: 3944685 - DNA, 25 bp, Homo sapien
cagggcttgggcagctgggcagttc

SEQ ID NO: 3944686 - DNA, 25 bp, Homo sapien
gcttgggcagctgggcagttccctc

SEQ ID NO: 3944687 - DNA, 25 bp, Homo sapien
ttgggaacccagggcttgggcagct

SEQ ID NO: 3944688 - DNA, 25 bp, Homo sapien
ggcagtgatcctggcgatccgcgcc

SEQ ID NO: 3944689 - DNA, 25 bp, Homo sapien
ctttggcagtgatcctggcgatccg

SEQ ID NO: 3944690 - DNA, 25 bp, Homo sapien
ttggcagtgatcctggcgatccgcg

SEQ ID NO: 3944691 - DNA, 25 bp, Homo sapien
cctcggcctttgcccgagagtggga

SEQ ID NO: 3944692 - DNA, 25 bp, Homo sapien
tcttggagtggtggcggacggtcac

SEQ ID NO: 3944693 - DNA, 25 bp, Homo sapien
cactcgcccagtgaaggcaaggtct

SEQ ID NO: 3944694 - DNA, 25 bp, Homo sapien
ccggcactcgcccagtgaaggcaag

SEQ ID NO: 3944695 - DNA, 25 bp, Homo sapien
cccagtgaaggcaaggtcttggagt

SEQ ID NO: 3944696 - DNA, 25 bp, Homo sapien
cagcggccccgtctctccatcacag

SEQ ID NO: 3944697 - DNA, 25 bp, Homo sapien
gcacattccacagcgaggccgcggt

SEQ ID NO: 3944698 - DNA, 25 bp, Homo sapien
agaggcgcttcccactcaccgaaag

SEQ ID NO: 3944699 - DNA, 25 bp, Homo sapien
tgtatggggacacaagacgacgcca

SEQ ID NO: 3944700 - DNA, 25 bp, Homo sapien
gccagacggcgttacccagcacatt

SEQ ID NO: 3944701 - DNA, 25 bp, Homo sapien
caggaggtctgacgcttcggcctct

SEQ ID NO: 3944702 - DNA, 25 bp, Homo sapien
ctcgatgtcgtcacaggaggtctga

SEQ ID NO: 3944703 - DNA, 25 bp, Homo sapien
aggtctgacgcttcggcctctggta

SEQ ID NO: 3944704 - DNA, 25 bp, Homo sapien
tcgtcacaggaggtctgacgcttcg

SEQ ID NO: 3944705 - DNA, 25 bp, Homo sapien
tgcagggggctgtcgtcgggggtca

SEQ ID NO: 3944706 - DNA, 25 bp, Homo sapien
tgcggtacagctcggggctctcctg

SEQ ID NO: 3944707 - DNA, 25 bp, Homo sapien
ctgtcgtcgggggtcaggtcggagg

SEQ ID NO: 3944708 - DNA, 25 bp, Homo sapien
tgctgcaggggtgtcccggtggaca

SEQ ID NO: 3944709 - DNA, 25 bp, Homo sapien
cagggcaccgctgcggacacccctg

SEQ ID NO: 3944710 - DNA, 25 bp, Homo sapien
cccgaacctcgggtgcggaagtcat

SEQ ID NO: 3944711 - DNA, 25 bp, Homo sapien
agcatctggatgtccccgccccgct

SEQ ID NO: 3944712 - DNA, 25 bp, Homo sapien
gaagtcatccacgagcaggccgccg

SEQ ID NO: 3944713 - DNA, 25 bp, Homo sapien
aggcgccgcccttgctgtagcgtct

SEQ ID NO: 3944714 - DNA, 25 bp, Homo sapien
aagggtttcatctccatccggtagt

SEQ ID NO: 3944715 - DNA, 25 bp, Homo sapien
tctggggatgcgtctccatcctcag

SEQ ID NO: 3944716 - DNA, 25 bp, Homo sapien
ccatccggtagttgctcagcttctc

SEQ ID NO: 3944717 - DNA, 25 bp, Homo sapien
ttctcctcgtcggactctagagcga

SEQ ID NO: 3944718 - DNA, 25 bp, Homo sapien
tctagagcgacaggcaaggatttct

SEQ ID NO: 3944719 - DNA, 25 bp, Homo sapien
cgtactggacttgagctcatcccca

SEQ ID NO: 3944720 - DNA, 25 bp, Homo sapien
ttgttctgggccttggaccgcagtc

SEQ ID NO: 3944721 - DNA, 25 bp, Homo sapien
ttgcggggagcgcagggatcccatg

SEQ ID NO: 3944722 - DNA, 25 bp, Homo sapien
ggggagcgcagggatcccatgctgc

SEQ ID NO: 3944723 - DNA, 25 bp, Homo sapien
aggggcacagactcttggagcagct

SEQ ID NO: 3944724 - DNA, 25 bp, Homo sapien
gggttgagcacgttgcggggagcgc

SEQ ID NO: 3944725 - DNA, 25 bp, Homo sapien
tgcgcagatcctatgtagccaccgt

SEQ ID NO: 3944726 - DNA, 25 bp, Homo sapien
gccgtgcgcagatcctatgtagcca

SEQ ID NO: 3944727 - DNA, 25 bp, Homo sapien
agggcctggccgtgcgcagatccta

SEQ ID NO: 3944728 - DNA, 25 bp, Homo sapien
agccacgagcgagcagagccctgct

SEQ ID NO: 3944729 - DNA, 25 bp, Homo sapien
acttctgttcagcaccacgcactgc

SEQ ID NO: 3944730 - DNA, 25 bp, Homo sapien
cacttctgttcagcaccacgcactg

SEQ ID NO: 3944731 - DNA, 25 bp, Homo sapien
gggcagactggcttgcagcacttct

SEQ ID NO: 3944732 - DNA, 25 bp, Homo sapien
cagactggcttgcagcacttctgtt

SEQ ID NO: 3944733 - DNA, 25 bp, Homo sapien
ccctgcggacacccccctgcgtcct

SEQ ID NO: 3944734 - DNA, 25 bp, Homo sapien
cgccccctgcggacacccccctgcg

SEQ ID NO: 3944735 - DNA, 25 bp, Homo sapien
agcgccccctgcggacacccccctg

SEQ ID NO: 3944736 - DNA, 25 bp, Homo sapien
gcggacacccccctgcgtcctcaca

SEQ ID NO: 3944737 - DNA, 25 bp, Homo sapien
gacgggacctccagattagccccag

SEQ ID NO: 3944738 - DNA, 25 bp, Homo sapien
cccatgacaacttggttgggccggg

SEQ ID NO: 3944739 - DNA, 25 bp, Homo sapien
gccccatgacaacttggttgggccg

SEQ ID NO: 3944740 - DNA, 25 bp, Homo sapien
atgacaacttggttgggccgggcca

SEQ ID NO: 3944741 - DNA, 25 bp, Homo sapien
catgacaacttggttgggccgggcc

SEQ ID NO: 3944742 - DNA, 25 bp, Homo sapien
cctgatgaagcagcatcgtagctga

SEQ ID NO: 3944743 - DNA, 25 bp, Homo sapien
tgcctgcttgagcacgtggcccaaa

SEQ ID NO: 3944744 - DNA, 25 bp, Homo sapien
tggatgccacatcccgcggcagcga

SEQ ID NO: 3944745 - DNA, 25 bp, Homo sapien
gctgatgttgaagggcctcacgcca

SEQ ID NO: 3944746 - DNA, 25 bp, Homo sapien
atgaccaccaggataggcgctgagc

SEQ ID NO: 3944747 - DNA, 25 bp, Homo sapien
catgaccaccaggataggcgctgag

SEQ ID NO: 3944748 - DNA, 25 bp, Homo sapien
tgaccaccaggataggcgctgagcc

SEQ ID NO: 3944749 - DNA, 25 bp, Homo sapien
gcgactccgatgttgagcaagatca

SEQ ID NO: 3944750 - DNA, 25 bp, Homo sapien
gttaataaacagaatggcgactccg

SEQ ID NO: 3944751 - DNA, 25 bp, Homo sapien
aatggcgactccgatgttgagcaag

SEQ ID NO: 3944752 - DNA, 25 bp, Homo sapien
aacagaatggcgactccgatgttga

SEQ ID NO: 3944753 - DNA, 25 bp, Homo sapien
ttctctatttttgctaccgcgacat

SEQ ID NO: 3944754 - DNA, 25 bp, Homo sapien
agttgcggtctttcccttcttgtgg

SEQ ID NO: 3944755 - DNA, 25 bp, Homo sapien
ctatttttgctaccgcgacatctca

SEQ ID NO: 3944756 - DNA, 25 bp, Homo sapien
acttggaagtcgctgggctgtccga

SEQ ID NO: 3944757 - DNA, 25 bp, Homo sapien
cagtaaccatgggagaaggcgtcct

SEQ ID NO: 3944758 - DNA, 25 bp, Homo sapien
tgaaaacccgtggagatcagtaacc

SEQ ID NO: 3944759 - DNA, 25 bp, Homo sapien
taagctcgtgtcgacgggagtcagc

SEQ ID NO: 3944760 - DNA, 25 bp, Homo sapien
tgtgaccacgaggacaacgtccgct

SEQ ID NO: 3944761 - DNA, 25 bp, Homo sapien
cttttgtttgggtgatggagcgacc

SEQ ID NO: 3944762 - DNA, 25 bp, Homo sapien
ttcttttgtttgggtgatggagcga

SEQ ID NO: 3944763 - DNA, 25 bp, Homo sapien
tgttcttttgtttgggtgatggagc

SEQ ID NO: 3944764 - DNA, 25 bp, Homo sapien
ctggcaaaccttgttcttttgtttg

SEQ ID NO: 3944765 - DNA, 25 bp, Homo sapien
aggcacgtccatgcacacgagagcc

SEQ ID NO: 3944766 - DNA, 25 bp, Homo sapien
ctcaggcacgtccatgcacacgaga

SEQ ID NO: 3944767 - DNA, 25 bp, Homo sapien
acgtccatgcacacgagagccaggg

SEQ ID NO: 3944768 - DNA, 25 bp, Homo sapien
tccatgcacacgagagccagggcca

SEQ ID NO: 3944769 - DNA, 25 bp, Homo sapien
taaagaagtctgctcgaaaggtagc

SEQ ID NO: 3944770 - DNA, 25 bp, Homo sapien
tatagcaatccagtgcagtgtagta

SEQ ID NO: 3944771 - DNA, 25 bp, Homo sapien
cgggctggccccaagacgaccggat

SEQ ID NO: 3944772 - DNA, 25 bp, Homo sapien
gcagagtccataagacgggctggcc

SEQ ID NO: 3944773 - DNA, 25 bp, Homo sapien
ctgtgtgcagggaagcaggtcccct

SEQ ID NO: 3944774 - DNA, 25 bp, Homo sapien
tgtgcagggaagcaggtcccctggg

SEQ ID NO: 3944775 - DNA, 25 bp, Homo sapien
gtgcagggaagcaggtcccctgggc

SEQ ID NO: 3944776 - DNA, 25 bp, Homo sapien
tgtgtgcagggaagcaggtcccctg

SEQ ID NO: 3944777 - DNA, 25 bp, Homo sapien
ggctgctctcgggttaatgaaaact

SEQ ID NO: 3944778 - DNA, 25 bp, Homo sapien
tctcgggttaatgaaaactcgtcaa

SEQ ID NO: 3944779 - DNA, 25 bp, Homo sapien
agcagccagccgggcacatgctgtc

SEQ ID NO: 3944780 - DNA, 25 bp, Homo sapien
gaaaactcgtcaaattctccatgca

SEQ ID NO: 3944781 - DNA, 25 bp, Homo sapien
accccccgcagaccgcgctgctgtc

SEQ ID NO: 3944782 - DNA, 25 bp, Homo sapien
ctgggccagaggtggacctgtctgc

SEQ ID NO: 3944783 - DNA, 25 bp, Homo sapien
cctgtctgcaggcttgtaagggtgg

SEQ ID NO: 3944784 - DNA, 25 bp, Homo sapien
gcttgtaagggtggggagacgccag

SEQ ID NO: 3944785 - DNA, 25 bp, Homo sapien
cattctgtgcgctactgaacttcag

SEQ ID NO: 3944786 - DNA, 25 bp, Homo sapien
ttagctcggctcaggcattgcatgc

SEQ ID NO: 3944787 - DNA, 25 bp, Homo sapien
cctgtgaggtaatggttctagatcc

SEQ ID NO: 3944788 - DNA, 25 bp, Homo sapien
tcagttcccgaaattatccaggcac

SEQ ID NO: 3944789 - DNA, 25 bp, Homo sapien
cgacgggtccagctgtcgataaaac

SEQ ID NO: 3944790 - DNA, 25 bp, Homo sapien
gtgaggggagttgccacccgcacac

SEQ ID NO: 3944791 - DNA, 25 bp, Homo sapien
tcagggtctcttcagtccgacgggt

SEQ ID NO: 3944792 - DNA, 25 bp, Homo sapien
tcttcagtccgacgggtccagctgt

SEQ ID NO: 3944793 - DNA, 25 bp, Homo sapien
ggtcacaagttctcacagcagcctg

SEQ ID NO: 3944794 - DNA, 25 bp, Homo sapien
tctgggacccgaaggctgttctgat

SEQ ID NO: 3944795 - DNA, 25 bp, Homo sapien
gacccggcgttagcctctgtaagga

SEQ ID NO: 3944796 - DNA, 25 bp, Homo sapien
tctgttccacacacgatcatgcggg

SEQ ID NO: 3944797 - DNA, 25 bp, Homo sapien
gccctttatggactcggcgcctggc

SEQ ID NO: 3944798 - DNA, 25 bp, Homo sapien
ccctttatggactcggcgcctggca

SEQ ID NO: 3944799 - DNA, 25 bp, Homo sapien
ccgaggaggccacggacatgcctgg

SEQ ID NO: 3944800 - DNA, 25 bp, Homo sapien
aagttgctgccggagaagtgtgctc

SEQ ID NO: 3944801 - DNA, 25 bp, Homo sapien
acggacatgcctgggaagttgctgc

SEQ ID NO: 3944802 - DNA, 25 bp, Homo sapien
gctacatttggggacgcgggctccc

SEQ ID NO: 3944803 - DNA, 25 bp, Homo sapien
aaacacaggttaacactgtttcctg

SEQ ID NO: 3944804 - DNA, 25 bp, Homo sapien
tagcaagcagttcacatgcgccagg

SEQ ID NO: 3944805 - DNA, 25 bp, Homo sapien
tctctctgtcattgcacggcgtgat

SEQ ID NO: 3944806 - DNA, 25 bp, Homo sapien
cagggccgacttggaaggaaacaca

SEQ ID NO: 3944807 - DNA, 25 bp, Homo sapien
caaagtgtcacacgacattgtttat

SEQ ID NO: 3944808 - DNA, 25 bp, Homo sapien
tgtaacgagagaagcgttccaaagt

SEQ ID NO: 3944809 - DNA, 25 bp, Homo sapien
ctggtttgtaacgagagaagcgttc

SEQ ID NO: 3944810 - DNA, 25 bp, Homo sapien
gaagcgttccaaagtgtcacacgac

SEQ ID NO: 3944811 - DNA, 25 bp, Homo sapien
gcagcggaaggaccttcagtaaaga

SEQ ID NO: 3944812 - DNA, 25 bp, Homo sapien
ctgcagcggaaggaccttcagtaaa

SEQ ID NO: 3944813 - DNA, 25 bp, Homo sapien
tgcagcggaaggaccttcagtaaag

SEQ ID NO: 3944814 - DNA, 25 bp, Homo sapien
cagcacgtttcctgctcgaaaacca

SEQ ID NO: 3944815 - DNA, 25 bp, Homo sapien
gctcgaaaaccaggagagcctccac

SEQ ID NO: 3944816 - DNA, 25 bp, Homo sapien
tccacgtgccgactagctctgtcca

SEQ ID NO: 3944817 - DNA, 25 bp, Homo sapien
tcgcgattcctgctcacagcacgtt

SEQ ID NO: 3944818 - DNA, 25 bp, Homo sapien
caggctgtgacaaaccctgtgccca

SEQ ID NO: 3944819 - DNA, 25 bp, Homo sapien
gacgtttaattacatgaacgcacac

SEQ ID NO: 3944820 - DNA, 25 bp, Homo sapien
acattttaaaaaccgcctgtgcact

SEQ ID NO: 3944821 - DNA, 25 bp, Homo sapien
ctggtcaccactgcggagactcagg

SEQ ID NO: 3944822 - DNA, 25 bp, Homo sapien
gagaagcgcaggtttacaaagctct

SEQ ID NO: 3944823 - DNA, 25 bp, Homo sapien
cgcaggtttacaaagctctggctgg

SEQ ID NO: 3944824 - DNA, 25 bp, Homo sapien
tgggaagaaattgagtaaccactcc

SEQ ID NO: 3944825 - DNA, 25 bp, Homo sapien
ctgggaagaaattgagtaaccactc

SEQ ID NO: 3944826 - DNA, 25 bp, Homo sapien
gatgcccgttggtgagagagaccct

SEQ ID NO: 3944827 - DNA, 25 bp, Homo sapien
gcgcctccttctccgtgacgttcag

SEQ ID NO: 3944828 - DNA, 25 bp, Homo sapien
gtcattggctaggtgacaaagtcac

SEQ ID NO: 3944829 - DNA, 25 bp, Homo sapien
tttaattgagttggtacaagcagga

SEQ ID NO: 3944830 - DNA, 25 bp, Homo sapien
cagcttgtgttgtgttgtgccgacc

SEQ ID NO: 3944831 - DNA, 25 bp, Homo sapien
cagcttgtgtttgcgttgtgccggc

SEQ ID NO: 3944832 - DNA, 25 bp, Homo sapien
cacctgtctggtgcgtctggatgtg

SEQ ID NO: 3944833 - DNA, 25 bp, Homo sapien
cacttgacacttgatgggaatgctg

SEQ ID NO: 3944834 - DNA, 25 bp, Homo sapien
cactgcggcttgtagctgcccctag

SEQ ID NO: 3944835 - DNA, 25 bp, Homo sapien
gcctttccactgcggcttgtagctg

SEQ ID NO: 3944836 - DNA, 25 bp, Homo sapien
tagctgcccctagtttagaggtgct

SEQ ID NO: 3944837 - DNA, 25 bp, Homo sapien
cggcttgtagctgcccctagtttag

SEQ ID NO: 3944838 - DNA, 25 bp, Homo sapien
ccggtagcagtttacacatccattg

SEQ ID NO: 3944839 - DNA, 25 bp, Homo sapien
tatttccttgctctaccagatggga

SEQ ID NO: 3944840 - DNA, 25 bp, Homo sapien
tacagtacatgttagctataagaaa

SEQ ID NO: 3944841 - DNA, 25 bp, Homo sapien
tagaaacaatactacccggtagcag

SEQ ID NO: 3944842 - DNA, 25 bp, Homo sapien
tttaggagtcgtcttcgggcgcctg

SEQ ID NO: 3944843 - DNA, 25 bp, Homo sapien
tgcggtcgctgcttgcccgagctgt

SEQ ID NO: 3944844 - DNA, 25 bp, Homo sapien
tgtgctcttgatgggttgctggacc

SEQ ID NO: 3944845 - DNA, 25 bp, Homo sapien
cctggatggacagtctcagtggtgt

SEQ ID NO: 3944846 - DNA, 25 bp, Homo sapien
gggtccagctagtgctttgactatg

SEQ ID NO: 3944847 - DNA, 25 bp, Homo sapien
ccacgttttataaattccgagtcag

SEQ ID NO: 3944848 - DNA, 25 bp, Homo sapien
gctctgcgctgccacgaagaaccgg

SEQ ID NO: 3944849 - DNA, 25 bp, Homo sapien
gctttggtcagtatcgtaaccacgt

SEQ ID NO: 3944850 - DNA, 25 bp, Homo sapien
gaaggcattctgaccgtggttctgc

SEQ ID NO: 3944851 - DNA, 25 bp, Homo sapien
acatgtgaagagctcgggttcatga

SEQ ID NO: 3944852 - DNA, 25 bp, Homo sapien
ccgtggttctgcatggcaaggctcc

SEQ ID NO: 3944853 - DNA, 25 bp, Homo sapien
tcatgaagtggacagtagtgctcag

SEQ ID NO: 3944854 - DNA, 25 bp, Homo sapien
gaaccacccatgtagaagctgggtt

SEQ ID NO: 3944855 - DNA, 25 bp, Homo sapien
tgagaaccacccatgtagaagctgg

SEQ ID NO: 3944856 - DNA, 25 bp, Homo sapien
cactgagaaccacccatgtagaagc

SEQ ID NO: 3944857 - DNA, 25 bp, Homo sapien
cccatgtagaagctgggttaggatt

SEQ ID NO: 3944858 - DNA, 25 bp, Homo sapien
tcacctcgtctggttggaacttgcc

SEQ ID NO: 3944859 - DNA, 25 bp, Homo sapien
gatctttgacgctctctctagggct

SEQ ID NO: 3944860 - DNA, 25 bp, Homo sapien
caagccctgtgtaagctctgatagt

SEQ ID NO: 3944861 - DNA, 25 bp, Homo sapien
tctctagtgaatgacctgtgtggtc

SEQ ID NO: 3944862 - DNA, 25 bp, Homo sapien
cctccagtacccaatactaaggtga

SEQ ID NO: 3944863 - DNA, 25 bp, Homo sapien
agtgggcgtctgattaggctagacc

SEQ ID NO: 3944864 - DNA, 25 bp, Homo sapien
gattacaagccgtaagccaccttgc

SEQ ID NO: 3944865 - DNA, 25 bp, Homo sapien
ttgccccgccagttacctgtcattt

SEQ ID NO: 3944866 - DNA, 25 bp, Homo sapien
ggccttatgcagagtccgaggcccc

SEQ ID NO: 3944867 - DNA, 25 bp, Homo sapien
gagcccgctgccgaagacggagctc

SEQ ID NO: 3944868 - DNA, 25 bp, Homo sapien
agctccaagaccgaacctcgtaaag

SEQ ID NO: 3944869 - DNA, 25 bp, Homo sapien
gggccttatgcagagtccgaggccc

SEQ ID NO: 3944870 - DNA, 25 bp, Homo sapien
tttgccttgggtcagtttccagcag

SEQ ID NO: 3944871 - DNA, 25 bp, Homo sapien
ttttgccttgggtcagtttccagca

SEQ ID NO: 3944872 - DNA, 25 bp, Homo sapien
taggacgttcatttctccgaggctc

SEQ ID NO: 3944873 - DNA, 25 bp, Homo sapien
cgaccagaaaggacgccagatgctt

SEQ ID NO: 3944874 - DNA, 25 bp, Homo sapien
tgtgttgcatcagccaacgggccct

SEQ ID NO: 3944875 - DNA, 25 bp, Homo sapien
acaaagggctttgccaggaggctca

SEQ ID NO: 3944876 - DNA, 25 bp, Homo sapien
gcttcagagggcatcctgactccct

SEQ ID NO: 3944877 - DNA, 25 bp, Homo sapien
tgggatttcgggacattgcttcaga

SEQ ID NO: 3944878 - DNA, 25 bp, Homo sapien
gacattgcttcagagggcatcctga

SEQ ID NO: 3944879 - DNA, 25 bp, Homo sapien
tgaatttgggatttcgggacattgc

SEQ ID NO: 3944880 - DNA, 25 bp, Homo sapien
ttactggtctccatagacactgaag

SEQ ID NO: 3944881 - DNA, 25 bp, Homo sapien
gagctcttggcaatcatgtctctca

SEQ ID NO: 3944882 - DNA, 25 bp, Homo sapien
gactctgcgggttgcaaatgtcccc

SEQ ID NO: 3944883 - DNA, 25 bp, Homo sapien
gaaaagcaaaccctcggctcctggc

SEQ ID NO: 3944884 - DNA, 25 bp, Homo sapien
tttgtcggcatctggatgccacgtg

SEQ ID NO: 3944885 - DNA, 25 bp, Homo sapien
ctgagtctcctgtgacctctgtgcc

SEQ ID NO: 3944886 - DNA, 25 bp, Homo sapien
tggatgccacgtggcctgagtctcc

SEQ ID NO: 3944887 - DNA, 25 bp, Homo sapien
tgtgacctctgtgccggtgctttgg

SEQ ID NO: 3944888 - DNA, 25 bp, Homo sapien
tccaattctgcctcgaagggccaag

SEQ ID NO: 3944889 - DNA, 25 bp, Homo sapien
tgaaatctgagggtgtcgcagccag

SEQ ID NO: 3944890 - DNA, 25 bp, Homo sapien
taatcacggtgaaatgtggattgcc

SEQ ID NO: 3944891 - DNA, 25 bp, Homo sapien
tactttgggcgagagattcgggaac

SEQ ID NO: 3944892 - DNA, 25 bp, Homo sapien
gctcctttgagagaactgtcggtgc

SEQ ID NO: 3944893 - DNA, 25 bp, Homo sapien
gcagaacacggctcctttgagagaa

SEQ ID NO: 3944894 - DNA, 25 bp, Homo sapien
agaactgtcggtgccacttttgttt

SEQ ID NO: 3944895 - DNA, 25 bp, Homo sapien
cgggtgtctgcgcagaacacggctc

SEQ ID NO: 3944896 - DNA, 25 bp, Homo sapien
cagacatgattcaagcaggaagtat

SEQ ID NO: 3944897 - DNA, 25 bp, Homo sapien
tgcccggcagctccgtttggaaagg

SEQ ID NO: 3944898 - DNA, 25 bp, Homo sapien
aggtggcggcaaggcaattagagca

SEQ ID NO: 3944899 - DNA, 25 bp, Homo sapien
ttggaaaggcggctgcatctgcacc

SEQ ID NO: 3944900 - DNA, 25 bp, Homo sapien
agctggtggtgcgaagcctctctcc

SEQ ID NO: 3944901 - DNA, 25 bp, Homo sapien
tggcgttatctcgaaacgctggcag

SEQ ID NO: 3944902 - DNA, 25 bp, Homo sapien
tatctcgaaacgctggcagccatcc

SEQ ID NO: 3944903 - DNA, 25 bp, Homo sapien
ccctgcatggctggcgttatctcga

SEQ ID NO: 3944904 - DNA, 25 bp, Homo sapien
aattggggaatttggagctttactg

SEQ ID NO: 3944905 - DNA, 25 bp, Homo sapien
caaagccgagggtgctggctgagag

SEQ ID NO: 3944906 - DNA, 25 bp, Homo sapien
atttggagctttactgtggttgggc

SEQ ID NO: 3944907 - DNA, 25 bp, Homo sapien
caaagtactcagagaattggggaat

SEQ ID NO: 3944908 - DNA, 25 bp, Homo sapien
tctggacgttgccgaaggcccctga

SEQ ID NO: 3944909 - DNA, 25 bp, Homo sapien
gacgttgccgaaggcccctgaggcc

SEQ ID NO: 3944910 - DNA, 25 bp, Homo sapien
tgcagaaggcttcctcttagtgcca

SEQ ID NO: 3944911 - DNA, 25 bp, Homo sapien
cttcctctggacgttgccgaaggcc

SEQ ID NO: 3944912 - DNA, 25 bp, Homo sapien
tcagaccacggaacctgctcctgga

SEQ ID NO: 3944913 - DNA, 25 bp, Homo sapien
gtgacaagctgtcctggactctcag

SEQ ID NO: 3944914 - DNA, 25 bp, Homo sapien
ttggtgtcctcggtcgccctggttg

SEQ ID NO: 3944915 - DNA, 25 bp, Homo sapien
tgctcctggaggttttgactcccgg

SEQ ID NO: 3944916 - DNA, 25 bp, Homo sapien
gagctgcgggaagcccgctgtggag

SEQ ID NO: 3944917 - DNA, 25 bp, Homo sapien
aattcgccgtgctgtgcagagctgc

SEQ ID NO: 3944918 - DNA, 25 bp, Homo sapien
gacgctgccgtctggcctaggtctt

SEQ ID NO: 3944919 - DNA, 25 bp, Homo sapien
cttaggtggaaattcgccgtgctgt

SEQ ID NO: 3944920 - DNA, 25 bp, Homo sapien
tttgatctggtggaggctccgtgga

SEQ ID NO: 3944921 - DNA, 25 bp, Homo sapien
cagtggtttttaaatgcagttttga

SEQ ID NO: 3944922 - DNA, 25 bp, Homo sapien
cgaaacagtggtttttaaatgcagt

SEQ ID NO: 3944923 - DNA, 25 bp, Homo sapien
acagtggtttttaaatgcagttttg

SEQ ID NO: 3944924 - DNA, 25 bp, Homo sapien
agtggtttttaaatgcagttttgag

SEQ ID NO: 3944925 - DNA, 25 bp, Homo sapien
gccgtttcaggtgcaggaccctgag

SEQ ID NO: 3944926 - DNA, 25 bp, Homo sapien
aattgtctcactgacaggacttctg

SEQ ID NO: 3944927 - DNA, 25 bp, Homo sapien
tctgcaaaggccgtttcaggtgcag

SEQ ID NO: 3944928 - DNA, 25 bp, Homo sapien
taggttggtgttctaattgtctcac

SEQ ID NO: 3944929 - DNA, 25 bp, Homo sapien
cgatttcactccttaatgaccgtgt

SEQ ID NO: 3944930 - DNA, 25 bp, Homo sapien
cgcgccgatttcactccttaatgac

SEQ ID NO: 3944931 - DNA, 25 bp, Homo sapien
ttcactccttaatgaccgtgtttca

SEQ ID NO: 3944932 - DNA, 25 bp, Homo sapien
cactccttaatgaccgtgtttcaaa

SEQ ID NO: 3944933 - DNA, 25 bp, Homo sapien
taggaggccccagctaatcccgctg

SEQ ID NO: 3944934 - DNA, 25 bp, Homo sapien
gagaatccgcttaatccccttgaca

SEQ ID NO: 3944935 - DNA, 25 bp, Homo sapien
agtgtcgtctgtgctaacccgagcc

SEQ ID NO: 3944936 - DNA, 25 bp, Homo sapien
cgctgccgttcccatgaacggcaaa

SEQ ID NO: 3944937 - DNA, 25 bp, Homo sapien
gctttgccttatagccacagggtga

SEQ ID NO: 3944938 - DNA, 25 bp, Homo sapien
tcaaagagggtgaggaaaggttcca

SEQ ID NO: 3944939 - DNA, 25 bp, Homo sapien
taacctgagtgcaagacacctggcc

SEQ ID NO: 3944940 - DNA, 25 bp, Homo sapien
tcattgacctctgcaaaggctggct

SEQ ID NO: 3944941 - DNA, 25 bp, Homo sapien
gggtccagcgtgggaaagtgaactg

SEQ ID NO: 3944942 - DNA, 25 bp, Homo sapien
tgaaggggtccagcgtgggaaagtg

SEQ ID NO: 3944943 - DNA, 25 bp, Homo sapien
tccagcgtgggaaagtgaactgagc

SEQ ID NO: 3944944 - DNA, 25 bp, Homo sapien
ctgaaggggtccagcgtgggaaagt

SEQ ID NO: 3944945 - DNA, 25 bp, Homo sapien
tccagccggatttctgggggtcctg

SEQ ID NO: 3944946 - DNA, 25 bp, Homo sapien
ctcctccagccggatttctgggggt

SEQ ID NO: 3944947 - DNA, 25 bp, Homo sapien
gatccccgctgtcccatggttctgt

SEQ ID NO: 3944948 - DNA, 25 bp, Homo sapien
ggatccccgctgtcccatggttctg

SEQ ID NO: 3944949 - DNA, 25 bp, Homo sapien
aaggagcattctaggagcatctgct

SEQ ID NO: 3944950 - DNA, 25 bp, Homo sapien
gaaggagcattctaggagcatctgc

SEQ ID NO: 3944951 - DNA, 25 bp, Homo sapien
taaagagcctgtaagtccttggtct

SEQ ID NO: 3944952 - DNA, 25 bp, Homo sapien
gagcctgtaagtccttggtcttcag

SEQ ID NO: 3944953 - DNA, 25 bp, Homo sapien
aagagcctgtaagtccttggtcttc

SEQ ID NO: 3944954 - DNA, 25 bp, Homo sapien
ctaaagagcctgtaagtccttggtc

SEQ ID NO: 3944955 - DNA, 25 bp, Homo sapien
agccctgcaggtgctgctaccagca

SEQ ID NO: 3944956 - DNA, 25 bp, Homo sapien
gccctgcaggtgctgctaccagcat

SEQ ID NO: 3944957 - DNA, 25 bp, Homo sapien
ggagccacaggtgagccagccctgc

SEQ ID NO: 3944958 - DNA, 25 bp, Homo sapien
ctgggagccacaggtgagccagccc

SEQ ID NO: 3944959 - DNA, 25 bp, Homo sapien
gcctgctgagtgatatccgagggtg

SEQ ID NO: 3944960 - DNA, 25 bp, Homo sapien
tgggggcctgctgagtgatatccga

SEQ ID NO: 3944961 - DNA, 25 bp, Homo sapien
gggcctgctgagtgatatccgaggg

SEQ ID NO: 3944962 - DNA, 25 bp, Homo sapien
ctgctgagtgatatccgagggtggg

SEQ ID NO: 3944963 - DNA, 25 bp, Homo sapien
tgtagtaatgtcttcactactggga

SEQ ID NO: 3944964 - DNA, 25 bp, Homo sapien
gcgcattgtagtaatgtcttcacta

SEQ ID NO: 3944965 - DNA, 25 bp, Homo sapien
gggttctggaaggattcgggcgcat

SEQ ID NO: 3944966 - DNA, 25 bp, Homo sapien
tctggaaggattcgggcgcattgta

SEQ ID NO: 3944967 - DNA, 25 bp, Homo sapien
acgtccccagcggtttccacttgtg

SEQ ID NO: 3944968 - DNA, 25 bp, Homo sapien
tgtcccgcggtgctgactgaggcct

SEQ ID NO: 3944969 - DNA, 25 bp, Homo sapien
ccctctgccgagtaatgacgtgtgt

SEQ ID NO: 3944970 - DNA, 25 bp, Homo sapien
tttaaagatgctgtcggcaccatgt

SEQ ID NO: 3944971 - DNA, 25 bp, Homo sapien
gggtccagtctgtgatccttggtgc

SEQ ID NO: 3944972 - DNA, 25 bp, Homo sapien
tccagtctgtgatccttggtgctgt

SEQ ID NO: 3944973 - DNA, 25 bp, Homo sapien
gtctgtgatccttggtgctgtgtgc

SEQ ID NO: 3944974 - DNA, 25 bp, Homo sapien
cagtctgtgatccttggtgctgtgt

SEQ ID NO: 3944975 - DNA, 25 bp, Homo sapien
cctctcgacggcacgcacttgcctg

SEQ ID NO: 3944976 - DNA, 25 bp, Homo sapien
gctgccagcgtctgttgtggaaagt

SEQ ID NO: 3944977 - DNA, 25 bp, Homo sapien
tggaaagtagctgctagtgaaatgg

SEQ ID NO: 3944978 - DNA, 25 bp, Homo sapien
ttcacactgcgcaggtctcttctgg

SEQ ID NO: 3944979 - DNA, 25 bp, Homo sapien
gactgtgttgggcaagacctcttcc

SEQ ID NO: 3944980 - DNA, 25 bp, Homo sapien
tcgggatgccgttctgttccaacct

SEQ ID NO: 3944981 - DNA, 25 bp, Homo sapien
gacttcacagcgtctgctcatagga

SEQ ID NO: 3944982 - DNA, 25 bp, Homo sapien
tcctgctctgggacgtggacatgcc

SEQ ID NO: 3944983 - DNA, 25 bp, Homo sapien
tgtgggcttatgtctctgccttagg

SEQ ID NO: 3944984 - DNA, 25 bp, Homo sapien
cattcgtgaaaaccaaccctgtggg

SEQ ID NO: 3944985 - DNA, 25 bp, Homo sapien
gaacctcattgctaccacagacttg

SEQ ID NO: 3944986 - DNA, 25 bp, Homo sapien
gaaactcagccgtagggtggcactg

SEQ ID NO: 3944987 - DNA, 25 bp, Homo sapien
aggctggacagtccccggtggccac

SEQ ID NO: 3944988 - DNA, 25 bp, Homo sapien
tcttccagtgtgtgatgacgctgct

SEQ ID NO: 3944989 - DNA, 25 bp, Homo sapien
agcttcttcaactggctctgcgtgg

SEQ ID NO: 3944990 - DNA, 25 bp, Homo sapien
aaggacatcttctccgtcatcaact

SEQ ID NO: 3944991 - DNA, 25 bp, Homo sapien
tgtgttctcatcgtagggtgtgacc

SEQ ID NO: 3944992 - DNA, 25 bp, Homo sapien
gttctcatcgtagggtgtgaccagg

SEQ ID NO: 3944993 - DNA, 25 bp, Homo sapien
gaggccactccacagtggcttcctc

SEQ ID NO: 3944994 - DNA, 25 bp, Homo sapien
gaagctgtgttctcatcgtagggtg

SEQ ID NO: 3944995 - DNA, 25 bp, Homo sapien
gattcagaccatcggaaatgcggga

SEQ ID NO: 3944996 - DNA, 25 bp, Homo sapien
tggtggctgccacaaacgattcaga

SEQ ID NO: 3944997 - DNA, 25 bp, Homo sapien
gccagcccgcgtgactgcctttgtt

SEQ ID NO: 3944998 - DNA, 25 bp, Homo sapien
cgtgggcgcccactctgttcgtttc

SEQ ID NO: 3944999 - DNA, 25 bp, Homo sapien
tcaggagctcccagattggtgccag

SEQ ID NO: 3945000 - DNA, 25 bp, Homo sapien
ttgataaaggatgcttgacccgccg

SEQ ID NO: 3945001 - DNA, 25 bp, Homo sapien
gggcacctcttttgggcctcgaaga

SEQ ID NO: 3945002 - DNA, 25 bp, Homo sapien
tcgtcagacgcatggacagaggcca

SEQ ID NO: 3945003 - DNA, 25 bp, Homo sapien
gtggctgtgtttgggctcgaagggg

SEQ ID NO: 3945004 - DNA, 25 bp, Homo sapien
aactgatgaagctgccggccacttc

SEQ ID NO: 3945005 - DNA, 25 bp, Homo sapien
actgatgaagctgccggccacttcc

SEQ ID NO: 3945006 - DNA, 25 bp, Homo sapien
tgatgaagctgccggccacttcctc

SEQ ID NO: 3945007 - DNA, 25 bp, Homo sapien
tgaagctgccggccacttcctctgt

SEQ ID NO: 3945008 - DNA, 25 bp, Homo sapien
cgcgaggtatttcgcccatgcagca

SEQ ID NO: 3945009 - DNA, 25 bp, Homo sapien
actcatgctgcggtgactggtcaga

SEQ ID NO: 3945010 - DNA, 25 bp, Homo sapien
tcatctgtgccctgaagatactcat

SEQ ID NO: 3945011 - DNA, 25 bp, Homo sapien
gccgtaagacacgtccgcgaggtat

SEQ ID NO: 3945012 - DNA, 25 bp, Homo sapien
gcagtggcaactccttatcactggt

SEQ ID NO: 3945013 - DNA, 25 bp, Homo sapien
agtggcaactccttatcactggtgc

SEQ ID NO: 3945014 - DNA, 25 bp, Homo sapien
gtggcaactccttatcactggtgcc

SEQ ID NO: 3945015 - DNA, 25 bp, Homo sapien
gcaactccttatcactggtgcccac

SEQ ID NO: 3945016 - DNA, 25 bp, Homo sapien
gcagggacaggacacgtgtatgcat

SEQ ID NO: 3945017 - DNA, 25 bp, Homo sapien
tactggccgaatcctgaattctccc

SEQ ID NO: 3945018 - DNA, 25 bp, Homo sapien
cagggacaggacacgtgtatgcatg

SEQ ID NO: 3945019 - DNA, 25 bp, Homo sapien
ttccctgatactggccgaatcctga

SEQ ID NO: 3945020 - DNA, 25 bp, Homo sapien
tccaggtaccctggacagccacagg

SEQ ID NO: 3945021 - DNA, 25 bp, Homo sapien
tccctggagcatcacctggatagct

SEQ ID NO: 3945022 - DNA, 25 bp, Homo sapien
cctccctggagcatcacctggatag

SEQ ID NO: 3945023 - DNA, 25 bp, Homo sapien
ccacagggttctgccccccagtagg

SEQ ID NO: 3945024 - DNA, 25 bp, Homo sapien
agttgcacgggctgtgaccgtccct

SEQ ID NO: 3945025 - DNA, 25 bp, Homo sapien
ccccagcgccaggtgtctgggaatc

SEQ ID NO: 3945026 - DNA, 25 bp, Homo sapien
gaaggtgccagttgcacgggctgtg

SEQ ID NO: 3945027 - DNA, 25 bp, Homo sapien
tgccagttgcacgggctgtgaccgt

SEQ ID NO: 3945028 - DNA, 25 bp, Homo sapien
gtcccagttgggtgaagcatggggg

SEQ ID NO: 3945029 - DNA, 25 bp, Homo sapien
tcccagttgggtgaagcatgggggg

SEQ ID NO: 3945030 - DNA, 25 bp, Homo sapien
tgtcccagttgggtgaagcatgggg

SEQ ID NO: 3945031 - DNA, 25 bp, Homo sapien
ctgtcccagttgggtgaagcatggg

SEQ ID NO: 3945032 - DNA, 25 bp, Homo sapien
ccaagcgcataggtgttcgggaagt

SEQ ID NO: 3945033 - DNA, 25 bp, Homo sapien
agctcctccatgccttgaaagcaga

SEQ ID NO: 3945034 - DNA, 25 bp, Homo sapien
aagcagaagtagccccctcctgttt

SEQ ID NO: 3945035 - DNA, 25 bp, Homo sapien
tgtgggcctcaggggcttccacctc

SEQ ID NO: 3945036 - DNA, 25 bp, Homo sapien
cttcattttccgtatcaacacacag

SEQ ID NO: 3945037 - DNA, 25 bp, Homo sapien
attttccgtatcaacacacaggggg

SEQ ID NO: 3945038 - DNA, 25 bp, Homo sapien
tttccgtatcaacacacagggggcc

SEQ ID NO: 3945039 - DNA, 25 bp, Homo sapien
tcattttccgtatcaacacacaggg

SEQ ID NO: 3945040 - DNA, 25 bp, Homo sapien
aggcagcctcggggcttgagagact

SEQ ID NO: 3945041 - DNA, 25 bp, Homo sapien
cagtttccagggacagatgaaggta

SEQ ID NO: 3945042 - DNA, 25 bp, Homo sapien
tccctggacggctgcagcatagggt

SEQ ID NO: 3945043 - DNA, 25 bp, Homo sapien
gggtggcaggcacagtttccaggga

SEQ ID NO: 3945044 - DNA, 25 bp, Homo sapien
gcaggcacagtttccagggacagat

SEQ ID NO: 3945045 - DNA, 25 bp, Homo sapien
tatcttgtcggcaccaggggcacag

SEQ ID NO: 3945046 - DNA, 25 bp, Homo sapien
actccgtctgtaggtatgtctgtca

SEQ ID NO: 3945047 - DNA, 25 bp, Homo sapien
ctatcttgtcggcaccaggggcaca

SEQ ID NO: 3945048 - DNA, 25 bp, Homo sapien
cgtctgtaggtatgtctgtcagctt

SEQ ID NO: 3945049 - DNA, 25 bp, Homo sapien
agtttgcccggccagggctagagtc

SEQ ID NO: 3945050 - DNA, 25 bp, Homo sapien
ctggttgttcttaagtgcgaggact

SEQ ID NO: 3945051 - DNA, 25 bp, Homo sapien
tttgcccggccagggctagagtctg

SEQ ID NO: 3945052 - DNA, 25 bp, Homo sapien
aagtgcgaggacttggagtttgccc

SEQ ID NO: 3945053 - DNA, 25 bp, Homo sapien
cattataagaggagcgggaagtgca

SEQ ID NO: 3945054 - DNA, 25 bp, Homo sapien
tctggcctggagttaatgaagttac

SEQ ID NO: 3945055 - DNA, 25 bp, Homo sapien
gaaggttcgcttactcaccagtcgg

SEQ ID NO: 3945056 - DNA, 25 bp, Homo sapien
ggtacaaggatccaatctggcctgg

SEQ ID NO: 3945057 - DNA, 25 bp, Homo sapien
gtggctgggttacttcgtggcaaaa

SEQ ID NO: 3945058 - DNA, 25 bp, Homo sapien
tgggacttgtcctttttcaacatga

SEQ ID NO: 3945059 - DNA, 25 bp, Homo sapien
ctgggacaggtgttgatctgaagat

SEQ ID NO: 3945060 - DNA, 25 bp, Homo sapien
aaagtgccttacaaacactccaagg

SEQ ID NO: 3945061 - DNA, 25 bp, Homo sapien
ctgccctgaggttccggagcgcttg

SEQ ID NO: 3945062 - DNA, 25 bp, Homo sapien
taaataagtgatggcggccgggcac

SEQ ID NO: 3945063 - DNA, 25 bp, Homo sapien
tggtggcgttttccctgacataagt

SEQ ID NO: 3945064 - DNA, 25 bp, Homo sapien
ggacttagcacacgcggcagtgatt

SEQ ID NO: 3945065 - DNA, 25 bp, Homo sapien
ggagatgcgataatggcgtccgtcc

SEQ ID NO: 3945066 - DNA, 25 bp, Homo sapien
tgcggaattctcgtggtgtttgtcg

SEQ ID NO: 3945067 - DNA, 25 bp, Homo sapien
gtgtgggctgcggaattctcgtggt

SEQ ID NO: 3945068 - DNA, 25 bp, Homo sapien
atggcgtccgtcctcgcgagagaag

SEQ ID NO: 3945069 - DNA, 25 bp, Homo sapien
cacagccacggaggaggcacaaaaa

SEQ ID NO: 3945070 - DNA, 25 bp, Homo sapien
gcacaaaaacgatgcctgtcgctcc

SEQ ID NO: 3945071 - DNA, 25 bp, Homo sapien
acagaaatcgcacaaacgtgctggg

SEQ ID NO: 3945072 - DNA, 25 bp, Homo sapien
ccgagagcgccccttgcgtgtgcaa

SEQ ID NO: 3945073 - DNA, 25 bp, Homo sapien
gaaaaacatcagtcctctatcaagg

SEQ ID NO: 3945074 - DNA, 25 bp, Homo sapien
aggcaatctctccaatttgctcaca

SEQ ID NO: 3945075 - DNA, 25 bp, Homo sapien
aatttgctcacacagtgtggatgga

SEQ ID NO: 3945076 - DNA, 25 bp, Homo sapien
tcagtcctctatcaaggcaatctct

SEQ ID NO: 3945077 - DNA, 25 bp, Homo sapien
tctgcgagctgcgtgttaaatgacc

SEQ ID NO: 3945078 - DNA, 25 bp, Homo sapien
ggtgcaagctcgctacccttcaaag

SEQ ID NO: 3945079 - DNA, 25 bp, Homo sapien
cctggagtacattcctgggcagaac

SEQ ID NO: 3945080 - DNA, 25 bp, Homo sapien
tattttaatcgccagacacgggaag

SEQ ID NO: 3945081 - DNA, 25 bp, Homo sapien
ttccccccgcgtcatctggtgaaag

SEQ ID NO: 3945082 - DNA, 25 bp, Homo sapien
gtgaaaggtgaaggcgttctgccat

SEQ ID NO: 3945083 - DNA, 25 bp, Homo sapien
gggttgtccgcatcctggccaccag

SEQ ID NO: 3945084 - DNA, 25 bp, Homo sapien
ccacagagcttgcagcatgccatga

SEQ ID NO: 3945085 - DNA, 25 bp, Homo sapien
gtggatcacctgtcagcctggccaa

SEQ ID NO: 3945086 - DNA, 25 bp, Homo sapien
gggtggatcacctgtcagcctggcc

SEQ ID NO: 3945087 - DNA, 25 bp, Homo sapien
cgggtggatcacctgtcagcctggc

SEQ ID NO: 3945088 - DNA, 25 bp, Homo sapien
ggatcacctgtcagcctggccaatg

SEQ ID NO: 3945089 - DNA, 25 bp, Homo sapien
cacggagagtggccggtcaacacga

SEQ ID NO: 3945090 - DNA, 25 bp, Homo sapien
cggagagtggccggtcaacacgaaa

SEQ ID NO: 3945091 - DNA, 25 bp, Homo sapien
gagagtggccggtcaacacgaaaga

SEQ ID NO: 3945092 - DNA, 25 bp, Homo sapien
acacgaaagagttcaactcacagtg

SEQ ID NO: 3945093 - DNA, 25 bp, Homo sapien
tccactgcaatctgaaccacatcgg

SEQ ID NO: 3945094 - DNA, 25 bp, Homo sapien
tcaggtcttccactgcaatctgaac

SEQ ID NO: 3945095 - DNA, 25 bp, Homo sapien
catcggccaggtcgtgttccgacat

SEQ ID NO: 3945096 - DNA, 25 bp, Homo sapien
accacatcggccaggtcgtgttccg

SEQ ID NO: 3945097 - DNA, 25 bp, Homo sapien
agccaaggaccactgtcgaccgatt

SEQ ID NO: 3945098 - DNA, 25 bp, Homo sapien
aaggaccactgtcgaccgattttgg

SEQ ID NO: 3945099 - DNA, 25 bp, Homo sapien
gaccactgtcgaccgattttggtct

SEQ ID NO: 3945100 - DNA, 25 bp, Homo sapien
cactgtcgaccgattttggtctttg

SEQ ID NO: 3945101 - DNA, 25 bp, Homo sapien
actgattacaaaaacaacgtcaaag

SEQ ID NO: 3945102 - DNA, 25 bp, Homo sapien
ccaaaatcggccacaattgcctcat

SEQ ID NO: 3945103 - DNA, 25 bp, Homo sapien
aaatcaaagaccaaaatcggccaca

SEQ ID NO: 3945104 - DNA, 25 bp, Homo sapien
gtcaaagataacctcaaaatcaaag

SEQ ID NO: 3945105 - DNA, 25 bp, Homo sapien
gatggatcctggcaattgatttcta

SEQ ID NO: 3945106 - DNA, 25 bp, Homo sapien
ttatagatggatcctggcaattgat

SEQ ID NO: 3945107 - DNA, 25 bp, Homo sapien
tggcaattgatttctagtcgctggc

SEQ ID NO: 3945108 - DNA, 25 bp, Homo sapien
gatcctggcaattgatttctagtcg

SEQ ID NO: 3945109 - DNA, 25 bp, Homo sapien
gctgtgctgcttgttcgtgaccaga

SEQ ID NO: 3945110 - DNA, 25 bp, Homo sapien
ccagatccagcttttcttctaagga

SEQ ID NO: 3945111 - DNA, 25 bp, Homo sapien
caatgctatccaaccgcaagcagat

SEQ ID NO: 3945112 - DNA, 25 bp, Homo sapien
taaggatttacaagtagcctccagg

SEQ ID NO: 3945113 - DNA, 25 bp, Homo sapien
ccgctgccgtcccaccattctctct

SEQ ID NO: 3945114 - DNA, 25 bp, Homo sapien
ctccaggcttgttgcggctcccatt

SEQ ID NO: 3945115 - DNA, 25 bp, Homo sapien
tgttgcggctcccattcctcggcgt

SEQ ID NO: 3945116 - DNA, 25 bp, Homo sapien
gcgtccacatgtcctccccggcgcc

SEQ ID NO: 3945117 - DNA, 25 bp, Homo sapien
cagagagtactggaatttggcaggc

SEQ ID NO: 3945118 - DNA, 25 bp, Homo sapien
caggacgcaacataccaggtgggac

SEQ ID NO: 3945119 - DNA, 25 bp, Homo sapien
ggacgtccggctttttcacagccaa

SEQ ID NO: 3945120 - DNA, 25 bp, Homo sapien
ggtgctttgagatcccgtgggacat

SEQ ID NO: 3945121 - DNA, 25 bp, Homo sapien
aaggaaatcactccactaggcgtgg

SEQ ID NO: 3945122 - DNA, 25 bp, Homo sapien
tgaaaggaaatcactccactaggcg

SEQ ID NO: 3945123 - DNA, 25 bp, Homo sapien
taaaagtcattcaaatataccacat

SEQ ID NO: 3945124 - DNA, 25 bp, Homo sapien
aatcactccactaggcgtggtggct

SEQ ID NO: 3945125 - DNA, 25 bp, Homo sapien
gcgctccgcatcctggtctccaaca

SEQ ID NO: 3945126 - DNA, 25 bp, Homo sapien
cgcgctccgcatcctggtctccaac

SEQ ID NO: 3945127 - DNA, 25 bp, Homo sapien
aaggagtactgagtgcttcgtgtgc

SEQ ID NO: 3945128 - DNA, 25 bp, Homo sapien
ttccgtgtggccttcccctgtacag

SEQ ID NO: 3945129 - DNA, 25 bp, Homo sapien
tgtacaggggtccttctgttcgtcc

SEQ ID NO: 3945130 - DNA, 25 bp, Homo sapien
ctgttcgtccaatgatgtctcccaa

SEQ ID NO: 3945131 - DNA, 25 bp, Homo sapien
ccgtgtggccttcccctgtacaggg

SEQ ID NO: 3945132 - DNA, 25 bp, Homo sapien
tggtaagtacagccgtgcaagtgca

SEQ ID NO: 3945133 - DNA, 25 bp, Homo sapien
ccagccgcgcacgtgcgtgcatgga

SEQ ID NO: 3945134 - DNA, 25 bp, Homo sapien
gtgcgtgcatggagacgtgtctggg

SEQ ID NO: 3945135 - DNA, 25 bp, Homo sapien
gacaggtaagtccagccgcgcacgt

SEQ ID NO: 3945136 - DNA, 25 bp, Homo sapien
cacgtgcgtgcatggagacgtgtct

SEQ ID NO: 3945137 - DNA, 25 bp, Homo sapien
aaggacaggtaagtacagccgcgca

SEQ ID NO: 3945138 - DNA, 25 bp, Homo sapien
cacgtgcgtgtatggagacgcgtct

SEQ ID NO: 3945139 - DNA, 25 bp, Homo sapien
gaaggacaggtaagtacagccgcgc

SEQ ID NO: 3945140 - DNA, 25 bp, Homo sapien
tgcatggagacacgtctggaaggac

SEQ ID NO: 3945141 - DNA, 25 bp, Homo sapien
gcatggagacgtgtctggaaggaca

SEQ ID NO: 3945142 - DNA, 25 bp, Homo sapien
cgcacgtgcgggcatggagacgtgt

SEQ ID NO: 3945143 - DNA, 25 bp, Homo sapien
gacaggtgagtccagccgcgcacgt

SEQ ID NO: 3945144 - DNA, 25 bp, Homo sapien
agtccagccgcgcacgtgcgggcat

SEQ ID NO: 3945145 - DNA, 25 bp, Homo sapien
aaggacaggtaagtacagccgcgca

SEQ ID NO: 3945146 - DNA, 25 bp, Homo sapien
aaggcctggtaagtacagccgcgca

SEQ ID NO: 3945147 - DNA, 25 bp, Homo sapien
caggtaagtacagccgtgcacgtgc

SEQ ID NO: 3945148 - DNA, 25 bp, Homo sapien
cacatgcgtgcatggagacgtgtct

SEQ ID NO: 3945149 - DNA, 25 bp, Homo sapien
caagtgcgtgcatggagacgtgtct

SEQ ID NO: 3945150 - DNA, 25 bp, Homo sapien
aaggacaggtaagtacagccgcgca

SEQ ID NO: 3945151 - DNA, 25 bp, Homo sapien
tggaaggcctggtaagtacagccgt

SEQ ID NO: 3945152 - DNA, 25 bp, Homo sapien
cacgtgcgtgcatggagacgtgtct

SEQ ID NO: 3945153 - DNA, 25 bp, Homo sapien
acaggtaagtacagccgcgcacgtg

SEQ ID NO: 3945154 - DNA, 25 bp, Homo sapien
cacgtgcgtgcatggagacgtgtct

SEQ ID NO: 3945155 - DNA, 25 bp, Homo sapien
gaaggacaggtaagtacagccgcgc

SEQ ID NO: 3945156 - DNA, 25 bp, Homo sapien
tacagccgcgcacgtgcgtgcatgg

SEQ ID NO: 3945157 - DNA, 25 bp, Homo sapien
gcgtgcatggagacgtgtctgggtg

SEQ ID NO: 3945158 - DNA, 25 bp, Homo sapien
gtgcgtgcatggagacgtgtctggg

SEQ ID NO: 3945159 - DNA, 25 bp, Homo sapien
tgcgtgcatggagacgtgtctgggt

SEQ ID NO: 3945160 - DNA, 25 bp, Homo sapien
acaggtaagtacagccgcgcacgtg

SEQ ID NO: 3945161 - DNA, 25 bp, Homo sapien
cacgtgcgtgcatggagacgtgtct

SEQ ID NO: 3945162 - DNA, 25 bp, Homo sapien
tacagccgcgcacgtgcgtgcatgg

SEQ ID NO: 3945163 - DNA, 25 bp, Homo sapien
gaaggacaggtaagtacagccgcgc

SEQ ID NO: 3945164 - DNA, 25 bp, Homo sapien
aaggacaggtaagtacagccgcgca

SEQ ID NO: 3945165 - DNA, 25 bp, Homo sapien
gaaggacaggtaagtacagccgcac

SEQ ID NO: 3945166 - DNA, 25 bp, Homo sapien
taagtacagccgtgcaagtgcgtgc

SEQ ID NO: 3945167 - DNA, 25 bp, Homo sapien
caggtaagtacagccgtgcacgtgc

SEQ ID NO: 3945168 - DNA, 25 bp, Homo sapien
tgcgtgcatggagacgtgtctgggt

SEQ ID NO: 3945169 - DNA, 25 bp, Homo sapien
gtgcgtgcatggagacgtgtctggg

SEQ ID NO: 3945170 - DNA, 25 bp, Homo sapien
gatgcagtccctatctaaggaccga

SEQ ID NO: 3945171 - DNA, 25 bp, Homo sapien
tatcacattaaggaggatgcagtcc

SEQ ID NO: 3945172 - DNA, 25 bp, Homo sapien
taacattcgactgccaaaagctcat

SEQ ID NO: 3945173 - DNA, 25 bp, Homo sapien
gttgcaaatgcatacgacagccagg

SEQ ID NO: 3945174 - DNA, 25 bp, Homo sapien
ctttctggtcacaagggatatctaa

SEQ ID NO: 3945175 - DNA, 25 bp, Homo sapien
cagttttcaatcatgcgtttttaag

SEQ ID NO: 3945176 - DNA, 25 bp, Homo sapien
ttttaagccttagcactttctggtc

SEQ ID NO: 3945177 - DNA, 25 bp, Homo sapien
tctaaggtccgctttgttgtggaag

SEQ ID NO: 3945178 - DNA, 25 bp, Homo sapien
ggcaaacatcacgttggacttggga

SEQ ID NO: 3945179 - DNA, 25 bp, Homo sapien
cttgggatggaaggacacacatgct

SEQ ID NO: 3945180 - DNA, 25 bp, Homo sapien
tgagctacaaccaaagggctcaggg

SEQ ID NO: 3945181 - DNA, 25 bp, Homo sapien
tatcattccaaaacggtagcgccct

SEQ ID NO: 3945182 - DNA, 25 bp, Homo sapien
actcattcctatgggacagatctaa

SEQ ID NO: 3945183 - DNA, 25 bp, Homo sapien
tccatcccaactcattcctatggga

SEQ ID NO: 3945184 - DNA, 25 bp, Homo sapien
ggcttgacattttcagtcactccat

SEQ ID NO: 3945185 - DNA, 25 bp, Homo sapien
ttgacattttcagtcactccatccc

SEQ ID NO: 3945186 - DNA, 25 bp, Homo sapien
tacaatggcgttctgccgatcattg

SEQ ID NO: 3945187 - DNA, 25 bp, Homo sapien
gggtcttccatcttggctacaatgg

SEQ ID NO: 3945188 - DNA, 25 bp, Homo sapien
ttgttgagtattactgtagtctggg

SEQ ID NO: 3945189 - DNA, 25 bp, Homo sapien
gaatccggtgccctgttgctcaagg

SEQ ID NO: 3945190 - DNA, 25 bp, Homo sapien
taagacaatacagaaaggggacgaa

SEQ ID NO: 3945191 - DNA, 25 bp, Homo sapien
aagacaatacagaaaggggacgaag

SEQ ID NO: 3945192 - DNA, 25 bp, Homo sapien
ctaagacaatacagaaaggggacga

SEQ ID NO: 3945193 - DNA, 25 bp, Homo sapien
accccacgtatcagacccttgcgac

SEQ ID NO: 3945194 - DNA, 25 bp, Homo sapien
cttcaccccacgtatcagacccttg

SEQ ID NO: 3945195 - DNA, 25 bp, Homo sapien
cctctcccttcaccccacgtatcag

SEQ ID NO: 3945196 - DNA, 25 bp, Homo sapien
tatcagacccttgcgaccacagctg

SEQ ID NO: 3945197 - DNA, 25 bp, Homo sapien
cgtcctcgtggtggctgtcttcttg

SEQ ID NO: 3945198 - DNA, 25 bp, Homo sapien
accacaatggtgttctgccgacgcc

SEQ ID NO: 3945199 - DNA, 25 bp, Homo sapien
cagctggacacagagtcgctggcct

SEQ ID NO: 3945200 - DNA, 25 bp, Homo sapien
gacgttgctcccgatgctctgactg

SEQ ID NO: 3945201 - DNA, 25 bp, Homo sapien
ggtgacaggatgaagggcacacaga

SEQ ID NO: 3945202 - DNA, 25 bp, Homo sapien
caggatgaagggcacacagaggctc

SEQ ID NO: 3945203 - DNA, 25 bp, Homo sapien
gcacacagaggctctcaggggaaga

SEQ ID NO: 3945204 - DNA, 25 bp, Homo sapien
acacagaggctctcaggggaagacg

SEQ ID NO: 3945205 - DNA, 25 bp, Homo sapien
tctttcttttctccacgctgtagtc

SEQ ID NO: 3945206 - DNA, 25 bp, Homo sapien
cacaaagctaagtctgtttggttct

SEQ ID NO: 3945207 - DNA, 25 bp, Homo sapien
tacaactccacgcacaaagctaagt

SEQ ID NO: 3945208 - DNA, 25 bp, Homo sapien
ttcttttctccacgctgtagtcact

SEQ ID NO: 3945209 - DNA, 25 bp, Homo sapien
cagacgcagatgcagaaaaactgag

SEQ ID NO: 3945210 - DNA, 25 bp, Homo sapien
gacgcagatgcagaaaaactgagtt

SEQ ID NO: 3945211 - DNA, 25 bp, Homo sapien
gcagatgcagaaaaactgagttctt

SEQ ID NO: 3945212 - DNA, 25 bp, Homo sapien
tcagacgcagatgcagaaaaactga

SEQ ID NO: 3945213 - DNA, 25 bp, Homo sapien
tacagatcaatactaagtaagctcc

SEQ ID NO: 3945214 - DNA, 25 bp, Homo sapien
caacaattagtctgtcgttactgca

SEQ ID NO: 3945215 - DNA, 25 bp, Homo sapien
gatatcgtctcataagttcatttag

SEQ ID NO: 3945216 - DNA, 25 bp, Homo sapien
tgtgtgaaaaactccattgccctga

SEQ ID NO: 3945217 - DNA, 25 bp, Homo sapien
aatgctctcctttccatgtgcacga

SEQ ID NO: 3945218 - DNA, 25 bp, Homo sapien
gatgtgtgtgactcggcacagcaca

SEQ ID NO: 3945219 - DNA, 25 bp, Homo sapien
cgtgcatagctggtgttccgtggac

SEQ ID NO: 3945220 - DNA, 25 bp, Homo sapien
catgtgcacggctaacattgtgtgg

SEQ ID NO: 3945221 - DNA, 25 bp, Homo sapien
ctggagatcacaaacagaggacccg

SEQ ID NO: 3945222 - DNA, 25 bp, Homo sapien
acaaacagaggacccgaggcaggca

SEQ ID NO: 3945223 - DNA, 25 bp, Homo sapien
ggagatcacaaacagaggacccgag

SEQ ID NO: 3945224 - DNA, 25 bp, Homo sapien
gatcacaaacagaggacccgaggca

SEQ ID NO: 3945225 - DNA, 25 bp, Homo sapien
gactggcagagggacgggcagaggg

SEQ ID NO: 3945226 - DNA, 25 bp, Homo sapien
cccagcgtggtccgagctgaactgg

SEQ ID NO: 3945227 - DNA, 25 bp, Homo sapien
cagcgtggtccgagctgaactggca

SEQ ID NO: 3945228 - DNA, 25 bp, Homo sapien
gcgtggtccgagctgaactggcaca

SEQ ID NO: 3945229 - DNA, 25 bp, Homo sapien
tgcggcagctgcctggtagctcctg

SEQ ID NO: 3945230 - DNA, 25 bp, Homo sapien
tggtagctcctggagcgcgagacct

SEQ ID NO: 3945231 - DNA, 25 bp, Homo sapien
ctgcctggtagctcctggagcgcga

SEQ ID NO: 3945232 - DNA, 25 bp, Homo sapien
cctggtagctcctggagcgcgagac

SEQ ID NO: 3945233 - DNA, 25 bp, Homo sapien
ggacctatgagggacgccacgctct

SEQ ID NO: 3945234 - DNA, 25 bp, Homo sapien
caaagtgaggctgcaagagtctccc

SEQ ID NO: 3945235 - DNA, 25 bp, Homo sapien
agaaacctgaatacctcccacgagg

SEQ ID NO: 3945236 - DNA, 25 bp, Homo sapien
gaccctgaagttgaaccaaagtgag

SEQ ID NO: 3945237 - DNA, 25 bp, Homo sapien
cgggaaagatgctccacgcagggct

SEQ ID NO: 3945238 - DNA, 25 bp, Homo sapien
tctgctcaggcacagtcgggaaaga

SEQ ID NO: 3945239 - DNA, 25 bp, Homo sapien
ccctcgtaacttgtgaggcagtcac

SEQ ID NO: 3945240 - DNA, 25 bp, Homo sapien
cagggctgggcaaatccctcgtaac

SEQ ID NO: 3945241 - DNA, 25 bp, Homo sapien
cagctgcttcttcccgtgcttgccc

SEQ ID NO: 3945242 - DNA, 25 bp, Homo sapien
tggaagaggtagtccagcagcgtga

SEQ ID NO: 3945243 - DNA, 25 bp, Homo sapien
ggttgttctcgtcgcccagccaggt

SEQ ID NO: 3945244 - DNA, 25 bp, Homo sapien
tgctgatgtgcagcatgtcggaggg

SEQ ID NO: 3945245 - DNA, 25 bp, Homo sapien
tcagcattgaaatgtgggtcctgac

SEQ ID NO: 3945246 - DNA, 25 bp, Homo sapien
gcgggcatgccgtgcgtaataagca

SEQ ID NO: 3945247 - DNA, 25 bp, Homo sapien
gctgagatttcaaaccgcctggaga

SEQ ID NO: 3945248 - DNA, 25 bp, Homo sapien
gagcactgatcctcgggctgagatt

SEQ ID NO: 3945249 - DNA, 25 bp, Homo sapien
ctcaagagtggcctacagacaggag

SEQ ID NO: 3945250 - DNA, 25 bp, Homo sapien
tactccaccgctgagaagctgtgag

SEQ ID NO: 3945251 - DNA, 25 bp, Homo sapien
gagttatctgatactaccctcaggg

SEQ ID NO: 3945252 - DNA, 25 bp, Homo sapien
gtgaggaggccccacgtgtggtctc

SEQ ID NO: 3945253 - DNA, 25 bp, Homo sapien
atgggcgcccgctggtgtctgacag

SEQ ID NO: 3945254 - DNA, 25 bp, Homo sapien
taattccttccgtctgcgctccagg

SEQ ID NO: 3945255 - DNA, 25 bp, Homo sapien
aattatctaattccttccgtctgcg

SEQ ID NO: 3945256 - DNA, 25 bp, Homo sapien
ctaattccttccgtctgcgctccag

SEQ ID NO: 3945257 - DNA, 25 bp, Homo sapien
tatctaattccttccgtctgcgctc

SEQ ID NO: 3945258 - DNA, 25 bp, Homo sapien
ctgtagcgatgacgaatgtgggcat

SEQ ID NO: 3945259 - DNA, 25 bp, Homo sapien
cctgtagcgatgacgaatgtgggca

SEQ ID NO: 3945260 - DNA, 25 bp, Homo sapien
ccctgtagcgatgacgaatgtgggc

SEQ ID NO: 3945261 - DNA, 25 bp, Homo sapien
agaaaactgaggatccgaaggccac

SEQ ID NO: 3945262 - DNA, 25 bp, Homo sapien
aactgaggatccgaaggccacggcg

SEQ ID NO: 3945263 - DNA, 25 bp, Homo sapien
cagagatgccctgtattcaacaggg

SEQ ID NO: 3945264 - DNA, 25 bp, Homo sapien
ctgcgctacggagagctctcagcac

SEQ ID NO: 3945265 - DNA, 25 bp, Homo sapien
tgctctgcttgattcggtaccagtc

SEQ ID NO: 3945266 - DNA, 25 bp, Homo sapien
cacttggagtcgatgctctgcttga

SEQ ID NO: 3945267 - DNA, 25 bp, Homo sapien
cacgccgtgcggcacttggagtcga

SEQ ID NO: 3945268 - DNA, 25 bp, Homo sapien
gatgctctgcttgattcggtaccag

SEQ ID NO: 3945269 - DNA, 25 bp, Homo sapien
actgagaaactacaatgaaagacaa

SEQ ID NO: 3945270 - DNA, 25 bp, Homo sapien
ttttacaactataaaactaatgcag

SEQ ID NO: 3945271 - DNA, 25 bp, Homo sapien
caactataaaactaatgcagtgctt

SEQ ID NO: 3945272 - DNA, 25 bp, Homo sapien
aaaactaatgcagtgcttattggaa

SEQ ID NO: 3945273 - DNA, 25 bp, Homo sapien
tccgtcttctccgatctggtggatc

SEQ ID NO: 3945274 - DNA, 25 bp, Homo sapien
ctgtccgtcttctccgatctggtgg

SEQ ID NO: 3945275 - DNA, 25 bp, Homo sapien
cttctccgatctggtggatctgcac

SEQ ID NO: 3945276 - DNA, 25 bp, Homo sapien
cgtcttctccgatctggtggatctg

SEQ ID NO: 3945277 - DNA, 25 bp, Homo sapien
cctcccaagctatcactgtgctccc

SEQ ID NO: 3945278 - DNA, 25 bp, Homo sapien
gcctcctcccaagctatcactgtgc

SEQ ID NO: 3945279 - DNA, 25 bp, Homo sapien
tcctcccaagctatcactgtgctcc

SEQ ID NO: 3945280 - DNA, 25 bp, Homo sapien
cctcctcccaagctatcactgtgct

SEQ ID NO: 3945281 - DNA, 25 bp, Homo sapien
agagctcatggccacgatgacctct

SEQ ID NO: 3945282 - DNA, 25 bp, Homo sapien
ttaagagctcatggccacgatgacc

SEQ ID NO: 3945283 - DNA, 25 bp, Homo sapien
taagagctcatggccacgatgacct

SEQ ID NO: 3945284 - DNA, 25 bp, Homo sapien
agctcatggccacgatgacctctac

SEQ ID NO: 3945285 - DNA, 25 bp, Homo sapien
aaacatcttccggaatgtttgttct

SEQ ID NO: 3945286 - DNA, 25 bp, Homo sapien
cccaccacgtggacgccagaaactg

SEQ ID NO: 3945287 - DNA, 25 bp, Homo sapien
aagaaacatcttccggaatgtttgt

SEQ ID NO: 3945288 - DNA, 25 bp, Homo sapien
catcttccggaatgtttgttcttga

SEQ ID NO: 3945289 - DNA, 25 bp, Homo sapien
tcgctgtcctgcgtgatctggactt

SEQ ID NO: 3945290 - DNA, 25 bp, Homo sapien
ctcgctgtcctgcgtgatctggact

SEQ ID NO: 3945291 - DNA, 25 bp, Homo sapien
acaccgatgaaggtcgggagcatgt

SEQ ID NO: 3945292 - DNA, 25 bp, Homo sapien
tcgcactgtgacaccgatgaaggtc

SEQ ID NO: 3945293 - DNA, 25 bp, Homo sapien
tgccctcgcactgtgacaccgatga

SEQ ID NO: 3945294 - DNA, 25 bp, Homo sapien
cactgtgacaccgatgaaggtcggg

SEQ ID NO: 3945295 - DNA, 25 bp, Homo sapien
ccagagtcgaaggacggtcacccgg

SEQ ID NO: 3945296 - DNA, 25 bp, Homo sapien
cagagtcgaaggacggtcacccggg

SEQ ID NO: 3945297 - DNA, 25 bp, Homo sapien
ggtcactgagtacaacacgtgtgtg

SEQ ID NO: 3945298 - DNA, 25 bp, Homo sapien
cggtcactgagtacaacacgtgtgt

SEQ ID NO: 3945299 - DNA, 25 bp, Homo sapien
gaggagacggtcatgagtagaaaca

SEQ ID NO: 3945300 - DNA, 25 bp, Homo sapien
tatggtgacgagactgcatactgtc

SEQ ID NO: 3945301 - DNA, 25 bp, Homo sapien
cttgctgagctgtgcggcatcacca

SEQ ID NO: 3945302 - DNA, 25 bp, Homo sapien
agacgtcctatgtgtgtgtcgccca

SEQ ID NO: 3945303 - DNA, 25 bp, Homo sapien
tgccccacgtgatggatctggaggt

SEQ ID NO: 3945304 - DNA, 25 bp, Homo sapien
ccccacgtgatggatctggaggttg

SEQ ID NO: 3945305 - DNA, 25 bp, Homo sapien
ccacgtgatggatctggaggttgcc

SEQ ID NO: 3945306 - DNA, 25 bp, Homo sapien
tcctgccccacgtgatggatctgga

SEQ ID NO: 3945307 - DNA, 25 bp, Homo sapien
cgcatgcgtgtgcagaaaataacca

SEQ ID NO: 3945308 - DNA, 25 bp, Homo sapien
tgaccaccatcaacatacgcatgcg

SEQ ID NO: 3945309 - DNA, 25 bp, Homo sapien
ttttgtagagaccattcgtactggg

SEQ ID NO: 3945310 - DNA, 25 bp, Homo sapien
gtttgacggcaatacacaggagcga

SEQ ID NO: 3945311 - DNA, 25 bp, Homo sapien
tcctggaactgacgttgctgctggc

SEQ ID NO: 3945312 - DNA, 25 bp, Homo sapien
aacgcagcacaatggcgcttcccag

SEQ ID NO: 3945313 - DNA, 25 bp, Homo sapien
tgcagacgtggcctcaaacccgtcg

SEQ ID NO: 3945314 - DNA, 25 bp, Homo sapien
aacccgtcgccccggcagcaatcca

SEQ ID NO: 3945315 - DNA, 25 bp, Homo sapien
ggacagctgcggcaaacatcgagcc

SEQ ID NO: 3945316 - DNA, 25 bp, Homo sapien
gggcatggacagctgcggcaaacat

SEQ ID NO: 3945317 - DNA, 25 bp, Homo sapien
cgtagaggggcatggacagctgcgg

SEQ ID NO: 3945318 - DNA, 25 bp, Homo sapien
gacaactcggtcagaggcttgtgga

SEQ ID NO: 3945319 - DNA, 25 bp, Homo sapien
ctgccaaccacagccgggccctcat

SEQ ID NO: 3945320 - DNA, 25 bp, Homo sapien
gttctctcccaaaagatctgccaac

SEQ ID NO: 3945321 - DNA, 25 bp, Homo sapien
catccagttctctcccaaaagatct

SEQ ID NO: 3945322 - DNA, 25 bp, Homo sapien
aaaagatctgccaaccacagccggg

SEQ ID NO: 3945323 - DNA, 25 bp, Homo sapien
aactggtatgacaaagtcacggcca

SEQ ID NO: 3945324 - DNA, 25 bp, Homo sapien
atatttcagtgtccaaattgaaaaa

SEQ ID NO: 3945325 - DNA, 25 bp, Homo sapien
actggtatgacaaagtcacggccag

SEQ ID NO: 3945326 - DNA, 25 bp, Homo sapien
ccctcacacttatccaaatgatggg

SEQ ID NO: 3945327 - DNA, 25 bp, Homo sapien
cagatgctcttacacaatcaggctc

SEQ ID NO: 3945328 - DNA, 25 bp, Homo sapien
caaatgatgggtttctgagtgcaga

SEQ ID NO: 3945329 - DNA, 25 bp, Homo sapien
gcaacctaccagcaagcagatgaga

SEQ ID NO: 3945330 - DNA, 25 bp, Homo sapien
ctttcttcgaatcttaagtgtacat

SEQ ID NO: 3945331 - DNA, 25 bp, Homo sapien
aagtgtacattaagtgtttcgctca

SEQ ID NO: 3945332 - DNA, 25 bp, Homo sapien
cccagcgccggtgcctgcttgtggt

SEQ ID NO: 3945333 - DNA, 25 bp, Homo sapien
tgttccaaggcagcaacaatgtctg

SEQ ID NO: 3945334 - DNA, 25 bp, Homo sapien
gctttgaagacggatggggccagga

SEQ ID NO: 3945335 - DNA, 25 bp, Homo sapien
ggctttgaagacggatggggccagg

SEQ ID NO: 3945336 - DNA, 25 bp, Homo sapien
tgccgcagtagtgggacgacagagg

SEQ ID NO: 3945337 - DNA, 25 bp, Homo sapien
gctatcccaggctcgtaaaagccac

SEQ ID NO: 3945338 - DNA, 25 bp, Homo sapien
aggtgcacaccctctcccgtgctcc

SEQ ID NO: 3945339 - DNA, 25 bp, Homo sapien
acgacagaggctgctcggacgctat

SEQ ID NO: 3945340 - DNA, 25 bp, Homo sapien
atggaaacgaagtgcgtggccacac

SEQ ID NO: 3945341 - DNA, 25 bp, Homo sapien
gtgggacgagtgcacgacgctttcc

SEQ ID NO: 3945342 - DNA, 25 bp, Homo sapien
tgtcacggactgacgacacaaggag

SEQ ID NO: 3945343 - DNA, 25 bp, Homo sapien
tcatcacacacgtggcgtgtcacgg

SEQ ID NO: 3945344 - DNA, 25 bp, Homo sapien
cctcgggcgaatagctgagccatca

SEQ ID NO: 3945345 - DNA, 25 bp, Homo sapien
gaatgaacctaaggagcggtcgacc

SEQ ID NO: 3945346 - DNA, 25 bp, Homo sapien
gtgctggcctgtcatgacccaaggg

SEQ ID NO: 3945347 - DNA, 25 bp, Homo sapien
cacatgacaaatctaggaacctcca

SEQ ID NO: 3945348 - DNA, 25 bp, Homo sapien
acagagcaaacttggcccccgcaaa

SEQ ID NO: 3945349 - DNA, 25 bp, Homo sapien
gcagcactgcacagagcaaacttgg

SEQ ID NO: 3945350 - DNA, 25 bp, Homo sapien
cctggacaacagcagcactgcacag

SEQ ID NO: 3945351 - DNA, 25 bp, Homo sapien
tggacaacagcagcactgcacagag

SEQ ID NO: 3945352 - DNA, 25 bp, Homo sapien
gcccgtcgcagggtgccccacccca

SEQ ID NO: 3945353 - DNA, 25 bp, Homo sapien
ggagcagcccgtcgcagggtgcccc

SEQ ID NO: 3945354 - DNA, 25 bp, Homo sapien
agaggagcagcccgtcgcagggtgc

SEQ ID NO: 3945355 - DNA, 25 bp, Homo sapien
cagcccgtcgcagggtgccccaccc

SEQ ID NO: 3945356 - DNA, 25 bp, Homo sapien
ccgcactctgtgcactgagagtctc

SEQ ID NO: 3945357 - DNA, 25 bp, Homo sapien
gcactctgtgcactgagagtctcac

SEQ ID NO: 3945358 - DNA, 25 bp, Homo sapien
aaccgcactctgtgcactgagagtc

SEQ ID NO: 3945359 - DNA, 25 bp, Homo sapien
agaaccgcactctgtgcactgagag

SEQ ID NO: 3945360 - DNA, 25 bp, Homo sapien
gggccaggagatgcatcccacacct

SEQ ID NO: 3945361 - DNA, 25 bp, Homo sapien
caggcagctccggtgtcaagacggc

SEQ ID NO: 3945362 - DNA, 25 bp, Homo sapien
gttgcaccccactacgggagggcca

SEQ ID NO: 3945363 - DNA, 25 bp, Homo sapien
agaagctcgcaggaaagtgaggccc

SEQ ID NO: 3945364 - DNA, 25 bp, Homo sapien
gggctcagggagagcaaaggagctg

SEQ ID NO: 3945365 - DNA, 25 bp, Homo sapien
tcaagggctcagggagagcaaagga

SEQ ID NO: 3945366 - DNA, 25 bp, Homo sapien
gctcagggagagcaaaggagctgct

SEQ ID NO: 3945367 - DNA, 25 bp, Homo sapien
aagggctcagggagagcaaaggagc

SEQ ID NO: 3945368 - DNA, 25 bp, Homo sapien
gaccgtgagcgtgaggctgagaccc

SEQ ID NO: 3945369 - DNA, 25 bp, Homo sapien
atccaagccaggaccgtgagcgtga

SEQ ID NO: 3945370 - DNA, 25 bp, Homo sapien
acaagcgctcccagagtgccactga

SEQ ID NO: 3945371 - DNA, 25 bp, Homo sapien
agcacaagcgctcccagagtgccac

SEQ ID NO: 3945372 - DNA, 25 bp, Homo sapien
aggactctgcggcacatcctgtctc

SEQ ID NO: 3945373 - DNA, 25 bp, Homo sapien
tccagtgagagagtgccatcgagtc

SEQ ID NO: 3945374 - DNA, 25 bp, Homo sapien
ccatcgctctcaagtcgcatcagat

SEQ ID NO: 3945375 - DNA, 25 bp, Homo sapien
ccatcgagtctctgctggatctgca

SEQ ID NO: 3945376 - DNA, 25 bp, Homo sapien
tactgaacctggatgtcgctgccct

SEQ ID NO: 3945377 - DNA, 25 bp, Homo sapien
gaggccacggcgatcagctgtgcac

SEQ ID NO: 3945378 - DNA, 25 bp, Homo sapien
ggcgatcagctgtgcaccctgcagc

SEQ ID NO: 3945379 - DNA, 25 bp, Homo sapien
actcactggcgccagctgcacgtac

SEQ ID NO: 3945380 - DNA, 25 bp, Homo sapien
caacgagtggggcagggagctctcc

SEQ ID NO: 3945381 - DNA, 25 bp, Homo sapien
acgagtggggcagggagctctccgg

SEQ ID NO: 3945382 - DNA, 25 bp, Homo sapien
tcaacgagtggggcagggagctctc

SEQ ID NO: 3945383 - DNA, 25 bp, Homo sapien
cttcaacgagtggggcagggagctc

SEQ ID NO: 3945384 - DNA, 25 bp, Homo sapien
tgttttcgtggacgctagggccaca

SEQ ID NO: 3945385 - DNA, 25 bp, Homo sapien
gcacagcagccctgcgctttgtttt

SEQ ID NO: 3945386 - DNA, 25 bp, Homo sapien
tctgcctgcgaggtatggagatgct

SEQ ID NO: 3945387 - DNA, 25 bp, Homo sapien
tgcgctttgttttcgtggacgctag

SEQ ID NO: 3945388 - DNA, 25 bp, Homo sapien
taccgagcccacttcttcagcaagc

SEQ ID NO: 3945389 - DNA, 25 bp, Homo sapien
ggtgagcgtgagctctaccgagccc

SEQ ID NO: 3945390 - DNA, 25 bp, Homo sapien
catcacacggctgtcgcggctgagg

SEQ ID NO: 3945391 - DNA, 25 bp, Homo sapien
gcagaaccgcccagcctggcgacct

SEQ ID NO: 3945392 - DNA, 25 bp, Homo sapien
ggccaccgcgcccatgggcagagta

SEQ ID NO: 3945393 - DNA, 25 bp, Homo sapien
gggccaccgcgcccatgggcagagt

SEQ ID NO: 3945394 - DNA, 25 bp, Homo sapien
caccgcgcccatgggcagagtacag

SEQ ID NO: 3945395 - DNA, 25 bp, Homo sapien
ctgcgggggccaccgcgcccatggg

SEQ ID NO: 3945396 - DNA, 25 bp, Homo sapien
accacgcagagtacagggcgcgcct

SEQ ID NO: 3945397 - DNA, 25 bp, Homo sapien
ggcgacaatgtggaaccaaacacca

SEQ ID NO: 3945398 - DNA, 25 bp, Homo sapien
cagcgcatctccagtgaggtcggcg

SEQ ID NO: 3945399 - DNA, 25 bp, Homo sapien
caaacaccacgcagagtacagggcg

SEQ ID NO: 3945400 - DNA, 25 bp, Homo sapien
cctctgctacagatggttcagggag

SEQ ID NO: 3945401 - DNA, 25 bp, Homo sapien
ggtgctgcctctgctacagatggtt

SEQ ID NO: 3945402 - DNA, 25 bp, Homo sapien
ttgccctccaaggacagtggccaga

SEQ ID NO: 3945403 - DNA, 25 bp, Homo sapien
gacagtggccagacctgtgttctgg

SEQ ID NO: 3945404 - DNA, 25 bp, Homo sapien
ctgcaaaagggagaaaggagggact

SEQ ID NO: 3945405 - DNA, 25 bp, Homo sapien
ctgcatctccggctgtagcgtgggc

SEQ ID NO: 3945406 - DNA, 25 bp, Homo sapien
tcactgaatctggatggccccgtgc

SEQ ID NO: 3945407 - DNA, 25 bp, Homo sapien
atggccccgtgctcgagctgcatct

SEQ ID NO: 3945408 - DNA, 25 bp, Homo sapien
catctccggctgtagcgtgggctgc

SEQ ID NO: 3945409 - DNA, 25 bp, Homo sapien
catagttcttgatttcccgcgcata

SEQ ID NO: 3945410 - DNA, 25 bp, Homo sapien
ggccttcagacgcacttcagcagaa

SEQ ID NO: 3945411 - DNA, 25 bp, Homo sapien
caacagcaggactcaaacgaaaggg

SEQ ID NO: 3945412 - DNA, 25 bp, Homo sapien
ttcagcagaacacgtgcagccgctg

SEQ ID NO: 3945413 - DNA, 25 bp, Homo sapien
gggctcccgtctcatgacactggac

SEQ ID NO: 3945414 - DNA, 25 bp, Homo sapien
aagggctcccgtctcatgacactgg

SEQ ID NO: 3945415 - DNA, 25 bp, Homo sapien
cagcaaagggctcccgtctcatgac

SEQ ID NO: 3945416 - DNA, 25 bp, Homo sapien
caaagggctcccgtctcatgacact

SEQ ID NO: 3945417 - DNA, 25 bp, Homo sapien
agtgtttaagagcatttcccctaga

SEQ ID NO: 3945418 - DNA, 25 bp, Homo sapien
gcaaacacctgcctcatgacactgg

SEQ ID NO: 3945419 - DNA, 25 bp, Homo sapien
tagaaaagtaggtcagcaatacccc

SEQ ID NO: 3945420 - DNA, 25 bp, Homo sapien
agcaataccccatcggaaccgagag

SEQ ID NO: 3945421 - DNA, 25 bp, Homo sapien
tggggaggcccagttgctcacaccc

SEQ ID NO: 3945422 - DNA, 25 bp, Homo sapien
ggaggcccagttgctcacaccctcc

SEQ ID NO: 3945423 - DNA, 25 bp, Homo sapien
tgtggggaggcccagttgctcacac

SEQ ID NO: 3945424 - DNA, 25 bp, Homo sapien
cgtcttccaccccaccagggtgtgg

SEQ ID NO: 3945425 - DNA, 25 bp, Homo sapien
gtgtctcctgaagcccacttgccgt

SEQ ID NO: 3945426 - DNA, 25 bp, Homo sapien
ctggcggtgtctcctgaagcccact

SEQ ID NO: 3945427 - DNA, 25 bp, Homo sapien
ggcggtgtctcctgaagcccacttg

SEQ ID NO: 3945428 - DNA, 25 bp, Homo sapien
ggtgtctcctgaagcccacttgccg

SEQ ID NO: 3945429 - DNA, 25 bp, Homo sapien
tgcaaagtcttccatgggacgagca

SEQ ID NO: 3945430 - DNA, 25 bp, Homo sapien
tggtgtgactgtgggagccgcgagc

SEQ ID NO: 3945431 - DNA, 25 bp, Homo sapien
tcctttatgttgctgcaaagtcttc

SEQ ID NO: 3945432 - DNA, 25 bp, Homo sapien
agcagcaactctgcattggtgatgg

SEQ ID NO: 3945433 - DNA, 25 bp, Homo sapien
taaagtttccttttcgcatgactgc

SEQ ID NO: 3945434 - DNA, 25 bp, Homo sapien
tttgatccccaaaaacgtgctgaca

SEQ ID NO: 3945435 - DNA, 25 bp, Homo sapien
agtgacatcacctgcgaacagtggg

SEQ ID NO: 3945436 - DNA, 25 bp, Homo sapien
tgatgacagaaacgcaatgacacct

SEQ ID NO: 3945437 - DNA, 25 bp, Homo sapien
ctgggggagccaggcaggcacccgc

SEQ ID NO: 3945438 - DNA, 25 bp, Homo sapien
cccacagcccggctgctgggggagc

SEQ ID NO: 3945439 - DNA, 25 bp, Homo sapien
gctgggggagccaggcaggcacccg

SEQ ID NO: 3945440 - DNA, 25 bp, Homo sapien
cttcccacagcccggctgctggggg

SEQ ID NO: 3945441 - DNA, 25 bp, Homo sapien
atggaggggagcttgccacagcccc

SEQ ID NO: 3945442 - DNA, 25 bp, Homo sapien
gctgacgtccacaccgtcctgctgt

SEQ ID NO: 3945443 - DNA, 25 bp, Homo sapien
ttcgagccggatgcggcgaaggtct

SEQ ID NO: 3945444 - DNA, 25 bp, Homo sapien
tcatccatccgagccttcgagccgg

SEQ ID NO: 3945445 - DNA, 25 bp, Homo sapien
tcctcagagttcactaccctcggtt

SEQ ID NO: 3945446 - DNA, 25 bp, Homo sapien
actaccctcggtttcacagctgtgc

SEQ ID NO: 3945447 - DNA, 25 bp, Homo sapien
ccccgctgtgtagaaacgcctggtg

SEQ ID NO: 3945448 - DNA, 25 bp, Homo sapien
cacagctgtgccaaagtttaaaatc

SEQ ID NO: 3945449 - DNA, 25 bp, Homo sapien
gggtctgaggctttcacggacgtta

SEQ ID NO: 3945450 - DNA, 25 bp, Homo sapien
gaggctttcacggacgttaaatgta

SEQ ID NO: 3945451 - DNA, 25 bp, Homo sapien
tctgaggctttcacggacgttaaat

SEQ ID NO: 3945452 - DNA, 25 bp, Homo sapien
tttcacggacgttaaatgtatgtcc

SEQ ID NO: 3945453 - DNA, 25 bp, Homo sapien
tgactaaggaggcaaagacccgaag

SEQ ID NO: 3945454 - DNA, 25 bp, Homo sapien
caggtgactaaggaggcaaagaccc

SEQ ID NO: 3945455 - DNA, 25 bp, Homo sapien
ctaaggaggcaaagacccgaagcct

SEQ ID NO: 3945456 - DNA, 25 bp, Homo sapien
aaggaggcaaagacccgaagcctgg

SEQ ID NO: 3945457 - DNA, 25 bp, Homo sapien
ggggagaggcccgcagttctgatca

SEQ ID NO: 3945458 - DNA, 25 bp, Homo sapien
gaggcccgcagttctgatcacggac

SEQ ID NO: 3945459 - DNA, 25 bp, Homo sapien
gagaggcccgcagttctgatcacgg

SEQ ID NO: 3945460 - DNA, 25 bp, Homo sapien
ggagaggcccgcagttctgatcacg

SEQ ID NO: 3945461 - DNA, 25 bp, Homo sapien
gaagcccgcggctgtcctgtcgctg

SEQ ID NO: 3945462 - DNA, 25 bp, Homo sapien
gcagtctccatttctagtaggccca

SEQ ID NO: 3945463 - DNA, 25 bp, Homo sapien
tgaccgatggtgtagagattttccc

SEQ ID NO: 3945464 - DNA, 25 bp, Homo sapien
ggcgtcctagtaatgtgaaccctca

SEQ ID NO: 3945465 - DNA, 25 bp, Homo sapien
ctcaggcggctgcttgtgactccaa

SEQ ID NO: 3945466 - DNA, 25 bp, Homo sapien
ctgggtccttcacccgcagtgagga

SEQ ID NO: 3945467 - DNA, 25 bp, Homo sapien
ggaaagagagtgacgccatggagat

SEQ ID NO: 3945468 - DNA, 25 bp, Homo sapien
acagggcctgcgatctcatgcattc

SEQ ID NO: 3945469 - DNA, 25 bp, Homo sapien
cattcgaatggtgccgaatgggcca

SEQ ID NO: 3945470 - DNA, 25 bp, Homo sapien
cacagtaagtacttcgatagtacgg

SEQ ID NO: 3945471 - DNA, 25 bp, Homo sapien
taagtacttcgatagtacggctcat

SEQ ID NO: 3945472 - DNA, 25 bp, Homo sapien
caaagtcgaagctctttttccaaag

SEQ ID NO: 3945473 - DNA, 25 bp, Homo sapien
cctctaagagttcctgttggtgtcc

SEQ ID NO: 3945474 - DNA, 25 bp, Homo sapien
ctcgtctcctccacccaagagcaaa

SEQ ID NO: 3945475 - DNA, 25 bp, Homo sapien
aagagttcctgttggtgtcctccac

SEQ ID NO: 3945476 - DNA, 25 bp, Homo sapien
aggagcattgctgcctgtggacgcc

SEQ ID NO: 3945477 - DNA, 25 bp, Homo sapien
gaaggagcattgctgcctgtggacg

SEQ ID NO: 3945478 - DNA, 25 bp, Homo sapien
aaggagcattgctgcctgtggacgc

SEQ ID NO: 3945479 - DNA, 25 bp, Homo sapien
ttttgctacgtggcccgggctggac

SEQ ID NO: 3945480 - DNA, 25 bp, Homo sapien
ggtggctggctatgagggctacggc

SEQ ID NO: 3945481 - DNA, 25 bp, Homo sapien
agagaattccgccgtgtggagcagc

SEQ ID NO: 3945482 - DNA, 25 bp, Homo sapien
cagctatgctcccttaggggtggct

SEQ ID NO: 3945483 - DNA, 25 bp, Homo sapien
ctgggggttctttgggcagcaggga

SEQ ID NO: 3945484 - DNA, 25 bp, Homo sapien
acaaaagcagctgtcctcgggcagg

SEQ ID NO: 3945485 - DNA, 25 bp, Homo sapien
ggcggctcagatgaaatatcgaaag

SEQ ID NO: 3945486 - DNA, 25 bp, Homo sapien
atatcgaaagttggcacaaaagcag

SEQ ID NO: 3945487 - DNA, 25 bp, Homo sapien
tgctcccagtgttggtcgacattgg

SEQ ID NO: 3945488 - DNA, 25 bp, Homo sapien
ctctgggctgggaagtttcaagttc

SEQ ID NO: 3945489 - DNA, 25 bp, Homo sapien
ctgggctgggaagtttcaagttcca

SEQ ID NO: 3945490 - DNA, 25 bp, Homo sapien
tgggctgggaagtttcaagttccag

SEQ ID NO: 3945491 - DNA, 25 bp, Homo sapien
tctgggctgggaagtttcaagttcc

SEQ ID NO: 3945492 - DNA, 25 bp, Homo sapien
aacgaattcgcctttgagctcttgg

SEQ ID NO: 3945493 - DNA, 25 bp, Homo sapien
gatcgtcaccatcgtcaatccggat

SEQ ID NO: 3945494 - DNA, 25 bp, Homo sapien
ggatggcccaatcgcatcgaatcca

SEQ ID NO: 3945495 - DNA, 25 bp, Homo sapien
agcctgaaggcatcgcgatcgtcac

SEQ ID NO: 3945496 - DNA, 25 bp, Homo sapien
tcaccaggatcctgacggagccaag

SEQ ID NO: 3945497 - DNA, 25 bp, Homo sapien
tgacggagccaagacgcacccgcgg

SEQ ID NO: 3945498 - DNA, 25 bp, Homo sapien
gttatgtctacacgtcatggaggaa

SEQ ID NO: 3945499 - DNA, 25 bp, Homo sapien
acctcccagcgtgacggctttctgg

SEQ ID NO: 3945500 - DNA, 25 bp, Homo sapien
acgatgagggctgtcggtaccttgt

SEQ ID NO: 3945501 - DNA, 25 bp, Homo sapien
tgtcggtaccttgtgatttagcccc

SEQ ID NO: 3945502 - DNA, 25 bp, Homo sapien
gcaaagaaacactccttgaagtctg

SEQ ID NO: 3945503 - DNA, 25 bp, Homo sapien
ttcacagcccaatccaagtacggcg

SEQ ID NO: 3945504 - DNA, 25 bp, Homo sapien
ccacagacgtgcacctctgtcctgg

SEQ ID NO: 3945505 - DNA, 25 bp, Homo sapien
gatccccagagatgtgcacctccat

SEQ ID NO: 3945506 - DNA, 25 bp, Homo sapien
ctgggatccccagagatgtgcacct

SEQ ID NO: 3945507 - DNA, 25 bp, Homo sapien
gcatccccacagacgtgcacctctg

SEQ ID NO: 3945508 - DNA, 25 bp, Homo sapien
acacagacgctcagcacctcctgat

SEQ ID NO: 3945509 - DNA, 25 bp, Homo sapien
tcctgatcccggagaggagacagcg

SEQ ID NO: 3945510 - DNA, 25 bp, Homo sapien
gcgtggacacagacgctcagcacct

SEQ ID NO: 3945511 - DNA, 25 bp, Homo sapien
cgtggacacagacgctcagcacctc

SEQ ID NO: 3945512 - DNA, 25 bp, Homo sapien
cactgtgccattgctggcccgggtc

SEQ ID NO: 3945513 - DNA, 25 bp, Homo sapien
gctggcccgggtctgcagtttctca

SEQ ID NO: 3945514 - DNA, 25 bp, Homo sapien
aagcgccacgagtgcccgtctgggc

SEQ ID NO: 3945515 - DNA, 25 bp, Homo sapien
acactgactgcaagcgccacgagtg

SEQ ID NO: 3945516 - DNA, 25 bp, Homo sapien
cgctggcctcttcggcagtggcgtc

SEQ ID NO: 3945517 - DNA, 25 bp, Homo sapien
ctggcctcttcggcagtggcgtcac

SEQ ID NO: 3945518 - DNA, 25 bp, Homo sapien
cacgctggcctcttcggcagtggcg

SEQ ID NO: 3945519 - DNA, 25 bp, Homo sapien
tggcctcttcggcagtggcgtcaca

SEQ ID NO: 3945520 - DNA, 25 bp, Homo sapien
aagctctgtcctccgagttccattt

SEQ ID NO: 3945521 - DNA, 25 bp, Homo sapien
tgggagctgccacgtgtcctgacgt

SEQ ID NO: 3945522 - DNA, 25 bp, Homo sapien
ggagctcacgctgcgggtccagcat

SEQ ID NO: 3945523 - DNA, 25 bp, Homo sapien
ggattcatacgagacgccgtcgaca

SEQ ID NO: 3945524 - DNA, 25 bp, Homo sapien
gtggacgcagccagccggggctcac

SEQ ID NO: 3945525 - DNA, 25 bp, Homo sapien
agtggacgcagccagccggggctca

SEQ ID NO: 3945526 - DNA, 25 bp, Homo sapien
gtacgcgttaccacgagcctctgtt

SEQ ID NO: 3945527 - DNA, 25 bp, Homo sapien
tgtacgcgttaccacgagcctctgt

SEQ ID NO: 3945528 - DNA, 25 bp, Homo sapien
ctgtacgcgttaccacgagcctctg

SEQ ID NO: 3945529 - DNA, 25 bp, Homo sapien
cgagtgacggagtgtctacactgtt

SEQ ID NO: 3945530 - DNA, 25 bp, Homo sapien
cggagtgtctacactgtttatttgg

SEQ ID NO: 3945531 - DNA, 25 bp, Homo sapien
tagcgagtgacggagtgtctacact

SEQ ID NO: 3945532 - DNA, 25 bp, Homo sapien
tggccgtagcgagtgacggagtgtc

SEQ ID NO: 3945533 - DNA, 25 bp, Homo sapien
gtgacaggttgcgatcacagtggct

SEQ ID NO: 3945534 - DNA, 25 bp, Homo sapien
gacaggttgcgatcacagtggctgc

SEQ ID NO: 3945535 - DNA, 25 bp, Homo sapien
aggttgcgatcacagtggctgccgt

SEQ ID NO: 3945536 - DNA, 25 bp, Homo sapien
acaggttgcgatcacagtggctgcc

SEQ ID NO: 3945537 - DNA, 25 bp, Homo sapien
ccaagtgacagagtgtgatccaagg

SEQ ID NO: 3945538 - DNA, 25 bp, Homo sapien
cagagtgccatctgagtggctgccg

SEQ ID NO: 3945539 - DNA, 25 bp, Homo sapien
ctgtagtgagtgacgggatgtgatc

SEQ ID NO: 3945540 - DNA, 25 bp, Homo sapien
gtgacagagtgccatctgagtggct

SEQ ID NO: 3945541 - DNA, 25 bp, Homo sapien
ctgcttccctgtgctgaacgtggcc

SEQ ID NO: 3945542 - DNA, 25 bp, Homo sapien
gcttccctgtgctgaacgtggccct

SEQ ID NO: 3945543 - DNA, 25 bp, Homo sapien
tgcttccctgtgctgaacgtggccc

SEQ ID NO: 3945544 - DNA, 25 bp, Homo sapien
cccagccgggtcttgcaggaaggac

SEQ ID NO: 3945545 - DNA, 25 bp, Homo sapien
caggaaggacagctgatttattctc

SEQ ID NO: 3945546 - DNA, 25 bp, Homo sapien
ggaaggacagctgatttattctcac

SEQ ID NO: 3945547 - DNA, 25 bp, Homo sapien
ccccgcccagccgggtcttgcagga

SEQ ID NO: 3945548 - DNA, 25 bp, Homo sapien
actgggctgttgataaggacccgct

SEQ ID NO: 3945549 - DNA, 25 bp, Homo sapien
ggctgttgataaggacccgcttagg

SEQ ID NO: 3945550 - DNA, 25 bp, Homo sapien
tgggctgttgataaggacccgctta

SEQ ID NO: 3945551 - DNA, 25 bp, Homo sapien
tgttgataaggacccgcttaggcat

SEQ ID NO: 3945552 - DNA, 25 bp, Homo sapien
cctgctgcagggagacgcatggcca

SEQ ID NO: 3945553 - DNA, 25 bp, Homo sapien
ccatgggccacgcatggggggagca

SEQ ID NO: 3945554 - DNA, 25 bp, Homo sapien
ctgctgcagggagacgcatggccat

SEQ ID NO: 3945555 - DNA, 25 bp, Homo sapien
cagaggcccgaaggtgggggtgatc

SEQ ID NO: 3945556 - DNA, 25 bp, Homo sapien
tctcggtgtccttgcgaagaggaag

SEQ ID NO: 3945557 - DNA, 25 bp, Homo sapien
aacgctgacgatgggcgggaggaag

SEQ ID NO: 3945558 - DNA, 25 bp, Homo sapien
cacagggaaatagcggcgggtcctt

SEQ ID NO: 3945559 - DNA, 25 bp, Homo sapien
tccttggtctggtgccgctggccgc

SEQ ID NO: 3945560 - DNA, 25 bp, Homo sapien
ctgcgccgtttcccctgcgcctggc

SEQ ID NO: 3945561 - DNA, 25 bp, Homo sapien
tgcgccgtttcccctgcgcctggca

SEQ ID NO: 3945562 - DNA, 25 bp, Homo sapien
cctgcgccgtttcccctgcgcctgg

SEQ ID NO: 3945563 - DNA, 25 bp, Homo sapien
gcgccgtttcccctgcgcctggcac

SEQ ID NO: 3945564 - DNA, 25 bp, Homo sapien
caacagcggcaaacccaagagggca

SEQ ID NO: 3945565 - DNA, 25 bp, Homo sapien
atcgcaggcacctctgcaccaacag

SEQ ID NO: 3945566 - DNA, 25 bp, Homo sapien
agctcggcccggtgaacagcggcca

SEQ ID NO: 3945567 - DNA, 25 bp, Homo sapien
cagcggccaagcacgaggctcgcag

SEQ ID NO: 3945568 - DNA, 25 bp, Homo sapien
ggcagggggagcccgtccatctccc

SEQ ID NO: 3945569 - DNA, 25 bp, Homo sapien
gggagcccgtccatctcccaagcat

SEQ ID NO: 3945570 - DNA, 25 bp, Homo sapien
cctcatggcctcgggccacaggagg

SEQ ID NO: 3945571 - DNA, 25 bp, Homo sapien
ctcatggcctcgggccacaggaggc

SEQ ID NO: 3945572 - DNA, 25 bp, Homo sapien
gtgccgctggtgcatggatgcctga

SEQ ID NO: 3945573 - DNA, 25 bp, Homo sapien
cctggactgtgcccaaggagctggt

SEQ ID NO: 3945574 - DNA, 25 bp, Homo sapien
ttccggcattacaggcagcaaggag

SEQ ID NO: 3945575 - DNA, 25 bp, Homo sapien
gcccgggtgggtcgtggtgccgctg

SEQ ID NO: 3945576 - DNA, 25 bp, Homo sapien
aggggtcccttccataggctgtggt

SEQ ID NO: 3945577 - DNA, 25 bp, Homo sapien
acactcaggggtcccttccataggc

SEQ ID NO: 3945578 - DNA, 25 bp, Homo sapien
ggtcccttccataggctgtggtttc

SEQ ID NO: 3945579 - DNA, 25 bp, Homo sapien
tcaggggtcccttccataggctgtg

SEQ ID NO: 3945580 - DNA, 25 bp, Homo sapien
gtggtaccaggagaccttgtgtgac

SEQ ID NO: 3945581 - DNA, 25 bp, Homo sapien
gaagttccacaatatcagctgatgt

SEQ ID NO: 3945582 - DNA, 25 bp, Homo sapien
cacaatatcagctgatgtggtacca

SEQ ID NO: 3945583 - DNA, 25 bp, Homo sapien
agagcacaaagaagcgggcctggct

SEQ ID NO: 3945584 - DNA, 25 bp, Homo sapien
ggaattatctctggccgagtgaagg

SEQ ID NO: 3945585 - DNA, 25 bp, Homo sapien
caggggaattatctctggccgagtg

SEQ ID NO: 3945586 - DNA, 25 bp, Homo sapien
tatctctggccgagtgaaggccgga

SEQ ID NO: 3945587 - DNA, 25 bp, Homo sapien
agtgaaggccggagagcccacggag

SEQ ID NO: 3945588 - DNA, 25 bp, Homo sapien
ttcaaaggaataagactttgtttgc

SEQ ID NO: 3945589 - DNA, 25 bp, Homo sapien
caaaggaataagactttgtttgcag

SEQ ID NO: 3945590 - DNA, 25 bp, Homo sapien
aaggaataagactttgtttgcagag

SEQ ID NO: 3945591 - DNA, 25 bp, Homo sapien
ctgtttcaaaggaataagactttgt

SEQ ID NO: 3945592 - DNA, 25 bp, Homo sapien
gatgaagcccgtctgctgggtttga

SEQ ID NO: 3945593 - DNA, 25 bp, Homo sapien
tgggtttgacagtcggcaccagtcc

SEQ ID NO: 3945594 - DNA, 25 bp, Homo sapien
atcaggctggctgaccacgtggacg

SEQ ID NO: 3945595 - DNA, 25 bp, Homo sapien
tgagtcaccgaacacatcaggctgg

SEQ ID NO: 3945596 - DNA, 25 bp, Homo sapien
tcagccctgtgggccggcacttgca

SEQ ID NO: 3945597 - DNA, 25 bp, Homo sapien
aactcagccctgtgggccggcactt

SEQ ID NO: 3945598 - DNA, 25 bp, Homo sapien
actcagccctgtgggccggcacttg

SEQ ID NO: 3945599 - DNA, 25 bp, Homo sapien
ctcagccctgtgggccggcacttgc

SEQ ID NO: 3945600 - DNA, 25 bp, Homo sapien
ccgagagagcaacaagcgcatgtcc

SEQ ID NO: 3945601 - DNA, 25 bp, Homo sapien
gtgtcggcttcagccccgagagagc

SEQ ID NO: 3945602 - DNA, 25 bp, Homo sapien
tgtgccctggtgctcatgagtgatg

SEQ ID NO: 3945603 - DNA, 25 bp, Homo sapien
gcatccctgcatcggctgcatgggc

SEQ ID NO: 3945604 - DNA, 25 bp, Homo sapien
gcctccctgtggtgcaacatcttgt

SEQ ID NO: 3945605 - DNA, 25 bp, Homo sapien
tccctgtggtgcaacatcttgtgtg

SEQ ID NO: 3945606 - DNA, 25 bp, Homo sapien
cctgtggtgcaacatcttgtgtgga

SEQ ID NO: 3945607 - DNA, 25 bp, Homo sapien
tggtgcaacatcttgtgtggaagaa

SEQ ID NO: 3945608 - DNA, 25 bp, Homo sapien
ccacatgcaattttgcacaggaggt

SEQ ID NO: 3945609 - DNA, 25 bp, Homo sapien
caggacacagctcgaactgtccaca

SEQ ID NO: 3945610 - DNA, 25 bp, Homo sapien
aggtggaactggtgcaaatggattc

SEQ ID NO: 3945611 - DNA, 25 bp, Homo sapien
gaactgtccacatgcaattttgcac

SEQ ID NO: 3945612 - DNA, 25 bp, Homo sapien
catggctggcagacaaggcttgctg

SEQ ID NO: 3945613 - DNA, 25 bp, Homo sapien
tgagagtgggcttcagccaggttgt

SEQ ID NO: 3945614 - DNA, 25 bp, Homo sapien
ctgtctgcactctgactcggcctgg

SEQ ID NO: 3945615 - DNA, 25 bp, Homo sapien
gctggaaaggagtcttcctgcagag

SEQ ID NO: 3945616 - DNA, 25 bp, Homo sapien
gaaggccccagtaggttcagaacca

SEQ ID NO: 3945617 - DNA, 25 bp, Homo sapien
caggacggtgagaatggtctgcaca

SEQ ID NO: 3945618 - DNA, 25 bp, Homo sapien
gacggtgagaatggtctgcacagcc

SEQ ID NO: 3945619 - DNA, 25 bp, Homo sapien
ggacggtgagaatggtctgcacagc

SEQ ID NO: 3945620 - DNA, 25 bp, Homo sapien
ccaggacggtgagaatggtctgcac

SEQ ID NO: 3945621 - DNA, 25 bp, Homo sapien
taaaactgtaacactgcacgccaag

SEQ ID NO: 3945622 - DNA, 25 bp, Homo sapien
tcagaagactcttgcccaagtgcag

SEQ ID NO: 3945623 - DNA, 25 bp, Homo sapien
taaaatcataggctgtctcaacggc

SEQ ID NO: 3945624 - DNA, 25 bp, Homo sapien
cagccaggctatttgtgtacgtacc

SEQ ID NO: 3945625 - DNA, 25 bp, Homo sapien
agctgcttcacatccgagaatccag

SEQ ID NO: 3945626 - DNA, 25 bp, Homo sapien
cagctgcttcacatccgagaatcca

SEQ ID NO: 3945627 - DNA, 25 bp, Homo sapien
tctgttctggttgggttgtctctcc

SEQ ID NO: 3945628 - DNA, 25 bp, Homo sapien
tgagccagaagctgcgctgggcgtt

SEQ ID NO: 3945629 - DNA, 25 bp, Homo sapien
gtgttccgtgctgcatctgttctgg

SEQ ID NO: 3945630 - DNA, 25 bp, Homo sapien
ctcaaggcctcttttgacccaaact

SEQ ID NO: 3945631 - DNA, 25 bp, Homo sapien
cagggtctgctggtttcggtgtcag

SEQ ID NO: 3945632 - DNA, 25 bp, Homo sapien
tccgagtaactttagaacatgtcgc

SEQ ID NO: 3945633 - DNA, 25 bp, Homo sapien
caggaccacgtctgagatgggaagt

SEQ ID NO: 3945634 - DNA, 25 bp, Homo sapien
gatgggaagtgccttgatggaaaac

SEQ ID NO: 3945635 - DNA, 25 bp, Homo sapien
tcagttctcagaacgccggagtgcc

SEQ ID NO: 3945636 - DNA, 25 bp, Homo sapien
gatgctgagaaaaagtcatctccca

SEQ ID NO: 3945637 - DNA, 25 bp, Homo sapien
agaactcacttagggcctggtgccc

SEQ ID NO: 3945638 - DNA, 25 bp, Homo sapien
ttctctggcaaatcgaagtgtcctc

SEQ ID NO: 3945639 - DNA, 25 bp, Homo sapien
tgttgagtgcatataaaggcaattt

SEQ ID NO: 3945640 - DNA, 25 bp, Homo sapien
tataagctcttacacattttctggt

SEQ ID NO: 3945641 - DNA, 25 bp, Homo sapien
cattggatctatagctcagtttgca

SEQ ID NO: 3945642 - DNA, 25 bp, Homo sapien
aatttcctattgtccactgctagta

SEQ ID NO: 3945643 - DNA, 25 bp, Homo sapien
gaaatcatacgtttaatcacggcgc

SEQ ID NO: 3945644 - DNA, 25 bp, Homo sapien
gagaagagacaaacaaaccgaacgc

SEQ ID NO: 3945645 - DNA, 25 bp, Homo sapien
gcggcattttcatcagcacctggca

SEQ ID NO: 3945646 - DNA, 25 bp, Homo sapien
gtgatcggtcttccctggcacggag

SEQ ID NO: 3945647 - DNA, 25 bp, Homo sapien
agctccagaactctgcagcttcccc

SEQ ID NO: 3945648 - DNA, 25 bp, Homo sapien
gctccagaactctgcagcttccccc

SEQ ID NO: 3945649 - DNA, 25 bp, Homo sapien
tgaagtccgtggagcgtccctaatc

SEQ ID NO: 3945650 - DNA, 25 bp, Homo sapien
tatgtgagtccgtgtctgtgcacgc

SEQ ID NO: 3945651 - DNA, 25 bp, Homo sapien
gcagcacttgcagcgtgacgaggtt

SEQ ID NO: 3945652 - DNA, 25 bp, Homo sapien
tgaggtcgtaaatgcctctcgcacg

SEQ ID NO: 3945653 - DNA, 25 bp, Homo sapien
cctgtgttcgtgtgcatcagtctgg

SEQ ID NO: 3945654 - DNA, 25 bp, Homo sapien
tgtgtctggctatactagtgcgtgc

SEQ ID NO: 3945655 - DNA, 25 bp, Homo sapien
gagtgtctatgcgtgggtgtcccaa

SEQ ID NO: 3945656 - DNA, 25 bp, Homo sapien
cactctgagtgtgcgaatgtgtgag

SEQ ID NO: 3945657 - DNA, 25 bp, Homo sapien
ccgcagtcgaatacactccacagga

SEQ ID NO: 3945658 - DNA, 25 bp, Homo sapien
tgtcggcccagtgatccgggagctc

SEQ ID NO: 3945659 - DNA, 25 bp, Homo sapien
ccgggagctcagagtgtaggtacct

SEQ ID NO: 3945660 - DNA, 25 bp, Homo sapien
tccacaggaagacggaccacaaaca

SEQ ID NO: 3945661 - DNA, 25 bp, Homo sapien
gaacgtgaaggactggctttggaaa

SEQ ID NO: 3945662 - DNA, 25 bp, Homo sapien
cagaccccatgacaagtccaggatc

SEQ ID NO: 3945663 - DNA, 25 bp, Homo sapien
agcataacctaatccagaccccatg

SEQ ID NO: 3945664 - DNA, 25 bp, Homo sapien
aacctaatccagaccccatgacaag

SEQ ID NO: 3945665 - DNA, 25 bp, Homo sapien
aaaggccaagtgtggatgccattag

SEQ ID NO: 3945666 - DNA, 25 bp, Homo sapien
ggccgcagcctccccggtcggcctg

SEQ ID NO: 3945667 - DNA, 25 bp, Homo sapien
agcctccccggtcggcctggcctgc

SEQ ID NO: 3945668 - DNA, 25 bp, Homo sapien
ccagaggcttctggcgaagcccacg

SEQ ID NO: 3945669 - DNA, 25 bp, Homo sapien
gaggcttctggcgaagcccacggcc

SEQ ID NO: 3945670 - DNA, 25 bp, Homo sapien
agctcccggcacgtgatgggagcct

SEQ ID NO: 3945671 - DNA, 25 bp, Homo sapien
atcagctcccggcacgtgatgggag

SEQ ID NO: 3945672 - DNA, 25 bp, Homo sapien
tgccaagatcagctcccggcacgtg

SEQ ID NO: 3945673 - DNA, 25 bp, Homo sapien
ccaagatcagctcccggcacgtgat

SEQ ID NO: 3945674 - DNA, 25 bp, Homo sapien
gagcagaggcggtcggaaaaccctg

SEQ ID NO: 3945675 - DNA, 25 bp, Homo sapien
agcagaggcggtcggaaaaccctgg

SEQ ID NO: 3945676 - DNA, 25 bp, Homo sapien
ggcccgctgcgctttgggagcaccc

SEQ ID NO: 3945677 - DNA, 25 bp, Homo sapien
ccgcgcccgacactgaggtctcggt

SEQ ID NO: 3945678 - DNA, 25 bp, Homo sapien
cagaagccccgtgtgcgactttgac

SEQ ID NO: 3945679 - DNA, 25 bp, Homo sapien
gctgcgctttgggagcacccgcgcc

SEQ ID NO: 3945680 - DNA, 25 bp, Homo sapien
aacacggagcggcttgcacacatgc

SEQ ID NO: 3945681 - DNA, 25 bp, Homo sapien
tttccaacacggagcggcttgcaca

SEQ ID NO: 3945682 - DNA, 25 bp, Homo sapien
acggagcggcttgcacacatgcagc

SEQ ID NO: 3945683 - DNA, 25 bp, Homo sapien
ttccaacacggagcggcttgcacac

SEQ ID NO: 3945684 - DNA, 25 bp, Homo sapien
tctgcatttttatcagcgagaattt

SEQ ID NO: 3945685 - DNA, 25 bp, Homo sapien
gcatttttatcagcgagaattttgc

SEQ ID NO: 3945686 - DNA, 25 bp, Homo sapien
tgttaatagaacgtgtgttctcatg

SEQ ID NO: 3945687 - DNA, 25 bp, Homo sapien
gaattttgctgttaatagaacgtgt

SEQ ID NO: 3945688 - DNA, 25 bp, Homo sapien
tggtgcgtgcagagaaactactccc

SEQ ID NO: 3945689 - DNA, 25 bp, Homo sapien
ggtcttgcaggcagacgacaccact

SEQ ID NO: 3945690 - DNA, 25 bp, Homo sapien
cccaaagccataggcctgggagctg

SEQ ID NO: 3945691 - DNA, 25 bp, Homo sapien
tagcggacgcgatttcttccctggt

SEQ ID NO: 3945692 - DNA, 25 bp, Homo sapien
ttggcctcctctgacgttacgaaac

SEQ ID NO: 3945693 - DNA, 25 bp, Homo sapien
gacagaagaacagctgacacttccc

SEQ ID NO: 3945694 - DNA, 25 bp, Homo sapien
tggcctcctctgacgttacgaaacc

SEQ ID NO: 3945695 - DNA, 25 bp, Homo sapien
gaacagctgacacttccctttcagc

SEQ ID NO: 3945696 - DNA, 25 bp, Homo sapien
tcagcgtgcgattacaacacagcca

SEQ ID NO: 3945697 - DNA, 25 bp, Homo sapien
tgtattctgagaacaggcggcttgc

SEQ ID NO: 3945698 - DNA, 25 bp, Homo sapien
gagagccgcgccttgaagcccatca

SEQ ID NO: 3945699 - DNA, 25 bp, Homo sapien
tgtgagatcagcgtgcgattacaac

SEQ ID NO: 3945700 - DNA, 25 bp, Homo sapien
cagcctcagagcagattatcagtgt

SEQ ID NO: 3945701 - DNA, 25 bp, Homo sapien
gggcccacgaacacagctataatta

SEQ ID NO: 3945702 - DNA, 25 bp, Homo sapien
catggattttcgcaaaaccacccag

SEQ ID NO: 3945703 - DNA, 25 bp, Homo sapien
ataattagcagcacagtcccggtgc

SEQ ID NO: 3945704 - DNA, 25 bp, Homo sapien
tcagctgcggtctgacatctcctgc

SEQ ID NO: 3945705 - DNA, 25 bp, Homo sapien
cctcctcgtaggaaaccagcagggc

SEQ ID NO: 3945706 - DNA, 25 bp, Homo sapien
gcccttgaccgtgaggtcctcattc

SEQ ID NO: 3945707 - DNA, 25 bp, Homo sapien
cctgccaggtcacggtggaatggga

SEQ ID NO: 3945708 - DNA, 25 bp, Homo sapien
tggcgccttctctggttgcagaccg

SEQ ID NO: 3945709 - DNA, 25 bp, Homo sapien
cgtggcgccttctctggttgcagac

SEQ ID NO: 3945710 - DNA, 25 bp, Homo sapien
gcgtggcgccttctctggttgcaga

SEQ ID NO: 3945711 - DNA, 25 bp, Homo sapien
gtggcgccttctctggttgcagacc

SEQ ID NO: 3945712 - DNA, 25 bp, Homo sapien
ggacaggtgggtgcagcttatccac

SEQ ID NO: 3945713 - DNA, 25 bp, Homo sapien
tgagaggtgctggctgtgctcctgg

SEQ ID NO: 3945714 - DNA, 25 bp, Homo sapien
ggggacaggtgggtgcagcttatcc

SEQ ID NO: 3945715 - DNA, 25 bp, Homo sapien
acaggtgggtgcagcttatccacgg

SEQ ID NO: 3945716 - DNA, 25 bp, Homo sapien
tatggggttatgagacacctctggc

SEQ ID NO: 3945717 - DNA, 25 bp, Homo sapien
tggggttatgagacacctctggcca

SEQ ID NO: 3945718 - DNA, 25 bp, Homo sapien
ctatggggttatgagacacctctgg

SEQ ID NO: 3945719 - DNA, 25 bp, Homo sapien
gggttatgagacacctctggccact

SEQ ID NO: 3945720 - DNA, 25 bp, Homo sapien
gcacctcccgctgctctatggggtt

SEQ ID NO: 3945721 - DNA, 25 bp, Homo sapien
gcacctccggctgctctatggggtt

SEQ ID NO: 3945722 - DNA, 25 bp, Homo sapien
tgctctatggggttaccgggcacct

SEQ ID NO: 3945723 - DNA, 25 bp, Homo sapien
tgctctatggggttacggggcacct

SEQ ID NO: 3945724 - DNA, 25 bp, Homo sapien
tacggagcgcctccggctgctctgt

SEQ ID NO: 3945725 - DNA, 25 bp, Homo sapien
ggttacggagcgcctccggctgctc

SEQ ID NO: 3945726 - DNA, 25 bp, Homo sapien
tatggggttacggagcgcctccggc

SEQ ID NO: 3945727 - DNA, 25 bp, Homo sapien
tggggttacggagcgcctccggctg

SEQ ID NO: 3945728 - DNA, 25 bp, Homo sapien
tatgtggcttatggggcatctccag

SEQ ID NO: 3945729 - DNA, 25 bp, Homo sapien
atctccagctgctctatgaggttac

SEQ ID NO: 3945730 - DNA, 25 bp, Homo sapien
gctctatgtggcttatggggcatct

SEQ ID NO: 3945731 - DNA, 25 bp, Homo sapien
tctccagctgctctatgaggttacg

SEQ ID NO: 3945732 - DNA, 25 bp, Homo sapien
tcctggtccacgggtgtcacaatcc

SEQ ID NO: 3945733 - DNA, 25 bp, Homo sapien
ctggtccacgggtgtcacaatccca

SEQ ID NO: 3945734 - DNA, 25 bp, Homo sapien
ggtccacgggtgtcacaatcccact

SEQ ID NO: 3945735 - DNA, 25 bp, Homo sapien
ccacgggtgtcacaatcccactctg

SEQ ID NO: 3945736 - DNA, 25 bp, Homo sapien
ctctgcacggttttccacgaagagg

SEQ ID NO: 3945737 - DNA, 25 bp, Homo sapien
tccctctgcacggttttccacgaag

SEQ ID NO: 3945738 - DNA, 25 bp, Homo sapien
tgcacggttttccacgaagagggac

SEQ ID NO: 3945739 - DNA, 25 bp, Homo sapien
gcctccctctgcacggttttccacg

SEQ ID NO: 3945740 - DNA, 25 bp, Homo sapien
acccacagggcgacctgcgcagtgg

SEQ ID NO: 3945741 - DNA, 25 bp, Homo sapien
agcgcccatgccaggcgccgtgtgt

SEQ ID NO: 3945742 - DNA, 25 bp, Homo sapien
tggggccctcatcccgttgctcgga

SEQ ID NO: 3945743 - DNA, 25 bp, Homo sapien
tgtgtgctgtctcacgggacccaca

SEQ ID NO: 3945744 - DNA, 25 bp, Homo sapien
aggctggagccagcacaaatgccat

SEQ ID NO: 3945745 - DNA, 25 bp, Homo sapien
ggttcctgccgcctgacgggctgct

SEQ ID NO: 3945746 - DNA, 25 bp, Homo sapien
gatcatcgttaagtcctcccagggc

SEQ ID NO: 3945747 - DNA, 25 bp, Homo sapien
gagggttcccgagagcagcttttta

SEQ ID NO: 3945748 - DNA, 25 bp, Homo sapien
tgctcatcagccctcataagctcct

SEQ ID NO: 3945749 - DNA, 25 bp, Homo sapien
ttggtgcgttccacgttccgctcct

SEQ ID NO: 3945750 - DNA, 25 bp, Homo sapien
cccacccgacttgcccactccttgg

SEQ ID NO: 3945751 - DNA, 25 bp, Homo sapien
gctcctttcccacccgacttgccca

SEQ ID NO: 3945752 - DNA, 25 bp, Homo sapien
cagatgcccactccttggtacgttc

SEQ ID NO: 3945753 - DNA, 25 bp, Homo sapien
cgggtggggactgcgggacagatgc

SEQ ID NO: 3945754 - DNA, 25 bp, Homo sapien
gatgcccactccttggtacgttcca

SEQ ID NO: 3945755 - DNA, 25 bp, Homo sapien
gacagatgcccactccttggtacgt

SEQ ID NO: 3945756 - DNA, 25 bp, Homo sapien
cagctcccgctgtgagagcccgggc

SEQ ID NO: 3945757 - DNA, 25 bp, Homo sapien
tgacagctcccgctgtgagagcccg

SEQ ID NO: 3945758 - DNA, 25 bp, Homo sapien
cagcatgctgacagctcccgctgtg

SEQ ID NO: 3945759 - DNA, 25 bp, Homo sapien
catgctgacagctcccgctgtgaga

SEQ ID NO: 3945760 - DNA, 25 bp, Homo sapien
cagacagaggctcccccgggccgtg

SEQ ID NO: 3945761 - DNA, 25 bp, Homo sapien
ggaggctgagccagcgcctgaggat

SEQ ID NO: 3945762 - DNA, 25 bp, Homo sapien
aaggagcagacagaggctcccccgg

SEQ ID NO: 3945763 - DNA, 25 bp, Homo sapien
ctggaaggagcagacagaggctccc

SEQ ID NO: 3945764 - DNA, 25 bp, Homo sapien
gaacagtgagtctttcggaagcctc

SEQ ID NO: 3945765 - DNA, 25 bp, Homo sapien
gttcatccagccttcacacggcctc

SEQ ID NO: 3945766 - DNA, 25 bp, Homo sapien
tctttcggaagcctcgtccttgaac

SEQ ID NO: 3945767 - DNA, 25 bp, Homo sapien
tcagttccccacacaggaacagtga

SEQ ID NO: 3945768 - DNA, 25 bp, Homo sapien
caaagaagttggtgctacgttcaca

SEQ ID NO: 3945769 - DNA, 25 bp, Homo sapien
gcagtgatctcagaagatcaaagaa

SEQ ID NO: 3945770 - DNA, 25 bp, Homo sapien
ggttcagaagtccatggcccttcca

SEQ ID NO: 3945771 - DNA, 25 bp, Homo sapien
agacccagcggcttttgtacacagg

SEQ ID NO: 3945772 - DNA, 25 bp, Homo sapien
tttttcagcaacaagtcctcatggg

SEQ ID NO: 3945773 - DNA, 25 bp, Homo sapien
tgcgaaatgaaaccacgggatccct

SEQ ID NO: 3945774 - DNA, 25 bp, Homo sapien
ttatctgatgggaacgaggcctggc

SEQ ID NO: 3945775 - DNA, 25 bp, Homo sapien
tacagttcaaggagtgcgacagcgc

SEQ ID NO: 3945776 - DNA, 25 bp, Homo sapien
attccaacccgagtctagtataaca

SEQ ID NO: 3945777 - DNA, 25 bp, Homo sapien
tgacataattttaaacggccccgca

SEQ ID NO: 3945778 - DNA, 25 bp, Homo sapien
ccaacccgagtctagtataacatca

SEQ ID NO: 3945779 - DNA, 25 bp, Homo sapien
tccaacccgagtctagtataacatc

SEQ ID NO: 3945780 - DNA, 25 bp, Homo sapien
ggtgagtgggtgctgccggccacat

SEQ ID NO: 3945781 - DNA, 25 bp, Homo sapien
gtgctgccggccacatggcagcgtg

SEQ ID NO: 3945782 - DNA, 25 bp, Homo sapien
catgcagttcagcagacacagggtg

SEQ ID NO: 3945783 - DNA, 25 bp, Homo sapien
gcagttcagcagacacagggtgagt

SEQ ID NO: 3945784 - DNA, 25 bp, Homo sapien
ggaccccacgttctgcatattagtg

SEQ ID NO: 3945785 - DNA, 25 bp, Homo sapien
ggttgatgcatctgcgtctctgtgg

SEQ ID NO: 3945786 - DNA, 25 bp, Homo sapien
gggttggcagatacccactctccag

SEQ ID NO: 3945787 - DNA, 25 bp, Homo sapien
cttctctcgctctctggttgatgca

SEQ ID NO: 3945788 - DNA, 25 bp, Homo sapien
gctgtctgcgacgtccagggttggg

SEQ ID NO: 3945789 - DNA, 25 bp, Homo sapien
caggtggtgctgtctgcgacgtcca

SEQ ID NO: 3945790 - DNA, 25 bp, Homo sapien
cgctgggctcgagtgcctttcctga

SEQ ID NO: 3945791 - DNA, 25 bp, Homo sapien
gccggttgcagagcgctgggctcga

SEQ ID NO: 3945792 - DNA, 25 bp, Homo sapien
caaagacacggatccatttgaccgc

SEQ ID NO: 3945793 - DNA, 25 bp, Homo sapien
tcagtccccgaatgtctgctcacag

SEQ ID NO: 3945794 - DNA, 25 bp, Homo sapien
atttgaccgcctttttcacgcttgg

SEQ ID NO: 3945795 - DNA, 25 bp, Homo sapien
tcacgcttggtcctatcaggcctgg

SEQ ID NO: 3945796 - DNA, 25 bp, Homo sapien
cacctgggacatgggatactggata

SEQ ID NO: 3945797 - DNA, 25 bp, Homo sapien
gctactactggctgacctgttgaaa

SEQ ID NO: 3945798 - DNA, 25 bp, Homo sapien
ttgaagtggagaaagggcacctgcc

SEQ ID NO: 3945799 - DNA, 25 bp, Homo sapien
tgtacccgtctcgtcatctgcaatg

SEQ ID NO: 3945800 - DNA, 25 bp, Homo sapien
agaacgcaagttccatgaggctggg

SEQ ID NO: 3945801 - DNA, 25 bp, Homo sapien
aatgtcatccgagttcatcagaacc

SEQ ID NO: 3945802 - DNA, 25 bp, Homo sapien
actgccagaacgcaagttccatgag

SEQ ID NO: 3945803 - DNA, 25 bp, Homo sapien
aaccctctaaaatgtcatccgagtt

SEQ ID NO: 3945804 - DNA, 25 bp, Homo sapien
gtgggtggccgcgaggcctggccgc

SEQ ID NO: 3945805 - DNA, 25 bp, Homo sapien
tggccgcacggcctcattcctgcga

SEQ ID NO: 3945806 - DNA, 25 bp, Homo sapien
acggcctcattcctgcgactttctt

SEQ ID NO: 3945807 - DNA, 25 bp, Homo sapien
tcctgcgactttcttctgccttgtg

SEQ ID NO: 3945808 - DNA, 25 bp, Homo sapien
tctccgccgtgtttctgtcttcctg

SEQ ID NO: 3945809 - DNA, 25 bp, Homo sapien
ttcacttgatcctctccgccgtgtt

SEQ ID NO: 3945810 - DNA, 25 bp, Homo sapien
atcctctccgccgtgtttctgtctt

SEQ ID NO: 3945811 - DNA, 25 bp, Homo sapien
cctctccgccgtgtttctgtcttcc

SEQ ID NO: 3945812 - DNA, 25 bp, Homo sapien
gtggcagcgtgctcgagcctctccg

SEQ ID NO: 3945813 - DNA, 25 bp, Homo sapien
gtgctcgagcctctccggaccgcat

SEQ ID NO: 3945814 - DNA, 25 bp, Homo sapien
tccggaccgcatcccagctgttaga

SEQ ID NO: 3945815 - DNA, 25 bp, Homo sapien
cggaccgcatcccagctgttagaac

SEQ ID NO: 3945816 - DNA, 25 bp, Homo sapien
gttggtttgggatgagccgggcgtc

SEQ ID NO: 3945817 - DNA, 25 bp, Homo sapien
ctggttgtcactcgtagatcggcct

SEQ ID NO: 3945818 - DNA, 25 bp, Homo sapien
gatcggcctcggaaagctccaggaa

SEQ ID NO: 3945819 - DNA, 25 bp, Homo sapien
aagctccaggaagttggtttgggat

SEQ ID NO: 3945820 - DNA, 25 bp, Homo sapien
cagctgtcgctaatgaaacgctcct

SEQ ID NO: 3945821 - DNA, 25 bp, Homo sapien
ccccagctgtcgctaatgaaacgct

SEQ ID NO: 3945822 - DNA, 25 bp, Homo sapien
ctgtcgctaatgaaacgctcctcca

SEQ ID NO: 3945823 - DNA, 25 bp, Homo sapien
gctgtcgctaatgaaacgctcctcc

SEQ ID NO: 3945824 - DNA, 25 bp, Homo sapien
tcctcgaagaaaatgggcgtctccc

SEQ ID NO: 3945825 - DNA, 25 bp, Homo sapien
gtaggtcagcgccagaggaaatcct

SEQ ID NO: 3945826 - DNA, 25 bp, Homo sapien
ccgcagtcagccctgtgtgcccgct

SEQ ID NO: 3945827 - DNA, 25 bp, Homo sapien
ttgctgagcacagaaccgcagtcag

SEQ ID NO: 3945828 - DNA, 25 bp, Homo sapien
gtgatatctacacagtactgaccaa

SEQ ID NO: 3945829 - DNA, 25 bp, Homo sapien
cggcgtggtgcagcactaaccgtgc

SEQ ID NO: 3945830 - DNA, 25 bp, Homo sapien
gtgtcggcgtggtgcagcactaacc

SEQ ID NO: 3945831 - DNA, 25 bp, Homo sapien
acacagtactgaccaagtgtcggca

SEQ ID NO: 3945832 - DNA, 25 bp, Homo sapien
agtgtggcacagcactaaccgtgca

SEQ ID NO: 3945833 - DNA, 25 bp, Homo sapien
tgcactgatatctacaaggtactga

SEQ ID NO: 3945834 - DNA, 25 bp, Homo sapien
tctacaaggtactgactgagcgtca

SEQ ID NO: 3945835 - DNA, 25 bp, Homo sapien
taaccgtgcactgatatctacaagg

SEQ ID NO: 3945836 - DNA, 25 bp, Homo sapien
acacggtactgaccgagtgtcagca

SEQ ID NO: 3945837 - DNA, 25 bp, Homo sapien
tctacacggtactgaccgagtgtca

SEQ ID NO: 3945838 - DNA, 25 bp, Homo sapien
cacggtactgaccgagtgtcagcat

SEQ ID NO: 3945839 - DNA, 25 bp, Homo sapien
tacacggtactgaccgagtgtcagc

SEQ ID NO: 3945840 - DNA, 25 bp, Homo sapien
ccgtgcactgatatctacacagtac

SEQ ID NO: 3945841 - DNA, 25 bp, Homo sapien
ctgtggcacagcactaaccgtgcac

SEQ ID NO: 3945842 - DNA, 25 bp, Homo sapien
tgcactgatatctacacagtactga

SEQ ID NO: 3945843 - DNA, 25 bp, Homo sapien
ctaaccgtgcactgatatctacaca

SEQ ID NO: 3945844 - DNA, 25 bp, Homo sapien
ctgatatctacacgatactgactgt

SEQ ID NO: 3945845 - DNA, 25 bp, Homo sapien
tgatatctacacgatactgactgtc

SEQ ID NO: 3945846 - DNA, 25 bp, Homo sapien
gatatctacacgatactgactgtca

SEQ ID NO: 3945847 - DNA, 25 bp, Homo sapien
tgctgacatcggcatgggactgacc

SEQ ID NO: 3945848 - DNA, 25 bp, Homo sapien
tactgatcaagcatcagcgtggcac

SEQ ID NO: 3945849 - DNA, 25 bp, Homo sapien
gtggcacagcaccaacaagtgcacc

SEQ ID NO: 3945850 - DNA, 25 bp, Homo sapien
gtggcacagcaccaacccgtgtgct

SEQ ID NO: 3945851 - DNA, 25 bp, Homo sapien
actgagcattggtgtggcacagcac

SEQ ID NO: 3945852 - DNA, 25 bp, Homo sapien
acagcactaacctgtgcaccgacat

SEQ ID NO: 3945853 - DNA, 25 bp, Homo sapien
actaacctgtgcaccgacatcagca

SEQ ID NO: 3945854 - DNA, 25 bp, Homo sapien
cattggtgtggcacagcactaacct

SEQ ID NO: 3945855 - DNA, 25 bp, Homo sapien
gcacagtactgaccaagcgtcagca

SEQ ID NO: 3945856 - DNA, 25 bp, Homo sapien
ctgaccaagcgtcagcatggcacag

SEQ ID NO: 3945857 - DNA, 25 bp, Homo sapien
atcacccagggctgacttttgacat

SEQ ID NO: 3945858 - DNA, 25 bp, Homo sapien
tcatcacccagggctgacttttgac

SEQ ID NO: 3945859 - DNA, 25 bp, Homo sapien
cactcatcacccagggctgactttt

SEQ ID NO: 3945860 - DNA, 25 bp, Homo sapien
acccagggctgacttttgacataaa

SEQ ID NO: 3945861 - DNA, 25 bp, Homo sapien
ttctgcaaggtgagcatctgaagga

SEQ ID NO: 3945862 - DNA, 25 bp, Homo sapien
tccacagcgggggtcaaaaggccag

SEQ ID NO: 3945863 - DNA, 25 bp, Homo sapien
tgaaggatgattacctccacagcgg

SEQ ID NO: 3945864 - DNA, 25 bp, Homo sapien
caaggtgagcatctgaaggatgatt

SEQ ID NO: 3945865 - DNA, 25 bp, Homo sapien
aaggcccttgtgccattcataaact

SEQ ID NO: 3945866 - DNA, 25 bp, Homo sapien
aggcccttgtgccattcataaactg

SEQ ID NO: 3945867 - DNA, 25 bp, Homo sapien
ggcccttgtgccattcataaactga

SEQ ID NO: 3945868 - DNA, 25 bp, Homo sapien
taagggacccaacctctgaaaggca

SEQ ID NO: 3945869 - DNA, 25 bp, Homo sapien
ccttcagccgtcagattggagttca

SEQ ID NO: 3945870 - DNA, 25 bp, Homo sapien
gattgctccgacaatgacaggctgc

SEQ ID NO: 3945871 - DNA, 25 bp, Homo sapien
gctcacagcagggattaacagacag

SEQ ID NO: 3945872 - DNA, 25 bp, Homo sapien
ttacagagatgacagtccacaccag

SEQ ID NO: 3945873 - DNA, 25 bp, Homo sapien
tgaattacagagatgacagtccaca

SEQ ID NO: 3945874 - DNA, 25 bp, Homo sapien
ctgaattacagagatgacagtccac

SEQ ID NO: 3945875 - DNA, 25 bp, Homo sapien
cagagatgacagtccacaccagcat

SEQ ID NO: 3945876 - DNA, 25 bp, Homo sapien
cagagatgacagtccacaccagcac

SEQ ID NO: 3945877 - DNA, 25 bp, Homo sapien
cagcatcatcttaattacagagaca

SEQ ID NO: 3945878 - DNA, 25 bp, Homo sapien
catcttaattacagagacagcccac

SEQ ID NO: 3945879 - DNA, 25 bp, Homo sapien
ctacaccagcatcatcttaattaca

SEQ ID NO: 3945880 - DNA, 25 bp, Homo sapien
tcttaattacagagacagcccacac

SEQ ID NO: 3945881 - DNA, 25 bp, Homo sapien
tggccacgcccttggtcaccatggc

SEQ ID NO: 3945882 - DNA, 25 bp, Homo sapien
ggtcaccatggcgataaaatggtcc

SEQ ID NO: 3945883 - DNA, 25 bp, Homo sapien
caccatggcgataaaatggtccaac

SEQ ID NO: 3945884 - DNA, 25 bp, Homo sapien
gccacgcccttggtcaccatggcga

SEQ ID NO: 3945885 - DNA, 25 bp, Homo sapien
gatcgcaggtccctctcctcatggg

SEQ ID NO: 3945886 - DNA, 25 bp, Homo sapien
caggctgggcccgaagatctgggag

SEQ ID NO: 3945887 - DNA, 25 bp, Homo sapien
agctccatggaacgcgccctggaga

SEQ ID NO: 3945888 - DNA, 25 bp, Homo sapien
tgccaccggctgtccaaacctgaga

SEQ ID NO: 3945889 - DNA, 25 bp, Homo sapien
tgggggctttgcagttggtataccc

SEQ ID NO: 3945890 - DNA, 25 bp, Homo sapien
gggggctttgcagttggtataccca

SEQ ID NO: 3945891 - DNA, 25 bp, Homo sapien
ggggctttgcagttggtatacccac

SEQ ID NO: 3945892 - DNA, 25 bp, Homo sapien
tgtttgcatgatggccgtctggatg

SEQ ID NO: 3945893 - DNA, 25 bp, Homo sapien
tgagggccaagctgtttgcatgatg

SEQ ID NO: 3945894 - DNA, 25 bp, Homo sapien
ctccctcgcatgctttccaagggag

SEQ ID NO: 3945895 - DNA, 25 bp, Homo sapien
ccttgcacgcgctgttcgggatttg

SEQ ID NO: 3945896 - DNA, 25 bp, Homo sapien
tcctgtgtggctccgcccaagaaag

SEQ ID NO: 3945897 - DNA, 25 bp, Homo sapien
gtgtggctccgcccaagaaagtctc

SEQ ID NO: 3945898 - DNA, 25 bp, Homo sapien
cttccgaggcctcggactgcctcct

SEQ ID NO: 3945899 - DNA, 25 bp, Homo sapien
tcctcccggggcccaatccttgcac

SEQ ID NO: 3945900 - DNA, 25 bp, Homo sapien
ccagcagcttggtctccaccagagt

SEQ ID NO: 3945901 - DNA, 25 bp, Homo sapien
gcagcttggtctccaccagagtcag

SEQ ID NO: 3945902 - DNA, 25 bp, Homo sapien
ttggtctccaccagagtcagggtcc

SEQ ID NO: 3945903 - DNA, 25 bp, Homo sapien
tggtctccaccagagtcagggtccc

SEQ ID NO: 3945904 - DNA, 25 bp, Homo sapien
tgctttgaattatcccccgctgttg

SEQ ID NO: 3945905 - DNA, 25 bp, Homo sapien
taatgctccatgagtggaggcctgg

SEQ ID NO: 3945906 - DNA, 25 bp, Homo sapien
gcttttgaatggctgcataatgctc

SEQ ID NO: 3945907 - DNA, 25 bp, Homo sapien
gacatttggggggtgcctgttatca

SEQ ID NO: 3945908 - DNA, 25 bp, Homo sapien
ggtgaggccttatgagcagaatccg

SEQ ID NO: 3945909 - DNA, 25 bp, Homo sapien
ccttatgagcagaatccgagggtca

SEQ ID NO: 3945910 - DNA, 25 bp, Homo sapien
gaatccgagggtcatatccaatcag

SEQ ID NO: 3945911 - DNA, 25 bp, Homo sapien
tgaggccacaccaatcaggtgaggc

SEQ ID NO: 3945912 - DNA, 25 bp, Homo sapien
tcatgtccaatcagatgaggtctta

SEQ ID NO: 3945913 - DNA, 25 bp, Homo sapien
catgtccaatcagatgaggtcttac

SEQ ID NO: 3945914 - DNA, 25 bp, Homo sapien
gatacggtttgatcagagcatactg

SEQ ID NO: 3945915 - DNA, 25 bp, Homo sapien
tgtgctggagccatgagatacggtt

SEQ ID NO: 3945916 - DNA, 25 bp, Homo sapien
cgtagctcccgccatctgtgctgga

SEQ ID NO: 3945917 - DNA, 25 bp, Homo sapien
acacggccgggacactgacgtgaca

SEQ ID NO: 3945918 - DNA, 25 bp, Homo sapien
gacagcgttgtaagcatgccgttct

SEQ ID NO: 3945919 - DNA, 25 bp, Homo sapien
ggccgtggctgggtggcatgagtac

SEQ ID NO: 3945920 - DNA, 25 bp, Homo sapien
tggcatgagtactgacagcgttgta

SEQ ID NO: 3945921 - DNA, 25 bp, Homo sapien
ctgacagcgttgtaagcatgccgtt

SEQ ID NO: 3945922 - DNA, 25 bp, Homo sapien
tgaggctcatgtgccatccacactg

SEQ ID NO: 3945923 - DNA, 25 bp, Homo sapien
tggctcctgactgcacaacatgggc

SEQ ID NO: 3945924 - DNA, 25 bp, Homo sapien
aatccatgatgtgggatcaccgccc

SEQ ID NO: 3945925 - DNA, 25 bp, Homo sapien
gcagctgtatgtggccctgtcagga

SEQ ID NO: 3945926 - DNA, 25 bp, Homo sapien
tcgcagctgctgtcgggaccacctg

SEQ ID NO: 3945927 - DNA, 25 bp, Homo sapien
gaccacctggagtgtgccggtgagg

SEQ ID NO: 3945928 - DNA, 25 bp, Homo sapien
gggaccacctggagtgtgccggtga

SEQ ID NO: 3945929 - DNA, 25 bp, Homo sapien
tgtcgcagctgctgtcgggaccacc

SEQ ID NO: 3945930 - DNA, 25 bp, Homo sapien
aaggtgcatctaccaaagccaggtg

SEQ ID NO: 3945931 - DNA, 25 bp, Homo sapien
ggtgcatctaccaaagccaggtggc

SEQ ID NO: 3945932 - DNA, 25 bp, Homo sapien
tgaaggtgcatctaccaaagccagg

SEQ ID NO: 3945933 - DNA, 25 bp, Homo sapien
caggtgaaggtgcatctaccaaagc

SEQ ID NO: 3945934 - DNA, 25 bp, Homo sapien
tcaggccaggtgcatcggatcagct

SEQ ID NO: 3945935 - DNA, 25 bp, Homo sapien
ggccgtggcgtttcaggtccagcag

SEQ ID NO: 3945936 - DNA, 25 bp, Homo sapien
cagcagcagagcttcgacggtagcc

SEQ ID NO: 3945937 - DNA, 25 bp, Homo sapien
cacacactgatggtgtcttgcactg

SEQ ID NO: 3945938 - DNA, 25 bp, Homo sapien
ccgccaacgagctcccggcccgcgc

SEQ ID NO: 3945939 - DNA, 25 bp, Homo sapien
gccggccgccgccaacgagctcccg

SEQ ID NO: 3945940 - DNA, 25 bp, Homo sapien
cgccgccaacgagctcccggcccgc

SEQ ID NO: 3945941 - DNA, 25 bp, Homo sapien
ggccgccgccaacgagctcccggcc

SEQ ID NO: 3945942 - DNA, 25 bp, Homo sapien
cggcatccctgctccctatggcggc

SEQ ID NO: 3945943 - DNA, 25 bp, Homo sapien
cacggagtctcctgaaacccatggg

SEQ ID NO: 3945944 - DNA, 25 bp, Homo sapien
cctgctccctatggcggcctccatc

SEQ ID NO: 3945945 - DNA, 25 bp, Homo sapien
cagaaccctctccacaggtcccacg

SEQ ID NO: 3945946 - DNA, 25 bp, Homo sapien
aaagccactgaagcgcacactgtag

SEQ ID NO: 3945947 - DNA, 25 bp, Homo sapien
aaaaggttcctacagcgaagggctg

SEQ ID NO: 3945948 - DNA, 25 bp, Homo sapien
caaacgagcgggatgtaggaaccac

SEQ ID NO: 3945949 - DNA, 25 bp, Homo sapien
gatggaccctaaagatgtgacgctg

SEQ ID NO: 3945950 - DNA, 25 bp, Homo sapien
aggatcagacttgagcctgtggatg

SEQ ID NO: 3945951 - DNA, 25 bp, Homo sapien
tcagacttgagcctgtggatgctgg

SEQ ID NO: 3945952 - DNA, 25 bp, Homo sapien
aaaacgatggccctgaattcgctgt

SEQ ID NO: 3945953 - DNA, 25 bp, Homo sapien
cagggctttgcccaggatcagactt

SEQ ID NO: 3945954 - DNA, 25 bp, Homo sapien
cgcgtggtgcccacgaggtcagctt

SEQ ID NO: 3945955 - DNA, 25 bp, Homo sapien
ccagccgcgtggtgcccacgaggtc

SEQ ID NO: 3945956 - DNA, 25 bp, Homo sapien
agccgcgtggtgcccacgaggtcag

SEQ ID NO: 3945957 - DNA, 25 bp, Homo sapien
ccgcgtggtgcccacgaggtcagct

SEQ ID NO: 3945958 - DNA, 25 bp, Homo sapien
gggagtgaccgcttggccgggcacg

SEQ ID NO: 3945959 - DNA, 25 bp, Homo sapien
gggctggtccgcgtttagaatgtat

SEQ ID NO: 3945960 - DNA, 25 bp, Homo sapien
ttttcttccgctgggagggcactcc

SEQ ID NO: 3945961 - DNA, 25 bp, Homo sapien
gaatgtatttatagaccggccacag

SEQ ID NO: 3945962 - DNA, 25 bp, Homo sapien
ccgtcacactgagagtgggattacg

SEQ ID NO: 3945963 - DNA, 25 bp, Homo sapien
tacacgacagatggtcccgtgtccg

SEQ ID NO: 3945964 - DNA, 25 bp, Homo sapien
tctgctgcctgtaggaagcctgagc

SEQ ID NO: 3945965 - DNA, 25 bp, Homo sapien
gaaaaacgcagcttgaccgtcacac

SEQ ID NO: 3945966 - DNA, 25 bp, Homo sapien
tcagaagggtctcctcccggcctgt

SEQ ID NO: 3945967 - DNA, 25 bp, Homo sapien
cagaagggtctcctcccggcctgtc

SEQ ID NO: 3945968 - DNA, 25 bp, Homo sapien
tgcaggagcgtctttgcctggcctc

SEQ ID NO: 3945969 - DNA, 25 bp, Homo sapien
cttcatctgtggttcacgtttccct

SEQ ID NO: 3945970 - DNA, 25 bp, Homo sapien
cgtttccctttgtccgtggcttgtg

SEQ ID NO: 3945971 - DNA, 25 bp, Homo sapien
gcttgtggtgtcttgcgtgtgtggc

SEQ ID NO: 3945972 - DNA, 25 bp, Homo sapien
tccgtggcttgtggtgtcttgcgtg

SEQ ID NO: 3945973 - DNA, 25 bp, Homo sapien
cctggcttagaggttccggaaagca

SEQ ID NO: 3945974 - DNA, 25 bp, Homo sapien
tgagaggagggactgatgtggagca

SEQ ID NO: 3945975 - DNA, 25 bp, Homo sapien
tggaatggggccttgcactgccgac

SEQ ID NO: 3945976 - DNA, 25 bp, Homo sapien
gcagggacgagcaaactgcttccaa

SEQ ID NO: 3945977 - DNA, 25 bp, Homo sapien
tgagaagaaccaaagcacgggtcct

SEQ ID NO: 3945978 - DNA, 25 bp, Homo sapien
cagcgggggcttcccagcgtggggg

SEQ ID NO: 3945979 - DNA, 25 bp, Homo sapien
taatgagaagaaccaaagcacgggt

SEQ ID NO: 3945980 - DNA, 25 bp, Homo sapien
ggcagggacagcttttgtaatgaga

SEQ ID NO: 3945981 - DNA, 25 bp, Homo sapien
ctcaattagtgcgtcatcggccacg

SEQ ID NO: 3945982 - DNA, 25 bp, Homo sapien
tcaggcagggtactcaattagtgcg

SEQ ID NO: 3945983 - DNA, 25 bp, Homo sapien
ggtactcaattagtgcgtcatcggc

SEQ ID NO: 3945984 - DNA, 25 bp, Homo sapien
cagggtactcaattagtgcgtcatc

SEQ ID NO: 3945985 - DNA, 25 bp, Homo sapien
ccacgtgacttgcaccatcaacagc

SEQ ID NO: 3945986 - DNA, 25 bp, Homo sapien
atgaccacgtgacttgcaccatcaa

SEQ ID NO: 3945987 - DNA, 25 bp, Homo sapien
tgaccacgtgacttgcaccatcaac

SEQ ID NO: 3945988 - DNA, 25 bp, Homo sapien
gaccacgtgacttgcaccatcaaca

SEQ ID NO: 3945989 - DNA, 25 bp, Homo sapien
cctcagctgggtcgccgcacaactt

SEQ ID NO: 3945990 - DNA, 25 bp, Homo sapien
gggtcgccgcacaacttcctgagga

SEQ ID NO: 3945991 - DNA, 25 bp, Homo sapien
gctgggtcgccgcacaacttcctga

SEQ ID NO: 3945992 - DNA, 25 bp, Homo sapien
cccctcagctgggtcgccgcacaac

SEQ ID NO: 3945993 - DNA, 25 bp, Homo sapien
gggcgtcctttacacagcagagtga

SEQ ID NO: 3945994 - DNA, 25 bp, Homo sapien
ctctgtgcggacaggactcagaccc

SEQ ID NO: 3945995 - DNA, 25 bp, Homo sapien
catgtcatgacatacgggactgtcc

SEQ ID NO: 3945996 - DNA, 25 bp, Homo sapien
cacactcatcatgtctgttctcatg

SEQ ID NO: 3945997 - DNA, 25 bp, Homo sapien
ggtggatgcttacacctgccatggg

SEQ ID NO: 3945998 - DNA, 25 bp, Homo sapien
tggatgcttacacctgccatgggga

SEQ ID NO: 3945999 - DNA, 25 bp, Homo sapien
gatgcttacacctgccatggggagg

SEQ ID NO: 3946000 - DNA, 25 bp, Homo sapien
aggtggatgcttacacctgccatgg

SEQ ID NO: 3946001 - DNA, 25 bp, Homo sapien
aagccaagctcttcggcggcgggtt

SEQ ID NO: 3946002 - DNA, 25 bp, Homo sapien
cgccagccttgagggagcctgcaag

SEQ ID NO: 3946003 - DNA, 25 bp, Homo sapien
ttctctggtgtctcgtccagggtgg

SEQ ID NO: 3946004 - DNA, 25 bp, Homo sapien
gcttggtcctcgagctggcgatgcc

SEQ ID NO: 3946005 - DNA, 25 bp, Homo sapien
gccacatccgcagggaagggttttg

SEQ ID NO: 3946006 - DNA, 25 bp, Homo sapien
cccattggtgaatgcgtgcccagcc

SEQ ID NO: 3946007 - DNA, 25 bp, Homo sapien
aagggttttgtgctggccccatgca

SEQ ID NO: 3946008 - DNA, 25 bp, Homo sapien
cactggcctggtattcgggatagga

SEQ ID NO: 3946009 - DNA, 25 bp, Homo sapien
ccagctcggtgtccggaggccccgg

SEQ ID NO: 3946010 - DNA, 25 bp, Homo sapien
gccagctcggtgtccggaggccccg

SEQ ID NO: 3946011 - DNA, 25 bp, Homo sapien
cagctcggtgtccggaggccccggg

SEQ ID NO: 3946012 - DNA, 25 bp, Homo sapien
gggtctgtcattccgttgtaggtga

SEQ ID NO: 3946013 - DNA, 25 bp, Homo sapien
catctgcgggaaaagggaaggcctt

SEQ ID NO: 3946014 - DNA, 25 bp, Homo sapien
tggccgttaaagaacatactcctgg

SEQ ID NO: 3946015 - DNA, 25 bp, Homo sapien
tgggtcccggtgtcttgccagcagt

SEQ ID NO: 3946016 - DNA, 25 bp, Homo sapien
tgtggggtacggaggcggcgcacgg

SEQ ID NO: 3946017 - DNA, 25 bp, Homo sapien
cggcgcacgggggaagccctgcagc

SEQ ID NO: 3946018 - DNA, 25 bp, Homo sapien
tggtgtgtggggtacggaggcggcg

SEQ ID NO: 3946019 - DNA, 25 bp, Homo sapien
gaagtggtgtgtggggtacggaggc

SEQ ID NO: 3946020 - DNA, 25 bp, Homo sapien
gactggtactccatgccgttgagcg

SEQ ID NO: 3946021 - DNA, 25 bp, Homo sapien
gcgtccccagctaacaggaaggtct

SEQ ID NO: 3946022 - DNA, 25 bp, Homo sapien
gatgaagctgctgtcgatctccggg

SEQ ID NO: 3946023 - DNA, 25 bp, Homo sapien
gatctccgggttgtccgactggtac

SEQ ID NO: 3946024 - DNA, 25 bp, Homo sapien
gcccgagtccagatccttccggaac

SEQ ID NO: 3946025 - DNA, 25 bp, Homo sapien
gacccctctgctgcgccgcccgagt

SEQ ID NO: 3946026 - DNA, 25 bp, Homo sapien
cgaccccgacccctctgctgcgccg

SEQ ID NO: 3946027 - DNA, 25 bp, Homo sapien
cgggggcctgcgttctagggcgccg

SEQ ID NO: 3946028 - DNA, 25 bp, Homo sapien
ctgcgggtctcctcggggagggcgg

SEQ ID NO: 3946029 - DNA, 25 bp, Homo sapien
tgccccaggcgccgccccgagcctt

SEQ ID NO: 3946030 - DNA, 25 bp, Homo sapien
ggagctgcgggtctcctcggggagg

SEQ ID NO: 3946031 - DNA, 25 bp, Homo sapien
ttgccccaggcgccgccccgagcct

SEQ ID NO: 3946032 - DNA, 25 bp, Homo sapien
ccttccggggtttctgtggctcatc

SEQ ID NO: 3946033 - DNA, 25 bp, Homo sapien
agcgacgggcgggtttcctctgagg

SEQ ID NO: 3946034 - DNA, 25 bp, Homo sapien
gctcccgtctccaggcttcgagacg

SEQ ID NO: 3946035 - DNA, 25 bp, Homo sapien
gcgaagtcgtactcgcggagcctgc

SEQ ID NO: 3946036 - DNA, 25 bp, Homo sapien
aggagaacgcaaagcctctgtgaat

SEQ ID NO: 3946037 - DNA, 25 bp, Homo sapien
tttctcccgcacaggcggctggagg

SEQ ID NO: 3946038 - DNA, 25 bp, Homo sapien
tgttggcgaggcttcccgacggctt

SEQ ID NO: 3946039 - DNA, 25 bp, Homo sapien
gactcttcggcagtttcaggctcct

SEQ ID NO: 3946040 - DNA, 25 bp, Homo sapien
agtggattctccaacgcgcgtgagg

SEQ ID NO: 3946041 - DNA, 25 bp, Homo sapien
tcctcggacaggtgactcataagag

SEQ ID NO: 3946042 - DNA, 25 bp, Homo sapien
cagccaggtctttgggtccgaggaa

SEQ ID NO: 3946043 - DNA, 25 bp, Homo sapien
gctgactttctaattcggtgaccaa

SEQ ID NO: 3946044 - DNA, 25 bp, Homo sapien
tgcaagcccaggatgccatctttac

SEQ ID NO: 3946045 - DNA, 25 bp, Homo sapien
gatgccatctttactcttagccact

SEQ ID NO: 3946046 - DNA, 25 bp, Homo sapien
ccaggatgccatctttactcttagc

SEQ ID NO: 3946047 - DNA, 25 bp, Homo sapien
ctgcagggagagttgtcacctgcac

SEQ ID NO: 3946048 - DNA, 25 bp, Homo sapien
gggttttctcggcttggccaagcaa

SEQ ID NO: 3946049 - DNA, 25 bp, Homo sapien
actgaggcgtggttgtccgtgcccc

SEQ ID NO: 3946050 - DNA, 25 bp, Homo sapien
cccgacagagggtgctgggctatcc

SEQ ID NO: 3946051 - DNA, 25 bp, Homo sapien
ctgttttgggactggcattgactga

SEQ ID NO: 3946052 - DNA, 25 bp, Homo sapien
cagtatctgtcgtggcttggacgcc

SEQ ID NO: 3946053 - DNA, 25 bp, Homo sapien
tggaggccggagtcttcacatctac

SEQ ID NO: 3946054 - DNA, 25 bp, Homo sapien
cttggagaatacgaggagtggcccc

SEQ ID NO: 3946055 - DNA, 25 bp, Homo sapien
gttacagcactgacggagccaggag

SEQ ID NO: 3946056 - DNA, 25 bp, Homo sapien
accttcctctgatcggctgtgggcc

SEQ ID NO: 3946057 - DNA, 25 bp, Homo sapien
tgtctgggttgtccgggaggccctg

SEQ ID NO: 3946058 - DNA, 25 bp, Homo sapien
gacacagcatccgatctccaggtgg

SEQ ID NO: 3946059 - DNA, 25 bp, Homo sapien
gagctggaagtctcgggaaaaccca

SEQ ID NO: 3946060 - DNA, 25 bp, Homo sapien
cgtgccctcgaagtctaagaagctg

SEQ ID NO: 3946061 - DNA, 25 bp, Homo sapien
gctattgaggaacccatccaggagg

SEQ ID NO: 3946062 - DNA, 25 bp, Homo sapien
agcacctcaaagtccgtggcacgga

SEQ ID NO: 3946063 - DNA, 25 bp, Homo sapien
cactttgcacttgtaggaggcccgc

SEQ ID NO: 3946064 - DNA, 25 bp, Homo sapien
aagcggaccgcgtgctcacgcaggt

SEQ ID NO: 3946065 - DNA, 25 bp, Homo sapien
agaaggtgggcgacagcgctgctgc

SEQ ID NO: 3946066 - DNA, 25 bp, Homo sapien
cgcgggttccgtgatgctgttcaga

SEQ ID NO: 3946067 - DNA, 25 bp, Homo sapien
gagcgcttgcccctgtggtgtttgg

SEQ ID NO: 3946068 - DNA, 25 bp, Homo sapien
aaggacttcttgatgatgcgcataa

SEQ ID NO: 3946069 - DNA, 25 bp, Homo sapien
tggcggtcgaactgctccttcttgg

SEQ ID NO: 3946070 - DNA, 25 bp, Homo sapien
gcgcataaccgtggcgcagagctcg

SEQ ID NO: 3946071 - DNA, 25 bp, Homo sapien
tcttggcgaaggtgtagttgcagga

SEQ ID NO: 3946072 - DNA, 25 bp, Homo sapien
ctgagaacacgagaggagccctctt

SEQ ID NO: 3946073 - DNA, 25 bp, Homo sapien
cacaacctctgatcgggtgggtcac

SEQ ID NO: 3946074 - DNA, 25 bp, Homo sapien
tgggagccacctccgaacacaggtg

SEQ ID NO: 3946075 - DNA, 25 bp, Homo sapien
gggccctgcgtttccctgagaacac

SEQ ID NO: 3946076 - DNA, 25 bp, Homo sapien
tggcagcccgcaggcttggtggcgc

SEQ ID NO: 3946077 - DNA, 25 bp, Homo sapien
ggtgcactgggaacttgagtgcttt

SEQ ID NO: 3946078 - DNA, 25 bp, Homo sapien
ccccaccgccttccttgggtgcact

SEQ ID NO: 3946079 - DNA, 25 bp, Homo sapien
tcccattctctgtgccacgggccag

SEQ ID NO: 3946080 - DNA, 25 bp, Homo sapien
tctccttgggacctaggctcccgtg

SEQ ID NO: 3946081 - DNA, 25 bp, Homo sapien
tgcagctcttggcttgggctcgagc

SEQ ID NO: 3946082 - DNA, 25 bp, Homo sapien
cacgcggctgggagttgcctgcttc

SEQ ID NO: 3946083 - DNA, 25 bp, Homo sapien
gccttccgctgctctgatggtggcg

SEQ ID NO: 3946084 - DNA, 25 bp, Homo sapien
attttgaagccagttagtctctgcc

SEQ ID NO: 3946085 - DNA, 25 bp, Homo sapien
cagttagtctctgcccgaagagctg

SEQ ID NO: 3946086 - DNA, 25 bp, Homo sapien
tgtggctcggcaggttcagcaccgt

SEQ ID NO: 3946087 - DNA, 25 bp, Homo sapien
tgtgtggctcggcaggttcagcacc

SEQ ID NO: 3946088 - DNA, 25 bp, Homo sapien
cagttgcacaagaagtcaagtggcc

SEQ ID NO: 3946089 - DNA, 25 bp, Homo sapien
cttggtaccaagaaaacagctgtgt

SEQ ID NO: 3946090 - DNA, 25 bp, Homo sapien
taacattgcaaataggcggagccca

SEQ ID NO: 3946091 - DNA, 25 bp, Homo sapien
tggtttgcgacactccggaggcgtt

SEQ ID NO: 3946092 - DNA, 25 bp, Homo sapien
ggtgtgagttccgccagcaacaagt

SEQ ID NO: 3946093 - DNA, 25 bp, Homo sapien
gttccgccagcaacaagtggaaagc

SEQ ID NO: 3946094 - DNA, 25 bp, Homo sapien
tgagttccgccagcaacaagtggaa

SEQ ID NO: 3946095 - DNA, 25 bp, Homo sapien
tccgccagcaacaagtggaaagcag

SEQ ID NO: 3946096 - DNA, 25 bp, Homo sapien
tggagagggtcacttgtctcctgga

SEQ ID NO: 3946097 - DNA, 25 bp, Homo sapien
tcctggacactgggatctttgaggg

SEQ ID NO: 3946098 - DNA, 25 bp, Homo sapien
ggagagggtcacttgtctcctggac

SEQ ID NO: 3946099 - DNA, 25 bp, Homo sapien
gagagggtcacttgtctcctggaca

SEQ ID NO: 3946100 - DNA, 25 bp, Homo sapien
gtaggagagcctgctttcaataatg

SEQ ID NO: 3946101 - DNA, 25 bp, Homo sapien
ggagagcctgctttcaataatgagt

SEQ ID NO: 3946102 - DNA, 25 bp, Homo sapien
cagatgcttcaaggtgtaggagcgt

SEQ ID NO: 3946103 - DNA, 25 bp, Homo sapien
tggccatccacacatcttctcagga

SEQ ID NO: 3946104 - DNA, 25 bp, Homo sapien
gaggccagcagttcacaaacgccgt

SEQ ID NO: 3946105 - DNA, 25 bp, Homo sapien
gaagcaccgcatgactttgactccg

SEQ ID NO: 3946106 - DNA, 25 bp, Homo sapien
cacgcggctggtcagtgagacagac

SEQ ID NO: 3946107 - DNA, 25 bp, Homo sapien
aaagacgcgattgttgttccgagcc

SEQ ID NO: 3946108 - DNA, 25 bp, Homo sapien
tgagaaagatgctcggaggaagccc

SEQ ID NO: 3946109 - DNA, 25 bp, Homo sapien
gacatcggcctccagaatcggaaga

SEQ ID NO: 3946110 - DNA, 25 bp, Homo sapien
aaagaaaactgccacgcgtttccag

SEQ ID NO: 3946111 - DNA, 25 bp, Homo sapien
gttttcaagcagaacttaggagcca

SEQ ID NO: 3946112 - DNA, 25 bp, Homo sapien
tgcgggacgcagtggctgcacctct

SEQ ID NO: 3946113 - DNA, 25 bp, Homo sapien
cacaggacccgaggcacgatgagga

SEQ ID NO: 3946114 - DNA, 25 bp, Homo sapien
cacgggcgtagatggtgcagacgaa

SEQ ID NO: 3946115 - DNA, 25 bp, Homo sapien
ggtccgtcgtcagtcctgttttcag

SEQ ID NO: 3946116 - DNA, 25 bp, Homo sapien
ggaagttggaattgcattcaggagc

SEQ ID NO: 3946117 - DNA, 25 bp, Homo sapien
gctgcactgggttctcccctgctgg

SEQ ID NO: 3946118 - DNA, 25 bp, Homo sapien
tgcccctgcatgttctcgaggtgtg

SEQ ID NO: 3946119 - DNA, 25 bp, Homo sapien
tgagattcacatccaaagtcactgg

SEQ ID NO: 3946120 - DNA, 25 bp, Homo sapien
attaaaccctcagggtggtcatgac

SEQ ID NO: 3946121 - DNA, 25 bp, Homo sapien
taaaccctcagggtggtcatgacga

SEQ ID NO: 3946122 - DNA, 25 bp, Homo sapien
cattaaaccctcagggtggtcatga

SEQ ID NO: 3946123 - DNA, 25 bp, Homo sapien
ttaaaccctcagggtggtcatgacg

SEQ ID NO: 3946124 - DNA, 25 bp, Homo sapien
tgatcatccatgattgatgtctgtc

SEQ ID NO: 3946125 - DNA, 25 bp, Homo sapien
ctggaacgggcggagatctgtgttg

SEQ ID NO: 3946126 - DNA, 25 bp, Homo sapien
ttgaggtggattccgagggtcaaca

SEQ ID NO: 3946127 - DNA, 25 bp, Homo sapien
gggtcaacaggagacagccatgatc

SEQ ID NO: 3946128 - DNA, 25 bp, Homo sapien
aagaagtccactttagagtatgtgg

SEQ ID NO: 3946129 - DNA, 25 bp, Homo sapien
gaagtccactttagagtatgtggac

SEQ ID NO: 3946130 - DNA, 25 bp, Homo sapien
caaagaagtccactttagagtatgt

SEQ ID NO: 3946131 - DNA, 25 bp, Homo sapien
cccaaagaagtccactttagagtat

SEQ ID NO: 3946132 - DNA, 25 bp, Homo sapien
ggcgcgcggactgcccgacgggcgg

SEQ ID NO: 3946133 - DNA, 25 bp, Homo sapien
cttttctcaatggaacccgcgggcg

SEQ ID NO: 3946134 - DNA, 25 bp, Homo sapien
cggtcctgcgttgcgggcgcgcgga

SEQ ID NO: 3946135 - DNA, 25 bp, Homo sapien
gcccgagaggccacggtcctgcgtt

SEQ ID NO: 3946136 - DNA, 25 bp, Homo sapien
ctgccgggggttgctctgtttccgc

SEQ ID NO: 3946137 - DNA, 25 bp, Homo sapien
cttgatctgccgggggttgctctgt

SEQ ID NO: 3946138 - DNA, 25 bp, Homo sapien
atctgccgggggttgctctgtttcc

SEQ ID NO: 3946139 - DNA, 25 bp, Homo sapien
tgatctgccgggggttgctctgttt

SEQ ID NO: 3946140 - DNA, 25 bp, Homo sapien
tggtggccaaagataaggcctctta

SEQ ID NO: 3946141 - DNA, 25 bp, Homo sapien
gcctggtggccaaagataaggcctc

SEQ ID NO: 3946142 - DNA, 25 bp, Homo sapien
gataaggcctcttatcgctcttggc

SEQ ID NO: 3946143 - DNA, 25 bp, Homo sapien
tcttatcgctcttggcgatcgccat

SEQ ID NO: 3946144 - DNA, 25 bp, Homo sapien
cacttggttcttgctaggaactacc

SEQ ID NO: 3946145 - DNA, 25 bp, Homo sapien
cattttgacggactgtaccaccggc

SEQ ID NO: 3946146 - DNA, 25 bp, Homo sapien
gtgacaaacccacctctagcggtct

SEQ ID NO: 3946147 - DNA, 25 bp, Homo sapien
tagcggtctcgcaccatctacgagg

SEQ ID NO: 3946148 - DNA, 25 bp, Homo sapien
gataaggggcacaattaatggcatc

SEQ ID NO: 3946149 - DNA, 25 bp, Homo sapien
ggttggcatagaaacaggagataag

SEQ ID NO: 3946150 - DNA, 25 bp, Homo sapien
gagataaggggcacaattaatggca

SEQ ID NO: 3946151 - DNA, 25 bp, Homo sapien
aaggggcacaattaatggcatcaca

SEQ ID NO: 3946152 - DNA, 25 bp, Homo sapien
ggttggtgataccaatcggccaggc

SEQ ID NO: 3946153 - DNA, 25 bp, Homo sapien
gagtattattcacaagcccgtcaag

SEQ ID NO: 3946154 - DNA, 25 bp, Homo sapien
gcagataggccagcgggagtattat

SEQ ID NO: 3946155 - DNA, 25 bp, Homo sapien
acaagcccgtcaagcccaggaacgt

SEQ ID NO: 3946156 - DNA, 25 bp, Homo sapien
gctgaaggccggcaaccacccggag

SEQ ID NO: 3946157 - DNA, 25 bp, Homo sapien
cacaacagccgggaaggaggtgttc

SEQ ID NO: 3946158 - DNA, 25 bp, Homo sapien
agaggccccagatacagccactggc

SEQ ID NO: 3946159 - DNA, 25 bp, Homo sapien
ttgcgctgttgtccgaagcggtccc

SEQ ID NO: 3946160 - DNA, 25 bp, Homo sapien
cacccatttcacagccggggaagct

SEQ ID NO: 3946161 - DNA, 25 bp, Homo sapien
acacccatttcacagccggggaagc

SEQ ID NO: 3946162 - DNA, 25 bp, Homo sapien
gcttcccctcccatcacgagggtct

SEQ ID NO: 3946163 - DNA, 25 bp, Homo sapien
tggccactgatggctctgagtcttg

SEQ ID NO: 3946164 - DNA, 25 bp, Homo sapien
tgtggagagcggcttaggtcctggg

SEQ ID NO: 3946165 - DNA, 25 bp, Homo sapien
cccatcacgagggtctgggcgcctg

SEQ ID NO: 3946166 - DNA, 25 bp, Homo sapien
tgtgcccgccagaggcccggaccag

SEQ ID NO: 3946167 - DNA, 25 bp, Homo sapien
ccagttcaactttcccagttatcgc

SEQ ID NO: 3946168 - DNA, 25 bp, Homo sapien
catcttggcgcagtaatggggccag

SEQ ID NO: 3946169 - DNA, 25 bp, Homo sapien
aactttcccagttatcgcaggagct

SEQ ID NO: 3946170 - DNA, 25 bp, Homo sapien
gacatcactgaggtcatcggcacac

SEQ ID NO: 3946171 - DNA, 25 bp, Homo sapien
gaaaaccgtgcaggaagaatgccag

SEQ ID NO: 3946172 - DNA, 25 bp, Homo sapien
gaagaatgccagtaggattcaggga

SEQ ID NO: 3946173 - DNA, 25 bp, Homo sapien
catcggcacactgtagccgttggcg

SEQ ID NO: 3946174 - DNA, 25 bp, Homo sapien
tgcaaggcaggtctcgcggtctaca

SEQ ID NO: 3946175 - DNA, 25 bp, Homo sapien
atctcaggtcccagccacaaagggc

SEQ ID NO: 3946176 - DNA, 25 bp, Homo sapien
acctcccaaagccatggaactaggg

SEQ ID NO: 3946177 - DNA, 25 bp, Homo sapien
cacgggtcagcttagggcccgctgt

SEQ ID NO: 3946178 - DNA, 25 bp, Homo sapien
ctggaagcttgtggggcgctagagc

SEQ ID NO: 3946179 - DNA, 25 bp, Homo sapien
ccagctggcccctcgtcctggtggg

SEQ ID NO: 3946180 - DNA, 25 bp, Homo sapien
ctgcagaaacggaggctgcccggtc

SEQ ID NO: 3946181 - DNA, 25 bp, Homo sapien
tgtggggcgctagagctctgagctc

SEQ ID NO: 3946182 - DNA, 25 bp, Homo sapien
gatagccactgatagattacatgag

SEQ ID NO: 3946183 - DNA, 25 bp, Homo sapien
tcggaaactttatcgacgctgaagg

SEQ ID NO: 3946184 - DNA, 25 bp, Homo sapien
tccccagatgggtgataagggctga

SEQ ID NO: 3946185 - DNA, 25 bp, Homo sapien
gagattgcttcactccggagaaccg

SEQ ID NO: 3946186 - DNA, 25 bp, Homo sapien
tgccatccagaaggtcaggaggtgc

SEQ ID NO: 3946187 - DNA, 25 bp, Homo sapien
gccctgagcaggcagtgccatccag

SEQ ID NO: 3946188 - DNA, 25 bp, Homo sapien
gcagtgccatccagaaggtcaggag

SEQ ID NO: 3946189 - DNA, 25 bp, Homo sapien
catccagaaggtcaggaggtgctcg

SEQ ID NO: 3946190 - DNA, 25 bp, Homo sapien
ggagatgggctggtcggaggtggag

SEQ ID NO: 3946191 - DNA, 25 bp, Homo sapien
gggctggtcggaggtggagcctgct

SEQ ID NO: 3946192 - DNA, 25 bp, Homo sapien
agcttctctccgaatccccactgtc

SEQ ID NO: 3946193 - DNA, 25 bp, Homo sapien
gagcttctctccgaatccccactgt

SEQ ID NO: 3946194 - DNA, 25 bp, Homo sapien
ggaatctgatgaaacctggtgcctc

SEQ ID NO: 3946195 - DNA, 25 bp, Homo sapien
caagccgcacggatggagaactgtt

SEQ ID NO: 3946196 - DNA, 25 bp, Homo sapien
cctgagcgttgcaggctggaacaac

SEQ ID NO: 3946197 - DNA, 25 bp, Homo sapien
acaccagagggaaggcctgagcgtt

SEQ ID NO: 3946198 - DNA, 25 bp, Homo sapien
ctggcacccaccaactgcacctcct

SEQ ID NO: 3946199 - DNA, 25 bp, Homo sapien
gggctcggggcttcaggtgccgtgg

SEQ ID NO: 3946200 - DNA, 25 bp, Homo sapien
tctctggcctccatgtctccgaggg

SEQ ID NO: 3946201 - DNA, 25 bp, Homo sapien
gggcttcaggtgccgtggccttttg

SEQ ID NO: 3946202 - DNA, 25 bp, Homo sapien
gcccctccatcagggcgccctgcag

SEQ ID NO: 3946203 - DNA, 25 bp, Homo sapien
gcggcacctgcgtgcggcactaagg

SEQ ID NO: 3946204 - DNA, 25 bp, Homo sapien
ttgctgcggcccctccatcagggcg

SEQ ID NO: 3946205 - DNA, 25 bp, Homo sapien
gccctgcagcttgccggcggcacct

SEQ ID NO: 3946206 - DNA, 25 bp, Homo sapien
gggcggcagcggtgggggtgagtta

SEQ ID NO: 3946207 - DNA, 25 bp, Homo sapien
cttcctccgtgggcctgggttctgg

SEQ ID NO: 3946208 - DNA, 25 bp, Homo sapien
ggcggcagcggtgggggtgagttaa

SEQ ID NO: 3946209 - DNA, 25 bp, Homo sapien
ggcagcggtgggggtgagttaacat

SEQ ID NO: 3946210 - DNA, 25 bp, Homo sapien
tgagctttggactaggcacaggcct

SEQ ID NO: 3946211 - DNA, 25 bp, Homo sapien
gctgcacgggttggctgagctttgg

SEQ ID NO: 3946212 - DNA, 25 bp, Homo sapien
gctgagctttggactaggcacaggc

SEQ ID NO: 3946213 - DNA, 25 bp, Homo sapien
agctttggactaggcacaggcctgg

SEQ ID NO: 3946214 - DNA, 25 bp, Homo sapien
gaaggcaccagcgcctgaccgagag

SEQ ID NO: 3946215 - DNA, 25 bp, Homo sapien
cagcgcctgactgggacccgcgaag

SEQ ID NO: 3946216 - DNA, 25 bp, Homo sapien
ctgacccccgacaggtgtgtcctgg

SEQ ID NO: 3946217 - DNA, 25 bp, Homo sapien
ggcaccagcgcctgaccgagacccc

SEQ ID NO: 3946218 - DNA, 25 bp, Homo sapien
ctgctggcatggggccgaggagggg

SEQ ID NO: 3946219 - DNA, 25 bp, Homo sapien
tctgctggcatggggccgaggaggg

SEQ ID NO: 3946220 - DNA, 25 bp, Homo sapien
ctctgctggcatggggccgaggagg

SEQ ID NO: 3946221 - DNA, 25 bp, Homo sapien
tcatcaccagtacctgcgggagagc

SEQ ID NO: 3946222 - DNA, 25 bp, Homo sapien
gcatccatgtctgctatctccatca

SEQ ID NO: 3946223 - DNA, 25 bp, Homo sapien
ccacacccgctatctccatcatcac

SEQ ID NO: 3946224 - DNA, 25 bp, Homo sapien
acccaggcccactatctccatcatc

SEQ ID NO: 3946225 - DNA, 25 bp, Homo sapien
ccatgtctgctatctccatcatcac

SEQ ID NO: 3946226 - DNA, 25 bp, Homo sapien
ctgcgggagggccccgcacccatgt

SEQ ID NO: 3946227 - DNA, 25 bp, Homo sapien
gccccgcacccatgtctgctatctc

SEQ ID NO: 3946228 - DNA, 25 bp, Homo sapien
gggagggccccgcacccatgtctgc

SEQ ID NO: 3946229 - DNA, 25 bp, Homo sapien
gcacccatgtctgctatctccatca

SEQ ID NO: 3946230 - DNA, 25 bp, Homo sapien
gcatccatgtctgctatctccatca

SEQ ID NO: 3946231 - DNA, 25 bp, Homo sapien
catgtctgctatctctatcatcacc

SEQ ID NO: 3946232 - DNA, 25 bp, Homo sapien
tgtctgctatctctatcatcaccag

SEQ ID NO: 3946233 - DNA, 25 bp, Homo sapien
tcatcaccagtacctgcgggagagc

SEQ ID NO: 3946234 - DNA, 25 bp, Homo sapien
tatcatcaccagcacctgcgcgatg

SEQ ID NO: 3946235 - DNA, 25 bp, Homo sapien
acccacacccgctatctctatcatc

SEQ ID NO: 3946236 - DNA, 25 bp, Homo sapien
atcatcaagagcacctgcgggagag

SEQ ID NO: 3946237 - DNA, 25 bp, Homo sapien
gagcacctgcgggagaggccctgca

SEQ ID NO: 3946238 - DNA, 25 bp, Homo sapien
ccgatcttatcagctgcgtccacgg

SEQ ID NO: 3946239 - DNA, 25 bp, Homo sapien
ctttgtcccatctccggggaccgat

SEQ ID NO: 3946240 - DNA, 25 bp, Homo sapien
ctcgagccgatggcggcccctttgt

SEQ ID NO: 3946241 - DNA, 25 bp, Homo sapien
tccggggaccgatcttatcagctgc

SEQ ID NO: 3946242 - DNA, 25 bp, Homo sapien
gagacgcaataaacccgagatagca

SEQ ID NO: 3946243 - DNA, 25 bp, Homo sapien
cctgctcggccctttcgggcaggat

SEQ ID NO: 3946244 - DNA, 25 bp, Homo sapien
agatagcatcttgccgcatctcagg

SEQ ID NO: 3946245 - DNA, 25 bp, Homo sapien
tctcaggccctgctcggccctttcg

SEQ ID NO: 3946246 - DNA, 25 bp, Homo sapien
tgccgaagagaccgcacacagcctt

SEQ ID NO: 3946247 - DNA, 25 bp, Homo sapien
tccggccaccgtgtgtgcagagacc

SEQ ID NO: 3946248 - DNA, 25 bp, Homo sapien
ttggaggaacgacagctaaaggcgg

SEQ ID NO: 3946249 - DNA, 25 bp, Homo sapien
gagacccacaaacgggcatccacgt

SEQ ID NO: 3946250 - DNA, 25 bp, Homo sapien
cctcagggccggctgttgaacggct

SEQ ID NO: 3946251 - DNA, 25 bp, Homo sapien
caaggcactgggacaccgtggacct

SEQ ID NO: 3946252 - DNA, 25 bp, Homo sapien
tgggacaccgtggacctgagtgcct

SEQ ID NO: 3946253 - DNA, 25 bp, Homo sapien
cactgggacaccgtggacctgagtg

SEQ ID NO: 3946254 - DNA, 25 bp, Homo sapien
tgctccctaatcggagctccagggc

SEQ ID NO: 3946255 - DNA, 25 bp, Homo sapien
acaggcaaacggtcctgctccctaa

SEQ ID NO: 3946256 - DNA, 25 bp, Homo sapien
agcctcccagataagagcgtggctg

SEQ ID NO: 3946257 - DNA, 25 bp, Homo sapien
gccggccaagcctcccagataagag

SEQ ID NO: 3946258 - DNA, 25 bp, Homo sapien
aggagcttgggcctgcagcgtccac

SEQ ID NO: 3946259 - DNA, 25 bp, Homo sapien
ctttccaggggtaggaggagcttgg

SEQ ID NO: 3946260 - DNA, 25 bp, Homo sapien
gagcttgggcctgcagcgtccacac

SEQ ID NO: 3946261 - DNA, 25 bp, Homo sapien
gtaggaggagcttgggcctgcagcg

SEQ ID NO: 3946262 - DNA, 25 bp, Homo sapien
tcctggagccccgattgggcaggct

SEQ ID NO: 3946263 - DNA, 25 bp, Homo sapien
ccgcagtgctgtggcggccccactt

SEQ ID NO: 3946264 - DNA, 25 bp, Homo sapien
gcctgatgatcagatagctgcttgc

SEQ ID NO: 3946265 - DNA, 25 bp, Homo sapien
caggctgtggtcttaatgggcctga

SEQ ID NO: 3946266 - DNA, 25 bp, Homo sapien
agggctgcctgggcccacagaggcc

SEQ ID NO: 3946267 - DNA, 25 bp, Homo sapien
gctgcctgggcccacagaggcctca

SEQ ID NO: 3946268 - DNA, 25 bp, Homo sapien
ctctcctgtggccagggctgcctgg

SEQ ID NO: 3946269 - DNA, 25 bp, Homo sapien
ctgcctgggcccacagaggcctcac

SEQ ID NO: 3946270 - DNA, 25 bp, Homo sapien
gagccctgcgatggtcgttctccag

SEQ ID NO: 3946271 - DNA, 25 bp, Homo sapien
cactgtggggtgtagggacgcagcc

SEQ ID NO: 3946272 - DNA, 25 bp, Homo sapien
tgggtttgagcgagctgtgagccct

SEQ ID NO: 3946273 - DNA, 25 bp, Homo sapien
cgatggtcgttctccagagcaaggg

SEQ ID NO: 3946274 - DNA, 25 bp, Homo sapien
tgagtcgggcccgtatgcgcctctg

SEQ ID NO: 3946275 - DNA, 25 bp, Homo sapien
gtctggacactcccatggaacgggc

SEQ ID NO: 3946276 - DNA, 25 bp, Homo sapien
aggacaggcccgtggcgaggctgag

SEQ ID NO: 3946277 - DNA, 25 bp, Homo sapien
tctggacactcccatggaacgggcc

SEQ ID NO: 3946278 - DNA, 25 bp, Homo sapien
gtttgatcctgggtatttgggcaat

SEQ ID NO: 3946279 - DNA, 25 bp, Homo sapien
aattgacttaacatcttggagcctc

SEQ ID NO: 3946280 - DNA, 25 bp, Homo sapien
tcctgggtatttgggcaattgactt

SEQ ID NO: 3946281 - DNA, 25 bp, Homo sapien
cattaaggagcttgcgagggtctcc

SEQ ID NO: 3946282 - DNA, 25 bp, Homo sapien
ccagacgttatctccccacttggga

SEQ ID NO: 3946283 - DNA, 25 bp, Homo sapien
tgcccgtatccccaggatggcctgt

SEQ ID NO: 3946284 - DNA, 25 bp, Homo sapien
cagagcaggactaaatgcggaggca

SEQ ID NO: 3946285 - DNA, 25 bp, Homo sapien
gtgccctaggccagagcaggactaa

SEQ ID NO: 3946286 - DNA, 25 bp, Homo sapien
gagataagggttaatcaaggattta

SEQ ID NO: 3946287 - DNA, 25 bp, Homo sapien
tggggagataagggttaatcaagga

SEQ ID NO: 3946288 - DNA, 25 bp, Homo sapien
aaatcaatcatcttgtacggtgtgt

SEQ ID NO: 3946289 - DNA, 25 bp, Homo sapien
catcttgtacggtgtgtctggacac

SEQ ID NO: 3946290 - DNA, 25 bp, Homo sapien
cactcggcgccaaggcggagatagc

SEQ ID NO: 3946291 - DNA, 25 bp, Homo sapien
gtgtgtctggacactcggcgccaag

SEQ ID NO: 3946292 - DNA, 25 bp, Homo sapien
agaactgcatctcccgtgagtcctg

SEQ ID NO: 3946293 - DNA, 25 bp, Homo sapien
tgtggagccgcccagaaatagcagg

SEQ ID NO: 3946294 - DNA, 25 bp, Homo sapien
ccgcccagaaatagcaggtaggcac

SEQ ID NO: 3946295 - DNA, 25 bp, Homo sapien
tctcccgtgagtcctggagtgtgga

SEQ ID NO: 3946296 - DNA, 25 bp, Homo sapien
gccggtcctgcagaagccccgtggg

SEQ ID NO: 3946297 - DNA, 25 bp, Homo sapien
cgtggggctgcttggtcatccccag

SEQ ID NO: 3946298 - DNA, 25 bp, Homo sapien
ggggctgcttggtcatccccaggac

SEQ ID NO: 3946299 - DNA, 25 bp, Homo sapien
cggcccatggagccaaacggccggt

SEQ ID NO: 3946300 - DNA, 25 bp, Homo sapien
aggtgtgtccagggtccacggagga

SEQ ID NO: 3946301 - DNA, 25 bp, Homo sapien
ggtgtgtccagggtccacggaggac

SEQ ID NO: 3946302 - DNA, 25 bp, Homo sapien
ttcctggactttgccagcacgcgtg

SEQ ID NO: 3946303 - DNA, 25 bp, Homo sapien
cctggactttgccagcacgcgtggg

SEQ ID NO: 3946304 - DNA, 25 bp, Homo sapien
ggactttgccagcacgcgtgggacc

SEQ ID NO: 3946305 - DNA, 25 bp, Homo sapien
ctggactttgccagcacgcgtggga

SEQ ID NO: 3946306 - DNA, 25 bp, Homo sapien
tgtggatctctgtgttggcctcggc

SEQ ID NO: 3946307 - DNA, 25 bp, Homo sapien
gatctctgtgttggcctcggcctca

SEQ ID NO: 3946308 - DNA, 25 bp, Homo sapien
tcctgtggatctctgtgttggcctc

SEQ ID NO: 3946309 - DNA, 25 bp, Homo sapien
tctctgtgttggcctcggcctcagt

SEQ ID NO: 3946310 - DNA, 25 bp, Homo sapien
gacggaggtgccgcgtcatactgac

SEQ ID NO: 3946311 - DNA, 25 bp, Homo sapien
tccggaaggcttgggacggaggtgc

SEQ ID NO: 3946312 - DNA, 25 bp, Homo sapien
gcttgggacggaggtgccgcgtcat

SEQ ID NO: 3946313 - DNA, 25 bp, Homo sapien
gaaggcttgggacggaggtgccgcg

SEQ ID NO: 3946314 - DNA, 25 bp, Homo sapien
cctggagccagcctgacgacatgga

SEQ ID NO: 3946315 - DNA, 25 bp, Homo sapien
cggccaccttgaccgttcctggagc

SEQ ID NO: 3946316 - DNA, 25 bp, Homo sapien
tgacgacatggaggatggtccagtg

SEQ ID NO: 3946317 - DNA, 25 bp, Homo sapien
caccttgaccgttcctggagccagc

SEQ ID NO: 3946318 - DNA, 25 bp, Homo sapien
gggctcggccgtgaggagcacgctc

SEQ ID NO: 3946319 - DNA, 25 bp, Homo sapien
gtgaccctgcaccagagtgcgtcat

SEQ ID NO: 3946320 - DNA, 25 bp, Homo sapien
cgcaggcaccggcttggtgaccctg

SEQ ID NO: 3946321 - DNA, 25 bp, Homo sapien
gtgaggagcacgctcaggagtcccc

SEQ ID NO: 3946322 - DNA, 25 bp, Homo sapien
cactgcggtggcaaggatggaggcc

SEQ ID NO: 3946323 - DNA, 25 bp, Homo sapien
gatcactgcggtggcaaggatggag

SEQ ID NO: 3946324 - DNA, 25 bp, Homo sapien
tgttgatcactgcggtggcaaggat

SEQ ID NO: 3946325 - DNA, 25 bp, Homo sapien
ctgcggtggcaaggatggaggccat

SEQ ID NO: 3946326 - DNA, 25 bp, Homo sapien
tgttccctgcgtgactcgtgcctgt

SEQ ID NO: 3946327 - DNA, 25 bp, Homo sapien
gacttgctgcgtgttccctgcgtga

SEQ ID NO: 3946328 - DNA, 25 bp, Homo sapien
aacgccatccggtgccgtccctgtt

SEQ ID NO: 3946329 - DNA, 25 bp, Homo sapien
agccagacttgctgcgtgttccctg

SEQ ID NO: 3946330 - DNA, 25 bp, Homo sapien
caggcggggtcaggctgaaggccag

SEQ ID NO: 3946331 - DNA, 25 bp, Homo sapien
gaagcaggcggggtcaggctgaagg

SEQ ID NO: 3946332 - DNA, 25 bp, Homo sapien
gggtgggaagcaggcggggtcaggc

SEQ ID NO: 3946333 - DNA, 25 bp, Homo sapien
gcaggcggggtcaggctgaaggcca

SEQ ID NO: 3946334 - DNA, 25 bp, Homo sapien
cagtccttgcaggggaagacgtctt

SEQ ID NO: 3946335 - DNA, 25 bp, Homo sapien
agatgccacagtccttgcaggggaa

SEQ ID NO: 3946336 - DNA, 25 bp, Homo sapien
ccacagtccttgcaggggaagacgt

SEQ ID NO: 3946337 - DNA, 25 bp, Homo sapien
cagatgccacagtccttgcagggga

SEQ ID NO: 3946338 - DNA, 25 bp, Homo sapien
tttgggcttctcgtctgtggcggct

SEQ ID NO: 3946339 - DNA, 25 bp, Homo sapien
ggaaggggcagacgcgctcgttggg

SEQ ID NO: 3946340 - DNA, 25 bp, Homo sapien
tggggcagctcttgcggcactgggg

SEQ ID NO: 3946341 - DNA, 25 bp, Homo sapien
cagtagtagagcaggtgcgcctgca

SEQ ID NO: 3946342 - DNA, 25 bp, Homo sapien
ggcagatcaggcacacgaagggccg

SEQ ID NO: 3946343 - DNA, 25 bp, Homo sapien
aggcagatcaggcacacgaagggcc

SEQ ID NO: 3946344 - DNA, 25 bp, Homo sapien
gtgcaccttgaggtgccgctcgcag

SEQ ID NO: 3946345 - DNA, 25 bp, Homo sapien
gccgacaggcagatcaggcacacga

SEQ ID NO: 3946346 - DNA, 25 bp, Homo sapien
ccatgtggttggtgaccaagtggct

SEQ ID NO: 3946347 - DNA, 25 bp, Homo sapien
tagaggatgtcccttgtggtggaga

SEQ ID NO: 3946348 - DNA, 25 bp, Homo sapien
gcgagtagatctcacccttggagcc

SEQ ID NO: 3946349 - DNA, 25 bp, Homo sapien
cttggttgctgggtgtccggcccct

SEQ ID NO: 3946350 - DNA, 25 bp, Homo sapien
tggcctctccgttggtggcctcggc

SEQ ID NO: 3946351 - DNA, 25 bp, Homo sapien
gggcctttctgtccagtcctggcga

SEQ ID NO: 3946352 - DNA, 25 bp, Homo sapien
gggccttgcagggccgtgtgctgct

SEQ ID NO: 3946353 - DNA, 25 bp, Homo sapien
cattctgggccagaggctccgctct

SEQ ID NO: 3946354 - DNA, 25 bp, Homo sapien
cacgtactgcggaaggaacagggcc

SEQ ID NO: 3946355 - DNA, 25 bp, Homo sapien
gcgtcgggcccgaacacgtactgcg

SEQ ID NO: 3946356 - DNA, 25 bp, Homo sapien
ggctggacagctcggccttgaccct

SEQ ID NO: 3946357 - DNA, 25 bp, Homo sapien
ggcccgaacacgtactgcggaagga

SEQ ID NO: 3946358 - DNA, 25 bp, Homo sapien
cggggaagagcccggtctgcgcgcc

SEQ ID NO: 3946359 - DNA, 25 bp, Homo sapien
agagcccggtctgcgcgccgccggc

SEQ ID NO: 3946360 - DNA, 25 bp, Homo sapien
gaagagcccggtctgcgcgccgccg

SEQ ID NO: 3946361 - DNA, 25 bp, Homo sapien
gggaagagcccggtctgcgcgccgc

SEQ ID NO: 3946362 - DNA, 25 bp, Homo sapien
gtgatctcgcactcgaagcacgtag

SEQ ID NO: 3946363 - DNA, 25 bp, Homo sapien
gatctcgcactcgaagcacgtagcg

SEQ ID NO: 3946364 - DNA, 25 bp, Homo sapien
gtagtagttgttgacgttgctgaag

SEQ ID NO: 3946365 - DNA, 25 bp, Homo sapien
tgttgacgttgctgaaggtgatctc

SEQ ID NO: 3946366 - DNA, 25 bp, Homo sapien
ctgaacagtagaggcgcttgtgcac

SEQ ID NO: 3946367 - DNA, 25 bp, Homo sapien
cggcctgaacagtagaggcgcttgt

SEQ ID NO: 3946368 - DNA, 25 bp, Homo sapien
gcctgaacagtagaggcgcttgtgc

SEQ ID NO: 3946369 - DNA, 25 bp, Homo sapien
ggcggcctgaacagtagaggcgctt

SEQ ID NO: 3946370 - DNA, 25 bp, Homo sapien
ggcgccttgggcctgcgcgcggcag

SEQ ID NO: 3946371 - DNA, 25 bp, Homo sapien
cggcgcgtcgggttcggcgggctgg

SEQ ID NO: 3946372 - DNA, 25 bp, Homo sapien
gggacgagcgcggcgcgtcgggttc

SEQ ID NO: 3946373 - DNA, 25 bp, Homo sapien
gcccgcgccgtcctcgggcgtggcc

SEQ ID NO: 3946374 - DNA, 25 bp, Homo sapien
ttgcaggcctcgcacagcgtgcggc

SEQ ID NO: 3946375 - DNA, 25 bp, Homo sapien
tctcgtggcggctgaagcggatgtt

SEQ ID NO: 3946376 - DNA, 25 bp, Homo sapien
gtccacggagctacccgggctctgg

SEQ ID NO: 3946377 - DNA, 25 bp, Homo sapien
tcctccgcgtcgtccacggagctac

SEQ ID NO: 3946378 - DNA, 25 bp, Homo sapien
ggcgggtcgtggcgcgaggcgcagt

SEQ ID NO: 3946379 - DNA, 25 bp, Homo sapien
gggtcgtggcgcgaggcgcagtagt

SEQ ID NO: 3946380 - DNA, 25 bp, Homo sapien
gtcgtggcgcgaggcgcagtagtac

SEQ ID NO: 3946381 - DNA, 25 bp, Homo sapien
gcgggtcgtggcgcgaggcgcagta

SEQ ID NO: 3946382 - DNA, 25 bp, Homo sapien
tgcagctcgtagagcttgcggcgtc

SEQ ID NO: 3946383 - DNA, 25 bp, Homo sapien
cagctcgtagagcttgcggcgtctg

SEQ ID NO: 3946384 - DNA, 25 bp, Homo sapien
gtgcagctcgtagagcttgcggcgt

SEQ ID NO: 3946385 - DNA, 25 bp, Homo sapien
gcagctcgtagagcttgcggcgtct

SEQ ID NO: 3946386 - DNA, 25 bp, Homo sapien
ctcaggtcgatggggccgtcggccg

SEQ ID NO: 3946387 - DNA, 25 bp, Homo sapien
tcgatggggccgtcggccgcggggc

SEQ ID NO: 3946388 - DNA, 25 bp, Homo sapien
cgggcgagcgcgcaggggcgaggcc

SEQ ID NO: 3946389 - DNA, 25 bp, Homo sapien
ggggccgggcgagcgcgcaggggcg

SEQ ID NO: 3946390 - DNA, 25 bp, Homo sapien
ggggagcgggcgccgcggcttcttg

SEQ ID NO: 3946391 - DNA, 25 bp, Homo sapien
cggggagcgggcgccgcggcttctt

SEQ ID NO: 3946392 - DNA, 25 bp, Homo sapien
ctccggggagcgggcgccgcggctt

SEQ ID NO: 3946393 - DNA, 25 bp, Homo sapien
ccggggagcgggcgccgcggcttct

SEQ ID NO: 3946394 - DNA, 25 bp, Homo sapien
gcaggccgtgcactcgtggtagtcg

SEQ ID NO: 3946395 - DNA, 25 bp, Homo sapien
cactcgtggtagtcggccagcgccg

SEQ ID NO: 3946396 - DNA, 25 bp, Homo sapien
gcggcaggccgtgcactcgtggtag

SEQ ID NO: 3946397 - DNA, 25 bp, Homo sapien
cgtgcactcgtggtagtcggccagc

SEQ ID NO: 3946398 - DNA, 25 bp, Homo sapien
gcgcagcggggcacgagtacttctt

SEQ ID NO: 3946399 - DNA, 25 bp, Homo sapien
gcgcgccgggcggtggcgcagcggg

SEQ ID NO: 3946400 - DNA, 25 bp, Homo sapien
gagtacttcttgtgcgccaggtagg

SEQ ID NO: 3946401 - DNA, 25 bp, Homo sapien
caggtaggcctcgaggctgtggaag

SEQ ID NO: 3946402 - DNA, 25 bp, Homo sapien
gagcagcaggccgtgcgccaggcgg

SEQ ID NO: 3946403 - DNA, 25 bp, Homo sapien
tgcgccaggcggaaatgctccagca

SEQ ID NO: 3946404 - DNA, 25 bp, Homo sapien
gggcgcgccgagcagcaggccgtgc

SEQ ID NO: 3946405 - DNA, 25 bp, Homo sapien
ggccgtgcgccaggcggaaatgctc

SEQ ID NO: 3946406 - DNA, 25 bp, Homo sapien
gagcgggcgaggggccgcggtcggc

SEQ ID NO: 3946407 - DNA, 25 bp, Homo sapien
cagtaccggtggttgccgttgggca

SEQ ID NO: 3946408 - DNA, 25 bp, Homo sapien
gcggcgccggcgtgcccttgctggg

SEQ ID NO: 3946409 - DNA, 25 bp, Homo sapien
agcggcgccggcgtgcccttgctgg

SEQ ID NO: 3946410 - DNA, 25 bp, Homo sapien
gcaaagacggcagtaccggtggttg

SEQ ID NO: 3946411 - DNA, 25 bp, Homo sapien
tgctcggcggcgtgcgaggagcagt

SEQ ID NO: 3946412 - DNA, 25 bp, Homo sapien
tgcgaggagcagtaatacttcttgt

SEQ ID NO: 3946413 - DNA, 25 bp, Homo sapien
cggcgtgcgaggagcagtaatactt

SEQ ID NO: 3946414 - DNA, 25 bp, Homo sapien
ttcttgtgggcgatgaaggtggaca

SEQ ID NO: 3946415 - DNA, 25 bp, Homo sapien
gggttcccaggagcggcagtccgtg

SEQ ID NO: 3946416 - DNA, 25 bp, Homo sapien
cgcagcggggcgtgcaaagcgtctg

SEQ ID NO: 3946417 - DNA, 25 bp, Homo sapien
cgtgcaaagcgtctgcggctgtagt

SEQ ID NO: 3946418 - DNA, 25 bp, Homo sapien
tattaagtgccaagggtccaggcgg

SEQ ID NO: 3946419 - DNA, 25 bp, Homo sapien
acaggtgactccaccacacggttgt

SEQ ID NO: 3946420 - DNA, 25 bp, Homo sapien
gactcagccaccacaggtgactcca

SEQ ID NO: 3946421 - DNA, 25 bp, Homo sapien
ggtgactccaccacacggttgtcct

SEQ ID NO: 3946422 - DNA, 25 bp, Homo sapien
ttgcaccgactcagccaccacaggt

SEQ ID NO: 3946423 - DNA, 25 bp, Homo sapien
gcagctagttcaagtagagttggaa

SEQ ID NO: 3946424 - DNA, 25 bp, Homo sapien
cttctgaggcaagaggccgctgcct

SEQ ID NO: 3946425 - DNA, 25 bp, Homo sapien
atcagagaccactgaaagcgctgca

SEQ ID NO: 3946426 - DNA, 25 bp, Homo sapien
tttagaacatcttgtaccctgcgcc

SEQ ID NO: 3946427 - DNA, 25 bp, Homo sapien
gtctgtgcagaagacgcgtgcccga

SEQ ID NO: 3946428 - DNA, 25 bp, Homo sapien
tgactgatggcgtctgccaggtgtg

SEQ ID NO: 3946429 - DNA, 25 bp, Homo sapien
cacgccaatgacctgggacgggcga

SEQ ID NO: 3946430 - DNA, 25 bp, Homo sapien
caccaccgagtcagcggctacaggg

SEQ ID NO: 3946431 - DNA, 25 bp, Homo sapien
tttgggaagcggtgggatttggaca

SEQ ID NO: 3946432 - DNA, 25 bp, Homo sapien
ggatttggacaaatcaagcattgct

SEQ ID NO: 3946433 - DNA, 25 bp, Homo sapien
caatgaagggtgaataggcaaggct

SEQ ID NO: 3946434 - DNA, 25 bp, Homo sapien
cccaggtctgggagtcggcgatggt

SEQ ID NO: 3946435 - DNA, 25 bp, Homo sapien
gggtggcgctgcctcactggtgcct

SEQ ID NO: 3946436 - DNA, 25 bp, Homo sapien
tcggggtggcgctgcctcactggtg

SEQ ID NO: 3946437 - DNA, 25 bp, Homo sapien
tcactggtgccttcaggtgaaccct

SEQ ID NO: 3946438 - DNA, 25 bp, Homo sapien
ggtggcgctgcctcactggtgcctt

SEQ ID NO: 3946439 - DNA, 25 bp, Homo sapien
tgcgcgactcacacccccggagcat

SEQ ID NO: 3946440 - DNA, 25 bp, Homo sapien
ccccgacggggggatgcgcgactca

SEQ ID NO: 3946441 - DNA, 25 bp, Homo sapien
ggagcacggggggacgggcgactca

SEQ ID NO: 3946442 - DNA, 25 bp, Homo sapien
acggggggatgcgcgactcacaccc

SEQ ID NO: 3946443 - DNA, 25 bp, Homo sapien
tgaggggacctgtcgcgtgtcctgc

SEQ ID NO: 3946444 - DNA, 25 bp, Homo sapien
cccggggcgtccaggggctgcagcg

SEQ ID NO: 3946445 - DNA, 25 bp, Homo sapien
cgcggtgtcccacgggcgcgtccac

SEQ ID NO: 3946446 - DNA, 25 bp, Homo sapien
tccccgcgcggttcaacgcgagcag

SEQ ID NO: 3946447 - DNA, 25 bp, Homo sapien
ctccaggctcgacacgggcggaaca

SEQ ID NO: 3946448 - DNA, 25 bp, Homo sapien
aggctcgacacgggcggaacaaacg

SEQ ID NO: 3946449 - DNA, 25 bp, Homo sapien
cgtggagaagacgtcccttggccct

SEQ ID NO: 3946450 - DNA, 25 bp, Homo sapien
ttccgctcttcacaggttctggctc

SEQ ID NO: 3946451 - DNA, 25 bp, Homo sapien
ccgggatgacctactctggaggtga

SEQ ID NO: 3946452 - DNA, 25 bp, Homo sapien
ctatataaaggacccagcacctctg

SEQ ID NO: 3946453 - DNA, 25 bp, Homo sapien
tccaggaggttcataaagagctcaa

SEQ ID NO: 3946454 - DNA, 25 bp, Homo sapien
tacatactcctaagagaccggcgcg

SEQ ID NO: 3946455 - DNA, 25 bp, Homo sapien
gtgactccacaaagctttcttacaa

SEQ ID NO: 3946456 - DNA, 25 bp, Homo sapien
tgactccacaaagctttcttacaat

SEQ ID NO: 3946457 - DNA, 25 bp, Homo sapien
gatttaggctcacttgcccggtcct

SEQ ID NO: 3946458 - DNA, 25 bp, Homo sapien
tgaggatcccgttcagggctctcgg

SEQ ID NO: 3946459 - DNA, 25 bp, Homo sapien
gaatgtcatcgtccgagagtccctg

SEQ ID NO: 3946460 - DNA, 25 bp, Homo sapien
gaggcctcatccctaaggtcgcttg

SEQ ID NO: 3946461 - DNA, 25 bp, Homo sapien
gattcctgagagttatatcccttaa

SEQ ID NO: 3946462 - DNA, 25 bp, Homo sapien
tggctcacagtaaacagtccgtaat

SEQ ID NO: 3946463 - DNA, 25 bp, Homo sapien
tcctgccttacttggaagtgagcgt

SEQ ID NO: 3946464 - DNA, 25 bp, Homo sapien
tcaacgtggtattctatgtaagctc

SEQ ID NO: 3946465 - DNA, 25 bp, Homo sapien
tgtcactggggtccttcacttcacc

SEQ ID NO: 3946466 - DNA, 25 bp, Homo sapien
cttcctgtcactggggtccttcact

SEQ ID NO: 3946467 - DNA, 25 bp, Homo sapien
ttcctgtcactggggtccttcactt

SEQ ID NO: 3946468 - DNA, 25 bp, Homo sapien
cctgtcactggggtccttcacttca

SEQ ID NO: 3946469 - DNA, 25 bp, Homo sapien
gaagaaccggcaggtgggacgaggc

SEQ ID NO: 3946470 - DNA, 25 bp, Homo sapien
tcatgaagaaccggcaggtgggacg

SEQ ID NO: 3946471 - DNA, 25 bp, Homo sapien
atgaagaaccggcaggtgggacgag

SEQ ID NO: 3946472 - DNA, 25 bp, Homo sapien
gaaccggcaggtgggacgaggcctc

SEQ ID NO: 3946473 - DNA, 25 bp, Homo sapien
cattccacacgaacaaacgcttcgg

SEQ ID NO: 3946474 - DNA, 25 bp, Homo sapien
gccatttcgaaatccattccacacg

SEQ ID NO: 3946475 - DNA, 25 bp, Homo sapien
gccttcagcggccatctctggccat

SEQ ID NO: 3946476 - DNA, 25 bp, Homo sapien
aacgcttcggacacatcttgcagga

SEQ ID NO: 3946477 - DNA, 25 bp, Homo sapien
agaagtacaggaagctcttgtgagc

SEQ ID NO: 3946478 - DNA, 25 bp, Homo sapien
aagctcttgtgagctttagatggca

SEQ ID NO: 3946479 - DNA, 25 bp, Homo sapien
aaagaagtacaggaagctcttgtga

SEQ ID NO: 3946480 - DNA, 25 bp, Homo sapien
tgtgagctttagatggcacacacag

SEQ ID NO: 3946481 - DNA, 25 bp, Homo sapien
tattggtggaagaagagtggataat

SEQ ID NO: 3946482 - DNA, 25 bp, Homo sapien
cctctgaatggtatggaattggata

SEQ ID NO: 3946483 - DNA, 25 bp, Homo sapien
ctttaacctggcctctgaatggtat

SEQ ID NO: 3946484 - DNA, 25 bp, Homo sapien
aattggatattggtggaagaagagt

SEQ ID NO: 3946485 - DNA, 25 bp, Homo sapien
cagcctcctgcagttggaaccatca

SEQ ID NO: 3946486 - DNA, 25 bp, Homo sapien
tgactgtagaaacccttccacatgg

SEQ ID NO: 3946487 - DNA, 25 bp, Homo sapien
tcatccaggcatctcccaatgaagg

SEQ ID NO: 3946488 - DNA, 25 bp, Homo sapien
aacccacgtgatgtgcaaggagaca

SEQ ID NO: 3946489 - DNA, 25 bp, Homo sapien
cagtccaggcaacgaggaatcaatc

SEQ ID NO: 3946490 - DNA, 25 bp, Homo sapien
tcttcaaggctcgtccacgttgcgg

SEQ ID NO: 3946491 - DNA, 25 bp, Homo sapien
tatggccaagtagcattccactgca

SEQ ID NO: 3946492 - DNA, 25 bp, Homo sapien
tgtgtaagcatcaccactagctagt

SEQ ID NO: 3946493 - DNA, 25 bp, Homo sapien
catcccatgaagaagtacagctcca

SEQ ID NO: 3946494 - DNA, 25 bp, Homo sapien
cccatgaagaagtacagctccagtt

SEQ ID NO: 3946495 - DNA, 25 bp, Homo sapien
tcctgatgatccaacacaggcccac

SEQ ID NO: 3946496 - DNA, 25 bp, Homo sapien
caggcccacgagagataaaaacatc

SEQ ID NO: 3946497 - DNA, 25 bp, Homo sapien
tgtaactacagaaagggaacctgca

SEQ ID NO: 3946498 - DNA, 25 bp, Homo sapien
cattcccagaggcagttatcaatat

SEQ ID NO: 3946499 - DNA, 25 bp, Homo sapien
tgaagttgaccacctatcccatgcc

SEQ ID NO: 3946500 - DNA, 25 bp, Homo sapien
tgcatgctcagtagcaaccaaccca

SEQ ID NO: 3946501 - DNA, 25 bp, Homo sapien
ttcactccagggtgtataaacctac

SEQ ID NO: 3946502 - DNA, 25 bp, Homo sapien
atcagcgggtgaggtccgagaggcg

SEQ ID NO: 3946503 - DNA, 25 bp, Homo sapien
tagttccccttgtcgttcactccag

SEQ ID NO: 3946504 - DNA, 25 bp, Homo sapien
tgattagggagtagttccccttgtc

SEQ ID NO: 3946505 - DNA, 25 bp, Homo sapien
tcagttggctgatgtgctaacaatg

SEQ ID NO: 3946506 - DNA, 25 bp, Homo sapien
cagttggctgatgtgctaacaatga

SEQ ID NO: 3946507 - DNA, 25 bp, Homo sapien
caaaatttcatcaactaccggccca

SEQ ID NO: 3946508 - DNA, 25 bp, Homo sapien
atgccggagtcctcgttcccaggca

SEQ ID NO: 3946509 - DNA, 25 bp, Homo sapien
ctttgcatgccggagtcctcgttcc

SEQ ID NO: 3946510 - DNA, 25 bp, Homo sapien
ccaggcactctctgttgggggctct

SEQ ID NO: 3946511 - DNA, 25 bp, Homo sapien
gtctctgacatctctcgggatccga

SEQ ID NO: 3946512 - DNA, 25 bp, Homo sapien
caggctcctgttcttttcgaatagt

SEQ ID NO: 3946513 - DNA, 25 bp, Homo sapien
gaattccaatctcgaaaaacttcat

SEQ ID NO: 3946514 - DNA, 25 bp, Homo sapien
aattcccgttcgtcttcgccaatgg

SEQ ID NO: 3946515 - DNA, 25 bp, Homo sapien
ctgcctgttgcccacgttcctgttg

SEQ ID NO: 3946516 - DNA, 25 bp, Homo sapien
tgttgcccacgttcctgttgcaacg

SEQ ID NO: 3946517 - DNA, 25 bp, Homo sapien
cacgttcctgttgcaacgctggcca

SEQ ID NO: 3946518 - DNA, 25 bp, Homo sapien
agcatggtcgacctggtgcccacct

SEQ ID NO: 3946519 - DNA, 25 bp, Homo sapien
gaccacacgaaacattagggacaga

SEQ ID NO: 3946520 - DNA, 25 bp, Homo sapien
gaaagtaacagaccgtgacgcagtg

SEQ ID NO: 3946521 - DNA, 25 bp, Homo sapien
tcatcacttaggagcactggcgtaa

SEQ ID NO: 3946522 - DNA, 25 bp, Homo sapien
ttcacaaactacatctaagagcagg

SEQ ID NO: 3946523 - DNA, 25 bp, Homo sapien
gaaattctcatactgtccgccacgc

SEQ ID NO: 3946524 - DNA, 25 bp, Homo sapien
tcggtaattatgatacggctctgtt

SEQ ID NO: 3946525 - DNA, 25 bp, Homo sapien
taataagggtctgcgtaaggctcga

SEQ ID NO: 3946526 - DNA, 25 bp, Homo sapien
tctgtatactgcaccctgaaattct

SEQ ID NO: 3946527 - DNA, 25 bp, Homo sapien
tcaaattggtacattgtgctggctc

SEQ ID NO: 3946528 - DNA, 25 bp, Homo sapien
tctataagctcatataaagccctgt

SEQ ID NO: 3946529 - DNA, 25 bp, Homo sapien
gcctctgaattcgttctccgtaaca

SEQ ID NO: 3946530 - DNA, 25 bp, Homo sapien
ccattaatgtaatcgctgcctctga

SEQ ID NO: 3946531 - DNA, 25 bp, Homo sapien
gctcgcgctcgcgctgtctgttctc

SEQ ID NO: 3946532 - DNA, 25 bp, Homo sapien
tcgcgctcgcgctgtctgttctctc

SEQ ID NO: 3946533 - DNA, 25 bp, Homo sapien
ctcgcgctcgcgctgtctgttctct

SEQ ID NO: 3946534 - DNA, 25 bp, Homo sapien
tcctccgctgccgctccttgtcgcg

SEQ ID NO: 3946535 - DNA, 25 bp, Homo sapien
ctcgctcacgctcccactcctcctt

SEQ ID NO: 3946536 - DNA, 25 bp, Homo sapien
ctccttcctccgctgccgctccttg

SEQ ID NO: 3946537 - DNA, 25 bp, Homo sapien
cttcctccgctgccgctccttgtcg

SEQ ID NO: 3946538 - DNA, 25 bp, Homo sapien
ctgccggtccttctcgtcccgcttg

SEQ ID NO: 3946539 - DNA, 25 bp, Homo sapien
tgccggtccttctcgtcccgcttgg

SEQ ID NO: 3946540 - DNA, 25 bp, Homo sapien
cttggcggctgcggggagcggggct

SEQ ID NO: 3946541 - DNA, 25 bp, Homo sapien
tctcccgctccttctcccggtcgcg

SEQ ID NO: 3946542 - DNA, 25 bp, Homo sapien
tgcggggagcggggcttgggcttcc

SEQ ID NO: 3946543 - DNA, 25 bp, Homo sapien
cggctgcggggagcggggcttgggc

SEQ ID NO: 3946544 - DNA, 25 bp, Homo sapien
cgtggtatacaagggcagcgcctat

SEQ ID NO: 3946545 - DNA, 25 bp, Homo sapien
tcctgagaacagtaacatggtgccc

SEQ ID NO: 3946546 - DNA, 25 bp, Homo sapien
caaggatcattctgcacccaaggca

SEQ ID NO: 3946547 - DNA, 25 bp, Homo sapien
aaaggccctgcgttggagagctctg

SEQ ID NO: 3946548 - DNA, 25 bp, Homo sapien
gggcagacggtggtgccccaggacc

SEQ ID NO: 3946549 - DNA, 25 bp, Homo sapien
cccaggaccatctgctgcaagggct

SEQ ID NO: 3946550 - DNA, 25 bp, Homo sapien
cagggcagacggtggtgccccagga

SEQ ID NO: 3946551 - DNA, 25 bp, Homo sapien
agcagggcagacggtggtgccccag

SEQ ID NO: 3946552 - DNA, 25 bp, Homo sapien
cagggctcccgcaaaggtgagtgaa

SEQ ID NO: 3946553 - DNA, 25 bp, Homo sapien
tgaatgaatccaggcaagcgacgca

SEQ ID NO: 3946554 - DNA, 25 bp, Homo sapien
gccagttctggctgataagggagaa

SEQ ID NO: 3946555 - DNA, 25 bp, Homo sapien
aagcgacgcagagaacgtcagccct

SEQ ID NO: 3946556 - DNA, 25 bp, Homo sapien
gcgagtgcttccagtctcaggggtc

SEQ ID NO: 3946557 - DNA, 25 bp, Homo sapien
gtgcttccagtctcaggggtccacc

SEQ ID NO: 3946558 - DNA, 25 bp, Homo sapien
tggggggcgagtgcttccagtctca

SEQ ID NO: 3946559 - DNA, 25 bp, Homo sapien
ccccacaaccccaccgcaggagcct

SEQ ID NO: 3946560 - DNA, 25 bp, Homo sapien
gagtgagaatgaagagcccggggtg

SEQ ID NO: 3946561 - DNA, 25 bp, Homo sapien
gaagagtgagaatgaagagcccggg

SEQ ID NO: 3946562 - DNA, 25 bp, Homo sapien
tgagaatgaagagcccggggtgagt

SEQ ID NO: 3946563 - DNA, 25 bp, Homo sapien
cagggaagagtgagaatgaagagcc

SEQ ID NO: 3946564 - DNA, 25 bp, Homo sapien
tgccaggctgctacaggccacgtgt

SEQ ID NO: 3946565 - DNA, 25 bp, Homo sapien
caggctgctacaggccacgtgtcca

SEQ ID NO: 3946566 - DNA, 25 bp, Homo sapien
cacgaggcgccacagatgccaggct

SEQ ID NO: 3946567 - DNA, 25 bp, Homo sapien
gccaggctgctacaggccacgtgtc

SEQ ID NO: 3946568 - DNA, 25 bp, Homo sapien
cactttgatagcgagtctccgggca

SEQ ID NO: 3946569 - DNA, 25 bp, Homo sapien
tccagcaagtccatgttaccacgtg

SEQ ID NO: 3946570 - DNA, 25 bp, Homo sapien
cctgccacggcatggaaataaaacc

SEQ ID NO: 3946571 - DNA, 25 bp, Homo sapien
tctcagcaaagaatgtcaccccagg

SEQ ID NO: 3946572 - DNA, 25 bp, Homo sapien
ctcttcttcgggtgaagctgtaaca

SEQ ID NO: 3946573 - DNA, 25 bp, Homo sapien
tcttcttcgggtgaagctgtaacag

SEQ ID NO: 3946574 - DNA, 25 bp, Homo sapien
cttcttcgggtgaagctgtaacagc

SEQ ID NO: 3946575 - DNA, 25 bp, Homo sapien
aagctgtaacagcatgtggagtcct

SEQ ID NO: 3946576 - DNA, 25 bp, Homo sapien
ttcagctcctgtacgtcagcccaaa

SEQ ID NO: 3946577 - DNA, 25 bp, Homo sapien
caaaaccccaagagctattgccaca

SEQ ID NO: 3946578 - DNA, 25 bp, Homo sapien
ggaagtaaacacctgtctgatgatc

SEQ ID NO: 3946579 - DNA, 25 bp, Homo sapien
acggacacgcgacatcacagcttca

SEQ ID NO: 3946580 - DNA, 25 bp, Homo sapien
ggcaaacatgcctgctatctgctga

SEQ ID NO: 3946581 - DNA, 25 bp, Homo sapien
tgcctgctatctgctgagaatgcag

SEQ ID NO: 3946582 - DNA, 25 bp, Homo sapien
gggcagctccccacttaacactgtc

SEQ ID NO: 3946583 - DNA, 25 bp, Homo sapien
gctggcaaacatgcctgctatctgc

SEQ ID NO: 3946584 - DNA, 25 bp, Homo sapien
gctctgctgtggtagcatctgctta

SEQ ID NO: 3946585 - DNA, 25 bp, Homo sapien
cctgtgttactgtgagtgggattct

SEQ ID NO: 3946586 - DNA, 25 bp, Homo sapien
ggttataagcttgagccgccatgcc

SEQ ID NO: 3946587 - DNA, 25 bp, Homo sapien
gattctctgccctacgtcttgctca

SEQ ID NO: 3946588 - DNA, 25 bp, Homo sapien
gatcggcgccaagggtccttccact

SEQ ID NO: 3946589 - DNA, 25 bp, Homo sapien
ttggatcggcgccaagggtccttcc

SEQ ID NO: 3946590 - DNA, 25 bp, Homo sapien
ttcttgggagacttggatcggcgcc

SEQ ID NO: 3946591 - DNA, 25 bp, Homo sapien
cttgggagacttggatcggcgccaa

SEQ ID NO: 3946592 - DNA, 25 bp, Homo sapien
gatgttttccgacgccttcgagccc

SEQ ID NO: 3946593 - DNA, 25 bp, Homo sapien
aggctgatgttttccgacgccttcg

SEQ ID NO: 3946594 - DNA, 25 bp, Homo sapien
cagaggctgacgaggctgatgtttt

SEQ ID NO: 3946595 - DNA, 25 bp, Homo sapien
gaggcagaggctgacgaggctgatg

SEQ ID NO: 3946596 - DNA, 25 bp, Homo sapien
tacatggtgtcagctgacggctcca

SEQ ID NO: 3946597 - DNA, 25 bp, Homo sapien
tggtgtcagctgacggctccaaggt

SEQ ID NO: 3946598 - DNA, 25 bp, Homo sapien
aggtacatggtgtcagctgacggct

SEQ ID NO: 3946599 - DNA, 25 bp, Homo sapien
gctgacaccccagccgtcccacgag

SEQ ID NO: 3946600 - DNA, 25 bp, Homo sapien
ctgcaggtaacgacgccacagcaaa

SEQ ID NO: 3946601 - DNA, 25 bp, Homo sapien
tgcaggtaacgacgccacagcaaac

SEQ ID NO: 3946602 - DNA, 25 bp, Homo sapien
gcaggtaacgacgccacagcaaaca

SEQ ID NO: 3946603 - DNA, 25 bp, Homo sapien
tctttgctgaaggtataaacgccgg

SEQ ID NO: 3946604 - DNA, 25 bp, Homo sapien
gggtcactgcgtcagtcctacttgg

SEQ ID NO: 3946605 - DNA, 25 bp, Homo sapien
cgccgggttagtcccactgactggt

SEQ ID NO: 3946606 - DNA, 25 bp, Homo sapien
acttggcattgatgctctttgctga

SEQ ID NO: 3946607 - DNA, 25 bp, Homo sapien
cctccttggtgcagaacggcattta

SEQ ID NO: 3946608 - DNA, 25 bp, Homo sapien
tgcatccactttcagtgaagcctgg

SEQ ID NO: 3946609 - DNA, 25 bp, Homo sapien
agctacacacaagcgcacagctgcg

SEQ ID NO: 3946610 - DNA, 25 bp, Homo sapien
caacagtttcaggtccagtctggag

SEQ ID NO: 3946611 - DNA, 25 bp, Homo sapien
tcctgagaacgagctgtgtctggaa

SEQ ID NO: 3946612 - DNA, 25 bp, Homo sapien
taggagctgtaggatgaagaccggg

SEQ ID NO: 3946613 - DNA, 25 bp, Homo sapien
tggaccggcttcctgagaacgagct

SEQ ID NO: 3946614 - DNA, 25 bp, Homo sapien
agccagagtaggacgatgaccgcga

SEQ ID NO: 3946615 - DNA, 25 bp, Homo sapien
tctgcggaggactggagtgcctcaa

SEQ ID NO: 3946616 - DNA, 25 bp, Homo sapien
ctccgggaggcgagtgtcacgttca

SEQ ID NO: 3946617 - DNA, 25 bp, Homo sapien
cctcaactcgaggatctcaggctgt

SEQ ID NO: 3946618 - DNA, 25 bp, Homo sapien
acacaggcccagagtagaccagaga

SEQ ID NO: 3946619 - DNA, 25 bp, Homo sapien
ggccacgaatttccatttatgtgcc

SEQ ID NO: 3946620 - DNA, 25 bp, Homo sapien
aggccacgaatttccatttatgtgc

SEQ ID NO: 3946621 - DNA, 25 bp, Homo sapien
acccacccagacccatggagaaggc

SEQ ID NO: 3946622 - DNA, 25 bp, Homo sapien
gccacgaatttccatttatgtgcct

SEQ ID NO: 3946623 - DNA, 25 bp, Homo sapien
ctaggggagtgaacaaaggtgtcgg

SEQ ID NO: 3946624 - DNA, 25 bp, Homo sapien
taggggagtgaacaaaggtgtcgga

SEQ ID NO: 3946625 - DNA, 25 bp, Homo sapien
gccggctctcccttggttctgatgg

SEQ ID NO: 3946626 - DNA, 25 bp, Homo sapien
ggttctgatggaaggtctatgtggg

SEQ ID NO: 3946627 - DNA, 25 bp, Homo sapien
cggctctcccttggttctgatggaa

SEQ ID NO: 3946628 - DNA, 25 bp, Homo sapien
ccttggttctgatggaaggtctatg

SEQ ID NO: 3946629 - DNA, 25 bp, Homo sapien
ggtcccaaacacaaatgagagatag

SEQ ID NO: 3946630 - DNA, 25 bp, Homo sapien
cctttcaatggacccacagctcggg

SEQ ID NO: 3946631 - DNA, 25 bp, Homo sapien
gagagcaggctaataggaagacccc

SEQ ID NO: 3946632 - DNA, 25 bp, Homo sapien
gcatgcctgtgacgctcggtgagca

SEQ ID NO: 3946633 - DNA, 25 bp, Homo sapien
ggtctcctggcttggtgggctcggg

SEQ ID NO: 3946634 - DNA, 25 bp, Homo sapien
ctggctggccgctccttcctcctgg

SEQ ID NO: 3946635 - DNA, 25 bp, Homo sapien
gggtctcctggcttggtgggctcgg

SEQ ID NO: 3946636 - DNA, 25 bp, Homo sapien
gggagctggaaccactatagctgct

SEQ ID NO: 3946637 - DNA, 25 bp, Homo sapien
actgccgctgccgcttagcgtccgc

SEQ ID NO: 3946638 - DNA, 25 bp, Homo sapien
gatcgggagctggaaccactatagc

SEQ ID NO: 3946639 - DNA, 25 bp, Homo sapien
gctggaaccactatagctgctacca

SEQ ID NO: 3946640 - DNA, 25 bp, Homo sapien
aatatataaacgacctgctgcctgg

SEQ ID NO: 3946641 - DNA, 25 bp, Homo sapien
gggtcttcctatcacgagtcctggc

SEQ ID NO: 3946642 - DNA, 25 bp, Homo sapien
cagggtgactcagatccagaagggc

SEQ ID NO: 3946643 - DNA, 25 bp, Homo sapien
tacaaaattaggctgcgtgcggcgg

SEQ ID NO: 3946644 - DNA, 25 bp, Homo sapien
caaggagcaattccgcagtctcagg

SEQ ID NO: 3946645 - DNA, 25 bp, Homo sapien
catttatggatcatgtacccacgga

SEQ ID NO: 3946646 - DNA, 25 bp, Homo sapien
gacaaaagggagatagcctcagccc

SEQ ID NO: 3946647 - DNA, 25 bp, Homo sapien
tcaatgtcaggttgcagccaggcac

SEQ ID NO: 3946648 - DNA, 25 bp, Homo sapien
ggagacgctgctcacgctcagggac

SEQ ID NO: 3946649 - DNA, 25 bp, Homo sapien
ggtctgcgtacatgtcctccgagtc

SEQ ID NO: 3946650 - DNA, 25 bp, Homo sapien
tgcagagctgctgctcgacgtagca

SEQ ID NO: 3946651 - DNA, 25 bp, Homo sapien
tccgagtccacgctgtgtgcagagc

SEQ ID NO: 3946652 - DNA, 25 bp, Homo sapien
cttattcaacagtgtcaacttgatc

SEQ ID NO: 3946653 - DNA, 25 bp, Homo sapien
tgcagatttgggtggttgtgtggac

SEQ ID NO: 3946654 - DNA, 25 bp, Homo sapien
caacttgatctccttgtgggccaca

SEQ ID NO: 3946655 - DNA, 25 bp, Homo sapien
caacagtgtcaacttgatctccttg

SEQ ID NO: 3946656 - DNA, 25 bp, Homo sapien
cagaggacatgggttccttgccagc

SEQ ID NO: 3946657 - DNA, 25 bp, Homo sapien
aggagccagaagccgtgtcctcgcc

SEQ ID NO: 3946658 - DNA, 25 bp, Homo sapien
caggagccagaagccgtgtcctcgc

SEQ ID NO: 3946659 - DNA, 25 bp, Homo sapien
gtccttgtctgatggttcatagcgc

SEQ ID NO: 3946660 - DNA, 25 bp, Homo sapien
tctgatggttcatagcgcttcctgc

SEQ ID NO: 3946661 - DNA, 25 bp, Homo sapien
gatgtgttgggccgcttggctggag

SEQ ID NO: 3946662 - DNA, 25 bp, Homo sapien
ggttcatagcgcttcctgcttcctt

SEQ ID NO: 3946663 - DNA, 25 bp, Homo sapien
ccgagagactaggagtgtttcactc

SEQ ID NO: 3946664 - DNA, 25 bp, Homo sapien
gaaatacaagcaaagccgagagact

SEQ ID NO: 3946665 - DNA, 25 bp, Homo sapien
caaggctggtgcgagaacaaaggtc

SEQ ID NO: 3946666 - DNA, 25 bp, Homo sapien
tgtgtccgacaaacccagagaactg

SEQ ID NO: 3946667 - DNA, 25 bp, Homo sapien
gaccaccctcctgatgtacagggaa

SEQ ID NO: 3946668 - DNA, 25 bp, Homo sapien
gactcacttctaaagcctgaggctg

SEQ ID NO: 3946669 - DNA, 25 bp, Homo sapien
ggctgcttagttcaccaccttcatt

SEQ ID NO: 3946670 - DNA, 25 bp, Homo sapien
ggtggcctcaccgatgccagggact

SEQ ID NO: 3946671 - DNA, 25 bp, Homo sapien
ctctctgccgctctggcttcgggga

SEQ ID NO: 3946672 - DNA, 25 bp, Homo sapien
tcccacctgacttccggtcccgaga

SEQ ID NO: 3946673 - DNA, 25 bp, Homo sapien
gcctctctgccgctctggcttcggg

SEQ ID NO: 3946674 - DNA, 25 bp, Homo sapien
tctggcctctctgccgctctggctt

SEQ ID NO: 3946675 - DNA, 25 bp, Homo sapien
tccctgatttggtgctggcggcgcc

SEQ ID NO: 3946676 - DNA, 25 bp, Homo sapien
tcctcccgccgagacagcgtgctgg

SEQ ID NO: 3946677 - DNA, 25 bp, Homo sapien
cggcgccgggatccgaggctttgcc

SEQ ID NO: 3946678 - DNA, 25 bp, Homo sapien
cgggcacgctcgtgaccttgctgga

SEQ ID NO: 3946679 - DNA, 25 bp, Homo sapien
tatgctttcccggggatcttggccc

SEQ ID NO: 3946680 - DNA, 25 bp, Homo sapien
gatcttggcccgcttgcgtgcaata

SEQ ID NO: 3946681 - DNA, 25 bp, Homo sapien
gggatcttggcccgcttgcgtgcaa

SEQ ID NO: 3946682 - DNA, 25 bp, Homo sapien
ttcccggggatcttggcccgcttgc

SEQ ID NO: 3946683 - DNA, 25 bp, Homo sapien
cctatgtataaaaatgcgtccagtc

SEQ ID NO: 3946684 - DNA, 25 bp, Homo sapien
gtataaaaatgcgtccagtccggtc

SEQ ID NO: 3946685 - DNA, 25 bp, Homo sapien
ataaaaatgcgtccagtccggtcgg

SEQ ID NO: 3946686 - DNA, 25 bp, Homo sapien
tatgtataaaaatgcgtccagtccg

SEQ ID NO: 3946687 - DNA, 25 bp, Homo sapien
taagacattaactgcaaaatccaaa

SEQ ID NO: 3946688 - DNA, 25 bp, Homo sapien
ctgggattcagcgtcgttgtcattt

SEQ ID NO: 3946689 - DNA, 25 bp, Homo sapien
tcagcgtcgttgtcatttcctgtgt

SEQ ID NO: 3946690 - DNA, 25 bp, Homo sapien
acattaactgcaaaatccaaaatgg

SEQ ID NO: 3946691 - DNA, 25 bp, Homo sapien
cctgatgagactttagtcgagaata

SEQ ID NO: 3946692 - DNA, 25 bp, Homo sapien
tacatgagaaccgtgctggtcacta

SEQ ID NO: 3946693 - DNA, 25 bp, Homo sapien
tgccaccagtggttcgcgaggttcc

SEQ ID NO: 3946694 - DNA, 25 bp, Homo sapien
ggttccgtttctcagctcaggaggg

SEQ ID NO: 3946695 - DNA, 25 bp, Homo sapien
actgggggcacagagcgccatttcc

SEQ ID NO: 3946696 - DNA, 25 bp, Homo sapien
ctgtccgctcctggccgtaaagaga

SEQ ID NO: 3946697 - DNA, 25 bp, Homo sapien
acagagcgccatttcctggcctcca

SEQ ID NO: 3946698 - DNA, 25 bp, Homo sapien
tcctggccgtaaagagacagtcact

SEQ ID NO: 3946699 - DNA, 25 bp, Homo sapien
ggcgtggacgcccatcgatgcctgt

SEQ ID NO: 3946700 - DNA, 25 bp, Homo sapien
cgggcggatgccgttgccagaatcc

SEQ ID NO: 3946701 - DNA, 25 bp, Homo sapien
ccagccgaacgggtgggtggaagcg

SEQ ID NO: 3946702 - DNA, 25 bp, Homo sapien
cgaggagaacgtgagtgccaaccac

SEQ ID NO: 3946703 - DNA, 25 bp, Homo sapien
gaagggcggcctgcgctcctgcggg

SEQ ID NO: 3946704 - DNA, 25 bp, Homo sapien
gggacctgcgggacctgcggactgg

SEQ ID NO: 3946705 - DNA, 25 bp, Homo sapien
cgcgtgttctcagcgctgtcccggg

SEQ ID NO: 3946706 - DNA, 25 bp, Homo sapien
tcctgtgggcgcagaggacgggagg

SEQ ID NO: 3946707 - DNA, 25 bp, Homo sapien
ggcttggagcggcctgcacacctgg

SEQ ID NO: 3946708 - DNA, 25 bp, Homo sapien
gcttggagcggcctgcacacctggc

SEQ ID NO: 3946709 - DNA, 25 bp, Homo sapien
gggcttggagcggcctgcacacctg

SEQ ID NO: 3946710 - DNA, 25 bp, Homo sapien
atgtgtgcagccaggtcagaaacag

SEQ ID NO: 3946711 - DNA, 25 bp, Homo sapien
gccaggtcagaaacaggaggccggg

SEQ ID NO: 3946712 - DNA, 25 bp, Homo sapien
gtgggccaggcatgtgtgcagccag

SEQ ID NO: 3946713 - DNA, 25 bp, Homo sapien
tcatggtgggccaggcatgtgtgca

SEQ ID NO: 3946714 - DNA, 25 bp, Homo sapien
ccgagtagcagtgtggggtaccgtg

SEQ ID NO: 3946715 - DNA, 25 bp, Homo sapien
gccgagtagcagtgtggggtaccgt

SEQ ID NO: 3946716 - DNA, 25 bp, Homo sapien
cgagtagcagtgtggggtaccgtga

SEQ ID NO: 3946717 - DNA, 25 bp, Homo sapien
gggcagttcctcagccgagtagcag

SEQ ID NO: 3946718 - DNA, 25 bp, Homo sapien
gcactgggtcgtagctgagggcctc

SEQ ID NO: 3946719 - DNA, 25 bp, Homo sapien
accgggcactgggtcgtagctgagg

SEQ ID NO: 3946720 - DNA, 25 bp, Homo sapien
tcgtgcctccccctgtggcttgctg

SEQ ID NO: 3946721 - DNA, 25 bp, Homo sapien
agcctgcccccacttggcacctcga

SEQ ID NO: 3946722 - DNA, 25 bp, Homo sapien
cgcacggagttgagcgcagctgtct

SEQ ID NO: 3946723 - DNA, 25 bp, Homo sapien
tgcatcgatacagcctctgcacagg

SEQ ID NO: 3946724 - DNA, 25 bp, Homo sapien
gatagcggtcctcatccgtgtccac

SEQ ID NO: 3946725 - DNA, 25 bp, Homo sapien
tgcacaggcactcggcgaaggccag

SEQ ID NO: 3946726 - DNA, 25 bp, Homo sapien
cagtttaataatacacgtacactta

SEQ ID NO: 3946727 - DNA, 25 bp, Homo sapien
ttttctgcagctttaagggctggaa

SEQ ID NO: 3946728 - DNA, 25 bp, Homo sapien
gggagcacacgtgtccagtctaggg

SEQ ID NO: 3946729 - DNA, 25 bp, Homo sapien
tctacccccaactactgaggctgga

SEQ ID NO: 3946730 - DNA, 25 bp, Homo sapien
tgaccgacgaggtcgtgtgacctcg

SEQ ID NO: 3946731 - DNA, 25 bp, Homo sapien
gaggtcgtgtgacctcgccccggac

SEQ ID NO: 3946732 - DNA, 25 bp, Homo sapien
ggcccgcaagaagcccagcgaggag

SEQ ID NO: 3946733 - DNA, 25 bp, Homo sapien
ccatcccggtgaccgacgaggtcgt

SEQ ID NO: 3946734 - DNA, 25 bp, Homo sapien
tgcaccagcgctttgccaagatggg

SEQ ID NO: 3946735 - DNA, 25 bp, Homo sapien
tatgagaactggcagagcctcggtg

SEQ ID NO: 3946736 - DNA, 25 bp, Homo sapien
gaaaccaccaagtgcctcggatggt

SEQ ID NO: 3946737 - DNA, 25 bp, Homo sapien
gcagcagggctgaagggctttctca

SEQ ID NO: 3946738 - DNA, 25 bp, Homo sapien
gggccattttgcatccctacggtga

SEQ ID NO: 3946739 - DNA, 25 bp, Homo sapien
cattttagccgcgtcctggtaggga

SEQ ID NO: 3946740 - DNA, 25 bp, Homo sapien
tggccagtgacgtggagcatctttc

SEQ ID NO: 3946741 - DNA, 25 bp, Homo sapien
cctacggtgatgcagattttccgca

SEQ ID NO: 3946742 - DNA, 25 bp, Homo sapien
ccgcaaagagcatctaacgttttct

SEQ ID NO: 3946743 - DNA, 25 bp, Homo sapien
tttcccttaccaataaagctgccat

SEQ ID NO: 3946744 - DNA, 25 bp, Homo sapien
agccaaggcctcaccccgcaaagag

SEQ ID NO: 3946745 - DNA, 25 bp, Homo sapien
tcttttctttccagaagccgccacc

SEQ ID NO: 3946746 - DNA, 25 bp, Homo sapien
gcccagaccccggatcgccgacgcg

SEQ ID NO: 3946747 - DNA, 25 bp, Homo sapien
gccgcgcccagaccccggatcgccg

SEQ ID NO: 3946748 - DNA, 25 bp, Homo sapien
cagaccccggatcgccgacgcggac

SEQ ID NO: 3946749 - DNA, 25 bp, Homo sapien
ctcgccgcgcccagaccccggatcg

SEQ ID NO: 3946750 - DNA, 25 bp, Homo sapien
tcacgggccccacacagctgtcgca

SEQ ID NO: 3946751 - DNA, 25 bp, Homo sapien
ggccccacacagctgtcgcacagcg

SEQ ID NO: 3946752 - DNA, 25 bp, Homo sapien
acgggccccacacagctgtcgcaca

SEQ ID NO: 3946753 - DNA, 25 bp, Homo sapien
ctcacgggccccacacagctgtcgc

SEQ ID NO: 3946754 - DNA, 25 bp, Homo sapien
taatttctaatgagggtaaatacag

SEQ ID NO: 3946755 - DNA, 25 bp, Homo sapien
tttctaatgagggtaaatacagatt

SEQ ID NO: 3946756 - DNA, 25 bp, Homo sapien
aatttctaatgagggtaaatacaga

SEQ ID NO: 3946757 - DNA, 25 bp, Homo sapien
atttctaatgagggtaaatacagat

SEQ ID NO: 3946758 - DNA, 25 bp, Homo sapien
gcatcaaccaaacgacataacgcag

SEQ ID NO: 3946759 - DNA, 25 bp, Homo sapien
gaacagccaccctgatctgaagagg

SEQ ID NO: 3946760 - DNA, 25 bp, Homo sapien
cctgcagttgtggagagcacagatt

SEQ ID NO: 3946761 - DNA, 25 bp, Homo sapien
ggagggtccagctatccacatctgc

SEQ ID NO: 3946762 - DNA, 25 bp, Homo sapien
tctggaagccccgtgtaaggcagtg

SEQ ID NO: 3946763 - DNA, 25 bp, Homo sapien
aactcttactgacgggtgggcctca

SEQ ID NO: 3946764 - DNA, 25 bp, Homo sapien
tgaagcaggtcaacatctggaagcc

SEQ ID NO: 3946765 - DNA, 25 bp, Homo sapien
gaccgatgtagatgttaggaacccc

SEQ ID NO: 3946766 - DNA, 25 bp, Homo sapien
gagaacacggacctgggtcttggca

SEQ ID NO: 3946767 - DNA, 25 bp, Homo sapien
agctcgtcgggatagccctcatggt

SEQ ID NO: 3946768 - DNA, 25 bp, Homo sapien
cagtttcgggatggccctcatggtc

SEQ ID NO: 3946769 - DNA, 25 bp, Homo sapien
gcccacgctcacacggaggaaagat

SEQ ID NO: 3946770 - DNA, 25 bp, Homo sapien
cctggttctggcacatcccccacat

SEQ ID NO: 3946771 - DNA, 25 bp, Homo sapien
gggtctccctcgtctcagaacaagt

SEQ ID NO: 3946772 - DNA, 25 bp, Homo sapien
agaccctctaagtggcttctgctgg

SEQ ID NO: 3946773 - DNA, 25 bp, Homo sapien
aagcatcatttctgcggtgccgtga

SEQ ID NO: 3946774 - DNA, 25 bp, Homo sapien
caagttgttcttacaggtggtctgc

SEQ ID NO: 3946775 - DNA, 25 bp, Homo sapien
gggtaaatctgtggacctctcagca

SEQ ID NO: 3946776 - DNA, 25 bp, Homo sapien
gggttgagttagtcacaaagccttg

SEQ ID NO: 3946777 - DNA, 25 bp, Homo sapien
catctcccagtcttgagccgggtaa

SEQ ID NO: 3946778 - DNA, 25 bp, Homo sapien
ctctcagcaaacaagaggcattctt

SEQ ID NO: 3946779 - DNA, 25 bp, Homo sapien
gacctcgcggatggcagaacattct

SEQ ID NO: 3946780 - DNA, 25 bp, Homo sapien
ggaaaattagtagggccctgcgtgc

SEQ ID NO: 3946781 - DNA, 25 bp, Homo sapien
ggctaagtatagctccctggcagag

SEQ ID NO: 3946782 - DNA, 25 bp, Homo sapien
gaacaaaagcttccaggcgtacacg

SEQ ID NO: 3946783 - DNA, 25 bp, Homo sapien
aaatatggtcacaagcggagggccc

SEQ ID NO: 3946784 - DNA, 25 bp, Homo sapien
gacgacacctgtttgaagagccttg

SEQ ID NO: 3946785 - DNA, 25 bp, Homo sapien
ggaagcttgacctagaccttgggct

SEQ ID NO: 3946786 - DNA, 25 bp, Homo sapien
gctccgctggatcaagggtgacctt

SEQ ID NO: 3946787 - DNA, 25 bp, Homo sapien
ggttccatttcgacacggccaggtc

SEQ ID NO: 3946788 - DNA, 25 bp, Homo sapien
ctcagacgccaagaagtaccggtgc

SEQ ID NO: 3946789 - DNA, 25 bp, Homo sapien
aatcagaaccaaagaagtccagcgg

SEQ ID NO: 3946790 - DNA, 25 bp, Homo sapien
gacttatagtgagcaccgccctgtg

SEQ ID NO: 3946791 - DNA, 25 bp, Homo sapien
gaaaatcatttggacctgggaggtg

SEQ ID NO: 3946792 - DNA, 25 bp, Homo sapien
gcaggaaaatcatttggacctggga

SEQ ID NO: 3946793 - DNA, 25 bp, Homo sapien
aggcaggaaaatcatttggacctgg

SEQ ID NO: 3946794 - DNA, 25 bp, Homo sapien
aggaaaatcatttggacctgggagg

SEQ ID NO: 3946795 - DNA, 25 bp, Homo sapien
cagaaacacatggtcagcctgacgg

SEQ ID NO: 3946796 - DNA, 25 bp, Homo sapien
aactctcttggacgctgcctcttag

SEQ ID NO: 3946797 - DNA, 25 bp, Homo sapien
cattgccgtcacttctgggtggaca

SEQ ID NO: 3946798 - DNA, 25 bp, Homo sapien
gatgggaggcgttcctttgaatccc

SEQ ID NO: 3946799 - DNA, 25 bp, Homo sapien
gacacgagagaagaggactctgtcc

SEQ ID NO: 3946800 - DNA, 25 bp, Homo sapien
caagaggcctttatcccagctcaga

SEQ ID NO: 3946801 - DNA, 25 bp, Homo sapien
tgcctgctaggcttagggacacgag

SEQ ID NO: 3946802 - DNA, 25 bp, Homo sapien
caggctgggctaaagggctgcaatc

SEQ ID NO: 3946803 - DNA, 25 bp, Homo sapien
ctggagtcatcttcctggcgcacac

SEQ ID NO: 3946804 - DNA, 25 bp, Homo sapien
cagggcgggcgggattctctcccaa

SEQ ID NO: 3946805 - DNA, 25 bp, Homo sapien
agccccagctaaaggcaccctggag

SEQ ID NO: 3946806 - DNA, 25 bp, Homo sapien
ggaactcacccctgatatacagccg

SEQ ID NO: 3946807 - DNA, 25 bp, Homo sapien
tccttcctggtgaaaacgcactcca

SEQ ID NO: 3946808 - DNA, 25 bp, Homo sapien
gacgcagagaggtactgactacccg

SEQ ID NO: 3946809 - DNA, 25 bp, Homo sapien
ggcggcgcgctatgctaatgagcct

SEQ ID NO: 3946810 - DNA, 25 bp, Homo sapien
gattctcgctcggtttccacacagc

SEQ ID NO: 3946811 - DNA, 25 bp, Homo sapien
ccagtagggctggtcactagggtca

SEQ ID NO: 3946812 - DNA, 25 bp, Homo sapien
tagggtcagcttcgtttcgcctggg

SEQ ID NO: 3946813 - DNA, 25 bp, Homo sapien
gagtgagcgtcattctccgcagcaa

SEQ ID NO: 3946814 - DNA, 25 bp, Homo sapien
gaggcactggacaaactcctaaagg

SEQ ID NO: 3946815 - DNA, 25 bp, Homo sapien
aaagctgactgtgccccgctgcggg

SEQ ID NO: 3946816 - DNA, 25 bp, Homo sapien
gagtcctggccttggcccgctgtca

SEQ ID NO: 3946817 - DNA, 25 bp, Homo sapien
gaggggacggcaccccagtggtggc

SEQ ID NO: 3946818 - DNA, 25 bp, Homo sapien
tcaaagctgactgtgccccgctgcg

SEQ ID NO: 3946819 - DNA, 25 bp, Homo sapien
gacacatgggcacgccgggtcccgt

SEQ ID NO: 3946820 - DNA, 25 bp, Homo sapien
actgtggcggcgacagcgcgagggc

SEQ ID NO: 3946821 - DNA, 25 bp, Homo sapien
cccgtcgcagactgtggcggcgaca

SEQ ID NO: 3946822 - DNA, 25 bp, Homo sapien
acgccgggtcccgtcgcagactgtg

SEQ ID NO: 3946823 - DNA, 25 bp, Homo sapien
gccggctccccgtagtcctcgccca

SEQ ID NO: 3946824 - DNA, 25 bp, Homo sapien
gctcctcaggcgccggctccccgta

SEQ ID NO: 3946825 - DNA, 25 bp, Homo sapien
tcctcaggcgccggctccccgtagt

SEQ ID NO: 3946826 - DNA, 25 bp, Homo sapien
tcaggcgccggctccccgtagtcct

SEQ ID NO: 3946827 - DNA, 25 bp, Homo sapien
tgcagaaggcatctccggctcgtat

SEQ ID NO: 3946828 - DNA, 25 bp, Homo sapien
gggctgcgcttccttgcacttcaca

SEQ ID NO: 3946829 - DNA, 25 bp, Homo sapien
ctgcagaaggcatctccggctcgta

SEQ ID NO: 3946830 - DNA, 25 bp, Homo sapien
cggctcgtatcaccacaacgggctg

SEQ ID NO: 3946831 - DNA, 25 bp, Homo sapien
cgaccaggtacaaactgcacagcca

SEQ ID NO: 3946832 - DNA, 25 bp, Homo sapien
ccacgaccaggtacaaactgcacag

SEQ ID NO: 3946833 - DNA, 25 bp, Homo sapien
accaggtacaaactgcacagccacg

SEQ ID NO: 3946834 - DNA, 25 bp, Homo sapien
aggtacaaactgcacagccacggag

SEQ ID NO: 3946835 - DNA, 25 bp, Homo sapien
gagatgagggaaccgcctgctaccc

SEQ ID NO: 3946836 - DNA, 25 bp, Homo sapien
gcgctgccaggtgacgacgtccttt

SEQ ID NO: 3946837 - DNA, 25 bp, Homo sapien
acagtgagcagcgtcctgaggcgct

SEQ ID NO: 3946838 - DNA, 25 bp, Homo sapien
gacgacgtcctttgccaatctccat

SEQ ID NO: 3946839 - DNA, 25 bp, Homo sapien
ggttcttgcccagcatggctctgaa

SEQ ID NO: 3946840 - DNA, 25 bp, Homo sapien
ccggttcttgcccagcatggctctg

SEQ ID NO: 3946841 - DNA, 25 bp, Homo sapien
cctggaaagatgagccggttcttgc

SEQ ID NO: 3946842 - DNA, 25 bp, Homo sapien
ttctcgcctggaaagatgagccggt

SEQ ID NO: 3946843 - DNA, 25 bp, Homo sapien
gacatctaggacatcgagtctgtcc

SEQ ID NO: 3946844 - DNA, 25 bp, Homo sapien
tggacatctaggacatcgagtctgt

SEQ ID NO: 3946845 - DNA, 25 bp, Homo sapien
catctaggacatcgagtctgtcctc

SEQ ID NO: 3946846 - DNA, 25 bp, Homo sapien
tctaggacatcgagtctgtcctcaa

SEQ ID NO: 3946847 - DNA, 25 bp, Homo sapien
ggccccccagaccacgccaagagca

SEQ ID NO: 3946848 - DNA, 25 bp, Homo sapien
gccccccagaccacgccaagagcac

SEQ ID NO: 3946849 - DNA, 25 bp, Homo sapien
gaacctgccagaccatggagctgga

SEQ ID NO: 3946850 - DNA, 25 bp, Homo sapien
gccacaaagcgcagtcttttggcag

SEQ ID NO: 3946851 - DNA, 25 bp, Homo sapien
gatgactcctgccacaaagcgcagt

SEQ ID NO: 3946852 - DNA, 25 bp, Homo sapien
aacaaagatgactcctgccacaaag

SEQ ID NO: 3946853 - DNA, 25 bp, Homo sapien
caaagcgcagtcttttggcagaatc

SEQ ID NO: 3946854 - DNA, 25 bp, Homo sapien
taacgatggatacatctgctgcctc

SEQ ID NO: 3946855 - DNA, 25 bp, Homo sapien
atccgcagggcttaccccaagtggc

SEQ ID NO: 3946856 - DNA, 25 bp, Homo sapien
tagctcaacacatcctaccagaggg

SEQ ID NO: 3946857 - DNA, 25 bp, Homo sapien
gaacagtgatgccacctaacgatgg

SEQ ID NO: 3946858 - DNA, 25 bp, Homo sapien
gctacagtcaacaccccaggagttc

SEQ ID NO: 3946859 - DNA, 25 bp, Homo sapien
tgtcggccattttcctttgggcagg

SEQ ID NO: 3946860 - DNA, 25 bp, Homo sapien
ggcggtgcttcctggcggagctgtg

SEQ ID NO: 3946861 - DNA, 25 bp, Homo sapien
tgcggctgacctcagcgctacagtc

SEQ ID NO: 3946862 - DNA, 25 bp, Homo sapien
taaggccaccacatgccatgggaac

SEQ ID NO: 3946863 - DNA, 25 bp, Homo sapien
tcacttcggccagggtctttgatct

SEQ ID NO: 3946864 - DNA, 25 bp, Homo sapien
ccatgggaacccagttgcttgcaga

SEQ ID NO: 3946865 - DNA, 25 bp, Homo sapien
ggtctttgatctctcctctaggctc

SEQ ID NO: 3946866 - DNA, 25 bp, Homo sapien
ccgggatgagggagacgccagtgag

SEQ ID NO: 3946867 - DNA, 25 bp, Homo sapien
agtgaggcccgggacacgggcaggt

SEQ ID NO: 3946868 - DNA, 25 bp, Homo sapien
gaggcccgggacacgggcaggtgcc

SEQ ID NO: 3946869 - DNA, 25 bp, Homo sapien
cttccgggatgagggagacgccagt

SEQ ID NO: 3946870 - DNA, 25 bp, Homo sapien
tgttcctccccttgagtcgggccag

SEQ ID NO: 3946871 - DNA, 25 bp, Homo sapien
ggcaggcggtcttgccaggttctgg

SEQ ID NO: 3946872 - DNA, 25 bp, Homo sapien
aggaagctgtccacggccgccttgt

SEQ ID NO: 3946873 - DNA, 25 bp, Homo sapien
aagcaccgacggtggcaggctgaac

SEQ ID NO: 3946874 - DNA, 25 bp, Homo sapien
ttggcagtcagtgtcctcactgagc

SEQ ID NO: 3946875 - DNA, 25 bp, Homo sapien
agaacagttgggaaagagcctcagt

SEQ ID NO: 3946876 - DNA, 25 bp, Homo sapien
ggcagtcagtgtcctcactgagcag

SEQ ID NO: 3946877 - DNA, 25 bp, Homo sapien
ctccttggcagtcagtgtcctcact

SEQ ID NO: 3946878 - DNA, 25 bp, Homo sapien
ggcccctcgacccagcgccaggttg

SEQ ID NO: 3946879 - DNA, 25 bp, Homo sapien
gtcatgagcttgatagccaagcgtg

SEQ ID NO: 3946880 - DNA, 25 bp, Homo sapien
atgaccttggagtagccgtgggctc

SEQ ID NO: 3946881 - DNA, 25 bp, Homo sapien
atagccaagcgtgtgcagctgtccc

SEQ ID NO: 3946882 - DNA, 25 bp, Homo sapien
tcaaggcccgaatgtgcttgcccct

SEQ ID NO: 3946883 - DNA, 25 bp, Homo sapien
aggtcaaggcccgaatgtgcttgcc

SEQ ID NO: 3946884 - DNA, 25 bp, Homo sapien
atccgaggccgcaggactgatacgc

SEQ ID NO: 3946885 - DNA, 25 bp, Homo sapien
gactgatacgcgagaggctactctc

SEQ ID NO: 3946886 - DNA, 25 bp, Homo sapien
aagacagaaggaacggagaacaggc

SEQ ID NO: 3946887 - DNA, 25 bp, Homo sapien
tggtgtcgacggctggtgtgaagac

SEQ ID NO: 3946888 - DNA, 25 bp, Homo sapien
gtccccgtgccgctcatccgagaag

SEQ ID NO: 3946889 - DNA, 25 bp, Homo sapien
tgtagaaagcgacctccttcagggt

SEQ ID NO: 3946890 - DNA, 25 bp, Homo sapien
gcccaccccggtgtcaatggtgaga

SEQ ID NO: 3946891 - DNA, 25 bp, Homo sapien
ccacatggcccaccccggtgtcaat

SEQ ID NO: 3946892 - DNA, 25 bp, Homo sapien
tgtcaatggtgagagaggttgccca

SEQ ID NO: 3946893 - DNA, 25 bp, Homo sapien
tggcccaccccggtgtcaatggtga

SEQ ID NO: 3946894 - DNA, 25 bp, Homo sapien
cagccggtggatgctggccttttca

SEQ ID NO: 3946895 - DNA, 25 bp, Homo sapien
tcagccggtggatgctggccttttc

SEQ ID NO: 3946896 - DNA, 25 bp, Homo sapien
tccatcagccggtggatgctggcct

SEQ ID NO: 3946897 - DNA, 25 bp, Homo sapien
catcagccggtggatgctggccttt

SEQ ID NO: 3946898 - DNA, 25 bp, Homo sapien
gcgtcgacgtccagggcacacatgc

SEQ ID NO: 3946899 - DNA, 25 bp, Homo sapien
agcggcgtcgacgtccagggcacac

SEQ ID NO: 3946900 - DNA, 25 bp, Homo sapien
cagcggcgtcgacgtccagggcaca

SEQ ID NO: 3946901 - DNA, 25 bp, Homo sapien
cggcgtcgacgtccagggcacacat

SEQ ID NO: 3946902 - DNA, 25 bp, Homo sapien
tcaccccaagagcatgaaacacaga

SEQ ID NO: 3946903 - DNA, 25 bp, Homo sapien
gagggggtgacggagcctggggctg

SEQ ID NO: 3946904 - DNA, 25 bp, Homo sapien
agggggtgacggagcctggggctgc

SEQ ID NO: 3946905 - DNA, 25 bp, Homo sapien
agcagagagggggtgacggagcctg

SEQ ID NO: 3946906 - DNA, 25 bp, Homo sapien
agagagggggtgacggagcctgggg

SEQ ID NO: 3946907 - DNA, 25 bp, Homo sapien
cgcgaggaggtctgagccccaaaag

SEQ ID NO: 3946908 - DNA, 25 bp, Homo sapien
tgtccgggtctcagtcagggggatg

SEQ ID NO: 3946909 - DNA, 25 bp, Homo sapien
ggagagacgcgaggaggtctgagcc

SEQ ID NO: 3946910 - DNA, 25 bp, Homo sapien
tgagccccaaaagccgtggcactgt

SEQ ID NO: 3946911 - DNA, 25 bp, Homo sapien
cttggcacctcaatgccgtgcagtg

SEQ ID NO: 3946912 - DNA, 25 bp, Homo sapien
tggcacctcaatgccgtgcagtgtg

SEQ ID NO: 3946913 - DNA, 25 bp, Homo sapien
accttggcacctcaatgccgtgcag

SEQ ID NO: 3946914 - DNA, 25 bp, Homo sapien
ccaccttggcacctcaatgccgtgc

SEQ ID NO: 3946915 - DNA, 25 bp, Homo sapien
atgttcacgcggcagctgtagcaca

SEQ ID NO: 3946916 - DNA, 25 bp, Homo sapien
gtccttcatgttcacgcggcagctg

SEQ ID NO: 3946917 - DNA, 25 bp, Homo sapien
ccttcatgttcacgcggcagctgta

SEQ ID NO: 3946918 - DNA, 25 bp, Homo sapien
aagtccttcatgttcacgcggcagc

SEQ ID NO: 3946919 - DNA, 25 bp, Homo sapien
caacagaggccggtgtcgaggggcc

SEQ ID NO: 3946920 - DNA, 25 bp, Homo sapien
ctgcaacagaggccggtgtcgaggg

SEQ ID NO: 3946921 - DNA, 25 bp, Homo sapien
gaggccggtgtcgaggggccaagaa

SEQ ID NO: 3946922 - DNA, 25 bp, Homo sapien
cagaggccggtgtcgaggggccaag

SEQ ID NO: 3946923 - DNA, 25 bp, Homo sapien
tacggcggcagggggtccagtgagg

SEQ ID NO: 3946924 - DNA, 25 bp, Homo sapien
cctcagccaggatgtacggcggcag

SEQ ID NO: 3946925 - DNA, 25 bp, Homo sapien
acggcggcagggggtccagtgaggg

SEQ ID NO: 3946926 - DNA, 25 bp, Homo sapien
gggcctcagccaggatgtacggcgg

SEQ ID NO: 3946927 - DNA, 25 bp, Homo sapien
ttacccacgcgccacggcagtgtgg

SEQ ID NO: 3946928 - DNA, 25 bp, Homo sapien
cccttacccacgcgccacggcagtg

SEQ ID NO: 3946929 - DNA, 25 bp, Homo sapien
gccccttacccacgcgccacggcag

SEQ ID NO: 3946930 - DNA, 25 bp, Homo sapien
cttacccacgcgccacggcagtgtg

SEQ ID NO: 3946931 - DNA, 25 bp, Homo sapien
ctccagtgtggtgtaccaggtggcc

SEQ ID NO: 3946932 - DNA, 25 bp, Homo sapien
cgcctcgtcgtcactgtcctcaatc

SEQ ID NO: 3946933 - DNA, 25 bp, Homo sapien
ggcaagcacgtcctcacgctcagct

SEQ ID NO: 3946934 - DNA, 25 bp, Homo sapien
actgcctgctgtcccggcaagcacg

SEQ ID NO: 3946935 - DNA, 25 bp, Homo sapien
cattatgttcgaggagctgccgtgc

SEQ ID NO: 3946936 - DNA, 25 bp, Homo sapien
tccatcgtgctggtcatcggcaagt

SEQ ID NO: 3946937 - DNA, 25 bp, Homo sapien
accagtctgtgtgagtgaagggccc

SEQ ID NO: 3946938 - DNA, 25 bp, Homo sapien
gctcaccggagaccatgatcaagtg

SEQ ID NO: 3946939 - DNA, 25 bp, Homo sapien
gagttcaagatctgcacggccacaa

SEQ ID NO: 3946940 - DNA, 25 bp, Homo sapien
agtaccatggtggttgaccgcgccc

SEQ ID NO: 3946941 - DNA, 25 bp, Homo sapien
cagagagaattcgtgcgtcagacca

SEQ ID NO: 3946942 - DNA, 25 bp, Homo sapien
gaagaaacccagtgcccattggctg

SEQ ID NO: 3946943 - DNA, 25 bp, Homo sapien
gcggctgcagggcttctgcctgtcc

SEQ ID NO: 3946944 - DNA, 25 bp, Homo sapien
caagccgctctggaggaagagtaag

SEQ ID NO: 3946945 - DNA, 25 bp, Homo sapien
tctggaggaagagtaagggcggccg

SEQ ID NO: 3946946 - DNA, 25 bp, Homo sapien
gaggccaagccgctctggaggaaga

SEQ ID NO: 3946947 - DNA, 25 bp, Homo sapien
ctatcaagcgtcacctaggccagct

SEQ ID NO: 3946948 - DNA, 25 bp, Homo sapien
gcagtcgccatcctgtgagatcagc

SEQ ID NO: 3946949 - DNA, 25 bp, Homo sapien
ctcttccttgttgaaatacctgcta

SEQ ID NO: 3946950 - DNA, 25 bp, Homo sapien
tgcctgttgctacagggctgcctca

SEQ ID NO: 3946951 - DNA, 25 bp, Homo sapien
gacaaccttgtgttggcacgggcac

SEQ ID NO: 3946952 - DNA, 25 bp, Homo sapien
tgtgagcgtgggctctgttggcacg

SEQ ID NO: 3946953 - DNA, 25 bp, Homo sapien
cactgtgtgagcgtgggctctgttg

SEQ ID NO: 3946954 - DNA, 25 bp, Homo sapien
ataaacagacaaccttgtgttggca

SEQ ID NO: 3946955 - DNA, 25 bp, Homo sapien
tcctgagagtcttcaggtgcgcaga

SEQ ID NO: 3946956 - DNA, 25 bp, Homo sapien
tcagggacggtgtcagcccaattgc

SEQ ID NO: 3946957 - DNA, 25 bp, Homo sapien
cagggccatccctgacgctcaggga

SEQ ID NO: 3946958 - DNA, 25 bp, Homo sapien
gcccaattgccggagccctcgtgtt

SEQ ID NO: 3946959 - DNA, 25 bp, Homo sapien
cgacaccgaggctgataactgcatc

SEQ ID NO: 3946960 - DNA, 25 bp, Homo sapien
tggtgagtaccgcacactgcaaggt

SEQ ID NO: 3946961 - DNA, 25 bp, Homo sapien
tccccagagaatgtggctatgctgt

SEQ ID NO: 3946962 - DNA, 25 bp, Homo sapien
taactgcatcgtgcacgagctgacc

SEQ ID NO: 3946963 - DNA, 25 bp, Homo sapien
tctcaaggacttcgtgggtcccacc

SEQ ID NO: 3946964 - DNA, 25 bp, Homo sapien
gcctgccggcatctgggctaggtaa

SEQ ID NO: 3946965 - DNA, 25 bp, Homo sapien
acgggtcttctctggacagggtgct

SEQ ID NO: 3946966 - DNA, 25 bp, Homo sapien
gctaggtaacggcttgccacacagc

SEQ ID NO: 3946967 - DNA, 25 bp, Homo sapien
tccgaaagatctagaagccccatga

SEQ ID NO: 3946968 - DNA, 25 bp, Homo sapien
gaaatctttagtcaggtccagggaa

SEQ ID NO: 3946969 - DNA, 25 bp, Homo sapien
ggtcctggccgtaacactgcttgca

SEQ ID NO: 3946970 - DNA, 25 bp, Homo sapien
cacacacgtgtttgcaggcatgcga

SEQ ID NO: 3946971 - DNA, 25 bp, Homo sapien
aggggcgctccgcatgctctggtct

SEQ ID NO: 3946972 - DNA, 25 bp, Homo sapien
ggcgctccgcatgctctggtctcca

SEQ ID NO: 3946973 - DNA, 25 bp, Homo sapien
cagccacggctgctcaggggcgctc

SEQ ID NO: 3946974 - DNA, 25 bp, Homo sapien
tgctcaggggcgctccgcatgctct

SEQ ID NO: 3946975 - DNA, 25 bp, Homo sapien
actttggtccggacccctgctgaag

SEQ ID NO: 3946976 - DNA, 25 bp, Homo sapien
gaagggcctgagctgttctgcactt

SEQ ID NO: 3946977 - DNA, 25 bp, Homo sapien
tctgcactttctcgtggccgggcgt

SEQ ID NO: 3946978 - DNA, 25 bp, Homo sapien
ggtgagctgtccacatgtgcgccga

SEQ ID NO: 3946979 - DNA, 25 bp, Homo sapien
acctaacaccatttgtgctcaaaaa

SEQ ID NO: 3946980 - DNA, 25 bp, Homo sapien
cacctaacaccatttgtgctcaaaa

SEQ ID NO: 3946981 - DNA, 25 bp, Homo sapien
cctaacaccatttgtgctcaaaaaa

SEQ ID NO: 3946982 - DNA, 25 bp, Homo sapien
tcacctaacaccatttgtgctcaaa

SEQ ID NO: 3946983 - DNA, 25 bp, Homo sapien
tgagtgtgagaagctggtccaaacc

SEQ ID NO: 3946984 - DNA, 25 bp, Homo sapien
ttcaacgtcaggctagagggtgcag

SEQ ID NO: 3946985 - DNA, 25 bp, Homo sapien
ggtgttctcatgtcaccccacggtg

SEQ ID NO: 3946986 - DNA, 25 bp, Homo sapien
cgctggcgaggttacttcaacgtca

SEQ ID NO: 3946987 - DNA, 25 bp, Homo sapien
tgggtttaagtgaaagtgattctcc

SEQ ID NO: 3946988 - DNA, 25 bp, Homo sapien
gccactgtgagctgggtgtgtcctg

SEQ ID NO: 3946989 - DNA, 25 bp, Homo sapien
ggtggcaagaatagtccattcccca

SEQ ID NO: 3946990 - DNA, 25 bp, Homo sapien
ctgatccccggctcagcctggtttt

SEQ ID NO: 3946991 - DNA, 25 bp, Homo sapien
cacttgttgagcattggacgttcct

SEQ ID NO: 3946992 - DNA, 25 bp, Homo sapien
taaagtttgtcacgttagccgcatt

SEQ ID NO: 3946993 - DNA, 25 bp, Homo sapien
tcagcagcggtaagcatgttcgcat

SEQ ID NO: 3946994 - DNA, 25 bp, Homo sapien
ggacctacgcttctgactccaggag

SEQ ID NO: 3946995 - DNA, 25 bp, Homo sapien
tctgaacccaaacgcccgatctggg

SEQ ID NO: 3946996 - DNA, 25 bp, Homo sapien
cgtacgaggactagacactcttttt

SEQ ID NO: 3946997 - DNA, 25 bp, Homo sapien
ggctcgtatcgtgccctgggaggaa

SEQ ID NO: 3946998 - DNA, 25 bp, Homo sapien
tcctgctgcagcaccgggtttgttt

SEQ ID NO: 3946999 - DNA, 25 bp, Homo sapien
tgagcgccactgtctcctcagactt

SEQ ID NO: 3947000 - DNA, 25 bp, Homo sapien
tgctggccaggttgactcctgagcg

SEQ ID NO: 3947001 - DNA, 25 bp, Homo sapien
agctttgagggtaggcgccaccgtt

SEQ ID NO: 3947002 - DNA, 25 bp, Homo sapien
tggccccggtttctcatgtcaggat

SEQ ID NO: 3947003 - DNA, 25 bp, Homo sapien
tggctccacttcctttgagaagctc

SEQ ID NO: 3947004 - DNA, 25 bp, Homo sapien
gaagcttcaacccatgggctctcct

SEQ ID NO: 3947005 - DNA, 25 bp, Homo sapien
gagaagctctttcccccgtcttggc

SEQ ID NO: 3947006 - DNA, 25 bp, Homo sapien
tgcttcccaggtgacgaagcttcaa

SEQ ID NO: 3947007 - DNA, 25 bp, Homo sapien
gccaaataaggcagagagcgctctt

SEQ ID NO: 3947008 - DNA, 25 bp, Homo sapien
tggcagctgtcatccgcgaactctg

SEQ ID NO: 3947009 - DNA, 25 bp, Homo sapien
gtttatcggtttctcttccaagcca

SEQ ID NO: 3947010 - DNA, 25 bp, Homo sapien
cactagcacgggagtgtttatcggt

SEQ ID NO: 3947011 - DNA, 25 bp, Homo sapien
ggctgtcacgtctgaagttcgcagg

SEQ ID NO: 3947012 - DNA, 25 bp, Homo sapien
tttaaggagctgacgcacgcgattg

SEQ ID NO: 3947013 - DNA, 25 bp, Homo sapien
tggctgtcaagagccgctgttgcag

SEQ ID NO: 3947014 - DNA, 25 bp, Homo sapien
gctgtgcgctcaggccgggcttctc

SEQ ID NO: 3947015 - DNA, 25 bp, Homo sapien
tactcagatcccctgagcgagggcc

SEQ ID NO: 3947016 - DNA, 25 bp, Homo sapien
tgtcttcacccttcccctagtgagg

SEQ ID NO: 3947017 - DNA, 25 bp, Homo sapien
ggccctgttcctaggagcctggaga

SEQ ID NO: 3947018 - DNA, 25 bp, Homo sapien
cctcctctgcggtttttattcaggg

SEQ ID NO: 3947019 - DNA, 25 bp, Homo sapien
gcctggtcccggagcacacagggca

SEQ ID NO: 3947020 - DNA, 25 bp, Homo sapien
ctgtggggctgtcggcctccctcat

SEQ ID NO: 3947021 - DNA, 25 bp, Homo sapien
tctaaccgctgctacagagtgccat

SEQ ID NO: 3947022 - DNA, 25 bp, Homo sapien
gagcaattgcgggattctctctaac

SEQ ID NO: 3947023 - DNA, 25 bp, Homo sapien
tgtagcactccactgtgagacacgc

SEQ ID NO: 3947024 - DNA, 25 bp, Homo sapien
gttgatacaaaacacctagccggat

SEQ ID NO: 3947025 - DNA, 25 bp, Homo sapien
cagggtactgcgctggactcctgga

SEQ ID NO: 3947026 - DNA, 25 bp, Homo sapien
agccggaaccacagggtactgcgct

SEQ ID NO: 3947027 - DNA, 25 bp, Homo sapien
tgccaggggccaaggttaggcccat

SEQ ID NO: 3947028 - DNA, 25 bp, Homo sapien
gctggactcctggagccatgccagg

SEQ ID NO: 3947029 - DNA, 25 bp, Homo sapien
ctcgagctggtaaaggcgcttcccc

SEQ ID NO: 3947030 - DNA, 25 bp, Homo sapien
gggagccgaggacggcgcggcctgg

SEQ ID NO: 3947031 - DNA, 25 bp, Homo sapien
gctgcaggctcgagctggtaaaggc

SEQ ID NO: 3947032 - DNA, 25 bp, Homo sapien
caggctcgagctggtaaaggcgctt

SEQ ID NO: 3947033 - DNA, 25 bp, Homo sapien
tcagaatgagcgcaatccaggcaaa

SEQ ID NO: 3947034 - DNA, 25 bp, Homo sapien
tgcgtgggactttagcgcggtctcc

SEQ ID NO: 3947035 - DNA, 25 bp, Homo sapien
cggtctccggatcccgcgtgtggct

SEQ ID NO: 3947036 - DNA, 25 bp, Homo sapien
gcatgcgccgacgtgcgggcgtgga

SEQ ID NO: 3947037 - DNA, 25 bp, Homo sapien
cggaccgaaccatcggggcagagca

SEQ ID NO: 3947038 - DNA, 25 bp, Homo sapien
accgaaccatcggggcagagcacgg

SEQ ID NO: 3947039 - DNA, 25 bp, Homo sapien
agggaagggacggggcgcgcatgcg

SEQ ID NO: 3947040 - DNA, 25 bp, Homo sapien
gggaagggacggggcgcgcatgcgc

SEQ ID NO: 3947041 - DNA, 25 bp, Homo sapien
cggagtgcgcggcgaaagcaaggaa

SEQ ID NO: 3947042 - DNA, 25 bp, Homo sapien
ggagtgcgcggcgaaagcaaggaaa

SEQ ID NO: 3947043 - DNA, 25 bp, Homo sapien
gctgccactggtagcggaggccggg

SEQ ID NO: 3947044 - DNA, 25 bp, Homo sapien
gcaggccagcttgggcggcgcgatg

SEQ ID NO: 3947045 - DNA, 25 bp, Homo sapien
caccgacagccgcagtctcctgcgg

SEQ ID NO: 3947046 - DNA, 25 bp, Homo sapien
gcggcgcgcgaagaagtcggtgacg

SEQ ID NO: 3947047 - DNA, 25 bp, Homo sapien
ctgctgccggggtggatttctttat

SEQ ID NO: 3947048 - DNA, 25 bp, Homo sapien
tgccggggtggatttctttatcttc

SEQ ID NO: 3947049 - DNA, 25 bp, Homo sapien
caggtggggcggctgacctgctgcc

SEQ ID NO: 3947050 - DNA, 25 bp, Homo sapien
tggtcctgcgcggatgtcaggtggg

SEQ ID NO: 3947051 - DNA, 25 bp, Homo sapien
catggctcctcagggcggccctcgg

SEQ ID NO: 3947052 - DNA, 25 bp, Homo sapien
ccgttgcaggcatgacgcaagctca

SEQ ID NO: 3947053 - DNA, 25 bp, Homo sapien
catgacgcaagctcagagatggtgt

SEQ ID NO: 3947054 - DNA, 25 bp, Homo sapien
gctcccgggcccgttgcaggcatga

SEQ ID NO: 3947055 - DNA, 25 bp, Homo sapien
acctggtacttgtagggcagcacga

SEQ ID NO: 3947056 - DNA, 25 bp, Homo sapien
ccttggcaaaggtgggcgtctcgga

SEQ ID NO: 3947057 - DNA, 25 bp, Homo sapien
cagggcatggaagcgctggtaggcg

SEQ ID NO: 3947058 - DNA, 25 bp, Homo sapien
ggagcatgcccacgatggtgtccat

SEQ ID NO: 3947059 - DNA, 25 bp, Homo sapien
cttgaaggtggggacactgcgctcc

SEQ ID NO: 3947060 - DNA, 25 bp, Homo sapien
tgagctggtaatctgacctcctggt

SEQ ID NO: 3947061 - DNA, 25 bp, Homo sapien
aggccgggtacacggttttgatctg

SEQ ID NO: 3947062 - DNA, 25 bp, Homo sapien
gatctggccaacattgcactcctca

SEQ ID NO: 3947063 - DNA, 25 bp, Homo sapien
ggtgctccttgacatgctccaccag

SEQ ID NO: 3947064 - DNA, 25 bp, Homo sapien
tccaccagcttctggctgaagatct

SEQ ID NO: 3947065 - DNA, 25 bp, Homo sapien
aggaggcgcgaggccgtgagctggg

SEQ ID NO: 3947066 - DNA, 25 bp, Homo sapien
ctgaagatctgccgtcgctgcagga

SEQ ID NO: 3947067 - DNA, 25 bp, Homo sapien
ccatcttcacacagcggggccgggg

SEQ ID NO: 3947068 - DNA, 25 bp, Homo sapien
catcttcacacagcggggccggggg

SEQ ID NO: 3947069 - DNA, 25 bp, Homo sapien
accatcttcacacagcggggccggg

SEQ ID NO: 3947070 - DNA, 25 bp, Homo sapien
atccacgttgaagcgcgggtgccag

SEQ ID NO: 3947071 - DNA, 25 bp, Homo sapien
ggtgccagcgggtcagctggtcctc

SEQ ID NO: 3947072 - DNA, 25 bp, Homo sapien
ggccggctcgatgtcgggtacttca

SEQ ID NO: 3947073 - DNA, 25 bp, Homo sapien
tcctgagcagtggtgagcttctccg

SEQ ID NO: 3947074 - DNA, 25 bp, Homo sapien
cctgggtgaaatcaggttgcgggcc

SEQ ID NO: 3947075 - DNA, 25 bp, Homo sapien
gtgaaatcaggttgcgggcccgggc

SEQ ID NO: 3947076 - DNA, 25 bp, Homo sapien
aaatcaggttgcgggcccgggccag

SEQ ID NO: 3947077 - DNA, 25 bp, Homo sapien
tgggtgaaatcaggttgcgggcccg

SEQ ID NO: 3947078 - DNA, 25 bp, Homo sapien
aatgggctgcccaagcctcgcagtc

SEQ ID NO: 3947079 - DNA, 25 bp, Homo sapien
tgggctgcccaagcctcgcagtctc

SEQ ID NO: 3947080 - DNA, 25 bp, Homo sapien
atgggctgcccaagcctcgcagtct

SEQ ID NO: 3947081 - DNA, 25 bp, Homo sapien
acacccccttcagagcactgggaga

SEQ ID NO: 3947082 - DNA, 25 bp, Homo sapien
gctggtggggtagccggcagtgctg

SEQ ID NO: 3947083 - DNA, 25 bp, Homo sapien
cgcagggccaattgactcaaggcct

SEQ ID NO: 3947084 - DNA, 25 bp, Homo sapien
gcagagcgcagggccaattgactca

SEQ ID NO: 3947085 - DNA, 25 bp, Homo sapien
taccgggacctggttagtgggcagc

SEQ ID NO: 3947086 - DNA, 25 bp, Homo sapien
ggacctggttagtgggcagcaggtc

SEQ ID NO: 3947087 - DNA, 25 bp, Homo sapien
cgggacctggttagtgggcagcagg

SEQ ID NO: 3947088 - DNA, 25 bp, Homo sapien
accgggacctggttagtgggcagca

SEQ ID NO: 3947089 - DNA, 25 bp, Homo sapien
gcaggcttgcgttcggacacaaaga

SEQ ID NO: 3947090 - DNA, 25 bp, Homo sapien
ccagctcaggcagccgttctaagcg

SEQ ID NO: 3947091 - DNA, 25 bp, Homo sapien
ggcaccgcgtcatctgtgccagctg

SEQ ID NO: 3947092 - DNA, 25 bp, Homo sapien
acctccatgctgagcgcaggcttgc

SEQ ID NO: 3947093 - DNA, 25 bp, Homo sapien
cagggctcatgatagtacaacagct

SEQ ID NO: 3947094 - DNA, 25 bp, Homo sapien
aggctgagccagtccggcagcagct

SEQ ID NO: 3947095 - DNA, 25 bp, Homo sapien
tcctcagcacgtgtctggtgggcca

SEQ ID NO: 3947096 - DNA, 25 bp, Homo sapien
tgtgggcgaggtccgcggccttgtc

SEQ ID NO: 3947097 - DNA, 25 bp, Homo sapien
tccagcttgacgtaggtgtcggtgc

SEQ ID NO: 3947098 - DNA, 25 bp, Homo sapien
aggtgagccccatgaaggggcccac

SEQ ID NO: 3947099 - DNA, 25 bp, Homo sapien
ggccagcgagcttctgaagcccacg

SEQ ID NO: 3947100 - DNA, 25 bp, Homo sapien
cacagaaaccggtttaatgtgaatc

SEQ ID NO: 3947101 - DNA, 25 bp, Homo sapien
cagcgagcttctgaagcccacgtct

SEQ ID NO: 3947102 - DNA, 25 bp, Homo sapien
caaaagtcaccctttgctgtgggag

SEQ ID NO: 3947103 - DNA, 25 bp, Homo sapien
tagctggacaattcaggatcacctc

SEQ ID NO: 3947104 - DNA, 25 bp, Homo sapien
tattcagaggttccaagattagagg

SEQ ID NO: 3947105 - DNA, 25 bp, Homo sapien
cagggccgcgtcttcaaagctggct

SEQ ID NO: 3947106 - DNA, 25 bp, Homo sapien
caggctgggagccacccgtggctgt

SEQ ID NO: 3947107 - DNA, 25 bp, Homo sapien
ctgggagccacccgtggctgtgctc

SEQ ID NO: 3947108 - DNA, 25 bp, Homo sapien
ggctgggagccacccgtggctgtgc

SEQ ID NO: 3947109 - DNA, 25 bp, Homo sapien
gctgggagccacccgtggctgtgct

SEQ ID NO: 3947110 - DNA, 25 bp, Homo sapien
acgttggcatgagactcgggacccg

SEQ ID NO: 3947111 - DNA, 25 bp, Homo sapien
gactcaggaactgtgtagctctggg

SEQ ID NO: 3947112 - DNA, 25 bp, Homo sapien
tctgggagacgttggcatgagactc

SEQ ID NO: 3947113 - DNA, 25 bp, Homo sapien
gacgttggcatgagactcgggaccc

SEQ ID NO: 3947114 - DNA, 25 bp, Homo sapien
tgtgtctgccgcctcaattgcctgg

SEQ ID NO: 3947115 - DNA, 25 bp, Homo sapien
ctgatgagcggcctgcgttgtgtct

SEQ ID NO: 3947116 - DNA, 25 bp, Homo sapien
cctgaaggcccagggattggctgct

SEQ ID NO: 3947117 - DNA, 25 bp, Homo sapien
tccctgtttcgagcctcgctgatga

SEQ ID NO: 3947118 - DNA, 25 bp, Homo sapien
tactgccgtgtgtcacgtgggtgct

SEQ ID NO: 3947119 - DNA, 25 bp, Homo sapien
tctcggtgtgtagggcttgctgtgc

SEQ ID NO: 3947120 - DNA, 25 bp, Homo sapien
tcaccgctctcctcggaaccaggtc

SEQ ID NO: 3947121 - DNA, 25 bp, Homo sapien
gggactggagccacgtatactgccg

SEQ ID NO: 3947122 - DNA, 25 bp, Homo sapien
cagcgtccaccggtctgccgggcag

SEQ ID NO: 3947123 - DNA, 25 bp, Homo sapien
gcgtccaccggtctgccgggcagca

SEQ ID NO: 3947124 - DNA, 25 bp, Homo sapien
agtcagcgtccaccggtctgccggg

SEQ ID NO: 3947125 - DNA, 25 bp, Homo sapien
gtccaccggtctgccgggcagcagg

SEQ ID NO: 3947126 - DNA, 25 bp, Homo sapien
caagggccacgcgtctttcagtgga

SEQ ID NO: 3947127 - DNA, 25 bp, Homo sapien
tgtcacctccacatagcgagggcgg

SEQ ID NO: 3947128 - DNA, 25 bp, Homo sapien
ccatgccagaaacggtaggctgccc

SEQ ID NO: 3947129 - DNA, 25 bp, Homo sapien
tttcagtggaatgggtgccgtgccc

SEQ ID NO: 3947130 - DNA, 25 bp, Homo sapien
cagtctcttgggtgtacagctagga

SEQ ID NO: 3947131 - DNA, 25 bp, Homo sapien
gacgtgtacagacatacgagggcct

SEQ ID NO: 3947132 - DNA, 25 bp, Homo sapien
tggacgctcgtatgcaggcctgcgt

SEQ ID NO: 3947133 - DNA, 25 bp, Homo sapien
ggtcacacgataactgggcttctgg

SEQ ID NO: 3947134 - DNA, 25 bp, Homo sapien
tgagtaggactgtcgccaagacctg

SEQ ID NO: 3947135 - DNA, 25 bp, Homo sapien
tccccgttgtaagtcatggcagtga

SEQ ID NO: 3947136 - DNA, 25 bp, Homo sapien
tgggaactgagtctcgcacagcttc

SEQ ID NO: 3947137 - DNA, 25 bp, Homo sapien
cagcgagagtgctcccttgcggtat

SEQ ID NO: 3947138 - DNA, 25 bp, Homo sapien
gtgtccctaaggtctgaagaactga

SEQ ID NO: 3947139 - DNA, 25 bp, Homo sapien
cacctgggttgaaaccctactgtct

SEQ ID NO: 3947140 - DNA, 25 bp, Homo sapien
tgggggtcacttccattcttgaacc

SEQ ID NO: 3947141 - DNA, 25 bp, Homo sapien
aatgctgagcgaaggtcaggtgtcc

SEQ ID NO: 3947142 - DNA, 25 bp, Homo sapien
cgccgctggtcacgcggcctccaaa

SEQ ID NO: 3947143 - DNA, 25 bp, Homo sapien
cttgggaggctcggcgccaggcacc

SEQ ID NO: 3947144 - DNA, 25 bp, Homo sapien
ttgggaggctcggcgccaggcaccg

SEQ ID NO: 3947145 - DNA, 25 bp, Homo sapien
cgtgacccgccgctggtcacgcggc

SEQ ID NO: 3947146 - DNA, 25 bp, Homo sapien
ggcaatcaccgcgatgcacaccgcc

SEQ ID NO: 3947147 - DNA, 25 bp, Homo sapien
ttggcaatcaccgcgatgcacaccg

SEQ ID NO: 3947148 - DNA, 25 bp, Homo sapien
tccttggcaatcaccgcgatgcaca

SEQ ID NO: 3947149 - DNA, 25 bp, Homo sapien
caatcaccgcgatgcacaccgccat

SEQ ID NO: 3947150 - DNA, 25 bp, Homo sapien
tctgcatggctcacccaaatacagc

SEQ ID NO: 3947151 - DNA, 25 bp, Homo sapien
gaatcagaaaaatgggcctgagcac

SEQ ID NO: 3947152 - DNA, 25 bp, Homo sapien
tctgaccattggaagcccagaatta

SEQ ID NO: 3947153 - DNA, 25 bp, Homo sapien
gggatcccagctaacctaaggagat

SEQ ID NO: 3947154 - DNA, 25 bp, Homo sapien
aggcccaggtacagctccctctggt

SEQ ID NO: 3947155 - DNA, 25 bp, Homo sapien
gtgtgcaccatgtagtggaacttca

SEQ ID NO: 3947156 - DNA, 25 bp, Homo sapien
tgtgcaccatgtagtggaacttcag

SEQ ID NO: 3947157 - DNA, 25 bp, Homo sapien
tacagctccctctggtcgaccaggg

SEQ ID NO: 3947158 - DNA, 25 bp, Homo sapien
tgcaaaccagacaacggacacgtgc

SEQ ID NO: 3947159 - DNA, 25 bp, Homo sapien
tctagtgacataagaggcaaggcct

SEQ ID NO: 3947160 - DNA, 25 bp, Homo sapien
gcttcgtgaacaaggcggatcccct

SEQ ID NO: 3947161 - DNA, 25 bp, Homo sapien
tgtcccaagggactagacgagtgtc

SEQ ID NO: 3947162 - DNA, 25 bp, Homo sapien
tcaccctcttcatgaatcaatgcct

SEQ ID NO: 3947163 - DNA, 25 bp, Homo sapien
cgaaccacctagactccgagtctgt

SEQ ID NO: 3947164 - DNA, 25 bp, Homo sapien
gaatcaatgcctggcccggaaagtt

SEQ ID NO: 3947165 - DNA, 25 bp, Homo sapien
aggagccgaaccacctagactccga

SEQ ID NO: 3947166 - DNA, 25 bp, Homo sapien
aatcacaggaaatgcccatgctggg

SEQ ID NO: 3947167 - DNA, 25 bp, Homo sapien
cagtggccgtgctgggtacaagcct

SEQ ID NO: 3947168 - DNA, 25 bp, Homo sapien
aatactttgctagggcgacgtctgg

SEQ ID NO: 3947169 - DNA, 25 bp, Homo sapien
cgacgtctggtgtttgcaggagaag

SEQ ID NO: 3947170 - DNA, 25 bp, Homo sapien
ggactgccggtggagggccctctgt

SEQ ID NO: 3947171 - DNA, 25 bp, Homo sapien
ctggttagggaaggcactcgtaaca

SEQ ID NO: 3947172 - DNA, 25 bp, Homo sapien
agggaaggcactcgtaacacaggga

SEQ ID NO: 3947173 - DNA, 25 bp, Homo sapien
aacacagggactgccggtggagggc

SEQ ID NO: 3947174 - DNA, 25 bp, Homo sapien
ccttggagttggtgacgtagccgta

SEQ ID NO: 3947175 - DNA, 25 bp, Homo sapien
cgaatttcgttgtctcgaagggctg

SEQ ID NO: 3947176 - DNA, 25 bp, Homo sapien
gctgcgaatttcgttgtctcgaagg

SEQ ID NO: 3947177 - DNA, 25 bp, Homo sapien
aacttcaccttggagttggtgacgt

SEQ ID NO: 3947178 - DNA, 25 bp, Homo sapien
gtggccctctaactccctgacttac

SEQ ID NO: 3947179 - DNA, 25 bp, Homo sapien
cactcgggcgtggccctctaactcc

SEQ ID NO: 3947180 - DNA, 25 bp, Homo sapien
gcgtggccctctaactccctgactt

SEQ ID NO: 3947181 - DNA, 25 bp, Homo sapien
tcgggcgtggccctctaactccctg

SEQ ID NO: 3947182 - DNA, 25 bp, Homo sapien
catcacgtctgtgtaggagttgtgt

SEQ ID NO: 3947183 - DNA, 25 bp, Homo sapien
ctgtgtaggagttgtgtagcttccg

SEQ ID NO: 3947184 - DNA, 25 bp, Homo sapien
gggttgcacatcacgtctgtgtagg

SEQ ID NO: 3947185 - DNA, 25 bp, Homo sapien
tggatgcggtcccccgggttgtaga

SEQ ID NO: 3947186 - DNA, 25 bp, Homo sapien
acagaaagaaggtggcaagacacag

SEQ ID NO: 3947187 - DNA, 25 bp, Homo sapien
ctacagaaagaaggtggcaagacac

SEQ ID NO: 3947188 - DNA, 25 bp, Homo sapien
gaaagaaggtggcaagacacagaaa

SEQ ID NO: 3947189 - DNA, 25 bp, Homo sapien
gcaagacacagaaagtagggcccac

SEQ ID NO: 3947190 - DNA, 25 bp, Homo sapien
gacgtgtgatccctgaaagccactg

SEQ ID NO: 3947191 - DNA, 25 bp, Homo sapien
gaaatgtgaactccgctgagaggcc

SEQ ID NO: 3947192 - DNA, 25 bp, Homo sapien
tggactattcggaagacacctgcaa

SEQ ID NO: 3947193 - DNA, 25 bp, Homo sapien
caagtctggaatgtgggcatggacc

SEQ ID NO: 3947194 - DNA, 25 bp, Homo sapien
catcatcgacgtcaccatgttatca

SEQ ID NO: 3947195 - DNA, 25 bp, Homo sapien
tatcatcatcgacgtcaccatgtta

SEQ ID NO: 3947196 - DNA, 25 bp, Homo sapien
ctgtatcatcatcgacgtcaccatg

SEQ ID NO: 3947197 - DNA, 25 bp, Homo sapien
tgtatcatcatcgacgtcaccatgt

SEQ ID NO: 3947198 - DNA, 25 bp, Homo sapien
gaatccagacattgagccagatgca

SEQ ID NO: 3947199 - DNA, 25 bp, Homo sapien
caggcgtcccattcaggaagaggca

SEQ ID NO: 3947200 - DNA, 25 bp, Homo sapien
caaggtttaggaccagggctgcagc

SEQ ID NO: 3947201 - DNA, 25 bp, Homo sapien
gatgcaaagaatggaggccaagtcc

SEQ ID NO: 3947202 - DNA, 25 bp, Homo sapien
actctccagtcctggaccagtgctg

SEQ ID NO: 3947203 - DNA, 25 bp, Homo sapien
tggaccagtgctggaaccaactccg

SEQ ID NO: 3947204 - DNA, 25 bp, Homo sapien
tcagcgggctgagccttgaccgctg

SEQ ID NO: 3947205 - DNA, 25 bp, Homo sapien
cggcggcactgacgccactatgggc

SEQ ID NO: 3947206 - DNA, 25 bp, Homo sapien
ccgctattggaactgggcagaggca

SEQ ID NO: 3947207 - DNA, 25 bp, Homo sapien
ccttgtgagagtggtctgtggccca

SEQ ID NO: 3947208 - DNA, 25 bp, Homo sapien
gagtgatccccactaaaaggcaaag

SEQ ID NO: 3947209 - DNA, 25 bp, Homo sapien
gagaatggacgctgggttagcaact

SEQ ID NO: 3947210 - DNA, 25 bp, Homo sapien
tcctcagaccctgaggcccagggct

SEQ ID NO: 3947211 - DNA, 25 bp, Homo sapien
tctcctcagaccctgaggcccaggg

SEQ ID NO: 3947212 - DNA, 25 bp, Homo sapien
ctcagaccctgaggcccagggctgg

SEQ ID NO: 3947213 - DNA, 25 bp, Homo sapien
ggtctcctcagaccctgaggcccag

SEQ ID NO: 3947214 - DNA, 25 bp, Homo sapien
aagaccctgaccgtgtacatagccc

SEQ ID NO: 3947215 - DNA, 25 bp, Homo sapien
gttttctatcagacgtgctccctcc

SEQ ID NO: 3947216 - DNA, 25 bp, Homo sapien
gggtgtgtctcggtgacgttttcta

SEQ ID NO: 3947217 - DNA, 25 bp, Homo sapien
tcagatgcgttcgcctctggccctg

SEQ ID NO: 3947218 - DNA, 25 bp, Homo sapien
tctcggccccctcaccccagctccg

SEQ ID NO: 3947219 - DNA, 25 bp, Homo sapien
tctctcggccccctcaccccagctc

SEQ ID NO: 3947220 - DNA, 25 bp, Homo sapien
ctctctcggccccctcaccccagct

SEQ ID NO: 3947221 - DNA, 25 bp, Homo sapien
tcggccccctcaccccagctccgac

SEQ ID NO: 3947222 - DNA, 25 bp, Homo sapien
tgtaggaaaggacacgccgtctgtc

SEQ ID NO: 3947223 - DNA, 25 bp, Homo sapien
ggtttgtgcccagttagaagcgact

SEQ ID NO: 3947224 - DNA, 25 bp, Homo sapien
tcttcccagagagagcataattccg

SEQ ID NO: 3947225 - DNA, 25 bp, Homo sapien
tgcttttcgagcatgcggagccagc

SEQ ID NO: 3947226 - DNA, 25 bp, Homo sapien
gattctgagcctccacgtggcatca

SEQ ID NO: 3947227 - DNA, 25 bp, Homo sapien
actccagcgaggtagggccacccgg

SEQ ID NO: 3947228 - DNA, 25 bp, Homo sapien
gcacagttgtcacgggcatcctgca

SEQ ID NO: 3947229 - DNA, 25 bp, Homo sapien
gcctcggctcccgtgcggtcccacg

SEQ ID NO: 3947230 - DNA, 25 bp, Homo sapien
tgggcgcagctaccacgaaagagta

SEQ ID NO: 3947231 - DNA, 25 bp, Homo sapien
aaataaacgccagctgtcgggcacg

SEQ ID NO: 3947232 - DNA, 25 bp, Homo sapien
tggcttcatcggagtcatgggcgcc

SEQ ID NO: 3947233 - DNA, 25 bp, Homo sapien
gagcagagaacaaccccgaatagga

SEQ ID NO: 3947234 - DNA, 25 bp, Homo sapien
ggtgagtcacgtggctctctgcttc

SEQ ID NO: 3947235 - DNA, 25 bp, Homo sapien
tgtcacctgggccagacgagagtcc

SEQ ID NO: 3947236 - DNA, 25 bp, Homo sapien
tggaactgcccacgtggttctcatc

SEQ ID NO: 3947237 - DNA, 25 bp, Homo sapien
gagcttggcgattcccacagtccac

SEQ ID NO: 3947238 - DNA, 25 bp, Homo sapien
gtcaagttgagctttcggccaccca

SEQ ID NO: 3947239 - DNA, 25 bp, Homo sapien
tacaaatgcttagaaccgctggctc

SEQ ID NO: 3947240 - DNA, 25 bp, Homo sapien
cactgctaggaaggaacttgaggcc

SEQ ID NO: 3947241 - DNA, 25 bp, Homo sapien
gtacacacaggcgtcaaaggcaggg

SEQ ID NO: 3947242 - DNA, 25 bp, Homo sapien
gactctttctttctccgttggtcgc

SEQ ID NO: 3947243 - DNA, 25 bp, Homo sapien
gccccagtggacaggaaagctaagg

SEQ ID NO: 3947244 - DNA, 25 bp, Homo sapien
aaagctaaggcctcagcgatgccgg

SEQ ID NO: 3947245 - DNA, 25 bp, Homo sapien
ccggactccccagcggaggtgaaga

SEQ ID NO: 3947246 - DNA, 25 bp, Homo sapien
taggaaatgtggcatgtccgtccat

SEQ ID NO: 3947247 - DNA, 25 bp, Homo sapien
gctgtggtgactccttgcgccgtgg

SEQ ID NO: 3947248 - DNA, 25 bp, Homo sapien
ccgtgagcacgcaggtggtggccat

SEQ ID NO: 3947249 - DNA, 25 bp, Homo sapien
catgagcccttgttgggtgacggct

SEQ ID NO: 3947250 - DNA, 25 bp, Homo sapien
ccttcccggagtcagcaccaggttc

SEQ ID NO: 3947251 - DNA, 25 bp, Homo sapien
tcccttcactttgcctctatcttgg

SEQ ID NO: 3947252 - DNA, 25 bp, Homo sapien
ccaggtctgatgctggtcaaagacc

SEQ ID NO: 3947253 - DNA, 25 bp, Homo sapien
tgtccccacgccttcagatgacggt

SEQ ID NO: 3947254 - DNA, 25 bp, Homo sapien
gggtgtccgcacgggcggacggcca

SEQ ID NO: 3947255 - DNA, 25 bp, Homo sapien
ctgtcttcgggtcagtgttggctcc

SEQ ID NO: 3947256 - DNA, 25 bp, Homo sapien
cgggtcagtgttggctcccgggtgt

SEQ ID NO: 3947257 - DNA, 25 bp, Homo sapien
ccgcacgggcggacggccagctggg

SEQ ID NO: 3947258 - DNA, 25 bp, Homo sapien
ggtagcttttacgtggaccatgcag

SEQ ID NO: 3947259 - DNA, 25 bp, Homo sapien
gcttttacgtggaccatgcagctgt

SEQ ID NO: 3947260 - DNA, 25 bp, Homo sapien
cttttacgtggaccatgcagctgtg

SEQ ID NO: 3947261 - DNA, 25 bp, Homo sapien
cttttgcgtggaccatgcagctgtg

SEQ ID NO: 3947262 - DNA, 25 bp, Homo sapien
cattgttgttatggtggaccatgca

SEQ ID NO: 3947263 - DNA, 25 bp, Homo sapien
ctgttctggacaccgcggatgaagg

SEQ ID NO: 3947264 - DNA, 25 bp, Homo sapien
ttttgtgtgtccgttgatggacgcg

SEQ ID NO: 3947265 - DNA, 25 bp, Homo sapien
tgcactgtgcagaaagaccacgttt

SEQ ID NO: 3947266 - DNA, 25 bp, Homo sapien
cacatgaaggggcttctgccgagga

SEQ ID NO: 3947267 - DNA, 25 bp, Homo sapien
acctctggctcgtccttggcacatg

SEQ ID NO: 3947268 - DNA, 25 bp, Homo sapien
accatggggccagcccacggccctt

SEQ ID NO: 3947269 - DNA, 25 bp, Homo sapien
tggctcgtccttggcacatgaaggg

SEQ ID NO: 3947270 - DNA, 25 bp, Homo sapien
tataaagcgtgagccgtgacaccag

SEQ ID NO: 3947271 - DNA, 25 bp, Homo sapien
cactgtgaccccttgagagctttta

SEQ ID NO: 3947272 - DNA, 25 bp, Homo sapien
caaggtcactgcgtcgggtgccgtt

SEQ ID NO: 3947273 - DNA, 25 bp, Homo sapien
gttccacaaatgataagtgccccgg

SEQ ID NO: 3947274 - DNA, 25 bp, Homo sapien
tatggtcattgagtccagcgccagg

SEQ ID NO: 3947275 - DNA, 25 bp, Homo sapien
gctgttttatggtcattgagtccag

SEQ ID NO: 3947276 - DNA, 25 bp, Homo sapien
ccgctgcacccagcttaagaggctg

SEQ ID NO: 3947277 - DNA, 25 bp, Homo sapien
tctgcctgttttccgggatggggaa

SEQ ID NO: 3947278 - DNA, 25 bp, Homo sapien
tgccggtcttgtgcttgcggctgct

SEQ ID NO: 3947279 - DNA, 25 bp, Homo sapien
tctgtcctcctcgtgccggtcttgt

SEQ ID NO: 3947280 - DNA, 25 bp, Homo sapien
cggtcttgtgcttgcggctgctgta

SEQ ID NO: 3947281 - DNA, 25 bp, Homo sapien
tcctcgtgccggtcttgtgcttgcg

SEQ ID NO: 3947282 - DNA, 25 bp, Homo sapien
tgggagaacttgacctctgccctgc

SEQ ID NO: 3947283 - DNA, 25 bp, Homo sapien
cagggcacgggtgggagaacttgac

SEQ ID NO: 3947284 - DNA, 25 bp, Homo sapien
cgggtgggagaacttgacctctgcc

SEQ ID NO: 3947285 - DNA, 25 bp, Homo sapien
gcacgggtgggagaacttgacctct

SEQ ID NO: 3947286 - DNA, 25 bp, Homo sapien
tgggcgttgggagtcagatacttcc

SEQ ID NO: 3947287 - DNA, 25 bp, Homo sapien
cgttcttccgtggagggctggctct

SEQ ID NO: 3947288 - DNA, 25 bp, Homo sapien
tatttgggaccgtcctgctgggcaa

SEQ ID NO: 3947289 - DNA, 25 bp, Homo sapien
cagacaggcggatgctgtgcaagcc

SEQ ID NO: 3947290 - DNA, 25 bp, Homo sapien
gggtgtgcgtttcctctcctggacg

SEQ ID NO: 3947291 - DNA, 25 bp, Homo sapien
ttgaaaagagagcacgtcgcgtgct

SEQ ID NO: 3947292 - DNA, 25 bp, Homo sapien
tcttgaggctgggactccactgtgt

SEQ ID NO: 3947293 - DNA, 25 bp, Homo sapien
ggcattgcccttcaagtttctgaga

SEQ ID NO: 3947294 - DNA, 25 bp, Homo sapien
tccgaacacactgcggggctggcgc

SEQ ID NO: 3947295 - DNA, 25 bp, Homo sapien
tgggctccgaacacactgcggggct

SEQ ID NO: 3947296 - DNA, 25 bp, Homo sapien
ccgcccctgcgtccgcccgtgtgtg

SEQ ID NO: 3947297 - DNA, 25 bp, Homo sapien
ggtggcggcgactcagagccgctgg

SEQ ID NO: 3947298 - DNA, 25 bp, Homo sapien
gactcccggaccgagtcgcgagtgt

SEQ ID NO: 3947299 - DNA, 25 bp, Homo sapien
aagctggaaggagcagcgactcccg

SEQ ID NO: 3947300 - DNA, 25 bp, Homo sapien
gcgccgagcgcacgggccgttttca

SEQ ID NO: 3947301 - DNA, 25 bp, Homo sapien
tttcaaagttggtgcccacggcagg

SEQ ID NO: 3947302 - DNA, 25 bp, Homo sapien
tgcagttggcaggacagaaggctgc

SEQ ID NO: 3947303 - DNA, 25 bp, Homo sapien
atcagatgtgggtgctgccctttgg

SEQ ID NO: 3947304 - DNA, 25 bp, Homo sapien
cagggacgcctgtggcaagtgttta

SEQ ID NO: 3947305 - DNA, 25 bp, Homo sapien
gcgtctttatccaaaccttgagctg

SEQ ID NO: 3947306 - DNA, 25 bp, Homo sapien
ggcctcccaacccatctcttatcgg

SEQ ID NO: 3947307 - DNA, 25 bp, Homo sapien
tctcttatcggggtcccctgtctct

SEQ ID NO: 3947308 - DNA, 25 bp, Homo sapien
agttgctcatgcctacacggccaaa

SEQ ID NO: 3947309 - DNA, 25 bp, Homo sapien
gtgcaggtgactcgatttcagctca

SEQ ID NO: 3947310 - DNA, 25 bp, Homo sapien
cgtgagctactgtgtctggtccctt

SEQ ID NO: 3947311 - DNA, 25 bp, Homo sapien
ctactgtgtctggtcccttttgttt

SEQ ID NO: 3947312 - DNA, 25 bp, Homo sapien
tgagctactgtgtctggtccctttt

SEQ ID NO: 3947313 - DNA, 25 bp, Homo sapien
agctactgtgtctggtcccttttgt

SEQ ID NO: 3947314 - DNA, 25 bp, Homo sapien
gaattgtatgataaggaaatgagaa

SEQ ID NO: 3947315 - DNA, 25 bp, Homo sapien
cgcagctaatgatacctctcaaaga

SEQ ID NO: 3947316 - DNA, 25 bp, Homo sapien
aaataaaataagacgcagctaatga

SEQ ID NO: 3947317 - DNA, 25 bp, Homo sapien
aagacaggtgccaacactcgaccct

SEQ ID NO: 3947318 - DNA, 25 bp, Homo sapien
ttcttccgtgaaccttcaccactgg

SEQ ID NO: 3947319 - DNA, 25 bp, Homo sapien
gctgtgtgcctgtcagccccgcagg

SEQ ID NO: 3947320 - DNA, 25 bp, Homo sapien
ctggctgtgtgcctgtcagccccgc

SEQ ID NO: 3947321 - DNA, 25 bp, Homo sapien
tgtgtgcctgtcagccccgcaggcc

SEQ ID NO: 3947322 - DNA, 25 bp, Homo sapien
tgtggtcagagggctatcttggtca

SEQ ID NO: 3947323 - DNA, 25 bp, Homo sapien
ctttcatagcagttggggtaccatc

SEQ ID NO: 3947324 - DNA, 25 bp, Homo sapien
atagcagttggggtaccatcgtggt

SEQ ID NO: 3947325 - DNA, 25 bp, Homo sapien
tcagagggctatcttggtcagtggt

SEQ ID NO: 3947326 - DNA, 25 bp, Homo sapien
tcattctgtggttcagccgacttca

SEQ ID NO: 3947327 - DNA, 25 bp, Homo sapien
ttccgggagagagcgtgacaaagac

SEQ ID NO: 3947328 - DNA, 25 bp, Homo sapien
tagaaccaccggcagcatttggtga

SEQ ID NO: 3947329 - DNA, 25 bp, Homo sapien
cagaggccctggcaaagtacagtgt

SEQ ID NO: 3947330 - DNA, 25 bp, Homo sapien
tgaggaagccccacgcaggtgctgc

SEQ ID NO: 3947331 - DNA, 25 bp, Homo sapien
tgctgcctgacacccgcgtcgccga

SEQ ID NO: 3947332 - DNA, 25 bp, Homo sapien
cgtcgccgacccctggatcaagcac

SEQ ID NO: 3947333 - DNA, 25 bp, Homo sapien
acctgaggaagccccacgcaggtgc

SEQ ID NO: 3947334 - DNA, 25 bp, Homo sapien
acttccgtgactgcagttgaccggg

SEQ ID NO: 3947335 - DNA, 25 bp, Homo sapien
agaggccgattggtcacagctgagc

SEQ ID NO: 3947336 - DNA, 25 bp, Homo sapien
ctgagccaggactcgccggccagtg

SEQ ID NO: 3947337 - DNA, 25 bp, Homo sapien
ctcctccgaggagacgtcggccagg

SEQ ID NO: 3947338 - DNA, 25 bp, Homo sapien
ggtctttctgaggcacccccggaga

SEQ ID NO: 3947339 - DNA, 25 bp, Homo sapien
tttctgaggcacccccggagagtgg

SEQ ID NO: 3947340 - DNA, 25 bp, Homo sapien
ctttctgaggcacccccggagagtg

SEQ ID NO: 3947341 - DNA, 25 bp, Homo sapien
tgaggcacccccggagagtggggga

SEQ ID NO: 3947342 - DNA, 25 bp, Homo sapien
tctccactcccggaaacgctgtagg

SEQ ID NO: 3947343 - DNA, 25 bp, Homo sapien
tgtaggagctgacgccgttaggatc

SEQ ID NO: 3947344 - DNA, 25 bp, Homo sapien
ccatgtggcggctcagagcctctgc

SEQ ID NO: 3947345 - DNA, 25 bp, Homo sapien
cagccacatgctcacggtggccccg

SEQ ID NO: 3947346 - DNA, 25 bp, Homo sapien
tctcattggggtgtctccggcctgc

SEQ ID NO: 3947347 - DNA, 25 bp, Homo sapien
caaggagtccacacaccgggaaggt

SEQ ID NO: 3947348 - DNA, 25 bp, Homo sapien
tccacacaccgggaaggtgaagacc

SEQ ID NO: 3947349 - DNA, 25 bp, Homo sapien
ccgattccagttccgtgctctcatt

SEQ ID NO: 3947350 - DNA, 25 bp, Homo sapien
gcctcttggccagacctagctgggt

SEQ ID NO: 3947351 - DNA, 25 bp, Homo sapien
gtcaggctgcatggttcttaaccca

SEQ ID NO: 3947352 - DNA, 25 bp, Homo sapien
cgcgaatggttagggtcctgcagcc

SEQ ID NO: 3947353 - DNA, 25 bp, Homo sapien
gtccacgtttggagcaggtcaggct

SEQ ID NO: 3947354 - DNA, 25 bp, Homo sapien
ccggtgcccagattagggaaggcct

SEQ ID NO: 3947355 - DNA, 25 bp, Homo sapien
gcccagattagggaaggccttgcct

SEQ ID NO: 3947356 - DNA, 25 bp, Homo sapien
ggaccccacgactgaatccgcagtg

SEQ ID NO: 3947357 - DNA, 25 bp, Homo sapien
gaggagctttgcacgtgcggctggt

SEQ ID NO: 3947358 - DNA, 25 bp, Homo sapien
gggcagctggcacggtctcgcccca

SEQ ID NO: 3947359 - DNA, 25 bp, Homo sapien
ggcagctggcacggtctcgccccac

SEQ ID NO: 3947360 - DNA, 25 bp, Homo sapien
agggcagctggcacggtctcgcccc

SEQ ID NO: 3947361 - DNA, 25 bp, Homo sapien
cgccacgttccagggtacccagttg

SEQ ID NO: 3947362 - DNA, 25 bp, Homo sapien
gggtatcccagtcaccaggcagctc

SEQ ID NO: 3947363 - DNA, 25 bp, Homo sapien
tgtttggcttttgtcatgggctgga

SEQ ID NO: 3947364 - DNA, 25 bp, Homo sapien
ccgcgggtcgccagctgtgtgtttg

SEQ ID NO: 3947365 - DNA, 25 bp, Homo sapien
tccctggagctgaacaggtgctgac

SEQ ID NO: 3947366 - DNA, 25 bp, Homo sapien
acagagaagcctcgtgcacaggtgc

SEQ ID NO: 3947367 - DNA, 25 bp, Homo sapien
caggactctggacaggcccagttcc

SEQ ID NO: 3947368 - DNA, 25 bp, Homo sapien
agcatccgtgctctcggaccccagg

SEQ ID NO: 3947369 - DNA, 25 bp, Homo sapien
tcagaggcaaggaggcgaaaaagac

SEQ ID NO: 3947370 - DNA, 25 bp, Homo sapien
acagaactcagaggcaaggaggcga

SEQ ID NO: 3947371 - DNA, 25 bp, Homo sapien
ccccacacgaaacagaactcagagg

SEQ ID NO: 3947372 - DNA, 25 bp, Homo sapien
agacgtcgggtcccggccacaggca

SEQ ID NO: 3947373 - DNA, 25 bp, Homo sapien
tgttacaaaggactcgcaggacggg

SEQ ID NO: 3947374 - DNA, 25 bp, Homo sapien
gctaagggttaggagctccatgcca

SEQ ID NO: 3947375 - DNA, 25 bp, Homo sapien
ccccatgggtacctcagtagaacaa

SEQ ID NO: 3947376 - DNA, 25 bp, Homo sapien
gccctcacggcactgatgtgtttcc

SEQ ID NO: 3947377 - DNA, 25 bp, Homo sapien
cccagagacgatggccaaggagaga

SEQ ID NO: 3947378 - DNA, 25 bp, Homo sapien
ccagagacgatggccaaggagagag

SEQ ID NO: 3947379 - DNA, 25 bp, Homo sapien
caggggtgaagccacctgcatacag

SEQ ID NO: 3947380 - DNA, 25 bp, Homo sapien
atacagccgtggcagatctgagagg

SEQ ID NO: 3947381 - DNA, 25 bp, Homo sapien
tgaagccacctgcatacagccgtgg

SEQ ID NO: 3947382 - DNA, 25 bp, Homo sapien
gggtgaagccacctgcatacagccg

SEQ ID NO: 3947383 - DNA, 25 bp, Homo sapien
ctgttgaccgtgctgggtgttgacc

SEQ ID NO: 3947384 - DNA, 25 bp, Homo sapien
tgcttggctgttgaccgtgctggct

SEQ ID NO: 3947385 - DNA, 25 bp, Homo sapien
tgctagctgttgaccgtgctggctg

SEQ ID NO: 3947386 - DNA, 25 bp, Homo sapien
cattctgggtgttgaccatgctagc

SEQ ID NO: 3947387 - DNA, 25 bp, Homo sapien
tcactcatcctctcagggtaggatt

SEQ ID NO: 3947388 - DNA, 25 bp, Homo sapien
gcatgtgagatacacagtgtcagac

SEQ ID NO: 3947389 - DNA, 25 bp, Homo sapien
ttcaccgtgggagctttaggaggac

SEQ ID NO: 3947390 - DNA, 25 bp, Homo sapien
ggaggacgtgaacacctctgcagtg

SEQ ID NO: 3947391 - DNA, 25 bp, Homo sapien
catttgaatcataaacgctttgcgg

SEQ ID NO: 3947392 - DNA, 25 bp, Homo sapien
cttaagggccatcccgtggctctga

SEQ ID NO: 3947393 - DNA, 25 bp, Homo sapien
tatgacactggaaagacaaagtctg

SEQ ID NO: 3947394 - DNA, 25 bp, Homo sapien
cgctttgcggcagcaactccactta

SEQ ID NO: 3947395 - DNA, 25 bp, Homo sapien
ccttggtgccgggacctcgcttctt

SEQ ID NO: 3947396 - DNA, 25 bp, Homo sapien
ccgatgcggcttccgtggtgctttc

SEQ ID NO: 3947397 - DNA, 25 bp, Homo sapien
tggtgccgggacctcgcttcttcct

SEQ ID NO: 3947398 - DNA, 25 bp, Homo sapien
gcagcaggaacctgccgatgcggct

SEQ ID NO: 3947399 - DNA, 25 bp, Homo sapien
ggtgcaccttgctagaggccagcag

SEQ ID NO: 3947400 - DNA, 25 bp, Homo sapien
cggccgtgactgatccagactgtgg

SEQ ID NO: 3947401 - DNA, 25 bp, Homo sapien
cgcagacgagctcaggactgcgcag

SEQ ID NO: 3947402 - DNA, 25 bp, Homo sapien
ggcacaggccccattgataatgcag

SEQ ID NO: 3947403 - DNA, 25 bp, Homo sapien
aggcagacgccggacgccatttcag

SEQ ID NO: 3947404 - DNA, 25 bp, Homo sapien
catttcagcacctcggagagggcca

SEQ ID NO: 3947405 - DNA, 25 bp, Homo sapien
tccactgcatctgaggcagacgccg

SEQ ID NO: 3947406 - DNA, 25 bp, Homo sapien
acatcggaaaacgtggaggctccca

SEQ ID NO: 3947407 - DNA, 25 bp, Homo sapien
gtccagggagcccagcactccctcc

SEQ ID NO: 3947408 - DNA, 25 bp, Homo sapien
ggagtccagggagcccagcactccc

SEQ ID NO: 3947409 - DNA, 25 bp, Homo sapien
cggagtccagggagcccagcactcc

SEQ ID NO: 3947410 - DNA, 25 bp, Homo sapien
ccagggagcccagcactccctccat

SEQ ID NO: 3947411 - DNA, 25 bp, Homo sapien
agacctggtgcagacccctcctgct

SEQ ID NO: 3947412 - DNA, 25 bp, Homo sapien
cagcagcttcacagcaaccagatgc

SEQ ID NO: 3947413 - DNA, 25 bp, Homo sapien
aagctctctccatgacggccgcaga

SEQ ID NO: 3947414 - DNA, 25 bp, Homo sapien
gctctctccatgacggccgcagagc

SEQ ID NO: 3947415 - DNA, 25 bp, Homo sapien
cagccacgcaatctgaggttctggg

SEQ ID NO: 3947416 - DNA, 25 bp, Homo sapien
gtgtccagggtattgaggcatctca

SEQ ID NO: 3947417 - DNA, 25 bp, Homo sapien
atctcagggccgagtctcgcggtcc

SEQ ID NO: 3947418 - DNA, 25 bp, Homo sapien
cgtcccggagggtgttccttgcttg

SEQ ID NO: 3947419 - DNA, 25 bp, Homo sapien
agcggatcccgcgtccacctgggag

SEQ ID NO: 3947420 - DNA, 25 bp, Homo sapien
cccgcgtccacttgggaggaggaca

SEQ ID NO: 3947421 - DNA, 25 bp, Homo sapien
gaggacagaaggaggacaggggatc

SEQ ID NO: 3947422 - DNA, 25 bp, Homo sapien
aggaaggaggacagcggatcccgcg

SEQ ID NO: 3947423 - DNA, 25 bp, Homo sapien
gaggacaggggctcccacatttcac

SEQ ID NO: 3947424 - DNA, 25 bp, Homo sapien
ggaggacaggggctcccacatttca

SEQ ID NO: 3947425 - DNA, 25 bp, Homo sapien
aaggaggacaggggctcccacattt

SEQ ID NO: 3947426 - DNA, 25 bp, Homo sapien
ggaaggaggacaggggctcccacat

SEQ ID NO: 3947427 - DNA, 25 bp, Homo sapien
tgagcacctctgctgtgtgtggaac

SEQ ID NO: 3947428 - DNA, 25 bp, Homo sapien
aagcagctcgcgcttggtggcagct

SEQ ID NO: 3947429 - DNA, 25 bp, Homo sapien
ttgggttgccagtgccactgacccc

SEQ ID NO: 3947430 - DNA, 25 bp, Homo sapien
agcgtctgcgctgttgagggtgatt

SEQ ID NO: 3947431 - DNA, 25 bp, Homo sapien
gaccaggcgggacacggctcacagc

SEQ ID NO: 3947432 - DNA, 25 bp, Homo sapien
gtccagctaggatcagagggaccag

SEQ ID NO: 3947433 - DNA, 25 bp, Homo sapien
gcccgtccagctaggatcagaggga

SEQ ID NO: 3947434 - DNA, 25 bp, Homo sapien
acagcccgtccagctaggatcagag

SEQ ID NO: 3947435 - DNA, 25 bp, Homo sapien
ccaggagcatttcccggaggataca

SEQ ID NO: 3947436 - DNA, 25 bp, Homo sapien
ggatacaggcgacctcgctcctgtt

SEQ ID NO: 3947437 - DNA, 25 bp, Homo sapien
gagcatttcccggaggatacaggcg

SEQ ID NO: 3947438 - DNA, 25 bp, Homo sapien
catttcccggaggatacaggcgacc

SEQ ID NO: 3947439 - DNA, 25 bp, Homo sapien
tcaaaacgacagctgcgcagtctgg

SEQ ID NO: 3947440 - DNA, 25 bp, Homo sapien
ccttgtagaccacagagtacgagga

SEQ ID NO: 3947441 - DNA, 25 bp, Homo sapien
gctccggccagcgacagttgagact

SEQ ID NO: 3947442 - DNA, 25 bp, Homo sapien
tacgaggaaagaaacgcgtagagcc

SEQ ID NO: 3947443 - DNA, 25 bp, Homo sapien
gacaggtcctcgtgacaggttcaca

SEQ ID NO: 3947444 - DNA, 25 bp, Homo sapien
catgacaggtccacactcaactggt

SEQ ID NO: 3947445 - DNA, 25 bp, Homo sapien
catgtgacaggtcttcacgtgacaa

SEQ ID NO: 3947446 - DNA, 25 bp, Homo sapien
gagtcgttcatgacatggctcatcc

SEQ ID NO: 3947447 - DNA, 25 bp, Homo sapien
gacaggaccacacgacaggttcaca

SEQ ID NO: 3947448 - DNA, 25 bp, Homo sapien
caggttcacacgtgacaggtccaca

SEQ ID NO: 3947449 - DNA, 25 bp, Homo sapien
gtgacaggtccacacgtgacaggcc

SEQ ID NO: 3947450 - DNA, 25 bp, Homo sapien
tatgacaggtccacacgtgacagtc

SEQ ID NO: 3947451 - DNA, 25 bp, Homo sapien
agacgacaggaccacacgacaggtt

SEQ ID NO: 3947452 - DNA, 25 bp, Homo sapien
cgacaggtccacacgtgactggtgc

SEQ ID NO: 3947453 - DNA, 25 bp, Homo sapien
gtgacagatccacacgtgacaggcc

SEQ ID NO: 3947454 - DNA, 25 bp, Homo sapien
tatgacaggtccacacgtgacagtc

SEQ ID NO: 3947455 - DNA, 25 bp, Homo sapien
tgacaggtccacacgtgactggtgc

SEQ ID NO: 3947456 - DNA, 25 bp, Homo sapien
gacaggcccacagacgacaggacca

SEQ ID NO: 3947457 - DNA, 25 bp, Homo sapien
acaggttcacacgtgacaggtccac

SEQ ID NO: 3947458 - DNA, 25 bp, Homo sapien
atgacaggtccacacgtgacagtcc

SEQ ID NO: 3947459 - DNA, 25 bp, Homo sapien
aggacgtcctgcagggggtgcagac

SEQ ID NO: 3947460 - DNA, 25 bp, Homo sapien
gagtgtggctgacggaggctccagg

SEQ ID NO: 3947461 - DNA, 25 bp, Homo sapien
ggtccggggcccgactccatgagtg

SEQ ID NO: 3947462 - DNA, 25 bp, Homo sapien
gggcgcccatctcagcgtcactgag

SEQ ID NO: 3947463 - DNA, 25 bp, Homo sapien
atatttttggagctctgttgaccat

SEQ ID NO: 3947464 - DNA, 25 bp, Homo sapien
ttaagcggggatgtctgtattttcc

SEQ ID NO: 3947465 - DNA, 25 bp, Homo sapien
ctgttgaccatggataactgaaact

SEQ ID NO: 3947466 - DNA, 25 bp, Homo sapien
aacaaaccctgcttaagcggggatg

SEQ ID NO: 3947467 - DNA, 25 bp, Homo sapien
cacagaatgtcctcggggtgccccg

SEQ ID NO: 3947468 - DNA, 25 bp, Homo sapien
gaacccagacgacgggactgagcca

SEQ ID NO: 3947469 - DNA, 25 bp, Homo sapien
ctttccacaggccctaggttcctgg

SEQ ID NO: 3947470 - DNA, 25 bp, Homo sapien
gctgggaacccagacgacgggactg

SEQ ID NO: 3947471 - DNA, 25 bp, Homo sapien
acatcggcacgatggggccatgtgc

SEQ ID NO: 3947472 - DNA, 25 bp, Homo sapien
cgggcccagatcatgggcacgatga

SEQ ID NO: 3947473 - DNA, 25 bp, Homo sapien
catgtgctggacatcggcacgatgg

SEQ ID NO: 3947474 - DNA, 25 bp, Homo sapien
ggacacgggcacgatgggggccacg

SEQ ID NO: 3947475 - DNA, 25 bp, Homo sapien
atacacacaagctccgggccattgg

SEQ ID NO: 3947476 - DNA, 25 bp, Homo sapien
tcccagaaggtgacgtcaacaacgc

SEQ ID NO: 3947477 - DNA, 25 bp, Homo sapien
tcaaagtttgcaggagcctccagag

SEQ ID NO: 3947478 - DNA, 25 bp, Homo sapien
ctccagagggcctgaccgtagctta

SEQ ID NO: 3947479 - DNA, 25 bp, Homo sapien
aggaccatggctctgggagacggag

SEQ ID NO: 3947480 - DNA, 25 bp, Homo sapien
gaagcagggccccacgatccagagc

SEQ ID NO: 3947481 - DNA, 25 bp, Homo sapien
gggagatactgagcgggtggccaca

SEQ ID NO: 3947482 - DNA, 25 bp, Homo sapien
gtggcagatgtgttgcgacagaagc

SEQ ID NO: 3947483 - DNA, 25 bp, Homo sapien
actgttttccagctcccacatatga

SEQ ID NO: 3947484 - DNA, 25 bp, Homo sapien
cctgagaccccacgagaacagttgc

SEQ ID NO: 3947485 - DNA, 25 bp, Homo sapien
tgggaatatctccatcattctagtc

SEQ ID NO: 3947486 - DNA, 25 bp, Homo sapien
tctccataagttccactgttttcca

SEQ ID NO: 3947487 - DNA, 25 bp, Homo sapien
gaagaggctgttgcggtacccctcc

SEQ ID NO: 3947488 - DNA, 25 bp, Homo sapien
ccccgggggagaagaggctgttgcg

SEQ ID NO: 3947489 - DNA, 25 bp, Homo sapien
ggaagaggctgttgcggtacccctc

SEQ ID NO: 3947490 - DNA, 25 bp, Homo sapien
agaagaggctgttgcggtacccctc

SEQ ID NO: 3947491 - DNA, 25 bp, Homo sapien
tccaagaaggtttgtttcaccacaa

SEQ ID NO: 3947492 - DNA, 25 bp, Homo sapien
tgcctcgggagaaacagcccatttt

SEQ ID NO: 3947493 - DNA, 25 bp, Homo sapien
gagctgacggcacccgttcaacagt

SEQ ID NO: 3947494 - DNA, 25 bp, Homo sapien
atactccacgaaggcgggaatcgag

SEQ ID NO: 3947495 - DNA, 25 bp, Homo sapien
agttcaggatccgatcctcagagga

SEQ ID NO: 3947496 - DNA, 25 bp, Homo sapien
ttcaggatccgatcctcagaggaga

SEQ ID NO: 3947497 - DNA, 25 bp, Homo sapien
tgagttcaggatccgatcctcagag

SEQ ID NO: 3947498 - DNA, 25 bp, Homo sapien
ctttgagttcaggatccgatcctca

SEQ ID NO: 3947499 - DNA, 25 bp, Homo sapien
tcgtgagtcgggccggaccagttcc

SEQ ID NO: 3947500 - DNA, 25 bp, Homo sapien
ggcgcccaacagcttccccggcgcg

SEQ ID NO: 3947501 - DNA, 25 bp, Homo sapien
caggatctgcctcgccacaactctt

SEQ ID NO: 3947502 - DNA, 25 bp, Homo sapien
tgcctcgccacaactcttcctcgtc

SEQ ID NO: 3947503 - DNA, 25 bp, Homo sapien
tatcccaagcccacagtttaatccg

SEQ ID NO: 3947504 - DNA, 25 bp, Homo sapien
tgtctgccttgaggagatggttcag

SEQ ID NO: 3947505 - DNA, 25 bp, Homo sapien
gggaagcctcatcttatgtcctcca

SEQ ID NO: 3947506 - DNA, 25 bp, Homo sapien
agtttaatccgccatttctgtctgc

SEQ ID NO: 3947507 - DNA, 25 bp, Homo sapien
tcctcctgtcggctgccccgatgag

SEQ ID NO: 3947508 - DNA, 25 bp, Homo sapien
agtggatgccggcacttcctcctgt

SEQ ID NO: 3947509 - DNA, 25 bp, Homo sapien
cttgtgtttgaagtggatgccggca

SEQ ID NO: 3947510 - DNA, 25 bp, Homo sapien
gcctgcggggcaggatgcgtttcag

SEQ ID NO: 3947511 - DNA, 25 bp, Homo sapien
ccttctaccgtggggctccccatca

SEQ ID NO: 3947512 - DNA, 25 bp, Homo sapien
ccccatcaccaccaggagcacagtg

SEQ ID NO: 3947513 - DNA, 25 bp, Homo sapien
caccaccaggagcacagtgtggagg

SEQ ID NO: 3947514 - DNA, 25 bp, Homo sapien
ccatcaccaccaggagcacagtgtg

SEQ ID NO: 3947515 - DNA, 25 bp, Homo sapien
ttcgcagttcacaagagcggcaggc

SEQ ID NO: 3947516 - DNA, 25 bp, Homo sapien
ggtgcaggcaatgcaaatgctcatc

SEQ ID NO: 3947517 - DNA, 25 bp, Homo sapien
aggcctggcgctggaacccggaagg

SEQ ID NO: 3947518 - DNA, 25 bp, Homo sapien
aagggcacgataaggtgcaggcaat

SEQ ID NO: 3947519 - DNA, 25 bp, Homo sapien
ggcaggacgccaaggcgcagcccag

SEQ ID NO: 3947520 - DNA, 25 bp, Homo sapien
gcagaagaccacttcctctgtgtct

SEQ ID NO: 3947521 - DNA, 25 bp, Homo sapien
aaggtgagcaccacatggggcagca

SEQ ID NO: 3947522 - DNA, 25 bp, Homo sapien
tctgtgtctcgcaggcgccagccgg

SEQ ID NO: 3947523 - DNA, 25 bp, Homo sapien
taaagctccctgtacgtgtggcggc

SEQ ID NO: 3947524 - DNA, 25 bp, Homo sapien
agatgacatactccagctgggccgc

SEQ ID NO: 3947525 - DNA, 25 bp, Homo sapien
agagcctgcagatctcctgggacag

SEQ ID NO: 3947526 - DNA, 25 bp, Homo sapien
tcgttagcgcataggaaggagaccc

SEQ ID NO: 3947527 - DNA, 25 bp, Homo sapien
tgaaaagatgtgcttctggcccgga

SEQ ID NO: 3947528 - DNA, 25 bp, Homo sapien
tcatgccgcatggtcctggcagggt

SEQ ID NO: 3947529 - DNA, 25 bp, Homo sapien
gagggcctgcgtccctgtatctcac

SEQ ID NO: 3947530 - DNA, 25 bp, Homo sapien
tatctcacacgggtctgcaggatgg

SEQ ID NO: 3947531 - DNA, 25 bp, Homo sapien
agaggacagcgccacacacagccag

SEQ ID NO: 3947532 - DNA, 25 bp, Homo sapien
cagaggacagcgccacacacagcca

SEQ ID NO: 3947533 - DNA, 25 bp, Homo sapien
acagaggacagcgccacacacagcc

SEQ ID NO: 3947534 - DNA, 25 bp, Homo sapien
ccacaccatggacgtggtgcagcgg

SEQ ID NO: 3947535 - DNA, 25 bp, Homo sapien
aactcaggcatcatcacacaggtgg

SEQ ID NO: 3947536 - DNA, 25 bp, Homo sapien
gagcacgtggaggatcacgtcgtct

SEQ ID NO: 3947537 - DNA, 25 bp, Homo sapien
agagcagcgcgttgaccacaccatg

SEQ ID NO: 3947538 - DNA, 25 bp, Homo sapien
accacgcagatgaggcagccgcagt

SEQ ID NO: 3947539 - DNA, 25 bp, Homo sapien
gctgagatgtctgtgaaaaataagg

SEQ ID NO: 3947540 - DNA, 25 bp, Homo sapien
tgtctccgggatggaccacgcagat

SEQ ID NO: 3947541 - DNA, 25 bp, Homo sapien
taacagactgctgtgtcgcagctgg

SEQ ID NO: 3947542 - DNA, 25 bp, Homo sapien
gggttctcgcgtcgcccataaagct

SEQ ID NO: 3947543 - DNA, 25 bp, Homo sapien
ttccacacggagcaccgaagggtgt

SEQ ID NO: 3947544 - DNA, 25 bp, Homo sapien
tcctcactcgttagcgggttctcgc

SEQ ID NO: 3947545 - DNA, 25 bp, Homo sapien
tggtgagccgcattccttccatggc

SEQ ID NO: 3947546 - DNA, 25 bp, Homo sapien
tattgtaggcactgccataaagaca

SEQ ID NO: 3947547 - DNA, 25 bp, Homo sapien
cataaagacattgatccgcggcgtt

SEQ ID NO: 3947548 - DNA, 25 bp, Homo sapien
taaaatgcctgtcgtagtactccat

SEQ ID NO: 3947549 - DNA, 25 bp, Homo sapien
cgcaagaaatcctgggcgtgcggct

SEQ ID NO: 3947550 - DNA, 25 bp, Homo sapien
gagccacacgtgtgcgtttccagtt

SEQ ID NO: 3947551 - DNA, 25 bp, Homo sapien
gaaaagaaacgttcccacgcctgca

SEQ ID NO: 3947552 - DNA, 25 bp, Homo sapien
cacgcctgcaggttcatgggagagt

SEQ ID NO: 3947553 - DNA, 25 bp, Homo sapien
agttagtgaaccacacctcaacagc

SEQ ID NO: 3947554 - DNA, 25 bp, Homo sapien
tctctccaggaacaaaggtgccgct

SEQ ID NO: 3947555 - DNA, 25 bp, Homo sapien
gcagcaaaaccatgggctccggtgg

SEQ ID NO: 3947556 - DNA, 25 bp, Homo sapien
gagcgaagcggttcagacatgtgcc

SEQ ID NO: 3947557 - DNA, 25 bp, Homo sapien
tgtgccttggacaacccggaattct

SEQ ID NO: 3947558 - DNA, 25 bp, Homo sapien
cgaccacggagctgatcacgggtga

SEQ ID NO: 3947559 - DNA, 25 bp, Homo sapien
tcacgggtgaacagccacggcgctg

SEQ ID NO: 3947560 - DNA, 25 bp, Homo sapien
tgcagctgccgaccacggagctgat

SEQ ID NO: 3947561 - DNA, 25 bp, Homo sapien
acatccggggactacagccggctca

SEQ ID NO: 3947562 - DNA, 25 bp, Homo sapien
ggcagggcagctgagcctgagacca

SEQ ID NO: 3947563 - DNA, 25 bp, Homo sapien
cagggcagctgagcctgagaccatc

SEQ ID NO: 3947564 - DNA, 25 bp, Homo sapien
gggcagctgagcctgagaccatcag

SEQ ID NO: 3947565 - DNA, 25 bp, Homo sapien
ggcagctgagcctgagaccatcagc

SEQ ID NO: 3947566 - DNA, 25 bp, Homo sapien
tgccataccgctccagcagggtgtg

SEQ ID NO: 3947567 - DNA, 25 bp, Homo sapien
cgatctcggtcatgccataccgctc

SEQ ID NO: 3947568 - DNA, 25 bp, Homo sapien
cggacagagccatgccgatctcggt

SEQ ID NO: 3947569 - DNA, 25 bp, Homo sapien
ctggcaggcgcacggcagtggtcag

SEQ ID NO: 3947570 - DNA, 25 bp, Homo sapien
tgggctgctcatgactccctcggtg

SEQ ID NO: 3947571 - DNA, 25 bp, Homo sapien
tgggctactatctgctccttggcgc

SEQ ID NO: 3947572 - DNA, 25 bp, Homo sapien
tcctgacgctctcagtgtagacagt

SEQ ID NO: 3947573 - DNA, 25 bp, Homo sapien
tcctgacatcctcggtgtagacagc

SEQ ID NO: 3947574 - DNA, 25 bp, Homo sapien
acttttacacacttgctggccaggg

SEQ ID NO: 3947575 - DNA, 25 bp, Homo sapien
ggctggcgccttgccctgatggccc

SEQ ID NO: 3947576 - DNA, 25 bp, Homo sapien
cccggggctgtccacgatgagggga

SEQ ID NO: 3947577 - DNA, 25 bp, Homo sapien
gattctggtgtcattcccactttta

SEQ ID NO: 3947578 - DNA, 25 bp, Homo sapien
acaatgcgcacctgtactccaggca

SEQ ID NO: 3947579 - DNA, 25 bp, Homo sapien
caatgcgcacctgtactccaggcag

SEQ ID NO: 3947580 - DNA, 25 bp, Homo sapien
ggttttctgagacaatgcgcacctg

SEQ ID NO: 3947581 - DNA, 25 bp, Homo sapien
tctgactagatggtgtccccaaccc

SEQ ID NO: 3947582 - DNA, 25 bp, Homo sapien
agcagcctagtaccagcagggcaga

SEQ ID NO: 3947583 - DNA, 25 bp, Homo sapien
tgcagggcacagacttgagagccag

SEQ ID NO: 3947584 - DNA, 25 bp, Homo sapien
tccctgcagacagggttggaactgg

SEQ ID NO: 3947585 - DNA, 25 bp, Homo sapien
catccagggtgaatgcactcttagt

SEQ ID NO: 3947586 - DNA, 25 bp, Homo sapien
tctcgaaacacggagggtcccctca

SEQ ID NO: 3947587 - DNA, 25 bp, Homo sapien
tctggtttattccagtattctcgaa

SEQ ID NO: 3947588 - DNA, 25 bp, Homo sapien
gggtgaatgcactcttagtttcttc

SEQ ID NO: 3947589 - DNA, 25 bp, Homo sapien
gtggggcccggcgtctgtggtcagg

SEQ ID NO: 3947590 - DNA, 25 bp, Homo sapien
agggtgcgtgcgtgccggagcggct

SEQ ID NO: 3947591 - DNA, 25 bp, Homo sapien
tctgtggtcagggtgcgtgcgtgcc

SEQ ID NO: 3947592 - DNA, 25 bp, Homo sapien
gtcagggtgcgtgcgtgccggagcg

SEQ ID NO: 3947593 - DNA, 25 bp, Homo sapien
aattaatgcatgtgattccgccccg

SEQ ID NO: 3947594 - DNA, 25 bp, Homo sapien
cgactcgcaaaatccacagggctgt

SEQ ID NO: 3947595 - DNA, 25 bp, Homo sapien
tcagcactggcgactgcgagtgttt

SEQ ID NO: 3947596 - DNA, 25 bp, Homo sapien
cggctgaaacatgcctcagcactgg

SEQ ID NO: 3947597 - DNA, 25 bp, Homo sapien
ccgccggcttatgccagaatccgtg

SEQ ID NO: 3947598 - DNA, 25 bp, Homo sapien
ttatgccagaatccgtgtggcagga

SEQ ID NO: 3947599 - DNA, 25 bp, Homo sapien
tgtgcccgccggcttatgccagaat

SEQ ID NO: 3947600 - DNA, 25 bp, Homo sapien
gctgtcccctgtgcccgccggctta

SEQ ID NO: 3947601 - DNA, 25 bp, Homo sapien
gctggcatcaaagctggcaacctct

SEQ ID NO: 3947602 - DNA, 25 bp, Homo sapien
aggagcggctggcatcaaagctggc

SEQ ID NO: 3947603 - DNA, 25 bp, Homo sapien
tggcatcaaagctggcaacctctcc

SEQ ID NO: 3947604 - DNA, 25 bp, Homo sapien
gcggctggcatcaaagctggcaacc

SEQ ID NO: 3947605 - DNA, 25 bp, Homo sapien
ctcacaagcccgctgtgtgatcttg

SEQ ID NO: 3947606 - DNA, 25 bp, Homo sapien
tcacaagcccgctgtgtgatcttga

SEQ ID NO: 3947607 - DNA, 25 bp, Homo sapien
ctgaaacagacctttgccatctcct

SEQ ID NO: 3947608 - DNA, 25 bp, Homo sapien
ggcctcacaagcccgctgtgtgatc

SEQ ID NO: 3947609 - DNA, 25 bp, Homo sapien
cgttgtggccgtcagaggagttacc

SEQ ID NO: 3947610 - DNA, 25 bp, Homo sapien
gacgtctgaagacatcgttgtggcc

SEQ ID NO: 3947611 - DNA, 25 bp, Homo sapien
tcgttgtggccgtcagaggagttac

SEQ ID NO: 3947612 - DNA, 25 bp, Homo sapien
agacctttgacgtctgaagacatcg

SEQ ID NO: 3947613 - DNA, 25 bp, Homo sapien
tgtggccgtcagaggagttacctga

SEQ ID NO: 3947614 - DNA, 25 bp, Homo sapien
ttgtggccgtcagaggagttacctg

SEQ ID NO: 3947615 - DNA, 25 bp, Homo sapien
gctcccgcatctgcccggcagaggt

SEQ ID NO: 3947616 - DNA, 25 bp, Homo sapien
caggtggcaaatgtgcgcgtgtgtc

SEQ ID NO: 3947617 - DNA, 25 bp, Homo sapien
gcccacctccacgtcaccttccact

SEQ ID NO: 3947618 - DNA, 25 bp, Homo sapien
cacgtcaccttccactcgccccagg

SEQ ID NO: 3947619 - DNA, 25 bp, Homo sapien
ttggtcggcacccttggcgcagagg

SEQ ID NO: 3947620 - DNA, 25 bp, Homo sapien
gggttttggtcaatgagacaaaggc

SEQ ID NO: 3947621 - DNA, 25 bp, Homo sapien
tggcaccagccagacgagccttggt

SEQ ID NO: 3947622 - DNA, 25 bp, Homo sapien
ccagacgagccttggttgggtcttg

SEQ ID NO: 3947623 - DNA, 25 bp, Homo sapien
gctgggacgctgctatcaagggctc

SEQ ID NO: 3947624 - DNA, 25 bp, Homo sapien
ttaaacaaagtctcagccaagcaag

SEQ ID NO: 3947625 - DNA, 25 bp, Homo sapien
agggctccagggcaacttgcgatca

SEQ ID NO: 3947626 - DNA, 25 bp, Homo sapien
cagcgagggcgactcagaaggttca

SEQ ID NO: 3947627 - DNA, 25 bp, Homo sapien
tggccatccttaaacaccacggtgt

SEQ ID NO: 3947628 - DNA, 25 bp, Homo sapien
ggccatccttaaacaccacggtgtc

SEQ ID NO: 3947629 - DNA, 25 bp, Homo sapien
actggccatccttaaacaccacggt

SEQ ID NO: 3947630 - DNA, 25 bp, Homo sapien
ctggccatccttaaacaccacggtg

SEQ ID NO: 3947631 - DNA, 25 bp, Homo sapien
atgtccactgaggtccggcctcgga

SEQ ID NO: 3947632 - DNA, 25 bp, Homo sapien
ctgaggtccggcctcggatccagta

SEQ ID NO: 3947633 - DNA, 25 bp, Homo sapien
ggtccggcctcggatccagtactgg

SEQ ID NO: 3947634 - DNA, 25 bp, Homo sapien
cggcctcggatccagtactggccat

SEQ ID NO: 3947635 - DNA, 25 bp, Homo sapien
tgtccttctcggagggtcaccacag

SEQ ID NO: 3947636 - DNA, 25 bp, Homo sapien
agcagtgacccgctggccccatgtc

SEQ ID NO: 3947637 - DNA, 25 bp, Homo sapien
tggccccatgtcatatccggaactc

SEQ ID NO: 3947638 - DNA, 25 bp, Homo sapien
gtgacccgctggccccatgtcatat

SEQ ID NO: 3947639 - DNA, 25 bp, Homo sapien
ggacttcagttcctgccaactcgga

SEQ ID NO: 3947640 - DNA, 25 bp, Homo sapien
tgatgctgccctgatcaagcaagcg

SEQ ID NO: 3947641 - DNA, 25 bp, Homo sapien
tgtggagtcacatcggacaagccaa

SEQ ID NO: 3947642 - DNA, 25 bp, Homo sapien
tgagtggcagtgctcccgctgtgtt

SEQ ID NO: 3947643 - DNA, 25 bp, Homo sapien
cgcagcttcccgtcttagggtcttg

SEQ ID NO: 3947644 - DNA, 25 bp, Homo sapien
tggtgaatggacaagcactgcagtc

SEQ ID NO: 3947645 - DNA, 25 bp, Homo sapien
aggtacagcaagtggcctggacagc

SEQ ID NO: 3947646 - DNA, 25 bp, Homo sapien
tagggtcttgtcacagccactgtca

SEQ ID NO: 3947647 - DNA, 25 bp, Homo sapien
tgtgaatttcctccctggatatctt

SEQ ID NO: 3947648 - DNA, 25 bp, Homo sapien
agttggaacatttggattaatcctc

SEQ ID NO: 3947649 - DNA, 25 bp, Homo sapien
gaactcccattagacagttggaaca

SEQ ID NO: 3947650 - DNA, 25 bp, Homo sapien
ccctggatatcttcttgttggaact

SEQ ID NO: 3947651 - DNA, 25 bp, Homo sapien
agtgaagccttttgggcctgctatt

SEQ ID NO: 3947652 - DNA, 25 bp, Homo sapien
ttcagtgtttgcgtcagtcttggca

SEQ ID NO: 3947653 - DNA, 25 bp, Homo sapien
tgcctgaggcgaggtttcgtttcct

SEQ ID NO: 3947654 - DNA, 25 bp, Homo sapien
aaattggtaactcagaactgttcag

SEQ ID NO: 3947655 - DNA, 25 bp, Homo sapien
tgtctgcccattgggaacactgtcc

SEQ ID NO: 3947656 - DNA, 25 bp, Homo sapien
tgggaacactgtcctctcgttttct

SEQ ID NO: 3947657 - DNA, 25 bp, Homo sapien
cagggtagtgctggtcccatacggg

SEQ ID NO: 3947658 - DNA, 25 bp, Homo sapien
ttaaatgctgcttgatcatgacgtg

SEQ ID NO: 3947659 - DNA, 25 bp, Homo sapien
tccctcatcaggttcaaggattttc

SEQ ID NO: 3947660 - DNA, 25 bp, Homo sapien
tgtcatctggtagcttttgagagac

SEQ ID NO: 3947661 - DNA, 25 bp, Homo sapien
tccccatcgagcaggatgtcatctg

SEQ ID NO: 3947662 - DNA, 25 bp, Homo sapien
taagtagcgcccagactgaaaggga

SEQ ID NO: 3947663 - DNA, 25 bp, Homo sapien
agatgtaatttacacccagctgtcc

SEQ ID NO: 3947664 - DNA, 25 bp, Homo sapien
ggtatgcgtcaccttacctggttcc

SEQ ID NO: 3947665 - DNA, 25 bp, Homo sapien
gctgtcctatgtacagtgtggtgag

SEQ ID NO: 3947666 - DNA, 25 bp, Homo sapien
tcccgaagtgctacaggtatgcgtc

SEQ ID NO: 3947667 - DNA, 25 bp, Homo sapien
ggcaactggcttcgacctcggtgtc

SEQ ID NO: 3947668 - DNA, 25 bp, Homo sapien
accaagtgtcgtggtttcttgacgc

SEQ ID NO: 3947669 - DNA, 25 bp, Homo sapien
tggagaaagtgtcgcctgccgtcca

SEQ ID NO: 3947670 - DNA, 25 bp, Homo sapien
tactgttccgcggaaaagtccagaa

SEQ ID NO: 3947671 - DNA, 25 bp, Homo sapien
actcaggcgcccagcagtacggaca

SEQ ID NO: 3947672 - DNA, 25 bp, Homo sapien
cagtacggacaggtgcccctgggac

SEQ ID NO: 3947673 - DNA, 25 bp, Homo sapien
gcgcccagcagtacggacaggtgcc

SEQ ID NO: 3947674 - DNA, 25 bp, Homo sapien
cttgccaggcgcctcggccatcctg

SEQ ID NO: 3947675 - DNA, 25 bp, Homo sapien
tcttgtcaatcttgcccatctggtt

SEQ ID NO: 3947676 - DNA, 25 bp, Homo sapien
agcgccttcttgtcaatcttgccca

SEQ ID NO: 3947677 - DNA, 25 bp, Homo sapien
tgcccatctggttccgcgggatctc

SEQ ID NO: 3947678 - DNA, 25 bp, Homo sapien
gtggaagtgcctgatgagcgccttc

SEQ ID NO: 3947679 - DNA, 25 bp, Homo sapien
cagggacggtctccttgagctgcaa

SEQ ID NO: 3947680 - DNA, 25 bp, Homo sapien
gctgcaccgcgctgcacagatgagg

SEQ ID NO: 3947681 - DNA, 25 bp, Homo sapien
aaacagttcttgattctacgtgacc

SEQ ID NO: 3947682 - DNA, 25 bp, Homo sapien
gctgcaacaactggcccgaggctgg

SEQ ID NO: 3947683 - DNA, 25 bp, Homo sapien
cagacaagcttggtgggcgacatgc

SEQ ID NO: 3947684 - DNA, 25 bp, Homo sapien
cagacctcctatgtgggccgggaga

SEQ ID NO: 3947685 - DNA, 25 bp, Homo sapien
tggccccgctaagtaaatgcaacgt

SEQ ID NO: 3947686 - DNA, 25 bp, Homo sapien
actgctgggcgatgactgttacttc

SEQ ID NO: 3947687 - DNA, 25 bp, Homo sapien
gatgtttatcctccagtgacctcgt

SEQ ID NO: 3947688 - DNA, 25 bp, Homo sapien
atgagccccacgttgctaccgcggt

SEQ ID NO: 3947689 - DNA, 25 bp, Homo sapien
ccgtgctcttgtctgtgccggcagc

SEQ ID NO: 3947690 - DNA, 25 bp, Homo sapien
tgatggatcatgaggtgcagtcacg

SEQ ID NO: 3947691 - DNA, 25 bp, Homo sapien
cacagcacgcgccacgtccgtaagc

SEQ ID NO: 3947692 - DNA, 25 bp, Homo sapien
cacgtccgtaagctgcacccagtcc

SEQ ID NO: 3947693 - DNA, 25 bp, Homo sapien
aggagccgcggcccgacgcccacag

SEQ ID NO: 3947694 - DNA, 25 bp, Homo sapien
gcacgcgccacgtccgtaagctgca

SEQ ID NO: 3947695 - DNA, 25 bp, Homo sapien
gattgggtgcgatctgcagacagca

SEQ ID NO: 3947696 - DNA, 25 bp, Homo sapien
tgcctggaccattccctcctgattg

SEQ ID NO: 3947697 - DNA, 25 bp, Homo sapien
tggccaaaccgtggccttgcccacc

SEQ ID NO: 3947698 - DNA, 25 bp, Homo sapien
tccctcctgattgggtgcgatctgc

SEQ ID NO: 3947699 - DNA, 25 bp, Homo sapien
tgtgaactcacaggtcccagggtga

SEQ ID NO: 3947700 - DNA, 25 bp, Homo sapien
ttgagggagctgatgtgccgtccac

SEQ ID NO: 3947701 - DNA, 25 bp, Homo sapien
aggtccccgctgctgtgtgaactca

SEQ ID NO: 3947702 - DNA, 25 bp, Homo sapien
gatgggagcctcctcatgaggcgtc

SEQ ID NO: 3947703 - DNA, 25 bp, Homo sapien
cacagcttaagacccatggaaggaa

SEQ ID NO: 3947704 - DNA, 25 bp, Homo sapien
tcttccactcagcaggacggaggta

SEQ ID NO: 3947705 - DNA, 25 bp, Homo sapien
cattttcctgtgtcaccgaggagga

SEQ ID NO: 3947706 - DNA, 25 bp, Homo sapien
ggaacgtgccttccatgggacagaa

SEQ ID NO: 3947707 - DNA, 25 bp, Homo sapien
tgaggacaaccaagtgaggcagagt

SEQ ID NO: 3947708 - DNA, 25 bp, Homo sapien
gccaattaggaagcgtcggtcccag

SEQ ID NO: 3947709 - DNA, 25 bp, Homo sapien
tccatgacatcactcaggcatcggg

SEQ ID NO: 3947710 - DNA, 25 bp, Homo sapien
tgtggctgtcaccacagcacggtgc

SEQ ID NO: 3947711 - DNA, 25 bp, Homo sapien
gacatctgggcctacgatccagtga

SEQ ID NO: 3947712 - DNA, 25 bp, Homo sapien
aaatattaaaggctagctgggcgca

SEQ ID NO: 3947713 - DNA, 25 bp, Homo sapien
tattcgagatgttccacctgacttg

SEQ ID NO: 3947714 - DNA, 25 bp, Homo sapien
gcagcgtggtgaaaactcaacatct

SEQ ID NO: 3947715 - DNA, 25 bp, Homo sapien
tgtccccagcagatcgcacccacgg

SEQ ID NO: 3947716 - DNA, 25 bp, Homo sapien
tgctgcgtgggtctgtgtccccagc

SEQ ID NO: 3947717 - DNA, 25 bp, Homo sapien
ccatctctacccagttccggacgtc

SEQ ID NO: 3947718 - DNA, 25 bp, Homo sapien
tcctctcccctgctgcgtgggtctg

SEQ ID NO: 3947719 - DNA, 25 bp, Homo sapien
ctgagtgggcggagctggccacagg

SEQ ID NO: 3947720 - DNA, 25 bp, Homo sapien
agcagggactcctgaggtcgggcca

SEQ ID NO: 3947721 - DNA, 25 bp, Homo sapien
gaggtctcacctggcgttggccctg

SEQ ID NO: 3947722 - DNA, 25 bp, Homo sapien
tgagaccacccgagcctccccgatg

SEQ ID NO: 3947723 - DNA, 25 bp, Homo sapien
tagcagctgtgaaggcggctcctac

SEQ ID NO: 3947724 - DNA, 25 bp, Homo sapien
aacattctactctggccgggaggcc

SEQ ID NO: 3947725 - DNA, 25 bp, Homo sapien
tcagaggagccccatcaggtatggg

SEQ ID NO: 3947726 - DNA, 25 bp, Homo sapien
atgaaggtccccacggagtgagtga

SEQ ID NO: 3947727 - DNA, 25 bp, Homo sapien
ccgagggctgagtgacaccttgtga

SEQ ID NO: 3947728 - DNA, 25 bp, Homo sapien
ccgcaggctgagtgatagcccgtgt

SEQ ID NO: 3947729 - DNA, 25 bp, Homo sapien
aagaagcgcgtccaggctgagtgac

SEQ ID NO: 3947730 - DNA, 25 bp, Homo sapien
agtgacagcacgaaggaggcctctg

SEQ ID NO: 3947731 - DNA, 25 bp, Homo sapien
aggacgaggaggaacgcggcgtcca

SEQ ID NO: 3947732 - DNA, 25 bp, Homo sapien
ggacgaggaggaacgcggcgtccat

SEQ ID NO: 3947733 - DNA, 25 bp, Homo sapien
gaggacgaggaggaacgcggcgtcc

SEQ ID NO: 3947734 - DNA, 25 bp, Homo sapien
gcggctgcagttgaagacactgtcc

SEQ ID NO: 3947735 - DNA, 25 bp, Homo sapien
cagttgaagacactgtcccgcagcg

SEQ ID NO: 3947736 - DNA, 25 bp, Homo sapien
acactgtcccgcagcgtcgagggag

SEQ ID NO: 3947737 - DNA, 25 bp, Homo sapien
ttgaagacactgtcccgcagcgtcg

SEQ ID NO: 3947738 - DNA, 25 bp, Homo sapien
ctggccacggcccacttccggctct

SEQ ID NO: 3947739 - DNA, 25 bp, Homo sapien
gggcgttctcaaagctggctctttg

SEQ ID NO: 3947740 - DNA, 25 bp, Homo sapien
agatcgggacatccggtgcccagga

SEQ ID NO: 3947741 - DNA, 25 bp, Homo sapien
ccagatcacggccaatgtgggtgtg

SEQ ID NO: 3947742 - DNA, 25 bp, Homo sapien
ctgggagtccagagagtagcaaacg

SEQ ID NO: 3947743 - DNA, 25 bp, Homo sapien
tcctgggagtccagagagtagcaaa

SEQ ID NO: 3947744 - DNA, 25 bp, Homo sapien
ctggggttcttggtcctcggccagc

SEQ ID NO: 3947745 - DNA, 25 bp, Homo sapien
cctggggttcttggtcctcggccag

SEQ ID NO: 3947746 - DNA, 25 bp, Homo sapien
gggtcaccctcgagctccccggtca

SEQ ID NO: 3947747 - DNA, 25 bp, Homo sapien
gagctccccggtcaggctgatgcct

SEQ ID NO: 3947748 - DNA, 25 bp, Homo sapien
ccactcggctcggcacggacatggg

SEQ ID NO: 3947749 - DNA, 25 bp, Homo sapien
cacagagtctgcctgaacttggtga

SEQ ID NO: 3947750 - DNA, 25 bp, Homo sapien
ctgtttgtaatgcacacgggaagcc

SEQ ID NO: 3947751 - DNA, 25 bp, Homo sapien
tctcccacatcaggggctgggacgc

SEQ ID NO: 3947752 - DNA, 25 bp, Homo sapien
gggctgggacgcactgtttgtaatg

SEQ ID NO: 3947753 - DNA, 25 bp, Homo sapien
ttcatctcttcaccccaatacttca

SEQ ID NO: 3947754 - DNA, 25 bp, Homo sapien
ggtcctgacacggaatgaccccaag

SEQ ID NO: 3947755 - DNA, 25 bp, Homo sapien
tgaccccaagaagccagtggcggtg

SEQ ID NO: 3947756 - DNA, 25 bp, Homo sapien
ccaggtgccagggtagcggtgcaca

SEQ ID NO: 3947757 - DNA, 25 bp, Homo sapien
ggtagcggtgcacacggaaagcccc

SEQ ID NO: 3947758 - DNA, 25 bp, Homo sapien
tgtggttctcggatacgctgatcgg

SEQ ID NO: 3947759 - DNA, 25 bp, Homo sapien
gcttgtggttctcggatacgctgat

SEQ ID NO: 3947760 - DNA, 25 bp, Homo sapien
gacgcttgtggttctcggatacgct

SEQ ID NO: 3947761 - DNA, 25 bp, Homo sapien
ggagacgcttgtggttctcggatac

SEQ ID NO: 3947762 - DNA, 25 bp, Homo sapien
acttgtcgatagagaagacgccccg

SEQ ID NO: 3947763 - DNA, 25 bp, Homo sapien
tgaacttgtcgatagagaagacgcc

SEQ ID NO: 3947764 - DNA, 25 bp, Homo sapien
cctgaagcgatcagtcttctcgcgg

SEQ ID NO: 3947765 - DNA, 25 bp, Homo sapien
cgcggtccagcatggcattgaggaa

SEQ ID NO: 3947766 - DNA, 25 bp, Homo sapien
gggcacaggtccgaccacgcagctc

SEQ ID NO: 3947767 - DNA, 25 bp, Homo sapien
ctgcttgaggggcacaggtccgacc

SEQ ID NO: 3947768 - DNA, 25 bp, Homo sapien
tgaggggcacaggtccgaccacgca

SEQ ID NO: 3947769 - DNA, 25 bp, Homo sapien
acaggtccgaccacgcagctccgca

SEQ ID NO: 3947770 - DNA, 25 bp, Homo sapien
tccagggtggatcctcccaggtcca

SEQ ID NO: 3947771 - DNA, 25 bp, Homo sapien
gttgtcattctgatccacaactaca

SEQ ID NO: 3947772 - DNA, 25 bp, Homo sapien
tgatccacaactacaatctccaggt

SEQ ID NO: 3947773 - DNA, 25 bp, Homo sapien
acgcggccagtgaacgcctcctgca

SEQ ID NO: 3947774 - DNA, 25 bp, Homo sapien
cctgtgagctcgtcgatgctgaaga

SEQ ID NO: 3947775 - DNA, 25 bp, Homo sapien
atggagaaccgcagcgctgcgttgt

SEQ ID NO: 3947776 - DNA, 25 bp, Homo sapien
ttgcactgtgcggatctctcctgtg

SEQ ID NO: 3947777 - DNA, 25 bp, Homo sapien
cgcagcgctgcgttgtccgtctcgg

SEQ ID NO: 3947778 - DNA, 25 bp, Homo sapien
cacctgcagggtcagattgtacacc

SEQ ID NO: 3947779 - DNA, 25 bp, Homo sapien
tcatccctggtgaactcgggggcat

SEQ ID NO: 3947780 - DNA, 25 bp, Homo sapien
gtgaggccgtctccagacatgtccg

SEQ ID NO: 3947781 - DNA, 25 bp, Homo sapien
cattgatgtcatcaagggtgatgat

SEQ ID NO: 3947782 - DNA, 25 bp, Homo sapien
ttcgagggagggacagcagcagcac

SEQ ID NO: 3947783 - DNA, 25 bp, Homo sapien
ctactttcgagggagggacagcagc

SEQ ID NO: 3947784 - DNA, 25 bp, Homo sapien
tttcgagggagggacagcagcagca

SEQ ID NO: 3947785 - DNA, 25 bp, Homo sapien
actttcgagggagggacagcagcag

SEQ ID NO: 3947786 - DNA, 25 bp, Homo sapien
ccatacagcaaaggccggagggaga

SEQ ID NO: 3947787 - DNA, 25 bp, Homo sapien
tcagcttcgtgctcccttcccatac

SEQ ID NO: 3947788 - DNA, 25 bp, Homo sapien
cttcccatacagcaaaggccggagg

SEQ ID NO: 3947789 - DNA, 25 bp, Homo sapien
ctcctctgtgggctcagcttcgtgc

SEQ ID NO: 3947790 - DNA, 25 bp, Homo sapien
tccgtgcggatggtgaactgcccat

SEQ ID NO: 3947791 - DNA, 25 bp, Homo sapien
acagaacaccctcgttggtcttggg

SEQ ID NO: 3947792 - DNA, 25 bp, Homo sapien
gcccatcggggtcgccttccaggat

SEQ ID NO: 3947793 - DNA, 25 bp, Homo sapien
gacggcctctatggcctccatgaag

SEQ ID NO: 3947794 - DNA, 25 bp, Homo sapien
tgttcacagctctcatagtccaggg

SEQ ID NO: 3947795 - DNA, 25 bp, Homo sapien
tggtgtcctgcacatgcacgcggac

SEQ ID NO: 3947796 - DNA, 25 bp, Homo sapien
cctctgctaggctggtccgaagtgg

SEQ ID NO: 3947797 - DNA, 25 bp, Homo sapien
tccgaagtgggttctcctggaacac

SEQ ID NO: 3947798 - DNA, 25 bp, Homo sapien
gatggctctgtaccagccgcccttg

SEQ ID NO: 3947799 - DNA, 25 bp, Homo sapien
gtcatcctgggccaggacgatggct

SEQ ID NO: 3947800 - DNA, 25 bp, Homo sapien
tgctgggtctggatccggccagtgg

SEQ ID NO: 3947801 - DNA, 25 bp, Homo sapien
agccagtcttccgggtcgtagtcct

SEQ ID NO: 3947802 - DNA, 25 bp, Homo sapien
ccttggtgtggctcgctgcacaggc

SEQ ID NO: 3947803 - DNA, 25 bp, Homo sapien
ccagttccggccgagctctgggagc

SEQ ID NO: 3947804 - DNA, 25 bp, Homo sapien
tccaggatctcgatggacagggtgc

SEQ ID NO: 3947805 - DNA, 25 bp, Homo sapien
aggtgcatggtcgttcacctccagg

SEQ ID NO: 3947806 - DNA, 25 bp, Homo sapien
gggacctggtgtcgcggccgcaggc

SEQ ID NO: 3947807 - DNA, 25 bp, Homo sapien
ggcgctggccagcacgatgaccagt

SEQ ID NO: 3947808 - DNA, 25 bp, Homo sapien
aggcagacgccgtccttgccgcagc

SEQ ID NO: 3947809 - DNA, 25 bp, Homo sapien
aggctgaggcggtgcaggccttcgg

SEQ ID NO: 3947810 - DNA, 25 bp, Homo sapien
ccgcctccttgctcatcgtagttga

SEQ ID NO: 3947811 - DNA, 25 bp, Homo sapien
tagttgaggacattgtctcgaaggt

SEQ ID NO: 3947812 - DNA, 25 bp, Homo sapien
tgcttccagaaccgcgcccggagtg

SEQ ID NO: 3947813 - DNA, 25 bp, Homo sapien
cccttgccccgagactgcttccaga

SEQ ID NO: 3947814 - DNA, 25 bp, Homo sapien
aggctcagcgctgtcgggtgacgca

SEQ ID NO: 3947815 - DNA, 25 bp, Homo sapien
tcattgatgaagtcggcgatgtcca

SEQ ID NO: 3947816 - DNA, 25 bp, Homo sapien
cagcgctgtcgggtgacgcagctgg

SEQ ID NO: 3947817 - DNA, 25 bp, Homo sapien
gcatctctgcgaagtggcggcggtc

SEQ ID NO: 3947818 - DNA, 25 bp, Homo sapien
tgagggcccagtttggacggtggca

SEQ ID NO: 3947819 - DNA, 25 bp, Homo sapien
tgcaggcgccggttcttgcatgcat

SEQ ID NO: 3947820 - DNA, 25 bp, Homo sapien
ccggttcttgcatgcatgtgcaggt

SEQ ID NO: 3947821 - DNA, 25 bp, Homo sapien
ctgggacggcccataagtgcatgca

SEQ ID NO: 3947822 - DNA, 25 bp, Homo sapien
agtcagctcaaggcacgggctcagg

SEQ ID NO: 3947823 - DNA, 25 bp, Homo sapien
gctcaaggcacgggctcaggaaggg

SEQ ID NO: 3947824 - DNA, 25 bp, Homo sapien
tcagctcaaggcacgggctcaggaa

SEQ ID NO: 3947825 - DNA, 25 bp, Homo sapien
cagctcaaggcacgggctcaggaag

SEQ ID NO: 3947826 - DNA, 25 bp, Homo sapien
gagccgtcaccctcgtagtcataga

SEQ ID NO: 3947827 - DNA, 25 bp, Homo sapien
agtctctgaggtagtcgtagtcctg

SEQ ID NO: 3947828 - DNA, 25 bp, Homo sapien
agtcatagatgagggctgtgtcgta

SEQ ID NO: 3947829 - DNA, 25 bp, Homo sapien
taaggcggcacactggggtcactat

SEQ ID NO: 3947830 - DNA, 25 bp, Homo sapien
tggtggtcccatctggccccgtact

SEQ ID NO: 3947831 - DNA, 25 bp, Homo sapien
tctgtgtctgggtagcagtgcccca

SEQ ID NO: 3947832 - DNA, 25 bp, Homo sapien
gctgtccggcctctgtgtctgggta

SEQ ID NO: 3947833 - DNA, 25 bp, Homo sapien
ggtggtcccatctggccccgtactc

SEQ ID NO: 3947834 - DNA, 25 bp, Homo sapien
tgggactagggaggtgacccgcatg

SEQ ID NO: 3947835 - DNA, 25 bp, Homo sapien
ttgggccctcgcctacaggaaggag

SEQ ID NO: 3947836 - DNA, 25 bp, Homo sapien
agtggcatgtccagttgcgccccag

SEQ ID NO: 3947837 - DNA, 25 bp, Homo sapien
gagactagcacgtttttcattcaga

SEQ ID NO: 3947838 - DNA, 25 bp, Homo sapien
actgccgaccggaccccacgctgtt

SEQ ID NO: 3947839 - DNA, 25 bp, Homo sapien
gccgaccggaccccacgctgttgcc

SEQ ID NO: 3947840 - DNA, 25 bp, Homo sapien
cccactgccgaccggaccccacgct

SEQ ID NO: 3947841 - DNA, 25 bp, Homo sapien
gcgccccactgccgaccggacccca

SEQ ID NO: 3947842 - DNA, 25 bp, Homo sapien
acgcaccgccgcaagaaccggatca

SEQ ID NO: 3947843 - DNA, 25 bp, Homo sapien
gagcggcggcgactttcccttctgg

SEQ ID NO: 3947844 - DNA, 25 bp, Homo sapien
aggacacgcgcggaactctccggcg

SEQ ID NO: 3947845 - DNA, 25 bp, Homo sapien
gcgggcgcccactcccggaccagct

SEQ ID NO: 3947846 - DNA, 25 bp, Homo sapien
tccgcggaatggaagcgctgcccgg

SEQ ID NO: 3947847 - DNA, 25 bp, Homo sapien
agctccgcggaatggaagcgctgcc

SEQ ID NO: 3947848 - DNA, 25 bp, Homo sapien
cagctccgcggaatggaagcgctgc

SEQ ID NO: 3947849 - DNA, 25 bp, Homo sapien
gctccgcggaatggaagcgctgccc

SEQ ID NO: 3947850 - DNA, 25 bp, Homo sapien
gggccatagtttctacgagttcagc

SEQ ID NO: 3947851 - DNA, 25 bp, Homo sapien
gaggacctgaccctcagactgcact

SEQ ID NO: 3947852 - DNA, 25 bp, Homo sapien
catgaggctggttggatacagtgaa

SEQ ID NO: 3947853 - DNA, 25 bp, Homo sapien
tccgatatgcacctccaagttactg

SEQ ID NO: 3947854 - DNA, 25 bp, Homo sapien
tgaatctatgtggaaggtacagtct

SEQ ID NO: 3947855 - DNA, 25 bp, Homo sapien
ccacggatggctggatccctatttc

SEQ ID NO: 3947856 - DNA, 25 bp, Homo sapien
acccacggatggctggatccctatt

SEQ ID NO: 3947857 - DNA, 25 bp, Homo sapien
ctgcagggcagcttgtgaatctatg

SEQ ID NO: 3947858 - DNA, 25 bp, Homo sapien
tgacggaagcgtctgaatgctcctt

SEQ ID NO: 3947859 - DNA, 25 bp, Homo sapien
acggaagcgtctgaatgctcctttc

SEQ ID NO: 3947860 - DNA, 25 bp, Homo sapien
aggctgacggaagcgtctgaatgct

SEQ ID NO: 3947861 - DNA, 25 bp, Homo sapien
gggaggctgacggaagcgtctgaat

SEQ ID NO: 3947862 - DNA, 25 bp, Homo sapien
cgtgggccaggtcaggggctgccat

SEQ ID NO: 3947863 - DNA, 25 bp, Homo sapien
tggtaacaatttatcagccagccag

SEQ ID NO: 3947864 - DNA, 25 bp, Homo sapien
tgagatgggtccagtaaagtccatt

SEQ ID NO: 3947865 - DNA, 25 bp, Homo sapien
tagaggtctctctgagatgggtcca

SEQ ID NO: 3947866 - DNA, 25 bp, Homo sapien
agccacgtcgtcaaaggtcaccgcg

SEQ ID NO: 3947867 - DNA, 25 bp, Homo sapien
ctgaggccaggttctcgtagttttc

SEQ ID NO: 3947868 - DNA, 25 bp, Homo sapien
gacatcgatggaagaggctcaggca

SEQ ID NO: 3947869 - DNA, 25 bp, Homo sapien
aagagacatcgatggaagaggctca

SEQ ID NO: 3947870 - DNA, 25 bp, Homo sapien
cacagggaaagagacatcgatggaa

SEQ ID NO: 3947871 - DNA, 25 bp, Homo sapien
gtacacagggaaagagacatcgatg

SEQ ID NO: 3947872 - DNA, 25 bp, Homo sapien
ctgctccagccaatagatcacactg

SEQ ID NO: 3947873 - DNA, 25 bp, Homo sapien
cagccaatagatcacactgggttgg

SEQ ID NO: 3947874 - DNA, 25 bp, Homo sapien
cttggagaactgctctccgccctgc

SEQ ID NO: 3947875 - DNA, 25 bp, Homo sapien
atagatcacactgggttggaacagg

SEQ ID NO: 3947876 - DNA, 25 bp, Homo sapien
caagatctatcctgccgaagtgctg

SEQ ID NO: 3947877 - DNA, 25 bp, Homo sapien
tgaaccaagatctatcctgccgaag

SEQ ID NO: 3947878 - DNA, 25 bp, Homo sapien
aaccaagatctatcctgccgaagtg

SEQ ID NO: 3947879 - DNA, 25 bp, Homo sapien
ctgaaccaagatctatcctgccgaa

SEQ ID NO: 3947880 - DNA, 25 bp, Homo sapien
acactgcgtgcggtcacagagctgc

SEQ ID NO: 3947881 - DNA, 25 bp, Homo sapien
ctgaaagcttctccacactgcgtgc

SEQ ID NO: 3947882 - DNA, 25 bp, Homo sapien
agcttctccacactgcgtgcggtca

SEQ ID NO: 3947883 - DNA, 25 bp, Homo sapien
gagctgccctccattgtggcttctt

SEQ ID NO: 3947884 - DNA, 25 bp, Homo sapien
taatgattagacacacaactgtctc

SEQ ID NO: 3947885 - DNA, 25 bp, Homo sapien
agtccctttcataatgattagacac

SEQ ID NO: 3947886 - DNA, 25 bp, Homo sapien
tagacacacaactgtctcctgtatt

SEQ ID NO: 3947887 - DNA, 25 bp, Homo sapien
aaaaagtccctttcataatgattag

SEQ ID NO: 3947888 - DNA, 25 bp, Homo sapien
caagagatctgtcccgagtgcatgc

SEQ ID NO: 3947889 - DNA, 25 bp, Homo sapien
ccatggagtgagttagagctttccc

SEQ ID NO: 3947890 - DNA, 25 bp, Homo sapien
cttgcacgcgaccagtaaggtaggc

SEQ ID NO: 3947891 - DNA, 25 bp, Homo sapien
caacatttggagtagagctgaaggc

SEQ ID NO: 3947892 - DNA, 25 bp, Homo sapien
cgtgtctagtaaggccacagcgcac

SEQ ID NO: 3947893 - DNA, 25 bp, Homo sapien
ctcgcccgtgtgtgttcgtacgtgt

SEQ ID NO: 3947894 - DNA, 25 bp, Homo sapien
cgaacatgattattaaggcatgagg

SEQ ID NO: 3947895 - DNA, 25 bp, Homo sapien
tgttcgtacgtgtctagtaaggcca

SEQ ID NO: 3947896 - DNA, 25 bp, Homo sapien
cctgagcgccctgtgaaggctttgc

SEQ ID NO: 3947897 - DNA, 25 bp, Homo sapien
tggattctcgcgtgctcagtcaggc

SEQ ID NO: 3947898 - DNA, 25 bp, Homo sapien
caccggtgtgggttcttatgtgcac

SEQ ID NO: 3947899 - DNA, 25 bp, Homo sapien
tgcataccgtacatataaagggctt

SEQ ID NO: 3947900 - DNA, 25 bp, Homo sapien
tgagttcctgcctgccgggttgtga

SEQ ID NO: 3947901 - DNA, 25 bp, Homo sapien
tcctcaagtcatggacatctggaga

SEQ ID NO: 3947902 - DNA, 25 bp, Homo sapien
catctggagaacgagaggtctttca

SEQ ID NO: 3947903 - DNA, 25 bp, Homo sapien
caagggatcatcaaagtactgagca

SEQ ID NO: 3947904 - DNA, 25 bp, Homo sapien
tgcctcatcagtgccggatcgcagc

SEQ ID NO: 3947905 - DNA, 25 bp, Homo sapien
catgaatgccggatcacagcagctg

SEQ ID NO: 3947906 - DNA, 25 bp, Homo sapien
gccaggaccgctctgcatgctgtga

SEQ ID NO: 3947907 - DNA, 25 bp, Homo sapien
ccccaggagtgccagattgcagcag

SEQ ID NO: 3947908 - DNA, 25 bp, Homo sapien
ttgagattacaccaggatcacgggt

SEQ ID NO: 3947909 - DNA, 25 bp, Homo sapien
ggtgatgtctccaccaacagtgggc

SEQ ID NO: 3947910 - DNA, 25 bp, Homo sapien
caaacatgtgacaggaaggtgcacg

SEQ ID NO: 3947911 - DNA, 25 bp, Homo sapien
cgagggacggcttggctttatcaca

SEQ ID NO: 3947912 - DNA, 25 bp, Homo sapien
tatcttactctgaggaaccctcaga

SEQ ID NO: 3947913 - DNA, 25 bp, Homo sapien
tcagacattgggagtggagattttc

SEQ ID NO: 3947914 - DNA, 25 bp, Homo sapien
tttatcttactctgaggaaccctca

SEQ ID NO: 3947915 - DNA, 25 bp, Homo sapien
ccctcagacattgggagtggagatt

SEQ ID NO: 3947916 - DNA, 25 bp, Homo sapien
ttgcataggcagtgagtggattcgc

SEQ ID NO: 3947917 - DNA, 25 bp, Homo sapien
tctagcctgagagggacggtctagc

SEQ ID NO: 3947918 - DNA, 25 bp, Homo sapien
tgagttgagttgcatatacggtgtg

SEQ ID NO: 3947919 - DNA, 25 bp, Homo sapien
gaccccaggatgaaaatgtacccta

SEQ ID NO: 3947920 - DNA, 25 bp, Homo sapien
cagagcgagctgagttgcatacgca

SEQ ID NO: 3947921 - DNA, 25 bp, Homo sapien
agagcgagctgagttgcatacgcag

SEQ ID NO: 3947922 - DNA, 25 bp, Homo sapien
gcagagcgagctgagttgcatacgc

SEQ ID NO: 3947923 - DNA, 25 bp, Homo sapien
gcgagctgagttgcatacgcagtgc

SEQ ID NO: 3947924 - DNA, 25 bp, Homo sapien
cacacgcagtgcgagttgagttgca

SEQ ID NO: 3947925 - DNA, 25 bp, Homo sapien
catacgcagtgcgagttgagttgca

SEQ ID NO: 3947926 - DNA, 25 bp, Homo sapien
gagttgagttgcacacgcagtgcga

SEQ ID NO: 3947927 - DNA, 25 bp, Homo sapien
atacgcagtgcgagttgagttgcat

SEQ ID NO: 3947928 - DNA, 25 bp, Homo sapien
caccccaaggagatgctgtttcaca

SEQ ID NO: 3947929 - DNA, 25 bp, Homo sapien
tcatcaggcgagtaacctagtcagg

SEQ ID NO: 3947930 - DNA, 25 bp, Homo sapien
tagccagcgtaagcaaaaccatgtt

SEQ ID NO: 3947931 - DNA, 25 bp, Homo sapien
cacagtgtcaagagaaggcggcaca

SEQ ID NO: 3947932 - DNA, 25 bp, Homo sapien
tgtgacttcaacactccgggttctg

SEQ ID NO: 3947933 - DNA, 25 bp, Homo sapien
gatgacatcattttcgggcgtttcg

SEQ ID NO: 3947934 - DNA, 25 bp, Homo sapien
gatctgtcgtcatctaggtcccgtc

SEQ ID NO: 3947935 - DNA, 25 bp, Homo sapien
tcaggatttcacaccgtagggatgt

SEQ ID NO: 3947936 - DNA, 25 bp, Homo sapien
cgcactagaaaggatgccgacacgt

SEQ ID NO: 3947937 - DNA, 25 bp, Homo sapien
aaaggatgccgacacgtgcagtgcg

SEQ ID NO: 3947938 - DNA, 25 bp, Homo sapien
gcgcaggcgcactagaaaggatgcc

SEQ ID NO: 3947939 - DNA, 25 bp, Homo sapien
atgccgacacgtgcagtgcgcgcgc

SEQ ID NO: 3947940 - DNA, 25 bp, Homo sapien
gcctgttcctcaagtctccgagtct

SEQ ID NO: 3947941 - DNA, 25 bp, Homo sapien
tgcgagctccgcctgttcctcaagt

SEQ ID NO: 3947942 - DNA, 25 bp, Homo sapien
tgaaaatgagaggtaagcgacggca

SEQ ID NO: 3947943 - DNA, 25 bp, Homo sapien
cgagtctattccttgggtttggacg

SEQ ID NO: 3947944 - DNA, 25 bp, Homo sapien
gatacggaaagcgtcggtccttgcg

SEQ ID NO: 3947945 - DNA, 25 bp, Homo sapien
tacaccgaagcaggaacccgggata

SEQ ID NO: 3947946 - DNA, 25 bp, Homo sapien
tccaggccacgcgtgatcagattct

SEQ ID NO: 3947947 - DNA, 25 bp, Homo sapien
caggcaatacgaccctgggcgcatt

SEQ ID NO: 3947948 - DNA, 25 bp, Homo sapien
ggtgtccacctctcacaaacagtga

SEQ ID NO: 3947949 - DNA, 25 bp, Homo sapien
aaggtgtccacctctcacaaacagt

SEQ ID NO: 3947950 - DNA, 25 bp, Homo sapien
gccgtggttctgttgccgccgagct

SEQ ID NO: 3947951 - DNA, 25 bp, Homo sapien
caggagccccatcccagccgtggtt

SEQ ID NO: 3947952 - DNA, 25 bp, Homo sapien
gaacgaggtgccctccttctacgtg

SEQ ID NO: 3947953 - DNA, 25 bp, Homo sapien
cttctacgtgcccatggtcgacgtc

SEQ ID NO: 3947954 - DNA, 25 bp, Homo sapien
tctacgtgcccatggtcgacgtcaa

SEQ ID NO: 3947955 - DNA, 25 bp, Homo sapien
aagtccctgtgcgtgaacgaggtgc

SEQ ID NO: 3947956 - DNA, 25 bp, Homo sapien
gacatatctagaaagtctcgcccag

SEQ ID NO: 3947957 - DNA, 25 bp, Homo sapien
gaactttacagtcagcgtcaccctg

SEQ ID NO: 3947958 - DNA, 25 bp, Homo sapien
ttctggccagccctaagatgatggt

SEQ ID NO: 3947959 - DNA, 25 bp, Homo sapien
ttccacagggtgacgagaacaagtc

SEQ ID NO: 3947960 - DNA, 25 bp, Homo sapien
caacgataaaatcagcgaggtctcc

SEQ ID NO: 3947961 - DNA, 25 bp, Homo sapien
tgaaaagaagcacgctgccgaagac

SEQ ID NO: 3947962 - DNA, 25 bp, Homo sapien
gaagctccccgagaaggctgaaaag

SEQ ID NO: 3947963 - DNA, 25 bp, Homo sapien
gaggtctcctctgacagcttcacgg

SEQ ID NO: 3947964 - DNA, 25 bp, Homo sapien
tatcagactccacaaggacgagact

SEQ ID NO: 3947965 - DNA, 25 bp, Homo sapien
tccagtgtggaatcgctgaagccag

SEQ ID NO: 3947966 - DNA, 25 bp, Homo sapien
actggcggacagacaattggaaaac

SEQ ID NO: 3947967 - DNA, 25 bp, Homo sapien
ttcggaaagcggagcgacaagttct

SEQ ID NO: 3947968 - DNA, 25 bp, Homo sapien
gaagactctgagacgagcagggaac

SEQ ID NO: 3947969 - DNA, 25 bp, Homo sapien
caccaagaggtgtggccagtgcaca

SEQ ID NO: 3947970 - DNA, 25 bp, Homo sapien
gatgcggcgggtctcactgatgtct

SEQ ID NO: 3947971 - DNA, 25 bp, Homo sapien
tatgggctcttccagagacgtgaac

SEQ ID NO: 3947972 - DNA, 25 bp, Homo sapien
tgctctcagaccatggtgtcgctgg

SEQ ID NO: 3947973 - DNA, 25 bp, Homo sapien
tctcagagctgacagacgtgcaagt

SEQ ID NO: 3947974 - DNA, 25 bp, Homo sapien
tttcacagtggagagattggcatcc

SEQ ID NO: 3947975 - DNA, 25 bp, Homo sapien
tcctctcagaggagcgtttctcagg

SEQ ID NO: 3947976 - DNA, 25 bp, Homo sapien
ggagaaagagcagtaattacacatt

SEQ ID NO: 3947977 - DNA, 25 bp, Homo sapien
tctgacgtgaagttttcagaacagc

SEQ ID NO: 3947978 - DNA, 25 bp, Homo sapien
tgcagcttaacaggcacctcggcag

SEQ ID NO: 3947979 - DNA, 25 bp, Homo sapien
caaagggaggatgttaaaagcagcc

SEQ ID NO: 3947980 - DNA, 25 bp, Homo sapien
cagtgggaatatggttgcgccctcg

SEQ ID NO: 3947981 - DNA, 25 bp, Homo sapien
cctcgtgtagatcggctgtgattta

SEQ ID NO: 3947982 - DNA, 25 bp, Homo sapien
acaggctgttcggagcttgtcttgc

SEQ ID NO: 3947983 - DNA, 25 bp, Homo sapien
gttgtggaccatccgcctcgtgtag

SEQ ID NO: 3947984 - DNA, 25 bp, Homo sapien
agatgacccagctcccatcggcagg

SEQ ID NO: 3947985 - DNA, 25 bp, Homo sapien
gctgaaaggcgtaagagatgaccca

SEQ ID NO: 3947986 - DNA, 25 bp, Homo sapien
tctgtgtgaccccttcacatacact

SEQ ID NO: 3947987 - DNA, 25 bp, Homo sapien
ttcacatacactgcggaagaagcca

SEQ ID NO: 3947988 - DNA, 25 bp, Homo sapien
tgttcaccatggtgaccgctggatg

SEQ ID NO: 3947989 - DNA, 25 bp, Homo sapien
aatacccacgatgctgtgtgtgtgg

SEQ ID NO: 3947990 - DNA, 25 bp, Homo sapien
tcctggcttcttgttcaccatggtg

SEQ ID NO: 3947991 - DNA, 25 bp, Homo sapien
tctgagcccttttgccgacattgct

SEQ ID NO: 3947992 - DNA, 25 bp, Homo sapien
gcagggtcggcctctgaatacagag

SEQ ID NO: 3947993 - DNA, 25 bp, Homo sapien
aggaccagagccacagtcacttcca

SEQ ID NO: 3947994 - DNA, 25 bp, Homo sapien
agggatcccacgcagggcacagatc

SEQ ID NO: 3947995 - DNA, 25 bp, Homo sapien
cacctcgtgagtctctggaaagcag

SEQ ID NO: 3947996 - DNA, 25 bp, Homo sapien
cagtttaaaaagccttatcactgaa

SEQ ID NO: 3947997 - DNA, 25 bp, Homo sapien
cccaccgagccctctcagaccagct

SEQ ID NO: 3947998 - DNA, 25 bp, Homo sapien
tgcccggggcctcttgtatctgctt

SEQ ID NO: 3947999 - DNA, 25 bp, Homo sapien
tgccctgggacttctagcccatctt

SEQ ID NO: 3948000 - DNA, 25 bp, Homo sapien
cagggttaactgacacgtgacagac

SEQ ID NO: 3948001 - DNA, 25 bp, Homo sapien
gccgcctgccaagaacaatgtgatt

SEQ ID NO: 3948002 - DNA, 25 bp, Homo sapien
taaatagtagcgagtccaactccag

SEQ ID NO: 3948003 - DNA, 25 bp, Homo sapien
cccagatgcagggttgagtcggccc

SEQ ID NO: 3948004 - DNA, 25 bp, Homo sapien
cccatgagtggaagtcgtgatgtga

SEQ ID NO: 3948005 - DNA, 25 bp, Homo sapien
tatgacatgtgcagagcctacctcg

SEQ ID NO: 3948006 - DNA, 25 bp, Homo sapien
tgtgatagggaatctgcatatgaca

SEQ ID NO: 3948007 - DNA, 25 bp, Homo sapien
ggagggtgtcaactggacgtggcca

SEQ ID NO: 3948008 - DNA, 25 bp, Homo sapien
catgtgatcataccaactaatgcag

SEQ ID NO: 3948009 - DNA, 25 bp, Homo sapien
ctccaggcagcacgaaagtcagact

SEQ ID NO: 3948010 - DNA, 25 bp, Homo sapien
tcaacctgacagagagcatctgtga

SEQ ID NO: 3948011 - DNA, 25 bp, Homo sapien
atgtaccatgaccaaccaagtaggg

SEQ ID NO: 3948012 - DNA, 25 bp, Homo sapien
ttgagtgtgttctgatccaaaggtg

SEQ ID NO: 3948013 - DNA, 25 bp, Homo sapien
tgttctgatccaaaggtgtgcaggg

SEQ ID NO: 3948014 - DNA, 25 bp, Homo sapien
acggaatcccagaaccgctgagctg

SEQ ID NO: 3948015 - DNA, 25 bp, Homo sapien
cattgccgaccacggaatcccagaa

SEQ ID NO: 3948016 - DNA, 25 bp, Homo sapien
gcgaacataaccagcaagacggcct

SEQ ID NO: 3948017 - DNA, 25 bp, Homo sapien
cattttgtgaatacggacacgtgca

SEQ ID NO: 3948018 - DNA, 25 bp, Homo sapien
gacacgtgcaggtgctaaacgacag

SEQ ID NO: 3948019 - DNA, 25 bp, Homo sapien
ttgcagccaccagcgaaggatgagc

SEQ ID NO: 3948020 - DNA, 25 bp, Homo sapien
tcaaaagccatacttcgtgcatgag

SEQ ID NO: 3948021 - DNA, 25 bp, Homo sapien
tcccggcatggtcgcgcacagaggt

SEQ ID NO: 3948022 - DNA, 25 bp, Homo sapien
tgcatgagcgagatgggtaaatgca

SEQ ID NO: 3948023 - DNA, 25 bp, Homo sapien
gatgggtctgcacatcgtgtttcaa

SEQ ID NO: 3948024 - DNA, 25 bp, Homo sapien
tcctgagtggactcccagatccctg

SEQ ID NO: 3948025 - DNA, 25 bp, Homo sapien
agtccccggagtgttcgctgtgatg

SEQ ID NO: 3948026 - DNA, 25 bp, Homo sapien
gatgcaggccgtgaaaagtattttg

SEQ ID NO: 3948027 - DNA, 25 bp, Homo sapien
tttgcctggtgggtgcgacccactt

SEQ ID NO: 3948028 - DNA, 25 bp, Homo sapien
catccgccaggaggtgaagtaacaa

SEQ ID NO: 3948029 - DNA, 25 bp, Homo sapien
gaccctgacagtccacgaagctggg

SEQ ID NO: 3948030 - DNA, 25 bp, Homo sapien
caaggacggctgttcccagcatcag

SEQ ID NO: 3948031 - DNA, 25 bp, Homo sapien
gccagccccgtagaaggattgtctt

SEQ ID NO: 3948032 - DNA, 25 bp, Homo sapien
tctgcatcaggcttaatcctggagg

SEQ ID NO: 3948033 - DNA, 25 bp, Homo sapien
ggctctttggtgctcgctgcatctc

SEQ ID NO: 3948034 - DNA, 25 bp, Homo sapien
taatcctggaggaaggctctttggt

SEQ ID NO: 3948035 - DNA, 25 bp, Homo sapien
cttgccgtagtcagtgtaaccactt

SEQ ID NO: 3948036 - DNA, 25 bp, Homo sapien
tccgctcagtccgttggagacttct

SEQ ID NO: 3948037 - DNA, 25 bp, Homo sapien
tcactcaagggctttgcacacagta

SEQ ID NO: 3948038 - DNA, 25 bp, Homo sapien
cacacagtaggcctgccaggtatgc

SEQ ID NO: 3948039 - DNA, 25 bp, Homo sapien
atagggtgtgtcactcaagggcttt

SEQ ID NO: 3948040 - DNA, 25 bp, Homo sapien
ctttgcacagagtgatagctggaac

SEQ ID NO: 3948041 - DNA, 25 bp, Homo sapien
ggtgagacggaggacacccatgtta

SEQ ID NO: 3948042 - DNA, 25 bp, Homo sapien
gaggacacccatgttaggagtcctt

SEQ ID NO: 3948043 - DNA, 25 bp, Homo sapien
ttaggagtcctttgcacagagtgat

SEQ ID NO: 3948044 - DNA, 25 bp, Homo sapien
ctcctgtcgggtggtccgtgttccg

SEQ ID NO: 3948045 - DNA, 25 bp, Homo sapien
tccgtgttccggagcacggggctcc

SEQ ID NO: 3948046 - DNA, 25 bp, Homo sapien
tccgtgctcctgtcgggtggtccgt

SEQ ID NO: 3948047 - DNA, 25 bp, Homo sapien
gtcgccccgactgctgtgtccgtgc

SEQ ID NO: 3948048 - DNA, 25 bp, Homo sapien
ccagatggagggttcgtcggcctct

SEQ ID NO: 3948049 - DNA, 25 bp, Homo sapien
gcagcttcctcaagatgctcccagg

SEQ ID NO: 3948050 - DNA, 25 bp, Homo sapien
tgcttccgcagatctgccgtgctgg

SEQ ID NO: 3948051 - DNA, 25 bp, Homo sapien
cttgatgactaacgaagctgagaac

SEQ ID NO: 3948052 - DNA, 25 bp, Homo sapien
tcccagtagggcctagcagggcgat

SEQ ID NO: 3948053 - DNA, 25 bp, Homo sapien
cctgaagctgctccgtcgtcatgct

SEQ ID NO: 3948054 - DNA, 25 bp, Homo sapien
gtcccagtagggcctagcagggcga

SEQ ID NO: 3948055 - DNA, 25 bp, Homo sapien
gaagctgctccgtcgtcatgctcat

SEQ ID NO: 3948056 - DNA, 25 bp, Homo sapien
agagaagggaccaagtgcccatggt

SEQ ID NO: 3948057 - DNA, 25 bp, Homo sapien
cgccaagatctagaagggccctgag

SEQ ID NO: 3948058 - DNA, 25 bp, Homo sapien
ccagacgccaagatctagaagggcc

SEQ ID NO: 3948059 - DNA, 25 bp, Homo sapien
ttgaggcccagacgccaagatctag

SEQ ID NO: 3948060 - DNA, 25 bp, Homo sapien
tatcctggaccgaatgctgtcttcc

SEQ ID NO: 3948061 - DNA, 25 bp, Homo sapien
aaacctggtccagagtattgctggt

SEQ ID NO: 3948062 - DNA, 25 bp, Homo sapien
ccttgttcctgttgggcgagttctt

SEQ ID NO: 3948063 - DNA, 25 bp, Homo sapien
ggagttcaacgttttccgactctca

SEQ ID NO: 3948064 - DNA, 25 bp, Homo sapien
tttatggatgtgactgaccaagttc

SEQ ID NO: 3948065 - DNA, 25 bp, Homo sapien
cagttgctgccttgtgttttctgac

SEQ ID NO: 3948066 - DNA, 25 bp, Homo sapien
tagtcgtggtctgtgaaggtaattg

SEQ ID NO: 3948067 - DNA, 25 bp, Homo sapien
ccaagttccggccagttgctgcctt

SEQ ID NO: 3948068 - DNA, 25 bp, Homo sapien
cctgcgaagcataaactgtgtcaga

SEQ ID NO: 3948069 - DNA, 25 bp, Homo sapien
gcgaagcataaactgtgtcagacat

SEQ ID NO: 3948070 - DNA, 25 bp, Homo sapien
tgcgaagcataaactgtgtcagaca

SEQ ID NO: 3948071 - DNA, 25 bp, Homo sapien
cgcctgcgaagcataaactgtgtca

SEQ ID NO: 3948072 - DNA, 25 bp, Homo sapien
tcttggctcattacaacctcacctc

SEQ ID NO: 3948073 - DNA, 25 bp, Homo sapien
ttggctcattacaacctcacctcct

SEQ ID NO: 3948074 - DNA, 25 bp, Homo sapien
tggctcattacaacctcacctcctg

SEQ ID NO: 3948075 - DNA, 25 bp, Homo sapien
atcttggctcattacaacctcacct

SEQ ID NO: 3948076 - DNA, 25 bp, Homo sapien
tgctcttgacgagctcttgtgcccg

SEQ ID NO: 3948077 - DNA, 25 bp, Homo sapien
gacgagctcttgtgcccgccatcgt

SEQ ID NO: 3948078 - DNA, 25 bp, Homo sapien
aacagtgctcttgacgagctcttgt

SEQ ID NO: 3948079 - DNA, 25 bp, Homo sapien
tcttgacgagctcttgtgcccgcca

SEQ ID NO: 3948080 - DNA, 25 bp, Homo sapien
cctgtggccatggattggcttgccg

SEQ ID NO: 3948081 - DNA, 25 bp, Homo sapien
gcttgccgatgagcagtggttcctc

SEQ ID NO: 3948082 - DNA, 25 bp, Homo sapien
ttgccgatgagcagtggttcctccc

SEQ ID NO: 3948083 - DNA, 25 bp, Homo sapien
gccatggattggcttgccgatgagc

SEQ ID NO: 3948084 - DNA, 25 bp, Homo sapien
taatataggcagttatccacgtggc

SEQ ID NO: 3948085 - DNA, 25 bp, Homo sapien
gaaacgtggtcgctaagctgtgcat

SEQ ID NO: 3948086 - DNA, 25 bp, Homo sapien
tgtgtagatgatgttcactcccgtg

SEQ ID NO: 3948087 - DNA, 25 bp, Homo sapien
cactcccgtgaatatgcagctgtga

SEQ ID NO: 3948088 - DNA, 25 bp, Homo sapien
taaggcatacacaagacataagagc

SEQ ID NO: 3948089 - DNA, 25 bp, Homo sapien
gaaagcgagtttcagaaaatcctgg

SEQ ID NO: 3948090 - DNA, 25 bp, Homo sapien
ggcagagtgtctcagcagcacggta

SEQ ID NO: 3948091 - DNA, 25 bp, Homo sapien
ggaaatattttgaaagcgagtttca

SEQ ID NO: 3948092 - DNA, 25 bp, Homo sapien
aggtagtgagtatccggtgagtctc

SEQ ID NO: 3948093 - DNA, 25 bp, Homo sapien
ctcccacgtggagtggactgttgtg

SEQ ID NO: 3948094 - DNA, 25 bp, Homo sapien
tgagagaacgctgaactcccacgtg

SEQ ID NO: 3948095 - DNA, 25 bp, Homo sapien
tgctcttcctcaccgatgggtgcgg

SEQ ID NO: 3948096 - DNA, 25 bp, Homo sapien
catttctcgggcgtacctaggtgta

SEQ ID NO: 3948097 - DNA, 25 bp, Homo sapien
ttgtttggagaccagccctttgaag

SEQ ID NO: 3948098 - DNA, 25 bp, Homo sapien
ggtgtaggtcgctgcactgcctttt

SEQ ID NO: 3948099 - DNA, 25 bp, Homo sapien
tcgtggagacgtgtgggcatttctc

SEQ ID NO: 3948100 - DNA, 25 bp, Homo sapien
acagcagtcaccgtgatgaaagctc

SEQ ID NO: 3948101 - DNA, 25 bp, Homo sapien
gcacagcagtcaccgtgatgaaagc

SEQ ID NO: 3948102 - DNA, 25 bp, Homo sapien
cacagcagtcaccgtgatgaaagct

SEQ ID NO: 3948103 - DNA, 25 bp, Homo sapien
agcacagcagtcaccgtgatgaaag

SEQ ID NO: 3948104 - DNA, 25 bp, Homo sapien
taagcgagcgcgcagttgaacgttt

SEQ ID NO: 3948105 - DNA, 25 bp, Homo sapien
gttgaacgtttctcacctgaacaag

SEQ ID NO: 3948106 - DNA, 25 bp, Homo sapien
ccctcggcggttttcagtaagcgag

SEQ ID NO: 3948107 - DNA, 25 bp, Homo sapien
tgcaccctgaaagtcaagacgctcg

SEQ ID NO: 3948108 - DNA, 25 bp, Homo sapien
cccttctggagatgtcgagtgggcc

SEQ ID NO: 3948109 - DNA, 25 bp, Homo sapien
gctttgcagaagtgcggagctcctg

SEQ ID NO: 3948110 - DNA, 25 bp, Homo sapien
agaagtgcggagctcctgtcctgca

SEQ ID NO: 3948111 - DNA, 25 bp, Homo sapien
ctgcaggtattgtggtcgtcagacc

SEQ ID NO: 3948112 - DNA, 25 bp, Homo sapien
ttctttgcccgttgtactcagtcca

SEQ ID NO: 3948113 - DNA, 25 bp, Homo sapien
cacgttcttcgcaaatccgtgcact

SEQ ID NO: 3948114 - DNA, 25 bp, Homo sapien
gtgcactgcacggagctcttccgtg

SEQ ID NO: 3948115 - DNA, 25 bp, Homo sapien
ttgtgaatcacaagaaccaacacgt

SEQ ID NO: 3948116 - DNA, 25 bp, Homo sapien
ttattatgtatactcttcttgctga

SEQ ID NO: 3948117 - DNA, 25 bp, Homo sapien
gaaattattatgtatactcttcttg

SEQ ID NO: 3948118 - DNA, 25 bp, Homo sapien
attattatgtatactcttcttgctg

SEQ ID NO: 3948119 - DNA, 25 bp, Homo sapien
aaattattatgtatactcttcttgc

SEQ ID NO: 3948120 - DNA, 25 bp, Homo sapien
ctttggggccggaactgcacacact

SEQ ID NO: 3948121 - DNA, 25 bp, Homo sapien
gtgctcgtggtggttacgcagccct

SEQ ID NO: 3948122 - DNA, 25 bp, Homo sapien
tccttcctcccataagccccagtgc

SEQ ID NO: 3948123 - DNA, 25 bp, Homo sapien
tgctgcccgtgcaggagatgcccca

SEQ ID NO: 3948124 - DNA, 25 bp, Homo sapien
cccgaggttttgaatgagacagaaa

SEQ ID NO: 3948125 - DNA, 25 bp, Homo sapien
gccccgaggttttgaatgagacaga

SEQ ID NO: 3948126 - DNA, 25 bp, Homo sapien
ggacatggccccgaggttttgaatg

SEQ ID NO: 3948127 - DNA, 25 bp, Homo sapien
catggccccgaggttttgaatgaga

SEQ ID NO: 3948128 - DNA, 25 bp, Homo sapien
tggccgtgctttgttccatgggaac

SEQ ID NO: 3948129 - DNA, 25 bp, Homo sapien
tgccctctgggtgctatcatgattg

SEQ ID NO: 3948130 - DNA, 25 bp, Homo sapien
ggctttggccattcctggccgtgct

SEQ ID NO: 3948131 - DNA, 25 bp, Homo sapien
tcgacgtgacaccatgggaggctct

SEQ ID NO: 3948132 - DNA, 25 bp, Homo sapien
tgtagggtgcttttggatacactcc

SEQ ID NO: 3948133 - DNA, 25 bp, Homo sapien
tctgtcttgactcgtgtcctgtagg

SEQ ID NO: 3948134 - DNA, 25 bp, Homo sapien
tcctggacgagaagagatttgtgat

SEQ ID NO: 3948135 - DNA, 25 bp, Homo sapien
taagggagtcaagtttcctggacga

SEQ ID NO: 3948136 - DNA, 25 bp, Homo sapien
gccacactcggtgtttgccccagtg

SEQ ID NO: 3948137 - DNA, 25 bp, Homo sapien
ccacactcggtgtttgccccagtga

SEQ ID NO: 3948138 - DNA, 25 bp, Homo sapien
ggtgttcgccccagtgatcttcttt

SEQ ID NO: 3948139 - DNA, 25 bp, Homo sapien
cggtgttcgccccagtgatcttctt

SEQ ID NO: 3948140 - DNA, 25 bp, Homo sapien
caaggtatttatgatgtagcaagaa

SEQ ID NO: 3948141 - DNA, 25 bp, Homo sapien
gctccactgagggttagcatttgca

SEQ ID NO: 3948142 - DNA, 25 bp, Homo sapien
ggctggcgtcgtgctctcaaggtat

SEQ ID NO: 3948143 - DNA, 25 bp, Homo sapien
ctgggcttgccggaggctccactga

SEQ ID NO: 3948144 - DNA, 25 bp, Homo sapien
tttccaacagtgctacagccaacct

SEQ ID NO: 3948145 - DNA, 25 bp, Homo sapien
gggttctctcatcagctctaagtag

SEQ ID NO: 3948146 - DNA, 25 bp, Homo sapien
aaactgtcgcctctgaattggctgc

SEQ ID NO: 3948147 - DNA, 25 bp, Homo sapien
cgcctctgaattggctgcaaacaaa

SEQ ID NO: 3948148 - DNA, 25 bp, Homo sapien
agttggacttgtgagaggccttgcc

SEQ ID NO: 3948149 - DNA, 25 bp, Homo sapien
ccttgccctgagggggttcttggct

SEQ ID NO: 3948150 - DNA, 25 bp, Homo sapien
ttgatggctgtgtctcccgtgctcc

SEQ ID NO: 3948151 - DNA, 25 bp, Homo sapien
tctgtcctggaggtggatgccttga

SEQ ID NO: 3948152 - DNA, 25 bp, Homo sapien
cagcagatgaccggcccccagcgca

SEQ ID NO: 3948153 - DNA, 25 bp, Homo sapien
agcagatgaccggcccccagcgcag

SEQ ID NO: 3948154 - DNA, 25 bp, Homo sapien
tcctatcctcagacagatgagctcc

SEQ ID NO: 3948155 - DNA, 25 bp, Homo sapien
gcttcctatcctcagacagatgagc

SEQ ID NO: 3948156 - DNA, 25 bp, Homo sapien
ttcctatcctcagacagatgagctc

SEQ ID NO: 3948157 - DNA, 25 bp, Homo sapien
cttcctatcctcagacagatgagct

SEQ ID NO: 3948158 - DNA, 25 bp, Homo sapien
ggttttgccagcttcacgcctcttt

SEQ ID NO: 3948159 - DNA, 25 bp, Homo sapien
tgccagcttcacgcctctttgtcct

SEQ ID NO: 3948160 - DNA, 25 bp, Homo sapien
gttttgccagcttcacgcctctttg

SEQ ID NO: 3948161 - DNA, 25 bp, Homo sapien
tttgccagcttcacgcctctttgtc

SEQ ID NO: 3948162 - DNA, 25 bp, Homo sapien
ctgctgtcctctgtcctctgctgac

SEQ ID NO: 3948163 - DNA, 25 bp, Homo sapien
cctctgctgtcctctgtcctctgct

SEQ ID NO: 3948164 - DNA, 25 bp, Homo sapien
tgtgacctctgctgtcctctgtcct

SEQ ID NO: 3948165 - DNA, 25 bp, Homo sapien
ctgtgacctctgctgtcctctgtcc

SEQ ID NO: 3948166 - DNA, 25 bp, Homo sapien
tttctgtgtcctgccgtagaatgct

SEQ ID NO: 3948167 - DNA, 25 bp, Homo sapien
cctggggagcttgtcggctgtttct

SEQ ID NO: 3948168 - DNA, 25 bp, Homo sapien
cagccacaggactaggtttgcaggt

SEQ ID NO: 3948169 - DNA, 25 bp, Homo sapien
tgtcctgccgtagaatgctccaggg

SEQ ID NO: 3948170 - DNA, 25 bp, Homo sapien
taaaacccatccgtatgctcctgta

SEQ ID NO: 3948171 - DNA, 25 bp, Homo sapien
tcatgaaaggaatgcactgcgggcc

SEQ ID NO: 3948172 - DNA, 25 bp, Homo sapien
aagaaagccacagctccgcactagt

SEQ ID NO: 3948173 - DNA, 25 bp, Homo sapien
gttaactctaaccacacatctcatg

SEQ ID NO: 3948174 - DNA, 25 bp, Homo sapien
tttagtgaagccacgcagggagttg

SEQ ID NO: 3948175 - DNA, 25 bp, Homo sapien
cagggagttggtgtttgttgctcag

SEQ ID NO: 3948176 - DNA, 25 bp, Homo sapien
caaggcttgttttagtgaagccacg

SEQ ID NO: 3948177 - DNA, 25 bp, Homo sapien
cttgtgaactcggccggcgctggtt

SEQ ID NO: 3948178 - DNA, 25 bp, Homo sapien
agaagctgtgtagtcccttccctcc

SEQ ID NO: 3948179 - DNA, 25 bp, Homo sapien
gggacgttgctgttctctcagaagc

SEQ ID NO: 3948180 - DNA, 25 bp, Homo sapien
gtgagagttgagaatcccacgctgc

SEQ ID NO: 3948181 - DNA, 25 bp, Homo sapien
cacgctgcagggacgttgctgttct

SEQ ID NO: 3948182 - DNA, 25 bp, Homo sapien
gatgttaaccctaggcttctggaag

SEQ ID NO: 3948183 - DNA, 25 bp, Homo sapien
gccaggactcttccagacacgggat

SEQ ID NO: 3948184 - DNA, 25 bp, Homo sapien
gaacaacgcagagctgatgcagaca

SEQ ID NO: 3948185 - DNA, 25 bp, Homo sapien
cacgggatttgtcggtgaacaacgc

SEQ ID NO: 3948186 - DNA, 25 bp, Homo sapien
ggctgtgataaagccccctgcagcc

SEQ ID NO: 3948187 - DNA, 25 bp, Homo sapien
aaagcaatacatatctccgtagaga

SEQ ID NO: 3948188 - DNA, 25 bp, Homo sapien
tcctgggctcaagattataccgtga

SEQ ID NO: 3948189 - DNA, 25 bp, Homo sapien
taaggtctcgggtatggtggtgaca

SEQ ID NO: 3948190 - DNA, 25 bp, Homo sapien
gagataagaagccagctgttcctag

SEQ ID NO: 3948191 - DNA, 25 bp, Homo sapien
tgttcctagtcttcatgcagacacc

SEQ ID NO: 3948192 - DNA, 25 bp, Homo sapien
gacaccagttgtgccagcctcctgg

SEQ ID NO: 3948193 - DNA, 25 bp, Homo sapien
gcgcacgcggttcgtggacccatct

SEQ ID NO: 3948194 - DNA, 25 bp, Homo sapien
tgcgatctctgcctctcaggttcac

SEQ ID NO: 3948195 - DNA, 25 bp, Homo sapien
actgcgatctctgcctctcaggttc

SEQ ID NO: 3948196 - DNA, 25 bp, Homo sapien
ctgcgatctctgcctctcaggttca

SEQ ID NO: 3948197 - DNA, 25 bp, Homo sapien
tatggtaatcgtctctgtgttgttc

SEQ ID NO: 3948198 - DNA, 25 bp, Homo sapien
ggtaatcgtctctgtgttgttcgaa

SEQ ID NO: 3948199 - DNA, 25 bp, Homo sapien
gggctatggtaatcgtctctgtgtt

SEQ ID NO: 3948200 - DNA, 25 bp, Homo sapien
gctatggtaatcgtctctgtgttgt

SEQ ID NO: 3948201 - DNA, 25 bp, Homo sapien
ttcagggaggaagcattgctagagt

SEQ ID NO: 3948202 - DNA, 25 bp, Homo sapien
gcctgttcagagttgtggttcaggg

SEQ ID NO: 3948203 - DNA, 25 bp, Homo sapien
cttcccagcaagtctgtcatgtgca

SEQ ID NO: 3948204 - DNA, 25 bp, Homo sapien
gctttgggcaggagcatttatctca

SEQ ID NO: 3948205 - DNA, 25 bp, Homo sapien
gaaacacgtactacctgccgggtgc

SEQ ID NO: 3948206 - DNA, 25 bp, Homo sapien
ccccttgtggcagagataagtcagt

SEQ ID NO: 3948207 - DNA, 25 bp, Homo sapien
caatacaagtgatggtcagctggca

SEQ ID NO: 3948208 - DNA, 25 bp, Homo sapien
tcagacagtcttgggaactcccgag

SEQ ID NO: 3948209 - DNA, 25 bp, Homo sapien
cccactaggtcaaggatgtaagatt

SEQ ID NO: 3948210 - DNA, 25 bp, Homo sapien
ggactcagcgtaggcctcaggtgct

SEQ ID NO: 3948211 - DNA, 25 bp, Homo sapien
tgcccatgtgggtcggatccttgct

SEQ ID NO: 3948212 - DNA, 25 bp, Homo sapien
tgcaacctgcagtagaagtcttctg

SEQ ID NO: 3948213 - DNA, 25 bp, Homo sapien
ttgaggaaccctagaagcacccagg

SEQ ID NO: 3948214 - DNA, 25 bp, Homo sapien
tgaggaaccctagaagcacccaggg

SEQ ID NO: 3948215 - DNA, 25 bp, Homo sapien
gcttgaggaaccctggaagcaccca

SEQ ID NO: 3948216 - DNA, 25 bp, Homo sapien
gcttgaggaaccctagaagcaccca

SEQ ID NO: 3948217 - DNA, 25 bp, Homo sapien
gtttttgaagagttcaccactgtga

SEQ ID NO: 3948218 - DNA, 25 bp, Homo sapien
ttatttcatctagcacagtcttccc

SEQ ID NO: 3948219 - DNA, 25 bp, Homo sapien
tctgggttctttcatcacagagaag

SEQ ID NO: 3948220 - DNA, 25 bp, Homo sapien
tcctgaagacaggtgtatgtgacca

SEQ ID NO: 3948221 - DNA, 25 bp, Homo sapien
gtgcctgagcccacggccagtgcag

SEQ ID NO: 3948222 - DNA, 25 bp, Homo sapien
ctggtgtgcctgagcccacggccag

SEQ ID NO: 3948223 - DNA, 25 bp, Homo sapien
gccagtgcagcaggttctgccagca

SEQ ID NO: 3948224 - DNA, 25 bp, Homo sapien
gtgtgcctgagcccacggccagtgc

SEQ ID NO: 3948225 - DNA, 25 bp, Homo sapien
caacatccagcaggctggccattgg

SEQ ID NO: 3948226 - DNA, 25 bp, Homo sapien
ttcaacatccagcaggctggccatt

SEQ ID NO: 3948227 - DNA, 25 bp, Homo sapien
acatccagcaggctggccattgggg

SEQ ID NO: 3948228 - DNA, 25 bp, Homo sapien
gtttcaacatccagcaggctggcca

SEQ ID NO: 3948229 - DNA, 25 bp, Homo sapien
tagtgcatcccatttcagcgctttt

SEQ ID NO: 3948230 - DNA, 25 bp, Homo sapien
ccttgtgtgcctgtcctaatagtgc

SEQ ID NO: 3948231 - DNA, 25 bp, Homo sapien
ggtgtgtttccccttgtgtgcctgt

SEQ ID NO: 3948232 - DNA, 25 bp, Homo sapien
gacctggacctggataagctcctca

SEQ ID NO: 3948233 - DNA, 25 bp, Homo sapien
aggatgggtacaacagcttcccatt

SEQ ID NO: 3948234 - DNA, 25 bp, Homo sapien
aaggatgggtacaacagcttcccat

SEQ ID NO: 3948235 - DNA, 25 bp, Homo sapien
caaggatgggtacaacagcttccca

SEQ ID NO: 3948236 - DNA, 25 bp, Homo sapien
tgttcagttgtggtgtggaggcgtc

SEQ ID NO: 3948237 - DNA, 25 bp, Homo sapien
gggctgtaggaggatgttcagttgt

SEQ ID NO: 3948238 - DNA, 25 bp, Homo sapien
gaggcgtcgggttgcttaacctcag

SEQ ID NO: 3948239 - DNA, 25 bp, Homo sapien
tttcctatgagttgtgtagaagagg

SEQ ID NO: 3948240 - DNA, 25 bp, Homo sapien
cgcgtagccggctgctggaggagag

SEQ ID NO: 3948241 - DNA, 25 bp, Homo sapien
gcagaaactgccacccgctttagtg

SEQ ID NO: 3948242 - DNA, 25 bp, Homo sapien
gctgtgccggagagctgcgcgtagc

SEQ ID NO: 3948243 - DNA, 25 bp, Homo sapien
cctgtacaggcagcttcgctctggg

SEQ ID NO: 3948244 - DNA, 25 bp, Homo sapien
aacttgaaatcattatggctgtact

SEQ ID NO: 3948245 - DNA, 25 bp, Homo sapien
gctgcattcatatctgacacaatca

SEQ ID NO: 3948246 - DNA, 25 bp, Homo sapien
ttgaaatcattatggctgtactgtt

SEQ ID NO: 3948247 - DNA, 25 bp, Homo sapien
acttgaaatcattatggctgtactg

SEQ ID NO: 3948248 - DNA, 25 bp, Homo sapien
gcagctctcatttgcgtcagccttc

SEQ ID NO: 3948249 - DNA, 25 bp, Homo sapien
ttttctccggactggccatgctggg

SEQ ID NO: 3948250 - DNA, 25 bp, Homo sapien
gctgttgatgacgagcggctgccat

SEQ ID NO: 3948251 - DNA, 25 bp, Homo sapien
cattgccaccgccagatgcttttct

SEQ ID NO: 3948252 - DNA, 25 bp, Homo sapien
ttttctctgttcttcgtgatgcctc

SEQ ID NO: 3948253 - DNA, 25 bp, Homo sapien
agaccaagttgctgtgacgttttct

SEQ ID NO: 3948254 - DNA, 25 bp, Homo sapien
tcttcgtgatgcctcttaagtttgt

SEQ ID NO: 3948255 - DNA, 25 bp, Homo sapien
ccccacaagatagtgctaaatttga

SEQ ID NO: 3948256 - DNA, 25 bp, Homo sapien
cctccattcagctgttgttctcctc

SEQ ID NO: 3948257 - DNA, 25 bp, Homo sapien
tagtttctccccgaagagcaggatc

SEQ ID NO: 3948258 - DNA, 25 bp, Homo sapien
gagcaggatctccttcgataggctg

SEQ ID NO: 3948259 - DNA, 25 bp, Homo sapien
tctccttcgataggctggccatctg

SEQ ID NO: 3948260 - DNA, 25 bp, Homo sapien
tacctgtggaaaaagtgccatcgaa

SEQ ID NO: 3948261 - DNA, 25 bp, Homo sapien
tgtgtgcagacctagtctatggcat

SEQ ID NO: 3948262 - DNA, 25 bp, Homo sapien
gttcaaaatcggagaccctgaggct

SEQ ID NO: 3948263 - DNA, 25 bp, Homo sapien
tcttagtaagtattggctgccctgg

SEQ ID NO: 3948264 - DNA, 25 bp, Homo sapien
tgagccgtcgcggagccgcgcagcc

SEQ ID NO: 3948265 - DNA, 25 bp, Homo sapien
cggagcacggtgagaggcgccgctg

SEQ ID NO: 3948266 - DNA, 25 bp, Homo sapien
gagcacggtgagaggcgccgctggt

SEQ ID NO: 3948267 - DNA, 25 bp, Homo sapien
cgccgctgagccgtcgcggagccgc

SEQ ID NO: 3948268 - DNA, 25 bp, Homo sapien
ccaatgggcgggagcgtctcatgcg

SEQ ID NO: 3948269 - DNA, 25 bp, Homo sapien
gggagcgtctcatgcggccggctcc

SEQ ID NO: 3948270 - DNA, 25 bp, Homo sapien
ccggggcgggccaatggcggtggcg

SEQ ID NO: 3948271 - DNA, 25 bp, Homo sapien
tggcggatacggcgggccaatgggc

SEQ ID NO: 3948272 - DNA, 25 bp, Homo sapien
cttcgacggcagagcaagagtcacc

SEQ ID NO: 3948273 - DNA, 25 bp, Homo sapien
cgtctacctttttcgcgtgttggag

SEQ ID NO: 3948274 - DNA, 25 bp, Homo sapien
ttggcctcctcaagcggctcaggct

SEQ ID NO: 3948275 - DNA, 25 bp, Homo sapien
gagaactaactagcaaggcagggaa

SEQ ID NO: 3948276 - DNA, 25 bp, Homo sapien
ctccagggctcaagggattctcccg

SEQ ID NO: 3948277 - DNA, 25 bp, Homo sapien
tggtcaggctggtctaactcctgac

SEQ ID NO: 3948278 - DNA, 25 bp, Homo sapien
tccagggctcaagggattctcccgc

SEQ ID NO: 3948279 - DNA, 25 bp, Homo sapien
ggtcaggctggtctaactcctgacc

SEQ ID NO: 3948280 - DNA, 25 bp, Homo sapien
cccaagcttcccagttggattgtaa

SEQ ID NO: 3948281 - DNA, 25 bp, Homo sapien
tagaaggctccttcgagcctaggag

SEQ ID NO: 3948282 - DNA, 25 bp, Homo sapien
catgttgtggaggtgctcgcctata

SEQ ID NO: 3948283 - DNA, 25 bp, Homo sapien
aaatgacaccaaaacggatagggct

SEQ ID NO: 3948284 - DNA, 25 bp, Homo sapien
gaagttctgaattggccatcctgta

SEQ ID NO: 3948285 - DNA, 25 bp, Homo sapien
gatggctgtcatgacggctttaacc

SEQ ID NO: 3948286 - DNA, 25 bp, Homo sapien
tagaaggagcctccatggcccgtaa

SEQ ID NO: 3948287 - DNA, 25 bp, Homo sapien
tggagagagtactgtgtcacgcacc

SEQ ID NO: 3948288 - DNA, 25 bp, Homo sapien
tttaaaagggaacttgtcatatgag

SEQ ID NO: 3948289 - DNA, 25 bp, Homo sapien
tcatatgagactcatggctcacacc

SEQ ID NO: 3948290 - DNA, 25 bp, Homo sapien
tgtcatatgagactcatggctcaca

SEQ ID NO: 3948291 - DNA, 25 bp, Homo sapien
ttaaaagggaacttgtcatatgaga

SEQ ID NO: 3948292 - DNA, 25 bp, Homo sapien
cactgagcacctatgctctccctgt

SEQ ID NO: 3948293 - DNA, 25 bp, Homo sapien
agcctcccacaataactcctgctca

SEQ ID NO: 3948294 - DNA, 25 bp, Homo sapien
acttttggtagcgttgaggtcttgc

SEQ ID NO: 3948295 - DNA, 25 bp, Homo sapien
gctcaggcaagcctcacacccagct

SEQ ID NO: 3948296 - DNA, 25 bp, Homo sapien
cgttctctgatctgcagcgccagga

SEQ ID NO: 3948297 - DNA, 25 bp, Homo sapien
tctgggctgcgttctctgatctgca

SEQ ID NO: 3948298 - DNA, 25 bp, Homo sapien
accggcctctgaaacgccaggacag

SEQ ID NO: 3948299 - DNA, 25 bp, Homo sapien
ctgctgagggcgatgagggtgagtc

SEQ ID NO: 3948300 - DNA, 25 bp, Homo sapien
ctgcgcgagcccatcgtaggaagcg

SEQ ID NO: 3948301 - DNA, 25 bp, Homo sapien
tcggaggcgcttcgagcctcggtcc

SEQ ID NO: 3948302 - DNA, 25 bp, Homo sapien
ctggaagcttaggaagaggctctgt

SEQ ID NO: 3948303 - DNA, 25 bp, Homo sapien
tccgccttaggtctagagctgacgc

SEQ ID NO: 3948304 - DNA, 25 bp, Homo sapien
tcggtcacaggcgagggcggatggt

SEQ ID NO: 3948305 - DNA, 25 bp, Homo sapien
tagaggcccgcgctcaggagggcgg

SEQ ID NO: 3948306 - DNA, 25 bp, Homo sapien
ggcagcctgcgtcacccgcagggtt

SEQ ID NO: 3948307 - DNA, 25 bp, Homo sapien
ggaatcccgcctgcgagtagaggcc

SEQ ID NO: 3948308 - DNA, 25 bp, Homo sapien
tttgaagccggccttgtattcccag

SEQ ID NO: 3948309 - DNA, 25 bp, Homo sapien
tctgcgaggaggtcgcgggtgccct

SEQ ID NO: 3948310 - DNA, 25 bp, Homo sapien
tgacgtggcgcctgcgcggtcccca

SEQ ID NO: 3948311 - DNA, 25 bp, Homo sapien
gagcctgagcccgtctacctcgtgg

SEQ ID NO: 3948312 - DNA, 25 bp, Homo sapien
accccggcggagggcacggagcagc

SEQ ID NO: 3948313 - DNA, 25 bp, Homo sapien
gaccccggcggagggcacggagcag

SEQ ID NO: 3948314 - DNA, 25 bp, Homo sapien
tggaccccggcggagggcacggagc

SEQ ID NO: 3948315 - DNA, 25 bp, Homo sapien
ctggaccccggcggagggcacggag

SEQ ID NO: 3948316 - DNA, 25 bp, Homo sapien
ctgctggccatgtacggccgccccc

SEQ ID NO: 3948317 - DNA, 25 bp, Homo sapien
ggcctgctggccatgtacggccgcc

SEQ ID NO: 3948318 - DNA, 25 bp, Homo sapien
ccagcctcggcgaggtcccccggag

SEQ ID NO: 3948319 - DNA, 25 bp, Homo sapien
gcctgctggccatgtacggccgccc

SEQ ID NO: 3948320 - DNA, 25 bp, Homo sapien
gggttagcagtctcaattgtaagct

SEQ ID NO: 3948321 - DNA, 25 bp, Homo sapien
ctaaaagttgccagagtctgactgg

SEQ ID NO: 3948322 - DNA, 25 bp, Homo sapien
tgttgtttcaacaacaatccgttga

SEQ ID NO: 3948323 - DNA, 25 bp, Homo sapien
caatccgttgatcccttcaaaggta

SEQ ID NO: 3948324 - DNA, 25 bp, Homo sapien
tcaaccttgaggtgttaaaatagaa

SEQ ID NO: 3948325 - DNA, 25 bp, Homo sapien
gcttcaaccttgaggtgttaaaata

SEQ ID NO: 3948326 - DNA, 25 bp, Homo sapien
ttctgcttcaaccttgaggtgttaa

SEQ ID NO: 3948327 - DNA, 25 bp, Homo sapien
cttcgtcctcttcaggcgccttccc

SEQ ID NO: 3948328 - DNA, 25 bp, Homo sapien
ggcctcaaggatccaaaagcaaagc

SEQ ID NO: 3948329 - DNA, 25 bp, Homo sapien
agcagggcgtccatcttaacaacgc

SEQ ID NO: 3948330 - DNA, 25 bp, Homo sapien
tgaagctgagttcaacccttctgcc

SEQ ID NO: 3948331 - DNA, 25 bp, Homo sapien
tgatttccagcgagaggcctcaagg

SEQ ID NO: 3948332 - DNA, 25 bp, Homo sapien
tcatttccacatcctgaaagctttc

SEQ ID NO: 3948333 - DNA, 25 bp, Homo sapien
tcatccaatagctgaaccatcattt

SEQ ID NO: 3948334 - DNA, 25 bp, Homo sapien
agctgaaccatcatttccacatcct

SEQ ID NO: 3948335 - DNA, 25 bp, Homo sapien
ctgaaccatcatttccacatcctga

SEQ ID NO: 3948336 - DNA, 25 bp, Homo sapien
taatcccagctacttcggaggctga

SEQ ID NO: 3948337 - DNA, 25 bp, Homo sapien
aattagcagggtgtggtggtgagca

SEQ ID NO: 3948338 - DNA, 25 bp, Homo sapien
agcagggtgtggtggtgagcacctg

SEQ ID NO: 3948339 - DNA, 25 bp, Homo sapien
ttagcagggtgtggtggtgagcacc

SEQ ID NO: 3948340 - DNA, 25 bp, Homo sapien
cctgaccaacgtggccaaaccaggt

SEQ ID NO: 3948341 - DNA, 25 bp, Homo sapien
ggccccaagtgatctaactttcttc

SEQ ID NO: 3948342 - DNA, 25 bp, Homo sapien
ccagtgatctgaaattacgccattg

SEQ ID NO: 3948343 - DNA, 25 bp, Homo sapien
cgtggccaaaccaggtctctaccaa

SEQ ID NO: 3948344 - DNA, 25 bp, Homo sapien
tgagctatgtatgatcacggacacg

SEQ ID NO: 3948345 - DNA, 25 bp, Homo sapien
caatgcagcaacgactaggatttca

SEQ ID NO: 3948346 - DNA, 25 bp, Homo sapien
tatgacaggtgacccttcagcaaca

SEQ ID NO: 3948347 - DNA, 25 bp, Homo sapien
ggatttcactggacaagcacctacc

SEQ ID NO: 3948348 - DNA, 25 bp, Homo sapien
gcaaactatagttcaacccaaaaca

SEQ ID NO: 3948349 - DNA, 25 bp, Homo sapien
caaactatagttcaacccaaaacag

SEQ ID NO: 3948350 - DNA, 25 bp, Homo sapien
tacaatcattctgcacggctggcaa

SEQ ID NO: 3948351 - DNA, 25 bp, Homo sapien
gcaaatacttttcgggcaaccacta

SEQ ID NO: 3948352 - DNA, 25 bp, Homo sapien
agttcagcatcagaccagggagaag

SEQ ID NO: 3948353 - DNA, 25 bp, Homo sapien
tcatctgaacagacgccatgcagtt

SEQ ID NO: 3948354 - DNA, 25 bp, Homo sapien
ggttcacccgccttaccagtgagca

SEQ ID NO: 3948355 - DNA, 25 bp, Homo sapien
ttcacccgcgttatcagtgagcggg

SEQ ID NO: 3948356 - DNA, 25 bp, Homo sapien
gcgttatcagtgagcggagcctttt

SEQ ID NO: 3948357 - DNA, 25 bp, Homo sapien
tacggcatgtgatctttcagctcgg

SEQ ID NO: 3948358 - DNA, 25 bp, Homo sapien
caaacggctgataccactgagtctc

SEQ ID NO: 3948359 - DNA, 25 bp, Homo sapien
taagaaattccagccggacgcaatg

SEQ ID NO: 3948360 - DNA, 25 bp, Homo sapien
tcatatgcacacctcgtggacggca

SEQ ID NO: 3948361 - DNA, 25 bp, Homo sapien
aaatgttagcaactgctgccgggcg

SEQ ID NO: 3948362 - DNA, 25 bp, Homo sapien
gctcacgtcttcttgagattcacag

SEQ ID NO: 3948363 - DNA, 25 bp, Homo sapien
cacggacccagcagccgggacgaga

SEQ ID NO: 3948364 - DNA, 25 bp, Homo sapien
ccagcagccgggacgagaggctcac

SEQ ID NO: 3948365 - DNA, 25 bp, Homo sapien
gacgagaggctcacgtcttcttgag

SEQ ID NO: 3948366 - DNA, 25 bp, Homo sapien
agacccagcggtggtaacgacgtca

SEQ ID NO: 3948367 - DNA, 25 bp, Homo sapien
aaaccgccacagacccagcggtggt

SEQ ID NO: 3948368 - DNA, 25 bp, Homo sapien
cagcgggaacgacatcatctccaga

SEQ ID NO: 3948369 - DNA, 25 bp, Homo sapien
gtcatttccagaacaccagcgcctg

SEQ ID NO: 3948370 - DNA, 25 bp, Homo sapien
cactgttgagtctaaaggcatatac

SEQ ID NO: 3948371 - DNA, 25 bp, Homo sapien
gatggaaaagacattcggcccctgt

SEQ ID NO: 3948372 - DNA, 25 bp, Homo sapien
tccagacattgggatacctcgaggg

SEQ ID NO: 3948373 - DNA, 25 bp, Homo sapien
taacaccctactgaagacacggtgg

SEQ ID NO: 3948374 - DNA, 25 bp, Homo sapien
tgcaaagtgcaagctcacaatggcc

SEQ ID NO: 3948375 - DNA, 25 bp, Homo sapien
tccagttgcttggagtttgatcaaa

SEQ ID NO: 3948376 - DNA, 25 bp, Homo sapien
cgtccgagccgtcacagatgcagtc

SEQ ID NO: 3948377 - DNA, 25 bp, Homo sapien
cagtcagctctcctgctgcaaagtg

SEQ ID NO: 3948378 - DNA, 25 bp, Homo sapien
aaacacatgagcaacagacacgggc

SEQ ID NO: 3948379 - DNA, 25 bp, Homo sapien
gaggtcacccacacttcattcgctg

SEQ ID NO: 3948380 - DNA, 25 bp, Homo sapien
taacgctgtgctgttcgaggtcacc

SEQ ID NO: 3948381 - DNA, 25 bp, Homo sapien
ttatcagagacaaagactaacgctg

SEQ ID NO: 3948382 - DNA, 25 bp, Homo sapien
gccagcatctcgtggacaaagtcgt

SEQ ID NO: 3948383 - DNA, 25 bp, Homo sapien
tgctgagagcattcaggaggctcat

SEQ ID NO: 3948384 - DNA, 25 bp, Homo sapien
gtgcaggtagacttccaccacgtcg

SEQ ID NO: 3948385 - DNA, 25 bp, Homo sapien
tgacaaccgcgatgaccagcaaggt

SEQ ID NO: 3948386 - DNA, 25 bp, Homo sapien
taggaaactgggatcctgtccttgg

SEQ ID NO: 3948387 - DNA, 25 bp, Homo sapien
aagaatcctgttcgcttgtaggaaa

SEQ ID NO: 3948388 - DNA, 25 bp, Homo sapien
tgcattcggtacatcaaggctagcc

SEQ ID NO: 3948389 - DNA, 25 bp, Homo sapien
ccttggcctcgatattcagctcatc

SEQ ID NO: 3948390 - DNA, 25 bp, Homo sapien
caacggacttgcacacggttggcct

SEQ ID NO: 3948391 - DNA, 25 bp, Homo sapien
aagatttcggcattttacaccaggg

SEQ ID NO: 3948392 - DNA, 25 bp, Homo sapien
caagaatgtgaattcagaagcgcca

SEQ ID NO: 3948393 - DNA, 25 bp, Homo sapien
tgagacttcggcatctacatcaggg

SEQ ID NO: 3948394 - DNA, 25 bp, Homo sapien
caagatgagacgaggaatccctacg

SEQ ID NO: 3948395 - DNA, 25 bp, Homo sapien
tctgggaccgatgcgcagattaaaa

SEQ ID NO: 3948396 - DNA, 25 bp, Homo sapien
gacagacgcaggcttccaaatcaga

SEQ ID NO: 3948397 - DNA, 25 bp, Homo sapien
cagatgccggagatctagccagcct

SEQ ID NO: 3948398 - DNA, 25 bp, Homo sapien
ccactgccgtcatccccacagagta

SEQ ID NO: 3948399 - DNA, 25 bp, Homo sapien
agtcatcccggccagacggaaaaca

SEQ ID NO: 3948400 - DNA, 25 bp, Homo sapien
ttccagtcatcccggccagacggaa

SEQ ID NO: 3948401 - DNA, 25 bp, Homo sapien
ccttccagtcatcccggccagacgg

SEQ ID NO: 3948402 - DNA, 25 bp, Homo sapien
catcccggccagacggaaaacatac

SEQ ID NO: 3948403 - DNA, 25 bp, Homo sapien
tacagccggaccatgggaaaggaag

SEQ ID NO: 3948404 - DNA, 25 bp, Homo sapien
ttggttactacacgccttacagccg

SEQ ID NO: 3948405 - DNA, 25 bp, Homo sapien
taattgtggcttcaggctactctct

SEQ ID NO: 3948406 - DNA, 25 bp, Homo sapien
gaggccctcaggcaacattggttac

SEQ ID NO: 3948407 - DNA, 25 bp, Homo sapien
taagaaacttatctagcaatttgct

SEQ ID NO: 3948408 - DNA, 25 bp, Homo sapien
agtaagaaacttatctagcaatttg

SEQ ID NO: 3948409 - DNA, 25 bp, Homo sapien
gaaacttatctagcaatttgcttta

SEQ ID NO: 3948410 - DNA, 25 bp, Homo sapien
ttagtaagaaacttatctagcaatt

SEQ ID NO: 3948411 - DNA, 25 bp, Homo sapien
caggaaatcagcagcacgatgccag

SEQ ID NO: 3948412 - DNA, 25 bp, Homo sapien
gcttcactcatgtcaggctgacgag

SEQ ID NO: 3948413 - DNA, 25 bp, Homo sapien
agcgctcagcccacgcacctgagcc

SEQ ID NO: 3948414 - DNA, 25 bp, Homo sapien
catgtcaggctgacgaggctcacag

SEQ ID NO: 3948415 - DNA, 25 bp, Homo sapien
tcccatccacaatggtgaaacgagc

SEQ ID NO: 3948416 - DNA, 25 bp, Homo sapien
aaactcgcggacttccagtttggct

SEQ ID NO: 3948417 - DNA, 25 bp, Homo sapien
cagtttggcttcgtgcattcctgcc

SEQ ID NO: 3948418 - DNA, 25 bp, Homo sapien
tcctgccacgtctttgaagctgact

SEQ ID NO: 3948419 - DNA, 25 bp, Homo sapien
ctttgggaccttggcgccaagctgg

SEQ ID NO: 3948420 - DNA, 25 bp, Homo sapien
cagcagtgcgccctttgggaccttg

SEQ ID NO: 3948421 - DNA, 25 bp, Homo sapien
ccgagcagcagtgcgccctttggga

SEQ ID NO: 3948422 - DNA, 25 bp, Homo sapien
ccggccatcgccaggaagggcacct

SEQ ID NO: 3948423 - DNA, 25 bp, Homo sapien
gacaaagttctacaccaaggacaac

SEQ ID NO: 3948424 - DNA, 25 bp, Homo sapien
tacaccaaggacaactaaagctacc

SEQ ID NO: 3948425 - DNA, 25 bp, Homo sapien
caaggacaactaaagctaccagctc

SEQ ID NO: 3948426 - DNA, 25 bp, Homo sapien
ctgtacccgggccagacaaagttct

SEQ ID NO: 3948427 - DNA, 25 bp, Homo sapien
tctcatcgatgtagacgatgcaggg

SEQ ID NO: 3948428 - DNA, 25 bp, Homo sapien
ctccgtgttggagaagccggacatg

SEQ ID NO: 3948429 - DNA, 25 bp, Homo sapien
ggctcgggcttccttaaagaggctc

SEQ ID NO: 3948430 - DNA, 25 bp, Homo sapien
acatggtggtggagcgcttcttgcc

SEQ ID NO: 3948431 - DNA, 25 bp, Homo sapien
cagaagctggttgagcgtctgctcc

SEQ ID NO: 3948432 - DNA, 25 bp, Homo sapien
taccagaagctggttgagcgtctgc

SEQ ID NO: 3948433 - DNA, 25 bp, Homo sapien
ccagaagctggttgagcgtctgctc

SEQ ID NO: 3948434 - DNA, 25 bp, Homo sapien
tctaccagaagctggttgagcgtct

SEQ ID NO: 3948435 - DNA, 25 bp, Homo sapien
aaacctcctctgatggtgcaatggg

SEQ ID NO: 3948436 - DNA, 25 bp, Homo sapien
ccacaacctgttctgaaagacatcg

SEQ ID NO: 3948437 - DNA, 25 bp, Homo sapien
ggaaaacctcctctgatggtgcaat

SEQ ID NO: 3948438 - DNA, 25 bp, Homo sapien
tgaaagacatcggaaaacctcctct

SEQ ID NO: 3948439 - DNA, 25 bp, Homo sapien
gattacatctgacgtaccacttata

SEQ ID NO: 3948440 - DNA, 25 bp, Homo sapien
ggaaagattacatctgacgtaccac

SEQ ID NO: 3948441 - DNA, 25 bp, Homo sapien
gacgtaccacttatattcctacttg

SEQ ID NO: 3948442 - DNA, 25 bp, Homo sapien
aagaaaaggaaagattacatctgac

SEQ ID NO: 3948443 - DNA, 25 bp, Homo sapien
cagacagactcattacacctaaaat

SEQ ID NO: 3948444 - DNA, 25 bp, Homo sapien
agggagagacgtggcagcacaacca

SEQ ID NO: 3948445 - DNA, 25 bp, Homo sapien
aattatgagtggcacagctcttcca

SEQ ID NO: 3948446 - DNA, 25 bp, Homo sapien
tgtcacctttattgggtcagctcca

SEQ ID NO: 3948447 - DNA, 25 bp, Homo sapien
acacagcaccagagaggccacataa

SEQ ID NO: 3948448 - DNA, 25 bp, Homo sapien
acacagcaccagagaggccacagtg

SEQ ID NO: 3948449 - DNA, 25 bp, Homo sapien
accagagaggccacataaagatgct

SEQ ID NO: 3948450 - DNA, 25 bp, Homo sapien
tgaaggccatacagcaccagagagg

SEQ ID NO: 3948451 - DNA, 25 bp, Homo sapien
ctgagcttcctcatggtcccctggg

SEQ ID NO: 3948452 - DNA, 25 bp, Homo sapien
tgaccctgtgggctccgtgagacag

SEQ ID NO: 3948453 - DNA, 25 bp, Homo sapien
caggcgggggtctttcctctgagct

SEQ ID NO: 3948454 - DNA, 25 bp, Homo sapien
aggcaaccccagcagagcgaatgac

SEQ ID NO: 3948455 - DNA, 25 bp, Homo sapien
cggaagcagctattcttatgatggc

SEQ ID NO: 3948456 - DNA, 25 bp, Homo sapien
tcaagtcactcaaaaaggtggtctc

SEQ ID NO: 3948457 - DNA, 25 bp, Homo sapien
aggccttcagtcagcggattcccag

SEQ ID NO: 3948458 - DNA, 25 bp, Homo sapien
gagctggcactcaacaagaggcctt

SEQ ID NO: 3948459 - DNA, 25 bp, Homo sapien
tatcctgtgcgcttccatgaacgga

SEQ ID NO: 3948460 - DNA, 25 bp, Homo sapien
gaacggaagcaacaaagcctggcct

SEQ ID NO: 3948461 - DNA, 25 bp, Homo sapien
tccagtgctctttgacttgcgccct

SEQ ID NO: 3948462 - DNA, 25 bp, Homo sapien
ggctgacgtaaccaacaaggcttgg

SEQ ID NO: 3948463 - DNA, 25 bp, Homo sapien
ccaccaggggatgactacgttgaag

SEQ ID NO: 3948464 - DNA, 25 bp, Homo sapien
ccaactacttaggaagcttgagcct

SEQ ID NO: 3948465 - DNA, 25 bp, Homo sapien
agctcccgcgtgtggtcagcgccga

SEQ ID NO: 3948466 - DNA, 25 bp, Homo sapien
agtcgaagcataaaatgttcacagc

SEQ ID NO: 3948467 - DNA, 25 bp, Homo sapien
accagtttcagctcttctagtcgct

SEQ ID NO: 3948468 - DNA, 25 bp, Homo sapien
cttctagtcgctgtgtagaacgccg

SEQ ID NO: 3948469 - DNA, 25 bp, Homo sapien
cagtttcagctcttctagtcgctgt

SEQ ID NO: 3948470 - DNA, 25 bp, Homo sapien
tcgctgtgtagaacgccgtgataag

SEQ ID NO: 3948471 - DNA, 25 bp, Homo sapien
ctgcgtagaacaccgtgataaggat

SEQ ID NO: 3948472 - DNA, 25 bp, Homo sapien
gatacaccagtttcagctcttctat

SEQ ID NO: 3948473 - DNA, 25 bp, Homo sapien
ggatacaccagtttcagctcttcta

SEQ ID NO: 3948474 - DNA, 25 bp, Homo sapien
tagaacaccgtgataaggatacacc

SEQ ID NO: 3948475 - DNA, 25 bp, Homo sapien
gtcatacgatactaagcctggctct

SEQ ID NO: 3948476 - DNA, 25 bp, Homo sapien
ttgttgctgcaggaagaaagtttcc

SEQ ID NO: 3948477 - DNA, 25 bp, Homo sapien
actttgcgtcatttccttgttgctg

SEQ ID NO: 3948478 - DNA, 25 bp, Homo sapien
ctgctgcatagaacaccatgataag

SEQ ID NO: 3948479 - DNA, 25 bp, Homo sapien
ctgagggtaggggtcctgacacaac

SEQ ID NO: 3948480 - DNA, 25 bp, Homo sapien
cagtggctctgagggtaggggtcct

SEQ ID NO: 3948481 - DNA, 25 bp, Homo sapien
agacagtggctctgagggtaggggt

SEQ ID NO: 3948482 - DNA, 25 bp, Homo sapien
gagggtaggggtcctgacacaacag

SEQ ID NO: 3948483 - DNA, 25 bp, Homo sapien
aatgtcagctcggttcgtggacgcc

SEQ ID NO: 3948484 - DNA, 25 bp, Homo sapien
ggagatcaatgaagacgtgccggtc

SEQ ID NO: 3948485 - DNA, 25 bp, Homo sapien
tggacgccaggacgatgacatggtc

SEQ ID NO: 3948486 - DNA, 25 bp, Homo sapien
tcagagcaccgtccaaaatgtcagc

SEQ ID NO: 3948487 - DNA, 25 bp, Homo sapien
ggcgcacgcccatagtagtcctagc

SEQ ID NO: 3948488 - DNA, 25 bp, Homo sapien
tcctagctcctcagcttgagccctg

SEQ ID NO: 3948489 - DNA, 25 bp, Homo sapien
agcacggcggcgcacgcccatagta

SEQ ID NO: 3948490 - DNA, 25 bp, Homo sapien
taaaaattaaccagcacggcggcgc

SEQ ID NO: 3948491 - DNA, 25 bp, Homo sapien
aaaaagagaacgctcttggaaggag

SEQ ID NO: 3948492 - DNA, 25 bp, Homo sapien
aaaagagaacgctcttggaaggaga

SEQ ID NO: 3948493 - DNA, 25 bp, Homo sapien
ctgccagacgctgggagtaaaaggt

SEQ ID NO: 3948494 - DNA, 25 bp, Homo sapien
cgctgggagtaaaaggtgctggact

SEQ ID NO: 3948495 - DNA, 25 bp, Homo sapien
ccagacgctgggagtaaaaggtgct

SEQ ID NO: 3948496 - DNA, 25 bp, Homo sapien
gctctgccagacgctgggagtaaaa

SEQ ID NO: 3948497 - DNA, 25 bp, Homo sapien
tgcgaggacgcgctccacggcgtac

SEQ ID NO: 3948498 - DNA, 25 bp, Homo sapien
tccacggcgtactcgaagttgagag

SEQ ID NO: 3948499 - DNA, 25 bp, Homo sapien
cgaagttgagagtgtgcacggaagt

SEQ ID NO: 3948500 - DNA, 25 bp, Homo sapien
gagtgtgcacggaagtgtgtccctc

SEQ ID NO: 3948501 - DNA, 25 bp, Homo sapien
gaaacgcaacgtgtgttccttcctg

SEQ ID NO: 3948502 - DNA, 25 bp, Homo sapien
gtgtgatggttccatccacctcacc

SEQ ID NO: 3948503 - DNA, 25 bp, Homo sapien
catgagttacgcagaactgaaacgc

SEQ ID NO: 3948504 - DNA, 25 bp, Homo sapien
aagtacaaggtatcataaagacatg

SEQ ID NO: 3948505 - DNA, 25 bp, Homo sapien
tgttggacgagcgtctactcttagg

SEQ ID NO: 3948506 - DNA, 25 bp, Homo sapien
cactttctttggcaaggcatttttt

SEQ ID NO: 3948507 - DNA, 25 bp, Homo sapien
tttatttctgttggacgagcgtcta

SEQ ID NO: 3948508 - DNA, 25 bp, Homo sapien
gacgagcgtctactcttaggtaaat

SEQ ID NO: 3948509 - DNA, 25 bp, Homo sapien
gaactcggttctcgcagggatagct

SEQ ID NO: 3948510 - DNA, 25 bp, Homo sapien
tagctcgcaaaggaggctcgtgctc

SEQ ID NO: 3948511 - DNA, 25 bp, Homo sapien
cacactgacagtgcgggtctgaact

SEQ ID NO: 3948512 - DNA, 25 bp, Homo sapien
gacggtcgggaccatgagtttcacc

SEQ ID NO: 3948513 - DNA, 25 bp, Homo sapien
ctgcaagaggcgtgttcgtgctagg

SEQ ID NO: 3948514 - DNA, 25 bp, Homo sapien
ttcagtaagacacaggcagcgccag

SEQ ID NO: 3948515 - DNA, 25 bp, Homo sapien
aacttgaatcagctcgtggtcctga

SEQ ID NO: 3948516 - DNA, 25 bp, Homo sapien
tcctgagcactcaagtacgtcatgt

SEQ ID NO: 3948517 - DNA, 25 bp, Homo sapien
caaaagcttttcgatttccacataa

SEQ ID NO: 3948518 - DNA, 25 bp, Homo sapien
attaaatctcccctgttcagcttac

SEQ ID NO: 3948519 - DNA, 25 bp, Homo sapien
cattaaatctcccctgttcagctta

SEQ ID NO: 3948520 - DNA, 25 bp, Homo sapien
tgccccgtgtggtcaaagcaagcct

SEQ ID NO: 3948521 - DNA, 25 bp, Homo sapien
caaaacgacactcttcaggtcaaag

SEQ ID NO: 3948522 - DNA, 25 bp, Homo sapien
gttgcaatcatcgaaatagctcctg

SEQ ID NO: 3948523 - DNA, 25 bp, Homo sapien
gcttttaggaacaagtgcaaccctc

SEQ ID NO: 3948524 - DNA, 25 bp, Homo sapien
catgaaacgcaaccactttctgttc

SEQ ID NO: 3948525 - DNA, 25 bp, Homo sapien
tggcccgactcatgaaacgcaacca

SEQ ID NO: 3948526 - DNA, 25 bp, Homo sapien
aaggcgtggcccgactcatgaaacg

SEQ ID NO: 3948527 - DNA, 25 bp, Homo sapien
ttcatcacggcctccgtgtgctcca

SEQ ID NO: 3948528 - DNA, 25 bp, Homo sapien
gcgcggggcaacgagctaactcgac

SEQ ID NO: 3948529 - DNA, 25 bp, Homo sapien
aacgagctaactcgacaacacggaa

SEQ ID NO: 3948530 - DNA, 25 bp, Homo sapien
gagctaactcgacaacacggaaccg

SEQ ID NO: 3948531 - DNA, 25 bp, Homo sapien
gggcaacgagctaactcgacaacac

SEQ ID NO: 3948532 - DNA, 25 bp, Homo sapien
aagaggtctccgtcattaaagcgtc

SEQ ID NO: 3948533 - DNA, 25 bp, Homo sapien
caacaggggatcctaacactctaga

SEQ ID NO: 3948534 - DNA, 25 bp, Homo sapien
tgcagcatcctctacaacaacaggg

SEQ ID NO: 3948535 - DNA, 25 bp, Homo sapien
ttaaagcgtctcaaagcaggaaggc

SEQ ID NO: 3948536 - DNA, 25 bp, Homo sapien
ctggcacaaggtcaagatgacccag

SEQ ID NO: 3948537 - DNA, 25 bp, Homo sapien
acaaggtcaagatgacccaggtcag

SEQ ID NO: 3948538 - DNA, 25 bp, Homo sapien
gcacaaggtcaagatgacccaggtc

SEQ ID NO: 3948539 - DNA, 25 bp, Homo sapien
acccaggtcagtaggcaggatgcgt

SEQ ID NO: 3948540 - DNA, 25 bp, Homo sapien
atgcacatccgctcaaacagctgct

SEQ ID NO: 3948541 - DNA, 25 bp, Homo sapien
cgttgaaggacagtgcttccgaggc

SEQ ID NO: 3948542 - DNA, 25 bp, Homo sapien
agggccatgcacatccgctcaaaca

SEQ ID NO: 3948543 - DNA, 25 bp, Homo sapien
ctcgttgaaggacagtgcttccgag

SEQ ID NO: 3948544 - DNA, 25 bp, Homo sapien
tggatatcccagtgcagtaatggct

SEQ ID NO: 3948545 - DNA, 25 bp, Homo sapien
gagtcatgcagggaaaagcgctctg

SEQ ID NO: 3948546 - DNA, 25 bp, Homo sapien
aattcaaagctacgtctacaccaga

SEQ ID NO: 3948547 - DNA, 25 bp, Homo sapien
taagaagtcttgcttagctccaact

SEQ ID NO: 3948548 - DNA, 25 bp, Homo sapien
ccaggtgtcccggtcagagcactga

SEQ ID NO: 3948549 - DNA, 25 bp, Homo sapien
cgagacagaggcatcctcagcactg

SEQ ID NO: 3948550 - DNA, 25 bp, Homo sapien
ctcagcactgcaggcgcagagcagt

SEQ ID NO: 3948551 - DNA, 25 bp, Homo sapien
ctggagggcggggtcgagacagagg

SEQ ID NO: 3948552 - DNA, 25 bp, Homo sapien
agatgggcccgatgccaggtgccat

SEQ ID NO: 3948553 - DNA, 25 bp, Homo sapien
cctcctgcgcctcagggaaggagat

SEQ ID NO: 3948554 - DNA, 25 bp, Homo sapien
ggcgccgcccgatgcccatgaggcc

SEQ ID NO: 3948555 - DNA, 25 bp, Homo sapien
ggagtaggcgatgcgggtgaccttc

SEQ ID NO: 3948556 - DNA, 25 bp, Homo sapien
tgcaacttgtccaggttgtcctgca

SEQ ID NO: 3948557 - DNA, 25 bp, Homo sapien
cctgcaacttgtccaggttgtcctg

SEQ ID NO: 3948558 - DNA, 25 bp, Homo sapien
ctgcaacttgtccaggttgtcctgc

SEQ ID NO: 3948559 - DNA, 25 bp, Homo sapien
ttgagctgggtagaattcacatcgg

SEQ ID NO: 3948560 - DNA, 25 bp, Homo sapien
tgtactctgtgtgccttggaaatac

SEQ ID NO: 3948561 - DNA, 25 bp, Homo sapien
tggacactgtgtgacgccgtagccc

SEQ ID NO: 3948562 - DNA, 25 bp, Homo sapien
cattggtaattgctaatggcaggaa

SEQ ID NO: 3948563 - DNA, 25 bp, Homo sapien
ttcacaacatgggacaaagagccgt

SEQ ID NO: 3948564 - DNA, 25 bp, Homo sapien
tcaaccgtgatgagcatgggtccac

SEQ ID NO: 3948565 - DNA, 25 bp, Homo sapien
taagcagcagttaccaaacccaggg

SEQ ID NO: 3948566 - DNA, 25 bp, Homo sapien
tgtggactcccaagaccggaaagga

SEQ ID NO: 3948567 - DNA, 25 bp, Homo sapien
gcgatcattttcttcggcccatggg

SEQ ID NO: 3948568 - DNA, 25 bp, Homo sapien
gcggcgggccaatgagagcctcaat

SEQ ID NO: 3948569 - DNA, 25 bp, Homo sapien
tcaatgtcctcatagtttatcactt

SEQ ID NO: 3948570 - DNA, 25 bp, Homo sapien
cacctctgcggtgcgatcattttct

SEQ ID NO: 3948571 - DNA, 25 bp, Homo sapien
cttgggccaagtcggctcttcgcct

SEQ ID NO: 3948572 - DNA, 25 bp, Homo sapien
ccaagtcggctcttcgcctccaagt

SEQ ID NO: 3948573 - DNA, 25 bp, Homo sapien
aagtcggctcttcgcctccaagtgg

SEQ ID NO: 3948574 - DNA, 25 bp, Homo sapien
ggccaagtcggctcttcgcctccaa

SEQ ID NO: 3948575 - DNA, 25 bp, Homo sapien
ttagcattccgagggagccacagga

SEQ ID NO: 3948576 - DNA, 25 bp, Homo sapien
gaagtgttccatgctcactcgggaa

SEQ ID NO: 3948577 - DNA, 25 bp, Homo sapien
ggaacgactgtctataaccctggga

SEQ ID NO: 3948578 - DNA, 25 bp, Homo sapien
cagggccgctggagataggacaatc

SEQ ID NO: 3948579 - DNA, 25 bp, Homo sapien
cgagcggaaaggaagcggccccgca

SEQ ID NO: 3948580 - DNA, 25 bp, Homo sapien
gaaaacagccgagcggaaaggaagc

SEQ ID NO: 3948581 - DNA, 25 bp, Homo sapien
gcaggaaaacagccgagcggaaagg

SEQ ID NO: 3948582 - DNA, 25 bp, Homo sapien
acagccgagcggaaaggaagcggcc

SEQ ID NO: 3948583 - DNA, 25 bp, Homo sapien
gcggccgaacgctgtctgcgaagaa

SEQ ID NO: 3948584 - DNA, 25 bp, Homo sapien
cgccaggccgatggcgctggatgat

SEQ ID NO: 3948585 - DNA, 25 bp, Homo sapien
atccactcccgcgttggctgaagcg

SEQ ID NO: 3948586 - DNA, 25 bp, Homo sapien
ctagagcccgggcagcggccgaacg

SEQ ID NO: 3948587 - DNA, 25 bp, Homo sapien
ggagcgagtgagaggccggaccccg

SEQ ID NO: 3948588 - DNA, 25 bp, Homo sapien
tgcggacgagaggggagcgagtgag

SEQ ID NO: 3948589 - DNA, 25 bp, Homo sapien
ctgcggacgagaggggagcgagtga

SEQ ID NO: 3948590 - DNA, 25 bp, Homo sapien
cggacgagaggggagcgagtgagag

SEQ ID NO: 3948591 - DNA, 25 bp, Homo sapien
ccgctgccagtccttgtggaagtgg

SEQ ID NO: 3948592 - DNA, 25 bp, Homo sapien
ggaagtggggcttcaagaccatgcc

SEQ ID NO: 3948593 - DNA, 25 bp, Homo sapien
gccacgcgccgctgccagtccttgt

SEQ ID NO: 3948594 - DNA, 25 bp, Homo sapien
tggttgaaccacgtggccacgcgcc

SEQ ID NO: 3948595 - DNA, 25 bp, Homo sapien
aagccaaggcgcagccgcgggcacg

SEQ ID NO: 3948596 - DNA, 25 bp, Homo sapien
cagcggcggtcacccttgcctaagg

SEQ ID NO: 3948597 - DNA, 25 bp, Homo sapien
cagcgctccgcgacggttgcagaca

SEQ ID NO: 3948598 - DNA, 25 bp, Homo sapien
gcctaaggccgccaggccagcgctc

SEQ ID NO: 3948599 - DNA, 25 bp, Homo sapien
gcgcggggcgatgcggcgcgccttg

SEQ ID NO: 3948600 - DNA, 25 bp, Homo sapien
gcgccttggcttgccgggccttacg

SEQ ID NO: 3948601 - DNA, 25 bp, Homo sapien
gatgcggcgcgccttggcttgccgg

SEQ ID NO: 3948602 - DNA, 25 bp, Homo sapien
ggcgcggggcgatgcggcgcgcctt

SEQ ID NO: 3948603 - DNA, 25 bp, Homo sapien
cgcgcaccttcgtgtggtaccgaac

SEQ ID NO: 3948604 - DNA, 25 bp, Homo sapien
cggcgcgcaccttcgtgtggtaccg

SEQ ID NO: 3948605 - DNA, 25 bp, Homo sapien
caccttcgtgtggtaccgaaccgtg

SEQ ID NO: 3948606 - DNA, 25 bp, Homo sapien
gaaccgtggggcagcgcacgatggg

SEQ ID NO: 3948607 - DNA, 25 bp, Homo sapien
gagctcctccaggctgaagccgcgg

SEQ ID NO: 3948608 - DNA, 25 bp, Homo sapien
cctgagctcctccaggctgaagccg

SEQ ID NO: 3948609 - DNA, 25 bp, Homo sapien
agctcctccaggctgaagccgcggc

SEQ ID NO: 3948610 - DNA, 25 bp, Homo sapien
tgagctcctccaggctgaagccgcg

SEQ ID NO: 3948611 - DNA, 25 bp, Homo sapien
gatggaaaagggttcaaatgtgctt

SEQ ID NO: 3948612 - DNA, 25 bp, Homo sapien
aaatgtgctttcatcaaggccgtac

SEQ ID NO: 3948613 - DNA, 25 bp, Homo sapien
gattccggagaatgtcatcacgcga

SEQ ID NO: 3948614 - DNA, 25 bp, Homo sapien
gaaaagcctcagcaatcagatggaa

SEQ ID NO: 3948615 - DNA, 25 bp, Homo sapien
aaatgccgatggtccgggccacctt

SEQ ID NO: 3948616 - DNA, 25 bp, Homo sapien
acagaaatgccgatggtccgggcca

SEQ ID NO: 3948617 - DNA, 25 bp, Homo sapien
gatccacagaaatgccgatggtccg

SEQ ID NO: 3948618 - DNA, 25 bp, Homo sapien
cctcggatccacagaaatgccgatg

SEQ ID NO: 3948619 - DNA, 25 bp, Homo sapien
taaggttatctctgcggaaacgcac

SEQ ID NO: 3948620 - DNA, 25 bp, Homo sapien
tgagttgacgcaacacgcacgagac

SEQ ID NO: 3948621 - DNA, 25 bp, Homo sapien
gaccggtgtcactgataaaggagcc

SEQ ID NO: 3948622 - DNA, 25 bp, Homo sapien
ttatctacctgtgaaccacgggcgg

SEQ ID NO: 3948623 - DNA, 25 bp, Homo sapien
cggacgggcatgaccggtccggtca

SEQ ID NO: 3948624 - DNA, 25 bp, Homo sapien
gctgggtggccagtttcagttcttc

SEQ ID NO: 3948625 - DNA, 25 bp, Homo sapien
gggtggccagtttcagttcttcagc

SEQ ID NO: 3948626 - DNA, 25 bp, Homo sapien
cagctgggtggccagtttcagttct

SEQ ID NO: 3948627 - DNA, 25 bp, Homo sapien
acccactgatctcgtctgaagcctg

SEQ ID NO: 3948628 - DNA, 25 bp, Homo sapien
gatctcgtctgaagcctggatttga

SEQ ID NO: 3948629 - DNA, 25 bp, Homo sapien
tcgtctgaagcctggatttgagtaa

SEQ ID NO: 3948630 - DNA, 25 bp, Homo sapien
gaagcctggatttgagtaagtgttc

SEQ ID NO: 3948631 - DNA, 25 bp, Homo sapien
gaacaaccaagcgtcaggagaacct

SEQ ID NO: 3948632 - DNA, 25 bp, Homo sapien
tgtaagcagcatagagaaactctct

SEQ ID NO: 3948633 - DNA, 25 bp, Homo sapien
ggttcgctgccataagtactgctga

SEQ ID NO: 3948634 - DNA, 25 bp, Homo sapien
tgctgaaaagcaaccctgagtcaat

SEQ ID NO: 3948635 - DNA, 25 bp, Homo sapien
gttggcacgggccatacggagacta

SEQ ID NO: 3948636 - DNA, 25 bp, Homo sapien
cccgtatgccgaagagccgggcgtt

SEQ ID NO: 3948637 - DNA, 25 bp, Homo sapien
tctcttcctcagtgatgactcgagc

SEQ ID NO: 3948638 - DNA, 25 bp, Homo sapien
acggagactagcgaaggctttgaaa

SEQ ID NO: 3948639 - DNA, 25 bp, Homo sapien
ttttcttttcaacatcctgttctgc

SEQ ID NO: 3948640 - DNA, 25 bp, Homo sapien
ttcttttcaacatcctgttctgcgg

SEQ ID NO: 3948641 - DNA, 25 bp, Homo sapien
ttttcaacatcctgttctgcggctt

SEQ ID NO: 3948642 - DNA, 25 bp, Homo sapien
ttcaacatcctgttctgcggcttcc

SEQ ID NO: 3948643 - DNA, 25 bp, Homo sapien
ttgttcccacgaaacacaccacgtg

SEQ ID NO: 3948644 - DNA, 25 bp, Homo sapien
ccagggcttggactgtctttcaaga

SEQ ID NO: 3948645 - DNA, 25 bp, Homo sapien
aacacaagtccactctgaagtcagc

SEQ ID NO: 3948646 - DNA, 25 bp, Homo sapien
cagaaagtaaagcattatccagggc

SEQ ID NO: 3948647 - DNA, 25 bp, Homo sapien
ttagtagttctgacatgttggccag

SEQ ID NO: 3948648 - DNA, 25 bp, Homo sapien
atttttagtagttctgacatgttgg

SEQ ID NO: 3948649 - DNA, 25 bp, Homo sapien
ttttagtagttctgacatgttggcc

SEQ ID NO: 3948650 - DNA, 25 bp, Homo sapien
ctttatttttagtagttctgacatg

SEQ ID NO: 3948651 - DNA, 25 bp, Homo sapien
tttaacaggagaggccgacacttgg

SEQ ID NO: 3948652 - DNA, 25 bp, Homo sapien
gaatctgactcggtccctgaagctg

SEQ ID NO: 3948653 - DNA, 25 bp, Homo sapien
caagaggaccatggttaccgggcac

SEQ ID NO: 3948654 - DNA, 25 bp, Homo sapien
tctgagcactgcacgagaaaccatg

SEQ ID NO: 3948655 - DNA, 25 bp, Homo sapien
acttcccgtcaagtcggctggtagg

SEQ ID NO: 3948656 - DNA, 25 bp, Homo sapien
cccggaacacgcagatcagagtgct

SEQ ID NO: 3948657 - DNA, 25 bp, Homo sapien
taaggttagcaacacagccctggag

SEQ ID NO: 3948658 - DNA, 25 bp, Homo sapien
gatgatacctgaaccctgacttccc

SEQ ID NO: 3948659 - DNA, 25 bp, Homo sapien
gaaaagccacttcctagtcaggacg

SEQ ID NO: 3948660 - DNA, 25 bp, Homo sapien
aaagggcccctttgcatctggtggc

SEQ ID NO: 3948661 - DNA, 25 bp, Homo sapien
cacaggtcagtttctcaggcttcac

SEQ ID NO: 3948662 - DNA, 25 bp, Homo sapien
cctgcaaaacggaatgaggagcctg

SEQ ID NO: 3948663 - DNA, 25 bp, Homo sapien
ggcgactcgtgcctcctgagactat

SEQ ID NO: 3948664 - DNA, 25 bp, Homo sapien
cagccggtgtgagaaacggtgcatc

SEQ ID NO: 3948665 - DNA, 25 bp, Homo sapien
cgtgactagcgcctcctgagactat

SEQ ID NO: 3948666 - DNA, 25 bp, Homo sapien
ggcaggagactagcgccttctgaga

SEQ ID NO: 3948667 - DNA, 25 bp, Homo sapien
tcacccaagatggagggcagtggca

SEQ ID NO: 3948668 - DNA, 25 bp, Homo sapien
gatacggggtctctcactctgtcac

SEQ ID NO: 3948669 - DNA, 25 bp, Homo sapien
tgtcacccaagatggagggcagtgg

SEQ ID NO: 3948670 - DNA, 25 bp, Homo sapien
caagatggagggcagtggcacagtc

SEQ ID NO: 3948671 - DNA, 25 bp, Homo sapien
cacagacctatggttcggcctcaca

SEQ ID NO: 3948672 - DNA, 25 bp, Homo sapien
taactggagatgctcaaccctgtga

SEQ ID NO: 3948673 - DNA, 25 bp, Homo sapien
caatgctgagtttgcggtccatccc

SEQ ID NO: 3948674 - DNA, 25 bp, Homo sapien
actgaaaactcttccggccgactga

SEQ ID NO: 3948675 - DNA, 25 bp, Homo sapien
ccggctgggcgcactgaggggccgc

SEQ ID NO: 3948676 - DNA, 25 bp, Homo sapien
ccgctgcccgcgagtcggcgccgcc

SEQ ID NO: 3948677 - DNA, 25 bp, Homo sapien
cgcttccctgaacgcctgccgggcg

SEQ ID NO: 3948678 - DNA, 25 bp, Homo sapien
tggtggccggcccaggcgtggccgc

SEQ ID NO: 3948679 - DNA, 25 bp, Homo sapien
cgccgccccgcgctccgagcccgcg

SEQ ID NO: 3948680 - DNA, 25 bp, Homo sapien
ccccgcgctccgagcccgcgctcat

SEQ ID NO: 3948681 - DNA, 25 bp, Homo sapien
cttcgaggcgcagggcgcgggcaaa

SEQ ID NO: 3948682 - DNA, 25 bp, Homo sapien
gggttgccgccgccccgcgctccga

SEQ ID NO: 3948683 - DNA, 25 bp, Homo sapien
caacgccacgctggggtcggacttg

SEQ ID NO: 3948684 - DNA, 25 bp, Homo sapien
tcggacttggtgagcgggtcgcggt

SEQ ID NO: 3948685 - DNA, 25 bp, Homo sapien
agcgggtcgcggtccagcaggtgcc

SEQ ID NO: 3948686 - DNA, 25 bp, Homo sapien
acccactggccctgcgcctgctgca

SEQ ID NO: 3948687 - DNA, 25 bp, Homo sapien
acctcctcgaagtagtagtccaccg

SEQ ID NO: 3948688 - DNA, 25 bp, Homo sapien
tagtccaccgtgaagaccttggaga

SEQ ID NO: 3948689 - DNA, 25 bp, Homo sapien
gcgtgtcgtacacctcaaagcgcag

SEQ ID NO: 3948690 - DNA, 25 bp, Homo sapien
ccttggagaacacgggatgcaggct

SEQ ID NO: 3948691 - DNA, 25 bp, Homo sapien
ctgtggcccccacgccaaccgtcct

SEQ ID NO: 3948692 - DNA, 25 bp, Homo sapien
tcagccttgaatcggctgtggcccc

SEQ ID NO: 3948693 - DNA, 25 bp, Homo sapien
tacatcagccttgaatcggctgtgg

SEQ ID NO: 3948694 - DNA, 25 bp, Homo sapien
catcagccttgaatcggctgtggcc

SEQ ID NO: 3948695 - DNA, 25 bp, Homo sapien
tttaatctaataatgactgttcagg

SEQ ID NO: 3948696 - DNA, 25 bp, Homo sapien
tctaataatgactgttcaggaggag

SEQ ID NO: 3948697 - DNA, 25 bp, Homo sapien
aatctaataatgactgttcaggagg

SEQ ID NO: 3948698 - DNA, 25 bp, Homo sapien
taatctaataatgactgttcaggag

SEQ ID NO: 3948699 - DNA, 25 bp, Homo sapien
aagtgcttagcgcagtgtccagcag

SEQ ID NO: 3948700 - DNA, 25 bp, Homo sapien
gacactctcatcacgacttgcagaa

SEQ ID NO: 3948701 - DNA, 25 bp, Homo sapien
cttgcagaagccacttttgggctgg

SEQ ID NO: 3948702 - DNA, 25 bp, Homo sapien
aggtgtgaggattccgtgcagcaca

SEQ ID NO: 3948703 - DNA, 25 bp, Homo sapien
tgtcagcgggtgacgggatgttccg

SEQ ID NO: 3948704 - DNA, 25 bp, Homo sapien
gatgttccgtgtgacgggtgagatg

SEQ ID NO: 3948705 - DNA, 25 bp, Homo sapien
ggatgttccgtgtgatgggtgagat

SEQ ID NO: 3948706 - DNA, 25 bp, Homo sapien
cgggatgttccgtgtgatgggtgag

SEQ ID NO: 3948707 - DNA, 25 bp, Homo sapien
tgtcagcgggtgacgggatgttccg

SEQ ID NO: 3948708 - DNA, 25 bp, Homo sapien
ccgtgtgacgggtgatgggatgttc

SEQ ID NO: 3948709 - DNA, 25 bp, Homo sapien
tgagatgttctgtgtcagcgggtga

SEQ ID NO: 3948710 - DNA, 25 bp, Homo sapien
gagatgttctgtgtcagcgggtgac

SEQ ID NO: 3948711 - DNA, 25 bp, Homo sapien
gaattccacagcagggagaacacgc

SEQ ID NO: 3948712 - DNA, 25 bp, Homo sapien
cgcgctgtgattcatggacgtggaa

SEQ ID NO: 3948713 - DNA, 25 bp, Homo sapien
aattccagaagagacgaaccaggcg

SEQ ID NO: 3948714 - DNA, 25 bp, Homo sapien
tgatcagatattccgtgtcagcggg

SEQ ID NO: 3948715 - DNA, 25 bp, Homo sapien
cacacgtaagtgatctcagcaacca

SEQ ID NO: 3948716 - DNA, 25 bp, Homo sapien
acctgctactgcctggcggatgctg

SEQ ID NO: 3948717 - DNA, 25 bp, Homo sapien
caggctccgtgtccgaaaggagatg

SEQ ID NO: 3948718 - DNA, 25 bp, Homo sapien
catgcggcactttccacacagaaga

SEQ ID NO: 3948719 - DNA, 25 bp, Homo sapien
tcctcttcgaaggtgccaaggagca

SEQ ID NO: 3948720 - DNA, 25 bp, Homo sapien
gaaagggtgtgagcgaggtgccggc

SEQ ID NO: 3948721 - DNA, 25 bp, Homo sapien
ccaaggagcagagttgattgttcga

SEQ ID NO: 3948722 - DNA, 25 bp, Homo sapien
ggacttccgccccatcggctatgag

SEQ ID NO: 3948723 - DNA, 25 bp, Homo sapien
cagaggcgaggcagctcaaacggcc

SEQ ID NO: 3948724 - DNA, 25 bp, Homo sapien
aggcgaggcagctcaaacggccccg

SEQ ID NO: 3948725 - DNA, 25 bp, Homo sapien
gcgaggcagctcaaacggccccgga

SEQ ID NO: 3948726 - DNA, 25 bp, Homo sapien
agaggcgaggcagctcaaacggccc

SEQ ID NO: 3948727 - DNA, 25 bp, Homo sapien
accacctcacggcgccagcagtcgc

SEQ ID NO: 3948728 - DNA, 25 bp, Homo sapien
ccaccacctcacggcgccagcagtc

SEQ ID NO: 3948729 - DNA, 25 bp, Homo sapien
acctcacggcgccagcagtcgccca

SEQ ID NO: 3948730 - DNA, 25 bp, Homo sapien
ccacctcacggcgccagcagtcgcc

SEQ ID NO: 3948731 - DNA, 25 bp, Homo sapien
tgccagcgttcctgccaaacttgag

SEQ ID NO: 3948732 - DNA, 25 bp, Homo sapien
ggacttgccagcgttcctgccaaac

SEQ ID NO: 3948733 - DNA, 25 bp, Homo sapien
ttcctgccaaacttgagcagcagcg

SEQ ID NO: 3948734 - DNA, 25 bp, Homo sapien
agcagcgggcgggtcaccttcttct

SEQ ID NO: 3948735 - DNA, 25 bp, Homo sapien
tccacgtagccgttgttccccgaga

SEQ ID NO: 3948736 - DNA, 25 bp, Homo sapien
gtagccgttgttccccgagatgtcc

SEQ ID NO: 3948737 - DNA, 25 bp, Homo sapien
tgttccccgagatgtcctcggcgat

SEQ ID NO: 3948738 - DNA, 25 bp, Homo sapien
gaaggagagctccacgtagccgttg

SEQ ID NO: 3948739 - DNA, 25 bp, Homo sapien
agctgcaagccctggtcgtcgttga

SEQ ID NO: 3948740 - DNA, 25 bp, Homo sapien
aaggggtcggacttgctgaagaggt

SEQ ID NO: 3948741 - DNA, 25 bp, Homo sapien
tggtcgtcgttgaccctgtagagct

SEQ ID NO: 3948742 - DNA, 25 bp, Homo sapien
gcaagccctggtcgtcgttgaccct

SEQ ID NO: 3948743 - DNA, 25 bp, Homo sapien
ctgcaggaagtggaaggtaggtcta

SEQ ID NO: 3948744 - DNA, 25 bp, Homo sapien
aataatcacagccacgactacacaa

SEQ ID NO: 3948745 - DNA, 25 bp, Homo sapien
ataatcacagccacgactacacaag

SEQ ID NO: 3948746 - DNA, 25 bp, Homo sapien
aggtaggtctaaaaataatcacagc

SEQ ID NO: 3948747 - DNA, 25 bp, Homo sapien
gagggaactcagagagactttgaag

SEQ ID NO: 3948748 - DNA, 25 bp, Homo sapien
agagggaactcagagagactttgaa

SEQ ID NO: 3948749 - DNA, 25 bp, Homo sapien
ggagcccagtcctcctcagcactgc

SEQ ID NO: 3948750 - DNA, 25 bp, Homo sapien
ctggggagcccagtcctcctcagca

SEQ ID NO: 3948751 - DNA, 25 bp, Homo sapien
gcccagtcctcctcagcactgctgt

SEQ ID NO: 3948752 - DNA, 25 bp, Homo sapien
ggggagcccagtcctcctcagcact

SEQ ID NO: 3948753 - DNA, 25 bp, Homo sapien
gagagtcgtaatcccagaccaggca

SEQ ID NO: 3948754 - DNA, 25 bp, Homo sapien
gatgaagtcgtgctttcctcgagag

SEQ ID NO: 3948755 - DNA, 25 bp, Homo sapien
tttcctcgagagtcgtaatcccaga

SEQ ID NO: 3948756 - DNA, 25 bp, Homo sapien
aggtggtagagaattctccgatgaa

SEQ ID NO: 3948757 - DNA, 25 bp, Homo sapien
tgagttcttataactgcgtctcttc

SEQ ID NO: 3948758 - DNA, 25 bp, Homo sapien
ggtcagccaggacgaccactcctga

SEQ ID NO: 3948759 - DNA, 25 bp, Homo sapien
cctgagttcttataactgcgtctct

SEQ ID NO: 3948760 - DNA, 25 bp, Homo sapien
aggacgaccactcctgagttcttat

SEQ ID NO: 3948761 - DNA, 25 bp, Homo sapien
ggttgagggtccatccaacaatcag

SEQ ID NO: 3948762 - DNA, 25 bp, Homo sapien
tccatccaacaatcagagggaggca

SEQ ID NO: 3948763 - DNA, 25 bp, Homo sapien
aggcagcggaagcccctcttgtggg

SEQ ID NO: 3948764 - DNA, 25 bp, Homo sapien
agcggaagcccctcttgtgggtggg

SEQ ID NO: 3948765 - DNA, 25 bp, Homo sapien
ttccggccggcggagtcagcgtcca

SEQ ID NO: 3948766 - DNA, 25 bp, Homo sapien
cttccggccggcggagtcagcgtcc

SEQ ID NO: 3948767 - DNA, 25 bp, Homo sapien
cagccgcccatgatatagtccagga

SEQ ID NO: 3948768 - DNA, 25 bp, Homo sapien
ccgcccatgatatagtccaggaagg

SEQ ID NO: 3948769 - DNA, 25 bp, Homo sapien
ggcagccgcccatgatatagtccag

SEQ ID NO: 3948770 - DNA, 25 bp, Homo sapien
ctggcagccgcccatgatatagtcc

SEQ ID NO: 3948771 - DNA, 25 bp, Homo sapien
ccgggctccttggatgacacgtaga

SEQ ID NO: 3948772 - DNA, 25 bp, Homo sapien
ttggatgacacgtagagactgtggc

SEQ ID NO: 3948773 - DNA, 25 bp, Homo sapien
tgtgcgtatctatgggtgacgcggg

SEQ ID NO: 3948774 - DNA, 25 bp, Homo sapien
tggctggttcactcaaacgctcact

SEQ ID NO: 3948775 - DNA, 25 bp, Homo sapien
tctgcaaataacacgcgggtgacac

SEQ ID NO: 3948776 - DNA, 25 bp, Homo sapien
atctgcaaataacacgcgggtgaca

SEQ ID NO: 3948777 - DNA, 25 bp, Homo sapien
ttctggggctcgttcaacaaaacac

SEQ ID NO: 3948778 - DNA, 25 bp, Homo sapien
tcaacaaaacacgaaccagcgcatc

SEQ ID NO: 3948779 - DNA, 25 bp, Homo sapien
gcccatccttcttagtggccgccca

SEQ ID NO: 3948780 - DNA, 25 bp, Homo sapien
ccggcagggcctaagtggaccaagc

SEQ ID NO: 3948781 - DNA, 25 bp, Homo sapien
gagaggtctcctcaaaacctgccag

SEQ ID NO: 3948782 - DNA, 25 bp, Homo sapien
tggaccaagcctggtctgggtcccc

SEQ ID NO: 3948783 - DNA, 25 bp, Homo sapien
caccagtgccttcaggtactcgttc

SEQ ID NO: 3948784 - DNA, 25 bp, Homo sapien
ttcaggtactcgttcggctggtagg

SEQ ID NO: 3948785 - DNA, 25 bp, Homo sapien
atagtcctggcagatctcgcccacg

SEQ ID NO: 3948786 - DNA, 25 bp, Homo sapien
tgttccgcgggtctccattggaggc

SEQ ID NO: 3948787 - DNA, 25 bp, Homo sapien
ggaagacggccaggcgcacctgtca

SEQ ID NO: 3948788 - DNA, 25 bp, Homo sapien
cggccaggcgcacctgtcatagctg

SEQ ID NO: 3948789 - DNA, 25 bp, Homo sapien
agacggccaggcgcacctgtcatag

SEQ ID NO: 3948790 - DNA, 25 bp, Homo sapien
gggaagacggccaggcgcacctgtc

SEQ ID NO: 3948791 - DNA, 25 bp, Homo sapien
ggcctggtaccacggcagtaagcac

SEQ ID NO: 3948792 - DNA, 25 bp, Homo sapien
tagggagacatgactggcgcccaaa

SEQ ID NO: 3948793 - DNA, 25 bp, Homo sapien
ggagacatgactggcgcccaaaaga

SEQ ID NO: 3948794 - DNA, 25 bp, Homo sapien
cccaggcctggtaccacggcagtaa

SEQ ID NO: 3948795 - DNA, 25 bp, Homo sapien
tacttgggagggatccgggctccaa

SEQ ID NO: 3948796 - DNA, 25 bp, Homo sapien
atacttgggagggatccgggctcca

SEQ ID NO: 3948797 - DNA, 25 bp, Homo sapien
cctcagggttgaaattgatggcaaa

SEQ ID NO: 3948798 - DNA, 25 bp, Homo sapien
tcctcagggttgaaattgatggcaa

SEQ ID NO: 3948799 - DNA, 25 bp, Homo sapien
cgtcctcagggttgaaattgatggc

SEQ ID NO: 3948800 - DNA, 25 bp, Homo sapien
ctcagggttgaaattgatggcaaag

SEQ ID NO: 3948801 - DNA, 25 bp, Homo sapien
gcaggcagttctggtaggcctccac

SEQ ID NO: 3948802 - DNA, 25 bp, Homo sapien
gccgccacgcgtgccaccttggaga

SEQ ID NO: 3948803 - DNA, 25 bp, Homo sapien
gctttcccggtgctctcctcggccg

SEQ ID NO: 3948804 - DNA, 25 bp, Homo sapien
cttggagatgatgggcgccacgttg

SEQ ID NO: 3948805 - DNA, 25 bp, Homo sapien
caaacagtagacatgtgcgcggcct

SEQ ID NO: 3948806 - DNA, 25 bp, Homo sapien
accgtgtgaggcgatggacagccct

SEQ ID NO: 3948807 - DNA, 25 bp, Homo sapien
gcacctttgagggagacgtagtcaa

SEQ ID NO: 3948808 - DNA, 25 bp, Homo sapien
caaaatgacgatacacacacagcca

SEQ ID NO: 3948809 - DNA, 25 bp, Homo sapien
gatgaaaccgtctgagacccgcttc

SEQ ID NO: 3948810 - DNA, 25 bp, Homo sapien
tagacgctgatactgacatttacag

SEQ ID NO: 3948811 - DNA, 25 bp, Homo sapien
tgggccaggaacaatactgctttga

SEQ ID NO: 3948812 - DNA, 25 bp, Homo sapien
cataacagctgaacgcaatcctcga

SEQ ID NO: 3948813 - DNA, 25 bp, Homo sapien
aaaggcatcagcaacaccacacctg

SEQ ID NO: 3948814 - DNA, 25 bp, Homo sapien
aacaccacacctgccatggcccaca

SEQ ID NO: 3948815 - DNA, 25 bp, Homo sapien
gggcacaggaaaggcatcagcaaca

SEQ ID NO: 3948816 - DNA, 25 bp, Homo sapien
caggaaaggcatcagcaacaccaca

SEQ ID NO: 3948817 - DNA, 25 bp, Homo sapien
cacgaactgtacgatgtcccggagc

SEQ ID NO: 3948818 - DNA, 25 bp, Homo sapien
catgtcggtgaagtcggcgttgccc

SEQ ID NO: 3948819 - DNA, 25 bp, Homo sapien
cttgagctcccggaagggcacgaac

SEQ ID NO: 3948820 - DNA, 25 bp, Homo sapien
cgtgtgtcggccatgtcggtcacca

SEQ ID NO: 3948821 - DNA, 25 bp, Homo sapien
tttgtgtagattcgacaagtttcaa

SEQ ID NO: 3948822 - DNA, 25 bp, Homo sapien
ttttgtgtagattcgacaagtttca

SEQ ID NO: 3948823 - DNA, 25 bp, Homo sapien
ttgtgtagattcgacaagtttcaaa

SEQ ID NO: 3948824 - DNA, 25 bp, Homo sapien
cttttgtgtagattcgacaagtttc

SEQ ID NO: 3948825 - DNA, 25 bp, Homo sapien
ggttggcagcaacgggggaagccgc

SEQ ID NO: 3948826 - DNA, 25 bp, Homo sapien
gtgtctcgccgggtcgcagaggttg

SEQ ID NO: 3948827 - DNA, 25 bp, Homo sapien
gtctcgccgggtcgcagaggttggc

SEQ ID NO: 3948828 - DNA, 25 bp, Homo sapien
tcgccgggtcgcagaggttggcagc

SEQ ID NO: 3948829 - DNA, 25 bp, Homo sapien
ctgtgcgtctcaccgggtagaacct

SEQ ID NO: 3948830 - DNA, 25 bp, Homo sapien
tgtgtgtctcggcgggtagaacctc

SEQ ID NO: 3948831 - DNA, 25 bp, Homo sapien
tgtgtctcggcgggtagaacctcac

SEQ ID NO: 3948832 - DNA, 25 bp, Homo sapien
tgctgtgtgtgtctcggcgggtaga

SEQ ID NO: 3948833 - DNA, 25 bp, Homo sapien
cagcacgcacttggccagcgccgca

SEQ ID NO: 3948834 - DNA, 25 bp, Homo sapien
ggccagcacgcacttggccagcgcc

SEQ ID NO: 3948835 - DNA, 25 bp, Homo sapien
ctgcttcgggacctcggccagcacg

SEQ ID NO: 3948836 - DNA, 25 bp, Homo sapien
tcggccagcacgcacttggccagcg

SEQ ID NO: 3948837 - DNA, 25 bp, Homo sapien
ggcctctgtggctgtagtactccac

SEQ ID NO: 3948838 - DNA, 25 bp, Homo sapien
cagggacacccaggcttctcggggg

SEQ ID NO: 3948839 - DNA, 25 bp, Homo sapien
gcctctgtggctgtagtactccacc

SEQ ID NO: 3948840 - DNA, 25 bp, Homo sapien
tgcagcctgggctggcctctccggc

SEQ ID NO: 3948841 - DNA, 25 bp, Homo sapien
gggtctcccgtggatgaactcccag

SEQ ID NO: 3948842 - DNA, 25 bp, Homo sapien
aaggttagacgcaaagcagagcccc

SEQ ID NO: 3948843 - DNA, 25 bp, Homo sapien
cagacagaggctgtacggacccatt

SEQ ID NO: 3948844 - DNA, 25 bp, Homo sapien
tgtattttgtcacccttcggccttg

SEQ ID NO: 3948845 - DNA, 25 bp, Homo sapien
cactttattactcctgaagccccac

SEQ ID NO: 3948846 - DNA, 25 bp, Homo sapien
acactttattactcctgaagcccca

SEQ ID NO: 3948847 - DNA, 25 bp, Homo sapien
gacactttattactcctgaagcccc

SEQ ID NO: 3948848 - DNA, 25 bp, Homo sapien
gccccaccggcagaacccacaggcc

SEQ ID NO: 3948849 - DNA, 25 bp, Homo sapien
cactgtgtacgtatattggctgctt

SEQ ID NO: 3948850 - DNA, 25 bp, Homo sapien
caacattgaggttacttatgaggcc

SEQ ID NO: 3948851 - DNA, 25 bp, Homo sapien
tatgaggcctaattggttctgtctg

SEQ ID NO: 3948852 - DNA, 25 bp, Homo sapien
gatgtgttgagcctaagtcctattc

SEQ ID NO: 3948853 - DNA, 25 bp, Homo sapien
tttcctgagagtgccctgagatgtc

SEQ ID NO: 3948854 - DNA, 25 bp, Homo sapien
ctgagagtgccctgagatgtcctgg

SEQ ID NO: 3948855 - DNA, 25 bp, Homo sapien
tcatttcctgagagtgccctgagat

SEQ ID NO: 3948856 - DNA, 25 bp, Homo sapien
cctgagagtgccctgagatgtcctg

SEQ ID NO: 3948857 - DNA, 25 bp, Homo sapien
cccctcctcaggaaggtgaaactgc

SEQ ID NO: 3948858 - DNA, 25 bp, Homo sapien
cggcctaggcagctcccacgccagg

SEQ ID NO: 3948859 - DNA, 25 bp, Homo sapien
gctggccctacccggccacctgctg

SEQ ID NO: 3948860 - DNA, 25 bp, Homo sapien
tggccctacccggccacctgctgcc

SEQ ID NO: 3948861 - DNA, 25 bp, Homo sapien
gagctctccagctacagaacagcca

SEQ ID NO: 3948862 - DNA, 25 bp, Homo sapien
cagggtcccgagtacctcggctcag

SEQ ID NO: 3948863 - DNA, 25 bp, Homo sapien
taaagcctcacacatgtcagctggt

SEQ ID NO: 3948864 - DNA, 25 bp, Homo sapien
tgttcaagttcagtcctgccaccca

SEQ ID NO: 3948865 - DNA, 25 bp, Homo sapien
cagaccggggccgaaagccacgcgt

SEQ ID NO: 3948866 - DNA, 25 bp, Homo sapien
catgtcttccgagcaccagaccggg

SEQ ID NO: 3948867 - DNA, 25 bp, Homo sapien
aggcacatgtcttccgagcaccaga

SEQ ID NO: 3948868 - DNA, 25 bp, Homo sapien
gaaagccacgcgtggactgcatttt

SEQ ID NO: 3948869 - DNA, 25 bp, Homo sapien
ggcacccttattcacacatcgcaag

SEQ ID NO: 3948870 - DNA, 25 bp, Homo sapien
tcagctccaccattcagtgcccagt

SEQ ID NO: 3948871 - DNA, 25 bp, Homo sapien
tgagaactttctcgctaccacgaga

SEQ ID NO: 3948872 - DNA, 25 bp, Homo sapien
tgcaacatgaaaatgcggcaccctt

SEQ ID NO: 3948873 - DNA, 25 bp, Homo sapien
gcttcaggctgtgaggagccactct

SEQ ID NO: 3948874 - DNA, 25 bp, Homo sapien
ctggcccgtgcagaaggatgagctt

SEQ ID NO: 3948875 - DNA, 25 bp, Homo sapien
tgagcttcaggctgtgaggagccac

SEQ ID NO: 3948876 - DNA, 25 bp, Homo sapien
tggggtccccggggacctgtgtgca

SEQ ID NO: 3948877 - DNA, 25 bp, Homo sapien
ctctgcctcgtcccgaaagaagtct

SEQ ID NO: 3948878 - DNA, 25 bp, Homo sapien
gcctcgtcccgaaagaagtctgcag

SEQ ID NO: 3948879 - DNA, 25 bp, Homo sapien
ccatcaatgacaggggagtccctca

SEQ ID NO: 3948880 - DNA, 25 bp, Homo sapien
caggggagtccctcatgatcctctc

SEQ ID NO: 3948881 - DNA, 25 bp, Homo sapien
tccatggtgacccagtgtcggggca

SEQ ID NO: 3948882 - DNA, 25 bp, Homo sapien
agccagtgtggaccctgatctgagt

SEQ ID NO: 3948883 - DNA, 25 bp, Homo sapien
ttcccgggcagtggggatctccgcc

SEQ ID NO: 3948884 - DNA, 25 bp, Homo sapien
gagccagtgtggaccctgatctgag

SEQ ID NO: 3948885 - DNA, 25 bp, Homo sapien
caaagccggccctcagcttggggat

SEQ ID NO: 3948886 - DNA, 25 bp, Homo sapien
gttggtgtgtgtgccggccaaggtg

SEQ ID NO: 3948887 - DNA, 25 bp, Homo sapien
gccctctcgtcctgcagccggttgt

SEQ ID NO: 3948888 - DNA, 25 bp, Homo sapien
gccggttgttgaacatatccagcag

SEQ ID NO: 3948889 - DNA, 25 bp, Homo sapien
gagacgggatgaccccacacagggc

SEQ ID NO: 3948890 - DNA, 25 bp, Homo sapien
gcctgaggtaggagacgggatgacc

SEQ ID NO: 3948891 - DNA, 25 bp, Homo sapien
cctgggcaccgagggaccctggagg

SEQ ID NO: 3948892 - DNA, 25 bp, Homo sapien
ggtaggagacgggatgaccccacac

SEQ ID NO: 3948893 - DNA, 25 bp, Homo sapien
gaaggtctccgggtacatccggcac

SEQ ID NO: 3948894 - DNA, 25 bp, Homo sapien
tgtcgcagggcgtgtacacggacca

SEQ ID NO: 3948895 - DNA, 25 bp, Homo sapien
ggcacatgcggtggaccacgtccat

SEQ ID NO: 3948896 - DNA, 25 bp, Homo sapien
agcgtcctccgcacggcgtctttgt

SEQ ID NO: 3948897 - DNA, 25 bp, Homo sapien
atagagtgcccgcaggacgcccaaa

SEQ ID NO: 3948898 - DNA, 25 bp, Homo sapien
agctgatagagtgcccgcaggacgc

SEQ ID NO: 3948899 - DNA, 25 bp, Homo sapien
catgcccagctgatagagtgcccgc

SEQ ID NO: 3948900 - DNA, 25 bp, Homo sapien
tccacgccgatcaggctggccacct

SEQ ID NO: 3948901 - DNA, 25 bp, Homo sapien
ttggctctggggctcgctgtctccc

SEQ ID NO: 3948902 - DNA, 25 bp, Homo sapien
cccgtgtccaccagccagttgtcag

SEQ ID NO: 3948903 - DNA, 25 bp, Homo sapien
tggggctcgctgtctcccgtgtcca

SEQ ID NO: 3948904 - DNA, 25 bp, Homo sapien
caaagggtgacaagccttggctctg

SEQ ID NO: 3948905 - DNA, 25 bp, Homo sapien
ttgcgcacacgctgtaggccgagga

SEQ ID NO: 3948906 - DNA, 25 bp, Homo sapien
gacacgtgagccaagtcgatgagga

SEQ ID NO: 3948907 - DNA, 25 bp, Homo sapien
accagcctcaggacgtcgtcaggca

SEQ ID NO: 3948908 - DNA, 25 bp, Homo sapien
gtcgtcaggcacgttgcgccggctt

SEQ ID NO: 3948909 - DNA, 25 bp, Homo sapien
ggtgcaggaaatgtaattgttgtag

SEQ ID NO: 3948910 - DNA, 25 bp, Homo sapien
gcaggaaatgtaattgttgtagaag

SEQ ID NO: 3948911 - DNA, 25 bp, Homo sapien
tggccttgttggtgcaggaaatgta

SEQ ID NO: 3948912 - DNA, 25 bp, Homo sapien
tgtaattgttgtagaagttcaccat

SEQ ID NO: 3948913 - DNA, 25 bp, Homo sapien
cagcaggtatgggtcccgagtgagg

SEQ ID NO: 3948914 - DNA, 25 bp, Homo sapien
ggtatgggtcccgagtgaggccctc

SEQ ID NO: 3948915 - DNA, 25 bp, Homo sapien
gcaggtatgggtcccgagtgaggcc

SEQ ID NO: 3948916 - DNA, 25 bp, Homo sapien
gcagcaggtatgggtcccgagtgag

SEQ ID NO: 3948917 - DNA, 25 bp, Homo sapien
ccaaaacccacggctctggctcctg

SEQ ID NO: 3948918 - DNA, 25 bp, Homo sapien
cccaccaaaacccacggctctggct

SEQ ID NO: 3948919 - DNA, 25 bp, Homo sapien
ccacctccttgatgtgatccagatg

SEQ ID NO: 3948920 - DNA, 25 bp, Homo sapien
cacctccttgatgtgatccagatgg

SEQ ID NO: 3948921 - DNA, 25 bp, Homo sapien
cctgggcccccacactaggacacag

SEQ ID NO: 3948922 - DNA, 25 bp, Homo sapien
tcatccctctgacgaggccatgaac

SEQ ID NO: 3948923 - DNA, 25 bp, Homo sapien
ttgaggccaggagaacctgggcccc

SEQ ID NO: 3948924 - DNA, 25 bp, Homo sapien
ggccatgaacctcccggctcatcca

SEQ ID NO: 3948925 - DNA, 25 bp, Homo sapien
accctcagcaggttgtcagccagtg

SEQ ID NO: 3948926 - DNA, 25 bp, Homo sapien
ggttgtcagccagtgcgcccttgac

SEQ ID NO: 3948927 - DNA, 25 bp, Homo sapien
cctgagcagctcagcgatcaggtct

SEQ ID NO: 3948928 - DNA, 25 bp, Homo sapien
tctggatacttggagacgtcctcca

SEQ ID NO: 3948929 - DNA, 25 bp, Homo sapien
ccagtggcgatggaggctggaagcc

SEQ ID NO: 3948930 - DNA, 25 bp, Homo sapien
aggaccaggggagcgagggaggcca

SEQ ID NO: 3948931 - DNA, 25 bp, Homo sapien
gcccccagtggcgatggaggctgga

SEQ ID NO: 3948932 - DNA, 25 bp, Homo sapien
ccagaggagtagccgtaatgggtcc

SEQ ID NO: 3948933 - DNA, 25 bp, Homo sapien
ggtgttgcttttattgcgggcctac

SEQ ID NO: 3948934 - DNA, 25 bp, Homo sapien
gtgttgcttttattgcgggcctact

SEQ ID NO: 3948935 - DNA, 25 bp, Homo sapien
gggtgttgcttttattgcgggccta

SEQ ID NO: 3948936 - DNA, 25 bp, Homo sapien
ctggagatggctcacactcctgacc

SEQ ID NO: 3948937 - DNA, 25 bp, Homo sapien
ctaccggtctccgcgtccaggtggt

SEQ ID NO: 3948938 - DNA, 25 bp, Homo sapien
tggagatggctcacactcctgaccc

SEQ ID NO: 3948939 - DNA, 25 bp, Homo sapien
tccgcgtccaggtggtagtggtccc

SEQ ID NO: 3948940 - DNA, 25 bp, Homo sapien
accgtgagaagcgaccacaagatga

SEQ ID NO: 3948941 - DNA, 25 bp, Homo sapien
gaaagtactaaagtctttgaaatgc

SEQ ID NO: 3948942 - DNA, 25 bp, Homo sapien
gcgaccacaagatgagcgtgagccc

SEQ ID NO: 3948943 - DNA, 25 bp, Homo sapien
tgagaagcgaccacaagatgagcgt

SEQ ID NO: 3948944 - DNA, 25 bp, Homo sapien
taggtcctagacgtggttccctcca

SEQ ID NO: 3948945 - DNA, 25 bp, Homo sapien
tgcaggaacgtggagaccctgacgt

SEQ ID NO: 3948946 - DNA, 25 bp, Homo sapien
ccctggtgttgagagaacgtccttc

SEQ ID NO: 3948947 - DNA, 25 bp, Homo sapien
tctgtccatcgtgggtaacagcctt

SEQ ID NO: 3948948 - DNA, 25 bp, Homo sapien
gggacagaaccgtcactcagatcca

SEQ ID NO: 3948949 - DNA, 25 bp, Homo sapien
tgctgtttgtctcctcgacagggag

SEQ ID NO: 3948950 - DNA, 25 bp, Homo sapien
gttcccaaagctgcccagtccatgg

SEQ ID NO: 3948951 - DNA, 25 bp, Homo sapien
gccctgcttcatgacgatgctgcct

SEQ ID NO: 3948952 - DNA, 25 bp, Homo sapien
gctgggtctccacgtcggcggcctt

SEQ ID NO: 3948953 - DNA, 25 bp, Homo sapien
actgggtctccacgtcggcggcctt

SEQ ID NO: 3948954 - DNA, 25 bp, Homo sapien
tttctccactgaccccgcactgggt

SEQ ID NO: 3948955 - DNA, 25 bp, Homo sapien
ctgggtctccacgtcggcggccttt

SEQ ID NO: 3948956 - DNA, 25 bp, Homo sapien
tgtgaactggcttcggatggcgtcc

SEQ ID NO: 3948957 - DNA, 25 bp, Homo sapien
gaaaaatgtagagtgtgcccgtgtg

SEQ ID NO: 3948958 - DNA, 25 bp, Homo sapien
gaacgccatccgcaagaagaacgaa

SEQ ID NO: 3948959 - DNA, 25 bp, Homo sapien
tgcccgtgtgtatgccgagaacgcc

SEQ ID NO: 3948960 - DNA, 25 bp, Homo sapien
tttttgacccttccgctctggagga

SEQ ID NO: 3948961 - DNA, 25 bp, Homo sapien
cagtctttctttgacgttgaaaagc

SEQ ID NO: 3948962 - DNA, 25 bp, Homo sapien
ctggagttctgtgttatgacttggg

SEQ ID NO: 3948963 - DNA, 25 bp, Homo sapien
gccatccataagcaggagccgagat

SEQ ID NO: 3948964 - DNA, 25 bp, Homo sapien
ctgataccagggtgtctgtgattcc

SEQ ID NO: 3948965 - DNA, 25 bp, Homo sapien
tgataccagggtgtctgtgattcca

SEQ ID NO: 3948966 - DNA, 25 bp, Homo sapien
ccagggcgtctgtggttccagatgg

SEQ ID NO: 3948967 - DNA, 25 bp, Homo sapien
ggttccagatgggttgccagaggcc

SEQ ID NO: 3948968 - DNA, 25 bp, Homo sapien
tggtggccagggctacctggtacca

SEQ ID NO: 3948969 - DNA, 25 bp, Homo sapien
cgtctgtggttccagatgggttgcc

SEQ ID NO: 3948970 - DNA, 25 bp, Homo sapien
tcgcgccagcggcgtgcgtcaccat

SEQ ID NO: 3948971 - DNA, 25 bp, Homo sapien
aaaaggtcctcgcgccagcggcgtg

SEQ ID NO: 3948972 - DNA, 25 bp, Homo sapien
aggtcctcgcgccagcggcgtgcgt

SEQ ID NO: 3948973 - DNA, 25 bp, Homo sapien
gtcctcgcgccagcggcgtgcgtca

SEQ ID NO: 3948974 - DNA, 25 bp, Homo sapien
ccgcggccgcggagccgggagcgac

SEQ ID NO: 3948975 - DNA, 25 bp, Homo sapien
ggccgcggagccgggagcgactcac

SEQ ID NO: 3948976 - DNA, 25 bp, Homo sapien
cgcggccgcggagccgggagcgact

SEQ ID NO: 3948977 - DNA, 25 bp, Homo sapien
ccacacctccgcggccgcggagccg

SEQ ID NO: 3948978 - DNA, 25 bp, Homo sapien
ttggaaaggcccatgggtgagccca

SEQ ID NO: 3948979 - DNA, 25 bp, Homo sapien
tcctgggtttctctttgcttttgga

SEQ ID NO: 3948980 - DNA, 25 bp, Homo sapien
atgggtgagcccaccgccccctccg

SEQ ID NO: 3948981 - DNA, 25 bp, Homo sapien
tctctttgcttttggaaaggcccat

SEQ ID NO: 3948982 - DNA, 25 bp, Homo sapien
gcaggaacggttcgcaccgggccga

SEQ ID NO: 3948983 - DNA, 25 bp, Homo sapien
caggggcggagacgcggggagccca

SEQ ID NO: 3948984 - DNA, 25 bp, Homo sapien
gagcctggcgcctgcgctcacaccg

SEQ ID NO: 3948985 - DNA, 25 bp, Homo sapien
gaaacgcgccgtccgtggcggactc

SEQ ID NO: 3948986 - DNA, 25 bp, Homo sapien
agtctcgagtctccgcgtttccgta

SEQ ID NO: 3948987 - DNA, 25 bp, Homo sapien
cagtgggtcccatcgtcttcagtcg

SEQ ID NO: 3948988 - DNA, 25 bp, Homo sapien
tgcgtggatccagaataagctggct

SEQ ID NO: 3948989 - DNA, 25 bp, Homo sapien
tggcttcaagtctcgagtctccgcg

SEQ ID NO: 3948990 - DNA, 25 bp, Homo sapien
tgaaatatatggatcatccgttaga

SEQ ID NO: 3948991 - DNA, 25 bp, Homo sapien
gatcatccgttagacccgggactta

SEQ ID NO: 3948992 - DNA, 25 bp, Homo sapien
tatggatcatccgttagacccggga

SEQ ID NO: 3948993 - DNA, 25 bp, Homo sapien
aatatatggatcatccgttagaccc

SEQ ID NO: 3948994 - DNA, 25 bp, Homo sapien
gaataggtggatcccttcttttgct

SEQ ID NO: 3948995 - DNA, 25 bp, Homo sapien
gaactgaataggtggatcccttctt

SEQ ID NO: 3948996 - DNA, 25 bp, Homo sapien
aactgaataggtggatcccttcttt

SEQ ID NO: 3948997 - DNA, 25 bp, Homo sapien
ctgaataggtggatcccttcttttg

SEQ ID NO: 3948998 - DNA, 25 bp, Homo sapien
gcttctccgactccctgtctgcctg

SEQ ID NO: 3948999 - DNA, 25 bp, Homo sapien
gcttcctgggaatgcttctccatca

SEQ ID NO: 3949000 - DNA, 25 bp, Homo sapien
gccggcggcgggtgcttggctgtcc

SEQ ID NO: 3949001 - DNA, 25 bp, Homo sapien
tggaggctgtccacaggcttctccg

SEQ ID NO: 3949002 - DNA, 25 bp, Homo sapien
aagccactgacctcgcttcgctccc

SEQ ID NO: 3949003 - DNA, 25 bp, Homo sapien
caagccactgacctcgcttcgctcc

SEQ ID NO: 3949004 - DNA, 25 bp, Homo sapien
agccactgacctcgcttcgctccct

SEQ ID NO: 3949005 - DNA, 25 bp, Homo sapien
ccaagccactgacctcgcttcgctc

SEQ ID NO: 3949006 - DNA, 25 bp, Homo sapien
ggcgcgtgcctgctactagtgtcca

SEQ ID NO: 3949007 - DNA, 25 bp, Homo sapien
tctttacggcgcgtgcctgctacta

SEQ ID NO: 3949008 - DNA, 25 bp, Homo sapien
acaaaccagtttcatctttacggcg

SEQ ID NO: 3949009 - DNA, 25 bp, Homo sapien
ctactagtgtccatccggtagggtc

SEQ ID NO: 3949010 - DNA, 25 bp, Homo sapien
tggtacgcacttatcactcgggaac

SEQ ID NO: 3949011 - DNA, 25 bp, Homo sapien
caaaggtctggccacactaggctgt

SEQ ID NO: 3949012 - DNA, 25 bp, Homo sapien
tcagggattctcagtggcaccaaga

SEQ ID NO: 3949013 - DNA, 25 bp, Homo sapien
cagcaatgggtctctgaccgggcca

SEQ ID NO: 3949014 - DNA, 25 bp, Homo sapien
gcatggagagcgtgcacacttcatt

SEQ ID NO: 3949015 - DNA, 25 bp, Homo sapien
tgcatggagagcgtgcacacttcat

SEQ ID NO: 3949016 - DNA, 25 bp, Homo sapien
atggagagcgtgcacacttcatttt

SEQ ID NO: 3949017 - DNA, 25 bp, Homo sapien
ctgcatggagagcgtgcacacttca

SEQ ID NO: 3949018 - DNA, 25 bp, Homo sapien
tttgggactccttcacggtgtggca

SEQ ID NO: 3949019 - DNA, 25 bp, Homo sapien
ttcaggacacgtttggcaggacagg

SEQ ID NO: 3949020 - DNA, 25 bp, Homo sapien
ggtgcatgccccaagctgagaagac

SEQ ID NO: 3949021 - DNA, 25 bp, Homo sapien
tcactgagacgtacagggaagctct

SEQ ID NO: 3949022 - DNA, 25 bp, Homo sapien
caagccacatcaatatcctaacagc

SEQ ID NO: 3949023 - DNA, 25 bp, Homo sapien
aatatcctaacagctgccacagtga

SEQ ID NO: 3949024 - DNA, 25 bp, Homo sapien
tcactactgcttcatagtaacttac

SEQ ID NO: 3949025 - DNA, 25 bp, Homo sapien
cacagtgattaacttatggccaaac

SEQ ID NO: 3949026 - DNA, 25 bp, Homo sapien
catcggatctcgtgacactcattca

SEQ ID NO: 3949027 - DNA, 25 bp, Homo sapien
gagcttatgcaggaaactcccgttt

SEQ ID NO: 3949028 - DNA, 25 bp, Homo sapien
cggcggaaggtagggaggagcgagt

SEQ ID NO: 3949029 - DNA, 25 bp, Homo sapien
ctcacaatcacggcggaaggtaggg

SEQ ID NO: 3949030 - DNA, 25 bp, Homo sapien
acacaggaagaaggtttaatggact

SEQ ID NO: 3949031 - DNA, 25 bp, Homo sapien
cacaggaagaaggtttaatggactt

SEQ ID NO: 3949032 - DNA, 25 bp, Homo sapien
gcttttatcgcgtgcctgttctgag

SEQ ID NO: 3949033 - DNA, 25 bp, Homo sapien
cttttatcgcgtgcctgttctgagc

SEQ ID NO: 3949034 - DNA, 25 bp, Homo sapien
tgctggcttttatcgcgtgcctgtt

SEQ ID NO: 3949035 - DNA, 25 bp, Homo sapien
tggcttttatcgcgtgcctgttctg

SEQ ID NO: 3949036 - DNA, 25 bp, Homo sapien
ccatgaaggttgctgatgctggaca

SEQ ID NO: 3949037 - DNA, 25 bp, Homo sapien
gaaacacttccactatccgtggcag

SEQ ID NO: 3949038 - DNA, 25 bp, Homo sapien
cgcctcagagctcaaggttcagaga

SEQ ID NO: 3949039 - DNA, 25 bp, Homo sapien
gcttaagggatgtgcaactcagcca

SEQ ID NO: 3949040 - DNA, 25 bp, Homo sapien
tcgacgctcgcgtgatgatgatctg

SEQ ID NO: 3949041 - DNA, 25 bp, Homo sapien
tcccgctggaactgcaactgactag

SEQ ID NO: 3949042 - DNA, 25 bp, Homo sapien
gatctgtggaacgaccactttcttc

SEQ ID NO: 3949043 - DNA, 25 bp, Homo sapien
tccggctcccgaatggttctctgct

SEQ ID NO: 3949044 - DNA, 25 bp, Homo sapien
ttcatttatcaataccacaaagctc

SEQ ID NO: 3949045 - DNA, 25 bp, Homo sapien
agtcactcttgcctcgaccgagctg

SEQ ID NO: 3949046 - DNA, 25 bp, Homo sapien
cagtttctcacagggtgggcaggcc

SEQ ID NO: 3949047 - DNA, 25 bp, Homo sapien
ccgagacgcctatcgcagggagtag

SEQ ID NO: 3949048 - DNA, 25 bp, Homo sapien
caatggcagatcacatggaaagcct

SEQ ID NO: 3949049 - DNA, 25 bp, Homo sapien
gataacttgtctcgtgccatcgtgt

SEQ ID NO: 3949050 - DNA, 25 bp, Homo sapien
gcagagtgaaattagggccccaagt

SEQ ID NO: 3949051 - DNA, 25 bp, Homo sapien
gggccttttcataagctgactcaga

SEQ ID NO: 3949052 - DNA, 25 bp, Homo sapien
gcaaactatcgcaagtaaaataaac

SEQ ID NO: 3949053 - DNA, 25 bp, Homo sapien
ccatcgtggaatcaggaaaaactcg

SEQ ID NO: 3949054 - DNA, 25 bp, Homo sapien
ccaagtttcgggagatcagagattc

SEQ ID NO: 3949055 - DNA, 25 bp, Homo sapien
gcaaattgtcctactgtcctgagca

SEQ ID NO: 3949056 - DNA, 25 bp, Homo sapien
taagcaccaggaggaaacctgccaa

SEQ ID NO: 3949057 - DNA, 25 bp, Homo sapien
gaggtgacggcacttactcttcgag

SEQ ID NO: 3949058 - DNA, 25 bp, Homo sapien
cgtggcctcgttatgcaaataaagc

SEQ ID NO: 3949059 - DNA, 25 bp, Homo sapien
agaggcttgtttcccacaacttgga

SEQ ID NO: 3949060 - DNA, 25 bp, Homo sapien
taaagcccatcacgtggtcaaaatc

SEQ ID NO: 3949061 - DNA, 25 bp, Homo sapien
tcgaagctgaaagcctcgaacagag

SEQ ID NO: 3949062 - DNA, 25 bp, Homo sapien
tcacagccttcgaagctgaaagcct

SEQ ID NO: 3949063 - DNA, 25 bp, Homo sapien
tccattcagattggttttgatcagc

SEQ ID NO: 3949064 - DNA, 25 bp, Homo sapien
tacaaaatgggggtgttggccaggc

SEQ ID NO: 3949065 - DNA, 25 bp, Homo sapien
cgcctctcttgcgcgcaggcgcaga

SEQ ID NO: 3949066 - DNA, 25 bp, Homo sapien
cccgcctctcttgcgcgcaggcgca

SEQ ID NO: 3949067 - DNA, 25 bp, Homo sapien
ccgcctctcttgcgcgcaggcgcag

SEQ ID NO: 3949068 - DNA, 25 bp, Homo sapien
ccccgcctctcttgcgcgcaggcgc

SEQ ID NO: 3949069 - DNA, 25 bp, Homo sapien
gatctgctcgcactccagatctggc

SEQ ID NO: 3949070 - DNA, 25 bp, Homo sapien
agacggatctgctcgcactccagat

SEQ ID NO: 3949071 - DNA, 25 bp, Homo sapien
gaatacacttcagacggatctgctc

SEQ ID NO: 3949072 - DNA, 25 bp, Homo sapien
cacttcagacggatctgctcgcact

SEQ ID NO: 3949073 - DNA, 25 bp, Homo sapien
cctgtgttccggaggcaccgtgaag

SEQ ID NO: 3949074 - DNA, 25 bp, Homo sapien
tgtgttccggaggcaccgtgaagaa

SEQ ID NO: 3949075 - DNA, 25 bp, Homo sapien
ctgtgttccggaggcaccgtgaaga

SEQ ID NO: 3949076 - DNA, 25 bp, Homo sapien
agctggatcccggagcttgctcttc

SEQ ID NO: 3949077 - DNA, 25 bp, Homo sapien
taaattctccccacaaacaagtggc

SEQ ID NO: 3949078 - DNA, 25 bp, Homo sapien
cagcgggagccttcaagctcgaact

SEQ ID NO: 3949079 - DNA, 25 bp, Homo sapien
agctcgaactcgtcgcgggtgtaaa

SEQ ID NO: 3949080 - DNA, 25 bp, Homo sapien
gcggccaaagttcagggctctccac

SEQ ID NO: 3949081 - DNA, 25 bp, Homo sapien
gcaccagccagcagttaaaaacaca

SEQ ID NO: 3949082 - DNA, 25 bp, Homo sapien
gagcaccagccagcagttaaaaaca

SEQ ID NO: 3949083 - DNA, 25 bp, Homo sapien
aaccagcggccaaagttcagggctc

SEQ ID NO: 3949084 - DNA, 25 bp, Homo sapien
aggctgacgatgcactgagccgtga

SEQ ID NO: 3949085 - DNA, 25 bp, Homo sapien
ggaggctgacgatgcactgagccgt

SEQ ID NO: 3949086 - DNA, 25 bp, Homo sapien
aggaggctgacgatgcactgagccg

SEQ ID NO: 3949087 - DNA, 25 bp, Homo sapien
gtcacacttcctgaactcaaagaaa

SEQ ID NO: 3949088 - DNA, 25 bp, Homo sapien
gacacgcttatttctgggtgtccaa

SEQ ID NO: 3949089 - DNA, 25 bp, Homo sapien
atcctctgcttgtgctcttctcgac

SEQ ID NO: 3949090 - DNA, 25 bp, Homo sapien
tgggtgtccaaatccttgtcacact

SEQ ID NO: 3949091 - DNA, 25 bp, Homo sapien
atttgtaccagggagcccactcacg

SEQ ID NO: 3949092 - DNA, 25 bp, Homo sapien
ggaatttgtaccagggagcccactc

SEQ ID NO: 3949093 - DNA, 25 bp, Homo sapien
tcacgtcttgctcaccaaacagaaa

SEQ ID NO: 3949094 - DNA, 25 bp, Homo sapien
cagaaaggcaaccacacgtttgggc

SEQ ID NO: 3949095 - DNA, 25 bp, Homo sapien
tgttgccagtgtggaaatttggcag

SEQ ID NO: 3949096 - DNA, 25 bp, Homo sapien
aagggtgttgccagtgtggaaattt

SEQ ID NO: 3949097 - DNA, 25 bp, Homo sapien
ctgaaacagaagggtgttgccagtg

SEQ ID NO: 3949098 - DNA, 25 bp, Homo sapien
acagaagggtgttgccagtgtggaa

SEQ ID NO: 3949099 - DNA, 25 bp, Homo sapien
tctccaatgcggttcagcttctcaa

SEQ ID NO: 3949100 - DNA, 25 bp, Homo sapien
actccttcacactccggcatcgtcc

SEQ ID NO: 3949101 - DNA, 25 bp, Homo sapien
aaactccttcacactccggcatcgt

SEQ ID NO: 3949102 - DNA, 25 bp, Homo sapien
cctctccaatgcggttcagcttctc

SEQ ID NO: 3949103 - DNA, 25 bp, Homo sapien
gatgcttacgtttacccagaaatgg

SEQ ID NO: 3949104 - DNA, 25 bp, Homo sapien
tatgggcattagcaaccggatgctt

SEQ ID NO: 3949105 - DNA, 25 bp, Homo sapien
ccagagttgctgaggtgatagacat

SEQ ID NO: 3949106 - DNA, 25 bp, Homo sapien
cagtgacacgtttggattatgggca

SEQ ID NO: 3949107 - DNA, 25 bp, Homo sapien
tgaagatggctctacaaaacatcct

SEQ ID NO: 3949108 - DNA, 25 bp, Homo sapien
cagaatgacctacgccaatttcaca

SEQ ID NO: 3949109 - DNA, 25 bp, Homo sapien
cagcttccagaatgacctacgccaa

SEQ ID NO: 3949110 - DNA, 25 bp, Homo sapien
tgttataacctttagttgtgtgtgg

SEQ ID NO: 3949111 - DNA, 25 bp, Homo sapien
cgctgaacgggaggctctccctgag

SEQ ID NO: 3949112 - DNA, 25 bp, Homo sapien
gatgacatcatctcgatgcccctcg

SEQ ID NO: 3949113 - DNA, 25 bp, Homo sapien
ctcgtgggctccctagcgctgaacg

SEQ ID NO: 3949114 - DNA, 25 bp, Homo sapien
acatcatctcgatgcccctcgtggg

SEQ ID NO: 3949115 - DNA, 25 bp, Homo sapien
cagtgcgacaatctcatctgtctgg

SEQ ID NO: 3949116 - DNA, 25 bp, Homo sapien
tcagtgcgacaatctcatctgtctg

SEQ ID NO: 3949117 - DNA, 25 bp, Homo sapien
agtgcgacaatctcatctgtctggg

SEQ ID NO: 3949118 - DNA, 25 bp, Homo sapien
gaatcggcacctctctaaacaccgt

SEQ ID NO: 3949119 - DNA, 25 bp, Homo sapien
cttccttgaccaaatacgaatcggc

SEQ ID NO: 3949120 - DNA, 25 bp, Homo sapien
taaacaccgtggacatctatgtggg

SEQ ID NO: 3949121 - DNA, 25 bp, Homo sapien
tgaccaaatacgaatcggcacctct

SEQ ID NO: 3949122 - DNA, 25 bp, Homo sapien
cagcagcgtgatctcccgcaagctg

SEQ ID NO: 3949123 - DNA, 25 bp, Homo sapien
ccacgatgttcggatgacgcaggcg

SEQ ID NO: 3949124 - DNA, 25 bp, Homo sapien
cgtgatctcccgcaagctgctgatg

SEQ ID NO: 3949125 - DNA, 25 bp, Homo sapien
agctccacgatgttcggatgacgca

SEQ ID NO: 3949126 - DNA, 25 bp, Homo sapien
agcctccgagaagggtgttggcata

SEQ ID NO: 3949127 - DNA, 25 bp, Homo sapien
aagggtgttggcatattctccagga

SEQ ID NO: 3949128 - DNA, 25 bp, Homo sapien
tccgagaagggtgttggcatattct

SEQ ID NO: 3949129 - DNA, 25 bp, Homo sapien
ctgagcctccgagaagggtgttggc

SEQ ID NO: 3949130 - DNA, 25 bp, Homo sapien
cctgtttcgttataaatgtgcacca

SEQ ID NO: 3949131 - DNA, 25 bp, Homo sapien
ctcagaaggctctccgcccagggct

SEQ ID NO: 3949132 - DNA, 25 bp, Homo sapien
ctcactgaagctcgctgaaacactg

SEQ ID NO: 3949133 - DNA, 25 bp, Homo sapien
atgtgcaccacaagggcccatgaag

SEQ ID NO: 3949134 - DNA, 25 bp, Homo sapien
cagagggtcagaggtaccagtcagg

SEQ ID NO: 3949135 - DNA, 25 bp, Homo sapien
gcaggactagcagtcccaatagccc

SEQ ID NO: 3949136 - DNA, 25 bp, Homo sapien
gtcagaggtaccagtcagggtgagc

SEQ ID NO: 3949137 - DNA, 25 bp, Homo sapien
gactagcagtcccaatagcccagga

SEQ ID NO: 3949138 - DNA, 25 bp, Homo sapien
tgcagatactggaggccccggagca

SEQ ID NO: 3949139 - DNA, 25 bp, Homo sapien
gtgcagatactggaggccccggagc

SEQ ID NO: 3949140 - DNA, 25 bp, Homo sapien
tgtgcagatactggaggccccggag

SEQ ID NO: 3949141 - DNA, 25 bp, Homo sapien
gcagcagagttaggcctcagccgaa

SEQ ID NO: 3949142 - DNA, 25 bp, Homo sapien
aacacaaatggagtgcgagcagcgg

SEQ ID NO: 3949143 - DNA, 25 bp, Homo sapien
tcagccgaatttgtgcttccaactc

SEQ ID NO: 3949144 - DNA, 25 bp, Homo sapien
aaacacaaatggagtgcgagcagcg

SEQ ID NO: 3949145 - DNA, 25 bp, Homo sapien
ctgtcttcacacaacccttgtcggt

SEQ ID NO: 3949146 - DNA, 25 bp, Homo sapien
ggtcatgagcaagttggaaaccttc

SEQ ID NO: 3949147 - DNA, 25 bp, Homo sapien
cttgtcggtcatgagcaagttggaa

SEQ ID NO: 3949148 - DNA, 25 bp, Homo sapien
cacaacccttgtcggtcatgagcaa

SEQ ID NO: 3949149 - DNA, 25 bp, Homo sapien
agggcctggcccaagttgcacccac

SEQ ID NO: 3949150 - DNA, 25 bp, Homo sapien
caccaagtgccatctagggacaggg

SEQ ID NO: 3949151 - DNA, 25 bp, Homo sapien
caagtgccatctagggacagggcct

SEQ ID NO: 3949152 - DNA, 25 bp, Homo sapien
tcaccaagtgccatctagggacagg

SEQ ID NO: 3949153 - DNA, 25 bp, Homo sapien
ttactgggacaccataggcccgggc

SEQ ID NO: 3949154 - DNA, 25 bp, Homo sapien
cattggctttactgggacaccatag

SEQ ID NO: 3949155 - DNA, 25 bp, Homo sapien
tggctttactgggacaccataggcc

SEQ ID NO: 3949156 - DNA, 25 bp, Homo sapien
ggtcattggctttactgggacacca

SEQ ID NO: 3949157 - DNA, 25 bp, Homo sapien
gaaccagggaaagcatgcaagctgc

SEQ ID NO: 3949158 - DNA, 25 bp, Homo sapien
tccaggtggcacacacagcaatggt

SEQ ID NO: 3949159 - DNA, 25 bp, Homo sapien
cctgtggtggcctggaaacctgtcc

SEQ ID NO: 3949160 - DNA, 25 bp, Homo sapien
tggaggctgtcctagacccaacgtt

SEQ ID NO: 3949161 - DNA, 25 bp, Homo sapien
cacatgtcgatgctggtggtctgcg

SEQ ID NO: 3949162 - DNA, 25 bp, Homo sapien
gtctgcgtggtggttcccaacagca

SEQ ID NO: 3949163 - DNA, 25 bp, Homo sapien
gtggtctgcgtggtggttcccaaca

SEQ ID NO: 3949164 - DNA, 25 bp, Homo sapien
acatgtcgatgctggtggtctgcgt

SEQ ID NO: 3949165 - DNA, 25 bp, Homo sapien
agcgcgaggaacagaggacctgact

SEQ ID NO: 3949166 - DNA, 25 bp, Homo sapien
ggacctgactgcagccagacctttg

SEQ ID NO: 3949167 - DNA, 25 bp, Homo sapien
gaacagtggacctcactgcggccag

SEQ ID NO: 3949168 - DNA, 25 bp, Homo sapien
tttgctgaccctgccagtgtgaggc

SEQ ID NO: 3949169 - DNA, 25 bp, Homo sapien
agctcggccagtatgcagcccacag

SEQ ID NO: 3949170 - DNA, 25 bp, Homo sapien
tggatctcggaagtgccggggagaa

SEQ ID NO: 3949171 - DNA, 25 bp, Homo sapien
gcagctcggccagtatgcagcccac

SEQ ID NO: 3949172 - DNA, 25 bp, Homo sapien
gatctcggaagtgccggggagaaga

SEQ ID NO: 3949173 - DNA, 25 bp, Homo sapien
cagatgttctcactgggcgtgccca

SEQ ID NO: 3949174 - DNA, 25 bp, Homo sapien
agatgttctcactgggcgtgcccag

SEQ ID NO: 3949175 - DNA, 25 bp, Homo sapien
ggctgcgggtctgcccaggacgccc

SEQ ID NO: 3949176 - DNA, 25 bp, Homo sapien
ctgcgggtctgcccaggacgcccac

SEQ ID NO: 3949177 - DNA, 25 bp, Homo sapien
gctgcgggtctgcccaggacgccca

SEQ ID NO: 3949178 - DNA, 25 bp, Homo sapien
gcgcagagggcgtgggcacgggcgg

SEQ ID NO: 3949179 - DNA, 25 bp, Homo sapien
ctgaggcgcagagggcgtgggcacg

SEQ ID NO: 3949180 - DNA, 25 bp, Homo sapien
gcaggagctgaggcgcagagggcgt

SEQ ID NO: 3949181 - DNA, 25 bp, Homo sapien
ctgcgggcgcagagggcgtgggcac

SEQ ID NO: 3949182 - DNA, 25 bp, Homo sapien
cgaccagtggcagcttggaaaagcc

SEQ ID NO: 3949183 - DNA, 25 bp, Homo sapien
tgtagggctgcttccggaggctgta

SEQ ID NO: 3949184 - DNA, 25 bp, Homo sapien
cttcaggttgttgtagggctgcttc

SEQ ID NO: 3949185 - DNA, 25 bp, Homo sapien
cggcctccgacagccatgggaactt

SEQ ID NO: 3949186 - DNA, 25 bp, Homo sapien
gagctctccaggcagtccccggccg

SEQ ID NO: 3949187 - DNA, 25 bp, Homo sapien
tctccttgaaataggagctctccag

SEQ ID NO: 3949188 - DNA, 25 bp, Homo sapien
agctctccaggcagtccccggccgt

SEQ ID NO: 3949189 - DNA, 25 bp, Homo sapien
ccttgaaataggagctctccaggca

SEQ ID NO: 3949190 - DNA, 25 bp, Homo sapien
cagcgcttgctctggccctcggagg

SEQ ID NO: 3949191 - DNA, 25 bp, Homo sapien
gcggcccgcttgttgcggtggtggg

SEQ ID NO: 3949192 - DNA, 25 bp, Homo sapien
gaaaggtcggcatgagctccggctc

SEQ ID NO: 3949193 - DNA, 25 bp, Homo sapien
tcagggtttacagcgcttgctctgg

SEQ ID NO: 3949194 - DNA, 25 bp, Homo sapien
ggaatacaggcgtgtgccaggccca

SEQ ID NO: 3949195 - DNA, 25 bp, Homo sapien
gaatacaggcgtgtgccaggcccac

SEQ ID NO: 3949196 - DNA, 25 bp, Homo sapien
gggaatacaggcgtgtgccaggccc

SEQ ID NO: 3949197 - DNA, 25 bp, Homo sapien
atacaggcgtgtgccaggcccaccg

SEQ ID NO: 3949198 - DNA, 25 bp, Homo sapien
tcacagacaccactgatcggaagac

SEQ ID NO: 3949199 - DNA, 25 bp, Homo sapien
gctcgcggcacccttcacagacacc

SEQ ID NO: 3949200 - DNA, 25 bp, Homo sapien
cgcggcacccttcacagacaccact

SEQ ID NO: 3949201 - DNA, 25 bp, Homo sapien
ccttcacagacaccactgatcggaa

SEQ ID NO: 3949202 - DNA, 25 bp, Homo sapien
gatacgaaggtcttctgggccctct

SEQ ID NO: 3949203 - DNA, 25 bp, Homo sapien
tatccaacaagagcctatagcttcg

SEQ ID NO: 3949204 - DNA, 25 bp, Homo sapien
caacatagcgaggaggaccacatga

SEQ ID NO: 3949205 - DNA, 25 bp, Homo sapien
caagaagcagtggttgcacatttcc

SEQ ID NO: 3949206 - DNA, 25 bp, Homo sapien
ctgctgcttacagggccccactgga

SEQ ID NO: 3949207 - DNA, 25 bp, Homo sapien
cagaagatgggctacgtacgcagag

SEQ ID NO: 3949208 - DNA, 25 bp, Homo sapien
ctgctgcaggcacggcgtgccagcg

SEQ ID NO: 3949209 - DNA, 25 bp, Homo sapien
agccatcggctcatggtgaccgccc

SEQ ID NO: 3949210 - DNA, 25 bp, Homo sapien
tgcaggctcagcgatgaacatctgg

SEQ ID NO: 3949211 - DNA, 25 bp, Homo sapien
cagacactaccttctggagggccgg

SEQ ID NO: 3949212 - DNA, 25 bp, Homo sapien
tcttatctaggtccgtgcagcccaa

SEQ ID NO: 3949213 - DNA, 25 bp, Homo sapien
caagtagtacagctagagcccaggg

SEQ ID NO: 3949214 - DNA, 25 bp, Homo sapien
aggccgccaacaggtgggactcctg

SEQ ID NO: 3949215 - DNA, 25 bp, Homo sapien
tttacgccgccatcctggagtacga

SEQ ID NO: 3949216 - DNA, 25 bp, Homo sapien
tccccaggaggttttgcagccaagt

SEQ ID NO: 3949217 - DNA, 25 bp, Homo sapien
tggagtacgaacaggaccatgtgcg

SEQ ID NO: 3949218 - DNA, 25 bp, Homo sapien
agagagactcctctggtgtccagac

SEQ ID NO: 3949219 - DNA, 25 bp, Homo sapien
gcctcagagcaatccgggaggatga

SEQ ID NO: 3949220 - DNA, 25 bp, Homo sapien
tgtccagacaccactgggcttcctg

SEQ ID NO: 3949221 - DNA, 25 bp, Homo sapien
catttccagagagctgacgccactg

SEQ ID NO: 3949222 - DNA, 25 bp, Homo sapien
tgccacccgagatcttccagaagct

SEQ ID NO: 3949223 - DNA, 25 bp, Homo sapien
tatactccgatgaaggaggaaagct

SEQ ID NO: 3949224 - DNA, 25 bp, Homo sapien
gaaaacacgcctgaagccaaccatg

SEQ ID NO: 3949225 - DNA, 25 bp, Homo sapien
ccatggcttgcagggaaaacacgcc

SEQ ID NO: 3949226 - DNA, 25 bp, Homo sapien
gcagtaagtaacagtggtagagccg

SEQ ID NO: 3949227 - DNA, 25 bp, Homo sapien
tgaagctagcacagcagtgtctgga

SEQ ID NO: 3949228 - DNA, 25 bp, Homo sapien
ccgccaagcttggtgggtctcctgc

SEQ ID NO: 3949229 - DNA, 25 bp, Homo sapien
ggtagagccgactgtgaccagcctt

SEQ ID NO: 3949230 - DNA, 25 bp, Homo sapien
ccagggcagatgattagaaatgcgt

SEQ ID NO: 3949231 - DNA, 25 bp, Homo sapien
tccatgaggaatagtcggcttgccc

SEQ ID NO: 3949232 - DNA, 25 bp, Homo sapien
cctgtttagggtcgaggctgtgacg

SEQ ID NO: 3949233 - DNA, 25 bp, Homo sapien
gcagactcaggaggcaaaaccaggg

SEQ ID NO: 3949234 - DNA, 25 bp, Homo sapien
cagccactggacgtaggatcacaca

SEQ ID NO: 3949235 - DNA, 25 bp, Homo sapien
cacattaagtttgagaggccagcag

SEQ ID NO: 3949236 - DNA, 25 bp, Homo sapien
ccaagctacgggaaggcaggacttt

SEQ ID NO: 3949237 - DNA, 25 bp, Homo sapien
cagccgctgcacaaaggatcacaga

SEQ ID NO: 3949238 - DNA, 25 bp, Homo sapien
tccaagtctggagagcagcgatgct

SEQ ID NO: 3949239 - DNA, 25 bp, Homo sapien
catacacggaatacctgaggagcat

SEQ ID NO: 3949240 - DNA, 25 bp, Homo sapien
cacctggccggaataatggagtcac

SEQ ID NO: 3949241 - DNA, 25 bp, Homo sapien
ttgcttatcccacaagggcacctgg

SEQ ID NO: 3949242 - DNA, 25 bp, Homo sapien
gctgcagagcgccatgaagcttgcc

SEQ ID NO: 3949243 - DNA, 25 bp, Homo sapien
atcgagctggacaccggcaaccggc

SEQ ID NO: 3949244 - DNA, 25 bp, Homo sapien
gacggcacggtgaagccgctgcaga

SEQ ID NO: 3949245 - DNA, 25 bp, Homo sapien
gaagcttgccaacggggccatcgag

SEQ ID NO: 3949246 - DNA, 25 bp, Homo sapien
tggcaactccgtgaggggcccttct

SEQ ID NO: 3949247 - DNA, 25 bp, Homo sapien
aagaggcccggctccgtcgcgacaa

SEQ ID NO: 3949248 - DNA, 25 bp, Homo sapien
ctgccgcggttagacgcccatggca

SEQ ID NO: 3949249 - DNA, 25 bp, Homo sapien
cagccccgtctcaagacggcgaaga

SEQ ID NO: 3949250 - DNA, 25 bp, Homo sapien
gtgcccgcctctgtcgccaatggag

SEQ ID NO: 3949251 - DNA, 25 bp, Homo sapien
cgctcgtaccgctcccctctcgggc

SEQ ID NO: 3949252 - DNA, 25 bp, Homo sapien
ggctcgccgacacctcacgacgagt

SEQ ID NO: 3949253 - DNA, 25 bp, Homo sapien
tctgtcgccaatggagcgctggcct

SEQ ID NO: 3949254 - DNA, 25 bp, Homo sapien
cgccagcagaatcccgcgggtgctg

SEQ ID NO: 3949255 - DNA, 25 bp, Homo sapien
tgcccggcccgaggttcctagagga

SEQ ID NO: 3949256 - DNA, 25 bp, Homo sapien
agaggacccggcgttaggctccgct

SEQ ID NO: 3949257 - DNA, 25 bp, Homo sapien
ttaggctccgctcggcgcgctggaa

SEQ ID NO: 3949258 - DNA, 25 bp, Homo sapien
actgtcgggacgacccaggagacag

SEQ ID NO: 3949259 - DNA, 25 bp, Homo sapien
gcactgtcgggacgacccaggagac

SEQ ID NO: 3949260 - DNA, 25 bp, Homo sapien
tccgaggccccgcactgtcgggacg

SEQ ID NO: 3949261 - DNA, 25 bp, Homo sapien
ccgcactgtcgggacgacccaggag

SEQ ID NO: 3949262 - DNA, 25 bp, Homo sapien
tgcgcaggcttctcgaggaaaactt

SEQ ID NO: 3949263 - DNA, 25 bp, Homo sapien
aaggacttgagaaggctgtggcact

SEQ ID NO: 3949264 - DNA, 25 bp, Homo sapien
aaaacttcccgtggcagaggcgaca

SEQ ID NO: 3949265 - DNA, 25 bp, Homo sapien
tttgcacaaggcttccggcgaccag

SEQ ID NO: 3949266 - DNA, 25 bp, Homo sapien
gtgctctgaacagactagggcgtac

SEQ ID NO: 3949267 - DNA, 25 bp, Homo sapien
tgaacgtgctctgaacagactaggg

SEQ ID NO: 3949268 - DNA, 25 bp, Homo sapien
agcctgaacgtgctctgaacagact

SEQ ID NO: 3949269 - DNA, 25 bp, Homo sapien
aacgtgctctgaacagactagggcg

SEQ ID NO: 3949270 - DNA, 25 bp, Homo sapien
cagacacgctccctcctctgcccct

SEQ ID NO: 3949271 - DNA, 25 bp, Homo sapien
ctctgcccctgttgggggctgggca

SEQ ID NO: 3949272 - DNA, 25 bp, Homo sapien
ccctcctctgcccctgttgggggct

SEQ ID NO: 3949273 - DNA, 25 bp, Homo sapien
ccagacacgctccctcctctgcccc

SEQ ID NO: 3949274 - DNA, 25 bp, Homo sapien
cccaccaagccgtgcaggcactggg

SEQ ID NO: 3949275 - DNA, 25 bp, Homo sapien
gcacccaccccaccaagccgtgcag

SEQ ID NO: 3949276 - DNA, 25 bp, Homo sapien
ccccaccaagccgtgcaggcactgg

SEQ ID NO: 3949277 - DNA, 25 bp, Homo sapien
ccaccccaccaagccgtgcaggcac

SEQ ID NO: 3949278 - DNA, 25 bp, Homo sapien
acacgacctggatgacgccgcagta

SEQ ID NO: 3949279 - DNA, 25 bp, Homo sapien
gtagtcgtggccctggtcgcagccc

SEQ ID NO: 3949280 - DNA, 25 bp, Homo sapien
cgacctggatgacgccgcagtactc

SEQ ID NO: 3949281 - DNA, 25 bp, Homo sapien
tcgtggccctggtcgcagccccaca

SEQ ID NO: 3949282 - DNA, 25 bp, Homo sapien
ggccttgcagctggagctggtatcc

SEQ ID NO: 3949283 - DNA, 25 bp, Homo sapien
aggccttgcagctggagctggtatc

SEQ ID NO: 3949284 - DNA, 25 bp, Homo sapien
aaggccttgcagctggagctggtat

SEQ ID NO: 3949285 - DNA, 25 bp, Homo sapien
gccttgcagctggagctggtatcca

SEQ ID NO: 3949286 - DNA, 25 bp, Homo sapien
ggcagccgtggcgccgtctctttgt

SEQ ID NO: 3949287 - DNA, 25 bp, Homo sapien
tggcgccgtctctttgtcccatggc

SEQ ID NO: 3949288 - DNA, 25 bp, Homo sapien
cccagggttccaccctcggtgctgg

SEQ ID NO: 3949289 - DNA, 25 bp, Homo sapien
ccatggccacttgactgccagcgca

SEQ ID NO: 3949290 - DNA, 25 bp, Homo sapien
ctgaggtgggaagcccgacctgggc

SEQ ID NO: 3949291 - DNA, 25 bp, Homo sapien
tggctgaggtgggaagcccgacctg

SEQ ID NO: 3949292 - DNA, 25 bp, Homo sapien
gggccctgcaaaggggcaggcttgg

SEQ ID NO: 3949293 - DNA, 25 bp, Homo sapien
ctgcaaaggggcaggcttggctgag

SEQ ID NO: 3949294 - DNA, 25 bp, Homo sapien
aaaaagactcgacggctgatgagcg

SEQ ID NO: 3949295 - DNA, 25 bp, Homo sapien
gaggcaacggccattcttttctccc

SEQ ID NO: 3949296 - DNA, 25 bp, Homo sapien
gatgagcgtgtctccacagaaactg

SEQ ID NO: 3949297 - DNA, 25 bp, Homo sapien
acatccacagacaaggccctattct

SEQ ID NO: 3949298 - DNA, 25 bp, Homo sapien
ccgatcatccgaggttgaagatgga

SEQ ID NO: 3949299 - DNA, 25 bp, Homo sapien
ggttgaagatggaagctgcttctca

SEQ ID NO: 3949300 - DNA, 25 bp, Homo sapien
ccctcagaaaggtcactgaactcgt

SEQ ID NO: 3949301 - DNA, 25 bp, Homo sapien
cctcagaaaggtcactgaactcgtc

SEQ ID NO: 3949302 - DNA, 25 bp, Homo sapien
gaaaggtcactgaactcgtctttta

SEQ ID NO: 3949303 - DNA, 25 bp, Homo sapien
tcagaaaggtcactgaactcgtctt

SEQ ID NO: 3949304 - DNA, 25 bp, Homo sapien
aaggactcgtccgaagactgggcat

SEQ ID NO: 3949305 - DNA, 25 bp, Homo sapien
ccgaagactgggcattttgcttctt

SEQ ID NO: 3949306 - DNA, 25 bp, Homo sapien
ggctcaaaggactcgtccgaagact

SEQ ID NO: 3949307 - DNA, 25 bp, Homo sapien
tcgtccgaagactgggcattttgct

SEQ ID NO: 3949308 - DNA, 25 bp, Homo sapien
gattcagactcaacccggagggtca

SEQ ID NO: 3949309 - DNA, 25 bp, Homo sapien
agtcaggaggccatgcttgctacca

SEQ ID NO: 3949310 - DNA, 25 bp, Homo sapien
gctagaactccaaggtcagggttga

SEQ ID NO: 3949311 - DNA, 25 bp, Homo sapien
tgaatctgcctcgatccggaaaagg

SEQ ID NO: 3949312 - DNA, 25 bp, Homo sapien
aagtagtttacactgccgagtccag

SEQ ID NO: 3949313 - DNA, 25 bp, Homo sapien
cacaactagaggtatcaggacggca

SEQ ID NO: 3949314 - DNA, 25 bp, Homo sapien
ttaaagagtgcattgaggccggcgc

SEQ ID NO: 3949315 - DNA, 25 bp, Homo sapien
tgagggaccagcaaatgcagcagct

SEQ ID NO: 3949316 - DNA, 25 bp, Homo sapien
catccgggcttgggtcccggcttct

SEQ ID NO: 3949317 - DNA, 25 bp, Homo sapien
cttccgaattcttggttcttcagac

SEQ ID NO: 3949318 - DNA, 25 bp, Homo sapien
tgctttcactcttcttaccagagac

SEQ ID NO: 3949319 - DNA, 25 bp, Homo sapien
ctctcacaacgaagcttcttcttcc

SEQ ID NO: 3949320 - DNA, 25 bp, Homo sapien
aatgaagagcatgcatggagccccg

SEQ ID NO: 3949321 - DNA, 25 bp, Homo sapien
ggcgagcctcgcgttgcaggcatca

SEQ ID NO: 3949322 - DNA, 25 bp, Homo sapien
ctgcaatgaagagcatgcatggagc

SEQ ID NO: 3949323 - DNA, 25 bp, Homo sapien
gcagggcgagcctcgcgttgcaggc

SEQ ID NO: 3949324 - DNA, 25 bp, Homo sapien
cacggccgtgcagccctggtaagga

SEQ ID NO: 3949325 - DNA, 25 bp, Homo sapien
agcgcctcggtacacggccgtgcag

SEQ ID NO: 3949326 - DNA, 25 bp, Homo sapien
taaggacacttgtagatggtgggaa

SEQ ID NO: 3949327 - DNA, 25 bp, Homo sapien
cgtgcagccctggtaaggacacttg

SEQ ID NO: 3949328 - DNA, 25 bp, Homo sapien
gaaaaccttgttgcagccagggtgg

SEQ ID NO: 3949329 - DNA, 25 bp, Homo sapien
cggtcgatcatgaaaaccttgttgc

SEQ ID NO: 3949330 - DNA, 25 bp, Homo sapien
ctgcaggtagcggtcgatcatgaaa

SEQ ID NO: 3949331 - DNA, 25 bp, Homo sapien
tggatgagcttcacgtggcgctgca

SEQ ID NO: 3949332 - DNA, 25 bp, Homo sapien
tgaaaaataagacgggcacagagac

SEQ ID NO: 3949333 - DNA, 25 bp, Homo sapien
gtgaaaaggcagaaccacacgtgcc

SEQ ID NO: 3949334 - DNA, 25 bp, Homo sapien
ccagagctggtgtgccttcatgcct

SEQ ID NO: 3949335 - DNA, 25 bp, Homo sapien
ttaatgacacgacctacacacatgt

SEQ ID NO: 3949336 - DNA, 25 bp, Homo sapien
gcgacacagactgtcccggaaaaaa

SEQ ID NO: 3949337 - DNA, 25 bp, Homo sapien
ggcgacacagactgtcccggaaaaa

SEQ ID NO: 3949338 - DNA, 25 bp, Homo sapien
gggcgacacagactgtcccggaaaa

SEQ ID NO: 3949339 - DNA, 25 bp, Homo sapien
ttacacaaagtgctcaatcccagca

SEQ ID NO: 3949340 - DNA, 25 bp, Homo sapien
cagccccagcccaatcaatatggta

SEQ ID NO: 3949341 - DNA, 25 bp, Homo sapien
gccccagcccaatcaatatggtaaa

SEQ ID NO: 3949342 - DNA, 25 bp, Homo sapien
cccagcccaatcaatatggtaaaac

SEQ ID NO: 3949343 - DNA, 25 bp, Homo sapien
ccggggggacgacgatgacaatgtg

SEQ ID NO: 3949344 - DNA, 25 bp, Homo sapien
gggacgacgatgacaatgtgaaacc

SEQ ID NO: 3949345 - DNA, 25 bp, Homo sapien
ctcccggggggacgacgatgacaat

SEQ ID NO: 3949346 - DNA, 25 bp, Homo sapien
gggggacgacgatgacaatgtgaaa

SEQ ID NO: 3949347 - DNA, 25 bp, Homo sapien
tcgtcacagatatagttccgcacct

SEQ ID NO: 3949348 - DNA, 25 bp, Homo sapien
catttggtggacgagaaggtgcttc

SEQ ID NO: 3949349 - DNA, 25 bp, Homo sapien
ggctcccgaatgtcgcatttggtgg

SEQ ID NO: 3949350 - DNA, 25 bp, Homo sapien
ttccgctgcttgaaggtttgtccac

SEQ ID NO: 3949351 - DNA, 25 bp, Homo sapien
aggcagataagaaggtgcgagggcc

SEQ ID NO: 3949352 - DNA, 25 bp, Homo sapien
cagaggcagataagaaggtgcgagg

SEQ ID NO: 3949353 - DNA, 25 bp, Homo sapien
gggacagaggcagataagaaggtgc

SEQ ID NO: 3949354 - DNA, 25 bp, Homo sapien
gacagaggcagataagaaggtgcga

SEQ ID NO: 3949355 - DNA, 25 bp, Homo sapien
catgtggtacttgagggatgcccgc

SEQ ID NO: 3949356 - DNA, 25 bp, Homo sapien
tcacaggcaaagtccagctcagtct

SEQ ID NO: 3949357 - DNA, 25 bp, Homo sapien
cagtctcagccttgtgtttggtcat

SEQ ID NO: 3949358 - DNA, 25 bp, Homo sapien
gaggttgtgggccttctcaaaccgc

SEQ ID NO: 3949359 - DNA, 25 bp, Homo sapien
gagtcactcagcgtttgcgggaaaa

SEQ ID NO: 3949360 - DNA, 25 bp, Homo sapien
gaaggctacttgagccggacaccaa

SEQ ID NO: 3949361 - DNA, 25 bp, Homo sapien
ttatttatgaactgtccggccccga

SEQ ID NO: 3949362 - DNA, 25 bp, Homo sapien
aaatctcctcgactgctttagtggg

SEQ ID NO: 3949363 - DNA, 25 bp, Homo sapien
taagaaacacgctgctgaggcacaa

SEQ ID NO: 3949364 - DNA, 25 bp, Homo sapien
tgcagttaatacctcggtgcccgaa

SEQ ID NO: 3949365 - DNA, 25 bp, Homo sapien
tgcaaatggttaagaacgagccctc

SEQ ID NO: 3949366 - DNA, 25 bp, Homo sapien
aaaaagagcttctcacacgtggcag

SEQ ID NO: 3949367 - DNA, 25 bp, Homo sapien
tttagaatgacagcacaggtaattt

SEQ ID NO: 3949368 - DNA, 25 bp, Homo sapien
tatttagaatgacagcacaggtaat

SEQ ID NO: 3949369 - DNA, 25 bp, Homo sapien
atgacagcacaggtaattttaatgt

SEQ ID NO: 3949370 - DNA, 25 bp, Homo sapien
tagaatgacagcacaggtaatttta

SEQ ID NO: 3949371 - DNA, 25 bp, Homo sapien
tggatgcaggttgcttcaccatccc

SEQ ID NO: 3949372 - DNA, 25 bp, Homo sapien
gagtagctcaggtgccctcaggtga

SEQ ID NO: 3949373 - DNA, 25 bp, Homo sapien
ttcccatccgtatccacagagtcca

SEQ ID NO: 3949374 - DNA, 25 bp, Homo sapien
cctcaggtgactttccaggctactt

SEQ ID NO: 3949375 - DNA, 25 bp, Homo sapien
cgaggtctgctgccgctttgtgccc

SEQ ID NO: 3949376 - DNA, 25 bp, Homo sapien
gccgaggtctgctgccgctttgtgc

SEQ ID NO: 3949377 - DNA, 25 bp, Homo sapien
ccgaggtctgctgccgctttgtgcc

SEQ ID NO: 3949378 - DNA, 25 bp, Homo sapien
gaggtctgctgccgctttgtgccca

SEQ ID NO: 3949379 - DNA, 25 bp, Homo sapien
gcttctggtctcttgggcagaggta

SEQ ID NO: 3949380 - DNA, 25 bp, Homo sapien
agctgccactcagaggcggaagcca

SEQ ID NO: 3949381 - DNA, 25 bp, Homo sapien
cagagccctgttgcggtgccggaga

SEQ ID NO: 3949382 - DNA, 25 bp, Homo sapien
agcccaggtcgggacagagccctgt

SEQ ID NO: 3949383 - DNA, 25 bp, Homo sapien
ggctgaagtatagtaccgtgatcac

SEQ ID NO: 3949384 - DNA, 25 bp, Homo sapien
taaagttacgagttactgaagaaca

SEQ ID NO: 3949385 - DNA, 25 bp, Homo sapien
tgaagaacacttataggtgacatta

SEQ ID NO: 3949386 - DNA, 25 bp, Homo sapien
tcctaggttgaaacgatcttctcac

SEQ ID NO: 3949387 - DNA, 25 bp, Homo sapien
gagtgctctcctttgtgtctgccct

SEQ ID NO: 3949388 - DNA, 25 bp, Homo sapien
gcttgaaggtgagcttttacgcgag

SEQ ID NO: 3949389 - DNA, 25 bp, Homo sapien
tctggaaacgcaggaggttcactgg

SEQ ID NO: 3949390 - DNA, 25 bp, Homo sapien
ctgagtgcagaggagttggttggcc

SEQ ID NO: 3949391 - DNA, 25 bp, Homo sapien
gagagtggagctttgcgcggacaca

SEQ ID NO: 3949392 - DNA, 25 bp, Homo sapien
gagctttgcgcggacacaccctctg

SEQ ID NO: 3949393 - DNA, 25 bp, Homo sapien
aaaacccacaactttttgatctctg

SEQ ID NO: 3949394 - DNA, 25 bp, Homo sapien
gcagcatctgatgctgttcagatgc

SEQ ID NO: 3949395 - DNA, 25 bp, Homo sapien
ctacccaactatttagaaatctcca

SEQ ID NO: 3949396 - DNA, 25 bp, Homo sapien
acattctcactgatagcatataaga

SEQ ID NO: 3949397 - DNA, 25 bp, Homo sapien
cattctcactgatagcatataagag

SEQ ID NO: 3949398 - DNA, 25 bp, Homo sapien
tctcactgatagcatataagagttc

SEQ ID NO: 3949399 - DNA, 25 bp, Homo sapien
gcagatcctgttttatcaaatggga

SEQ ID NO: 3949400 - DNA, 25 bp, Homo sapien
tgagtgagaaagacaagggacatgc

SEQ ID NO: 3949401 - DNA, 25 bp, Homo sapien
tagaagtaggctacagtgcgtagga

SEQ ID NO: 3949402 - DNA, 25 bp, Homo sapien
cacagtgttcacagtgagtggctaa

SEQ ID NO: 3949403 - DNA, 25 bp, Homo sapien
attcccggcaggaaccacgcttgag

SEQ ID NO: 3949404 - DNA, 25 bp, Homo sapien
acacaataaagacgcctgccgggaa

SEQ ID NO: 3949405 - DNA, 25 bp, Homo sapien
cagcagattgcaaagtgtccgagtc

SEQ ID NO: 3949406 - DNA, 25 bp, Homo sapien
tgaatcccttcggtggttccaaggc

SEQ ID NO: 3949407 - DNA, 25 bp, Homo sapien
ttattgtaacgattttattatactg

SEQ ID NO: 3949408 - DNA, 25 bp, Homo sapien
acctgggtaattctccgcccacagg

SEQ ID NO: 3949409 - DNA, 25 bp, Homo sapien
gtgtcaccacactgggcaatacaaa

SEQ ID NO: 3949410 - DNA, 25 bp, Homo sapien
ctgggtaattctccgcccacaggac

SEQ ID NO: 3949411 - DNA, 25 bp, Homo sapien
gactggtagcggccccgaacggcta

SEQ ID NO: 3949412 - DNA, 25 bp, Homo sapien
ggctctttgatatctattgcataca

SEQ ID NO: 3949413 - DNA, 25 bp, Homo sapien
ctaggctctttgatatctattgcat

SEQ ID NO: 3949414 - DNA, 25 bp, Homo sapien
ggccccgaacggctaggctctttga

SEQ ID NO: 3949415 - DNA, 25 bp, Homo sapien
gacaccgcgagggatccagaccatg

SEQ ID NO: 3949416 - DNA, 25 bp, Homo sapien
ctggtgaccgacacagaggctgagc

SEQ ID NO: 3949417 - DNA, 25 bp, Homo sapien
tgctccagggtttctaggctggtga

SEQ ID NO: 3949418 - DNA, 25 bp, Homo sapien
tgaaagggaactcacgacagatctg

SEQ ID NO: 3949419 - DNA, 25 bp, Homo sapien
gggccgtcatcgcctcccgcgcgcc

SEQ ID NO: 3949420 - DNA, 25 bp, Homo sapien
tcgttgagcggctgctcgtaggcct

SEQ ID NO: 3949421 - DNA, 25 bp, Homo sapien
gcggctgctcgtaggccttcagcac

SEQ ID NO: 3949422 - DNA, 25 bp, Homo sapien
caggaggtccccggtatcccgcagg

SEQ ID NO: 3949423 - DNA, 25 bp, Homo sapien
ctgctcctcgttgagcggctgctcg

SEQ ID NO: 3949424 - DNA, 25 bp, Homo sapien
cgcggcctcgggctcccgcgccccg

SEQ ID NO: 3949425 - DNA, 25 bp, Homo sapien
gcggcctcgggctcccgcgccccga

SEQ ID NO: 3949426 - DNA, 25 bp, Homo sapien
cccagaacctgtgagcatgtaccga

SEQ ID NO: 3949427 - DNA, 25 bp, Homo sapien
ccgagaggagcttacagtggcagtt

SEQ ID NO: 3949428 - DNA, 25 bp, Homo sapien
tgtgggcactccctcagattctcgg

SEQ ID NO: 3949429 - DNA, 25 bp, Homo sapien
agtcggcagaatcacggcccctaaa

SEQ ID NO: 3949430 - DNA, 25 bp, Homo sapien
tattaatcccggtccaagaggtcca

SEQ ID NO: 3949431 - DNA, 25 bp, Homo sapien
cagcagaccagggaacttgttacag

SEQ ID NO: 3949432 - DNA, 25 bp, Homo sapien
gactcggatctggatttaacaggcc

SEQ ID NO: 3949433 - DNA, 25 bp, Homo sapien
cctgcctggcgtgtgtcaagtcttg

SEQ ID NO: 3949434 - DNA, 25 bp, Homo sapien
tgcaggacagagatgactcctgctc

SEQ ID NO: 3949435 - DNA, 25 bp, Homo sapien
gatgactcctgctcaatctcacgca

SEQ ID NO: 3949436 - DNA, 25 bp, Homo sapien
ggacagagatgactcctgctcaatc

SEQ ID NO: 3949437 - DNA, 25 bp, Homo sapien
gagatgactcctgctcaatctcacg

SEQ ID NO: 3949438 - DNA, 25 bp, Homo sapien
cttccgagctggctagtggcacgac

SEQ ID NO: 3949439 - DNA, 25 bp, Homo sapien
cgagctggctagtggcacgaccatg

SEQ ID NO: 3949440 - DNA, 25 bp, Homo sapien
ctgggcttccgagctggctagtggc

SEQ ID NO: 3949441 - DNA, 25 bp, Homo sapien
tccgagctggctagtggcacgacca

SEQ ID NO: 3949442 - DNA, 25 bp, Homo sapien
cctgccctgcggtgaggttccagtt

SEQ ID NO: 3949443 - DNA, 25 bp, Homo sapien
ggttgcgctgcaactagccgaggtt

SEQ ID NO: 3949444 - DNA, 25 bp, Homo sapien
gtttgcacctgaagtcgtctccctg

SEQ ID NO: 3949445 - DNA, 25 bp, Homo sapien
caaaagacagaagacactcgggaga

SEQ ID NO: 3949446 - DNA, 25 bp, Homo sapien
taatctaccacgaagggcaccagtg

SEQ ID NO: 3949447 - DNA, 25 bp, Homo sapien
tgttccatgtcttaaagggttctca

SEQ ID NO: 3949448 - DNA, 25 bp, Homo sapien
gcaccagtggttctgtggagtgata

SEQ ID NO: 3949449 - DNA, 25 bp, Homo sapien
gacaattacacggacactctcagct

SEQ ID NO: 3949450 - DNA, 25 bp, Homo sapien
gcacaagcaagacatggaccggatg

SEQ ID NO: 3949451 - DNA, 25 bp, Homo sapien
agacagcagctgtcggtccacaaga

SEQ ID NO: 3949452 - DNA, 25 bp, Homo sapien
ggagaacgcggctggtgggtgcaga

SEQ ID NO: 3949453 - DNA, 25 bp, Homo sapien
gacatggaccggatgaaaaggatgt

SEQ ID NO: 3949454 - DNA, 25 bp, Homo sapien
ctgcgggacaggggcgcggtcactg

SEQ ID NO: 3949455 - DNA, 25 bp, Homo sapien
acaggggcgcggtcactgggcggta

SEQ ID NO: 3949456 - DNA, 25 bp, Homo sapien
cgggacaggggcgcggtcactgggc

SEQ ID NO: 3949457 - DNA, 25 bp, Homo sapien
ggacaggggcgcggtcactgggcgg

SEQ ID NO: 3949458 - DNA, 25 bp, Homo sapien
acggcctggtaatgcgcctgtgcgc

SEQ ID NO: 3949459 - DNA, 25 bp, Homo sapien
tccagctgagggctgagttcgcgct

SEQ ID NO: 3949460 - DNA, 25 bp, Homo sapien
agcgcgcggcacacggcctggtaat

SEQ ID NO: 3949461 - DNA, 25 bp, Homo sapien
tcctcgctgtcgttgttggccatga

SEQ ID NO: 3949462 - DNA, 25 bp, Homo sapien
gaggcgtctccagatgcggctcgtc

SEQ ID NO: 3949463 - DNA, 25 bp, Homo sapien
gcccgaggcgtctccagatgcggct

SEQ ID NO: 3949464 - DNA, 25 bp, Homo sapien
gatgcggctcgtcctcccgaagctt

SEQ ID NO: 3949465 - DNA, 25 bp, Homo sapien
agctctgcccgaggcgtctccagat

SEQ ID NO: 3949466 - DNA, 25 bp, Homo sapien
ttgcgcagcttgtagttccgggccc

SEQ ID NO: 3949467 - DNA, 25 bp, Homo sapien
catcagcatctcgaagggcgtgagc

SEQ ID NO: 3949468 - DNA, 25 bp, Homo sapien
gcatgagctgaacccacagtcgggc

SEQ ID NO: 3949469 - DNA, 25 bp, Homo sapien
gggcccggatgtcctgcatcagcat

SEQ ID NO: 3949470 - DNA, 25 bp, Homo sapien
atgagctcgtgagcgtccttcttca

SEQ ID NO: 3949471 - DNA, 25 bp, Homo sapien
tggaggccgtgagcggataaagtcc

SEQ ID NO: 3949472 - DNA, 25 bp, Homo sapien
gccgtgagcggataaagtccaggat

SEQ ID NO: 3949473 - DNA, 25 bp, Homo sapien
gtccaggatgagctcgtgagcgtcc

SEQ ID NO: 3949474 - DNA, 25 bp, Homo sapien
tttgctttggtggcaacgggcgcag

SEQ ID NO: 3949475 - DNA, 25 bp, Homo sapien
ctttgctttggtggcaacgggcgca

SEQ ID NO: 3949476 - DNA, 25 bp, Homo sapien
gacctttgctttggtggcaacgggc

SEQ ID NO: 3949477 - DNA, 25 bp, Homo sapien
cctttgctttggtggcaacgggcgc

SEQ ID NO: 3949478 - DNA, 25 bp, Homo sapien
caaggtaggcgccttgagcagcacg

SEQ ID NO: 3949479 - DNA, 25 bp, Homo sapien
gacttggcatctccggagcaggcgt

SEQ ID NO: 3949480 - DNA, 25 bp, Homo sapien
tccatttcagccaaggtaggcgcct

SEQ ID NO: 3949481 - DNA, 25 bp, Homo sapien
ttggcatctccggagcaggcgttga

SEQ ID NO: 3949482 - DNA, 25 bp, Homo sapien
aggagcggtcccgtttcagcgtcac

SEQ ID NO: 3949483 - DNA, 25 bp, Homo sapien
gctctgagaaggagcggtcccgttt

SEQ ID NO: 3949484 - DNA, 25 bp, Homo sapien
agctgggccaggtcatgctctgaga

SEQ ID NO: 3949485 - DNA, 25 bp, Homo sapien
ttcagcgtcacctccccacacggag

SEQ ID NO: 3949486 - DNA, 25 bp, Homo sapien
gggtgggtggccgactgcaggccag

SEQ ID NO: 3949487 - DNA, 25 bp, Homo sapien
ggtgggtggccgactgcaggccaga

SEQ ID NO: 3949488 - DNA, 25 bp, Homo sapien
tgccagctcggggccgtggtggctc

SEQ ID NO: 3949489 - DNA, 25 bp, Homo sapien
ggtgtttggcatcgggggtcatgga

SEQ ID NO: 3949490 - DNA, 25 bp, Homo sapien
gtcagagacactcgcgggacaggta

SEQ ID NO: 3949491 - DNA, 25 bp, Homo sapien
gaggagccccggttgctgagtaggg

SEQ ID NO: 3949492 - DNA, 25 bp, Homo sapien
ctggggtcagagacactcgcgggac

SEQ ID NO: 3949493 - DNA, 25 bp, Homo sapien
cagtaccgtggcggcgtcacggcca

SEQ ID NO: 3949494 - DNA, 25 bp, Homo sapien
cgtggcggcgtcacggccagagtca

SEQ ID NO: 3949495 - DNA, 25 bp, Homo sapien
ctgagcagtaccgtggcggcgtcac

SEQ ID NO: 3949496 - DNA, 25 bp, Homo sapien
taccgtggcggcgtcacggccagag

SEQ ID NO: 3949497 - DNA, 25 bp, Homo sapien
gtccacgtgggcctcaagatgtcag

SEQ ID NO: 3949498 - DNA, 25 bp, Homo sapien
caaaggtgagctcttcacaattaca

SEQ ID NO: 3949499 - DNA, 25 bp, Homo sapien
caattacaggtcagataagaaaccg

SEQ ID NO: 3949500 - DNA, 25 bp, Homo sapien
tccacgtgggcctcaagatgtcagc

SEQ ID NO: 3949501 - DNA, 25 bp, Homo sapien
catctgagccgctggataaaacctc

SEQ ID NO: 3949502 - DNA, 25 bp, Homo sapien
tataaggctcatagttctcaaagca

SEQ ID NO: 3949503 - DNA, 25 bp, Homo sapien
tagtgacagcaaccacaccgttcac

SEQ ID NO: 3949504 - DNA, 25 bp, Homo sapien
agtgccttgcatttatataaggctc

SEQ ID NO: 3949505 - DNA, 25 bp, Homo sapien
ggtgtgacgccaacaacgtccgtgg

SEQ ID NO: 3949506 - DNA, 25 bp, Homo sapien
acagcgttcgcagtgtcggtcatca

SEQ ID NO: 3949507 - DNA, 25 bp, Homo sapien
tggcctcagcctaaacaagcctgcg

SEQ ID NO: 3949508 - DNA, 25 bp, Homo sapien
gtgaacacacgctcctggcattggg

SEQ ID NO: 3949509 - DNA, 25 bp, Homo sapien
gctccttgttctgcaaaaacttttc

SEQ ID NO: 3949510 - DNA, 25 bp, Homo sapien
agcacacggcgcacgtccatcacct

SEQ ID NO: 3949511 - DNA, 25 bp, Homo sapien
cctcttccacagtcagcgccaggct

SEQ ID NO: 3949512 - DNA, 25 bp, Homo sapien
ttcttcagactgctgaagagctcct

SEQ ID NO: 3949513 - DNA, 25 bp, Homo sapien
gcggccacgagaacagcgggaactt

SEQ ID NO: 3949514 - DNA, 25 bp, Homo sapien
gaagagacagctgggcggccacgag

SEQ ID NO: 3949515 - DNA, 25 bp, Homo sapien
agctgggcggccacgagaacagcgg

SEQ ID NO: 3949516 - DNA, 25 bp, Homo sapien
gccacgagaacagcgggaacttggc

SEQ ID NO: 3949517 - DNA, 25 bp, Homo sapien
tctcctctggagttctacacggcgg

SEQ ID NO: 3949518 - DNA, 25 bp, Homo sapien
gacatttctgcctgtggccggtgga

SEQ ID NO: 3949519 - DNA, 25 bp, Homo sapien
tacttgcaaaacaggccgaggacca

SEQ ID NO: 3949520 - DNA, 25 bp, Homo sapien
aaccttttaggcgtggctgagcgag

SEQ ID NO: 3949521 - DNA, 25 bp, Homo sapien
cttccgactgggcaacaagagtgaa

SEQ ID NO: 3949522 - DNA, 25 bp, Homo sapien
tgcacttccgactgggcaacaagag

SEQ ID NO: 3949523 - DNA, 25 bp, Homo sapien
gcacttccgactgggcaacaagagt

SEQ ID NO: 3949524 - DNA, 25 bp, Homo sapien
ccgactgggcaacaagagtgaaact

SEQ ID NO: 3949525 - DNA, 25 bp, Homo sapien
ctttatgctacaggaagtgcagacg

SEQ ID NO: 3949526 - DNA, 25 bp, Homo sapien
ttatgctacaggaagtgcagacggc

SEQ ID NO: 3949527 - DNA, 25 bp, Homo sapien
tttatgctacaggaagtgcagacgg

SEQ ID NO: 3949528 - DNA, 25 bp, Homo sapien
tatgctacaggaagtgcagacggct

SEQ ID NO: 3949529 - DNA, 25 bp, Homo sapien
aatgttaggatccctttacctctgt

SEQ ID NO: 3949530 - DNA, 25 bp, Homo sapien
aaatgttaggatccctttacctctg

SEQ ID NO: 3949531 - DNA, 25 bp, Homo sapien
atgttaggatccctttacctctgtg

SEQ ID NO: 3949532 - DNA, 25 bp, Homo sapien
tccaaatttcttagaaggcatcttc

SEQ ID NO: 3949533 - DNA, 25 bp, Homo sapien
tcaaagcccagtgtgtagacaggga

SEQ ID NO: 3949534 - DNA, 25 bp, Homo sapien
cttctctggattggcgcggttttgg

SEQ ID NO: 3949535 - DNA, 25 bp, Homo sapien
tggcgcggttttggcagctgatacc

SEQ ID NO: 3949536 - DNA, 25 bp, Homo sapien
cgtagtgttgaggacgtccacgctc

SEQ ID NO: 3949537 - DNA, 25 bp, Homo sapien
acgctcttgcggctggaacgcacca

SEQ ID NO: 3949538 - DNA, 25 bp, Homo sapien
tagagggattgggtctggcgactgc

SEQ ID NO: 3949539 - DNA, 25 bp, Homo sapien
cgactgcgtcgtggcgtagtgttga

SEQ ID NO: 3949540 - DNA, 25 bp, Homo sapien
catgtgcacagatttacagagctgc

SEQ ID NO: 3949541 - DNA, 25 bp, Homo sapien
ggagcagcttggcacggaccttttt

SEQ ID NO: 3949542 - DNA, 25 bp, Homo sapien
cagagcgtcctagcctgatacaggg

SEQ ID NO: 3949543 - DNA, 25 bp, Homo sapien
tgtacatgcacagctcagagcgtcc

SEQ ID NO: 3949544 - DNA, 25 bp, Homo sapien
agaaaactcggctgtcggcgcgcct

SEQ ID NO: 3949545 - DNA, 25 bp, Homo sapien
gaactttcccgcttcagcggcggcg

SEQ ID NO: 3949546 - DNA, 25 bp, Homo sapien
cgcctgcgcactcttggcgcgaggg

SEQ ID NO: 3949547 - DNA, 25 bp, Homo sapien
aacgaccacgacgtctggagagagg

SEQ ID NO: 3949548 - DNA, 25 bp, Homo sapien
tcacggagatcgaaatgcaaggcgc

SEQ ID NO: 3949549 - DNA, 25 bp, Homo sapien
ttcttccgcgtcatcgtcatcacgg

SEQ ID NO: 3949550 - DNA, 25 bp, Homo sapien
atcgaaatgcaaggcgccgggcccg

SEQ ID NO: 3949551 - DNA, 25 bp, Homo sapien
gaagcggttgttgactcggacgccc

SEQ ID NO: 3949552 - DNA, 25 bp, Homo sapien
caaactgttacttccctgtgccaga

SEQ ID NO: 3949553 - DNA, 25 bp, Homo sapien
ccagggcttaggagaaaacgtcaca

SEQ ID NO: 3949554 - DNA, 25 bp, Homo sapien
agttacagacggaggccagggctta

SEQ ID NO: 3949555 - DNA, 25 bp, Homo sapien
tgccagaaacgagctgccggagatg

SEQ ID NO: 3949556 - DNA, 25 bp, Homo sapien
ggacttgatgcgagaagggcagtca

SEQ ID NO: 3949557 - DNA, 25 bp, Homo sapien
ctttcagtaactgctgtgaatctag

SEQ ID NO: 3949558 - DNA, 25 bp, Homo sapien
gggaccactaaaggtggacttgatg

SEQ ID NO: 3949559 - DNA, 25 bp, Homo sapien
tttcagtaactgctgtgaatctagc

SEQ ID NO: 3949560 - DNA, 25 bp, Homo sapien
tctttaggataaagctcgatcagca

SEQ ID NO: 3949561 - DNA, 25 bp, Homo sapien
cattagttttagggtctcaaatggg

SEQ ID NO: 3949562 - DNA, 25 bp, Homo sapien
caaggttcttgtccacgactgatct

SEQ ID NO: 3949563 - DNA, 25 bp, Homo sapien
gcatttcagttaataaccaggaagg

SEQ ID NO: 3949564 - DNA, 25 bp, Homo sapien
cgtctgtgtacacgaacagcacgta

SEQ ID NO: 3949565 - DNA, 25 bp, Homo sapien
agcacgggtgacaggcctagttttg

SEQ ID NO: 3949566 - DNA, 25 bp, Homo sapien
tggtgatgacacatgatttgctgca

SEQ ID NO: 3949567 - DNA, 25 bp, Homo sapien
tcttcagtgaagttttggtgatgac

SEQ ID NO: 3949568 - DNA, 25 bp, Homo sapien
gagcctgtctgtgtacacggacaac

SEQ ID NO: 3949569 - DNA, 25 bp, Homo sapien
caggagcctgtctgtgtacacggac

SEQ ID NO: 3949570 - DNA, 25 bp, Homo sapien
gcctgtctgtgtacacggacaacac

SEQ ID NO: 3949571 - DNA, 25 bp, Homo sapien
ggagcctgtctgtgtacacggacaa

SEQ ID NO: 3949572 - DNA, 25 bp, Homo sapien
ggtgattctcatggtgatgcctcct

SEQ ID NO: 3949573 - DNA, 25 bp, Homo sapien
tgatggtgattctcatggtgatgcc

SEQ ID NO: 3949574 - DNA, 25 bp, Homo sapien
ctaggcatgggccggctgccttgca

SEQ ID NO: 3949575 - DNA, 25 bp, Homo sapien
catgatggtgattctcatggtgatg

SEQ ID NO: 3949576 - DNA, 25 bp, Homo sapien
gagatatgaatagtgagatgtgaac

SEQ ID NO: 3949577 - DNA, 25 bp, Homo sapien
catgctgagatatgaatagtgagat

SEQ ID NO: 3949578 - DNA, 25 bp, Homo sapien
aatagtgagatgtgaacgggcttgc

SEQ ID NO: 3949579 - DNA, 25 bp, Homo sapien
agtgtgaacgctcatgctgagatat

SEQ ID NO: 3949580 - DNA, 25 bp, Homo sapien
tctgtgagcgcacagccagacctct

SEQ ID NO: 3949581 - DNA, 25 bp, Homo sapien
tgtctcggtgtcatctccatccgtc

SEQ ID NO: 3949582 - DNA, 25 bp, Homo sapien
cctggtgccacagcgtctgtgagcg

SEQ ID NO: 3949583 - DNA, 25 bp, Homo sapien
gggtcatcctcaagatcgtcaatgt

SEQ ID NO: 3949584 - DNA, 25 bp, Homo sapien
ttcttcttccggagtttgccacttg

SEQ ID NO: 3949585 - DNA, 25 bp, Homo sapien
tccggagtttgccacttgcatgaga

SEQ ID NO: 3949586 - DNA, 25 bp, Homo sapien
gcttctcccgtgctgcttttcttgt

SEQ ID NO: 3949587 - DNA, 25 bp, Homo sapien
gatgcttctcccgtgctgcttttct

SEQ ID NO: 3949588 - DNA, 25 bp, Homo sapien
tcctctctaggatgcgatcgatatc

SEQ ID NO: 3949589 - DNA, 25 bp, Homo sapien
ccgggacggttcaacccagtgctgt

SEQ ID NO: 3949590 - DNA, 25 bp, Homo sapien
gatcgatatcttctagtccgttttc

SEQ ID NO: 3949591 - DNA, 25 bp, Homo sapien
tgtgctccacgtagagaacgtgctt

SEQ ID NO: 3949592 - DNA, 25 bp, Homo sapien
tcctcccacgaagtctctgtggcag

SEQ ID NO: 3949593 - DNA, 25 bp, Homo sapien
tttcctcccacgaagtctctgtggc

SEQ ID NO: 3949594 - DNA, 25 bp, Homo sapien
ttcctcccacgaagtctctgtggca

SEQ ID NO: 3949595 - DNA, 25 bp, Homo sapien
ctcccacgaagtctctgtggcagcc

SEQ ID NO: 3949596 - DNA, 25 bp, Homo sapien
ttatgttctaagacgattccaaaag

SEQ ID NO: 3949597 - DNA, 25 bp, Homo sapien
gaaattatgttctaagacgattcca

SEQ ID NO: 3949598 - DNA, 25 bp, Homo sapien
tctaagacgattccaaaagcttcag

SEQ ID NO: 3949599 - DNA, 25 bp, Homo sapien
catgaaattatgttctaagacgatt

SEQ ID NO: 3949600 - DNA, 25 bp, Homo sapien
cttttcagttctgtgtctggattca

SEQ ID NO: 3949601 - DNA, 25 bp, Homo sapien
tttcagttctgtgtctggattcaag

SEQ ID NO: 3949602 - DNA, 25 bp, Homo sapien
cagttctgtgtctggattcaagtgt

SEQ ID NO: 3949603 - DNA, 25 bp, Homo sapien
tcagttctgtgtctggattcaagtg

SEQ ID NO: 3949604 - DNA, 25 bp, Homo sapien
caggattgcccgggcaccaaaatac

SEQ ID NO: 3949605 - DNA, 25 bp, Homo sapien
cccaggattgcccgggcaccaaaat

SEQ ID NO: 3949606 - DNA, 25 bp, Homo sapien
ccaggattgcccgggcaccaaaata

SEQ ID NO: 3949607 - DNA, 25 bp, Homo sapien
aaagaactcagacgtgcaaacccag

SEQ ID NO: 3949608 - DNA, 25 bp, Homo sapien
tccaataaaacaggatgtgtctggc

SEQ ID NO: 3949609 - DNA, 25 bp, Homo sapien
aacccagggcatgttatagaccagc

SEQ ID NO: 3949610 - DNA, 25 bp, Homo sapien
aataaattagcggtggcatgtgccg

SEQ ID NO: 3949611 - DNA, 25 bp, Homo sapien
acgtaactctactgaaggcactggc

SEQ ID NO: 3949612 - DNA, 25 bp, Homo sapien
catctggacacatgctaccattggg

SEQ ID NO: 3949613 - DNA, 25 bp, Homo sapien
cctgggtataccatggtgcagaaac

SEQ ID NO: 3949614 - DNA, 25 bp, Homo sapien
ggacctgggcagacactcagtgtga

SEQ ID NO: 3949615 - DNA, 25 bp, Homo sapien
gcgtgtggggaccaaggcttggctg

SEQ ID NO: 3949616 - DNA, 25 bp, Homo sapien
ggacacaggtacagctttacttcct

SEQ ID NO: 3949617 - DNA, 25 bp, Homo sapien
ccctgcacgggctgtggaagcaaaa

SEQ ID NO: 3949618 - DNA, 25 bp, Homo sapien
tgatccctgcacgggctgtggaagc

SEQ ID NO: 3949619 - DNA, 25 bp, Homo sapien
gtacacacgttgtctctgccgtggc

SEQ ID NO: 3949620 - DNA, 25 bp, Homo sapien
gcacttggggtacacacgttgtctc

SEQ ID NO: 3949621 - DNA, 25 bp, Homo sapien
gccatgtgcacttggggtacacacg

SEQ ID NO: 3949622 - DNA, 25 bp, Homo sapien
ctgtagcggggccaggtgcttttag

SEQ ID NO: 3949623 - DNA, 25 bp, Homo sapien
ttgctgtaccggggccagtgcacag

SEQ ID NO: 3949624 - DNA, 25 bp, Homo sapien
ggccagtgcacagacaacgcccccc

SEQ ID NO: 3949625 - DNA, 25 bp, Homo sapien
agtgcacagacaacgccccccaacc

SEQ ID NO: 3949626 - DNA, 25 bp, Homo sapien
gtttgctgtaccggggccagtgcac

SEQ ID NO: 3949627 - DNA, 25 bp, Homo sapien
ctcaaacgcaaagaaggagaggcct

SEQ ID NO: 3949628 - DNA, 25 bp, Homo sapien
cacgatgttgttcggctccatagac

SEQ ID NO: 3949629 - DNA, 25 bp, Homo sapien
tcactgtgctcaaacgcaaagaagg

SEQ ID NO: 3949630 - DNA, 25 bp, Homo sapien
gttgttcggctccatagactccacg

SEQ ID NO: 3949631 - DNA, 25 bp, Homo sapien
tgtcaggggctgcagggaccacgca

SEQ ID NO: 3949632 - DNA, 25 bp, Homo sapien
gtcaggggctgcagggaccacgcac

SEQ ID NO: 3949633 - DNA, 25 bp, Homo sapien
tcctgtcaggggctgcagggaccac

SEQ ID NO: 3949634 - DNA, 25 bp, Homo sapien
ctgtcaggggctgcagggaccacgc

SEQ ID NO: 3949635 - DNA, 25 bp, Homo sapien
ctgtacggggactgtccaggtccgg

SEQ ID NO: 3949636 - DNA, 25 bp, Homo sapien
ttgcaaggggagctgtccggcggct

SEQ ID NO: 3949637 - DNA, 25 bp, Homo sapien
gctgcatgagggctgtccagggttg

SEQ ID NO: 3949638 - DNA, 25 bp, Homo sapien
agatgacggggagctctgcggaggc

SEQ ID NO: 3949639 - DNA, 25 bp, Homo sapien
gcaggagtgagtcaacgtggtaagg

SEQ ID NO: 3949640 - DNA, 25 bp, Homo sapien
aggagtgagtcaacgtggtaagggc

SEQ ID NO: 3949641 - DNA, 25 bp, Homo sapien
gtgagtcaacgtggtaagggctcgt

SEQ ID NO: 3949642 - DNA, 25 bp, Homo sapien
gagtgagtcaacgtggtaagggctc

SEQ ID NO: 3949643 - DNA, 25 bp, Homo sapien
tgatcctcttgaaagcggcaggcat

SEQ ID NO: 3949644 - DNA, 25 bp, Homo sapien
acgaggtctcgagccatctcctgat

SEQ ID NO: 3949645 - DNA, 25 bp, Homo sapien
ctacgaggtctcgagccatctcctg

SEQ ID NO: 3949646 - DNA, 25 bp, Homo sapien
tcttgaaagcggcaggcatcgctga

SEQ ID NO: 3949647 - DNA, 25 bp, Homo sapien
tctgcggtaatccagccggcaggcc

SEQ ID NO: 3949648 - DNA, 25 bp, Homo sapien
ctgttctcgggtctgcggtaatcca

SEQ ID NO: 3949649 - DNA, 25 bp, Homo sapien
cattccatgctgtacagcgctctct

SEQ ID NO: 3949650 - DNA, 25 bp, Homo sapien
gggggtggaacgcacattccatgct

SEQ ID NO: 3949651 - DNA, 25 bp, Homo sapien
cacagtagcatcaggcatgtccaca

SEQ ID NO: 3949652 - DNA, 25 bp, Homo sapien
cccagcctcactcgcaggagaaggg

SEQ ID NO: 3949653 - DNA, 25 bp, Homo sapien
ctctatccttaagcccagagagagg

SEQ ID NO: 3949654 - DNA, 25 bp, Homo sapien
caaaggtaaacctgggctgagacaa

SEQ ID NO: 3949655 - DNA, 25 bp, Homo sapien
agggtaggagcggatcccacactgc

SEQ ID NO: 3949656 - DNA, 25 bp, Homo sapien
ctgagagggtaggagcggatcccac

SEQ ID NO: 3949657 - DNA, 25 bp, Homo sapien
ctgcagacaacccagggcggccaga

SEQ ID NO: 3949658 - DNA, 25 bp, Homo sapien
aggagcggatcccacactgcagaca

SEQ ID NO: 3949659 - DNA, 25 bp, Homo sapien
gatgagcttgcagtactccagcgcc

SEQ ID NO: 3949660 - DNA, 25 bp, Homo sapien
ctcaggatgagcttgcagtactcca

SEQ ID NO: 3949661 - DNA, 25 bp, Homo sapien
gagcttgcagtactccagcgccgtg

SEQ ID NO: 3949662 - DNA, 25 bp, Homo sapien
ttgcagtactccagcgccgtgcgcg

SEQ ID NO: 3949663 - DNA, 25 bp, Homo sapien
gggagcgtggacgggcttggccctg

SEQ ID NO: 3949664 - DNA, 25 bp, Homo sapien
acaggggcatcgtcaggctgagagt

SEQ ID NO: 3949665 - DNA, 25 bp, Homo sapien
ggcatcgtcaggctgagagtgggcc

SEQ ID NO: 3949666 - DNA, 25 bp, Homo sapien
gaacaggggcatcgtcaggctgaga

SEQ ID NO: 3949667 - DNA, 25 bp, Homo sapien
gcggatcaggtactcgtagttccgg

SEQ ID NO: 3949668 - DNA, 25 bp, Homo sapien
gatcaggtactcgtagttccgggcc

SEQ ID NO: 3949669 - DNA, 25 bp, Homo sapien
cgtagttccgggcccgcaaggccag

SEQ ID NO: 3949670 - DNA, 25 bp, Homo sapien
aagaggcggatcaggtactcgtagt

SEQ ID NO: 3949671 - DNA, 25 bp, Homo sapien
gcaggaggacgtggttctgccctca

SEQ ID NO: 3949672 - DNA, 25 bp, Homo sapien
taggaaaaccacattccactccgta

SEQ ID NO: 3949673 - DNA, 25 bp, Homo sapien
tagaggcggcaagggagacaaacaa

SEQ ID NO: 3949674 - DNA, 25 bp, Homo sapien
ggttctgccctcagacgattatcgt

SEQ ID NO: 3949675 - DNA, 25 bp, Homo sapien
gtacacacgtatgaggattctgaca

SEQ ID NO: 3949676 - DNA, 25 bp, Homo sapien
tctgacataaggctgctgtactgtc

SEQ ID NO: 3949677 - DNA, 25 bp, Homo sapien
cacacgtttgagcatgtgtacacac

SEQ ID NO: 3949678 - DNA, 25 bp, Homo sapien
gagctcgggagttgtcggtttttca

SEQ ID NO: 3949679 - DNA, 25 bp, Homo sapien
cgaaattatcattccaacacgtgtc

SEQ ID NO: 3949680 - DNA, 25 bp, Homo sapien
tcccatggaacaggacagacgtgct

SEQ ID NO: 3949681 - DNA, 25 bp, Homo sapien
gggacagagctcaagtctctcctgc

SEQ ID NO: 3949682 - DNA, 25 bp, Homo sapien
gacaaaacaggtgagattaatacgt

SEQ ID NO: 3949683 - DNA, 25 bp, Homo sapien
tattgtagacatgtgactcactgca

SEQ ID NO: 3949684 - DNA, 25 bp, Homo sapien
ggatcacagactcacagttttgtga

SEQ ID NO: 3949685 - DNA, 25 bp, Homo sapien
tgaggtttccctgcacctacatttt

SEQ ID NO: 3949686 - DNA, 25 bp, Homo sapien
gggtgagacttcctggccaactatg

SEQ ID NO: 3949687 - DNA, 25 bp, Homo sapien
caggaaatacgccagtggaacagag

SEQ ID NO: 3949688 - DNA, 25 bp, Homo sapien
atacgccagtggaacagagaaggca

SEQ ID NO: 3949689 - DNA, 25 bp, Homo sapien
aacagagaaggcaaaattagggagc

SEQ ID NO: 3949690 - DNA, 25 bp, Homo sapien
cagagaaggcaaaattagggagctg

SEQ ID NO: 3949691 - DNA, 25 bp, Homo sapien
gtcttaaggagggatttcaccctca

SEQ ID NO: 3949692 - DNA, 25 bp, Homo sapien
tcttaaggagggatttcaccctcac

SEQ ID NO: 3949693 - DNA, 25 bp, Homo sapien
agccgcgtttccagacacggctgca

SEQ ID NO: 3949694 - DNA, 25 bp, Homo sapien
tgtgacacagcagcacagctctgcc

SEQ ID NO: 3949695 - DNA, 25 bp, Homo sapien
tcaagggaggtgctgacgctacagc

SEQ ID NO: 3949696 - DNA, 25 bp, Homo sapien
tggtggagcatatggccagctgcat

SEQ ID NO: 3949697 - DNA, 25 bp, Homo sapien
gcagtaagggacacagcgaggtcct

SEQ ID NO: 3949698 - DNA, 25 bp, Homo sapien
tgtcacagacacagctgttctaagg

SEQ ID NO: 3949699 - DNA, 25 bp, Homo sapien
gcttgcttccgggtggtattctgag

SEQ ID NO: 3949700 - DNA, 25 bp, Homo sapien
tgcatccaagggaagactcacccac

SEQ ID NO: 3949701 - DNA, 25 bp, Homo sapien
cattgggtccaaagaagcggtgact

SEQ ID NO: 3949702 - DNA, 25 bp, Homo sapien
cgcacactgcaagactcgagcaggg

SEQ ID NO: 3949703 - DNA, 25 bp, Homo sapien
tttcagcattgggtccaaagaagcg

SEQ ID NO: 3949704 - DNA, 25 bp, Homo sapien
gcggtgactggaaacgctggcgtcg

SEQ ID NO: 3949705 - DNA, 25 bp, Homo sapien
tatgagcctcgtttttaagctggag

SEQ ID NO: 3949706 - DNA, 25 bp, Homo sapien
cagagccgtcccatgtcaaatgaca

SEQ ID NO: 3949707 - DNA, 25 bp, Homo sapien
taggaagcaggactgacgtcacaga

SEQ ID NO: 3949708 - DNA, 25 bp, Homo sapien
gatgagtgaaaatggctcccaggct

SEQ ID NO: 3949709 - DNA, 25 bp, Homo sapien
gaacctcgtggacgttctcctccag

SEQ ID NO: 3949710 - DNA, 25 bp, Homo sapien
tgggtccccggcgtccactgcttgc

SEQ ID NO: 3949711 - DNA, 25 bp, Homo sapien
cactgcttgcagaacctcgtggacg

SEQ ID NO: 3949712 - DNA, 25 bp, Homo sapien
catggtggcgggctctttccagaga

SEQ ID NO: 3949713 - DNA, 25 bp, Homo sapien
gcagggcttgtgtcaacccctagct

SEQ ID NO: 3949714 - DNA, 25 bp, Homo sapien
agggcttgtgtcaacccctagctca

SEQ ID NO: 3949715 - DNA, 25 bp, Homo sapien
gggcttgtgtcaacccctagctcac

SEQ ID NO: 3949716 - DNA, 25 bp, Homo sapien
ggcagggcttgtgtcaacccctagc

SEQ ID NO: 3949717 - DNA, 25 bp, Homo sapien
cacatggcggtggatattcctgggt

SEQ ID NO: 3949718 - DNA, 25 bp, Homo sapien
tctcagagaggatcacatggcggtg

SEQ ID NO: 3949719 - DNA, 25 bp, Homo sapien
gcgacggcttccttgatctcagaga

SEQ ID NO: 3949720 - DNA, 25 bp, Homo sapien
gtgcacgctggtagagcaccttccg

SEQ ID NO: 3949721 - DNA, 25 bp, Homo sapien
cctgcatgtggaccgcccggagcag

SEQ ID NO: 3949722 - DNA, 25 bp, Homo sapien
catgtgaccggcttacacagagctc

SEQ ID NO: 3949723 - DNA, 25 bp, Homo sapien
ggcttacacagagctcccatttcag

SEQ ID NO: 3949724 - DNA, 25 bp, Homo sapien
aagggacgtgcatgtgaccggctta

SEQ ID NO: 3949725 - DNA, 25 bp, Homo sapien
ggaaaggaggagccctctgcactag

SEQ ID NO: 3949726 - DNA, 25 bp, Homo sapien
caggaaaggaggagccctctgcact

SEQ ID NO: 3949727 - DNA, 25 bp, Homo sapien
aggaaaggaggagccctctgcacta

SEQ ID NO: 3949728 - DNA, 25 bp, Homo sapien
gaaaggaggagccctctgcactaga

SEQ ID NO: 3949729 - DNA, 25 bp, Homo sapien
tcacgggagtcgagatgaacctgca

SEQ ID NO: 3949730 - DNA, 25 bp, Homo sapien
aacgaagatgctacagatgctgcca

SEQ ID NO: 3949731 - DNA, 25 bp, Homo sapien
tttgagacagaaacggcacctccag

SEQ ID NO: 3949732 - DNA, 25 bp, Homo sapien
cacgtgctgccactctactgaggag

SEQ ID NO: 3949733 - DNA, 25 bp, Homo sapien
tgtgtccgaaggaggcagaggatca

SEQ ID NO: 3949734 - DNA, 25 bp, Homo sapien
ccatcacagactgcgtggtcacgtc

SEQ ID NO: 3949735 - DNA, 25 bp, Homo sapien
aggcagaggatcaaaccccatcaca

SEQ ID NO: 3949736 - DNA, 25 bp, Homo sapien
gagtagattgtgtccgaaggaggca

SEQ ID NO: 3949737 - DNA, 25 bp, Homo sapien
aaagaacgtggcctgcaaacgcaga

SEQ ID NO: 3949738 - DNA, 25 bp, Homo sapien
gctgtgacccccaaataacactgtt

SEQ ID NO: 3949739 - DNA, 25 bp, Homo sapien
gcaagcgcttgtacattcggtggag

SEQ ID NO: 3949740 - DNA, 25 bp, Homo sapien
cagaggccgacacgcaagcgcttgt

SEQ ID NO: 3949741 - DNA, 25 bp, Homo sapien
tccagggcctgcgttaagcggagac

SEQ ID NO: 3949742 - DNA, 25 bp, Homo sapien
gaaccgcgattcctcaatgctgcaa

SEQ ID NO: 3949743 - DNA, 25 bp, Homo sapien
gcaagtactttccagcccagaagga

SEQ ID NO: 3949744 - DNA, 25 bp, Homo sapien
ggataatcacgacgaccgctgtgcg

SEQ ID NO: 3949745 - DNA, 25 bp, Homo sapien
cgggaacaggatgagggagaccaac

SEQ ID NO: 3949746 - DNA, 25 bp, Homo sapien
cagcgggaacaggatgagggagacc

SEQ ID NO: 3949747 - DNA, 25 bp, Homo sapien
agcgggaacaggatgagggagacca

SEQ ID NO: 3949748 - DNA, 25 bp, Homo sapien
gcgggaacaggatgagggagaccaa

SEQ ID NO: 3949749 - DNA, 25 bp, Homo sapien
cagctgcctccctcgcagggacacg

SEQ ID NO: 3949750 - DNA, 25 bp, Homo sapien
tgcctccctcgcagggacacggagg

SEQ ID NO: 3949751 - DNA, 25 bp, Homo sapien
aggcttcctcatcagcttagggtgg

SEQ ID NO: 3949752 - DNA, 25 bp, Homo sapien
ggcttcctcatcagcttagggtggg

SEQ ID NO: 3949753 - DNA, 25 bp, Homo sapien
agaaaagtcagaaacgacactgaac

SEQ ID NO: 3949754 - DNA, 25 bp, Homo sapien
gtcagaaacgacactgaactgagac

SEQ ID NO: 3949755 - DNA, 25 bp, Homo sapien
tgagactcgtgggacccaacccggc

SEQ ID NO: 3949756 - DNA, 25 bp, Homo sapien
actgaactgagactcgtgggaccca

SEQ ID NO: 3949757 - DNA, 25 bp, Homo sapien
tttggcaacagtgaccggaagaaga

SEQ ID NO: 3949758 - DNA, 25 bp, Homo sapien
ctccatggtatagtttggcaacagt

SEQ ID NO: 3949759 - DNA, 25 bp, Homo sapien
tagtttggcaacagtgaccggaaga

SEQ ID NO: 3949760 - DNA, 25 bp, Homo sapien
ggtatagtttggcaacagtgaccgg

SEQ ID NO: 3949761 - DNA, 25 bp, Homo sapien
actggaatggatatgcccgcaccca

SEQ ID NO: 3949762 - DNA, 25 bp, Homo sapien
aatgccgtgtctagaccaagccagg

SEQ ID NO: 3949763 - DNA, 25 bp, Homo sapien
acagagtgggatcaagccggctgac

SEQ ID NO: 3949764 - DNA, 25 bp, Homo sapien
gaagctctcaaaaccaaatgccgtg

SEQ ID NO: 3949765 - DNA, 25 bp, Homo sapien
atcatgtcgcgcacagccagcatca

SEQ ID NO: 3949766 - DNA, 25 bp, Homo sapien
tcaggccctggttgcggttcagacc

SEQ ID NO: 3949767 - DNA, 25 bp, Homo sapien
tgttcaggccctggttgcggttcag

SEQ ID NO: 3949768 - DNA, 25 bp, Homo sapien
caggtcgttgaggtggaagttggcc

SEQ ID NO: 3949769 - DNA, 25 bp, Homo sapien
tgattcgaatccgagggcatgggac

SEQ ID NO: 3949770 - DNA, 25 bp, Homo sapien
caaggcacgcagctctgttgacgaa

SEQ ID NO: 3949771 - DNA, 25 bp, Homo sapien
tacggcttttcggtcacctctgcgg

SEQ ID NO: 3949772 - DNA, 25 bp, Homo sapien
ttcaacagatagtggcatccagcca

SEQ ID NO: 3949773 - DNA, 25 bp, Homo sapien
ttctggctcagtggaaaagggcccg

SEQ ID NO: 3949774 - DNA, 25 bp, Homo sapien
gcaagcagggtttctcgtgggctca

SEQ ID NO: 3949775 - DNA, 25 bp, Homo sapien
taggctcagctgcaggtcatgacat

SEQ ID NO: 3949776 - DNA, 25 bp, Homo sapien
cacggtcattggaagtaggctcagc

SEQ ID NO: 3949777 - DNA, 25 bp, Homo sapien
aaatgtttacccacacacgtatgcg

SEQ ID NO: 3949778 - DNA, 25 bp, Homo sapien
tctgctcaatgtgtgcccgagggct

SEQ ID NO: 3949779 - DNA, 25 bp, Homo sapien
accgtggtgggctccagtacagctc

SEQ ID NO: 3949780 - DNA, 25 bp, Homo sapien
cgagggctgcgagaggtaaaacatc

SEQ ID NO: 3949781 - DNA, 25 bp, Homo sapien
tttattcagtgtctggcatccaggg

SEQ ID NO: 3949782 - DNA, 25 bp, Homo sapien
cagcgacccacgaggagaatgaaga

SEQ ID NO: 3949783 - DNA, 25 bp, Homo sapien
cagacgtcttcctgcgtttattcag

SEQ ID NO: 3949784 - DNA, 25 bp, Homo sapien
caggtgtttctggaccagcgaccca

SEQ ID NO: 3949785 - DNA, 25 bp, Homo sapien
taccgtctgatggacacaggtgcgt

SEQ ID NO: 3949786 - DNA, 25 bp, Homo sapien
cacaatgaggcctttgagacggacg

SEQ ID NO: 3949787 - DNA, 25 bp, Homo sapien
gaaacactgcatgctgagtggccgg

SEQ ID NO: 3949788 - DNA, 25 bp, Homo sapien
tatgcaggttgacggatgacagacc

SEQ ID NO: 3949789 - DNA, 25 bp, Homo sapien
aaaaaattattattgccgggcacag

SEQ ID NO: 3949790 - DNA, 25 bp, Homo sapien
tttttattattgtcagccatggtgg

SEQ ID NO: 3949791 - DNA, 25 bp, Homo sapien
ttacaaccgcattttacaatttata

SEQ ID NO: 3949792 - DNA, 25 bp, Homo sapien
gtcaggataatagcttgaacatgag

SEQ ID NO: 3949793 - DNA, 25 bp, Homo sapien
agccgtcgcacgtggtgctccgcag

SEQ ID NO: 3949794 - DNA, 25 bp, Homo sapien
gttcacagcagtcgggcgtggcccc

SEQ ID NO: 3949795 - DNA, 25 bp, Homo sapien
gcgccatttccgctgcggaaggcac

SEQ ID NO: 3949796 - DNA, 25 bp, Homo sapien
tccgcaggccgttcacagcagtcgg

SEQ ID NO: 3949797 - DNA, 25 bp, Homo sapien
gaaagcgtccaatgctagtgagccc

SEQ ID NO: 3949798 - DNA, 25 bp, Homo sapien
ggacatttcgacacctctggaccgt

SEQ ID NO: 3949799 - DNA, 25 bp, Homo sapien
aactcagctgtcaacgttcacggca

SEQ ID NO: 3949800 - DNA, 25 bp, Homo sapien
cctgcaggagtttgcacatcgcgcg

SEQ ID NO: 3949801 - DNA, 25 bp, Homo sapien
ggaagagcccgtcagagatggacac

SEQ ID NO: 3949802 - DNA, 25 bp, Homo sapien
aagttcttgaagatgcagccgcacg

SEQ ID NO: 3949803 - DNA, 25 bp, Homo sapien
gagctgcaggtgatcacgtcaatga

SEQ ID NO: 3949804 - DNA, 25 bp, Homo sapien
agcgtgctgaagacgacactggcca

SEQ ID NO: 3949805 - DNA, 25 bp, Homo sapien
aggtaaggaactgcccagggtcaca

SEQ ID NO: 3949806 - DNA, 25 bp, Homo sapien
tgcccagcacacttaaagccgcgtg

SEQ ID NO: 3949807 - DNA, 25 bp, Homo sapien
tcattggagcagacggagtgtccca

SEQ ID NO: 3949808 - DNA, 25 bp, Homo sapien
aagggtccgcgcttcaacactttca

SEQ ID NO: 3949809 - DNA, 25 bp, Homo sapien
ctgtgggagtagctcttggcacaca

SEQ ID NO: 3949810 - DNA, 25 bp, Homo sapien
tcccagctgacgagggcacggtcct

SEQ ID NO: 3949811 - DNA, 25 bp, Homo sapien
ctgctgtgggagtagctcttggcac

SEQ ID NO: 3949812 - DNA, 25 bp, Homo sapien
cagagacttcacatcccagctgacg

SEQ ID NO: 3949813 - DNA, 25 bp, Homo sapien
ctggtcccttggcctgaggcaggga

SEQ ID NO: 3949814 - DNA, 25 bp, Homo sapien
tggtcccttggcctgaggcagggat

SEQ ID NO: 3949815 - DNA, 25 bp, Homo sapien
cccttggcctgaggcagggatttca

SEQ ID NO: 3949816 - DNA, 25 bp, Homo sapien
gtcccttggcctgaggcagggattt

SEQ ID NO: 3949817 - DNA, 25 bp, Homo sapien
tctgcttgggcgactgctgcaggaa

SEQ ID NO: 3949818 - DNA, 25 bp, Homo sapien
agggctcagccccataccactaggg

SEQ ID NO: 3949819 - DNA, 25 bp, Homo sapien
cactgagtcaggcatttgccagggc

SEQ ID NO: 3949820 - DNA, 25 bp, Homo sapien
tagaaccggccctcaggagggctca

SEQ ID NO: 3949821 - DNA, 25 bp, Homo sapien
cctgcgtaggagtcggctgatggcc

SEQ ID NO: 3949822 - DNA, 25 bp, Homo sapien
gactgagcctgcgtaggagtcggct

SEQ ID NO: 3949823 - DNA, 25 bp, Homo sapien
taggagtcggctgatggccctgcag

SEQ ID NO: 3949824 - DNA, 25 bp, Homo sapien
tgagcctgcgtaggagtcggctgat

SEQ ID NO: 3949825 - DNA, 25 bp, Homo sapien
ttttgttctcaagagatgcccctcc

SEQ ID NO: 3949826 - DNA, 25 bp, Homo sapien
ggtggcgtggacctgtacctgtctc

SEQ ID NO: 3949827 - DNA, 25 bp, Homo sapien
cgcctgtgtccggtctgtgtgcaca

SEQ ID NO: 3949828 - DNA, 25 bp, Homo sapien
tctccacgagggaagaagttttgca

SEQ ID NO: 3949829 - DNA, 25 bp, Homo sapien
tctctgaggtcggagactgcgtgca

SEQ ID NO: 3949830 - DNA, 25 bp, Homo sapien
tcactctctgaggtcggagactgcg

SEQ ID NO: 3949831 - DNA, 25 bp, Homo sapien
tcgggggagcgactggagatgcgtt

SEQ ID NO: 3949832 - DNA, 25 bp, Homo sapien
ctcgggggagcgactggagatgcgt

SEQ ID NO: 3949833 - DNA, 25 bp, Homo sapien
tgggcgcgtctggcgggcggctgcg

SEQ ID NO: 3949834 - DNA, 25 bp, Homo sapien
gggcgcgtctggcgggcggctgcgg

SEQ ID NO: 3949835 - DNA, 25 bp, Homo sapien
ctgggcgcgtctggcgggcggctgc

SEQ ID NO: 3949836 - DNA, 25 bp, Homo sapien
cgcactggccggcctggatgtgcac

SEQ ID NO: 3949837 - DNA, 25 bp, Homo sapien
ggccccgatctggttgccgcactgg

SEQ ID NO: 3949838 - DNA, 25 bp, Homo sapien
ttgccgcactggccggcctggatgt

SEQ ID NO: 3949839 - DNA, 25 bp, Homo sapien
ctggttgccgcactggccggcctgg

SEQ ID NO: 3949840 - DNA, 25 bp, Homo sapien
tagatcatgccagtccaggcgacag

SEQ ID NO: 3949841 - DNA, 25 bp, Homo sapien
atcatgccagtccaggcgacagagt

SEQ ID NO: 3949842 - DNA, 25 bp, Homo sapien
ctagatcatgccagtccaggcgaca

SEQ ID NO: 3949843 - DNA, 25 bp, Homo sapien
gatcatgccagtccaggcgacagag

SEQ ID NO: 3949844 - DNA, 25 bp, Homo sapien
tattgtaacgcggacagcatggaca

SEQ ID NO: 3949845 - DNA, 25 bp, Homo sapien
gactgttatcagaggtgcccgttca

SEQ ID NO: 3949846 - DNA, 25 bp, Homo sapien
cacgtgcacacggtagcttttcaaa

SEQ ID NO: 3949847 - DNA, 25 bp, Homo sapien
ggacatggaccacctctgctaacag

SEQ ID NO: 3949848 - DNA, 25 bp, Homo sapien
gagcagcggattcctccatgaaggg

SEQ ID NO: 3949849 - DNA, 25 bp, Homo sapien
caatgggcacgatgacaggaggtct

SEQ ID NO: 3949850 - DNA, 25 bp, Homo sapien
tcccaaatgggaagcgacttgcctg

SEQ ID NO: 3949851 - DNA, 25 bp, Homo sapien
gaactatctatctgtgtgcacacgg

SEQ ID NO: 3949852 - DNA, 25 bp, Homo sapien
tccagctgcaagtccgagtcgccca

SEQ ID NO: 3949853 - DNA, 25 bp, Homo sapien
agctgcaagtccgagtcgcccacgt

SEQ ID NO: 3949854 - DNA, 25 bp, Homo sapien
ctgcaagtccgagtcgcccacgtag

SEQ ID NO: 3949855 - DNA, 25 bp, Homo sapien
gcaagtccgagtcgcccacgtagtt

SEQ ID NO: 3949856 - DNA, 25 bp, Homo sapien
taagcctcactgtgtttaaggacgg

SEQ ID NO: 3949857 - DNA, 25 bp, Homo sapien
tcctaagagcctgtactctgaagtc

SEQ ID NO: 3949858 - DNA, 25 bp, Homo sapien
gattcagtcagacgtccaccagatg

SEQ ID NO: 3949859 - DNA, 25 bp, Homo sapien
cagagtcctggaccaaaggcaagct

SEQ ID NO: 3949860 - DNA, 25 bp, Homo sapien
tctgaattctgtgcccgcctgccat

SEQ ID NO: 3949861 - DNA, 25 bp, Homo sapien
cggtgattcgggtcacagagggcca

SEQ ID NO: 3949862 - DNA, 25 bp, Homo sapien
gagaggggctcggtgattcgggtca

SEQ ID NO: 3949863 - DNA, 25 bp, Homo sapien
aggggctcggtgattcgggtcacag

SEQ ID NO: 3949864 - DNA, 25 bp, Homo sapien
aatggctcgaggcacgtacttgtga

SEQ ID NO: 3949865 - DNA, 25 bp, Homo sapien
cctgagcggacactgtccatggttc

SEQ ID NO: 3949866 - DNA, 25 bp, Homo sapien
caaaggcccctgagcggacactgtc

SEQ ID NO: 3949867 - DNA, 25 bp, Homo sapien
ccaggtccaccagaatggctcgagg

SEQ ID NO: 3949868 - DNA, 25 bp, Homo sapien
ggtctgccatcagagcttggagcag

SEQ ID NO: 3949869 - DNA, 25 bp, Homo sapien
ctgggcttgcctgtgatggggtctg

SEQ ID NO: 3949870 - DNA, 25 bp, Homo sapien
tgtgatggggtctgccatcagagct

SEQ ID NO: 3949871 - DNA, 25 bp, Homo sapien
tgggcttgcctgtgatggggtctgc

SEQ ID NO: 3949872 - DNA, 25 bp, Homo sapien
tgaggagctgaccattccttgtttc

SEQ ID NO: 3949873 - DNA, 25 bp, Homo sapien
tttctcacagccgtccccgtccacc

SEQ ID NO: 3949874 - DNA, 25 bp, Homo sapien
aaatggagagatgagttcccaccat

SEQ ID NO: 3949875 - DNA, 25 bp, Homo sapien
cccaccattcaggatcatgtgagga

SEQ ID NO: 3949876 - DNA, 25 bp, Homo sapien
gaagtgaagcgaggccctcctgttt

SEQ ID NO: 3949877 - DNA, 25 bp, Homo sapien
gcatgggaacgtcctgatctcttga

SEQ ID NO: 3949878 - DNA, 25 bp, Homo sapien
tcctgtttctgtggcgcgtccacgg

SEQ ID NO: 3949879 - DNA, 25 bp, Homo sapien
atctcttgaccgcagcaaggcctcg

SEQ ID NO: 3949880 - DNA, 25 bp, Homo sapien
tccctgagccgatgctgctgagtgc

SEQ ID NO: 3949881 - DNA, 25 bp, Homo sapien
tcctgggtgaatggatcagccctcc

SEQ ID NO: 3949882 - DNA, 25 bp, Homo sapien
gcgagttggcatctaccagctggat

SEQ ID NO: 3949883 - DNA, 25 bp, Homo sapien
agcataccttccttccgactggcag

SEQ ID NO: 3949884 - DNA, 25 bp, Homo sapien
gggactctgcagtccagacctccag

SEQ ID NO: 3949885 - DNA, 25 bp, Homo sapien
ccagggactctgcagtccagacctc

SEQ ID NO: 3949886 - DNA, 25 bp, Homo sapien
gaagaggggtaagagacaggggcca

SEQ ID NO: 3949887 - DNA, 25 bp, Homo sapien
ggccagggactctgcagtccagacc

SEQ ID NO: 3949888 - DNA, 25 bp, Homo sapien
accgaatccaccagctccgccccct

SEQ ID NO: 3949889 - DNA, 25 bp, Homo sapien
cagctccgccccctccgtgtagtga

SEQ ID NO: 3949890 - DNA, 25 bp, Homo sapien
cgccccctccgtgtagtgacccttg

SEQ ID NO: 3949891 - DNA, 25 bp, Homo sapien
gaccgaatccaccagctccgccccc

SEQ ID NO: 3949892 - DNA, 25 bp, Homo sapien
tcgtcgtcttcgtacatctcgccct

SEQ ID NO: 3949893 - DNA, 25 bp, Homo sapien
agtcgcagttttcacactccttccg

SEQ ID NO: 3949894 - DNA, 25 bp, Homo sapien
gcaggcagtcgcagttttcacactc

SEQ ID NO: 3949895 - DNA, 25 bp, Homo sapien
cgggaagcgcaaggaggtggtgact

SEQ ID NO: 3949896 - DNA, 25 bp, Homo sapien
gtttagacactgctggcttcggccc

SEQ ID NO: 3949897 - DNA, 25 bp, Homo sapien
ctgcaataagacagagacaggagca

SEQ ID NO: 3949898 - DNA, 25 bp, Homo sapien
accgtaaaacgtcaggcctggagct

SEQ ID NO: 3949899 - DNA, 25 bp, Homo sapien
cataaatactgcaggagggcggcaa

SEQ ID NO: 3949900 - DNA, 25 bp, Homo sapien
tctgacagcaatagatttattaagt

SEQ ID NO: 3949901 - DNA, 25 bp, Homo sapien
tgccttccagatagcagtagcaaat

SEQ ID NO: 3949902 - DNA, 25 bp, Homo sapien
gccttccagatagcagtagcaaatt

SEQ ID NO: 3949903 - DNA, 25 bp, Homo sapien
tgaaagtataaaagtctcttgatat

SEQ ID NO: 3949904 - DNA, 25 bp, Homo sapien
tagtgaaagtataaaagtctcttga

SEQ ID NO: 3949905 - DNA, 25 bp, Homo sapien
cgtggcacgggagcagatgccaaat

SEQ ID NO: 3949906 - DNA, 25 bp, Homo sapien
cccgggccccaatgttctagaacat

SEQ ID NO: 3949907 - DNA, 25 bp, Homo sapien
ccaaattgcatgtgaggagcggcca

SEQ ID NO: 3949908 - DNA, 25 bp, Homo sapien
cccctagggtgatgccgtcggatat

SEQ ID NO: 3949909 - DNA, 25 bp, Homo sapien
taaaaagctatccattatcctcaaa

SEQ ID NO: 3949910 - DNA, 25 bp, Homo sapien
ataaaaagctatccattatcctcaa

SEQ ID NO: 3949911 - DNA, 25 bp, Homo sapien
aaaaagctatccattatcctcaaat

SEQ ID NO: 3949912 - DNA, 25 bp, Homo sapien
tgcagaaaggtgtggttttggctgc

SEQ ID NO: 3949913 - DNA, 25 bp, Homo sapien
gggcttggtccactttgttcagtgg

SEQ ID NO: 3949914 - DNA, 25 bp, Homo sapien
cttggtccactttgttcagtgggca

SEQ ID NO: 3949915 - DNA, 25 bp, Homo sapien
tggggcttggtccactttgttcagt

SEQ ID NO: 3949916 - DNA, 25 bp, Homo sapien
tcgcgagtctgcgagccccggagtc

SEQ ID NO: 3949917 - DNA, 25 bp, Homo sapien
ttcctctcatcgcagaaggcctgtg

SEQ ID NO: 3949918 - DNA, 25 bp, Homo sapien
gaacagagaaccaccgtgtgcaggt

SEQ ID NO: 3949919 - DNA, 25 bp, Homo sapien
gggctgcgcgtcctgggtttcctct

SEQ ID NO: 3949920 - DNA, 25 bp, Homo sapien
tccgcacgcagctggtgtggacgcc

SEQ ID NO: 3949921 - DNA, 25 bp, Homo sapien
agccgcccgggtgctccgcacgcag

SEQ ID NO: 3949922 - DNA, 25 bp, Homo sapien
tggtgtggacgccggagcagcggcg

SEQ ID NO: 3949923 - DNA, 25 bp, Homo sapien
ggtcccctgagccgcccgggtgctc

SEQ ID NO: 3949924 - DNA, 25 bp, Homo sapien
cacggaagcctggccgtgggttcgg

SEQ ID NO: 3949925 - DNA, 25 bp, Homo sapien
gccacggaagcctggccgtgggttc

SEQ ID NO: 3949926 - DNA, 25 bp, Homo sapien
ggaagcctggccgtgggttcggcac

SEQ ID NO: 3949927 - DNA, 25 bp, Homo sapien
cggaagcctggccgtgggttcggca

SEQ ID NO: 3949928 - DNA, 25 bp, Homo sapien
aggggctcgcagggacaggatggcc

SEQ ID NO: 3949929 - DNA, 25 bp, Homo sapien
caggggctcgcagggacaggatggc

SEQ ID NO: 3949930 - DNA, 25 bp, Homo sapien
ggggctcgcagggacaggatggcca

SEQ ID NO: 3949931 - DNA, 25 bp, Homo sapien
gtcaacagcgtcctgtctgcccata

SEQ ID NO: 3949932 - DNA, 25 bp, Homo sapien
tgcccgcggcgtgaccaccaggaag

SEQ ID NO: 3949933 - DNA, 25 bp, Homo sapien
ggaagcggtgtcatcactgcagctg

SEQ ID NO: 3949934 - DNA, 25 bp, Homo sapien
gaagtcaccccggtgtgcggagtca

SEQ ID NO: 3949935 - DNA, 25 bp, Homo sapien
cagctagacctggtaaagtgactgt

SEQ ID NO: 3949936 - DNA, 25 bp, Homo sapien
tccccagcagctagacctggtaaag

SEQ ID NO: 3949937 - DNA, 25 bp, Homo sapien
cagcagctagacctggtaaagtgac

SEQ ID NO: 3949938 - DNA, 25 bp, Homo sapien
cccagcagctagacctggtaaagtg

SEQ ID NO: 3949939 - DNA, 25 bp, Homo sapien
ccttcctgggccccaagcaaaggtg

SEQ ID NO: 3949940 - DNA, 25 bp, Homo sapien
ttcctgggccccaagcaaaggtgct

SEQ ID NO: 3949941 - DNA, 25 bp, Homo sapien
ctctcagaaatgggttcctccttcc

SEQ ID NO: 3949942 - DNA, 25 bp, Homo sapien
cctgggccccaagcaaaggtgcttt

SEQ ID NO: 3949943 - DNA, 25 bp, Homo sapien
caggctcaccacggaccaccccctt

SEQ ID NO: 3949944 - DNA, 25 bp, Homo sapien
ctaaagtgggtagtcctcacaccac

SEQ ID NO: 3949945 - DNA, 25 bp, Homo sapien
cctaaagtgggtagtcctcacacca

SEQ ID NO: 3949946 - DNA, 25 bp, Homo sapien
ttccctaaagtgggtagtcctcaca

SEQ ID NO: 3949947 - DNA, 25 bp, Homo sapien
gctgtctcggcccagactgcttgtt

SEQ ID NO: 3949948 - DNA, 25 bp, Homo sapien
tgctcatgctgtctcggcccagact

SEQ ID NO: 3949949 - DNA, 25 bp, Homo sapien
tcaggagtgacgtccgggacctcct

SEQ ID NO: 3949950 - DNA, 25 bp, Homo sapien
cttcaggagtgacgtccgggacctc

SEQ ID NO: 3949951 - DNA, 25 bp, Homo sapien
cgagatccatcacgcgttcagggca

SEQ ID NO: 3949952 - DNA, 25 bp, Homo sapien
acagggcgggagaagtggtcctcag

SEQ ID NO: 3949953 - DNA, 25 bp, Homo sapien
cacagggcgggagaagtggtcctca

SEQ ID NO: 3949954 - DNA, 25 bp, Homo sapien
tcctcagacaggccgagatccatca

SEQ ID NO: 3949955 - DNA, 25 bp, Homo sapien
ggctctgagacccaggcaaagggga

SEQ ID NO: 3949956 - DNA, 25 bp, Homo sapien
taatatacaaaacaagctgagtgca

SEQ ID NO: 3949957 - DNA, 25 bp, Homo sapien
actcagaacactctggggatcccgg

SEQ ID NO: 3949958 - DNA, 25 bp, Homo sapien
ggaccccgccctcaggagccatcct

SEQ ID NO: 3949959 - DNA, 25 bp, Homo sapien
gggcgggggcagtcaaaggcccatc

SEQ ID NO: 3949960 - DNA, 25 bp, Homo sapien
ggcgggggcagtcaaaggcccatcc

SEQ ID NO: 3949961 - DNA, 25 bp, Homo sapien
gcgggggcagtcaaaggcccatcct

SEQ ID NO: 3949962 - DNA, 25 bp, Homo sapien
tggacgtcagaggccaggaacagac

SEQ ID NO: 3949963 - DNA, 25 bp, Homo sapien
ggacgtcagaggccaggaacagacc

SEQ ID NO: 3949964 - DNA, 25 bp, Homo sapien
ctggacgtcagaggccaggaacaga

SEQ ID NO: 3949965 - DNA, 25 bp, Homo sapien
actcctcgatcgcctgccgcagctg

SEQ ID NO: 3949966 - DNA, 25 bp, Homo sapien
tggatgagtcgcaccacggcatcct

SEQ ID NO: 3949967 - DNA, 25 bp, Homo sapien
cttcagccggaggtggatgagtcgc

SEQ ID NO: 3949968 - DNA, 25 bp, Homo sapien
aggtggatgagtcgcaccacggcat

SEQ ID NO: 3949969 - DNA, 25 bp, Homo sapien
agggcccgtcttccaccctgcctgt

SEQ ID NO: 3949970 - DNA, 25 bp, Homo sapien
ctgcctgtctcgtgcccttctacct

SEQ ID NO: 3949971 - DNA, 25 bp, Homo sapien
caacaggagggtctaggctaatagg

SEQ ID NO: 3949972 - DNA, 25 bp, Homo sapien
tgaggccgagagagagaccaccgcc

SEQ ID NO: 3949973 - DNA, 25 bp, Homo sapien
tctactttctacattcccagggata

SEQ ID NO: 3949974 - DNA, 25 bp, Homo sapien
tctacattcccagggatacctgaat

SEQ ID NO: 3949975 - DNA, 25 bp, Homo sapien
cagggatacctgaatcagcacaggg

SEQ ID NO: 3949976 - DNA, 25 bp, Homo sapien
ttcccagggatacctgaatcagcac

SEQ ID NO: 3949977 - DNA, 25 bp, Homo sapien
ctttcccttcgcacaagcccctcaa

SEQ ID NO: 3949978 - DNA, 25 bp, Homo sapien
agcccctcaacttatttcttccagg

SEQ ID NO: 3949979 - DNA, 25 bp, Homo sapien
tatttcttccaggcaccatttaggg

SEQ ID NO: 3949980 - DNA, 25 bp, Homo sapien
gcacaagcccctcaacttatttctt

SEQ ID NO: 3949981 - DNA, 25 bp, Homo sapien
taaaagcggtgctcaaggagcactc

SEQ ID NO: 3949982 - DNA, 25 bp, Homo sapien
tgctcaaggagcactcggatgtttg

SEQ ID NO: 3949983 - DNA, 25 bp, Homo sapien
ttctccttgtaaaagcggtgctcaa

SEQ ID NO: 3949984 - DNA, 25 bp, Homo sapien
ggagcactcggatgtttggctcatc

SEQ ID NO: 3949985 - DNA, 25 bp, Homo sapien
tcattcctcactcctcgtctgggtc

SEQ ID NO: 3949986 - DNA, 25 bp, Homo sapien
cactcctcgtctgggtctcggccca

SEQ ID NO: 3949987 - DNA, 25 bp, Homo sapien
gcaggaactttggtctctctcattc

SEQ ID NO: 3949988 - DNA, 25 bp, Homo sapien
ggaactttggtctctctcattcctc

SEQ ID NO: 3949989 - DNA, 25 bp, Homo sapien
cagtacaacgaggaaatgcatattt

SEQ ID NO: 3949990 - DNA, 25 bp, Homo sapien
cactagtttaatttctcatccagaa

SEQ ID NO: 3949991 - DNA, 25 bp, Homo sapien
gttaatttaactttgactggccatg

SEQ ID NO: 3949992 - DNA, 25 bp, Homo sapien
tcatccagaacagccctgtccaatg

SEQ ID NO: 3949993 - DNA, 25 bp, Homo sapien
gcacagcggtaatcctggctgtcca

SEQ ID NO: 3949994 - DNA, 25 bp, Homo sapien
gactttggagctcacacagggcttg

SEQ ID NO: 3949995 - DNA, 25 bp, Homo sapien
tttggagctcacacagggcttggag

SEQ ID NO: 3949996 - DNA, 25 bp, Homo sapien
cacagcggtaatcctggctgtccag

SEQ ID NO: 3949997 - DNA, 25 bp, Homo sapien
ttacacacctgtgcacccggctccc

SEQ ID NO: 3949998 - DNA, 25 bp, Homo sapien
gtgcccttacacacctgtgcacccg

SEQ ID NO: 3949999 - DNA, 25 bp, Homo sapien
cccttacacacctgtgcacccggct

SEQ ID NO: 3950000 - DNA, 25 bp, Homo sapien
tgcccttacacacctgtgcacccgg

SEQ ID NO: 3950001 - DNA, 25 bp, Homo sapien
tgtacaacgcgtgcagggatcacag

SEQ ID NO: 3950002 - DNA, 25 bp, Homo sapien
ttcgaggctcaaagtcccagttgtg

SEQ ID NO: 3950003 - DNA, 25 bp, Homo sapien
tcaaagtcccagttgtgtacaacgc

SEQ ID NO: 3950004 - DNA, 25 bp, Homo sapien
cagttgtgtacaacgcgtgcaggga

SEQ ID NO: 3950005 - DNA, 25 bp, Homo sapien
tcctccacgtagctgaacagcagag

SEQ ID NO: 3950006 - DNA, 25 bp, Homo sapien
gcagagggttgatctcccggagcct

SEQ ID NO: 3950007 - DNA, 25 bp, Homo sapien
caggtagcgcatgctgcagcgagaa

SEQ ID NO: 3950008 - DNA, 25 bp, Homo sapien
tgagtacgggccgagacaccatcag

SEQ ID NO: 3950009 - DNA, 25 bp, Homo sapien
ctgacacagcgcccccgccccccac

SEQ ID NO: 3950010 - DNA, 25 bp, Homo sapien
tgacacagcgcccccgccccccact

SEQ ID NO: 3950011 - DNA, 25 bp, Homo sapien
tggccttggcaactcaacgtgctgc

SEQ ID NO: 3950012 - DNA, 25 bp, Homo sapien
tgcagtgagacttagcagaggctac

SEQ ID NO: 3950013 - DNA, 25 bp, Homo sapien
gcaccttcaaccaaaagggcagccg

SEQ ID NO: 3950014 - DNA, 25 bp, Homo sapien
tcaccgctggctaagagagtggcca

SEQ ID NO: 3950015 - DNA, 25 bp, Homo sapien
catgagcaggatgtcctggcgcagc

SEQ ID NO: 3950016 - DNA, 25 bp, Homo sapien
tgagcaggatgtcctggcgcagctt

SEQ ID NO: 3950017 - DNA, 25 bp, Homo sapien
ttcatgagcaggatgtcctggcgca

SEQ ID NO: 3950018 - DNA, 25 bp, Homo sapien
gcttcatgagcaggatgtcctggcg

SEQ ID NO: 3950019 - DNA, 25 bp, Homo sapien
gctgcgcttcccatcgggggccagt

SEQ ID NO: 3950020 - DNA, 25 bp, Homo sapien
ctggctgcgcttcccatcgggggcc

SEQ ID NO: 3950021 - DNA, 25 bp, Homo sapien
ggctgcgcttcccatcgggggccag

SEQ ID NO: 3950022 - DNA, 25 bp, Homo sapien
tgcgcttcccatcgggggccagtcc

SEQ ID NO: 3950023 - DNA, 25 bp, Homo sapien
ccaggtgctcacagagaaacgagct

SEQ ID NO: 3950024 - DNA, 25 bp, Homo sapien
gccccaggagtagaatccaggagcc

SEQ ID NO: 3950025 - DNA, 25 bp, Homo sapien
gggccacgtttcctgacctgtgtag

SEQ ID NO: 3950026 - DNA, 25 bp, Homo sapien
cagagaaacgagctacacaagggtc

SEQ ID NO: 3950027 - DNA, 25 bp, Homo sapien
ccctcccaccgcccacccatggtcg

SEQ ID NO: 3950028 - DNA, 25 bp, Homo sapien
ctgccaagtcccagcagccgtgacg

SEQ ID NO: 3950029 - DNA, 25 bp, Homo sapien
gccaagtcccagcagccgtgacgcc

SEQ ID NO: 3950030 - DNA, 25 bp, Homo sapien
tgccaagtcccagcagccgtgacgc

SEQ ID NO: 3950031 - DNA, 25 bp, Homo sapien
ctggacagagtacatctcgtcgttc

SEQ ID NO: 3950032 - DNA, 25 bp, Homo sapien
gtacatctcgtcgttctccacaaaa

SEQ ID NO: 3950033 - DNA, 25 bp, Homo sapien
ctccacaaaatgctgccgatcctgg

SEQ ID NO: 3950034 - DNA, 25 bp, Homo sapien
ccacaaaatgctgccgatcctggag

SEQ ID NO: 3950035 - DNA, 25 bp, Homo sapien
aagagcgtgtggatctcggtgagcg

SEQ ID NO: 3950036 - DNA, 25 bp, Homo sapien
tgcttggcgaagagcgtgtggatct

SEQ ID NO: 3950037 - DNA, 25 bp, Homo sapien
ttggcgaagagcgtgtggatctcgg

SEQ ID NO: 3950038 - DNA, 25 bp, Homo sapien
tgtggatctcggtgagcgagcagcc

SEQ ID NO: 3950039 - DNA, 25 bp, Homo sapien
tgcagagctcacacacgaagccctt

SEQ ID NO: 3950040 - DNA, 25 bp, Homo sapien
ctcacacacgaagcccttggcctgg

SEQ ID NO: 3950041 - DNA, 25 bp, Homo sapien
gcagagctcacacacgaagcccttg

SEQ ID NO: 3950042 - DNA, 25 bp, Homo sapien
agctcacacacgaagcccttggcct

SEQ ID NO: 3950043 - DNA, 25 bp, Homo sapien
taggcctccacatcgggacctggct

SEQ ID NO: 3950044 - DNA, 25 bp, Homo sapien
tggaagagcgactgcttcctcaggc

SEQ ID NO: 3950045 - DNA, 25 bp, Homo sapien
caagtggtggagttgtcgtagtagc

SEQ ID NO: 3950046 - DNA, 25 bp, Homo sapien
gctgagccgggcacacttgggacaa

SEQ ID NO: 3950047 - DNA, 25 bp, Homo sapien
cactgtactgaccatccgatgaggc

SEQ ID NO: 3950048 - DNA, 25 bp, Homo sapien
cctcgtggaccgcaggatctgtaaa

SEQ ID NO: 3950049 - DNA, 25 bp, Homo sapien
tgtggaatttctagggcccggatgc

SEQ ID NO: 3950050 - DNA, 25 bp, Homo sapien
gcaggatcccatcgcctaactggaa

SEQ ID NO: 3950051 - DNA, 25 bp, Homo sapien
tcatgagacgtgtgcagactttggg

SEQ ID NO: 3950052 - DNA, 25 bp, Homo sapien
tccgtttaccggctgtgtcacccag

SEQ ID NO: 3950053 - DNA, 25 bp, Homo sapien
tgggaaacagcatttggcctttaac

SEQ ID NO: 3950054 - DNA, 25 bp, Homo sapien
cagatttcggaatggctaatatcca

SEQ ID NO: 3950055 - DNA, 25 bp, Homo sapien
gacatgttacttcgcctcacaccag

SEQ ID NO: 3950056 - DNA, 25 bp, Homo sapien
tcaaccccattggatggcaaaggct

SEQ ID NO: 3950057 - DNA, 25 bp, Homo sapien
aggtagttctcccaaccaatcagga

SEQ ID NO: 3950058 - DNA, 25 bp, Homo sapien
ggctgtctttcctaagcctgcaaat

SEQ ID NO: 3950059 - DNA, 25 bp, Homo sapien
tagaggaaccacagcgttcttgcgc

SEQ ID NO: 3950060 - DNA, 25 bp, Homo sapien
gagagcctctcggttgactcgccat

SEQ ID NO: 3950061 - DNA, 25 bp, Homo sapien
tatctctacagtggcgaccattcga

SEQ ID NO: 3950062 - DNA, 25 bp, Homo sapien
gctcagtcagatcgcaaaggcctta

SEQ ID NO: 3950063 - DNA, 25 bp, Homo sapien
agggccctcgcgctggtcttggccg

SEQ ID NO: 3950064 - DNA, 25 bp, Homo sapien
ctggccaccgctctactgccggccg

SEQ ID NO: 3950065 - DNA, 25 bp, Homo sapien
agcagccggtaccacatccccagac

SEQ ID NO: 3950066 - DNA, 25 bp, Homo sapien
tgggccaccacatcgccacagcaag

SEQ ID NO: 3950067 - DNA, 25 bp, Homo sapien
tctgatgccccaatcttccagagct

SEQ ID NO: 3950068 - DNA, 25 bp, Homo sapien
cagctggtagctgaaagtgtgcaat

SEQ ID NO: 3950069 - DNA, 25 bp, Homo sapien
cattgcccatctgagaaagtagaac

SEQ ID NO: 3950070 - DNA, 25 bp, Homo sapien
taatgtgagtgcctgaagacagctg

SEQ ID NO: 3950071 - DNA, 25 bp, Homo sapien
tgaacgaaatcgatctgcagcagcc

SEQ ID NO: 3950072 - DNA, 25 bp, Homo sapien
ccaaggtgtgggtcaacaggagacc

SEQ ID NO: 3950073 - DNA, 25 bp, Homo sapien
tacctgacacagagctagcaatgac

SEQ ID NO: 3950074 - DNA, 25 bp, Homo sapien
tagcaatgactctcgaaggatccca

SEQ ID NO: 3950075 - DNA, 25 bp, Homo sapien
gcagggtgaggtgtgagcttatcgc

SEQ ID NO: 3950076 - DNA, 25 bp, Homo sapien
ctgcaatgcaacaccgcacattctc

SEQ ID NO: 3950077 - DNA, 25 bp, Homo sapien
atgcaacaccgcacattctcactgg

SEQ ID NO: 3950078 - DNA, 25 bp, Homo sapien
aatgcaacaccgcacattctcactg

SEQ ID NO: 3950079 - DNA, 25 bp, Homo sapien
gcaatgcaacaccgcacattctcac

SEQ ID NO: 3950080 - DNA, 25 bp, Homo sapien
gaacaggaggccagatgagctttcc

SEQ ID NO: 3950081 - DNA, 25 bp, Homo sapien
ggaacaggaggccagatgagctttc

SEQ ID NO: 3950082 - DNA, 25 bp, Homo sapien
ggaggccagatgagctttcctagct

SEQ ID NO: 3950083 - DNA, 25 bp, Homo sapien
gccagatgagctttcctagcttctt

SEQ ID NO: 3950084 - DNA, 25 bp, Homo sapien
cagagtcagcttctgaacgtggatc

SEQ ID NO: 3950085 - DNA, 25 bp, Homo sapien
gcttctgaacgtggatcccctggaa

SEQ ID NO: 3950086 - DNA, 25 bp, Homo sapien
caccaggaaaataacgtcggtcttg

SEQ ID NO: 3950087 - DNA, 25 bp, Homo sapien
aataacgtcggtcttgcctgcagag

SEQ ID NO: 3950088 - DNA, 25 bp, Homo sapien
gagtcagatacgcagaaaccaaggt

SEQ ID NO: 3950089 - DNA, 25 bp, Homo sapien
tcatacaatcggcatgagccctcag

SEQ ID NO: 3950090 - DNA, 25 bp, Homo sapien
tgctctgaggtaatgccagtctgca

SEQ ID NO: 3950091 - DNA, 25 bp, Homo sapien
cctacagaaggactccaagtgggca

SEQ ID NO: 3950092 - DNA, 25 bp, Homo sapien
tgtttctcagtttgtgttccttcca

SEQ ID NO: 3950093 - DNA, 25 bp, Homo sapien
ccactcctcttaaagtatttctcaa

SEQ ID NO: 3950094 - DNA, 25 bp, Homo sapien
ctttttttggtgctgttgatgtttc

SEQ ID NO: 3950095 - DNA, 25 bp, Homo sapien
tttttggtgctgttgatgtttctca

SEQ ID NO: 3950096 - DNA, 25 bp, Homo sapien
taaaatttcacctcgctggcttcat

SEQ ID NO: 3950097 - DNA, 25 bp, Homo sapien
gctgcaaaataacaccatgaaaggc

SEQ ID NO: 3950098 - DNA, 25 bp, Homo sapien
tacgtatatttgtgtcccacggacc

SEQ ID NO: 3950099 - DNA, 25 bp, Homo sapien
taagacagactggtatgggtggtcc

SEQ ID NO: 3950100 - DNA, 25 bp, Homo sapien
caggcaacgttatcctgcttccctc

SEQ ID NO: 3950101 - DNA, 25 bp, Homo sapien
tccaccaggcaacgttatcctgctt

SEQ ID NO: 3950102 - DNA, 25 bp, Homo sapien
gcctccaccaggcaacgttatcctg

SEQ ID NO: 3950103 - DNA, 25 bp, Homo sapien
cgcctccaccaggcaacgttatcct

SEQ ID NO: 3950104 - DNA, 25 bp, Homo sapien
tctgccttcccgaatgggattggtg

SEQ ID NO: 3950105 - DNA, 25 bp, Homo sapien
ttggaactcaatccctaaggtgaag

SEQ ID NO: 3950106 - DNA, 25 bp, Homo sapien
caagcagaaagattgatatgggttt

SEQ ID NO: 3950107 - DNA, 25 bp, Homo sapien
ggattggtgccctcacaatctgttg

SEQ ID NO: 3950108 - DNA, 25 bp, Homo sapien
cggaaatcctcgtcatcccagggga

SEQ ID NO: 3950109 - DNA, 25 bp, Homo sapien
tgcggaaatcctcgtcatcccaggg

SEQ ID NO: 3950110 - DNA, 25 bp, Homo sapien
ctgcggaaatcctcgtcatcccagg

SEQ ID NO: 3950111 - DNA, 25 bp, Homo sapien
aaatcctcgtcatcccaggggaagt

SEQ ID NO: 3950112 - DNA, 25 bp, Homo sapien
gaggtagaaaaatcccatggcaacg

SEQ ID NO: 3950113 - DNA, 25 bp, Homo sapien
caggatctcgaaaatagaggtagaa

SEQ ID NO: 3950114 - DNA, 25 bp, Homo sapien
atggcaacgcctgcccccaaaaggg

SEQ ID NO: 3950115 - DNA, 25 bp, Homo sapien
tgtacaaagtgcttccacgtgattt

SEQ ID NO: 3950116 - DNA, 25 bp, Homo sapien
taaggaagcttccaccttgcaagaa

SEQ ID NO: 3950117 - DNA, 25 bp, Homo sapien
caggacatctaccacacaacgggtt

SEQ ID NO: 3950118 - DNA, 25 bp, Homo sapien
taacaaacgtccttctgagggcaac

SEQ ID NO: 3950119 - DNA, 25 bp, Homo sapien
gcggaggcttgctggttactaaacc

SEQ ID NO: 3950120 - DNA, 25 bp, Homo sapien
tgagcccaggagtctgagactagcc

SEQ ID NO: 3950121 - DNA, 25 bp, Homo sapien
caacataaggagacactgtctctaa

SEQ ID NO: 3950122 - DNA, 25 bp, Homo sapien
aggaggacaaagtgggagcatcact

SEQ ID NO: 3950123 - DNA, 25 bp, Homo sapien
aaaaaaaagtgcgggctgggcacag

SEQ ID NO: 3950124 - DNA, 25 bp, Homo sapien
gagcagtgagtatgatattcaacag

SEQ ID NO: 3950125 - DNA, 25 bp, Homo sapien
gcagtgagtatgatattcaacagta

SEQ ID NO: 3950126 - DNA, 25 bp, Homo sapien
tgagtatgatattcaacagtaaaca

SEQ ID NO: 3950127 - DNA, 25 bp, Homo sapien
cagtgagtatgatattcaacagtaa

SEQ ID NO: 3950128 - DNA, 25 bp, Homo sapien
gattgtttgttcacgacttccagcc

SEQ ID NO: 3950129 - DNA, 25 bp, Homo sapien
gggcaggaataacacgcacagattg

SEQ ID NO: 3950130 - DNA, 25 bp, Homo sapien
aacacgcacagattgtttgttcacg

SEQ ID NO: 3950131 - DNA, 25 bp, Homo sapien
ggcaggaataacacgcacagattgt

SEQ ID NO: 3950132 - DNA, 25 bp, Homo sapien
tggatactaagggagtattttactg

SEQ ID NO: 3950133 - DNA, 25 bp, Homo sapien
ggatactaagggagtattttactga

SEQ ID NO: 3950134 - DNA, 25 bp, Homo sapien
tctccccacaatccttgatgagttg

SEQ ID NO: 3950135 - DNA, 25 bp, Homo sapien
tgagttgttctcagacactgcttgg

SEQ ID NO: 3950136 - DNA, 25 bp, Homo sapien
tagtcagtcttataagggctcctgt

SEQ ID NO: 3950137 - DNA, 25 bp, Homo sapien
actgcttggcaaatctgaaccctag

SEQ ID NO: 3950138 - DNA, 25 bp, Homo sapien
caccacggccagccattccttttgg

SEQ ID NO: 3950139 - DNA, 25 bp, Homo sapien
tggtgtagactaccactgcctggtt

SEQ ID NO: 3950140 - DNA, 25 bp, Homo sapien
ccatcactctcgctggtgtagacta

SEQ ID NO: 3950141 - DNA, 25 bp, Homo sapien
tcgaaggtatcaacgctgccaatgt

SEQ ID NO: 3950142 - DNA, 25 bp, Homo sapien
ccttgagcagactccaggttccgct

SEQ ID NO: 3950143 - DNA, 25 bp, Homo sapien
aaagtgcattttgacagggctctcg

SEQ ID NO: 3950144 - DNA, 25 bp, Homo sapien
ccacctctggacgttaattcgacac

SEQ ID NO: 3950145 - DNA, 25 bp, Homo sapien
catggcccaattgtggaaggcttcc

SEQ ID NO: 3950146 - DNA, 25 bp, Homo sapien
aattcgacacttctgcaggagtggc

SEQ ID NO: 3950147 - DNA, 25 bp, Homo sapien
aggagaccgctctaggactttgtgt

SEQ ID NO: 3950148 - DNA, 25 bp, Homo sapien
taactttttatagatacgcagtctc

SEQ ID NO: 3950149 - DNA, 25 bp, Homo sapien
tgtctcttagaggagaccgctctag

SEQ ID NO: 3950150 - DNA, 25 bp, Homo sapien
aaactctgtctcttagaggagaccg

SEQ ID NO: 3950151 - DNA, 25 bp, Homo sapien
gcatagacgagaatgccaaccagga

SEQ ID NO: 3950152 - DNA, 25 bp, Homo sapien
cagcatagacgagaatgccaaccag

SEQ ID NO: 3950153 - DNA, 25 bp, Homo sapien
ctggcagcatagacgagaatgccaa

SEQ ID NO: 3950154 - DNA, 25 bp, Homo sapien
ggcagcatagacgagaatgccaacc

SEQ ID NO: 3950155 - DNA, 25 bp, Homo sapien
ggctgctgtctcaccaacaccgaag

SEQ ID NO: 3950156 - DNA, 25 bp, Homo sapien
tactgcgcctggatcccataaggcc

SEQ ID NO: 3950157 - DNA, 25 bp, Homo sapien
tgctgtctcaccaacaccgaagagg

SEQ ID NO: 3950158 - DNA, 25 bp, Homo sapien
ccctcctcgtctactgcgcctggat

SEQ ID NO: 3950159 - DNA, 25 bp, Homo sapien
ctgcttgggattcttcaggaaattc

SEQ ID NO: 3950160 - DNA, 25 bp, Homo sapien
tggaatttttgctcctaagtcctga

SEQ ID NO: 3950161 - DNA, 25 bp, Homo sapien
gtcctgatactgcttgggattcttc

SEQ ID NO: 3950162 - DNA, 25 bp, Homo sapien
gctcctaagtcctgatactgcttgg

SEQ ID NO: 3950163 - DNA, 25 bp, Homo sapien
tcaccttctggctccgccccaggtt

SEQ ID NO: 3950164 - DNA, 25 bp, Homo sapien
cccggtgcttggtataatcattatt

SEQ ID NO: 3950165 - DNA, 25 bp, Homo sapien
aggttcccggtgcttggtataatca

SEQ ID NO: 3950166 - DNA, 25 bp, Homo sapien
ttcccagcctcatgctcatcaaagt

SEQ ID NO: 3950167 - DNA, 25 bp, Homo sapien
cctttcttggtacctgactgcctca

SEQ ID NO: 3950168 - DNA, 25 bp, Homo sapien
gagcacgaggcctgtgatgtaacac

SEQ ID NO: 3950169 - DNA, 25 bp, Homo sapien
aaaaggatgcgatcgctcacacctg

SEQ ID NO: 3950170 - DNA, 25 bp, Homo sapien
gaaatcactgtacctcatacccaag

SEQ ID NO: 3950171 - DNA, 25 bp, Homo sapien
gcctcccctgcagttgctttggcaa

SEQ ID NO: 3950172 - DNA, 25 bp, Homo sapien
tcccctgcagttgctttggcaagaa

SEQ ID NO: 3950173 - DNA, 25 bp, Homo sapien
ggtcttgccggtaccaggaggacca

SEQ ID NO: 3950174 - DNA, 25 bp, Homo sapien
cctcccctgcagttgctttggcaag

SEQ ID NO: 3950175 - DNA, 25 bp, Homo sapien
ccttgctggcccaacgccaataaac

SEQ ID NO: 3950176 - DNA, 25 bp, Homo sapien
tgaaacaggaacccacccagaatcg

SEQ ID NO: 3950177 - DNA, 25 bp, Homo sapien
ctgaaacaggaacccacccagaatc

SEQ ID NO: 3950178 - DNA, 25 bp, Homo sapien
tacatggagcgtttttttcgggcca

SEQ ID NO: 3950179 - DNA, 25 bp, Homo sapien
gccaatcgcatcaatctcatcaatg

SEQ ID NO: 3950180 - DNA, 25 bp, Homo sapien
cgggccattgcaaacatgtcatgaa

SEQ ID NO: 3950181 - DNA, 25 bp, Homo sapien
tctcatcaatgaataagatacatgg

SEQ ID NO: 3950182 - DNA, 25 bp, Homo sapien
tccacgagcatctggttcagggtgt

SEQ ID NO: 3950183 - DNA, 25 bp, Homo sapien
tccaaagtgcccttggcctcgcttc

SEQ ID NO: 3950184 - DNA, 25 bp, Homo sapien
tgtccatctccacgagcatctggtt

SEQ ID NO: 3950185 - DNA, 25 bp, Homo sapien
tctggttcagggtgttctcctgctc

SEQ ID NO: 3950186 - DNA, 25 bp, Homo sapien
acgacgttggtggcagagttgaacc

SEQ ID NO: 3950187 - DNA, 25 bp, Homo sapien
cagtgtaaatctggcgatgaaaccg

SEQ ID NO: 3950188 - DNA, 25 bp, Homo sapien
tcagggcggttggtgccagccaaca

SEQ ID NO: 3950189 - DNA, 25 bp, Homo sapien
gatgaaaccggccaggccgcatgag

SEQ ID NO: 3950190 - DNA, 25 bp, Homo sapien
gggcgcaggtggaccttaaagatgg

SEQ ID NO: 3950191 - DNA, 25 bp, Homo sapien
agtgggcgcaggtggaccttaaaga

SEQ ID NO: 3950192 - DNA, 25 bp, Homo sapien
gtgggcgcaggtggaccttaaagat

SEQ ID NO: 3950193 - DNA, 25 bp, Homo sapien
tgggcgcaggtggaccttaaagatg

SEQ ID NO: 3950194 - DNA, 25 bp, Homo sapien
ccagggtgtccttattgaggctctt

SEQ ID NO: 3950195 - DNA, 25 bp, Homo sapien
cgccagggtgtccttattgaggctc

SEQ ID NO: 3950196 - DNA, 25 bp, Homo sapien
ctcgccagggtgtccttattgaggc

SEQ ID NO: 3950197 - DNA, 25 bp, Homo sapien
actgccagcttcctcgccagggtgt

SEQ ID NO: 3950198 - DNA, 25 bp, Homo sapien
tgaacactctcaacaggcgaaaagt

SEQ ID NO: 3950199 - DNA, 25 bp, Homo sapien
gaatacacgtgacctgacactaggc

SEQ ID NO: 3950200 - DNA, 25 bp, Homo sapien
ccagaactgaatgagaacggccagt

SEQ ID NO: 3950201 - DNA, 25 bp, Homo sapien
gaaacgctgcgggaagcatcaggtt

SEQ ID NO: 3950202 - DNA, 25 bp, Homo sapien
tcctgcagcaggcaaacgtacaatc

SEQ ID NO: 3950203 - DNA, 25 bp, Homo sapien
atcctgcagcaggcaaacgtacaat

SEQ ID NO: 3950204 - DNA, 25 bp, Homo sapien
catcctgcagcaggcaaacgtacaa

SEQ ID NO: 3950205 - DNA, 25 bp, Homo sapien
tttcagatacctgccagccaagacc

SEQ ID NO: 3950206 - DNA, 25 bp, Homo sapien
acctttcagatacctgccagccaag

SEQ ID NO: 3950207 - DNA, 25 bp, Homo sapien
aagggaggaagcacattttgtgtct

SEQ ID NO: 3950208 - DNA, 25 bp, Homo sapien
gatgacacctttcagatacctgcca

SEQ ID NO: 3950209 - DNA, 25 bp, Homo sapien
ttaactttggtatgtaaacagacat

SEQ ID NO: 3950210 - DNA, 25 bp, Homo sapien
tttaactttggtatgtaaacagaca

SEQ ID NO: 3950211 - DNA, 25 bp, Homo sapien
gggtagtgcttagtaagccctgctg

SEQ ID NO: 3950212 - DNA, 25 bp, Homo sapien
agtgcttagtaagccctgctgaggg

SEQ ID NO: 3950213 - DNA, 25 bp, Homo sapien
gcggagtcatccctgttaaggggta

SEQ ID NO: 3950214 - DNA, 25 bp, Homo sapien
catccctgttaaggggtagtgctta

SEQ ID NO: 3950215 - DNA, 25 bp, Homo sapien
ttgagcggcagtgctgagtcatcct

SEQ ID NO: 3950216 - DNA, 25 bp, Homo sapien
gcagtactaagccatccctgagtca

SEQ ID NO: 3950217 - DNA, 25 bp, Homo sapien
ctgttgagcggcagtgctgagtcat

SEQ ID NO: 3950218 - DNA, 25 bp, Homo sapien
tgaggggcagtactaagccatccct

SEQ ID NO: 3950219 - DNA, 25 bp, Homo sapien
tacagatgcttccatcggagcaaaa

SEQ ID NO: 3950220 - DNA, 25 bp, Homo sapien
accactttggccattcacctgctga

SEQ ID NO: 3950221 - DNA, 25 bp, Homo sapien
tcatctctgtaaggtaccctgtgca

SEQ ID NO: 3950222 - DNA, 25 bp, Homo sapien
tgatcacgtagtgcaactattgcca

SEQ ID NO: 3950223 - DNA, 25 bp, Homo sapien
tataatttataaaccataaaatcca

SEQ ID NO: 3950224 - DNA, 25 bp, Homo sapien
tcattgcaaacattcgaaatatcag

SEQ ID NO: 3950225 - DNA, 25 bp, Homo sapien
agacccaggaaggaatagccaacag

SEQ ID NO: 3950226 - DNA, 25 bp, Homo sapien
caggaaggaatagccaacagtcagt

SEQ ID NO: 3950227 - DNA, 25 bp, Homo sapien
ttcgaaatatcagcaccagacccag

SEQ ID NO: 3950228 - DNA, 25 bp, Homo sapien
atgaccctctcaatggcctgctgaa

SEQ ID NO: 3950229 - DNA, 25 bp, Homo sapien
ctccgatgaccctctcaatggcctg

SEQ ID NO: 3950230 - DNA, 25 bp, Homo sapien
gaactcagatgccaggcagcaatca

SEQ ID NO: 3950231 - DNA, 25 bp, Homo sapien
agaactcagatgccaggcagcaatc

SEQ ID NO: 3950232 - DNA, 25 bp, Homo sapien
taaacaggcccatttgaagccaatg

SEQ ID NO: 3950233 - DNA, 25 bp, Homo sapien
ggatgatctcagtgccctaacggcc

SEQ ID NO: 3950234 - DNA, 25 bp, Homo sapien
gctccatgctgccttcttgaaagtg

SEQ ID NO: 3950235 - DNA, 25 bp, Homo sapien
taacggcccagtgcaagggtaggta

SEQ ID NO: 3950236 - DNA, 25 bp, Homo sapien
aaccagcctaccaccacgtgtccgg

SEQ ID NO: 3950237 - DNA, 25 bp, Homo sapien
ttcagcagggggtccacgtgctcca

SEQ ID NO: 3950238 - DNA, 25 bp, Homo sapien
acgtgctccaagaaccagcctacca

SEQ ID NO: 3950239 - DNA, 25 bp, Homo sapien
agttgtcttttcaccgggctgcagg

SEQ ID NO: 3950240 - DNA, 25 bp, Homo sapien
cacaggtccttctactggaacagga

SEQ ID NO: 3950241 - DNA, 25 bp, Homo sapien
tttgggagcttcacgtggaaaccac

SEQ ID NO: 3950242 - DNA, 25 bp, Homo sapien
gctcaggagtcaggcgggtttaaca

SEQ ID NO: 3950243 - DNA, 25 bp, Homo sapien
aggccaacggtcgaatccagagctc

SEQ ID NO: 3950244 - DNA, 25 bp, Homo sapien
gtactgtgcgtagcggagccccttg

SEQ ID NO: 3950245 - DNA, 25 bp, Homo sapien
cccgagcatcatgcacgtgcggtcg

SEQ ID NO: 3950246 - DNA, 25 bp, Homo sapien
acgtgcggtcgaagagctgctcctg

SEQ ID NO: 3950247 - DNA, 25 bp, Homo sapien
caggtactgtgcgtagcggagcccc

SEQ ID NO: 3950248 - DNA, 25 bp, Homo sapien
gcgtaggcactctgggtgaccttcc

SEQ ID NO: 3950249 - DNA, 25 bp, Homo sapien
gggcgtaggcactctgggtgacctt

SEQ ID NO: 3950250 - DNA, 25 bp, Homo sapien
ggcgtaggcactctgggtgaccttc

SEQ ID NO: 3950251 - DNA, 25 bp, Homo sapien
gccggacctcgtcatcaaggagctg

SEQ ID NO: 3950252 - DNA, 25 bp, Homo sapien
gtcttgccgtgtcgggaaaagtcga

SEQ ID NO: 3950253 - DNA, 25 bp, Homo sapien
tgcacctgtaggtggcactgacgag

SEQ ID NO: 3950254 - DNA, 25 bp, Homo sapien
tgggcgcttgcctcgccgtacagct

SEQ ID NO: 3950255 - DNA, 25 bp, Homo sapien
aactcctcataggtagacttctccg

SEQ ID NO: 3950256 - DNA, 25 bp, Homo sapien
taggtagacttctccgagaagggcc

SEQ ID NO: 3950257 - DNA, 25 bp, Homo sapien
cctcataggtagacttctccgagaa

SEQ ID NO: 3950258 - DNA, 25 bp, Homo sapien
cacgccctctacaaactcctcatag

SEQ ID NO: 3950259 - DNA, 25 bp, Homo sapien
gtgcaggcgaccgccacaggctaca

SEQ ID NO: 3950260 - DNA, 25 bp, Homo sapien
ggcgaccgccacaggctacacagag

SEQ ID NO: 3950261 - DNA, 25 bp, Homo sapien
caggctacacagagccccctgcaca

SEQ ID NO: 3950262 - DNA, 25 bp, Homo sapien
gcaggcgaccgccacaggctacaca

SEQ ID NO: 3950263 - DNA, 25 bp, Homo sapien
ttgttttgggtgagattccgcagct

SEQ ID NO: 3950264 - DNA, 25 bp, Homo sapien
ttttgggtgagattccgcagctgct

SEQ ID NO: 3950265 - DNA, 25 bp, Homo sapien
ttgggtgagattccgcagctgcttt

SEQ ID NO: 3950266 - DNA, 25 bp, Homo sapien
gtgagattccgcagctgctttgcca

SEQ ID NO: 3950267 - DNA, 25 bp, Homo sapien
tgttcacgaacaggtaccagggcca

SEQ ID NO: 3950268 - DNA, 25 bp, Homo sapien
tatttttgaggctccgaggccaaca

SEQ ID NO: 3950269 - DNA, 25 bp, Homo sapien
tgacttccccttgatgcctggctga

SEQ ID NO: 3950270 - DNA, 25 bp, Homo sapien
caggacatctgcaaacgggcatctt

SEQ ID NO: 3950271 - DNA, 25 bp, Homo sapien
ggaagacagcgtcacggagtcactg

SEQ ID NO: 3950272 - DNA, 25 bp, Homo sapien
acttggagaccagccggctttcctg

SEQ ID NO: 3950273 - DNA, 25 bp, Homo sapien
ggcacgggtcttcgcctcacttgga

SEQ ID NO: 3950274 - DNA, 25 bp, Homo sapien
tcactgccaggaacgtgctgaggaa

SEQ ID NO: 3950275 - DNA, 25 bp, Homo sapien
accacacctagctgtcattattaac

SEQ ID NO: 3950276 - DNA, 25 bp, Homo sapien
tggccccaggtttccttgatattag

SEQ ID NO: 3950277 - DNA, 25 bp, Homo sapien
gccagggtgtatgatcgcttgaacc

SEQ ID NO: 3950278 - DNA, 25 bp, Homo sapien
tcctgggtttcaggcggacctcctg

SEQ ID NO: 3950279 - DNA, 25 bp, Homo sapien
tcctgggacatcagaaacacctgct

SEQ ID NO: 3950280 - DNA, 25 bp, Homo sapien
gtgtgtgccaagtgcctcctcgatg

SEQ ID NO: 3950281 - DNA, 25 bp, Homo sapien
ttcagtgcccactcatcagcgaggg

SEQ ID NO: 3950282 - DNA, 25 bp, Homo sapien
ttagctcatccgtccatacagtggt

SEQ ID NO: 3950283 - DNA, 25 bp, Homo sapien
ctcaaaaacgcagaaatcggaaaga

SEQ ID NO: 3950284 - DNA, 25 bp, Homo sapien
aacgttgggaaaatgtcgccggcag

SEQ ID NO: 3950285 - DNA, 25 bp, Homo sapien
gataagtcacaagatcctcgcgaga

SEQ ID NO: 3950286 - DNA, 25 bp, Homo sapien
ccagaagcctttcgctgcagggcat

SEQ ID NO: 3950287 - DNA, 25 bp, Homo sapien
tgccaaaggcgggagtgcgtcccta

SEQ ID NO: 3950288 - DNA, 25 bp, Homo sapien
tgagttactgacaattcctgtacca

SEQ ID NO: 3950289 - DNA, 25 bp, Homo sapien
caattcctgtaccacaaagggagag

SEQ ID NO: 3950290 - DNA, 25 bp, Homo sapien
gacaattcctgtaccacaaagggag

SEQ ID NO: 3950291 - DNA, 25 bp, Homo sapien
tactgacaattcctgtaccacaaag

SEQ ID NO: 3950292 - DNA, 25 bp, Homo sapien
tgaaccccatcggtctctctaattc

SEQ ID NO: 3950293 - DNA, 25 bp, Homo sapien
ccctgattctgtagctgtgcggctg

SEQ ID NO: 3950294 - DNA, 25 bp, Homo sapien
gatgtaatgcatgtttcaactgaac

SEQ ID NO: 3950295 - DNA, 25 bp, Homo sapien
aagaccctgattctgtagctgtgcg

SEQ ID NO: 3950296 - DNA, 25 bp, Homo sapien
caacattggtgaccaccatggaaaa

SEQ ID NO: 3950297 - DNA, 25 bp, Homo sapien
gcggcaacattggtgaccaccatgg

SEQ ID NO: 3950298 - DNA, 25 bp, Homo sapien
catgctggcggcaacattggtgacc

SEQ ID NO: 3950299 - DNA, 25 bp, Homo sapien
tgctggcggcaacattggtgaccac

SEQ ID NO: 3950300 - DNA, 25 bp, Homo sapien
catcattgccctgagtgttcccacc

SEQ ID NO: 3950301 - DNA, 25 bp, Homo sapien
tcattgccctgagtgttcccaccct

SEQ ID NO: 3950302 - DNA, 25 bp, Homo sapien
ttgccctgagtgttcccacccttta

SEQ ID NO: 3950303 - DNA, 25 bp, Homo sapien
attgccctgagtgttcccacccttt

SEQ ID NO: 3950304 - DNA, 25 bp, Homo sapien
cccatcgacaatcggggtgcctttg

SEQ ID NO: 3950305 - DNA, 25 bp, Homo sapien
tcgacaatcggggtgcctttggctt

SEQ ID NO: 3950306 - DNA, 25 bp, Homo sapien
tggagcgagcccatcgacaatcggg

SEQ ID NO: 3950307 - DNA, 25 bp, Homo sapien
ctctggagcgagcccatcgacaatc

SEQ ID NO: 3950308 - DNA, 25 bp, Homo sapien
tcacaggctgcactacctttctgaa

SEQ ID NO: 3950309 - DNA, 25 bp, Homo sapien
cgctgatgggaattatgggccacgc

SEQ ID NO: 3950310 - DNA, 25 bp, Homo sapien
catggtgcagccgaaagctttgccg

SEQ ID NO: 3950311 - DNA, 25 bp, Homo sapien
ttggacagaagggtggatccacatg

SEQ ID NO: 3950312 - DNA, 25 bp, Homo sapien
aaaccagtagactctaaaatctcaa

SEQ ID NO: 3950313 - DNA, 25 bp, Homo sapien
tctcaagagggttcaattgcgaatc

SEQ ID NO: 3950314 - DNA, 25 bp, Homo sapien
tctcgggagctcatttcccttaaga

SEQ ID NO: 3950315 - DNA, 25 bp, Homo sapien
gaatcagttactgccaggcgcggtg

SEQ ID NO: 3950316 - DNA, 25 bp, Homo sapien
catgcacggcaacggggcgtgtggc

SEQ ID NO: 3950317 - DNA, 25 bp, Homo sapien
tgagcaggggcccatgcacggcaac

SEQ ID NO: 3950318 - DNA, 25 bp, Homo sapien
gggcgtgtggccggcgaaaggcaag

SEQ ID NO: 3950319 - DNA, 25 bp, Homo sapien
tgtggccggcgaaaggcaaggaaga

SEQ ID NO: 3950320 - DNA, 25 bp, Homo sapien
tcccggatgcggctgacatgctcct

SEQ ID NO: 3950321 - DNA, 25 bp, Homo sapien
agtagtttcgttcctcccgctcgcg

SEQ ID NO: 3950322 - DNA, 25 bp, Homo sapien
ccagctgcctccgtgtgatctccca

SEQ ID NO: 3950323 - DNA, 25 bp, Homo sapien
gtcccgctccagctggaagtagttt

SEQ ID NO: 3950324 - DNA, 25 bp, Homo sapien
caggttgttctggtgctcatatagc

SEQ ID NO: 3950325 - DNA, 25 bp, Homo sapien
cctgtatgcggtgctctttctgtgc

SEQ ID NO: 3950326 - DNA, 25 bp, Homo sapien
agtgcccgcatgtccttgcgcagca

SEQ ID NO: 3950327 - DNA, 25 bp, Homo sapien
ccagcttcatgactacagtgccctc

SEQ ID NO: 3950328 - DNA, 25 bp, Homo sapien
ctcaaaatcattccgcatcctggtg

SEQ ID NO: 3950329 - DNA, 25 bp, Homo sapien
tctcaaaatcattccgcatcctggt

SEQ ID NO: 3950330 - DNA, 25 bp, Homo sapien
aaaatcattccgcatcctggtgatc

SEQ ID NO: 3950331 - DNA, 25 bp, Homo sapien
aatcattccgcatcctggtgatctc

SEQ ID NO: 3950332 - DNA, 25 bp, Homo sapien
gattctgagtgggtccactggcctt

SEQ ID NO: 3950333 - DNA, 25 bp, Homo sapien
gaaataggttgttctgggattctga

SEQ ID NO: 3950334 - DNA, 25 bp, Homo sapien
gctccctgagttaacaagctctgga

SEQ ID NO: 3950335 - DNA, 25 bp, Homo sapien
gcatgccttggctgttttaatccag

SEQ ID NO: 3950336 - DNA, 25 bp, Homo sapien
cagcagcttagcagaggaagacgtg

SEQ ID NO: 3950337 - DNA, 25 bp, Homo sapien
catggagcctgtaaacgggcccaaa

SEQ ID NO: 3950338 - DNA, 25 bp, Homo sapien
gtgcccctacggctacagaacatgg

SEQ ID NO: 3950339 - DNA, 25 bp, Homo sapien
cagcaaacagcagcttagcagagga

SEQ ID NO: 3950340 - DNA, 25 bp, Homo sapien
gagctcagtctttctccgcaagtcg

SEQ ID NO: 3950341 - DNA, 25 bp, Homo sapien
tcctcgtggcgctgcatcagcgtgt

SEQ ID NO: 3950342 - DNA, 25 bp, Homo sapien
gcaagtcgagttcgtccctcagcat

SEQ ID NO: 3950343 - DNA, 25 bp, Homo sapien
tagttcttaatgtcggtgaaggcct

SEQ ID NO: 3950344 - DNA, 25 bp, Homo sapien
gcccacattctaggacaggcagagt

SEQ ID NO: 3950345 - DNA, 25 bp, Homo sapien
gacaggcagagtgtgcctccccagc

SEQ ID NO: 3950346 - DNA, 25 bp, Homo sapien
tgagaggggcattgtcaaacaatct

SEQ ID NO: 3950347 - DNA, 25 bp, Homo sapien
ctgcagcccacattctaggacaggc

SEQ ID NO: 3950348 - DNA, 25 bp, Homo sapien
ggcatgctggcacctagacgtcttc

SEQ ID NO: 3950349 - DNA, 25 bp, Homo sapien
ccaagggccgttgtctactgtagaa

SEQ ID NO: 3950350 - DNA, 25 bp, Homo sapien
cgcaggcagtgactatgacacctat

SEQ ID NO: 3950351 - DNA, 25 bp, Homo sapien
gcggttccatctgagcttttacaaa

SEQ ID NO: 3950352 - DNA, 25 bp, Homo sapien
ctgcttgtccctctcgtagtttgcg

SEQ ID NO: 3950353 - DNA, 25 bp, Homo sapien
tcgtagtttgcgagctgtttctgca

SEQ ID NO: 3950354 - DNA, 25 bp, Homo sapien
tggagagggtctgccaggcgcttgt

SEQ ID NO: 3950355 - DNA, 25 bp, Homo sapien
tgcatctcgctcatctcctcccgag

SEQ ID NO: 3950356 - DNA, 25 bp, Homo sapien
gtgaatcgctgctctaacacttcat

SEQ ID NO: 3950357 - DNA, 25 bp, Homo sapien
cctgactttcaaacgggcttttgtg

SEQ ID NO: 3950358 - DNA, 25 bp, Homo sapien
cttggtgaatcgctgctctaacact

SEQ ID NO: 3950359 - DNA, 25 bp, Homo sapien
ctgactttcaaacgggcttttgtgc

SEQ ID NO: 3950360 - DNA, 25 bp, Homo sapien
tgcagggccagcgtggtgccactca

SEQ ID NO: 3950361 - DNA, 25 bp, Homo sapien
actgcagggccagcgtggtgccact

SEQ ID NO: 3950362 - DNA, 25 bp, Homo sapien
caactgcagggccagcgtggtgcca

SEQ ID NO: 3950363 - DNA, 25 bp, Homo sapien
cgccaactgcagggccagcgtggtg

SEQ ID NO: 3950364 - DNA, 25 bp, Homo sapien
gatctcactgactaccttgcaggtg

SEQ ID NO: 3950365 - DNA, 25 bp, Homo sapien
tgtctaacacagcagtcctcaggat

SEQ ID NO: 3950366 - DNA, 25 bp, Homo sapien
tgagaagcgaatcccactacaacgg

SEQ ID NO: 3950367 - DNA, 25 bp, Homo sapien
gacaccagcttggacactgtcagga

SEQ ID NO: 3950368 - DNA, 25 bp, Homo sapien
acctgcctggaacacgctgcctccc

SEQ ID NO: 3950369 - DNA, 25 bp, Homo sapien
ctctgcacctgcctggaacacgctg

SEQ ID NO: 3950370 - DNA, 25 bp, Homo sapien
ggggacatctcgctgggaagatgct

SEQ ID NO: 3950371 - DNA, 25 bp, Homo sapien
caccggggtcagtgtgttgtccaca

SEQ ID NO: 3950372 - DNA, 25 bp, Homo sapien
ggttcttgaaccctgtcttctgctg

SEQ ID NO: 3950373 - DNA, 25 bp, Homo sapien
cagcttgcgttctagcacgaggttc

SEQ ID NO: 3950374 - DNA, 25 bp, Homo sapien
tgaacttccgatagagctcgtcccg

SEQ ID NO: 3950375 - DNA, 25 bp, Homo sapien
tcctggatggctgcggtgaacttcc

SEQ ID NO: 3950376 - DNA, 25 bp, Homo sapien
gagtttgagactcatcttttggccg

SEQ ID NO: 3950377 - DNA, 25 bp, Homo sapien
tttgagactcatcttttggccgagg

SEQ ID NO: 3950378 - DNA, 25 bp, Homo sapien
ttggccgaggcaacgggagcggcct

SEQ ID NO: 3950379 - DNA, 25 bp, Homo sapien
ttttggccgaggcaacgggagcggc

SEQ ID NO: 3950380 - DNA, 25 bp, Homo sapien
ggtgctgttcttcgactcaagaaca

SEQ ID NO: 3950381 - DNA, 25 bp, Homo sapien
gatggtgctgttcttcgactcaaga

SEQ ID NO: 3950382 - DNA, 25 bp, Homo sapien
tggtgctgttcttcgactcaagaac

SEQ ID NO: 3950383 - DNA, 25 bp, Homo sapien
tgctgttcttcgactcaagaacatc

SEQ ID NO: 3950384 - DNA, 25 bp, Homo sapien
cagtcatttcccgtgtgggacacag

SEQ ID NO: 3950385 - DNA, 25 bp, Homo sapien
catcacggtgcagaaggataaagcc

SEQ ID NO: 3950386 - DNA, 25 bp, Homo sapien
cttcactgcgttggctcaggtagca

SEQ ID NO: 3950387 - DNA, 25 bp, Homo sapien
tattccacaaatgacgagacggagg

SEQ ID NO: 3950388 - DNA, 25 bp, Homo sapien
ttccaagggcttgaagcccacgttg

SEQ ID NO: 3950389 - DNA, 25 bp, Homo sapien
tcatacgtgcgcagcaggtcgttat

SEQ ID NO: 3950390 - DNA, 25 bp, Homo sapien
agctttgcctcatacgtgcgcagca

SEQ ID NO: 3950391 - DNA, 25 bp, Homo sapien
cacgttgtccagagggatcccgaag

SEQ ID NO: 3950392 - DNA, 25 bp, Homo sapien
cctggcccagtgtctgtccgatcac

SEQ ID NO: 3950393 - DNA, 25 bp, Homo sapien
tggcccagtgtctgtccgatcacag

SEQ ID NO: 3950394 - DNA, 25 bp, Homo sapien
gggccctggcccagtgtctgtccga

SEQ ID NO: 3950395 - DNA, 25 bp, Homo sapien
cgtcggggtgcccaccagtcccgcg

SEQ ID NO: 3950396 - DNA, 25 bp, Homo sapien
aatagactctacgaggacacacccg

SEQ ID NO: 3950397 - DNA, 25 bp, Homo sapien
cacctaccgagggagttagagcgaa

SEQ ID NO: 3950398 - DNA, 25 bp, Homo sapien
tccattcggtgggacaacagtggcg

SEQ ID NO: 3950399 - DNA, 25 bp, Homo sapien
tgtcatcccgagtgttcctaggctg

SEQ ID NO: 3950400 - DNA, 25 bp, Homo sapien
gagccactcgaccagctttcatgtg

SEQ ID NO: 3950401 - DNA, 25 bp, Homo sapien
cacaattcccttttgcacggagaca

SEQ ID NO: 3950402 - DNA, 25 bp, Homo sapien
tgtgtcaccgaaggcaggccatcaa

SEQ ID NO: 3950403 - DNA, 25 bp, Homo sapien
taattatcaggtggcggcatctgcc

SEQ ID NO: 3950404 - DNA, 25 bp, Homo sapien
tgtggcacgtagctagggataccga

SEQ ID NO: 3950405 - DNA, 25 bp, Homo sapien
tgcgaacgcgaagtacagaagaacc

SEQ ID NO: 3950406 - DNA, 25 bp, Homo sapien
atctgtggccagcactcgaacggag

SEQ ID NO: 3950407 - DNA, 25 bp, Homo sapien
tgagtgcattgctccacctgagtac

SEQ ID NO: 3950408 - DNA, 25 bp, Homo sapien
actgcgcatggccaactactaggta

SEQ ID NO: 3950409 - DNA, 25 bp, Homo sapien
tcataatggccaaatactttaaggg

SEQ ID NO: 3950410 - DNA, 25 bp, Homo sapien
gaatgctattcagcaagaaacaggg

SEQ ID NO: 3950411 - DNA, 25 bp, Homo sapien
taaccaagttgggtacatccatgca

SEQ ID NO: 3950412 - DNA, 25 bp, Homo sapien
aagtgaggtcctgctacaaacggcg

SEQ ID NO: 3950413 - DNA, 25 bp, Homo sapien
gtgaccagcccaagccctcatgagg

SEQ ID NO: 3950414 - DNA, 25 bp, Homo sapien
cggacagggaaacacggccgcgctc

SEQ ID NO: 3950415 - DNA, 25 bp, Homo sapien
cgctacactcaacggcaacaggaag

SEQ ID NO: 3950416 - DNA, 25 bp, Homo sapien
ctcatgtagataggttcctccattt

SEQ ID NO: 3950417 - DNA, 25 bp, Homo sapien
tttccagaggactgcggtctccagc

SEQ ID NO: 3950418 - DNA, 25 bp, Homo sapien
gatttagctagagtcttctttagga

SEQ ID NO: 3950419 - DNA, 25 bp, Homo sapien
tatgggtattagagatagtcaggcc

SEQ ID NO: 3950420 - DNA, 25 bp, Homo sapien
cactgcccggtctgcgtgagcacga

SEQ ID NO: 3950421 - DNA, 25 bp, Homo sapien
cggtctgcgtgagcacgatttccct

SEQ ID NO: 3950422 - DNA, 25 bp, Homo sapien
gcccggtctgcgtgagcacgatttc

SEQ ID NO: 3950423 - DNA, 25 bp, Homo sapien
ggtctgcgtgagcacgatttccctc

SEQ ID NO: 3950424 - DNA, 25 bp, Homo sapien
gcccccgccgctgccaacatcttcc

SEQ ID NO: 3950425 - DNA, 25 bp, Homo sapien
ggggccgcaatgcaggggcaccgcc

SEQ ID NO: 3950426 - DNA, 25 bp, Homo sapien
cgccgctgccaacatcttccccggc

SEQ ID NO: 3950427 - DNA, 25 bp, Homo sapien
gcaatgcaggggcaccgcccccgcc

SEQ ID NO: 3950428 - DNA, 25 bp, Homo sapien
cgctggcctcgcggtggtgcacgtt

SEQ ID NO: 3950429 - DNA, 25 bp, Homo sapien
cgctccagcggcaggtggctgtccc

SEQ ID NO: 3950430 - DNA, 25 bp, Homo sapien
tggtgcacgttgacgcgctccagcg

SEQ ID NO: 3950431 - DNA, 25 bp, Homo sapien
cggtggtgcacgttgacgcgctcca

SEQ ID NO: 3950432 - DNA, 25 bp, Homo sapien
gggagggcatgagcgaggggagggc

SEQ ID NO: 3950433 - DNA, 25 bp, Homo sapien
gagggcatgagcgaggggagggccg

SEQ ID NO: 3950434 - DNA, 25 bp, Homo sapien
gggcgggagggcatgagcgagggga

SEQ ID NO: 3950435 - DNA, 25 bp, Homo sapien
cgggagggcatgagcgaggggaggg

SEQ ID NO: 3950436 - DNA, 25 bp, Homo sapien
tggcctgaagacctgcccgaagggc

SEQ ID NO: 3950437 - DNA, 25 bp, Homo sapien
gcacggagtccatggtgcccggctc

SEQ ID NO: 3950438 - DNA, 25 bp, Homo sapien
gagcgcacggagtccatggtgcccg

SEQ ID NO: 3950439 - DNA, 25 bp, Homo sapien
ttgtctggcctgaagacctgcccga

SEQ ID NO: 3950440 - DNA, 25 bp, Homo sapien
taagagaggcagattgagcgactcg

SEQ ID NO: 3950441 - DNA, 25 bp, Homo sapien
cccgaagcccgtttaagagaggcag

SEQ ID NO: 3950442 - DNA, 25 bp, Homo sapien
ttaagagaggcagattgagcgactc

SEQ ID NO: 3950443 - DNA, 25 bp, Homo sapien
aagagaggcagattgagcgactcga

SEQ ID NO: 3950444 - DNA, 25 bp, Homo sapien
ggcaagagcaggatgctcaatgtgt

SEQ ID NO: 3950445 - DNA, 25 bp, Homo sapien
gcaagagcaggatgctcaatgtgtt

SEQ ID NO: 3950446 - DNA, 25 bp, Homo sapien
ggcagttttagggtcttggaacata

SEQ ID NO: 3950447 - DNA, 25 bp, Homo sapien
atctatgcagaaggtctcatctgcg

SEQ ID NO: 3950448 - DNA, 25 bp, Homo sapien
catatgtcatatagcgcttcgttat

SEQ ID NO: 3950449 - DNA, 25 bp, Homo sapien
cagaaggtctcatctgcgttttcta

SEQ ID NO: 3950450 - DNA, 25 bp, Homo sapien
gaccccaactcatggtagcagacac

SEQ ID NO: 3950451 - DNA, 25 bp, Homo sapien
ggtgaccccaactcatggtagcaga

SEQ ID NO: 3950452 - DNA, 25 bp, Homo sapien
tgaccccaactcatggtagcagaca

SEQ ID NO: 3950453 - DNA, 25 bp, Homo sapien
gtggtgaccccaactcatggtagca

SEQ ID NO: 3950454 - DNA, 25 bp, Homo sapien
gagacacatgtgaagagttcctgga

SEQ ID NO: 3950455 - DNA, 25 bp, Homo sapien
actgctctgagacacatgtgaagag

SEQ ID NO: 3950456 - DNA, 25 bp, Homo sapien
tcctggatggccgtattattcccaa

SEQ ID NO: 3950457 - DNA, 25 bp, Homo sapien
tattattcccaatgaaggtggctga

SEQ ID NO: 3950458 - DNA, 25 bp, Homo sapien
taggcaaaaccgcatactatacaaa

SEQ ID NO: 3950459 - DNA, 25 bp, Homo sapien
caaaaccgcatactatacaaatgct

SEQ ID NO: 3950460 - DNA, 25 bp, Homo sapien
tattaggcaaaaccgcatactatac

SEQ ID NO: 3950461 - DNA, 25 bp, Homo sapien
cactttattaggcaaaaccgcatac

SEQ ID NO: 3950462 - DNA, 25 bp, Homo sapien
gttctctgatgtagctgaatgtttc

SEQ ID NO: 3950463 - DNA, 25 bp, Homo sapien
tcaacgggacagacatgggacaagt

SEQ ID NO: 3950464 - DNA, 25 bp, Homo sapien
cagctgtcgcactgccatgggttct

SEQ ID NO: 3950465 - DNA, 25 bp, Homo sapien
tgggacaagtgtgcctgatcatggt

SEQ ID NO: 3950466 - DNA, 25 bp, Homo sapien
tctacgtgtttcttgggcagaggac

SEQ ID NO: 3950467 - DNA, 25 bp, Homo sapien
tggggagcggatctgagctgcattt

SEQ ID NO: 3950468 - DNA, 25 bp, Homo sapien
agtgatcagtgtgggaccgtgaagc

SEQ ID NO: 3950469 - DNA, 25 bp, Homo sapien
tgtgggaccgtgaagctggatttcc

SEQ ID NO: 3950470 - DNA, 25 bp, Homo sapien
ccgtgaagctggatttccccaggag

SEQ ID NO: 3950471 - DNA, 25 bp, Homo sapien
ttggtttctgggcagcaacttcctt

SEQ ID NO: 3950472 - DNA, 25 bp, Homo sapien
tctgggcagcaacttccttgacttg

SEQ ID NO: 3950473 - DNA, 25 bp, Homo sapien
gtttctgggcagcaacttccttgac

SEQ ID NO: 3950474 - DNA, 25 bp, Homo sapien
ctgggcagcaacttccttgacttgc

SEQ ID NO: 3950475 - DNA, 25 bp, Homo sapien
ttttttgtttgcgaggccacaggga

SEQ ID NO: 3950476 - DNA, 25 bp, Homo sapien
ttttgtttgcgaggccacagggaaa

SEQ ID NO: 3950477 - DNA, 25 bp, Homo sapien
tcttttttgtttgcgaggccacagg

SEQ ID NO: 3950478 - DNA, 25 bp, Homo sapien
ttcttttttgtttgcgaggccacag

SEQ ID NO: 3950479 - DNA, 25 bp, Homo sapien
aaccgggtgtcttcaggacaggtgt

SEQ ID NO: 3950480 - DNA, 25 bp, Homo sapien
agagcatgagaaccgggtgtcttca

SEQ ID NO: 3950481 - DNA, 25 bp, Homo sapien
agaagagcatgagaaccgggtgtct

SEQ ID NO: 3950482 - DNA, 25 bp, Homo sapien
tgagaaccgggtgtcttcaggacag

SEQ ID NO: 3950483 - DNA, 25 bp, Homo sapien
aagttgcaagctttaatgtacccat

SEQ ID NO: 3950484 - DNA, 25 bp, Homo sapien
gatctgctactcagtttccagtctc

SEQ ID NO: 3950485 - DNA, 25 bp, Homo sapien
tgagcattttggtttctcggatctg

SEQ ID NO: 3950486 - DNA, 25 bp, Homo sapien
ctgccagcgtgcctcttctgcaagc

SEQ ID NO: 3950487 - DNA, 25 bp, Homo sapien
ctcctctttagccatcatctggctg

SEQ ID NO: 3950488 - DNA, 25 bp, Homo sapien
tgttcggacagttacacgccatgac

SEQ ID NO: 3950489 - DNA, 25 bp, Homo sapien
gcgtctcccgagtaggtcctgagga

SEQ ID NO: 3950490 - DNA, 25 bp, Homo sapien
tgttcctagagagccagcggcgtct

SEQ ID NO: 3950491 - DNA, 25 bp, Homo sapien
ctcttgaggttctgtgaggcggcat

SEQ ID NO: 3950492 - DNA, 25 bp, Homo sapien
agcctcggggaccatgaagccacag

SEQ ID NO: 3950493 - DNA, 25 bp, Homo sapien
gcagcctcggggaccatgaagccac

SEQ ID NO: 3950494 - DNA, 25 bp, Homo sapien
cagcctcggggaccatgaagccaca

SEQ ID NO: 3950495 - DNA, 25 bp, Homo sapien
ctctggtggcgccatggttcagcac

SEQ ID NO: 3950496 - DNA, 25 bp, Homo sapien
agcacagacgctcttgctcacagtt

SEQ ID NO: 3950497 - DNA, 25 bp, Homo sapien
ggttcagcacagacgctcttgctca

SEQ ID NO: 3950498 - DNA, 25 bp, Homo sapien
cgccatggttcagcacagacgctct

SEQ ID NO: 3950499 - DNA, 25 bp, Homo sapien
ttaagggaagcgcttccactttctg

SEQ ID NO: 3950500 - DNA, 25 bp, Homo sapien
ctgggctttcggacttgccagaatg

SEQ ID NO: 3950501 - DNA, 25 bp, Homo sapien
gaaagctgggctttcggacttgcca

SEQ ID NO: 3950502 - DNA, 25 bp, Homo sapien
aagggaagcgcttccactttctggg

SEQ ID NO: 3950503 - DNA, 25 bp, Homo sapien
acaaggcttagacattcgtccagta

SEQ ID NO: 3950504 - DNA, 25 bp, Homo sapien
caaggcttagacattcgtccagtat

SEQ ID NO: 3950505 - DNA, 25 bp, Homo sapien
cacaaggcttagacattcgtccagt

SEQ ID NO: 3950506 - DNA, 25 bp, Homo sapien
aaggcttagacattcgtccagtatg

SEQ ID NO: 3950507 - DNA, 25 bp, Homo sapien
aaggggctacaagaggcagttggaa

SEQ ID NO: 3950508 - DNA, 25 bp, Homo sapien
ctgggctgtgactacttccaggaag

SEQ ID NO: 3950509 - DNA, 25 bp, Homo sapien
tgggctgtgactacttccaggaagg

SEQ ID NO: 3950510 - DNA, 25 bp, Homo sapien
gaaggggctacaagaggcagttgga

SEQ ID NO: 3950511 - DNA, 25 bp, Homo sapien
atgcacaaggtcctcttactgttcc

SEQ ID NO: 3950512 - DNA, 25 bp, Homo sapien
tgtagtgtggaaacaaattattcat

SEQ ID NO: 3950513 - DNA, 25 bp, Homo sapien
attcatgcacaaggtcctcttactg

SEQ ID NO: 3950514 - DNA, 25 bp, Homo sapien
attattcatgcacaaggtcctctta

SEQ ID NO: 3950515 - DNA, 25 bp, Homo sapien
aaaagtcactgggttctctaagaag

SEQ ID NO: 3950516 - DNA, 25 bp, Homo sapien
caaaaagtcactgggttctctaaga

SEQ ID NO: 3950517 - DNA, 25 bp, Homo sapien
aggatttcacagatttaaggtgcaa

SEQ ID NO: 3950518 - DNA, 25 bp, Homo sapien
cagatttaaggtgcaaaaagtcact

SEQ ID NO: 3950519 - DNA, 25 bp, Homo sapien
ttctttttctgccctcttgggcttc

SEQ ID NO: 3950520 - DNA, 25 bp, Homo sapien
tttttctgccctcttgggcttctga

SEQ ID NO: 3950521 - DNA, 25 bp, Homo sapien
gccctcttgggcttctgaaatgaaa

SEQ ID NO: 3950522 - DNA, 25 bp, Homo sapien
tgccctcttgggcttctgaaatgaa

SEQ ID NO: 3950523 - DNA, 25 bp, Homo sapien
cttagaaggtggggaataatcatca

SEQ ID NO: 3950524 - DNA, 25 bp, Homo sapien
ttagaaggtggggaataatcatcat

SEQ ID NO: 3950525 - DNA, 25 bp, Homo sapien
cattttccgttccccagcattggca

SEQ ID NO: 3950526 - DNA, 25 bp, Homo sapien
caggttctgggactggtggctgtgg

SEQ ID NO: 3950527 - DNA, 25 bp, Homo sapien
ccgttccccagcattggcaggttct

SEQ ID NO: 3950528 - DNA, 25 bp, Homo sapien
ttttccgttccccagcattggcagg

SEQ ID NO: 3950529 - DNA, 25 bp, Homo sapien
gatgagtttcgtctcctccactgga

SEQ ID NO: 3950530 - DNA, 25 bp, Homo sapien
catgaggcgtgcccagagggacaga

SEQ ID NO: 3950531 - DNA, 25 bp, Homo sapien
ggacagaggcagatgagtttcgtct

SEQ ID NO: 3950532 - DNA, 25 bp, Homo sapien
ctggcatgaggcgtgcccagaggga

SEQ ID NO: 3950533 - DNA, 25 bp, Homo sapien
ctttctccaactttggaagcccagg

SEQ ID NO: 3950534 - DNA, 25 bp, Homo sapien
ggcagctttctccaactttggaagc

SEQ ID NO: 3950535 - DNA, 25 bp, Homo sapien
ggagcatggcccctgtccacagatg

SEQ ID NO: 3950536 - DNA, 25 bp, Homo sapien
gaagcccaggagcatggcccctgtc

SEQ ID NO: 3950537 - DNA, 25 bp, Homo sapien
caaggtaaccagtaggcattcccag

SEQ ID NO: 3950538 - DNA, 25 bp, Homo sapien
taggcattcccagatacagcgaagg

SEQ ID NO: 3950539 - DNA, 25 bp, Homo sapien
cagcgaaggtcctcacaccaagata

SEQ ID NO: 3950540 - DNA, 25 bp, Homo sapien
agtaggcattcccagatacagcgaa

SEQ ID NO: 3950541 - DNA, 25 bp, Homo sapien
tgtagtgacagaagcaggaaactcc

SEQ ID NO: 3950542 - DNA, 25 bp, Homo sapien
ctgcggagtgcaggccacctctacg

SEQ ID NO: 3950543 - DNA, 25 bp, Homo sapien
attcgagacgggcagcacaagctgc

SEQ ID NO: 3950544 - DNA, 25 bp, Homo sapien
cctctacggccaggaaacggattct

SEQ ID NO: 3950545 - DNA, 25 bp, Homo sapien
aatacaaaacagcagggcatggtgg

SEQ ID NO: 3950546 - DNA, 25 bp, Homo sapien
tactcaggaggctgaggcaggagaa

SEQ ID NO: 3950547 - DNA, 25 bp, Homo sapien
cgggcgcctgtagtcccagctactc

SEQ ID NO: 3950548 - DNA, 25 bp, Homo sapien
cacgccactgccagcctggatgaca

SEQ ID NO: 3950549 - DNA, 25 bp, Homo sapien
ttacgtagatcagcgatacgatgat

SEQ ID NO: 3950550 - DNA, 25 bp, Homo sapien
gtagatcagcgatacgatgattcca

SEQ ID NO: 3950551 - DNA, 25 bp, Homo sapien
acgtagatcagcgatacgatgattc

SEQ ID NO: 3950552 - DNA, 25 bp, Homo sapien
gtttacgtagatcagcgatacgatg

SEQ ID NO: 3950553 - DNA, 25 bp, Homo sapien
ctgtgtaaacgcccatgaacctaag

SEQ ID NO: 3950554 - DNA, 25 bp, Homo sapien
cgcccatgaacctaagattacaaga

SEQ ID NO: 3950555 - DNA, 25 bp, Homo sapien
aacgcccatgaacctaagattacaa

SEQ ID NO: 3950556 - DNA, 25 bp, Homo sapien
tccactgtgtaaacgcccatgaacc

SEQ ID NO: 3950557 - DNA, 25 bp, Homo sapien
atcttcacctgttgaattcataagt

SEQ ID NO: 3950558 - DNA, 25 bp, Homo sapien
ttcacctgttgaattcataagttca

SEQ ID NO: 3950559 - DNA, 25 bp, Homo sapien
ctgacaaagttgatttatcaagttg

SEQ ID NO: 3950560 - DNA, 25 bp, Homo sapien
cacctgttgaattcataagttcatg

SEQ ID NO: 3950561 - DNA, 25 bp, Homo sapien
gactggaaaaaagggtatgggatca

SEQ ID NO: 3950562 - DNA, 25 bp, Homo sapien
aaaagggtatgggatcatcaccgga

SEQ ID NO: 3950563 - DNA, 25 bp, Homo sapien
gaaaaaagggtatgggatcatcacc

SEQ ID NO: 3950564 - DNA, 25 bp, Homo sapien
aaagggtatgggatcatcaccggac

SEQ ID NO: 3950565 - DNA, 25 bp, Homo sapien
cctgggcgataagagtgaaaactcc

SEQ ID NO: 3950566 - DNA, 25 bp, Homo sapien
cagtgaccagcaaggttgcgccatt

SEQ ID NO: 3950567 - DNA, 25 bp, Homo sapien
ggttgcagtgaccagcaaggttgcg

SEQ ID NO: 3950568 - DNA, 25 bp, Homo sapien
gggcgataagagtgaaaactccatc

SEQ ID NO: 3950569 - DNA, 25 bp, Homo sapien
tctaaagtaacatcctctcaaggcc

SEQ ID NO: 3950570 - DNA, 25 bp, Homo sapien
tccttctaaagtaacatcctctcaa

SEQ ID NO: 3950571 - DNA, 25 bp, Homo sapien
ttccattagtagaaagccttcctaa

SEQ ID NO: 3950572 - DNA, 25 bp, Homo sapien
tcacttgatatcaggagtcgaggcg

SEQ ID NO: 3950573 - DNA, 25 bp, Homo sapien
ggacagtacttgttctcaagggaat

SEQ ID NO: 3950574 - DNA, 25 bp, Homo sapien
tcacagaggccgtgccaatctctct

SEQ ID NO: 3950575 - DNA, 25 bp, Homo sapien
acttaagtatgtgtgctactgaggc

SEQ ID NO: 3950576 - DNA, 25 bp, Homo sapien
taagtatgtgtgctactgaggcaag

SEQ ID NO: 3950577 - DNA, 25 bp, Homo sapien
gtatgtgtgctactgaggcaagcat

SEQ ID NO: 3950578 - DNA, 25 bp, Homo sapien
taaacaaaaggtcatatgcacaaac

SEQ ID NO: 3950579 - DNA, 25 bp, Homo sapien
tacagacagtgactcattatactgc

SEQ ID NO: 3950580 - DNA, 25 bp, Homo sapien
taagaatgctcatgccctgtgactc

SEQ ID NO: 3950581 - DNA, 25 bp, Homo sapien
tttacatcgagggtaataagaatgc

SEQ ID NO: 3950582 - DNA, 25 bp, Homo sapien
atcccagctaataggaggtctttca

SEQ ID NO: 3950583 - DNA, 25 bp, Homo sapien
tcccagctaataggaggtctttcat

SEQ ID NO: 3950584 - DNA, 25 bp, Homo sapien
cccagctaataggaggtctttcatt

SEQ ID NO: 3950585 - DNA, 25 bp, Homo sapien
aaatgtaggagggaaggtgttactg

SEQ ID NO: 3950586 - DNA, 25 bp, Homo sapien
cagacagacatcagcacttaaaagt

SEQ ID NO: 3950587 - DNA, 25 bp, Homo sapien
cagacatcagcacttaaaagtttta

SEQ ID NO: 3950588 - DNA, 25 bp, Homo sapien
cacagacagacatcagcacttaaaa

SEQ ID NO: 3950589 - DNA, 25 bp, Homo sapien
gtcagtttctcttcctggattcaga

SEQ ID NO: 3950590 - DNA, 25 bp, Homo sapien
cagaagtctttcatggtaggtccag

SEQ ID NO: 3950591 - DNA, 25 bp, Homo sapien
tcagaagtctttcatggtaggtcca

SEQ ID NO: 3950592 - DNA, 25 bp, Homo sapien
tttctcttcctggattcagaagtct

SEQ ID NO: 3950593 - DNA, 25 bp, Homo sapien
agaccaacctgggcaacataagaag

SEQ ID NO: 3950594 - DNA, 25 bp, Homo sapien
tgagcctaggaatttgagaccaacc

SEQ ID NO: 3950595 - DNA, 25 bp, Homo sapien
accaacctgggcaacataagaagac

SEQ ID NO: 3950596 - DNA, 25 bp, Homo sapien
caacctgggcaacataagaagaccc

SEQ ID NO: 3950597 - DNA, 25 bp, Homo sapien
gggagactgaagtgagagaaccact

SEQ ID NO: 3950598 - DNA, 25 bp, Homo sapien
tgtcactgtactgtagcctaagcaa

SEQ ID NO: 3950599 - DNA, 25 bp, Homo sapien
tcatgtcactgtactgtagcctaag

SEQ ID NO: 3950600 - DNA, 25 bp, Homo sapien
tgggagactgaagtgagagaaccac

SEQ ID NO: 3950601 - DNA, 25 bp, Homo sapien
gctataatgagccatgataggacca

SEQ ID NO: 3950602 - DNA, 25 bp, Homo sapien
tgaggctataatgagccatgatagg

SEQ ID NO: 3950603 - DNA, 25 bp, Homo sapien
taatgagccatgataggaccactga

SEQ ID NO: 3950604 - DNA, 25 bp, Homo sapien
tgggaaggctgacatggtaggattg

SEQ ID NO: 3950605 - DNA, 25 bp, Homo sapien
acaaaattcactgagtgtcacgatg

SEQ ID NO: 3950606 - DNA, 25 bp, Homo sapien
attcactgagtgtcacgatgcttac

SEQ ID NO: 3950607 - DNA, 25 bp, Homo sapien
aaaattcactgagtgtcacgatgct

SEQ ID NO: 3950608 - DNA, 25 bp, Homo sapien
agccatggcaacatactgaggtccc

SEQ ID NO: 3950609 - DNA, 25 bp, Homo sapien
agtccaaactccttaacagcccctg

SEQ ID NO: 3950610 - DNA, 25 bp, Homo sapien
ttctgcacacacattgagccatctg

SEQ ID NO: 3950611 - DNA, 25 bp, Homo sapien
cctgagccatgtctctaatctatga

SEQ ID NO: 3950612 - DNA, 25 bp, Homo sapien
ccttgcctcagggattaagtccaaa

SEQ ID NO: 3950613 - DNA, 25 bp, Homo sapien
tttgaaaggaaccatcccacgccat

SEQ ID NO: 3950614 - DNA, 25 bp, Homo sapien
gtgcatttgaaaggaaccatcccac

SEQ ID NO: 3950615 - DNA, 25 bp, Homo sapien
catttgaaaggaaccatcccacgcc

SEQ ID NO: 3950616 - DNA, 25 bp, Homo sapien
ttgaaaggaaccatcccacgccatt

SEQ ID NO: 3950617 - DNA, 25 bp, Homo sapien
cttcctggattcacaagtctttcat

SEQ ID NO: 3950618 - DNA, 25 bp, Homo sapien
tcctggattcacaagtctttcatgg

SEQ ID NO: 3950619 - DNA, 25 bp, Homo sapien
ctggattcacaagtctttcatggta

SEQ ID NO: 3950620 - DNA, 25 bp, Homo sapien
ctcttcctggattcacaagtctttc

SEQ ID NO: 3950621 - DNA, 25 bp, Homo sapien
atataaccttcataacatacttgag

SEQ ID NO: 3950622 - DNA, 25 bp, Homo sapien
tataaccttcataacatacttgaga

SEQ ID NO: 3950623 - DNA, 25 bp, Homo sapien
acatataaccttcataacatacttg

SEQ ID NO: 3950624 - DNA, 25 bp, Homo sapien
taacatataaccttcataacatact

SEQ ID NO: 3950625 - DNA, 25 bp, Homo sapien
ccacgtatacgaaaattccaaatgt

SEQ ID NO: 3950626 - DNA, 25 bp, Homo sapien
acccctctggaatccacgtatacga

SEQ ID NO: 3950627 - DNA, 25 bp, Homo sapien
cctctggaatccacgtatacgaaaa

SEQ ID NO: 3950628 - DNA, 25 bp, Homo sapien
gcagtcagctgcgatagcactacta

SEQ ID NO: 3950629 - DNA, 25 bp, Homo sapien
cttgagtcactgtgaggtcacctac

SEQ ID NO: 3950630 - DNA, 25 bp, Homo sapien
tcactgtgaggtcacctactggaaa

SEQ ID NO: 3950631 - DNA, 25 bp, Homo sapien
gaggtcacctactggaaatcaccag

SEQ ID NO: 3950632 - DNA, 25 bp, Homo sapien
tgaggtcacctactggaaatcacca

SEQ ID NO: 3950633 - DNA, 25 bp, Homo sapien
taatgtagaattagtgggcgtgtta

SEQ ID NO: 3950634 - DNA, 25 bp, Homo sapien
attagtgggcgtgttaagcttgttt

SEQ ID NO: 3950635 - DNA, 25 bp, Homo sapien
agaattagtgggcgtgttaagcttg

SEQ ID NO: 3950636 - DNA, 25 bp, Homo sapien
tgtagaattagtgggcgtgttaagc

SEQ ID NO: 3950637 - DNA, 25 bp, Homo sapien
gtagggtatgggcctaaataggcca

SEQ ID NO: 3950638 - DNA, 25 bp, Homo sapien
tagggtatgggcctaaataggccat

SEQ ID NO: 3950639 - DNA, 25 bp, Homo sapien
agggtatgggcctaaataggccatt

SEQ ID NO: 3950640 - DNA, 25 bp, Homo sapien
gggtatgggcctaaataggccattg

SEQ ID NO: 3950641 - DNA, 25 bp, Homo sapien
ctgggcagctgccacgaggcaagag

SEQ ID NO: 3950642 - DNA, 25 bp, Homo sapien
aggctgggccttgtcgaggcctgca

SEQ ID NO: 3950643 - DNA, 25 bp, Homo sapien
caggcagaaatttggcctgggcagc

SEQ ID NO: 3950644 - DNA, 25 bp, Homo sapien
aatggcctcacagtcatgagttggg

SEQ ID NO: 3950645 - DNA, 25 bp, Homo sapien
ccaaagaggttgttgagaagcagga

SEQ ID NO: 3950646 - DNA, 25 bp, Homo sapien
atgggtaggcactgagtccaaagag

SEQ ID NO: 3950647 - DNA, 25 bp, Homo sapien
ccgccaggagatgggtaggcactga

SEQ ID NO: 3950648 - DNA, 25 bp, Homo sapien
aagaggttgttgagaagcaggaatc

SEQ ID NO: 3950649 - DNA, 25 bp, Homo sapien
ccttggcgtggaggagcccaccgac

SEQ ID NO: 3950650 - DNA, 25 bp, Homo sapien
gggcaggagctcatcctggagaggc

SEQ ID NO: 3950651 - DNA, 25 bp, Homo sapien
cgccgggaggcccaaccttggcgtg

SEQ ID NO: 3950652 - DNA, 25 bp, Homo sapien
acaacttgggcctgcggcggtcgcc

SEQ ID NO: 3950653 - DNA, 25 bp, Homo sapien
tgtgaggcgaggggctcgggctgac

SEQ ID NO: 3950654 - DNA, 25 bp, Homo sapien
tgaggcgaggggctcgggctgacct

SEQ ID NO: 3950655 - DNA, 25 bp, Homo sapien
ggggctcgggctgacctctctcagc

SEQ ID NO: 3950656 - DNA, 25 bp, Homo sapien
ggcgaggggctcgggctgacctctc

SEQ ID NO: 3950657 - DNA, 25 bp, Homo sapien
tgtgaggcgaggggctcgggctgac

SEQ ID NO: 3950658 - DNA, 25 bp, Homo sapien
aggcgaggggctcgggctgacctct

SEQ ID NO: 3950659 - DNA, 25 bp, Homo sapien
gccggggtgaggcaaagggctcaca

SEQ ID NO: 3950660 - DNA, 25 bp, Homo sapien
ggcgaggggctcgggctgacctctc

SEQ ID NO: 3950661 - DNA, 25 bp, Homo sapien
agcagcccgagtgcgatcctgttcc

SEQ ID NO: 3950662 - DNA, 25 bp, Homo sapien
cccagcagcccgagtgcgatcctgt

SEQ ID NO: 3950663 - DNA, 25 bp, Homo sapien
cagcagcccgagtgcgatcctgttc

SEQ ID NO: 3950664 - DNA, 25 bp, Homo sapien
ccagcagcccgagtgcgatcctgtt

SEQ ID NO: 3950665 - DNA, 25 bp, Homo sapien
aagacgttgttgggacctggagtcg

SEQ ID NO: 3950666 - DNA, 25 bp, Homo sapien
cctgcagatgtcatcggagggccag

SEQ ID NO: 3950667 - DNA, 25 bp, Homo sapien
gcctgcagatgtcatcggagggcca

SEQ ID NO: 3950668 - DNA, 25 bp, Homo sapien
tgggactgatgactgcatgatcttc

SEQ ID NO: 3950669 - DNA, 25 bp, Homo sapien
gggactgatgactgcatgatcttct

SEQ ID NO: 3950670 - DNA, 25 bp, Homo sapien
ccaaagcccaacacccccaagtgtg

SEQ ID NO: 3950671 - DNA, 25 bp, Homo sapien
caaagcccaacacccccaagtgtgc

SEQ ID NO: 3950672 - DNA, 25 bp, Homo sapien
ttcagaggaagctttcattttataa

SEQ ID NO: 3950673 - DNA, 25 bp, Homo sapien
tctgcagtgcttcagaggaagcttt

SEQ ID NO: 3950674 - DNA, 25 bp, Homo sapien
tctttgtatcggtgctcagctgagt

SEQ ID NO: 3950675 - DNA, 25 bp, Homo sapien
tgagtctgcagtgcttcagaggaag

SEQ ID NO: 3950676 - DNA, 25 bp, Homo sapien
ccatattgaactgtaagtctcctga

SEQ ID NO: 3950677 - DNA, 25 bp, Homo sapien
caatataagttcctgcagaatgcag

SEQ ID NO: 3950678 - DNA, 25 bp, Homo sapien
tcctgcctagaaaggatcgtccctc

SEQ ID NO: 3950679 - DNA, 25 bp, Homo sapien
gactttgtcgcatcacacctcagag

SEQ ID NO: 3950680 - DNA, 25 bp, Homo sapien
accatctacgctaagacataaaatt

SEQ ID NO: 3950681 - DNA, 25 bp, Homo sapien
tcagttgtttagttacaagatagaa

SEQ ID NO: 3950682 - DNA, 25 bp, Homo sapien
tggccttgtaagaaagcaaattaac

SEQ ID NO: 3950683 - DNA, 25 bp, Homo sapien
aattaacttctaacatacaaagcct

SEQ ID NO: 3950684 - DNA, 25 bp, Homo sapien
gaaaatcttgtccattactggttaa

SEQ ID NO: 3950685 - DNA, 25 bp, Homo sapien
agtatgtatatgcagtgactcagca

SEQ ID NO: 3950686 - DNA, 25 bp, Homo sapien
ttacatccatgagcctgataaaagt

SEQ ID NO: 3950687 - DNA, 25 bp, Homo sapien
tcaagagaaacttacaggagtggac

SEQ ID NO: 3950688 - DNA, 25 bp, Homo sapien
tatcctgatttcttccatagcttgg

SEQ ID NO: 3950689 - DNA, 25 bp, Homo sapien
gaggctacataactacatggctagg

SEQ ID NO: 3950690 - DNA, 25 bp, Homo sapien
gcttggatcttgacctagagggaaa

SEQ ID NO: 3950691 - DNA, 25 bp, Homo sapien
acttggctgctctagaaaattgaca

SEQ ID NO: 3950692 - DNA, 25 bp, Homo sapien
catgctggataagaggtacctgggc

SEQ ID NO: 3950693 - DNA, 25 bp, Homo sapien
gaagcctaagagtatgactatcctg

SEQ ID NO: 3950694 - DNA, 25 bp, Homo sapien
tcctgaggtagaaagagggtcacat

SEQ ID NO: 3950695 - DNA, 25 bp, Homo sapien
tgggctctccacttacaagaagaga

SEQ ID NO: 3950696 - DNA, 25 bp, Homo sapien
tatcaccttctcagtggagactaca

SEQ ID NO: 3950697 - DNA, 25 bp, Homo sapien
gaacatgtctgatgtggtcccacct

SEQ ID NO: 3950698 - DNA, 25 bp, Homo sapien
cattgctactcctctgcctgtaggg

SEQ ID NO: 3950699 - DNA, 25 bp, Homo sapien
tccctcagctagtcctcgaacatgt

SEQ ID NO: 3950700 - DNA, 25 bp, Homo sapien
ccatggctccaaaacaagcagggat

SEQ ID NO: 3950701 - DNA, 25 bp, Homo sapien
cctcgaacatccatggctaacactg

SEQ ID NO: 3950702 - DNA, 25 bp, Homo sapien
tgactccatccatgggctagtgacc

SEQ ID NO: 3950703 - DNA, 25 bp, Homo sapien
cacaggcctgtgtctctatcagctg

SEQ ID NO: 3950704 - DNA, 25 bp, Homo sapien
cttttgaggagttattgctgtgtgg

SEQ ID NO: 3950705 - DNA, 25 bp, Homo sapien
ggatgtgatataaccctttctgtca

SEQ ID NO: 3950706 - DNA, 25 bp, Homo sapien
gctgtgtggatgtgatataaccctt

SEQ ID NO: 3950707 - DNA, 25 bp, Homo sapien
tgcttttgaggagttattgctgtgt

SEQ ID NO: 3950708 - DNA, 25 bp, Homo sapien
ctcctaagcacaagcgatcctcccg

SEQ ID NO: 3950709 - DNA, 25 bp, Homo sapien
tctgcagtgtggaaacaaattattc

SEQ ID NO: 3950710 - DNA, 25 bp, Homo sapien
attattcatgcacaaggtcctctta

SEQ ID NO: 3950711 - DNA, 25 bp, Homo sapien
tgcagtgtggaaacaaattattcat

SEQ ID NO: 3950712 - DNA, 25 bp, Homo sapien
attcatgcacaaggtcctcttactg

SEQ ID NO: 3950713 - DNA, 25 bp, Homo sapien
ggcaataagccgaaggcacatgtgg

SEQ ID NO: 3950714 - DNA, 25 bp, Homo sapien
caataagccgaaggcacatgtggca

SEQ ID NO: 3950715 - DNA, 25 bp, Homo sapien
gcaataagccgaaggcacatgtggc

SEQ ID NO: 3950716 - DNA, 25 bp, Homo sapien
gccacatctccccaggtcagtctta

SEQ ID NO: 3950717 - DNA, 25 bp, Homo sapien
gtcttcactgtggacacgccacact

SEQ ID NO: 3950718 - DNA, 25 bp, Homo sapien
tgtggacacgccacactaccaggcg

SEQ ID NO: 3950719 - DNA, 25 bp, Homo sapien
caatggcctacagccacatctcccc

SEQ ID NO: 3950720 - DNA, 25 bp, Homo sapien
agacacccgtctgatcacctagata

SEQ ID NO: 3950721 - DNA, 25 bp, Homo sapien
aaagacacccgtctgatcacctaga

SEQ ID NO: 3950722 - DNA, 25 bp, Homo sapien
ttttagccctaatacaacagaatca

SEQ ID NO: 3950723 - DNA, 25 bp, Homo sapien
ttcttgccatgcctaccttttagcc

SEQ ID NO: 3950724 - DNA, 25 bp, Homo sapien
ttgtttaattatttataccatgaat

SEQ ID NO: 3950725 - DNA, 25 bp, Homo sapien
tgtttaattatttataccatgaatt

SEQ ID NO: 3950726 - DNA, 25 bp, Homo sapien
ccatgaattactagtaattgacact

SEQ ID NO: 3950727 - DNA, 25 bp, Homo sapien
taccatgaattactagtaattgaca

SEQ ID NO: 3950728 - DNA, 25 bp, Homo sapien
atggactaagacacaaatctaggta

SEQ ID NO: 3950729 - DNA, 25 bp, Homo sapien
tggactaagacacaaatctaggtaa

SEQ ID NO: 3950730 - DNA, 25 bp, Homo sapien
ggactaagacacaaatctaggtaaa

SEQ ID NO: 3950731 - DNA, 25 bp, Homo sapien
gactaagacacaaatctaggtaaaa

SEQ ID NO: 3950732 - DNA, 25 bp, Homo sapien
tgactgctcagaccagccggctgga

SEQ ID NO: 3950733 - DNA, 25 bp, Homo sapien
actgctcagaccagccggctggagg

SEQ ID NO: 3950734 - DNA, 25 bp, Homo sapien
tctgctgccatcggagcccaaagcc

SEQ ID NO: 3950735 - DNA, 25 bp, Homo sapien
ctgtgactgctcagaccagccggct

SEQ ID NO: 3950736 - DNA, 25 bp, Homo sapien
aagaacacagtggcgcaggctgggt

SEQ ID NO: 3950737 - DNA, 25 bp, Homo sapien
agttctttattgattggtgtgccgt

SEQ ID NO: 3950738 - DNA, 25 bp, Homo sapien
tattgattggtgtgccgttttctct

SEQ ID NO: 3950739 - DNA, 25 bp, Homo sapien
ctttattgattggtgtgccgttttc

SEQ ID NO: 3950740 - DNA, 25 bp, Homo sapien
ttcccagtcgtcctcgtcctctgcc

SEQ ID NO: 3950741 - DNA, 25 bp, Homo sapien
cggcagaggagggatggagtctgac

SEQ ID NO: 3950742 - DNA, 25 bp, Homo sapien
gattcccagtcgtcctcgtcctctg

SEQ ID NO: 3950743 - DNA, 25 bp, Homo sapien
cccagtcgtcctcgtcctctgcctg

SEQ ID NO: 3950744 - DNA, 25 bp, Homo sapien
agccccaggtcctttcccagagatg

SEQ ID NO: 3950745 - DNA, 25 bp, Homo sapien
ctccgggcccgtcaccagccccagg

SEQ ID NO: 3950746 - DNA, 25 bp, Homo sapien
ggctcctccgggcccgtcaccagcc

SEQ ID NO: 3950747 - DNA, 25 bp, Homo sapien
ggcaaaggctcctccgggcccgtca

SEQ ID NO: 3950748 - DNA, 25 bp, Homo sapien
gaagagatccgacatcaagtgccca

SEQ ID NO: 3950749 - DNA, 25 bp, Homo sapien
gagatccgacatcaagtgcccacct

SEQ ID NO: 3950750 - DNA, 25 bp, Homo sapien
tgttgaagagatccgacatcaagtg

SEQ ID NO: 3950751 - DNA, 25 bp, Homo sapien
ttgaagagatccgacatcaagtgcc

SEQ ID NO: 3950752 - DNA, 25 bp, Homo sapien
tgaagagttcagtcacatgcgaccg

SEQ ID NO: 3950753 - DNA, 25 bp, Homo sapien
gaagagttcagtcacatgcgaccgg

SEQ ID NO: 3950754 - DNA, 25 bp, Homo sapien
gggtgaagagttcagtcacatgcga

SEQ ID NO: 3950755 - DNA, 25 bp, Homo sapien
agagttcagtcacatgcgaccggtg

SEQ ID NO: 3950756 - DNA, 25 bp, Homo sapien
gaccgctcttggcagtcgaagaaga

SEQ ID NO: 3950757 - DNA, 25 bp, Homo sapien
cagggcttccagcatgtgccctagg

SEQ ID NO: 3950758 - DNA, 25 bp, Homo sapien
cttggaccgctcttggcagtcgaag

SEQ ID NO: 3950759 - DNA, 25 bp, Homo sapien
cttggcagtcgaagaagattctcct

SEQ ID NO: 3950760 - DNA, 25 bp, Homo sapien
cttctccagctttcgctccttcatg

SEQ ID NO: 3950761 - DNA, 25 bp, Homo sapien
ttctccagctttcgctccttcatgc

SEQ ID NO: 3950762 - DNA, 25 bp, Homo sapien
ggcggatggactctagcagagtggc

SEQ ID NO: 3950763 - DNA, 25 bp, Homo sapien
ccagctttcgctccttcatgctgcg

SEQ ID NO: 3950764 - DNA, 25 bp, Homo sapien
cctgagctagccatgctctgacagt

SEQ ID NO: 3950765 - DNA, 25 bp, Homo sapien
ctgaaggagatgcgctgctgctgct

SEQ ID NO: 3950766 - DNA, 25 bp, Homo sapien
ctgctgtcgtcctgcctggcgcctt

SEQ ID NO: 3950767 - DNA, 25 bp, Homo sapien
tgctgtcgtcctgcctggcgccttg

SEQ ID NO: 3950768 - DNA, 25 bp, Homo sapien
ctgctgctgtcgtcctgcctggcgc

SEQ ID NO: 3950769 - DNA, 25 bp, Homo sapien
gtggtgttagtaccccatcttgtag

SEQ ID NO: 3950770 - DNA, 25 bp, Homo sapien
ctacaggggccgcggttgagggtgg

SEQ ID NO: 3950771 - DNA, 25 bp, Homo sapien
ggtggtgttagtaccccatcttgta

SEQ ID NO: 3950772 - DNA, 25 bp, Homo sapien
gcaggtaggatggaacatcaatctc

SEQ ID NO: 3950773 - DNA, 25 bp, Homo sapien
ggtcggcaatgtacatgaggtcgtt

SEQ ID NO: 3950774 - DNA, 25 bp, Homo sapien
tacatgaggtcgttggcaatgccgg

SEQ ID NO: 3950775 - DNA, 25 bp, Homo sapien
ggcccaggtcggcaatgtacatgag

SEQ ID NO: 3950776 - DNA, 25 bp, Homo sapien
gccaacaagaccttgtgtgcacctc

SEQ ID NO: 3950777 - DNA, 25 bp, Homo sapien
tgcaggggcagccaacaagaccttg

SEQ ID NO: 3950778 - DNA, 25 bp, Homo sapien
tgcaagattaggcagggacatgtga

SEQ ID NO: 3950779 - DNA, 25 bp, Homo sapien
caagattaggcagggacatgtgaga

SEQ ID NO: 3950780 - DNA, 25 bp, Homo sapien
tggacaagggggcatcaaacagctt

SEQ ID NO: 3950781 - DNA, 25 bp, Homo sapien
gatggacaagggggcatcaaacagc

SEQ ID NO: 3950782 - DNA, 25 bp, Homo sapien
atggacaagggggcatcaaacagct

SEQ ID NO: 3950783 - DNA, 25 bp, Homo sapien
tgatggacaagggggcatcaaacag

SEQ ID NO: 3950784 - DNA, 25 bp, Homo sapien
acatgggggtcaggcaagctgacac

SEQ ID NO: 3950785 - DNA, 25 bp, Homo sapien
ctgggtccccactaagccaggccgg

SEQ ID NO: 3950786 - DNA, 25 bp, Homo sapien
tgagcccatgttcctctcccacatc

SEQ ID NO: 3950787 - DNA, 25 bp, Homo sapien
ggtcaggcaagctgacacccgctgt

SEQ ID NO: 3950788 - DNA, 25 bp, Homo sapien
cacacccctcggccctgccttctgg

SEQ ID NO: 3950789 - DNA, 25 bp, Homo sapien
cccctcggccctgccttctggccat

SEQ ID NO: 3950790 - DNA, 25 bp, Homo sapien
cgcccacacccctcggccctgcctt

SEQ ID NO: 3950791 - DNA, 25 bp, Homo sapien
cctcggccctgccttctggccatac

SEQ ID NO: 3950792 - DNA, 25 bp, Homo sapien
tggtgctcacgcacacaggaaagtc

SEQ ID NO: 3950793 - DNA, 25 bp, Homo sapien
ttggtgctcacgcacacaggaaagt

SEQ ID NO: 3950794 - DNA, 25 bp, Homo sapien
agtccctcttctgcatcgtcctcgg

SEQ ID NO: 3950795 - DNA, 25 bp, Homo sapien
aaggagctgacagagctgatgttgc

SEQ ID NO: 3950796 - DNA, 25 bp, Homo sapien
tgacaggctaagttatgtgcgcagc

SEQ ID NO: 3950797 - DNA, 25 bp, Homo sapien
caggctaagttatgtgcgcagccag

SEQ ID NO: 3950798 - DNA, 25 bp, Homo sapien
gctaagttatgtgcgcagccagcag

SEQ ID NO: 3950799 - DNA, 25 bp, Homo sapien
gtgtgtgacaggctaagttatgtgc

SEQ ID NO: 3950800 - DNA, 25 bp, Homo sapien
gggcccgctcgtccagggggcgctg

SEQ ID NO: 3950801 - DNA, 25 bp, Homo sapien
cctgggcgtcggtgaagatggagcc

SEQ ID NO: 3950802 - DNA, 25 bp, Homo sapien
gcgctgcttgctctggatcctgtgg

SEQ ID NO: 3950803 - DNA, 25 bp, Homo sapien
ggagccatattcctgcaggcgctct

SEQ ID NO: 3950804 - DNA, 25 bp, Homo sapien
aggagaccttctctccaatggcctg

SEQ ID NO: 3950805 - DNA, 25 bp, Homo sapien
tgggccaaggagaccttctctccaa

SEQ ID NO: 3950806 - DNA, 25 bp, Homo sapien
gcccttgatcttctcaatcttggcc

SEQ ID NO: 3950807 - DNA, 25 bp, Homo sapien
tcaatcttggcctgggccaaggaga

SEQ ID NO: 3950808 - DNA, 25 bp, Homo sapien
tccagggggcctctacaaggataat

SEQ ID NO: 3950809 - DNA, 25 bp, Homo sapien
atccagggggcctctacaaggataa

SEQ ID NO: 3950810 - DNA, 25 bp, Homo sapien
ttgacggtgctgagttccctgcact

SEQ ID NO: 3950811 - DNA, 25 bp, Homo sapien
cggtgctgagttccctgcactctca

SEQ ID NO: 3950812 - DNA, 25 bp, Homo sapien
aggagttgacggtgctgagttccct

SEQ ID NO: 3950813 - DNA, 25 bp, Homo sapien
tgcagggtcgaggagttgacggtgc

SEQ ID NO: 3950814 - DNA, 25 bp, Homo sapien
agggccacactccacgtgcagagca

SEQ ID NO: 3950815 - DNA, 25 bp, Homo sapien
gcctcagcattcaccgggcacgagc

SEQ ID NO: 3950816 - DNA, 25 bp, Homo sapien
ttcaccgggcacgagcgagcctgtg

SEQ ID NO: 3950817 - DNA, 25 bp, Homo sapien
tcagcattcaccgggcacgagcgag

SEQ ID NO: 3950818 - DNA, 25 bp, Homo sapien
acgtccgcgatgaggacatctctgg

SEQ ID NO: 3950819 - DNA, 25 bp, Homo sapien
cacgtccgcgatgaggacatctctg

SEQ ID NO: 3950820 - DNA, 25 bp, Homo sapien
tggggctgcatctccgggacacctg

SEQ ID NO: 3950821 - DNA, 25 bp, Homo sapien
gccacgtccgcgatgaggacatctc

SEQ ID NO: 3950822 - DNA, 25 bp, Homo sapien
agcagtcaggccctcctgtgatctg

SEQ ID NO: 3950823 - DNA, 25 bp, Homo sapien
ccttatggagcagggatgccccata

SEQ ID NO: 3950824 - DNA, 25 bp, Homo sapien
tggtcacagccctaactaggcagat

SEQ ID NO: 3950825 - DNA, 25 bp, Homo sapien
caagccctgcctcaggagtcaggtc

SEQ ID NO: 3950826 - DNA, 25 bp, Homo sapien
tatgtgttagcatgcgtctgagcac

SEQ ID NO: 3950827 - DNA, 25 bp, Homo sapien
tgaggacagaagcaggacccttcac

SEQ ID NO: 3950828 - DNA, 25 bp, Homo sapien
gaactgtcattgagcctacaccatg

SEQ ID NO: 3950829 - DNA, 25 bp, Homo sapien
ggaagcttccttggcctcatatcaa

SEQ ID NO: 3950830 - DNA, 25 bp, Homo sapien
ctgtgtccactgggcccaggctggc

SEQ ID NO: 3950831 - DNA, 25 bp, Homo sapien
tgtgtccactgggcccaggctggcc

SEQ ID NO: 3950832 - DNA, 25 bp, Homo sapien
cagacaagggctccagaaacttcag

SEQ ID NO: 3950833 - DNA, 25 bp, Homo sapien
tttaagggtatgagggcagaacagc

SEQ ID NO: 3950834 - DNA, 25 bp, Homo sapien
catgatgcatctggcgagtcaggga

SEQ ID NO: 3950835 - DNA, 25 bp, Homo sapien
tcaggaggttcagtctcagacaagg

SEQ ID NO: 3950836 - DNA, 25 bp, Homo sapien
tcctcctgtggcagataggcaagcg

SEQ ID NO: 3950837 - DNA, 25 bp, Homo sapien
agtcctcctgtggcagataggcaag

SEQ ID NO: 3950838 - DNA, 25 bp, Homo sapien
gtcctcctgtggcagataggcaagc

SEQ ID NO: 3950839 - DNA, 25 bp, Homo sapien
cagtcctcctgtggcagataggcaa

SEQ ID NO: 3950840 - DNA, 25 bp, Homo sapien
ctctgagctcaggttccccgggagc

SEQ ID NO: 3950841 - DNA, 25 bp, Homo sapien
tctgagctcaggttccccgggagcc

SEQ ID NO: 3950842 - DNA, 25 bp, Homo sapien
ctgagctcaggttccccgggagcct

SEQ ID NO: 3950843 - DNA, 25 bp, Homo sapien
tgagctcaggttccccgggagcctg

SEQ ID NO: 3950844 - DNA, 25 bp, Homo sapien
tttgcccaaagtgaggagtctgagg

SEQ ID NO: 3950845 - DNA, 25 bp, Homo sapien
taggctcctcattgagagagaaaag

SEQ ID NO: 3950846 - DNA, 25 bp, Homo sapien
gaaaactaggctcctcattgagaga

SEQ ID NO: 3950847 - DNA, 25 bp, Homo sapien
gatttttctgcatagtaagctggag

SEQ ID NO: 3950848 - DNA, 25 bp, Homo sapien
gtgagagccccaagggcagcacaca

SEQ ID NO: 3950849 - DNA, 25 bp, Homo sapien
agtgagagccccaagggcagcacac

SEQ ID NO: 3950850 - DNA, 25 bp, Homo sapien
agcccagaggcagtgagagccccaa

SEQ ID NO: 3950851 - DNA, 25 bp, Homo sapien
gaggcagtgagagccccaagggcag

SEQ ID NO: 3950852 - DNA, 25 bp, Homo sapien
gacagacaccttcgcagaaggagga

SEQ ID NO: 3950853 - DNA, 25 bp, Homo sapien
cagacaccttcgcagaaggaggagg

SEQ ID NO: 3950854 - DNA, 25 bp, Homo sapien
aggacagacaccttcgcagaaggag

SEQ ID NO: 3950855 - DNA, 25 bp, Homo sapien
agacaccttcgcagaaggaggaggt

SEQ ID NO: 3950856 - DNA, 25 bp, Homo sapien
agaacatcgctggagagggcacgtt

SEQ ID NO: 3950857 - DNA, 25 bp, Homo sapien
gagggcacgttctggtagaagattc

SEQ ID NO: 3950858 - DNA, 25 bp, Homo sapien
cacgttctggtagaagattctcttc

SEQ ID NO: 3950859 - DNA, 25 bp, Homo sapien
ctggaagaacatcgctggagagggc

SEQ ID NO: 3950860 - DNA, 25 bp, Homo sapien
tggcccccattggcctccagcaggt

SEQ ID NO: 3950861 - DNA, 25 bp, Homo sapien
cattggcctccagcaggtcccccat

SEQ ID NO: 3950862 - DNA, 25 bp, Homo sapien
gcccccattggcctccagcaggtcc

SEQ ID NO: 3950863 - DNA, 25 bp, Homo sapien
ccccattggcctccagcaggtcccc

SEQ ID NO: 3950864 - DNA, 25 bp, Homo sapien
tgggcgacagcttgaacaggaggta

SEQ ID NO: 3950865 - DNA, 25 bp, Homo sapien
gcgacagcttgaacaggaggtaggt

SEQ ID NO: 3950866 - DNA, 25 bp, Homo sapien
ctgggcgacagcttgaacaggaggt

SEQ ID NO: 3950867 - DNA, 25 bp, Homo sapien
ggcgacagcttgaacaggaggtagg

SEQ ID NO: 3950868 - DNA, 25 bp, Homo sapien
tgggatcagagggcccgtgggcagg

SEQ ID NO: 3950869 - DNA, 25 bp, Homo sapien
cagggtgggatcagagggcccgtgg

SEQ ID NO: 3950870 - DNA, 25 bp, Homo sapien
ggtgggatcagagggcccgtgggca

SEQ ID NO: 3950871 - DNA, 25 bp, Homo sapien
cccagggtgggatcagagggcccgt

SEQ ID NO: 3950872 - DNA, 25 bp, Homo sapien
ttgtctctggggagcctggaagcac

SEQ ID NO: 3950873 - DNA, 25 bp, Homo sapien
cttgtctctggggagcctggaagca

SEQ ID NO: 3950874 - DNA, 25 bp, Homo sapien
gcctgtgtaacgctcctcctgtgcc

SEQ ID NO: 3950875 - DNA, 25 bp, Homo sapien
ggcctgtgtaacgctcctcctgtgc

SEQ ID NO: 3950876 - DNA, 25 bp, Homo sapien
tacctgtaggcatgcccaagtgcac

SEQ ID NO: 3950877 - DNA, 25 bp, Homo sapien
tgtacaaacacaaacacgggcacac

SEQ ID NO: 3950878 - DNA, 25 bp, Homo sapien
cataaacacaggagcactcacccta

SEQ ID NO: 3950879 - DNA, 25 bp, Homo sapien
gtgcactcacgtatacaaccacgag

SEQ ID NO: 3950880 - DNA, 25 bp, Homo sapien
tctcgaaggccataggtcatagctg

SEQ ID NO: 3950881 - DNA, 25 bp, Homo sapien
tcgaaggccataggtcatagctgag

SEQ ID NO: 3950882 - DNA, 25 bp, Homo sapien
ctcgaaggccataggtcatagctga

SEQ ID NO: 3950883 - DNA, 25 bp, Homo sapien
tgcaagtcagagtgggtccagcttc

SEQ ID NO: 3950884 - DNA, 25 bp, Homo sapien
ctgcaagtcagagtgggtccagctt

SEQ ID NO: 3950885 - DNA, 25 bp, Homo sapien
gcaagtcagagtgggtccagcttca

SEQ ID NO: 3950886 - DNA, 25 bp, Homo sapien
tctgggtgtgtcagtcagcacatcc

SEQ ID NO: 3950887 - DNA, 25 bp, Homo sapien
tgagtctacgtaaggctgaagcccc

SEQ ID NO: 3950888 - DNA, 25 bp, Homo sapien
tgggagactggtccagaaaaccttc

SEQ ID NO: 3950889 - DNA, 25 bp, Homo sapien
tctcagaccaggcacctcactggga

SEQ ID NO: 3950890 - DNA, 25 bp, Homo sapien
ggcaggtactccgggtccaccaggc

SEQ ID NO: 3950891 - DNA, 25 bp, Homo sapien
tcactgcctcgcaaggtgcacttac

SEQ ID NO: 3950892 - DNA, 25 bp, Homo sapien
gcaaggtgcacttacgtgtgccacc

SEQ ID NO: 3950893 - DNA, 25 bp, Homo sapien
aggagcactgcctcgggcggcagca

SEQ ID NO: 3950894 - DNA, 25 bp, Homo sapien
cagacacgcatttggaaagtgatga

SEQ ID NO: 3950895 - DNA, 25 bp, Homo sapien
ctggtgaagaggagcccggggctgg

SEQ ID NO: 3950896 - DNA, 25 bp, Homo sapien
tggggcagaccagtggcaatcgatc

SEQ ID NO: 3950897 - DNA, 25 bp, Homo sapien
tcccagctctggggcagaccagtgg

SEQ ID NO: 3950898 - DNA, 25 bp, Homo sapien
cccggggctggagccctgtcccagc

SEQ ID NO: 3950899 - DNA, 25 bp, Homo sapien
tggtgaggcaggtggaggttccagc

SEQ ID NO: 3950900 - DNA, 25 bp, Homo sapien
aggcaggtggaggttccagcccttg

SEQ ID NO: 3950901 - DNA, 25 bp, Homo sapien
gaatgttgttggtgaggcaggtgga

SEQ ID NO: 3950902 - DNA, 25 bp, Homo sapien
caggtggaggttccagcccttggcc

SEQ ID NO: 3950903 - DNA, 25 bp, Homo sapien
gctgggctgagggcctgtgcgagcc

SEQ ID NO: 3950904 - DNA, 25 bp, Homo sapien
gctgagggcctgtgcgagccatccc

SEQ ID NO: 3950905 - DNA, 25 bp, Homo sapien
gagggcctgtgcgagccatccctct

SEQ ID NO: 3950906 - DNA, 25 bp, Homo sapien
gggctgagggcctgtgcgagccatc

SEQ ID NO: 3950907 - DNA, 25 bp, Homo sapien
caagatgcctccaagcgagagtaca

SEQ ID NO: 3950908 - DNA, 25 bp, Homo sapien
tgttaggcctgagccccaagattcc

SEQ ID NO: 3950909 - DNA, 25 bp, Homo sapien
tgttgtacccctgttccaagatgcc

SEQ ID NO: 3950910 - DNA, 25 bp, Homo sapien
tatcgatgcaacagacagcacttcc

SEQ ID NO: 3950911 - DNA, 25 bp, Homo sapien
catgaaacaccgtggcaagttctct

SEQ ID NO: 3950912 - DNA, 25 bp, Homo sapien
atgaaacaccgtggcaagttctctg

SEQ ID NO: 3950913 - DNA, 25 bp, Homo sapien
ggacacacaactcatactgccagct

SEQ ID NO: 3950914 - DNA, 25 bp, Homo sapien
tcccggtgattaacattttcgtagc

SEQ ID NO: 3950915 - DNA, 25 bp, Homo sapien
catttaaagcaacccgaggaagcaa

SEQ ID NO: 3950916 - DNA, 25 bp, Homo sapien
agggacaaggcaagcacacactagg

SEQ ID NO: 3950917 - DNA, 25 bp, Homo sapien
ggatgttcgcatttgggacacgact

SEQ ID NO: 3950918 - DNA, 25 bp, Homo sapien
cgaggatgttcgcatttgggacacg

SEQ ID NO: 3950919 - DNA, 25 bp, Homo sapien
acgaggatgttcgcatttgggacac

SEQ ID NO: 3950920 - DNA, 25 bp, Homo sapien
gaggatgttcgcatttgggacacga

SEQ ID NO: 3950921 - DNA, 25 bp, Homo sapien
catctatgtctaccagacatgcaat

SEQ ID NO: 3950922 - DNA, 25 bp, Homo sapien
agtactaaccatcagttatctctct

SEQ ID NO: 3950923 - DNA, 25 bp, Homo sapien
ctatgtctaccagacatgcaataaa

SEQ ID NO: 3950924 - DNA, 25 bp, Homo sapien
taaccatcagttatctctctcacct

SEQ ID NO: 3950925 - DNA, 25 bp, Homo sapien
ggtctacgaatatggattagcccca

SEQ ID NO: 3950926 - DNA, 25 bp, Homo sapien
tccaaggctggcacaaatattgctt

SEQ ID NO: 3950927 - DNA, 25 bp, Homo sapien
ctgagaatctgacccgggcctgtat

SEQ ID NO: 3950928 - DNA, 25 bp, Homo sapien
cactttatgctctcgcggtctacga

SEQ ID NO: 3950929 - DNA, 25 bp, Homo sapien
ctgcagtagagtcaacattctccca

SEQ ID NO: 3950930 - DNA, 25 bp, Homo sapien
agtagagtcaacattctcccaggca

SEQ ID NO: 3950931 - DNA, 25 bp, Homo sapien
catccacttctttcagttttgggta

SEQ ID NO: 3950932 - DNA, 25 bp, Homo sapien
agagtcaacattctcccaggcagct

SEQ ID NO: 3950933 - DNA, 25 bp, Homo sapien
gggcacgtgttgcaggagaagcggt

SEQ ID NO: 3950934 - DNA, 25 bp, Homo sapien
tgttgtgcacgtaggggcacgtgtt

SEQ ID NO: 3950935 - DNA, 25 bp, Homo sapien
agcggtggcagcgttgtccctcctc

SEQ ID NO: 3950936 - DNA, 25 bp, Homo sapien
caggagaagcggtggcagcgttgtc

SEQ ID NO: 3950937 - DNA, 25 bp, Homo sapien
actccgcaggctccaactcccggca

SEQ ID NO: 3950938 - DNA, 25 bp, Homo sapien
tctcgaactccgcaggctccaactc

SEQ ID NO: 3950939 - DNA, 25 bp, Homo sapien
gaactccgcaggctccaactcccgg

SEQ ID NO: 3950940 - DNA, 25 bp, Homo sapien
ggtctcgaactccgcaggctccaac

SEQ ID NO: 3950941 - DNA, 25 bp, Homo sapien
gaagtagtataataaatgcccggca

SEQ ID NO: 3950942 - DNA, 25 bp, Homo sapien
ggagcaggtgactcctgtaagcctg

SEQ ID NO: 3950943 - DNA, 25 bp, Homo sapien
ccacatgaggtggtcgtcaagaaac

SEQ ID NO: 3950944 - DNA, 25 bp, Homo sapien
aaacgctcccagtccatttattggc

SEQ ID NO: 3950945 - DNA, 25 bp, Homo sapien
tttccggtacaggtcgaacttgcca

SEQ ID NO: 3950946 - DNA, 25 bp, Homo sapien
cactcacagcggacaggatagacgt

SEQ ID NO: 3950947 - DNA, 25 bp, Homo sapien
tctcacagaacttgtcagtgaaggg

SEQ ID NO: 3950948 - DNA, 25 bp, Homo sapien
agatgatgatctggcagcgtttccg

SEQ ID NO: 3950949 - DNA, 25 bp, Homo sapien
ggggtagctgtaaggcagtggggct

SEQ ID NO: 3950950 - DNA, 25 bp, Homo sapien
gggatggttggggtagctgtaaggc

SEQ ID NO: 3950951 - DNA, 25 bp, Homo sapien
ctgggggatggttggggtagctgta

SEQ ID NO: 3950952 - DNA, 25 bp, Homo sapien
gttggggtagctgtaaggcagtggg

SEQ ID NO: 3950953 - DNA, 25 bp, Homo sapien
aggttgccggtgacaccactcagca

SEQ ID NO: 3950954 - DNA, 25 bp, Homo sapien
tctccaggtcccgcaggacagtcat

SEQ ID NO: 3950955 - DNA, 25 bp, Homo sapien
tagatgatggctatgcggtgccagc

SEQ ID NO: 3950956 - DNA, 25 bp, Homo sapien
ctatgcggtgccagcctgccagctt

SEQ ID NO: 3950957 - DNA, 25 bp, Homo sapien
gaagcagatggacaccaggcagtgc

SEQ ID NO: 3950958 - DNA, 25 bp, Homo sapien
gatggacaccaggcagtgcaagatc

SEQ ID NO: 3950959 - DNA, 25 bp, Homo sapien
ctggaagcagatggacaccaggcag

SEQ ID NO: 3950960 - DNA, 25 bp, Homo sapien
gcagatggacaccaggcagtgcaag

SEQ ID NO: 3950961 - DNA, 25 bp, Homo sapien
cagccagccaatcctgagggccctg

SEQ ID NO: 3950962 - DNA, 25 bp, Homo sapien
cgggggtcgggagacattcagcagg

SEQ ID NO: 3950963 - DNA, 25 bp, Homo sapien
tgtagtcagtagcaggcgggggtcg

SEQ ID NO: 3950964 - DNA, 25 bp, Homo sapien
cagggaagtgacctttctgccaccc

SEQ ID NO: 3950965 - DNA, 25 bp, Homo sapien
gccacaggcggtagaactggtcagg

SEQ ID NO: 3950966 - DNA, 25 bp, Homo sapien
agccacaggcggtagaactggtcag

SEQ ID NO: 3950967 - DNA, 25 bp, Homo sapien
ccacaggcggtagaactggtcaggc

SEQ ID NO: 3950968 - DNA, 25 bp, Homo sapien
cacaggcggtagaactggtcaggca

SEQ ID NO: 3950969 - DNA, 25 bp, Homo sapien
aaggcaggagcccacacacatcatc

SEQ ID NO: 3950970 - DNA, 25 bp, Homo sapien
gagaaaaggcaggagcccacacaca

SEQ ID NO: 3950971 - DNA, 25 bp, Homo sapien
ccacacacatcatccatgcagtgca

SEQ ID NO: 3950972 - DNA, 25 bp, Homo sapien
ggagcccacacacatcatccatgca

SEQ ID NO: 3950973 - DNA, 25 bp, Homo sapien
gcgcagagcagcatatcagcatcac

SEQ ID NO: 3950974 - DNA, 25 bp, Homo sapien
ctgcgcagagcagcatatcagcatc

SEQ ID NO: 3950975 - DNA, 25 bp, Homo sapien
aggggaacgacggacactctgcaga

SEQ ID NO: 3950976 - DNA, 25 bp, Homo sapien
gaacgacggacactctgcagaccta

SEQ ID NO: 3950977 - DNA, 25 bp, Homo sapien
gaagtcacagtactcccgggaggtg

SEQ ID NO: 3950978 - DNA, 25 bp, Homo sapien
gaagtagcccctcatgaagtcacag

SEQ ID NO: 3950979 - DNA, 25 bp, Homo sapien
gtactcccgggaggtgatctcacac

SEQ ID NO: 3950980 - DNA, 25 bp, Homo sapien
tgagagcagagcgtggcctcctcat

SEQ ID NO: 3950981 - DNA, 25 bp, Homo sapien
cctagggcgatgctctgagcccaga

SEQ ID NO: 3950982 - DNA, 25 bp, Homo sapien
gagaccagctgcactcgctggcacg

SEQ ID NO: 3950983 - DNA, 25 bp, Homo sapien
tgcactcgctggcacgcacacgtac

SEQ ID NO: 3950984 - DNA, 25 bp, Homo sapien
cagagaccagctgcactcgctggca

SEQ ID NO: 3950985 - DNA, 25 bp, Homo sapien
tggtgtggttcccagcgctgttttt

SEQ ID NO: 3950986 - DNA, 25 bp, Homo sapien
gtgtggttcccagcgctgtttttgg

SEQ ID NO: 3950987 - DNA, 25 bp, Homo sapien
ggtgtggttcccagcgctgtttttg

SEQ ID NO: 3950988 - DNA, 25 bp, Homo sapien
ttggtgtggttcccagcgctgtttt

SEQ ID NO: 3950989 - DNA, 25 bp, Homo sapien
ctcataaagcagaaaacggtgtggc

SEQ ID NO: 3950990 - DNA, 25 bp, Homo sapien
ggtcacaaatgaggacgagctgagt

SEQ ID NO: 3950991 - DNA, 25 bp, Homo sapien
cgctggttgatggacaggctgtaca

SEQ ID NO: 3950992 - DNA, 25 bp, Homo sapien
cacactgagtctctatcaaactgga

SEQ ID NO: 3950993 - DNA, 25 bp, Homo sapien
ctgaaaacgtgaggtggtcccatga

SEQ ID NO: 3950994 - DNA, 25 bp, Homo sapien
ccatgatgggaatctctggtatcac

SEQ ID NO: 3950995 - DNA, 25 bp, Homo sapien
tgacacggagggctccctaacaacc

SEQ ID NO: 3950996 - DNA, 25 bp, Homo sapien
ccacatgacacggagggctccctaa

SEQ ID NO: 3950997 - DNA, 25 bp, Homo sapien
gccactcatgagggtcttcggagga

SEQ ID NO: 3950998 - DNA, 25 bp, Homo sapien
tggccactcatgagggtcttcggag

SEQ ID NO: 3950999 - DNA, 25 bp, Homo sapien
tctggccactcatgagggtcttcgg

SEQ ID NO: 3951000 - DNA, 25 bp, Homo sapien
ctggccactcatgagggtcttcgga

SEQ ID NO: 3951001 - DNA, 25 bp, Homo sapien
actgtctcttgtggcccgcaagctc

SEQ ID NO: 3951002 - DNA, 25 bp, Homo sapien
caaactgtctcttgtggcccgcaag

SEQ ID NO: 3951003 - DNA, 25 bp, Homo sapien
gagccaaactgtctcttgtggcccg

SEQ ID NO: 3951004 - DNA, 25 bp, Homo sapien
ggatggatgggccacttcacccaca

SEQ ID NO: 3951005 - DNA, 25 bp, Homo sapien
gaacgagggcgaaggatcactctgc

SEQ ID NO: 3951006 - DNA, 25 bp, Homo sapien
tgacaaggccttgcgcgtaaggacg

SEQ ID NO: 3951007 - DNA, 25 bp, Homo sapien
tcagggaactggtatggactacggc

SEQ ID NO: 3951008 - DNA, 25 bp, Homo sapien
gagtcaggagtcgaaggcaaaacca

SEQ ID NO: 3951009 - DNA, 25 bp, Homo sapien
cgcacgcagcaggcggagtgcttct

SEQ ID NO: 3951010 - DNA, 25 bp, Homo sapien
ctggcgcatgcagggcgaaaacttg

SEQ ID NO: 3951011 - DNA, 25 bp, Homo sapien
ctcgcgcgccgagcgaatgaagctg

SEQ ID NO: 3951012 - DNA, 25 bp, Homo sapien
cctgtcgttgcgcacgcagcaggcg

SEQ ID NO: 3951013 - DNA, 25 bp, Homo sapien
tgcccccgccgggcacctccaggtc

SEQ ID NO: 3951014 - DNA, 25 bp, Homo sapien
ctgcccccgccgggcacctccaggt

SEQ ID NO: 3951015 - DNA, 25 bp, Homo sapien
tgggcccgatccagaagttctcctg

SEQ ID NO: 3951016 - DNA, 25 bp, Homo sapien
ggcccgatccagaagttctcctgct

SEQ ID NO: 3951017 - DNA, 25 bp, Homo sapien
gctgggcccgatccagaagttctcc

SEQ ID NO: 3951018 - DNA, 25 bp, Homo sapien
ccgatccagaagttctcctgctgca

SEQ ID NO: 3951019 - DNA, 25 bp, Homo sapien
cttgacgttctcgtagaccccgcgg

SEQ ID NO: 3951020 - DNA, 25 bp, Homo sapien
ttctcgtagaccccgcggttccgca

SEQ ID NO: 3951021 - DNA, 25 bp, Homo sapien
tcgtagaccccgcggttccgcagca

SEQ ID NO: 3951022 - DNA, 25 bp, Homo sapien
tacttgacgttctcgtagaccccgc

SEQ ID NO: 3951023 - DNA, 25 bp, Homo sapien
cgagtgcacgaaggtaagccagtag

SEQ ID NO: 3951024 - DNA, 25 bp, Homo sapien
gcgagtgcacgaaggtaagccagta

SEQ ID NO: 3951025 - DNA, 25 bp, Homo sapien
gagtgcacgaaggtaagccagtagg

SEQ ID NO: 3951026 - DNA, 25 bp, Homo sapien
ccgcgatacgctggccccgtcgcgg

SEQ ID NO: 3951027 - DNA, 25 bp, Homo sapien
cggtaggtgcggttggtgagccgtc

SEQ ID NO: 3951028 - DNA, 25 bp, Homo sapien
gcgcttgcggtaggtgcggttggtg

SEQ ID NO: 3951029 - DNA, 25 bp, Homo sapien
cttgcgcaccggcaccgcgatacgc

SEQ ID NO: 3951030 - DNA, 25 bp, Homo sapien
ctccgatggggactcgaaaacttca

SEQ ID NO: 3951031 - DNA, 25 bp, Homo sapien
cccagtcctttagcgctgcctccga

SEQ ID NO: 3951032 - DNA, 25 bp, Homo sapien
tccgatggggactcgaaaacttcat

SEQ ID NO: 3951033 - DNA, 25 bp, Homo sapien
gtcctttagcgctgcctccgatggg

SEQ ID NO: 3951034 - DNA, 25 bp, Homo sapien
ctcatcggggaaatcagttgtgtcc

SEQ ID NO: 3951035 - DNA, 25 bp, Homo sapien
ggaaatcagttgtgtcctcctccag

SEQ ID NO: 3951036 - DNA, 25 bp, Homo sapien
aggtgccatccctaacggagcggcc

SEQ ID NO: 3951037 - DNA, 25 bp, Homo sapien
atgtgtccagctcatcggggaaatc

SEQ ID NO: 3951038 - DNA, 25 bp, Homo sapien
cgggagccggtggaaacctgagcgg

SEQ ID NO: 3951039 - DNA, 25 bp, Homo sapien
atcttggccaccgactctcgcttgc

SEQ ID NO: 3951040 - DNA, 25 bp, Homo sapien
tgcggccgcccggaagctcatcttg

SEQ ID NO: 3951041 - DNA, 25 bp, Homo sapien
gcagcacccggcgtgacgggagtgt

SEQ ID NO: 3951042 - DNA, 25 bp, Homo sapien
tctgggtgctgtcactgtccttgct

SEQ ID NO: 3951043 - DNA, 25 bp, Homo sapien
agtgacggatgctcttgcgctgcca

SEQ ID NO: 3951044 - DNA, 25 bp, Homo sapien
tggtcagcgacacgttgtcctggct

SEQ ID NO: 3951045 - DNA, 25 bp, Homo sapien
ttcccgtagcgctggctgcagtgac

SEQ ID NO: 3951046 - DNA, 25 bp, Homo sapien
actcagcaaggggcggccagatcgc

SEQ ID NO: 3951047 - DNA, 25 bp, Homo sapien
cttcaaaggccctcctccggggcag

SEQ ID NO: 3951048 - DNA, 25 bp, Homo sapien
ccaggcctgtagtcactccagggac

SEQ ID NO: 3951049 - DNA, 25 bp, Homo sapien
tgcccccaggcctgtagtcactcca

SEQ ID NO: 3951050 - DNA, 25 bp, Homo sapien
gacacgcccgaagcgtacttgtcgg

SEQ ID NO: 3951051 - DNA, 25 bp, Homo sapien
gtggacacgcccgaagcgtacttgt

SEQ ID NO: 3951052 - DNA, 25 bp, Homo sapien
gaccaagagagagactggcgctgtg

SEQ ID NO: 3951053 - DNA, 25 bp, Homo sapien
cagagtgtggacacgcccgaagcgt

SEQ ID NO: 3951054 - DNA, 25 bp, Homo sapien
gtgagagcggtcagtatccagaaca

SEQ ID NO: 3951055 - DNA, 25 bp, Homo sapien
gggcccttgttctcatttccatcct

SEQ ID NO: 3951056 - DNA, 25 bp, Homo sapien
ggaggaagctgaaacaagagggccc

SEQ ID NO: 3951057 - DNA, 25 bp, Homo sapien
ttccatcctctgtgtacctgcctct

SEQ ID NO: 3951058 - DNA, 25 bp, Homo sapien
gtgaagagatgtgggctgtctcggc

SEQ ID NO: 3951059 - DNA, 25 bp, Homo sapien
acgtctggcgttgcagcaccggccg

SEQ ID NO: 3951060 - DNA, 25 bp, Homo sapien
ggtctgtgtgatggacgtctggcgt

SEQ ID NO: 3951061 - DNA, 25 bp, Homo sapien
tgtctcggctggcatactcacactc

SEQ ID NO: 3951062 - DNA, 25 bp, Homo sapien
gggtactggacagggggcacccaca

SEQ ID NO: 3951063 - DNA, 25 bp, Homo sapien
gtactggacagggggcacccacagt

SEQ ID NO: 3951064 - DNA, 25 bp, Homo sapien
ctggacagggggcacccacagtccc

SEQ ID NO: 3951065 - DNA, 25 bp, Homo sapien
gagggtactggacagggggcaccca

SEQ ID NO: 3951066 - DNA, 25 bp, Homo sapien
aagctgggctcttctgccgtcaggg

SEQ ID NO: 3951067 - DNA, 25 bp, Homo sapien
agctgggctcttctgccgtcagggg

SEQ ID NO: 3951068 - DNA, 25 bp, Homo sapien
cagagggaatgtccagctttagcca

SEQ ID NO: 3951069 - DNA, 25 bp, Homo sapien
cagggtggcttcttgcgctgcaggc

SEQ ID NO: 3951070 - DNA, 25 bp, Homo sapien
aatgtccagctttagccagggtggc

SEQ ID NO: 3951071 - DNA, 25 bp, Homo sapien
gcaggctgctcgtgctgtccctgcg

SEQ ID NO: 3951072 - DNA, 25 bp, Homo sapien
ggcccagccacagcgtgaaggggtc

SEQ ID NO: 3951073 - DNA, 25 bp, Homo sapien
gcccagccacagcgtgaaggggtca

SEQ ID NO: 3951074 - DNA, 25 bp, Homo sapien
gtgtcctggatacggcccagccaca

SEQ ID NO: 3951075 - DNA, 25 bp, Homo sapien
ctgcgtgtcctggatacggcccagc

SEQ ID NO: 3951076 - DNA, 25 bp, Homo sapien
gagggcctgatggtccctgaaaggc

SEQ ID NO: 3951077 - DNA, 25 bp, Homo sapien
ggcttgcccagaatgacccctggtg

SEQ ID NO: 3951078 - DNA, 25 bp, Homo sapien
aagagcgcaccctagaaagtcagct

SEQ ID NO: 3951079 - DNA, 25 bp, Homo sapien
gcctgcttgtgcaacggaggccacc

SEQ ID NO: 3951080 - DNA, 25 bp, Homo sapien
gccgctggccgggagggcccgcgcc

SEQ ID NO: 3951081 - DNA, 25 bp, Homo sapien
tggccgggagggcccgcgccgagtc

SEQ ID NO: 3951082 - DNA, 25 bp, Homo sapien
gccgccgctggccgggagggcccgc

SEQ ID NO: 3951083 - DNA, 25 bp, Homo sapien
ctctggggggtcctgagggcgccgg

SEQ ID NO: 3951084 - DNA, 25 bp, Homo sapien
ctcagaagcgtaggacggctgcgca

SEQ ID NO: 3951085 - DNA, 25 bp, Homo sapien
taaaccttcaagtggccagaagcgg

SEQ ID NO: 3951086 - DNA, 25 bp, Homo sapien
gaggatccactcaggttcacgacgg

SEQ ID NO: 3951087 - DNA, 25 bp, Homo sapien
gcctggcgtccacttcctggataag

SEQ ID NO: 3951088 - DNA, 25 bp, Homo sapien
cccttccccgctctcgcctcgcagg

SEQ ID NO: 3951089 - DNA, 25 bp, Homo sapien
gccccttccccgctctcgcctcgca

SEQ ID NO: 3951090 - DNA, 25 bp, Homo sapien
ccttccccgctctcgcctcgcaggc

SEQ ID NO: 3951091 - DNA, 25 bp, Homo sapien
cttccccgctctcgcctcgcaggca

SEQ ID NO: 3951092 - DNA, 25 bp, Homo sapien
gtgcttccgtggtcggcggctgctg

SEQ ID NO: 3951093 - DNA, 25 bp, Homo sapien
ggggtgcttccgtggtcggcggctg

SEQ ID NO: 3951094 - DNA, 25 bp, Homo sapien
cctaggggtgcttccgtggtcggcg

SEQ ID NO: 3951095 - DNA, 25 bp, Homo sapien
tcctaggggtgcttccgtggtcggc

SEQ ID NO: 3951096 - DNA, 25 bp, Homo sapien
aagggccaagctcgggccgagagca

SEQ ID NO: 3951097 - DNA, 25 bp, Homo sapien
tgcggagacggtcacgtcagcgtcc

SEQ ID NO: 3951098 - DNA, 25 bp, Homo sapien
gtcagcgtccgttccaggccgactg

SEQ ID NO: 3951099 - DNA, 25 bp, Homo sapien
aggccgactggcagtctccgttcta

SEQ ID NO: 3951100 - DNA, 25 bp, Homo sapien
gttggagttcttcgaccagccggca

SEQ ID NO: 3951101 - DNA, 25 bp, Homo sapien
cattacagttttgccgacggatggg

SEQ ID NO: 3951102 - DNA, 25 bp, Homo sapien
ggggcaaaagaagcagcgaccagct

SEQ ID NO: 3951103 - DNA, 25 bp, Homo sapien
ccctggcccgggcatttctgggaca

SEQ ID NO: 3951104 - DNA, 25 bp, Homo sapien
tctaaaagcaccttaagtaatgggc

SEQ ID NO: 3951105 - DNA, 25 bp, Homo sapien
tgggctcgacctcatggagaacaga

SEQ ID NO: 3951106 - DNA, 25 bp, Homo sapien
gttgggtgctaaaggagcagaccct

SEQ ID NO: 3951107 - DNA, 25 bp, Homo sapien
agagaacattctgtccccatgcgga

SEQ ID NO: 3951108 - DNA, 25 bp, Homo sapien
cagaatggacgggaacttaaaggct

SEQ ID NO: 3951109 - DNA, 25 bp, Homo sapien
tgaaatacttttgacagctggctgg

SEQ ID NO: 3951110 - DNA, 25 bp, Homo sapien
tctgctcacaggaacgccgcatttg

SEQ ID NO: 3951111 - DNA, 25 bp, Homo sapien
ggctaagcttcggactcccaggtgg

SEQ ID NO: 3951112 - DNA, 25 bp, Homo sapien
tggctgaatgatcgcacccgaggac

SEQ ID NO: 3951113 - DNA, 25 bp, Homo sapien
ggtggaaaggaactgatacccagca

SEQ ID NO: 3951114 - DNA, 25 bp, Homo sapien
tgagtcattgcatgggctctcccaa

SEQ ID NO: 3951115 - DNA, 25 bp, Homo sapien
caggaggcacacctcatggtgcagg

SEQ ID NO: 3951116 - DNA, 25 bp, Homo sapien
agagctcctctaggtgatcaaccca

SEQ ID NO: 3951117 - DNA, 25 bp, Homo sapien
cacttcacaaatagaaggctgtcag

SEQ ID NO: 3951118 - DNA, 25 bp, Homo sapien
gatcaacccatgtctggagctagct

SEQ ID NO: 3951119 - DNA, 25 bp, Homo sapien
gatgcctacgcgtgcggcaaggact

SEQ ID NO: 3951120 - DNA, 25 bp, Homo sapien
cagcagccttccgccctccgcctgg

SEQ ID NO: 3951121 - DNA, 25 bp, Homo sapien
agcagccttccgccctccgcctggg

SEQ ID NO: 3951122 - DNA, 25 bp, Homo sapien
cccagcagccttccgccctccgcct

SEQ ID NO: 3951123 - DNA, 25 bp, Homo sapien
gcagccttccgccctccgcctgggc

SEQ ID NO: 3951124 - DNA, 25 bp, Homo sapien
cagcacgctgcggaacttgtcaaac

SEQ ID NO: 3951125 - DNA, 25 bp, Homo sapien
gagcgccgcgtgttctcgttgtaca

SEQ ID NO: 3951126 - DNA, 25 bp, Homo sapien
gttgtacataatctcctccaggtgg

SEQ ID NO: 3951127 - DNA, 25 bp, Homo sapien
gggtcctcgtgggtggtcaccacca

SEQ ID NO: 3951128 - DNA, 25 bp, Homo sapien
ggtgggtgtgagcccaacctgacac

SEQ ID NO: 3951129 - DNA, 25 bp, Homo sapien
ctctgctgaagagccactgctggga

SEQ ID NO: 3951130 - DNA, 25 bp, Homo sapien
tgagctgcccacaggcctgaacaga

SEQ ID NO: 3951131 - DNA, 25 bp, Homo sapien
agaggcctctgctgaagagccactg

SEQ ID NO: 3951132 - DNA, 25 bp, Homo sapien
cactgctgggaatcagctctgagct

SEQ ID NO: 3951133 - DNA, 25 bp, Homo sapien
aagcctgcgtcctgatgttgggacc

SEQ ID NO: 3951134 - DNA, 25 bp, Homo sapien
gacggctgttcaaacccagaggtgc

SEQ ID NO: 3951135 - DNA, 25 bp, Homo sapien
tctttttcgtgctacagtgagtccc

SEQ ID NO: 3951136 - DNA, 25 bp, Homo sapien
cacgtagctctggagccaaatggtc

SEQ ID NO: 3951137 - DNA, 25 bp, Homo sapien
tgttgcgtacgtccctatccacttt

SEQ ID NO: 3951138 - DNA, 25 bp, Homo sapien
ggtggttctgttgcgtacgtcccta

SEQ ID NO: 3951139 - DNA, 25 bp, Homo sapien
gttctgttgcgtacgtccctatcca

SEQ ID NO: 3951140 - DNA, 25 bp, Homo sapien
ttggtggttctgttgcgtacgtccc

SEQ ID NO: 3951141 - DNA, 25 bp, Homo sapien
acatgcggaggtcctcagggttctg

SEQ ID NO: 3951142 - DNA, 25 bp, Homo sapien
ctggcaaacatgcggaggtcctcag

SEQ ID NO: 3951143 - DNA, 25 bp, Homo sapien
tctgggctgcgggtacactgaggat

SEQ ID NO: 3951144 - DNA, 25 bp, Homo sapien
cactgaggatggctgcgcgttcatg

SEQ ID NO: 3951145 - DNA, 25 bp, Homo sapien
tcctctggttcagtggcgagtcccc

SEQ ID NO: 3951146 - DNA, 25 bp, Homo sapien
agtagctctgcgctggagttgtcca

SEQ ID NO: 3951147 - DNA, 25 bp, Homo sapien
tggtgagggtcatgtcatcgctgct

SEQ ID NO: 3951148 - DNA, 25 bp, Homo sapien
agcaggttctccgtcatcctctggt

SEQ ID NO: 3951149 - DNA, 25 bp, Homo sapien
tcatacggctgacttgggaaacggg

SEQ ID NO: 3951150 - DNA, 25 bp, Homo sapien
tcctggtagtggtatgagatcctgc

SEQ ID NO: 3951151 - DNA, 25 bp, Homo sapien
tgggagctgcccctaattctagcaa

SEQ ID NO: 3951152 - DNA, 25 bp, Homo sapien
ctacaagggttagggtacatctgcc

SEQ ID NO: 3951153 - DNA, 25 bp, Homo sapien
tgcgaccgccgacccgggcagtgaa

SEQ ID NO: 3951154 - DNA, 25 bp, Homo sapien
ggccatcaggcagacataggtgtgc

SEQ ID NO: 3951155 - DNA, 25 bp, Homo sapien
ctgagggcgttgggcgtgctgaggc

SEQ ID NO: 3951156 - DNA, 25 bp, Homo sapien
agtgaaggggacgtcgtcctctcgc

SEQ ID NO: 3951157 - DNA, 25 bp, Homo sapien
tgagaagccggcgctgcagcatcca

SEQ ID NO: 3951158 - DNA, 25 bp, Homo sapien
cacaccaccatctggatgagctggg

SEQ ID NO: 3951159 - DNA, 25 bp, Homo sapien
gatgagaagccggcgctgcagcatc

SEQ ID NO: 3951160 - DNA, 25 bp, Homo sapien
ctggatgagaagccggcgctgcagc

SEQ ID NO: 3951161 - DNA, 25 bp, Homo sapien
gggagccatggccctagacatggcc

SEQ ID NO: 3951162 - DNA, 25 bp, Homo sapien
gagccatggccctagacatggccac

SEQ ID NO: 3951163 - DNA, 25 bp, Homo sapien
ggccacagcacgctccctgtgctga

SEQ ID NO: 3951164 - DNA, 25 bp, Homo sapien
acatggccacagcacgctccctgtg

SEQ ID NO: 3951165 - DNA, 25 bp, Homo sapien
agctctgcaaggcccgctcaccctc

SEQ ID NO: 3951166 - DNA, 25 bp, Homo sapien
ttctcagaaagggagcccccagctg

SEQ ID NO: 3951167 - DNA, 25 bp, Homo sapien
tatatcccaggcaagtaagaagact

SEQ ID NO: 3951168 - DNA, 25 bp, Homo sapien
gaaagtactgcccagactcaggcgt

SEQ ID NO: 3951169 - DNA, 25 bp, Homo sapien
gaacatctggatcacacctgcacag

SEQ ID NO: 3951170 - DNA, 25 bp, Homo sapien
gagtggatccacaagaaagctgagg

SEQ ID NO: 3951171 - DNA, 25 bp, Homo sapien
ctaaattctgacaaggagaccggca

SEQ ID NO: 3951172 - DNA, 25 bp, Homo sapien
aagaacggacggcaggtcatgagat

SEQ ID NO: 3951173 - DNA, 25 bp, Homo sapien
cctaaattctgacaaggagaccggc

SEQ ID NO: 3951174 - DNA, 25 bp, Homo sapien
gagaccggcaaggagaacttggcaa

SEQ ID NO: 3951175 - DNA, 25 bp, Homo sapien
gcaggtgagcatgccagtgagtgca

SEQ ID NO: 3951176 - DNA, 25 bp, Homo sapien
catgccagtgagtgcagcagacccc

SEQ ID NO: 3951177 - DNA, 25 bp, Homo sapien
tgagcatgccagtgagtgcagcaga

SEQ ID NO: 3951178 - DNA, 25 bp, Homo sapien
aggcaggtgagcatgccagtgagtg

SEQ ID NO: 3951179 - DNA, 25 bp, Homo sapien
gcagaacggtatgaggccaggcagg

SEQ ID NO: 3951180 - DNA, 25 bp, Homo sapien
tatgctagtggccaggagttaggct

SEQ ID NO: 3951181 - DNA, 25 bp, Homo sapien
agagccagaccagaattgggacctg

SEQ ID NO: 3951182 - DNA, 25 bp, Homo sapien
acctctgatccctcaaggtggatta

SEQ ID NO: 3951183 - DNA, 25 bp, Homo sapien
tgtagacgttgttctcacacagcgg

SEQ ID NO: 3951184 - DNA, 25 bp, Homo sapien
gacatacgctggcattgggagacag

SEQ ID NO: 3951185 - DNA, 25 bp, Homo sapien
tcacacagcgggtagatgatgatgg

SEQ ID NO: 3951186 - DNA, 25 bp, Homo sapien
cttgccccagtacaccagatgagct

SEQ ID NO: 3951187 - DNA, 25 bp, Homo sapien
gtgtgtgaaatcctaagctctcgca

SEQ ID NO: 3951188 - DNA, 25 bp, Homo sapien
gcctctgtggaggtgagtcacccct

SEQ ID NO: 3951189 - DNA, 25 bp, Homo sapien
agctttgctcttgtggacccttgaa

SEQ ID NO: 3951190 - DNA, 25 bp, Homo sapien
aaaacagggcctccagactgagtga

SEQ ID NO: 3951191 - DNA, 25 bp, Homo sapien
ggcttccgcaccgccacaccagcag

SEQ ID NO: 3951192 - DNA, 25 bp, Homo sapien
caggggcttccgcaccgccacacca

SEQ ID NO: 3951193 - DNA, 25 bp, Homo sapien
ggccccaggggcttccgcaccgcca

SEQ ID NO: 3951194 - DNA, 25 bp, Homo sapien
ttccgcaccgccacaccagcagcaa

SEQ ID NO: 3951195 - DNA, 25 bp, Homo sapien
caatggtcccgtggctctgggccac

SEQ ID NO: 3951196 - DNA, 25 bp, Homo sapien
tgtgcacaccgccaccagacgaggg

SEQ ID NO: 3951197 - DNA, 25 bp, Homo sapien
cccaccctcaggcagtatttcaatg

SEQ ID NO: 3951198 - DNA, 25 bp, Homo sapien
gccacagctgatcccatggcctgtt

SEQ ID NO: 3951199 - DNA, 25 bp, Homo sapien
catgtggctcagcaaggacgtggca

SEQ ID NO: 3951200 - DNA, 25 bp, Homo sapien
tcttgtacagagtgcacaggccaac

SEQ ID NO: 3951201 - DNA, 25 bp, Homo sapien
ggttaggtctctgttctgcacatgg

SEQ ID NO: 3951202 - DNA, 25 bp, Homo sapien
cgtatgttgttcatgcaccactgtg

SEQ ID NO: 3951203 - DNA, 25 bp, Homo sapien
cagcagatgtggtcttgatcacccg

SEQ ID NO: 3951204 - DNA, 25 bp, Homo sapien
cagtcaataggaagctcacccagca

SEQ ID NO: 3951205 - DNA, 25 bp, Homo sapien
ggaagctcacccagcaaggacttct

SEQ ID NO: 3951206 - DNA, 25 bp, Homo sapien
cttgatcacccgcactagggcaggg

SEQ ID NO: 3951207 - DNA, 25 bp, Homo sapien
cagctgttgatgtgaagccgaacta

SEQ ID NO: 3951208 - DNA, 25 bp, Homo sapien
tggctttcaggctccgttcgatggc

SEQ ID NO: 3951209 - DNA, 25 bp, Homo sapien
gtgaagccgaactacgcccgacgtg

SEQ ID NO: 3951210 - DNA, 25 bp, Homo sapien
cagactggaggccgcatagtggatc

SEQ ID NO: 3951211 - DNA, 25 bp, Homo sapien
gaaaggcgctctgtcctaggtcacc

SEQ ID NO: 3951212 - DNA, 25 bp, Homo sapien
ccttgaggccaaccatggacctgat

SEQ ID NO: 3951213 - DNA, 25 bp, Homo sapien
caaacagaatgcgtaggtcaggaaa

SEQ ID NO: 3951214 - DNA, 25 bp, Homo sapien
gagggtactactgcctggactcctg

SEQ ID NO: 3951215 - DNA, 25 bp, Homo sapien
gcttgctgccctcacacagtcagtg

SEQ ID NO: 3951216 - DNA, 25 bp, Homo sapien
cggactctcatgtataacttcgggc

SEQ ID NO: 3951217 - DNA, 25 bp, Homo sapien
ggagtcagtgacacccacctagtga

SEQ ID NO: 3951218 - DNA, 25 bp, Homo sapien
gcacttggtgttgcgtcatgctcag

SEQ ID NO: 3951219 - DNA, 25 bp, Homo sapien
acttgggcaggatgtgatggaatgg

SEQ ID NO: 3951220 - DNA, 25 bp, Homo sapien
tccctggccagcttgcacttgggca

SEQ ID NO: 3951221 - DNA, 25 bp, Homo sapien
taagcttccttgaggtccctggcca

SEQ ID NO: 3951222 - DNA, 25 bp, Homo sapien
ctgtcataagcttccttgaggtccc

SEQ ID NO: 3951223 - DNA, 25 bp, Homo sapien
atcctggagcgccaggatcagcttg

SEQ ID NO: 3951224 - DNA, 25 bp, Homo sapien
tatgcagacagtttatcactgacgg

SEQ ID NO: 3951225 - DNA, 25 bp, Homo sapien
tacgacgggacaggttatgcagaca

SEQ ID NO: 3951226 - DNA, 25 bp, Homo sapien
tcccgggtgaggtactggcagcggc

SEQ ID NO: 3951227 - DNA, 25 bp, Homo sapien
gctgcagtccaagctccgagtcaat

SEQ ID NO: 3951228 - DNA, 25 bp, Homo sapien
tcgtcaatatcacggccagctgaag

SEQ ID NO: 3951229 - DNA, 25 bp, Homo sapien
aaacaatgaagtgcagtctgcctgc

SEQ ID NO: 3951230 - DNA, 25 bp, Homo sapien
taagcatttgtgctcggctccggtt

SEQ ID NO: 3951231 - DNA, 25 bp, Homo sapien
gtgcttccctcttcggggaaggatc

SEQ ID NO: 3951232 - DNA, 25 bp, Homo sapien
tcttcggggaaggatctgttttgga

SEQ ID NO: 3951233 - DNA, 25 bp, Homo sapien
cctcttcggggaaggatctgttttg

SEQ ID NO: 3951234 - DNA, 25 bp, Homo sapien
catagtaggtgcttccctcttcggg

SEQ ID NO: 3951235 - DNA, 25 bp, Homo sapien
gaggcgtgcctactgcatgggcaaa

SEQ ID NO: 3951236 - DNA, 25 bp, Homo sapien
gaccagggcgctcaagggaagcatt

SEQ ID NO: 3951237 - DNA, 25 bp, Homo sapien
cagaacaattgagggacaggacgat

SEQ ID NO: 3951238 - DNA, 25 bp, Homo sapien
aatttctgtgctcccggttctggca

SEQ ID NO: 3951239 - DNA, 25 bp, Homo sapien
gggtctgtgcatgcccagggagaac

SEQ ID NO: 3951240 - DNA, 25 bp, Homo sapien
agagggtctgtgcatgcccagggag

SEQ ID NO: 3951241 - DNA, 25 bp, Homo sapien
agggtctgtgcatgcccagggagaa

SEQ ID NO: 3951242 - DNA, 25 bp, Homo sapien
ggtctgtgcatgcccagggagaacc

SEQ ID NO: 3951243 - DNA, 25 bp, Homo sapien
tcccagagggtctgtacctgcccag

SEQ ID NO: 3951244 - DNA, 25 bp, Homo sapien
cttcccagagggtctgtacctgccc

SEQ ID NO: 3951245 - DNA, 25 bp, Homo sapien
cagagggtctgtacctgcccagggg

SEQ ID NO: 3951246 - DNA, 25 bp, Homo sapien
gagggtctgtacctgcccaggggaa

SEQ ID NO: 3951247 - DNA, 25 bp, Homo sapien
aaatcgcacattatcaatcttcagt

SEQ ID NO: 3951248 - DNA, 25 bp, Homo sapien
ctgtagcagtgttgggtgcccaaca

SEQ ID NO: 3951249 - DNA, 25 bp, Homo sapien
gacttggttgccaaaattgttgcca

SEQ ID NO: 3951250 - DNA, 25 bp, Homo sapien
tcagttcaaatttttggccacacat

SEQ ID NO: 3951251 - DNA, 25 bp, Homo sapien
ctggccccagagcggaagggtctca

SEQ ID NO: 3951252 - DNA, 25 bp, Homo sapien
gagcggaagggtctcagtaaactgc

SEQ ID NO: 3951253 - DNA, 25 bp, Homo sapien
cccagagcggaagggtctcagtaaa

SEQ ID NO: 3951254 - DNA, 25 bp, Homo sapien
gcggaagggtctcagtaaactgcac

SEQ ID NO: 3951255 - DNA, 25 bp, Homo sapien
taatatctaggtcaggagggtgcac

SEQ ID NO: 3951256 - DNA, 25 bp, Homo sapien
gggcctccgctctagaaacacaaat

SEQ ID NO: 3951257 - DNA, 25 bp, Homo sapien
ttctagggtgcaaacctggtcatgc

SEQ ID NO: 3951258 - DNA, 25 bp, Homo sapien
gagatctggataagggagtgtcacc

SEQ ID NO: 3951259 - DNA, 25 bp, Homo sapien
cctgcaaccaattgctcatcggttg

SEQ ID NO: 3951260 - DNA, 25 bp, Homo sapien
ccaattgctcatcggttggaggaca

SEQ ID NO: 3951261 - DNA, 25 bp, Homo sapien
attgctcatcggttggaggacatgg

SEQ ID NO: 3951262 - DNA, 25 bp, Homo sapien
gcaaccaattgctcatcggttggag

SEQ ID NO: 3951263 - DNA, 25 bp, Homo sapien
tgaaccctagaggtgaggttgcagc

SEQ ID NO: 3951264 - DNA, 25 bp, Homo sapien
atcgcttgaaccctagaggtgaggt

SEQ ID NO: 3951265 - DNA, 25 bp, Homo sapien
accctagaggtgaggttgcagcaag

SEQ ID NO: 3951266 - DNA, 25 bp, Homo sapien
tcgcttgaaccctagaggtgaggtt

SEQ ID NO: 3951267 - DNA, 25 bp, Homo sapien
ttctctgaggtagtggcctaagcac

SEQ ID NO: 3951268 - DNA, 25 bp, Homo sapien
agcaggaagacggtgtccacacaga

SEQ ID NO: 3951269 - DNA, 25 bp, Homo sapien
cctgaggacagtagcagtgccacct

SEQ ID NO: 3951270 - DNA, 25 bp, Homo sapien
tgttgaccaagctgagttcgagacc

SEQ ID NO: 3951271 - DNA, 25 bp, Homo sapien
actaagggcgcaggtcaccaaccca

SEQ ID NO: 3951272 - DNA, 25 bp, Homo sapien
gggcgcaggtcaccaacccagctaa

SEQ ID NO: 3951273 - DNA, 25 bp, Homo sapien
tgggactaagggcgcaggtcaccaa

SEQ ID NO: 3951274 - DNA, 25 bp, Homo sapien
tatttccatatagacattgagcacc

SEQ ID NO: 3951275 - DNA, 25 bp, Homo sapien
tacatcaaaatgacggtccaatggg

SEQ ID NO: 3951276 - DNA, 25 bp, Homo sapien
ggcaagacaaccacaggcctctaca

SEQ ID NO: 3951277 - DNA, 25 bp, Homo sapien
tctatatgcctgtgacaaaccagag

SEQ ID NO: 3951278 - DNA, 25 bp, Homo sapien
ccaccacatttaaagggcaagacaa

SEQ ID NO: 3951279 - DNA, 25 bp, Homo sapien
ctgctcatcagcatggtcgcccgtg

SEQ ID NO: 3951280 - DNA, 25 bp, Homo sapien
gttgctggcagcgtatctgctacgc

SEQ ID NO: 3951281 - DNA, 25 bp, Homo sapien
gcagcgtatctgctacgcggcttac

SEQ ID NO: 3951282 - DNA, 25 bp, Homo sapien
catcagcatggtcgcccgtgttgct

SEQ ID NO: 3951283 - DNA, 25 bp, Homo sapien
gtagattagaggttagcacaggctg

SEQ ID NO: 3951284 - DNA, 25 bp, Homo sapien
ggttatggaaccgttaacagccatg

SEQ ID NO: 3951285 - DNA, 25 bp, Homo sapien
aaacatgctctgtccataccatgga

SEQ ID NO: 3951286 - DNA, 25 bp, Homo sapien
cagatagcggtaatggctgcacact

SEQ ID NO: 3951287 - DNA, 25 bp, Homo sapien
tattttctcatgatgaatacatccc

SEQ ID NO: 3951288 - DNA, 25 bp, Homo sapien
attaccgccaccggccttgttcgtg

SEQ ID NO: 3951289 - DNA, 25 bp, Homo sapien
tgatgaatacatcccaaactcattt

SEQ ID NO: 3951290 - DNA, 25 bp, Homo sapien
cggccttgttcgtgtaattttgtat

SEQ ID NO: 3951291 - DNA, 25 bp, Homo sapien
ctgggacgccgggtgctcctggctt

SEQ ID NO: 3951292 - DNA, 25 bp, Homo sapien
tacctgaacagcagcttattgcccc

SEQ ID NO: 3951293 - DNA, 25 bp, Homo sapien
ctgctccccgagctcaccagaatca

SEQ ID NO: 3951294 - DNA, 25 bp, Homo sapien
agctcaccagaatcacgctgatggg

SEQ ID NO: 3951295 - DNA, 25 bp, Homo sapien
cagaggaggacggagccggaggcgg

SEQ ID NO: 3951296 - DNA, 25 bp, Homo sapien
gagggggccagaggaggacggagcc

SEQ ID NO: 3951297 - DNA, 25 bp, Homo sapien
gcggagggggccagaggaggacgga

SEQ ID NO: 3951298 - DNA, 25 bp, Homo sapien
gggccagaggaggacggagccggag

SEQ ID NO: 3951299 - DNA, 25 bp, Homo sapien
tgaggaggacggagccggaggcgga

SEQ ID NO: 3951300 - DNA, 25 bp, Homo sapien
gaggaggacggagccggaggcggag

SEQ ID NO: 3951301 - DNA, 25 bp, Homo sapien
aggaggacggagccggaggcggagg

SEQ ID NO: 3951302 - DNA, 25 bp, Homo sapien
ctgaggaggacggagccggaggcgg

SEQ ID NO: 3951303 - DNA, 25 bp, Homo sapien
ggtggtggtggacgcggagcagcgc

SEQ ID NO: 3951304 - DNA, 25 bp, Homo sapien
ctgaggaggacgaggcggggacgca

SEQ ID NO: 3951305 - DNA, 25 bp, Homo sapien
tggtggacgcggagcagcgccacag

SEQ ID NO: 3951306 - DNA, 25 bp, Homo sapien
gcggagcagcgccacagttaccaac

SEQ ID NO: 3951307 - DNA, 25 bp, Homo sapien
cgacaccgtccggaggaggtgctaa

SEQ ID NO: 3951308 - DNA, 25 bp, Homo sapien
acgctccgggctcgcgagacttcgg

SEQ ID NO: 3951309 - DNA, 25 bp, Homo sapien
cttctggaagccaccgagttccgcg

SEQ ID NO: 3951310 - DNA, 25 bp, Homo sapien
tgtctggagccgtacggttcgcgtt

SEQ ID NO: 3951311 - DNA, 25 bp, Homo sapien
catgtgcggccccatgagcaagcca

SEQ ID NO: 3951312 - DNA, 25 bp, Homo sapien
aaaagatgtgcatgggccgggcacg

SEQ ID NO: 3951313 - DNA, 25 bp, Homo sapien
gacgcagcaacggaaaagcatcagt

SEQ ID NO: 3951314 - DNA, 25 bp, Homo sapien
tgaagatgttgcacctgtcagcggg

SEQ ID NO: 3951315 - DNA, 25 bp, Homo sapien
aagaccaacgtcaaggccgcctggg

SEQ ID NO: 3951316 - DNA, 25 bp, Homo sapien
gagtatggtgcggaggccctggaga

SEQ ID NO: 3951317 - DNA, 25 bp, Homo sapien
tcctgccgacaagaccaacgtcaag

SEQ ID NO: 3951318 - DNA, 25 bp, Homo sapien
ggcgcgcacgctggcgagtatggtg

SEQ ID NO: 3951319 - DNA, 25 bp, Homo sapien
tctgcccaggttaagggccacggca

SEQ ID NO: 3951320 - DNA, 25 bp, Homo sapien
aagaaggtggccgacgcgctgacca

SEQ ID NO: 3951321 - DNA, 25 bp, Homo sapien
acgccgtggcgcacgtggacgacat

SEQ ID NO: 3951322 - DNA, 25 bp, Homo sapien
tggacgacatgcccaacgcgctgtc

SEQ ID NO: 3951323 - DNA, 25 bp, Homo sapien
agcctcggtagccgttcctcctgcc

SEQ ID NO: 3951324 - DNA, 25 bp, Homo sapien
agctggagcctcggtagccgttcct

SEQ ID NO: 3951325 - DNA, 25 bp, Homo sapien
ggagcctcggtagccgttcctcctg

SEQ ID NO: 3951326 - DNA, 25 bp, Homo sapien
tggagcctcggtagccgttcctcct

SEQ ID NO: 3951327 - DNA, 25 bp, Homo sapien
aagaccaacgtcaaggccgcctggg

SEQ ID NO: 3951328 - DNA, 25 bp, Homo sapien
gagtatggtgcggaggccctggaga

SEQ ID NO: 3951329 - DNA, 25 bp, Homo sapien
tcctgccgacaagaccaacgtcaag

SEQ ID NO: 3951330 - DNA, 25 bp, Homo sapien
ggcgcgcacgctggcgagtatggtg

SEQ ID NO: 3951331 - DNA, 25 bp, Homo sapien
tctgcccaggttaagggccacggca

SEQ ID NO: 3951332 - DNA, 25 bp, Homo sapien
aagaaggtggccgacgcgctgacca

SEQ ID NO: 3951333 - DNA, 25 bp, Homo sapien
acgccgtggcgcacgtggacgacat

SEQ ID NO: 3951334 - DNA, 25 bp, Homo sapien
tggacgacatgcccaacgcgctgtc

SEQ ID NO: 3951335 - DNA, 25 bp, Homo sapien
gcctcggtggccatgcttcttgccc

SEQ ID NO: 3951336 - DNA, 25 bp, Homo sapien
ggccatgcttcttgccccttgggcc

SEQ ID NO: 3951337 - DNA, 25 bp, Homo sapien
cctcggtggccatgcttcttgcccc

SEQ ID NO: 3951338 - DNA, 25 bp, Homo sapien
ggtggccatgcttcttgccccttgg

SEQ ID NO: 3951339 - DNA, 25 bp, Homo sapien
ttacatctggagcatcactgaaggt

SEQ ID NO: 3951340 - DNA, 25 bp, Homo sapien
tgcaacttcgcgcacaggagcaagc

SEQ ID NO: 3951341 - DNA, 25 bp, Homo sapien
tgcggctgctgcaacttcgcgcaca

SEQ ID NO: 3951342 - DNA, 25 bp, Homo sapien
cagactcctgtaactaggtgtggac

SEQ ID NO: 3951343 - DNA, 25 bp, Homo sapien
cagtaagccatgactacaacactgc

SEQ ID NO: 3951344 - DNA, 25 bp, Homo sapien
gacaaagcaagcatcgtctcaaaaa

SEQ ID NO: 3951345 - DNA, 25 bp, Homo sapien
tggtagtgcacacctatgtcccagt

SEQ ID NO: 3951346 - DNA, 25 bp, Homo sapien
gggtgacaaagcaagcatcgtctca

SEQ ID NO: 3951347 - DNA, 25 bp, Homo sapien
cacctggcaggtgtaccaaaagccc

SEQ ID NO: 3951348 - DNA, 25 bp, Homo sapien
tcagcgaaactgcaccgggggcatg

SEQ ID NO: 3951349 - DNA, 25 bp, Homo sapien
ctggcaggtgtaccaaaagcccacc

SEQ ID NO: 3951350 - DNA, 25 bp, Homo sapien
agcaccacctggcaggtgtaccaaa

SEQ ID NO: 3951351 - DNA, 25 bp, Homo sapien
tgacgctgtctgcttaaggcccagg

SEQ ID NO: 3951352 - DNA, 25 bp, Homo sapien
cctagaagacgaagaggaaagcaca

SEQ ID NO: 3951353 - DNA, 25 bp, Homo sapien
tgtgctgaacaagtaccctgagtcc

SEQ ID NO: 3951354 - DNA, 25 bp, Homo sapien
catgaacacaacgtgggcttgggaa

SEQ ID NO: 3951355 - DNA, 25 bp, Homo sapien
ggaataccaacacgggaggaacagc

SEQ ID NO: 3951356 - DNA, 25 bp, Homo sapien
ctgggctagacctgtgtcacgggct

SEQ ID NO: 3951357 - DNA, 25 bp, Homo sapien
cagctacactgtgataccggtggca

SEQ ID NO: 3951358 - DNA, 25 bp, Homo sapien
cagggaatatcgacatgggtgatgc

SEQ ID NO: 3951359 - DNA, 25 bp, Homo sapien
gggcagctcagacactcagaaggtt

SEQ ID NO: 3951360 - DNA, 25 bp, Homo sapien
gggacatgcagtgtaactcacctga

SEQ ID NO: 3951361 - DNA, 25 bp, Homo sapien
tgtgtgggagcgagcaaacaaacac

SEQ ID NO: 3951362 - DNA, 25 bp, Homo sapien
cagtggcggaatcaaggtttgcctc

SEQ ID NO: 3951363 - DNA, 25 bp, Homo sapien
tagactgtgtgaacgtttatcagac

SEQ ID NO: 3951364 - DNA, 25 bp, Homo sapien
tcacagctagctccaaaacaataga

SEQ ID NO: 3951365 - DNA, 25 bp, Homo sapien
ccgggaacacaggagcaactctgta

SEQ ID NO: 3951366 - DNA, 25 bp, Homo sapien
cagactatttacagcacccgggaga

SEQ ID NO: 3951367 - DNA, 25 bp, Homo sapien
gacctccgtgaagccatcttcccgt

SEQ ID NO: 3951368 - DNA, 25 bp, Homo sapien
cgttggagctctcaagcctccagtc

SEQ ID NO: 3951369 - DNA, 25 bp, Homo sapien
tcgctccgcccgctctcccaggact

SEQ ID NO: 3951370 - DNA, 25 bp, Homo sapien
tctggatgcccgctctctggagaac

SEQ ID NO: 3951371 - DNA, 25 bp, Homo sapien
tcaggcactgacgatggacccgcag

SEQ ID NO: 3951372 - DNA, 25 bp, Homo sapien
aaggccctacatcccctatacctgg

SEQ ID NO: 3951373 - DNA, 25 bp, Homo sapien
ccacatatggagtgttagatagcca

SEQ ID NO: 3951374 - DNA, 25 bp, Homo sapien
accagacttgcccaccacatatgga

SEQ ID NO: 3951375 - DNA, 25 bp, Homo sapien
gccactctgagcatggacgcaacag

SEQ ID NO: 3951376 - DNA, 25 bp, Homo sapien
taaacagtgcaaaggagaatacaac

SEQ ID NO: 3951377 - DNA, 25 bp, Homo sapien
tatgcacagaacatgacactacgta

SEQ ID NO: 3951378 - DNA, 25 bp, Homo sapien
ggtcaggacacaagtctcagccact

SEQ ID NO: 3951379 - DNA, 25 bp, Homo sapien
tgtatttcgcacttcggtcccggga

SEQ ID NO: 3951380 - DNA, 25 bp, Homo sapien
cgatgtctatctcgggaccgggacc

SEQ ID NO: 3951381 - DNA, 25 bp, Homo sapien
gacaatttccgtcgctctcgggagg

SEQ ID NO: 3951382 - DNA, 25 bp, Homo sapien
gaggtagatcttgaccgcctccgac

SEQ ID NO: 3951383 - DNA, 25 bp, Homo sapien
tataggtgccaacactatgagggcc

SEQ ID NO: 3951384 - DNA, 25 bp, Homo sapien
tgaacaatcagaaggctccaaggct

SEQ ID NO: 3951385 - DNA, 25 bp, Homo sapien
tcctgaaaacatgtggcctggatac

SEQ ID NO: 3951386 - DNA, 25 bp, Homo sapien
ggtccttccaatgaggtctcctgaa

SEQ ID NO: 3951387 - DNA, 25 bp, Homo sapien
gcgatctctggttcttgatcccgac

SEQ ID NO: 3951388 - DNA, 25 bp, Homo sapien
aaaaagatgaacaaggccaggcatg

SEQ ID NO: 3951389 - DNA, 25 bp, Homo sapien
gaaaaaaagatgaacaaggccaggc

SEQ ID NO: 3951390 - DNA, 25 bp, Homo sapien
cttcggggaggcctaggcaggcaat

SEQ ID NO: 3951391 - DNA, 25 bp, Homo sapien
agcacttcggggaggcctaggcagg

SEQ ID NO: 3951392 - DNA, 25 bp, Homo sapien
gtctctactgagaacacaaaacctg

SEQ ID NO: 3951393 - DNA, 25 bp, Homo sapien
ccgtctctactgagaacacaaaacc

SEQ ID NO: 3951394 - DNA, 25 bp, Homo sapien
caggcgtggtggcgggtgcctgtaa

SEQ ID NO: 3951395 - DNA, 25 bp, Homo sapien
ctctactgagaacacaaaacctggc

SEQ ID NO: 3951396 - DNA, 25 bp, Homo sapien
cctggacaatgagctgtctccagga

SEQ ID NO: 3951397 - DNA, 25 bp, Homo sapien
ccctgagttatgcactgaggaatta

SEQ ID NO: 3951398 - DNA, 25 bp, Homo sapien
aggaggatgtggatacttctggctc

SEQ ID NO: 3951399 - DNA, 25 bp, Homo sapien
aaacacaataaacattcgccctgag

SEQ ID NO: 3951400 - DNA, 25 bp, Homo sapien
tcaagcgatcctgatttctcttctc

SEQ ID NO: 3951401 - DNA, 25 bp, Homo sapien
tcagacgctcctcccgttccctctc

SEQ ID NO: 3951402 - DNA, 25 bp, Homo sapien
cctcaagcgatcctgatttctcttc

SEQ ID NO: 3951403 - DNA, 25 bp, Homo sapien
ctcctgctcagacgctcctcccgtt

SEQ ID NO: 3951404 - DNA, 25 bp, Homo sapien
ttaaaacttcttaatgaagaagata

SEQ ID NO: 3951405 - DNA, 25 bp, Homo sapien
agccaccgcgcttggccactttttt

SEQ ID NO: 3951406 - DNA, 25 bp, Homo sapien
tcttgctctgtccacccaggctgga

SEQ ID NO: 3951407 - DNA, 25 bp, Homo sapien
ttttttgaaacagggtcttgctctg

SEQ ID NO: 3951408 - DNA, 25 bp, Homo sapien
tgctctgtccacccaggctggatgg

SEQ ID NO: 3951409 - DNA, 25 bp, Homo sapien
acgatggcataaggataatcttcca

SEQ ID NO: 3951410 - DNA, 25 bp, Homo sapien
cacgatggcataaggataatcttcc

SEQ ID NO: 3951411 - DNA, 25 bp, Homo sapien
gagccacgatggcataaggataatc

SEQ ID NO: 3951412 - DNA, 25 bp, Homo sapien
gccacgatggcataaggataatctt

SEQ ID NO: 3951413 - DNA, 25 bp, Homo sapien
accaacacacctggctaatttttcg

SEQ ID NO: 3951414 - DNA, 25 bp, Homo sapien
ctggctaatttttcggtagagacgg

SEQ ID NO: 3951415 - DNA, 25 bp, Homo sapien
caccacgcccggccaaaacataagg

SEQ ID NO: 3951416 - DNA, 25 bp, Homo sapien
cgagtacctaagattacaggctcac

SEQ ID NO: 3951417 - DNA, 25 bp, Homo sapien
cagctttctccagaaacagatgaac

SEQ ID NO: 3951418 - DNA, 25 bp, Homo sapien
gctttctccagaaacagatgaacat

SEQ ID NO: 3951419 - DNA, 25 bp, Homo sapien
tttctccagaaacagatgaacatac

SEQ ID NO: 3951420 - DNA, 25 bp, Homo sapien
tcagctttctccagaaacagatgaa

SEQ ID NO: 3951421 - DNA, 25 bp, Homo sapien
caggcgacggtcattgtcatggaga

SEQ ID NO: 3951422 - DNA, 25 bp, Homo sapien
caaggtaggctgaacagacctcgca

SEQ ID NO: 3951423 - DNA, 25 bp, Homo sapien
taacttgccaccgaagtggtctgcc

SEQ ID NO: 3951424 - DNA, 25 bp, Homo sapien
agacctcgcagacacgcagcttttg

SEQ ID NO: 3951425 - DNA, 25 bp, Homo sapien
agcgataaactagatgaaatggacc

SEQ ID NO: 3951426 - DNA, 25 bp, Homo sapien
catgcccacaaaagcgataaactag

SEQ ID NO: 3951427 - DNA, 25 bp, Homo sapien
tggaccgatcccttcaaagacagcc

SEQ ID NO: 3951428 - DNA, 25 bp, Homo sapien
taaactagatgaaatggaccgatcc

SEQ ID NO: 3951429 - DNA, 25 bp, Homo sapien
gggctcaattaattccaacggtcaa

SEQ ID NO: 3951430 - DNA, 25 bp, Homo sapien
aaaatgggagcaagcatgggctcaa

SEQ ID NO: 3951431 - DNA, 25 bp, Homo sapien
ggtcaacgctgccaaattactaaga

SEQ ID NO: 3951432 - DNA, 25 bp, Homo sapien
taagatttctcttgccctaaggcac

SEQ ID NO: 3951433 - DNA, 25 bp, Homo sapien
ctagctgttcggctttagcaaggag

SEQ ID NO: 3951434 - DNA, 25 bp, Homo sapien
cggctttagcaaggagttttcctat

SEQ ID NO: 3951435 - DNA, 25 bp, Homo sapien
gctgttcggctttagcaaggagttt

SEQ ID NO: 3951436 - DNA, 25 bp, Homo sapien
tgttcggctttagcaaggagttttc

SEQ ID NO: 3951437 - DNA, 25 bp, Homo sapien
cataaacgagtcctatgttccaatg

SEQ ID NO: 3951438 - DNA, 25 bp, Homo sapien
ggaagagctaaagatccacacttaa

SEQ ID NO: 3951439 - DNA, 25 bp, Homo sapien
gaaagaatgaggtaagcagacatct

SEQ ID NO: 3951440 - DNA, 25 bp, Homo sapien
cattgagactgtaaccataaacgag

SEQ ID NO: 3951441 - DNA, 25 bp, Homo sapien
ttgcagaaacttccgcactgatttc

SEQ ID NO: 3951442 - DNA, 25 bp, Homo sapien
ctccgatcacattcagcaataaagg

SEQ ID NO: 3951443 - DNA, 25 bp, Homo sapien
ttcttggcgagctcagttctccgat

SEQ ID NO: 3951444 - DNA, 25 bp, Homo sapien
ctgtgtttctgccagccgcttcttg

SEQ ID NO: 3951445 - DNA, 25 bp, Homo sapien
aaaggctgagcctagactcgtgctg

SEQ ID NO: 3951446 - DNA, 25 bp, Homo sapien
taaagcctgtacattcaagggaaag

SEQ ID NO: 3951447 - DNA, 25 bp, Homo sapien
tagaacccatttgcttgataggaaa

SEQ ID NO: 3951448 - DNA, 25 bp, Homo sapien
ttctcggagggacagaaaaggctga

SEQ ID NO: 3951449 - DNA, 25 bp, Homo sapien
ttattccctcatgttctgagggtag

SEQ ID NO: 3951450 - DNA, 25 bp, Homo sapien
gtctttgtgagccacgtaaatatta

SEQ ID NO: 3951451 - DNA, 25 bp, Homo sapien
tattattccctcatgttctgagggt

SEQ ID NO: 3951452 - DNA, 25 bp, Homo sapien
tgtgagccacgtaaatattattccc

SEQ ID NO: 3951453 - DNA, 25 bp, Homo sapien
tagggcatcacttttccgactgtca

SEQ ID NO: 3951454 - DNA, 25 bp, Homo sapien
taagatagggaagaacctccaagtc

SEQ ID NO: 3951455 - DNA, 25 bp, Homo sapien
cagccagtgaccagtagtaagaaac

SEQ ID NO: 3951456 - DNA, 25 bp, Homo sapien
ttgtagtgaactgagaccagaccac

SEQ ID NO: 3951457 - DNA, 25 bp, Homo sapien
gaaataggcagctgacaactctccc

SEQ ID NO: 3951458 - DNA, 25 bp, Homo sapien
aactgcttcttgttggtcacccaga

SEQ ID NO: 3951459 - DNA, 25 bp, Homo sapien
gcaccttaagcagaatccaaattgg

SEQ ID NO: 3951460 - DNA, 25 bp, Homo sapien
gacagattcagggattcactcgagg

SEQ ID NO: 3951461 - DNA, 25 bp, Homo sapien
tataggaacacgtcactacacccag

SEQ ID NO: 3951462 - DNA, 25 bp, Homo sapien
ggagttccatccatcaagcttaagg

SEQ ID NO: 3951463 - DNA, 25 bp, Homo sapien
caactgagtactgggaggatcctgg

SEQ ID NO: 3951464 - DNA, 25 bp, Homo sapien
gataaaacatatcaaggcctgggtc

SEQ ID NO: 3951465 - DNA, 25 bp, Homo sapien
cacataggacaaaaaggtctctgac

SEQ ID NO: 3951466 - DNA, 25 bp, Homo sapien
taacccattctctcaaggcacatgc

SEQ ID NO: 3951467 - DNA, 25 bp, Homo sapien
aaatgacttttagggagtgggagat

SEQ ID NO: 3951468 - DNA, 25 bp, Homo sapien
gacacggtgttgtactatttggcca

SEQ ID NO: 3951469 - DNA, 25 bp, Homo sapien
aacagaatttacttgaggccaggtg

SEQ ID NO: 3951470 - DNA, 25 bp, Homo sapien
aataaacagaatttacttgaggcca

SEQ ID NO: 3951471 - DNA, 25 bp, Homo sapien
taaacagaatttacttgaggccagg

SEQ ID NO: 3951472 - DNA, 25 bp, Homo sapien
aaacagaatttacttgaggccaggt

SEQ ID NO: 3951473 - DNA, 25 bp, Homo sapien
caatattgggttcttcgcagtagga

SEQ ID NO: 3951474 - DNA, 25 bp, Homo sapien
tgtctgcagtagcaaaactagaatc

SEQ ID NO: 3951475 - DNA, 25 bp, Homo sapien
gacgctggacacaacatataaacag

SEQ ID NO: 3951476 - DNA, 25 bp, Homo sapien
tcatttaggacactgacaggacgct

SEQ ID NO: 3951477 - DNA, 25 bp, Homo sapien
tctttacttgcaatctcataatctg

SEQ ID NO: 3951478 - DNA, 25 bp, Homo sapien
aatctgctcggagggccaagtcgtg

SEQ ID NO: 3951479 - DNA, 25 bp, Homo sapien
tgcaatctcataatctgctcggagg

SEQ ID NO: 3951480 - DNA, 25 bp, Homo sapien
tggtacattctcctaaatccatgcg

SEQ ID NO: 3951481 - DNA, 25 bp, Homo sapien
tctgtaaacttgaccctctgtctgg

SEQ ID NO: 3951482 - DNA, 25 bp, Homo sapien
gaaggtgactcttgcagacacggtc

SEQ ID NO: 3951483 - DNA, 25 bp, Homo sapien
gggcagcagtccagaaggtgactct

SEQ ID NO: 3951484 - DNA, 25 bp, Homo sapien
tcccagccaggatgtcatgggggca

SEQ ID NO: 3951485 - DNA, 25 bp, Homo sapien
tgagactgcaaaacccaagctaatc

SEQ ID NO: 3951486 - DNA, 25 bp, Homo sapien
gaggtccatgaaccaccaagggtga

SEQ ID NO: 3951487 - DNA, 25 bp, Homo sapien
caattcacctggatgatttgcagac

SEQ ID NO: 3951488 - DNA, 25 bp, Homo sapien
aaagagagttgctacctgggagtca

SEQ ID NO: 3951489 - DNA, 25 bp, Homo sapien
tatgcccgctgttgaaaagtgttaa

SEQ ID NO: 3951490 - DNA, 25 bp, Homo sapien
cagcttagaaattggttgtgactca

SEQ ID NO: 3951491 - DNA, 25 bp, Homo sapien
acagagctgtgcaacgctagaggag

SEQ ID NO: 3951492 - DNA, 25 bp, Homo sapien
tcagctgcagaattttatgcccgct

SEQ ID NO: 3951493 - DNA, 25 bp, Homo sapien
tgtaggcaggcaaagatacactgaa

SEQ ID NO: 3951494 - DNA, 25 bp, Homo sapien
tacttggcagaaacccacgttagaa

SEQ ID NO: 3951495 - DNA, 25 bp, Homo sapien
caatggtacagaaccagagcgggcc

SEQ ID NO: 3951496 - DNA, 25 bp, Homo sapien
gtcaagcgctggctacacagaggct

SEQ ID NO: 3951497 - DNA, 25 bp, Homo sapien
gcaaataatctgcacagccctgaga

SEQ ID NO: 3951498 - DNA, 25 bp, Homo sapien
tcgcctggttggccgctctgactca

SEQ ID NO: 3951499 - DNA, 25 bp, Homo sapien
caggcgcagacgatcgcggcccccg

SEQ ID NO: 3951500 - DNA, 25 bp, Homo sapien
ggaggagcgatgccccgcgcaggcg

SEQ ID NO: 3951501 - DNA, 25 bp, Homo sapien
ccagaccctcgcctggttggccgct

SEQ ID NO: 3951502 - DNA, 25 bp, Homo sapien
gccgtgcccatgagctggtccagca

SEQ ID NO: 3951503 - DNA, 25 bp, Homo sapien
cgtcccgagccgtgcccatgagctg

SEQ ID NO: 3951504 - DNA, 25 bp, Homo sapien
gtcccgagccgtgcccatgagctgg

SEQ ID NO: 3951505 - DNA, 25 bp, Homo sapien
cgagccgtgcccatgagctggtcca

SEQ ID NO: 3951506 - DNA, 25 bp, Homo sapien
acttctctcaggcaggcggtggcag

SEQ ID NO: 3951507 - DNA, 25 bp, Homo sapien
acaaacgatggtcgcgtcggcctcg

SEQ ID NO: 3951508 - DNA, 25 bp, Homo sapien
gggtcggccgcgacgacttctctca

SEQ ID NO: 3951509 - DNA, 25 bp, Homo sapien
gcagcggcgtcgacaaacgatggtc

SEQ ID NO: 3951510 - DNA, 25 bp, Homo sapien
tatcagctcaagtggaagaacttgc

SEQ ID NO: 3951511 - DNA, 25 bp, Homo sapien
taaatagggtgtccgttgggctgct

SEQ ID NO: 3951512 - DNA, 25 bp, Homo sapien
gcagatcggagacgcagccttttca

SEQ ID NO: 3951513 - DNA, 25 bp, Homo sapien
gacacggtgttgtaccgtattggcc

SEQ ID NO: 3951514 - DNA, 25 bp, Homo sapien
tggttgaatcatgaactgcctggct

SEQ ID NO: 3951515 - DNA, 25 bp, Homo sapien
tagccacatggcctgactctctgtg

SEQ ID NO: 3951516 - DNA, 25 bp, Homo sapien
ttaatgaccgcagtagagaaaaaca

SEQ ID NO: 3951517 - DNA, 25 bp, Homo sapien
gagcaaatctttggacctgtctcat

SEQ ID NO: 3951518 - DNA, 25 bp, Homo sapien
ctccatgcctggctaatgtatgtat

SEQ ID NO: 3951519 - DNA, 25 bp, Homo sapien
gcctccatgcctggctaatgtatgt

SEQ ID NO: 3951520 - DNA, 25 bp, Homo sapien
cccgcctccatgcctggctaatgta

SEQ ID NO: 3951521 - DNA, 25 bp, Homo sapien
ccgcctccatgcctggctaatgtat

SEQ ID NO: 3951522 - DNA, 25 bp, Homo sapien
tcatttttgtgcatgacgtaaagat

SEQ ID NO: 3951523 - DNA, 25 bp, Homo sapien
tgcatgacgtaaagattcaacttca

SEQ ID NO: 3951524 - DNA, 25 bp, Homo sapien
tttgtgcatgacgtaaagattcaac

SEQ ID NO: 3951525 - DNA, 25 bp, Homo sapien
tttttgtgcatgacgtaaagattca

SEQ ID NO: 3951526 - DNA, 25 bp, Homo sapien
tcattgcagtcaacttgttcacagg

SEQ ID NO: 3951527 - DNA, 25 bp, Homo sapien
tcaccctgagggctaatgccaggag

SEQ ID NO: 3951528 - DNA, 25 bp, Homo sapien
aacggcagcacgctctgggagagac

SEQ ID NO: 3951529 - DNA, 25 bp, Homo sapien
caacagtgaggtgccggtgtctctc

SEQ ID NO: 3951530 - DNA, 25 bp, Homo sapien
tggagccgtcctgtgtagcctagcc

SEQ ID NO: 3951531 - DNA, 25 bp, Homo sapien
ggagcaccagcgagacggtacggga

SEQ ID NO: 3951532 - DNA, 25 bp, Homo sapien
gagccgtcctgtgtagcctagccct

SEQ ID NO: 3951533 - DNA, 25 bp, Homo sapien
gggagccaccctcggagcagccatg

SEQ ID NO: 3951534 - DNA, 25 bp, Homo sapien
cacaggtgtccttagtggtgttgca

SEQ ID NO: 3951535 - DNA, 25 bp, Homo sapien
tcacagagcctgagcttcgtagcca

SEQ ID NO: 3951536 - DNA, 25 bp, Homo sapien
ttcgtagccaaagcagcctgatgac

SEQ ID NO: 3951537 - DNA, 25 bp, Homo sapien
catgtgctgtgaatatcccaaggaa

SEQ ID NO: 3951538 - DNA, 25 bp, Homo sapien
ccctaccgccgagagagttgaagct

SEQ ID NO: 3951539 - DNA, 25 bp, Homo sapien
caaattctggaacgcgtttggcgag

SEQ ID NO: 3951540 - DNA, 25 bp, Homo sapien
tgccggcgcacctgtggacaaattc

SEQ ID NO: 3951541 - DNA, 25 bp, Homo sapien
caaggatccaccctatggaatcggg

SEQ ID NO: 3951542 - DNA, 25 bp, Homo sapien
cagggctggggctcgagtgccgtgg

SEQ ID NO: 3951543 - DNA, 25 bp, Homo sapien
acaagccgctgtgggctccacaggg

SEQ ID NO: 3951544 - DNA, 25 bp, Homo sapien
tgccgtggcctccacgtaaacggga

SEQ ID NO: 3951545 - DNA, 25 bp, Homo sapien
ccagggccacaagccgctgtgggct

SEQ ID NO: 3951546 - DNA, 25 bp, Homo sapien
gggccttgtacatgtcagacttcag

SEQ ID NO: 3951547 - DNA, 25 bp, Homo sapien
ttcatctccagcgggatcccagcct

SEQ ID NO: 3951548 - DNA, 25 bp, Homo sapien
ccaggagggccttgtacatgtcaga

SEQ ID NO: 3951549 - DNA, 25 bp, Homo sapien
ttgtacatgtcagacttcaggaacc

SEQ ID NO: 3951550 - DNA, 25 bp, Homo sapien
cttcatgagcatgtatatgtgcagc

SEQ ID NO: 3951551 - DNA, 25 bp, Homo sapien
gggtctgctccatggtccggctgtc

SEQ ID NO: 3951552 - DNA, 25 bp, Homo sapien
agcatgtatatgtgcagctgggcgt

SEQ ID NO: 3951553 - DNA, 25 bp, Homo sapien
tccatggtccggctgtcgatgttga

SEQ ID NO: 3951554 - DNA, 25 bp, Homo sapien
cacggcatccaccagggtggggacc

SEQ ID NO: 3951555 - DNA, 25 bp, Homo sapien
ctgggcctgcgctccatatcgaagc

SEQ ID NO: 3951556 - DNA, 25 bp, Homo sapien
agctcctcacatgcctcccagaagc

SEQ ID NO: 3951557 - DNA, 25 bp, Homo sapien
gctccatatcgaagctcctcacatg

SEQ ID NO: 3951558 - DNA, 25 bp, Homo sapien
cccagtcaaggatcccatcgagagt

SEQ ID NO: 3951559 - DNA, 25 bp, Homo sapien
caaggatcccatcgagagtggcagc

SEQ ID NO: 3951560 - DNA, 25 bp, Homo sapien
gggccgggcacccagtcaaggatcc

SEQ ID NO: 3951561 - DNA, 25 bp, Homo sapien
atcccatcgagagtggcagccaggg

SEQ ID NO: 3951562 - DNA, 25 bp, Homo sapien
gagctcccggaagctgaagccccat

SEQ ID NO: 3951563 - DNA, 25 bp, Homo sapien
tctccacacggagcttcgtgggggc

SEQ ID NO: 3951564 - DNA, 25 bp, Homo sapien
agaaagtccatgaagtgggcccgcc

SEQ ID NO: 3951565 - DNA, 25 bp, Homo sapien
ctgaactcctttcccagaaagtcca

SEQ ID NO: 3951566 - DNA, 25 bp, Homo sapien
acgctggccgcagaaactcaggtac

SEQ ID NO: 3951567 - DNA, 25 bp, Homo sapien
caggcaccccgacacgaggggatcg

SEQ ID NO: 3951568 - DNA, 25 bp, Homo sapien
gcgtcattgtctgagatccagggat

SEQ ID NO: 3951569 - DNA, 25 bp, Homo sapien
tcatgacccagtaggcgtcattgtc

SEQ ID NO: 3951570 - DNA, 25 bp, Homo sapien
cccagcgctttcctgaagtactcga

SEQ ID NO: 3951571 - DNA, 25 bp, Homo sapien
ccagcgctttcctgaagtactcgat

SEQ ID NO: 3951572 - DNA, 25 bp, Homo sapien
ctcccgcttatggaaatctgcactc

SEQ ID NO: 3951573 - DNA, 25 bp, Homo sapien
tcccgcttatggaaatctgcactct

SEQ ID NO: 3951574 - DNA, 25 bp, Homo sapien
gcttatggaaatctgcactcttggt

SEQ ID NO: 3951575 - DNA, 25 bp, Homo sapien
ccgcttatggaaatctgcactcttg

SEQ ID NO: 3951576 - DNA, 25 bp, Homo sapien
gcgcccggcctaatatgtcacattt

SEQ ID NO: 3951577 - DNA, 25 bp, Homo sapien
tggaatattccacggaacctcaggt

SEQ ID NO: 3951578 - DNA, 25 bp, Homo sapien
caatcagggatctttcgaggagacc

SEQ ID NO: 3951579 - DNA, 25 bp, Homo sapien
tatcagtgaggttctaggtgcatct

SEQ ID NO: 3951580 - DNA, 25 bp, Homo sapien
ctgctccagcacatcgggggccccg

SEQ ID NO: 3951581 - DNA, 25 bp, Homo sapien
tgctccagcacatcgggggccccgg

SEQ ID NO: 3951582 - DNA, 25 bp, Homo sapien
tcacgaagtgaaaacgtcctgcccc

SEQ ID NO: 3951583 - DNA, 25 bp, Homo sapien
ctgagagcgcctgtcagggaagcac

SEQ ID NO: 3951584 - DNA, 25 bp, Homo sapien
ggtccttccacaggctcaaaatggt

SEQ ID NO: 3951585 - DNA, 25 bp, Homo sapien
tgggttctgattggcagaaacgcaa

SEQ ID NO: 3951586 - DNA, 25 bp, Homo sapien
gggggcctgttcaccagccagtagg

SEQ ID NO: 3951587 - DNA, 25 bp, Homo sapien
cgggggcctgttcaccagccagtag

SEQ ID NO: 3951588 - DNA, 25 bp, Homo sapien
ggcctgttcaccagccagtaggtct

SEQ ID NO: 3951589 - DNA, 25 bp, Homo sapien
gcctgttcaccagccagtaggtctg

SEQ ID NO: 3951590 - DNA, 25 bp, Homo sapien
agctgctccctcgcctgcatcagca

SEQ ID NO: 3951591 - DNA, 25 bp, Homo sapien
accaggtcccatgcgtggttgatct

SEQ ID NO: 3951592 - DNA, 25 bp, Homo sapien
caccaggtcccatgcgtggttgatc

SEQ ID NO: 3951593 - DNA, 25 bp, Homo sapien
tgctccctcgcctgcatcagcacca

SEQ ID NO: 3951594 - DNA, 25 bp, Homo sapien
gttttcggatgttcttcttggccag

SEQ ID NO: 3951595 - DNA, 25 bp, Homo sapien
cttctcataatccaccagggtcccc

SEQ ID NO: 3951596 - DNA, 25 bp, Homo sapien
cgttttcggatgttcttcttggcca

SEQ ID NO: 3951597 - DNA, 25 bp, Homo sapien
gccggcctcagggtacttgtccaga

SEQ ID NO: 3951598 - DNA, 25 bp, Homo sapien
cggcctcagggtacttgtccagaag

SEQ ID NO: 3951599 - DNA, 25 bp, Homo sapien
gcctcagggtacttgtccagaagta

SEQ ID NO: 3951600 - DNA, 25 bp, Homo sapien
cagggtacttgtccagaagtacggg

SEQ ID NO: 3951601 - DNA, 25 bp, Homo sapien
gcacaagtcttggatgtagtcacag

SEQ ID NO: 3951602 - DNA, 25 bp, Homo sapien
gcaggaggtgtctgaggatctccct

SEQ ID NO: 3951603 - DNA, 25 bp, Homo sapien
gaggtcaactcgctccttagggccc

SEQ ID NO: 3951604 - DNA, 25 bp, Homo sapien
gtccaggacgcctgcgtctgtgcct

SEQ ID NO: 3951605 - DNA, 25 bp, Homo sapien
cgtacttgcggtccaggacttttgg

SEQ ID NO: 3951606 - DNA, 25 bp, Homo sapien
agcccacggcgacatggcggagtcc

SEQ ID NO: 3951607 - DNA, 25 bp, Homo sapien
ctctgcacatacgaccccttgtggg

SEQ ID NO: 3951608 - DNA, 25 bp, Homo sapien
tgtctccccgagttggtaagctggg

SEQ ID NO: 3951609 - DNA, 25 bp, Homo sapien
agatgtagccatgctgcaccaggac

SEQ ID NO: 3951610 - DNA, 25 bp, Homo sapien
gggtcgcgcagcgggtagatgtagc

SEQ ID NO: 3951611 - DNA, 25 bp, Homo sapien
agggcgtctcgtctggccggagcat

SEQ ID NO: 3951612 - DNA, 25 bp, Homo sapien
tcgtctggccggagcatgaggctac

SEQ ID NO: 3951613 - DNA, 25 bp, Homo sapien
ctccgagacgcagaacttctgggcc

SEQ ID NO: 3951614 - DNA, 25 bp, Homo sapien
ggccaaccactgcacgacgtcgctg

SEQ ID NO: 3951615 - DNA, 25 bp, Homo sapien
tctgggccaaccactgcacgacgtc

SEQ ID NO: 3951616 - DNA, 25 bp, Homo sapien
cctcctccgagacgcagaacttctg

SEQ ID NO: 3951617 - DNA, 25 bp, Homo sapien
gcgctggctccgcatcttcacgccc

SEQ ID NO: 3951618 - DNA, 25 bp, Homo sapien
gggaatgacggtgaccagcaggcgc

SEQ ID NO: 3951619 - DNA, 25 bp, Homo sapien
tcggggtcctgcatgctcacgacca

SEQ ID NO: 3951620 - DNA, 25 bp, Homo sapien
ctgtcaccgcgtggggaatgacggt

SEQ ID NO: 3951621 - DNA, 25 bp, Homo sapien
cctcagatgcggcatctgcgcccgg

SEQ ID NO: 3951622 - DNA, 25 bp, Homo sapien
cttcctcagatgcggcatctgcgcc

SEQ ID NO: 3951623 - DNA, 25 bp, Homo sapien
ctcagatgcggcatctgcgcccggg

SEQ ID NO: 3951624 - DNA, 25 bp, Homo sapien
tcctcagatgcggcatctgcgcccg

SEQ ID NO: 3951625 - DNA, 25 bp, Homo sapien
cgaggccggcggggatgaccgacgt

SEQ ID NO: 3951626 - DNA, 25 bp, Homo sapien
gcgaggccggcggggatgaccgacg

SEQ ID NO: 3951627 - DNA, 25 bp, Homo sapien
gaggccggcggggatgaccgacgtc

SEQ ID NO: 3951628 - DNA, 25 bp, Homo sapien
cagcagtttggcctcaccaaggaca

SEQ ID NO: 3951629 - DNA, 25 bp, Homo sapien
tcaacagccaggtgcgtaggctgca

SEQ ID NO: 3951630 - DNA, 25 bp, Homo sapien
gcctggtcacggagttcaacagcca

SEQ ID NO: 3951631 - DNA, 25 bp, Homo sapien
ggatctgtcgcgcttcctggtcaca

SEQ ID NO: 3951632 - DNA, 25 bp, Homo sapien
ccagacctgggtacgtgggcaaatc

SEQ ID NO: 3951633 - DNA, 25 bp, Homo sapien
actcggtggcgcgtacaattgacag

SEQ ID NO: 3951634 - DNA, 25 bp, Homo sapien
catcgggctcctgagtacgaggtca

SEQ ID NO: 3951635 - DNA, 25 bp, Homo sapien
gtacatatttacacgggccctcaga

SEQ ID NO: 3951636 - DNA, 25 bp, Homo sapien
ttctcctcaaagacgggcaggacgg

SEQ ID NO: 3951637 - DNA, 25 bp, Homo sapien
aaactcgtcgctcactttcttgaag

SEQ ID NO: 3951638 - DNA, 25 bp, Homo sapien
ggcaggacggcctcgtcctctcgaa

SEQ ID NO: 3951639 - DNA, 25 bp, Homo sapien
cactttgccgatgatcttctcctca

SEQ ID NO: 3951640 - DNA, 25 bp, Homo sapien
gtgagcaggcagcaccgcagatggg

SEQ ID NO: 3951641 - DNA, 25 bp, Homo sapien
ctgcaggacggaggtgaggagggca

SEQ ID NO: 3951642 - DNA, 25 bp, Homo sapien
ggcagcaccgcagatgggaaggagg

SEQ ID NO: 3951643 - DNA, 25 bp, Homo sapien
gcaggacggaggtgaggagggcagt

SEQ ID NO: 3951644 - DNA, 25 bp, Homo sapien
tccccgcagaagtagtacgccacaa

SEQ ID NO: 3951645 - DNA, 25 bp, Homo sapien
acgccacaacgatgctgtcacacgg

SEQ ID NO: 3951646 - DNA, 25 bp, Homo sapien
gaagtagtacgccacaacgatgctg

SEQ ID NO: 3951647 - DNA, 25 bp, Homo sapien
gatgctgtcacacggctgggcactc

SEQ ID NO: 3951648 - DNA, 25 bp, Homo sapien
tgtgcacgatttctggataagcctg

SEQ ID NO: 3951649 - DNA, 25 bp, Homo sapien
tgaccccgcagcgaagtttgtcgga

SEQ ID NO: 3951650 - DNA, 25 bp, Homo sapien
tctagtccgctagcagtggagtcgg

SEQ ID NO: 3951651 - DNA, 25 bp, Homo sapien
gctcactgggagcacgaaggtctcc

SEQ ID NO: 3951652 - DNA, 25 bp, Homo sapien
gagagctccatgtccgacacggctg

SEQ ID NO: 3951653 - DNA, 25 bp, Homo sapien
gacacggctggtaccacgtgcagca

SEQ ID NO: 3951654 - DNA, 25 bp, Homo sapien
gcgtccccgccgcataacctcctgc

SEQ ID NO: 3951655 - DNA, 25 bp, Homo sapien
ctggcctgacgcaggcgcgtccccg

SEQ ID NO: 3951656 - DNA, 25 bp, Homo sapien
cagcaactctgggtttccccatggg

SEQ ID NO: 3951657 - DNA, 25 bp, Homo sapien
tgttggccgaacacgatcacagggt

SEQ ID NO: 3951658 - DNA, 25 bp, Homo sapien
aaagcgcagacgcaacctgagagac

SEQ ID NO: 3951659 - DNA, 25 bp, Homo sapien
tacactgggcgaccttgatggtggt

SEQ ID NO: 3951660 - DNA, 25 bp, Homo sapien
tctgcttggagggtgctcggctggc

SEQ ID NO: 3951661 - DNA, 25 bp, Homo sapien
ggtgctcaagggacaagggtctgga

SEQ ID NO: 3951662 - DNA, 25 bp, Homo sapien
cttcctcctccagacgtcggcgcgc

SEQ ID NO: 3951663 - DNA, 25 bp, Homo sapien
ggaggtccggagctgagggccggcc

SEQ ID NO: 3951664 - DNA, 25 bp, Homo sapien
tggcacctcggtgctggcgctcttc

SEQ ID NO: 3951665 - DNA, 25 bp, Homo sapien
ttctggttcttctccgcatcctccg

SEQ ID NO: 3951666 - DNA, 25 bp, Homo sapien
cccctcaatgatccactgcatgatt

SEQ ID NO: 3951667 - DNA, 25 bp, Homo sapien
gatccactgcatgattttctggttc

SEQ ID NO: 3951668 - DNA, 25 bp, Homo sapien
gtagcctcgggaccttgccccatgg

SEQ ID NO: 3951669 - DNA, 25 bp, Homo sapien
acactctctgagtagcctcgggacc

SEQ ID NO: 3951670 - DNA, 25 bp, Homo sapien
tgtgggcgaggccatcactggcgtt

SEQ ID NO: 3951671 - DNA, 25 bp, Homo sapien
gcgttgggggcagcgccaacactct

SEQ ID NO: 3951672 - DNA, 25 bp, Homo sapien
cagcttcgcccctgacttgggtacg

SEQ ID NO: 3951673 - DNA, 25 bp, Homo sapien
ctctcagggttctcctcgtgtgcat

SEQ ID NO: 3951674 - DNA, 25 bp, Homo sapien
cacgctgtacgtgctcgtccaggat

SEQ ID NO: 3951675 - DNA, 25 bp, Homo sapien
tggcatcttggccacgtgcccactg

SEQ ID NO: 3951676 - DNA, 25 bp, Homo sapien
gacgatggatcgccgtcctcacctt

SEQ ID NO: 3951677 - DNA, 25 bp, Homo sapien
cttgtgacacggccctgggggccct

SEQ ID NO: 3951678 - DNA, 25 bp, Homo sapien
gccctgggggccctgacgatggatc

SEQ ID NO: 3951679 - DNA, 25 bp, Homo sapien
ggccctgacgatggatcgccgtcct

SEQ ID NO: 3951680 - DNA, 25 bp, Homo sapien
tcccctggcggatgcagctatgctg

SEQ ID NO: 3951681 - DNA, 25 bp, Homo sapien
tcacacctgcaaaagtatccaaatg

SEQ ID NO: 3951682 - DNA, 25 bp, Homo sapien
gatgccgttcactgccttggccgag

SEQ ID NO: 3951683 - DNA, 25 bp, Homo sapien
cactaaagaggacagacggatgctg

SEQ ID NO: 3951684 - DNA, 25 bp, Homo sapien
taaggtctgcctgccatctcaatgg

SEQ ID NO: 3951685 - DNA, 25 bp, Homo sapien
ttactgaggataaaacaaatcgacg

SEQ ID NO: 3951686 - DNA, 25 bp, Homo sapien
tcccagctgctcaacgagctatgta

SEQ ID NO: 3951687 - DNA, 25 bp, Homo sapien
caaatcgacgtctgtgtgtgagaca

SEQ ID NO: 3951688 - DNA, 25 bp, Homo sapien
ccaggcggtggatgagctcctccgc

SEQ ID NO: 3951689 - DNA, 25 bp, Homo sapien
gagctcctccgcgaacttctgaggc

SEQ ID NO: 3951690 - DNA, 25 bp, Homo sapien
atgcgcacgcgcttcagccgctcct

SEQ ID NO: 3951691 - DNA, 25 bp, Homo sapien
aggctccacgcggacctccttcggc

SEQ ID NO: 3951692 - DNA, 25 bp, Homo sapien
tgggaccctccgtgtgtgtggcctt

SEQ ID NO: 3951693 - DNA, 25 bp, Homo sapien
agcatctaaacctgagaaggatggg

SEQ ID NO: 3951694 - DNA, 25 bp, Homo sapien
tgttccacagtagacgaggctcaga

SEQ ID NO: 3951695 - DNA, 25 bp, Homo sapien
tctacacaatgagagtagaaacagc

SEQ ID NO: 3951696 - DNA, 25 bp, Homo sapien
tgaaaagcccatcatcaggcccaga

SEQ ID NO: 3951697 - DNA, 25 bp, Homo sapien
gacgcgcttatggtctgaacagtca

SEQ ID NO: 3951698 - DNA, 25 bp, Homo sapien
gccacgcgagctccataaaaagact

SEQ ID NO: 3951699 - DNA, 25 bp, Homo sapien
gggcgtccacacagatggcaaggaa

SEQ ID NO: 3951700 - DNA, 25 bp, Homo sapien
aagactctgaccagcaccccaaaat

SEQ ID NO: 3951701 - DNA, 25 bp, Homo sapien
cagggactcgccataggcatcctct

SEQ ID NO: 3951702 - DNA, 25 bp, Homo sapien
tctggaaggttctgacgacgacacc

SEQ ID NO: 3951703 - DNA, 25 bp, Homo sapien
tggcatgcactttctacacacgaag

SEQ ID NO: 3951704 - DNA, 25 bp, Homo sapien
tgaggtaggggcacccgcccattga

SEQ ID NO: 3951705 - DNA, 25 bp, Homo sapien
acccgcccattgacctgcacgctct

SEQ ID NO: 3951706 - DNA, 25 bp, Homo sapien
ccctgcggtgctgcttacggatcct

SEQ ID NO: 3951707 - DNA, 25 bp, Homo sapien
gtgctgcttacggatcctgtatggg

SEQ ID NO: 3951708 - DNA, 25 bp, Homo sapien
cagccgttaactcagagaggagcag

SEQ ID NO: 3951709 - DNA, 25 bp, Homo sapien
aagaggcagccgttaactcagagag

SEQ ID NO: 3951710 - DNA, 25 bp, Homo sapien
gagaaagaggcagccgttaactcag

SEQ ID NO: 3951711 - DNA, 25 bp, Homo sapien
gaggcagccgttaactcagagagga

SEQ ID NO: 3951712 - DNA, 25 bp, Homo sapien
tcacctcgagcgtcacacatgtgtg

SEQ ID NO: 3951713 - DNA, 25 bp, Homo sapien
tgtgcctgtctttaagctgaaaccc

SEQ ID NO: 3951714 - DNA, 25 bp, Homo sapien
aaacaagcacgttcctacacatggg

SEQ ID NO: 3951715 - DNA, 25 bp, Homo sapien
gtacataggtcccaaaaagccagct

SEQ ID NO: 3951716 - DNA, 25 bp, Homo sapien
gacagggtgtctgcatcgctggaca

SEQ ID NO: 3951717 - DNA, 25 bp, Homo sapien
tgtctgcatcgctggacaggctctg

SEQ ID NO: 3951718 - DNA, 25 bp, Homo sapien
ctgctcgctgtcgttggcactggtg

SEQ ID NO: 3951719 - DNA, 25 bp, Homo sapien
caggctctgctgctcgctgtcgttg

SEQ ID NO: 3951720 - DNA, 25 bp, Homo sapien
gggcatagccggcattgacataata

SEQ ID NO: 3951721 - DNA, 25 bp, Homo sapien
catagccggcattgacataataggg

SEQ ID NO: 3951722 - DNA, 25 bp, Homo sapien
gccagggcatagccggcattgacat

SEQ ID NO: 3951723 - DNA, 25 bp, Homo sapien
attgacataataggggttgactggc

SEQ ID NO: 3951724 - DNA, 25 bp, Homo sapien
tgcacatggccggaggaactgccat

SEQ ID NO: 3951725 - DNA, 25 bp, Homo sapien
agggagggaccagcgcagcttccag

SEQ ID NO: 3951726 - DNA, 25 bp, Homo sapien
cacacctgcgcatcagagtccttgg

SEQ ID NO: 3951727 - DNA, 25 bp, Homo sapien
tgccatgtcggaggtgcaagcacac

SEQ ID NO: 3951728 - DNA, 25 bp, Homo sapien
ttcactaccagcagatgcgaccaag

SEQ ID NO: 3951729 - DNA, 25 bp, Homo sapien
accagcagatgcgaccaagaacgtt

SEQ ID NO: 3951730 - DNA, 25 bp, Homo sapien
ggccttcactaccagcagatgcgac

SEQ ID NO: 3951731 - DNA, 25 bp, Homo sapien
ttggccttcactaccagcagatgcg

SEQ ID NO: 3951732 - DNA, 25 bp, Homo sapien
gctgtgcggagagaatgcggccgga

SEQ ID NO: 3951733 - DNA, 25 bp, Homo sapien
tgcggccggagacttggtgagagct

SEQ ID NO: 3951734 - DNA, 25 bp, Homo sapien
gggccttggtgagagcggctctggc

SEQ ID NO: 3951735 - DNA, 25 bp, Homo sapien
cccacgctgatgacctcaaacagga

SEQ ID NO: 3951736 - DNA, 25 bp, Homo sapien
gagtgcatcctttagagcccagaca

SEQ ID NO: 3951737 - DNA, 25 bp, Homo sapien
gtggacggatgagtgcatcctttag

SEQ ID NO: 3951738 - DNA, 25 bp, Homo sapien
gatgagtgcatcctttagagcccag

SEQ ID NO: 3951739 - DNA, 25 bp, Homo sapien
gacggatgagtgcatcctttagagc

SEQ ID NO: 3951740 - DNA, 25 bp, Homo sapien
cactgaggggtgtgacttgggttct

SEQ ID NO: 3951741 - DNA, 25 bp, Homo sapien
aaacaaaacactgaggggtgtgact

SEQ ID NO: 3951742 - DNA, 25 bp, Homo sapien
aacaaaacactgaggggtgtgactt

SEQ ID NO: 3951743 - DNA, 25 bp, Homo sapien
tgaggggtgtgacttgggttctcac

SEQ ID NO: 3951744 - DNA, 25 bp, Homo sapien
cttcaccactgtgggtgcaaaggga

SEQ ID NO: 3951745 - DNA, 25 bp, Homo sapien
gtcttcaccactgtgggtgcaaagg

SEQ ID NO: 3951746 - DNA, 25 bp, Homo sapien
ctgcgtctctctaggagcataagca

SEQ ID NO: 3951747 - DNA, 25 bp, Homo sapien
gcgtctctctaggagcataagcaca

SEQ ID NO: 3951748 - DNA, 25 bp, Homo sapien
gatggaatacggcacagaatgagca

SEQ ID NO: 3951749 - DNA, 25 bp, Homo sapien
cagaatgagcaacccaccctggaga

SEQ ID NO: 3951750 - DNA, 25 bp, Homo sapien
atacggcacagaatgagcaacccac

SEQ ID NO: 3951751 - DNA, 25 bp, Homo sapien
acaggggatggaatacggcacagaa

SEQ ID NO: 3951752 - DNA, 25 bp, Homo sapien
gatggctgccacagcgtcgtgtgta

SEQ ID NO: 3951753 - DNA, 25 bp, Homo sapien
ccagaccagggctcaacccactgcc

SEQ ID NO: 3951754 - DNA, 25 bp, Homo sapien
aaggagcggtcaccgccccagagtg

SEQ ID NO: 3951755 - DNA, 25 bp, Homo sapien
cgtcgtgtgtacaacttatggtctg

SEQ ID NO: 3951756 - DNA, 25 bp, Homo sapien
agacccacctgagtgaaaaggccag

SEQ ID NO: 3951757 - DNA, 25 bp, Homo sapien
gagtgaaaaggccagaccttgtctc

SEQ ID NO: 3951758 - DNA, 25 bp, Homo sapien
cccacctgagtgaaaaggccagacc

SEQ ID NO: 3951759 - DNA, 25 bp, Homo sapien
acctgagtgaaaaggccagaccttg

SEQ ID NO: 3951760 - DNA, 25 bp, Homo sapien
caggagaatcgcttgaacccaggag

SEQ ID NO: 3951761 - DNA, 25 bp, Homo sapien
gtaatcccatctactcaagagctga

SEQ ID NO: 3951762 - DNA, 25 bp, Homo sapien
cttgaacccaggaggcagaggttgc

SEQ ID NO: 3951763 - DNA, 25 bp, Homo sapien
aatcccatctactcaagagctgagg

SEQ ID NO: 3951764 - DNA, 25 bp, Homo sapien
cctgcataaaactcacctgaaggag

SEQ ID NO: 3951765 - DNA, 25 bp, Homo sapien
cagaaccaggttgccggcttacagt

SEQ ID NO: 3951766 - DNA, 25 bp, Homo sapien
atcctgcataaaactcacctgaagg

SEQ ID NO: 3951767 - DNA, 25 bp, Homo sapien
gcttacagtcatggtccctgaatcc

SEQ ID NO: 3951768 - DNA, 25 bp, Homo sapien
ccgaccctgactacagcagatggga

SEQ ID NO: 3951769 - DNA, 25 bp, Homo sapien
gagcccctgctcaaaagcgctgttt

SEQ ID NO: 3951770 - DNA, 25 bp, Homo sapien
agagaccacggtgactaagggcccg

SEQ ID NO: 3951771 - DNA, 25 bp, Homo sapien
ttccaagcaaaggtgcaagcctgac

SEQ ID NO: 3951772 - DNA, 25 bp, Homo sapien
gagtccacaggtcggcagccttcag

SEQ ID NO: 3951773 - DNA, 25 bp, Homo sapien
tgacacaggcagtgcgagagtccac

SEQ ID NO: 3951774 - DNA, 25 bp, Homo sapien
ctcgcggatggcctgacgcctgaca

SEQ ID NO: 3951775 - DNA, 25 bp, Homo sapien
ccttcagcagcgacaatggtccctg

SEQ ID NO: 3951776 - DNA, 25 bp, Homo sapien
caaaataaaaacggcctggactgct

SEQ ID NO: 3951777 - DNA, 25 bp, Homo sapien
gaatgcacagcagtaagtggacaca

SEQ ID NO: 3951778 - DNA, 25 bp, Homo sapien
gaaccaaacgcaaccaactcatgag

SEQ ID NO: 3951779 - DNA, 25 bp, Homo sapien
caaaacactcccattggcgtataga

SEQ ID NO: 3951780 - DNA, 25 bp, Homo sapien
tgcatgccaataacacagcacccag

SEQ ID NO: 3951781 - DNA, 25 bp, Homo sapien
cagtaccacaggatgcctaaagagt

SEQ ID NO: 3951782 - DNA, 25 bp, Homo sapien
tgcgcccagttacacagcatgccag

SEQ ID NO: 3951783 - DNA, 25 bp, Homo sapien
gagtaactgtttcaaccagagtggg

SEQ ID NO: 3951784 - DNA, 25 bp, Homo sapien
gccactggctgtctgcaaagtgctt

SEQ ID NO: 3951785 - DNA, 25 bp, Homo sapien
ggcacacagtctcatcggcacgtct

SEQ ID NO: 3951786 - DNA, 25 bp, Homo sapien
cacgtctgccactggctgtctgcaa

SEQ ID NO: 3951787 - DNA, 25 bp, Homo sapien
agtctcatcggcacgtctgccactg

SEQ ID NO: 3951788 - DNA, 25 bp, Homo sapien
taatgagcaggtccgacggttcctc

SEQ ID NO: 3951789 - DNA, 25 bp, Homo sapien
ccctgcgggaacctgaacggcaagg

SEQ ID NO: 3951790 - DNA, 25 bp, Homo sapien
caataaactaatgagcaggtccgac

SEQ ID NO: 3951791 - DNA, 25 bp, Homo sapien
aaacacagtcaataaactaatgagc

SEQ ID NO: 3951792 - DNA, 25 bp, Homo sapien
tgaccagccctatccacaagtgcat

SEQ ID NO: 3951793 - DNA, 25 bp, Homo sapien
ggacatgtctgttgtccactctctg

SEQ ID NO: 3951794 - DNA, 25 bp, Homo sapien
caagtgcatcactggactggcccgg

SEQ ID NO: 3951795 - DNA, 25 bp, Homo sapien
gactggcccgggaagacacacgaaa

SEQ ID NO: 3951796 - DNA, 25 bp, Homo sapien
ccaggagctcaaaatgacagtgggt

SEQ ID NO: 3951797 - DNA, 25 bp, Homo sapien
gacccgagggtgcagaaagtgttcc

SEQ ID NO: 3951798 - DNA, 25 bp, Homo sapien
ccatgaaaccttggcccaggagctc

SEQ ID NO: 3951799 - DNA, 25 bp, Homo sapien
gatccacaccgctgaaatgacgagg

SEQ ID NO: 3951800 - DNA, 25 bp, Homo sapien
caggggaactggatgcctgtggccg

SEQ ID NO: 3951801 - DNA, 25 bp, Homo sapien
cctgtggccgtgctggaccgcagca

SEQ ID NO: 3951802 - DNA, 25 bp, Homo sapien
actcaggcgtcccacaggggaactg

SEQ ID NO: 3951803 - DNA, 25 bp, Homo sapien
gacccgcactcaggcgtcccacagg

SEQ ID NO: 3951804 - DNA, 25 bp, Homo sapien
gatatgcatcccctaacacgtgagg

SEQ ID NO: 3951805 - DNA, 25 bp, Homo sapien
tggtctaaatgtgaggaacgcagcc

SEQ ID NO: 3951806 - DNA, 25 bp, Homo sapien
cagccgtctgtctgggtggagaacc

SEQ ID NO: 3951807 - DNA, 25 bp, Homo sapien
agagaggattcaaccgcagacacga

SEQ ID NO: 3951808 - DNA, 25 bp, Homo sapien
tcaaacatggcaggatcgatcagct

SEQ ID NO: 3951809 - DNA, 25 bp, Homo sapien
taccgtctactggaggagaccctcg

SEQ ID NO: 3951810 - DNA, 25 bp, Homo sapien
tactttcggtagatggctctcgcca

SEQ ID NO: 3951811 - DNA, 25 bp, Homo sapien
ttcatttaaggtcggcaggtatcca

SEQ ID NO: 3951812 - DNA, 25 bp, Homo sapien
acttacagctccaaagtgaatcaat

SEQ ID NO: 3951813 - DNA, 25 bp, Homo sapien
ctgcgtcaaggaacaatgagcgctg

SEQ ID NO: 3951814 - DNA, 25 bp, Homo sapien
taatacatcagtacttacagctcca

SEQ ID NO: 3951815 - DNA, 25 bp, Homo sapien
gagcgctgcaccctaatacatcagt

SEQ ID NO: 3951816 - DNA, 25 bp, Homo sapien
cacccgcccgctccgcgtggacgcg

SEQ ID NO: 3951817 - DNA, 25 bp, Homo sapien
gcagcggccacgatcgcctcccgag

SEQ ID NO: 3951818 - DNA, 25 bp, Homo sapien
cccatgcgctcagcggcagcgcggc

SEQ ID NO: 3951819 - DNA, 25 bp, Homo sapien
tccgggccgactccggccggctctg

SEQ ID NO: 3951820 - DNA, 25 bp, Homo sapien
aacaaggtccccaatgcttgccttg

SEQ ID NO: 3951821 - DNA, 25 bp, Homo sapien
ctcccaacaaggtccccaatgcttg

SEQ ID NO: 3951822 - DNA, 25 bp, Homo sapien
tgctgtgtccgggccaggctctcgg

SEQ ID NO: 3951823 - DNA, 25 bp, Homo sapien
ctcctcttggccctcggtggcaggt

SEQ ID NO: 3951824 - DNA, 25 bp, Homo sapien
cctggctccgtgtgcctgctcacgc

SEQ ID NO: 3951825 - DNA, 25 bp, Homo sapien
ggctccgtgtgcctgctcacgcccc

SEQ ID NO: 3951826 - DNA, 25 bp, Homo sapien
ctccgtgtgcctgctcacgccccac

SEQ ID NO: 3951827 - DNA, 25 bp, Homo sapien
ctgcctggctccgtgtgcctgctca

SEQ ID NO: 3951828 - DNA, 25 bp, Homo sapien
ttggccgtccgtccgagcactttca

SEQ ID NO: 3951829 - DNA, 25 bp, Homo sapien
cccgctgtccgccatgatgggcttg

SEQ ID NO: 3951830 - DNA, 25 bp, Homo sapien
gccatgatgggcttggccgtccgtc

SEQ ID NO: 3951831 - DNA, 25 bp, Homo sapien
ggctcctgccgccgattggctgagg

SEQ ID NO: 3951832 - DNA, 25 bp, Homo sapien
aaccgtcacccgtggacatcctggg

SEQ ID NO: 3951833 - DNA, 25 bp, Homo sapien
agggcgcaccagcattggcccctgg

SEQ ID NO: 3951834 - DNA, 25 bp, Homo sapien
tggagacgaggcttctcaaccgtca

SEQ ID NO: 3951835 - DNA, 25 bp, Homo sapien
aagctttcccgtatgtctggagacg

SEQ ID NO: 3951836 - DNA, 25 bp, Homo sapien
aatgcccacggctcatccgaggtct

SEQ ID NO: 3951837 - DNA, 25 bp, Homo sapien
gcacaaggaacactgccgcaaacgt

SEQ ID NO: 3951838 - DNA, 25 bp, Homo sapien
acaattagccatacatgatagcggg

SEQ ID NO: 3951839 - DNA, 25 bp, Homo sapien
caggatcaggatccccaaagagaac

SEQ ID NO: 3951840 - DNA, 25 bp, Homo sapien
gtgtcctcagtgcaaagggcctggc

SEQ ID NO: 3951841 - DNA, 25 bp, Homo sapien
aggtgcatgggcagcacacgaaacc

SEQ ID NO: 3951842 - DNA, 25 bp, Homo sapien
atgggcagcacacgaaaccaggatc

SEQ ID NO: 3951843 - DNA, 25 bp, Homo sapien
atccctgccaagctggccccgggct

SEQ ID NO: 3951844 - DNA, 25 bp, Homo sapien
gctccgccacatagatcttgaacag

SEQ ID NO: 3951845 - DNA, 25 bp, Homo sapien
accgccggctctgacagtgcctgct

SEQ ID NO: 3951846 - DNA, 25 bp, Homo sapien
gatcagctccgccacatagatcttg

SEQ ID NO: 3951847 - DNA, 25 bp, Homo sapien
tccgccacatagatcttgaacaggg

SEQ ID NO: 3951848 - DNA, 25 bp, Homo sapien
cctcctcctctgggatggcaaattc

SEQ ID NO: 3951849 - DNA, 25 bp, Homo sapien
aaagtctctgcttctcaatggcctc

SEQ ID NO: 3951850 - DNA, 25 bp, Homo sapien
cttctcctccaaaagtctctgcttc

SEQ ID NO: 3951851 - DNA, 25 bp, Homo sapien
ctccagcgtgaggcccacccactct

SEQ ID NO: 3951852 - DNA, 25 bp, Homo sapien
ttgtcgtagatggctgcccgccgct

SEQ ID NO: 3951853 - DNA, 25 bp, Homo sapien
acttgtcgtagatggctgcccgccg

SEQ ID NO: 3951854 - DNA, 25 bp, Homo sapien
tacttgtcgtagatggctgcccgcc

SEQ ID NO: 3951855 - DNA, 25 bp, Homo sapien
cttgtcgtagatggctgcccgccgc

SEQ ID NO: 3951856 - DNA, 25 bp, Homo sapien
aggtccatcccaaacttggagcaca

SEQ ID NO: 3951857 - DNA, 25 bp, Homo sapien
ggtccatcccaaacttggagcacag

SEQ ID NO: 3951858 - DNA, 25 bp, Homo sapien
tggccccactcacgctttcccagtg

SEQ ID NO: 3951859 - DNA, 25 bp, Homo sapien
ggtgggatcagcacagaagcaagtc

SEQ ID NO: 3951860 - DNA, 25 bp, Homo sapien
cctcctgtgcagatgtcagcgtgcc

SEQ ID NO: 3951861 - DNA, 25 bp, Homo sapien
gtgagtctgactggcccatcccaga

SEQ ID NO: 3951862 - DNA, 25 bp, Homo sapien
tgtaaaagtcgagcccataagcctc

SEQ ID NO: 3951863 - DNA, 25 bp, Homo sapien
ttgaggatgtaaaagtcgagcccat

SEQ ID NO: 3951864 - DNA, 25 bp, Homo sapien
gatgtaaaagtcgagcccataagcc

SEQ ID NO: 3951865 - DNA, 25 bp, Homo sapien
ccataagcctcatcgatgaggtcca

SEQ ID NO: 3951866 - DNA, 25 bp, Homo sapien
ggatctcactgtagaactctcgctc

SEQ ID NO: 3951867 - DNA, 25 bp, Homo sapien
tcactgtagaactctcgctcaaaca

SEQ ID NO: 3951868 - DNA, 25 bp, Homo sapien
tagaactctcgctcaaacagctgtg

SEQ ID NO: 3951869 - DNA, 25 bp, Homo sapien
ctgtagaactctcgctcaaacagct

SEQ ID NO: 3951870 - DNA, 25 bp, Homo sapien
gggtgcaacagagcctccatgagta

SEQ ID NO: 3951871 - DNA, 25 bp, Homo sapien
tgcgaccccacagtttacaggttgt

SEQ ID NO: 3951872 - DNA, 25 bp, Homo sapien
tgtttcagaaacatgtgcgacccca

SEQ ID NO: 3951873 - DNA, 25 bp, Homo sapien
ggtcctgactgtgtacccagaagtc

SEQ ID NO: 3951874 - DNA, 25 bp, Homo sapien
tcactcagcgtgctcctttgccgga

SEQ ID NO: 3951875 - DNA, 25 bp, Homo sapien
acccctactttatcagtcctgtttg

SEQ ID NO: 3951876 - DNA, 25 bp, Homo sapien
ctcctttgccggagatgtgtcgcct

SEQ ID NO: 3951877 - DNA, 25 bp, Homo sapien
tgtttgccagaactgcggttcttca

SEQ ID NO: 3951878 - DNA, 25 bp, Homo sapien
cacacgggatacttgtgtagaggca

SEQ ID NO: 3951879 - DNA, 25 bp, Homo sapien
ccatgaggcctatagtgcacgggag

SEQ ID NO: 3951880 - DNA, 25 bp, Homo sapien
gcaggcgggaacagatgccctcccg

SEQ ID NO: 3951881 - DNA, 25 bp, Homo sapien
gtcgttgttggcatatatttggccc

SEQ ID NO: 3951882 - DNA, 25 bp, Homo sapien
ctgcccctccccttctgccccggcg

SEQ ID NO: 3951883 - DNA, 25 bp, Homo sapien
tgcccctccccttctgccccggcgc

SEQ ID NO: 3951884 - DNA, 25 bp, Homo sapien
ccaccggaaccggaagccgatctgc

SEQ ID NO: 3951885 - DNA, 25 bp, Homo sapien
ggaagccgatctgccgcgcctggcc

SEQ ID NO: 3951886 - DNA, 25 bp, Homo sapien
cccaccgctgactggctgtaaaagc

SEQ ID NO: 3951887 - DNA, 25 bp, Homo sapien
tcccaccgctgactggctgtaaaag

SEQ ID NO: 3951888 - DNA, 25 bp, Homo sapien
tatcccggacaagacccagaaggga

SEQ ID NO: 3951889 - DNA, 25 bp, Homo sapien
ttctccagggcggatccgagacact

SEQ ID NO: 3951890 - DNA, 25 bp, Homo sapien
ccacaaggtttgcatgaggagcaga

SEQ ID NO: 3951891 - DNA, 25 bp, Homo sapien
cacctgtggtctccaagtaaccaag

SEQ ID NO: 3951892 - DNA, 25 bp, Homo sapien
attcagctggaaatcaatctgtcca

SEQ ID NO: 3951893 - DNA, 25 bp, Homo sapien
aggcgcctccccctcgatacagctc

SEQ ID NO: 3951894 - DNA, 25 bp, Homo sapien
tttattcagctggaaatcaatctgt

SEQ ID NO: 3951895 - DNA, 25 bp, Homo sapien
cccctcgatacagctcctggctgaa

SEQ ID NO: 3951896 - DNA, 25 bp, Homo sapien
tgtagtagtagttgtcgctagtcat

SEQ ID NO: 3951897 - DNA, 25 bp, Homo sapien
tcgttcttgcagatctgatagtggc

SEQ ID NO: 3951898 - DNA, 25 bp, Homo sapien
tcatcatggaggtgtagatggcgat

SEQ ID NO: 3951899 - DNA, 25 bp, Homo sapien
actgcgtacagttcctcccgatcgt

SEQ ID NO: 3951900 - DNA, 25 bp, Homo sapien
agccacgcaggtatcagtgcaggtg

SEQ ID NO: 3951901 - DNA, 25 bp, Homo sapien
ccagggcccagatacggtggttact

SEQ ID NO: 3951902 - DNA, 25 bp, Homo sapien
tgcttcgagggggctcaaggccact

SEQ ID NO: 3951903 - DNA, 25 bp, Homo sapien
tgggcagcagaacgacaagggtggg

SEQ ID NO: 3951904 - DNA, 25 bp, Homo sapien
tggaggccatgatcacgaaggcaaa

SEQ ID NO: 3951905 - DNA, 25 bp, Homo sapien
gatgaccagtgtacccagaagaaac

SEQ ID NO: 3951906 - DNA, 25 bp, Homo sapien
acatggcgatgaccagtgtacccag

SEQ ID NO: 3951907 - DNA, 25 bp, Homo sapien
cacatggaggccatgatcacgaagg

SEQ ID NO: 3951908 - DNA, 25 bp, Homo sapien
gcacaggatggtgacccagatggcc

SEQ ID NO: 3951909 - DNA, 25 bp, Homo sapien
ccggagcccaagaagtcgcagtact

SEQ ID NO: 3951910 - DNA, 25 bp, Homo sapien
agcgtgtcgtagctgaggatgcaca

SEQ ID NO: 3951911 - DNA, 25 bp, Homo sapien
ggactgtcttgagccgtgccatgca

SEQ ID NO: 3951912 - DNA, 25 bp, Homo sapien
catgagcgcggtcctgccctcccac

SEQ ID NO: 3951913 - DNA, 25 bp, Homo sapien
tccatgagcgcggtcctgccctccc

SEQ ID NO: 3951914 - DNA, 25 bp, Homo sapien
aggctccatgagcgcggtcctgccc

SEQ ID NO: 3951915 - DNA, 25 bp, Homo sapien
ccatgagcgcggtcctgccctccca

SEQ ID NO: 3951916 - DNA, 25 bp, Homo sapien
gctgtgctgttgtccgtgcagctcc

SEQ ID NO: 3951917 - DNA, 25 bp, Homo sapien
tgtaggcgtagacggaggcctccac

SEQ ID NO: 3951918 - DNA, 25 bp, Homo sapien
gaagaatcgccgcactgagacggcg

SEQ ID NO: 3951919 - DNA, 25 bp, Homo sapien
gaacatggtgtaggcgtagacggag

SEQ ID NO: 3951920 - DNA, 25 bp, Homo sapien
ggccatagggtccacaatcgttcaa

SEQ ID NO: 3951921 - DNA, 25 bp, Homo sapien
tacaggtagctgtgtctgcggagca

SEQ ID NO: 3951922 - DNA, 25 bp, Homo sapien
caggtacaaggtggtctccacgtgg

SEQ ID NO: 3951923 - DNA, 25 bp, Homo sapien
aatcgttcaaacagggcaccaggta

SEQ ID NO: 3951924 - DNA, 25 bp, Homo sapien
agtgatctgacagcccagctgccac

SEQ ID NO: 3951925 - DNA, 25 bp, Homo sapien
cacaggaaagctggtgcagtgatct

SEQ ID NO: 3951926 - DNA, 25 bp, Homo sapien
ggggccacaggaaagctggtgcagt

SEQ ID NO: 3951927 - DNA, 25 bp, Homo sapien
gctggtgcagtgatctgacagccca

SEQ ID NO: 3951928 - DNA, 25 bp, Homo sapien
acatgagaacgcagcattagggccc

SEQ ID NO: 3951929 - DNA, 25 bp, Homo sapien
tctagctgggtcactccgaacgcca

SEQ ID NO: 3951930 - DNA, 25 bp, Homo sapien
agccctggaggaagcacccctctag

SEQ ID NO: 3951931 - DNA, 25 bp, Homo sapien
gacatgagaacgcagcattagggcc

SEQ ID NO: 3951932 - DNA, 25 bp, Homo sapien
cctggcccccgtctctgccctaggt

SEQ ID NO: 3951933 - DNA, 25 bp, Homo sapien
ctggcccccgtctctgccctaggtt

SEQ ID NO: 3951934 - DNA, 25 bp, Homo sapien
atgacagggtgcctggcccccgtct

SEQ ID NO: 3951935 - DNA, 25 bp, Homo sapien
gtgcctggcccccgtctctgcccta

SEQ ID NO: 3951936 - DNA, 25 bp, Homo sapien
gagaggtaccagttgtctgtctctg

SEQ ID NO: 3951937 - DNA, 25 bp, Homo sapien
cagggagaggtaccagttgtctgtc

SEQ ID NO: 3951938 - DNA, 25 bp, Homo sapien
gagacaaagggtagccctggaagaa

SEQ ID NO: 3951939 - DNA, 25 bp, Homo sapien
gttggccctgcgagaccaggcgctc

SEQ ID NO: 3951940 - DNA, 25 bp, Homo sapien
gagcgaagtattgaagccaaggaag

SEQ ID NO: 3951941 - DNA, 25 bp, Homo sapien
ctgtggtgcagttgagcgaagtatt

SEQ ID NO: 3951942 - DNA, 25 bp, Homo sapien
cgcaggccactacgacggtctcgtt

SEQ ID NO: 3951943 - DNA, 25 bp, Homo sapien
ggcgaggcagcattcacgcaggcca

SEQ ID NO: 3951944 - DNA, 25 bp, Homo sapien
gaaagggaggcggtgccggctcagc

SEQ ID NO: 3951945 - DNA, 25 bp, Homo sapien
ctggaaagggaggcggtgccggctc

SEQ ID NO: 3951946 - DNA, 25 bp, Homo sapien
aagggaggcggtgccggctcagctc

SEQ ID NO: 3951947 - DNA, 25 bp, Homo sapien
tggaaagggaggcggtgccggctca

SEQ ID NO: 3951948 - DNA, 25 bp, Homo sapien
gctggtgtcactgtgccgcctgtcc

SEQ ID NO: 3951949 - DNA, 25 bp, Homo sapien
cgcctgtcccgtgccaaggtaaatg

SEQ ID NO: 3951950 - DNA, 25 bp, Homo sapien
gtcttggcccgtgcctgctggtgtc

SEQ ID NO: 3951951 - DNA, 25 bp, Homo sapien
gccacaggccgcttgcagacagcag

SEQ ID NO: 3951952 - DNA, 25 bp, Homo sapien
atcacggagggcgtgtccgaacaca

SEQ ID NO: 3951953 - DNA, 25 bp, Homo sapien
gaccagaggaggcattgaagctctg

SEQ ID NO: 3951954 - DNA, 25 bp, Homo sapien
cccgctgtccatgccggtgttcagg

SEQ ID NO: 3951955 - DNA, 25 bp, Homo sapien
tcccgcgtgactgggtagtttgtga

SEQ ID NO: 3951956 - DNA, 25 bp, Homo sapien
ctgccgagaggacaaggggtttggc

SEQ ID NO: 3951957 - DNA, 25 bp, Homo sapien
tggctggaggaaagtctggggatct

SEQ ID NO: 3951958 - DNA, 25 bp, Homo sapien
ggcagggccatccctccagcccttg

SEQ ID NO: 3951959 - DNA, 25 bp, Homo sapien
atccctccagcccttgtgcggccca

SEQ ID NO: 3951960 - DNA, 25 bp, Homo sapien
ctgtgagggcagctacagcactgaa

SEQ ID NO: 3951961 - DNA, 25 bp, Homo sapien
tcccgcgtgtaatcggggacaaaga

SEQ ID NO: 3951962 - DNA, 25 bp, Homo sapien
tgaccgggcccacggtgagacgcac

SEQ ID NO: 3951963 - DNA, 25 bp, Homo sapien
ctaggcagggtgaccgggcccacgg

SEQ ID NO: 3951964 - DNA, 25 bp, Homo sapien
ggctcccattggacacgcagtcccg

SEQ ID NO: 3951965 - DNA, 25 bp, Homo sapien
ttcaggctggaagacgtaggcacag

SEQ ID NO: 3951966 - DNA, 25 bp, Homo sapien
ggcacgtccggctccatgatggaaa

SEQ ID NO: 3951967 - DNA, 25 bp, Homo sapien
acccgcgtgaccagcagttcaggct

SEQ ID NO: 3951968 - DNA, 25 bp, Homo sapien
atggaaatctcgaccacccgcgtga

SEQ ID NO: 3951969 - DNA, 25 bp, Homo sapien
ccgacctggaaggagggctgtaccg

SEQ ID NO: 3951970 - DNA, 25 bp, Homo sapien
tgggaaacgttgacggaggcattgc

SEQ ID NO: 3951971 - DNA, 25 bp, Homo sapien
aggcattgcttctcggtgtggtgct

SEQ ID NO: 3951972 - DNA, 25 bp, Homo sapien
taccgcggtgtcgtccgggaagctg

SEQ ID NO: 3951973 - DNA, 25 bp, Homo sapien
gagccagcgtagaagcacagcatct

SEQ ID NO: 3951974 - DNA, 25 bp, Homo sapien
tgatctccgcgtcggtgcaggcagc

SEQ ID NO: 3951975 - DNA, 25 bp, Homo sapien
cgctctcccgggagacctgcaggag

SEQ ID NO: 3951976 - DNA, 25 bp, Homo sapien
catctgggggcacgcggaagcggaa

SEQ ID NO: 3951977 - DNA, 25 bp, Homo sapien
gcgagaagtgctcggacaccagccc

SEQ ID NO: 3951978 - DNA, 25 bp, Homo sapien
tctgcggggcctgcgagaagtgctc

SEQ ID NO: 3951979 - DNA, 25 bp, Homo sapien
tgcgagaagtgctcggacaccagcc

SEQ ID NO: 3951980 - DNA, 25 bp, Homo sapien
ggtacctcagcagccatcgccaccc

SEQ ID NO: 3951981 - DNA, 25 bp, Homo sapien
acaagccgcagggtacctcagcagc

SEQ ID NO: 3951982 - DNA, 25 bp, Homo sapien
aaacaagccgcagggtacctcagca

SEQ ID NO: 3951983 - DNA, 25 bp, Homo sapien
gcagccatcgccaccctgactgcca

SEQ ID NO: 3951984 - DNA, 25 bp, Homo sapien
tcttcccgctgtagccggcggaggc

SEQ ID NO: 3951985 - DNA, 25 bp, Homo sapien
cgctcttcccgctgtagccggcgga

SEQ ID NO: 3951986 - DNA, 25 bp, Homo sapien
cttcccgctgtagccggcggaggca

SEQ ID NO: 3951987 - DNA, 25 bp, Homo sapien
cggtcccggtgccagcccggcccat

SEQ ID NO: 3951988 - DNA, 25 bp, Homo sapien
gcgctacccggcccgcgtcccgcgc

SEQ ID NO: 3951989 - DNA, 25 bp, Homo sapien
ccgccgcccgggcagcctctgccgc

SEQ ID NO: 3951990 - DNA, 25 bp, Homo sapien
gccgcccgggcagcctctgccgcct

SEQ ID NO: 3951991 - DNA, 25 bp, Homo sapien
ggctccgcgctcggcccggcgctac

SEQ ID NO: 3951992 - DNA, 25 bp, Homo sapien
gcctctgcccccggcgcccatggcc

SEQ ID NO: 3951993 - DNA, 25 bp, Homo sapien
ctctgcccccggcgcccatggcccg

SEQ ID NO: 3951994 - DNA, 25 bp, Homo sapien
ctgcccccggcgcccatggcccggc

SEQ ID NO: 3951995 - DNA, 25 bp, Homo sapien
tccgcctctgcccccggcgcccatg

SEQ ID NO: 3951996 - DNA, 25 bp, Homo sapien
caaaacactaaagtgtccttcccag

SEQ ID NO: 3951997 - DNA, 25 bp, Homo sapien
acactaaagtgtccttcccaggatg

SEQ ID NO: 3951998 - DNA, 25 bp, Homo sapien
tccctcagcgcagaaatgcaaatta

SEQ ID NO: 3951999 - DNA, 25 bp, Homo sapien
taaaaactactccagctactccgga

SEQ ID NO: 3952000 - DNA, 25 bp, Homo sapien
gctcacgtgggaatttcaccctcca

SEQ ID NO: 3952001 - DNA, 25 bp, Homo sapien
acaggccctgcaactatgaatgtgg

SEQ ID NO: 3952002 - DNA, 25 bp, Homo sapien
ggccatttgagaataaaggtcggat

SEQ ID NO: 3952003 - DNA, 25 bp, Homo sapien
tgcagtcacatcagaggccatttga

SEQ ID NO: 3952004 - DNA, 25 bp, Homo sapien
cagattctgtgggacatacagggtc

SEQ ID NO: 3952005 - DNA, 25 bp, Homo sapien
ctggcggagcccctttggctctgtc

SEQ ID NO: 3952006 - DNA, 25 bp, Homo sapien
cagccgcctgctggggttaactttt

SEQ ID NO: 3952007 - DNA, 25 bp, Homo sapien
ctggaaaccagggacccgatgccgg

SEQ ID NO: 3952008 - DNA, 25 bp, Homo sapien
caatctgaaccagcaatgcctgcag

SEQ ID NO: 3952009 - DNA, 25 bp, Homo sapien
ccatggtcaagggtgtcctgcctgc

SEQ ID NO: 3952010 - DNA, 25 bp, Homo sapien
ggagccacatggatcccgagacttg

SEQ ID NO: 3952011 - DNA, 25 bp, Homo sapien
tacagacaagatgctgggatgtccc

SEQ ID NO: 3952012 - DNA, 25 bp, Homo sapien
gcgggtctcatattcctgacttcaa

SEQ ID NO: 3952013 - DNA, 25 bp, Homo sapien
ggcgggtctcatattcctgacttca

SEQ ID NO: 3952014 - DNA, 25 bp, Homo sapien
tgtattttctaggattttatgtaag

SEQ ID NO: 3952015 - DNA, 25 bp, Homo sapien
caccgcgcctgcctggtgtttgtat

SEQ ID NO: 3952016 - DNA, 25 bp, Homo sapien
cggccgaaggcatcagcccaaattt

SEQ ID NO: 3952017 - DNA, 25 bp, Homo sapien
gatgactcacttaattaacacgctg

SEQ ID NO: 3952018 - DNA, 25 bp, Homo sapien
gcctcgcgaagtctggtcccatgta

SEQ ID NO: 3952019 - DNA, 25 bp, Homo sapien
cgctgctcctgaccgtacacttgga

SEQ ID NO: 3952020 - DNA, 25 bp, Homo sapien
agcaacccgtaacgattgtgatcag

SEQ ID NO: 3952021 - DNA, 25 bp, Homo sapien
caacccgtaacgattgtgatcagtt

SEQ ID NO: 3952022 - DNA, 25 bp, Homo sapien
ccaaagcaacccgtaacgattgtga

SEQ ID NO: 3952023 - DNA, 25 bp, Homo sapien
cccgtaacgattgtgatcagttagt

SEQ ID NO: 3952024 - DNA, 25 bp, Homo sapien
tgcttggtagcagccccggcatctg

SEQ ID NO: 3952025 - DNA, 25 bp, Homo sapien
gcttgctgcttggtagcagccccgg

SEQ ID NO: 3952026 - DNA, 25 bp, Homo sapien
tcaccacagggcctagggggccttc

SEQ ID NO: 3952027 - DNA, 25 bp, Homo sapien
ggccttcctcgggttcaccgatgct

SEQ ID NO: 3952028 - DNA, 25 bp, Homo sapien
ggtaatgacgccttgttccagcaca

SEQ ID NO: 3952029 - DNA, 25 bp, Homo sapien
cactttgaggactacggtgaaggca

SEQ ID NO: 3952030 - DNA, 25 bp, Homo sapien
gagaccctatgcaacgggcagctgg

SEQ ID NO: 3952031 - DNA, 25 bp, Homo sapien
tagcacaccctatggaaagcacctt

SEQ ID NO: 3952032 - DNA, 25 bp, Homo sapien
aaaaaagcccaatctgagccggacg

SEQ ID NO: 3952033 - DNA, 25 bp, Homo sapien
aagtcttttactccagacaggctgc

SEQ ID NO: 3952034 - DNA, 25 bp, Homo sapien
cagctggtgacatgaaagaccggtc

SEQ ID NO: 3952035 - DNA, 25 bp, Homo sapien
ccggtcaaggccagctaaggcatct

SEQ ID NO: 3952036 - DNA, 25 bp, Homo sapien
tcctgacgaacacctgaggccaggg

SEQ ID NO: 3952037 - DNA, 25 bp, Homo sapien
ccctagaggaggaatcgggactgca

SEQ ID NO: 3952038 - DNA, 25 bp, Homo sapien
tcagaagtgggtagcaccaggaacc

SEQ ID NO: 3952039 - DNA, 25 bp, Homo sapien
gaagttggataaaggcgaggctcac

SEQ ID NO: 3952040 - DNA, 25 bp, Homo sapien
gcgtccgaggccatcagttgtctga

SEQ ID NO: 3952041 - DNA, 25 bp, Homo sapien
tccaaggccgtaggattgcacctcc

SEQ ID NO: 3952042 - DNA, 25 bp, Homo sapien
aatatataaagactggcaccctgcc

SEQ ID NO: 3952043 - DNA, 25 bp, Homo sapien
ttctggatcctgacgagctgctgag

SEQ ID NO: 3952044 - DNA, 25 bp, Homo sapien
ttctgggcacttggcgagcttctgc

SEQ ID NO: 3952045 - DNA, 25 bp, Homo sapien
gaatcttcaagacaatcacaggctg

SEQ ID NO: 3952046 - DNA, 25 bp, Homo sapien
cagggctcggtcaatggtctggata

SEQ ID NO: 3952047 - DNA, 25 bp, Homo sapien
caagtctgggctccatgatggcact

SEQ ID NO: 3952048 - DNA, 25 bp, Homo sapien
gatatagtctgggaacaaacggcac

SEQ ID NO: 3952049 - DNA, 25 bp, Homo sapien
cactgactgcagctagaagccgagc

SEQ ID NO: 3952050 - DNA, 25 bp, Homo sapien
agagaacctgcggtccctgagtgag

SEQ ID NO: 3952051 - DNA, 25 bp, Homo sapien
tataaggcctgctggctagaccact

SEQ ID NO: 3952052 - DNA, 25 bp, Homo sapien
ctgctccttgtagcagggtcgggcc

SEQ ID NO: 3952053 - DNA, 25 bp, Homo sapien
tcatggactcttgcccacggcctgc

SEQ ID NO: 3952054 - DNA, 25 bp, Homo sapien
ggccgtgggaggtccggacaggatc

SEQ ID NO: 3952055 - DNA, 25 bp, Homo sapien
ttgaatggccctgtctgcggtcctg

SEQ ID NO: 3952056 - DNA, 25 bp, Homo sapien
tccttgttggggtcgctgtggttcc

SEQ ID NO: 3952057 - DNA, 25 bp, Homo sapien
tctgtgaaagattgacggagatgta

SEQ ID NO: 3952058 - DNA, 25 bp, Homo sapien
ctgtggttcccatggtggcaagatg

SEQ ID NO: 3952059 - DNA, 25 bp, Homo sapien
aaagattgacggagatgtagggccc

SEQ ID NO: 3952060 - DNA, 25 bp, Homo sapien
cagcacagatgcttggccggcggca

SEQ ID NO: 3952061 - DNA, 25 bp, Homo sapien
tctgtggcagtcatgagtcacggcc

SEQ ID NO: 3952062 - DNA, 25 bp, Homo sapien
tgaggcgccgccctgagagtcagcc

SEQ ID NO: 3952063 - DNA, 25 bp, Homo sapien
ttcgcgagcacctgaaacagcctgg

SEQ ID NO: 3952064 - DNA, 25 bp, Homo sapien
tggttccggcgtctggcgtagccac

SEQ ID NO: 3952065 - DNA, 25 bp, Homo sapien
ttccgtgtggcattcgagaccccgt

SEQ ID NO: 3952066 - DNA, 25 bp, Homo sapien
catgtttgagcgctgccccttgtgg

SEQ ID NO: 3952067 - DNA, 25 bp, Homo sapien
ttgatgcgtgggctccctgctagcg

SEQ ID NO: 3952068 - DNA, 25 bp, Homo sapien
ccccgtccacactgcgcggcgctct

SEQ ID NO: 3952069 - DNA, 25 bp, Homo sapien
agatccgccacgactcccgtggccc

SEQ ID NO: 3952070 - DNA, 25 bp, Homo sapien
caggagatccgccacgactcccgtg

SEQ ID NO: 3952071 - DNA, 25 bp, Homo sapien
gccccgtccacactgcgcggcgctc

SEQ ID NO: 3952072 - DNA, 25 bp, Homo sapien
cccacgcacggcagctttgacactt

SEQ ID NO: 3952073 - DNA, 25 bp, Homo sapien
atgcagctgtggtgctcacgccatc

SEQ ID NO: 3952074 - DNA, 25 bp, Homo sapien
gatcccccacgcacggcagctttga

SEQ ID NO: 3952075 - DNA, 25 bp, Homo sapien
tgcagctgtggtgctcacgccatcc

SEQ ID NO: 3952076 - DNA, 25 bp, Homo sapien
cagagacttaatcagaagctggaag

SEQ ID NO: 3952077 - DNA, 25 bp, Homo sapien
gaagaagggctgtgacgtgtgtgac

SEQ ID NO: 3952078 - DNA, 25 bp, Homo sapien
gcaggaactgctggtcaacccacag

SEQ ID NO: 3952079 - DNA, 25 bp, Homo sapien
taagctctaccctgacgctggctgt

SEQ ID NO: 3952080 - DNA, 25 bp, Homo sapien
catagcctcacagggtccttgtttc

SEQ ID NO: 3952081 - DNA, 25 bp, Homo sapien
tcctcccgtctcaggattaacgttc

SEQ ID NO: 3952082 - DNA, 25 bp, Homo sapien
ctctgtgggtgcacaaggcatggtc

SEQ ID NO: 3952083 - DNA, 25 bp, Homo sapien
tcgggctcccgtccttctggaagtc

SEQ ID NO: 3952084 - DNA, 25 bp, Homo sapien
gataaagcaaaagcgtgtgatctct

SEQ ID NO: 3952085 - DNA, 25 bp, Homo sapien
tgggtagacgttctcttgacccttc

SEQ ID NO: 3952086 - DNA, 25 bp, Homo sapien
gacccttccttctgtgataaagcaa

SEQ ID NO: 3952087 - DNA, 25 bp, Homo sapien
taaaacgtctctgaataccacagac

SEQ ID NO: 3952088 - DNA, 25 bp, Homo sapien
aaagctgccagcactcgctgggctc

SEQ ID NO: 3952089 - DNA, 25 bp, Homo sapien
acatggcttggtggccgaactccac

SEQ ID NO: 3952090 - DNA, 25 bp, Homo sapien
gctgcccacggtttcaaagctgcca

SEQ ID NO: 3952091 - DNA, 25 bp, Homo sapien
ggtggccgaactccacgtgctggct

SEQ ID NO: 3952092 - DNA, 25 bp, Homo sapien
gcaggaggctttgatgccggcctgg

SEQ ID NO: 3952093 - DNA, 25 bp, Homo sapien
cggggagagcttcgtgggtggccac

SEQ ID NO: 3952094 - DNA, 25 bp, Homo sapien
ggaggctttgatgccggcctggcag

SEQ ID NO: 3952095 - DNA, 25 bp, Homo sapien
gctccaggagttgggcgacggaggg

SEQ ID NO: 3952096 - DNA, 25 bp, Homo sapien
taacagcgctactgaacgcagagca

SEQ ID NO: 3952097 - DNA, 25 bp, Homo sapien
tctgggcacaatgacctctgagcag

SEQ ID NO: 3952098 - DNA, 25 bp, Homo sapien
aaactggtgcgtcgatgtggtcgcc

SEQ ID NO: 3952099 - DNA, 25 bp, Homo sapien
tcagaaaccgaggaggaaacatcac

SEQ ID NO: 3952100 - DNA, 25 bp, Homo sapien
tgcagactcactggtgacccaacgg

SEQ ID NO: 3952101 - DNA, 25 bp, Homo sapien
gatacaaacaacgtggacttccgag

SEQ ID NO: 3952102 - DNA, 25 bp, Homo sapien
gaacctcagcgactttgcagactca

SEQ ID NO: 3952103 - DNA, 25 bp, Homo sapien
ccgtgatggacatgcaagcgaccca

SEQ ID NO: 3952104 - DNA, 25 bp, Homo sapien
tgtttctctagaatacacgagtcct

SEQ ID NO: 3952105 - DNA, 25 bp, Homo sapien
tataacacaaatacgcacgaggcct

SEQ ID NO: 3952106 - DNA, 25 bp, Homo sapien
tatgtagggatacagttcagtggca

SEQ ID NO: 3952107 - DNA, 25 bp, Homo sapien
gaaaacacgtcattttagccatatg

SEQ ID NO: 3952108 - DNA, 25 bp, Homo sapien
cacgtggttgagtgcagttgctccc

SEQ ID NO: 3952109 - DNA, 25 bp, Homo sapien
tagttttcacgtcaatggagccaca

SEQ ID NO: 3952110 - DNA, 25 bp, Homo sapien
tctcagacgcgtttggtcaacacag

SEQ ID NO: 3952111 - DNA, 25 bp, Homo sapien
cattgctgttgggacgtactgagga

SEQ ID NO: 3952112 - DNA, 25 bp, Homo sapien
ggtgttggctgacacacagtcctct

SEQ ID NO: 3952113 - DNA, 25 bp, Homo sapien
aaggtgttggctgacacgcagtcct

SEQ ID NO: 3952114 - DNA, 25 bp, Homo sapien
gtcctcagtccagtgtgggtttccc

SEQ ID NO: 3952115 - DNA, 25 bp, Homo sapien
caaggtgttggctgacacgcagtcc

SEQ ID NO: 3952116 - DNA, 25 bp, Homo sapien
cctgggcagattggcctccatgggc

SEQ ID NO: 3952117 - DNA, 25 bp, Homo sapien
cacgtccactccccagaccaccagc

SEQ ID NO: 3952118 - DNA, 25 bp, Homo sapien
ctgacagtccctgggcagattggcc

SEQ ID NO: 3952119 - DNA, 25 bp, Homo sapien
acagtccctgggcagattggcctcc

SEQ ID NO: 3952120 - DNA, 25 bp, Homo sapien
caggatgggtgggacgcagacgtcc

SEQ ID NO: 3952121 - DNA, 25 bp, Homo sapien
gggtgggacgcagacgtccagcggg

SEQ ID NO: 3952122 - DNA, 25 bp, Homo sapien
cgcagacgtccagcgggaggagcat

SEQ ID NO: 3952123 - DNA, 25 bp, Homo sapien
tgggacgcagacgtccagcgggagg

SEQ ID NO: 3952124 - DNA, 25 bp, Homo sapien
ccattacgtgaaggttttgtcagcc

SEQ ID NO: 3952125 - DNA, 25 bp, Homo sapien
tttatcgcccaccagactgacttgg

SEQ ID NO: 3952126 - DNA, 25 bp, Homo sapien
cctaggagtagggtggatcacagct

SEQ ID NO: 3952127 - DNA, 25 bp, Homo sapien
tcgccctgggagcttagtaatgtca

SEQ ID NO: 3952128 - DNA, 25 bp, Homo sapien
cctacgtggagactgtccacacagc

SEQ ID NO: 3952129 - DNA, 25 bp, Homo sapien
tgcttccgggaatcttggtcggaaa

SEQ ID NO: 3952130 - DNA, 25 bp, Homo sapien
gctgcctcagaagcgccgggctttc

SEQ ID NO: 3952131 - DNA, 25 bp, Homo sapien
tcctcacacctgagccgggtgcgag

SEQ ID NO: 3952132 - DNA, 25 bp, Homo sapien
catcctgtgaattcatgcgctgcga

SEQ ID NO: 3952133 - DNA, 25 bp, Homo sapien
tgtggtcctgtggtcagagcccaag

SEQ ID NO: 3952134 - DNA, 25 bp, Homo sapien
gttgcacggcatcagaaccatcctg

SEQ ID NO: 3952135 - DNA, 25 bp, Homo sapien
gaccttcttagggacgtgcctggaa

SEQ ID NO: 3952136 - DNA, 25 bp, Homo sapien
acactacccgcgctgctgttagaca

SEQ ID NO: 3952137 - DNA, 25 bp, Homo sapien
cctggatggtcctgcattcacggca

SEQ ID NO: 3952138 - DNA, 25 bp, Homo sapien
ccacggagggtgttactgggcacca

SEQ ID NO: 3952139 - DNA, 25 bp, Homo sapien
gccgtggcctgcatgaactaccaga

SEQ ID NO: 3952140 - DNA, 25 bp, Homo sapien
aggacatgctttattctgagcaggc

SEQ ID NO: 3952141 - DNA, 25 bp, Homo sapien
cagcaggacatgctttattctgagc

SEQ ID NO: 3952142 - DNA, 25 bp, Homo sapien
gacatgctttattctgagcaggctg

SEQ ID NO: 3952143 - DNA, 25 bp, Homo sapien
gcaggacatgctttattctgagcag

SEQ ID NO: 3952144 - DNA, 25 bp, Homo sapien
tagggaggcagggttcgtgcctcac

SEQ ID NO: 3952145 - DNA, 25 bp, Homo sapien
ggctgtcgtccacaaggtccggcct

SEQ ID NO: 3952146 - DNA, 25 bp, Homo sapien
cctccggcagggatgcaggtgtgcg

SEQ ID NO: 3952147 - DNA, 25 bp, Homo sapien
ctcacagagcctccggcagggatgc

SEQ ID NO: 3952148 - DNA, 25 bp, Homo sapien
agtttttccggaagatcaggcattt

SEQ ID NO: 3952149 - DNA, 25 bp, Homo sapien
ttagtttttccggaagatcaggcat

SEQ ID NO: 3952150 - DNA, 25 bp, Homo sapien
tagtttttccggaagatcaggcatt

SEQ ID NO: 3952151 - DNA, 25 bp, Homo sapien
actttgctggaggacggccctcaac

SEQ ID NO: 3952152 - DNA, 25 bp, Homo sapien
aggacggccctcaacccctagagag

SEQ ID NO: 3952153 - DNA, 25 bp, Homo sapien
ctcaacccctagagaggttgcctgg

SEQ ID NO: 3952154 - DNA, 25 bp, Homo sapien
gagaaacactttgctggaggacggc

SEQ ID NO: 3952155 - DNA, 25 bp, Homo sapien
ccaggagcaggccactggcctttcc

SEQ ID NO: 3952156 - DNA, 25 bp, Homo sapien
atcctctccaggagcaggccactgg

SEQ ID NO: 3952157 - DNA, 25 bp, Homo sapien
ggagggctgtgtcccgaagccccca

SEQ ID NO: 3952158 - DNA, 25 bp, Homo sapien
ctccaggagggctgtgtcccgaagc

SEQ ID NO: 3952159 - DNA, 25 bp, Homo sapien
gccacctgccacctgagccagaccc

SEQ ID NO: 3952160 - DNA, 25 bp, Homo sapien
atggcctggggggtgccacccaagc

SEQ ID NO: 3952161 - DNA, 25 bp, Homo sapien
gtggggagatggagtcatggcctgg

SEQ ID NO: 3952162 - DNA, 25 bp, Homo sapien
cagaccccccgcctctagctctgac

SEQ ID NO: 3952163 - DNA, 25 bp, Homo sapien
agcatcaggtcaaagtccacgttgc

SEQ ID NO: 3952164 - DNA, 25 bp, Homo sapien
gcatcaggtcaaagtccacgttgct

SEQ ID NO: 3952165 - DNA, 25 bp, Homo sapien
ctgggacagacttgcaggctggggt

SEQ ID NO: 3952166 - DNA, 25 bp, Homo sapien
gtcggggtatttcccagagagcctg

SEQ ID NO: 3952167 - DNA, 25 bp, Homo sapien
tgggacagacttgcaggctggggtt

SEQ ID NO: 3952168 - DNA, 25 bp, Homo sapien
gaggggtacagactggaagtggagg

SEQ ID NO: 3952169 - DNA, 25 bp, Homo sapien
ggaggggtacagactggaagtggag

SEQ ID NO: 3952170 - DNA, 25 bp, Homo sapien
ctgtccccaagagggagtcagccaa

SEQ ID NO: 3952171 - DNA, 25 bp, Homo sapien
gggaggggtacagactggaagtgga

SEQ ID NO: 3952172 - DNA, 25 bp, Homo sapien
ggtgtcctgctgctctgaagagccc

SEQ ID NO: 3952173 - DNA, 25 bp, Homo sapien
cccgtaggtgatgagcagggccctg

SEQ ID NO: 3952174 - DNA, 25 bp, Homo sapien
ggccctgggtttgagcaggtgtcct

SEQ ID NO: 3952175 - DNA, 25 bp, Homo sapien
cagggccctgggtttgagcaggtgt

SEQ ID NO: 3952176 - DNA, 25 bp, Homo sapien
cagtgaggtgctgcccccaacagaa

SEQ ID NO: 3952177 - DNA, 25 bp, Homo sapien
tgagtaggaacaggacggcagtgag

SEQ ID NO: 3952178 - DNA, 25 bp, Homo sapien
ctggtgagtaggaacaggacggcag

SEQ ID NO: 3952179 - DNA, 25 bp, Homo sapien
ggaacaggacggcagtgaggtgctg

SEQ ID NO: 3952180 - DNA, 25 bp, Homo sapien
cagggtgagtggtgccacggcagac

SEQ ID NO: 3952181 - DNA, 25 bp, Homo sapien
gtgatgggggcaaatctggcatccc

SEQ ID NO: 3952182 - DNA, 25 bp, Homo sapien
cagctgcccccatgcagggtgagtg

SEQ ID NO: 3952183 - DNA, 25 bp, Homo sapien
gggggcaaatctggcatcccagctg

SEQ ID NO: 3952184 - DNA, 25 bp, Homo sapien
gctgacatgggccatgttgatgcag

SEQ ID NO: 3952185 - DNA, 25 bp, Homo sapien
ggtccagcgactgtggcaggatccc

SEQ ID NO: 3952186 - DNA, 25 bp, Homo sapien
gagcaacaggtccagcgactgtggc

SEQ ID NO: 3952187 - DNA, 25 bp, Homo sapien
ccacgtcacgtccaggtgtagcggg

SEQ ID NO: 3952188 - DNA, 25 bp, Homo sapien
ctgcaggaggcgaacgcttgggtgg

SEQ ID NO: 3952189 - DNA, 25 bp, Homo sapien
gagtcctgtgcacccgcctttccga

SEQ ID NO: 3952190 - DNA, 25 bp, Homo sapien
gggccgagtcctgtgcacccgcctt

SEQ ID NO: 3952191 - DNA, 25 bp, Homo sapien
tgcaggaggcgaacgcttgggtggg

SEQ ID NO: 3952192 - DNA, 25 bp, Homo sapien
gaggagcggagaccaaagcggctgg

SEQ ID NO: 3952193 - DNA, 25 bp, Homo sapien
gcggagaccaaagcggctgggaagg

SEQ ID NO: 3952194 - DNA, 25 bp, Homo sapien
gggggccgcacagctagggcctgcc

SEQ ID NO: 3952195 - DNA, 25 bp, Homo sapien
gggggcacgttgaggagcggagacc

SEQ ID NO: 3952196 - DNA, 25 bp, Homo sapien
ccggaccgccgcaccgatagaagtg

SEQ ID NO: 3952197 - DNA, 25 bp, Homo sapien
gctgcgggccgtgggctcttgaggc

SEQ ID NO: 3952198 - DNA, 25 bp, Homo sapien
ctcagagcccgagccgcatcctttt

SEQ ID NO: 3952199 - DNA, 25 bp, Homo sapien
gcaccgatagaagtggccgccccgg

SEQ ID NO: 3952200 - DNA, 25 bp, Homo sapien
agcgctggtccacgtccgacggctg

SEQ ID NO: 3952201 - DNA, 25 bp, Homo sapien
cgcagcacgtgcaagatgggatcct

SEQ ID NO: 3952202 - DNA, 25 bp, Homo sapien
tgggccggatccaggtactgccgca

SEQ ID NO: 3952203 - DNA, 25 bp, Homo sapien
aaggcccgcgcgaagtgcgctgcgt

SEQ ID NO: 3952204 - DNA, 25 bp, Homo sapien
cagcaacaactccccgccgcggacg

SEQ ID NO: 3952205 - DNA, 25 bp, Homo sapien
agcaacaactccccgccgcggacgc

SEQ ID NO: 3952206 - DNA, 25 bp, Homo sapien
ttgcatgataccactacaccagcgg

SEQ ID NO: 3952207 - DNA, 25 bp, Homo sapien
acccgggtcgcaagaatgggaatct

SEQ ID NO: 3952208 - DNA, 25 bp, Homo sapien
cccgggtcgcaagaatgggaatctt

SEQ ID NO: 3952209 - DNA, 25 bp, Homo sapien
gaatgggaatcttgcatgataccac

SEQ ID NO: 3952210 - DNA, 25 bp, Homo sapien
tccagcgcttgtcaaaggtgggccc

SEQ ID NO: 3952211 - DNA, 25 bp, Homo sapien
tattgaactaaccactctgcactga

SEQ ID NO: 3952212 - DNA, 25 bp, Homo sapien
tgtaaaccaccgatcctggacagct

SEQ ID NO: 3952213 - DNA, 25 bp, Homo sapien
ttggctgaggctccccaagtatgaa

SEQ ID NO: 3952214 - DNA, 25 bp, Homo sapien
cggctgtcccaaccaagctgccatg

SEQ ID NO: 3952215 - DNA, 25 bp, Homo sapien
tgtgcccagggaccagcgaccagcc

SEQ ID NO: 3952216 - DNA, 25 bp, Homo sapien
tggccaagggccgaacccgtctgac

SEQ ID NO: 3952217 - DNA, 25 bp, Homo sapien
ttggcccggctgtcccaaccaagct

SEQ ID NO: 3952218 - DNA, 25 bp, Homo sapien
aagccgttagcttctcacccagctg

SEQ ID NO: 3952219 - DNA, 25 bp, Homo sapien
tgtagccctgttccttcaagccgtt

SEQ ID NO: 3952220 - DNA, 25 bp, Homo sapien
tagggggggttctcatgtccagttc

SEQ ID NO: 3952221 - DNA, 25 bp, Homo sapien
aggcccagcacaaactccccttgta

SEQ ID NO: 3952222 - DNA, 25 bp, Homo sapien
gtaggagggacgttagccagcccac

SEQ ID NO: 3952223 - DNA, 25 bp, Homo sapien
gagactcaaggcctaaagacattaa

SEQ ID NO: 3952224 - DNA, 25 bp, Homo sapien
tttcctctcccgttggcgttgactg

SEQ ID NO: 3952225 - DNA, 25 bp, Homo sapien
actgggaccgaagccgagactcaag

SEQ ID NO: 3952226 - DNA, 25 bp, Homo sapien
ctctggacggcgagagagcggcagg

SEQ ID NO: 3952227 - DNA, 25 bp, Homo sapien
ccgaggcgctgacaggtgggcgcgg

SEQ ID NO: 3952228 - DNA, 25 bp, Homo sapien
tcgcctcgctgcttgcatgcggcgg

SEQ ID NO: 3952229 - DNA, 25 bp, Homo sapien
ggccgtccgtggcatggccaggcct

SEQ ID NO: 3952230 - DNA, 25 bp, Homo sapien
gtcgttctggcaaaggcgcacactg

SEQ ID NO: 3952231 - DNA, 25 bp, Homo sapien
cagaggctggtctccgcatgagaga

SEQ ID NO: 3952232 - DNA, 25 bp, Homo sapien
gcattgcgggtctctgtagaagtcc

SEQ ID NO: 3952233 - DNA, 25 bp, Homo sapien
tgagagaaaagccacctccgggtgg

SEQ ID NO: 3952234 - DNA, 25 bp, Homo sapien
gtcccgcctagcctaagagtggtgg

SEQ ID NO: 3952235 - DNA, 25 bp, Homo sapien
acgtgggtagtgtgtgaagcccctc

SEQ ID NO: 3952236 - DNA, 25 bp, Homo sapien
gccaagtggcatatccagagccctg

SEQ ID NO: 3952237 - DNA, 25 bp, Homo sapien
ctgcatcttgcagccgtgtggagcc

SEQ ID NO: 3952238 - DNA, 25 bp, Homo sapien
gggctctgttctcccggtagcgcct

SEQ ID NO: 3952239 - DNA, 25 bp, Homo sapien
ctccagccgaggtcctgtgaagcac

SEQ ID NO: 3952240 - DNA, 25 bp, Homo sapien
agcactttggctactggacgctggg

SEQ ID NO: 3952241 - DNA, 25 bp, Homo sapien
tggcaaatgagcgccagccatcagt

SEQ ID NO: 3952242 - DNA, 25 bp, Homo sapien
gcaggccttgcaggtcttctcaaac

SEQ ID NO: 3952243 - DNA, 25 bp, Homo sapien
gtcaaagaaatcacatcagtccggg

SEQ ID NO: 3952244 - DNA, 25 bp, Homo sapien
cctcaaagccgtcccggttgtgtct

SEQ ID NO: 3952245 - DNA, 25 bp, Homo sapien
cttgggtgtgcacgtcccctcaaag

SEQ ID NO: 3952246 - DNA, 25 bp, Homo sapien
agtggcacctgcataatgacacgtc

SEQ ID NO: 3952247 - DNA, 25 bp, Homo sapien
tttaatgaagtgcatcgtgttccca

SEQ ID NO: 3952248 - DNA, 25 bp, Homo sapien
aggaatgcgactgcatggcgcgctc

SEQ ID NO: 3952249 - DNA, 25 bp, Homo sapien
ccccaatcagcgtgcagcggttttg

SEQ ID NO: 3952250 - DNA, 25 bp, Homo sapien
gaacagctttctcctcggtatcccg

SEQ ID NO: 3952251 - DNA, 25 bp, Homo sapien
cagatctagtgcagggacacacacg

SEQ ID NO: 3952252 - DNA, 25 bp, Homo sapien
tatcccgccgggtttgactggctag

SEQ ID NO: 3952253 - DNA, 25 bp, Homo sapien
ctttccgccatgtggagttggccgg

SEQ ID NO: 3952254 - DNA, 25 bp, Homo sapien
gattcgaactaagtggatcccactg

SEQ ID NO: 3952255 - DNA, 25 bp, Homo sapien
atggaggccgtgctccccatcatga

SEQ ID NO: 3952256 - DNA, 25 bp, Homo sapien
catgagccagtttcccgagattgag

SEQ ID NO: 3952257 - DNA, 25 bp, Homo sapien
tcctagtgggcaacaagtcagacct

SEQ ID NO: 3952258 - DNA, 25 bp, Homo sapien
tagtgactggaacgggtcgtctccg

SEQ ID NO: 3952259 - DNA, 25 bp, Homo sapien
tgaacctccgctgccgttagtgact

SEQ ID NO: 3952260 - DNA, 25 bp, Homo sapien
ctggaccaggcgctcagtgacgaag

SEQ ID NO: 3952261 - DNA, 25 bp, Homo sapien
gacgaagagctcaacgctttccagg

SEQ ID NO: 3952262 - DNA, 25 bp, Homo sapien
cctcaagtttggagccgtttccgtg

SEQ ID NO: 3952263 - DNA, 25 bp, Homo sapien
tatctcggatcccagtctctgaaga

SEQ ID NO: 3952264 - DNA, 25 bp, Homo sapien
tttccgtggttgtagcagaggaccg

SEQ ID NO: 3952265 - DNA, 25 bp, Homo sapien
gagctttgggccaaaagcaggcgtt

SEQ ID NO: 3952266 - DNA, 25 bp, Homo sapien
aagccccgctcggtacctacctcat

SEQ ID NO: 3952267 - DNA, 25 bp, Homo sapien
ggctggtcttggaccttggccctcg

SEQ ID NO: 3952268 - DNA, 25 bp, Homo sapien
aggagaggactgactggaccagagc

SEQ ID NO: 3952269 - DNA, 25 bp, Homo sapien
cttggtccgtgtgtctgggacccca

SEQ ID NO: 3952270 - DNA, 25 bp, Homo sapien
accttcactggcctggtgcacagcc

SEQ ID NO: 3952271 - DNA, 25 bp, Homo sapien
tgcccctggacccggccaagctgga

SEQ ID NO: 3952272 - DNA, 25 bp, Homo sapien
gcagggccaggtctgctaccaggag

SEQ ID NO: 3952273 - DNA, 25 bp, Homo sapien
tcatcggtgcggacaccttcactgg

SEQ ID NO: 3952274 - DNA, 25 bp, Homo sapien
cattgctaacggacagcgggcactg

SEQ ID NO: 3952275 - DNA, 25 bp, Homo sapien
caggcctaggtgtctacaagcggtt

SEQ ID NO: 3952276 - DNA, 25 bp, Homo sapien
caagcggtttgtgcgttacgtggcc

SEQ ID NO: 3952277 - DNA, 25 bp, Homo sapien
tccagcagtttcaagcgggccattg

SEQ ID NO: 3952278 - DNA, 25 bp, Homo sapien
cagtgctgtctccactaggtaggga

SEQ ID NO: 3952279 - DNA, 25 bp, Homo sapien
gtagggagtccactgtcctgaggca

SEQ ID NO: 3952280 - DNA, 25 bp, Homo sapien
gtttattgagctcccgtagtggcca

SEQ ID NO: 3952281 - DNA, 25 bp, Homo sapien
gcctagcatcctcgtgggtggccag

SEQ ID NO: 3952282 - DNA, 25 bp, Homo sapien
aggggcacacggactcaggcccagg

SEQ ID NO: 3952283 - DNA, 25 bp, Homo sapien
gcccacacacagttcattccccttg

SEQ ID NO: 3952284 - DNA, 25 bp, Homo sapien
agagctgtggcccgctcttgaacct

SEQ ID NO: 3952285 - DNA, 25 bp, Homo sapien
gctgtggcccgctcttgaacctggc

SEQ ID NO: 3952286 - DNA, 25 bp, Homo sapien
gtggccaccgcctcatctgacatga

SEQ ID NO: 3952287 - DNA, 25 bp, Homo sapien
tggccaccgcctcatctgacatgaa

SEQ ID NO: 3952288 - DNA, 25 bp, Homo sapien
tagcgacacgcaagggcccagactg

SEQ ID NO: 3952289 - DNA, 25 bp, Homo sapien
agactgcccgcttcacagacaagaa

SEQ ID NO: 3952290 - DNA, 25 bp, Homo sapien
gaacgcctatgtacccaagtcgtgc

SEQ ID NO: 3952291 - DNA, 25 bp, Homo sapien
ttcctgctcctagcgacacgcaagg

SEQ ID NO: 3952292 - DNA, 25 bp, Homo sapien
aaggtggcggtcgaacagtgcacaa

SEQ ID NO: 3952293 - DNA, 25 bp, Homo sapien
cgaacagtgcacaaccagctcaggg

SEQ ID NO: 3952294 - DNA, 25 bp, Homo sapien
gaggcagaaggtggcggtcgaacag

SEQ ID NO: 3952295 - DNA, 25 bp, Homo sapien
tgtggtgggcccacaccgcagaggg

SEQ ID NO: 3952296 - DNA, 25 bp, Homo sapien
tgaagacccgcgctacggaggccct

SEQ ID NO: 3952297 - DNA, 25 bp, Homo sapien
gatgccacgccccaatgaagacccg

SEQ ID NO: 3952298 - DNA, 25 bp, Homo sapien
tggccgctggcaactcttcccgata

SEQ ID NO: 3952299 - DNA, 25 bp, Homo sapien
ccctgatggccgctggcaactcttc

SEQ ID NO: 3952300 - DNA, 25 bp, Homo sapien
cctctcgtggcgctccagaatggca

SEQ ID NO: 3952301 - DNA, 25 bp, Homo sapien
agcgcgtgggaagccgctacgttca

SEQ ID NO: 3952302 - DNA, 25 bp, Homo sapien
ggaggactggccacggaggacgctc

SEQ ID NO: 3952303 - DNA, 25 bp, Homo sapien
tctaccaacagtccggggcttccag

SEQ ID NO: 3952304 - DNA, 25 bp, Homo sapien
tgatggggccgggtgctgggggcgg

SEQ ID NO: 3952305 - DNA, 25 bp, Homo sapien
tctgctgatggggccgggtgctggg

SEQ ID NO: 3952306 - DNA, 25 bp, Homo sapien
gctgatggggccgggtgctgggggc

SEQ ID NO: 3952307 - DNA, 25 bp, Homo sapien
ctgctgatggggccgggtgctgggg

SEQ ID NO: 3952308 - DNA, 25 bp, Homo sapien
cggaagccccgagaagagcccgagc

SEQ ID NO: 3952309 - DNA, 25 bp, Homo sapien
caatcgtctgttcgtgggccgaaag

SEQ ID NO: 3952310 - DNA, 25 bp, Homo sapien
cgcggagcttgggagcggagcccag

SEQ ID NO: 3952311 - DNA, 25 bp, Homo sapien
ggacagggaactggagcgttcctcc

SEQ ID NO: 3952312 - DNA, 25 bp, Homo sapien
gattctagccagagcgcagaagctg

SEQ ID NO: 3952313 - DNA, 25 bp, Homo sapien
taagcccggactctccaaagatttg

SEQ ID NO: 3952314 - DNA, 25 bp, Homo sapien
gaatcaagcggataggctcagccag

SEQ ID NO: 3952315 - DNA, 25 bp, Homo sapien
cgtgtattacaccaaccgggccttg

SEQ ID NO: 3952316 - DNA, 25 bp, Homo sapien
tatcgaaggctttactggcaagcag

SEQ ID NO: 3952317 - DNA, 25 bp, Homo sapien
catggcggacatggacgagcttttt

SEQ ID NO: 3952318 - DNA, 25 bp, Homo sapien
ttcacaggacaagtacatggcggac

SEQ ID NO: 3952319 - DNA, 25 bp, Homo sapien
aaccacgagggtgatgaggacgaca

SEQ ID NO: 3952320 - DNA, 25 bp, Homo sapien
aaggttgagcgtagcatgccaccag

SEQ ID NO: 3952321 - DNA, 25 bp, Homo sapien
tgccaccagcggtcggggaagtaca

SEQ ID NO: 3952322 - DNA, 25 bp, Homo sapien
ttgagcgtagcatgccaccagcggt

SEQ ID NO: 3952323 - DNA, 25 bp, Homo sapien
gtgtcaaggttgagcgtagcatgcc

SEQ ID NO: 3952324 - DNA, 25 bp, Homo sapien
tgcagcagagattagctgcgggcct

SEQ ID NO: 3952325 - DNA, 25 bp, Homo sapien
cagagattagctgcgggcctctagc

SEQ ID NO: 3952326 - DNA, 25 bp, Homo sapien
gggtgcagcagagattagctgcggg

SEQ ID NO: 3952327 - DNA, 25 bp, Homo sapien
cagcagagattagctgcgggcctct

SEQ ID NO: 3952328 - DNA, 25 bp, Homo sapien
ctgggtatgtgtcccggagccaggc

SEQ ID NO: 3952329 - DNA, 25 bp, Homo sapien
ccggatggtacactccaggggccgt

SEQ ID NO: 3952330 - DNA, 25 bp, Homo sapien
tctcaggtgggtaaaggaaccagcg

SEQ ID NO: 3952331 - DNA, 25 bp, Homo sapien
atgtgtcccggagccaggccagcgt

SEQ ID NO: 3952332 - DNA, 25 bp, Homo sapien
ttttggtcagcgagtcccaagcctc

SEQ ID NO: 3952333 - DNA, 25 bp, Homo sapien
ccttgcccgttttggtcagcgagtc

SEQ ID NO: 3952334 - DNA, 25 bp, Homo sapien
gcccgttttggtcagcgagtcccaa

SEQ ID NO: 3952335 - DNA, 25 bp, Homo sapien
tcacccttgcccgttttggtcagcg

SEQ ID NO: 3952336 - DNA, 25 bp, Homo sapien
ctgagtacccgggtccatgccagtg

SEQ ID NO: 3952337 - DNA, 25 bp, Homo sapien
cacttctgagtacccgggtccatgc

SEQ ID NO: 3952338 - DNA, 25 bp, Homo sapien
gtccatgccagtggaagggcacccc

SEQ ID NO: 3952339 - DNA, 25 bp, Homo sapien
agatcacttctgagtacccgggtcc

SEQ ID NO: 3952340 - DNA, 25 bp, Homo sapien
ccactcggtgaagttgttgtccccg

SEQ ID NO: 3952341 - DNA, 25 bp, Homo sapien
taagctggagcggttcccagcaggc

SEQ ID NO: 3952342 - DNA, 25 bp, Homo sapien
agtagtgccgaaagagagaggccca

SEQ ID NO: 3952343 - DNA, 25 bp, Homo sapien
agctgtaagctggagcggttcccag

SEQ ID NO: 3952344 - DNA, 25 bp, Homo sapien
tggagactccaagcgtccccacccc

SEQ ID NO: 3952345 - DNA, 25 bp, Homo sapien
tggcacctggagactccaagcgtcc

SEQ ID NO: 3952346 - DNA, 25 bp, Homo sapien
tcctggcacctggagactccaagcg

SEQ ID NO: 3952347 - DNA, 25 bp, Homo sapien
ctggagactccaagcgtccccaccc

SEQ ID NO: 3952348 - DNA, 25 bp, Homo sapien
acatactcctggaagggcaagtcca

SEQ ID NO: 3952349 - DNA, 25 bp, Homo sapien
agctgctccacatactcctggaagg

SEQ ID NO: 3952350 - DNA, 25 bp, Homo sapien
gctccacatactcctggaagggcaa

SEQ ID NO: 3952351 - DNA, 25 bp, Homo sapien
gctgctccacatactcctggaaggg

SEQ ID NO: 3952352 - DNA, 25 bp, Homo sapien
tgcaggaaagagacgggtcaggacc

SEQ ID NO: 3952353 - DNA, 25 bp, Homo sapien
gtgttggcaaatgggcgggccccag

SEQ ID NO: 3952354 - DNA, 25 bp, Homo sapien
ccagccgccccggtgttggcaaatg

SEQ ID NO: 3952355 - DNA, 25 bp, Homo sapien
ggtcaggaccgtctggtccagccgc

SEQ ID NO: 3952356 - DNA, 25 bp, Homo sapien
ccagcaacctgtcgcgggagcacag

SEQ ID NO: 3952357 - DNA, 25 bp, Homo sapien
taggagtaggtgttggcggtgctca

SEQ ID NO: 3952358 - DNA, 25 bp, Homo sapien
tggcggtgctcagccggaccactct

SEQ ID NO: 3952359 - DNA, 25 bp, Homo sapien
actctgtccccaaacgaagccagca

SEQ ID NO: 3952360 - DNA, 25 bp, Homo sapien
cggggacggacgggcacgcgctcac

SEQ ID NO: 3952361 - DNA, 25 bp, Homo sapien
gccggggacggacgggcacgcgctc

SEQ ID NO: 3952362 - DNA, 25 bp, Homo sapien
ccggggacggacgggcacgcgctca

SEQ ID NO: 3952363 - DNA, 25 bp, Homo sapien
cgagttgtccgtgagtccctgcagg

SEQ ID NO: 3952364 - DNA, 25 bp, Homo sapien
gatgacgggcctgacgaaggcgtac

SEQ ID NO: 3952365 - DNA, 25 bp, Homo sapien
agttgtccgtgagtccctgcaggat

SEQ ID NO: 3952366 - DNA, 25 bp, Homo sapien
aggatgacgggcctgacgaaggcgt

SEQ ID NO: 3952367 - DNA, 25 bp, Homo sapien
acctccgcgatcaggggcgcacgta

SEQ ID NO: 3952368 - DNA, 25 bp, Homo sapien
gcagacgggccggtgaacaggacgc

SEQ ID NO: 3952369 - DNA, 25 bp, Homo sapien
ggaaagaagggcagagtcgcggcca

SEQ ID NO: 3952370 - DNA, 25 bp, Homo sapien
caggacgcgacctccgcgatcaggg

SEQ ID NO: 3952371 - DNA, 25 bp, Homo sapien
tgctgcacgaactccgcgtaggtga

SEQ ID NO: 3952372 - DNA, 25 bp, Homo sapien
gacgctccaccgtgcagcgctcctc

SEQ ID NO: 3952373 - DNA, 25 bp, Homo sapien
taggtgaggtcggcccgacgctcca

SEQ ID NO: 3952374 - DNA, 25 bp, Homo sapien
cacgaactccgcgtaggtgaggtcg

SEQ ID NO: 3952375 - DNA, 25 bp, Homo sapien
cgccgcacgtgaccccaccgcccgg

SEQ ID NO: 3952376 - DNA, 25 bp, Homo sapien
ccgccgcacgtgaccccaccgcccg

SEQ ID NO: 3952377 - DNA, 25 bp, Homo sapien
gccgcacgtgaccccaccgcccggc

SEQ ID NO: 3952378 - DNA, 25 bp, Homo sapien
gcccgccgcacgtgaccccaccgcc

SEQ ID NO: 3952379 - DNA, 25 bp, Homo sapien
agagcgcgagcaaccgcgacgccgg

SEQ ID NO: 3952380 - DNA, 25 bp, Homo sapien
tccgccccggagccgggtagagcca

SEQ ID NO: 3952381 - DNA, 25 bp, Homo sapien
gagccgggtagagccacagccgcca

SEQ ID NO: 3952382 - DNA, 25 bp, Homo sapien
cccagagcgcgagcaaccgcgacgc

SEQ ID NO: 3952383 - DNA, 25 bp, Homo sapien
agcttcgtcgtcgtggcaacggccg

SEQ ID NO: 3952384 - DNA, 25 bp, Homo sapien
gactatgggcgccgccggttaccat

SEQ ID NO: 3952385 - DNA, 25 bp, Homo sapien
cggaagaggcctctacgggaggcac

SEQ ID NO: 3952386 - DNA, 25 bp, Homo sapien
ggccgccccgagagcgactatgggc

SEQ ID NO: 3952387 - DNA, 25 bp, Homo sapien
tttattgaggtctcaagttccagcc

SEQ ID NO: 3952388 - DNA, 25 bp, Homo sapien
ctctacttcctttattgaggtctca

SEQ ID NO: 3952389 - DNA, 25 bp, Homo sapien
tgaggtctcaagttccagcctccgc

SEQ ID NO: 3952390 - DNA, 25 bp, Homo sapien
ccgtctcgggcacaagaccaggcgg

SEQ ID NO: 3952391 - DNA, 25 bp, Homo sapien
tcgcagaggtggccgcagcctgcgg

SEQ ID NO: 3952392 - DNA, 25 bp, Homo sapien
ggacagtgggagctgccttccagcc

SEQ ID NO: 3952393 - DNA, 25 bp, Homo sapien
gaggtggccgcagcctgcgggacag

SEQ ID NO: 3952394 - DNA, 25 bp, Homo sapien
acagtgggagctgccttccagccac

SEQ ID NO: 3952395 - DNA, 25 bp, Homo sapien
gcagacggcacacatgctggcgcag

SEQ ID NO: 3952396 - DNA, 25 bp, Homo sapien
tgcagccctggcaccacacgaagag

SEQ ID NO: 3952397 - DNA, 25 bp, Homo sapien
cttgactacgtggtggcagacggca

SEQ ID NO: 3952398 - DNA, 25 bp, Homo sapien
acggcacacatgctggcgcagcggt

SEQ ID NO: 3952399 - DNA, 25 bp, Homo sapien
gcgggagggagggtgcctcagcggg

SEQ ID NO: 3952400 - DNA, 25 bp, Homo sapien
gagggagggtgcctcagcgggggct

SEQ ID NO: 3952401 - DNA, 25 bp, Homo sapien
gggcgggagggagggtgcctcagcg

SEQ ID NO: 3952402 - DNA, 25 bp, Homo sapien
ctgctgcgctgcctgcaggcccctg

SEQ ID NO: 3952403 - DNA, 25 bp, Homo sapien
tgctcagcttgaccacctcgttgga

SEQ ID NO: 3952404 - DNA, 25 bp, Homo sapien
cagcaggtcgatgtaggaagtgtac

SEQ ID NO: 3952405 - DNA, 25 bp, Homo sapien
tgctcatgggccgcttgcagtggct

SEQ ID NO: 3952406 - DNA, 25 bp, Homo sapien
cctcgttggacacgttccagaggcg

SEQ ID NO: 3952407 - DNA, 25 bp, Homo sapien
gagggagcgcccggcagtcaggatc

SEQ ID NO: 3952408 - DNA, 25 bp, Homo sapien
ggagcgcccggcagtcaggatctgg

SEQ ID NO: 3952409 - DNA, 25 bp, Homo sapien
gggagggagcgcccggcagtcagga

SEQ ID NO: 3952410 - DNA, 25 bp, Homo sapien
gggagcgcccggcagtcaggatctg

SEQ ID NO: 3952411 - DNA, 25 bp, Homo sapien
atctcgtggcgcagcggaaaggcct

SEQ ID NO: 3952412 - DNA, 25 bp, Homo sapien
tcgtagagcgcgtgtgagacagaca

SEQ ID NO: 3952413 - DNA, 25 bp, Homo sapien
tcgccctgctcagcgtagaagtgca

SEQ ID NO: 3952414 - DNA, 25 bp, Homo sapien
tagaagtgcagcatgtcgcgcacca

SEQ ID NO: 3952415 - DNA, 25 bp, Homo sapien
gcgcgtgttccggatccagcaggta

SEQ ID NO: 3952416 - DNA, 25 bp, Homo sapien
ggtgcgcgtgttccggatccagcag

SEQ ID NO: 3952417 - DNA, 25 bp, Homo sapien
tgcgcgtgttccggatccagcaggt

SEQ ID NO: 3952418 - DNA, 25 bp, Homo sapien
gtgcgcgtgttccggatccagcagg

SEQ ID NO: 3952419 - DNA, 25 bp, Homo sapien
tcacccagcaggtagtcggcaggta

SEQ ID NO: 3952420 - DNA, 25 bp, Homo sapien
ccagcaggtagtcggcaggtacgtc

SEQ ID NO: 3952421 - DNA, 25 bp, Homo sapien
caggtacgtcgctgccctcggtttc

SEQ ID NO: 3952422 - DNA, 25 bp, Homo sapien
ttccacgtcacccagcaggtagtcg

SEQ ID NO: 3952423 - DNA, 25 bp, Homo sapien
atgagtgtggccgaggagtcgagca

SEQ ID NO: 3952424 - DNA, 25 bp, Homo sapien
tgtcgctccgtgcatctcctttgct

SEQ ID NO: 3952425 - DNA, 25 bp, Homo sapien
ccgaggagtcgagcagaactgtgtc

SEQ ID NO: 3952426 - DNA, 25 bp, Homo sapien
aaccctggggccatatccttcaggt

SEQ ID NO: 3952427 - DNA, 25 bp, Homo sapien
gcaggaagggcccatgggtgggtgg

SEQ ID NO: 3952428 - DNA, 25 bp, Homo sapien
ggtgggtgggctcgagcagccccag

SEQ ID NO: 3952429 - DNA, 25 bp, Homo sapien
gggcccatgggtgggtgggctcgag

SEQ ID NO: 3952430 - DNA, 25 bp, Homo sapien
ctggggagagctgcccccggcatct

SEQ ID NO: 3952431 - DNA, 25 bp, Homo sapien
gctgcagtagatgatccgcagcatg

SEQ ID NO: 3952432 - DNA, 25 bp, Homo sapien
gcagcatggtccacgtttgcgccac

SEQ ID NO: 3952433 - DNA, 25 bp, Homo sapien
gtagatgatccgcagcatggtccac

SEQ ID NO: 3952434 - DNA, 25 bp, Homo sapien
gatccgcagcatggtccacgtttgc

SEQ ID NO: 3952435 - DNA, 25 bp, Homo sapien
gcatgggaacggcagctcacggctc

SEQ ID NO: 3952436 - DNA, 25 bp, Homo sapien
cctcagctaccaaggcaaggcctgt

SEQ ID NO: 3952437 - DNA, 25 bp, Homo sapien
agaacagagagcttgagccacacga

SEQ ID NO: 3952438 - DNA, 25 bp, Homo sapien
actggtcacttgtgggcgtcctgga

SEQ ID NO: 3952439 - DNA, 25 bp, Homo sapien
gcaattcccgtggtgacgtctcggt

SEQ ID NO: 3952440 - DNA, 25 bp, Homo sapien
gcagggtccagcttgcgcttaaaga

SEQ ID NO: 3952441 - DNA, 25 bp, Homo sapien
ggcgcacgtcccaaacatagatgtt

SEQ ID NO: 3952442 - DNA, 25 bp, Homo sapien
gaggcgatggtctgcacacagtgca

SEQ ID NO: 3952443 - DNA, 25 bp, Homo sapien
cattgccgttctcaaaggtggaggc

SEQ ID NO: 3952444 - DNA, 25 bp, Homo sapien
tgggctgtgaacatcctctcgcacc

SEQ ID NO: 3952445 - DNA, 25 bp, Homo sapien
agtcgcagcagaagacgggtccgtt

SEQ ID NO: 3952446 - DNA, 25 bp, Homo sapien
gcgaaggtgaagtagtcccggatac

SEQ ID NO: 3952447 - DNA, 25 bp, Homo sapien
agggtagagtggacatccccaagat

SEQ ID NO: 3952448 - DNA, 25 bp, Homo sapien
tgggagaataggaacgcacccagcc

SEQ ID NO: 3952449 - DNA, 25 bp, Homo sapien
tttgccgtagattctgcatcctgca

SEQ ID NO: 3952450 - DNA, 25 bp, Homo sapien
ctgcatcggtccatgagcaaagctg

SEQ ID NO: 3952451 - DNA, 25 bp, Homo sapien
ctcaggatgcggcagctgagcactg

SEQ ID NO: 3952452 - DNA, 25 bp, Homo sapien
cactgagcagcacgtgggcttcggt

SEQ ID NO: 3952453 - DNA, 25 bp, Homo sapien
gaactgttcctcctcgatggcatag

SEQ ID NO: 3952454 - DNA, 25 bp, Homo sapien
ctcaggttaagcgaaggcttgcgcc

SEQ ID NO: 3952455 - DNA, 25 bp, Homo sapien
actgatggcattggcgggagcatcc

SEQ ID NO: 3952456 - DNA, 25 bp, Homo sapien
tcagtcttagtgagccaatccaggg

SEQ ID NO: 3952457 - DNA, 25 bp, Homo sapien
cagcctgggtgggtcatcagttcag

SEQ ID NO: 3952458 - DNA, 25 bp, Homo sapien
cttggtcccgggctggtcagtctta

SEQ ID NO: 3952459 - DNA, 25 bp, Homo sapien
ttccacggaagactctagctggaca

SEQ ID NO: 3952460 - DNA, 25 bp, Homo sapien
taaacgctcggtcagtcaatcccag

SEQ ID NO: 3952461 - DNA, 25 bp, Homo sapien
ggagcgaggagactcccgccgtcca

SEQ ID NO: 3952462 - DNA, 25 bp, Homo sapien
gtcactaaacgctcggtcagtcaat

SEQ ID NO: 3952463 - DNA, 25 bp, Homo sapien
ctgggcagtcactaaacgctcggtc

SEQ ID NO: 3952464 - DNA, 25 bp, Homo sapien
gggactcaggcgatagacgcgggaa

SEQ ID NO: 3952465 - DNA, 25 bp, Homo sapien
tcaaggaccgagctacttaaggagc

SEQ ID NO: 3952466 - DNA, 25 bp, Homo sapien
acgctgcgggacgagaaccagaggg

SEQ ID NO: 3952467 - DNA, 25 bp, Homo sapien
agaagccggcgaccccggagtacag

SEQ ID NO: 3952468 - DNA, 25 bp, Homo sapien
gctgtctttcccgtccctcgccgga

SEQ ID NO: 3952469 - DNA, 25 bp, Homo sapien
tccctcgccggaagtggtcctcttc

SEQ ID NO: 3952470 - DNA, 25 bp, Homo sapien
cgtccctcgccggaagtggtcctct

SEQ ID NO: 3952471 - DNA, 25 bp, Homo sapien
gccgctgtctttcccgtccctcgcc

SEQ ID NO: 3952472 - DNA, 25 bp, Homo sapien
tcttccaaccagatagggagtgtcc

SEQ ID NO: 3952473 - DNA, 25 bp, Homo sapien
gttaatgactccaagcgatcgccag

SEQ ID NO: 3952474 - DNA, 25 bp, Homo sapien
tactttgggcaaatggacagctgcc

SEQ ID NO: 3952475 - DNA, 25 bp, Homo sapien
tacagctcgaggcttgcaaggtgcc

SEQ ID NO: 3952476 - DNA, 25 bp, Homo sapien
aaatacttgaagagctcgggggtgg

SEQ ID NO: 3952477 - DNA, 25 bp, Homo sapien
ggcaggtgctgcgagaaatacttga

SEQ ID NO: 3952478 - DNA, 25 bp, Homo sapien
caccaggcccgacagcccggtggtg

SEQ ID NO: 3952479 - DNA, 25 bp, Homo sapien
tgcaccaggcccgacagcccggtgg

SEQ ID NO: 3952480 - DNA, 25 bp, Homo sapien
gtcactgccagcgtcagagcagaaa

SEQ ID NO: 3952481 - DNA, 25 bp, Homo sapien
tgtgagtttgcacaaggaccgggca

SEQ ID NO: 3952482 - DNA, 25 bp, Homo sapien
cctcggacccgggactgtgtgtccg

SEQ ID NO: 3952483 - DNA, 25 bp, Homo sapien
caggttgggcgggtggactaagtgg

SEQ ID NO: 3952484 - DNA, 25 bp, Homo sapien
agacaggaggcgcaaactccccagg

SEQ ID NO: 3952485 - DNA, 25 bp, Homo sapien
aggaggcgcaaactccccagggcca

SEQ ID NO: 3952486 - DNA, 25 bp, Homo sapien
caggaggtgcttcagcccgaagtct

SEQ ID NO: 3952487 - DNA, 25 bp, Homo sapien
ggaggtgcttcagcccgaagtcttg

SEQ ID NO: 3952488 - DNA, 25 bp, Homo sapien
catcgcaggtagaggctgcggaggg

SEQ ID NO: 3952489 - DNA, 25 bp, Homo sapien
cgcaggtagaggctgcggagggacg

SEQ ID NO: 3952490 - DNA, 25 bp, Homo sapien
accatcgcaggtagaggctgcggag

SEQ ID NO: 3952491 - DNA, 25 bp, Homo sapien
caggtagaggctgcggagggacgac

SEQ ID NO: 3952492 - DNA, 25 bp, Homo sapien
gccagtgtccgtgatgcgtacacac

SEQ ID NO: 3952493 - DNA, 25 bp, Homo sapien
tgggagtgcccctggcgtgaatccc

SEQ ID NO: 3952494 - DNA, 25 bp, Homo sapien
ccaacccgtgctgcggttctgcggt

SEQ ID NO: 3952495 - DNA, 25 bp, Homo sapien
ggccatccctcgtcttcctgggagt

SEQ ID NO: 3952496 - DNA, 25 bp, Homo sapien
ctgtggttgcaccagaggggacccc

SEQ ID NO: 3952497 - DNA, 25 bp, Homo sapien
tcgtcggccacgttgatgcagtcac

SEQ ID NO: 3952498 - DNA, 25 bp, Homo sapien
tgcagtcactcacgctcagcgaggt

SEQ ID NO: 3952499 - DNA, 25 bp, Homo sapien
ggtgaagtcgttgcagcccgacagc

SEQ ID NO: 3952500 - DNA, 25 bp, Homo sapien
ccatgtcggtgatgcgtgggcacca

SEQ ID NO: 3952501 - DNA, 25 bp, Homo sapien
cgccgggtcaggattgcaggagaag

SEQ ID NO: 3952502 - DNA, 25 bp, Homo sapien
ggcgggcgccgggtcaggattgcag

SEQ ID NO: 3952503 - DNA, 25 bp, Homo sapien
gtggagcccgcagggaggaagcagt

SEQ ID NO: 3952504 - DNA, 25 bp, Homo sapien
aagcagtagggtgtaaacatgcagg

SEQ ID NO: 3952505 - DNA, 25 bp, Homo sapien
tcacagatgtccaggtcggagacgc

SEQ ID NO: 3952506 - DNA, 25 bp, Homo sapien
caccagaccgtttcgaggcaagcat

SEQ ID NO: 3952507 - DNA, 25 bp, Homo sapien
ccttcttggagagcgcatagttgtc

SEQ ID NO: 3952508 - DNA, 25 bp, Homo sapien
tgaggatcttctcgtccgtggccag

SEQ ID NO: 3952509 - DNA, 25 bp, Homo sapien
gccctcgtggctgagaacccagctt

SEQ ID NO: 3952510 - DNA, 25 bp, Homo sapien
catcacaacgtttgcaagggccggc

SEQ ID NO: 3952511 - DNA, 25 bp, Homo sapien
tcgccagaacacgtggccctcgtgg

SEQ ID NO: 3952512 - DNA, 25 bp, Homo sapien
agtatcattcgggtcctggaaggtg

SEQ ID NO: 3952513 - DNA, 25 bp, Homo sapien
tccccgccagggacgcctgggcctc

SEQ ID NO: 3952514 - DNA, 25 bp, Homo sapien
cccgccagggacgcctgggcctccg

SEQ ID NO: 3952515 - DNA, 25 bp, Homo sapien
gccagggacgcctgggcctccgcag

SEQ ID NO: 3952516 - DNA, 25 bp, Homo sapien
cgccagggacgcctgggcctccgca

SEQ ID NO: 3952517 - DNA, 25 bp, Homo sapien
ctcagcgcccccagtttgaaggtct

SEQ ID NO: 3952518 - DNA, 25 bp, Homo sapien
tcagcgcccccagtttgaaggtctc

SEQ ID NO: 3952519 - DNA, 25 bp, Homo sapien
cagcgcccccagtttgaaggtctct

SEQ ID NO: 3952520 - DNA, 25 bp, Homo sapien
gcgcccccagtttgaaggtctcttc

SEQ ID NO: 3952521 - DNA, 25 bp, Homo sapien
gggtcttcgggtggctgaacagtgc

SEQ ID NO: 3952522 - DNA, 25 bp, Homo sapien
cactgccaatccagtcatgggaggc

SEQ ID NO: 3952523 - DNA, 25 bp, Homo sapien
ccttcactgccaatccagtcatggg

SEQ ID NO: 3952524 - DNA, 25 bp, Homo sapien
cagtgggtgcccacatgcaaggaga

SEQ ID NO: 3952525 - DNA, 25 bp, Homo sapien
catgcagtttaacggtctctggcct

SEQ ID NO: 3952526 - DNA, 25 bp, Homo sapien
tcccgcgggcagtagctcagcgcag

SEQ ID NO: 3952527 - DNA, 25 bp, Homo sapien
tttcggcgtcccaggaggcacggac

SEQ ID NO: 3952528 - DNA, 25 bp, Homo sapien
ctctggcctgtcacttcggtccggg

SEQ ID NO: 3952529 - DNA, 25 bp, Homo sapien
tggctcatgccacgctgtccgccgg

SEQ ID NO: 3952530 - DNA, 25 bp, Homo sapien
ccgccgggcgacctcccgtcatggg

SEQ ID NO: 3952531 - DNA, 25 bp, Homo sapien
tgtccgccgggcgacctcccgtcat

SEQ ID NO: 3952532 - DNA, 25 bp, Homo sapien
ctcctggctcatgccacgctgtccg

SEQ ID NO: 3952533 - DNA, 25 bp, Homo sapien
ggggccgccggggtgctggactggc

SEQ ID NO: 3952534 - DNA, 25 bp, Homo sapien
tgcgccccgcgtcccgtcctggccg

SEQ ID NO: 3952535 - DNA, 25 bp, Homo sapien
ccctgcgccccgcgtcccgtcctgg

SEQ ID NO: 3952536 - DNA, 25 bp, Homo sapien
ctgcgccccgcgtcccgtcctggcc

SEQ ID NO: 3952537 - DNA, 25 bp, Homo sapien
tttgcagggaaccaggcgggcgcct

SEQ ID NO: 3952538 - DNA, 25 bp, Homo sapien
ctgtgcccagataaataaggccgct

SEQ ID NO: 3952539 - DNA, 25 bp, Homo sapien
ctccccggtgggagaggatcggccg

SEQ ID NO: 3952540 - DNA, 25 bp, Homo sapien
taaataaggccgctttgcagggaac

SEQ ID NO: 3952541 - DNA, 25 bp, Homo sapien
aacctatctgggtgtctccggtgca

SEQ ID NO: 3952542 - DNA, 25 bp, Homo sapien
gatactgaccaaagaaggtgcccgg

SEQ ID NO: 3952543 - DNA, 25 bp, Homo sapien
gctcttctgcgtaagtcttgcccgg

SEQ ID NO: 3952544 - DNA, 25 bp, Homo sapien
tcttgcccggtacctggatactgac

SEQ ID NO: 3952545 - DNA, 25 bp, Homo sapien
tgtccccagcgggttgttcggcact

SEQ ID NO: 3952546 - DNA, 25 bp, Homo sapien
tgacagctgctattctgtgcccggc

SEQ ID NO: 3952547 - DNA, 25 bp, Homo sapien
tcatggcaaatgcagcactggtgtc

SEQ ID NO: 3952548 - DNA, 25 bp, Homo sapien
tggtttactcgaagttctgtctgcc

SEQ ID NO: 3952549 - DNA, 25 bp, Homo sapien
gctgcattggcaccggatccccgga

SEQ ID NO: 3952550 - DNA, 25 bp, Homo sapien
gtggctgcattggcaccggatcccc

SEQ ID NO: 3952551 - DNA, 25 bp, Homo sapien
gctgtgaggaaaaggggtgtgtgtc

SEQ ID NO: 3952552 - DNA, 25 bp, Homo sapien
tgtgaggaaaaggggtgtgtgtcca

SEQ ID NO: 3952553 - DNA, 25 bp, Homo sapien
gtggctgcagcggccgacccgtgtg

SEQ ID NO: 3952554 - DNA, 25 bp, Homo sapien
gctgcagcggccgacccgtgtgcct

SEQ ID NO: 3952555 - DNA, 25 bp, Homo sapien
tgggtggctgcagcggccgacccgt

SEQ ID NO: 3952556 - DNA, 25 bp, Homo sapien
tgcagcggccgacccgtgtgcctct

SEQ ID NO: 3952557 - DNA, 25 bp, Homo sapien
gcatgcaccagcgacttcggtgagt

SEQ ID NO: 3952558 - DNA, 25 bp, Homo sapien
cacagtaattcacgggatcatccat

SEQ ID NO: 3952559 - DNA, 25 bp, Homo sapien
gagctgcaggagtctgtcatcactg

SEQ ID NO: 3952560 - DNA, 25 bp, Homo sapien
gctgtgccccacgattccaggagtt

SEQ ID NO: 3952561 - DNA, 25 bp, Homo sapien
agacggcctagtggctgccggtcct

SEQ ID NO: 3952562 - DNA, 25 bp, Homo sapien
cctgactcatgttttatggggggct

SEQ ID NO: 3952563 - DNA, 25 bp, Homo sapien
tatcctgactcatgttttatggggg

SEQ ID NO: 3952564 - DNA, 25 bp, Homo sapien
tctgctccttgggagacggcctagt

SEQ ID NO: 3952565 - DNA, 25 bp, Homo sapien
acaggtctgcttttagcgcctgagg

SEQ ID NO: 3952566 - DNA, 25 bp, Homo sapien
tgcttttagcgcctgaggcagccat

SEQ ID NO: 3952567 - DNA, 25 bp, Homo sapien
tcagaggaaccatgcttaagtgact

SEQ ID NO: 3952568 - DNA, 25 bp, Homo sapien
cagaggaaccatgcttaagtgactt

SEQ ID NO: 3952569 - DNA, 25 bp, Homo sapien
tgctcttcagccatcgtggcccgga

SEQ ID NO: 3952570 - DNA, 25 bp, Homo sapien
tagctcagaaagttgctcttcagcc

SEQ ID NO: 3952571 - DNA, 25 bp, Homo sapien
ttgctcttcagccatcgtggcccgg

SEQ ID NO: 3952572 - DNA, 25 bp, Homo sapien
tcctgtagctcagaaagttgctctt

SEQ ID NO: 3952573 - DNA, 25 bp, Homo sapien
ctggcatggggatgtaagccatgag

SEQ ID NO: 3952574 - DNA, 25 bp, Homo sapien
gggcatggcgtgaggatgggcctgg

SEQ ID NO: 3952575 - DNA, 25 bp, Homo sapien
ctggggcatggcgtgaggatgggcc

SEQ ID NO: 3952576 - DNA, 25 bp, Homo sapien
tggggcatggcgtgaggatgggcct

SEQ ID NO: 3952577 - DNA, 25 bp, Homo sapien
ggggcatggcgtgaggatgggcctg

SEQ ID NO: 3952578 - DNA, 25 bp, Homo sapien
ggcccaggatgcagcgtccaggccc

SEQ ID NO: 3952579 - DNA, 25 bp, Homo sapien
gggcccaggatgcagcgtccaggcc

SEQ ID NO: 3952580 - DNA, 25 bp, Homo sapien
tgcgggagaagtcccggagcttctg

SEQ ID NO: 3952581 - DNA, 25 bp, Homo sapien
tgatcctccgtgttcaaggccagct

SEQ ID NO: 3952582 - DNA, 25 bp, Homo sapien
cattgtacagctgggaacatggagg

SEQ ID NO: 3952583 - DNA, 25 bp, Homo sapien
gccatccgtgtatagggacagcccg

SEQ ID NO: 3952584 - DNA, 25 bp, Homo sapien
tgtgattatcagtgtcgccgggacc

SEQ ID NO: 3952585 - DNA, 25 bp, Homo sapien
ctgggaggctccaccgggtctcttt

SEQ ID NO: 3952586 - DNA, 25 bp, Homo sapien
ggtctcttttttggggatgagagca

SEQ ID NO: 3952587 - DNA, 25 bp, Homo sapien
tcttttttggggatgagagcagtgc

SEQ ID NO: 3952588 - DNA, 25 bp, Homo sapien
tgtggctctgatgttcccccctggg

SEQ ID NO: 3952589 - DNA, 25 bp, Homo sapien
gagcttctgggggtctctagcctca

SEQ ID NO: 3952590 - DNA, 25 bp, Homo sapien
tcagttggctgaacaaggcaagccc

SEQ ID NO: 3952591 - DNA, 25 bp, Homo sapien
ttggctgaacaaggcaagcccctca

SEQ ID NO: 3952592 - DNA, 25 bp, Homo sapien
tgaacaaggcaagcccctcagaggc

SEQ ID NO: 3952593 - DNA, 25 bp, Homo sapien
agctggctatgtcaaaaatagcttg

SEQ ID NO: 3952594 - DNA, 25 bp, Homo sapien
tcccgatggctgaagtcagtgacca

SEQ ID NO: 3952595 - DNA, 25 bp, Homo sapien
ggttccaggtccaagctggctatgt

SEQ ID NO: 3952596 - DNA, 25 bp, Homo sapien
caggggcacgggcaatggttccagg

SEQ ID NO: 3952597 - DNA, 25 bp, Homo sapien
taggctagtgtctgtctggggccac

SEQ ID NO: 3952598 - DNA, 25 bp, Homo sapien
tgtcagggtaggctagtgtctgtct

SEQ ID NO: 3952599 - DNA, 25 bp, Homo sapien
ctgtcagggtaggctagtgtctgtc

SEQ ID NO: 3952600 - DNA, 25 bp, Homo sapien
ctagtgtctgtctggggccactcct

SEQ ID NO: 3952601 - DNA, 25 bp, Homo sapien
cctccaggaatgtccggagggccgt

SEQ ID NO: 3952602 - DNA, 25 bp, Homo sapien
cagctgctgctcacggctgcggtgc

SEQ ID NO: 3952603 - DNA, 25 bp, Homo sapien
gctcttcatgcctgcggctcagatc

SEQ ID NO: 3952604 - DNA, 25 bp, Homo sapien
tgtaggcaaccagtagctcttcatg

SEQ ID NO: 3952605 - DNA, 25 bp, Homo sapien
ggcttgggctccctaggcctcaggg

SEQ ID NO: 3952606 - DNA, 25 bp, Homo sapien
caggcttgggctccctaggcctcag

SEQ ID NO: 3952607 - DNA, 25 bp, Homo sapien
ctgaagctatccagcacacccaggc

SEQ ID NO: 3952608 - DNA, 25 bp, Homo sapien
cctgaagctatccagcacacccagg

SEQ ID NO: 3952609 - DNA, 25 bp, Homo sapien
gtgttgcagccgtaggacgtactca

SEQ ID NO: 3952610 - DNA, 25 bp, Homo sapien
agccgtaggacgtactcatccttca

SEQ ID NO: 3952611 - DNA, 25 bp, Homo sapien
cctctgcctgacggagctggccttg

SEQ ID NO: 3952612 - DNA, 25 bp, Homo sapien
caggcgcagtgttgcagccgtagga

SEQ ID NO: 3952613 - DNA, 25 bp, Homo sapien
ctccaggtctccaagcagtcagggc

SEQ ID NO: 3952614 - DNA, 25 bp, Homo sapien
ctgccctggcctcctctcgggctcc

SEQ ID NO: 3952615 - DNA, 25 bp, Homo sapien
ctgtgtggccagtcgctgcccggct

SEQ ID NO: 3952616 - DNA, 25 bp, Homo sapien
cacagcctgtgtggccagtcgctgc

SEQ ID NO: 3952617 - DNA, 25 bp, Homo sapien
tgtggccagtcgctgcccggctgcc

SEQ ID NO: 3952618 - DNA, 25 bp, Homo sapien
gctcagcaggcccacgatcaggggt

SEQ ID NO: 3952619 - DNA, 25 bp, Homo sapien
ggctcagcaggcccacgatcagggg

SEQ ID NO: 3952620 - DNA, 25 bp, Homo sapien
tcagcaggcccacgatcaggggttc

SEQ ID NO: 3952621 - DNA, 25 bp, Homo sapien
agcaggcccacgatcaggggttctc

SEQ ID NO: 3952622 - DNA, 25 bp, Homo sapien
cctcctgatgctccagcgcccactt

SEQ ID NO: 3952623 - DNA, 25 bp, Homo sapien
tcctgatgctccagcgcccacttca

SEQ ID NO: 3952624 - DNA, 25 bp, Homo sapien
ctcctgatgctccagcgcccacttc

SEQ ID NO: 3952625 - DNA, 25 bp, Homo sapien
ccagcgcccacttcacttccccctg

SEQ ID NO: 3952626 - DNA, 25 bp, Homo sapien
tgagaccctaggcttggggtctctg

SEQ ID NO: 3952627 - DNA, 25 bp, Homo sapien
ggctggctggatgagaccctaggct

SEQ ID NO: 3952628 - DNA, 25 bp, Homo sapien
gatgagaccctaggcttggggtctc

SEQ ID NO: 3952629 - DNA, 25 bp, Homo sapien
ctggctggatgagaccctaggcttg

SEQ ID NO: 3952630 - DNA, 25 bp, Homo sapien
gtgctgctcattctcggggttcatg

SEQ ID NO: 3952631 - DNA, 25 bp, Homo sapien
cctgtgctgctcattctcggggttc

SEQ ID NO: 3952632 - DNA, 25 bp, Homo sapien
cccagcctgtgctgctcattctcgg

SEQ ID NO: 3952633 - DNA, 25 bp, Homo sapien
ccagcctgtgctgctcattctcggg

SEQ ID NO: 3952634 - DNA, 25 bp, Homo sapien
gtgggtgagccccagtttcactgag

SEQ ID NO: 3952635 - DNA, 25 bp, Homo sapien
caggctctccatatgctcatggtaa

SEQ ID NO: 3952636 - DNA, 25 bp, Homo sapien
gtttcactgaggcccctgctgaggc

SEQ ID NO: 3952637 - DNA, 25 bp, Homo sapien
tgaggcttccctctggcctttccca

SEQ ID NO: 3952638 - DNA, 25 bp, Homo sapien
ctggaatctgtggtcatcagagtgt

SEQ ID NO: 3952639 - DNA, 25 bp, Homo sapien
ggaatctgtggtcatcagagtgtcc

SEQ ID NO: 3952640 - DNA, 25 bp, Homo sapien
aatctgtggtcatcagagtgtccag

SEQ ID NO: 3952641 - DNA, 25 bp, Homo sapien
ctgtggtcatcagagtgtccaggca

SEQ ID NO: 3952642 - DNA, 25 bp, Homo sapien
gggtcagactccactgggactgcac

SEQ ID NO: 3952643 - DNA, 25 bp, Homo sapien
ggtcagactccactgggactgcaca

SEQ ID NO: 3952644 - DNA, 25 bp, Homo sapien
tggggtcagactccactgggactgc

SEQ ID NO: 3952645 - DNA, 25 bp, Homo sapien
ctggggtcagactccactgggactg

SEQ ID NO: 3952646 - DNA, 25 bp, Homo sapien
gcaggtgcacctgcccgcgggccac

SEQ ID NO: 3952647 - DNA, 25 bp, Homo sapien
ctgtgggacaactggcatgagcagg

SEQ ID NO: 3952648 - DNA, 25 bp, Homo sapien
tgtgggacaactggcatgagcaggt

SEQ ID NO: 3952649 - DNA, 25 bp, Homo sapien
atgagcaggtgcacctgcccgcggg

SEQ ID NO: 3952650 - DNA, 25 bp, Homo sapien
tgcccatgcagggcacgtgtcctgg

SEQ ID NO: 3952651 - DNA, 25 bp, Homo sapien
gggtaggtgaacattcacccggtgc

SEQ ID NO: 3952652 - DNA, 25 bp, Homo sapien
ggtaggtgaacattcacccggtgca

SEQ ID NO: 3952653 - DNA, 25 bp, Homo sapien
tgatctgaatgtcgaccagctcctt

SEQ ID NO: 3952654 - DNA, 25 bp, Homo sapien
tgtgatctgaatgtcgaccagctcc

SEQ ID NO: 3952655 - DNA, 25 bp, Homo sapien
gtgatctgaatgtcgaccagctcct

SEQ ID NO: 3952656 - DNA, 25 bp, Homo sapien
gatctgaatgtcgaccagctccttg

SEQ ID NO: 3952657 - DNA, 25 bp, Homo sapien
gccagtccttggctcgtagcacaac

SEQ ID NO: 3952658 - DNA, 25 bp, Homo sapien
tagatctggtgggacctctgcttcc

SEQ ID NO: 3952659 - DNA, 25 bp, Homo sapien
tattgagcgctagatctggtgggac

SEQ ID NO: 3952660 - DNA, 25 bp, Homo sapien
gctccttattgagcgctagatctgg

SEQ ID NO: 3952661 - DNA, 25 bp, Homo sapien
tgcctggctgagctgtaaaagtccc

SEQ ID NO: 3952662 - DNA, 25 bp, Homo sapien
tgagctgtaaaagtccctctcctgg

SEQ ID NO: 3952663 - DNA, 25 bp, Homo sapien
ggaacgggcagacttcaaccccatg

SEQ ID NO: 3952664 - DNA, 25 bp, Homo sapien
aaccccatggcaggagcggcaagtc

SEQ ID NO: 3952665 - DNA, 25 bp, Homo sapien
tctccacccgccgagagggaggtcc

SEQ ID NO: 3952666 - DNA, 25 bp, Homo sapien
cacccgccgagagggaggtccaggc

SEQ ID NO: 3952667 - DNA, 25 bp, Homo sapien
tccacccgccgagagggaggtccag

SEQ ID NO: 3952668 - DNA, 25 bp, Homo sapien
attctccacccgccgagagggaggt

SEQ ID NO: 3952669 - DNA, 25 bp, Homo sapien
tccgagcccggtgctgcctccacgc

SEQ ID NO: 3952670 - DNA, 25 bp, Homo sapien
ctggccagctccgagcccggtgctg

SEQ ID NO: 3952671 - DNA, 25 bp, Homo sapien
cagctccgagcccggtgctgcctcc

SEQ ID NO: 3952672 - DNA, 25 bp, Homo sapien
ctccacgcccggcttccccatggct

SEQ ID NO: 3952673 - DNA, 25 bp, Homo sapien
tgcagatggaaccaggtgcgtgaaa

SEQ ID NO: 3952674 - DNA, 25 bp, Homo sapien
agcggacgagcacgcggaacggagc

SEQ ID NO: 3952675 - DNA, 25 bp, Homo sapien
caggtgcgtgaaagcgcccagcctg

SEQ ID NO: 3952676 - DNA, 25 bp, Homo sapien
gagctacactcgctggacaccttct

SEQ ID NO: 3952677 - DNA, 25 bp, Homo sapien
gggacgggggaagtatatctctgca

SEQ ID NO: 3952678 - DNA, 25 bp, Homo sapien
cgggacgggggaagtatatctctgc

SEQ ID NO: 3952679 - DNA, 25 bp, Homo sapien
ccgggacgggggaagtatatctctg

SEQ ID NO: 3952680 - DNA, 25 bp, Homo sapien
ggacgggggaagtatatctctgcac

SEQ ID NO: 3952681 - DNA, 25 bp, Homo sapien
gacgtccccatcaggggccggagaa

SEQ ID NO: 3952682 - DNA, 25 bp, Homo sapien
catcaggggccggagaactcggaaa

SEQ ID NO: 3952683 - DNA, 25 bp, Homo sapien
ctcggaaacgactggctcagccggg

SEQ ID NO: 3952684 - DNA, 25 bp, Homo sapien
ccggagaactcggaaacgactggct

SEQ ID NO: 3952685 - DNA, 25 bp, Homo sapien
ttgtggtctcatcgcgcgcaggatc

SEQ ID NO: 3952686 - DNA, 25 bp, Homo sapien
gggccttgtggtctcatcgcgcgca

SEQ ID NO: 3952687 - DNA, 25 bp, Homo sapien
cgccggcgggccttgtggtctcatc

SEQ ID NO: 3952688 - DNA, 25 bp, Homo sapien
ccggcgggccttgtggtctcatcgc

SEQ ID NO: 3952689 - DNA, 25 bp, Homo sapien
ttcggggccatccacgtgcgttgcc

SEQ ID NO: 3952690 - DNA, 25 bp, Homo sapien
aaacccggagctggcgcggcttcgt

SEQ ID NO: 3952691 - DNA, 25 bp, Homo sapien
tgctgggcgcggacgagcgcatctt

SEQ ID NO: 3952692 - DNA, 25 bp, Homo sapien
gcatcttctcgctgacgcgcaggct

SEQ ID NO: 3952693 - DNA, 25 bp, Homo sapien
agccggtgcgcaagttcacgggcaa

SEQ ID NO: 3952694 - DNA, 25 bp, Homo sapien
caacctggtgcttcccgggtggaca

SEQ ID NO: 3952695 - DNA, 25 bp, Homo sapien
tgctcattaagtgcctgcctgcccg

SEQ ID NO: 3952696 - DNA, 25 bp, Homo sapien
catgagggccacctctggaaccttc

SEQ ID NO: 3952697 - DNA, 25 bp, Homo sapien
gctgcttcgtacttggcttgccccg

SEQ ID NO: 3952698 - DNA, 25 bp, Homo sapien
gggtgagaacccgtcttgctctgcc

SEQ ID NO: 3952699 - DNA, 25 bp, Homo sapien
ttattagacaaacgctgggagacag

SEQ ID NO: 3952700 - DNA, 25 bp, Homo sapien
ggctagtcctagctcctactcgggt

SEQ ID NO: 3952701 - DNA, 25 bp, Homo sapien
atgccgtacagtctctccacgtgct

SEQ ID NO: 3952702 - DNA, 25 bp, Homo sapien
tccacggcgtggtactgcgtatgca

SEQ ID NO: 3952703 - DNA, 25 bp, Homo sapien
ccctgcagccagtgtgtgtacagct

SEQ ID NO: 3952704 - DNA, 25 bp, Homo sapien
agcaagcgacctgcacactccgagt

SEQ ID NO: 3952705 - DNA, 25 bp, Homo sapien
gggtcctcgtgtcctgtcccttgca

SEQ ID NO: 3952706 - DNA, 25 bp, Homo sapien
ggggtcctcgtgtcctgtcccttgc

SEQ ID NO: 3952707 - DNA, 25 bp, Homo sapien
cagggaggtgaccgggccccctctg

SEQ ID NO: 3952708 - DNA, 25 bp, Homo sapien
aggggtcctcgtgtcctgtcccttg

SEQ ID NO: 3952709 - DNA, 25 bp, Homo sapien
ccatgacctccacgtagtggtaggg

SEQ ID NO: 3952710 - DNA, 25 bp, Homo sapien
gccattgcgaagtgcagcagcacct

SEQ ID NO: 3952711 - DNA, 25 bp, Homo sapien
gggcagcgccctcgtttgagcctct

SEQ ID NO: 3952712 - DNA, 25 bp, Homo sapien
ctggatgttgcggaagccgtacgcc

SEQ ID NO: 3952713 - DNA, 25 bp, Homo sapien
gggtttgtctacatggcacacccac

SEQ ID NO: 3952714 - DNA, 25 bp, Homo sapien
cctggagtgcttaggtgccttcaca

SEQ ID NO: 3952715 - DNA, 25 bp, Homo sapien
aaggctcacttccttgagtccagca

SEQ ID NO: 3952716 - DNA, 25 bp, Homo sapien
atgaccgggtacctcccagggctct

SEQ ID NO: 3952717 - DNA, 25 bp, Homo sapien
cctccccgatggctggtgggctcct

SEQ ID NO: 3952718 - DNA, 25 bp, Homo sapien
tttgtaggtaacctcagccacatgg

SEQ ID NO: 3952719 - DNA, 25 bp, Homo sapien
cgtgccggaacacgtgctccaggta

SEQ ID NO: 3952720 - DNA, 25 bp, Homo sapien
attccaaagagctctcgggccgcgt

SEQ ID NO: 3952721 - DNA, 25 bp, Homo sapien
gaggaacagctcctgtgtcaccagc

SEQ ID NO: 3952722 - DNA, 25 bp, Homo sapien
tcctcagaggcagcgttagaagcta

SEQ ID NO: 3952723 - DNA, 25 bp, Homo sapien
cacatgagcgtttgcatttccaggt

SEQ ID NO: 3952724 - DNA, 25 bp, Homo sapien
ttctgtggacgccaagatgggctgc

SEQ ID NO: 3952725 - DNA, 25 bp, Homo sapien
gctggttccaggtcggggagggaga

SEQ ID NO: 3952726 - DNA, 25 bp, Homo sapien
aggctgtccagaggggctggttcca

SEQ ID NO: 3952727 - DNA, 25 bp, Homo sapien
cttcctccagcaacctgaaaacttc

SEQ ID NO: 3952728 - DNA, 25 bp, Homo sapien
tcctccagcaacctgaaaacttctc

SEQ ID NO: 3952729 - DNA, 25 bp, Homo sapien
tgcaaagaagccacagcgcagacac

SEQ ID NO: 3952730 - DNA, 25 bp, Homo sapien
gcaaagaagccacagcgcagacact

SEQ ID NO: 3952731 - DNA, 25 bp, Homo sapien
ctgcaaagaagccacagcgcagaca

SEQ ID NO: 3952732 - DNA, 25 bp, Homo sapien
gagacgaaggtacgtgcacgcatgc

SEQ ID NO: 3952733 - DNA, 25 bp, Homo sapien
aatcagaccaggaggcttgagggct

SEQ ID NO: 3952734 - DNA, 25 bp, Homo sapien
actcatgggagctgaagaggctgca

SEQ ID NO: 3952735 - DNA, 25 bp, Homo sapien
caacaaggaggtattactgagcgcc

SEQ ID NO: 3952736 - DNA, 25 bp, Homo sapien
agtccacatcccgtgtctggtgctc

SEQ ID NO: 3952737 - DNA, 25 bp, Homo sapien
tgctcctggttgaaaaagtcgggtc

SEQ ID NO: 3952738 - DNA, 25 bp, Homo sapien
aagtcgggtctggaggcttccagct

SEQ ID NO: 3952739 - DNA, 25 bp, Homo sapien
actgtgacgtggtagatcttgtcag

SEQ ID NO: 3952740 - DNA, 25 bp, Homo sapien
cttgaccagggagcccatgacctgc

SEQ ID NO: 3952741 - DNA, 25 bp, Homo sapien
gatgaagctgccgtgagtcttctcg

SEQ ID NO: 3952742 - DNA, 25 bp, Homo sapien
agtcttctcggcatagcagatccag

SEQ ID NO: 3952743 - DNA, 25 bp, Homo sapien
gctgggcgaagaagtccttgaccag

SEQ ID NO: 3952744 - DNA, 25 bp, Homo sapien
ggctgaagtgccttgagaaggcggt

SEQ ID NO: 3952745 - DNA, 25 bp, Homo sapien
gcggtgtcgaagacgaagtgcaccc

SEQ ID NO: 3952746 - DNA, 25 bp, Homo sapien
agcgcctgtctgcagtcggcctgtc

SEQ ID NO: 3952747 - DNA, 25 bp, Homo sapien
tgtcctcggaatcgccgcacaaact

SEQ ID NO: 3952748 - DNA, 25 bp, Homo sapien
gtggtgagaccgaaactacaaccag

SEQ ID NO: 3952749 - DNA, 25 bp, Homo sapien
cagcgatgctctagactgtggtgag

SEQ ID NO: 3952750 - DNA, 25 bp, Homo sapien
gtgagaccgaaactacaaccagcct

SEQ ID NO: 3952751 - DNA, 25 bp, Homo sapien
ggattcagctgaaaccgtgcagcca

SEQ ID NO: 3952752 - DNA, 25 bp, Homo sapien
tctctgcggaggtgatgcagccgct

SEQ ID NO: 3952753 - DNA, 25 bp, Homo sapien
atgcagccgctgcacgccaggcagt

SEQ ID NO: 3952754 - DNA, 25 bp, Homo sapien
tcgtttagcgagaccttggccttct

SEQ ID NO: 3952755 - DNA, 25 bp, Homo sapien
ctgctgggtgataagcacggtctct

SEQ ID NO: 3952756 - DNA, 25 bp, Homo sapien
cctctgcacgaggacatggagacag

SEQ ID NO: 3952757 - DNA, 25 bp, Homo sapien
gacagaggatagtggagtccagctc

SEQ ID NO: 3952758 - DNA, 25 bp, Homo sapien
tacaagggagaagaacccggtgcac

SEQ ID NO: 3952759 - DNA, 25 bp, Homo sapien
tcataaccgacaaccaacatggctg

SEQ ID NO: 3952760 - DNA, 25 bp, Homo sapien
cagtttcataatgccgtcaagtctg

SEQ ID NO: 3952761 - DNA, 25 bp, Homo sapien
tcttggtaccacttggttagtgcat

SEQ ID NO: 3952762 - DNA, 25 bp, Homo sapien
catccgaatcacaggactaaggctt

SEQ ID NO: 3952763 - DNA, 25 bp, Homo sapien
cactggtatctcagcaaagcagcag

SEQ ID NO: 3952764 - DNA, 25 bp, Homo sapien
gtagggcaggaaaatgccgaaggtg

SEQ ID NO: 3952765 - DNA, 25 bp, Homo sapien
gggcaggaaaatgccgaaggtgggc

SEQ ID NO: 3952766 - DNA, 25 bp, Homo sapien
gggctgtagggcaggaaaatgccga

SEQ ID NO: 3952767 - DNA, 25 bp, Homo sapien
ctgtagggcaggaaaatgccgaagg

SEQ ID NO: 3952768 - DNA, 25 bp, Homo sapien
aggaaaggacgaaggcacaggaaga

SEQ ID NO: 3952769 - DNA, 25 bp, Homo sapien
gggcagaaacaaccgtcagactcgc

SEQ ID NO: 3952770 - DNA, 25 bp, Homo sapien
tcgccaaacagatgcaggaacaagg

SEQ ID NO: 3952771 - DNA, 25 bp, Homo sapien
aaccgtcagactcgccaaacagatg

SEQ ID NO: 3952772 - DNA, 25 bp, Homo sapien
ccagctcgagctcccccaacttctc

SEQ ID NO: 3952773 - DNA, 25 bp, Homo sapien
aaagtgtttcggatcagccgggcag

SEQ ID NO: 3952774 - DNA, 25 bp, Homo sapien
caccgctctgtgacgggaggaagca

SEQ ID NO: 3952775 - DNA, 25 bp, Homo sapien
gctgagcagatcaagctgtttggcc

SEQ ID NO: 3952776 - DNA, 25 bp, Homo sapien
caggtgaattcgaccagtgggaaaa

SEQ ID NO: 3952777 - DNA, 25 bp, Homo sapien
cgtcatcttcaatgcgaatcttggc

SEQ ID NO: 3952778 - DNA, 25 bp, Homo sapien
tccactttgacaggcttgatgcact

SEQ ID NO: 3952779 - DNA, 25 bp, Homo sapien
gttaatttggaagtagctcccgtca

SEQ ID NO: 3952780 - DNA, 25 bp, Homo sapien
gaatcttggccacgccacttcccgc

SEQ ID NO: 3952781 - DNA, 25 bp, Homo sapien
gagccatgcactcagggactgaggc

SEQ ID NO: 3952782 - DNA, 25 bp, Homo sapien
tgccaggagccatgcactcagggac

SEQ ID NO: 3952783 - DNA, 25 bp, Homo sapien
aggagccatgcactcagggactgag

SEQ ID NO: 3952784 - DNA, 25 bp, Homo sapien
caggagccatgcactcagggactga

SEQ ID NO: 3952785 - DNA, 25 bp, Homo sapien
ggatcgggttcccaacatcctgcgg

SEQ ID NO: 3952786 - DNA, 25 bp, Homo sapien
catcctgcggcactgaagttcccag

SEQ ID NO: 3952787 - DNA, 25 bp, Homo sapien
tgcaggaaggccagtgctaacagcg

SEQ ID NO: 3952788 - DNA, 25 bp, Homo sapien
gtgctaacagcgcctgcaaactacc

SEQ ID NO: 3952789 - DNA, 25 bp, Homo sapien
caccagggcgacgttaaggacagct

SEQ ID NO: 3952790 - DNA, 25 bp, Homo sapien
ccttgttggtaagaagcgggcctca

SEQ ID NO: 3952791 - DNA, 25 bp, Homo sapien
cagtgcccgggaaacaagtggattt

SEQ ID NO: 3952792 - DNA, 25 bp, Homo sapien
tgcccatcgagaggacgtgtgcttg

SEQ ID NO: 3952793 - DNA, 25 bp, Homo sapien
gcgccccgctgaagggcgacgccat

SEQ ID NO: 3952794 - DNA, 25 bp, Homo sapien
gacggcccgatgaagtcatccaggt

SEQ ID NO: 3952795 - DNA, 25 bp, Homo sapien
gtcagctgcagcgccccgctgaagg

SEQ ID NO: 3952796 - DNA, 25 bp, Homo sapien
ctgagacggcccgatgaagtcatcc

SEQ ID NO: 3952797 - DNA, 25 bp, Homo sapien
cgccgcgcgcaggtgtcgctaaacg

SEQ ID NO: 3952798 - DNA, 25 bp, Homo sapien
taaacggcgcgaaacgaagtggctg

SEQ ID NO: 3952799 - DNA, 25 bp, Homo sapien
gttccgccacgctgccggaaagcgc

SEQ ID NO: 3952800 - DNA, 25 bp, Homo sapien
gaaacgaagtggctggttccgccac

SEQ ID NO: 3952801 - DNA, 25 bp, Homo sapien
ctcctctcggccagacaggactttc

SEQ ID NO: 3952802 - DNA, 25 bp, Homo sapien
ctgcacggaggagctttccccagca

SEQ ID NO: 3952803 - DNA, 25 bp, Homo sapien
ctctcggccagacaggactttcttc

SEQ ID NO: 3952804 - DNA, 25 bp, Homo sapien
cctctcggccagacaggactttctt

SEQ ID NO: 3952805 - DNA, 25 bp, Homo sapien
ggccactgatgtgcaggacaccagg

SEQ ID NO: 3952806 - DNA, 25 bp, Homo sapien
ggcaacagagtgcagggtaggccag

SEQ ID NO: 3952807 - DNA, 25 bp, Homo sapien
cactgatgtgcaggacaccaggatg

SEQ ID NO: 3952808 - DNA, 25 bp, Homo sapien
gatgtgcaggacaccaggatgagct

SEQ ID NO: 3952809 - DNA, 25 bp, Homo sapien
actttattcatgtccagcagtgaag

SEQ ID NO: 3952810 - DNA, 25 bp, Homo sapien
agcgtcttccgtggcccgcctgggc

SEQ ID NO: 3952811 - DNA, 25 bp, Homo sapien
gaccacgaccgtggactttattcat

SEQ ID NO: 3952812 - DNA, 25 bp, Homo sapien
tgcgggaggcaccttcttagggcct

SEQ ID NO: 3952813 - DNA, 25 bp, Homo sapien
cttgggtaggttggcctggcctaga

SEQ ID NO: 3952814 - DNA, 25 bp, Homo sapien
cctgaggcaacgctgtccacagaaa

SEQ ID NO: 3952815 - DNA, 25 bp, Homo sapien
cacagaaaccaggatgcaagtcccc

SEQ ID NO: 3952816 - DNA, 25 bp, Homo sapien
gctggcccgtcagcccaagtgggcg

SEQ ID NO: 3952817 - DNA, 25 bp, Homo sapien
ggaggcaatggacaaagctggtgga

SEQ ID NO: 3952818 - DNA, 25 bp, Homo sapien
caggaggcaatggacaaagctggtg

SEQ ID NO: 3952819 - DNA, 25 bp, Homo sapien
gcaatggacaaagctggtggacagg

SEQ ID NO: 3952820 - DNA, 25 bp, Homo sapien
aggcaatggacaaagctggtggaca

SEQ ID NO: 3952821 - DNA, 25 bp, Homo sapien
gcaggcccgaggtgtggaccagatg

SEQ ID NO: 3952822 - DNA, 25 bp, Homo sapien
gggcatcgttcgtgggcaggcccga

SEQ ID NO: 3952823 - DNA, 25 bp, Homo sapien
tggaggcctgggcatcgttcgtggg

SEQ ID NO: 3952824 - DNA, 25 bp, Homo sapien
ggctggcgtccaggccgagctggcc

SEQ ID NO: 3952825 - DNA, 25 bp, Homo sapien
gtggctgcgggccttctgaaggtct

SEQ ID NO: 3952826 - DNA, 25 bp, Homo sapien
caggccctgacggtggggtggctgc

SEQ ID NO: 3952827 - DNA, 25 bp, Homo sapien
tgcgggccttctgaaggtctcccac

SEQ ID NO: 3952828 - DNA, 25 bp, Homo sapien
ctgacggtggggtggctgcgggcct

SEQ ID NO: 3952829 - DNA, 25 bp, Homo sapien
tggcccagcagcgcagtcacgttgc

SEQ ID NO: 3952830 - DNA, 25 bp, Homo sapien
ggcccagcagcgcagtcacgttgcc

SEQ ID NO: 3952831 - DNA, 25 bp, Homo sapien
gcccagcagcgcagtcacgttgcca

SEQ ID NO: 3952832 - DNA, 25 bp, Homo sapien
cccagcagcgcagtcacgttgccaa

SEQ ID NO: 3952833 - DNA, 25 bp, Homo sapien
tgtccatggagatgttggcgtgggc

SEQ ID NO: 3952834 - DNA, 25 bp, Homo sapien
ggctggtgaaggtgtcgatgtccat

SEQ ID NO: 3952835 - DNA, 25 bp, Homo sapien
ccatggagatgttggcgtgggccag

SEQ ID NO: 3952836 - DNA, 25 bp, Homo sapien
tgaaggtgtcgatgtccatggagat

SEQ ID NO: 3952837 - DNA, 25 bp, Homo sapien
gacgggtgaggggggctgggctcca

SEQ ID NO: 3952838 - DNA, 25 bp, Homo sapien
tgaggggggctgggctccaccaggg

SEQ ID NO: 3952839 - DNA, 25 bp, Homo sapien
ggctgggctccaccaggggagccgc

SEQ ID NO: 3952840 - DNA, 25 bp, Homo sapien
gggggctgggctccaccaggggagc

SEQ ID NO: 3952841 - DNA, 25 bp, Homo sapien
ttggtgtagagcacgtccttccggc

SEQ ID NO: 3952842 - DNA, 25 bp, Homo sapien
tgccgaaggtctcatgggccttggt

SEQ ID NO: 3952843 - DNA, 25 bp, Homo sapien
cccgctgctgccgaaggtctcatgg

SEQ ID NO: 3952844 - DNA, 25 bp, Homo sapien
tagtaggcagctagggtcccgctgc

SEQ ID NO: 3952845 - DNA, 25 bp, Homo sapien
gtgaggactcatccagcacaggcgg

SEQ ID NO: 3952846 - DNA, 25 bp, Homo sapien
gaggactcatccagcacaggcgggt

SEQ ID NO: 3952847 - DNA, 25 bp, Homo sapien
gatggtctggatctggtgaggactc

SEQ ID NO: 3952848 - DNA, 25 bp, Homo sapien
ggtgaggactcatccagcacaggcg

SEQ ID NO: 3952849 - DNA, 25 bp, Homo sapien
tccactggccgatctcggtgcggga

SEQ ID NO: 3952850 - DNA, 25 bp, Homo sapien
tagaccagcgaggtgatgagccgca

SEQ ID NO: 3952851 - DNA, 25 bp, Homo sapien
tcctgggaggtgatgctccactggc

SEQ ID NO: 3952852 - DNA, 25 bp, Homo sapien
gcagctgatcctccgggaggccttg

SEQ ID NO: 3952853 - DNA, 25 bp, Homo sapien
tgcaacagggtgtccaggttggttc

SEQ ID NO: 3952854 - DNA, 25 bp, Homo sapien
atgcagccatccaggcaggactcaa

SEQ ID NO: 3952855 - DNA, 25 bp, Homo sapien
ccttgaccacatgctggcactcagt

SEQ ID NO: 3952856 - DNA, 25 bp, Homo sapien
ctgtgcgagcttggccttgaccaca

SEQ ID NO: 3952857 - DNA, 25 bp, Homo sapien
ctgcacagtcgtagtgcaccaggaa

SEQ ID NO: 3952858 - DNA, 25 bp, Homo sapien
agtcgtagtgcaccaggaagaggtc

SEQ ID NO: 3952859 - DNA, 25 bp, Homo sapien
cacagtcgtagtgcaccaggaagag

SEQ ID NO: 3952860 - DNA, 25 bp, Homo sapien
cagtcgtagtgcaccaggaagaggt

SEQ ID NO: 3952861 - DNA, 25 bp, Homo sapien
gctggtgacgaagcacctggcctcg

SEQ ID NO: 3952862 - DNA, 25 bp, Homo sapien
aggaagctggtgacgaagcacctgg

SEQ ID NO: 3952863 - DNA, 25 bp, Homo sapien
ctggcctcgcgctggccgagccttc

SEQ ID NO: 3952864 - DNA, 25 bp, Homo sapien
gaagctggtgacgaagcacctggcc

SEQ ID NO: 3952865 - DNA, 25 bp, Homo sapien
tgcggaagaagcccaggcccacggc

SEQ ID NO: 3952866 - DNA, 25 bp, Homo sapien
ctgcggaagaagcccaggcccacgg

SEQ ID NO: 3952867 - DNA, 25 bp, Homo sapien
ctgtagcccctccagtgtccaggag

SEQ ID NO: 3952868 - DNA, 25 bp, Homo sapien
ctgatgtatgtggccaggggcccca

SEQ ID NO: 3952869 - DNA, 25 bp, Homo sapien
cacaggtgagggctgatgtatgtgg

SEQ ID NO: 3952870 - DNA, 25 bp, Homo sapien
tgcacctgcgcccacaggtgagggc

SEQ ID NO: 3952871 - DNA, 25 bp, Homo sapien
cgagcagttgctggtcggaggcgct

SEQ ID NO: 3952872 - DNA, 25 bp, Homo sapien
aatgcgctgggcagcggtcagccgg

SEQ ID NO: 3952873 - DNA, 25 bp, Homo sapien
tcccaccggccagcagtgagttaag

SEQ ID NO: 3952874 - DNA, 25 bp, Homo sapien
tctgcggcaccgatgctggacgcgt

SEQ ID NO: 3952875 - DNA, 25 bp, Homo sapien
ggaggctgcctccaatgcaccgggc

SEQ ID NO: 3952876 - DNA, 25 bp, Homo sapien
cgggaggctgcctccaatgcaccgg

SEQ ID NO: 3952877 - DNA, 25 bp, Homo sapien
aggtcggcgcccagcgggaggctgc

SEQ ID NO: 3952878 - DNA, 25 bp, Homo sapien
ccagcgggaggctgcctccaatgca

SEQ ID NO: 3952879 - DNA, 25 bp, Homo sapien
ccctctggtcgggtagatggctcag

SEQ ID NO: 3952880 - DNA, 25 bp, Homo sapien
ccctgggcggcacggcggatgaagg

SEQ ID NO: 3952881 - DNA, 25 bp, Homo sapien
ggcagtcggcttcccgcacctggct

SEQ ID NO: 3952882 - DNA, 25 bp, Homo sapien
acggcggatgaaggcccggcagtcg

SEQ ID NO: 3952883 - DNA, 25 bp, Homo sapien
ttgggtgggtggagcgtgaagtcgt

SEQ ID NO: 3952884 - DNA, 25 bp, Homo sapien
tgggtgggtggagcgtgaagtcgtc

SEQ ID NO: 3952885 - DNA, 25 bp, Homo sapien
gttgggtgggtggagcgtgaagtcg

SEQ ID NO: 3952886 - DNA, 25 bp, Homo sapien
ggaggccgcaccgtgacgccaggtt

SEQ ID NO: 3952887 - DNA, 25 bp, Homo sapien
gccgcaccgtgacgccaggttggcc

SEQ ID NO: 3952888 - DNA, 25 bp, Homo sapien
aggccgcaccgtgacgccaggttgg

SEQ ID NO: 3952889 - DNA, 25 bp, Homo sapien
ctggaggccgcaccgtgacgccagg

SEQ ID NO: 3952890 - DNA, 25 bp, Homo sapien
tttcccacatgtcgggtcatcccca

SEQ ID NO: 3952891 - DNA, 25 bp, Homo sapien
ccccgtttcccacatgtcgggtcat

SEQ ID NO: 3952892 - DNA, 25 bp, Homo sapien
aacggcgctccctcgtgactctgga

SEQ ID NO: 3952893 - DNA, 25 bp, Homo sapien
ctgggcagaacggcgctccctcgtg

SEQ ID NO: 3952894 - DNA, 25 bp, Homo sapien
cagcaaggccagcctctggattagg

SEQ ID NO: 3952895 - DNA, 25 bp, Homo sapien
gcagcaaggccagcctctggattag

SEQ ID NO: 3952896 - DNA, 25 bp, Homo sapien
tgcagcaaggccagcctctggatta

SEQ ID NO: 3952897 - DNA, 25 bp, Homo sapien
ctggcccacaggttggccccgctgg

SEQ ID NO: 3952898 - DNA, 25 bp, Homo sapien
acaggttggccccgctggcatccag

SEQ ID NO: 3952899 - DNA, 25 bp, Homo sapien
cagccctcctggggaaagaaccttg

SEQ ID NO: 3952900 - DNA, 25 bp, Homo sapien
cccgctggcatccagccctcctggg

SEQ ID NO: 3952901 - DNA, 25 bp, Homo sapien
agcaggagggtgaggcctgagctct

SEQ ID NO: 3952902 - DNA, 25 bp, Homo sapien
ccagagcagtgggcagcaagggaca

SEQ ID NO: 3952903 - DNA, 25 bp, Homo sapien
agtgggcagcaagggacagcaggag

SEQ ID NO: 3952904 - DNA, 25 bp, Homo sapien
ggagggtgaggcctgagctctgcag

SEQ ID NO: 3952905 - DNA, 25 bp, Homo sapien
caggacgtgtctggtggagcatgca

SEQ ID NO: 3952906 - DNA, 25 bp, Homo sapien
aggacatggaggaacttctggagcc

SEQ ID NO: 3952907 - DNA, 25 bp, Homo sapien
cagcctgggcccaagcgcaggacgt

SEQ ID NO: 3952908 - DNA, 25 bp, Homo sapien
tggtgtgcacgggtaggttacagtg

SEQ ID NO: 3952909 - DNA, 25 bp, Homo sapien
ctgtgcggcggcgtgcactggtcat

SEQ ID NO: 3952910 - DNA, 25 bp, Homo sapien
ccacgtctgtgcggcggcgtgcact

SEQ ID NO: 3952911 - DNA, 25 bp, Homo sapien
ggcccacgtctgtgcggcggcgtgc

SEQ ID NO: 3952912 - DNA, 25 bp, Homo sapien
cggcgtgcactggtcatcctggctg

SEQ ID NO: 3952913 - DNA, 25 bp, Homo sapien
aggtgatccagacgcaatcccagcc

SEQ ID NO: 3952914 - DNA, 25 bp, Homo sapien
ggaccaggtgatccagacgcaatcc

SEQ ID NO: 3952915 - DNA, 25 bp, Homo sapien
agcccgccaagtgcgtcagccgcta

SEQ ID NO: 3952916 - DNA, 25 bp, Homo sapien
ttgtggaccaggtgatccagacgca

SEQ ID NO: 3952917 - DNA, 25 bp, Homo sapien
cctggcaggcggcatgagactgcct

SEQ ID NO: 3952918 - DNA, 25 bp, Homo sapien
ggcctggcaggcggcatgagactgc

SEQ ID NO: 3952919 - DNA, 25 bp, Homo sapien
gcctggcaggcggcatgagactgcc

SEQ ID NO: 3952920 - DNA, 25 bp, Homo sapien
cactgagcgcccgggtgcagaggcg

SEQ ID NO: 3952921 - DNA, 25 bp, Homo sapien
ctgaacatttatttggagtccctgg

SEQ ID NO: 3952922 - DNA, 25 bp, Homo sapien
gtcactgaacatttatttggagtcc

SEQ ID NO: 3952923 - DNA, 25 bp, Homo sapien
acatttatttggagtccctggagcc

SEQ ID NO: 3952924 - DNA, 25 bp, Homo sapien
gaacatttatttggagtccctggag

SEQ ID NO: 3952925 - DNA, 25 bp, Homo sapien
cagcagggaccattaggtctcggga

SEQ ID NO: 3952926 - DNA, 25 bp, Homo sapien
cagagtgacaatgcatggctgtgtg

SEQ ID NO: 3952927 - DNA, 25 bp, Homo sapien
cagagagggaaccactggtacagtg

SEQ ID NO: 3952928 - DNA, 25 bp, Homo sapien
ctgcagactcgagcccagcagggac

SEQ ID NO: 3952929 - DNA, 25 bp, Homo sapien
tagagtcccgctgtgcagctgacac

SEQ ID NO: 3952930 - DNA, 25 bp, Homo sapien
gagccagtgagcagacgctcgctcg

SEQ ID NO: 3952931 - DNA, 25 bp, Homo sapien
tgacgcttgagagccggaagctgtt

SEQ ID NO: 3952932 - DNA, 25 bp, Homo sapien
tcgtcacctgtgatcacggctgcct

SEQ ID NO: 3952933 - DNA, 25 bp, Homo sapien
tcagctgtccggttccagcgtccac

SEQ ID NO: 3952934 - DNA, 25 bp, Homo sapien
tcgggggtggcccgtaaggcctgca

SEQ ID NO: 3952935 - DNA, 25 bp, Homo sapien
ctggggcccctatcctcggggtcag

SEQ ID NO: 3952936 - DNA, 25 bp, Homo sapien
aggcaggagtgcggaggggctgcct

SEQ ID NO: 3952937 - DNA, 25 bp, Homo sapien
gagacttctccgtaggtcaggtcgc

SEQ ID NO: 3952938 - DNA, 25 bp, Homo sapien
atgcgcaggtagaaagcgtgcagca

SEQ ID NO: 3952939 - DNA, 25 bp, Homo sapien
gtgcagacctccacacactcggtgt

SEQ ID NO: 3952940 - DNA, 25 bp, Homo sapien
agcatcattctgaacggccggtcct

SEQ ID NO: 3952941 - DNA, 25 bp, Homo sapien
cccaaggaatcagtcaggagccagc

SEQ ID NO: 3952942 - DNA, 25 bp, Homo sapien
tgctcggtcctggagaatctaggcc

SEQ ID NO: 3952943 - DNA, 25 bp, Homo sapien
aacataagcttcgtggccctgtgcc

SEQ ID NO: 3952944 - DNA, 25 bp, Homo sapien
taagaacgcaggagtgcttgttgcc

SEQ ID NO: 3952945 - DNA, 25 bp, Homo sapien
aaccacgagatctgtgaggcttggc

SEQ ID NO: 3952946 - DNA, 25 bp, Homo sapien
cccgtgttccagaaccacgagatct

SEQ ID NO: 3952947 - DNA, 25 bp, Homo sapien
actttggagacaggatcgcctgcgt

SEQ ID NO: 3952948 - DNA, 25 bp, Homo sapien
agacaggatcgcctgcgtacagccc

SEQ ID NO: 3952949 - DNA, 25 bp, Homo sapien
atggttacccggctctcctggatgt

SEQ ID NO: 3952950 - DNA, 25 bp, Homo sapien
catggctgatggttacccggctctc

SEQ ID NO: 3952951 - DNA, 25 bp, Homo sapien
atgcacatggtgtgggcccggccct

SEQ ID NO: 3952952 - DNA, 25 bp, Homo sapien
cctgcgagccctcgatgcacatggt

SEQ ID NO: 3952953 - DNA, 25 bp, Homo sapien
gcgccccgctggtggagaaatccag

SEQ ID NO: 3952954 - DNA, 25 bp, Homo sapien
ggctgccttgtttagggccacgcac

SEQ ID NO: 3952955 - DNA, 25 bp, Homo sapien
tccttgaagcacctgtacgcgctgc

SEQ ID NO: 3952956 - DNA, 25 bp, Homo sapien
aggtaagccttggtcacgcgccgct

SEQ ID NO: 3952957 - DNA, 25 bp, Homo sapien
actttcctccacagacgccaccgtg

SEQ ID NO: 3952958 - DNA, 25 bp, Homo sapien
gggacagagtccagagtctgagcca

SEQ ID NO: 3952959 - DNA, 25 bp, Homo sapien
acagacgccaccgtggggctccggc

SEQ ID NO: 3952960 - DNA, 25 bp, Homo sapien
gagtccagagtctgagccactttcc

SEQ ID NO: 3952961 - DNA, 25 bp, Homo sapien
gggaaagcggtaccgcagctgcttc

SEQ ID NO: 3952962 - DNA, 25 bp, Homo sapien
agggtcggccagctcgggaaagcgg

SEQ ID NO: 3952963 - DNA, 25 bp, Homo sapien
gggtcagagtctcccgccacgcctt

SEQ ID NO: 3952964 - DNA, 25 bp, Homo sapien
gccagctcgggaaagcggtaccgca

SEQ ID NO: 3952965 - DNA, 25 bp, Homo sapien
gaacgtcccagtgcttgttgaccac

SEQ ID NO: 3952966 - DNA, 25 bp, Homo sapien
aggaagtcgcggctccggtacacga

SEQ ID NO: 3952967 - DNA, 25 bp, Homo sapien
gctccggtacacgatggacaggttc

SEQ ID NO: 3952968 - DNA, 25 bp, Homo sapien
gacaggttctccacgctgcctggct

SEQ ID NO: 3952969 - DNA, 25 bp, Homo sapien
agatcagtccccagggcgtcagctg

SEQ ID NO: 3952970 - DNA, 25 bp, Homo sapien
cgtgaatgcctctgcccgacggtgg

SEQ ID NO: 3952971 - DNA, 25 bp, Homo sapien
ctgctccgggctgacctgaagggcc

SEQ ID NO: 3952972 - DNA, 25 bp, Homo sapien
ctgacctaagcctggagaaagagcc

SEQ ID NO: 3952973 - DNA, 25 bp, Homo sapien
cgcgcgctggcgacccagagaccct

SEQ ID NO: 3952974 - DNA, 25 bp, Homo sapien
ggaagctccgctccggacgcctggc

SEQ ID NO: 3952975 - DNA, 25 bp, Homo sapien
ccccgatgccgtgcccggcgccggc

SEQ ID NO: 3952976 - DNA, 25 bp, Homo sapien
ctgctgccgggccgtgcagtccagg

SEQ ID NO: 3952977 - DNA, 25 bp, Homo sapien
cccaggatcaaacggcctaggctgc

SEQ ID NO: 3952978 - DNA, 25 bp, Homo sapien
gctgaacttcagatcggaggagatg

SEQ ID NO: 3952979 - DNA, 25 bp, Homo sapien
ctgcaggtggtcaagaggctgaact

SEQ ID NO: 3952980 - DNA, 25 bp, Homo sapien
ccacggtaggttggcggcattgccc

SEQ ID NO: 3952981 - DNA, 25 bp, Homo sapien
cgggcacagtcttacaagatgttgt

SEQ ID NO: 3952982 - DNA, 25 bp, Homo sapien
cgtggtctcacaggatggtgtgaga

SEQ ID NO: 3952983 - DNA, 25 bp, Homo sapien
tgggcatagtcttacaagatggagt

SEQ ID NO: 3952984 - DNA, 25 bp, Homo sapien
tacagactgtaatcacgtgcgagtg

SEQ ID NO: 3952985 - DNA, 25 bp, Homo sapien
tggggatcccgtcctcgatccactt

SEQ ID NO: 3952986 - DNA, 25 bp, Homo sapien
tcacaggatggtgcatttgcccttt

SEQ ID NO: 3952987 - DNA, 25 bp, Homo sapien
gtccttggggatcccgtcctcgatc

SEQ ID NO: 3952988 - DNA, 25 bp, Homo sapien
tccacccatgggttgttcttcatca

SEQ ID NO: 3952989 - DNA, 25 bp, Homo sapien
tggacgccatctcccgctggaaggc

SEQ ID NO: 3952990 - DNA, 25 bp, Homo sapien
gtcttggacgccatctcccgctgga

SEQ ID NO: 3952991 - DNA, 25 bp, Homo sapien
gtacttgaggctctccacctctttc

SEQ ID NO: 3952992 - DNA, 25 bp, Homo sapien
ttggacgccatctcccgctggaagg

SEQ ID NO: 3952993 - DNA, 25 bp, Homo sapien
ggtcaggggcttctgaagcagccag

SEQ ID NO: 3952994 - DNA, 25 bp, Homo sapien
ggggtcaggggcttctgaagcagcc

SEQ ID NO: 3952995 - DNA, 25 bp, Homo sapien
gtcaggggcttctgaagcagccagc

SEQ ID NO: 3952996 - DNA, 25 bp, Homo sapien
gggtcaggggcttctgaagcagcca

SEQ ID NO: 3952997 - DNA, 25 bp, Homo sapien
ctgcgtgctttctgcttgtggccag

SEQ ID NO: 3952998 - DNA, 25 bp, Homo sapien
tgcgtgctttctgcttgtggccagc

SEQ ID NO: 3952999 - DNA, 25 bp, Homo sapien
ctggccacccaccccgtgcaccccg

SEQ ID NO: 3953000 - DNA, 25 bp, Homo sapien
agcggagggacaatgacaacggcca

SEQ ID NO: 3953001 - DNA, 25 bp, Homo sapien
aaggtgacagcggagggacaatgac

SEQ ID NO: 3953002 - DNA, 25 bp, Homo sapien
tgaaaaggtgacagcggagggacaa

SEQ ID NO: 3953003 - DNA, 25 bp, Homo sapien
tgacagcggagggacaatgacaacg

SEQ ID NO: 3953004 - DNA, 25 bp, Homo sapien
ccagtgtggggctggtccattttcc

SEQ ID NO: 3953005 - DNA, 25 bp, Homo sapien
cagtgtggggctggtccattttccc

SEQ ID NO: 3953006 - DNA, 25 bp, Homo sapien
agtgtggggctggtccattttccct

SEQ ID NO: 3953007 - DNA, 25 bp, Homo sapien
agtaacctctgctcccgtgtgaggg

SEQ ID NO: 3953008 - DNA, 25 bp, Homo sapien
gggcaccagtcagcctcggtgtcgt

SEQ ID NO: 3953009 - DNA, 25 bp, Homo sapien
gtgggtgcagtaacctctgctcccg

SEQ ID NO: 3953010 - DNA, 25 bp, Homo sapien
agtcagcctcggtgtcgtgtggacc

SEQ ID NO: 3953011 - DNA, 25 bp, Homo sapien
cagcctcggtatctgcagatgcaca

SEQ ID NO: 3953012 - DNA, 25 bp, Homo sapien
tgagactcctcgcactcagtggaca

SEQ ID NO: 3953013 - DNA, 25 bp, Homo sapien
tgtccacccgtgtggcagcacccgg

SEQ ID NO: 3953014 - DNA, 25 bp, Homo sapien
tggacagcagagcgcccctgagcag

SEQ ID NO: 3953015 - DNA, 25 bp, Homo sapien
agacacacccagaagcagcgcctta

SEQ ID NO: 3953016 - DNA, 25 bp, Homo sapien
cccaggcgattgatggtatccgccc

SEQ ID NO: 3953017 - DNA, 25 bp, Homo sapien
gtatccgcccccatggagggtcttc

SEQ ID NO: 3953018 - DNA, 25 bp, Homo sapien
cgccttatgaggtctctagggatcc

SEQ ID NO: 3953019 - DNA, 25 bp, Homo sapien
acgggcccggtgtgttgtggttgag

SEQ ID NO: 3953020 - DNA, 25 bp, Homo sapien
gcgagattcatgacccgaaaccacg

SEQ ID NO: 3953021 - DNA, 25 bp, Homo sapien
gaaaagcggatctgcgtccatagga

SEQ ID NO: 3953022 - DNA, 25 bp, Homo sapien
gaaaccacgccacattggcatcagg

SEQ ID NO: 3953023 - DNA, 25 bp, Homo sapien
gaagtggcctctcttgacagccgcc

SEQ ID NO: 3953024 - DNA, 25 bp, Homo sapien
ttgacagccgcctctcatcgctagg

SEQ ID NO: 3953025 - DNA, 25 bp, Homo sapien
tcttcacttgctggccgctgtctca

SEQ ID NO: 3953026 - DNA, 25 bp, Homo sapien
acacggctgcccggaagtggcctct

SEQ ID NO: 3953027 - DNA, 25 bp, Homo sapien
ggaggtttagaatacagcgtgtgct

SEQ ID NO: 3953028 - DNA, 25 bp, Homo sapien
aatacagcgtgtgctggtgcggcct

SEQ ID NO: 3953029 - DNA, 25 bp, Homo sapien
tgagcgagagtgtctgccgagaatc

SEQ ID NO: 3953030 - DNA, 25 bp, Homo sapien
ggtgcggcctgtgtgtgagcgagag

SEQ ID NO: 3953031 - DNA, 25 bp, Homo sapien
gcctggcttgggcagtaaccctctt

SEQ ID NO: 3953032 - DNA, 25 bp, Homo sapien
gattcgatgtctgtcccgatgctgg

SEQ ID NO: 3953033 - DNA, 25 bp, Homo sapien
tccctgtgtatcacgggcagaaggc

SEQ ID NO: 3953034 - DNA, 25 bp, Homo sapien
tctggtgtcactctgcattgcctgg

SEQ ID NO: 3953035 - DNA, 25 bp, Homo sapien
acagcaggcccacgacggccagcag

SEQ ID NO: 3953036 - DNA, 25 bp, Homo sapien
cacagcaggcccacgacggccagca

SEQ ID NO: 3953037 - DNA, 25 bp, Homo sapien
ccacagcaggcccacgacggccagc

SEQ ID NO: 3953038 - DNA, 25 bp, Homo sapien
ttattttctgtgtgatttcgccgtc

SEQ ID NO: 3953039 - DNA, 25 bp, Homo sapien
agtccgggatggctttcggtgtcga

SEQ ID NO: 3953040 - DNA, 25 bp, Homo sapien
tgtgatttcgccgtcattccacttt

SEQ ID NO: 3953041 - DNA, 25 bp, Homo sapien
ccgggatggctttcggtgtcgagcg

SEQ ID NO: 3953042 - DNA, 25 bp, Homo sapien
aggagctctgagtccgcctgctgct

SEQ ID NO: 3953043 - DNA, 25 bp, Homo sapien
tgcatcagccgacagccccttccca

SEQ ID NO: 3953044 - DNA, 25 bp, Homo sapien
ccagccacgggtggcagttctgtct

SEQ ID NO: 3953045 - DNA, 25 bp, Homo sapien
cacgggtggcagttctgtcttcctc

SEQ ID NO: 3953046 - DNA, 25 bp, Homo sapien
cagaagaaatatccgggaggaaggc

SEQ ID NO: 3953047 - DNA, 25 bp, Homo sapien
gaagatgcaggaaagcccatgggtc

SEQ ID NO: 3953048 - DNA, 25 bp, Homo sapien
tccagaagaaatatccgggaggaag

SEQ ID NO: 3953049 - DNA, 25 bp, Homo sapien
agatgcaggaaagcccatgggtcag

SEQ ID NO: 3953050 - DNA, 25 bp, Homo sapien
cggacactttggctccgggctggca

SEQ ID NO: 3953051 - DNA, 25 bp, Homo sapien
ccctgtcatggcagcaagggctctg

SEQ ID NO: 3953052 - DNA, 25 bp, Homo sapien
accctcatgagagcagtggctgcag

SEQ ID NO: 3953053 - DNA, 25 bp, Homo sapien
aagggctctgcgtgtgtacggccgc

SEQ ID NO: 3953054 - DNA, 25 bp, Homo sapien
accgcgtccagccggatgcttcctt

SEQ ID NO: 3953055 - DNA, 25 bp, Homo sapien
gcgtccagccggatgcttccttttc

SEQ ID NO: 3953056 - DNA, 25 bp, Homo sapien
cgcgtccagccggatgcttcctttt

SEQ ID NO: 3953057 - DNA, 25 bp, Homo sapien
ccaccgcgtccagccggatgcttcc

SEQ ID NO: 3953058 - DNA, 25 bp, Homo sapien
tgtttgtggcatgaatacacgggcc

SEQ ID NO: 3953059 - DNA, 25 bp, Homo sapien
gtggcatgaatacacgggcctccca

SEQ ID NO: 3953060 - DNA, 25 bp, Homo sapien
agttgtttgtggcatgaatacacgg

SEQ ID NO: 3953061 - DNA, 25 bp, Homo sapien
ggctccgtagttgtttgtggcatga

SEQ ID NO: 3953062 - DNA, 25 bp, Homo sapien
cctgggcttcgggacctgaccctgg

SEQ ID NO: 3953063 - DNA, 25 bp, Homo sapien
gtcggttttgactctgggccacagg

SEQ ID NO: 3953064 - DNA, 25 bp, Homo sapien
ttctgacctgggcttcgggacctga

SEQ ID NO: 3953065 - DNA, 25 bp, Homo sapien
cctcgggtagcgctgccgcaggagg

SEQ ID NO: 3953066 - DNA, 25 bp, Homo sapien
agcacacacagtggacagcgagctc

SEQ ID NO: 3953067 - DNA, 25 bp, Homo sapien
agtgtccgtcgccttccacacgtgg

SEQ ID NO: 3953068 - DNA, 25 bp, Homo sapien
caggtccagagcacagtagaccctg

SEQ ID NO: 3953069 - DNA, 25 bp, Homo sapien
catgtccacgggtgaacatcagcgt

SEQ ID NO: 3953070 - DNA, 25 bp, Homo sapien
cagacaccgcctagctgctctttga

SEQ ID NO: 3953071 - DNA, 25 bp, Homo sapien
gctttccagtcgtggccgtgacgct

SEQ ID NO: 3953072 - DNA, 25 bp, Homo sapien
ctgtgggctcgtgacacgtgtctga

SEQ ID NO: 3953073 - DNA, 25 bp, Homo sapien
tgctctgcgtctggctggcatcggc

SEQ ID NO: 3953074 - DNA, 25 bp, Homo sapien
tatgacggccagtccagggctggtt

SEQ ID NO: 3953075 - DNA, 25 bp, Homo sapien
caatcaaggcggctatgacggccag

SEQ ID NO: 3953076 - DNA, 25 bp, Homo sapien
tgacggaagctttcgccaacttgct

SEQ ID NO: 3953077 - DNA, 25 bp, Homo sapien
ccagcaatgggccaacgacaatcaa

SEQ ID NO: 3953078 - DNA, 25 bp, Homo sapien
tcgggttaaccagcatccaggtgca

SEQ ID NO: 3953079 - DNA, 25 bp, Homo sapien
catttgctcgcgtggtcctcagtga

SEQ ID NO: 3953080 - DNA, 25 bp, Homo sapien
caaagtttgcatgtccgtgactgcg

SEQ ID NO: 3953081 - DNA, 25 bp, Homo sapien
tgactgcggccatcatcagagcttg

SEQ ID NO: 3953082 - DNA, 25 bp, Homo sapien
gagataaagctttcccagtaccatt

SEQ ID NO: 3953083 - DNA, 25 bp, Homo sapien
ctcagagcctttgtcggaaggtacc

SEQ ID NO: 3953084 - DNA, 25 bp, Homo sapien
ttgcatgtggagataaagctttccc

SEQ ID NO: 3953085 - DNA, 25 bp, Homo sapien
caggccacgtgtgggacaatttctt

SEQ ID NO: 3953086 - DNA, 25 bp, Homo sapien
ggaagacacctggttgtcctcgttg

SEQ ID NO: 3953087 - DNA, 25 bp, Homo sapien
tgtcggaagacacctggttgtcctc

SEQ ID NO: 3953088 - DNA, 25 bp, Homo sapien
tgttcttgtcggaagacacctggtt

SEQ ID NO: 3953089 - DNA, 25 bp, Homo sapien
gacacctggttgtcctcgttggaag

SEQ ID NO: 3953090 - DNA, 25 bp, Homo sapien
tgtgggacgatttcttgggtcgttg

SEQ ID NO: 3953091 - DNA, 25 bp, Homo sapien
acgatttcttgggtcgttgttgtca

SEQ ID NO: 3953092 - DNA, 25 bp, Homo sapien
ctgcgtgtgggacgatttcttgggt

SEQ ID NO: 3953093 - DNA, 25 bp, Homo sapien
ttcttgggtcgttgttgtcagaagg

SEQ ID NO: 3953094 - DNA, 25 bp, Homo sapien
tctcattggaaggtacgtggctgca

SEQ ID NO: 3953095 - DNA, 25 bp, Homo sapien
ttctcgttggaaggtatgtggccgt

SEQ ID NO: 3953096 - DNA, 25 bp, Homo sapien
ttctcgggttgttctcattggaagg

SEQ ID NO: 3953097 - DNA, 25 bp, Homo sapien
tcgttctcgttggacggtacctggc

SEQ ID NO: 3953098 - DNA, 25 bp, Homo sapien
cgatttctcgggtggttactgtgcc

SEQ ID NO: 3953099 - DNA, 25 bp, Homo sapien
ccgtgtgtgtgggacgatttctcgt

SEQ ID NO: 3953100 - DNA, 25 bp, Homo sapien
tactgttttgacgagggagctttct

SEQ ID NO: 3953101 - DNA, 25 bp, Homo sapien
tctcattgggcggtacctggccgca

SEQ ID NO: 3953102 - DNA, 25 bp, Homo sapien
cctgccttccacagtgacaggcccc

SEQ ID NO: 3953103 - DNA, 25 bp, Homo sapien
acctgccttccacagtgacaggccc

SEQ ID NO: 3953104 - DNA, 25 bp, Homo sapien
agacctgccttccacagtgacaggc

SEQ ID NO: 3953105 - DNA, 25 bp, Homo sapien
gacctgccttccacagtgacaggcc

SEQ ID NO: 3953106 - DNA, 25 bp, Homo sapien
atcaagctcccgctcggtcacccgc

SEQ ID NO: 3953107 - DNA, 25 bp, Homo sapien
agctcccgctcggtcacccgctgcc

SEQ ID NO: 3953108 - DNA, 25 bp, Homo sapien
ctccatcaagctcccgctcggtcac

SEQ ID NO: 3953109 - DNA, 25 bp, Homo sapien
ctctccatcaagctcccgctcggtc

SEQ ID NO: 3953110 - DNA, 25 bp, Homo sapien
tgggagccgccacagtatgtgacaa

SEQ ID NO: 3953111 - DNA, 25 bp, Homo sapien
ccagacgtgacagggacttggctct

SEQ ID NO: 3953112 - DNA, 25 bp, Homo sapien
gacgatgatgaaagtgtgcacggcc

SEQ ID NO: 3953113 - DNA, 25 bp, Homo sapien
gataggacagaaaatggcccatcca

SEQ ID NO: 3953114 - DNA, 25 bp, Homo sapien
ggtcttcgcctttatttctggtgca

SEQ ID NO: 3953115 - DNA, 25 bp, Homo sapien
tcttcgcctttatttctggtgcacg

SEQ ID NO: 3953116 - DNA, 25 bp, Homo sapien
cttcgcctttatttctggtgcacgt

SEQ ID NO: 3953117 - DNA, 25 bp, Homo sapien
gtcttcgcctttatttctggtgcac

SEQ ID NO: 3953118 - DNA, 25 bp, Homo sapien
ccctgaagtagggcctcagctcctc

SEQ ID NO: 3953119 - DNA, 25 bp, Homo sapien
tccctgaagtagggcctcagctcct

SEQ ID NO: 3953120 - DNA, 25 bp, Homo sapien
ggtccctgaagtagggcctcagctc

SEQ ID NO: 3953121 - DNA, 25 bp, Homo sapien
gtccctgaagtagggcctcagctcc

SEQ ID NO: 3953122 - DNA, 25 bp, Homo sapien
caggctgagcggagggaagtaggct

SEQ ID NO: 3953123 - DNA, 25 bp, Homo sapien
gctgagcggagggaagtaggctccg

SEQ ID NO: 3953124 - DNA, 25 bp, Homo sapien
agggaagtaggctccgatcctcttc

SEQ ID NO: 3953125 - DNA, 25 bp, Homo sapien
agcggagggaagtaggctccgatcc

SEQ ID NO: 3953126 - DNA, 25 bp, Homo sapien
ccccaggacggctgaacttgtacct

SEQ ID NO: 3953127 - DNA, 25 bp, Homo sapien
ctgcccccaggacggctgaacttgt

SEQ ID NO: 3953128 - DNA, 25 bp, Homo sapien
tgaacttgtacctgtagtgctctcc

SEQ ID NO: 3953129 - DNA, 25 bp, Homo sapien
gtacctgtagtgctctcctcggacc

SEQ ID NO: 3953130 - DNA, 25 bp, Homo sapien
tcactggactctcggaggactgggc

SEQ ID NO: 3953131 - DNA, 25 bp, Homo sapien
gcgccaggaggaattgtcaccgtca

SEQ ID NO: 3953132 - DNA, 25 bp, Homo sapien
tgagccctgtataaggtcccgcctg

SEQ ID NO: 3953133 - DNA, 25 bp, Homo sapien
gatggtgcagccataacaggaccct

SEQ ID NO: 3953134 - DNA, 25 bp, Homo sapien
ttgtatcttccaacccacgaacgcg

SEQ ID NO: 3953135 - DNA, 25 bp, Homo sapien
tgttgtatcttccaacccacgaacg

SEQ ID NO: 3953136 - DNA, 25 bp, Homo sapien
acgaacgcggccgtgtctctaggtg

SEQ ID NO: 3953137 - DNA, 25 bp, Homo sapien
tctaggtgtgtgctgacgtctttca

SEQ ID NO: 3953138 - DNA, 25 bp, Homo sapien
ccggcctcgcttcataattctagga

SEQ ID NO: 3953139 - DNA, 25 bp, Homo sapien
gatttcctacaaagacaacggcgtc

SEQ ID NO: 3953140 - DNA, 25 bp, Homo sapien
caacggcgtcatctgtaaacaggca

SEQ ID NO: 3953141 - DNA, 25 bp, Homo sapien
tgtcctgcgtactgcagtgcccagc

SEQ ID NO: 3953142 - DNA, 25 bp, Homo sapien
taacgtgtggatctcatcgactgat

SEQ ID NO: 3953143 - DNA, 25 bp, Homo sapien
gactgattctcaaatacggaaccaa

SEQ ID NO: 3953144 - DNA, 25 bp, Homo sapien
gatcgtgtgagttatcttcggtagc

SEQ ID NO: 3953145 - DNA, 25 bp, Homo sapien
gatgttaaacttgtcacgggccttc

SEQ ID NO: 3953146 - DNA, 25 bp, Homo sapien
caagaggctggcgttaacgtcctgg

SEQ ID NO: 3953147 - DNA, 25 bp, Homo sapien
tataaacatcattaggccctgcctg

SEQ ID NO: 3953148 - DNA, 25 bp, Homo sapien
gtgttgaaacatccagccgtaattg

SEQ ID NO: 3953149 - DNA, 25 bp, Homo sapien
gcctgtcgatgatggtgctccttta

SEQ ID NO: 3953150 - DNA, 25 bp, Homo sapien
tttacattgaatatacagtcggtca

SEQ ID NO: 3953151 - DNA, 25 bp, Homo sapien
tcaagttaagcatagaaacctcacc

SEQ ID NO: 3953152 - DNA, 25 bp, Homo sapien
caatagtgtgttccaatgtatctct

SEQ ID NO: 3953153 - DNA, 25 bp, Homo sapien
tgttcttggcacgtaacttacagtc

SEQ ID NO: 3953154 - DNA, 25 bp, Homo sapien
catcttggtgctatcatctgtcgac

SEQ ID NO: 3953155 - DNA, 25 bp, Homo sapien
ccagtggacgcattgggagtattcc

SEQ ID NO: 3953156 - DNA, 25 bp, Homo sapien
gagtcgtggctctgcactaggcctc

SEQ ID NO: 3953157 - DNA, 25 bp, Homo sapien
tactgcatgcgttttcgacggctgc

SEQ ID NO: 3953158 - DNA, 25 bp, Homo sapien
gcctcggcgtcgctggccaggagct

SEQ ID NO: 3953159 - DNA, 25 bp, Homo sapien
cctgcccgcgaaggggttgtgtgcc

SEQ ID NO: 3953160 - DNA, 25 bp, Homo sapien
cagggacaaggcctcggcgtcgctg

SEQ ID NO: 3953161 - DNA, 25 bp, Homo sapien
aaggcctcggcgtcgctggccagga

SEQ ID NO: 3953162 - DNA, 25 bp, Homo sapien
cttgcacttgaactcgtagtcctcc

SEQ ID NO: 3953163 - DNA, 25 bp, Homo sapien
tcagccagtccaggcggtagtggta

SEQ ID NO: 3953164 - DNA, 25 bp, Homo sapien
cgtagtcctcccacatggcatcggg

SEQ ID NO: 3953165 - DNA, 25 bp, Homo sapien
tggaaggccgcgaaccacatcagcc

SEQ ID NO: 3953166 - DNA, 25 bp, Homo sapien
caggcccggtagtggggacagcacg

SEQ ID NO: 3953167 - DNA, 25 bp, Homo sapien
cctgcgtgtccaggcccggtagtgg

SEQ ID NO: 3953168 - DNA, 25 bp, Homo sapien
ggcctgcgtgtccaggcccggtagt

SEQ ID NO: 3953169 - DNA, 25 bp, Homo sapien
gaggcctgcgtgtccaggcccggta

SEQ ID NO: 3953170 - DNA, 25 bp, Homo sapien
taagtgttgacgatgtgaagagagt

SEQ ID NO: 3953171 - DNA, 25 bp, Homo sapien
aagttgaggaccacgggcacgctga

SEQ ID NO: 3953172 - DNA, 25 bp, Homo sapien
cgaaggccccgtaagtgttgacgat

SEQ ID NO: 3953173 - DNA, 25 bp, Homo sapien
ctggagctcagcaagttgaggacca

SEQ ID NO: 3953174 - DNA, 25 bp, Homo sapien
atctgggctcgggccgggcccctcg

SEQ ID NO: 3953175 - DNA, 25 bp, Homo sapien
gccgggcccctcggatgtccctctg

SEQ ID NO: 3953176 - DNA, 25 bp, Homo sapien
ggcccctcggatgtccctctgcatc

SEQ ID NO: 3953177 - DNA, 25 bp, Homo sapien
cccctcggatgtccctctgcatctg

SEQ ID NO: 3953178 - DNA, 25 bp, Homo sapien
cagggtggcgtcatcaaagcaggcc

SEQ ID NO: 3953179 - DNA, 25 bp, Homo sapien
agaatcccagggtggcgtcatcaaa

SEQ ID NO: 3953180 - DNA, 25 bp, Homo sapien
tgaggttcccgctgacgatgaggac

SEQ ID NO: 3953181 - DNA, 25 bp, Homo sapien
gctgggcaccatagtcagccagttc

SEQ ID NO: 3953182 - DNA, 25 bp, Homo sapien
acgccgcagctgagtctcgtgcagg

SEQ ID NO: 3953183 - DNA, 25 bp, Homo sapien
agctgagtctcgtgcaggggctcgt

SEQ ID NO: 3953184 - DNA, 25 bp, Homo sapien
cgcagctgagtctcgtgcaggggct

SEQ ID NO: 3953185 - DNA, 25 bp, Homo sapien
gacgccgcagctgagtctcgtgcag

SEQ ID NO: 3953186 - DNA, 25 bp, Homo sapien
cccaagagacggagcagcaggtgtt

SEQ ID NO: 3953187 - DNA, 25 bp, Homo sapien
tcagccgatgggtgacacagacaac

SEQ ID NO: 3953188 - DNA, 25 bp, Homo sapien
tttgttatgaaaacgcagttccgcg

SEQ ID NO: 3953189 - DNA, 25 bp, Homo sapien
tctaatgaagggactcgtgagggca

SEQ ID NO: 3953190 - DNA, 25 bp, Homo sapien
agcggactccaaaacggggccagca

SEQ ID NO: 3953191 - DNA, 25 bp, Homo sapien
gcaccggcactaagggaacccgcag

SEQ ID NO: 3953192 - DNA, 25 bp, Homo sapien
ggcagcggactccaaaacggggcca

SEQ ID NO: 3953193 - DNA, 25 bp, Homo sapien
aaacggggccagcaccggcactaag

SEQ ID NO: 3953194 - DNA, 25 bp, Homo sapien
tagattcacggcgacatcgatgccc

SEQ ID NO: 3953195 - DNA, 25 bp, Homo sapien
aaatcacctgatgggcaccggtgcc

SEQ ID NO: 3953196 - DNA, 25 bp, Homo sapien
gctgcagagagaaacgtgcggtcct

SEQ ID NO: 3953197 - DNA, 25 bp, Homo sapien
ggtccggctacatggaaccgactga

SEQ ID NO: 3953198 - DNA, 25 bp, Homo sapien
gtgcaggtagtacgccacaggattg

SEQ ID NO: 3953199 - DNA, 25 bp, Homo sapien
ggatctgcagcaccccgtggatgat

SEQ ID NO: 3953200 - DNA, 25 bp, Homo sapien
tcgatgaagtggttgctgagcgtct

SEQ ID NO: 3953201 - DNA, 25 bp, Homo sapien
gtctcgaagcgatggaaccaccagg

SEQ ID NO: 3953202 - DNA, 25 bp, Homo sapien
ttcccaccaaggcaactgcagatgg

SEQ ID NO: 3953203 - DNA, 25 bp, Homo sapien
gagaaaaatgacactgagtgataaa

SEQ ID NO: 3953204 - DNA, 25 bp, Homo sapien
cagcagggacacagtgcgatgcctt

SEQ ID NO: 3953205 - DNA, 25 bp, Homo sapien
aagacggtgacaaatgtaacagaca

SEQ ID NO: 3953206 - DNA, 25 bp, Homo sapien
taatcaaattgtcacaaactgccta

SEQ ID NO: 3953207 - DNA, 25 bp, Homo sapien
gatttgtctatgtctgcttacagtt

SEQ ID NO: 3953208 - DNA, 25 bp, Homo sapien
gcgcatacgtgtttgagagtcttct

SEQ ID NO: 3953209 - DNA, 25 bp, Homo sapien
gaagctctattatcaggcgcatacg

SEQ ID NO: 3953210 - DNA, 25 bp, Homo sapien
gatggaaaaaagagctccggaaatg

SEQ ID NO: 3953211 - DNA, 25 bp, Homo sapien
ttcttccaattgaatgaaatgtctc

SEQ ID NO: 3953212 - DNA, 25 bp, Homo sapien
aggctgttcttccaattgaatgaaa

SEQ ID NO: 3953213 - DNA, 25 bp, Homo sapien
cagatggaaaaaagagctccggaaa

SEQ ID NO: 3953214 - DNA, 25 bp, Homo sapien
ctgctgttgcatccgcgtcgtcagg

SEQ ID NO: 3953215 - DNA, 25 bp, Homo sapien
gtcgtcaggcaaccgctccgatgtg

SEQ ID NO: 3953216 - DNA, 25 bp, Homo sapien
ctgctgcattctggacggcgcccgt

SEQ ID NO: 3953217 - DNA, 25 bp, Homo sapien
tcgacagacggagcagtggccatgc

SEQ ID NO: 3953218 - DNA, 25 bp, Homo sapien
ttcaccagtgcctcgtcatcaagac

SEQ ID NO: 3953219 - DNA, 25 bp, Homo sapien
cggaatcaggtcctccttggagaga

SEQ ID NO: 3953220 - DNA, 25 bp, Homo sapien
acacacgggagggagcatcctcgtc

SEQ ID NO: 3953221 - DNA, 25 bp, Homo sapien
tgggctcgcagttgacaccctgact

SEQ ID NO: 3953222 - DNA, 25 bp, Homo sapien
tggtgttgacggctgacacagagca

SEQ ID NO: 3953223 - DNA, 25 bp, Homo sapien
tccaccgtctcgggccatgtctgaa

SEQ ID NO: 3953224 - DNA, 25 bp, Homo sapien
ttgacggctgacacagagcactcct

SEQ ID NO: 3953225 - DNA, 25 bp, Homo sapien
catgtctgaactggtgttgacggct

SEQ ID NO: 3953226 - DNA, 25 bp, Homo sapien
ccagctccacgcttggaggcggtga

SEQ ID NO: 3953227 - DNA, 25 bp, Homo sapien
cagaaaacgcaaaggcagtgagaca

SEQ ID NO: 3953228 - DNA, 25 bp, Homo sapien
tgagacagccatcactggctgtcgg

SEQ ID NO: 3953229 - DNA, 25 bp, Homo sapien
gtgcaccgtggccatgaccacacgg

SEQ ID NO: 3953230 - DNA, 25 bp, Homo sapien
tgtccaggtaacgatggagccacag

SEQ ID NO: 3953231 - DNA, 25 bp, Homo sapien
ctgcccgtgtccaggtaacgatgga

SEQ ID NO: 3953232 - DNA, 25 bp, Homo sapien
tggagccacagttccgtgtggcagg

SEQ ID NO: 3953233 - DNA, 25 bp, Homo sapien
caggtaacgatggagccacagttcc

SEQ ID NO: 3953234 - DNA, 25 bp, Homo sapien
cggtccccccggatcttgatcaggc

SEQ ID NO: 3953235 - DNA, 25 bp, Homo sapien
tccatgcaggtgaggtctcgccagc

SEQ ID NO: 3953236 - DNA, 25 bp, Homo sapien
aagtccatgcaggtgaggtctcgcc

SEQ ID NO: 3953237 - DNA, 25 bp, Homo sapien
ctcatagtggaagtccatgcaggtg

SEQ ID NO: 3953238 - DNA, 25 bp, Homo sapien
cagctcgcctgctgtgaggactcct

SEQ ID NO: 3953239 - DNA, 25 bp, Homo sapien
tgcagctcgcctgctgtgaggactc

SEQ ID NO: 3953240 - DNA, 25 bp, Homo sapien
gctcgcctgctgtgaggactcctgg

SEQ ID NO: 3953241 - DNA, 25 bp, Homo sapien
agctcgcctgctgtgaggactcctg

SEQ ID NO: 3953242 - DNA, 25 bp, Homo sapien
cagacgcagtggcacataaaggaca

SEQ ID NO: 3953243 - DNA, 25 bp, Homo sapien
atagaggccgcatgctgcaggcgca

SEQ ID NO: 3953244 - DNA, 25 bp, Homo sapien
tccatgctgcaggttcggaggcgat

SEQ ID NO: 3953245 - DNA, 25 bp, Homo sapien
taagtactgagtgcccttgaggtgc

SEQ ID NO: 3953246 - DNA, 25 bp, Homo sapien
gggcggagaaggccccactcctcaa

SEQ ID NO: 3953247 - DNA, 25 bp, Homo sapien
accgccactgctccccccgcatgag

SEQ ID NO: 3953248 - DNA, 25 bp, Homo sapien
ggagaaggccccactcctcaaggcg

SEQ ID NO: 3953249 - DNA, 25 bp, Homo sapien
tgctccccccgcatgagcaccagct

SEQ ID NO: 3953250 - DNA, 25 bp, Homo sapien
cctgaagccgatgggccctgaaaga

SEQ ID NO: 3953251 - DNA, 25 bp, Homo sapien
aattactctcgttctggagtgtggc

SEQ ID NO: 3953252 - DNA, 25 bp, Homo sapien
ttttcctctgagctacccgagctgc

SEQ ID NO: 3953253 - DNA, 25 bp, Homo sapien
ttccgggtggagcatgtcgccctga

SEQ ID NO: 3953254 - DNA, 25 bp, Homo sapien
tgatgtcggcagcaccgctccacgt

SEQ ID NO: 3953255 - DNA, 25 bp, Homo sapien
tttcatcagtggctctgatgccaag

SEQ ID NO: 3953256 - DNA, 25 bp, Homo sapien
ttcaaagtcaggtcttgatgtcggc

SEQ ID NO: 3953257 - DNA, 25 bp, Homo sapien
agtggctctgatgccaagcagcagc

SEQ ID NO: 3953258 - DNA, 25 bp, Homo sapien
gtgaagcatgctcggcgtaaagcgc

SEQ ID NO: 3953259 - DNA, 25 bp, Homo sapien
ccatgggctgcggaccctctggcag

SEQ ID NO: 3953260 - DNA, 25 bp, Homo sapien
aaagcgctttgcagacagtcctggg

SEQ ID NO: 3953261 - DNA, 25 bp, Homo sapien
catgctcggcgtaaagcgctttgca

SEQ ID NO: 3953262 - DNA, 25 bp, Homo sapien
gagaccttcactttgacacgactga

SEQ ID NO: 3953263 - DNA, 25 bp, Homo sapien
agtgatcaacggtggtttggctcca

SEQ ID NO: 3953264 - DNA, 25 bp, Homo sapien
acagggatctgctgcgtgctggcca

SEQ ID NO: 3953265 - DNA, 25 bp, Homo sapien
aattcccagaacatacgcaaccgag

SEQ ID NO: 3953266 - DNA, 25 bp, Homo sapien
agccctgagtcaggaagtccggcga

SEQ ID NO: 3953267 - DNA, 25 bp, Homo sapien
tatcctgtgcatggcacggacatgg

SEQ ID NO: 3953268 - DNA, 25 bp, Homo sapien
tgcaaggaaccgtgctgactccatg

SEQ ID NO: 3953269 - DNA, 25 bp, Homo sapien
ccaggagaagccgtctgtgcgtgca

SEQ ID NO: 3953270 - DNA, 25 bp, Homo sapien
acctcacactcctggacatcaaggg

SEQ ID NO: 3953271 - DNA, 25 bp, Homo sapien
ttttcatccggtgctcaacccaggg

SEQ ID NO: 3953272 - DNA, 25 bp, Homo sapien
agccactgagggaacacagcgtccc

SEQ ID NO: 3953273 - DNA, 25 bp, Homo sapien
gatgcgtctggcctggcattctccc

SEQ ID NO: 3953274 - DNA, 25 bp, Homo sapien
gggtgacctctgcatcgcccacagg

SEQ ID NO: 3953275 - DNA, 25 bp, Homo sapien
tggtgacctttgcactgcccgtggg

SEQ ID NO: 3953276 - DNA, 25 bp, Homo sapien
ggtggtgacctttgcactgcccgtg

SEQ ID NO: 3953277 - DNA, 25 bp, Homo sapien
ggtgacctctgcatcgcccacagga

SEQ ID NO: 3953278 - DNA, 25 bp, Homo sapien
gtgacctctgcatcgcccacaggac

SEQ ID NO: 3953279 - DNA, 25 bp, Homo sapien
cgtggggtgacctctgcatcgccca

SEQ ID NO: 3953280 - DNA, 25 bp, Homo sapien
gacctctgcactgcctgtggggacg

SEQ ID NO: 3953281 - DNA, 25 bp, Homo sapien
ggtgacctctgcatcgcccacagga

SEQ ID NO: 3953282 - DNA, 25 bp, Homo sapien
agctatctgtcctcacgccttgtga

SEQ ID NO: 3953283 - DNA, 25 bp, Homo sapien
gaaggcggacccaagcttaatctgg

SEQ ID NO: 3953284 - DNA, 25 bp, Homo sapien
ggttccttgtcaggcataatggcat

SEQ ID NO: 3953285 - DNA, 25 bp, Homo sapien
tatccaggtgcatatccagaacttc

SEQ ID NO: 3953286 - DNA, 25 bp, Homo sapien
agggagcacctcaagaaatggccag

SEQ ID NO: 3953287 - DNA, 25 bp, Homo sapien
aatggccagttcactccatgcatgg

SEQ ID NO: 3953288 - DNA, 25 bp, Homo sapien
ctggctaagggctggcgcaaggtga

SEQ ID NO: 3953289 - DNA, 25 bp, Homo sapien
cactccatgcatggctgacgtttct

SEQ ID NO: 3953290 - DNA, 25 bp, Homo sapien
gggcagtgcccaactcttcgtacgt

SEQ ID NO: 3953291 - DNA, 25 bp, Homo sapien
gctgtcttaggactgggtgtcccaa

SEQ ID NO: 3953292 - DNA, 25 bp, Homo sapien
gagtcatcgcttcctgagtccgtgg

SEQ ID NO: 3953293 - DNA, 25 bp, Homo sapien
gagtccgtggccagtgctgtcttag

SEQ ID NO: 3953294 - DNA, 25 bp, Homo sapien
catgatcctgaagatcagccaccgg

SEQ ID NO: 3953295 - DNA, 25 bp, Homo sapien
gggcagccttgacagcgtccacaga

SEQ ID NO: 3953296 - DNA, 25 bp, Homo sapien
agccttgacagcgtccacagagggc

SEQ ID NO: 3953297 - DNA, 25 bp, Homo sapien
gccccacaggacaatccgggatgtg

SEQ ID NO: 3953298 - DNA, 25 bp, Homo sapien
ccctcgcagtcccaggataaggcag

SEQ ID NO: 3953299 - DNA, 25 bp, Homo sapien
caacggattcttcgcactggaaacc

SEQ ID NO: 3953300 - DNA, 25 bp, Homo sapien
cataagaatgcggatgcgggtcgcc

SEQ ID NO: 3953301 - DNA, 25 bp, Homo sapien
gcgggtcgccattccagtgctattc

SEQ ID NO: 3953302 - DNA, 25 bp, Homo sapien
atcttccccacggaagccagagccg

SEQ ID NO: 3953303 - DNA, 25 bp, Homo sapien
cccaggctcgctgggccccatcttc

SEQ ID NO: 3953304 - DNA, 25 bp, Homo sapien
ccccatcttccccacggaagccaga

SEQ ID NO: 3953305 - DNA, 25 bp, Homo sapien
gccccaggctcgctgggccccatct

SEQ ID NO: 3953306 - DNA, 25 bp, Homo sapien
cggcgtgcacaagggctgccattgt

SEQ ID NO: 3953307 - DNA, 25 bp, Homo sapien
gcttgggtcttgaggaattccagca

SEQ ID NO: 3953308 - DNA, 25 bp, Homo sapien
tgccattgttctccgcctcagcgtg

SEQ ID NO: 3953309 - DNA, 25 bp, Homo sapien
gcctcagcgtggcggacaacgcgtc

SEQ ID NO: 3953310 - DNA, 25 bp, Homo sapien
cctgggtaacggggcagtagctctt

SEQ ID NO: 3953311 - DNA, 25 bp, Homo sapien
gcagtagctcttgtggggaacattc

SEQ ID NO: 3953312 - DNA, 25 bp, Homo sapien
cctgtgaggagcctgacgcgttctg

SEQ ID NO: 3953313 - DNA, 25 bp, Homo sapien
gggaacattcacttccacggccgct

SEQ ID NO: 3953314 - DNA, 25 bp, Homo sapien
cattgttgatgggccgcgaggcctg

SEQ ID NO: 3953315 - DNA, 25 bp, Homo sapien
gctacacgcacggtcttctgaggcc

SEQ ID NO: 3953316 - DNA, 25 bp, Homo sapien
gcggctgcagctacacgcacggtct

SEQ ID NO: 3953317 - DNA, 25 bp, Homo sapien
acggtcttctgaggccctacgagat

SEQ ID NO: 3953318 - DNA, 25 bp, Homo sapien
caaatgaaggtatgtcaggaacacc

SEQ ID NO: 3953319 - DNA, 25 bp, Homo sapien
tgttacggctatttctctgcgcagc

SEQ ID NO: 3953320 - DNA, 25 bp, Homo sapien
tctgggatcccctgaatattgagct

SEQ ID NO: 3953321 - DNA, 25 bp, Homo sapien
tctgcgcagcgagctctgagagcat

SEQ ID NO: 3953322 - DNA, 25 bp, Homo sapien
catggtgtggccacgcagagcacat

SEQ ID NO: 3953323 - DNA, 25 bp, Homo sapien
acatgtgtgcactgcgggtgggcgc

SEQ ID NO: 3953324 - DNA, 25 bp, Homo sapien
aacacacagccatggtgtggccacg

SEQ ID NO: 3953325 - DNA, 25 bp, Homo sapien
gcagagcacatgctgcgcaggccca

SEQ ID NO: 3953326 - DNA, 25 bp, Homo sapien
ccagcgctcgcgtgaggacagcagt

SEQ ID NO: 3953327 - DNA, 25 bp, Homo sapien
gaccgcagtctcatgtgggtcactc

SEQ ID NO: 3953328 - DNA, 25 bp, Homo sapien
ggaaagctcatatctccagcgctcg

SEQ ID NO: 3953329 - DNA, 25 bp, Homo sapien
tctggacagtgtgcgccctcagagg

SEQ ID NO: 3953330 - DNA, 25 bp, Homo sapien
ccttgtgtggacaaacagctgagaa

SEQ ID NO: 3953331 - DNA, 25 bp, Homo sapien
acagcgactggtagccaggtaggca

SEQ ID NO: 3953332 - DNA, 25 bp, Homo sapien
agcacacgggcgtccacctaacgtg

SEQ ID NO: 3953333 - DNA, 25 bp, Homo sapien
tggacgtgaagaaagtcgcctcggt

SEQ ID NO: 3953334 - DNA, 25 bp, Homo sapien
cgcctgggttttcgggtgtgatgtg

SEQ ID NO: 3953335 - DNA, 25 bp, Homo sapien
tgatgtggtgttggcgtcgtgttgt

SEQ ID NO: 3953336 - DNA, 25 bp, Homo sapien
agtcgcctgggttttcgggtgtgat

SEQ ID NO: 3953337 - DNA, 25 bp, Homo sapien
tgtggtgttggcgtcgtgttgttgc

SEQ ID NO: 3953338 - DNA, 25 bp, Homo sapien
tttcattagcagagaagaagagaca

SEQ ID NO: 3953339 - DNA, 25 bp, Homo sapien
gagacagaaaatagctgaaccaact

SEQ ID NO: 3953340 - DNA, 25 bp, Homo sapien
gacagaaaatagctgaaccaactcc

SEQ ID NO: 3953341 - DNA, 25 bp, Homo sapien
cagaaaatagctgaaccaactccag

SEQ ID NO: 3953342 - DNA, 25 bp, Homo sapien
tgcatgcaggacccaagggaccctg

SEQ ID NO: 3953343 - DNA, 25 bp, Homo sapien
tttaaagcacgaatttaagagccgc

SEQ ID NO: 3953344 - DNA, 25 bp, Homo sapien
acgaatttaagagccgcaagggtga

SEQ ID NO: 3953345 - DNA, 25 bp, Homo sapien
gcacgaatttaagagccgcaagggt

SEQ ID NO: 3953346 - DNA, 25 bp, Homo sapien
aaagcacgaatttaagagccgcaag

SEQ ID NO: 3953347 - DNA, 25 bp, Homo sapien
gtgcattgtcgggagggtgccggca

SEQ ID NO: 3953348 - DNA, 25 bp, Homo sapien
gggtgccggcaaaggcggtctggtc

SEQ ID NO: 3953349 - DNA, 25 bp, Homo sapien
gagggtgccggcaaaggcggtctgg

SEQ ID NO: 3953350 - DNA, 25 bp, Homo sapien
cttgggggacggtgcattgtcggga

SEQ ID NO: 3953351 - DNA, 25 bp, Homo sapien
gggcgcacggccctgggacacagag

SEQ ID NO: 3953352 - DNA, 25 bp, Homo sapien
tccgtctgtgaacgggggcgcacgg

SEQ ID NO: 3953353 - DNA, 25 bp, Homo sapien
ccaggacagcagtggtcgtgtacgt

SEQ ID NO: 3953354 - DNA, 25 bp, Homo sapien
tacgtgtgaacgggggcacagggcc

SEQ ID NO: 3953355 - DNA, 25 bp, Homo sapien
gctctatgttctccaagatcaggga

SEQ ID NO: 3953356 - DNA, 25 bp, Homo sapien
gacagttcaaagacgcatggctgct

SEQ ID NO: 3953357 - DNA, 25 bp, Homo sapien
cagtccaaagtgacgtgctgagccg

SEQ ID NO: 3953358 - DNA, 25 bp, Homo sapien
gagcactgccgaagctactacgagt

SEQ ID NO: 3953359 - DNA, 25 bp, Homo sapien
acacacgcttcctcacgtctactcg

SEQ ID NO: 3953360 - DNA, 25 bp, Homo sapien
tctctgtgggcattttgatactgaa

SEQ ID NO: 3953361 - DNA, 25 bp, Homo sapien
tcccacacgcgtgagcactctaggg

SEQ ID NO: 3953362 - DNA, 25 bp, Homo sapien
tactgaatgtatactggcgcactgc

SEQ ID NO: 3953363 - DNA, 25 bp, Homo sapien
ggaggaggcacggatcagatcacaa

SEQ ID NO: 3953364 - DNA, 25 bp, Homo sapien
tccgtgcatactgggaaggctgatg

SEQ ID NO: 3953365 - DNA, 25 bp, Homo sapien
tgcgtgcgaccatccgtctctaggt

SEQ ID NO: 3953366 - DNA, 25 bp, Homo sapien
tgagatgccgacaatcatgcgtgcg

SEQ ID NO: 3953367 - DNA, 25 bp, Homo sapien
gggtctctgttgactgacaggtcgt

SEQ ID NO: 3953368 - DNA, 25 bp, Homo sapien
tctctgttgaccgacaggctgctgg

SEQ ID NO: 3953369 - DNA, 25 bp, Homo sapien
ctggggtctctgttgactgacaggc

SEQ ID NO: 3953370 - DNA, 25 bp, Homo sapien
tggggtctctgttgaccgacaggct

SEQ ID NO: 3953371 - DNA, 25 bp, Homo sapien
caacgtcggcgagatgggaagatac

SEQ ID NO: 3953372 - DNA, 25 bp, Homo sapien
gacagggaataaaacagggtgcgca

SEQ ID NO: 3953373 - DNA, 25 bp, Homo sapien
ggcaatgaccagtgcgtcgctgaga

SEQ ID NO: 3953374 - DNA, 25 bp, Homo sapien
tagggaacaggacaacagcacgctg

SEQ ID NO: 3953375 - DNA, 25 bp, Homo sapien
cctggcgctgctctcagtactcttt

SEQ ID NO: 3953376 - DNA, 25 bp, Homo sapien
aaaaggtgttgcaggtacttgtgga

SEQ ID NO: 3953377 - DNA, 25 bp, Homo sapien
tgctctcagtactctttgaagtgga

SEQ ID NO: 3953378 - DNA, 25 bp, Homo sapien
aatgaagcaccgagggcggtgtccc

SEQ ID NO: 3953379 - DNA, 25 bp, Homo sapien
catgagaagcatgttggcgcagccc

SEQ ID NO: 3953380 - DNA, 25 bp, Homo sapien
gagatgcccagtccgagaagagcca

SEQ ID NO: 3953381 - DNA, 25 bp, Homo sapien
gatcagtacgaaagacgagatgccc

SEQ ID NO: 3953382 - DNA, 25 bp, Homo sapien
taaccagggacatgtagaggcccca

SEQ ID NO: 3953383 - DNA, 25 bp, Homo sapien
gacttcccagctcgtcctgtcctgg

SEQ ID NO: 3953384 - DNA, 25 bp, Homo sapien
agccccctgtcaccgatgagctgct

SEQ ID NO: 3953385 - DNA, 25 bp, Homo sapien
cctgtcaccgatgagctgcttgttc

SEQ ID NO: 3953386 - DNA, 25 bp, Homo sapien
aagacttcccagctcgtcctgtcct

SEQ ID NO: 3953387 - DNA, 25 bp, Homo sapien
acgacggctctctcacatccacagg

SEQ ID NO: 3953388 - DNA, 25 bp, Homo sapien
ggcgcccaccccacgacggctctct

SEQ ID NO: 3953389 - DNA, 25 bp, Homo sapien
aggtctccgagttcacgtcccacgg

SEQ ID NO: 3953390 - DNA, 25 bp, Homo sapien
ccacaggtctccgagttcacgtccc

SEQ ID NO: 3953391 - DNA, 25 bp, Homo sapien
tcagtgcccggcatgaagcgctgtg

SEQ ID NO: 3953392 - DNA, 25 bp, Homo sapien
agggcgggacacagactggacacaa

SEQ ID NO: 3953393 - DNA, 25 bp, Homo sapien
cacgggatggacacagggtaaacaa

SEQ ID NO: 3953394 - DNA, 25 bp, Homo sapien
taaaggtttctcgaagactctgcac

SEQ ID NO: 3953395 - DNA, 25 bp, Homo sapien
acacgtgcagggaccgcaccagcag

SEQ ID NO: 3953396 - DNA, 25 bp, Homo sapien
ccccggcggccacacgtgcagggac

SEQ ID NO: 3953397 - DNA, 25 bp, Homo sapien
gaggacacctcgcggtaggccctca

SEQ ID NO: 3953398 - DNA, 25 bp, Homo sapien
ctcctagcaacatagaggacacctc

SEQ ID NO: 3953399 - DNA, 25 bp, Homo sapien
gatgccaagctacaagggctgcggt

SEQ ID NO: 3953400 - DNA, 25 bp, Homo sapien
gagactcagagacacgctaccaatg

SEQ ID NO: 3953401 - DNA, 25 bp, Homo sapien
gacaaaactagcatggagatcccct

SEQ ID NO: 3953402 - DNA, 25 bp, Homo sapien
tagggcctcgcggaagccatgttct

SEQ ID NO: 3953403 - DNA, 25 bp, Homo sapien
tccctgcggagatcaaaggagcctc

SEQ ID NO: 3953404 - DNA, 25 bp, Homo sapien
taaaatatccgcttgacccagtggc

SEQ ID NO: 3953405 - DNA, 25 bp, Homo sapien
ggagagcccctatggcaacttggaa

SEQ ID NO: 3953406 - DNA, 25 bp, Homo sapien
tgtatctcgggctcccctgtggaag

SEQ ID NO: 3953407 - DNA, 25 bp, Homo sapien
tgacactggcggatgtcccgggccc

SEQ ID NO: 3953408 - DNA, 25 bp, Homo sapien
ggaggtgacactggcggatgtcccg

SEQ ID NO: 3953409 - DNA, 25 bp, Homo sapien
agggcgggggtcgtggtgcgcggag

SEQ ID NO: 3953410 - DNA, 25 bp, Homo sapien
tcgtggtgcgcggaggtgacactgg

SEQ ID NO: 3953411 - DNA, 25 bp, Homo sapien
gctccggatccgagtacccagtctt

SEQ ID NO: 3953412 - DNA, 25 bp, Homo sapien
aaggtgcccgtgtggagatgggccg

SEQ ID NO: 3953413 - DNA, 25 bp, Homo sapien
ggcgactcaggctccggatccgagt

SEQ ID NO: 3953414 - DNA, 25 bp, Homo sapien
ttcaggagcacgatccgggtcagcc

SEQ ID NO: 3953415 - DNA, 25 bp, Homo sapien
gcactaatgggtctctggaacgttc

SEQ ID NO: 3953416 - DNA, 25 bp, Homo sapien
caaatgtggacattccgggcaaggg

SEQ ID NO: 3953417 - DNA, 25 bp, Homo sapien
tccctcctggttatacttgaaatgg

SEQ ID NO: 3953418 - DNA, 25 bp, Homo sapien
gccagggcccatttcgagaaagcag

SEQ ID NO: 3953419 - DNA, 25 bp, Homo sapien
ggttgagcttggaaggacggacaca

SEQ ID NO: 3953420 - DNA, 25 bp, Homo sapien
ggtacaaacgctgatttttctggag

SEQ ID NO: 3953421 - DNA, 25 bp, Homo sapien
cctcatgaactctgaaggttgagct

SEQ ID NO: 3953422 - DNA, 25 bp, Homo sapien
ggatgagggcccagaacgaggctgg

SEQ ID NO: 3953423 - DNA, 25 bp, Homo sapien
gcaccctcctgtacacggcacagct

SEQ ID NO: 3953424 - DNA, 25 bp, Homo sapien
tgcgatctgtagtccaggtgtctgg

SEQ ID NO: 3953425 - DNA, 25 bp, Homo sapien
caggaatcaggctgcgatctgtagt

SEQ ID NO: 3953426 - DNA, 25 bp, Homo sapien
gtgtctggcgtcagacagcaccctc

SEQ ID NO: 3953427 - DNA, 25 bp, Homo sapien
gacacatccgtgatctgggcgtgca

SEQ ID NO: 3953428 - DNA, 25 bp, Homo sapien
tctgcccattatcagacgagaagtg

SEQ ID NO: 3953429 - DNA, 25 bp, Homo sapien
ggatttactgccaccaacggaagcg

SEQ ID NO: 3953430 - DNA, 25 bp, Homo sapien
agcaaatgcgtgctgttggcgcccc

SEQ ID NO: 3953431 - DNA, 25 bp, Homo sapien
tttccacatgcgaacagcctgggca

SEQ ID NO: 3953432 - DNA, 25 bp, Homo sapien
gggtccccagcggtcagtagctact

SEQ ID NO: 3953433 - DNA, 25 bp, Homo sapien
agtgctggtctccacgctttgggca

SEQ ID NO: 3953434 - DNA, 25 bp, Homo sapien
gggttcatggatcaggaggctccca

SEQ ID NO: 3953435 - DNA, 25 bp, Homo sapien
tacagaggcccagaaagcactgctc

SEQ ID NO: 3953436 - DNA, 25 bp, Homo sapien
cagggccagctctggctacagaggc

SEQ ID NO: 3953437 - DNA, 25 bp, Homo sapien
ctgcaggcagacgtaagctgcagca

SEQ ID NO: 3953438 - DNA, 25 bp, Homo sapien
tgcaggcagacgtaagctgcagcag

SEQ ID NO: 3953439 - DNA, 25 bp, Homo sapien
tgcaaggtgccaagaaagactcact

SEQ ID NO: 3953440 - DNA, 25 bp, Homo sapien
cagagctccaagtgtgcgtggccaa

SEQ ID NO: 3953441 - DNA, 25 bp, Homo sapien
taaggcacagacaaggccagttctc

SEQ ID NO: 3953442 - DNA, 25 bp, Homo sapien
tgagcgccaggaagcttaaggcaca

SEQ ID NO: 3953443 - DNA, 25 bp, Homo sapien
gagctgtgagggtggcccggctcca

SEQ ID NO: 3953444 - DNA, 25 bp, Homo sapien
tccacaaggccagcgtctgcagggc

SEQ ID NO: 3953445 - DNA, 25 bp, Homo sapien
aggagctgtgagggtggcccggctc

SEQ ID NO: 3953446 - DNA, 25 bp, Homo sapien
tggcccggctccatcctgtgtggga

SEQ ID NO: 3953447 - DNA, 25 bp, Homo sapien
ggcacacagcaagtgcttaattaat

SEQ ID NO: 3953448 - DNA, 25 bp, Homo sapien
tggcacacagcaagtgcttaattaa

SEQ ID NO: 3953449 - DNA, 25 bp, Homo sapien
cacacagcaagtgcttaattaatac

SEQ ID NO: 3953450 - DNA, 25 bp, Homo sapien
ctggcacacagcaagtgcttaatta

SEQ ID NO: 3953451 - DNA, 25 bp, Homo sapien
cctagtggctcacacccgcggagga

SEQ ID NO: 3953452 - DNA, 25 bp, Homo sapien
gtctcagttgcacagaccaccgtgc

SEQ ID NO: 3953453 - DNA, 25 bp, Homo sapien
ttcctggggacttcaaggtggacca

SEQ ID NO: 3953454 - DNA, 25 bp, Homo sapien
ccgcggaggacgaggtcattttcct

SEQ ID NO: 3953455 - DNA, 25 bp, Homo sapien
tgcctgctcgcagacctaatgcaac

SEQ ID NO: 3953456 - DNA, 25 bp, Homo sapien
gatggcactgtgagcccgagtgggc

SEQ ID NO: 3953457 - DNA, 25 bp, Homo sapien
cactgtgagcccgagtgggcgatgt

SEQ ID NO: 3953458 - DNA, 25 bp, Homo sapien
caaagagagctctccacggaggtcc

SEQ ID NO: 3953459 - DNA, 25 bp, Homo sapien
cagcgcgctggttgaaaggatccga

SEQ ID NO: 3953460 - DNA, 25 bp, Homo sapien
caggcctaacagatgagttccgcgg

SEQ ID NO: 3953461 - DNA, 25 bp, Homo sapien
tggacttttctagtaacggaccagc

SEQ ID NO: 3953462 - DNA, 25 bp, Homo sapien
cacgctcgcactcgtatgggcaggg

SEQ ID NO: 3953463 - DNA, 25 bp, Homo sapien
ggcgcccgcagaggagaggaagcgc

SEQ ID NO: 3953464 - DNA, 25 bp, Homo sapien
acctcaggcgcgagacgggctgtgt

SEQ ID NO: 3953465 - DNA, 25 bp, Homo sapien
gaggacccgcttcctagctgagcgt

SEQ ID NO: 3953466 - DNA, 25 bp, Homo sapien
ctggacgtgcgctgtccgcagactc

SEQ ID NO: 3953467 - DNA, 25 bp, Homo sapien
tttaattaatgaggtaattcgggca

SEQ ID NO: 3953468 - DNA, 25 bp, Homo sapien
cttgctggcagagtgcgctcacgcg

SEQ ID NO: 3953469 - DNA, 25 bp, Homo sapien
taattcgggcaaagagtagaattta

SEQ ID NO: 3953470 - DNA, 25 bp, Homo sapien
gtgcgctcacgcgagggctggctgt

SEQ ID NO: 3953471 - DNA, 25 bp, Homo sapien
cagtgccacctaccaagctgtgaaa

SEQ ID NO: 3953472 - DNA, 25 bp, Homo sapien
gtgatcttggctcgcaggcaccagt

SEQ ID NO: 3953473 - DNA, 25 bp, Homo sapien
tgccacgtggtaggacacataggac

SEQ ID NO: 3953474 - DNA, 25 bp, Homo sapien
caatagcgcctacttcacggaaact

SEQ ID NO: 3953475 - DNA, 25 bp, Homo sapien
aggctgggagcggatgaaagcgccc

SEQ ID NO: 3953476 - DNA, 25 bp, Homo sapien
gacggcatctttcgggccttggcat

SEQ ID NO: 3953477 - DNA, 25 bp, Homo sapien
cgtcgcggcctctgggaaccgagct

SEQ ID NO: 3953478 - DNA, 25 bp, Homo sapien
caaaatgggtctggacgggcccgat

SEQ ID NO: 3953479 - DNA, 25 bp, Homo sapien
ggccatgcgatgacccttttgctta

SEQ ID NO: 3953480 - DNA, 25 bp, Homo sapien
ccccaggtgcctgacgtactgttgt

SEQ ID NO: 3953481 - DNA, 25 bp, Homo sapien
aacttggtgagatcaggaccttccc

SEQ ID NO: 3953482 - DNA, 25 bp, Homo sapien
gtggtattattaccacctcgggcca

SEQ ID NO: 3953483 - DNA, 25 bp, Homo sapien
cattacgggctgctgaatgaccgat

SEQ ID NO: 3953484 - DNA, 25 bp, Homo sapien
ctttgtatgcgcgaccagcaggcct

SEQ ID NO: 3953485 - DNA, 25 bp, Homo sapien
tgggaatgccggacaaaatccgagt

SEQ ID NO: 3953486 - DNA, 25 bp, Homo sapien
tggccggctccggaatgataatggc

SEQ ID NO: 3953487 - DNA, 25 bp, Homo sapien
ctgctgcctggcgtctgtgtgggag

SEQ ID NO: 3953488 - DNA, 25 bp, Homo sapien
aaggagcatttgtttcccgagctgg

SEQ ID NO: 3953489 - DNA, 25 bp, Homo sapien
gtcctgctgcctggcgtctgtgtgg

SEQ ID NO: 3953490 - DNA, 25 bp, Homo sapien
gccccggctctacagctctctgctg

SEQ ID NO: 3953491 - DNA, 25 bp, Homo sapien
tgcagatgcgaataaaataccccaa

SEQ ID NO: 3953492 - DNA, 25 bp, Homo sapien
cagggtccacgttctgaagtcttca

SEQ ID NO: 3953493 - DNA, 25 bp, Homo sapien
catggttactttccgaggcatcgtg

SEQ ID NO: 3953494 - DNA, 25 bp, Homo sapien
aataccccaaaacaggtgagctgcc

SEQ ID NO: 3953495 - DNA, 25 bp, Homo sapien
tcggttaccacacagcctgcgcggg

SEQ ID NO: 3953496 - DNA, 25 bp, Homo sapien
catctgagagctcgccagaggactg

SEQ ID NO: 3953497 - DNA, 25 bp, Homo sapien
agcgggtgcggcagatccggcgtgt

SEQ ID NO: 3953498 - DNA, 25 bp, Homo sapien
tgttcctcccatctgagagctcgcc

SEQ ID NO: 3953499 - DNA, 25 bp, Homo sapien
aaccatttgcacctggactcggaaa

SEQ ID NO: 3953500 - DNA, 25 bp, Homo sapien
tctcggccatgtgggttaaactcgg

SEQ ID NO: 3953501 - DNA, 25 bp, Homo sapien
gactcggaaagctcatttggacaca

SEQ ID NO: 3953502 - DNA, 25 bp, Homo sapien
ttaaactcggggatctcggcctgct

SEQ ID NO: 3953503 - DNA, 25 bp, Homo sapien
gtcccagctcatcacatggcggggg

SEQ ID NO: 3953504 - DNA, 25 bp, Homo sapien
ccagctcatcacatggcgggggctc

SEQ ID NO: 3953505 - DNA, 25 bp, Homo sapien
tcccagctcatcacatggcgggggc

SEQ ID NO: 3953506 - DNA, 25 bp, Homo sapien
agctcatcacatggcgggggctcct

SEQ ID NO: 3953507 - DNA, 25 bp, Homo sapien
gaaggacagcagtgcggtctccatg

SEQ ID NO: 3953508 - DNA, 25 bp, Homo sapien
ggagctgatggctccatttggcggg

SEQ ID NO: 3953509 - DNA, 25 bp, Homo sapien
ggcagctgtctaaagtccgtgaaat

SEQ ID NO: 3953510 - DNA, 25 bp, Homo sapien
tccgtgaaatcccaaccactgctgg

SEQ ID NO: 3953511 - DNA, 25 bp, Homo sapien
ctcccacggcggagggcagtgccca

SEQ ID NO: 3953512 - DNA, 25 bp, Homo sapien
tccagggcacgggacaggcctgaag

SEQ ID NO: 3953513 - DNA, 25 bp, Homo sapien
cagtggcctcccacggcggagggca

SEQ ID NO: 3953514 - DNA, 25 bp, Homo sapien
aggcctgaagtgcagacatttcctc

SEQ ID NO: 3953515 - DNA, 25 bp, Homo sapien
tcgctcacacccactcctgcacaca

SEQ ID NO: 3953516 - DNA, 25 bp, Homo sapien
tgccacagccccctcatgggcctcg

SEQ ID NO: 3953517 - DNA, 25 bp, Homo sapien
tgggcctcgctcacacccactcctg

SEQ ID NO: 3953518 - DNA, 25 bp, Homo sapien
tcatgggcctcgctcacacccactc

SEQ ID NO: 3953519 - DNA, 25 bp, Homo sapien
gctggtgacacggagcatcttttca

SEQ ID NO: 3953520 - DNA, 25 bp, Homo sapien
gtagatggctaggaacggaattgcc

SEQ ID NO: 3953521 - DNA, 25 bp, Homo sapien
gcagtgcgtgaagacttgtttctcc

SEQ ID NO: 3953522 - DNA, 25 bp, Homo sapien
ggccacaggtgtatcttctttgaga

SEQ ID NO: 3953523 - DNA, 25 bp, Homo sapien
gtgtgggattaagccggccacaaac

SEQ ID NO: 3953524 - DNA, 25 bp, Homo sapien
tcccgtccacgtgctaggaaatggc

SEQ ID NO: 3953525 - DNA, 25 bp, Homo sapien
acaaaccagcgagccgggaaggctc

SEQ ID NO: 3953526 - DNA, 25 bp, Homo sapien
tcatcaccagcgcagaaatctaatt

SEQ ID NO: 3953527 - DNA, 25 bp, Homo sapien
ctaaaaggactgtgggaatgtcagc

SEQ ID NO: 3953528 - DNA, 25 bp, Homo sapien
accagcagccgcacacgttgttggg

SEQ ID NO: 3953529 - DNA, 25 bp, Homo sapien
aaaggactgtgggaatgtcagcaca

SEQ ID NO: 3953530 - DNA, 25 bp, Homo sapien
gtgggaatgtcagcacagtcagctc

SEQ ID NO: 3953531 - DNA, 25 bp, Homo sapien
ggcgtgggttcccacaccatgggct

SEQ ID NO: 3953532 - DNA, 25 bp, Homo sapien
tgtgggccggctggaaaatgacctc

SEQ ID NO: 3953533 - DNA, 25 bp, Homo sapien
cccggcgtgtgttgtggacctgtct

SEQ ID NO: 3953534 - DNA, 25 bp, Homo sapien
actgcccgatgctgcttgcgcctgg

SEQ ID NO: 3953535 - DNA, 25 bp, Homo sapien
agcacgctggtgattaggaggcccc

SEQ ID NO: 3953536 - DNA, 25 bp, Homo sapien
gagttgcccaaatcaggagggagcc

SEQ ID NO: 3953537 - DNA, 25 bp, Homo sapien
tggagccaggtcttcagcacgctgg

SEQ ID NO: 3953538 - DNA, 25 bp, Homo sapien
gatcccggaatcctagagttgccca

SEQ ID NO: 3953539 - DNA, 25 bp, Homo sapien
atgacgatttcgcatccaccctgct

SEQ ID NO: 3953540 - DNA, 25 bp, Homo sapien
cgctgccgccatgacgatttcgcat

SEQ ID NO: 3953541 - DNA, 25 bp, Homo sapien
cacggccggcgctgggtccagagtg

SEQ ID NO: 3953542 - DNA, 25 bp, Homo sapien
tgtaggcaccgagctgccgaaggct

SEQ ID NO: 3953543 - DNA, 25 bp, Homo sapien
gctcggtgccctcggagttctcagg

SEQ ID NO: 3953544 - DNA, 25 bp, Homo sapien
aggcagttacccttggtccacaccg

SEQ ID NO: 3953545 - DNA, 25 bp, Homo sapien
ggcctgcacgtggacacttcctgaa

SEQ ID NO: 3953546 - DNA, 25 bp, Homo sapien
ggcagctccattgtgttccccgatg

SEQ ID NO: 3953547 - DNA, 25 bp, Homo sapien
gacccgggactctcagagggagtgc

SEQ ID NO: 3953548 - DNA, 25 bp, Homo sapien
gggagacccgggactctcagaggga

SEQ ID NO: 3953549 - DNA, 25 bp, Homo sapien
gaggcccggtggagactctgctctt

SEQ ID NO: 3953550 - DNA, 25 bp, Homo sapien
catgattcccggtgacggccaggct

SEQ ID NO: 3953551 - DNA, 25 bp, Homo sapien
aaatggctgatgaatcactatattt

SEQ ID NO: 3953552 - DNA, 25 bp, Homo sapien
tgaaatggctgatgaatcactatat

SEQ ID NO: 3953553 - DNA, 25 bp, Homo sapien
aaatgaaatggctgatgaatcacta

SEQ ID NO: 3953554 - DNA, 25 bp, Homo sapien
aatgaaatggctgatgaatcactat

SEQ ID NO: 3953555 - DNA, 25 bp, Homo sapien
tttgactcttgcaagcccacgatgg

SEQ ID NO: 3953556 - DNA, 25 bp, Homo sapien
ggcttcaggagtcaacacagatgga

SEQ ID NO: 3953557 - DNA, 25 bp, Homo sapien
ccaaaatcacggtgtgggcagcacg

SEQ ID NO: 3953558 - DNA, 25 bp, Homo sapien
caagcctgtccggattagccaagat

SEQ ID NO: 3953559 - DNA, 25 bp, Homo sapien
catttggcagacctgatgcggagcc

SEQ ID NO: 3953560 - DNA, 25 bp, Homo sapien
ggtcctcagccgcatgcagttcggg

SEQ ID NO: 3953561 - DNA, 25 bp, Homo sapien
tctgggaccagcacttttaacgata

SEQ ID NO: 3953562 - DNA, 25 bp, Homo sapien
tctgccatcggaaccgcgggtttct

SEQ ID NO: 3953563 - DNA, 25 bp, Homo sapien
cttcgccttccaccacggttggaag

SEQ ID NO: 3953564 - DNA, 25 bp, Homo sapien
ttctcgttcccgctcacgccatgtg

SEQ ID NO: 3953565 - DNA, 25 bp, Homo sapien
tcgttcccgctcacgccatgtgaga

SEQ ID NO: 3953566 - DNA, 25 bp, Homo sapien
ctgtctttctcgttcccgctcacgc

SEQ ID NO: 3953567 - DNA, 25 bp, Homo sapien
cagctcaatgcaccctctgctcctg

SEQ ID NO: 3953568 - DNA, 25 bp, Homo sapien
ctacaaagcgtgagccaatcaaact

SEQ ID NO: 3953569 - DNA, 25 bp, Homo sapien
gccaatcaaactcttttctctataa

SEQ ID NO: 3953570 - DNA, 25 bp, Homo sapien
ggcgggggtggacagcgtctctctc

SEQ ID NO: 3953571 - DNA, 25 bp, Homo sapien
ggaaaatgtccggtgatccccagcc

SEQ ID NO: 3953572 - DNA, 25 bp, Homo sapien
cggtacccggccttcaagggagctg

SEQ ID NO: 3953573 - DNA, 25 bp, Homo sapien
acctgtgaacagacggcaggcggct

SEQ ID NO: 3953574 - DNA, 25 bp, Homo sapien
tggcgcctgttcaacaggagccgac

SEQ ID NO: 3953575 - DNA, 25 bp, Homo sapien
taagaagctacaaagacagggaggc

SEQ ID NO: 3953576 - DNA, 25 bp, Homo sapien
tctgaagtctaactccggaggtgga

SEQ ID NO: 3953577 - DNA, 25 bp, Homo sapien
tggccttggaggaaccctgaggctc

SEQ ID NO: 3953578 - DNA, 25 bp, Homo sapien
tgaggctcctctgaagctaagaagc

SEQ ID NO: 3953579 - DNA, 25 bp, Homo sapien
ggccctgttgattttctgagtcgta

SEQ ID NO: 3953580 - DNA, 25 bp, Homo sapien
tagcctaagcgtacctgtttgctcg

SEQ ID NO: 3953581 - DNA, 25 bp, Homo sapien
cttagtgtgtttgggccatgcgagc

SEQ ID NO: 3953582 - DNA, 25 bp, Homo sapien
ggatcctgcacatatttaaacatag

SEQ ID NO: 3953583 - DNA, 25 bp, Homo sapien
gcagctgtcgccatatcgacagcag

SEQ ID NO: 3953584 - DNA, 25 bp, Homo sapien
catatcgacagcagccgtccgtctg

SEQ ID NO: 3953585 - DNA, 25 bp, Homo sapien
cagggcagctgtcgccatatcgaca

SEQ ID NO: 3953586 - DNA, 25 bp, Homo sapien
ggggccacctgcccgccgctccttc

SEQ ID NO: 3953587 - DNA, 25 bp, Homo sapien
caactgctcccctgaataaatgcga

SEQ ID NO: 3953588 - DNA, 25 bp, Homo sapien
gtgcggcatcactcggcctcaggga

SEQ ID NO: 3953589 - DNA, 25 bp, Homo sapien
tccaagcagtgaggacacgcgtgtt

SEQ ID NO: 3953590 - DNA, 25 bp, Homo sapien
caggcctgggaaacatccaagcagt

SEQ ID NO: 3953591 - DNA, 25 bp, Homo sapien
gactcatgattaaagccagcacggg

SEQ ID NO: 3953592 - DNA, 25 bp, Homo sapien
gtccctcggaataagcgcctggctt

SEQ ID NO: 3953593 - DNA, 25 bp, Homo sapien
tccgcagctgcaactacctataggc

SEQ ID NO: 3953594 - DNA, 25 bp, Homo sapien
cttggcagagaatcgtgaccgtatc

SEQ ID NO: 3953595 - DNA, 25 bp, Homo sapien
tgtccttggttgtcaccacacttcc

SEQ ID NO: 3953596 - DNA, 25 bp, Homo sapien
cagacacacaaggtgggacttgagt

SEQ ID NO: 3953597 - DNA, 25 bp, Homo sapien
acacacgcgggttctgcagactctg

SEQ ID NO: 3953598 - DNA, 25 bp, Homo sapien
tgtgtgcacagcaaatggcgggccc

SEQ ID NO: 3953599 - DNA, 25 bp, Homo sapien
agtcggcgctcaaccaatcacagca

SEQ ID NO: 3953600 - DNA, 25 bp, Homo sapien
gtcggcgctcaaccaatcacagcac

SEQ ID NO: 3953601 - DNA, 25 bp, Homo sapien
acagtcggcgctcaaccaatcacag

SEQ ID NO: 3953602 - DNA, 25 bp, Homo sapien
cagtcggcgctcaaccaatcacagc

SEQ ID NO: 3953603 - DNA, 25 bp, Homo sapien
ctgaaggtgatgtagaggtctccgt

SEQ ID NO: 3953604 - DNA, 25 bp, Homo sapien
ccgtagatggcgttgtcccggtcgc

SEQ ID NO: 3953605 - DNA, 25 bp, Homo sapien
ccggcttgaccaggtggccgctgaa

SEQ ID NO: 3953606 - DNA, 25 bp, Homo sapien
ggccgccggttcagcatgatgtgca

SEQ ID NO: 3953607 - DNA, 25 bp, Homo sapien
ggcgtaggcacgtcggcacgcggcg

SEQ ID NO: 3953608 - DNA, 25 bp, Homo sapien
gcctggcggcccctctttcccgctc

SEQ ID NO: 3953609 - DNA, 25 bp, Homo sapien
gcccacggagaaggcggcgtaggca

SEQ ID NO: 3953610 - DNA, 25 bp, Homo sapien
acctgccccttctggcctctgcggc

SEQ ID NO: 3953611 - DNA, 25 bp, Homo sapien
actcacccgggcatagggtccaggg

SEQ ID NO: 3953612 - DNA, 25 bp, Homo sapien
gcggcagcagtgcacacagggcctc

SEQ ID NO: 3953613 - DNA, 25 bp, Homo sapien
tatagtgggccgtactcgaggcagc

SEQ ID NO: 3953614 - DNA, 25 bp, Homo sapien
gaggatttcgatgtctatagtgggc

SEQ ID NO: 3953615 - DNA, 25 bp, Homo sapien
cacgggtcgggatcctcaatattcc

SEQ ID NO: 3953616 - DNA, 25 bp, Homo sapien
cctctgggattgtagcacagggcaa

SEQ ID NO: 3953617 - DNA, 25 bp, Homo sapien
tctgctggacaaagatctaggctgc

SEQ ID NO: 3953618 - DNA, 25 bp, Homo sapien
agtgtcttccgctagggcaggtgca

SEQ ID NO: 3953619 - DNA, 25 bp, Homo sapien
tttcatgcccgcctgggcgcccgtg

SEQ ID NO: 3953620 - DNA, 25 bp, Homo sapien
tctgtgttactgtcccagcaaccca

SEQ ID NO: 3953621 - DNA, 25 bp, Homo sapien
agcaacccagccgtcaaagagccct

SEQ ID NO: 3953622 - DNA, 25 bp, Homo sapien
cgtcaaagagccctttcatgcccgc

SEQ ID NO: 3953623 - DNA, 25 bp, Homo sapien
ctctggacacggacacgcggccatt

SEQ ID NO: 3953624 - DNA, 25 bp, Homo sapien
agcaccttggccttgtcccgctccg

SEQ ID NO: 3953625 - DNA, 25 bp, Homo sapien
ccttcctccacaagccggcccctgt

SEQ ID NO: 3953626 - DNA, 25 bp, Homo sapien
gcggccattccccacaggtccttcc

SEQ ID NO: 3953627 - DNA, 25 bp, Homo sapien
ctggacgtggcaggagaattgtggc

SEQ ID NO: 3953628 - DNA, 25 bp, Homo sapien
caggagaattgtggcggccttgcct

SEQ ID NO: 3953629 - DNA, 25 bp, Homo sapien
tggcaggagaattgtggcggccttg

SEQ ID NO: 3953630 - DNA, 25 bp, Homo sapien
gacgtggcaggagaattgtggcggc

SEQ ID NO: 3953631 - DNA, 25 bp, Homo sapien
ttggcagcggcacccactaggccca

SEQ ID NO: 3953632 - DNA, 25 bp, Homo sapien
cagctgtagccggttccaggctccc

SEQ ID NO: 3953633 - DNA, 25 bp, Homo sapien
ggtgacagctcacccttggcagcgg

SEQ ID NO: 3953634 - DNA, 25 bp, Homo sapien
cctgggcggtgacagctcacccttg

SEQ ID NO: 3953635 - DNA, 25 bp, Homo sapien
agaggaatcgttgctgcccggcagt

SEQ ID NO: 3953636 - DNA, 25 bp, Homo sapien
gcagaggaatcgttgctgcccggca

SEQ ID NO: 3953637 - DNA, 25 bp, Homo sapien
gcccggtccggtcagcaatgagcct

SEQ ID NO: 3953638 - DNA, 25 bp, Homo sapien
atgagcctatcgcagcacggcctct

SEQ ID NO: 3953639 - DNA, 25 bp, Homo sapien
gtctcaaaggatatgaagttgaggc

SEQ ID NO: 3953640 - DNA, 25 bp, Homo sapien
gctccgggcagagcgagtgcccagt

SEQ ID NO: 3953641 - DNA, 25 bp, Homo sapien
tcaaaggatatgaagttgaggctgg

SEQ ID NO: 3953642 - DNA, 25 bp, Homo sapien
tgggaggagctccgggcagagcgag

SEQ ID NO: 3953643 - DNA, 25 bp, Homo sapien
ggccatgcacgcctggcggtcgaca

SEQ ID NO: 3953644 - DNA, 25 bp, Homo sapien
cggtcgacatagaggctgttggtct

SEQ ID NO: 3953645 - DNA, 25 bp, Homo sapien
ttgacggcgatgtttttctccaggc

SEQ ID NO: 3953646 - DNA, 25 bp, Homo sapien
gcacgtactccaggttgcccagcga

SEQ ID NO: 3953647 - DNA, 25 bp, Homo sapien
ccgaccagccccgacttcaggtctt

SEQ ID NO: 3953648 - DNA, 25 bp, Homo sapien
tgtgggcgccacattgtccgaccag

SEQ ID NO: 3953649 - DNA, 25 bp, Homo sapien
gcaggcggtggacgggggccctgcg

SEQ ID NO: 3953650 - DNA, 25 bp, Homo sapien
catgctgtgggcgccacattgtccg

SEQ ID NO: 3953651 - DNA, 25 bp, Homo sapien
tcaggttgcaggaccctctggatct

SEQ ID NO: 3953652 - DNA, 25 bp, Homo sapien
agcagctccggaatgctcccgatga

SEQ ID NO: 3953653 - DNA, 25 bp, Homo sapien
gctgttgtccatgtcctgcctcagg

SEQ ID NO: 3953654 - DNA, 25 bp, Homo sapien
ctggatctgtttccggcttgcacgg

SEQ ID NO: 3953655 - DNA, 25 bp, Homo sapien
gcttcacggacaggtcgtgctggat

SEQ ID NO: 3953656 - DNA, 25 bp, Homo sapien
gggacagagcgttcggaggagaggg

SEQ ID NO: 3953657 - DNA, 25 bp, Homo sapien
tgctggattcggaagggacagagcg

SEQ ID NO: 3953658 - DNA, 25 bp, Homo sapien
tcacggacaggtcgtgctggattcg

SEQ ID NO: 3953659 - DNA, 25 bp, Homo sapien
cattgctcgtggtactgcaggttgt

SEQ ID NO: 3953660 - DNA, 25 bp, Homo sapien
gcccacgaggtaagggtgccagcat

SEQ ID NO: 3953661 - DNA, 25 bp, Homo sapien
gtctccacgtagtcgcccacgaggt

SEQ ID NO: 3953662 - DNA, 25 bp, Homo sapien
tcatggtgtccgaggcatgacacag

SEQ ID NO: 3953663 - DNA, 25 bp, Homo sapien
gcttggtcaggagcgtgtccatctg

SEQ ID NO: 3953664 - DNA, 25 bp, Homo sapien
caggatgcggctcccagttgcctgg

SEQ ID NO: 3953665 - DNA, 25 bp, Homo sapien
agttgcctggtacacaccgacggcc

SEQ ID NO: 3953666 - DNA, 25 bp, Homo sapien
ttcaggccacgtcgcacagctttgg

SEQ ID NO: 3953667 - DNA, 25 bp, Homo sapien
ggaactgcccgtgtttgtcccctga

SEQ ID NO: 3953668 - DNA, 25 bp, Homo sapien
ggaccgtcctggagcctcgctgtga

SEQ ID NO: 3953669 - DNA, 25 bp, Homo sapien
gatgtcagggaaccttccgggactg

SEQ ID NO: 3953670 - DNA, 25 bp, Homo sapien
actgatgtggcctgaggaccgtcct

SEQ ID NO: 3953671 - DNA, 25 bp, Homo sapien
gacggacaggacttgactgagtgcc

SEQ ID NO: 3953672 - DNA, 25 bp, Homo sapien
tgcaggctgacggacaggacttgac

SEQ ID NO: 3953673 - DNA, 25 bp, Homo sapien
gccctgcaggctgacggacaggact

SEQ ID NO: 3953674 - DNA, 25 bp, Homo sapien
gtgaccgcagtcggccctgcaggct

SEQ ID NO: 3953675 - DNA, 25 bp, Homo sapien
ctgggagtggggcagcaccggcctg

SEQ ID NO: 3953676 - DNA, 25 bp, Homo sapien
tgggagtggggcagcaccggcctgg

SEQ ID NO: 3953677 - DNA, 25 bp, Homo sapien
agggtcacggtgtccattagagcac

SEQ ID NO: 3953678 - DNA, 25 bp, Homo sapien
cccagggtcacggtgtccattagag

SEQ ID NO: 3953679 - DNA, 25 bp, Homo sapien
accccagggtcacggtgtccattag

SEQ ID NO: 3953680 - DNA, 25 bp, Homo sapien
acagaccccagggtcacggtgtcca

SEQ ID NO: 3953681 - DNA, 25 bp, Homo sapien
agttgtgtgactagcgtccctgtga

SEQ ID NO: 3953682 - DNA, 25 bp, Homo sapien
ccaggaggcgggacagttgtgtgac

SEQ ID NO: 3953683 - DNA, 25 bp, Homo sapien
tgtgactagcgtccctgtgacaggg

SEQ ID NO: 3953684 - DNA, 25 bp, Homo sapien
cgggacagttgtgtgactagcgtcc

SEQ ID NO: 3953685 - DNA, 25 bp, Homo sapien
tcacacgctgatcctgactgcagat

SEQ ID NO: 3953686 - DNA, 25 bp, Homo sapien
aaactccagggtgagatgagatcac

SEQ ID NO: 3953687 - DNA, 25 bp, Homo sapien
taaaccacgttcagagggagccata

SEQ ID NO: 3953688 - DNA, 25 bp, Homo sapien
cagatacggccgagttaaaccacgt

SEQ ID NO: 3953689 - DNA, 25 bp, Homo sapien
cagtgtggtggcgtctggcacattc

SEQ ID NO: 3953690 - DNA, 25 bp, Homo sapien
taactgccgtaaagcgtgcagtgtg

SEQ ID NO: 3953691 - DNA, 25 bp, Homo sapien
cacattcgtagcactgtgcaaccat

SEQ ID NO: 3953692 - DNA, 25 bp, Homo sapien
gttttaactgccgtaaagcgtgcag

SEQ ID NO: 3953693 - DNA, 25 bp, Homo sapien
ggctttaccagatgtggatggcccc

SEQ ID NO: 3953694 - DNA, 25 bp, Homo sapien
gcggcccgtgggtctgtgtccacct

SEQ ID NO: 3953695 - DNA, 25 bp, Homo sapien
cacccaccacgcatgggatgtggtt

SEQ ID NO: 3953696 - DNA, 25 bp, Homo sapien
acctctggtccacctccgctccaca

SEQ ID NO: 3953697 - DNA, 25 bp, Homo sapien
gaggggccgccttggagctctagtg

SEQ ID NO: 3953698 - DNA, 25 bp, Homo sapien
ctgtgggcctgtcggtgaaggcgtc

SEQ ID NO: 3953699 - DNA, 25 bp, Homo sapien
tgaagatgctctgggcaggcggagc

SEQ ID NO: 3953700 - DNA, 25 bp, Homo sapien
agctctagtgcatctggggttaaga

SEQ ID NO: 3953701 - DNA, 25 bp, Homo sapien
tgggccctcgacagtgtctctgggt

SEQ ID NO: 3953702 - DNA, 25 bp, Homo sapien
cgttggccctcttgggccctcgaga

SEQ ID NO: 3953703 - DNA, 25 bp, Homo sapien
ccaacgacagtgattgcagccaatt

SEQ ID NO: 3953704 - DNA, 25 bp, Homo sapien
acagacaccaacgacagtgattgca

SEQ ID NO: 3953705 - DNA, 25 bp, Homo sapien
ccagtagccaccgggggaaggtgag

SEQ ID NO: 3953706 - DNA, 25 bp, Homo sapien
ctgggggagagatgcaggcatggcc

SEQ ID NO: 3953707 - DNA, 25 bp, Homo sapien
agatgcaggcatggcctccccagta

SEQ ID NO: 3953708 - DNA, 25 bp, Homo sapien
gggaaggtgaggtctccccatggcc

SEQ ID NO: 3953709 - DNA, 25 bp, Homo sapien
ctccagggcacgtcttgatcacggc

SEQ ID NO: 3953710 - DNA, 25 bp, Homo sapien
cacgtcttgatcacggccagagtcc

SEQ ID NO: 3953711 - DNA, 25 bp, Homo sapien
agggcacgtcttgatcacggccaga

SEQ ID NO: 3953712 - DNA, 25 bp, Homo sapien
agagtcccagaagtgccaccactca

SEQ ID NO: 3953713 - DNA, 25 bp, Homo sapien
ctccggcctcccgtgtgcagttgag

SEQ ID NO: 3953714 - DNA, 25 bp, Homo sapien
tccggcctcccgtgtgcagttgagg

SEQ ID NO: 3953715 - DNA, 25 bp, Homo sapien
gggtgcccggattcctggctgccct

SEQ ID NO: 3953716 - DNA, 25 bp, Homo sapien
tcccgggtgcccggattcctggctg

SEQ ID NO: 3953717 - DNA, 25 bp, Homo sapien
tggcacaaggattcggaagcacagg

SEQ ID NO: 3953718 - DNA, 25 bp, Homo sapien
ctggttggcacaaggattcggaagc

SEQ ID NO: 3953719 - DNA, 25 bp, Homo sapien
attcggaagcacaggtagcggccca

SEQ ID NO: 3953720 - DNA, 25 bp, Homo sapien
caaggattcggaagcacaggtagcg

SEQ ID NO: 3953721 - DNA, 25 bp, Homo sapien
tgccgctcactagagcaccacagtt

SEQ ID NO: 3953722 - DNA, 25 bp, Homo sapien
gcatgagaacgtcaccaggaccctt

SEQ ID NO: 3953723 - DNA, 25 bp, Homo sapien
tcttcggcggaacatctgagcatcc

SEQ ID NO: 3953724 - DNA, 25 bp, Homo sapien
tggagttgccgctcactagagcacc

SEQ ID NO: 3953725 - DNA, 25 bp, Homo sapien
cgggtagcgtgcttcaccctcaggt

SEQ ID NO: 3953726 - DNA, 25 bp, Homo sapien
ccaggctccggctgagtccacaagg

SEQ ID NO: 3953727 - DNA, 25 bp, Homo sapien
tctgcgccatcgtgcgggctgaaga

SEQ ID NO: 3953728 - DNA, 25 bp, Homo sapien
tgaagacggtgtgcgtggagggctc

SEQ ID NO: 3953729 - DNA, 25 bp, Homo sapien
ttgaagcaccacgtccagagaaaga

SEQ ID NO: 3953730 - DNA, 25 bp, Homo sapien
aatctgcagggtggactagtcctca

SEQ ID NO: 3953731 - DNA, 25 bp, Homo sapien
gcttgatgcagccacgcagcatgga

SEQ ID NO: 3953732 - DNA, 25 bp, Homo sapien
cacgtgcggcttgttgtgtctcaca

SEQ ID NO: 3953733 - DNA, 25 bp, Homo sapien
tccacccagcggcaataaaatcgga

SEQ ID NO: 3953734 - DNA, 25 bp, Homo sapien
taaaatcggatgtttccgcacacag

SEQ ID NO: 3953735 - DNA, 25 bp, Homo sapien
ttccacacagacaactgcgaaggtg

SEQ ID NO: 3953736 - DNA, 25 bp, Homo sapien
tcagagagggtaagacacatgtcca

SEQ ID NO: 3953737 - DNA, 25 bp, Homo sapien
gctccccactccagggtctcgtgtc

SEQ ID NO: 3953738 - DNA, 25 bp, Homo sapien
tctgactccatggcaggacaaaggt

SEQ ID NO: 3953739 - DNA, 25 bp, Homo sapien
ggtctcgtgtctctgactccatggc

SEQ ID NO: 3953740 - DNA, 25 bp, Homo sapien
ctccagggtctcgtgtctctgactc

SEQ ID NO: 3953741 - DNA, 25 bp, Homo sapien
tcttccggcagatggatgttcagag

SEQ ID NO: 3953742 - DNA, 25 bp, Homo sapien
tctctctgacgctcagcgaagggcg

SEQ ID NO: 3953743 - DNA, 25 bp, Homo sapien
atccatgttccaggcgtgcgggcac

SEQ ID NO: 3953744 - DNA, 25 bp, Homo sapien
tcacgtcgcgttgaggtggtccccg

SEQ ID NO: 3953745 - DNA, 25 bp, Homo sapien
tacagactggacgtcccgtcccttc

SEQ ID NO: 3953746 - DNA, 25 bp, Homo sapien
gcccggcttctctcggccgtgctag

SEQ ID NO: 3953747 - DNA, 25 bp, Homo sapien
accagggtgtgaactcggccgttgc

SEQ ID NO: 3953748 - DNA, 25 bp, Homo sapien
ttctctcggccgtgctagggcgcgt

SEQ ID NO: 3953749 - DNA, 25 bp, Homo sapien
cagggtaggggtctgccgagcgcct

SEQ ID NO: 3953750 - DNA, 25 bp, Homo sapien
gccgagcgcctgtcgtagtcattcc

SEQ ID NO: 3953751 - DNA, 25 bp, Homo sapien
ctgccgagcgcctgtcgtagtcatt

SEQ ID NO: 3953752 - DNA, 25 bp, Homo sapien
gagcgcctgtcgtagtcattccctc

SEQ ID NO: 3953753 - DNA, 25 bp, Homo sapien
cttcatggaagcatcagggccgcac

SEQ ID NO: 3953754 - DNA, 25 bp, Homo sapien
cccgtgggacgtcatcttgttcccg

SEQ ID NO: 3953755 - DNA, 25 bp, Homo sapien
tcttgttcccgccaggaagtgggcg

SEQ ID NO: 3953756 - DNA, 25 bp, Homo sapien
gcgtgacgccagcaggctgagctca

SEQ ID NO: 3953757 - DNA, 25 bp, Homo sapien
gctaccccgatggactcgggactca

SEQ ID NO: 3953758 - DNA, 25 bp, Homo sapien
ggcagagtgcgggtggggacagcag

SEQ ID NO: 3953759 - DNA, 25 bp, Homo sapien
ccctcgggagcttgagggctgtgag

SEQ ID NO: 3953760 - DNA, 25 bp, Homo sapien
cagttcccgagcctgccctcgggag

SEQ ID NO: 3953761 - DNA, 25 bp, Homo sapien
agcttgcctccaactggcgtcacaa

SEQ ID NO: 3953762 - DNA, 25 bp, Homo sapien
ttatgcagatgtcggccaggccgtc

SEQ ID NO: 3953763 - DNA, 25 bp, Homo sapien
agatgtcggccaggccgtccgtcca

SEQ ID NO: 3953764 - DNA, 25 bp, Homo sapien
cgtccagccgcctgtgccgagcccg

SEQ ID NO: 3953765 - DNA, 25 bp, Homo sapien
ttgtttatgcagatgtcggccaggc

SEQ ID NO: 3953766 - DNA, 25 bp, Homo sapien
ctgtgcccgccgaggatgacagatg

SEQ ID NO: 3953767 - DNA, 25 bp, Homo sapien
cggagtagcagcttgccgtggtgca

SEQ ID NO: 3953768 - DNA, 25 bp, Homo sapien
tgggcccgggctgacgggagaagcg

SEQ ID NO: 3953769 - DNA, 25 bp, Homo sapien
tttgatgagccggacggttgatgaa

SEQ ID NO: 3953770 - DNA, 25 bp, Homo sapien
ctctgtgccctggttagaagctgcc

SEQ ID NO: 3953771 - DNA, 25 bp, Homo sapien
gattggtcgcccactgttgtcaggc

SEQ ID NO: 3953772 - DNA, 25 bp, Homo sapien
cgcagtaacaggagtcagccccttt

SEQ ID NO: 3953773 - DNA, 25 bp, Homo sapien
gcaggaggtgcttgacgcagtaaca

SEQ ID NO: 3953774 - DNA, 25 bp, Homo sapien
gccgggctccggatatgctgcttgg

SEQ ID NO: 3953775 - DNA, 25 bp, Homo sapien
gacctcagggtgatttgtctccgtg

SEQ ID NO: 3953776 - DNA, 25 bp, Homo sapien
ggcccctcggtccagcatgggctga

SEQ ID NO: 3953777 - DNA, 25 bp, Homo sapien
gtcgagtcgccccttttgctggtcc

SEQ ID NO: 3953778 - DNA, 25 bp, Homo sapien
ggccgcccgcgaatgtcaggaacct

SEQ ID NO: 3953779 - DNA, 25 bp, Homo sapien
tggggtatgggcctcctgtcagcag

SEQ ID NO: 3953780 - DNA, 25 bp, Homo sapien
cgcgaatgtcaggaaccttggattc

SEQ ID NO: 3953781 - DNA, 25 bp, Homo sapien
tgtcagcagcccgtcccggtgggtg

SEQ ID NO: 3953782 - DNA, 25 bp, Homo sapien
cactaatggggttgccgtggcaacg

SEQ ID NO: 3953783 - DNA, 25 bp, Homo sapien
tcaccgcggcggtgccactaatggg

SEQ ID NO: 3953784 - DNA, 25 bp, Homo sapien
aacgcctgtcactaatccccagctg

SEQ ID NO: 3953785 - DNA, 25 bp, Homo sapien
agctgctcctggttgaccggcccgg

SEQ ID NO: 3953786 - DNA, 25 bp, Homo sapien
ttcccaggaacgtttgtccgtctgc

SEQ ID NO: 3953787 - DNA, 25 bp, Homo sapien
acttcagagctgtgcgggccgtgct

SEQ ID NO: 3953788 - DNA, 25 bp, Homo sapien
ttccctcggagatcagggaggcccc

SEQ ID NO: 3953789 - DNA, 25 bp, Homo sapien
agcccacttgtctgggtcggccaca

SEQ ID NO: 3953790 - DNA, 25 bp, Homo sapien
agctgtcagcatggtttcccgtaaa

SEQ ID NO: 3953791 - DNA, 25 bp, Homo sapien
tcagcatggtttcccgtaaaagaga

SEQ ID NO: 3953792 - DNA, 25 bp, Homo sapien
gaatccggggtaacactgggcagaa

SEQ ID NO: 3953793 - DNA, 25 bp, Homo sapien
gccagcgggacagggcccgaggaat

SEQ ID NO: 3953794 - DNA, 25 bp, Homo sapien
ggctgggcgtctggggggatcgtgg

SEQ ID NO: 3953795 - DNA, 25 bp, Homo sapien
cccaggatcacctcctcgtggggag

SEQ ID NO: 3953796 - DNA, 25 bp, Homo sapien
ggaggtctctcgggcagcctgctct

SEQ ID NO: 3953797 - DNA, 25 bp, Homo sapien
ggcgggctgggcgtctggggggatc

SEQ ID NO: 3953798 - DNA, 25 bp, Homo sapien
ccctaagccttgttggtcctcggca

SEQ ID NO: 3953799 - DNA, 25 bp, Homo sapien
cagtcactggccctaagccttgttg

SEQ ID NO: 3953800 - DNA, 25 bp, Homo sapien
cgtggggactctcgcagtcactggc

SEQ ID NO: 3953801 - DNA, 25 bp, Homo sapien
gttggtcctcggcagctggccccag

SEQ ID NO: 3953802 - DNA, 25 bp, Homo sapien
cagcagaacagcgtgtgtccagccc

SEQ ID NO: 3953803 - DNA, 25 bp, Homo sapien
aacacagcagaacagcgtgtgtcca

SEQ ID NO: 3953804 - DNA, 25 bp, Homo sapien
gaacacagcagaacagcgtgtgtcc

SEQ ID NO: 3953805 - DNA, 25 bp, Homo sapien
gcagaacagcgtgtgtccagccccc

SEQ ID NO: 3953806 - DNA, 25 bp, Homo sapien
aggcgtcgcccacagagcataatgt

SEQ ID NO: 3953807 - DNA, 25 bp, Homo sapien
tgaggcgagagggactcgggctgct

SEQ ID NO: 3953808 - DNA, 25 bp, Homo sapien
tcacacagattgagaccaggcgtcg

SEQ ID NO: 3953809 - DNA, 25 bp, Homo sapien
tgtgcgtccgcattgcagaacacgg

SEQ ID NO: 3953810 - DNA, 25 bp, Homo sapien
tgagccagcgctttgacgcccgcgt

SEQ ID NO: 3953811 - DNA, 25 bp, Homo sapien
gggtctgctccagttccggcagaac

SEQ ID NO: 3953812 - DNA, 25 bp, Homo sapien
acatcctgggtggtcgtgcccccga

SEQ ID NO: 3953813 - DNA, 25 bp, Homo sapien
tgcccccgaggtccttgccggtgtg

SEQ ID NO: 3953814 - DNA, 25 bp, Homo sapien
tcaattcctggtccaaagggcgcct

SEQ ID NO: 3953815 - DNA, 25 bp, Homo sapien
ctatgcctgcccatgtgccgggtct

SEQ ID NO: 3953816 - DNA, 25 bp, Homo sapien
catgtgccgggtctcaattcctggt

SEQ ID NO: 3953817 - DNA, 25 bp, Homo sapien
ttcagtggcgactgcagacaggtgc

SEQ ID NO: 3953818 - DNA, 25 bp, Homo sapien
cagctggactcctggacggtgtctg

SEQ ID NO: 3953819 - DNA, 25 bp, Homo sapien
tgtctgtgggtcctgccagcggcag

SEQ ID NO: 3953820 - DNA, 25 bp, Homo sapien
agcggcagccagactcccacatgga

SEQ ID NO: 3953821 - DNA, 25 bp, Homo sapien
cggttatccggagcttagacgtgcc

SEQ ID NO: 3953822 - DNA, 25 bp, Homo sapien
cttcctctgcggcagaggcgatgga

SEQ ID NO: 3953823 - DNA, 25 bp, Homo sapien
tgggcttccccggtgaatacacata

SEQ ID NO: 3953824 - DNA, 25 bp, Homo sapien
cacataggtcgtcttcttgagcaaa

SEQ ID NO: 3953825 - DNA, 25 bp, Homo sapien
gtctcttgatgtgggaccaaagctg

SEQ ID NO: 3953826 - DNA, 25 bp, Homo sapien
ggcttctgaggaacccctgtcccta

SEQ ID NO: 3953827 - DNA, 25 bp, Homo sapien
catcttcggcgcagagatagcagct

SEQ ID NO: 3953828 - DNA, 25 bp, Homo sapien
acccagccgcgggaatgcaggcctt

SEQ ID NO: 3953829 - DNA, 25 bp, Homo sapien
tcagggctcagtcggcactgtttgg

SEQ ID NO: 3953830 - DNA, 25 bp, Homo sapien
tgcccgccctgcgtccacacctcct

SEQ ID NO: 3953831 - DNA, 25 bp, Homo sapien
tctgtggaccttggtgtgagccacc

SEQ ID NO: 3953832 - DNA, 25 bp, Homo sapien
ctggcatctgcggtgcactggagct

SEQ ID NO: 3953833 - DNA, 25 bp, Homo sapien
cagccctggtacatccaggacaggc

SEQ ID NO: 3953834 - DNA, 25 bp, Homo sapien
gagagtttgagacactcagaccctg

SEQ ID NO: 3953835 - DNA, 25 bp, Homo sapien
gagccgtggcactggcatcaaatgc

SEQ ID NO: 3953836 - DNA, 25 bp, Homo sapien
acctccgctgtagtgagcgtggccc

SEQ ID NO: 3953837 - DNA, 25 bp, Homo sapien
tcaaatgctgacctgctaggaggct

SEQ ID NO: 3953838 - DNA, 25 bp, Homo sapien
gagctcagggtcagggtcggctgga

SEQ ID NO: 3953839 - DNA, 25 bp, Homo sapien
ctgtgtgcccgtctagcctggagct

SEQ ID NO: 3953840 - DNA, 25 bp, Homo sapien
ctgtcccgcctctggtcttggttct

SEQ ID NO: 3953841 - DNA, 25 bp, Homo sapien
aggtgtcccaggttccagttgccac

SEQ ID NO: 3953842 - DNA, 25 bp, Homo sapien
gacaccgtgcctgacaggaagaact

SEQ ID NO: 3953843 - DNA, 25 bp, Homo sapien
tgaagacagacaccggagacaccgt

SEQ ID NO: 3953844 - DNA, 25 bp, Homo sapien
gctgcaagttcagcctgaagacaga

SEQ ID NO: 3953845 - DNA, 25 bp, Homo sapien
aagaacttcgactccctgctgtggg

SEQ ID NO: 3953846 - DNA, 25 bp, Homo sapien
aacaaggaggcacgggaggatgcgg

SEQ ID NO: 3953847 - DNA, 25 bp, Homo sapien
gcacgggaggatgcggagctggacg

SEQ ID NO: 3953848 - DNA, 25 bp, Homo sapien
aggcacgggaggatgcggagctgga

SEQ ID NO: 3953849 - DNA, 25 bp, Homo sapien
aggaggcacgggaggatgcggagct

SEQ ID NO: 3953850 - DNA, 25 bp, Homo sapien
ggtggacgcggacaggcctcccttg

SEQ ID NO: 3953851 - DNA, 25 bp, Homo sapien
agtgcacgccgggtggacgcggaca

SEQ ID NO: 3953852 - DNA, 25 bp, Homo sapien
acgccgggtggacgcggacaggcct

SEQ ID NO: 3953853 - DNA, 25 bp, Homo sapien
cccgggagtgcacgccgggtggacg

SEQ ID NO: 3953854 - DNA, 25 bp, Homo sapien
caataatctgatgcagaagactcag

SEQ ID NO: 3953855 - DNA, 25 bp, Homo sapien
gttaaatgttgcaataatctgatgc

SEQ ID NO: 3953856 - DNA, 25 bp, Homo sapien
tttaagaaatgcacttggattcctg

SEQ ID NO: 3953857 - DNA, 25 bp, Homo sapien
aagaaatgcacttggattcctgcca

SEQ ID NO: 3953858 - DNA, 25 bp, Homo sapien
aggacacaggagactagcagaagga

SEQ ID NO: 3953859 - DNA, 25 bp, Homo sapien
taccatccgcagatgggtgcagcag

SEQ ID NO: 3953860 - DNA, 25 bp, Homo sapien
gggaagggagtaccatccgcagatg

SEQ ID NO: 3953861 - DNA, 25 bp, Homo sapien
ggacacaggagactagcagaaggaa

SEQ ID NO: 3953862 - DNA, 25 bp, Homo sapien
gactctgagccccctgatgctgtga

SEQ ID NO: 3953863 - DNA, 25 bp, Homo sapien
taggcagggacacgagtgtagactc

SEQ ID NO: 3953864 - DNA, 25 bp, Homo sapien
ccagttcacgtaggcagggacacga

SEQ ID NO: 3953865 - DNA, 25 bp, Homo sapien
gcaccgttcacctggcagaccagag

SEQ ID NO: 3953866 - DNA, 25 bp, Homo sapien
cgagtgtagactcccggcctgttgg

SEQ ID NO: 3953867 - DNA, 25 bp, Homo sapien
gacagagaaggcgagcattgggagc

SEQ ID NO: 3953868 - DNA, 25 bp, Homo sapien
aggacagagaaggcgagcattggga

SEQ ID NO: 3953869 - DNA, 25 bp, Homo sapien
cgagcattgggagccgagaagatgg

SEQ ID NO: 3953870 - DNA, 25 bp, Homo sapien
agaaggcgagcattgggagccgaga

SEQ ID NO: 3953871 - DNA, 25 bp, Homo sapien
atagtcccggcggcaggtctctgtg

SEQ ID NO: 3953872 - DNA, 25 bp, Homo sapien
ctgtgtccaccacggagactttcac

SEQ ID NO: 3953873 - DNA, 25 bp, Homo sapien
tttcacctcccgcaggctgtacggg

SEQ ID NO: 3953874 - DNA, 25 bp, Homo sapien
gcatgtcgggctgaaggatgctgcc

SEQ ID NO: 3953875 - DNA, 25 bp, Homo sapien
aggatgatctgcctcacggtggaga

SEQ ID NO: 3953876 - DNA, 25 bp, Homo sapien
gaggcagacgggcaggatccggctg

SEQ ID NO: 3953877 - DNA, 25 bp, Homo sapien
gcacctggtagtcggatgagttcag

SEQ ID NO: 3953878 - DNA, 25 bp, Homo sapien
caggatccggctggagagggtcacg

SEQ ID NO: 3953879 - DNA, 25 bp, Homo sapien
gtgacccgccgcacacgtgcaccct

SEQ ID NO: 3953880 - DNA, 25 bp, Homo sapien
cacgtgcaccctccgcaggcggagg

SEQ ID NO: 3953881 - DNA, 25 bp, Homo sapien
agcgtgaccccccacgatccggccg

SEQ ID NO: 3953882 - DNA, 25 bp, Homo sapien
tgcatccgaaacctgcggccggcca

SEQ ID NO: 3953883 - DNA, 25 bp, Homo sapien
tggctgcaaagtcctgagggacaca

SEQ ID NO: 3953884 - DNA, 25 bp, Homo sapien
ctggctgcaaagtcctgagggacac

SEQ ID NO: 3953885 - DNA, 25 bp, Homo sapien
ggctgcaaagtcctgagggacacac

SEQ ID NO: 3953886 - DNA, 25 bp, Homo sapien
gaggggtgtgcgggctccagaggcc

SEQ ID NO: 3953887 - DNA, 25 bp, Homo sapien
aggggtgtgcgggctccagaggccc

SEQ ID NO: 3953888 - DNA, 25 bp, Homo sapien
agaggggtgtgcgggctccagaggc

SEQ ID NO: 3953889 - DNA, 25 bp, Homo sapien
cagcaggaggccacaggccccaagg

SEQ ID NO: 3953890 - DNA, 25 bp, Homo sapien
gcagcaggaggccacaggccccaag

SEQ ID NO: 3953891 - DNA, 25 bp, Homo sapien
aggagcagcaggaggccacaggccc

SEQ ID NO: 3953892 - DNA, 25 bp, Homo sapien
gagcagcaggaggccacaggcccca

SEQ ID NO: 3953893 - DNA, 25 bp, Homo sapien
aggagggccagcctgacccttggac

SEQ ID NO: 3953894 - DNA, 25 bp, Homo sapien
tgtctgcccactgtagggagaagga

SEQ ID NO: 3953895 - DNA, 25 bp, Homo sapien
ggggataggggtggccacacacctg

SEQ ID NO: 3953896 - DNA, 25 bp, Homo sapien
ccagcctgacccttggacctgctgg

SEQ ID NO: 3953897 - DNA, 25 bp, Homo sapien
taaggacaacaccagcatgcggggc

SEQ ID NO: 3953898 - DNA, 25 bp, Homo sapien
cacgccagcacgtggggtagccaag

SEQ ID NO: 3953899 - DNA, 25 bp, Homo sapien
cagtgtttttcctggtgaccaataa

SEQ ID NO: 3953900 - DNA, 25 bp, Homo sapien
gtagccaaggctcagaactggaggt

SEQ ID NO: 3953901 - DNA, 25 bp, Homo sapien
cagcactcaggaggattagcgccca

SEQ ID NO: 3953902 - DNA, 25 bp, Homo sapien
ccatgcactttaatgaggtccagca

SEQ ID NO: 3953903 - DNA, 25 bp, Homo sapien
ttaatgaggtccagcactcaggagg

SEQ ID NO: 3953904 - DNA, 25 bp, Homo sapien
actcaggaggattagcgcccaccac

SEQ ID NO: 3953905 - DNA, 25 bp, Homo sapien
ggctttttggggacatagtggtgga

SEQ ID NO: 3953906 - DNA, 25 bp, Homo sapien
ctttttggggacatagtggtggatc

SEQ ID NO: 3953907 - DNA, 25 bp, Homo sapien
ttttggggacatagtggtggatcca

SEQ ID NO: 3953908 - DNA, 25 bp, Homo sapien
gtgtagatgccaggccggttgggct

SEQ ID NO: 3953909 - DNA, 25 bp, Homo sapien
tggcatgagtccctccgggtgttcc

SEQ ID NO: 3953910 - DNA, 25 bp, Homo sapien
ccaaggtggtattttgcgtcacaaa

SEQ ID NO: 3953911 - DNA, 25 bp, Homo sapien
tgcggacgtcgtctcccgtgtaggc

SEQ ID NO: 3953912 - DNA, 25 bp, Homo sapien
ggcacacagcatgtcgtcacggacg

SEQ ID NO: 3953913 - DNA, 25 bp, Homo sapien
cattgtccacatcgccccagccagt

SEQ ID NO: 3953914 - DNA, 25 bp, Homo sapien
tcattgtccacatcgccccagccag

SEQ ID NO: 3953915 - DNA, 25 bp, Homo sapien
attgtccacatcgccccagccagtg

SEQ ID NO: 3953916 - DNA, 25 bp, Homo sapien
tgtccacatcgccccagccagtgac

SEQ ID NO: 3953917 - DNA, 25 bp, Homo sapien
ggtgaccgtgtggacgtggctggag

SEQ ID NO: 3953918 - DNA, 25 bp, Homo sapien
cagggggcagggtgaccgtgtggac

SEQ ID NO: 3953919 - DNA, 25 bp, Homo sapien
agggtgaccgtgtggacgtggctgg

SEQ ID NO: 3953920 - DNA, 25 bp, Homo sapien
agggggcagggtgaccgtgtggacg

SEQ ID NO: 3953921 - DNA, 25 bp, Homo sapien
cgatgtccgctccgatctgggcggt

SEQ ID NO: 3953922 - DNA, 25 bp, Homo sapien
ggcgatgtccgctccgatctgggcg

SEQ ID NO: 3953923 - DNA, 25 bp, Homo sapien
tgtccgctccgatctgggcggtgta

SEQ ID NO: 3953924 - DNA, 25 bp, Homo sapien
ccgctccgatctgggcggtgtagaa

SEQ ID NO: 3953925 - DNA, 25 bp, Homo sapien
ctgtgggtgcacgatgatcctgctg

SEQ ID NO: 3953926 - DNA, 25 bp, Homo sapien
tgtgggtgcacgatgatcctgctga

SEQ ID NO: 3953927 - DNA, 25 bp, Homo sapien
gtgggtgcacgatgatcctgctgac

SEQ ID NO: 3953928 - DNA, 25 bp, Homo sapien
gtcctggtagtagaggtgctgctcc

SEQ ID NO: 3953929 - DNA, 25 bp, Homo sapien
cctggtagtagaggtgctgctcccg

SEQ ID NO: 3953930 - DNA, 25 bp, Homo sapien
ctggtcctggtagtagaggtgctgc

SEQ ID NO: 3953931 - DNA, 25 bp, Homo sapien
agcagctggtcctggtagtagaggt

SEQ ID NO: 3953932 - DNA, 25 bp, Homo sapien
ctgagggcggccagatccttgacgt

SEQ ID NO: 3953933 - DNA, 25 bp, Homo sapien
tgagggcggccagatccttgacgtc

SEQ ID NO: 3953934 - DNA, 25 bp, Homo sapien
gagggcggccagatccttgacgtcc

SEQ ID NO: 3953935 - DNA, 25 bp, Homo sapien
ggcagcggaggatcccactcagggc

SEQ ID NO: 3953936 - DNA, 25 bp, Homo sapien
gcagcggaggatcccactcagggcc

SEQ ID NO: 3953937 - DNA, 25 bp, Homo sapien
gggcagcggaggatcccactcaggg

SEQ ID NO: 3953938 - DNA, 25 bp, Homo sapien
tgggcagcggaggatcccactcagg

SEQ ID NO: 3953939 - DNA, 25 bp, Homo sapien
gaagtgcatccagtatcggtcgcgg

SEQ ID NO: 3953940 - DNA, 25 bp, Homo sapien
ggtcccacgcagtgcgctgcggtca

SEQ ID NO: 3953941 - DNA, 25 bp, Homo sapien
tatcggtcgcggactctcaggctca

SEQ ID NO: 3953942 - DNA, 25 bp, Homo sapien
ccccgcagaagtgcatccagtatcg

SEQ ID NO: 3953943 - DNA, 25 bp, Homo sapien
cctcctgacccccaacgatgcccac

SEQ ID NO: 3953944 - DNA, 25 bp, Homo sapien
cctgacccccaacgatgcccactcg

SEQ ID NO: 3953945 - DNA, 25 bp, Homo sapien
tgccagggccacttgctcctggggg

SEQ ID NO: 3953946 - DNA, 25 bp, Homo sapien
agggccacttgctcctgggggcctc

SEQ ID NO: 3953947 - DNA, 25 bp, Homo sapien
gggccgcgtaggcgcggctcgccag

SEQ ID NO: 3953948 - DNA, 25 bp, Homo sapien
caggggccgcgtaggcgcggctcgc

SEQ ID NO: 3953949 - DNA, 25 bp, Homo sapien
aggggccgcgtaggcgcggctcgcc

SEQ ID NO: 3953950 - DNA, 25 bp, Homo sapien
tgggggctacagattgtggggtgaa

SEQ ID NO: 3953951 - DNA, 25 bp, Homo sapien
gctgggggctacagattgtggggtg

SEQ ID NO: 3953952 - DNA, 25 bp, Homo sapien
gggtgaagaatggagctgggacggg

SEQ ID NO: 3953953 - DNA, 25 bp, Homo sapien
ctgggggctacagattgtggggtga

SEQ ID NO: 3953954 - DNA, 25 bp, Homo sapien
gcttcctacccaggtggcgactgcc

SEQ ID NO: 3953955 - DNA, 25 bp, Homo sapien
tgcttcctacccaggtggcgactgc

SEQ ID NO: 3953956 - DNA, 25 bp, Homo sapien
ctgcttcctacccaggtggcgactg

SEQ ID NO: 3953957 - DNA, 25 bp, Homo sapien
tgtagacgccgggaaagtcccgcag

SEQ ID NO: 3953958 - DNA, 25 bp, Homo sapien
caccccggcatcagggaggtcctgg

SEQ ID NO: 3953959 - DNA, 25 bp, Homo sapien
gctctttaatcagacagagacgcag

SEQ ID NO: 3953960 - DNA, 25 bp, Homo sapien
caggatccagagcacgtagatctgg

SEQ ID NO: 3953961 - DNA, 25 bp, Homo sapien
tgctcacagacggcgttctccagca

SEQ ID NO: 3953962 - DNA, 25 bp, Homo sapien
gaggcgttgcggtagggctgctcac

SEQ ID NO: 3953963 - DNA, 25 bp, Homo sapien
gtagcaggagtctcggccctcgctg

SEQ ID NO: 3953964 - DNA, 25 bp, Homo sapien
gctgccggtcgccagtgtgccctga

SEQ ID NO: 3953965 - DNA, 25 bp, Homo sapien
caggcggtagggcggcggcagcgac

SEQ ID NO: 3953966 - DNA, 25 bp, Homo sapien
ctgcaggcggtagggcggcggcagc

SEQ ID NO: 3953967 - DNA, 25 bp, Homo sapien
tgcaggcggtagggcggcggcagcg

SEQ ID NO: 3953968 - DNA, 25 bp, Homo sapien
aggcggtagggcggcggcagcgact

SEQ ID NO: 3953969 - DNA, 25 bp, Homo sapien
ggagcagggccacatccgcacccag

SEQ ID NO: 3953970 - DNA, 25 bp, Homo sapien
gctggagcagggccacatccgcacc

SEQ ID NO: 3953971 - DNA, 25 bp, Homo sapien
gcagggccacatccgcacccagccc

SEQ ID NO: 3953972 - DNA, 25 bp, Homo sapien
tggagcagggccacatccgcaccca

SEQ ID NO: 3953973 - DNA, 25 bp, Homo sapien
gatgatccggctgacgttcagcagc

SEQ ID NO: 3953974 - DNA, 25 bp, Homo sapien
cccagcgtggatccggtagatggac

SEQ ID NO: 3953975 - DNA, 25 bp, Homo sapien
gtggacgatgatccggctgacgttc

SEQ ID NO: 3953976 - DNA, 25 bp, Homo sapien
ccgtagagatacacgtccccagcgt

SEQ ID NO: 3953977 - DNA, 25 bp, Homo sapien
cacagatgtgcgcccaggaggccca

SEQ ID NO: 3953978 - DNA, 25 bp, Homo sapien
accaggtcattctctgggacgggca

SEQ ID NO: 3953979 - DNA, 25 bp, Homo sapien
acagatgtgcgcccaggaggcccag

SEQ ID NO: 3953980 - DNA, 25 bp, Homo sapien
caccctcctgcaatgccaggagctt

SEQ ID NO: 3953981 - DNA, 25 bp, Homo sapien
ctgggaacaaccaaaggaggtcagg

SEQ ID NO: 3953982 - DNA, 25 bp, Homo sapien
gaacaaccaaaggaggtcagggagc

SEQ ID NO: 3953983 - DNA, 25 bp, Homo sapien
ctgcaatgccaggagcttccaggcc

SEQ ID NO: 3953984 - DNA, 25 bp, Homo sapien
ctcgacgagggggtcagctctccgt

SEQ ID NO: 3953985 - DNA, 25 bp, Homo sapien
tccctgagggtccagtgtgggattg

SEQ ID NO: 3953986 - DNA, 25 bp, Homo sapien
gtcctagcccagtccctgagggtcc

SEQ ID NO: 3953987 - DNA, 25 bp, Homo sapien
ggtcagctctccgtcctagcccagt

SEQ ID NO: 3953988 - DNA, 25 bp, Homo sapien
tgtcagggatatagggacaccaccc

SEQ ID NO: 3953989 - DNA, 25 bp, Homo sapien
tgcaaaagtatcagccagagggcct

SEQ ID NO: 3953990 - DNA, 25 bp, Homo sapien
gggtcaggaatagcagccacagcat

SEQ ID NO: 3953991 - DNA, 25 bp, Homo sapien
aatgtctacggtgcacaggatggcc

SEQ ID NO: 3953992 - DNA, 25 bp, Homo sapien
gcaaatgcctgtttcagcccaggtg

SEQ ID NO: 3953993 - DNA, 25 bp, Homo sapien
tgctttgccatgagattgtaaccag

SEQ ID NO: 3953994 - DNA, 25 bp, Homo sapien
gaacacaagggagcactgtgaatgg

SEQ ID NO: 3953995 - DNA, 25 bp, Homo sapien
cacacagggagatcttctggatggg

SEQ ID NO: 3953996 - DNA, 25 bp, Homo sapien
aagcatgtgcatacgtgatgtgtgc

SEQ ID NO: 3953997 - DNA, 25 bp, Homo sapien
tgtgcgcgtcagtttgcatgtgttt

SEQ ID NO: 3953998 - DNA, 25 bp, Homo sapien
tgagtttgtacattgtgcgtgtgca

SEQ ID NO: 3953999 - DNA, 25 bp, Homo sapien
aaagtgcgtgcatgtttgaaagcat

SEQ ID NO: 3954000 - DNA, 25 bp, Homo sapien
accagccaagatccgcgaagcacag

SEQ ID NO: 3954001 - DNA, 25 bp, Homo sapien
gatccgcgaagcacagccagtctga

SEQ ID NO: 3954002 - DNA, 25 bp, Homo sapien
cggggcgagcgtggccagggcttcc

SEQ ID NO: 3954003 - DNA, 25 bp, Homo sapien
tcgaaccagccaagatccgcgaagc

SEQ ID NO: 3954004 - DNA, 25 bp, Homo sapien
agattcctgtccctcatcagggtgg

SEQ ID NO: 3954005 - DNA, 25 bp, Homo sapien
gggtggcccctttgtccctgtggca

SEQ ID NO: 3954006 - DNA, 25 bp, Homo sapien
cagggcctgagaacagctatcgtgt

SEQ ID NO: 3954007 - DNA, 25 bp, Homo sapien
ccgtcgtgtagcaggtggcgtggtt

SEQ ID NO: 3954008 - DNA, 25 bp, Homo sapien
gggatggccgtcgggtggcaggtga

SEQ ID NO: 3954009 - DNA, 25 bp, Homo sapien
atggccatcgtgtagcaggtgatgt

SEQ ID NO: 3954010 - DNA, 25 bp, Homo sapien
ctggggatggccgtcgggtggcagg

SEQ ID NO: 3954011 - DNA, 25 bp, Homo sapien
ctggggatggccatcgtgtagcagg

SEQ ID NO: 3954012 - DNA, 25 bp, Homo sapien
acagccattgggtagcaggtgatgt

SEQ ID NO: 3954013 - DNA, 25 bp, Homo sapien
tgggtagcaggtgatgtgggtaaag

SEQ ID NO: 3954014 - DNA, 25 bp, Homo sapien
ggacagccattgggtagcaggtgat

SEQ ID NO: 3954015 - DNA, 25 bp, Homo sapien
cattgggtagcaggtgatgtgggta

SEQ ID NO: 3954016 - DNA, 25 bp, Homo sapien
ctgcatggttggcaccctgccagct

SEQ ID NO: 3954017 - DNA, 25 bp, Homo sapien
atggttggcaccctgccagctggtc

SEQ ID NO: 3954018 - DNA, 25 bp, Homo sapien
tgcatggttggcaccctgccagctg

SEQ ID NO: 3954019 - DNA, 25 bp, Homo sapien
ccgtcgggtagcaggtgacgtgggt

SEQ ID NO: 3954020 - DNA, 25 bp, Homo sapien
ccagggcacataggtctggactcac

SEQ ID NO: 3954021 - DNA, 25 bp, Homo sapien
gatccagggcacataggtctggact

SEQ ID NO: 3954022 - DNA, 25 bp, Homo sapien
caggatccagggcacataggtctgg

SEQ ID NO: 3954023 - DNA, 25 bp, Homo sapien
tccagggcacataggtctggactca

SEQ ID NO: 3954024 - DNA, 25 bp, Homo sapien
ctggagccaggtacccttcttcttg

SEQ ID NO: 3954025 - DNA, 25 bp, Homo sapien
gatcactgtaaaatccccagctcac

SEQ ID NO: 3954026 - DNA, 25 bp, Homo sapien
tcttcttgcagaccagggggctgcc

SEQ ID NO: 3954027 - DNA, 25 bp, Homo sapien
tgtagacgccaatgctgggccgatc

SEQ ID NO: 3954028 - DNA, 25 bp, Homo sapien
tcatcctggatgaactttctgtctc

SEQ ID NO: 3954029 - DNA, 25 bp, Homo sapien
gccgctcacagtctgcattgctcag

SEQ ID NO: 3954030 - DNA, 25 bp, Homo sapien
ggcccgtgcggccggcacagatcat

SEQ ID NO: 3954031 - DNA, 25 bp, Homo sapien
caccaggaaaagcatcgtaggtctg

SEQ ID NO: 3954032 - DNA, 25 bp, Homo sapien
cgggcggtaaggaggcggcagcata

SEQ ID NO: 3954033 - DNA, 25 bp, Homo sapien
ctgcgggcggtaaggaggcggcagc

SEQ ID NO: 3954034 - DNA, 25 bp, Homo sapien
gggcggtaaggaggcggcagcatat

SEQ ID NO: 3954035 - DNA, 25 bp, Homo sapien
tgcgggcggtaaggaggcggcagca

SEQ ID NO: 3954036 - DNA, 25 bp, Homo sapien
acaggccgaccatgccccagcctgt

SEQ ID NO: 3954037 - DNA, 25 bp, Homo sapien
cagcctgtgttccagcagttgtcac

SEQ ID NO: 3954038 - DNA, 25 bp, Homo sapien
cccagcctgtgttccagcagttgtc

SEQ ID NO: 3954039 - DNA, 25 bp, Homo sapien
tgtcactgtcagtgaactccaggga

SEQ ID NO: 3954040 - DNA, 25 bp, Homo sapien
ttgggtggacgacgatctggctgac

SEQ ID NO: 3954041 - DNA, 25 bp, Homo sapien
tatgacggcagggcgactgccgcga

SEQ ID NO: 3954042 - DNA, 25 bp, Homo sapien
aggaagaagacagagtagttgggtg

SEQ ID NO: 3954043 - DNA, 25 bp, Homo sapien
tgttctcacactggtggccagcttc

SEQ ID NO: 3954044 - DNA, 25 bp, Homo sapien
cctggtgtgaatccggtaggtggac

SEQ ID NO: 3954045 - DNA, 25 bp, Homo sapien
cccgtacagatacacatccctggtg

SEQ ID NO: 3954046 - DNA, 25 bp, Homo sapien
tacagatacacatccctggtgtgaa

SEQ ID NO: 3954047 - DNA, 25 bp, Homo sapien
tgtgaatccggtaggtggacgggtc

SEQ ID NO: 3954048 - DNA, 25 bp, Homo sapien
ggaaaatgcagtgagcggcggtcag

SEQ ID NO: 3954049 - DNA, 25 bp, Homo sapien
cggaaaatgcagtgagcggcggtca

SEQ ID NO: 3954050 - DNA, 25 bp, Homo sapien
gaaaatgcagtgagcggcggtcagc

SEQ ID NO: 3954051 - DNA, 25 bp, Homo sapien
accaggtcattctcggggacgggag

SEQ ID NO: 3954052 - DNA, 25 bp, Homo sapien
gcccaccaggtcattctcggggacg

SEQ ID NO: 3954053 - DNA, 25 bp, Homo sapien
cccaccaggtcattctcggggacgg

SEQ ID NO: 3954054 - DNA, 25 bp, Homo sapien
tgcccaccaggtcattctcggggac

SEQ ID NO: 3954055 - DNA, 25 bp, Homo sapien
ggactcccagtgctacagctcccca

SEQ ID NO: 3954056 - DNA, 25 bp, Homo sapien
tggactcccagtgctacagctcccc

SEQ ID NO: 3954057 - DNA, 25 bp, Homo sapien
caagtctccacccaccccgcagcct

SEQ ID NO: 3954058 - DNA, 25 bp, Homo sapien
cctccaagtctccacccaccccgca

SEQ ID NO: 3954059 - DNA, 25 bp, Homo sapien
tccaagtctccacccaccccgcagc

SEQ ID NO: 3954060 - DNA, 25 bp, Homo sapien
aagtctccacccaccccgcagcctg

SEQ ID NO: 3954061 - DNA, 25 bp, Homo sapien
gacaggaccactgtgtcccgttcag

SEQ ID NO: 3954062 - DNA, 25 bp, Homo sapien
cccgttcagggtcttaggggcagct

SEQ ID NO: 3954063 - DNA, 25 bp, Homo sapien
cctcgtggtgcgcaggctgtggctg

SEQ ID NO: 3954064 - DNA, 25 bp, Homo sapien
ctcgtggtgcgcaggctgtggctgt

SEQ ID NO: 3954065 - DNA, 25 bp, Homo sapien
atgatggggacctcggcctcttgca

SEQ ID NO: 3954066 - DNA, 25 bp, Homo sapien
caagctcgggtcctcatgatgggga

SEQ ID NO: 3954067 - DNA, 25 bp, Homo sapien
gtgatacatcctctcgcaagctcgg

SEQ ID NO: 3954068 - DNA, 25 bp, Homo sapien
gggcctttgtgatacatcctctcgc

SEQ ID NO: 3954069 - DNA, 25 bp, Homo sapien
ctggtgggctcaggccgtccgtcca

SEQ ID NO: 3954070 - DNA, 25 bp, Homo sapien
tggtgggctcaggccgtccgtccat

SEQ ID NO: 3954071 - DNA, 25 bp, Homo sapien
agaggacagctagctcatccttggg

SEQ ID NO: 3954072 - DNA, 25 bp, Homo sapien
ctcttcccactgaatctggagggag

SEQ ID NO: 3954073 - DNA, 25 bp, Homo sapien
ttcccactgaatctggagggagtgg

SEQ ID NO: 3954074 - DNA, 25 bp, Homo sapien
gaatctggagggagtggggtgtgga

SEQ ID NO: 3954075 - DNA, 25 bp, Homo sapien
tgaatctggagggagtggggtgtgg

SEQ ID NO: 3954076 - DNA, 25 bp, Homo sapien
ctagcgtctggggaacggcgggacg

SEQ ID NO: 3954077 - DNA, 25 bp, Homo sapien
gatagccgcgaaggccgcagagttt

SEQ ID NO: 3954078 - DNA, 25 bp, Homo sapien
aggccgcagagtttgccccagctca

SEQ ID NO: 3954079 - DNA, 25 bp, Homo sapien
tcacgcgggtgtacatgccgggata

SEQ ID NO: 3954080 - DNA, 25 bp, Homo sapien
aggacacgtagctcgtcacgcgggt

SEQ ID NO: 3954081 - DNA, 25 bp, Homo sapien
tgcacaggagggggcccccgttgtc

SEQ ID NO: 3954082 - DNA, 25 bp, Homo sapien
ctgcacaggagggggcccccgttgt

SEQ ID NO: 3954083 - DNA, 25 bp, Homo sapien
tggttggaaggaaagcggcggcgac

SEQ ID NO: 3954084 - DNA, 25 bp, Homo sapien
catgtcgtccttgatgagccgctca

SEQ ID NO: 3954085 - DNA, 25 bp, Homo sapien
gtctggttacagaggacgttgctcc

SEQ ID NO: 3954086 - DNA, 25 bp, Homo sapien
gagccgctcaaaccgctcagtgtgg

SEQ ID NO: 3954087 - DNA, 25 bp, Homo sapien
cttcaccgtcgcctcccacaagctg

SEQ ID NO: 3954088 - DNA, 25 bp, Homo sapien
tcaccgtcgcctcccacaagctgag

SEQ ID NO: 3954089 - DNA, 25 bp, Homo sapien
accgtcgcctcccacaagctgaggg

SEQ ID NO: 3954090 - DNA, 25 bp, Homo sapien
aagctgaggggccagggcagtagtt

SEQ ID NO: 3954091 - DNA, 25 bp, Homo sapien
gacggacgatctcaaccaccttcgt

SEQ ID NO: 3954092 - DNA, 25 bp, Homo sapien
cagacgggagcgagaccgggtggat

SEQ ID NO: 3954093 - DNA, 25 bp, Homo sapien
ggtcgtcctcatagagcctcagctg

SEQ ID NO: 3954094 - DNA, 25 bp, Homo sapien
gcagacaggctctcgttgtactggg

SEQ ID NO: 3954095 - DNA, 25 bp, Homo sapien
taaacgcgcaagcctccaactcctc

SEQ ID NO: 3954096 - DNA, 25 bp, Homo sapien
ctaaacgcgcaagcctccaactcct

SEQ ID NO: 3954097 - DNA, 25 bp, Homo sapien
aaacgcgcaagcctccaactcctcc

SEQ ID NO: 3954098 - DNA, 25 bp, Homo sapien
ggcagtgggcggcggtcagcaccca

SEQ ID NO: 3954099 - DNA, 25 bp, Homo sapien
ccaaggcagtgggcggcggtcagca

SEQ ID NO: 3954100 - DNA, 25 bp, Homo sapien
ggcccaaggcagtgggcggcggtca

SEQ ID NO: 3954101 - DNA, 25 bp, Homo sapien
gcagtgggcggcggtcagcacccac

SEQ ID NO: 3954102 - DNA, 25 bp, Homo sapien
cttcatgctgtagaacctcaggctg

SEQ ID NO: 3954103 - DNA, 25 bp, Homo sapien
ttcatgctgtagaacctcaggctga

SEQ ID NO: 3954104 - DNA, 25 bp, Homo sapien
ggagcccccacagatgggctcccac

SEQ ID NO: 3954105 - DNA, 25 bp, Homo sapien
aggggtgcctcctggccgagacgtc

SEQ ID NO: 3954106 - DNA, 25 bp, Homo sapien
ccaccagctcacgccccgtgccggg

SEQ ID NO: 3954107 - DNA, 25 bp, Homo sapien
tgcctcctggccgagacgtcgcagc

SEQ ID NO: 3954108 - DNA, 25 bp, Homo sapien
gccgagacgtcgcagcccccagtga

SEQ ID NO: 3954109 - DNA, 25 bp, Homo sapien
tcaacaccacgaagagaagcagcag

SEQ ID NO: 3954110 - DNA, 25 bp, Homo sapien
aatggtcaacaccacgaagagaagc

SEQ ID NO: 3954111 - DNA, 25 bp, Homo sapien
acaccacgaagagaagcagcagcga

SEQ ID NO: 3954112 - DNA, 25 bp, Homo sapien
tctgagaaatggtcaacaccacgaa

SEQ ID NO: 3954113 - DNA, 25 bp, Homo sapien
gtatctcttcatctgcccgctcatt

SEQ ID NO: 3954114 - DNA, 25 bp, Homo sapien
tatctcttcatctgcccgctcattt

SEQ ID NO: 3954115 - DNA, 25 bp, Homo sapien
tcttcatctgcccgctcatttttat

SEQ ID NO: 3954116 - DNA, 25 bp, Homo sapien
tcatctgcccgctcatttttatcct

SEQ ID NO: 3954117 - DNA, 25 bp, Homo sapien
cacatcattggctacatgagaccca

SEQ ID NO: 3954118 - DNA, 25 bp, Homo sapien
gaggggacaagcatgtacagacacc

SEQ ID NO: 3954119 - DNA, 25 bp, Homo sapien
ggctccgggaattaggacacggaca

SEQ ID NO: 3954120 - DNA, 25 bp, Homo sapien
cacggacatatctgtggggagccac

SEQ ID NO: 3954121 - DNA, 25 bp, Homo sapien
cattcgaacaggagtgcatccagag

SEQ ID NO: 3954122 - DNA, 25 bp, Homo sapien
gagtgcatccagagacgaggtggga

SEQ ID NO: 3954123 - DNA, 25 bp, Homo sapien
acaggagtgcatccagagacgaggt

SEQ ID NO: 3954124 - DNA, 25 bp, Homo sapien
tcgaacaggagtgcatccagagacg

SEQ ID NO: 3954125 - DNA, 25 bp, Homo sapien
ctgcatcccggaaactccatgccca

SEQ ID NO: 3954126 - DNA, 25 bp, Homo sapien
ctcaatgccacctcctctaggaagg

SEQ ID NO: 3954127 - DNA, 25 bp, Homo sapien
ggctgcccggacctgtgagggtgtt

SEQ ID NO: 3954128 - DNA, 25 bp, Homo sapien
tcctcacaatagtgtggctctggct

SEQ ID NO: 3954129 - DNA, 25 bp, Homo sapien
ctgaggatgcacaactgagggagcc

SEQ ID NO: 3954130 - DNA, 25 bp, Homo sapien
aagatggcgttggaaccttagccca

SEQ ID NO: 3954131 - DNA, 25 bp, Homo sapien
gaattctctagatgcctgagccatg

SEQ ID NO: 3954132 - DNA, 25 bp, Homo sapien
tccttgaaaacgtgtgccaggtgca

SEQ ID NO: 3954133 - DNA, 25 bp, Homo sapien
tgagggtggcaatgaatgagtaagt

SEQ ID NO: 3954134 - DNA, 25 bp, Homo sapien
gtgatggagggatcgaatgaatgag

SEQ ID NO: 3954135 - DNA, 25 bp, Homo sapien
agagggaaggaatgattgagtgatg

SEQ ID NO: 3954136 - DNA, 25 bp, Homo sapien
atgagtgagtgagggtggcaatgaa

SEQ ID NO: 3954137 - DNA, 25 bp, Homo sapien
cccggtttagggagcatccacactt

SEQ ID NO: 3954138 - DNA, 25 bp, Homo sapien
tgcgacgcttcagaggatccttagg

SEQ ID NO: 3954139 - DNA, 25 bp, Homo sapien
tttcacagggcgctgaactcgcggg

SEQ ID NO: 3954140 - DNA, 25 bp, Homo sapien
tgaatgaatgtggtcactccccgcg

SEQ ID NO: 3954141 - DNA, 25 bp, Homo sapien
cattcagagaggtccgttccctagg

SEQ ID NO: 3954142 - DNA, 25 bp, Homo sapien
agacgggacggatcctcagtttgcc

SEQ ID NO: 3954143 - DNA, 25 bp, Homo sapien
tagagaacctatgcaacggaagacg

SEQ ID NO: 3954144 - DNA, 25 bp, Homo sapien
tcaagaaacgttgcctttgggtaga

SEQ ID NO: 3954145 - DNA, 25 bp, Homo sapien
acaggctgcggccactcaggaagcc

SEQ ID NO: 3954146 - DNA, 25 bp, Homo sapien
ggctgcggccactcaggaagcccat

SEQ ID NO: 3954147 - DNA, 25 bp, Homo sapien
gcacaggctgcggccactcaggaag

SEQ ID NO: 3954148 - DNA, 25 bp, Homo sapien
cgggcacaggctgcggccactcagg

SEQ ID NO: 3954149 - DNA, 25 bp, Homo sapien
aaaagaagtcacaacggaagaggtg

SEQ ID NO: 3954150 - DNA, 25 bp, Homo sapien
caaccgttgattggaattccaagca

SEQ ID NO: 3954151 - DNA, 25 bp, Homo sapien
tgattctgttcaaccgttgattgga

SEQ ID NO: 3954152 - DNA, 25 bp, Homo sapien
ttgattggaattccaagcaaatgca

SEQ ID NO: 3954153 - DNA, 25 bp, Homo sapien
cagtaagaaggctgccatgacgtcc

SEQ ID NO: 3954154 - DNA, 25 bp, Homo sapien
ccaccgctggagagagcggatgttc

SEQ ID NO: 3954155 - DNA, 25 bp, Homo sapien
ccagtgggatctgccgtagcgcaca

SEQ ID NO: 3954156 - DNA, 25 bp, Homo sapien
gatgttctgaacgtttcccctggac

SEQ ID NO: 3954157 - DNA, 25 bp, Homo sapien
cgtgttcgcactcaggacagccacg

SEQ ID NO: 3954158 - DNA, 25 bp, Homo sapien
agcagcgcgctcacgcgtgttcgca

SEQ ID NO: 3954159 - DNA, 25 bp, Homo sapien
agctgctggtgtcgcccgtgtgctc

SEQ ID NO: 3954160 - DNA, 25 bp, Homo sapien
agcacggcttgagggccaacaccgt

SEQ ID NO: 3954161 - DNA, 25 bp, Homo sapien
ggacggtctgcggtggtgtcttcgc

SEQ ID NO: 3954162 - DNA, 25 bp, Homo sapien
gatggtcgcggtgtgggacggtctg

SEQ ID NO: 3954163 - DNA, 25 bp, Homo sapien
cggtggtgtcttcgcgttccccagg

SEQ ID NO: 3954164 - DNA, 25 bp, Homo sapien
gtgtcttcgcgttccccagggagtg

SEQ ID NO: 3954165 - DNA, 25 bp, Homo sapien
ttcgtggcgcgttggctttctggta

SEQ ID NO: 3954166 - DNA, 25 bp, Homo sapien
cagatgcagtggtcggtaggagcga

SEQ ID NO: 3954167 - DNA, 25 bp, Homo sapien
caggaagctgcctgcggatgttgca

SEQ ID NO: 3954168 - DNA, 25 bp, Homo sapien
aagctgtaggtgttcgtggcgcgtt

SEQ ID NO: 3954169 - DNA, 25 bp, Homo sapien
gaaatagcctagaatatcaactgtg

SEQ ID NO: 3954170 - DNA, 25 bp, Homo sapien
aaaagcccgtatatcctggaagcag

SEQ ID NO: 3954171 - DNA, 25 bp, Homo sapien
tcggaacagccgactctggaagggc

SEQ ID NO: 3954172 - DNA, 25 bp, Homo sapien
gctatgtccctggacgtctcctgca

SEQ ID NO: 3954173 - DNA, 25 bp, Homo sapien
caaggctctgttccctgtgtgcaaa

SEQ ID NO: 3954174 - DNA, 25 bp, Homo sapien
gacagtgcctgcctccaaaaagtgc

SEQ ID NO: 3954175 - DNA, 25 bp, Homo sapien
caagcagaggcctacacgatttact

SEQ ID NO: 3954176 - DNA, 25 bp, Homo sapien
ttactggttagtagcagccctggcc

SEQ ID NO: 3954177 - DNA, 25 bp, Homo sapien
gagcaggccaggtgacgggctgtct

SEQ ID NO: 3954178 - DNA, 25 bp, Homo sapien
agcaggcaccgttgcacaccgtctg

SEQ ID NO: 3954179 - DNA, 25 bp, Homo sapien
tctgcggtgggcatggatggcgccg

SEQ ID NO: 3954180 - DNA, 25 bp, Homo sapien
caccgttgcacaccgtctgcggtgg

SEQ ID NO: 3954181 - DNA, 25 bp, Homo sapien
ctgctgtggctagaagggtccccgt

SEQ ID NO: 3954182 - DNA, 25 bp, Homo sapien
tccgcctgcagcgttgagaaaccca

SEQ ID NO: 3954183 - DNA, 25 bp, Homo sapien
tcagtgacgtgatgctgtcacacgg

SEQ ID NO: 3954184 - DNA, 25 bp, Homo sapien
tgagttaggatgcagacgacagcca

SEQ ID NO: 3954185 - DNA, 25 bp, Homo sapien
ccggcctgcacaggtcgtgaggaaa

SEQ ID NO: 3954186 - DNA, 25 bp, Homo sapien
ggagcaagtatcacagcagccaccc

SEQ ID NO: 3954187 - DNA, 25 bp, Homo sapien
tgaggaaaagcacctggtttcggcc

SEQ ID NO: 3954188 - DNA, 25 bp, Homo sapien
aggtgtctgcaaggtgccctccctg

SEQ ID NO: 3954189 - DNA, 25 bp, Homo sapien
ccctgcggctgagagcctcatggaa

SEQ ID NO: 3954190 - DNA, 25 bp, Homo sapien
gaagctgctgattactagttaggac

SEQ ID NO: 3954191 - DNA, 25 bp, Homo sapien
cagtggcaagcagtcagtgttttca

SEQ ID NO: 3954192 - DNA, 25 bp, Homo sapien
cagaaattggtgtctatttttggga

SEQ ID NO: 3954193 - DNA, 25 bp, Homo sapien
tcataagcagcgaccttgtggcatc

SEQ ID NO: 3954194 - DNA, 25 bp, Homo sapien
tgtggcatcgtcaaaaggaagggat

SEQ ID NO: 3954195 - DNA, 25 bp, Homo sapien
accttctagaacctgggctgtgctg

SEQ ID NO: 3954196 - DNA, 25 bp, Homo sapien
gctgaattgcccgtttccatacagg

SEQ ID NO: 3954197 - DNA, 25 bp, Homo sapien
gaagtaacggatgtttctcgccaat

SEQ ID NO: 3954198 - DNA, 25 bp, Homo sapien
tttgaatatttgtagcccgctccca

SEQ ID NO: 3954199 - DNA, 25 bp, Homo sapien
tgtgttcccggcatgaggtgcctcg

SEQ ID NO: 3954200 - DNA, 25 bp, Homo sapien
gagagctctgaaacgcggtcacctt

SEQ ID NO: 3954201 - DNA, 25 bp, Homo sapien
tgaagggctccgtgccaactggtca

SEQ ID NO: 3954202 - DNA, 25 bp, Homo sapien
ttcatttgcgagagcgccgaggcag

SEQ ID NO: 3954203 - DNA, 25 bp, Homo sapien
cacaacgggcaatgtgcagacgcat

SEQ ID NO: 3954204 - DNA, 25 bp, Homo sapien
tcaagaaccgcataggtctccagtc

SEQ ID NO: 3954205 - DNA, 25 bp, Homo sapien
tcctcagacgcatcactgtcatcag

SEQ ID NO: 3954206 - DNA, 25 bp, Homo sapien
actgtcatcagtgtccgagggcagc

SEQ ID NO: 3954207 - DNA, 25 bp, Homo sapien
ctgggtcctcagacgcatcactgtc

SEQ ID NO: 3954208 - DNA, 25 bp, Homo sapien
agtctctctgccgtttcttgattcc

SEQ ID NO: 3954209 - DNA, 25 bp, Homo sapien
aaatgacgtcctccctggctagctg

SEQ ID NO: 3954210 - DNA, 25 bp, Homo sapien
ggctagctggagtcaacgtcatcca

SEQ ID NO: 3954211 - DNA, 25 bp, Homo sapien
tccctggctagctggagtcaacgtc

SEQ ID NO: 3954212 - DNA, 25 bp, Homo sapien
ggagcacgttcccaaatgacgtcct

SEQ ID NO: 3954213 - DNA, 25 bp, Homo sapien
gccacaggcctgttggggtttccaa

SEQ ID NO: 3954214 - DNA, 25 bp, Homo sapien
ctccctgaatccacatcgaagggat

SEQ ID NO: 3954215 - DNA, 25 bp, Homo sapien
tggccacaggcctgttggggtttcc

SEQ ID NO: 3954216 - DNA, 25 bp, Homo sapien
ggtttccaaactctctccctgaatc

SEQ ID NO: 3954217 - DNA, 25 bp, Homo sapien
taaacttccgcagcaaaatgacagc

SEQ ID NO: 3954218 - DNA, 25 bp, Homo sapien
ttgccccatttaaacttccgcagca

SEQ ID NO: 3954219 - DNA, 25 bp, Homo sapien
aggccgcgtacttgtccaggagctg

SEQ ID NO: 3954220 - DNA, 25 bp, Homo sapien
ttggccaagaactcctgctccgcct

SEQ ID NO: 3954221 - DNA, 25 bp, Homo sapien
tagttcacggggttggcggccacca

SEQ ID NO: 3954222 - DNA, 25 bp, Homo sapien
gcaaacgcttccacgcaggaaagtc

SEQ ID NO: 3954223 - DNA, 25 bp, Homo sapien
accaggtagggcaacaggcgcaagt

SEQ ID NO: 3954224 - DNA, 25 bp, Homo sapien
aggaaagtctgtagggccggccata

SEQ ID NO: 3954225 - DNA, 25 bp, Homo sapien
caaacggtgtctcgtccagcctggc

SEQ ID NO: 3954226 - DNA, 25 bp, Homo sapien
ctggcccaggagcagtcgatgacgg

SEQ ID NO: 3954227 - DNA, 25 bp, Homo sapien
cttcccaaacggtgtctcgtccagc

SEQ ID NO: 3954228 - DNA, 25 bp, Homo sapien
gtcgatgacggcgaccccagactgc

SEQ ID NO: 3954229 - DNA, 25 bp, Homo sapien
ggacagcatgggataagttcaggag

SEQ ID NO: 3954230 - DNA, 25 bp, Homo sapien
ggataagttcaggagccagcactac

SEQ ID NO: 3954231 - DNA, 25 bp, Homo sapien
acagcatgggataagttcaggagcc

SEQ ID NO: 3954232 - DNA, 25 bp, Homo sapien
agcatgggataagttcaggagccag

SEQ ID NO: 3954233 - DNA, 25 bp, Homo sapien
ccaaggtggagcatgccccggagaa

SEQ ID NO: 3954234 - DNA, 25 bp, Homo sapien
gggattcagggacatcattccgcca

SEQ ID NO: 3954235 - DNA, 25 bp, Homo sapien
gaatggcctagctaagggattcagg

SEQ ID NO: 3954236 - DNA, 25 bp, Homo sapien
tcaaacggacttcacgagcaagctt

SEQ ID NO: 3954237 - DNA, 25 bp, Homo sapien
caggcgggccagcttgcggcccgtg

SEQ ID NO: 3954238 - DNA, 25 bp, Homo sapien
agcttgcggcccgtgcagcgccggg

SEQ ID NO: 3954239 - DNA, 25 bp, Homo sapien
gacgcgtactgcttgcccacggggc

SEQ ID NO: 3954240 - DNA, 25 bp, Homo sapien
agcaccagaccgccgaatctgtggc

SEQ ID NO: 3954241 - DNA, 25 bp, Homo sapien
ccgctctccccatcacgcctcgctc

SEQ ID NO: 3954242 - DNA, 25 bp, Homo sapien
cgctctccccatcacgcctcgctca

SEQ ID NO: 3954243 - DNA, 25 bp, Homo sapien
gctctccccatcacgcctcgctcac

SEQ ID NO: 3954244 - DNA, 25 bp, Homo sapien
ggcctccagggagcgcgtcgggagg

SEQ ID NO: 3954245 - DNA, 25 bp, Homo sapien
agcgcgtcgggaggtgccgagggcg

SEQ ID NO: 3954246 - DNA, 25 bp, Homo sapien
cggcgccgacctcctcggcgaaggc

SEQ ID NO: 3954247 - DNA, 25 bp, Homo sapien
gcgccgacctcctcggcgaaggcct

SEQ ID NO: 3954248 - DNA, 25 bp, Homo sapien
ggctgtgcggctgccagcgcttgcg

SEQ ID NO: 3954249 - DNA, 25 bp, Homo sapien
cctcggcctcccaatgggctgtgcg

SEQ ID NO: 3954250 - DNA, 25 bp, Homo sapien
cacggccgcgcccctcggcctccca

SEQ ID NO: 3954251 - DNA, 25 bp, Homo sapien
cggcctcccaatgggctgtgcggct

SEQ ID NO: 3954252 - DNA, 25 bp, Homo sapien
gagggatccttcacccgtgtctggt

SEQ ID NO: 3954253 - DNA, 25 bp, Homo sapien
ttcctttccgagaggtaactgctgt

SEQ ID NO: 3954254 - DNA, 25 bp, Homo sapien
gatggatgagtgaccctgagagtta

SEQ ID NO: 3954255 - DNA, 25 bp, Homo sapien
tacggcccggagtctaaagcattgg

SEQ ID NO: 3954256 - DNA, 25 bp, Homo sapien
tgtgttctggatgtgagtctcttac

SEQ ID NO: 3954257 - DNA, 25 bp, Homo sapien
tcttttcactcccttgatgggtttg

SEQ ID NO: 3954258 - DNA, 25 bp, Homo sapien
tcttacatacgtggtttgccagtgt

SEQ ID NO: 3954259 - DNA, 25 bp, Homo sapien
tgttgggctgtagttctgtgttctg

SEQ ID NO: 3954260 - DNA, 25 bp, Homo sapien
ggcatcccctacacgaggcccacag

SEQ ID NO: 3954261 - DNA, 25 bp, Homo sapien
gatcaaaaggctgaaaggtttgctc

SEQ ID NO: 3954262 - DNA, 25 bp, Homo sapien
aaggagatcaaaaggctgaaaggtt

SEQ ID NO: 3954263 - DNA, 25 bp, Homo sapien
aaggtttgctcacccagcacggcat

SEQ ID NO: 3954264 - DNA, 25 bp, Homo sapien
acttggagcacttgggccacgagac

SEQ ID NO: 3954265 - DNA, 25 bp, Homo sapien
ccgagagccctacagagaagctggc

SEQ ID NO: 3954266 - DNA, 25 bp, Homo sapien
tgaccaggcttgtgctcagagaagc

SEQ ID NO: 3954267 - DNA, 25 bp, Homo sapien
gagacgcccagagccaagtctccag

SEQ ID NO: 3954268 - DNA, 25 bp, Homo sapien
tatcacggcgaatgtcgaacactag

SEQ ID NO: 3954269 - DNA, 25 bp, Homo sapien
aacactagagttacagacgacaggc

SEQ ID NO: 3954270 - DNA, 25 bp, Homo sapien
tccacgcggaacaaggtctgctgac

SEQ ID NO: 3954271 - DNA, 25 bp, Homo sapien
gaccagaggctccaaatgggaacca

SEQ ID NO: 3954272 - DNA, 25 bp, Homo sapien
gctatcagtttgtcttacgttaaaa

SEQ ID NO: 3954273 - DNA, 25 bp, Homo sapien
cagttcttaaaccacctactatatt

SEQ ID NO: 3954274 - DNA, 25 bp, Homo sapien
agtctttggcaaagccacggtcggg

SEQ ID NO: 3954275 - DNA, 25 bp, Homo sapien
acaacagaatgttgctatcagtttg

SEQ ID NO: 3954276 - DNA, 25 bp, Homo sapien
tgctgcggccgaaaccacactgtcg

SEQ ID NO: 3954277 - DNA, 25 bp, Homo sapien
catcgcggggatgcgttctcagtca

SEQ ID NO: 3954278 - DNA, 25 bp, Homo sapien
acagatgcctgttcctgctcaactc

SEQ ID NO: 3954279 - DNA, 25 bp, Homo sapien
tgctcaactcctagggacagtccca

SEQ ID NO: 3954280 - DNA, 25 bp, Homo sapien
gatgagctccgatgataactggcag

SEQ ID NO: 3954281 - DNA, 25 bp, Homo sapien
ctagtcacagtagtgtcaggaccac

SEQ ID NO: 3954282 - DNA, 25 bp, Homo sapien
tgctgtgatcacagcgccgcgtgga

SEQ ID NO: 3954283 - DNA, 25 bp, Homo sapien
tacaaagcaccattgcctaggacag

SEQ ID NO: 3954284 - DNA, 25 bp, Homo sapien
tgaaaccgtcggtaggactagatag

SEQ ID NO: 3954285 - DNA, 25 bp, Homo sapien
catgataacgtgtaacaggaagggc

SEQ ID NO: 3954286 - DNA, 25 bp, Homo sapien
cagaagcgagtgacgacatgtccgt

SEQ ID NO: 3954287 - DNA, 25 bp, Homo sapien
gactagataggtgacaacgtgtgac

SEQ ID NO: 3954288 - DNA, 25 bp, Homo sapien
acagggccgcaggacagcaccgtgg

SEQ ID NO: 3954289 - DNA, 25 bp, Homo sapien
ggccgcacacggctcacagaggatg

SEQ ID NO: 3954290 - DNA, 25 bp, Homo sapien
gccacacactgcttggcgcggagct

SEQ ID NO: 3954291 - DNA, 25 bp, Homo sapien
cactcaggtgcggtggccgcacacg

SEQ ID NO: 3954292 - DNA, 25 bp, Homo sapien
gccttccgggcaggactcagcatct

SEQ ID NO: 3954293 - DNA, 25 bp, Homo sapien
cagggccagaacaatgacgggctca

SEQ ID NO: 3954294 - DNA, 25 bp, Homo sapien
ccagaacaatgacgggctcaggagg

SEQ ID NO: 3954295 - DNA, 25 bp, Homo sapien
cgcccggccaccagctacagagaca

SEQ ID NO: 3954296 - DNA, 25 bp, Homo sapien
gggaatggtgccgatgtccccacag

SEQ ID NO: 3954297 - DNA, 25 bp, Homo sapien
ctctgcagcgagtgcagcttcggca

SEQ ID NO: 3954298 - DNA, 25 bp, Homo sapien
tgactctgcagcgagtgcagcttcg

SEQ ID NO: 3954299 - DNA, 25 bp, Homo sapien
ggaggctacgcccaggccctccagc

SEQ ID NO: 3954300 - DNA, 25 bp, Homo sapien
cctctcgctgccaggcatcgcagac

SEQ ID NO: 3954301 - DNA, 25 bp, Homo sapien
cgccagctgccggtcgctatcggcc

SEQ ID NO: 3954302 - DNA, 25 bp, Homo sapien
tgccggtcgctatcggccacacggg

SEQ ID NO: 3954303 - DNA, 25 bp, Homo sapien
gccacacgggcacgctccttggcct

SEQ ID NO: 3954304 - DNA, 25 bp, Homo sapien
tcagctccgtttggacttgcactcg

SEQ ID NO: 3954305 - DNA, 25 bp, Homo sapien
ttggacttgcactcgaagaggatgg

SEQ ID NO: 3954306 - DNA, 25 bp, Homo sapien
cgtttggacttgcactcgaagagga

SEQ ID NO: 3954307 - DNA, 25 bp, Homo sapien
ggccagctcagctccgtttggactt

SEQ ID NO: 3954308 - DNA, 25 bp, Homo sapien
cagatgctcccggggacaccgttca

SEQ ID NO: 3954309 - DNA, 25 bp, Homo sapien
ctgccggaaacaaagtcccagatgc

SEQ ID NO: 3954310 - DNA, 25 bp, Homo sapien
gatgctcccggggacaccgttcaaa

SEQ ID NO: 3954311 - DNA, 25 bp, Homo sapien
gaaacaaagtcccagatgctcccgg

SEQ ID NO: 3954312 - DNA, 25 bp, Homo sapien
gccacctgaggagtctaaacagaga

SEQ ID NO: 3954313 - DNA, 25 bp, Homo sapien
gagctgtgtccatgtggtgactgcc

SEQ ID NO: 3954314 - DNA, 25 bp, Homo sapien
gtgtgaaacggtcgatgacggccca

SEQ ID NO: 3954315 - DNA, 25 bp, Homo sapien
gttcctgggaccacaccatgaggtg

SEQ ID NO: 3954316 - DNA, 25 bp, Homo sapien
tgcggcgtgggggaacctgtgagca

SEQ ID NO: 3954317 - DNA, 25 bp, Homo sapien
cggtctgcggcgtgggggaacctgt

SEQ ID NO: 3954318 - DNA, 25 bp, Homo sapien
ggcgtgggggaacctgtgagcagca

SEQ ID NO: 3954319 - DNA, 25 bp, Homo sapien
agcgagactcggtctgcggcgtggg

SEQ ID NO: 3954320 - DNA, 25 bp, Homo sapien
cctcagtcaggacggcatctgggag

SEQ ID NO: 3954321 - DNA, 25 bp, Homo sapien
gcacaaggttccgtgtgaggcccct

SEQ ID NO: 3954322 - DNA, 25 bp, Homo sapien
gcttcacggcaacgccagcatggag

SEQ ID NO: 3954323 - DNA, 25 bp, Homo sapien
tttgccaccacagatagggcacaag

SEQ ID NO: 3954324 - DNA, 25 bp, Homo sapien
ctagggggctgtaggatgaggctgc

SEQ ID NO: 3954325 - DNA, 25 bp, Homo sapien
tagggggctgtaggatgaggctgca

SEQ ID NO: 3954326 - DNA, 25 bp, Homo sapien
ggacgcagaggatggcgagtgtagc

SEQ ID NO: 3954327 - DNA, 25 bp, Homo sapien
cgagtgtagcgatggtgctctgggc

SEQ ID NO: 3954328 - DNA, 25 bp, Homo sapien
gggatggcgacaggtgcagagccgg

SEQ ID NO: 3954329 - DNA, 25 bp, Homo sapien
accgagcggcgaggtggacgcagag

SEQ ID NO: 3954330 - DNA, 25 bp, Homo sapien
caatattcacattgctaagatgcag

SEQ ID NO: 3954331 - DNA, 25 bp, Homo sapien
cattgctaagatgcaggtctaacgc

SEQ ID NO: 3954332 - DNA, 25 bp, Homo sapien
ccttctctagggatgcaatattcac

SEQ ID NO: 3954333 - DNA, 25 bp, Homo sapien
tcgtggccgtcttgctcttccaggt

SEQ ID NO: 3954334 - DNA, 25 bp, Homo sapien
tggggccgccgccaatgctgactca

SEQ ID NO: 3954335 - DNA, 25 bp, Homo sapien
taacgagacccgcaccttggcggcg

SEQ ID NO: 3954336 - DNA, 25 bp, Homo sapien
ctcctgaccgccgagtaacgagacc

SEQ ID NO: 3954337 - DNA, 25 bp, Homo sapien
aatgctgactcacggtccgcggccg

SEQ ID NO: 3954338 - DNA, 25 bp, Homo sapien
caacaatacattgcctctaactaag

SEQ ID NO: 3954339 - DNA, 25 bp, Homo sapien
gcctctaactaaggcagtgtcgatc

SEQ ID NO: 3954340 - DNA, 25 bp, Homo sapien
agcagcaacaatacattgcctctaa

SEQ ID NO: 3954341 - DNA, 25 bp, Homo sapien
tacattgcctctaactaaggcagtg

SEQ ID NO: 3954342 - DNA, 25 bp, Homo sapien
tggccggcatcgtctaggagttgct

SEQ ID NO: 3954343 - DNA, 25 bp, Homo sapien
ccgatgtgtggtctgtggcctaagt

SEQ ID NO: 3954344 - DNA, 25 bp, Homo sapien
cattgacgcgggtcctgatggtgct

SEQ ID NO: 3954345 - DNA, 25 bp, Homo sapien
taagtggccgctgggaagagtctct

SEQ ID NO: 3954346 - DNA, 25 bp, Homo sapien
aggagaggaaggggtgggctccagg

SEQ ID NO: 3954347 - DNA, 25 bp, Homo sapien
agcagaggatgtaggagaggaaggg

SEQ ID NO: 3954348 - DNA, 25 bp, Homo sapien
cagaggatgtaggagaggaaggggt

SEQ ID NO: 3954349 - DNA, 25 bp, Homo sapien
cagcagaggatgtaggagaggaagg

SEQ ID NO: 3954350 - DNA, 25 bp, Homo sapien
ccggcgggtggaccgctgcaaacac

SEQ ID NO: 3954351 - DNA, 25 bp, Homo sapien
ggagccggcgctggacgccaggctg

SEQ ID NO: 3954352 - DNA, 25 bp, Homo sapien
ggtggaccgctgcaaacacggccag

SEQ ID NO: 3954353 - DNA, 25 bp, Homo sapien
caggctggacgccacgctggagctc

SEQ ID NO: 3954354 - DNA, 25 bp, Homo sapien
gacataaacaccgtgagcgcgcacc

SEQ ID NO: 3954355 - DNA, 25 bp, Homo sapien
cataaacaccgtgagcgcgcacccc

SEQ ID NO: 3954356 - DNA, 25 bp, Homo sapien
aagacataaacaccgtgagcgcgca

SEQ ID NO: 3954357 - DNA, 25 bp, Homo sapien
aaagacataaacaccgtgagcgcgc

SEQ ID NO: 3954358 - DNA, 25 bp, Homo sapien
gtcttgctcgctgcccctagggcca

SEQ ID NO: 3954359 - DNA, 25 bp, Homo sapien
cctagggccaccctcggccggcgag

SEQ ID NO: 3954360 - DNA, 25 bp, Homo sapien
cggccggcgagtctctccgcttggc

SEQ ID NO: 3954361 - DNA, 25 bp, Homo sapien
ctgtcttgctcgctgcccctagggc

SEQ ID NO: 3954362 - DNA, 25 bp, Homo sapien
caaggtcataccaccgcactgcagg

SEQ ID NO: 3954363 - DNA, 25 bp, Homo sapien
aggtcataccaccgcactgcaggct

SEQ ID NO: 3954364 - DNA, 25 bp, Homo sapien
aaggtcataccaccgcactgcaggc

SEQ ID NO: 3954365 - DNA, 25 bp, Homo sapien
gtcataccaccgcactgcaggctgg

SEQ ID NO: 3954366 - DNA, 25 bp, Homo sapien
aggtggaggtcgtgacagccccatt

SEQ ID NO: 3954367 - DNA, 25 bp, Homo sapien
atttcccggctggccgctgcccgtg

SEQ ID NO: 3954368 - DNA, 25 bp, Homo sapien
gtggaggtcgtgacagccccattca

SEQ ID NO: 3954369 - DNA, 25 bp, Homo sapien
gaggtcgtgacagccccattcattc

SEQ ID NO: 3954370 - DNA, 25 bp, Homo sapien
acagaaggggccgcgcgggcagtac

SEQ ID NO: 3954371 - DNA, 25 bp, Homo sapien
gcacagaaggggccgcgcgggcagt

SEQ ID NO: 3954372 - DNA, 25 bp, Homo sapien
tctcaacgtgtgcaaaggcacagaa

SEQ ID NO: 3954373 - DNA, 25 bp, Homo sapien
aggcacagaaggggccgcgcgggca

SEQ ID NO: 3954374 - DNA, 25 bp, Homo sapien
gtttggcgcatgtcgttgcattttg

SEQ ID NO: 3954375 - DNA, 25 bp, Homo sapien
ccggtttggcgcatgtcgttgcatt

SEQ ID NO: 3954376 - DNA, 25 bp, Homo sapien
cgcatgtcgttgcattttgtagatt

SEQ ID NO: 3954377 - DNA, 25 bp, Homo sapien
tggcgcatgtcgttgcattttgtag

SEQ ID NO: 3954378 - DNA, 25 bp, Homo sapien
tcccgcagcatctgccctcccatca

SEQ ID NO: 3954379 - DNA, 25 bp, Homo sapien
cacatgtggggccattcccgcagca

SEQ ID NO: 3954380 - DNA, 25 bp, Homo sapien
aaagtcatttccccgcttgatattt

SEQ ID NO: 3954381 - DNA, 25 bp, Homo sapien
aagtcatttccccgcttgatatttt

SEQ ID NO: 3954382 - DNA, 25 bp, Homo sapien
cataccctgcaccttctagtggagg

SEQ ID NO: 3954383 - DNA, 25 bp, Homo sapien
ctacacggctgggtgtgaacacagc

SEQ ID NO: 3954384 - DNA, 25 bp, Homo sapien
gtatggtcccttggcaactacacgg

SEQ ID NO: 3954385 - DNA, 25 bp, Homo sapien
taatacaaatctgagtatggtccct

SEQ ID NO: 3954386 - DNA, 25 bp, Homo sapien
cactcagctgggtaccagagactgg

SEQ ID NO: 3954387 - DNA, 25 bp, Homo sapien
aggcgggagggtttatctccctcag

SEQ ID NO: 3954388 - DNA, 25 bp, Homo sapien
agctccactcagctgggtaccagag

SEQ ID NO: 3954389 - DNA, 25 bp, Homo sapien
cctcaggatttatggtgcggctgtg

SEQ ID NO: 3954390 - DNA, 25 bp, Homo sapien
cgacgggaagcagcgcctggtcctt

SEQ ID NO: 3954391 - DNA, 25 bp, Homo sapien
tgatgcgcgtctgtgacaacatgag

SEQ ID NO: 3954392 - DNA, 25 bp, Homo sapien
caacatgagtcaagaaacgacggga

SEQ ID NO: 3954393 - DNA, 25 bp, Homo sapien
gacacccagaaagcatgatgcgcgt

SEQ ID NO: 3954394 - DNA, 25 bp, Homo sapien
ccaagtggagagactcgctggctga

SEQ ID NO: 3954395 - DNA, 25 bp, Homo sapien
tactgcacccagacctgaatatgta

SEQ ID NO: 3954396 - DNA, 25 bp, Homo sapien
gcttttttcccacatgactctttct

SEQ ID NO: 3954397 - DNA, 25 bp, Homo sapien
tgtgtgataaccacgctgtgaaccc

SEQ ID NO: 3954398 - DNA, 25 bp, Homo sapien
atcgcagcgtgagggttccccccac

SEQ ID NO: 3954399 - DNA, 25 bp, Homo sapien
tcatccccgtgcttcacactggggc

SEQ ID NO: 3954400 - DNA, 25 bp, Homo sapien
tgctccgtgcgggagtggcaatact

SEQ ID NO: 3954401 - DNA, 25 bp, Homo sapien
tggcaatactggcagccgtcgccgc

SEQ ID NO: 3954402 - DNA, 25 bp, Homo sapien
cccgtgcttcacgctggggcagggc

SEQ ID NO: 3954403 - DNA, 25 bp, Homo sapien
ccgtgcttcacgctggggcagggcg

SEQ ID NO: 3954404 - DNA, 25 bp, Homo sapien
cagggcgtggacctggggatgagga

SEQ ID NO: 3954405 - DNA, 25 bp, Homo sapien
cgtgcttcacgctggggcagggcgt

SEQ ID NO: 3954406 - DNA, 25 bp, Homo sapien
gaggacacagaggacttggctcccc

SEQ ID NO: 3954407 - DNA, 25 bp, Homo sapien
tgtcaggaggacacagaggacttgg

SEQ ID NO: 3954408 - DNA, 25 bp, Homo sapien
gatgaggaggtgtcaggaggacaca

SEQ ID NO: 3954409 - DNA, 25 bp, Homo sapien
tcaggaggacacagaggacttggct

SEQ ID NO: 3954410 - DNA, 25 bp, Homo sapien
tggaatctctagctgctttattgta

SEQ ID NO: 3954411 - DNA, 25 bp, Homo sapien
gactgaacgtggcataacaacaagg

SEQ ID NO: 3954412 - DNA, 25 bp, Homo sapien
caccaggtcattcaaaagaggcgag

SEQ ID NO: 3954413 - DNA, 25 bp, Homo sapien
tccatgacgggcgatgacaaaatct

SEQ ID NO: 3954414 - DNA, 25 bp, Homo sapien
ttcccaaaggaagcacaggtgctct

SEQ ID NO: 3954415 - DNA, 25 bp, Homo sapien
ggactcagcctaaggacccggcgtc

SEQ ID NO: 3954416 - DNA, 25 bp, Homo sapien
ctgggactcagcctaaggacccggc

SEQ ID NO: 3954417 - DNA, 25 bp, Homo sapien
tgtgtgcaccctgggcagggcgacc

SEQ ID NO: 3954418 - DNA, 25 bp, Homo sapien
gcagggcgacccttgggttgttggc

SEQ ID NO: 3954419 - DNA, 25 bp, Homo sapien
ctgtgaagacaagattgagcccagg

SEQ ID NO: 3954420 - DNA, 25 bp, Homo sapien
tgaagacaagattgagcccaggtga

SEQ ID NO: 3954421 - DNA, 25 bp, Homo sapien
agacaagattgagcccaggtgacga

SEQ ID NO: 3954422 - DNA, 25 bp, Homo sapien
ggtgacgacagtgcctgagcccctg

SEQ ID NO: 3954423 - DNA, 25 bp, Homo sapien
acaagggcagccctcccattagaac

SEQ ID NO: 3954424 - DNA, 25 bp, Homo sapien
ggtgggcaacgcgagccacgggccg

SEQ ID NO: 3954425 - DNA, 25 bp, Homo sapien
accagccggagtcctctgagcacgg

SEQ ID NO: 3954426 - DNA, 25 bp, Homo sapien
atccccaggacagacgcgtgggcct

SEQ ID NO: 3954427 - DNA, 25 bp, Homo sapien
actgctccgtcttgtagctgcccag

SEQ ID NO: 3954428 - DNA, 25 bp, Homo sapien
tggtagtgtgggcacgcatagccct

SEQ ID NO: 3954429 - DNA, 25 bp, Homo sapien
ggttgcgccgcctgtcccggctatt

SEQ ID NO: 3954430 - DNA, 25 bp, Homo sapien
cctgtcccggctattgtggtagtgt

SEQ ID NO: 3954431 - DNA, 25 bp, Homo sapien
gcctgagcagcgcgactggaagcaa

SEQ ID NO: 3954432 - DNA, 25 bp, Homo sapien
ggtgcctgagcagcgcgactggaag

SEQ ID NO: 3954433 - DNA, 25 bp, Homo sapien
acggtgcctgagcagcgcgactgga

SEQ ID NO: 3954434 - DNA, 25 bp, Homo sapien
ctgaaaaatgggccacacggtgcct

SEQ ID NO: 3954435 - DNA, 25 bp, Homo sapien
gcttggtattggactccacgagcct

SEQ ID NO: 3954436 - DNA, 25 bp, Homo sapien
gagggcttggtattggactccacga

SEQ ID NO: 3954437 - DNA, 25 bp, Homo sapien
tattggactccacgagcctcggttt

SEQ ID NO: 3954438 - DNA, 25 bp, Homo sapien
gggcccaaatcccactcggcaccca

SEQ ID NO: 3954439 - DNA, 25 bp, Homo sapien
cttgccaccgggggtcctcgctcag

SEQ ID NO: 3954440 - DNA, 25 bp, Homo sapien
cgccgcccagctggccgttctgcaa

SEQ ID NO: 3954441 - DNA, 25 bp, Homo sapien
ccaggctgcagatccgggacccctt

SEQ ID NO: 3954442 - DNA, 25 bp, Homo sapien
tgcagatccgggaccccttccccgc

SEQ ID NO: 3954443 - DNA, 25 bp, Homo sapien
cagtggccacgtgcgtctgtctcgt

SEQ ID NO: 3954444 - DNA, 25 bp, Homo sapien
gcaggttcctgttttgtagtaacgc

SEQ ID NO: 3954445 - DNA, 25 bp, Homo sapien
tgacgtcacacacgggcggccgcag

SEQ ID NO: 3954446 - DNA, 25 bp, Homo sapien
ggtggtacttgcgttctgtgtcccc

SEQ ID NO: 3954447 - DNA, 25 bp, Homo sapien
ccttaacacattctcgagactgcga

SEQ ID NO: 3954448 - DNA, 25 bp, Homo sapien
tggatctgcactgccggctggttcc

SEQ ID NO: 3954449 - DNA, 25 bp, Homo sapien
gagactgcgagccacatgcatcaaa

SEQ ID NO: 3954450 - DNA, 25 bp, Homo sapien
ttcccagggaacgtgcgagaaccac

SEQ ID NO: 3954451 - DNA, 25 bp, Homo sapien
agtggagacccagctaggcacaccc

SEQ ID NO: 3954452 - DNA, 25 bp, Homo sapien
accccggacccatccagacaggagt

SEQ ID NO: 3954453 - DNA, 25 bp, Homo sapien
atgcacagtggagacccagctaggc

SEQ ID NO: 3954454 - DNA, 25 bp, Homo sapien
ccagctaggcacaccccggacccat

SEQ ID NO: 3954455 - DNA, 25 bp, Homo sapien
gggtgcccacagaggatagaggacg

SEQ ID NO: 3954456 - DNA, 25 bp, Homo sapien
acagtgggggcacccacgggggcag

SEQ ID NO: 3954457 - DNA, 25 bp, Homo sapien
ctaggaaagggtgcacagtgggggc

SEQ ID NO: 3954458 - DNA, 25 bp, Homo sapien
acagaggatagaggacgccgagaag

SEQ ID NO: 3954459 - DNA, 25 bp, Homo sapien
aacggccggtgctgcgcgcacttgt

SEQ ID NO: 3954460 - DNA, 25 bp, Homo sapien
tgtagttgaaggtgccgtcgcgcct

SEQ ID NO: 3954461 - DNA, 25 bp, Homo sapien
tgtacttggagcagtacacgtcggg

SEQ ID NO: 3954462 - DNA, 25 bp, Homo sapien
tgcggcgccgctggttgaggaagtg

SEQ ID NO: 3954463 - DNA, 25 bp, Homo sapien
ggcactgctccgtcctgaactcctt

SEQ ID NO: 3954464 - DNA, 25 bp, Homo sapien
tgctccgtcctgaactccttcaggt

SEQ ID NO: 3954465 - DNA, 25 bp, Homo sapien
agggggcactgctccgtcctgaact

SEQ ID NO: 3954466 - DNA, 25 bp, Homo sapien
actgctccgtcctgaactccttcag

SEQ ID NO: 3954467 - DNA, 25 bp, Homo sapien
tccccgagcccaggcgcaaccccca

SEQ ID NO: 3954468 - DNA, 25 bp, Homo sapien
tgccgccgctttcgaaaccgacggc

SEQ ID NO: 3954469 - DNA, 25 bp, Homo sapien
gctgccgccgctttcgaaaccgacg

SEQ ID NO: 3954470 - DNA, 25 bp, Homo sapien
gccgccgctttcgaaaccgacggca

SEQ ID NO: 3954471 - DNA, 25 bp, Homo sapien
ccgccgctttcgaaaccgacggcat

SEQ ID NO: 3954472 - DNA, 25 bp, Homo sapien
ttcagtcaaaacaatgcagcgcgca

SEQ ID NO: 3954473 - DNA, 25 bp, Homo sapien
tttcagtcaaaacaatgcagcgcgc

SEQ ID NO: 3954474 - DNA, 25 bp, Homo sapien
aatccaacagcatacagtgcaactg

SEQ ID NO: 3954475 - DNA, 25 bp, Homo sapien
caagtgtcaccagaagtgctttgga

SEQ ID NO: 3954476 - DNA, 25 bp, Homo sapien
caggccgcagcatgcaatacagttt

SEQ ID NO: 3954477 - DNA, 25 bp, Homo sapien
tgtgtaaaactcacatgtggaagtg

SEQ ID NO: 3954478 - DNA, 25 bp, Homo sapien
cgtgacatcaaatccgaagggcggc

SEQ ID NO: 3954479 - DNA, 25 bp, Homo sapien
gaatccttggacatcaagagccagg

SEQ ID NO: 3954480 - DNA, 25 bp, Homo sapien
cgaatcagcatagccaagtgcccca

SEQ ID NO: 3954481 - DNA, 25 bp, Homo sapien
gaagtcttgccgatggaatccttgg

SEQ ID NO: 3954482 - DNA, 25 bp, Homo sapien
tcctcagaacgatcactgggctctg

SEQ ID NO: 3954483 - DNA, 25 bp, Homo sapien
agaacgatcactgggctctggcacc

SEQ ID NO: 3954484 - DNA, 25 bp, Homo sapien
tcaggctcctcagaacgatcactgg

SEQ ID NO: 3954485 - DNA, 25 bp, Homo sapien
ggcaccccgtcaagttctcgctctg

SEQ ID NO: 3954486 - DNA, 25 bp, Homo sapien
aaccgggcaacggatgaaggcttcg

SEQ ID NO: 3954487 - DNA, 25 bp, Homo sapien
ggaagcccagcctatgagcctcagc

SEQ ID NO: 3954488 - DNA, 25 bp, Homo sapien
tggtatggcccaccgaccagcggtg

SEQ ID NO: 3954489 - DNA, 25 bp, Homo sapien
tgatcagcgccacgaggaagcagct

SEQ ID NO: 3954490 - DNA, 25 bp, Homo sapien
cccgccggtgtctgccctcggccct

SEQ ID NO: 3954491 - DNA, 25 bp, Homo sapien
cctcggccctccgagaccttgagga

SEQ ID NO: 3954492 - DNA, 25 bp, Homo sapien
gaagagagagagcagtaagcgctcc

SEQ ID NO: 3954493 - DNA, 25 bp, Homo sapien
agagagagcagtaagcgctccgccc

SEQ ID NO: 3954494 - DNA, 25 bp, Homo sapien
cacacaagacacgattcattgctgc

SEQ ID NO: 3954495 - DNA, 25 bp, Homo sapien
acaagacacgattcattgctgcctt

SEQ ID NO: 3954496 - DNA, 25 bp, Homo sapien
cacaagacacgattcattgctgcct

SEQ ID NO: 3954497 - DNA, 25 bp, Homo sapien
ggcacacaagacacgattcattgct

SEQ ID NO: 3954498 - DNA, 25 bp, Homo sapien
cttggcgcgccgtgatagcgtcact

SEQ ID NO: 3954499 - DNA, 25 bp, Homo sapien
tagcgcagcggaaatgacgttcggc

SEQ ID NO: 3954500 - DNA, 25 bp, Homo sapien
cgttcggctgcgaagagctctttcc

SEQ ID NO: 3954501 - DNA, 25 bp, Homo sapien
acagaacgtggtcccagtagcgcag

SEQ ID NO: 3954502 - DNA, 25 bp, Homo sapien
tctttcctctcaggatggccctgga

SEQ ID NO: 3954503 - DNA, 25 bp, Homo sapien
gagccagaatctgctcgcctctgga

SEQ ID NO: 3954504 - DNA, 25 bp, Homo sapien
cagaagaagcgccagatctgggacc

SEQ ID NO: 3954505 - DNA, 25 bp, Homo sapien
ttcacattcattcccgtagagaggt

SEQ ID NO: 3954506 - DNA, 25 bp, Homo sapien
tctggttagccatggagcctttggg

SEQ ID NO: 3954507 - DNA, 25 bp, Homo sapien
ttttgggcagttgcgcacaagctgc

SEQ ID NO: 3954508 - DNA, 25 bp, Homo sapien
gagcacccactgttgtgggaggagg

SEQ ID NO: 3954509 - DNA, 25 bp, Homo sapien
aatcgaagggccctctggttagcca

SEQ ID NO: 3954510 - DNA, 25 bp, Homo sapien
ccagcaccgacgaggccgagctgag

SEQ ID NO: 3954511 - DNA, 25 bp, Homo sapien
accagcaccgacgaggccgagctga

SEQ ID NO: 3954512 - DNA, 25 bp, Homo sapien
ccgacgaggccgagctgaggtccac

SEQ ID NO: 3954513 - DNA, 25 bp, Homo sapien
gcaccgacgaggccgagctgaggtc

SEQ ID NO: 3954514 - DNA, 25 bp, Homo sapien
cgcccgaagcctgggctggccattt

SEQ ID NO: 3954515 - DNA, 25 bp, Homo sapien
ccgaagcctgggctggccatttcct

SEQ ID NO: 3954516 - DNA, 25 bp, Homo sapien
ctgcgcccgaagcctgggctggcca

SEQ ID NO: 3954517 - DNA, 25 bp, Homo sapien
gctggccatttcctgccgcccgcgc

SEQ ID NO: 3954518 - DNA, 25 bp, Homo sapien
actggtggctgtgccgatgctgtcc

SEQ ID NO: 3954519 - DNA, 25 bp, Homo sapien
ggagcagtaaggagaagccgtaact

SEQ ID NO: 3954520 - DNA, 25 bp, Homo sapien
cagtaaggagaagccgtaactggtg

SEQ ID NO: 3954521 - DNA, 25 bp, Homo sapien
cgtaactggtggctgtgccgatgct

SEQ ID NO: 3954522 - DNA, 25 bp, Homo sapien
ttctggataaacagtgagggtgtga

SEQ ID NO: 3954523 - DNA, 25 bp, Homo sapien
tatgagggacgccttccagcgcagc

SEQ ID NO: 3954524 - DNA, 25 bp, Homo sapien
tgagctttatgagggacgccttcca

SEQ ID NO: 3954525 - DNA, 25 bp, Homo sapien
ggccctgagctttatgagggacgcc

SEQ ID NO: 3954526 - DNA, 25 bp, Homo sapien
accaccttgccaggcgccatgtcct

SEQ ID NO: 3954527 - DNA, 25 bp, Homo sapien
cgccccagcagttcatgggcaccac

SEQ ID NO: 3954528 - DNA, 25 bp, Homo sapien
tgtccttgatgaagacccgcggcct

SEQ ID NO: 3954529 - DNA, 25 bp, Homo sapien
cagcctggtacacgccccagcagtt

SEQ ID NO: 3954530 - DNA, 25 bp, Homo sapien
ggatgggagcgccttccagctgccc

SEQ ID NO: 3954531 - DNA, 25 bp, Homo sapien
gcggcgtccgcgggccctcctcact

SEQ ID NO: 3954532 - DNA, 25 bp, Homo sapien
actccacagccggagcacactctcc

SEQ ID NO: 3954533 - DNA, 25 bp, Homo sapien
ctcctcactccacagccggagcaca

SEQ ID NO: 3954534 - DNA, 25 bp, Homo sapien
cctggacgcagttttccagcttcat

SEQ ID NO: 3954535 - DNA, 25 bp, Homo sapien
gttgaacctgaggttctggatggtc

SEQ ID NO: 3954536 - DNA, 25 bp, Homo sapien
agccgggcctcagtgttgaacctga

SEQ ID NO: 3954537 - DNA, 25 bp, Homo sapien
tctggatggtcttgttggcctggac

SEQ ID NO: 3954538 - DNA, 25 bp, Homo sapien
gatatccactgttgagtgcttacag

SEQ ID NO: 3954539 - DNA, 25 bp, Homo sapien
tgttgagtgcttacagcttgggcag

SEQ ID NO: 3954540 - DNA, 25 bp, Homo sapien
acaggcaccccgatatccactgttg

SEQ ID NO: 3954541 - DNA, 25 bp, Homo sapien
acatggcccccatttgggcacagac

SEQ ID NO: 3954542 - DNA, 25 bp, Homo sapien
tgatagtagcgtggccagctcctgc

SEQ ID NO: 3954543 - DNA, 25 bp, Homo sapien
tcctttagcagctgcacggatgata

SEQ ID NO: 3954544 - DNA, 25 bp, Homo sapien
gccgcagggccccaaccttgaactc

SEQ ID NO: 3954545 - DNA, 25 bp, Homo sapien
cgatcttccgcccagggttgtcttc

SEQ ID NO: 3954546 - DNA, 25 bp, Homo sapien
ctggccttgccttcggcggaaatcc

SEQ ID NO: 3954547 - DNA, 25 bp, Homo sapien
ggcacttgtcggagacactctctat

SEQ ID NO: 3954548 - DNA, 25 bp, Homo sapien
cttcggcggaaatcctgaggtctga

SEQ ID NO: 3954549 - DNA, 25 bp, Homo sapien
tgagtcgctcttatgaagcaggcac

SEQ ID NO: 3954550 - DNA, 25 bp, Homo sapien
cgcacccctcgcaggtgttcggtca

SEQ ID NO: 3954551 - DNA, 25 bp, Homo sapien
tctgcaccttcccattcggtctttg

SEQ ID NO: 3954552 - DNA, 25 bp, Homo sapien
tctcccgcacccctcgcaggtgttc

SEQ ID NO: 3954553 - DNA, 25 bp, Homo sapien
gcaggtgttcggtcacctccttccg

SEQ ID NO: 3954554 - DNA, 25 bp, Homo sapien
gggtggaggccgcttgtctgccccg

SEQ ID NO: 3954555 - DNA, 25 bp, Homo sapien
caacagagctgttacacagtgaaca

SEQ ID NO: 3954556 - DNA, 25 bp, Homo sapien
aactgtgcacgttcacgggtgaacc

SEQ ID NO: 3954557 - DNA, 25 bp, Homo sapien
tgaaactgtgaatagacacacggaa

SEQ ID NO: 3954558 - DNA, 25 bp, Homo sapien
gctgcgccacggatgcctccagagc

SEQ ID NO: 3954559 - DNA, 25 bp, Homo sapien
ctgctcctgcagatcgagccggctg

SEQ ID NO: 3954560 - DNA, 25 bp, Homo sapien
gagccgggagatggccactcagctc

SEQ ID NO: 3954561 - DNA, 25 bp, Homo sapien
gctcagagccgggagatggccactc

SEQ ID NO: 3954562 - DNA, 25 bp, Homo sapien
ttctcctgcacataggcggccagct

SEQ ID NO: 3954563 - DNA, 25 bp, Homo sapien
aggttctcctgcacataggcggcca

SEQ ID NO: 3954564 - DNA, 25 bp, Homo sapien
cccagcccggctttcctccaagcgc

SEQ ID NO: 3954565 - DNA, 25 bp, Homo sapien
ccccagcccggctttcctccaagcg

SEQ ID NO: 3954566 - DNA, 25 bp, Homo sapien
ggttctgctgcacaaacttggtcag

SEQ ID NO: 3954567 - DNA, 25 bp, Homo sapien
tctcctcggccagtaggacacggtt

SEQ ID NO: 3954568 - DNA, 25 bp, Homo sapien
acaaacttggtcagctgggccacgg

SEQ ID NO: 3954569 - DNA, 25 bp, Homo sapien
ggacacggttcagcgacgcctggtt

SEQ ID NO: 3954570 - DNA, 25 bp, Homo sapien
cagcccccgaagcttctcccaccgg

SEQ ID NO: 3954571 - DNA, 25 bp, Homo sapien
agccgtgagctctccgaggccttca

SEQ ID NO: 3954572 - DNA, 25 bp, Homo sapien
gccgtgagctctccgaggccttcat

SEQ ID NO: 3954573 - DNA, 25 bp, Homo sapien
cccaccggctctccagctcgccccg

SEQ ID NO: 3954574 - DNA, 25 bp, Homo sapien
tcagctgcaggtctgcgtctgggaa

SEQ ID NO: 3954575 - DNA, 25 bp, Homo sapien
ctgtggggagaccccactgtcagct

SEQ ID NO: 3954576 - DNA, 25 bp, Homo sapien
tggggagaccccactgtcagctgca

SEQ ID NO: 3954577 - DNA, 25 bp, Homo sapien
gggcaggccagccgcgggcaggctc

SEQ ID NO: 3954578 - DNA, 25 bp, Homo sapien
ggcctccctcttcaggaagcgcagg

SEQ ID NO: 3954579 - DNA, 25 bp, Homo sapien
tgcaggaagccgcacagcttggcct

SEQ ID NO: 3954580 - DNA, 25 bp, Homo sapien
cttcgccgagcttggtcacctgggc

SEQ ID NO: 3954581 - DNA, 25 bp, Homo sapien
ttcaggaagcgcaggctcacctctt

SEQ ID NO: 3954582 - DNA, 25 bp, Homo sapien
agtgtcgtgcaggtgtccccatgca

SEQ ID NO: 3954583 - DNA, 25 bp, Homo sapien
tgtacccagacgaccaaccaggcat

SEQ ID NO: 3954584 - DNA, 25 bp, Homo sapien
aggcatgggtttgtgaagcatgaga

SEQ ID NO: 3954585 - DNA, 25 bp, Homo sapien
catgagaaggccacgctcaggtggg

SEQ ID NO: 3954586 - DNA, 25 bp, Homo sapien
ttggttcttctgcagggcgccgcag

SEQ ID NO: 3954587 - DNA, 25 bp, Homo sapien
ggttcttctgcagggcgccgcaggc

SEQ ID NO: 3954588 - DNA, 25 bp, Homo sapien
cttggttcttctgcagggcgccgca

SEQ ID NO: 3954589 - DNA, 25 bp, Homo sapien
tggttcttctgcagggcgccgcagg

SEQ ID NO: 3954590 - DNA, 25 bp, Homo sapien
tagagaagtcggctgtggtcacacc

SEQ ID NO: 3954591 - DNA, 25 bp, Homo sapien
gtcggctgtggtcacaccagcccag

SEQ ID NO: 3954592 - DNA, 25 bp, Homo sapien
ctagagaagtcggctgtggtcacac

SEQ ID NO: 3954593 - DNA, 25 bp, Homo sapien
agaagtcggctgtggtcacaccagc

SEQ ID NO: 3954594 - DNA, 25 bp, Homo sapien
caggcaggaggtgtacgacccccgc

SEQ ID NO: 3954595 - DNA, 25 bp, Homo sapien
tcctcctgagccgggtcaaggcttc

SEQ ID NO: 3954596 - DNA, 25 bp, Homo sapien
tgagccgggtcaaggcttcccggac

SEQ ID NO: 3954597 - DNA, 25 bp, Homo sapien
cggcctcttgctcggcgccccttct

SEQ ID NO: 3954598 - DNA, 25 bp, Homo sapien
tgaggccggcctcttgctcggcgcc

SEQ ID NO: 3954599 - DNA, 25 bp, Homo sapien
agggcctgcatctggttctggagac

SEQ ID NO: 3954600 - DNA, 25 bp, Homo sapien
tgcatctggttctggagaccagaga

SEQ ID NO: 3954601 - DNA, 25 bp, Homo sapien
ggcctgcatctggttctggagacca

SEQ ID NO: 3954602 - DNA, 25 bp, Homo sapien
cctgcatctggttctggagaccaga

SEQ ID NO: 3954603 - DNA, 25 bp, Homo sapien
gcaggctccgcgtggcgcgctcaca

SEQ ID NO: 3954604 - DNA, 25 bp, Homo sapien
gcgtggcgcgctcacagcgctgctt

SEQ ID NO: 3954605 - DNA, 25 bp, Homo sapien
gagccctgcagctgcacgcgggccc

SEQ ID NO: 3954606 - DNA, 25 bp, Homo sapien
tggcgcgctcacagcgctgcttgtg

SEQ ID NO: 3954607 - DNA, 25 bp, Homo sapien
acagaggccgtggatgtcggatggc

SEQ ID NO: 3954608 - DNA, 25 bp, Homo sapien
tcggatggctggactcatacctctc

SEQ ID NO: 3954609 - DNA, 25 bp, Homo sapien
tcatacctctccgagagctcctcca

SEQ ID NO: 3954610 - DNA, 25 bp, Homo sapien
tggatgtcggatggctggactcata

SEQ ID NO: 3954611 - DNA, 25 bp, Homo sapien
gagctcaacgcgtctccttgggtca

SEQ ID NO: 3954612 - DNA, 25 bp, Homo sapien
cactggagcttacgggaacaaggcc

SEQ ID NO: 3954613 - DNA, 25 bp, Homo sapien
acaggatccagacgggcttggctca

SEQ ID NO: 3954614 - DNA, 25 bp, Homo sapien
gcatcttgggagcttgccccttggg

SEQ ID NO: 3954615 - DNA, 25 bp, Homo sapien
accggccaccctgccctcggctgta

SEQ ID NO: 3954616 - DNA, 25 bp, Homo sapien
accctgccctcggctgtagcttggg

SEQ ID NO: 3954617 - DNA, 25 bp, Homo sapien
ggccaccctgccctcggctgtagct

SEQ ID NO: 3954618 - DNA, 25 bp, Homo sapien
tgccctcggctgtagcttgggcctt

SEQ ID NO: 3954619 - DNA, 25 bp, Homo sapien
ggaagtcccgtgagagctctgggcc

SEQ ID NO: 3954620 - DNA, 25 bp, Homo sapien
gccagaggaagtcccgtgagagctc

SEQ ID NO: 3954621 - DNA, 25 bp, Homo sapien
ggacgagctgctgccctcgtctggc

SEQ ID NO: 3954622 - DNA, 25 bp, Homo sapien
gggacgagctgctgccctcgtctgg

SEQ ID NO: 3954623 - DNA, 25 bp, Homo sapien
cgccgactctgaggcccgggagttt

SEQ ID NO: 3954624 - DNA, 25 bp, Homo sapien
gagttttcttcttgcgtcaccccag

SEQ ID NO: 3954625 - DNA, 25 bp, Homo sapien
gaatcctaaccgctgattttattta

SEQ ID NO: 3954626 - DNA, 25 bp, Homo sapien
cccgaaagtcccaggctgttggacg

SEQ ID NO: 3954627 - DNA, 25 bp, Homo sapien
ctgtgtacccaagccggatgcaggc

SEQ ID NO: 3954628 - DNA, 25 bp, Homo sapien
cgatagcccggtagggaggtcacac

SEQ ID NO: 3954629 - DNA, 25 bp, Homo sapien
tctgtggcgccagtgtgaagctgct

SEQ ID NO: 3954630 - DNA, 25 bp, Homo sapien
gggcagcaattccacgctctgaggc

SEQ ID NO: 3954631 - DNA, 25 bp, Homo sapien
cggtacctggcgaggtccttcctgg

SEQ ID NO: 3954632 - DNA, 25 bp, Homo sapien
caggcggtacctggcgaggtccttc

SEQ ID NO: 3954633 - DNA, 25 bp, Homo sapien
gcctctctttcccaggcggtacctg

SEQ ID NO: 3954634 - DNA, 25 bp, Homo sapien
tccttcctggtcaccaacccgacaa

SEQ ID NO: 3954635 - DNA, 25 bp, Homo sapien
gcccggaacagcttgaacacccgtg

SEQ ID NO: 3954636 - DNA, 25 bp, Homo sapien
cagggcccggaacagcttgaacacc

SEQ ID NO: 3954637 - DNA, 25 bp, Homo sapien
ccggaacagcttgaacacccgtggg

SEQ ID NO: 3954638 - DNA, 25 bp, Homo sapien
cggaacagcttgaacacccgtggga

SEQ ID NO: 3954639 - DNA, 25 bp, Homo sapien
aggcccaggttggaccgctccacaa

SEQ ID NO: 3954640 - DNA, 25 bp, Homo sapien
atggtgcactcccgctcgtcctggg

SEQ ID NO: 3954641 - DNA, 25 bp, Homo sapien
gggtaggcgtctcggaagtccttca

SEQ ID NO: 3954642 - DNA, 25 bp, Homo sapien
tcgtcctgggacacgtggatggact

SEQ ID NO: 3954643 - DNA, 25 bp, Homo sapien
gcagagccctgtgtcaggcacccag

SEQ ID NO: 3954644 - DNA, 25 bp, Homo sapien
agccctgtgtcaggcacccaggcag

SEQ ID NO: 3954645 - DNA, 25 bp, Homo sapien
ggcggcagagccctgtgtcaggcac

SEQ ID NO: 3954646 - DNA, 25 bp, Homo sapien
ctgcgggcggcagagccctgtgtca

SEQ ID NO: 3954647 - DNA, 25 bp, Homo sapien
cttgtgctttaggagaacgatgagc

SEQ ID NO: 3954648 - DNA, 25 bp, Homo sapien
taggagaacgatgagctgggagcgc

SEQ ID NO: 3954649 - DNA, 25 bp, Homo sapien
agctgggagcgcaggatcaggccct

SEQ ID NO: 3954650 - DNA, 25 bp, Homo sapien
gctgggagcgcaggatcaggccctg

SEQ ID NO: 3954651 - DNA, 25 bp, Homo sapien
aggtcactggtgtgctcatcacctc

SEQ ID NO: 3954652 - DNA, 25 bp, Homo sapien
aagccgttgtgattggacgccgtgt

SEQ ID NO: 3954653 - DNA, 25 bp, Homo sapien
gcacgtccacaatgacgccgacctt

SEQ ID NO: 3954654 - DNA, 25 bp, Homo sapien
gggtgtcatcggcatgctccaccac

SEQ ID NO: 3954655 - DNA, 25 bp, Homo sapien
ggagcccggccacacatgcccgtca

SEQ ID NO: 3954656 - DNA, 25 bp, Homo sapien
acacgccaccaactcccacagttac

SEQ ID NO: 3954657 - DNA, 25 bp, Homo sapien
tgtgaagccgctggacaggaaacgc

SEQ ID NO: 3954658 - DNA, 25 bp, Homo sapien
cacagttacctctgcgggctggtga

SEQ ID NO: 3954659 - DNA, 25 bp, Homo sapien
tgagtgtgaggtgaccggggcctcc

SEQ ID NO: 3954660 - DNA, 25 bp, Homo sapien
gtgaccggggcctcccagtgcagga

SEQ ID NO: 3954661 - DNA, 25 bp, Homo sapien
gcagctgaatgtgcatgtcgtacag

SEQ ID NO: 3954662 - DNA, 25 bp, Homo sapien
gctgaatgtgcatgtcgtacaggcc

SEQ ID NO: 3954663 - DNA, 25 bp, Homo sapien
ccgtaggtcacgttgctggtggcct

SEQ ID NO: 3954664 - DNA, 25 bp, Homo sapien
tggcggtcatgagcaccagcatgat

SEQ ID NO: 3954665 - DNA, 25 bp, Homo sapien
tggtggcctccatcatgatgacggt

SEQ ID NO: 3954666 - DNA, 25 bp, Homo sapien
gaagacgtcgcccacgatcttggcg

SEQ ID NO: 3954667 - DNA, 25 bp, Homo sapien
ccacccatcgggcaagagctgggac

SEQ ID NO: 3954668 - DNA, 25 bp, Homo sapien
tgcgggagccatcatgaaccccagc

SEQ ID NO: 3954669 - DNA, 25 bp, Homo sapien
ctgcgggagccatcatgaaccccag

SEQ ID NO: 3954670 - DNA, 25 bp, Homo sapien
ccatcgggcaagagctgggacatac

SEQ ID NO: 3954671 - DNA, 25 bp, Homo sapien
cgtatttgccggggtccgcccagat

SEQ ID NO: 3954672 - DNA, 25 bp, Homo sapien
agcagctcccatcagggcgtatttg

SEQ ID NO: 3954673 - DNA, 25 bp, Homo sapien
catcagggcgtatttgccggggtcc

SEQ ID NO: 3954674 - DNA, 25 bp, Homo sapien
cagctcccatcagggcgtatttgcc

SEQ ID NO: 3954675 - DNA, 25 bp, Homo sapien
ccaagatacacagacggaggaggcc

SEQ ID NO: 3954676 - DNA, 25 bp, Homo sapien
tcgtgaacgtgagaaacgccgctga

SEQ ID NO: 3954677 - DNA, 25 bp, Homo sapien
cattctgggatgacggaacattcta

SEQ ID NO: 3954678 - DNA, 25 bp, Homo sapien
tctagaagtggtagtgacggccgca

SEQ ID NO: 3954679 - DNA, 25 bp, Homo sapien
tctcaagaataaggacacgagcctc

SEQ ID NO: 3954680 - DNA, 25 bp, Homo sapien
tggccggacatccaccccatggagt

SEQ ID NO: 3954681 - DNA, 25 bp, Homo sapien
agctctgcagcagcccacaatcacc

SEQ ID NO: 3954682 - DNA, 25 bp, Homo sapien
tgcagcagcccacaatcacctctgc

SEQ ID NO: 3954683 - DNA, 25 bp, Homo sapien
gtgaaccacgcgaggacaacgccca

SEQ ID NO: 3954684 - DNA, 25 bp, Homo sapien
acggcccgtgaaccacgtgaggtgc

SEQ ID NO: 3954685 - DNA, 25 bp, Homo sapien
ggctgcgctgccacagtacacgctg

SEQ ID NO: 3954686 - DNA, 25 bp, Homo sapien
ggtccagactccacacatgggctgc

SEQ ID NO: 3954687 - DNA, 25 bp, Homo sapien
ccacagcctcccctccggccccact

SEQ ID NO: 3954688 - DNA, 25 bp, Homo sapien
cacagcctcccctccggccccactc

SEQ ID NO: 3954689 - DNA, 25 bp, Homo sapien
ctgcagggccccacagcctcccctc

SEQ ID NO: 3954690 - DNA, 25 bp, Homo sapien
cagggccccacagcctcccctccgg

SEQ ID NO: 3954691 - DNA, 25 bp, Homo sapien
gtgagcccgtaggtccagcaggcca

SEQ ID NO: 3954692 - DNA, 25 bp, Homo sapien
tgaagaccccggcagacaccgtgag

SEQ ID NO: 3954693 - DNA, 25 bp, Homo sapien
aagaagtagaccagcgtgaacaggc

SEQ ID NO: 3954694 - DNA, 25 bp, Homo sapien
gtaggacagggagatcccaaagagc

SEQ ID NO: 3954695 - DNA, 25 bp, Homo sapien
ctgggactgtgggtgtactaccgta

SEQ ID NO: 3954696 - DNA, 25 bp, Homo sapien
tactaccgtagccagataatgttgc

SEQ ID NO: 3954697 - DNA, 25 bp, Homo sapien
tccctgctatgatccatgctaggga

SEQ ID NO: 3954698 - DNA, 25 bp, Homo sapien
tatgatccatgctagggatgacccc

SEQ ID NO: 3954699 - DNA, 25 bp, Homo sapien
gggtgttgaagaaggccgcagccat

SEQ ID NO: 3954700 - DNA, 25 bp, Homo sapien
ctggcgggtcgtggaagaggctcac

SEQ ID NO: 3954701 - DNA, 25 bp, Homo sapien
aagaggctcaccacgctcttctccg

SEQ ID NO: 3954702 - DNA, 25 bp, Homo sapien
tggagttgtactcgccatctgcaca

SEQ ID NO: 3954703 - DNA, 25 bp, Homo sapien
gaaaccacacgatcctgccattggg

SEQ ID NO: 3954704 - DNA, 25 bp, Homo sapien
tgagaggccgtgtaccctgtgcctg

SEQ ID NO: 3954705 - DNA, 25 bp, Homo sapien
ccaagccatggtcacggagggaaag

SEQ ID NO: 3954706 - DNA, 25 bp, Homo sapien
cacaaacctggtgtcgccgtgagag

SEQ ID NO: 3954707 - DNA, 25 bp, Homo sapien
gagtagatcagcacgaaggcaactg

SEQ ID NO: 3954708 - DNA, 25 bp, Homo sapien
ctgcagcgggtaggacatggagccc

SEQ ID NO: 3954709 - DNA, 25 bp, Homo sapien
agcacggcctcaatcacctgcaggc

SEQ ID NO: 3954710 - DNA, 25 bp, Homo sapien
tggcaatcccgcgacgagtagatca

SEQ ID NO: 3954711 - DNA, 25 bp, Homo sapien
gggtaaagactcctcggcagcaact

SEQ ID NO: 3954712 - DNA, 25 bp, Homo sapien
tgtacccgacagtattgaaatcagc

SEQ ID NO: 3954713 - DNA, 25 bp, Homo sapien
gacagctgcggttgctaccaggcag

SEQ ID NO: 3954714 - DNA, 25 bp, Homo sapien
gtttaatcatcaatcaggcacccaa

SEQ ID NO: 3954715 - DNA, 25 bp, Homo sapien
caaggcattgaacactgctccaagc

SEQ ID NO: 3954716 - DNA, 25 bp, Homo sapien
tagttcaaggcattgaacactgctc

SEQ ID NO: 3954717 - DNA, 25 bp, Homo sapien
ccagtagttcaaggcattgaacact

SEQ ID NO: 3954718 - DNA, 25 bp, Homo sapien
gttcaaggcattgaacactgctcca

SEQ ID NO: 3954719 - DNA, 25 bp, Homo sapien
ggatctcgtggatcgtgtaggccat

SEQ ID NO: 3954720 - DNA, 25 bp, Homo sapien
gggatctcgtggatcgtgtaggcca

SEQ ID NO: 3954721 - DNA, 25 bp, Homo sapien
agaccgggatctcgtggatcgtgta

SEQ ID NO: 3954722 - DNA, 25 bp, Homo sapien
atgaagaccgggatctcgtggatcg

SEQ ID NO: 3954723 - DNA, 25 bp, Homo sapien
acaaaattcagggtgaacgtggaga

SEQ ID NO: 3954724 - DNA, 25 bp, Homo sapien
tcccgtggtaaatgctcagaacaaa

SEQ ID NO: 3954725 - DNA, 25 bp, Homo sapien
gtcccacatgttcccgtggtaaatg

SEQ ID NO: 3954726 - DNA, 25 bp, Homo sapien
accttccgaagttgatgaggcctgg

SEQ ID NO: 3954727 - DNA, 25 bp, Homo sapien
ccagaaggacgcaccctcctccaag

SEQ ID NO: 3954728 - DNA, 25 bp, Homo sapien
agaaggacgcaccctcctccaagct

SEQ ID NO: 3954729 - DNA, 25 bp, Homo sapien
aggtcaggaactggttccagaagga

SEQ ID NO: 3954730 - DNA, 25 bp, Homo sapien
cagaaggacgcaccctcctccaagc

SEQ ID NO: 3954731 - DNA, 25 bp, Homo sapien
agggcgagggcaaagcattggaccc

SEQ ID NO: 3954732 - DNA, 25 bp, Homo sapien
gggcaaagcattggacccggtgcgg

SEQ ID NO: 3954733 - DNA, 25 bp, Homo sapien
gcgagggcaaagcattggacccggt

SEQ ID NO: 3954734 - DNA, 25 bp, Homo sapien
caaagcattggacccggtgcggccc

SEQ ID NO: 3954735 - DNA, 25 bp, Homo sapien
tgtgtctctgcggaagtactcgaag

SEQ ID NO: 3954736 - DNA, 25 bp, Homo sapien
cggagacgaagtcccgcttctctgt

SEQ ID NO: 3954737 - DNA, 25 bp, Homo sapien
aaacgccgctgacactccggccgca

SEQ ID NO: 3954738 - DNA, 25 bp, Homo sapien
cctgcggagacgaagtcccgcttct

SEQ ID NO: 3954739 - DNA, 25 bp, Homo sapien
cagggtcggggcaggttccttgagg

SEQ ID NO: 3954740 - DNA, 25 bp, Homo sapien
ctttcaggacaaccgagtcagcagc

SEQ ID NO: 3954741 - DNA, 25 bp, Homo sapien
ctcagaaagggagagcaactgccag

SEQ ID NO: 3954742 - DNA, 25 bp, Homo sapien
ccttgagggcacggctctcagaaag

SEQ ID NO: 3954743 - DNA, 25 bp, Homo sapien
ttccctgagagatcccggcggcaat

SEQ ID NO: 3954744 - DNA, 25 bp, Homo sapien
gaaatctcgtttcagtgacgttgac

SEQ ID NO: 3954745 - DNA, 25 bp, Homo sapien
cggcggcaatcactgaacctgagtg

SEQ ID NO: 3954746 - DNA, 25 bp, Homo sapien
aacctgagtggatcatcggcccttc

SEQ ID NO: 3954747 - DNA, 25 bp, Homo sapien
gagaccagaaggaccggtgctcaga

SEQ ID NO: 3954748 - DNA, 25 bp, Homo sapien
cagaaggaccggtgctcagagacac

SEQ ID NO: 3954749 - DNA, 25 bp, Homo sapien
tcagagacacgcgtgacgcggccct

SEQ ID NO: 3954750 - DNA, 25 bp, Homo sapien
agagacacgcgtgacgcggcccttc

SEQ ID NO: 3954751 - DNA, 25 bp, Homo sapien
tcaggctccagctggagtggccatg

SEQ ID NO: 3954752 - DNA, 25 bp, Homo sapien
caggctccagctggagtggccatgt

SEQ ID NO: 3954753 - DNA, 25 bp, Homo sapien
gacaggatcacaccggacactttga

SEQ ID NO: 3954754 - DNA, 25 bp, Homo sapien
aagcacttgatctgggggattccgc

SEQ ID NO: 3954755 - DNA, 25 bp, Homo sapien
gatctgggggattccgctgccagca

SEQ ID NO: 3954756 - DNA, 25 bp, Homo sapien
ttgagccgcaccacgtgggggatct

SEQ ID NO: 3954757 - DNA, 25 bp, Homo sapien
gatcttcaccccgttgaggaagcac

SEQ ID NO: 3954758 - DNA, 25 bp, Homo sapien
ctgagacagatgcagcccctcagcc

SEQ ID NO: 3954759 - DNA, 25 bp, Homo sapien
aggggaagcacggctgagtgggtca

SEQ ID NO: 3954760 - DNA, 25 bp, Homo sapien
ggggaagcacggctgagtgggtcac

SEQ ID NO: 3954761 - DNA, 25 bp, Homo sapien
agaggggaagcacggctgagtgggt

SEQ ID NO: 3954762 - DNA, 25 bp, Homo sapien
gacagtccgcccttctctgtgaact

SEQ ID NO: 3954763 - DNA, 25 bp, Homo sapien
gcggcgttcagcgtggcccacagca

SEQ ID NO: 3954764 - DNA, 25 bp, Homo sapien
ctctatgaaagccacaatcacagag

SEQ ID NO: 3954765 - DNA, 25 bp, Homo sapien
cacaatcacagagcccacgagcacg

SEQ ID NO: 3954766 - DNA, 25 bp, Homo sapien
ggctcaggacttctgcccgggactc

SEQ ID NO: 3954767 - DNA, 25 bp, Homo sapien
tgggctcaggacttctgcccgggac

SEQ ID NO: 3954768 - DNA, 25 bp, Homo sapien
ggccacgcccccctcccaagctgca

SEQ ID NO: 3954769 - DNA, 25 bp, Homo sapien
ctcaggacttctgcccgggactcgg

SEQ ID NO: 3954770 - DNA, 25 bp, Homo sapien
tccaccacgatgtcaatgaagcagg

SEQ ID NO: 3954771 - DNA, 25 bp, Homo sapien
gcagatgacccagcgcttgatctcc

SEQ ID NO: 3954772 - DNA, 25 bp, Homo sapien
gatgaccctgtacttgaggccagcc

SEQ ID NO: 3954773 - DNA, 25 bp, Homo sapien
ccgtgaggatcccaatgagggcgca

SEQ ID NO: 3954774 - DNA, 25 bp, Homo sapien
tgttatgctgggcaccgcatctggc

SEQ ID NO: 3954775 - DNA, 25 bp, Homo sapien
gagcagccttcttggttacggtgac

SEQ ID NO: 3954776 - DNA, 25 bp, Homo sapien
cagtttctggccaacatctgaggcg

SEQ ID NO: 3954777 - DNA, 25 bp, Homo sapien
ttatgaagggcccagtgtgcacggt

SEQ ID NO: 3954778 - DNA, 25 bp, Homo sapien
gttctcactgttgtcatagtccaag

SEQ ID NO: 3954779 - DNA, 25 bp, Homo sapien
cgtgtgattgatccgccgctcctcc

SEQ ID NO: 3954780 - DNA, 25 bp, Homo sapien
aacccacgctctgggtgcgggcaca

SEQ ID NO: 3954781 - DNA, 25 bp, Homo sapien
cagcactcagcaccgaacccacgct

SEQ ID NO: 3954782 - DNA, 25 bp, Homo sapien
ctgcaggccgggacagcaagggcag

SEQ ID NO: 3954783 - DNA, 25 bp, Homo sapien
cagcaccgaacccacgctctgggtg

SEQ ID NO: 3954784 - DNA, 25 bp, Homo sapien
cttctcgttgtgtgggatctccttg

SEQ ID NO: 3954785 - DNA, 25 bp, Homo sapien
ggacaggagcttctcgttgtgtggg

SEQ ID NO: 3954786 - DNA, 25 bp, Homo sapien
caggagcttctcgttgtgtgggatc

SEQ ID NO: 3954787 - DNA, 25 bp, Homo sapien
ggaagggatgtggagggtccatatc

SEQ ID NO: 3954788 - DNA, 25 bp, Homo sapien
agatcttccgaaggccttgtggctc

SEQ ID NO: 3954789 - DNA, 25 bp, Homo sapien
cacggccacgaaacagatcttccga

SEQ ID NO: 3954790 - DNA, 25 bp, Homo sapien
gcacaaacgtatcagaagggcagcc

SEQ ID NO: 3954791 - DNA, 25 bp, Homo sapien
tttgaagtccaaaaaggcagtgccg

SEQ ID NO: 3954792 - DNA, 25 bp, Homo sapien
tcatatgtccgactcggaaaagcgc

SEQ ID NO: 3954793 - DNA, 25 bp, Homo sapien
tgtccgactcggaaaagcgcagaac

SEQ ID NO: 3954794 - DNA, 25 bp, Homo sapien
gctgctcatatgtccgactcggaaa

SEQ ID NO: 3954795 - DNA, 25 bp, Homo sapien
agctccacgctgctcatatgtccga

SEQ ID NO: 3954796 - DNA, 25 bp, Homo sapien
tcgcagacgggaaaactgggcaaca

SEQ ID NO: 3954797 - DNA, 25 bp, Homo sapien
ggcgagtccgatgctcagagcacaa

SEQ ID NO: 3954798 - DNA, 25 bp, Homo sapien
cgtgctcagcgctatgcatgcgtta

SEQ ID NO: 3954799 - DNA, 25 bp, Homo sapien
tagtttgtgacaggcaccgtgctca

SEQ ID NO: 3954800 - DNA, 25 bp, Homo sapien
ggaccaggacaccttcttagagacg

SEQ ID NO: 3954801 - DNA, 25 bp, Homo sapien
cccagccccgttcagcagcggcgtc

SEQ ID NO: 3954802 - DNA, 25 bp, Homo sapien
gacaccttcttagagacgttggcca

SEQ ID NO: 3954803 - DNA, 25 bp, Homo sapien
cggccggaccaggacaccttcttag

SEQ ID NO: 3954804 - DNA, 25 bp, Homo sapien
cgtgtttgttctcgtgacccgcgcc

SEQ ID NO: 3954805 - DNA, 25 bp, Homo sapien
cgcggagcgacaccggccgggaagc

SEQ ID NO: 3954806 - DNA, 25 bp, Homo sapien
tttgttctcgtgacccgcgccggcg

SEQ ID NO: 3954807 - DNA, 25 bp, Homo sapien
acgtgatgagcgacggcgaccatgt

SEQ ID NO: 3954808 - DNA, 25 bp, Homo sapien
ttagaagtcccgaagcatgcatccg

SEQ ID NO: 3954809 - DNA, 25 bp, Homo sapien
ttccttgccataggcggcggctaaa

SEQ ID NO: 3954810 - DNA, 25 bp, Homo sapien
acgcgactgcaaaggcggccccgtt

SEQ ID NO: 3954811 - DNA, 25 bp, Homo sapien
gccctcgcagtaggcactcgggcga

SEQ ID NO: 3954812 - DNA, 25 bp, Homo sapien
ggcagcactggcaggcccgtcaaat

SEQ ID NO: 3954813 - DNA, 25 bp, Homo sapien
acaggcagcactggcaggcccgtca

SEQ ID NO: 3954814 - DNA, 25 bp, Homo sapien
gcaggcccgtcaaatccagaaaaga

SEQ ID NO: 3954815 - DNA, 25 bp, Homo sapien
actggcaggcccgtcaaatccagaa

SEQ ID NO: 3954816 - DNA, 25 bp, Homo sapien
tcagcccccgtgcggctcggcctca

SEQ ID NO: 3954817 - DNA, 25 bp, Homo sapien
gcccccgtgcggctcggcctcaggg

SEQ ID NO: 3954818 - DNA, 25 bp, Homo sapien
cctcagcccccgtgcggctcggcct

SEQ ID NO: 3954819 - DNA, 25 bp, Homo sapien
agcccccgtgcggctcggcctcagg

SEQ ID NO: 3954820 - DNA, 25 bp, Homo sapien
tcaggatggcacctgtcgggaactc

SEQ ID NO: 3954821 - DNA, 25 bp, Homo sapien
gaaggcctcggagctgtcgaatccg

SEQ ID NO: 3954822 - DNA, 25 bp, Homo sapien
gggtggacgtccagatgacacagat

SEQ ID NO: 3954823 - DNA, 25 bp, Homo sapien
ccgggtccccgatcacgaagtggat

SEQ ID NO: 3954824 - DNA, 25 bp, Homo sapien
tgaagcttcagggaggtcgggccca

SEQ ID NO: 3954825 - DNA, 25 bp, Homo sapien
tggggggaccatgcctgctgccgag

SEQ ID NO: 3954826 - DNA, 25 bp, Homo sapien
agtcccactgagtacccgatggctg

SEQ ID NO: 3954827 - DNA, 25 bp, Homo sapien
aggctcccgcctcccttggagaggg

SEQ ID NO: 3954828 - DNA, 25 bp, Homo sapien
cctgtgaccggttgactgcctgagc

SEQ ID NO: 3954829 - DNA, 25 bp, Homo sapien
gcgtgtctactttccggcctcggcg

SEQ ID NO: 3954830 - DNA, 25 bp, Homo sapien
taggacacgttgtagttgctggcga

SEQ ID NO: 3954831 - DNA, 25 bp, Homo sapien
ccggacgtcaacgttgtaggacacg

SEQ ID NO: 3954832 - DNA, 25 bp, Homo sapien
cgactgccacaaggtggacctgtga

SEQ ID NO: 3954833 - DNA, 25 bp, Homo sapien
caggcccacagcactccggaactgt

SEQ ID NO: 3954834 - DNA, 25 bp, Homo sapien
acaccgactgccacaaggtggacct

SEQ ID NO: 3954835 - DNA, 25 bp, Homo sapien
gccacaaggtggacctgtgacctcc

SEQ ID NO: 3954836 - DNA, 25 bp, Homo sapien
tccagcctacggagcctctcgaaaa

SEQ ID NO: 3954837 - DNA, 25 bp, Homo sapien
agcctacggagcctctcgaaaaacg

SEQ ID NO: 3954838 - DNA, 25 bp, Homo sapien
ccagcctacggagcctctcgaaaaa

SEQ ID NO: 3954839 - DNA, 25 bp, Homo sapien
ctccagcctacggagcctctcgaaa

SEQ ID NO: 3954840 - DNA, 25 bp, Homo sapien
gtctgctctcctaactgcaccagca

SEQ ID NO: 3954841 - DNA, 25 bp, Homo sapien
cgtctgctctcctaactgcaccagc

SEQ ID NO: 3954842 - DNA, 25 bp, Homo sapien
tctgctctcctaactgcaccagcat

SEQ ID NO: 3954843 - DNA, 25 bp, Homo sapien
cttgaacttctgggtgcaaacgatt

SEQ ID NO: 3954844 - DNA, 25 bp, Homo sapien
tcacaggctcatgacaccgtgcctg

SEQ ID NO: 3954845 - DNA, 25 bp, Homo sapien
tgggatcacaggctcatgacaccgt

SEQ ID NO: 3954846 - DNA, 25 bp, Homo sapien
ttgaacttctgggtgcaaacgattc

SEQ ID NO: 3954847 - DNA, 25 bp, Homo sapien
gggcctacaggctacttggacaaaa

SEQ ID NO: 3954848 - DNA, 25 bp, Homo sapien
gagacccataacctctcaccgggag

SEQ ID NO: 3954849 - DNA, 25 bp, Homo sapien
tggacaaaatttggcccgctgcatg

SEQ ID NO: 3954850 - DNA, 25 bp, Homo sapien
tccacactggctggatagacttgtg

SEQ ID NO: 3954851 - DNA, 25 bp, Homo sapien
tgtggcatttatgccccagagaagg

SEQ ID NO: 3954852 - DNA, 25 bp, Homo sapien
gaaccagaggctcgtggctaggaat

SEQ ID NO: 3954853 - DNA, 25 bp, Homo sapien
tgtgggcatcggagttcacgctctc

SEQ ID NO: 3954854 - DNA, 25 bp, Homo sapien
tgcacgcgctctctgggttgtggca

SEQ ID NO: 3954855 - DNA, 25 bp, Homo sapien
gaggacctgatggacgagctgctgg

SEQ ID NO: 3954856 - DNA, 25 bp, Homo sapien
cttcccaaataggaagtgtgccagg

SEQ ID NO: 3954857 - DNA, 25 bp, Homo sapien
ttcttgccggcagctacgtgcgcca

SEQ ID NO: 3954858 - DNA, 25 bp, Homo sapien
ccaggggctgttgtcggccgtctcc

SEQ ID NO: 3954859 - DNA, 25 bp, Homo sapien
gaatacgatggaagggtgaacccga

SEQ ID NO: 3954860 - DNA, 25 bp, Homo sapien
gtcgcgtattccaacacagacatgt

SEQ ID NO: 3954861 - DNA, 25 bp, Homo sapien
caaaaatctagtggagctgccgggc

SEQ ID NO: 3954862 - DNA, 25 bp, Homo sapien
gagcaaggtgcagacgggtcacacc

SEQ ID NO: 3954863 - DNA, 25 bp, Homo sapien
acggtgcgtggcagtgggagaccca

SEQ ID NO: 3954864 - DNA, 25 bp, Homo sapien
acggcctgcgggctcacgtagtagg

SEQ ID NO: 3954865 - DNA, 25 bp, Homo sapien
tagtaggacatgttggccaagggaa

SEQ ID NO: 3954866 - DNA, 25 bp, Homo sapien
tccatgctgttgtggcggacctgct

SEQ ID NO: 3954867 - DNA, 25 bp, Homo sapien
tataataagcttgttggatggcccc

SEQ ID NO: 3954868 - DNA, 25 bp, Homo sapien
tcaaacgagaggctgagggcaaaca

SEQ ID NO: 3954869 - DNA, 25 bp, Homo sapien
tggagggcaggcagcgatatctact

SEQ ID NO: 3954870 - DNA, 25 bp, Homo sapien
catgtgtggacactcaacaggaagc

SEQ ID NO: 3954871 - DNA, 25 bp, Homo sapien
ggagccttgtgtggcgggatgctgc

SEQ ID NO: 3954872 - DNA, 25 bp, Homo sapien
taagccttcgtttcaggagccttgt

SEQ ID NO: 3954873 - DNA, 25 bp, Homo sapien
gcctcagtttgagccgttaagcctt

SEQ ID NO: 3954874 - DNA, 25 bp, Homo sapien
ctgctagtgagcagcactcaggcct

SEQ ID NO: 3954875 - DNA, 25 bp, Homo sapien
actgcttgatggactccttggggtc

SEQ ID NO: 3954876 - DNA, 25 bp, Homo sapien
tagacgtccccgatgcggatggtgc

SEQ ID NO: 3954877 - DNA, 25 bp, Homo sapien
ggtattcctccttccgcacgtagtg

SEQ ID NO: 3954878 - DNA, 25 bp, Homo sapien
accaggaagccatagacgtccccga

SEQ ID NO: 3954879 - DNA, 25 bp, Homo sapien
tcctgctctatggaacagtccagag

SEQ ID NO: 3954880 - DNA, 25 bp, Homo sapien
aacacaacatggtccagggcaggtg

SEQ ID NO: 3954881 - DNA, 25 bp, Homo sapien
acacaggctgcgtgtgtgacctggc

SEQ ID NO: 3954882 - DNA, 25 bp, Homo sapien
acggagaggcgcacggcaccccttg

SEQ ID NO: 3954883 - DNA, 25 bp, Homo sapien
agttctggtattcatcaatctccac

SEQ ID NO: 3954884 - DNA, 25 bp, Homo sapien
gtaggcctcggtcagcgccccgtgg

SEQ ID NO: 3954885 - DNA, 25 bp, Homo sapien
tcagcgccccgtgggctttgtcgta

SEQ ID NO: 3954886 - DNA, 25 bp, Homo sapien
gggctttgtcgtagttctggtattc

SEQ ID NO: 3954887 - DNA, 25 bp, Homo sapien
cgtcataaaagccagccaggaggtc

SEQ ID NO: 3954888 - DNA, 25 bp, Homo sapien
cctggacacgctcgcgaagaacgtg

SEQ ID NO: 3954889 - DNA, 25 bp, Homo sapien
tgtctccggatttgagcagcgccct

SEQ ID NO: 3954890 - DNA, 25 bp, Homo sapien
cgccccttggtgtagaagccgatga

SEQ ID NO: 3954891 - DNA, 25 bp, Homo sapien
cttcagcttgttgccggcctgcgtg

SEQ ID NO: 3954892 - DNA, 25 bp, Homo sapien
gcctgcgtgtacttcttggtggcca

SEQ ID NO: 3954893 - DNA, 25 bp, Homo sapien
ttggccacggtcatcttttccgcca

SEQ ID NO: 3954894 - DNA, 25 bp, Homo sapien
tggcgcatgcagcagtctgctatct

SEQ ID NO: 3954895 - DNA, 25 bp, Homo sapien
gctgtagggccacaaactgctgggt

SEQ ID NO: 3954896 - DNA, 25 bp, Homo sapien
actgtgctcgatgaagaagtcggag

SEQ ID NO: 3954897 - DNA, 25 bp, Homo sapien
gccctctcgtactgactgtgctcga

SEQ ID NO: 3954898 - DNA, 25 bp, Homo sapien
agggtctgacgtctcatccaggtcc

SEQ ID NO: 3954899 - DNA, 25 bp, Homo sapien
gttcatgagctggtcgtccaggccg

SEQ ID NO: 3954900 - DNA, 25 bp, Homo sapien
cttgtggtacagcatgaccgccctg

SEQ ID NO: 3954901 - DNA, 25 bp, Homo sapien
ttctcctcgtagtatcgggccgcct

SEQ ID NO: 3954902 - DNA, 25 bp, Homo sapien
gggccgcctcgatcatgtcctcggg

SEQ ID NO: 3954903 - DNA, 25 bp, Homo sapien
tcctgtctcgttggctatttgcgca

SEQ ID NO: 3954904 - DNA, 25 bp, Homo sapien
taggaggccgccaggtttcctgtct

SEQ ID NO: 3954905 - DNA, 25 bp, Homo sapien
cctgtgcccgggtgtagaagtgcac

SEQ ID NO: 3954906 - DNA, 25 bp, Homo sapien
acaggcggatggcattcttgaaggc

SEQ ID NO: 3954907 - DNA, 25 bp, Homo sapien
gggagaagtggtcccgggccagctc

SEQ ID NO: 3954908 - DNA, 25 bp, Homo sapien
cctggaagcagtggatgcggaccag

SEQ ID NO: 3954909 - DNA, 25 bp, Homo sapien
gcggcgtccatctcgccctggctct

SEQ ID NO: 3954910 - DNA, 25 bp, Homo sapien
cctggctctccaggtactgcgccca

SEQ ID NO: 3954911 - DNA, 25 bp, Homo sapien
tccagggacggcaggtcctccgaca

SEQ ID NO: 3954912 - DNA, 25 bp, Homo sapien
ctgggcacctcgaagcggtgcgtgt

SEQ ID NO: 3954913 - DNA, 25 bp, Homo sapien
cctcgaagcggtgcgtgtccgactt

SEQ ID NO: 3954914 - DNA, 25 bp, Homo sapien
gcaggtcctccgacagcatcctggg

SEQ ID NO: 3954915 - DNA, 25 bp, Homo sapien
tgctcggctacctggagggcctcct

SEQ ID NO: 3954916 - DNA, 25 bp, Homo sapien
aacttgttcaggaggtcgtggcgct

SEQ ID NO: 3954917 - DNA, 25 bp, Homo sapien
tgcacgcgatcgtggtgctcggcta

SEQ ID NO: 3954918 - DNA, 25 bp, Homo sapien
cccgcagcctggtagaacttgttca

SEQ ID NO: 3954919 - DNA, 25 bp, Homo sapien
ggccacgcgggcctctagctccggc

SEQ ID NO: 3954920 - DNA, 25 bp, Homo sapien
gcgggcatggcccatgttccccagg

SEQ ID NO: 3954921 - DNA, 25 bp, Homo sapien
tgctccgcctcacgcagcgctcggg

SEQ ID NO: 3954922 - DNA, 25 bp, Homo sapien
gccagcacggccacgcgggcctcta

SEQ ID NO: 3954923 - DNA, 25 bp, Homo sapien
cacatgcgcgccatgttctcccaga

SEQ ID NO: 3954924 - DNA, 25 bp, Homo sapien
atgcgcgccatgttctcccagacgg

SEQ ID NO: 3954925 - DNA, 25 bp, Homo sapien
cagccgctgggtcttcacgcacatg

SEQ ID NO: 3954926 - DNA, 25 bp, Homo sapien
gctgggtcttcacgcacatgcgcgc

SEQ ID NO: 3954927 - DNA, 25 bp, Homo sapien
caagtagtcatcaggcacagctgcc

SEQ ID NO: 3954928 - DNA, 25 bp, Homo sapien
agagaggtgcccgtcacgagtccca

SEQ ID NO: 3954929 - DNA, 25 bp, Homo sapien
tctcctggggcaagtagtcatcagg

SEQ ID NO: 3954930 - DNA, 25 bp, Homo sapien
cacagctgccaaacgggcatgagga

SEQ ID NO: 3954931 - DNA, 25 bp, Homo sapien
tgtctccccaggagacggtgaccca

SEQ ID NO: 3954932 - DNA, 25 bp, Homo sapien
ctggaacctggagacaggcctgtct

SEQ ID NO: 3954933 - DNA, 25 bp, Homo sapien
ctgacccagccctggaacctggaga

SEQ ID NO: 3954934 - DNA, 25 bp, Homo sapien
ccagcccacgcagggttctgcagag

SEQ ID NO: 3954935 - DNA, 25 bp, Homo sapien
gctctgccgagaccactctgtgtca

SEQ ID NO: 3954936 - DNA, 25 bp, Homo sapien
cgaggcactggaacaagaagcagat

SEQ ID NO: 3954937 - DNA, 25 bp, Homo sapien
tggcgaacagcggcttgacgatcat

SEQ ID NO: 3954938 - DNA, 25 bp, Homo sapien
ggacgcagccttcaaaggtcctgca

SEQ ID NO: 3954939 - DNA, 25 bp, Homo sapien
ccagggcaggcaatagtcgctcagt

SEQ ID NO: 3954940 - DNA, 25 bp, Homo sapien
ttaaaagcaacaggcgagacgaggg

SEQ ID NO: 3954941 - DNA, 25 bp, Homo sapien
ttttgagggcagcattcccgtggcg

SEQ ID NO: 3954942 - DNA, 25 bp, Homo sapien
cacctaagaatgacctggcctcgag

SEQ ID NO: 3954943 - DNA, 25 bp, Homo sapien
gctttctccggataagcggcggcac

SEQ ID NO: 3954944 - DNA, 25 bp, Homo sapien
cgatgaccgtgcagagactcgtggc

SEQ ID NO: 3954945 - DNA, 25 bp, Homo sapien
tcactcatcctcaacaacgtggcgg

SEQ ID NO: 3954946 - DNA, 25 bp, Homo sapien
tccaactgggtgtgccagacgctgg

SEQ ID NO: 3954947 - DNA, 25 bp, Homo sapien
cataaataggaaggcgcttacagcc

SEQ ID NO: 3954948 - DNA, 25 bp, Homo sapien
aactcggtgtcttatgggaagcccg

SEQ ID NO: 3954949 - DNA, 25 bp, Homo sapien
cagcagggaccaacagccgtctttt

SEQ ID NO: 3954950 - DNA, 25 bp, Homo sapien
gaataacttcaaagcttccaccggc

SEQ ID NO: 3954951 - DNA, 25 bp, Homo sapien
ggatccgttcatggagcagggccct

SEQ ID NO: 3954952 - DNA, 25 bp, Homo sapien
ggcgcaaactgtcctcttggcaaga

SEQ ID NO: 3954953 - DNA, 25 bp, Homo sapien
gaaggacactagaaagggcaccatg

SEQ ID NO: 3954954 - DNA, 25 bp, Homo sapien
gatgccccgtgacacactgagaagc

SEQ ID NO: 3954955 - DNA, 25 bp, Homo sapien
ctctgggtctcactggcgtccgagg

SEQ ID NO: 3954956 - DNA, 25 bp, Homo sapien
tccagccttggagctgtaccaccag

SEQ ID NO: 3954957 - DNA, 25 bp, Homo sapien
gtcccgttttcaccgcatgcctagg

SEQ ID NO: 3954958 - DNA, 25 bp, Homo sapien
taccctagttgtgctccaaacagaa

SEQ ID NO: 3954959 - DNA, 25 bp, Homo sapien
tgtctggattagaatggtcgaccca

SEQ ID NO: 3954960 - DNA, 25 bp, Homo sapien
caaaagctatgacactgatcttaag

SEQ ID NO: 3954961 - DNA, 25 bp, Homo sapien
ttccaggtgggcctcgagggaccca

SEQ ID NO: 3954962 - DNA, 25 bp, Homo sapien
gaggcctgagctcgtgtttatggca

SEQ ID NO: 3954963 - DNA, 25 bp, Homo sapien
cacgtagccgatgccagtgggtcct

SEQ ID NO: 3954964 - DNA, 25 bp, Homo sapien
ctgttgagtacagggccacgtagcc

SEQ ID NO: 3954965 - DNA, 25 bp, Homo sapien
ctccgtgagcattcgagggcaccag

SEQ ID NO: 3954966 - DNA, 25 bp, Homo sapien
gggaatcgtgctgcccctccgtgag

SEQ ID NO: 3954967 - DNA, 25 bp, Homo sapien
tttcatacagatcagggtgcagcgg

SEQ ID NO: 3954968 - DNA, 25 bp, Homo sapien
tcacggaagagcctaagatcagcgg

SEQ ID NO: 3954969 - DNA, 25 bp, Homo sapien
tacctatacaaaggaggccacacca

SEQ ID NO: 3954970 - DNA, 25 bp, Homo sapien
cagcggcacttcagtcttctacggg

SEQ ID NO: 3954971 - DNA, 25 bp, Homo sapien
tagactctagtcacgaaaccctgat

SEQ ID NO: 3954972 - DNA, 25 bp, Homo sapien
cagtgtcctgttatcctagttggta

SEQ ID NO: 3954973 - DNA, 25 bp, Homo sapien
cctagagcctatgtttccagctgga

SEQ ID NO: 3954974 - DNA, 25 bp, Homo sapien
gctggattaggacgcccggctccat

SEQ ID NO: 3954975 - DNA, 25 bp, Homo sapien
aaattactgctgagtctggggggct

SEQ ID NO: 3954976 - DNA, 25 bp, Homo sapien
gagcagcacgccaggacagaattaa

SEQ ID NO: 3954977 - DNA, 25 bp, Homo sapien
ccccaagttggtgttgcaagcatca

SEQ ID NO: 3954978 - DNA, 25 bp, Homo sapien
aagtcagagatggatttaacacaaa

SEQ ID NO: 3954979 - DNA, 25 bp, Homo sapien
catcgggctcgtgactttctacaga

SEQ ID NO: 3954980 - DNA, 25 bp, Homo sapien
catatgtctgtacgtgtcgtgggcc

SEQ ID NO: 3954981 - DNA, 25 bp, Homo sapien
tacgtggagtcaccatgctgagtcg

SEQ ID NO: 3954982 - DNA, 25 bp, Homo sapien
tccacaagagggaggactgcatggc

SEQ ID NO: 3954983 - DNA, 25 bp, Homo sapien
gaccttttcagagaccccgtaggca

SEQ ID NO: 3954984 - DNA, 25 bp, Homo sapien
ggcatacacactcttatccacactt

SEQ ID NO: 3954985 - DNA, 25 bp, Homo sapien
gggctcacactaagggtcaaaaaga

SEQ ID NO: 3954986 - DNA, 25 bp, Homo sapien
caagtccttacagactctctgatca

SEQ ID NO: 3954987 - DNA, 25 bp, Homo sapien
cttggtgggctacaaaattcctgca

SEQ ID NO: 3954988 - DNA, 25 bp, Homo sapien
tcagcacacagcgtagaaataccag

SEQ ID NO: 3954989 - DNA, 25 bp, Homo sapien
catgatgctgcactgggtccaaaca

SEQ ID NO: 3954990 - DNA, 25 bp, Homo sapien
gatcagtttggattgtgaggcccgt

SEQ ID NO: 3954991 - DNA, 25 bp, Homo sapien
cagcatttcatcgagtgggaagacc

SEQ ID NO: 3954992 - DNA, 25 bp, Homo sapien
aggctgagagcttcccacgtggcat

SEQ ID NO: 3954993 - DNA, 25 bp, Homo sapien
tttcaacaggcgaaccaagaaggca

SEQ ID NO: 3954994 - DNA, 25 bp, Homo sapien
taggaagcagctaaacagcccgaga

SEQ ID NO: 3954995 - DNA, 25 bp, Homo sapien
ggatgtggtggcacccaggctccac

SEQ ID NO: 3954996 - DNA, 25 bp, Homo sapien
ttgatggatttgaaggcttcgtcca

SEQ ID NO: 3954997 - DNA, 25 bp, Homo sapien
gggtggccttgtcgcagtcctccag

SEQ ID NO: 3954998 - DNA, 25 bp, Homo sapien
ccatgtctcctatggtgacaaagaa

SEQ ID NO: 3954999 - DNA, 25 bp, Homo sapien
tatgtaaagctgaagccctcaccca

SEQ ID NO: 3955000 - DNA, 25 bp, Homo sapien
tgtaaagctgaagccctcacccaga

SEQ ID NO: 3955001 - DNA, 25 bp, Homo sapien
cccatgtgtttgttaattcatatgt

SEQ ID NO: 3955002 - DNA, 25 bp, Homo sapien
ccagacctcgtcctctggatttagc

SEQ ID NO: 3955003 - DNA, 25 bp, Homo sapien
ctgcgtcatacacgcctgctctctg

SEQ ID NO: 3955004 - DNA, 25 bp, Homo sapien
actgcgtcatacacgcctgctctct

SEQ ID NO: 3955005 - DNA, 25 bp, Homo sapien
gactgcgtcatacacgcctgctctc

SEQ ID NO: 3955006 - DNA, 25 bp, Homo sapien
ggaacagtgtgacgcataaaccagc

SEQ ID NO: 3955007 - DNA, 25 bp, Homo sapien
caatccaggtccgagtctacagggt

SEQ ID NO: 3955008 - DNA, 25 bp, Homo sapien
tcctatgaaggtgaatgccagctca

SEQ ID NO: 3955009 - DNA, 25 bp, Homo sapien
catgcattgacagagcagggagccc

SEQ ID NO: 3955010 - DNA, 25 bp, Homo sapien
tcttcggaaatgaagaaggacagga

SEQ ID NO: 3955011 - DNA, 25 bp, Homo sapien
gtagtaataaggcacttccatcccc

SEQ ID NO: 3955012 - DNA, 25 bp, Homo sapien
ttcttgtgaagtagtaataaggcac

SEQ ID NO: 3955013 - DNA, 25 bp, Homo sapien
agaaggacaggatcaaaacatctgc

SEQ ID NO: 3955014 - DNA, 25 bp, Homo sapien
catgaagatcttaagtctgtcaaat

SEQ ID NO: 3955015 - DNA, 25 bp, Homo sapien
tccacgtgaacgaattttcaggacc

SEQ ID NO: 3955016 - DNA, 25 bp, Homo sapien
ttaagtctgtcaaatggccactgag

SEQ ID NO: 3955017 - DNA, 25 bp, Homo sapien
gtctaaactcaaatacaacaggcag

SEQ ID NO: 3955018 - DNA, 25 bp, Homo sapien
ggctgcccgtttgcagactgaggct

SEQ ID NO: 3955019 - DNA, 25 bp, Homo sapien
gagcgcggcgtctcctgcacggctt

SEQ ID NO: 3955020 - DNA, 25 bp, Homo sapien
cacggcttcgcatacaaacagccgg

SEQ ID NO: 3955021 - DNA, 25 bp, Homo sapien
ctgcccgtttgcagactgaggctgg

SEQ ID NO: 3955022 - DNA, 25 bp, Homo sapien
tcacgggaacataatttttcagtcc

SEQ ID NO: 3955023 - DNA, 25 bp, Homo sapien
tccctcatccacaaagaggtggctc

SEQ ID NO: 3955024 - DNA, 25 bp, Homo sapien
agtccctcatccacaaagaggtggc

SEQ ID NO: 3955025 - DNA, 25 bp, Homo sapien
tggtcccagaagtggttcacgggaa

SEQ ID NO: 3955026 - DNA, 25 bp, Homo sapien
gggcgggcactcctgctaccagtct

SEQ ID NO: 3955027 - DNA, 25 bp, Homo sapien
cagggcgggcactcctgctaccagt

SEQ ID NO: 3955028 - DNA, 25 bp, Homo sapien
gcgggcactcctgctaccagtctcc

SEQ ID NO: 3955029 - DNA, 25 bp, Homo sapien
ccagggcgggcactcctgctaccag

SEQ ID NO: 3955030 - DNA, 25 bp, Homo sapien
gtccatttcaacatcgtagaagcag

SEQ ID NO: 3955031 - DNA, 25 bp, Homo sapien
tagaagcagattttggaatcagggc

SEQ ID NO: 3955032 - DNA, 25 bp, Homo sapien
tgaagtcaaagacggtcactgtgtc

SEQ ID NO: 3955033 - DNA, 25 bp, Homo sapien
tcttgctcattaaaggacagcgtct

SEQ ID NO: 3955034 - DNA, 25 bp, Homo sapien
gggaggatgctgatggtgctcccgc

SEQ ID NO: 3955035 - DNA, 25 bp, Homo sapien
gaggatgctgatggtgctcccgctg

SEQ ID NO: 3955036 - DNA, 25 bp, Homo sapien
aggatgctgatggtgctcccgctgc

SEQ ID NO: 3955037 - DNA, 25 bp, Homo sapien
tggggaggatgctgatggtgctccc

SEQ ID NO: 3955038 - DNA, 25 bp, Homo sapien
cagagaagcgatgccccccacccca

SEQ ID NO: 3955039 - DNA, 25 bp, Homo sapien
ccgcagagaagcgatgccccccacc

SEQ ID NO: 3955040 - DNA, 25 bp, Homo sapien
ctgcaccgcagagaagcgatgcccc

SEQ ID NO: 3955041 - DNA, 25 bp, Homo sapien
caccgcagagaagcgatgcccccca

SEQ ID NO: 3955042 - DNA, 25 bp, Homo sapien
ctcagtctccgagaaaaggaggagt

SEQ ID NO: 3955043 - DNA, 25 bp, Homo sapien
cacagatgtccaagaagcagggatt

SEQ ID NO: 3955044 - DNA, 25 bp, Homo sapien
taaagtgagccaagtctgtccctac

SEQ ID NO: 3955045 - DNA, 25 bp, Homo sapien
caagtctgtccctacaaccaggaaa

SEQ ID NO: 3955046 - DNA, 25 bp, Homo sapien
aaatgtgcatctaagtggcccctgc

SEQ ID NO: 3955047 - DNA, 25 bp, Homo sapien
cagatgtgagttacagcgctcggcc

SEQ ID NO: 3955048 - DNA, 25 bp, Homo sapien
gcctggacagcacctggattgcaga

SEQ ID NO: 3955049 - DNA, 25 bp, Homo sapien
aggtcaagtgcacaagccaaggaac

SEQ ID NO: 3955050 - DNA, 25 bp, Homo sapien
gggaaatcccatctagcgaggtgat

SEQ ID NO: 3955051 - DNA, 25 bp, Homo sapien
tgtctcccgatttctgaagtgacag

SEQ ID NO: 3955052 - DNA, 25 bp, Homo sapien
atcaagcacctgacgcgggaaatcc

SEQ ID NO: 3955053 - DNA, 25 bp, Homo sapien
gattaaacagctgtcctaggattca

SEQ ID NO: 3955054 - DNA, 25 bp, Homo sapien
gaactcggtttgactccaccgtgta

SEQ ID NO: 3955055 - DNA, 25 bp, Homo sapien
caggttcgaacttgaactcggtttg

SEQ ID NO: 3955056 - DNA, 25 bp, Homo sapien
ccaccgtgtaaacgttttcttcatg

SEQ ID NO: 3955057 - DNA, 25 bp, Homo sapien
cacaggcgtctcacacaagaaggtc

SEQ ID NO: 3955058 - DNA, 25 bp, Homo sapien
agataagaatctagaggcgggcctg

SEQ ID NO: 3955059 - DNA, 25 bp, Homo sapien
cagggaactgtcgtggccacggcta

SEQ ID NO: 3955060 - DNA, 25 bp, Homo sapien
cctgggctgatgtggagactccatg

SEQ ID NO: 3955061 - DNA, 25 bp, Homo sapien
gcagcacagcatctatgacaacaca

SEQ ID NO: 3955062 - DNA, 25 bp, Homo sapien
ctgcactccgtatcgcggctccaga

SEQ ID NO: 3955063 - DNA, 25 bp, Homo sapien
gctccagaaagctcgaagatcgcca

SEQ ID NO: 3955064 - DNA, 25 bp, Homo sapien
tccgtatcgcggctccagaaagctc

SEQ ID NO: 3955065 - DNA, 25 bp, Homo sapien
ctccagaaagctcgaagatcgccac

SEQ ID NO: 3955066 - DNA, 25 bp, Homo sapien
cttccgttccagactgcgacagcat

SEQ ID NO: 3955067 - DNA, 25 bp, Homo sapien
ccttccgttccagactgcgacagca

SEQ ID NO: 3955068 - DNA, 25 bp, Homo sapien
cacccacgggtcccctcggcagtca

SEQ ID NO: 3955069 - DNA, 25 bp, Homo sapien
tgccctgaactacctggccatgggg

SEQ ID NO: 3955070 - DNA, 25 bp, Homo sapien
cctgaactacctggccatggggcag

SEQ ID NO: 3955071 - DNA, 25 bp, Homo sapien
ctacctggccatggggcagttcttc

SEQ ID NO: 3955072 - DNA, 25 bp, Homo sapien
acatggcccgctcgctgaggatggc

SEQ ID NO: 3955073 - DNA, 25 bp, Homo sapien
cactgatgtgcatgtcggtgcgcag

SEQ ID NO: 3955074 - DNA, 25 bp, Homo sapien
tggtggaagtgtgacgacatggccc

SEQ ID NO: 3955075 - DNA, 25 bp, Homo sapien
gatggccacggagatgacgctgttc

SEQ ID NO: 3955076 - DNA, 25 bp, Homo sapien
agagcaggagaaagatgcggtcagg

SEQ ID NO: 3955077 - DNA, 25 bp, Homo sapien
ccagatgtgtgaacagagcaggaga

SEQ ID NO: 3955078 - DNA, 25 bp, Homo sapien
gagaaagaaccagatgtgtgaacag

SEQ ID NO: 3955079 - DNA, 25 bp, Homo sapien
caggagaaagatgcggtcaggagaa

SEQ ID NO: 3955080 - DNA, 25 bp, Homo sapien
ccttggagctcggtaggggtctgaa

SEQ ID NO: 3955081 - DNA, 25 bp, Homo sapien
gatgtttccttggagctcggtaggg

SEQ ID NO: 3955082 - DNA, 25 bp, Homo sapien
gatttgcgtgatgtttccttggagc

SEQ ID NO: 3955083 - DNA, 25 bp, Homo sapien
ctggatttgcgtgatgtttccttgg

SEQ ID NO: 3955084 - DNA, 25 bp, Homo sapien
catggctactcgccctctgtcggta

SEQ ID NO: 3955085 - DNA, 25 bp, Homo sapien
cctctgtcggtaccagcggccagaa

SEQ ID NO: 3955086 - DNA, 25 bp, Homo sapien
ctgtcggtaccagcggccagaagac

SEQ ID NO: 3955087 - DNA, 25 bp, Homo sapien
ctccacatggctactcgccctctgt

SEQ ID NO: 3955088 - DNA, 25 bp, Homo sapien
tcaaagccaaacttctcatctggac

SEQ ID NO: 3955089 - DNA, 25 bp, Homo sapien
caaagccaaacttctcatctggact

SEQ ID NO: 3955090 - DNA, 25 bp, Homo sapien
tcatctggactcagtatataattct

SEQ ID NO: 3955091 - DNA, 25 bp, Homo sapien
agaaggctgccttcaatcaaagcga

SEQ ID NO: 3955092 - DNA, 25 bp, Homo sapien
aatcaaagcgatgtctgcccggcgg

SEQ ID NO: 3955093 - DNA, 25 bp, Homo sapien
ctccccgacggccatcacgagaagg

SEQ ID NO: 3955094 - DNA, 25 bp, Homo sapien
ccccgacggccatcacgagaaggct

SEQ ID NO: 3955095 - DNA, 25 bp, Homo sapien
cagggacagccggaggttctctgtg

SEQ ID NO: 3955096 - DNA, 25 bp, Homo sapien
tcaggaggcaccgtgtacagggaca

SEQ ID NO: 3955097 - DNA, 25 bp, Homo sapien
gcatctgaatcgtgctgtctgcgga

SEQ ID NO: 3955098 - DNA, 25 bp, Homo sapien
tgtctgcggacaccacctgagtggt

SEQ ID NO: 3955099 - DNA, 25 bp, Homo sapien
cgtccatcagactgacaaagaacaa

SEQ ID NO: 3955100 - DNA, 25 bp, Homo sapien
tcagcaaacttccagaactgctctt

SEQ ID NO: 3955101 - DNA, 25 bp, Homo sapien
ttccagttaaacatgtccagggctt

SEQ ID NO: 3955102 - DNA, 25 bp, Homo sapien
agggctttctcatcaccgctcacag

SEQ ID NO: 3955103 - DNA, 25 bp, Homo sapien
tgtttcagcagaggcgtcccttgca

SEQ ID NO: 3955104 - DNA, 25 bp, Homo sapien
gggagccggaagatgcagtgcgtga

SEQ ID NO: 3955105 - DNA, 25 bp, Homo sapien
tttggtccaacctccacaagagcaa

SEQ ID NO: 3955106 - DNA, 25 bp, Homo sapien
ggtgtttcccatactcgtgtttcag

SEQ ID NO: 3955107 - DNA, 25 bp, Homo sapien
gaacggcctctcgacgtgtgtatct

SEQ ID NO: 3955108 - DNA, 25 bp, Homo sapien
gggcatcgtgtgctgctccttgtcc

SEQ ID NO: 3955109 - DNA, 25 bp, Homo sapien
tccaacggagcacggtgatgtcggc

SEQ ID NO: 3955110 - DNA, 25 bp, Homo sapien
tgttaaacaccgtcacttctccagt

SEQ ID NO: 3955111 - DNA, 25 bp, Homo sapien
ggtaaatatccacgctgcctgttga

SEQ ID NO: 3955112 - DNA, 25 bp, Homo sapien
ccaggtaaatatccacgctgcctgt

SEQ ID NO: 3955113 - DNA, 25 bp, Homo sapien
ctgttgaggttgtgctgatgtaagc

SEQ ID NO: 3955114 - DNA, 25 bp, Homo sapien
cgctgcctgttgaggttgtgctgat

SEQ ID NO: 3955115 - DNA, 25 bp, Homo sapien
tatctggtggtcataatagagggcc

SEQ ID NO: 3955116 - DNA, 25 bp, Homo sapien
gggcttctatctggtggtcataata

SEQ ID NO: 3955117 - DNA, 25 bp, Homo sapien
agctgataaatgagggtgaccctgc

SEQ ID NO: 3955118 - DNA, 25 bp, Homo sapien
ccaagaatggatggacagggtgcca

SEQ ID NO: 3955119 - DNA, 25 bp, Homo sapien
gacggaactcaggcctcctcagcgc

SEQ ID NO: 3955120 - DNA, 25 bp, Homo sapien
aactcaggcctcctcagcgctgaaa

SEQ ID NO: 3955121 - DNA, 25 bp, Homo sapien
cggaactcaggcctcctcagcgctg

SEQ ID NO: 3955122 - DNA, 25 bp, Homo sapien
gaactcaggcctcctcagcgctgaa

SEQ ID NO: 3955123 - DNA, 25 bp, Homo sapien
tataagaaacgggttccaggcctgc

SEQ ID NO: 3955124 - DNA, 25 bp, Homo sapien
gacggtactgagaagccatgcgctg

SEQ ID NO: 3955125 - DNA, 25 bp, Homo sapien
gtttgatgcaacacgaccctcaggg

SEQ ID NO: 3955126 - DNA, 25 bp, Homo sapien
tgagtagccttcctcggtgacgctg

SEQ ID NO: 3955127 - DNA, 25 bp, Homo sapien
gttgccgggacaacggcgcgccagg

SEQ ID NO: 3955128 - DNA, 25 bp, Homo sapien
aaggcgatcgggcacgcacgtgcag

SEQ ID NO: 3955129 - DNA, 25 bp, Homo sapien
cggaaagagccgaaggcgatcgggc

SEQ ID NO: 3955130 - DNA, 25 bp, Homo sapien
aacgcggaaatagccgaaggtgagc

SEQ ID NO: 3955131 - DNA, 25 bp, Homo sapien
tcacagccccgatcaaccgcggcat

SEQ ID NO: 3955132 - DNA, 25 bp, Homo sapien
ctgcaagagagaagcgggacgagct

SEQ ID NO: 3955133 - DNA, 25 bp, Homo sapien
gagaagcgggacgagctttttctag

SEQ ID NO: 3955134 - DNA, 25 bp, Homo sapien
tcccctttgtgtggagggcgcgctg

SEQ ID NO: 3955135 - DNA, 25 bp, Homo sapien
cgccgtagccggaactgctgctgag

SEQ ID NO: 3955136 - DNA, 25 bp, Homo sapien
tggcggcagtatctgcgtccgcagc

SEQ ID NO: 3955137 - DNA, 25 bp, Homo sapien
ctcgaccagtcgcttccgaggcgga

SEQ ID NO: 3955138 - DNA, 25 bp, Homo sapien
tgccgcccggcgttgatgaaaaagg

SEQ ID NO: 3955139 - DNA, 25 bp, Homo sapien
gggaggacgggctcaagaagctggg

SEQ ID NO: 3955140 - DNA, 25 bp, Homo sapien
caagcgggcggccgatgaggagtcc

SEQ ID NO: 3955141 - DNA, 25 bp, Homo sapien
gctcaagaagctgggcaagcgggcg

SEQ ID NO: 3955142 - DNA, 25 bp, Homo sapien
cggccgcaggatgacagtgaagttg

SEQ ID NO: 3955143 - DNA, 25 bp, Homo sapien
tttcaaacagcggacaatagttcgg

SEQ ID NO: 3955144 - DNA, 25 bp, Homo sapien
tctctccttcgaagaggctgcgact

SEQ ID NO: 3955145 - DNA, 25 bp, Homo sapien
tctttcccagacatcaggcggtgga

SEQ ID NO: 3955146 - DNA, 25 bp, Homo sapien
gaaatgcaccaagggagcaggcttt

SEQ ID NO: 3955147 - DNA, 25 bp, Homo sapien
ttgaatccagccggcattcgtcccc

SEQ ID NO: 3955148 - DNA, 25 bp, Homo sapien
gaatccagccggcattcgtccccca

SEQ ID NO: 3955149 - DNA, 25 bp, Homo sapien
cttgaatccagccggcattcgtccc

SEQ ID NO: 3955150 - DNA, 25 bp, Homo sapien
aatccagccggcattcgtcccccat

SEQ ID NO: 3955151 - DNA, 25 bp, Homo sapien
taaggtgcagaaggtttcctgagct

SEQ ID NO: 3955152 - DNA, 25 bp, Homo sapien
cccattgtgtggcttggagaagcgt

SEQ ID NO: 3955153 - DNA, 25 bp, Homo sapien
tgaagtgcggctgctaaaatgaaat

SEQ ID NO: 3955154 - DNA, 25 bp, Homo sapien
tgagcttggctcacacttaggttgc

SEQ ID NO: 3955155 - DNA, 25 bp, Homo sapien
tgtctccattgtggacagggcgtct

SEQ ID NO: 3955156 - DNA, 25 bp, Homo sapien
gctgcagcgtcattgtgctgttaca

SEQ ID NO: 3955157 - DNA, 25 bp, Homo sapien
tgctgttacatggttccacataaaa

SEQ ID NO: 3955158 - DNA, 25 bp, Homo sapien
cagggcgtcttaggctgcagcgtca

SEQ ID NO: 3955159 - DNA, 25 bp, Homo sapien
aacttagggtcttctggtggcgaga

SEQ ID NO: 3955160 - DNA, 25 bp, Homo sapien
agaaggcaaaaaggtccggcggcag

SEQ ID NO: 3955161 - DNA, 25 bp, Homo sapien
gatcatcgtctggaaatgtgtctgg

SEQ ID NO: 3955162 - DNA, 25 bp, Homo sapien
gagtcgtggagcacagaggacaaga

SEQ ID NO: 3955163 - DNA, 25 bp, Homo sapien
tcccagctggtgtgcatgatgaacg

SEQ ID NO: 3955164 - DNA, 25 bp, Homo sapien
tcctggtggcggatgaagccctctt

SEQ ID NO: 3955165 - DNA, 25 bp, Homo sapien
tacatttctcggttcaatgacctgg

SEQ ID NO: 3955166 - DNA, 25 bp, Homo sapien
tggcccaagagctgtccatcgctga

SEQ ID NO: 3955167 - DNA, 25 bp, Homo sapien
gaaatcactgtggtactagagccgt

SEQ ID NO: 3955168 - DNA, 25 bp, Homo sapien
ctaggatgagttcttggcaagggcc

SEQ ID NO: 3955169 - DNA, 25 bp, Homo sapien
gcaagggccagcgttagaaatcact

SEQ ID NO: 3955170 - DNA, 25 bp, Homo sapien
tgcaacgggcaggaacgtggtcaca

SEQ ID NO: 3955171 - DNA, 25 bp, Homo sapien
ataagacaccgggaatgagggagga

SEQ ID NO: 3955172 - DNA, 25 bp, Homo sapien
aattagatcacagcattgaattcaa

SEQ ID NO: 3955173 - DNA, 25 bp, Homo sapien
tctttaaaccttgagctctagccga

SEQ ID NO: 3955174 - DNA, 25 bp, Homo sapien
cgatgcatttgtcaggaaatacagc

SEQ ID NO: 3955175 - DNA, 25 bp, Homo sapien
gtataaagcagaatgcctgcctttc

SEQ ID NO: 3955176 - DNA, 25 bp, Homo sapien
atgtataaagcagaatgcctgcctt

SEQ ID NO: 3955177 - DNA, 25 bp, Homo sapien
tttttgtaccatattgtaaattata

SEQ ID NO: 3955178 - DNA, 25 bp, Homo sapien
tgtataaagcagaatgcctgccttt

SEQ ID NO: 3955179 - DNA, 25 bp, Homo sapien
gccttgagtacctgcgctgggcggg

SEQ ID NO: 3955180 - DNA, 25 bp, Homo sapien
ggatgattggcgtcttggcgcccaa

SEQ ID NO: 3955181 - DNA, 25 bp, Homo sapien
cgaccgttcaaagcctaagtcgtcg

SEQ ID NO: 3955182 - DNA, 25 bp, Homo sapien
cggtggccgcgctgagataggctgc

SEQ ID NO: 3955183 - DNA, 25 bp, Homo sapien
ttccagcaggcctaataggatggca

SEQ ID NO: 3955184 - DNA, 25 bp, Homo sapien
ttttggaccaacagaagaacctcag

SEQ ID NO: 3955185 - DNA, 25 bp, Homo sapien
tggaagtccagaagaagctactcct

SEQ ID NO: 3955186 - DNA, 25 bp, Homo sapien
ggatggcatctaatatttttggacc

SEQ ID NO: 3955187 - DNA, 25 bp, Homo sapien
catttttgggtctccggtcactgcc

SEQ ID NO: 3955188 - DNA, 25 bp, Homo sapien
ccgtgcagactcgacagcacctgaa

SEQ ID NO: 3955189 - DNA, 25 bp, Homo sapien
gtggtatctttgacgaatcaacccc

SEQ ID NO: 3955190 - DNA, 25 bp, Homo sapien
cctggagggaagaccagcgacattt

SEQ ID NO: 3955191 - DNA, 25 bp, Homo sapien
gaaacctcggcctgatctgatctca

SEQ ID NO: 3955192 - DNA, 25 bp, Homo sapien
tggaggaggcgtaagcagaaacact

SEQ ID NO: 3955193 - DNA, 25 bp, Homo sapien
tcttcccataaatgaggcccgctga

SEQ ID NO: 3955194 - DNA, 25 bp, Homo sapien
ccattctggagatcacggctgctaa

SEQ ID NO: 3955195 - DNA, 25 bp, Homo sapien
tatgaactacagcagaagcccctgg

SEQ ID NO: 3955196 - DNA, 25 bp, Homo sapien
tagccagaggatgccaaaattagtc

SEQ ID NO: 3955197 - DNA, 25 bp, Homo sapien
ggtgtttaacctgcctctgacctgg

SEQ ID NO: 3955198 - DNA, 25 bp, Homo sapien
cgtgacggtactgggccctgtgatt

SEQ ID NO: 3955199 - DNA, 25 bp, Homo sapien
tgaagcagttacaagagccgggccc

SEQ ID NO: 3955200 - DNA, 25 bp, Homo sapien
ttcaccgtcagatactgagctcggc

SEQ ID NO: 3955201 - DNA, 25 bp, Homo sapien
taattctgtgctaggatgtctccat

SEQ ID NO: 3955202 - DNA, 25 bp, Homo sapien
gaacctcgccctttgtcagaaacag

SEQ ID NO: 3955203 - DNA, 25 bp, Homo sapien
agatcccgtagcagtgggtttcaga

SEQ ID NO: 3955204 - DNA, 25 bp, Homo sapien
gctgaagttctcgaaaggccaagaa

SEQ ID NO: 3955205 - DNA, 25 bp, Homo sapien
tttcagatacaggagaccagacagg

SEQ ID NO: 3955206 - DNA, 25 bp, Homo sapien
tgctcagggcacaggatcgactttt

SEQ ID NO: 3955207 - DNA, 25 bp, Homo sapien
tgacatacactgaactgtacatact

SEQ ID NO: 3955208 - DNA, 25 bp, Homo sapien
atcattgacatacactgaactgtac

SEQ ID NO: 3955209 - DNA, 25 bp, Homo sapien
tgaactgtacatacttaaagagtac

SEQ ID NO: 3955210 - DNA, 25 bp, Homo sapien
catacactgaactgtacatacttaa

SEQ ID NO: 3955211 - DNA, 25 bp, Homo sapien
tcagtcactgtaggttaatttgcat

SEQ ID NO: 3955212 - DNA, 25 bp, Homo sapien
gcagtgccgtttgtccatccgcctg

SEQ ID NO: 3955213 - DNA, 25 bp, Homo sapien
tcttccactcggtacagtgattcgg

SEQ ID NO: 3955214 - DNA, 25 bp, Homo sapien
ggcctcctgcagtgcgtacgtggtt

SEQ ID NO: 3955215 - DNA, 25 bp, Homo sapien
agtcagtggccggataagcagagcc

SEQ ID NO: 3955216 - DNA, 25 bp, Homo sapien
gaaagccccgttccaagccatttca

SEQ ID NO: 3955217 - DNA, 25 bp, Homo sapien
ggcactggcccattacaagcaatcg

SEQ ID NO: 3955218 - DNA, 25 bp, Homo sapien
tgtcgggcgaggcaaagtgcaaagc

SEQ ID NO: 3955219 - DNA, 25 bp, Homo sapien
ccagtagaggccatgtatgagtaac

SEQ ID NO: 3955220 - DNA, 25 bp, Homo sapien
ggaatgctccccgagatcaggacgg

SEQ ID NO: 3955221 - DNA, 25 bp, Homo sapien
ccatgttaaccgagttgaagtgttc

SEQ ID NO: 3955222 - DNA, 25 bp, Homo sapien
cacactgtacttggtggtgaaagat

SEQ ID NO: 3955223 - DNA, 25 bp, Homo sapien
gtagctgcctgttcctgggcccaaa

SEQ ID NO: 3955224 - DNA, 25 bp, Homo sapien
cgtcgtagctgcctgttcctgggcc

SEQ ID NO: 3955225 - DNA, 25 bp, Homo sapien
cttaacgtcgtagctgcctgttcct

SEQ ID NO: 3955226 - DNA, 25 bp, Homo sapien
tcgtagctgcctgttcctgggccca

SEQ ID NO: 3955227 - DNA, 25 bp, Homo sapien
tccatgcaacgtccagacaggtgga

SEQ ID NO: 3955228 - DNA, 25 bp, Homo sapien
tccaaagggatgctccaagcgctgt

SEQ ID NO: 3955229 - DNA, 25 bp, Homo sapien
tggatgttcagcagcccgtccaaag

SEQ ID NO: 3955230 - DNA, 25 bp, Homo sapien
gtgagagcctctgtgacgcgcatct

SEQ ID NO: 3955231 - DNA, 25 bp, Homo sapien
cagcagaggagctcgtctgcgcgga

SEQ ID NO: 3955232 - DNA, 25 bp, Homo sapien
cggaaccagagagcgatctcgcggc

SEQ ID NO: 3955233 - DNA, 25 bp, Homo sapien
caccgagtcgctgccgtgaatcagg

SEQ ID NO: 3955234 - DNA, 25 bp, Homo sapien
tctccaccgagtcgctgccgtgaat

SEQ ID NO: 3955235 - DNA, 25 bp, Homo sapien
agagacctccggcacgggtaccacg

SEQ ID NO: 3955236 - DNA, 25 bp, Homo sapien
cggaagaggcgcgtgtgagcgtggg

SEQ ID NO: 3955237 - DNA, 25 bp, Homo sapien
tccggcacgggtaccacgcaggctg

SEQ ID NO: 3955238 - DNA, 25 bp, Homo sapien
acgggtaccacgcaggctgaacagg

SEQ ID NO: 3955239 - DNA, 25 bp, Homo sapien
tcgtggctccgatgagcgcccgcga

SEQ ID NO: 3955240 - DNA, 25 bp, Homo sapien
tgcagaaatccccgcggatggtgcc

SEQ ID NO: 3955241 - DNA, 25 bp, Homo sapien
agcgcccgcgaggtgcgcaccacgt

SEQ ID NO: 3955242 - DNA, 25 bp, Homo sapien
gcgtcggccgggttcgtggctccga

SEQ ID NO: 3955243 - DNA, 25 bp, Homo sapien
tgtgcggaggaacgggcgcggtatc

SEQ ID NO: 3955244 - DNA, 25 bp, Homo sapien
aggaacgggcgcggtatcacgcggg

SEQ ID NO: 3955245 - DNA, 25 bp, Homo sapien
cggaggaacgggcgcggtatcacgc

SEQ ID NO: 3955246 - DNA, 25 bp, Homo sapien
ctgtgcggaggaacgggcgcggtat

SEQ ID NO: 3955247 - DNA, 25 bp, Homo sapien
caccggcccggaggccatatacttg

SEQ ID NO: 3955248 - DNA, 25 bp, Homo sapien
cgttcacgcagctcggcgtagtgct

SEQ ID NO: 3955249 - DNA, 25 bp, Homo sapien
cgtagaacgggcgttcacgcagctc

SEQ ID NO: 3955250 - DNA, 25 bp, Homo sapien
tatacttgacaaggcggccgtagaa

SEQ ID NO: 3955251 - DNA, 25 bp, Homo sapien
tgcggaagggtcaggccgcctgcgc

SEQ ID NO: 3955252 - DNA, 25 bp, Homo sapien
cggaagggtcaggccgcctgcgccc

SEQ ID NO: 3955253 - DNA, 25 bp, Homo sapien
ctgcggaagggtcaggccgcctgcg

SEQ ID NO: 3955254 - DNA, 25 bp, Homo sapien
gcggaagggtcaggccgcctgcgcc

SEQ ID NO: 3955255 - DNA, 25 bp, Homo sapien
cgcccccgctcgctcaccgcgcccc

SEQ ID NO: 3955256 - DNA, 25 bp, Homo sapien
cgcgcccccgctcgctcaccgcgcc

SEQ ID NO: 3955257 - DNA, 25 bp, Homo sapien
gcccccgctcgctcaccgcgccccc

SEQ ID NO: 3955258 - DNA, 25 bp, Homo sapien
ccccgctcgctcaccgcgcccccac

SEQ ID NO: 3955259 - DNA, 25 bp, Homo sapien
caacttgaagcccttcctctcgaag

SEQ ID NO: 3955260 - DNA, 25 bp, Homo sapien
cgtccggcttcacggccaggaaggt

SEQ ID NO: 3955261 - DNA, 25 bp, Homo sapien
ccaggaaggtgcgttcgtgtgcgcc

SEQ ID NO: 3955262 - DNA, 25 bp, Homo sapien
cagcttcagcgccaccaacttgaag

SEQ ID NO: 3955263 - DNA, 25 bp, Homo sapien
ggcaggcggggacgggccgtcaggc

SEQ ID NO: 3955264 - DNA, 25 bp, Homo sapien
gacgggccgtcaggccggcccagca

SEQ ID NO: 3955265 - DNA, 25 bp, Homo sapien
ggacgggccgtcaggccggcccagc

SEQ ID NO: 3955266 - DNA, 25 bp, Homo sapien
caggcggggacgggccgtcaggccg

SEQ ID NO: 3955267 - DNA, 25 bp, Homo sapien
cggggaagaggttagcgaagatggt

SEQ ID NO: 3955268 - DNA, 25 bp, Homo sapien
ccgcggggaagaggttagcgaagat

SEQ ID NO: 3955269 - DNA, 25 bp, Homo sapien
cgcggggaagaggttagcgaagatg

SEQ ID NO: 3955270 - DNA, 25 bp, Homo sapien
gcggggaagaggttagcgaagatgg

SEQ ID NO: 3955271 - DNA, 25 bp, Homo sapien
atggcggtgcgggagcgggatccgc

SEQ ID NO: 3955272 - DNA, 25 bp, Homo sapien
gcctccgcggggaggctgcttcact

SEQ ID NO: 3955273 - DNA, 25 bp, Homo sapien
cctgcgcttaaagaggcctggtcgg

SEQ ID NO: 3955274 - DNA, 25 bp, Homo sapien
tcacttgcaccccggaacccggcag

SEQ ID NO: 3955275 - DNA, 25 bp, Homo sapien
aaaggcacaggtggcgatttgcccc

SEQ ID NO: 3955276 - DNA, 25 bp, Homo sapien
ttcatagcttctgccgggatccagg

SEQ ID NO: 3955277 - DNA, 25 bp, Homo sapien
gcagactcgggtgtaacgcaaagac

SEQ ID NO: 3955278 - DNA, 25 bp, Homo sapien
cctcagaacacgtcgcggaaggtga

SEQ ID NO: 3955279 - DNA, 25 bp, Homo sapien
gggttccatgcgtatcctctgcaca

SEQ ID NO: 3955280 - DNA, 25 bp, Homo sapien
tttgcagggtaatcccagggttcca

SEQ ID NO: 3955281 - DNA, 25 bp, Homo sapien
cgttctgcgataatcatggcccgga

SEQ ID NO: 3955282 - DNA, 25 bp, Homo sapien
tacatgacgtgttcgatctcccgcg

SEQ ID NO: 3955283 - DNA, 25 bp, Homo sapien
gcggtcggcatcgaactgccgggca

SEQ ID NO: 3955284 - DNA, 25 bp, Homo sapien
acttgctgtgccgtcggcggtcggc

SEQ ID NO: 3955285 - DNA, 25 bp, Homo sapien
ggtcggcatcgaactgccgggcacc

SEQ ID NO: 3955286 - DNA, 25 bp, Homo sapien
ttgctgtgccgtcggcggtcggcat

SEQ ID NO: 3955287 - DNA, 25 bp, Homo sapien
tttgaaggtcaggatgccccaggcc

SEQ ID NO: 3955288 - DNA, 25 bp, Homo sapien
ctttgaaggtcaggatgccccaggc

SEQ ID NO: 3955289 - DNA, 25 bp, Homo sapien
tgggagcctcagccacgcaaacctg

SEQ ID NO: 3955290 - DNA, 25 bp, Homo sapien
agccacgcaaacctgcagggaggag

SEQ ID NO: 3955291 - DNA, 25 bp, Homo sapien
tgcaaagccagaaggaagcggggtc

SEQ ID NO: 3955292 - DNA, 25 bp, Homo sapien
gggtcagctcgcaaagctctcggcc

SEQ ID NO: 3955293 - DNA, 25 bp, Homo sapien
aaggtctcgtagtccaccgcgtaga

SEQ ID NO: 3955294 - DNA, 25 bp, Homo sapien
gagaacggccgcgtcaaggtctcgt

SEQ ID NO: 3955295 - DNA, 25 bp, Homo sapien
acagccaggacttgcgcgtgaccag

SEQ ID NO: 3955296 - DNA, 25 bp, Homo sapien
gagtcgcgcggcctgttcagttgct

SEQ ID NO: 3955297 - DNA, 25 bp, Homo sapien
cctcgggagcaagagatggctccct

SEQ ID NO: 3955298 - DNA, 25 bp, Homo sapien
agtcctttaagtctatgacggcggg

SEQ ID NO: 3955299 - DNA, 25 bp, Homo sapien
cctgtgggaacagcaacgcgggctc

SEQ ID NO: 3955300 - DNA, 25 bp, Homo sapien
agaaaggactgtcccagcctcggga

SEQ ID NO: 3955301 - DNA, 25 bp, Homo sapien
agcgtgtctcccgagtctggccgca

SEQ ID NO: 3955302 - DNA, 25 bp, Homo sapien
cccagcccagcttgttgtgtagcac

SEQ ID NO: 3955303 - DNA, 25 bp, Homo sapien
gccgtggagcacaccatcgggtaga

SEQ ID NO: 3955304 - DNA, 25 bp, Homo sapien
cacaggagcgggtgaccttcatgct

SEQ ID NO: 3955305 - DNA, 25 bp, Homo sapien
gggccagctactgggcgcagcccct

SEQ ID NO: 3955306 - DNA, 25 bp, Homo sapien
gggaaggggccagctactgggcgca

SEQ ID NO: 3955307 - DNA, 25 bp, Homo sapien
aggggccagctactgggcgcagccc

SEQ ID NO: 3955308 - DNA, 25 bp, Homo sapien
gaaggggccagctactgggcgcagc

SEQ ID NO: 3955309 - DNA, 25 bp, Homo sapien
acttcctgttcttgaaaaaggtgag

SEQ ID NO: 3955310 - DNA, 25 bp, Homo sapien
ctatacacttcctgttcttgaaaaa

SEQ ID NO: 3955311 - DNA, 25 bp, Homo sapien
cttcctgttcttgaaaaaggtgagt

SEQ ID NO: 3955312 - DNA, 25 bp, Homo sapien
ccaggtgcacgccaatgatggagcc

SEQ ID NO: 3955313 - DNA, 25 bp, Homo sapien
caggtgtccaggtgcacgccaatga

SEQ ID NO: 3955314 - DNA, 25 bp, Homo sapien
tgtccaggtgcacgccaatgatgga

SEQ ID NO: 3955315 - DNA, 25 bp, Homo sapien
ggtgtccaggtgcacgccaatgatg

SEQ ID NO: 3955316 - DNA, 25 bp, Homo sapien
gccgaaccgcgatgagaagctggtc

SEQ ID NO: 3955317 - DNA, 25 bp, Homo sapien
tggccgaaccgcgatgagaagctgg

SEQ ID NO: 3955318 - DNA, 25 bp, Homo sapien
ctggccgaaccgcgatgagaagctg

SEQ ID NO: 3955319 - DNA, 25 bp, Homo sapien
ggccgaaccgcgatgagaagctggt

SEQ ID NO: 3955320 - DNA, 25 bp, Homo sapien
gggtcgcagtgagcccgggagctcc

SEQ ID NO: 3955321 - DNA, 25 bp, Homo sapien
gggcagccagggtcgcagtgagccc

SEQ ID NO: 3955322 - DNA, 25 bp, Homo sapien
cagccagggtcgcagtgagcccggg

SEQ ID NO: 3955323 - DNA, 25 bp, Homo sapien
cagggtcgcagtgagcccgggagct

SEQ ID NO: 3955324 - DNA, 25 bp, Homo sapien
ccagcaggctgcagaacgtgtggcg

SEQ ID NO: 3955325 - DNA, 25 bp, Homo sapien
aggtccacatccgacgtcccgatgc

SEQ ID NO: 3955326 - DNA, 25 bp, Homo sapien
ctgcagaacgtgtggcggtatttgt

SEQ ID NO: 3955327 - DNA, 25 bp, Homo sapien
cgtgtggcggtatttgtccaggtcc

SEQ ID NO: 3955328 - DNA, 25 bp, Homo sapien
ggctgccggagccaggttccccaga

SEQ ID NO: 3955329 - DNA, 25 bp, Homo sapien
aagcaccctgggccgaagcaactta

SEQ ID NO: 3955330 - DNA, 25 bp, Homo sapien
gggctgggctgccggagccaggttc

SEQ ID NO: 3955331 - DNA, 25 bp, Homo sapien
gccggagccaggttccccagaagca

SEQ ID NO: 3955332 - DNA, 25 bp, Homo sapien
gttgtcacagctcagcagggtggct

SEQ ID NO: 3955333 - DNA, 25 bp, Homo sapien
tgtgccgcagctgtactccatgtgg

SEQ ID NO: 3955334 - DNA, 25 bp, Homo sapien
gaagctgaccttacggttgtcacag

SEQ ID NO: 3955335 - DNA, 25 bp, Homo sapien
ttatttaagtcatcccagacccagt

SEQ ID NO: 3955336 - DNA, 25 bp, Homo sapien
ggcccgcccgcagtgcagtcccagc

SEQ ID NO: 3955337 - DNA, 25 bp, Homo sapien
aggcccgcccgcagtgcagtcccag

SEQ ID NO: 3955338 - DNA, 25 bp, Homo sapien
caggctgctacagaaggaggcctcg

SEQ ID NO: 3955339 - DNA, 25 bp, Homo sapien
ggtgggccgagtgcaggctgctaca

SEQ ID NO: 3955340 - DNA, 25 bp, Homo sapien
actcgtcttcctctccgcagcggca

SEQ ID NO: 3955341 - DNA, 25 bp, Homo sapien
ttcctctccgcagcggcagtccctg

SEQ ID NO: 3955342 - DNA, 25 bp, Homo sapien
gatggatggcggcagcgtggagtac

SEQ ID NO: 3955343 - DNA, 25 bp, Homo sapien
gcgtggagtactcggggtcggagtc

SEQ ID NO: 3955344 - DNA, 25 bp, Homo sapien
cagcgtggagtactcggggtcggag

SEQ ID NO: 3955345 - DNA, 25 bp, Homo sapien
aaggactcgccggtcacgggcaccg

SEQ ID NO: 3955346 - DNA, 25 bp, Homo sapien
gggaccatgacatgggcgccaccag

SEQ ID NO: 3955347 - DNA, 25 bp, Homo sapien
tggacctatcgaaagccagcttcag

SEQ ID NO: 3955348 - DNA, 25 bp, Homo sapien
agggtagaccccctgagtcaggagc

SEQ ID NO: 3955349 - DNA, 25 bp, Homo sapien
actgcctagaagtgcgggtccccag

SEQ ID NO: 3955350 - DNA, 25 bp, Homo sapien
gtgtcgaacactgccgagcccgcag

SEQ ID NO: 3955351 - DNA, 25 bp, Homo sapien
aagcagcacatgtgtcgaacactgc

SEQ ID NO: 3955352 - DNA, 25 bp, Homo sapien
ccgcaggcacgcctgcatcccacag

SEQ ID NO: 3955353 - DNA, 25 bp, Homo sapien
gcatcccacagccacgagcctgtga

SEQ ID NO: 3955354 - DNA, 25 bp, Homo sapien
tgacagaggacaagcagcatgcgtg

SEQ ID NO: 3955355 - DNA, 25 bp, Homo sapien
tgctctggtccgagggagatctcag

SEQ ID NO: 3955356 - DNA, 25 bp, Homo sapien
accgggcttagggagtcctcactca

SEQ ID NO: 3955357 - DNA, 25 bp, Homo sapien
gagatctcaggaaaccgactgggaa

SEQ ID NO: 3955358 - DNA, 25 bp, Homo sapien
agtcgtagccccagttagtggagcc

SEQ ID NO: 3955359 - DNA, 25 bp, Homo sapien
ctgcccatcagagtcgtagccccag

SEQ ID NO: 3955360 - DNA, 25 bp, Homo sapien
tcgtagccccagttagtggagcctg

SEQ ID NO: 3955361 - DNA, 25 bp, Homo sapien
gtcgtagccccagttagtggagcct

SEQ ID NO: 3955362 - DNA, 25 bp, Homo sapien
actcaggacgaagtgccaggccctg

SEQ ID NO: 3955363 - DNA, 25 bp, Homo sapien
gcatctgcgtctcggcgggctgcac

SEQ ID NO: 3955364 - DNA, 25 bp, Homo sapien
gcccgggcatctgcgtctcggcggg

SEQ ID NO: 3955365 - DNA, 25 bp, Homo sapien
tctcggcgggctgcactcaggacga

SEQ ID NO: 3955366 - DNA, 25 bp, Homo sapien
ggtagatcctgtgaaacgccaccca

SEQ ID NO: 3955367 - DNA, 25 bp, Homo sapien
atgactccggaatgcgaatcccagc

SEQ ID NO: 3955368 - DNA, 25 bp, Homo sapien
gacacccatgactccggaatgcgaa

SEQ ID NO: 3955369 - DNA, 25 bp, Homo sapien
cccaggtagatcctgtgaaacgcca

SEQ ID NO: 3955370 - DNA, 25 bp, Homo sapien
cgctggccgctgttatggtataaaa

SEQ ID NO: 3955371 - DNA, 25 bp, Homo sapien
gggctcctcgtgaaacacaaatctt

SEQ ID NO: 3955372 - DNA, 25 bp, Homo sapien
taaaatgcaaaaggctgcgagggcc

SEQ ID NO: 3955373 - DNA, 25 bp, Homo sapien
gttcctcatgccagaagcaccgtga

SEQ ID NO: 3955374 - DNA, 25 bp, Homo sapien
cgccccggagcgagacgtaaacaat

SEQ ID NO: 3955375 - DNA, 25 bp, Homo sapien
ctgacccactttccgccccggagcg

SEQ ID NO: 3955376 - DNA, 25 bp, Homo sapien
tgacccactttccgccccggagcga

SEQ ID NO: 3955377 - DNA, 25 bp, Homo sapien
ggagcgagacgtaaacaatccccgc

SEQ ID NO: 3955378 - DNA, 25 bp, Homo sapien
ctccctggtttcacgttcgcagtca

SEQ ID NO: 3955379 - DNA, 25 bp, Homo sapien
ctggtttcacgttcgcagtcaccca

SEQ ID NO: 3955380 - DNA, 25 bp, Homo sapien
ttcacgttcgcagtcacccactgtg

SEQ ID NO: 3955381 - DNA, 25 bp, Homo sapien
gtttcacgttcgcagtcacccactg

SEQ ID NO: 3955382 - DNA, 25 bp, Homo sapien
tcaggcccttgcgtcttccagcaag

SEQ ID NO: 3955383 - DNA, 25 bp, Homo sapien
ccccagcacaaggtgagccaggtgg

SEQ ID NO: 3955384 - DNA, 25 bp, Homo sapien
acctgtccccagcacaaggtgagcc

SEQ ID NO: 3955385 - DNA, 25 bp, Homo sapien
aggcccctgaggacactgaggacct

SEQ ID NO: 3955386 - DNA, 25 bp, Homo sapien
tcatgaccgccacgttggtgaggcc

SEQ ID NO: 3955387 - DNA, 25 bp, Homo sapien
tattccagccgaggttgaggtccca

SEQ ID NO: 3955388 - DNA, 25 bp, Homo sapien
aaggttccggagacagttcccagag

SEQ ID NO: 3955389 - DNA, 25 bp, Homo sapien
tgtgtgcaaacgtgccgagtgccag

SEQ ID NO: 3955390 - DNA, 25 bp, Homo sapien
gggcacgctgggccctcggcttccc

SEQ ID NO: 3955391 - DNA, 25 bp, Homo sapien
ggcgttccggggtctgctccctcca

SEQ ID NO: 3955392 - DNA, 25 bp, Homo sapien
gggcccagtgccacccaggacagca

SEQ ID NO: 3955393 - DNA, 25 bp, Homo sapien
ggcggccgggcacgctgggccctcg

SEQ ID NO: 3955394 - DNA, 25 bp, Homo sapien
ctgcctgcatccaggccttggtcgg

SEQ ID NO: 3955395 - DNA, 25 bp, Homo sapien
cctgcatccaggccttggtcgggtg

SEQ ID NO: 3955396 - DNA, 25 bp, Homo sapien
tgcctgcatccaggccttggtcggg

SEQ ID NO: 3955397 - DNA, 25 bp, Homo sapien
gcctgcatccaggccttggtcgggt

SEQ ID NO: 3955398 - DNA, 25 bp, Homo sapien
gggtacgtctgctgtgccggccacc

SEQ ID NO: 3955399 - DNA, 25 bp, Homo sapien
ggagggtacgtctgctgtgccggcc

SEQ ID NO: 3955400 - DNA, 25 bp, Homo sapien
cgagggagggtacgtctgctgtgcc

SEQ ID NO: 3955401 - DNA, 25 bp, Homo sapien
cagcgagggagggtacgtctgctgt

SEQ ID NO: 3955402 - DNA, 25 bp, Homo sapien
acattcagcccattgagttccagag

SEQ ID NO: 3955403 - DNA, 25 bp, Homo sapien
agctcaaggccggtggcctcccagg

SEQ ID NO: 3955404 - DNA, 25 bp, Homo sapien
cctgtggtaacgcagaggcctacac

SEQ ID NO: 3955405 - DNA, 25 bp, Homo sapien
tccatgagccgcattctgcctgtct

SEQ ID NO: 3955406 - DNA, 25 bp, Homo sapien
tcttgccgattttctagttagctgg

SEQ ID NO: 3955407 - DNA, 25 bp, Homo sapien
cgattttctagttagctggctgatt

SEQ ID NO: 3955408 - DNA, 25 bp, Homo sapien
tgccgattttctagttagctggctg

SEQ ID NO: 3955409 - DNA, 25 bp, Homo sapien
cacagccacagggtcatctggcctc

SEQ ID NO: 3955410 - DNA, 25 bp, Homo sapien
tggtagtaactctcatgagacctga

SEQ ID NO: 3955411 - DNA, 25 bp, Homo sapien
gaggttgattcctcagataccaaca

SEQ ID NO: 3955412 - DNA, 25 bp, Homo sapien
tggaaacaactcaatcagggggcag

SEQ ID NO: 3955413 - DNA, 25 bp, Homo sapien
caccgggccggcgagagttcttaat

SEQ ID NO: 3955414 - DNA, 25 bp, Homo sapien
caagtcggtgacaggaaatgcgtgt

SEQ ID NO: 3955415 - DNA, 25 bp, Homo sapien
cctggatgcggtgttttggaggctc

SEQ ID NO: 3955416 - DNA, 25 bp, Homo sapien
tatagagcataaaattctctcactg

SEQ ID NO: 3955417 - DNA, 25 bp, Homo sapien
gctgtacactctgcatctggtttct

SEQ ID NO: 3955418 - DNA, 25 bp, Homo sapien
gtgcaagtctttggacacaggtttc

SEQ ID NO: 3955419 - DNA, 25 bp, Homo sapien
agtggagttgctggttcatagtgtt

SEQ ID NO: 3955420 - DNA, 25 bp, Homo sapien
agttgctggttcatagtgttgtatc

SEQ ID NO: 3955421 - DNA, 25 bp, Homo sapien
tgttttctagtgtgggcataatttt

SEQ ID NO: 3955422 - DNA, 25 bp, Homo sapien
tagtgatggatcaacaagcgggaaa

SEQ ID NO: 3955423 - DNA, 25 bp, Homo sapien
ccagcatttggtatgttcctgtaaa

SEQ ID NO: 3955424 - DNA, 25 bp, Homo sapien
tttttaacatgtacaaagctgctgg

SEQ ID NO: 3955425 - DNA, 25 bp, Homo sapien
ccacgcccagtcgagtgtactgttt

SEQ ID NO: 3955426 - DNA, 25 bp, Homo sapien
ccaggctgaagtgcagtggcatgat

SEQ ID NO: 3955427 - DNA, 25 bp, Homo sapien
caaagtactgggattgcagagtgtg

SEQ ID NO: 3955428 - DNA, 25 bp, Homo sapien
gccactgtgcccggcccacactttt

SEQ ID NO: 3955429 - DNA, 25 bp, Homo sapien
cactgtgcccggcccacactttttt

SEQ ID NO: 3955430 - DNA, 25 bp, Homo sapien
cctgttgtggcttgtctagattctt

SEQ ID NO: 3955431 - DNA, 25 bp, Homo sapien
tgccactcacactttatagtgagtt

SEQ ID NO: 3955432 - DNA, 25 bp, Homo sapien
gttttgaaatcaggcagcctgagcc

SEQ ID NO: 3955433 - DNA, 25 bp, Homo sapien
tccaactcatcctgtttcaaacctg

SEQ ID NO: 3955434 - DNA, 25 bp, Homo sapien
ccaggttcacgctgttctcctgcct

SEQ ID NO: 3955435 - DNA, 25 bp, Homo sapien
gcctcccaggttcacgctgttctcc

SEQ ID NO: 3955436 - DNA, 25 bp, Homo sapien
gcaatcttggttcgctgcaagctct

SEQ ID NO: 3955437 - DNA, 25 bp, Homo sapien
caaggtggcccctaagtgtgtgttc

SEQ ID NO: 3955438 - DNA, 25 bp, Homo sapien
tcttaatagggacttcatgggatct

SEQ ID NO: 3955439 - DNA, 25 bp, Homo sapien
gagtctcctacccaatgaacatggg

SEQ ID NO: 3955440 - DNA, 25 bp, Homo sapien
tccatgctagtgaatggcgtcttag

SEQ ID NO: 3955441 - DNA, 25 bp, Homo sapien
ggtgacctatcccagcagcaattgg

SEQ ID NO: 3955442 - DNA, 25 bp, Homo sapien
gccatacctggcctaaacttgtgtt

SEQ ID NO: 3955443 - DNA, 25 bp, Homo sapien
ttggaacctaacacagatggccttt

SEQ ID NO: 3955444 - DNA, 25 bp, Homo sapien
aatcactgaggtggcggtgacctat

SEQ ID NO: 3955445 - DNA, 25 bp, Homo sapien
gctttctgtaggaagactcaggact

SEQ ID NO: 3955446 - DNA, 25 bp, Homo sapien
cctctaggagtttgtcagtttcacc

SEQ ID NO: 3955447 - DNA, 25 bp, Homo sapien
tattgacagtatacagtggcagcca

SEQ ID NO: 3955448 - DNA, 25 bp, Homo sapien
ttagcctcttagactcagatgggcg

SEQ ID NO: 3955449 - DNA, 25 bp, Homo sapien
actctgcccggccaagtcctgttca

SEQ ID NO: 3955450 - DNA, 25 bp, Homo sapien
ctctgcccggccaagtcctgttcat

SEQ ID NO: 3955451 - DNA, 25 bp, Homo sapien
tttggtagtcagtctagctaagagt

SEQ ID NO: 3955452 - DNA, 25 bp, Homo sapien
agaagaaagccggagaagcagtctg

SEQ ID NO: 3955453 - DNA, 25 bp, Homo sapien
catttgttgcatccaaagagggctg

SEQ ID NO: 3955454 - DNA, 25 bp, Homo sapien
aatagaacaaactctttgcgctggg

SEQ ID NO: 3955455 - DNA, 25 bp, Homo sapien
gcgagtatgcgaacagaccagtgac

SEQ ID NO: 3955456 - DNA, 25 bp, Homo sapien
tcacagctcactgacagagcagtca

SEQ ID NO: 3955457 - DNA, 25 bp, Homo sapien
ccctcacagctcactgacagagcag

SEQ ID NO: 3955458 - DNA, 25 bp, Homo sapien
ctcccctcacagctcactgacagag

SEQ ID NO: 3955459 - DNA, 25 bp, Homo sapien
cacacagagtcacctcccctcacag

SEQ ID NO: 3955460 - DNA, 25 bp, Homo sapien
tcaagactgaatttcccgcacggac

SEQ ID NO: 3955461 - DNA, 25 bp, Homo sapien
gaatgtccgataacacaagccaagg

SEQ ID NO: 3955462 - DNA, 25 bp, Homo sapien
ccagagggcggtttgtgctttctca

SEQ ID NO: 3955463 - DNA, 25 bp, Homo sapien
cagatcagaccacaagcacaggctg

SEQ ID NO: 3955464 - DNA, 25 bp, Homo sapien
atccccaaatccgctgaaggtgcag

SEQ ID NO: 3955465 - DNA, 25 bp, Homo sapien
tccccaaatccgctgaaggtgcagg

SEQ ID NO: 3955466 - DNA, 25 bp, Homo sapien
ccccaaatccgctgaaggtgcaggg

SEQ ID NO: 3955467 - DNA, 25 bp, Homo sapien
ttctccctgcgcacggcccgcatgg

SEQ ID NO: 3955468 - DNA, 25 bp, Homo sapien
tcagtcccggggcatcttgaactgg

SEQ ID NO: 3955469 - DNA, 25 bp, Homo sapien
cggggcatcttgaactggtccttct

SEQ ID NO: 3955470 - DNA, 25 bp, Homo sapien
tgcgcacggcccgcatggtggtcac

SEQ ID NO: 3955471 - DNA, 25 bp, Homo sapien
ctgcgtgctgctgcaccgtcttctc

SEQ ID NO: 3955472 - DNA, 25 bp, Homo sapien
tgcgtgctgctgcaccgtcttctcc

SEQ ID NO: 3955473 - DNA, 25 bp, Homo sapien
ctgcggaggccagcaccgggctgca

SEQ ID NO: 3955474 - DNA, 25 bp, Homo sapien
gcggaggccagcaccgggctgcagg

SEQ ID NO: 3955475 - DNA, 25 bp, Homo sapien
tgtgccgagccacgcccaccggagg

SEQ ID NO: 3955476 - DNA, 25 bp, Homo sapien
ccacgcccaccggaggagccagggc

SEQ ID NO: 3955477 - DNA, 25 bp, Homo sapien
ctgcagaggaaggcgactcgtgctg

SEQ ID NO: 3955478 - DNA, 25 bp, Homo sapien
agaggaaggcgactcgtgctggccg

SEQ ID NO: 3955479 - DNA, 25 bp, Homo sapien
aggaaggcgactcgtgctggccgag

SEQ ID NO: 3955480 - DNA, 25 bp, Homo sapien
aggcgactcgtgctggccgagccca

SEQ ID NO: 3955481 - DNA, 25 bp, Homo sapien
cactctcatgaaggggttgtaggta

SEQ ID NO: 3955482 - DNA, 25 bp, Homo sapien
gatggcactgtgggctccccgatgc

SEQ ID NO: 3955483 - DNA, 25 bp, Homo sapien
gggttgtaggtaaactcctctgcca

SEQ ID NO: 3955484 - DNA, 25 bp, Homo sapien
atggcactgtgggctccccgatgct

SEQ ID NO: 3955485 - DNA, 25 bp, Homo sapien
accactttatcacgggaacttcaca

SEQ ID NO: 3955486 - DNA, 25 bp, Homo sapien
tgacagcgacatcacgtctcaaaaa

SEQ ID NO: 3955487 - DNA, 25 bp, Homo sapien
gaaacgcaccactttatcacgggaa

SEQ ID NO: 3955488 - DNA, 25 bp, Homo sapien
ctgcaagagaaacgcaccactttat

SEQ ID NO: 3955489 - DNA, 25 bp, Homo sapien
caacagttagcaggaaaacacaggg

SEQ ID NO: 3955490 - DNA, 25 bp, Homo sapien
gctggtcacctcctctcgagatgga

SEQ ID NO: 3955491 - DNA, 25 bp, Homo sapien
ggtgagtgactcttcagctggtaga

SEQ ID NO: 3955492 - DNA, 25 bp, Homo sapien
tggtaaccttaggacactgcccgac

SEQ ID NO: 3955493 - DNA, 25 bp, Homo sapien
cagctggcggggacgccacatggga

SEQ ID NO: 3955494 - DNA, 25 bp, Homo sapien
gggattacacaagtgcaaacatcat

SEQ ID NO: 3955495 - DNA, 25 bp, Homo sapien
tgcaatctgtccactcaagacagac

SEQ ID NO: 3955496 - DNA, 25 bp, Homo sapien
tggggtagtggtaagttccacatct

SEQ ID NO: 3955497 - DNA, 25 bp, Homo sapien
aacaaccctgtcagaggcagcgact

SEQ ID NO: 3955498 - DNA, 25 bp, Homo sapien
acaggctgggcgctttttacacacg

SEQ ID NO: 3955499 - DNA, 25 bp, Homo sapien
caggcgtgcgtgcttgtgacaccgt

SEQ ID NO: 3955500 - DNA, 25 bp, Homo sapien
gccaccgtggagataagagtccttt

SEQ ID NO: 3955501 - DNA, 25 bp, Homo sapien
cgggctccacgtggcgtgcaaactt

SEQ ID NO: 3955502 - DNA, 25 bp, Homo sapien
ttgatggtgtactcgtggccacagt

SEQ ID NO: 3955503 - DNA, 25 bp, Homo sapien
tgtactcgtggccacagtagactct

SEQ ID NO: 3955504 - DNA, 25 bp, Homo sapien
ggcgtgcaaacttgaggttgttgat

SEQ ID NO: 3955505 - DNA, 25 bp, Homo sapien
cggcccgcagggaggcgctgcctac

SEQ ID NO: 3955506 - DNA, 25 bp, Homo sapien
ccggcccgcagggaggcgctgccta

SEQ ID NO: 3955507 - DNA, 25 bp, Homo sapien
cccggcccgcagggaggcgctgcct

SEQ ID NO: 3955508 - DNA, 25 bp, Homo sapien
gcccaagacctccagcagagcttta

SEQ ID NO: 3955509 - DNA, 25 bp, Homo sapien
atctcatccgcagtcccttcataga

SEQ ID NO: 3955510 - DNA, 25 bp, Homo sapien
agtcccttcatagaacttcccgcag

SEQ ID NO: 3955511 - DNA, 25 bp, Homo sapien
tccagcagagctttacacatctcat

SEQ ID NO: 3955512 - DNA, 25 bp, Homo sapien
agggggctccgagcctccgggcttg

SEQ ID NO: 3955513 - DNA, 25 bp, Homo sapien
ctgtgaacacggcagggggctccga

SEQ ID NO: 3955514 - DNA, 25 bp, Homo sapien
aacacggcagggggctccgagcctc

SEQ ID NO: 3955515 - DNA, 25 bp, Homo sapien
cagggggctccgagcctccgggctt

SEQ ID NO: 3955516 - DNA, 25 bp, Homo sapien
aggcacttgacgttcagagacccca

SEQ ID NO: 3955517 - DNA, 25 bp, Homo sapien
ctcacgaagtaacaaatgtgtcctg

SEQ ID NO: 3955518 - DNA, 25 bp, Homo sapien
caaatgtgtcctgaagtgtggcacg

SEQ ID NO: 3955519 - DNA, 25 bp, Homo sapien
gggtcgccaggcacttgacgttcag

SEQ ID NO: 3955520 - DNA, 25 bp, Homo sapien
ttcagtcccgactccagcttgacca

SEQ ID NO: 3955521 - DNA, 25 bp, Homo sapien
cagtttctcattcccgccagcatgg

SEQ ID NO: 3955522 - DNA, 25 bp, Homo sapien
tggacaggtgagtgatcttgtgagt

SEQ ID NO: 3955523 - DNA, 25 bp, Homo sapien
agtcagggccccgatacggtcgtca

SEQ ID NO: 3955524 - DNA, 25 bp, Homo sapien
ctagaagtcaaacaggagacctggg

SEQ ID NO: 3955525 - DNA, 25 bp, Homo sapien
tagaagtcaaacaggagacctgggc

SEQ ID NO: 3955526 - DNA, 25 bp, Homo sapien
acctgcacgtctttacaaagcacca

SEQ ID NO: 3955527 - DNA, 25 bp, Homo sapien
cctgctgctcttaaaccctagtcaa

SEQ ID NO: 3955528 - DNA, 25 bp, Homo sapien
ctagtcaaacgcaacacttattttc

SEQ ID NO: 3955529 - DNA, 25 bp, Homo sapien
cctggatgatcctgtggccagggtt

SEQ ID NO: 3955530 - DNA, 25 bp, Homo sapien
acattgaggccaacgtgccagggca

SEQ ID NO: 3955531 - DNA, 25 bp, Homo sapien
caaacaacggccttgagcaggcaat

SEQ ID NO: 3955532 - DNA, 25 bp, Homo sapien
gccctcgggcgcttgcttggcaaaa

SEQ ID NO: 3955533 - DNA, 25 bp, Homo sapien
gaccaaaggcttcatttcaccccaa

SEQ ID NO: 3955534 - DNA, 25 bp, Homo sapien
ggtgggtggtgagcactgtggtcag

SEQ ID NO: 3955535 - DNA, 25 bp, Homo sapien
gtggtgggtggtgagcactgtggtc

SEQ ID NO: 3955536 - DNA, 25 bp, Homo sapien
accccgtgctttctcgccgcgtcca

SEQ ID NO: 3955537 - DNA, 25 bp, Homo sapien
cccgtgctttctcgccgcgtccacg

SEQ ID NO: 3955538 - DNA, 25 bp, Homo sapien
gtacatgtagttgtcggtcagggca

SEQ ID NO: 3955539 - DNA, 25 bp, Homo sapien
acatgtagttgtcggtcagggcagg

SEQ ID NO: 3955540 - DNA, 25 bp, Homo sapien
tgtagttgtcggtcagggcaggcag

SEQ ID NO: 3955541 - DNA, 25 bp, Homo sapien
atgtagttgtcggtcagggcaggca

SEQ ID NO: 3955542 - DNA, 25 bp, Homo sapien
gtccacggtcaggttcttccgcaaa

SEQ ID NO: 3955543 - DNA, 25 bp, Homo sapien
cacggtcaggttcttccgcaaatct

SEQ ID NO: 3955544 - DNA, 25 bp, Homo sapien
tccacggtcaggttcttccgcaaat

SEQ ID NO: 3955545 - DNA, 25 bp, Homo sapien
cggtcaggttcttccgcaaatctgt

SEQ ID NO: 3955546 - DNA, 25 bp, Homo sapien
gcgcccgctccgcgccagcctcagc

SEQ ID NO: 3955547 - DNA, 25 bp, Homo sapien
ctccgcgccagcctcagcgcctgcg

SEQ ID NO: 3955548 - DNA, 25 bp, Homo sapien
cgccgcctccgctcgagcccggcag

SEQ ID NO: 3955549 - DNA, 25 bp, Homo sapien
gcctccgctcgagcccggcagcgcg

SEQ ID NO: 3955550 - DNA, 25 bp, Homo sapien
gcgcaacagacaccgcgtcagcggt

SEQ ID NO: 3955551 - DNA, 25 bp, Homo sapien
cgcgtcagcggtcgccaaacgacgg

SEQ ID NO: 3955552 - DNA, 25 bp, Homo sapien
agacaccgcgtcagcggtcgccaaa

SEQ ID NO: 3955553 - DNA, 25 bp, Homo sapien
ctgcgcaacagacaccgcgtcagcg

SEQ ID NO: 3955554 - DNA, 25 bp, Homo sapien
gaggcctcggcgggcgcaggcggct

SEQ ID NO: 3955555 - DNA, 25 bp, Homo sapien
cgaggcctcggcgggcgcaggcggc

SEQ ID NO: 3955556 - DNA, 25 bp, Homo sapien
gggcgcaggcggctcccagcgcggc

SEQ ID NO: 3955557 - DNA, 25 bp, Homo sapien
ggctcccagcgcggcgaggctgcgg

SEQ ID NO: 3955558 - DNA, 25 bp, Homo sapien
tcttttttggcaccgcacagtggat

SEQ ID NO: 3955559 - DNA, 25 bp, Homo sapien
tcaacttgttttgtccgcgagcccc

SEQ ID NO: 3955560 - DNA, 25 bp, Homo sapien
aggactgcaaaacaccggcgtcggc

SEQ ID NO: 3955561 - DNA, 25 bp, Homo sapien
tacccggcagatcgcgaggtggaac

SEQ ID NO: 3955562 - DNA, 25 bp, Homo sapien
gatgaacccttcaagaaaacgtgaa

SEQ ID NO: 3955563 - DNA, 25 bp, Homo sapien
acttttcagtgggttatctctagga

SEQ ID NO: 3955564 - DNA, 25 bp, Homo sapien
tctaggatgatcagtagttcagcac

SEQ ID NO: 3955565 - DNA, 25 bp, Homo sapien
tgcctcaactcatagaagatgaacc

SEQ ID NO: 3955566 - DNA, 25 bp, Homo sapien
ccacctccaccataacaatttctag

SEQ ID NO: 3955567 - DNA, 25 bp, Homo sapien
tagaaacatgttcaccacatgtaaa

SEQ ID NO: 3955568 - DNA, 25 bp, Homo sapien
caaggcaaagacagtaggaggcctt

SEQ ID NO: 3955569 - DNA, 25 bp, Homo sapien
gccttcagactcacccagaccacct

SEQ ID NO: 3955570 - DNA, 25 bp, Homo sapien
tctgcaagcttgcacgagagtacac

SEQ ID NO: 3955571 - DNA, 25 bp, Homo sapien
gagagtacactaattttcaatccac

SEQ ID NO: 3955572 - DNA, 25 bp, Homo sapien
tgcctcagtaggatctgcaagcttg

SEQ ID NO: 3955573 - DNA, 25 bp, Homo sapien
aagtttctgcttgcctcagtaggat

SEQ ID NO: 3955574 - DNA, 25 bp, Homo sapien
attgccactttaatgctgttttctg

SEQ ID NO: 3955575 - DNA, 25 bp, Homo sapien
aattgccactttaatgctgttttct

SEQ ID NO: 3955576 - DNA, 25 bp, Homo sapien
gaaattgccactttaatgctgtttt

SEQ ID NO: 3955577 - DNA, 25 bp, Homo sapien
aaattgccactttaatgctgttttc

SEQ ID NO: 3955578 - DNA, 25 bp, Homo sapien
tcactttggaaatattctaaacatt

SEQ ID NO: 3955579 - DNA, 25 bp, Homo sapien
tctaaacatttcttcctttttgcta

SEQ ID NO: 3955580 - DNA, 25 bp, Homo sapien
tggaaatattctaaacatttcttcc

SEQ ID NO: 3955581 - DNA, 25 bp, Homo sapien
ctaaacatttcttcctttttgctat

SEQ ID NO: 3955582 - DNA, 25 bp, Homo sapien
cctgtgtgatcagtcagatcaatca

SEQ ID NO: 3955583 - DNA, 25 bp, Homo sapien
gcctgtgtgatcagtcagatcaatc

SEQ ID NO: 3955584 - DNA, 25 bp, Homo sapien
gtgcctgtgtgatcagtcagatcaa

SEQ ID NO: 3955585 - DNA, 25 bp, Homo sapien
ggtgcctgtgtgatcagtcagatca

SEQ ID NO: 3955586 - DNA, 25 bp, Homo sapien
gaaagacagatttaaagtccaagga

SEQ ID NO: 3955587 - DNA, 25 bp, Homo sapien
aaagacagatttaaagtccaaggag

SEQ ID NO: 3955588 - DNA, 25 bp, Homo sapien
agaaagacagatttaaagtccaagg

SEQ ID NO: 3955589 - DNA, 25 bp, Homo sapien
gagaaagacagatttaaagtccaag

SEQ ID NO: 3955590 - DNA, 25 bp, Homo sapien
cataaaggatgccataggaaggatc

SEQ ID NO: 3955591 - DNA, 25 bp, Homo sapien
cctttaattgttcaactgtgtagac

SEQ ID NO: 3955592 - DNA, 25 bp, Homo sapien
catctatttcgaactacttttgtag

SEQ ID NO: 3955593 - DNA, 25 bp, Homo sapien
catcaatgttgagtgtggaaatgta

SEQ ID NO: 3955594 - DNA, 25 bp, Homo sapien
gaaataactgtcaatttcatcatcc

SEQ ID NO: 3955595 - DNA, 25 bp, Homo sapien
tttcatcatccagaacattcgtttc

SEQ ID NO: 3955596 - DNA, 25 bp, Homo sapien
agcagaatgttagcttctggtatat

SEQ ID NO: 3955597 - DNA, 25 bp, Homo sapien
tctcgtataaaattcagcagaatgt

SEQ ID NO: 3955598 - DNA, 25 bp, Homo sapien
ctggattagttgtaataatggtttt

SEQ ID NO: 3955599 - DNA, 25 bp, Homo sapien
attcttacatctgaggcaaatatta

SEQ ID NO: 3955600 - DNA, 25 bp, Homo sapien
tattcttacatctgaggcaaatatt

SEQ ID NO: 3955601 - DNA, 25 bp, Homo sapien
ttattcttacatctgaggcaaatat

SEQ ID NO: 3955602 - DNA, 25 bp, Homo sapien
tttattcttacatctgaggcaaata

SEQ ID NO: 3955603 - DNA, 25 bp, Homo sapien
tctgtgcaagtagaatggattcatt

SEQ ID NO: 3955604 - DNA, 25 bp, Homo sapien
gctctgtgcaagtagaatggattca

SEQ ID NO: 3955605 - DNA, 25 bp, Homo sapien
ctctgtgcaagtagaatggattcat

SEQ ID NO: 3955606 - DNA, 25 bp, Homo sapien
tcatcgcaaaagacgactctgtttc

SEQ ID NO: 3955607 - DNA, 25 bp, Homo sapien
ctccggtctgaagttgtaaagtatt

SEQ ID NO: 3955608 - DNA, 25 bp, Homo sapien
ttgtaaagtattttggctctccaac

SEQ ID NO: 3955609 - DNA, 25 bp, Homo sapien
tcatcatagagtctaacttcacacc

SEQ ID NO: 3955610 - DNA, 25 bp, Homo sapien
ctctgccaccactgcatctgtggtg

SEQ ID NO: 3955611 - DNA, 25 bp, Homo sapien
tctgccaccactgcatctgtggtgc

SEQ ID NO: 3955612 - DNA, 25 bp, Homo sapien
atctgtggtgcccagagaaagggac

SEQ ID NO: 3955613 - DNA, 25 bp, Homo sapien
gccaccactgcatctgtggtgccca

SEQ ID NO: 3955614 - DNA, 25 bp, Homo sapien
tcacagctgcaagcacgttaataat

SEQ ID NO: 3955615 - DNA, 25 bp, Homo sapien
gactctttaacaggtaaatgtatca

SEQ ID NO: 3955616 - DNA, 25 bp, Homo sapien
aatcctcccattaagactgtgtcca

SEQ ID NO: 3955617 - DNA, 25 bp, Homo sapien
gaaagtaactttgtgtccacttcat

SEQ ID NO: 3955618 - DNA, 25 bp, Homo sapien
ctttggatcagaggattttcaatta

SEQ ID NO: 3955619 - DNA, 25 bp, Homo sapien
cctttctttggatcagaggattttc

SEQ ID NO: 3955620 - DNA, 25 bp, Homo sapien
ttctttggatcagaggattttcaat

SEQ ID NO: 3955621 - DNA, 25 bp, Homo sapien
ggagttgcagggctgaatttttctt

SEQ ID NO: 3955622 - DNA, 25 bp, Homo sapien
agagacttgatgtaatcttcattgc

SEQ ID NO: 3955623 - DNA, 25 bp, Homo sapien
gccccaggaagctgcatttacaaaa

SEQ ID NO: 3955624 - DNA, 25 bp, Homo sapien
gtgctggtgaatcccgaatggtgaa

SEQ ID NO: 3955625 - DNA, 25 bp, Homo sapien
cctaaagctgtcagaaagagacttg

SEQ ID NO: 3955626 - DNA, 25 bp, Homo sapien
accatccaatagagagcatgaccat

SEQ ID NO: 3955627 - DNA, 25 bp, Homo sapien
tgttttcccaataactataccgata

SEQ ID NO: 3955628 - DNA, 25 bp, Homo sapien
gaaaatcctcgctgcaaaggagttt

SEQ ID NO: 3955629 - DNA, 25 bp, Homo sapien
gggtagtgaaaatcctcgctgcaaa

SEQ ID NO: 3955630 - DNA, 25 bp, Homo sapien
cagattagccatatttgtctgcaga

SEQ ID NO: 3955631 - DNA, 25 bp, Homo sapien
agatctgaaagggtagtgaaaatcc

SEQ ID NO: 3955632 - DNA, 25 bp, Homo sapien
gctcgggccacagcctcgtgcaggt

SEQ ID NO: 3955633 - DNA, 25 bp, Homo sapien
gacggccgcgcgaccgttagcgcga

SEQ ID NO: 3955634 - DNA, 25 bp, Homo sapien
ggcttctccacaggacgctcgggcc

SEQ ID NO: 3955635 - DNA, 25 bp, Homo sapien
acagcctcgtgcaggtgcgacggcc

SEQ ID NO: 3955636 - DNA, 25 bp, Homo sapien
aaaggcagccttgaatcctcccttc

SEQ ID NO: 3955637 - DNA, 25 bp, Homo sapien
ctgaagctcagcgtctcaaaggcag

SEQ ID NO: 3955638 - DNA, 25 bp, Homo sapien
tatggaaaacacctggtaactgaag

SEQ ID NO: 3955639 - DNA, 25 bp, Homo sapien
tccaattctatggaaaacacctggt

SEQ ID NO: 3955640 - DNA, 25 bp, Homo sapien
gcccttgtctctccacgtctgttgc

SEQ ID NO: 3955641 - DNA, 25 bp, Homo sapien
ttgtctctccacgtctgttgctgcc

SEQ ID NO: 3955642 - DNA, 25 bp, Homo sapien
cctgcccttgtctctccacgtctgt

SEQ ID NO: 3955643 - DNA, 25 bp, Homo sapien
tgcccttgtctctccacgtctgttg

SEQ ID NO: 3955644 - DNA, 25 bp, Homo sapien
gaagatgaacacaaaatacgcgccc

SEQ ID NO: 3955645 - DNA, 25 bp, Homo sapien
tagctgtgtcactcaagcatctgaa

SEQ ID NO: 3955646 - DNA, 25 bp, Homo sapien
cagatccagtgggacgaagatgaac

SEQ ID NO: 3955647 - DNA, 25 bp, Homo sapien
tgtctggtcaaaagtctcagccttg

SEQ ID NO: 3955648 - DNA, 25 bp, Homo sapien
gggatcattcaatactcgtaagtaa

SEQ ID NO: 3955649 - DNA, 25 bp, Homo sapien
cagactgaagctcctattgctaagg

SEQ ID NO: 3955650 - DNA, 25 bp, Homo sapien
tatttgcttatatgtcccactctcc

SEQ ID NO: 3955651 - DNA, 25 bp, Homo sapien
tgctaaggtagcacctcctgcatag

SEQ ID NO: 3955652 - DNA, 25 bp, Homo sapien
atgcaaatggccccagagggctcat

SEQ ID NO: 3955653 - DNA, 25 bp, Homo sapien
gaggttaatggcctgtgatgagtct

SEQ ID NO: 3955654 - DNA, 25 bp, Homo sapien
tgcaactagaccgtgaatccatcat

SEQ ID NO: 3955655 - DNA, 25 bp, Homo sapien
gaccgtgaatccatcattcctgatt

SEQ ID NO: 3955656 - DNA, 25 bp, Homo sapien
gatgagtcttgcaactagaccgtga

SEQ ID NO: 3955657 - DNA, 25 bp, Homo sapien
ttttccacggacttacaaatatgag

SEQ ID NO: 3955658 - DNA, 25 bp, Homo sapien
gtatctagcctagcaaaacatgaat

SEQ ID NO: 3955659 - DNA, 25 bp, Homo sapien
tacaaatatgagaccgctacaacaa

SEQ ID NO: 3955660 - DNA, 25 bp, Homo sapien
gagaccgctacaacaaatgtatcta

SEQ ID NO: 3955661 - DNA, 25 bp, Homo sapien
tgatgcggacgcttttaggaacaag

SEQ ID NO: 3955662 - DNA, 25 bp, Homo sapien
gaggtatttgtgtttaatcatcatc

SEQ ID NO: 3955663 - DNA, 25 bp, Homo sapien
gggacacctgatgaggtatttgtgt

SEQ ID NO: 3955664 - DNA, 25 bp, Homo sapien
ctgcagattgcccatctgtacccca

SEQ ID NO: 3955665 - DNA, 25 bp, Homo sapien
gagcacaagcttgggtcaggccccg

SEQ ID NO: 3955666 - DNA, 25 bp, Homo sapien
ctgcactgagcacaagcttgggtca

SEQ ID NO: 3955667 - DNA, 25 bp, Homo sapien
cactgagcacaagcttgggtcaggc

SEQ ID NO: 3955668 - DNA, 25 bp, Homo sapien
tcaggccccgcaaggggatccaggg

SEQ ID NO: 3955669 - DNA, 25 bp, Homo sapien
agtgacatgccgatggcagcgttgt

SEQ ID NO: 3955670 - DNA, 25 bp, Homo sapien
tctaagcctaaagtcacatttgtga

SEQ ID NO: 3955671 - DNA, 25 bp, Homo sapien
aattgcacatattcctcttgacgaa

SEQ ID NO: 3955672 - DNA, 25 bp, Homo sapien
gacgagggtgcctttcgatctaagc

SEQ ID NO: 3955673 - DNA, 25 bp, Homo sapien
cctgacagttgtgatgtgttcctga

SEQ ID NO: 3955674 - DNA, 25 bp, Homo sapien
ggctggcaaacgcacactctcatga

SEQ ID NO: 3955675 - DNA, 25 bp, Homo sapien
tgactgtgaaccattcctgacagtt

SEQ ID NO: 3955676 - DNA, 25 bp, Homo sapien
tcgctttgtaaatagaacctgtgtg

SEQ ID NO: 3955677 - DNA, 25 bp, Homo sapien
aggctgtcaggtctggccagcaatc

SEQ ID NO: 3955678 - DNA, 25 bp, Homo sapien
gctgtcaggtctggccagcaatccc

SEQ ID NO: 3955679 - DNA, 25 bp, Homo sapien
aatccccctgcacgcggggcccgct

SEQ ID NO: 3955680 - DNA, 25 bp, Homo sapien
cagcaatccccctgcacgcggggcc

SEQ ID NO: 3955681 - DNA, 25 bp, Homo sapien
gtctccgtggcctcggtggtctgct

SEQ ID NO: 3955682 - DNA, 25 bp, Homo sapien
tgagggtctccgtggcctcggtggt

SEQ ID NO: 3955683 - DNA, 25 bp, Homo sapien
tccgtggcctcggtggtctgctctt

SEQ ID NO: 3955684 - DNA, 25 bp, Homo sapien
gcctcggtggtctgctctttgtcct

SEQ ID NO: 3955685 - DNA, 25 bp, Homo sapien
agcatgtgcacgcagcccgctctgg

SEQ ID NO: 3955686 - DNA, 25 bp, Homo sapien
tctgggtccaagctttatttcttaa

SEQ ID NO: 3955687 - DNA, 25 bp, Homo sapien
ggcgagcgggtgtcaatcaaggtgc

SEQ ID NO: 3955688 - DNA, 25 bp, Homo sapien
ccgctctggccaggcgagcgggtgt

SEQ ID NO: 3955689 - DNA, 25 bp, Homo sapien
aagtcctggcccgtcatctggtaga

SEQ ID NO: 3955690 - DNA, 25 bp, Homo sapien
gttgaagggccggtagaactcctgc

SEQ ID NO: 3955691 - DNA, 25 bp, Homo sapien
gcctctcgcgtcacgaagtagctgg

SEQ ID NO: 3955692 - DNA, 25 bp, Homo sapien
gtgacgacccgtttcaggcccagga

SEQ ID NO: 3955693 - DNA, 25 bp, Homo sapien
gacgggtgcaaggagagggggcctg

SEQ ID NO: 3955694 - DNA, 25 bp, Homo sapien
ctgcgggacgggtgcaaggagaggg

SEQ ID NO: 3955695 - DNA, 25 bp, Homo sapien
agagggggcctgagcctccccagcc

SEQ ID NO: 3955696 - DNA, 25 bp, Homo sapien
ggagagggggcctgagcctccccag

SEQ ID NO: 3955697 - DNA, 25 bp, Homo sapien
gggcagggtcctctctgcaggcgct

SEQ ID NO: 3955698 - DNA, 25 bp, Homo sapien
ggagaagcgtctgggtcctgccacc

SEQ ID NO: 3955699 - DNA, 25 bp, Homo sapien
ctggagaagcgtctgggtcctgcca

SEQ ID NO: 3955700 - DNA, 25 bp, Homo sapien
gcagggtcctctctgcaggcgctgg

SEQ ID NO: 3955701 - DNA, 25 bp, Homo sapien
agcgcgggctgcttcagctgaggct

SEQ ID NO: 3955702 - DNA, 25 bp, Homo sapien
cagcgcgggctgcttcagctgaggc

SEQ ID NO: 3955703 - DNA, 25 bp, Homo sapien
aggctgccgcacccccacgtccatc

SEQ ID NO: 3955704 - DNA, 25 bp, Homo sapien
agctgaggctgccgcacccccacgt

SEQ ID NO: 3955705 - DNA, 25 bp, Homo sapien
tcgtagcacctgtcgaagaagtggg

SEQ ID NO: 3955706 - DNA, 25 bp, Homo sapien
gcgaggccgcgctcgtagcacctgt

SEQ ID NO: 3955707 - DNA, 25 bp, Homo sapien
ggctcagagcccagcgcgcggacgt

SEQ ID NO: 3955708 - DNA, 25 bp, Homo sapien
cgcgctcgtagcacctgtcgaagaa

SEQ ID NO: 3955709 - DNA, 25 bp, Homo sapien
ttgcgggaagcgccggcggccggga

SEQ ID NO: 3955710 - DNA, 25 bp, Homo sapien
tgcgggaagcgccggcggccgggac

SEQ ID NO: 3955711 - DNA, 25 bp, Homo sapien
cttgcgggaagcgccggcggccggg

SEQ ID NO: 3955712 - DNA, 25 bp, Homo sapien
agtaggcgccgagcaccagggccac

SEQ ID NO: 3955713 - DNA, 25 bp, Homo sapien
tggccaaaggcaggccgggtgctcc

SEQ ID NO: 3955714 - DNA, 25 bp, Homo sapien
tggacggagctggacggctcggagg

SEQ ID NO: 3955715 - DNA, 25 bp, Homo sapien
gggccacgagcagcatcggcgcgcg

SEQ ID NO: 3955716 - DNA, 25 bp, Homo sapien
caggcgggcgcgcatctcggcccgc

SEQ ID NO: 3955717 - DNA, 25 bp, Homo sapien
tccgtgggtgcccggcttgtgctct

SEQ ID NO: 3955718 - DNA, 25 bp, Homo sapien
aggcgggcgcgcatctcggcccgcg

SEQ ID NO: 3955719 - DNA, 25 bp, Homo sapien
cccgcgcgccgctcagtccgtgggt

SEQ ID NO: 3955720 - DNA, 25 bp, Homo sapien
gggccgctagacactgcgggaactt

SEQ ID NO: 3955721 - DNA, 25 bp, Homo sapien
tagacactgcgggaacttcacatcc

SEQ ID NO: 3955722 - DNA, 25 bp, Homo sapien
gacatcagtgatgcatttcggaagc

SEQ ID NO: 3955723 - DNA, 25 bp, Homo sapien
gctggcaaagtggaccccactggag

SEQ ID NO: 3955724 - DNA, 25 bp, Homo sapien
tcagcatccccatggtctcagctgt

SEQ ID NO: 3955725 - DNA, 25 bp, Homo sapien
ggagtccccacaggttcagcagtcc

SEQ ID NO: 3955726 - DNA, 25 bp, Homo sapien
tgagtccccacggtctcagctgttc

SEQ ID NO: 3955727 - DNA, 25 bp, Homo sapien
atggtctcagccgtccccagggtct

SEQ ID NO: 3955728 - DNA, 25 bp, Homo sapien
tgttgtagctcaccaaccaaccagt

SEQ ID NO: 3955729 - DNA, 25 bp, Homo sapien
agaacctctgcttagtgggcccgta

SEQ ID NO: 3955730 - DNA, 25 bp, Homo sapien
tatccctactgtagggtctcctggt

SEQ ID NO: 3955731 - DNA, 25 bp, Homo sapien
cagtggtagcacgaggtccagaacc

SEQ ID NO: 3955732 - DNA, 25 bp, Homo sapien
atcactgctgagctaagccctcctg

SEQ ID NO: 3955733 - DNA, 25 bp, Homo sapien
tggagccttgttccgtgccctccag

SEQ ID NO: 3955734 - DNA, 25 bp, Homo sapien
ttcttgtggagccttgttccgtgcc

SEQ ID NO: 3955735 - DNA, 25 bp, Homo sapien
gccccatgtgtgctgagcctgtgca

SEQ ID NO: 3955736 - DNA, 25 bp, Homo sapien
tgaggcaagctacttccgcacagat

SEQ ID NO: 3955737 - DNA, 25 bp, Homo sapien
ccagagcggatcatgcagtgaccag

SEQ ID NO: 3955738 - DNA, 25 bp, Homo sapien
taggtttctcccctcgtggacgaga

SEQ ID NO: 3955739 - DNA, 25 bp, Homo sapien
tagagttatggagcaacagccgctt

SEQ ID NO: 3955740 - DNA, 25 bp, Homo sapien
tagtgaccctgggaggcagaagttt

SEQ ID NO: 3955741 - DNA, 25 bp, Homo sapien
ctagtgaccctgggaggcagaagtt

SEQ ID NO: 3955742 - DNA, 25 bp, Homo sapien
gtaagtggacaagcacaaacactgg

SEQ ID NO: 3955743 - DNA, 25 bp, Homo sapien
tcatggtaagtggacaagcacaaac

SEQ ID NO: 3955744 - DNA, 25 bp, Homo sapien
tggtaagtggacaagcacaaacact

SEQ ID NO: 3955745 - DNA, 25 bp, Homo sapien
ccttgtcatggtaagtggacaagca

SEQ ID NO: 3955746 - DNA, 25 bp, Homo sapien
ctttagggacaaacttcagcgagct

SEQ ID NO: 3955747 - DNA, 25 bp, Homo sapien
tttagggacaaacttcagcgagctg

SEQ ID NO: 3955748 - DNA, 25 bp, Homo sapien
ccgtcgttcaggaactcgtggccca

SEQ ID NO: 3955749 - DNA, 25 bp, Homo sapien
gtcgttcaggaactcgtggcccaac

SEQ ID NO: 3955750 - DNA, 25 bp, Homo sapien
ggccgtcgttcaggaactcgtggcc

SEQ ID NO: 3955751 - DNA, 25 bp, Homo sapien
tcaggaactcgtggcccaacccatt

SEQ ID NO: 3955752 - DNA, 25 bp, Homo sapien
ggtgagcttctggccatgatacagc

SEQ ID NO: 3955753 - DNA, 25 bp, Homo sapien
tgagcttctggccatgatacagcca

SEQ ID NO: 3955754 - DNA, 25 bp, Homo sapien
ttcccacacgcctatttcccaagct

SEQ ID NO: 3955755 - DNA, 25 bp, Homo sapien
tgtttcttcccacacgcctatttcc

SEQ ID NO: 3955756 - DNA, 25 bp, Homo sapien
gagcccgtacaggaaacctgtcctg

SEQ ID NO: 3955757 - DNA, 25 bp, Homo sapien
tggaatagacgcctctaagcccctg

SEQ ID NO: 3955758 - DNA, 25 bp, Homo sapien
cgccgacataagaggttgacctttg

SEQ ID NO: 3955759 - DNA, 25 bp, Homo sapien
gctctcccgatagcctggggtggca

SEQ ID NO: 3955760 - DNA, 25 bp, Homo sapien
gaaggtgggactggctctctgctct

SEQ ID NO: 3955761 - DNA, 25 bp, Homo sapien
tctgctctccctggccgcccccgtc

SEQ ID NO: 3955762 - DNA, 25 bp, Homo sapien
gggaggaaggtgggactggctctct

SEQ ID NO: 3955763 - DNA, 25 bp, Homo sapien
aggaaggtgggactggctctctgct

SEQ ID NO: 3955764 - DNA, 25 bp, Homo sapien
gatctattgtgctccggacgcttgg

SEQ ID NO: 3955765 - DNA, 25 bp, Homo sapien
aatggtctcggtgaacgccggccat

SEQ ID NO: 3955766 - DNA, 25 bp, Homo sapien
ccggccatggagacgagtgtgcata

SEQ ID NO: 3955767 - DNA, 25 bp, Homo sapien
tgcatacttcgagcggctggagaac

SEQ ID NO: 3955768 - DNA, 25 bp, Homo sapien
ggagtcatcagctcccgcctttccg

SEQ ID NO: 3955769 - DNA, 25 bp, Homo sapien
accaacccaggcaaagacagcgctg

SEQ ID NO: 3955770 - DNA, 25 bp, Homo sapien
gagtcatcagctcccgcctttccgg

SEQ ID NO: 3955771 - DNA, 25 bp, Homo sapien
ttccggggtcaagctcccaaatcca

SEQ ID NO: 3955772 - DNA, 25 bp, Homo sapien
cttgattcttctcatagccccgtga

SEQ ID NO: 3955773 - DNA, 25 bp, Homo sapien
gtagtccaatgaggacacggagctc

SEQ ID NO: 3955774 - DNA, 25 bp, Homo sapien
caagtgtgtgcagcgtgaaggaacc

SEQ ID NO: 3955775 - DNA, 25 bp, Homo sapien
tctttgcttggtgatgcagacactc

SEQ ID NO: 3955776 - DNA, 25 bp, Homo sapien
ccaatttggagtccctgggcaggtg

SEQ ID NO: 3955777 - DNA, 25 bp, Homo sapien
caaattagtccactaccaggcgagc

SEQ ID NO: 3955778 - DNA, 25 bp, Homo sapien
cctgggccggcacattaggatctga

SEQ ID NO: 3955779 - DNA, 25 bp, Homo sapien
tgccgggatggtcctgtgtcacagc

SEQ ID NO: 3955780 - DNA, 25 bp, Homo sapien
ctgttcgcttctccccggcagccac

SEQ ID NO: 3955781 - DNA, 25 bp, Homo sapien
gcagtccttttgacccctgttcgct

SEQ ID NO: 3955782 - DNA, 25 bp, Homo sapien
gttcacactcgaggcctgccccctc

SEQ ID NO: 3955783 - DNA, 25 bp, Homo sapien
ctctcctcgggtaccccactctcct

SEQ ID NO: 3955784 - DNA, 25 bp, Homo sapien
tcaaagtgattctggaaaacctcgc

SEQ ID NO: 3955785 - DNA, 25 bp, Homo sapien
ccccgaagaagctgcagaacgacat

SEQ ID NO: 3955786 - DNA, 25 bp, Homo sapien
aacctcgcccccgaagaagctgcag

SEQ ID NO: 3955787 - DNA, 25 bp, Homo sapien
caaagtgattctggaaaacctcgcc

SEQ ID NO: 3955788 - DNA, 25 bp, Homo sapien
ccggaaccgcagcgcgcttgccgct

SEQ ID NO: 3955789 - DNA, 25 bp, Homo sapien
accggaaccgcagcgcgcttgccgc

SEQ ID NO: 3955790 - DNA, 25 bp, Homo sapien
cggaaccgcagcgcgcttgccgctg

SEQ ID NO: 3955791 - DNA, 25 bp, Homo sapien
caccggaaccgcagcgcgcttgccg

SEQ ID NO: 3955792 - DNA, 25 bp, Homo sapien
tcccgaggaccaatcgctccccgga

SEQ ID NO: 3955793 - DNA, 25 bp, Homo sapien
cctcccgaggaccaatcgctccccg

SEQ ID NO: 3955794 - DNA, 25 bp, Homo sapien
ctcccgaggaccaatcgctccccgg

SEQ ID NO: 3955795 - DNA, 25 bp, Homo sapien
gagggcgaatcccggcttccgcctc

SEQ ID NO: 3955796 - DNA, 25 bp, Homo sapien
tgggcggttacacagcgctctgaga

SEQ ID NO: 3955797 - DNA, 25 bp, Homo sapien
ttttgccgaccctgcaacttgatgg

SEQ ID NO: 3955798 - DNA, 25 bp, Homo sapien
gaagagtcgcctccggcctttgtta

SEQ ID NO: 3955799 - DNA, 25 bp, Homo sapien
tctgagacctcgcaggaagagtcgc

SEQ ID NO: 3955800 - DNA, 25 bp, Homo sapien
ggtctccggcgtttccttctccaga

SEQ ID NO: 3955801 - DNA, 25 bp, Homo sapien
gaggtctccggcgtttccttctcca

SEQ ID NO: 3955802 - DNA, 25 bp, Homo sapien
aggtctccggcgtttccttctccag

SEQ ID NO: 3955803 - DNA, 25 bp, Homo sapien
gcttggcgactgtgatgcaccagga

SEQ ID NO: 3955804 - DNA, 25 bp, Homo sapien
tattctccacggcttggcgactgtg

SEQ ID NO: 3955805 - DNA, 25 bp, Homo sapien
tgagctcaatattctccacggcttg

SEQ ID NO: 3955806 - DNA, 25 bp, Homo sapien
cacggcttggcgactgtgatgcacc

SEQ ID NO: 3955807 - DNA, 25 bp, Homo sapien
cgcttcttggtaccagcaatacaac

SEQ ID NO: 3955808 - DNA, 25 bp, Homo sapien
tctcagcgtaatgacccgcttcttg

SEQ ID NO: 3955809 - DNA, 25 bp, Homo sapien
agtcgttgttcacttccccgtagtg

SEQ ID NO: 3955810 - DNA, 25 bp, Homo sapien
aatacaacccttcagcatgacgaag

SEQ ID NO: 3955811 - DNA, 25 bp, Homo sapien
cggccagcctgaccccactccagcc

SEQ ID NO: 3955812 - DNA, 25 bp, Homo sapien
tgtgatgggcctggcagtcgccccc

SEQ ID NO: 3955813 - DNA, 25 bp, Homo sapien
ggtgtgatgggcctggcagtcgccc

SEQ ID NO: 3955814 - DNA, 25 bp, Homo sapien
ccatcatcagcggtgtgatgggcct

SEQ ID NO: 3955815 - DNA, 25 bp, Homo sapien
tggacttggcagtcacgtcgtagct

SEQ ID NO: 3955816 - DNA, 25 bp, Homo sapien
tgtgcgggcccctgccgatgcggaa

SEQ ID NO: 3955817 - DNA, 25 bp, Homo sapien
gcttcccgtcctccatgtgcgggcc

SEQ ID NO: 3955818 - DNA, 25 bp, Homo sapien
ggatgcattgttcttcaccagcttc

SEQ ID NO: 3955819 - DNA, 25 bp, Homo sapien
ggtccgaccacacagtgtccccgta

SEQ ID NO: 3955820 - DNA, 25 bp, Homo sapien
cacagtgtccccgtaccccggctga

SEQ ID NO: 3955821 - DNA, 25 bp, Homo sapien
cagtgtccccgtaccccggctgagg

SEQ ID NO: 3955822 - DNA, 25 bp, Homo sapien
ggctggggtccgaccacacagtgtc

SEQ ID NO: 3955823 - DNA, 25 bp, Homo sapien
tgttgagctccgtgcggtggtgata

SEQ ID NO: 3955824 - DNA, 25 bp, Homo sapien
gctccgtgcggtggtgatagccctt

SEQ ID NO: 3955825 - DNA, 25 bp, Homo sapien
tcttgttgagctccgtgcggtggtg

SEQ ID NO: 3955826 - DNA, 25 bp, Homo sapien
gagctccgtgcggtggtgatagccc

SEQ ID NO: 3955827 - DNA, 25 bp, Homo sapien
ccgagcaatggagcagcccacgcgg

SEQ ID NO: 3955828 - DNA, 25 bp, Homo sapien
ggcggggtgccaggcgccaatgcag

SEQ ID NO: 3955829 - DNA, 25 bp, Homo sapien
ctgcccggcccgagcaatggagcag

SEQ ID NO: 3955830 - DNA, 25 bp, Homo sapien
ggtgccaggcgccaatgcaggccac

SEQ ID NO: 3955831 - DNA, 25 bp, Homo sapien
gcaggcccttatgggtcttccgcgg

SEQ ID NO: 3955832 - DNA, 25 bp, Homo sapien
gcccttatgggtcttccgcggcagc

SEQ ID NO: 3955833 - DNA, 25 bp, Homo sapien
cttatgggtcttccgcggcagcttc

SEQ ID NO: 3955834 - DNA, 25 bp, Homo sapien
aggcccttatgggtcttccgcggca

SEQ ID NO: 3955835 - DNA, 25 bp, Homo sapien
accgtgccaccgttcagctggatct

SEQ ID NO: 3955836 - DNA, 25 bp, Homo sapien
tgaacacgctgtgcacgggcacctg

SEQ ID NO: 3955837 - DNA, 25 bp, Homo sapien
catcaatgacctcactctggctgaa

SEQ ID NO: 3955838 - DNA, 25 bp, Homo sapien
ttgacgcctcgacccttggtgacag

SEQ ID NO: 3955839 - DNA, 25 bp, Homo sapien
tggtggcagctgtggccccgcccag

SEQ ID NO: 3955840 - DNA, 25 bp, Homo sapien
tggcagctgtggccccgcccagggc

SEQ ID NO: 3955841 - DNA, 25 bp, Homo sapien
agctgtggccccgcccagggcctct

SEQ ID NO: 3955842 - DNA, 25 bp, Homo sapien
ctgtggccccgcccagggcctctgc

SEQ ID NO: 3955843 - DNA, 25 bp, Homo sapien
gggcactgctctagggcctcgggaa

SEQ ID NO: 3955844 - DNA, 25 bp, Homo sapien
ctgctctagggcctcgggaagcctt

SEQ ID NO: 3955845 - DNA, 25 bp, Homo sapien
gggctgtgggaagctcagggtcggg

SEQ ID NO: 3955846 - DNA, 25 bp, Homo sapien
catggtgtacaagtgtgcgagcagc

SEQ ID NO: 3955847 - DNA, 25 bp, Homo sapien
gcctgcctgtcagcctacagcaagc

SEQ ID NO: 3955848 - DNA, 25 bp, Homo sapien
ataagctggagggtgccgcctgcct

SEQ ID NO: 3955849 - DNA, 25 bp, Homo sapien
gttccagaataagctggagggtgcc

SEQ ID NO: 3955850 - DNA, 25 bp, Homo sapien
cagaataagctggagggtgccgcct

SEQ ID NO: 3955851 - DNA, 25 bp, Homo sapien
cgacagcggagggccgggggctgac

SEQ ID NO: 3955852 - DNA, 25 bp, Homo sapien
gctttttcccgtctgtgtcccgcca

SEQ ID NO: 3955853 - DNA, 25 bp, Homo sapien
ctgagtgtggacaatgacccgaatg

SEQ ID NO: 3955854 - DNA, 25 bp, Homo sapien
gccacctcttgcaggccttggtgaa

SEQ ID NO: 3955855 - DNA, 25 bp, Homo sapien
cgaatgaccttgcagtacttcttca

SEQ ID NO: 3955856 - DNA, 25 bp, Homo sapien
agtccttgtagaatcggcgccggca

SEQ ID NO: 3955857 - DNA, 25 bp, Homo sapien
gggcggcgtttctacaattgtcacc

SEQ ID NO: 3955858 - DNA, 25 bp, Homo sapien
ggcgccggcactcatcactgaggtg

SEQ ID NO: 3955859 - DNA, 25 bp, Homo sapien
gaggtgttctgcaaagatggtcttg

SEQ ID NO: 3955860 - DNA, 25 bp, Homo sapien
acctcccgcagggtgtgggtcatgc

SEQ ID NO: 3955861 - DNA, 25 bp, Homo sapien
aaggccgtgaggtgcacgggctggc

SEQ ID NO: 3955862 - DNA, 25 bp, Homo sapien
aggaagcccaggtgtccgtgccgag

SEQ ID NO: 3955863 - DNA, 25 bp, Homo sapien
cccggtgccggtggctcctcttatg

SEQ ID NO: 3955864 - DNA, 25 bp, Homo sapien
tggtagagctggatggtcccagaac

SEQ ID NO: 3955865 - DNA, 25 bp, Homo sapien
gggtgtccctggtggtagagctgga

SEQ ID NO: 3955866 - DNA, 25 bp, Homo sapien
gagctggatggtcccagaacccata

SEQ ID NO: 3955867 - DNA, 25 bp, Homo sapien
aggaggtcagacctggggtgtccct

SEQ ID NO: 3955868 - DNA, 25 bp, Homo sapien
gggcctcgccgctagccgccagagg

SEQ ID NO: 3955869 - DNA, 25 bp, Homo sapien
aggggcctcgccgctagccgccaga

SEQ ID NO: 3955870 - DNA, 25 bp, Homo sapien
aaggggcctcgccgctagccgccag

SEQ ID NO: 3955871 - DNA, 25 bp, Homo sapien
ggaaggggcctcgccgctagccgcc

SEQ ID NO: 3955872 - DNA, 25 bp, Homo sapien
ctgctgtgtggctctgtatgactgt

SEQ ID NO: 3955873 - DNA, 25 bp, Homo sapien
ctggagcctgagtccgctgcacgga

SEQ ID NO: 3955874 - DNA, 25 bp, Homo sapien
acagctggagcctgagtccgctgca

SEQ ID NO: 3955875 - DNA, 25 bp, Homo sapien
cacagctggagcctgagtccgctgc

SEQ ID NO: 3955876 - DNA, 25 bp, Homo sapien
agctggagcctgagtccgctgcacg

SEQ ID NO: 3955877 - DNA, 25 bp, Homo sapien
tggtcagtgaactcctgatagggag

SEQ ID NO: 3955878 - DNA, 25 bp, Homo sapien
gaggtggtcagtgaactcctgatag

SEQ ID NO: 3955879 - DNA, 25 bp, Homo sapien
ggtggtcagtgaactcctgataggg

SEQ ID NO: 3955880 - DNA, 25 bp, Homo sapien
gtcagtgaactcctgatagggagac

SEQ ID NO: 3955881 - DNA, 25 bp, Homo sapien
tcttagaaatggcatcaaaggtggc

SEQ ID NO: 3955882 - DNA, 25 bp, Homo sapien
gctgtaggtcttagaaatggcatca

SEQ ID NO: 3955883 - DNA, 25 bp, Homo sapien
taggtcttagaaatggcatcaaagg

SEQ ID NO: 3955884 - DNA, 25 bp, Homo sapien
gtagctgtaggtcttagaaatggca

SEQ ID NO: 3955885 - DNA, 25 bp, Homo sapien
agtggtgtgcttgaggcaagtcccc

SEQ ID NO: 3955886 - DNA, 25 bp, Homo sapien
agggtcagtggtgtgcttgaggcaa

SEQ ID NO: 3955887 - DNA, 25 bp, Homo sapien
ggtcagtggtgtgcttgaggcaagt

SEQ ID NO: 3955888 - DNA, 25 bp, Homo sapien
tcagtggtgtgcttgaggcaagtcc

SEQ ID NO: 3955889 - DNA, 25 bp, Homo sapien
cattctgggcgggtctgtcgtgcat

SEQ ID NO: 3955890 - DNA, 25 bp, Homo sapien
tgcctccctgaaaacacgccaagca

SEQ ID NO: 3955891 - DNA, 25 bp, Homo sapien
agaggccattctgggcgggtctgtc

SEQ ID NO: 3955892 - DNA, 25 bp, Homo sapien
gtcgtgcattaggagagcctttctc

SEQ ID NO: 3955893 - DNA, 25 bp, Homo sapien
atggctatgccccatgtgtggacca

SEQ ID NO: 3955894 - DNA, 25 bp, Homo sapien
tggctatgccccatgtgtggaccac

SEQ ID NO: 3955895 - DNA, 25 bp, Homo sapien
aagttgcccagggtggcagtgcagc

SEQ ID NO: 3955896 - DNA, 25 bp, Homo sapien
gaagttgcccagggtggcagtgcag

SEQ ID NO: 3955897 - DNA, 25 bp, Homo sapien
tgcccagggtggcagtgcagccccg

SEQ ID NO: 3955898 - DNA, 25 bp, Homo sapien
gttgcccagggtggcagtgcagccc

SEQ ID NO: 3955899 - DNA, 25 bp, Homo sapien
tcttaggcacaggtgcggagacgat

SEQ ID NO: 3955900 - DNA, 25 bp, Homo sapien
agcagcttcttaggcacaggtgcgg

SEQ ID NO: 3955901 - DNA, 25 bp, Homo sapien
cagcttcttaggcacaggtgcggag

SEQ ID NO: 3955902 - DNA, 25 bp, Homo sapien
cttcttaggcacaggtgcggagacg

SEQ ID NO: 3955903 - DNA, 25 bp, Homo sapien
ctgggtgcagggatgaggcgtacca

SEQ ID NO: 3955904 - DNA, 25 bp, Homo sapien
ggtgcagggatgaggcgtaccagca

SEQ ID NO: 3955905 - DNA, 25 bp, Homo sapien
tgggtgcagggatgaggcgtaccag

SEQ ID NO: 3955906 - DNA, 25 bp, Homo sapien
gggtgcagggatgaggcgtaccagc

SEQ ID NO: 3955907 - DNA, 25 bp, Homo sapien
tcaggagacgggggcccgagggagc

SEQ ID NO: 3955908 - DNA, 25 bp, Homo sapien
acggcaggcccatcacctgccacca

SEQ ID NO: 3955909 - DNA, 25 bp, Homo sapien
caggcccatcacctgccaccagcct

SEQ ID NO: 3955910 - DNA, 25 bp, Homo sapien
ccacggcaggcccatcacctgccac

SEQ ID NO: 3955911 - DNA, 25 bp, Homo sapien
ggcccatcacctgccaccagcctac

SEQ ID NO: 3955912 - DNA, 25 bp, Homo sapien
atgatggccccacggatggcggtgg

SEQ ID NO: 3955913 - DNA, 25 bp, Homo sapien
cacggatggcggtggccacctcctt

SEQ ID NO: 3955914 - DNA, 25 bp, Homo sapien
cacggggacgatggagagcttggcc

SEQ ID NO: 3955915 - DNA, 25 bp, Homo sapien
tgtagtccccgatagcaacaaatgc

SEQ ID NO: 3955916 - DNA, 25 bp, Homo sapien
gcgaaaagatgtgtgtgaggcagct

SEQ ID NO: 3955917 - DNA, 25 bp, Homo sapien
aagatgtgtgtgaggcagctggtgg

SEQ ID NO: 3955918 - DNA, 25 bp, Homo sapien
gatgtgtgtgaggcagctggtggcc

SEQ ID NO: 3955919 - DNA, 25 bp, Homo sapien
gaaaagatgtgtgtgaggcagctgg

SEQ ID NO: 3955920 - DNA, 25 bp, Homo sapien
ctacacccaatcactgcccaccgcc

SEQ ID NO: 3955921 - DNA, 25 bp, Homo sapien
tacacccaatcactgcccaccgccc

SEQ ID NO: 3955922 - DNA, 25 bp, Homo sapien
tgcaactatgcagagccgagagagt

SEQ ID NO: 3955923 - DNA, 25 bp, Homo sapien
cgggtgaagccaagtgcaactatgc

SEQ ID NO: 3955924 - DNA, 25 bp, Homo sapien
ttacgaaagtcacacgggtgaagcc

SEQ ID NO: 3955925 - DNA, 25 bp, Homo sapien
gcctgttgcacccctcaaggaaaga

SEQ ID NO: 3955926 - DNA, 25 bp, Homo sapien
cccagcgcagccccctccaggacag

SEQ ID NO: 3955927 - DNA, 25 bp, Homo sapien
gcgcagccccctccaggacagccgg

SEQ ID NO: 3955928 - DNA, 25 bp, Homo sapien
cagccccctccaggacagccgggta

SEQ ID NO: 3955929 - DNA, 25 bp, Homo sapien
cccggcaagcccagcgcagccccct

SEQ ID NO: 3955930 - DNA, 25 bp, Homo sapien
gagaggcccccaggaagaaatcaat

SEQ ID NO: 3955931 - DNA, 25 bp, Homo sapien
gaggcccccaggaagaaatcaatga

SEQ ID NO: 3955932 - DNA, 25 bp, Homo sapien
gagagaggcccccaggaagaaatca

SEQ ID NO: 3955933 - DNA, 25 bp, Homo sapien
cgctggccggcacgggtctgcttct

SEQ ID NO: 3955934 - DNA, 25 bp, Homo sapien
attcaagaaccaaagtcacggccgg

SEQ ID NO: 3955935 - DNA, 25 bp, Homo sapien
gaaaattgtagggagagcattaaaa

SEQ ID NO: 3955936 - DNA, 25 bp, Homo sapien
accgaagaagtcatgaaccccctca

SEQ ID NO: 3955937 - DNA, 25 bp, Homo sapien
gatagggcgaaactgtgtaaccgcc

SEQ ID NO: 3955938 - DNA, 25 bp, Homo sapien
aaggttaccctatttctgcatctca

SEQ ID NO: 3955939 - DNA, 25 bp, Homo sapien
tttggcctagccatgaccaccgtac

SEQ ID NO: 3955940 - DNA, 25 bp, Homo sapien
gaagcttgtatgtaaggttacccta

SEQ ID NO: 3955941 - DNA, 25 bp, Homo sapien
cgtttttggaagcttgtatgtaagg

SEQ ID NO: 3955942 - DNA, 25 bp, Homo sapien
tctcggatggcatgaaccaagcgct

SEQ ID NO: 3955943 - DNA, 25 bp, Homo sapien
cctttaatgcgagtcaatggcagat

SEQ ID NO: 3955944 - DNA, 25 bp, Homo sapien
ccgtacacgcggactatgacagttt

SEQ ID NO: 3955945 - DNA, 25 bp, Homo sapien
acgcgagacgctgggccctttaatg

SEQ ID NO: 3955946 - DNA, 25 bp, Homo sapien
cttaataggcagggagaagagatag

SEQ ID NO: 3955947 - DNA, 25 bp, Homo sapien
tcatgtccttgaccaagcggcccaa

SEQ ID NO: 3955948 - DNA, 25 bp, Homo sapien
caagcggcccaacttggtgacgggc

SEQ ID NO: 3955949 - DNA, 25 bp, Homo sapien
gtccttgaccaagcggcccaacttg

SEQ ID NO: 3955950 - DNA, 25 bp, Homo sapien
aggcgccagtgaccaggaccgctct

SEQ ID NO: 3955951 - DNA, 25 bp, Homo sapien
cgaccccgagcgtggctgataccta

SEQ ID NO: 3955952 - DNA, 25 bp, Homo sapien
gaccccgagcgtggctgatacctac

SEQ ID NO: 3955953 - DNA, 25 bp, Homo sapien
taaagggagaaaaggcgccagtgac

SEQ ID NO: 3955954 - DNA, 25 bp, Homo sapien
gcctccgcgagctccgcggcctcgg

SEQ ID NO: 3955955 - DNA, 25 bp, Homo sapien
ggcccccccgctgcaccggcgtcat

SEQ ID NO: 3955956 - DNA, 25 bp, Homo sapien
ttgcctccgcgagctccgcggcctc

SEQ ID NO: 3955957 - DNA, 25 bp, Homo sapien
cgcggaagccaccgcggttccccat

SEQ ID NO: 3955958 - DNA, 25 bp, Homo sapien
tcagtgtggcctacgcatctggcag

SEQ ID NO: 3955959 - DNA, 25 bp, Homo sapien
caagaaggaactagtcagtgtggcc

SEQ ID NO: 3955960 - DNA, 25 bp, Homo sapien
agacccgacccgatgtccgcggatt

SEQ ID NO: 3955961 - DNA, 25 bp, Homo sapien
gcggactcgggagcctagacccgac

SEQ ID NO: 3955962 - DNA, 25 bp, Homo sapien
tttatcaagagccacactgcgagcc

SEQ ID NO: 3955963 - DNA, 25 bp, Homo sapien
ttatactggtatcaaagagccaggc

SEQ ID NO: 3955964 - DNA, 25 bp, Homo sapien
cgccgaaaagcaggagtaaacgctg

SEQ ID NO: 3955965 - DNA, 25 bp, Homo sapien
gggtcaggttgacggctctacgcac

SEQ ID NO: 3955966 - DNA, 25 bp, Homo sapien
gtccatcccctcatcgggatcctcg

SEQ ID NO: 3955967 - DNA, 25 bp, Homo sapien
tgcagaacaagctttactcagagga

SEQ ID NO: 3955968 - DNA, 25 bp, Homo sapien
gaacaagctttactcagaggaacag

SEQ ID NO: 3955969 - DNA, 25 bp, Homo sapien
caagctttactcagaggaacagcaa

SEQ ID NO: 3955970 - DNA, 25 bp, Homo sapien
agagtccacgcaccctcgagggcgg

SEQ ID NO: 3955971 - DNA, 25 bp, Homo sapien
accccgtcccgctcaggagagcgcc

SEQ ID NO: 3955972 - DNA, 25 bp, Homo sapien
tgcgtgtgacggtgcagcagcggct

SEQ ID NO: 3955973 - DNA, 25 bp, Homo sapien
gcgcccggcgaaggtcgggtgggca

SEQ ID NO: 3955974 - DNA, 25 bp, Homo sapien
ctgccctgcccacgcccgctcccgc

SEQ ID NO: 3955975 - DNA, 25 bp, Homo sapien
gccctgcccacgcccgctcccgcgt

SEQ ID NO: 3955976 - DNA, 25 bp, Homo sapien
ctagcctgccctgcccacgcccgct

SEQ ID NO: 3955977 - DNA, 25 bp, Homo sapien
cctgcccacgcccgctcccgcgtac

SEQ ID NO: 3955978 - DNA, 25 bp, Homo sapien
tctcgtaggcgcgggaagcacagaa

SEQ ID NO: 3955979 - DNA, 25 bp, Homo sapien
tgcatagccaccagccgcggtctga

SEQ ID NO: 3955980 - DNA, 25 bp, Homo sapien
gtctgacgtttccaacacgcgcacg

SEQ ID NO: 3955981 - DNA, 25 bp, Homo sapien
atctgcgcggctgctctcgtaggcg

SEQ ID NO: 3955982 - DNA, 25 bp, Homo sapien
tgtttggagtcaccgcggggccaca

SEQ ID NO: 3955983 - DNA, 25 bp, Homo sapien
agtcttgccacacggtcaagccgca

SEQ ID NO: 3955984 - DNA, 25 bp, Homo sapien
tgcggagaccaagcacgggctcctg

SEQ ID NO: 3955985 - DNA, 25 bp, Homo sapien
ggcttcctctaggtgcggagaccaa

SEQ ID NO: 3955986 - DNA, 25 bp, Homo sapien
gcggtctgccggtcttcgttctcca

SEQ ID NO: 3955987 - DNA, 25 bp, Homo sapien
accaggcggtctgccggtcttcgtt

SEQ ID NO: 3955988 - DNA, 25 bp, Homo sapien
tcctccaggtagggcgctggaaacc

SEQ ID NO: 3955989 - DNA, 25 bp, Homo sapien
ctgctccctagggacgggcctccct

SEQ ID NO: 3955990 - DNA, 25 bp, Homo sapien
cctgaaaaggcctatcccgcgtgtc

SEQ ID NO: 3955991 - DNA, 25 bp, Homo sapien
ggcctgcgcctgaaaaggcctatcc

SEQ ID NO: 3955992 - DNA, 25 bp, Homo sapien
tgcgcctgaaaaggcctatcccgcg

SEQ ID NO: 3955993 - DNA, 25 bp, Homo sapien
tgggcctgcgcctgaaaaggcctat

SEQ ID NO: 3955994 - DNA, 25 bp, Homo sapien
gcagcgcaggctctgagcctccaga

SEQ ID NO: 3955995 - DNA, 25 bp, Homo sapien
ctgggtacagaagggctgcaggcag

SEQ ID NO: 3955996 - DNA, 25 bp, Homo sapien
tgcaggcagcgcaggctctgagcct

SEQ ID NO: 3955997 - DNA, 25 bp, Homo sapien
aggcagcgcaggctctgagcctcca

SEQ ID NO: 3955998 - DNA, 25 bp, Homo sapien
ggcggcccgcagcgcgagaaagagg

SEQ ID NO: 3955999 - DNA, 25 bp, Homo sapien
aggcggcccgcagcgcgagaaagag

SEQ ID NO: 3956000 - DNA, 25 bp, Homo sapien
ggagaggcggcccgcagcgcgagaa

SEQ ID NO: 3956001 - DNA, 25 bp, Homo sapien
agaggcggcccgcagcgcgagaaag

SEQ ID NO: 3956002 - DNA, 25 bp, Homo sapien
tccaaacgccgctgcatgctgggag

SEQ ID NO: 3956003 - DNA, 25 bp, Homo sapien
atgctgggagtttggggcgagtcag

SEQ ID NO: 3956004 - DNA, 25 bp, Homo sapien
tgctgggagtttggggcgagtcagg

SEQ ID NO: 3956005 - DNA, 25 bp, Homo sapien
tgggagtttggggcgagtcaggcac

SEQ ID NO: 3956006 - DNA, 25 bp, Homo sapien
ttgcggtgcgaagaagccagtgatc

SEQ ID NO: 3956007 - DNA, 25 bp, Homo sapien
gcagcctccgagaataggtttccaa

SEQ ID NO: 3956008 - DNA, 25 bp, Homo sapien
gtgccacgcgctctgcagtcgccag

SEQ ID NO: 3956009 - DNA, 25 bp, Homo sapien
tgatcgtcgggctccgtgccacgcg

SEQ ID NO: 3956010 - DNA, 25 bp, Homo sapien
cgtactgtgatacgccgctttgggc

SEQ ID NO: 3956011 - DNA, 25 bp, Homo sapien
cttaaggcaccacaaaaacgtactg

SEQ ID NO: 3956012 - DNA, 25 bp, Homo sapien
gccgctttgggcttcactggtccct

SEQ ID NO: 3956013 - DNA, 25 bp, Homo sapien
caaaaacgtactgtgatacgccgct

SEQ ID NO: 3956014 - DNA, 25 bp, Homo sapien
ctccaccgggaaggtctccttgagg

SEQ ID NO: 3956015 - DNA, 25 bp, Homo sapien
gagaagctttgggagaacgcggtca

SEQ ID NO: 3956016 - DNA, 25 bp, Homo sapien
cctccaccgggaaggtctccttgag

SEQ ID NO: 3956017 - DNA, 25 bp, Homo sapien
aacgcggtcagatctccgcagcagg

SEQ ID NO: 3956018 - DNA, 25 bp, Homo sapien
aaccagggcattggtcttccagagc

SEQ ID NO: 3956019 - DNA, 25 bp, Homo sapien
agggacgaagggcctccagtgggag

SEQ ID NO: 3956020 - DNA, 25 bp, Homo sapien
ggcgggaaccagggcattggtcttc

SEQ ID NO: 3956021 - DNA, 25 bp, Homo sapien
cagggacgaagggcctccagtggga

SEQ ID NO: 3956022 - DNA, 25 bp, Homo sapien
actcctgcgcacgaaggtgtcgctg

SEQ ID NO: 3956023 - DNA, 25 bp, Homo sapien
gccgtctgaccagcgcacagagaag

SEQ ID NO: 3956024 - DNA, 25 bp, Homo sapien
gagctgcctgaattcgtcccaactc

SEQ ID NO: 3956025 - DNA, 25 bp, Homo sapien
ggtgtcgctgccgtctgaccagcgc

SEQ ID NO: 3956026 - DNA, 25 bp, Homo sapien
tggagcctcttgatctgcaccaggg

SEQ ID NO: 3956027 - DNA, 25 bp, Homo sapien
ctgccccttgcactgaaactgggta

SEQ ID NO: 3956028 - DNA, 25 bp, Homo sapien
ccttgcactgaaactgggtatcggg

SEQ ID NO: 3956029 - DNA, 25 bp, Homo sapien
aaactgggtatcgggggcctgccat

SEQ ID NO: 3956030 - DNA, 25 bp, Homo sapien
tgaaatgggcgaggacccttctgcc

SEQ ID NO: 3956031 - DNA, 25 bp, Homo sapien
aaccccctgggatagaatcctggca

SEQ ID NO: 3956032 - DNA, 25 bp, Homo sapien
gggtccttgtggagccgccccagct

SEQ ID NO: 3956033 - DNA, 25 bp, Homo sapien
tgcctccccgtgcttgagagggctc

SEQ ID NO: 3956034 - DNA, 25 bp, Homo sapien
gcggtcactgcgcaaataatagcgg

SEQ ID NO: 3956035 - DNA, 25 bp, Homo sapien
tcttgaccactggattatgaacaga

SEQ ID NO: 3956036 - DNA, 25 bp, Homo sapien
tggataaatgaacgcaaggaggcac

SEQ ID NO: 3956037 - DNA, 25 bp, Homo sapien
gcccagcacttggaacagcgcttgg

SEQ ID NO: 3956038 - DNA, 25 bp, Homo sapien
caggacactcagaacggagcgatgg

SEQ ID NO: 3956039 - DNA, 25 bp, Homo sapien
caacacggactttgcctgggtgtca

SEQ ID NO: 3956040 - DNA, 25 bp, Homo sapien
tagcgcgcgccgcaatctgtgcggt

SEQ ID NO: 3956041 - DNA, 25 bp, Homo sapien
ctgggtgtcagctcgggtccacagc

SEQ ID NO: 3956042 - DNA, 25 bp, Homo sapien
gacaccaagtttagggaggactgcc

SEQ ID NO: 3956043 - DNA, 25 bp, Homo sapien
agctttgggcgcctttgttcggaga

SEQ ID NO: 3956044 - DNA, 25 bp, Homo sapien
agaatgaactcactctcggtcggcc

SEQ ID NO: 3956045 - DNA, 25 bp, Homo sapien
ttcaagacgtggatgcggacgcagc

SEQ ID NO: 3956046 - DNA, 25 bp, Homo sapien
gttttacccctgtgaggagtgtgct

SEQ ID NO: 3956047 - DNA, 25 bp, Homo sapien
aagttttacccctgtgaggagtgtg

SEQ ID NO: 3956048 - DNA, 25 bp, Homo sapien
ctaagttttacccctgtgaggagtg

SEQ ID NO: 3956049 - DNA, 25 bp, Homo sapien
agttttacccctgtgaggagtgtgc

SEQ ID NO: 3956050 - DNA, 25 bp, Homo sapien
ccttgcaggtgtttctaggccagat

SEQ ID NO: 3956051 - DNA, 25 bp, Homo sapien
gggcctgccctcagatgctaagaaa

SEQ ID NO: 3956052 - DNA, 25 bp, Homo sapien
tcccgcaagttagggaagactccac

SEQ ID NO: 3956053 - DNA, 25 bp, Homo sapien
gccagatgtatagggtagagccgcc

SEQ ID NO: 3956054 - DNA, 25 bp, Homo sapien
gctgggcaagcctgacttcgactgc

SEQ ID NO: 3956055 - DNA, 25 bp, Homo sapien
tcctgtgactagagggtggtcagcc

SEQ ID NO: 3956056 - DNA, 25 bp, Homo sapien
ctcaaaagtggatgagcgctggcgc

SEQ ID NO: 3956057 - DNA, 25 bp, Homo sapien
acaatgaagtgaaccgcaagctggg

SEQ ID NO: 3956058 - DNA, 25 bp, Homo sapien
taaagcagtagacagggcttgttcc

SEQ ID NO: 3956059 - DNA, 25 bp, Homo sapien
gtttgaagcccaaatgaaacgctga

SEQ ID NO: 3956060 - DNA, 25 bp, Homo sapien
tacagggaaagctcaggtcgggtct

SEQ ID NO: 3956061 - DNA, 25 bp, Homo sapien
gaaacgctgaagtgactgagaacct

SEQ ID NO: 3956062 - DNA, 25 bp, Homo sapien
acgcaggtgttctccatcgccgtct

SEQ ID NO: 3956063 - DNA, 25 bp, Homo sapien
agggctacgtgaacaccgacagcgg

SEQ ID NO: 3956064 - DNA, 25 bp, Homo sapien
gtcttcgggcccatcgtcaacgagg

SEQ ID NO: 3956065 - DNA, 25 bp, Homo sapien
tgcgctgcgtgttcaacgggaacgc

SEQ ID NO: 3956066 - DNA, 25 bp, Homo sapien
gattcagcttgtctcataaaaagat

SEQ ID NO: 3956067 - DNA, 25 bp, Homo sapien
cagattcagcttgtctcataaaaag

SEQ ID NO: 3956068 - DNA, 25 bp, Homo sapien
ccagattcagcttgtctcataaaaa

SEQ ID NO: 3956069 - DNA, 25 bp, Homo sapien
agattcagcttgtctcataaaaaga

SEQ ID NO: 3956070 - DNA, 25 bp, Homo sapien
ggtggactcccgcttgagtgtgcca

SEQ ID NO: 3956071 - DNA, 25 bp, Homo sapien
acaagaatgcaaaccgagactggcc

SEQ ID NO: 3956072 - DNA, 25 bp, Homo sapien
ggacgctcacggtgcgacagctctg

SEQ ID NO: 3956073 - DNA, 25 bp, Homo sapien
ggcctggccaaccaagaggccaagt

SEQ ID NO: 3956074 - DNA, 25 bp, Homo sapien
gctcattaaagaccttctggaaatt

SEQ ID NO: 3956075 - DNA, 25 bp, Homo sapien
gcttggccgtgtcgggcagcaggac

SEQ ID NO: 3956076 - DNA, 25 bp, Homo sapien
aagtcgtcgtcccgggcagcatgca

SEQ ID NO: 3956077 - DNA, 25 bp, Homo sapien
aactcttgtaatactgggctgcgga

SEQ ID NO: 3956078 - DNA, 25 bp, Homo sapien
ccatctggactccccgggcccgcct

SEQ ID NO: 3956079 - DNA, 25 bp, Homo sapien
tgccaccggagagccggactcagtc

SEQ ID NO: 3956080 - DNA, 25 bp, Homo sapien
catctggactccccgggcccgcctg

SEQ ID NO: 3956081 - DNA, 25 bp, Homo sapien
ctgccaccggagagccggactcagt

SEQ ID NO: 3956082 - DNA, 25 bp, Homo sapien
ttgaactcgctgaagcgggcctcgt

SEQ ID NO: 3956083 - DNA, 25 bp, Homo sapien
tcttgaactcgctgaagcgggcctc

SEQ ID NO: 3956084 - DNA, 25 bp, Homo sapien
ctcttgaactcgctgaagcgggcct

SEQ ID NO: 3956085 - DNA, 25 bp, Homo sapien
gaactcgctgaagcgggcctcgtcg

SEQ ID NO: 3956086 - DNA, 25 bp, Homo sapien
ccgtggggcaggcagcagcctgggt

SEQ ID NO: 3956087 - DNA, 25 bp, Homo sapien
cgcccgtggggcaggcagcagcctg

SEQ ID NO: 3956088 - DNA, 25 bp, Homo sapien
taggtacgcccgtggggcaggcagc

SEQ ID NO: 3956089 - DNA, 25 bp, Homo sapien
ctaggtacgcccgtggggcaggcag

SEQ ID NO: 3956090 - DNA, 25 bp, Homo sapien
tcacagtggcccaaggggagggtac

SEQ ID NO: 3956091 - DNA, 25 bp, Homo sapien
ctccacccccggtggacaccaggca

SEQ ID NO: 3956092 - DNA, 25 bp, Homo sapien
tccacccccggtggacaccaggcag

SEQ ID NO: 3956093 - DNA, 25 bp, Homo sapien
ggcggcttgctgattgggggcacca

SEQ ID NO: 3956094 - DNA, 25 bp, Homo sapien
ccagagaagccagggggcggcttgc

SEQ ID NO: 3956095 - DNA, 25 bp, Homo sapien
ggaggcgtgcccttcaggagcacca

SEQ ID NO: 3956096 - DNA, 25 bp, Homo sapien
ttcaggagcaccacagcgctgaagc

SEQ ID NO: 3956097 - DNA, 25 bp, Homo sapien
aggaccctcgctgactgcgggctgc

SEQ ID NO: 3956098 - DNA, 25 bp, Homo sapien
acccagagaggaccctcgctgactg

SEQ ID NO: 3956099 - DNA, 25 bp, Homo sapien
gggtggcaggacaagacccagagag

SEQ ID NO: 3956100 - DNA, 25 bp, Homo sapien
aggacaagacccagagaggaccctc

SEQ ID NO: 3956101 - DNA, 25 bp, Homo sapien
ccattaacgacgacggcaactggcc

SEQ ID NO: 3956102 - DNA, 25 bp, Homo sapien
cccaactttagagggttggatggag

SEQ ID NO: 3956103 - DNA, 25 bp, Homo sapien
cctccatgtgtccattaacgacgac

SEQ ID NO: 3956104 - DNA, 25 bp, Homo sapien
cttcccaactttagagggttggatg

SEQ ID NO: 3956105 - DNA, 25 bp, Homo sapien
tgctaccttcttgctgctactgctg

SEQ ID NO: 3956106 - DNA, 25 bp, Homo sapien
agagtgggggctgtgctaccttctt

SEQ ID NO: 3956107 - DNA, 25 bp, Homo sapien
gggctgtgctaccttcttgctgcta

SEQ ID NO: 3956108 - DNA, 25 bp, Homo sapien
ctgtgctaccttcttgctgctactg

SEQ ID NO: 3956109 - DNA, 25 bp, Homo sapien
gcggtgccaggcttgggcaccgagg

SEQ ID NO: 3956110 - DNA, 25 bp, Homo sapien
gggcggtgccaggcttgggcaccga

SEQ ID NO: 3956111 - DNA, 25 bp, Homo sapien
ggcggtgccaggcttgggcaccgag

SEQ ID NO: 3956112 - DNA, 25 bp, Homo sapien
tcctcctcctggaaggcactcctgc

SEQ ID NO: 3956113 - DNA, 25 bp, Homo sapien
agggatggcgtacggcagcgccaac

SEQ ID NO: 3956114 - DNA, 25 bp, Homo sapien
ctggcagggatggcgtacggcagcg

SEQ ID NO: 3956115 - DNA, 25 bp, Homo sapien
gcagggatggcgtacggcagcgcca

SEQ ID NO: 3956116 - DNA, 25 bp, Homo sapien
ggatggcgtacggcagcgccaaccc

SEQ ID NO: 3956117 - DNA, 25 bp, Homo sapien
gggaagtcttcgtccttgagcttcg

SEQ ID NO: 3956118 - DNA, 25 bp, Homo sapien
aggctggggaagtcttcgtccttga

SEQ ID NO: 3956119 - DNA, 25 bp, Homo sapien
aagtcttcgtccttgagcttcgggc

SEQ ID NO: 3956120 - DNA, 25 bp, Homo sapien
tcttcgtccttgagcttcgggctgg

SEQ ID NO: 3956121 - DNA, 25 bp, Homo sapien
ggtcaacagctatcaggccccgtgg

SEQ ID NO: 3956122 - DNA, 25 bp, Homo sapien
ccattcacccctgggcgcccatact

SEQ ID NO: 3956123 - DNA, 25 bp, Homo sapien
gtggctccatacctgccctcccggc

SEQ ID NO: 3956124 - DNA, 25 bp, Homo sapien
gccccgtggctccatacctgccctc

SEQ ID NO: 3956125 - DNA, 25 bp, Homo sapien
aggcttcttggcttacaggaccatt

SEQ ID NO: 3956126 - DNA, 25 bp, Homo sapien
aggaccatttgtcgaggtttccttg

SEQ ID NO: 3956127 - DNA, 25 bp, Homo sapien
aaggcttcttggcttacaggaccat

SEQ ID NO: 3956128 - DNA, 25 bp, Homo sapien
ctgggcctgtcaccgagaaggcttc

SEQ ID NO: 3956129 - DNA, 25 bp, Homo sapien
tgggcctaccgccttcctcctgatc

SEQ ID NO: 3956130 - DNA, 25 bp, Homo sapien
tgagtccggggtgagcgccgggggc

SEQ ID NO: 3956131 - DNA, 25 bp, Homo sapien
ggccttcgccctgagtccggggtga

SEQ ID NO: 3956132 - DNA, 25 bp, Homo sapien
tgctgctgtgcggccacggaggccc

SEQ ID NO: 3956133 - DNA, 25 bp, Homo sapien
tggcggctgtacctgtccacctcct

SEQ ID NO: 3956134 - DNA, 25 bp, Homo sapien
ccactcggccctggcggctgtacct

SEQ ID NO: 3956135 - DNA, 25 bp, Homo sapien
tcctcgtagtcttcgccaccaacga

SEQ ID NO: 3956136 - DNA, 25 bp, Homo sapien
cctcctcgtagtcttcgccaccaac

SEQ ID NO: 3956137 - DNA, 25 bp, Homo sapien
cgggacgacaataggaggaacaggc

SEQ ID NO: 3956138 - DNA, 25 bp, Homo sapien
cagacagcccgtcacttcccgggac

SEQ ID NO: 3956139 - DNA, 25 bp, Homo sapien
cccgggacgacaataggaggaacag

SEQ ID NO: 3956140 - DNA, 25 bp, Homo sapien
gcagacagcccgtcacttcccggga

SEQ ID NO: 3956141 - DNA, 25 bp, Homo sapien
tgggggcatccaggccaggtgcctg

SEQ ID NO: 3956142 - DNA, 25 bp, Homo sapien
ggggcatccaggccaggtgcctgct

SEQ ID NO: 3956143 - DNA, 25 bp, Homo sapien
ggcatccaggccaggtgcctgctca

SEQ ID NO: 3956144 - DNA, 25 bp, Homo sapien
ctgggggcatccaggccaggtgcct

SEQ ID NO: 3956145 - DNA, 25 bp, Homo sapien
aactgcaggtcgatgtggcggttct

SEQ ID NO: 3956146 - DNA, 25 bp, Homo sapien
ctgcgactgtggcaggccgtcctgt

SEQ ID NO: 3956147 - DNA, 25 bp, Homo sapien
ccttgaggtcgatctcggtgcggaa

SEQ ID NO: 3956148 - DNA, 25 bp, Homo sapien
tcccggaagtgctcacgcaggtagg

SEQ ID NO: 3956149 - DNA, 25 bp, Homo sapien
tgcccacggtgcgacgtgtcatcgg

SEQ ID NO: 3956150 - DNA, 25 bp, Homo sapien
aggtccttgcgcgagtaccacttgc

SEQ ID NO: 3956151 - DNA, 25 bp, Homo sapien
taccacttgcgctcatatgtgaaga

SEQ ID NO: 3956152 - DNA, 25 bp, Homo sapien
tagcgctcgtcacagaacttgcaga

SEQ ID NO: 3956153 - DNA, 25 bp, Homo sapien
aagcccctcccagccgtgtggccac

SEQ ID NO: 3956154 - DNA, 25 bp, Homo sapien
cctaggctctctccggggtcgctgg

SEQ ID NO: 3956155 - DNA, 25 bp, Homo sapien
agcctgaccctcagggggccatccg

SEQ ID NO: 3956156 - DNA, 25 bp, Homo sapien
gtgtggccacatcccttgcaccacc

SEQ ID NO: 3956157 - DNA, 25 bp, Homo sapien
gggcaccgcgggcactcgtgctgca

SEQ ID NO: 3956158 - DNA, 25 bp, Homo sapien
gctcatgctgcctccgcatgtgctg

SEQ ID NO: 3956159 - DNA, 25 bp, Homo sapien
accgcgggcactcgtgctgcagcag

SEQ ID NO: 3956160 - DNA, 25 bp, Homo sapien
ggcagctcggggcaccgcgggcact

SEQ ID NO: 3956161 - DNA, 25 bp, Homo sapien
cccgaagtgcctccggttgtgagga

SEQ ID NO: 3956162 - DNA, 25 bp, Homo sapien
ttataggattttcaggccacgggcc

SEQ ID NO: 3956163 - DNA, 25 bp, Homo sapien
aggacattcagtgtcaccgccggga

SEQ ID NO: 3956164 - DNA, 25 bp, Homo sapien
cccagcattggtgcaccaggtggcc

SEQ ID NO: 3956165 - DNA, 25 bp, Homo sapien
gtacaatgcgtacacctttccatct

SEQ ID NO: 3956166 - DNA, 25 bp, Homo sapien
caatgcgtacacctttccatctgca

SEQ ID NO: 3956167 - DNA, 25 bp, Homo sapien
tacaatgcgtacacctttccatctg

SEQ ID NO: 3956168 - DNA, 25 bp, Homo sapien
ctgtacaatgcgtacacctttccat

SEQ ID NO: 3956169 - DNA, 25 bp, Homo sapien
ggagctgagtacctggactcccggg

SEQ ID NO: 3956170 - DNA, 25 bp, Homo sapien
cacaggcgcaatctgtgcagccact

SEQ ID NO: 3956171 - DNA, 25 bp, Homo sapien
agacagggccacttccccaccacag

SEQ ID NO: 3956172 - DNA, 25 bp, Homo sapien
aagggcgcctctccagcccgaccct

SEQ ID NO: 3956173 - DNA, 25 bp, Homo sapien
gcgcagtagcgctgctcgcagagca

SEQ ID NO: 3956174 - DNA, 25 bp, Homo sapien
cggcacacggcgcagtagcgctgct

SEQ ID NO: 3956175 - DNA, 25 bp, Homo sapien
agctcctcgcggcacacggcgcagt

SEQ ID NO: 3956176 - DNA, 25 bp, Homo sapien
agtagcgctgctcgcagagcacccg

SEQ ID NO: 3956177 - DNA, 25 bp, Homo sapien
gtagcacaccgggtggtcgcagcgg

SEQ ID NO: 3956178 - DNA, 25 bp, Homo sapien
ccttcccgctcaggagctgccgccg

SEQ ID NO: 3956179 - DNA, 25 bp, Homo sapien
agcagcggtagcacaccgggtggtc

SEQ ID NO: 3956180 - DNA, 25 bp, Homo sapien
ggtctccgcagcacagcacgcagct

SEQ ID NO: 3956181 - DNA, 25 bp, Homo sapien
ccgccgccatggtccgggatccggc

SEQ ID NO: 3956182 - DNA, 25 bp, Homo sapien
ctccatgtccgcgcgccgcccctcg

SEQ ID NO: 3956183 - DNA, 25 bp, Homo sapien
cagcatagactttcattgatcagtt

SEQ ID NO: 3956184 - DNA, 25 bp, Homo sapien
gctgtcacagggacttccatcccag

SEQ ID NO: 3956185 - DNA, 25 bp, Homo sapien
catcccagcatagactttcattgat

SEQ ID NO: 3956186 - DNA, 25 bp, Homo sapien
cccagcatagactttcattgatcag

SEQ ID NO: 3956187 - DNA, 25 bp, Homo sapien
gagcgtggcggggatagcttcttgc

SEQ ID NO: 3956188 - DNA, 25 bp, Homo sapien
ggggatagcttcttgcagggcctct

SEQ ID NO: 3956189 - DNA, 25 bp, Homo sapien
tggcggggatagcttcttgcagggc

SEQ ID NO: 3956190 - DNA, 25 bp, Homo sapien
cagctgtcaaggacaaggggccctg

SEQ ID NO: 3956191 - DNA, 25 bp, Homo sapien
agagcagggctacggcttccacctg

SEQ ID NO: 3956192 - DNA, 25 bp, Homo sapien
acgtggagggcgagacgcaccacca

SEQ ID NO: 3956193 - DNA, 25 bp, Homo sapien
tcatccggcgcgtggaacccggttc

SEQ ID NO: 3956194 - DNA, 25 bp, Homo sapien
tggtcgaggtcaacggcgtcaacgt

SEQ ID NO: 3956195 - DNA, 25 bp, Homo sapien
tgacctgtaccgaggagatggccca

SEQ ID NO: 3956196 - DNA, 25 bp, Homo sapien
aggagacagatgaggagctccgccg

SEQ ID NO: 3956197 - DNA, 25 bp, Homo sapien
cggcagctgacctgtaccgaggaga

SEQ ID NO: 3956198 - DNA, 25 bp, Homo sapien
gccggcggcagctgacctgtaccga

SEQ ID NO: 3956199 - DNA, 25 bp, Homo sapien
gctcgtcccgaagtgacctgcctgg

SEQ ID NO: 3956200 - DNA, 25 bp, Homo sapien
tcgtcccgaagtgacctgcctggtt

SEQ ID NO: 3956201 - DNA, 25 bp, Homo sapien
ctcgtcccgaagtgacctgcctggt

SEQ ID NO: 3956202 - DNA, 25 bp, Homo sapien
agccatgcgagtcaacaagcgcgcg

SEQ ID NO: 3956203 - DNA, 25 bp, Homo sapien
gcaagatcccttccaggagagcggc

SEQ ID NO: 3956204 - DNA, 25 bp, Homo sapien
caaggagaaggctcgagccatgcga

SEQ ID NO: 3956205 - DNA, 25 bp, Homo sapien
gaacaggaagcgtgaaatcttcagc

SEQ ID NO: 3956206 - DNA, 25 bp, Homo sapien
gcttcctgaagcgtaaagccacttc

SEQ ID NO: 3956207 - DNA, 25 bp, Homo sapien
aagctttattcaacaggcgtggctt

SEQ ID NO: 3956208 - DNA, 25 bp, Homo sapien
aagccacttcacagacggtggccac

SEQ ID NO: 3956209 - DNA, 25 bp, Homo sapien
caacaggcgtggcttcctgaagcgt

SEQ ID NO: 3956210 - DNA, 25 bp, Homo sapien
caggcagacaggtctgctggccgaa

SEQ ID NO: 3956211 - DNA, 25 bp, Homo sapien
cgtggcagcgagggtgcacaggcag

SEQ ID NO: 3956212 - DNA, 25 bp, Homo sapien
gtccattgatctcgtgccacagctc

SEQ ID NO: 3956213 - DNA, 25 bp, Homo sapien
agagtccattgatctcgtgccacag

SEQ ID NO: 3956214 - DNA, 25 bp, Homo sapien
tctggggacttggttgccttcttgg

SEQ ID NO: 3956215 - DNA, 25 bp, Homo sapien
tgttggcgattctgtgcacatgcgt

SEQ ID NO: 3956216 - DNA, 25 bp, Homo sapien
cagcctgttggcgattctgtgcaca

SEQ ID NO: 3956217 - DNA, 25 bp, Homo sapien
acctcagcctgttggcgattctgtg

SEQ ID NO: 3956218 - DNA, 25 bp, Homo sapien
gctcgcttggacaaacgcttgctgg

SEQ ID NO: 3956219 - DNA, 25 bp, Homo sapien
ggctgcaagcctacatgtgaccatc

SEQ ID NO: 3956220 - DNA, 25 bp, Homo sapien
gcttggagctctattccccacaata

SEQ ID NO: 3956221 - DNA, 25 bp, Homo sapien
tagacattggaaccgcaaagccctg

SEQ ID NO: 3956222 - DNA, 25 bp, Homo sapien
tgagagcgtttctctttcggggaac

SEQ ID NO: 3956223 - DNA, 25 bp, Homo sapien
ttaactgagagcgtttctctttcgg

SEQ ID NO: 3956224 - DNA, 25 bp, Homo sapien
taactgagagcgtttctctttcggg

SEQ ID NO: 3956225 - DNA, 25 bp, Homo sapien
attttaactgagagcgtttctcttt

SEQ ID NO: 3956226 - DNA, 25 bp, Homo sapien
cagaggctgggatgtccccaccgta

SEQ ID NO: 3956227 - DNA, 25 bp, Homo sapien
gatggcgctggtctgcttgatgtat

SEQ ID NO: 3956228 - DNA, 25 bp, Homo sapien
ggcgctggtctgcttgatgtatttc

SEQ ID NO: 3956229 - DNA, 25 bp, Homo sapien
tgtccccaccgtagtgctgctgcag

SEQ ID NO: 3956230 - DNA, 25 bp, Homo sapien
gggctctggacaggagggggtgaca

SEQ ID NO: 3956231 - DNA, 25 bp, Homo sapien
caccatccagtgctcggcggggttg

SEQ ID NO: 3956232 - DNA, 25 bp, Homo sapien
acagatccgcccaccaccatccagt

SEQ ID NO: 3956233 - DNA, 25 bp, Homo sapien
caagctgctttcaacagatccgccc

SEQ ID NO: 3956234 - DNA, 25 bp, Homo sapien
cctccagaaaccgacggggtagatg

SEQ ID NO: 3956235 - DNA, 25 bp, Homo sapien
ccgacggggtagatgagcttgccca

SEQ ID NO: 3956236 - DNA, 25 bp, Homo sapien
ggcgcccgccgtcacctggtctttg

SEQ ID NO: 3956237 - DNA, 25 bp, Homo sapien
ccgcgcccgcagtcgctgcatggcg

SEQ ID NO: 3956238 - DNA, 25 bp, Homo sapien
agtggctacagtgatgcaggcgatg

SEQ ID NO: 3956239 - DNA, 25 bp, Homo sapien
tctggggcaccgggtgtccatcctc

SEQ ID NO: 3956240 - DNA, 25 bp, Homo sapien
gggcaccgggtgtccatcctcccaa

SEQ ID NO: 3956241 - DNA, 25 bp, Homo sapien
gctgagtggctacagtgatgcaggc

SEQ ID NO: 3956242 - DNA, 25 bp, Homo sapien
gcactggagtcatagcagtgctcag

SEQ ID NO: 3956243 - DNA, 25 bp, Homo sapien
ctcagtccccagatggtccacaggt

SEQ ID NO: 3956244 - DNA, 25 bp, Homo sapien
cctttttgttcctcatggcacggat

SEQ ID NO: 3956245 - DNA, 25 bp, Homo sapien
ggcacggatgttgaccagctgttgc

SEQ ID NO: 3956246 - DNA, 25 bp, Homo sapien
gccctcataggccacacgcagtctc

SEQ ID NO: 3956247 - DNA, 25 bp, Homo sapien
gtgctttccgcggacgcttcacggg

SEQ ID NO: 3956248 - DNA, 25 bp, Homo sapien
ttctcactgtccgagccctcatagg

SEQ ID NO: 3956249 - DNA, 25 bp, Homo sapien
acacgcagtctctgtgctttccgcg

SEQ ID NO: 3956250 - DNA, 25 bp, Homo sapien
caaaaagcaccacgcagtccctctg

SEQ ID NO: 3956251 - DNA, 25 bp, Homo sapien
gcaaaaagcaccacgcagtccctct

SEQ ID NO: 3956252 - DNA, 25 bp, Homo sapien
tgcaaaaagcaccacgcagtccctc

SEQ ID NO: 3956253 - DNA, 25 bp, Homo sapien
ccctcactcgttcatgccacaactg

SEQ ID NO: 3956254 - DNA, 25 bp, Homo sapien
tagctcacccctcactcgttcatgc

SEQ ID NO: 3956255 - DNA, 25 bp, Homo sapien
gctagctcacccctcactcgttcat

SEQ ID NO: 3956256 - DNA, 25 bp, Homo sapien
tcgttcatgccacaactgtccatca

SEQ ID NO: 3956257 - DNA, 25 bp, Homo sapien
gctcatgaggactctagcaacagcc

SEQ ID NO: 3956258 - DNA, 25 bp, Homo sapien
tatactgcaccagagacagtctgct

SEQ ID NO: 3956259 - DNA, 25 bp, Homo sapien
tctgctaacacccacatcaggttgt

SEQ ID NO: 3956260 - DNA, 25 bp, Homo sapien
ttatgccagcgaccctgacaaggtc

SEQ ID NO: 3956261 - DNA, 25 bp, Homo sapien
tgacatagtctggactacccctggg

SEQ ID NO: 3956262 - DNA, 25 bp, Homo sapien
ttctgcagaagtcccagcgggacta

SEQ ID NO: 3956263 - DNA, 25 bp, Homo sapien
ggtgcctatgggaatccagctctgg

SEQ ID NO: 3956264 - DNA, 25 bp, Homo sapien
cctgcggaccgcaatctttgggaaa

SEQ ID NO: 3956265 - DNA, 25 bp, Homo sapien
ggctccgggtcagcatcctcgcgct

SEQ ID NO: 3956266 - DNA, 25 bp, Homo sapien
gcatcctcgcgctcaaggcggtcat

SEQ ID NO: 3956267 - DNA, 25 bp, Homo sapien
cgggtcagcatcctcgcgctcaagg

SEQ ID NO: 3956268 - DNA, 25 bp, Homo sapien
ggtcagcatcctcgcgctcaaggcg

SEQ ID NO: 3956269 - DNA, 25 bp, Homo sapien
ggcccatgcggccccgtcacgtgat

SEQ ID NO: 3956270 - DNA, 25 bp, Homo sapien
gcggcccatgcggccccgtcacgtg

SEQ ID NO: 3956271 - DNA, 25 bp, Homo sapien
cggcccatgcggccccgtcacgtga

SEQ ID NO: 3956272 - DNA, 25 bp, Homo sapien
cgtgtttggactcctgcctcggtga

SEQ ID NO: 3956273 - DNA, 25 bp, Homo sapien
cagatggtcactgcaccttcctctt

SEQ ID NO: 3956274 - DNA, 25 bp, Homo sapien
aggtctgtgtgaccgtaggcactgc

SEQ ID NO: 3956275 - DNA, 25 bp, Homo sapien
ctcctcgcctgtaaacagatggtca

SEQ ID NO: 3956276 - DNA, 25 bp, Homo sapien
tggaccgacgctggagcccagacct

SEQ ID NO: 3956277 - DNA, 25 bp, Homo sapien
cagtcactcgggtataaagggcatc

SEQ ID NO: 3956278 - DNA, 25 bp, Homo sapien
ggtttctgcacagtcactcgggtat

SEQ ID NO: 3956279 - DNA, 25 bp, Homo sapien
gaccgacgctggagcccagacctgg

SEQ ID NO: 3956280 - DNA, 25 bp, Homo sapien
tgagcatctcgtattacaggcacct

SEQ ID NO: 3956281 - DNA, 25 bp, Homo sapien
ctgagcatctcgtattacaggcacc

SEQ ID NO: 3956282 - DNA, 25 bp, Homo sapien
cctgagcatctcgtattacaggcac

SEQ ID NO: 3956283 - DNA, 25 bp, Homo sapien
gccatggtcttagttctccccgcag

SEQ ID NO: 3956284 - DNA, 25 bp, Homo sapien
ggtgctcggtgaggcttaaagccat

SEQ ID NO: 3956285 - DNA, 25 bp, Homo sapien
cctgtgggtcatcgctgctggcact

SEQ ID NO: 3956286 - DNA, 25 bp, Homo sapien
agcctgcgggcagaatgcaatctgg

SEQ ID NO: 3956287 - DNA, 25 bp, Homo sapien
acttcaccgagtttgtgtgaggccg

SEQ ID NO: 3956288 - DNA, 25 bp, Homo sapien
agcgcctcatctcctcggtggagga

SEQ ID NO: 3956289 - DNA, 25 bp, Homo sapien
cacacctggctatgaggtgggccag

SEQ ID NO: 3956290 - DNA, 25 bp, Homo sapien
cctgcactggccttggacggtattg

SEQ ID NO: 3956291 - DNA, 25 bp, Homo sapien
tattgactttgtctgcttggtgcgg

SEQ ID NO: 3956292 - DNA, 25 bp, Homo sapien
ttttattgactttgtctgcttggtg

SEQ ID NO: 3956293 - DNA, 25 bp, Homo sapien
ctcttttattgactttgtctgcttg

SEQ ID NO: 3956294 - DNA, 25 bp, Homo sapien
cagtcagacagctcttttattgact

SEQ ID NO: 3956295 - DNA, 25 bp, Homo sapien
gaaaccgtccaatactgctgtgtcc

SEQ ID NO: 3956296 - DNA, 25 bp, Homo sapien
taatactgagcggtgtccactccga

SEQ ID NO: 3956297 - DNA, 25 bp, Homo sapien
gcatctcagaggctagaaaccgtcc

SEQ ID NO: 3956298 - DNA, 25 bp, Homo sapien
ccttgacagcggcagaaagtaatac

SEQ ID NO: 3956299 - DNA, 25 bp, Homo sapien
cagctggtagacgtcctctgtggcc

SEQ ID NO: 3956300 - DNA, 25 bp, Homo sapien
tggcctggttgagtcggtcaaactg

SEQ ID NO: 3956301 - DNA, 25 bp, Homo sapien
ggagggctcaggctcacaccttgtc

SEQ ID NO: 3956302 - DNA, 25 bp, Homo sapien
agcagggcctcgaacacggcttgga

SEQ ID NO: 3956303 - DNA, 25 bp, Homo sapien
ggggcggcacaggggctcagtcagt

SEQ ID NO: 3956304 - DNA, 25 bp, Homo sapien
gggcggcacaggggctcagtcagtc

SEQ ID NO: 3956305 - DNA, 25 bp, Homo sapien
cggcacaggggctcagtcagtccgg

SEQ ID NO: 3956306 - DNA, 25 bp, Homo sapien
gcggcacaggggctcagtcagtccg

SEQ ID NO: 3956307 - DNA, 25 bp, Homo sapien
agagcccagggcgtgtccctctccc

SEQ ID NO: 3956308 - DNA, 25 bp, Homo sapien
ctgggcagagcccagggcgtgtccc

SEQ ID NO: 3956309 - DNA, 25 bp, Homo sapien
gagcccagggcgtgtccctctcccc

SEQ ID NO: 3956310 - DNA, 25 bp, Homo sapien
ggcagagcccagggcgtgtccctct

SEQ ID NO: 3956311 - DNA, 25 bp, Homo sapien
tccacgcaaggcgtggtagcgccag

SEQ ID NO: 3956312 - DNA, 25 bp, Homo sapien
ggccggtacagctctccacgcaagg

SEQ ID NO: 3956313 - DNA, 25 bp, Homo sapien
ccaggactcggcaggacacagggta

SEQ ID NO: 3956314 - DNA, 25 bp, Homo sapien
gtagcgccagcggagaataacagcc

SEQ ID NO: 3956315 - DNA, 25 bp, Homo sapien
gccagctgggcgtaggctaccccga

SEQ ID NO: 3956316 - DNA, 25 bp, Homo sapien
cactggcgcacgaagcgtagctgct

SEQ ID NO: 3956317 - DNA, 25 bp, Homo sapien
ggcagagctcggcataatgtcttgc

SEQ ID NO: 3956318 - DNA, 25 bp, Homo sapien
tgtcttgccaaagacggaccactgg

SEQ ID NO: 3956319 - DNA, 25 bp, Homo sapien
acgaaacgggtccactggcggtcag

SEQ ID NO: 3956320 - DNA, 25 bp, Homo sapien
agctgcgccacctggtcgaagctag

SEQ ID NO: 3956321 - DNA, 25 bp, Homo sapien
ggccgcgcacgaaacgggtccactg

SEQ ID NO: 3956322 - DNA, 25 bp, Homo sapien
ccacctggtcgaagctagtgaagcg

SEQ ID NO: 3956323 - DNA, 25 bp, Homo sapien
acggcgaagtgcacggcgaacagca

SEQ ID NO: 3956324 - DNA, 25 bp, Homo sapien
ctcggccacggcgaagtgcacggcg

SEQ ID NO: 3956325 - DNA, 25 bp, Homo sapien
ttccctgtgccaagtacgggcctcg

SEQ ID NO: 3956326 - DNA, 25 bp, Homo sapien
cccaggctccgagccgcagcacgcg

SEQ ID NO: 3956327 - DNA, 25 bp, Homo sapien
tgtggggggcgcggtcaggagggcg

SEQ ID NO: 3956328 - DNA, 25 bp, Homo sapien
ctgtggggggcgcggtcaggagggc

SEQ ID NO: 3956329 - DNA, 25 bp, Homo sapien
gcgctgcgaggggtgagacgctgcc

SEQ ID NO: 3956330 - DNA, 25 bp, Homo sapien
cgaggggtgagacgctgccggggcg

SEQ ID NO: 3956331 - DNA, 25 bp, Homo sapien
ctgcgaggggtgagacgctgccggg

SEQ ID NO: 3956332 - DNA, 25 bp, Homo sapien
aggggtgagacgctgccggggcggg

SEQ ID NO: 3956333 - DNA, 25 bp, Homo sapien
gagcagaggcagcgagaggcccgcg

SEQ ID NO: 3956334 - DNA, 25 bp, Homo sapien
gtgagcagaggcagcgagaggcccg

SEQ ID NO: 3956335 - DNA, 25 bp, Homo sapien
cgaggtgagcagaggcagcgagagg

SEQ ID NO: 3956336 - DNA, 25 bp, Homo sapien
ggtgagcagaggcagcgagaggccc

SEQ ID NO: 3956337 - DNA, 25 bp, Homo sapien
ggcgcagcgcaaaggggcggacgct

SEQ ID NO: 3956338 - DNA, 25 bp, Homo sapien
gcgcaaaggggcggacgctgagggc

SEQ ID NO: 3956339 - DNA, 25 bp, Homo sapien
ggcggcgcagcgcaaaggggcggac

SEQ ID NO: 3956340 - DNA, 25 bp, Homo sapien
cgcaaaggggcggacgctgagggcg

SEQ ID NO: 3956341 - DNA, 25 bp, Homo sapien
ggcgcagcgtgacggcggcgtgcag

SEQ ID NO: 3956342 - DNA, 25 bp, Homo sapien
agcgtgacggcggcgtgcagcccca

SEQ ID NO: 3956343 - DNA, 25 bp, Homo sapien
gaggcgcagcgtgacggcggcgtgc

SEQ ID NO: 3956344 - DNA, 25 bp, Homo sapien
tcgaggcgcagcgtgacggcggcgt

SEQ ID NO: 3956345 - DNA, 25 bp, Homo sapien
gagctccaggaacacagcgcggctc

SEQ ID NO: 3956346 - DNA, 25 bp, Homo sapien
ctgtagcgcgtgagctccaggaaca

SEQ ID NO: 3956347 - DNA, 25 bp, Homo sapien
gtgagctccaggaacacagcgcggc

SEQ ID NO: 3956348 - DNA, 25 bp, Homo sapien
gtagcgcgtgagctccaggaacaca

SEQ ID NO: 3956349 - DNA, 25 bp, Homo sapien
ggaagcgcagccggtcgcggctctc

SEQ ID NO: 3956350 - DNA, 25 bp, Homo sapien
ctgttgtccagccagttgtgcagct

SEQ ID NO: 3956351 - DNA, 25 bp, Homo sapien
gaagcgcagccggtcgcggctctcc

SEQ ID NO: 3956352 - DNA, 25 bp, Homo sapien
gttgtccagccagttgtgcagctgc

SEQ ID NO: 3956353 - DNA, 25 bp, Homo sapien
cgctgtcatacacggcacaggagcc

SEQ ID NO: 3956354 - DNA, 25 bp, Homo sapien
acgtagcccccgctgtcatacacgg

SEQ ID NO: 3956355 - DNA, 25 bp, Homo sapien
gtagcccccgctgtcatacacggca

SEQ ID NO: 3956356 - DNA, 25 bp, Homo sapien
ccccgctgtcatacacggcacagga

SEQ ID NO: 3956357 - DNA, 25 bp, Homo sapien
cagcagatccggcgctgaataggcc

SEQ ID NO: 3956358 - DNA, 25 bp, Homo sapien
gcagatccggcgctgaataggccca

SEQ ID NO: 3956359 - DNA, 25 bp, Homo sapien
cagatccggcgctgaataggcccac

SEQ ID NO: 3956360 - DNA, 25 bp, Homo sapien
cccagcagatccggcgctgaatagg

SEQ ID NO: 3956361 - DNA, 25 bp, Homo sapien
acgtcgtaatcgctggtgctgaagc

SEQ ID NO: 3956362 - DNA, 25 bp, Homo sapien
tgtgaggactctcccagccaacgtc

SEQ ID NO: 3956363 - DNA, 25 bp, Homo sapien
aggactctcccagccaacgtcgtaa

SEQ ID NO: 3956364 - DNA, 25 bp, Homo sapien
tcccagccaacgtcgtaatcgctgg

SEQ ID NO: 3956365 - DNA, 25 bp, Homo sapien
ctgcggccgagcacgtgtggaccct

SEQ ID NO: 3956366 - DNA, 25 bp, Homo sapien
cggccgagcacgtgtggaccctggg

SEQ ID NO: 3956367 - DNA, 25 bp, Homo sapien
cgagcacgtgtggaccctggggccg

SEQ ID NO: 3956368 - DNA, 25 bp, Homo sapien
gagcacgtgtggaccctggggccgg

SEQ ID NO: 3956369 - DNA, 25 bp, Homo sapien
ggcctcatcaaaacccaacaggagt

SEQ ID NO: 3956370 - DNA, 25 bp, Homo sapien
taccatctctcatatacagagaagg

SEQ ID NO: 3956371 - DNA, 25 bp, Homo sapien
tcgcctgagctctggttcggcgcca

SEQ ID NO: 3956372 - DNA, 25 bp, Homo sapien
gctgctctctcaacaagaggaacga

SEQ ID NO: 3956373 - DNA, 25 bp, Homo sapien
acgtgggccatccatggccagagct

SEQ ID NO: 3956374 - DNA, 25 bp, Homo sapien
ctgggctggactggttcccgtggac

SEQ ID NO: 3956375 - DNA, 25 bp, Homo sapien
ttcccgtggacgtagggcagcagca

SEQ ID NO: 3956376 - DNA, 25 bp, Homo sapien
ggcagcagcacgtgggccatccatg

SEQ ID NO: 3956377 - DNA, 25 bp, Homo sapien
tgtgcactgcaagacacggacctgt

SEQ ID NO: 3956378 - DNA, 25 bp, Homo sapien
acagttgtctgtcatgggcccgtcc

SEQ ID NO: 3956379 - DNA, 25 bp, Homo sapien
tagcagccacaaaggtatctacaca

SEQ ID NO: 3956380 - DNA, 25 bp, Homo sapien
catgtccacatgtcccctagggtct

SEQ ID NO: 3956381 - DNA, 25 bp, Homo sapien
gctttgcagacggtaggcgtgccca

SEQ ID NO: 3956382 - DNA, 25 bp, Homo sapien
atgaggcatccccatagctggccag

SEQ ID NO: 3956383 - DNA, 25 bp, Homo sapien
agctcctgcttgatggcgctttgca

SEQ ID NO: 3956384 - DNA, 25 bp, Homo sapien
taggcgtgcccatggcatgaggcat

SEQ ID NO: 3956385 - DNA, 25 bp, Homo sapien
acaggccactgcagtggtgcttagg

SEQ ID NO: 3956386 - DNA, 25 bp, Homo sapien
gacacacaggccactgcagtggtgc

SEQ ID NO: 3956387 - DNA, 25 bp, Homo sapien
agtgggcattggagctgggccctgg

SEQ ID NO: 3956388 - DNA, 25 bp, Homo sapien
ccaggcaggagtgggcattggagct

SEQ ID NO: 3956389 - DNA, 25 bp, Homo sapien
caggagtgtcctgcgtgcatgggtg

SEQ ID NO: 3956390 - DNA, 25 bp, Homo sapien
acccctaagggccttctgaggtgag

SEQ ID NO: 3956391 - DNA, 25 bp, Homo sapien
gggcacaggccgcacccaggctcac

SEQ ID NO: 3956392 - DNA, 25 bp, Homo sapien
gaggtgggagacaagagacggaggt

SEQ ID NO: 3956393 - DNA, 25 bp, Homo sapien
catgtagcctcttgaccttgcgggc

SEQ ID NO: 3956394 - DNA, 25 bp, Homo sapien
gccgggctctctaccagggtgtcat

SEQ ID NO: 3956395 - DNA, 25 bp, Homo sapien
cagccgcttggccaccagtgagaag

SEQ ID NO: 3956396 - DNA, 25 bp, Homo sapien
tgtcatcttcatccgggtgcagccg

SEQ ID NO: 3956397 - DNA, 25 bp, Homo sapien
cccagccgaggaatgaggccaggaa

SEQ ID NO: 3956398 - DNA, 25 bp, Homo sapien
caggaagctggcgctgctggacagg

SEQ ID NO: 3956399 - DNA, 25 bp, Homo sapien
ctcccagccgaggaatgaggccagg

SEQ ID NO: 3956400 - DNA, 25 bp, Homo sapien
ctgctggacaggagccacgcaacac

SEQ ID NO: 3956401 - DNA, 25 bp, Homo sapien
cgcttccgcagaccctccaccagtc

SEQ ID NO: 3956402 - DNA, 25 bp, Homo sapien
tcgctgcctggggctgttcccagtt

SEQ ID NO: 3956403 - DNA, 25 bp, Homo sapien
gcagcgccagcgtctctgtcttctc

SEQ ID NO: 3956404 - DNA, 25 bp, Homo sapien
gctgttcccagttcaggcctgggct

SEQ ID NO: 3956405 - DNA, 25 bp, Homo sapien
tctgcagcgccagcgtctctgtctt

SEQ ID NO: 3956406 - DNA, 25 bp, Homo sapien
aaaaaatgacctagcctcaacttgg

SEQ ID NO: 3956407 - DNA, 25 bp, Homo sapien
tcgtcagcccatcaccgaaagaacg

SEQ ID NO: 3956408 - DNA, 25 bp, Homo sapien
tcggaggataaaagacactcttggc

SEQ ID NO: 3956409 - DNA, 25 bp, Homo sapien
gagtcccgggctctcaggacgctct

SEQ ID NO: 3956410 - DNA, 25 bp, Homo sapien
ccctggggatcccatgaggctcttt

SEQ ID NO: 3956411 - DNA, 25 bp, Homo sapien
caggagcctttctgctcctacaaag

SEQ ID NO: 3956412 - DNA, 25 bp, Homo sapien
tgctccctccctagagggaaggttc

SEQ ID NO: 3956413 - DNA, 25 bp, Homo sapien
ttctgctcctacaaagccccatgag

SEQ ID NO: 3956414 - DNA, 25 bp, Homo sapien
caggtccgtttccatgtgggtgtct

SEQ ID NO: 3956415 - DNA, 25 bp, Homo sapien
ggtccgtttccatgtgggtgtcttg

SEQ ID NO: 3956416 - DNA, 25 bp, Homo sapien
agcaggtccgtttccatgtgggtgt

SEQ ID NO: 3956417 - DNA, 25 bp, Homo sapien
ccgtttccatgtgggtgtcttgggt

SEQ ID NO: 3956418 - DNA, 25 bp, Homo sapien
cctcggcaaggacctgctggatcag

SEQ ID NO: 3956419 - DNA, 25 bp, Homo sapien
caaggacctgctggatcaggtcttc

SEQ ID NO: 3956420 - DNA, 25 bp, Homo sapien
cccctcggcaaggacctgctggatc

SEQ ID NO: 3956421 - DNA, 25 bp, Homo sapien
aggacctgctggatcaggtcttcat

SEQ ID NO: 3956422 - DNA, 25 bp, Homo sapien
cagattgctacccacaatggacggg

SEQ ID NO: 3956423 - DNA, 25 bp, Homo sapien
tgccgcagattgctacccacaatgg

SEQ ID NO: 3956424 - DNA, 25 bp, Homo sapien
cgcagattgctacccacaatggacg

SEQ ID NO: 3956425 - DNA, 25 bp, Homo sapien
gattgctacccacaatggacgggtc

SEQ ID NO: 3956426 - DNA, 25 bp, Homo sapien
cactcttcatctgtccaacaaaggc

SEQ ID NO: 3956427 - DNA, 25 bp, Homo sapien
gaaacaagtcactcttcatctgtcc

SEQ ID NO: 3956428 - DNA, 25 bp, Homo sapien
caagtcactcttcatctgtccaaca

SEQ ID NO: 3956429 - DNA, 25 bp, Homo sapien
catccagaaacaagtcactcttcat

SEQ ID NO: 3956430 - DNA, 25 bp, Homo sapien
aggtgcacagtgtcttgagtccaag

SEQ ID NO: 3956431 - DNA, 25 bp, Homo sapien
ctgagaggtgcacagtgtcttgagt

SEQ ID NO: 3956432 - DNA, 25 bp, Homo sapien
gaggtgcacagtgtcttgagtccaa

SEQ ID NO: 3956433 - DNA, 25 bp, Homo sapien
gagaggtgcacagtgtcttgagtcc

SEQ ID NO: 3956434 - DNA, 25 bp, Homo sapien
ccagcccaggacccccagtagagtc

SEQ ID NO: 3956435 - DNA, 25 bp, Homo sapien
ccaggacccccagtagagtcctcac

SEQ ID NO: 3956436 - DNA, 25 bp, Homo sapien
ctgcgccaaggcggcaggaccccca

SEQ ID NO: 3956437 - DNA, 25 bp, Homo sapien
agcccaggacccccagtagagtcct

SEQ ID NO: 3956438 - DNA, 25 bp, Homo sapien
tgtccagcacggacgagtccaggca

SEQ ID NO: 3956439 - DNA, 25 bp, Homo sapien
ggcagctgtcgatgtccagcacctg

SEQ ID NO: 3956440 - DNA, 25 bp, Homo sapien
cagcgtggaggcctgagaacgtgag

SEQ ID NO: 3956441 - DNA, 25 bp, Homo sapien
aggagctgtccagcacggacgagtc

SEQ ID NO: 3956442 - DNA, 25 bp, Homo sapien
acgagggcagtggtcagcgggcggc

SEQ ID NO: 3956443 - DNA, 25 bp, Homo sapien
gacgagggcagtggtcagcgggcgg

SEQ ID NO: 3956444 - DNA, 25 bp, Homo sapien
gcaggacgagggcagtggtcagcgg

SEQ ID NO: 3956445 - DNA, 25 bp, Homo sapien
aggacgagggcagtggtcagcgggc

SEQ ID NO: 3956446 - DNA, 25 bp, Homo sapien
tagtttgcatgtaacctcttgagga

SEQ ID NO: 3956447 - DNA, 25 bp, Homo sapien
taacttaaatacgagcagccacatg

SEQ ID NO: 3956448 - DNA, 25 bp, Homo sapien
aattctatcgtgaaggctctgagcc

SEQ ID NO: 3956449 - DNA, 25 bp, Homo sapien
tcttgaggaccccacgtgtgcattc

SEQ ID NO: 3956450 - DNA, 25 bp, Homo sapien
tggccaggtagacgggatagacaac

SEQ ID NO: 3956451 - DNA, 25 bp, Homo sapien
tggacaccaggccaacagcgactgt

SEQ ID NO: 3956452 - DNA, 25 bp, Homo sapien
gggatagacaaccacgctggacacc

SEQ ID NO: 3956453 - DNA, 25 bp, Homo sapien
cagcgactgtgtcgacgctcagcgg

SEQ ID NO: 3956454 - DNA, 25 bp, Homo sapien
ctgtgtggaggagaggaggccacac

SEQ ID NO: 3956455 - DNA, 25 bp, Homo sapien
tggaggagaggaggccacacaggtg

SEQ ID NO: 3956456 - DNA, 25 bp, Homo sapien
gtggaggagaggaggccacacaggt

SEQ ID NO: 3956457 - DNA, 25 bp, Homo sapien
aggagaggaggccacacaggtgagg

SEQ ID NO: 3956458 - DNA, 25 bp, Homo sapien
cagatgaggagaacgcagcaggtgg

SEQ ID NO: 3956459 - DNA, 25 bp, Homo sapien
aacagccccgtaccacacggcgttg

SEQ ID NO: 3956460 - DNA, 25 bp, Homo sapien
accacacggcgttggcgcccaggaa

SEQ ID NO: 3956461 - DNA, 25 bp, Homo sapien
gcggccggtcccatatggagagcca

SEQ ID NO: 3956462 - DNA, 25 bp, Homo sapien
aagccagtcattgaccaggaagaag

SEQ ID NO: 3956463 - DNA, 25 bp, Homo sapien
tctccaccgaaagccagtcattgac

SEQ ID NO: 3956464 - DNA, 25 bp, Homo sapien
caccgaaagccagtcattgaccagg

SEQ ID NO: 3956465 - DNA, 25 bp, Homo sapien
aaagccagtcattgaccaggaagaa

SEQ ID NO: 3956466 - DNA, 25 bp, Homo sapien
gctgtccaccccatacagcatgatg

SEQ ID NO: 3956467 - DNA, 25 bp, Homo sapien
catgatgcccacgtgggccgtggta

SEQ ID NO: 3956468 - DNA, 25 bp, Homo sapien
tgttgcggtggaaggctctgtcgcc

SEQ ID NO: 3956469 - DNA, 25 bp, Homo sapien
tgtcgtgccacactcggatcttcca

SEQ ID NO: 3956470 - DNA, 25 bp, Homo sapien
tgacatggtgaaaaattaactgggt

SEQ ID NO: 3956471 - DNA, 25 bp, Homo sapien
gtggtggtgtgcacctgtactccca

SEQ ID NO: 3956472 - DNA, 25 bp, Homo sapien
gctactcaggagaatcgcttaaggg

SEQ ID NO: 3956473 - DNA, 25 bp, Homo sapien
actcaggagaatcgcttaaggggaa

SEQ ID NO: 3956474 - DNA, 25 bp, Homo sapien
gtgagtgctcacgaggtcattccca

SEQ ID NO: 3956475 - DNA, 25 bp, Homo sapien
aggagctgtcctagtcctcagggac

SEQ ID NO: 3956476 - DNA, 25 bp, Homo sapien
acaaaaagggaatgccagaagggca

SEQ ID NO: 3956477 - DNA, 25 bp, Homo sapien
tactgtgcagaacgtgggctgccca

SEQ ID NO: 3956478 - DNA, 25 bp, Homo sapien
gcacacagcacatgtcagcatgacg

SEQ ID NO: 3956479 - DNA, 25 bp, Homo sapien
tgtcttgacgaggatctcgtacttg

SEQ ID NO: 3956480 - DNA, 25 bp, Homo sapien
tgacgatgtagtttacatccgctgt

SEQ ID NO: 3956481 - DNA, 25 bp, Homo sapien
acgaggatctcgtacttgaagcggc

SEQ ID NO: 3956482 - DNA, 25 bp, Homo sapien
ccaggccctcctcgactctgcagag

SEQ ID NO: 3956483 - DNA, 25 bp, Homo sapien
caggccctcctcgactctgcagagg

SEQ ID NO: 3956484 - DNA, 25 bp, Homo sapien
ggccctcctcgactctgcagaggct

SEQ ID NO: 3956485 - DNA, 25 bp, Homo sapien
aggccctcctcgactctgcagaggc

SEQ ID NO: 3956486 - DNA, 25 bp, Homo sapien
aagtactggcacagggacgtgtaca

SEQ ID NO: 3956487 - DNA, 25 bp, Homo sapien
tgaggtggcgggtgaggcagacggc

SEQ ID NO: 3956488 - DNA, 25 bp, Homo sapien
gtcctcctcgctgaagtactggcac

SEQ ID NO: 3956489 - DNA, 25 bp, Homo sapien
ggcagacggcctggcggggcgaggt

SEQ ID NO: 3956490 - DNA, 25 bp, Homo sapien
tctgggcggatcctcctgctagccg

SEQ ID NO: 3956491 - DNA, 25 bp, Homo sapien
ctgggcggatcctcctgctagccga

SEQ ID NO: 3956492 - DNA, 25 bp, Homo sapien
gaaagggattggagtccaccagaaa

SEQ ID NO: 3956493 - DNA, 25 bp, Homo sapien
gacggtgtagttgctgatatagcca

SEQ ID NO: 3956494 - DNA, 25 bp, Homo sapien
tgagctgcaccacgtcactgaggtt

SEQ ID NO: 3956495 - DNA, 25 bp, Homo sapien
cagcccagtccgagttgttgggcac

SEQ ID NO: 3956496 - DNA, 25 bp, Homo sapien
tgttgaggatgctgtctccgatggc

SEQ ID NO: 3956497 - DNA, 25 bp, Homo sapien
tcaggcacgagcggcatacgagctc

SEQ ID NO: 3956498 - DNA, 25 bp, Homo sapien
ctccgatggcggtgggcgtcacggt

SEQ ID NO: 3956499 - DNA, 25 bp, Homo sapien
tcacggtgcccgcggtggtctctgc

SEQ ID NO: 3956500 - DNA, 25 bp, Homo sapien
tacaccctgggtcccccgagaggca

SEQ ID NO: 3956501 - DNA, 25 bp, Homo sapien
catctgggcccctctttacaccctg

SEQ ID NO: 3956502 - DNA, 25 bp, Homo sapien
ttagtccctccccacatctgggccc

SEQ ID NO: 3956503 - DNA, 25 bp, Homo sapien
ccacatctgggcccctctttacacc

SEQ ID NO: 3956504 - DNA, 25 bp, Homo sapien
tcagagaccgaggaacgccatggca

SEQ ID NO: 3956505 - DNA, 25 bp, Homo sapien
cagagaccgaggaacgccatggcag

SEQ ID NO: 3956506 - DNA, 25 bp, Homo sapien
ggaggctcagctcctcggccaagct

SEQ ID NO: 3956507 - DNA, 25 bp, Homo sapien
agctcctcggccaagctgcccgtct

SEQ ID NO: 3956508 - DNA, 25 bp, Homo sapien
cagcgatctgctggatgtcatccac

SEQ ID NO: 3956509 - DNA, 25 bp, Homo sapien
tccgtgatgttcttgcgtatctggg

SEQ ID NO: 3956510 - DNA, 25 bp, Homo sapien
gatgttcttgcgtatctgggctcgg

SEQ ID NO: 3956511 - DNA, 25 bp, Homo sapien
agcgatctgctggatgtcatccaca

SEQ ID NO: 3956512 - DNA, 25 bp, Homo sapien
ctcgtgcttgggctctgccgccacg

SEQ ID NO: 3956513 - DNA, 25 bp, Homo sapien
tcgtgcttgggctctgccgccacgt

SEQ ID NO: 3956514 - DNA, 25 bp, Homo sapien
tcccggggtgcagttacgtgctaga

SEQ ID NO: 3956515 - DNA, 25 bp, Homo sapien
gatgcccacgactcccggggtgcag

SEQ ID NO: 3956516 - DNA, 25 bp, Homo sapien
acgactcccggggtgcagttacgtg

SEQ ID NO: 3956517 - DNA, 25 bp, Homo sapien
agcagatgcccacgactcccggggt

SEQ ID NO: 3956518 - DNA, 25 bp, Homo sapien
agtactcgatgacgtgctggggatc

SEQ ID NO: 3956519 - DNA, 25 bp, Homo sapien
acactagcggtgagcccgtgcagcc

SEQ ID NO: 3956520 - DNA, 25 bp, Homo sapien
cggtgagcccgtgcagccagactgt

SEQ ID NO: 3956521 - DNA, 25 bp, Homo sapien
gggagcacactagcggtgagcccgt

SEQ ID NO: 3956522 - DNA, 25 bp, Homo sapien
gcccacctcgaagtgtggcctgaaa

SEQ ID NO: 3956523 - DNA, 25 bp, Homo sapien
ctgttgagggcgaccacagcggctc

SEQ ID NO: 3956524 - DNA, 25 bp, Homo sapien
gagaggctgcccttgtagacacaga

SEQ ID NO: 3956525 - DNA, 25 bp, Homo sapien
ttgagggcgaccacagcggctccca

SEQ ID NO: 3956526 - DNA, 25 bp, Homo sapien
ttgctgaacgtacgtgcagcccacc

SEQ ID NO: 3956527 - DNA, 25 bp, Homo sapien
gtgaaggtgtatccctcgccgtccc

SEQ ID NO: 3956528 - DNA, 25 bp, Homo sapien
gtcttgttgctgaacgtacgtgcag

SEQ ID NO: 3956529 - DNA, 25 bp, Homo sapien
tggatgtggtggtctcatccagcac

SEQ ID NO: 3956530 - DNA, 25 bp, Homo sapien
gagccgctgctgcaattgaggcagc

SEQ ID NO: 3956531 - DNA, 25 bp, Homo sapien
tgcggctcacttcgtacacggcctg

SEQ ID NO: 3956532 - DNA, 25 bp, Homo sapien
tcacttcgtacacggcctgtgcctt

SEQ ID NO: 3956533 - DNA, 25 bp, Homo sapien
cgtacacggcctgtgccttgcagga

SEQ ID NO: 3956534 - DNA, 25 bp, Homo sapien
ttacctccaacacaggtctatttgg

SEQ ID NO: 3956535 - DNA, 25 bp, Homo sapien
gttacctccaacacaggtctatttg

SEQ ID NO: 3956536 - DNA, 25 bp, Homo sapien
tggggttacctccaacacaggtcta

SEQ ID NO: 3956537 - DNA, 25 bp, Homo sapien
tgggaaggggctcttcctcactgtt

SEQ ID NO: 3956538 - DNA, 25 bp, Homo sapien
actgtggcaggtttggaaggaagca

SEQ ID NO: 3956539 - DNA, 25 bp, Homo sapien
cactagagcatatgtggcttgaaga

SEQ ID NO: 3956540 - DNA, 25 bp, Homo sapien
gagcatatgtggcttgaagactgta

SEQ ID NO: 3956541 - DNA, 25 bp, Homo sapien
gggcccaaagttcagcgcacacccg

SEQ ID NO: 3956542 - DNA, 25 bp, Homo sapien
gcccaaagttcagcgcacacccgcc

SEQ ID NO: 3956543 - DNA, 25 bp, Homo sapien
aagttcagcgcacacccgccagcct

SEQ ID NO: 3956544 - DNA, 25 bp, Homo sapien
caaagttcagcgcacacccgccagc

SEQ ID NO: 3956545 - DNA, 25 bp, Homo sapien
gcctccaagtagttgcgctgtgatc

SEQ ID NO: 3956546 - DNA, 25 bp, Homo sapien
tcaacgtgggcctccaagtagttgc

SEQ ID NO: 3956547 - DNA, 25 bp, Homo sapien
cgcgcaggtcaacgtgggcctccaa

SEQ ID NO: 3956548 - DNA, 25 bp, Homo sapien
tgggcctccaagtagttgcgctgtg

SEQ ID NO: 3956549 - DNA, 25 bp, Homo sapien
accagcgagtcgccctggaccttct

SEQ ID NO: 3956550 - DNA, 25 bp, Homo sapien
atgaccagcgagtcgccctggacct

SEQ ID NO: 3956551 - DNA, 25 bp, Homo sapien
tgaccagcgagtcgccctggacctt

SEQ ID NO: 3956552 - DNA, 25 bp, Homo sapien
ggatgaccagcgagtcgccctggac

SEQ ID NO: 3956553 - DNA, 25 bp, Homo sapien
catggtgacatgagggccacgcttg

SEQ ID NO: 3956554 - DNA, 25 bp, Homo sapien
tgaggttgtacgtggctgagaccca

SEQ ID NO: 3956555 - DNA, 25 bp, Homo sapien
gacccagctgactgcgttggaggca

SEQ ID NO: 3956556 - DNA, 25 bp, Homo sapien
agcatccgggaagaccatggtgaca

SEQ ID NO: 3956557 - DNA, 25 bp, Homo sapien
ggagacgttggtgccatccctaacc

SEQ ID NO: 3956558 - DNA, 25 bp, Homo sapien
tgtaagagatggtaggacccccagg

SEQ ID NO: 3956559 - DNA, 25 bp, Homo sapien
ccaccgtgcggcttgcattgacgac

SEQ ID NO: 3956560 - DNA, 25 bp, Homo sapien
tccagctgtaggagacgttggtgcc

SEQ ID NO: 3956561 - DNA, 25 bp, Homo sapien
gctgttgtaagcgtgggtgacctcc

SEQ ID NO: 3956562 - DNA, 25 bp, Homo sapien
gtagatgaacgtcacctcagggccc

SEQ ID NO: 3956563 - DNA, 25 bp, Homo sapien
gaagttgtgtgtcaccgtcgggcac

SEQ ID NO: 3956564 - DNA, 25 bp, Homo sapien
tgactgtcacaagataggagcctgg

SEQ ID NO: 3956565 - DNA, 25 bp, Homo sapien
tcaggacaggggagccgtccccgaa

SEQ ID NO: 3956566 - DNA, 25 bp, Homo sapien
aagaacacccccaggcgagggcagc

SEQ ID NO: 3956567 - DNA, 25 bp, Homo sapien
tgggtcaggacaggggagccgtccc

SEQ ID NO: 3956568 - DNA, 25 bp, Homo sapien
taaagaacacccccaggcgagggca

SEQ ID NO: 3956569 - DNA, 25 bp, Homo sapien
ttctcgaaggcattagatgccagca

SEQ ID NO: 3956570 - DNA, 25 bp, Homo sapien
ggttctcgaaggcattagatgccag

SEQ ID NO: 3956571 - DNA, 25 bp, Homo sapien
gttctcgaaggcattagatgccagc

SEQ ID NO: 3956572 - DNA, 25 bp, Homo sapien
gacattgtgctccaccagcacctgg

SEQ ID NO: 3956573 - DNA, 25 bp, Homo sapien
tgacattgtgctccaccagcacctg

SEQ ID NO: 3956574 - DNA, 25 bp, Homo sapien
acattgtgctccaccagcacctggg

SEQ ID NO: 3956575 - DNA, 25 bp, Homo sapien
ttgtagttcacggtgacgttgctca

SEQ ID NO: 3956576 - DNA, 25 bp, Homo sapien
cacggtgacgttgctcacgtggttg

SEQ ID NO: 3956577 - DNA, 25 bp, Homo sapien
ttgctcacgtggttggaggccgtca

SEQ ID NO: 3956578 - DNA, 25 bp, Homo sapien
tagttcacggtgacgttgctcacgt

SEQ ID NO: 3956579 - DNA, 25 bp, Homo sapien
gagagcttgaagaccgccgcgctct

SEQ ID NO: 3956580 - DNA, 25 bp, Homo sapien
aagaccatgtccgagccggcctcca

SEQ ID NO: 3956581 - DNA, 25 bp, Homo sapien
tctggaaggtcagggactgcttgtc

SEQ ID NO: 3956582 - DNA, 25 bp, Homo sapien
attgaagaccacgttctggaaggtc

SEQ ID NO: 3956583 - DNA, 25 bp, Homo sapien
gactgcttgtcgttgatggtccacc

SEQ ID NO: 3956584 - DNA, 25 bp, Homo sapien
tgtcagagccgtgactttccaggaa

SEQ ID NO: 3956585 - DNA, 25 bp, Homo sapien
ggctggtggtggagcctcggccata

SEQ ID NO: 3956586 - DNA, 25 bp, Homo sapien
ggtggtggagcctcggccatactca

SEQ ID NO: 3956587 - DNA, 25 bp, Homo sapien
ctggtggtggagcctcggccatact

SEQ ID NO: 3956588 - DNA, 25 bp, Homo sapien
tggtggtggagcctcggccatactc

SEQ ID NO: 3956589 - DNA, 25 bp, Homo sapien
ctgggcgtggcgcggaggccacaga

SEQ ID NO: 3956590 - DNA, 25 bp, Homo sapien
gcgtggcgcggaggccacagatggg

SEQ ID NO: 3956591 - DNA, 25 bp, Homo sapien
gttggcccggctggcgctgttttcc

SEQ ID NO: 3956592 - DNA, 25 bp, Homo sapien
gggctgggcgtggcgcggaggccac

SEQ ID NO: 3956593 - DNA, 25 bp, Homo sapien
gcgtcgtgctgcaagccaacgaggt

SEQ ID NO: 3956594 - DNA, 25 bp, Homo sapien
tgttccgtggctgcaagcagccgca

SEQ ID NO: 3956595 - DNA, 25 bp, Homo sapien
caacgaggtcaccagggagcatgag

SEQ ID NO: 3956596 - DNA, 25 bp, Homo sapien
cagtgctaccactgagaacagggta

SEQ ID NO: 3956597 - DNA, 25 bp, Homo sapien
gcacgacggatgagggtggacacgc

SEQ ID NO: 3956598 - DNA, 25 bp, Homo sapien
ggacacgcagggctccccgcttcgt

SEQ ID NO: 3956599 - DNA, 25 bp, Homo sapien
agggctccccgcttcgtcagccaca

SEQ ID NO: 3956600 - DNA, 25 bp, Homo sapien
cccacagtgctcgtgacaaggacag

SEQ ID NO: 3956601 - DNA, 25 bp, Homo sapien
ggaactctctccatagcgcataggg

SEQ ID NO: 3956602 - DNA, 25 bp, Homo sapien
gaagaggaactctctccatagcgca

SEQ ID NO: 3956603 - DNA, 25 bp, Homo sapien
gagaagaggaactctctccatagcg

SEQ ID NO: 3956604 - DNA, 25 bp, Homo sapien
gaggaactctctccatagcgcatag

SEQ ID NO: 3956605 - DNA, 25 bp, Homo sapien
cagcggcaagcagatgttggctcca

SEQ ID NO: 3956606 - DNA, 25 bp, Homo sapien
gtgcagccattggcgcaggcctggg

SEQ ID NO: 3956607 - DNA, 25 bp, Homo sapien
aggcgtccagcggcaagcagatgtt

SEQ ID NO: 3956608 - DNA, 25 bp, Homo sapien
caagcagatgttggctccagggcac

SEQ ID NO: 3956609 - DNA, 25 bp, Homo sapien
aggctcgctgccgttctccggggtc

SEQ ID NO: 3956610 - DNA, 25 bp, Homo sapien
ctgttgtccggggacctgctctcag

SEQ ID NO: 3956611 - DNA, 25 bp, Homo sapien
ttgtccggggacctgctctcaggct

SEQ ID NO: 3956612 - DNA, 25 bp, Homo sapien
tctcaggctcgctgccgttctccgg

SEQ ID NO: 3956613 - DNA, 25 bp, Homo sapien
aaggcttcacggctcagacgcaggc

SEQ ID NO: 3956614 - DNA, 25 bp, Homo sapien
agacgcaggcccgggaataccatga

SEQ ID NO: 3956615 - DNA, 25 bp, Homo sapien
tgggtcccaaattcggccgtggtga

SEQ ID NO: 3956616 - DNA, 25 bp, Homo sapien
ggcgggccgccggagctcctgggtc

SEQ ID NO: 3956617 - DNA, 25 bp, Homo sapien
gggccgcctcagctccacagacccc

SEQ ID NO: 3956618 - DNA, 25 bp, Homo sapien
gggggccgcctcagctccacagacc

SEQ ID NO: 3956619 - DNA, 25 bp, Homo sapien
gccgcctcagctccacagaccccat

SEQ ID NO: 3956620 - DNA, 25 bp, Homo sapien
cctcagctccacagaccccatccca

SEQ ID NO: 3956621 - DNA, 25 bp, Homo sapien
tcccacgaggaggttctcggcatcc

SEQ ID NO: 3956622 - DNA, 25 bp, Homo sapien
gctcccacgaggaggttctcggcat

SEQ ID NO: 3956623 - DNA, 25 bp, Homo sapien
gggcgctcccacgaggaggttctcg

SEQ ID NO: 3956624 - DNA, 25 bp, Homo sapien
cacgaggaggttctcggcatcctgc

SEQ ID NO: 3956625 - DNA, 25 bp, Homo sapien
tcaggcccctgcctggccccccgca

SEQ ID NO: 3956626 - DNA, 25 bp, Homo sapien
ggcccctgcctggccccccgcacac

SEQ ID NO: 3956627 - DNA, 25 bp, Homo sapien
cacagccagcgtctcaggcccctgc

SEQ ID NO: 3956628 - DNA, 25 bp, Homo sapien
ctcaggcccctgcctggccccccgc

SEQ ID NO: 3956629 - DNA, 25 bp, Homo sapien
acgtagctgtgcggcgctgagcaca

SEQ ID NO: 3956630 - DNA, 25 bp, Homo sapien
gcagctcgcagacgtagctgtgcgg

SEQ ID NO: 3956631 - DNA, 25 bp, Homo sapien
ccggtgggcccgagccggacgcagt

SEQ ID NO: 3956632 - DNA, 25 bp, Homo sapien
cggtgggcccgagccggacgcagtg

SEQ ID NO: 3956633 - DNA, 25 bp, Homo sapien
tccaccaccaggcggtagcagtgcc

SEQ ID NO: 3956634 - DNA, 25 bp, Homo sapien
tctccgtgtccgaggggcagagcgg

SEQ ID NO: 3956635 - DNA, 25 bp, Homo sapien
gcgggactgtccaccattgccaggg

SEQ ID NO: 3956636 - DNA, 25 bp, Homo sapien
aggaagcgctgcacggcgggactgt

SEQ ID NO: 3956637 - DNA, 25 bp, Homo sapien
tcgcccagggccacgatgctgtagg

SEQ ID NO: 3956638 - DNA, 25 bp, Homo sapien
tgaaccaccgcggttctggatgctg

SEQ ID NO: 3956639 - DNA, 25 bp, Homo sapien
tgctgaggtcgaggctctcgtcact

SEQ ID NO: 3956640 - DNA, 25 bp, Homo sapien
caccgcggttctggatgctgaggtc

SEQ ID NO: 3956641 - DNA, 25 bp, Homo sapien
gtgccgcttccacctgcacgtctgt

SEQ ID NO: 3956642 - DNA, 25 bp, Homo sapien
ctgcaccgaggacgggcacacgagc

SEQ ID NO: 3956643 - DNA, 25 bp, Homo sapien
cccaggcagcacatagcgatgcgag

SEQ ID NO: 3956644 - DNA, 25 bp, Homo sapien
gccagcacggccgtcacgtgatagc

SEQ ID NO: 3956645 - DNA, 25 bp, Homo sapien
cagggaagacgtgctggaggagggt

SEQ ID NO: 3956646 - DNA, 25 bp, Homo sapien
agggaagacgtgctggaggagggtg

SEQ ID NO: 3956647 - DNA, 25 bp, Homo sapien
gaggcagggaagacgtgctggagga

SEQ ID NO: 3956648 - DNA, 25 bp, Homo sapien
ggggaggcagggaagacgtgctgga

SEQ ID NO: 3956649 - DNA, 25 bp, Homo sapien
gacaggcaggcaaaggaggcactgg

SEQ ID NO: 3956650 - DNA, 25 bp, Homo sapien
caggcaggcaaaggaggcactggag

SEQ ID NO: 3956651 - DNA, 25 bp, Homo sapien
ggccggagcagagggacaggcaggc

SEQ ID NO: 3956652 - DNA, 25 bp, Homo sapien
aggaggtggcggggggccggagcag

SEQ ID NO: 3956653 - DNA, 25 bp, Homo sapien
agcagaaggcgctgcaggcctctgg

SEQ ID NO: 3956654 - DNA, 25 bp, Homo sapien
gtcagggaggcaggcgacatactcc

SEQ ID NO: 3956655 - DNA, 25 bp, Homo sapien
cttcgtgggcagctgaaaaggacac

SEQ ID NO: 3956656 - DNA, 25 bp, Homo sapien
acactgctgccacggtgcctgagct

SEQ ID NO: 3956657 - DNA, 25 bp, Homo sapien
gcccagcacacgtggctgcctcggg

SEQ ID NO: 3956658 - DNA, 25 bp, Homo sapien
actgtccagcaaggggatgccaagc

SEQ ID NO: 3956659 - DNA, 25 bp, Homo sapien
agcacacgtggctgcctcgggctgc

SEQ ID NO: 3956660 - DNA, 25 bp, Homo sapien
ggggatgccaagcagaggctggcca

SEQ ID NO: 3956661 - DNA, 25 bp, Homo sapien
gctcctccgcccatcgcggcagcca

SEQ ID NO: 3956662 - DNA, 25 bp, Homo sapien
tcctccgcccatcgcggcagccacg

SEQ ID NO: 3956663 - DNA, 25 bp, Homo sapien
cgcccatcgcggcagccacgccagg

SEQ ID NO: 3956664 - DNA, 25 bp, Homo sapien
atcgcggcagccacgccaggccaca

SEQ ID NO: 3956665 - DNA, 25 bp, Homo sapien
tattccttcttctaacgtagaaatc

SEQ ID NO: 3956666 - DNA, 25 bp, Homo sapien
tccttcttctaacgtagaaatcttg

SEQ ID NO: 3956667 - DNA, 25 bp, Homo sapien
aacgtagaaatcttgttgttgctta

SEQ ID NO: 3956668 - DNA, 25 bp, Homo sapien
tcttctaacgtagaaatcttgttgt

SEQ ID NO: 3956669 - DNA, 25 bp, Homo sapien
agctctgccagcgccgagaggttcg

SEQ ID NO: 3956670 - DNA, 25 bp, Homo sapien
ggttcgccaggagcccaacgtccag

SEQ ID NO: 3956671 - DNA, 25 bp, Homo sapien
ctgccagcgccgagaggttcgccag

SEQ ID NO: 3956672 - DNA, 25 bp, Homo sapien
aggttcgccaggagcccaacgtcca

SEQ ID NO: 3956673 - DNA, 25 bp, Homo sapien
ctgaggagtgagtggccgtgggtca

SEQ ID NO: 3956674 - DNA, 25 bp, Homo sapien
gagtggccgtgggtcagggccagag

SEQ ID NO: 3956675 - DNA, 25 bp, Homo sapien
tggccgtgggtcagggccagagccc

SEQ ID NO: 3956676 - DNA, 25 bp, Homo sapien
tgaggagtgagtggccgtgggtcag

SEQ ID NO: 3956677 - DNA, 25 bp, Homo sapien
tgggcccatcccacacattgccagc

SEQ ID NO: 3956678 - DNA, 25 bp, Homo sapien
ccctgggcccatcccacacattgcc

SEQ ID NO: 3956679 - DNA, 25 bp, Homo sapien
ggcccatcccacacattgccagcat

SEQ ID NO: 3956680 - DNA, 25 bp, Homo sapien
ctgggcccatcccacacattgccag

SEQ ID NO: 3956681 - DNA, 25 bp, Homo sapien
tctgcggatggagggcacggttggg

SEQ ID NO: 3956682 - DNA, 25 bp, Homo sapien
tctcgttccatctgcggatggaggg

SEQ ID NO: 3956683 - DNA, 25 bp, Homo sapien
ggctgtgggacactcagagagccta

SEQ ID NO: 3956684 - DNA, 25 bp, Homo sapien
gctgtgggacactcagagagcctat

SEQ ID NO: 3956685 - DNA, 25 bp, Homo sapien
ctgcagaggccacggtgaacacagg

SEQ ID NO: 3956686 - DNA, 25 bp, Homo sapien
aggccacggtgaacacaggcaggcc

SEQ ID NO: 3956687 - DNA, 25 bp, Homo sapien
tgctgcagaggccacggtgaacaca

SEQ ID NO: 3956688 - DNA, 25 bp, Homo sapien
cagaggccacggtgaacacaggcag

SEQ ID NO: 3956689 - DNA, 25 bp, Homo sapien
gtactttttcacgtctccatctgct

SEQ ID NO: 3956690 - DNA, 25 bp, Homo sapien
tcgcttgctcccgtactttttcacg

SEQ ID NO: 3956691 - DNA, 25 bp, Homo sapien
tccatctgcttttgccatcgccgtt

SEQ ID NO: 3956692 - DNA, 25 bp, Homo sapien
ttgctcccgtactttttcacgtctc

SEQ ID NO: 3956693 - DNA, 25 bp, Homo sapien
ggggaacgccaaggcctagccaggc

SEQ ID NO: 3956694 - DNA, 25 bp, Homo sapien
ctgggggaacgccaaggcctagcca

SEQ ID NO: 3956695 - DNA, 25 bp, Homo sapien
gaacgccaaggcctagccaggcagc

SEQ ID NO: 3956696 - DNA, 25 bp, Homo sapien
ggaacgccaaggcctagccaggcag

SEQ ID NO: 3956697 - DNA, 25 bp, Homo sapien
ttctcacacgctgttggccatctgt

SEQ ID NO: 3956698 - DNA, 25 bp, Homo sapien
cgaccatcttctcacacgctgttgg

SEQ ID NO: 3956699 - DNA, 25 bp, Homo sapien
catgactaatgaggccgaccatctt

SEQ ID NO: 3956700 - DNA, 25 bp, Homo sapien
aaatctctgttcagatcctgtgatt

SEQ ID NO: 3956701 - DNA, 25 bp, Homo sapien
acaaaagacatcagctagctggtcc

SEQ ID NO: 3956702 - DNA, 25 bp, Homo sapien
agctggtccaagcacagtggtgttc

SEQ ID NO: 3956703 - DNA, 25 bp, Homo sapien
cacaacgaattgatcacagccaggt

SEQ ID NO: 3956704 - DNA, 25 bp, Homo sapien
cacagtggtgttcacaacgaattga

SEQ ID NO: 3956705 - DNA, 25 bp, Homo sapien
ggcgtccgcggggatgcgcagcgcg

SEQ ID NO: 3956706 - DNA, 25 bp, Homo sapien
cgcggcccgagcagttgacgcggca

SEQ ID NO: 3956707 - DNA, 25 bp, Homo sapien
cagttgacgcggcaggcggcgccgg

SEQ ID NO: 3956708 - DNA, 25 bp, Homo sapien
tgcgcagcgcgggaccgagcgtccg

SEQ ID NO: 3956709 - DNA, 25 bp, Homo sapien
ccgccagcgccccgagccacaggcc

SEQ ID NO: 3956710 - DNA, 25 bp, Homo sapien
ctgggccgcagaggcaggggggctc

SEQ ID NO: 3956711 - DNA, 25 bp, Homo sapien
caggggggctcgcagggcccgcagc

SEQ ID NO: 3956712 - DNA, 25 bp, Homo sapien
ccccgccagcgccccgagccacagg

SEQ ID NO: 3956713 - DNA, 25 bp, Homo sapien
cgttagggcagcgcgcgcatggccc

SEQ ID NO: 3956714 - DNA, 25 bp, Homo sapien
gcgcgcatggccccgccgtccccag

SEQ ID NO: 3956715 - DNA, 25 bp, Homo sapien
gttagggcagcgcgcgcatggcccc

SEQ ID NO: 3956716 - DNA, 25 bp, Homo sapien
gcgcatggccccgccgtccccaggc

SEQ ID NO: 3956717 - DNA, 25 bp, Homo sapien
tgctgctgagcgacgcccgctcggg

SEQ ID NO: 3956718 - DNA, 25 bp, Homo sapien
ggctgcggccgcgacctgctgctga

SEQ ID NO: 3956719 - DNA, 25 bp, Homo sapien
ctcggccgcccgctcggacgctggc

SEQ ID NO: 3956720 - DNA, 25 bp, Homo sapien
gacgctggcgctgcagtgcgggccc

SEQ ID NO: 3956721 - DNA, 25 bp, Homo sapien
caggcaactggctccgtaggagtga

SEQ ID NO: 3956722 - DNA, 25 bp, Homo sapien
gctgagagcaggcaactggctccgt

SEQ ID NO: 3956723 - DNA, 25 bp, Homo sapien
tccgtaggagtgaggatactgctct

SEQ ID NO: 3956724 - DNA, 25 bp, Homo sapien
gagtgaggatactgctctgacagcc

SEQ ID NO: 3956725 - DNA, 25 bp, Homo sapien
gccttcccgtctgggagcacctgag

SEQ ID NO: 3956726 - DNA, 25 bp, Homo sapien
cagacaaagggtccccattcgggca

SEQ ID NO: 3956727 - DNA, 25 bp, Homo sapien
tgtggtcacgtctgcaggcaacaga

SEQ ID NO: 3956728 - DNA, 25 bp, Homo sapien
ccgttagctcatcttctgtgtggca

SEQ ID NO: 3956729 - DNA, 25 bp, Homo sapien
ggccgccacggaaaagcagtcttct

SEQ ID NO: 3956730 - DNA, 25 bp, Homo sapien
gtgcctaaccctagaaaagccatgt

SEQ ID NO: 3956731 - DNA, 25 bp, Homo sapien
gccgcacatgctcaggcagctaagg

SEQ ID NO: 3956732 - DNA, 25 bp, Homo sapien
gcccacgcctgggacagaaggcttc

SEQ ID NO: 3956733 - DNA, 25 bp, Homo sapien
tattgctaagcacttcaatagacac

SEQ ID NO: 3956734 - DNA, 25 bp, Homo sapien
acttgcagccggctcgcgacgaaac

SEQ ID NO: 3956735 - DNA, 25 bp, Homo sapien
taccgctaggccctccggattgagg

SEQ ID NO: 3956736 - DNA, 25 bp, Homo sapien
ttcaatagacacagcgcccacctta

SEQ ID NO: 3956737 - DNA, 25 bp, Homo sapien
aagtcagcgccaaaatacagacatt

SEQ ID NO: 3956738 - DNA, 25 bp, Homo sapien
actccttcgtttcgggcaacacctg

SEQ ID NO: 3956739 - DNA, 25 bp, Homo sapien
ttcgggcaacacctgtttccactct

SEQ ID NO: 3956740 - DNA, 25 bp, Homo sapien
ctgaaagtcagcgccaaaatacaga

SEQ ID NO: 3956741 - DNA, 25 bp, Homo sapien
tacgaggtgtcagaagtcaaagcaa

SEQ ID NO: 3956742 - DNA, 25 bp, Homo sapien
tgcacgtgcagttttcatacgaggt

SEQ ID NO: 3956743 - DNA, 25 bp, Homo sapien
cttgctaaataatcagactgcacgt

SEQ ID NO: 3956744 - DNA, 25 bp, Homo sapien
taaataatcagactgcacgtgcagt

SEQ ID NO: 3956745 - DNA, 25 bp, Homo sapien
tgcagcgttcggacggccctcaaag

SEQ ID NO: 3956746 - DNA, 25 bp, Homo sapien
taaacgctaagggacaaagtggtgc

SEQ ID NO: 3956747 - DNA, 25 bp, Homo sapien
ccaagatcgtagcacatggcgaacg

SEQ ID NO: 3956748 - DNA, 25 bp, Homo sapien
gctcgtggctcagttcgtcccaaga

SEQ ID NO: 3956749 - DNA, 25 bp, Homo sapien
gtccgtccgccagtcagtagtccgt

SEQ ID NO: 3956750 - DNA, 25 bp, Homo sapien
tccgtcctgttctcgcgcagttctt

SEQ ID NO: 3956751 - DNA, 25 bp, Homo sapien
gatcgggcgcgtggagatcgaggcg

SEQ ID NO: 3956752 - DNA, 25 bp, Homo sapien
agtagtccgtccctcgctccgtcct

SEQ ID NO: 3956753 - DNA, 25 bp, Homo sapien
tgggtgggcaccgaggacttcacca

SEQ ID NO: 3956754 - DNA, 25 bp, Homo sapien
accaggccctctgtgtggatcatgc

SEQ ID NO: 3956755 - DNA, 25 bp, Homo sapien
cttcaccaggccctctgtgtggatc

SEQ ID NO: 3956756 - DNA, 25 bp, Homo sapien
tcagtgggtgggcaccgaggacttc

SEQ ID NO: 3956757 - DNA, 25 bp, Homo sapien
gcctggcccgagcagggagctgcat

SEQ ID NO: 3956758 - DNA, 25 bp, Homo sapien
ggaggagctgctttaaggccgggcc

SEQ ID NO: 3956759 - DNA, 25 bp, Homo sapien
gctgctttaaggccgggcctggccc

SEQ ID NO: 3956760 - DNA, 25 bp, Homo sapien
ctggcccgagcagggagctgcatct

SEQ ID NO: 3956761 - DNA, 25 bp, Homo sapien
tgcagagctcccagcgcagtcccgt

SEQ ID NO: 3956762 - DNA, 25 bp, Homo sapien
cagcgcagtcccgtcccgagctggg

SEQ ID NO: 3956763 - DNA, 25 bp, Homo sapien
agctcaggcaagagtgcccgctaca

SEQ ID NO: 3956764 - DNA, 25 bp, Homo sapien
tcaccacaggggtaagggtgtgccc

SEQ ID NO: 3956765 - DNA, 25 bp, Homo sapien
cctggtcgcgtgttaggcatgtgag

SEQ ID NO: 3956766 - DNA, 25 bp, Homo sapien
ttagcgctgcgtggcgcggcctggt

SEQ ID NO: 3956767 - DNA, 25 bp, Homo sapien
cagcctggtcgcatggttaaacgtg

SEQ ID NO: 3956768 - DNA, 25 bp, Homo sapien
ctggcctggtcgcatggtttagcgt

SEQ ID NO: 3956769 - DNA, 25 bp, Homo sapien
tagatttggttacctcctggttgaa

SEQ ID NO: 3956770 - DNA, 25 bp, Homo sapien
tggagcgagggcctttttactcacc

SEQ ID NO: 3956771 - DNA, 25 bp, Homo sapien
catccccaccctagatggagcgagg

SEQ ID NO: 3956772 - DNA, 25 bp, Homo sapien
ctctgggtgccaggtacgacgcttg

SEQ ID NO: 3956773 - DNA, 25 bp, Homo sapien
gggcctctaacagcttttgtccgga

SEQ ID NO: 3956774 - DNA, 25 bp, Homo sapien
caaacacgatagaggagaccagtca

SEQ ID NO: 3956775 - DNA, 25 bp, Homo sapien
tgagcagaagcgtccgtgggaactc

SEQ ID NO: 3956776 - DNA, 25 bp, Homo sapien
tgtttattgacagccgacggcagcg

SEQ ID NO: 3956777 - DNA, 25 bp, Homo sapien
gcgcccatcctgaggtataggtcag

SEQ ID NO: 3956778 - DNA, 25 bp, Homo sapien
cagcaggtattgcacggggagcagc

SEQ ID NO: 3956779 - DNA, 25 bp, Homo sapien
ggccggagttgtgcttctgcagggc

SEQ ID NO: 3956780 - DNA, 25 bp, Homo sapien
gcagggtctgcctagagcccttgga

SEQ ID NO: 3956781 - DNA, 25 bp, Homo sapien
aacatgctgccgatgtcgtccagga

SEQ ID NO: 3956782 - DNA, 25 bp, Homo sapien
tgccgatgtcgtccaggatgctgcc

SEQ ID NO: 3956783 - DNA, 25 bp, Homo sapien
tggtcggccaggtcgtcgaacatgc

SEQ ID NO: 3956784 - DNA, 25 bp, Homo sapien
ccaggtcgtcgaacatgctgccgat

SEQ ID NO: 3956785 - DNA, 25 bp, Homo sapien
cctccagtttctgccgggcgctgtc

SEQ ID NO: 3956786 - DNA, 25 bp, Homo sapien
caggcacgcgcttgtctcctccagt

SEQ ID NO: 3956787 - DNA, 25 bp, Homo sapien
gccaggcacgcgcttgtctcctcca

SEQ ID NO: 3956788 - DNA, 25 bp, Homo sapien
gccgcggccaggcacgcgcttgtct

SEQ ID NO: 3956789 - DNA, 25 bp, Homo sapien
gggggcttggcgggcacgtgcagcg

SEQ ID NO: 3956790 - DNA, 25 bp, Homo sapien
ttggcgggcacgtgcagcgcgggcg

SEQ ID NO: 3956791 - DNA, 25 bp, Homo sapien
gcgggcacgtgcagcgcgggcgcgc

SEQ ID NO: 3956792 - DNA, 25 bp, Homo sapien
gcttggcgggcacgtgcagcgcggg

SEQ ID NO: 3956793 - DNA, 25 bp, Homo sapien
gacacgggcggtggcgtgccgtggg

SEQ ID NO: 3956794 - DNA, 25 bp, Homo sapien
cttgacgggcttgggcgctgtgggc

SEQ ID NO: 3956795 - DNA, 25 bp, Homo sapien
tcgcgcgggcgagggtgcgggtgaa

SEQ ID NO: 3956796 - DNA, 25 bp, Homo sapien
cggcggcggcttgggagacacgggc

SEQ ID NO: 3956797 - DNA, 25 bp, Homo sapien
cattatggtacacggacagtggcgg

SEQ ID NO: 3956798 - DNA, 25 bp, Homo sapien
cctcttgagtgtggcgctggcttcc

SEQ ID NO: 3956799 - DNA, 25 bp, Homo sapien
ttgacgttcttgtcggcacctgcgg

SEQ ID NO: 3956800 - DNA, 25 bp, Homo sapien
catagcgattcaggctgtgggcccg

SEQ ID NO: 3956801 - DNA, 25 bp, Homo sapien
gctggaccatgaggtcccccaaggg

SEQ ID NO: 3956802 - DNA, 25 bp, Homo sapien
ttcaccttggccgtagctggggctg

SEQ ID NO: 3956803 - DNA, 25 bp, Homo sapien
tgacatggggcgctctgtcggcggc

SEQ ID NO: 3956804 - DNA, 25 bp, Homo sapien
atggggcgctctgtcggcggcagca

SEQ ID NO: 3956805 - DNA, 25 bp, Homo sapien
tggctagtgcctggtgggaggacct

SEQ ID NO: 3956806 - DNA, 25 bp, Homo sapien
ggcgtgaagtggctagtgcctggtg

SEQ ID NO: 3956807 - DNA, 25 bp, Homo sapien
ggcacggggggcacgctggccctct

SEQ ID NO: 3956808 - DNA, 25 bp, Homo sapien
gacctgccgtggcttgccaggcacg

SEQ ID NO: 3956809 - DNA, 25 bp, Homo sapien
gggcggggccctcatccaggaggta

SEQ ID NO: 3956810 - DNA, 25 bp, Homo sapien
ggcggggccctcatccaggaggtac

SEQ ID NO: 3956811 - DNA, 25 bp, Homo sapien
ggctggagtcctgccgcgtggtggc

SEQ ID NO: 3956812 - DNA, 25 bp, Homo sapien
cctggcttcgagacatggggctgct

SEQ ID NO: 3956813 - DNA, 25 bp, Homo sapien
cgcgtggtggccctcggggtgggtg

SEQ ID NO: 3956814 - DNA, 25 bp, Homo sapien
tgtgccgtgcccgaccacccaggct

SEQ ID NO: 3956815 - DNA, 25 bp, Homo sapien
tcagccgggccagtcatggcagcct

SEQ ID NO: 3956816 - DNA, 25 bp, Homo sapien
catcacttcaagagactggggcgcc

SEQ ID NO: 3956817 - DNA, 25 bp, Homo sapien
agcttcctcacagcgagcatcagct

SEQ ID NO: 3956818 - DNA, 25 bp, Homo sapien
catacttggcgtattcagccttctg

SEQ ID NO: 3956819 - DNA, 25 bp, Homo sapien
caacaccttgtagtactgggccagg

SEQ ID NO: 3956820 - DNA, 25 bp, Homo sapien
tggtgatgccgatctcctgcaggtc

SEQ ID NO: 3956821 - DNA, 25 bp, Homo sapien
aatgttctcgtagccattgtccacc

SEQ ID NO: 3956822 - DNA, 25 bp, Homo sapien
cccaggtgatgtcggtgatgaaatc

SEQ ID NO: 3956823 - DNA, 25 bp, Homo sapien
ccgagtcatggacacagacgcatgg

SEQ ID NO: 3956824 - DNA, 25 bp, Homo sapien
tggacacagacgcatggggccacac

SEQ ID NO: 3956825 - DNA, 25 bp, Homo sapien
tcatggacacagacgcatggggcca

SEQ ID NO: 3956826 - DNA, 25 bp, Homo sapien
cgagtcatggacacagacgcatggg

SEQ ID NO: 3956827 - DNA, 25 bp, Homo sapien
ggaacacgcacatgatttgcacgct

SEQ ID NO: 3956828 - DNA, 25 bp, Homo sapien
ctggtacaggaacacgcacatgatt

SEQ ID NO: 3956829 - DNA, 25 bp, Homo sapien
accccatcccgtttcacactctgac

SEQ ID NO: 3956830 - DNA, 25 bp, Homo sapien
atgatttgcacgctgcgctcccagc

SEQ ID NO: 3956831 - DNA, 25 bp, Homo sapien
cagtctgcatgtgagtggcagtgct

SEQ ID NO: 3956832 - DNA, 25 bp, Homo sapien
agtgcttggaggcttggtggctggg

SEQ ID NO: 3956833 - DNA, 25 bp, Homo sapien
tgagcaaaggccgtaagcatggccc

SEQ ID NO: 3956834 - DNA, 25 bp, Homo sapien
gcctgtgagcaaaggccgtaagcat

SEQ ID NO: 3956835 - DNA, 25 bp, Homo sapien
cagggatgcttaggccgctgatctc

SEQ ID NO: 3956836 - DNA, 25 bp, Homo sapien
ggcttggtgacaccaatggccgtga

SEQ ID NO: 3956837 - DNA, 25 bp, Homo sapien
tctctgccgcgatcttcttccggtg

SEQ ID NO: 3956838 - DNA, 25 bp, Homo sapien
gatcttcttccggtggcccggcttg

SEQ ID NO: 3956839 - DNA, 25 bp, Homo sapien
tgggcaggtcgtagccggcgctgat

SEQ ID NO: 3956840 - DNA, 25 bp, Homo sapien
gatggtgggcaggtcgtagccggcg

SEQ ID NO: 3956841 - DNA, 25 bp, Homo sapien
gcggtgagccactggctcacggcct

SEQ ID NO: 3956842 - DNA, 25 bp, Homo sapien
agctggaacgcggtgagccactggc

SEQ ID NO: 3956843 - DNA, 25 bp, Homo sapien
ccgtgcagccactgcgtccgccgtc

SEQ ID NO: 3956844 - DNA, 25 bp, Homo sapien
gcagccactgcgtccgccgtccgct

SEQ ID NO: 3956845 - DNA, 25 bp, Homo sapien
tgcaggctcgcctgcccggccgcgc

SEQ ID NO: 3956846 - DNA, 25 bp, Homo sapien
ttggccggccagccgtgcagccact

SEQ ID NO: 3956847 - DNA, 25 bp, Homo sapien
ccatgcacacgctgcaccatctcat

SEQ ID NO: 3956848 - DNA, 25 bp, Homo sapien
gtgcactcacacaccatacgccgtg

SEQ ID NO: 3956849 - DNA, 25 bp, Homo sapien
atacgccgtgcccatgcacacgctg

SEQ ID NO: 3956850 - DNA, 25 bp, Homo sapien
agctctccggcacacgagtgcactc

SEQ ID NO: 3956851 - DNA, 25 bp, Homo sapien
gcggctgctccccatagacctgccc

SEQ ID NO: 3956852 - DNA, 25 bp, Homo sapien
cttgccctccgatgctggctccagc

SEQ ID NO: 3956853 - DNA, 25 bp, Homo sapien
tgccctccgatgctggctccagctt

SEQ ID NO: 3956854 - DNA, 25 bp, Homo sapien
tgcccggcgtgggccactggaggct

SEQ ID NO: 3956855 - DNA, 25 bp, Homo sapien
tgtcccccgggccggactcagagac

SEQ ID NO: 3956856 - DNA, 25 bp, Homo sapien
cccgggccggactcagagacggact

SEQ ID NO: 3956857 - DNA, 25 bp, Homo sapien
ccgggccggactcagagacggactt

SEQ ID NO: 3956858 - DNA, 25 bp, Homo sapien
agagcccgcgtgtagggcgtgaccc

SEQ ID NO: 3956859 - DNA, 25 bp, Homo sapien
catgccgctaatgctgccgcttcgg

SEQ ID NO: 3956860 - DNA, 25 bp, Homo sapien
ggccgccagccatgccgctaatgct

SEQ ID NO: 3956861 - DNA, 25 bp, Homo sapien
cttgacgccttcagagcccgcgtgt

SEQ ID NO: 3956862 - DNA, 25 bp, Homo sapien
ggtgcagagggtcccgatgagctgc

SEQ ID NO: 3956863 - DNA, 25 bp, Homo sapien
gggtcccgatgagctgcttccctgg

SEQ ID NO: 3956864 - DNA, 25 bp, Homo sapien
ttcctcagcacccagatctcctctg

SEQ ID NO: 3956865 - DNA, 25 bp, Homo sapien
gcttggttcagtgcctgctcgggaa

SEQ ID NO: 3956866 - DNA, 25 bp, Homo sapien
acactcgctgcttccagcccccaag

SEQ ID NO: 3956867 - DNA, 25 bp, Homo sapien
cctcagcacactcgctgcttccagc

SEQ ID NO: 3956868 - DNA, 25 bp, Homo sapien
gggctcctgcctgccccccagggtg

SEQ ID NO: 3956869 - DNA, 25 bp, Homo sapien
agcccccaagcccaggggctcctgc

SEQ ID NO: 3956870 - DNA, 25 bp, Homo sapien
tcgcttgacaatggcctcgcccagg

SEQ ID NO: 3956871 - DNA, 25 bp, Homo sapien
cggtcattgcccgtccggttgtcat

SEQ ID NO: 3956872 - DNA, 25 bp, Homo sapien
ggttgtcatggatgcagcccttcca

SEQ ID NO: 3956873 - DNA, 25 bp, Homo sapien
cgggaagtagcccacccggtcattg

SEQ ID NO: 3956874 - DNA, 25 bp, Homo sapien
gtgttctggggtgcgcacgcccagg

SEQ ID NO: 3956875 - DNA, 25 bp, Homo sapien
gagatgccccctttcgcagagtctc

SEQ ID NO: 3956876 - DNA, 25 bp, Homo sapien
gagggtgttctggggtgcgcacgcc

SEQ ID NO: 3956877 - DNA, 25 bp, Homo sapien
ttctggggtgcgcacgcccaggtgc

SEQ ID NO: 3956878 - DNA, 25 bp, Homo sapien
tcccctgccttcacgttgaggctgg

SEQ ID NO: 3956879 - DNA, 25 bp, Homo sapien
gctggtcaggtcgtaattgttgcaa

SEQ ID NO: 3956880 - DNA, 25 bp, Homo sapien
aataatccttggtcgcccggacctg

SEQ ID NO: 3956881 - DNA, 25 bp, Homo sapien
tgttgcaataatccttggtcgcccg

SEQ ID NO: 3956882 - DNA, 25 bp, Homo sapien
tccagggctgtctggctgtaggtgt

SEQ ID NO: 3956883 - DNA, 25 bp, Homo sapien
tgtaggtgttcctcacgtgggcatt

SEQ ID NO: 3956884 - DNA, 25 bp, Homo sapien
tcctcacgtgggcattgatcccgct

SEQ ID NO: 3956885 - DNA, 25 bp, Homo sapien
ggctgtctggctgtaggtgttcctc

SEQ ID NO: 3956886 - DNA, 25 bp, Homo sapien
agggccgtgccggacttggtctggc

SEQ ID NO: 3956887 - DNA, 25 bp, Homo sapien
cggttaatgtcgatgccggcttgga

SEQ ID NO: 3956888 - DNA, 25 bp, Homo sapien
cttggtctggcggttaatgtcgatg

SEQ ID NO: 3956889 - DNA, 25 bp, Homo sapien
agagcgcagcctcgtgcagggccgt

SEQ ID NO: 3956890 - DNA, 25 bp, Homo sapien
tgaaccctggggaccctaaggctga

SEQ ID NO: 3956891 - DNA, 25 bp, Homo sapien
tgctgaaccctggggaccctaaggc

SEQ ID NO: 3956892 - DNA, 25 bp, Homo sapien
tggggaccctaaggctgaggccctc

SEQ ID NO: 3956893 - DNA, 25 bp, Homo sapien
gcagcgccgcacacatattgctgct

SEQ ID NO: 3956894 - DNA, 25 bp, Homo sapien
ccgtttttagctgcgaggtgcaaag

SEQ ID NO: 3956895 - DNA, 25 bp, Homo sapien
ctgatgatgtcgatgtggccgtttt

SEQ ID NO: 3956896 - DNA, 25 bp, Homo sapien
gcgccgcacacatattgctgctgag

SEQ ID NO: 3956897 - DNA, 25 bp, Homo sapien
tgatgtggggctccccagccccacc

SEQ ID NO: 3956898 - DNA, 25 bp, Homo sapien
caccccacagggctccacaggagac

SEQ ID NO: 3956899 - DNA, 25 bp, Homo sapien
ccacagggctccacaggagactcac

SEQ ID NO: 3956900 - DNA, 25 bp, Homo sapien
ctgatgtggggctccccagccccac

SEQ ID NO: 3956901 - DNA, 25 bp, Homo sapien
tgtccaccatgcacgggttagactg

SEQ ID NO: 3956902 - DNA, 25 bp, Homo sapien
ggttagactggtgctgtagcagcat

SEQ ID NO: 3956903 - DNA, 25 bp, Homo sapien
acgcggccgaactcgcaggccaggt

SEQ ID NO: 3956904 - DNA, 25 bp, Homo sapien
cccgagttgtccaccatgcacgggt

SEQ ID NO: 3956905 - DNA, 25 bp, Homo sapien
tcagacgggatgttcacggccgagc

SEQ ID NO: 3956906 - DNA, 25 bp, Homo sapien
cacatcatagtgaccatgctgggcc

SEQ ID NO: 3956907 - DNA, 25 bp, Homo sapien
ggatgtggccctcatcagacgggat

SEQ ID NO: 3956908 - DNA, 25 bp, Homo sapien
gccctcatcagacgggatgttcacg

SEQ ID NO: 3956909 - DNA, 25 bp, Homo sapien
ctgccaggccgcatagtgcagcggc

SEQ ID NO: 3956910 - DNA, 25 bp, Homo sapien
cagcagcaggctgatcaattccgtg

SEQ ID NO: 3956911 - DNA, 25 bp, Homo sapien
gatcaattccgtgttgccgttcagg

SEQ ID NO: 3956912 - DNA, 25 bp, Homo sapien
ttcagggccgcatggtgcagagccg

SEQ ID NO: 3956913 - DNA, 25 bp, Homo sapien
ttccgtgttgccgttcagggccgca

SEQ ID NO: 3956914 - DNA, 25 bp, Homo sapien
tcctggaagttgacattgatcttct

SEQ ID NO: 3956915 - DNA, 25 bp, Homo sapien
agttgacattgatcttcttggtgga

SEQ ID NO: 3956916 - DNA, 25 bp, Homo sapien
tggaagttgacattgatcttcttgg

SEQ ID NO: 3956917 - DNA, 25 bp, Homo sapien
gaagttgacattgatcttcttggtg

SEQ ID NO: 3956918 - DNA, 25 bp, Homo sapien
gcctgctccctggcgactcggagca

SEQ ID NO: 3956919 - DNA, 25 bp, Homo sapien
cctgctccctggcgactcggagcac

SEQ ID NO: 3956920 - DNA, 25 bp, Homo sapien
ccacgccctcccttcagggccccag

SEQ ID NO: 3956921 - DNA, 25 bp, Homo sapien
ctcccttcagggccccagcgtcctc

SEQ ID NO: 3956922 - DNA, 25 bp, Homo sapien
cagaggggcccacgccctcccttca

SEQ ID NO: 3956923 - DNA, 25 bp, Homo sapien
gccctcccttcagggccccagcgtc

SEQ ID NO: 3956924 - DNA, 25 bp, Homo sapien
ggtgcccccaacaatctcccagaag

SEQ ID NO: 3956925 - DNA, 25 bp, Homo sapien
cccagttctcggcatccccctggag

SEQ ID NO: 3956926 - DNA, 25 bp, Homo sapien
ctgctggtgaagtacgggggagggg

SEQ ID NO: 3956927 - DNA, 25 bp, Homo sapien
gccagtcccagttctcggcatcccc

SEQ ID NO: 3956928 - DNA, 25 bp, Homo sapien
aggacgcccagaccccacgtgccga

SEQ ID NO: 3956929 - DNA, 25 bp, Homo sapien
gggaggacgcccagaccccacgtgc

SEQ ID NO: 3956930 - DNA, 25 bp, Homo sapien
ggaggacgcccagaccccacgtgcc

SEQ ID NO: 3956931 - DNA, 25 bp, Homo sapien
ggacgcccagaccccacgtgccgac

SEQ ID NO: 3956932 - DNA, 25 bp, Homo sapien
tgcagagccctgtccgtgcccgcac

SEQ ID NO: 3956933 - DNA, 25 bp, Homo sapien
gcacaggtgccctgacacactgaca

SEQ ID NO: 3956934 - DNA, 25 bp, Homo sapien
gcccgcacaggtgccctgacacact

SEQ ID NO: 3956935 - DNA, 25 bp, Homo sapien
tgtccgtgcccgcacaggtgccctg

SEQ ID NO: 3956936 - DNA, 25 bp, Homo sapien
cccagggaggctacgcgctgagcca

SEQ ID NO: 3956937 - DNA, 25 bp, Homo sapien
ggctggtccacacgcccatccatcc

SEQ ID NO: 3956938 - DNA, 25 bp, Homo sapien
gaggctacgcgctgagccaggatga

SEQ ID NO: 3956939 - DNA, 25 bp, Homo sapien
tgcgcagccgcacacgcggctggtc

SEQ ID NO: 3956940 - DNA, 25 bp, Homo sapien
tctgcgcggtccctacgtcctccgc

SEQ ID NO: 3956941 - DNA, 25 bp, Homo sapien
gcagcctctgcgcggtccctacgtc

SEQ ID NO: 3956942 - DNA, 25 bp, Homo sapien
gcctctgcgcggtccctacgtcctc

SEQ ID NO: 3956943 - DNA, 25 bp, Homo sapien
gcggtccctacgtcctccgccttca

SEQ ID NO: 3956944 - DNA, 25 bp, Homo sapien
gccgcagcgacgcggctgcgctcgt

SEQ ID NO: 3956945 - DNA, 25 bp, Homo sapien
cgctcgtgagctcggcgcggctcag

SEQ ID NO: 3956946 - DNA, 25 bp, Homo sapien
gcagcgacgcggctgcgctcgtgag

SEQ ID NO: 3956947 - DNA, 25 bp, Homo sapien
agcgacgcggctgcgctcgtgagct

SEQ ID NO: 3956948 - DNA, 25 bp, Homo sapien
ctcgccgtcctggacacggcggagt

SEQ ID NO: 3956949 - DNA, 25 bp, Homo sapien
agcaagggcggtcaccggaggaaag

SEQ ID NO: 3956950 - DNA, 25 bp, Homo sapien
catggtctcgccctagggagccatc

SEQ ID NO: 3956951 - DNA, 25 bp, Homo sapien
ataactctacgctcggcctcgatcg

SEQ ID NO: 3956952 - DNA, 25 bp, Homo sapien
tgtctacttccgttggccatcggca

SEQ ID NO: 3956953 - DNA, 25 bp, Homo sapien
gctacgccctgcagtgtcgcttcag

SEQ ID NO: 3956954 - DNA, 25 bp, Homo sapien
gacctctagggaaactgctatgtct

SEQ ID NO: 3956955 - DNA, 25 bp, Homo sapien
tgtctctctagctggtgcccttctc

SEQ ID NO: 3956956 - DNA, 25 bp, Homo sapien
ggacgtccaacttctccctgatgac

SEQ ID NO: 3956957 - DNA, 25 bp, Homo sapien
tcagacgtgcaagatctggaggacg

SEQ ID NO: 3956958 - DNA, 25 bp, Homo sapien
ccacctgctcggctgatcagacgtg

SEQ ID NO: 3956959 - DNA, 25 bp, Homo sapien
gatctggaggacgtccaacttctcc

SEQ ID NO: 3956960 - DNA, 25 bp, Homo sapien
agatgtgacagagctcgacccaagc

SEQ ID NO: 3956961 - DNA, 25 bp, Homo sapien
caatgacagtgtgctgggctagcct

SEQ ID NO: 3956962 - DNA, 25 bp, Homo sapien
tatggcggccaccagaaggctgttg

SEQ ID NO: 3956963 - DNA, 25 bp, Homo sapien
tcagggcctcggtccatagagaaca

SEQ ID NO: 3956964 - DNA, 25 bp, Homo sapien
gaagggtttattagtccctgccagc

SEQ ID NO: 3956965 - DNA, 25 bp, Homo sapien
gggtttattagtccctgccagcagc

SEQ ID NO: 3956966 - DNA, 25 bp, Homo sapien
ctggccagcccactggattggggac

SEQ ID NO: 3956967 - DNA, 25 bp, Homo sapien
tggaagggtttattagtccctgcca

SEQ ID NO: 3956968 - DNA, 25 bp, Homo sapien
gcagatgtcgatgcagagataaatc

SEQ ID NO: 3956969 - DNA, 25 bp, Homo sapien
gagataaatcagccgctgtctccgg

SEQ ID NO: 3956970 - DNA, 25 bp, Homo sapien
aataaaagcagaccgacacgcagat

SEQ ID NO: 3956971 - DNA, 25 bp, Homo sapien
cgcagatgttgctcgggaagcagat

SEQ ID NO: 3956972 - DNA, 25 bp, Homo sapien
cttcccccacagcggtcctgactca

SEQ ID NO: 3956973 - DNA, 25 bp, Homo sapien
ttcccccacagcggtcctgactcac

SEQ ID NO: 3956974 - DNA, 25 bp, Homo sapien
ctgtggcgagggtgccgtgaatctc

SEQ ID NO: 3956975 - DNA, 25 bp, Homo sapien
gtggcgagggtgccgtgaatctcca

SEQ ID NO: 3956976 - DNA, 25 bp, Homo sapien
ggggtcctcatgcacaggcgctgca

SEQ ID NO: 3956977 - DNA, 25 bp, Homo sapien
gggtccacttcgaggctcccctgca

SEQ ID NO: 3956978 - DNA, 25 bp, Homo sapien
acaggcgctgcaccaaagcccccgc

SEQ ID NO: 3956979 - DNA, 25 bp, Homo sapien
tctgctcgccgggcccagtagatgg

SEQ ID NO: 3956980 - DNA, 25 bp, Homo sapien
cctcagggcggtaacagatgcagcc

SEQ ID NO: 3956981 - DNA, 25 bp, Homo sapien
ggtgctcctcagggcggtaacagat

SEQ ID NO: 3956982 - DNA, 25 bp, Homo sapien
cttggaggtatccaccagcagccgc

SEQ ID NO: 3956983 - DNA, 25 bp, Homo sapien
gcagggtctcccgatcactgtcctc

SEQ ID NO: 3956984 - DNA, 25 bp, Homo sapien
cagaccgacacctgccagggtgacc

SEQ ID NO: 3956985 - DNA, 25 bp, Homo sapien
cccagaccgacacctgccagggtga

SEQ ID NO: 3956986 - DNA, 25 bp, Homo sapien
cccccagaccgacacctgccagggt

SEQ ID NO: 3956987 - DNA, 25 bp, Homo sapien
gccccccagaccgacacctgccagg

SEQ ID NO: 3956988 - DNA, 25 bp, Homo sapien
gtcactgtgatggtcgccgcgttcc

SEQ ID NO: 3956989 - DNA, 25 bp, Homo sapien
gctctgcccgtcgaacagcaccgcc

SEQ ID NO: 3956990 - DNA, 25 bp, Homo sapien
ctcgggagggtcattcgcagcgtct

SEQ ID NO: 3956991 - DNA, 25 bp, Homo sapien
atggtcgccgcgttccgggccacgt

SEQ ID NO: 3956992 - DNA, 25 bp, Homo sapien
gcagtgggagttggagttcagccgg

SEQ ID NO: 3956993 - DNA, 25 bp, Homo sapien
agtgggagttggagttcagccgggc

SEQ ID NO: 3956994 - DNA, 25 bp, Homo sapien
ctggcagtgggagttggagttcagc

SEQ ID NO: 3956995 - DNA, 25 bp, Homo sapien
tgggagttggagttcagccgggcag

SEQ ID NO: 3956996 - DNA, 25 bp, Homo sapien
acaacccccacagcggccagcacca

SEQ ID NO: 3956997 - DNA, 25 bp, Homo sapien
ctgagcagagccaagaagccctcca

SEQ ID NO: 3956998 - DNA, 25 bp, Homo sapien
tccagcccccgcaggagggcttggt

SEQ ID NO: 3956999 - DNA, 25 bp, Homo sapien
gcagcaggagcaggctcacggctct

SEQ ID NO: 3957000 - DNA, 25 bp, Homo sapien
ctgggcgtgcatcagggtcagaagg

SEQ ID NO: 3957001 - DNA, 25 bp, Homo sapien
cgtgcatcagggtcagaagggtcat

SEQ ID NO: 3957002 - DNA, 25 bp, Homo sapien
gggcgtgcatcagggtcagaagggt

SEQ ID NO: 3957003 - DNA, 25 bp, Homo sapien
gcgtgcatcagggtcagaagggtca

SEQ ID NO: 3957004 - DNA, 25 bp, Homo sapien
ttagacatcagggagcaagtgggct

SEQ ID NO: 3957005 - DNA, 25 bp, Homo sapien
tgggtccttgctgcaggagtaacgg

SEQ ID NO: 3957006 - DNA, 25 bp, Homo sapien
tccttgctgcaggagtaacgggagg

SEQ ID NO: 3957007 - DNA, 25 bp, Homo sapien
gagggttagacatcagggagcaagt

SEQ ID NO: 3957008 - DNA, 25 bp, Homo sapien
taggcccaggtttggggcgctcagc

SEQ ID NO: 3957009 - DNA, 25 bp, Homo sapien
aggtttggggcgctcagcacagcag

SEQ ID NO: 3957010 - DNA, 25 bp, Homo sapien
cctgtaggcccaggtttggggcgct

SEQ ID NO: 3957011 - DNA, 25 bp, Homo sapien
ccaggtttggggcgctcagcacagc

SEQ ID NO: 3957012 - DNA, 25 bp, Homo sapien
ggccaggggaaactcagaacagaac

SEQ ID NO: 3957013 - DNA, 25 bp, Homo sapien
gcccctgctcacaatgtgccgattg

SEQ ID NO: 3957014 - DNA, 25 bp, Homo sapien
tcagctctggatctgatatccaggt

SEQ ID NO: 3957015 - DNA, 25 bp, Homo sapien
gattgtctgcgtcccttgtctgcag

SEQ ID NO: 3957016 - DNA, 25 bp, Homo sapien
gtggaaatccagtccggctgaccga

SEQ ID NO: 3957017 - DNA, 25 bp, Homo sapien
ctgggggatgcctgtcaccaggccc

SEQ ID NO: 3957018 - DNA, 25 bp, Homo sapien
cggctccagacacctggcctgtgca

SEQ ID NO: 3957019 - DNA, 25 bp, Homo sapien
cagggtctgggaggcgtagggctcg

SEQ ID NO: 3957020 - DNA, 25 bp, Homo sapien
taaagtggcctgagtctgtcaggtt

SEQ ID NO: 3957021 - DNA, 25 bp, Homo sapien
ccggccagggtgactcgctaagtgt

SEQ ID NO: 3957022 - DNA, 25 bp, Homo sapien
ttatccttgactcccagagttgggc

SEQ ID NO: 3957023 - DNA, 25 bp, Homo sapien
ggcctgacacgccacaagctgtcaa

SEQ ID NO: 3957024 - DNA, 25 bp, Homo sapien
caatgcaaggtgagagcaaggacac

SEQ ID NO: 3957025 - DNA, 25 bp, Homo sapien
gggcagttggcattccagctctgga

SEQ ID NO: 3957026 - DNA, 25 bp, Homo sapien
tttgagtcctcccacccgtggtgag

SEQ ID NO: 3957027 - DNA, 25 bp, Homo sapien
gcgcccgggccagcattacttctga

SEQ ID NO: 3957028 - DNA, 25 bp, Homo sapien
gagtttaatctgtgctctggcgccc

SEQ ID NO: 3957029 - DNA, 25 bp, Homo sapien
agagtttaatctgtgctctggcgcc

SEQ ID NO: 3957030 - DNA, 25 bp, Homo sapien
ccagagacaggatgcacggggactc

SEQ ID NO: 3957031 - DNA, 25 bp, Homo sapien
agcccctacccggcaagagaggcat

SEQ ID NO: 3957032 - DNA, 25 bp, Homo sapien
ccctacccggcaagagaggcatcac

SEQ ID NO: 3957033 - DNA, 25 bp, Homo sapien
gccagagacaggatgcacggggact

SEQ ID NO: 3957034 - DNA, 25 bp, Homo sapien
tgaacccgatatcccaggcctggga

SEQ ID NO: 3957035 - DNA, 25 bp, Homo sapien
ttagccaagccagcgtcagtgtcac

SEQ ID NO: 3957036 - DNA, 25 bp, Homo sapien
tgaccaagtggagtgctgtgactgt

SEQ ID NO: 3957037 - DNA, 25 bp, Homo sapien
gacccggcttgagccaacttagcca

SEQ ID NO: 3957038 - DNA, 25 bp, Homo sapien
gatgctttgtaaaggacttcctgtt

SEQ ID NO: 3957039 - DNA, 25 bp, Homo sapien
ccactgaagagggaatccagggcaa

SEQ ID NO: 3957040 - DNA, 25 bp, Homo sapien
ctgggccaccagtctctaaccccta

SEQ ID NO: 3957041 - DNA, 25 bp, Homo sapien
gttcttggggacataactctcgtcc

SEQ ID NO: 3957042 - DNA, 25 bp, Homo sapien
agaggctccttcagtggaattttgc

SEQ ID NO: 3957043 - DNA, 25 bp, Homo sapien
gcattccttggccaacacatgcttc

SEQ ID NO: 3957044 - DNA, 25 bp, Homo sapien
ttggccaacacatgcttcagccgcg

SEQ ID NO: 3957045 - DNA, 25 bp, Homo sapien
gggcacagaggctccttcagtggaa

SEQ ID NO: 3957046 - DNA, 25 bp, Homo sapien
ctgaatcccggacaggtgcagagcc

SEQ ID NO: 3957047 - DNA, 25 bp, Homo sapien
tcacctgggtataaatgcacacttg

SEQ ID NO: 3957048 - DNA, 25 bp, Homo sapien
tagctgggctgcgtttacagaactg

SEQ ID NO: 3957049 - DNA, 25 bp, Homo sapien
gacacagaaggctccgctggacttt

SEQ ID NO: 3957050 - DNA, 25 bp, Homo sapien
gcagatgcttaagccccacctatta

SEQ ID NO: 3957051 - DNA, 25 bp, Homo sapien
aattacactctttgaagccacttag

SEQ ID NO: 3957052 - DNA, 25 bp, Homo sapien
tagccgagcagatgcttaagcccca

SEQ ID NO: 3957053 - DNA, 25 bp, Homo sapien
tgaagccacttagccgagcagatgc

SEQ ID NO: 3957054 - DNA, 25 bp, Homo sapien
tcacatcccctagagtggagactcc

SEQ ID NO: 3957055 - DNA, 25 bp, Homo sapien
caaaaggtcggctatgctgtcaaca

SEQ ID NO: 3957056 - DNA, 25 bp, Homo sapien
cagtcgaaaatgaagcggctgggct

SEQ ID NO: 3957057 - DNA, 25 bp, Homo sapien
tgatgccgtattcctgggacacgca

SEQ ID NO: 3957058 - DNA, 25 bp, Homo sapien
cacaggggaccgggtcaaagggcag

SEQ ID NO: 3957059 - DNA, 25 bp, Homo sapien
gcacaggggaccgggtcaaagggca

SEQ ID NO: 3957060 - DNA, 25 bp, Homo sapien
tgaagcggccgttctcaagcggaag

SEQ ID NO: 3957061 - DNA, 25 bp, Homo sapien
ctgaagtgcgggtcaaagcccacca

SEQ ID NO: 3957062 - DNA, 25 bp, Homo sapien
tgagcttcatgtagctgaagtgcgg

SEQ ID NO: 3957063 - DNA, 25 bp, Homo sapien
ggttgtccatgttggtgcccacgag

SEQ ID NO: 3957064 - DNA, 25 bp, Homo sapien
gtaggccgtgccgaagacctccagg

SEQ ID NO: 3957065 - DNA, 25 bp, Homo sapien
ctggcgcaggtagagcgcggtgcag

SEQ ID NO: 3957066 - DNA, 25 bp, Homo sapien
gcgcggtgcagtaggccgtgccgaa

SEQ ID NO: 3957067 - DNA, 25 bp, Homo sapien
ggtagagcgcggtgcagtaggccgt

SEQ ID NO: 3957068 - DNA, 25 bp, Homo sapien
gtgatgaagcccaggcgcttgccgc

SEQ ID NO: 3957069 - DNA, 25 bp, Homo sapien
tcggcgtaggcagcgcgggtcttgc

SEQ ID NO: 3957070 - DNA, 25 bp, Homo sapien
cgccgtcgcagtcgaacagcagcgt

SEQ ID NO: 3957071 - DNA, 25 bp, Homo sapien
caggcgccgcagcttctcggcgtag

SEQ ID NO: 3957072 - DNA, 25 bp, Homo sapien
cacgcagcgggcgtcgtcgccaccg

SEQ ID NO: 3957073 - DNA, 25 bp, Homo sapien
gggcgtcgtcgccaccggcctccgc

SEQ ID NO: 3957074 - DNA, 25 bp, Homo sapien
ctcagccgcacgcagcgggcgtcgt

SEQ ID NO: 3957075 - DNA, 25 bp, Homo sapien
tcagccgcacgcagcgggcgtcgtc

SEQ ID NO: 3957076 - DNA, 25 bp, Homo sapien
cgatcattggctaccggccttggga

SEQ ID NO: 3957077 - DNA, 25 bp, Homo sapien
agctcagcgccaatcggtgaggccc

SEQ ID NO: 3957078 - DNA, 25 bp, Homo sapien
accggcattcggagtgaagcgctcg

SEQ ID NO: 3957079 - DNA, 25 bp, Homo sapien
gtgattggctggcagggctccaacc

SEQ ID NO: 3957080 - DNA, 25 bp, Homo sapien
gtgagtacgcgcctcagtcctttgc

SEQ ID NO: 3957081 - DNA, 25 bp, Homo sapien
ccggcaggcgtgagtacgcgcctca

SEQ ID NO: 3957082 - DNA, 25 bp, Homo sapien
gtacgcgcctcagtcctttgcaaaa

SEQ ID NO: 3957083 - DNA, 25 bp, Homo sapien
caggcgtgagtacgcgcctcagtcc

SEQ ID NO: 3957084 - DNA, 25 bp, Homo sapien
cttggaggtaacacgaaccagccat

SEQ ID NO: 3957085 - DNA, 25 bp, Homo sapien
cggcgcccttcagcgaggaaggtaa

SEQ ID NO: 3957086 - DNA, 25 bp, Homo sapien
ggtgacggccgctcatacggcagaa

SEQ ID NO: 3957087 - DNA, 25 bp, Homo sapien
ttcctgcggcgcgttgcgacatgga

SEQ ID NO: 3957088 - DNA, 25 bp, Homo sapien
gacgacatggtcgtaaatccgccat

SEQ ID NO: 3957089 - DNA, 25 bp, Homo sapien
catcctgggtactctgtgtgtgccc

SEQ ID NO: 3957090 - DNA, 25 bp, Homo sapien
gccactcagagctcggaatgttcat

SEQ ID NO: 3957091 - DNA, 25 bp, Homo sapien
tcacctgggagcatgaactccttag

SEQ ID NO: 3957092 - DNA, 25 bp, Homo sapien
aaggagctgtctagggacctgatgc

SEQ ID NO: 3957093 - DNA, 25 bp, Homo sapien
gcatcggagccttcaacattcagag

SEQ ID NO: 3957094 - DNA, 25 bp, Homo sapien
cattcagagcttcggtgacagcaaa

SEQ ID NO: 3957095 - DNA, 25 bp, Homo sapien
ccttggtgccagagctactgccaga

SEQ ID NO: 3957096 - DNA, 25 bp, Homo sapien
cacatccaaggtgagtctctcggct

SEQ ID NO: 3957097 - DNA, 25 bp, Homo sapien
ccgtaagcctgtggcagcccaatcg

SEQ ID NO: 3957098 - DNA, 25 bp, Homo sapien
ggccgtaagcctgtggcagcccaat

SEQ ID NO: 3957099 - DNA, 25 bp, Homo sapien
acaggggcacgtgtggccgtaagcc

SEQ ID NO: 3957100 - DNA, 25 bp, Homo sapien
gtggccgtaagcctgtggcagccca

SEQ ID NO: 3957101 - DNA, 25 bp, Homo sapien
cctttcgcatcatggccttggtcag

SEQ ID NO: 3957102 - DNA, 25 bp, Homo sapien
aagttctgcacgtccgcatcgcgct

SEQ ID NO: 3957103 - DNA, 25 bp, Homo sapien
tttggagatgaagctgacgaagttc

SEQ ID NO: 3957104 - DNA, 25 bp, Homo sapien
tctttgagcctctctaagtacatct

SEQ ID NO: 3957105 - DNA, 25 bp, Homo sapien
gaatatttccacgacgcaggaggct

SEQ ID NO: 3957106 - DNA, 25 bp, Homo sapien
tcagtcatttgtatcagggttggca

SEQ ID NO: 3957107 - DNA, 25 bp, Homo sapien
ggcgtgcacacacatcctggctaat

SEQ ID NO: 3957108 - DNA, 25 bp, Homo sapien
caaggccctgaagctatgaatagtt

SEQ ID NO: 3957109 - DNA, 25 bp, Homo sapien
ttatcaacagtctcccgaagtcacg

SEQ ID NO: 3957110 - DNA, 25 bp, Homo sapien
gggccctggtctataccatcgctga

SEQ ID NO: 3957111 - DNA, 25 bp, Homo sapien
tgtgccccaaaagataggtccaagc

SEQ ID NO: 3957112 - DNA, 25 bp, Homo sapien
tccataaagctttgccggaacacag

SEQ ID NO: 3957113 - DNA, 25 bp, Homo sapien
accacctggtccactatgcccacct

SEQ ID NO: 3957114 - DNA, 25 bp, Homo sapien
gacagcgcagtgctctgcacctgct

SEQ ID NO: 3957115 - DNA, 25 bp, Homo sapien
ctgggctatcgctgacagcgcagtg

SEQ ID NO: 3957116 - DNA, 25 bp, Homo sapien
ccggtgcccgatggtgttctccagg

SEQ ID NO: 3957117 - DNA, 25 bp, Homo sapien
cccaggcgggtctgttccctccaca

SEQ ID NO: 3957118 - DNA, 25 bp, Homo sapien
ccacaacaagcatggagcgtggctg

SEQ ID NO: 3957119 - DNA, 25 bp, Homo sapien
ggtctcattgagtcctatgcagtac

SEQ ID NO: 3957120 - DNA, 25 bp, Homo sapien
cagaaaggggcgatgatgcccagct

SEQ ID NO: 3957121 - DNA, 25 bp, Homo sapien
cagctgggtctcattgagtcctatg

SEQ ID NO: 3957122 - DNA, 25 bp, Homo sapien
gctgggtctcattgagtcctatgca

SEQ ID NO: 3957123 - DNA, 25 bp, Homo sapien
ccaggatgcggtagtcacaggtcag

SEQ ID NO: 3957124 - DNA, 25 bp, Homo sapien
aggatgcggtagtcacaggtcaggg

SEQ ID NO: 3957125 - DNA, 25 bp, Homo sapien
ccgccaggatgcggtagtcacaggt

SEQ ID NO: 3957126 - DNA, 25 bp, Homo sapien
gccaggatgcggtagtcacaggtca

SEQ ID NO: 3957127 - DNA, 25 bp, Homo sapien
tagtcataactgtcatgccccaagg

SEQ ID NO: 3957128 - DNA, 25 bp, Homo sapien
tcttgtctgattgacccaggccagg

SEQ ID NO: 3957129 - DNA, 25 bp, Homo sapien
gagggtcattagttcttcggcaaca

SEQ ID NO: 3957130 - DNA, 25 bp, Homo sapien
tttccaaaatgtgggtccgatcacc

SEQ ID NO: 3957131 - DNA, 25 bp, Homo sapien
ttccaagggcaggacagtgtctgtc

SEQ ID NO: 3957132 - DNA, 25 bp, Homo sapien
gctggcccagaacagccagcgaggc

SEQ ID NO: 3957133 - DNA, 25 bp, Homo sapien
ccttcccctgtgagagattccaagg

SEQ ID NO: 3957134 - DNA, 25 bp, Homo sapien
ctcagggcctctccaaccgtcccct

SEQ ID NO: 3957135 - DNA, 25 bp, Homo sapien
gttggactggtacaaccgcagccac

SEQ ID NO: 3957136 - DNA, 25 bp, Homo sapien
tccgtcaggtccaggccggccgaga

SEQ ID NO: 3957137 - DNA, 25 bp, Homo sapien
gagaccagcaccaggttggactggt

SEQ ID NO: 3957138 - DNA, 25 bp, Homo sapien
acggccttccagtacccagcgtagt

SEQ ID NO: 3957139 - DNA, 25 bp, Homo sapien
tgcttactgcccctcggcgatgttg

SEQ ID NO: 3957140 - DNA, 25 bp, Homo sapien
ctgcccctcggcgatgttggtaatg

SEQ ID NO: 3957141 - DNA, 25 bp, Homo sapien
cccctcggcgatgttggtaatgaca

SEQ ID NO: 3957142 - DNA, 25 bp, Homo sapien
cccgcttctcctcaagggtcccatc

SEQ ID NO: 3957143 - DNA, 25 bp, Homo sapien
tgaccagctccgtcagaaactccag

SEQ ID NO: 3957144 - DNA, 25 bp, Homo sapien
cgaggtcagaatgacaccgcggaag

SEQ ID NO: 3957145 - DNA, 25 bp, Homo sapien
caccgcggaagctcttgtcattctc

SEQ ID NO: 3957146 - DNA, 25 bp, Homo sapien
ctgatgaccagctccgtcagaaact

SEQ ID NO: 3957147 - DNA, 25 bp, Homo sapien
gagcggcaaggttctgtttcgaaac

SEQ ID NO: 3957148 - DNA, 25 bp, Homo sapien
aggtagagcggcaaggttctgtttc

SEQ ID NO: 3957149 - DNA, 25 bp, Homo sapien
acgaacgaacccaggtagagcggca

SEQ ID NO: 3957150 - DNA, 25 bp, Homo sapien
ttatctcatgacgaacgaacccagg

SEQ ID NO: 3957151 - DNA, 25 bp, Homo sapien
ccgcgtccggctccaccagcacccg

SEQ ID NO: 3957152 - DNA, 25 bp, Homo sapien
cacccgctggctcccgaagcgccgc

SEQ ID NO: 3957153 - DNA, 25 bp, Homo sapien
gcccgcgtccggctccaccagcacc

SEQ ID NO: 3957154 - DNA, 25 bp, Homo sapien
ccagcacccgctggctcccgaagcg

SEQ ID NO: 3957155 - DNA, 25 bp, Homo sapien
cgaaggcagcgtgggggagcccgtt

SEQ ID NO: 3957156 - DNA, 25 bp, Homo sapien
ctgcgaaggcagcgtgggggagccc

SEQ ID NO: 3957157 - DNA, 25 bp, Homo sapien
aaggcagcgtgggggagcccgttag

SEQ ID NO: 3957158 - DNA, 25 bp, Homo sapien
gcagcgtgggggagcccgttagttc

SEQ ID NO: 3957159 - DNA, 25 bp, Homo sapien
agcagaacgcgcgccgggactcgca

SEQ ID NO: 3957160 - DNA, 25 bp, Homo sapien
cgcgcggagcagaacgcgcgccggg

SEQ ID NO: 3957161 - DNA, 25 bp, Homo sapien
gggactcgcacagaagccaccagcg

SEQ ID NO: 3957162 - DNA, 25 bp, Homo sapien
acgcgcgccgggactcgcacagaag

SEQ ID NO: 3957163 - DNA, 25 bp, Homo sapien
tgaccgcaacgcgcgggataaaggt

SEQ ID NO: 3957164 - DNA, 25 bp, Homo sapien
gaccgcaacgcgcgggataaaggtc

SEQ ID NO: 3957165 - DNA, 25 bp, Homo sapien
cttgaccgcaacgcgcgggataaag

SEQ ID NO: 3957166 - DNA, 25 bp, Homo sapien
ttgaccgcaacgcgcgggataaagg

SEQ ID NO: 3957167 - DNA, 25 bp, Homo sapien
cagaacccagcggtaagaacaggcc

SEQ ID NO: 3957168 - DNA, 25 bp, Homo sapien
agctactgcagtatcggcgctggaa

SEQ ID NO: 3957169 - DNA, 25 bp, Homo sapien
tacagcgcgggacactgtaggcaag

SEQ ID NO: 3957170 - DNA, 25 bp, Homo sapien
tggaaaggcgatcaaagcacggaac

SEQ ID NO: 3957171 - DNA, 25 bp, Homo sapien
ccgatgcacacaccgcaccccacca

SEQ ID NO: 3957172 - DNA, 25 bp, Homo sapien
atgacattgtgtttgtactttgttg

SEQ ID NO: 3957173 - DNA, 25 bp, Homo sapien
atcctctcacccatggtagttgctg

SEQ ID NO: 3957174 - DNA, 25 bp, Homo sapien
tcaggttatcttggcaacatgtaca

SEQ ID NO: 3957175 - DNA, 25 bp, Homo sapien
aaagatcctctcacccatggtagtt

SEQ ID NO: 3957176 - DNA, 25 bp, Homo sapien
ctttgttgtgtagagtggaagaatt

SEQ ID NO: 3957177 - DNA, 25 bp, Homo sapien
tggtctttcaggttatcttggcaac

SEQ ID NO: 3957178 - DNA, 25 bp, Homo sapien
tgtacatgttgccaagataacctga

SEQ ID NO: 3957179 - DNA, 25 bp, Homo sapien
caacaaagtacaaacacaatgtcat

SEQ ID NO: 3957180 - DNA, 25 bp, Homo sapien
tgttgccaagataacctgaaagacc

SEQ ID NO: 3957181 - DNA, 25 bp, Homo sapien
aattcttccactctacacaacaaag

SEQ ID NO: 3957182 - DNA, 25 bp, Homo sapien
caactaccatgggtgagaggatctt

SEQ ID NO: 3957183 - DNA, 25 bp, Homo sapien
cagcaactaccatgggtgagaggat

SEQ ID NO: 3957184 - DNA, 25 bp, Homo sapien
tggtggggtgcggtgtgtgcatcgg

SEQ ID NO: 3957185 - DNA, 25 bp, Homo sapien
agctcatccgtttccggtttctaag

SEQ ID NO: 3957186 - DNA, 25 bp, Homo sapien
gctcatccgtttccggtttctaaga

SEQ ID NO: 3957187 - DNA, 25 bp, Homo sapien
ctcatccgtttccggtttctaagag

SEQ ID NO: 3957188 - DNA, 25 bp, Homo sapien
cttagaaaccggaaacggatgagct

SEQ ID NO: 3957189 - DNA, 25 bp, Homo sapien
ctcttagaaaccggaaacggatgag

SEQ ID NO: 3957190 - DNA, 25 bp, Homo sapien
tcttagaaaccggaaacggatgagc

SEQ ID NO: 3957191 - DNA, 25 bp, Homo sapien
agctcatccgtttccggtttctaag

SEQ ID NO: 3957192 - DNA, 25 bp, Homo sapien
tccggtttctaagagtcagttcagt

SEQ ID NO: 3957193 - DNA, 25 bp, Homo sapien
ctaagagtcagttcagtggcagagc

SEQ ID NO: 3957194 - DNA, 25 bp, Homo sapien
gctcatccgtttccggtttctaaga

SEQ ID NO: 3957195 - DNA, 25 bp, Homo sapien
ctcatccgtttccggtttctaagag

SEQ ID NO: 3957196 - DNA, 25 bp, Homo sapien
tggctagaaagctcatccgtttccg

SEQ ID NO: 3957197 - DNA, 25 bp, Homo sapien
cttagaaaccggaaacggatgagct

SEQ ID NO: 3957198 - DNA, 25 bp, Homo sapien
ctcttagaaaccggaaacggatgag

SEQ ID NO: 3957199 - DNA, 25 bp, Homo sapien
gctctgccactgaactgactcttag

SEQ ID NO: 3957200 - DNA, 25 bp, Homo sapien
cactgaactgactcttagaaaccgg

SEQ ID NO: 3957201 - DNA, 25 bp, Homo sapien
acggatgagctttctagccagaaaa

SEQ ID NO: 3957202 - DNA, 25 bp, Homo sapien
tcttagaaaccggaaacggatgagc

SEQ ID NO: 3957203 - DNA, 25 bp, Homo sapien
gaaagcaaacccttgactctggcag

SEQ ID NO: 3957204 - DNA, 25 bp, Homo sapien
ctgccagagtcaagggtttgctttc

SEQ ID NO: 3957205 - DNA, 25 bp, Homo sapien
ccccggctgcagaagtgctgttggt

SEQ ID NO: 3957206 - DNA, 25 bp, Homo sapien
ctgttggtttggatgctgtgtgcct

SEQ ID NO: 3957207 - DNA, 25 bp, Homo sapien
tgtgtgcctgtcaagattccctccg

SEQ ID NO: 3957208 - DNA, 25 bp, Homo sapien
actctggcaggatttgcaggcagca

SEQ ID NO: 3957209 - DNA, 25 bp, Homo sapien
gaaagcaaacccttgactctggcag

SEQ ID NO: 3957210 - DNA, 25 bp, Homo sapien
ttctagccaaaggaagaccagtagg

SEQ ID NO: 3957211 - DNA, 25 bp, Homo sapien
tgccagagtcaagggtttgctttcc

SEQ ID NO: 3957212 - DNA, 25 bp, Homo sapien
cctactggtcttcctttggctagaa

SEQ ID NO: 3957213 - DNA, 25 bp, Homo sapien
aaaccaacagcacttctgcagccgg

SEQ ID NO: 3957214 - DNA, 25 bp, Homo sapien
aggcacacagcatccaaaccaacag

SEQ ID NO: 3957215 - DNA, 25 bp, Homo sapien
cggagggaatcttgacaggcacaca

SEQ ID NO: 3957216 - DNA, 25 bp, Homo sapien
tgctgcctgcaaatcctgccagagt

SEQ ID NO: 3957217 - DNA, 25 bp, Homo sapien
aggccactgaagctctcgcccctgt

SEQ ID NO: 3957218 - DNA, 25 bp, Homo sapien
ggccactgaagctctcgcccctgta

SEQ ID NO: 3957219 - DNA, 25 bp, Homo sapien
actgaagctctcgcccctgtaactt

SEQ ID NO: 3957220 - DNA, 25 bp, Homo sapien
gccactgaagctctcgcccctgtaa

SEQ ID NO: 3957221 - DNA, 25 bp, Homo sapien
aagctctcgcccctgtaacttatac

SEQ ID NO: 3957222 - DNA, 25 bp, Homo sapien
cactgaagctctcgcccctgtaact

SEQ ID NO: 3957223 - DNA, 25 bp, Homo sapien
taagttacaggggcgagagcttcag

SEQ ID NO: 3957224 - DNA, 25 bp, Homo sapien
tacaggggcgagagcttcagtggcc

SEQ ID NO: 3957225 - DNA, 25 bp, Homo sapien
ttacaggggcgagagcttcagtggc

SEQ ID NO: 3957226 - DNA, 25 bp, Homo sapien
gtataagttacaggggcgagagctt

SEQ ID NO: 3957227 - DNA, 25 bp, Homo sapien
agttacaggggcgagagcttcagtg

SEQ ID NO: 3957228 - DNA, 25 bp, Homo sapien
gttacaggggcgagagcttcagtgg

SEQ ID NO: 3957229 - DNA, 25 bp, Homo sapien
cgtgcgccggagatcacggtccccg

SEQ ID NO: 3957230 - DNA, 25 bp, Homo sapien
gtgcgccggagatcacggtccccgg

SEQ ID NO: 3957231 - DNA, 25 bp, Homo sapien
tgcgccggagatcacggtccccggg

SEQ ID NO: 3957232 - DNA, 25 bp, Homo sapien
gcgccggagatcacggtccccgggc

SEQ ID NO: 3957233 - DNA, 25 bp, Homo sapien
ctccccgaggcgcaggtcccccgtg

SEQ ID NO: 3957234 - DNA, 25 bp, Homo sapien
cgcaggtcccccgtgcgccggagat

SEQ ID NO: 3957235 - DNA, 25 bp, Homo sapien
cacgggggacctgcgcctcggggag

SEQ ID NO: 3957236 - DNA, 25 bp, Homo sapien
gcacgggggacctgcgcctcgggga

SEQ ID NO: 3957237 - DNA, 25 bp, Homo sapien
cccggggaccgtgatctccggcgca

SEQ ID NO: 3957238 - DNA, 25 bp, Homo sapien
ggcgcacgggggacctgcgcctcgg

SEQ ID NO: 3957239 - DNA, 25 bp, Homo sapien
cggggaccgtgatctccggcgcacg

SEQ ID NO: 3957240 - DNA, 25 bp, Homo sapien
atctccggcgcacgggggacctgcg

SEQ ID NO: 3957241 - DNA, 25 bp, Homo sapien
ggtctcccccacggatgaggagaag

SEQ ID NO: 3957242 - DNA, 25 bp, Homo sapien
caggtctcccccacggatgaggaga

SEQ ID NO: 3957243 - DNA, 25 bp, Homo sapien
atgttgccaccaccgcctatgtggc

SEQ ID NO: 3957244 - DNA, 25 bp, Homo sapien
aggtctcccccacggatgaggagaa

SEQ ID NO: 3957245 - DNA, 25 bp, Homo sapien
ttctcctcatccgtgggggagacct

SEQ ID NO: 3957246 - DNA, 25 bp, Homo sapien
tctcctcatccgtgggggagacctg

SEQ ID NO: 3957247 - DNA, 25 bp, Homo sapien
gccacataggcggtggtggcaacat

SEQ ID NO: 3957248 - DNA, 25 bp, Homo sapien
cttctcctcatccgtgggggagacc

SEQ ID NO: 3957249 - DNA, 25 bp, Homo sapien
gacaaattgatggccaggagatcac

SEQ ID NO: 3957250 - DNA, 25 bp, Homo sapien
acaaattgatggccaggagatcact

SEQ ID NO: 3957251 - DNA, 25 bp, Homo sapien
agtgatctcctggccatcaatttgt

SEQ ID NO: 3957252 - DNA, 25 bp, Homo sapien
gtgatctcctggccatcaatttgtc

SEQ ID NO: 3957253 - DNA, 25 bp, Homo sapien
ccagcacggcggtggcagtgatctc

SEQ ID NO: 3957254 - DNA, 25 bp, Homo sapien
ggtggcagtgatctcctggccatca

SEQ ID NO: 3957255 - DNA, 25 bp, Homo sapien
ggcagtgatctcctggccatcaatt

SEQ ID NO: 3957256 - DNA, 25 bp, Homo sapien
cagtgatctcctggccatcaatttg

SEQ ID NO: 3957257 - DNA, 25 bp, Homo sapien
cagcacggcggtggcagtgatctcc

SEQ ID NO: 3957258 - DNA, 25 bp, Homo sapien
gcggtggcagtgatctcctggccat

SEQ ID NO: 3957259 - DNA, 25 bp, Homo sapien
gctgtgaaatccctaatttgggcta

SEQ ID NO: 3957260 - DNA, 25 bp, Homo sapien
tgaatacatagccacatgccggagt

SEQ ID NO: 3957261 - DNA, 25 bp, Homo sapien
gctaccagacaattcttgaggtcgg

SEQ ID NO: 3957262 - DNA, 25 bp, Homo sapien
tctccgtcagtggaagttcacacct

SEQ ID NO: 3957263 - DNA, 25 bp, Homo sapien
caaacgcggatactgcctgcatggt

SEQ ID NO: 3957264 - DNA, 25 bp, Homo sapien
gagttagtccccatgtgccttaaag

SEQ ID NO: 3957265 - DNA, 25 bp, Homo sapien
ggtgtgaacttccactgacggagag

SEQ ID NO: 3957266 - DNA, 25 bp, Homo sapien
gagtcatccaagtcaagagctaaag

SEQ ID NO: 3957267 - DNA, 25 bp, Homo sapien
catgccacagtgaaagacaggcctg

SEQ ID NO: 3957268 - DNA, 25 bp, Homo sapien
gaagttctcttaggagggctctgca

SEQ ID NO: 3957269 - DNA, 25 bp, Homo sapien
catgcaggcagtatccgcgtttgcg

SEQ ID NO: 3957270 - DNA, 25 bp, Homo sapien
caataaatcagctgtgcgaggtggc

SEQ ID NO: 3957271 - DNA, 25 bp, Homo sapien
tgcagcattttgaggcatgtggagt

SEQ ID NO: 3957272 - DNA, 25 bp, Homo sapien
gcagcattttgaggcatgtggagtc

SEQ ID NO: 3957273 - DNA, 25 bp, Homo sapien
gcattttgaggcatgtggagtcatc

SEQ ID NO: 3957274 - DNA, 25 bp, Homo sapien
cattttgaggcatgtggagtcatct

SEQ ID NO: 3957275 - DNA, 25 bp, Homo sapien
agcattttgaggcatgtggagtcat

SEQ ID NO: 3957276 - DNA, 25 bp, Homo sapien
cagcattttgaggcatgtggagtca

SEQ ID NO: 3957277 - DNA, 25 bp, Homo sapien
tgactgaggccgctggcactgagaa

SEQ ID NO: 3957278 - DNA, 25 bp, Homo sapien
gactgaggccgctggcactgagaac

SEQ ID NO: 3957279 - DNA, 25 bp, Homo sapien
ttctcagtgccagcggcctcagtca

SEQ ID NO: 3957280 - DNA, 25 bp, Homo sapien
gttctcagtgccagcggcctcagtc

SEQ ID NO: 3957281 - DNA, 25 bp, Homo sapien
gactccacatgcctcaaaatgctgc

SEQ ID NO: 3957282 - DNA, 25 bp, Homo sapien
tgactccacatgcctcaaaatgctg

SEQ ID NO: 3957283 - DNA, 25 bp, Homo sapien
gatgactccacatgcctcaaaatgc

SEQ ID NO: 3957284 - DNA, 25 bp, Homo sapien
actccacatgcctcaaaatgctgca

SEQ ID NO: 3957285 - DNA, 25 bp, Homo sapien
agatgactccacatgcctcaaaatg

SEQ ID NO: 3957286 - DNA, 25 bp, Homo sapien
atgactccacatgcctcaaaatgct

SEQ ID NO: 3957287 - DNA, 25 bp, Homo sapien
tgattttgggacacatatcaataac

SEQ ID NO: 3957288 - DNA, 25 bp, Homo sapien
gattacaggcaacctccactatatc

SEQ ID NO: 3957289 - DNA, 25 bp, Homo sapien
tgctgttaatgttaaaacccaatcc

SEQ ID NO: 3957290 - DNA, 25 bp, Homo sapien
ggtagtgcttcctgtataatttttg

SEQ ID NO: 3957291 - DNA, 25 bp, Homo sapien
gagttttacgtgattttgggacaca

SEQ ID NO: 3957292 - DNA, 25 bp, Homo sapien
tgtacactaggatatattgcaattg

SEQ ID NO: 3957293 - DNA, 25 bp, Homo sapien
caattgcaatatatcctagtgtaca

SEQ ID NO: 3957294 - DNA, 25 bp, Homo sapien
gattgggttttaacattaacagcac

SEQ ID NO: 3957295 - DNA, 25 bp, Homo sapien
tcacgtaaaactcctacaattgcaa

SEQ ID NO: 3957296 - DNA, 25 bp, Homo sapien
tgatatgtgtcccaaaatcacgtaa

SEQ ID NO: 3957297 - DNA, 25 bp, Homo sapien
caaaaattatacaggaagcactacc

SEQ ID NO: 3957298 - DNA, 25 bp, Homo sapien
gatatagtggaggttgcctgtaatc

SEQ ID NO: 3957299 - DNA, 25 bp, Homo sapien
caaacacagcgctggagtggaagag

SEQ ID NO: 3957300 - DNA, 25 bp, Homo sapien
cacgagaatcgtagggagatgaagc

SEQ ID NO: 3957301 - DNA, 25 bp, Homo sapien
gaggtggatttgttcccggtagcac

SEQ ID NO: 3957302 - DNA, 25 bp, Homo sapien
tgaaacgtaataggatgcaacagcc

SEQ ID NO: 3957303 - DNA, 25 bp, Homo sapien
tgcaacagccacacatagaagtagg

SEQ ID NO: 3957304 - DNA, 25 bp, Homo sapien
ttacagggcttgaggaaagcatagc

SEQ ID NO: 3957305 - DNA, 25 bp, Homo sapien
tgtttggtgccccatgacgacaacc

SEQ ID NO: 3957306 - DNA, 25 bp, Homo sapien
tccactccagcgctgtgtttggtgc

SEQ ID NO: 3957307 - DNA, 25 bp, Homo sapien
gcatcctattacgtttcagcaggtg

SEQ ID NO: 3957308 - DNA, 25 bp, Homo sapien
gcagcaacctacttctatgtgtggc

SEQ ID NO: 3957309 - DNA, 25 bp, Homo sapien
taagctatgctttcctcaagccctg

SEQ ID NO: 3957310 - DNA, 25 bp, Homo sapien
cagaaagtgctaccgggaacaaatc

SEQ ID NO: 3957311 - DNA, 25 bp, Homo sapien
accctgacctctcagagacccgccg

SEQ ID NO: 3957312 - DNA, 25 bp, Homo sapien
ctgacctctcagagacccgccgccg

SEQ ID NO: 3957313 - DNA, 25 bp, Homo sapien
tgacctctcagagacccgccgccgc

SEQ ID NO: 3957314 - DNA, 25 bp, Homo sapien
gccacataaccctgacctctcagag

SEQ ID NO: 3957315 - DNA, 25 bp, Homo sapien
ccctgacctctcagagacccgccgc

SEQ ID NO: 3957316 - DNA, 25 bp, Homo sapien
tgccacataaccctgacctctcaga

SEQ ID NO: 3957317 - DNA, 25 bp, Homo sapien
cggcgggtctctgagaggtcagggt

SEQ ID NO: 3957318 - DNA, 25 bp, Homo sapien
gcggcggcgggtctctgagaggtca

SEQ ID NO: 3957319 - DNA, 25 bp, Homo sapien
ctctgagaggtcagggttatgtggc

SEQ ID NO: 3957320 - DNA, 25 bp, Homo sapien
gcggcgggtctctgagaggtcaggg

SEQ ID NO: 3957321 - DNA, 25 bp, Homo sapien
cggcggcgggtctctgagaggtcag

SEQ ID NO: 3957322 - DNA, 25 bp, Homo sapien
tctgagaggtcagggttatgtggca

SEQ ID NO: 3957323 - DNA, 25 bp, Homo sapien
ggatgcatccccatctgtccaaagg

SEQ ID NO: 3957324 - DNA, 25 bp, Homo sapien
taaaatgattgacatgcccgtggaa

SEQ ID NO: 3957325 - DNA, 25 bp, Homo sapien
ttccacgggcatgtcaatcatttta

SEQ ID NO: 3957326 - DNA, 25 bp, Homo sapien
cctttggacagatggggatgcatcc

SEQ ID NO: 3957327 - DNA, 25 bp, Homo sapien
tcagcgccttctcggcttcatctgg

SEQ ID NO: 3957328 - DNA, 25 bp, Homo sapien
tacgcatagcctttggacagatggg

SEQ ID NO: 3957329 - DNA, 25 bp, Homo sapien
tccacgggcatgtcaatcattttaa

SEQ ID NO: 3957330 - DNA, 25 bp, Homo sapien
ttcccataggtggaaaatatctcca

SEQ ID NO: 3957331 - DNA, 25 bp, Homo sapien
gggatgcatcctttccacgggcatg

SEQ ID NO: 3957332 - DNA, 25 bp, Homo sapien
ggattctcaaactctacgtacgcat

SEQ ID NO: 3957333 - DNA, 25 bp, Homo sapien
gtgaggatcatggatctctcctgtg

SEQ ID NO: 3957334 - DNA, 25 bp, Homo sapien
gaggatcatggatctctcctgtggg

SEQ ID NO: 3957335 - DNA, 25 bp, Homo sapien
tgaggatcatggatctctcctgtgg

SEQ ID NO: 3957336 - DNA, 25 bp, Homo sapien
ccacaggagagatccatgatcctca

SEQ ID NO: 3957337 - DNA, 25 bp, Homo sapien
cacaggagagatccatgatcctcac

SEQ ID NO: 3957338 - DNA, 25 bp, Homo sapien
cccacaggagagatccatgatcctc

SEQ ID NO: 3957339 - DNA, 25 bp, Homo sapien
ccaaagtgcacattgggagactcac

SEQ ID NO: 3957340 - DNA, 25 bp, Homo sapien
caccaaagtgcacattgggagactc

SEQ ID NO: 3957341 - DNA, 25 bp, Homo sapien
taagcccaccaaagtgcacattggg

SEQ ID NO: 3957342 - DNA, 25 bp, Homo sapien
gcccaccaaagtgcacattgggaga

SEQ ID NO: 3957343 - DNA, 25 bp, Homo sapien
tcctaagcccaccaaagtgcacatt

SEQ ID NO: 3957344 - DNA, 25 bp, Homo sapien
aagcccaccaaagtgcacattggga

SEQ ID NO: 3957345 - DNA, 25 bp, Homo sapien
tcccaatgtgcactttggtgggctt

SEQ ID NO: 3957346 - DNA, 25 bp, Homo sapien
ccaatgtgcactttggtgggcttag

SEQ ID NO: 3957347 - DNA, 25 bp, Homo sapien
tctcccaatgtgcactttggtgggc

SEQ ID NO: 3957348 - DNA, 25 bp, Homo sapien
aatgtgcactttggtgggcttagga

SEQ ID NO: 3957349 - DNA, 25 bp, Homo sapien
gtgagtctcccaatgtgcactttgg

SEQ ID NO: 3957350 - DNA, 25 bp, Homo sapien
gagtctcccaatgtgcactttggtg

SEQ ID NO: 3957351 - DNA, 25 bp, Homo sapien
tctccaagtccttctcggcgcagac

SEQ ID NO: 3957352 - DNA, 25 bp, Homo sapien
ctccaagtccttctcggcgcagaca

SEQ ID NO: 3957353 - DNA, 25 bp, Homo sapien
ccaagtccttctcggcgcagacacg

SEQ ID NO: 3957354 - DNA, 25 bp, Homo sapien
tccaagtccttctcggcgcagacac

SEQ ID NO: 3957355 - DNA, 25 bp, Homo sapien
gtgtctgcgccgagaaggacttgga

SEQ ID NO: 3957356 - DNA, 25 bp, Homo sapien
cgtgtctgcgccgagaaggacttgg

SEQ ID NO: 3957357 - DNA, 25 bp, Homo sapien
gtctgcgccgagaaggacttggaga

SEQ ID NO: 3957358 - DNA, 25 bp, Homo sapien
tgtctgcgccgagaaggacttggag

SEQ ID NO: 3957359 - DNA, 25 bp, Homo sapien
tctcggtccagctcgacttccagct

SEQ ID NO: 3957360 - DNA, 25 bp, Homo sapien
gtctcggtccagctcgacttccagc

SEQ ID NO: 3957361 - DNA, 25 bp, Homo sapien
gctggaagtcgagctggaccgagac

SEQ ID NO: 3957362 - DNA, 25 bp, Homo sapien
agctggaagtcgagctggaccgaga

SEQ ID NO: 3957363 - DNA, 25 bp, Homo sapien
gcactggctcaagcagtggctccag

SEQ ID NO: 3957364 - DNA, 25 bp, Homo sapien
atccagccgctcaggaagctccagc

SEQ ID NO: 3957365 - DNA, 25 bp, Homo sapien
agtggctccagctcttcctcagcat

SEQ ID NO: 3957366 - DNA, 25 bp, Homo sapien
caccagcactggctcaagcagtggc

SEQ ID NO: 3957367 - DNA, 25 bp, Homo sapien
ttcctcagcatccagccgctcagga

SEQ ID NO: 3957368 - DNA, 25 bp, Homo sapien
ggtccagctcgacttccagctcagg

SEQ ID NO: 3957369 - DNA, 25 bp, Homo sapien
gctggagcttcctgagcggctggat

SEQ ID NO: 3957370 - DNA, 25 bp, Homo sapien
cttcctgagcggctggatgctgagg

SEQ ID NO: 3957371 - DNA, 25 bp, Homo sapien
cctgagctggaagtcgagctggacc

SEQ ID NO: 3957372 - DNA, 25 bp, Homo sapien
gagccactgcttgagccagtgctgg

SEQ ID NO: 3957373 - DNA, 25 bp, Homo sapien
atgctgaggaagagctggagccact

SEQ ID NO: 3957374 - DNA, 25 bp, Homo sapien
tagagctggagctgcgggaggtgct

SEQ ID NO: 3957375 - DNA, 25 bp, Homo sapien
aacacatcctctgattgttagtaga

SEQ ID NO: 3957376 - DNA, 25 bp, Homo sapien
cagatggctcggttttcttgattat

SEQ ID NO: 3957377 - DNA, 25 bp, Homo sapien
gaccctaatttatggcagactggct

SEQ ID NO: 3957378 - DNA, 25 bp, Homo sapien
tagagaccctaatttatggcagact

SEQ ID NO: 3957379 - DNA, 25 bp, Homo sapien
cccacagatggctcggttttcttga

SEQ ID NO: 3957380 - DNA, 25 bp, Homo sapien
gaaaacacatcctctgattgttagt

SEQ ID NO: 3957381 - DNA, 25 bp, Homo sapien
aaataatcaagaaaaccgagccatc

SEQ ID NO: 3957382 - DNA, 25 bp, Homo sapien
tctactaacaatcagaggatgtgtt

SEQ ID NO: 3957383 - DNA, 25 bp, Homo sapien
cagtctgccataaattagggtctct

SEQ ID NO: 3957384 - DNA, 25 bp, Homo sapien
tagccagtctgccataaattagggt

SEQ ID NO: 3957385 - DNA, 25 bp, Homo sapien
tcaagaaaaccgagccatctgtggg

SEQ ID NO: 3957386 - DNA, 25 bp, Homo sapien
taatcaagaaaaccgagccatctgt

SEQ ID NO: 3957387 - DNA, 25 bp, Homo sapien
agtgagaaggatcgcggccgggaca

SEQ ID NO: 3957388 - DNA, 25 bp, Homo sapien
taccaaacgcaaagaccgctcagat

SEQ ID NO: 3957389 - DNA, 25 bp, Homo sapien
tgagaagtccaaggatcgctcaaaa

SEQ ID NO: 3957390 - DNA, 25 bp, Homo sapien
caaagaccgctcagatgagaagtcc

SEQ ID NO: 3957391 - DNA, 25 bp, Homo sapien
gaagtccaaggatcgctcaaaagat

SEQ ID NO: 3957392 - DNA, 25 bp, Homo sapien
caaggatcgctcaaaagataaaggg

SEQ ID NO: 3957393 - DNA, 25 bp, Homo sapien
tcttttgagcgatccttggacttct

SEQ ID NO: 3957394 - DNA, 25 bp, Homo sapien
tgtcccggccgcgatccttctcact

SEQ ID NO: 3957395 - DNA, 25 bp, Homo sapien
tctgagcggtctttgcgtttggtag

SEQ ID NO: 3957396 - DNA, 25 bp, Homo sapien
tcatctgagcggtctttgcgtttgg

SEQ ID NO: 3957397 - DNA, 25 bp, Homo sapien
tggacttctcatctgagcggtcttt

SEQ ID NO: 3957398 - DNA, 25 bp, Homo sapien
ccctttatcttttgagcgatccttg

SEQ ID NO: 3957399 - DNA, 25 bp, Homo sapien
tgatcccccgttttgggttgtgctg

SEQ ID NO: 3957400 - DNA, 25 bp, Homo sapien
ggtttggtcagaggagcacgcaatc

SEQ ID NO: 3957401 - DNA, 25 bp, Homo sapien
tttggtcagaggagcacgcaatctc

SEQ ID NO: 3957402 - DNA, 25 bp, Homo sapien
tgctgatgctgatcccccgttttgg

SEQ ID NO: 3957403 - DNA, 25 bp, Homo sapien
ggtcagaggagcacgcaatctcaca

SEQ ID NO: 3957404 - DNA, 25 bp, Homo sapien
gaggagcacgcaatctcacactctt

SEQ ID NO: 3957405 - DNA, 25 bp, Homo sapien
gaagagtgtgagattgcgtgctcct

SEQ ID NO: 3957406 - DNA, 25 bp, Homo sapien
gagtgtgagattgcgtgctcctctg

SEQ ID NO: 3957407 - DNA, 25 bp, Homo sapien
ccaaaacgggggatcagcatcagca

SEQ ID NO: 3957408 - DNA, 25 bp, Homo sapien
gagattgcgtgctcctctgaccaaa

SEQ ID NO: 3957409 - DNA, 25 bp, Homo sapien
cagcacaacccaaaacgggggatca

SEQ ID NO: 3957410 - DNA, 25 bp, Homo sapien
tgtgagattgcgtgctcctctgacc

SEQ ID NO: 3957411 - DNA, 25 bp, Homo sapien
atggatttatcaggagtgaaaaaga

SEQ ID NO: 3957412 - DNA, 25 bp, Homo sapien
aaaaagaagagcttgctaggagtca

SEQ ID NO: 3957413 - DNA, 25 bp, Homo sapien
gaaaataataaaaagtccagcacta

SEQ ID NO: 3957414 - DNA, 25 bp, Homo sapien
ggagtgaaaaagaagagcttgctag

SEQ ID NO: 3957415 - DNA, 25 bp, Homo sapien
cttgctaggagtcaaagaaaataat

SEQ ID NO: 3957416 - DNA, 25 bp, Homo sapien
gaagagcttgctaggagtcaaagaa

SEQ ID NO: 3957417 - DNA, 25 bp, Homo sapien
tctttttcactcctgataaatccat

SEQ ID NO: 3957418 - DNA, 25 bp, Homo sapien
tagtgctggactttttattattttc

SEQ ID NO: 3957419 - DNA, 25 bp, Homo sapien
tctttgactcctagcaagctcttct

SEQ ID NO: 3957420 - DNA, 25 bp, Homo sapien
ttttctttgactcctagcaagctct

SEQ ID NO: 3957421 - DNA, 25 bp, Homo sapien
tattattttctttgactcctagcaa

SEQ ID NO: 3957422 - DNA, 25 bp, Homo sapien
ctagcaagctcttctttttcactcc

SEQ ID NO: 3957423 - DNA, 25 bp, Homo sapien
tgctgctttgaacacctcagaaggg

SEQ ID NO: 3957424 - DNA, 25 bp, Homo sapien
gtgaggccgccattgctgctttgaa

SEQ ID NO: 3957425 - DNA, 25 bp, Homo sapien
gaggccgccattgctgctttgaaca

SEQ ID NO: 3957426 - DNA, 25 bp, Homo sapien
gccgccattgctgctttgaacacct

SEQ ID NO: 3957427 - DNA, 25 bp, Homo sapien
gctttgaacacctcagaaggggaga

SEQ ID NO: 3957428 - DNA, 25 bp, Homo sapien
ttgctgctttgaacacctcagaagg

SEQ ID NO: 3957429 - DNA, 25 bp, Homo sapien
ttcaaagcagcaatggcggcctcac

SEQ ID NO: 3957430 - DNA, 25 bp, Homo sapien
tctccccttctgaggtgttcaaagc

SEQ ID NO: 3957431 - DNA, 25 bp, Homo sapien
tgttcaaagcagcaatggcggcctc

SEQ ID NO: 3957432 - DNA, 25 bp, Homo sapien
ccccttctgaggtgttcaaagcagc

SEQ ID NO: 3957433 - DNA, 25 bp, Homo sapien
ccttctgaggtgttcaaagcagcaa

SEQ ID NO: 3957434 - DNA, 25 bp, Homo sapien
aggtgttcaaagcagcaatggcggc

SEQ ID NO: 3957435 - DNA, 25 bp, Homo sapien
caatcgattagggatcgtttctcag

SEQ ID NO: 3957436 - DNA, 25 bp, Homo sapien
gctctttggcgtaaattgcaatcga

SEQ ID NO: 3957437 - DNA, 25 bp, Homo sapien
ctcagaatcaagttagaagtgagag

SEQ ID NO: 3957438 - DNA, 25 bp, Homo sapien
taaattgcaatcgattagggatcgt

SEQ ID NO: 3957439 - DNA, 25 bp, Homo sapien
gattagggatcgtttctcagaatca

SEQ ID NO: 3957440 - DNA, 25 bp, Homo sapien
gggatcgtttctcagaatcaagtta

SEQ ID NO: 3957441 - DNA, 25 bp, Homo sapien
gagaaacgatccctaatcgattgca

SEQ ID NO: 3957442 - DNA, 25 bp, Homo sapien
taacttgattctgagaaacgatccc

SEQ ID NO: 3957443 - DNA, 25 bp, Homo sapien
aatcgattgcaatttacgccaaaga

SEQ ID NO: 3957444 - DNA, 25 bp, Homo sapien
tcgattgcaatttacgccaaagagc

SEQ ID NO: 3957445 - DNA, 25 bp, Homo sapien
ctctcacttctaacttgattctgag

SEQ ID NO: 3957446 - DNA, 25 bp, Homo sapien
gattctgagaaacgatccctaatcg

SEQ ID NO: 3957447 - DNA, 25 bp, Homo sapien
gccttgccaattcgttcactcttta

SEQ ID NO: 3957448 - DNA, 25 bp, Homo sapien
aaagtagacttgttgccttgccaat

SEQ ID NO: 3957449 - DNA, 25 bp, Homo sapien
tgcaaagtagacttgttgccttgcc

SEQ ID NO: 3957450 - DNA, 25 bp, Homo sapien
tgactgcaaagtagacttgttgcct

SEQ ID NO: 3957451 - DNA, 25 bp, Homo sapien
caaagtagacttgttgccttgccaa

SEQ ID NO: 3957452 - DNA, 25 bp, Homo sapien
tgccaattcgttcactctttaaacc

SEQ ID NO: 3957453 - DNA, 25 bp, Homo sapien
aagagtgaacgaattggcaaggcaa

SEQ ID NO: 3957454 - DNA, 25 bp, Homo sapien
gcaaggcaacaagtctactttgcag

SEQ ID NO: 3957455 - DNA, 25 bp, Homo sapien
aggcaacaagtctactttgcagtca

SEQ ID NO: 3957456 - DNA, 25 bp, Homo sapien
taaagagtgaacgaattggcaaggc

SEQ ID NO: 3957457 - DNA, 25 bp, Homo sapien
ggtttaaagagtgaacgaattggca

SEQ ID NO: 3957458 - DNA, 25 bp, Homo sapien
ttggcaaggcaacaagtctactttg

SEQ ID NO: 3957459 - DNA, 25 bp, Homo sapien
ttgctaaactcttacatggcaggca

SEQ ID NO: 3957460 - DNA, 25 bp, Homo sapien
tggcaggcagtctctcacgcaattt

SEQ ID NO: 3957461 - DNA, 25 bp, Homo sapien
tgtgcagagccttactagaaatact

SEQ ID NO: 3957462 - DNA, 25 bp, Homo sapien
cacaggaaggtcgagttatacagtt

SEQ ID NO: 3957463 - DNA, 25 bp, Homo sapien
cacataaagaccacttaagggccgg

SEQ ID NO: 3957464 - DNA, 25 bp, Homo sapien
tagaaatactgaaggcagaagtccc

SEQ ID NO: 3957465 - DNA, 25 bp, Homo sapien
aactgtataactcgaccttcctgtg

SEQ ID NO: 3957466 - DNA, 25 bp, Homo sapien
tgcctgccatgtaagagtttagcaa

SEQ ID NO: 3957467 - DNA, 25 bp, Homo sapien
cagaatgtgctcaaataacggtaac

SEQ ID NO: 3957468 - DNA, 25 bp, Homo sapien
gaaattgcgtgagagactgcctgcc

SEQ ID NO: 3957469 - DNA, 25 bp, Homo sapien
aaatgcctggactgcagaatgtgct

SEQ ID NO: 3957470 - DNA, 25 bp, Homo sapien
tatttctagtaaggctctgcacaag

SEQ ID NO: 3957471 - DNA, 25 bp, Homo sapien
gacaagagcagcaaaggtggcgttc

SEQ ID NO: 3957472 - DNA, 25 bp, Homo sapien
ggaatctgcgggtgtgacctccact

SEQ ID NO: 3957473 - DNA, 25 bp, Homo sapien
caaggcgtccgcttactcagtggtt

SEQ ID NO: 3957474 - DNA, 25 bp, Homo sapien
tcaccaagtacattcgggcagatct

SEQ ID NO: 3957475 - DNA, 25 bp, Homo sapien
tactcactgattgtccgaggacaca

SEQ ID NO: 3957476 - DNA, 25 bp, Homo sapien
gacgtggctactaaggaatttcagg

SEQ ID NO: 3957477 - DNA, 25 bp, Homo sapien
caagagccagttggtaaggaggaca

SEQ ID NO: 3957478 - DNA, 25 bp, Homo sapien
caagagttgtatctccacgtccgga

SEQ ID NO: 3957479 - DNA, 25 bp, Homo sapien
tgaggagccacaagcatcacctgaa

SEQ ID NO: 3957480 - DNA, 25 bp, Homo sapien
taagaaccactgagtaagcggacgc

SEQ ID NO: 3957481 - DNA, 25 bp, Homo sapien
gaaattccttagtagccacgtcaca

SEQ ID NO: 3957482 - DNA, 25 bp, Homo sapien
ccaatagaaaccgtgtgaggagcca

SEQ ID NO: 3957483 - DNA, 25 bp, Homo sapien
ttggacgcgcacctttccggaggat

SEQ ID NO: 3957484 - DNA, 25 bp, Homo sapien
ctgttggacgcgcacctttccggag

SEQ ID NO: 3957485 - DNA, 25 bp, Homo sapien
ctggctgttggacgcgcacctttcc

SEQ ID NO: 3957486 - DNA, 25 bp, Homo sapien
ctctggctgttggacgcgcaccttt

SEQ ID NO: 3957487 - DNA, 25 bp, Homo sapien
tctctggctgttggacgcgcacctt

SEQ ID NO: 3957488 - DNA, 25 bp, Homo sapien
tggacgcgcacctttccggaggatg

SEQ ID NO: 3957489 - DNA, 25 bp, Homo sapien
tctgaagatttgtgccgaaacgccc

SEQ ID NO: 3957490 - DNA, 25 bp, Homo sapien
gatacggcccactatggaccgagca

SEQ ID NO: 3957491 - DNA, 25 bp, Homo sapien
tcttgattccgcatgaactgtgcct

SEQ ID NO: 3957492 - DNA, 25 bp, Homo sapien
taattcaaacgtgtactccgcgaac

SEQ ID NO: 3957493 - DNA, 25 bp, Homo sapien
gaaacgccctctcctcgagatttaa

SEQ ID NO: 3957494 - DNA, 25 bp, Homo sapien
cccggactcccgtgtgcaattatcg

SEQ ID NO: 3957495 - DNA, 25 bp, Homo sapien
cgtgctcggtccatagtgggccgta

SEQ ID NO: 3957496 - DNA, 25 bp, Homo sapien
cgataattgcacacgggagtccggg

SEQ ID NO: 3957497 - DNA, 25 bp, Homo sapien
gggcgtttcggcacaaatcttcaga

SEQ ID NO: 3957498 - DNA, 25 bp, Homo sapien
tcaagacaaaaagcctactccacgt

SEQ ID NO: 3957499 - DNA, 25 bp, Homo sapien
taaatctcgaggagagggcgtttcg

SEQ ID NO: 3957500 - DNA, 25 bp, Homo sapien
ggcacagttcatgcggaatcaagac

SEQ ID NO: 3957501 - DNA, 25 bp, Homo sapien
aaggtgcgcgtccaacagccagaga

SEQ ID NO: 3957502 - DNA, 25 bp, Homo sapien
ctccggaaaggtgcgcgtccaacag

SEQ ID NO: 3957503 - DNA, 25 bp, Homo sapien
atcctccggaaaggtgcgcgtccaa

SEQ ID NO: 3957504 - DNA, 25 bp, Homo sapien
ggaaaggtgcgcgtccaacagccag

SEQ ID NO: 3957505 - DNA, 25 bp, Homo sapien
catcctccggaaaggtgcgcgtcca

SEQ ID NO: 3957506 - DNA, 25 bp, Homo sapien
aaaggtgcgcgtccaacagccagag

SEQ ID NO: 3957507 - DNA, 25 bp, Homo sapien
cggcgtgtcgggccggtgtcggcgg

SEQ ID NO: 3957508 - DNA, 25 bp, Homo sapien
aggtcggcgtgtcgggccggtgtcg

SEQ ID NO: 3957509 - DNA, 25 bp, Homo sapien
tgagtgaacgcggacgggtagcggc

SEQ ID NO: 3957510 - DNA, 25 bp, Homo sapien
gtcggcgtgtcgggccggtgtcggc

SEQ ID NO: 3957511 - DNA, 25 bp, Homo sapien
tcggcgtgtcgggccggtgtcggcg

SEQ ID NO: 3957512 - DNA, 25 bp, Homo sapien
ccgccgacaccggcccgacacgccg

SEQ ID NO: 3957513 - DNA, 25 bp, Homo sapien
cgacaccggcccgacacgccgacct

SEQ ID NO: 3957514 - DNA, 25 bp, Homo sapien
cgccgacaccggcccgacacgccga

SEQ ID NO: 3957515 - DNA, 25 bp, Homo sapien
gccgacaccggcccgacacgccgac

SEQ ID NO: 3957516 - DNA, 25 bp, Homo sapien
gccgctacccgtccgcgttcactca

SEQ ID NO: 3957517 - DNA, 25 bp, Homo sapien
gcctgtgcttcgtccgctcggcggt

SEQ ID NO: 3957518 - DNA, 25 bp, Homo sapien
agggcgcctgtgcttcgtccgctcg

SEQ ID NO: 3957519 - DNA, 25 bp, Homo sapien
gcttcgtccgctcggcggtggccca

SEQ ID NO: 3957520 - DNA, 25 bp, Homo sapien
aggcccgcgggactcagaccagcgg

SEQ ID NO: 3957521 - DNA, 25 bp, Homo sapien
cctgtgcttcgtccgctcggcggtg

SEQ ID NO: 3957522 - DNA, 25 bp, Homo sapien
gaagggcgcctgtgcttcgtccgct

SEQ ID NO: 3957523 - DNA, 25 bp, Homo sapien
accgccgagcggacgaagcacaggc

SEQ ID NO: 3957524 - DNA, 25 bp, Homo sapien
gctggtctgagtcccgcgggcctgg

SEQ ID NO: 3957525 - DNA, 25 bp, Homo sapien
gcagcggccccgaccacttccgggc

SEQ ID NO: 3957526 - DNA, 25 bp, Homo sapien
cgagcggacgaagcacaggcgccct

SEQ ID NO: 3957527 - DNA, 25 bp, Homo sapien
agcggacgaagcacaggcgcccttc

SEQ ID NO: 3957528 - DNA, 25 bp, Homo sapien
tgggccaccgccgagcggacgaagc

SEQ ID NO: 3957529 - DNA, 25 bp, Homo sapien
gcagtgcggcggtggcctggcagcg

SEQ ID NO: 3957530 - DNA, 25 bp, Homo sapien
agtgcggcggtggcctggcagcgcg

SEQ ID NO: 3957531 - DNA, 25 bp, Homo sapien
cagtgcggcggtggcctggcagcgc

SEQ ID NO: 3957532 - DNA, 25 bp, Homo sapien
ccgcagtgcggcggtggcctggcag

SEQ ID NO: 3957533 - DNA, 25 bp, Homo sapien
cccgcagtgcggcggtggcctggca

SEQ ID NO: 3957534 - DNA, 25 bp, Homo sapien
cgcagtgcggcggtggcctggcagc

SEQ ID NO: 3957535 - DNA, 25 bp, Homo sapien
gctgccaggccaccgccgcactgcg

SEQ ID NO: 3957536 - DNA, 25 bp, Homo sapien
ctgccaggccaccgccgcactgcgg

SEQ ID NO: 3957537 - DNA, 25 bp, Homo sapien
tgccaggccaccgccgcactgcggg

SEQ ID NO: 3957538 - DNA, 25 bp, Homo sapien
cgcgctgccaggccaccgccgcact

SEQ ID NO: 3957539 - DNA, 25 bp, Homo sapien
cgctgccaggccaccgccgcactgc

SEQ ID NO: 3957540 - DNA, 25 bp, Homo sapien
gcgctgccaggccaccgccgcactg

SEQ ID NO: 3957541 - DNA, 25 bp, Homo sapien
aatccgactgcatccgtgtttcggg

SEQ ID NO: 3957542 - DNA, 25 bp, Homo sapien
actgcatccgtgtttcgggggctgc

SEQ ID NO: 3957543 - DNA, 25 bp, Homo sapien
gcggaatccgactgcatccgtgttt

SEQ ID NO: 3957544 - DNA, 25 bp, Homo sapien
ggcggaatccgactgcatccgtgtt

SEQ ID NO: 3957545 - DNA, 25 bp, Homo sapien
gggcggaatccgactgcatccgtgt

SEQ ID NO: 3957546 - DNA, 25 bp, Homo sapien
ggaatccgactgcatccgtgtttcg

SEQ ID NO: 3957547 - DNA, 25 bp, Homo sapien
cgaaacacggatgcagtcggattcc

SEQ ID NO: 3957548 - DNA, 25 bp, Homo sapien
acacggatgcagtcggattccgccc

SEQ ID NO: 3957549 - DNA, 25 bp, Homo sapien
aaacacggatgcagtcggattccgc

SEQ ID NO: 3957550 - DNA, 25 bp, Homo sapien
cccgaaacacggatgcagtcggatt

SEQ ID NO: 3957551 - DNA, 25 bp, Homo sapien
ccccgaaacacggatgcagtcggat

SEQ ID NO: 3957552 - DNA, 25 bp, Homo sapien
gggcagcccccgaaacacggatgca

SEQ ID NO: 3957553 - DNA, 25 bp, Homo sapien
ccttgactctgacgtcagagcggcg

SEQ ID NO: 3957554 - DNA, 25 bp, Homo sapien
tttacgtcatcgctgcgcgccgggc

SEQ ID NO: 3957555 - DNA, 25 bp, Homo sapien
tgactctgacgtcagagcggcgccg

SEQ ID NO: 3957556 - DNA, 25 bp, Homo sapien
gctccttgactctgacgtcagagcg

SEQ ID NO: 3957557 - DNA, 25 bp, Homo sapien
gcgtttacgtcatcgctgcgcgccg

SEQ ID NO: 3957558 - DNA, 25 bp, Homo sapien
tctgacgtcagagcggcgccggcct

SEQ ID NO: 3957559 - DNA, 25 bp, Homo sapien
ggcgccgctctgacgtcagagtcaa

SEQ ID NO: 3957560 - DNA, 25 bp, Homo sapien
aggccggcgccgctctgacgtcaga

SEQ ID NO: 3957561 - DNA, 25 bp, Homo sapien
gccggcgccgctctgacgtcagagt

SEQ ID NO: 3957562 - DNA, 25 bp, Homo sapien
gcccggcgcgcagcgatgacgtaaa

SEQ ID NO: 3957563 - DNA, 25 bp, Homo sapien
cgctctgacgtcagagtcaaggagc

SEQ ID NO: 3957564 - DNA, 25 bp, Homo sapien
cggcgcgcagcgatgacgtaaacgc

SEQ ID NO: 3957565 - DNA, 25 bp, Homo sapien
cagtcccagggactttaccggctag

SEQ ID NO: 3957566 - DNA, 25 bp, Homo sapien
taggagacaccttgaacgtccccag

SEQ ID NO: 3957567 - DNA, 25 bp, Homo sapien
taagcgtgcaaccagcccggtcagt

SEQ ID NO: 3957568 - DNA, 25 bp, Homo sapien
gcgactcccacaaactgccttgact

SEQ ID NO: 3957569 - DNA, 25 bp, Homo sapien
acgcttcctcgctggcgcccattgg

SEQ ID NO: 3957570 - DNA, 25 bp, Homo sapien
cagggactttaccggctaggagaca

SEQ ID NO: 3957571 - DNA, 25 bp, Homo sapien
cgctggggacgttcaaggtgtctcc

SEQ ID NO: 3957572 - DNA, 25 bp, Homo sapien
ccaatgggcgccagcgaggaagcgt

SEQ ID NO: 3957573 - DNA, 25 bp, Homo sapien
tcaaggcagtttgtgggagtcgcgc

SEQ ID NO: 3957574 - DNA, 25 bp, Homo sapien
tagccggtaaagtccctgggactga

SEQ ID NO: 3957575 - DNA, 25 bp, Homo sapien
tgtctcctagccggtaaagtccctg

SEQ ID NO: 3957576 - DNA, 25 bp, Homo sapien
ctgaccgggctggttgcacgcttac

SEQ ID NO: 3957577 - DNA, 25 bp, Homo sapien
ttcaacaggctacccatgtgcccgc

SEQ ID NO: 3957578 - DNA, 25 bp, Homo sapien
gttcaacaggctacccatgtgcccg

SEQ ID NO: 3957579 - DNA, 25 bp, Homo sapien
acaggctacccatgtgcccgctcca

SEQ ID NO: 3957580 - DNA, 25 bp, Homo sapien
caacaggctacccatgtgcccgctc

SEQ ID NO: 3957581 - DNA, 25 bp, Homo sapien
tcaacaggctacccatgtgcccgct

SEQ ID NO: 3957582 - DNA, 25 bp, Homo sapien
aacaggctacccatgtgcccgctcc

SEQ ID NO: 3957583 - DNA, 25 bp, Homo sapien
gcgggcacatgggtagcctgttgaa

SEQ ID NO: 3957584 - DNA, 25 bp, Homo sapien
agcgggcacatgggtagcctgttga

SEQ ID NO: 3957585 - DNA, 25 bp, Homo sapien
cgggcacatgggtagcctgttgaac

SEQ ID NO: 3957586 - DNA, 25 bp, Homo sapien
tggagcgggcacatgggtagcctgt

SEQ ID NO: 3957587 - DNA, 25 bp, Homo sapien
gagcgggcacatgggtagcctgttg

SEQ ID NO: 3957588 - DNA, 25 bp, Homo sapien
ggagcgggcacatgggtagcctgtt

SEQ ID NO: 3957589 - DNA, 25 bp, Homo sapien
cagcggcacggagcgtgtgaacggc

SEQ ID NO: 3957590 - DNA, 25 bp, Homo sapien
tgtgaacggcgcagcgccgaggctt

SEQ ID NO: 3957591 - DNA, 25 bp, Homo sapien
cagggagcactgtcgaccagggtcc

SEQ ID NO: 3957592 - DNA, 25 bp, Homo sapien
aggcttcatccatcggccggtgcag

SEQ ID NO: 3957593 - DNA, 25 bp, Homo sapien
gcttctcgtgggctctggccacggc

SEQ ID NO: 3957594 - DNA, 25 bp, Homo sapien
gctgagctgggcacgggcttctcgt

SEQ ID NO: 3957595 - DNA, 25 bp, Homo sapien
ttcccagagcggagggtcacctgct

SEQ ID NO: 3957596 - DNA, 25 bp, Homo sapien
tcacctgctgagctgggcacgggct

SEQ ID NO: 3957597 - DNA, 25 bp, Homo sapien
gcagtgaagtcaaaacctcgtttcc

SEQ ID NO: 3957598 - DNA, 25 bp, Homo sapien
agcagtgaagtcaaaacctcgtttc

SEQ ID NO: 3957599 - DNA, 25 bp, Homo sapien
tgggccgtctgctcacgggagccct

SEQ ID NO: 3957600 - DNA, 25 bp, Homo sapien
tcgtggcccatgggccgtctgctca

SEQ ID NO: 3957601 - DNA, 25 bp, Homo sapien
gagttggctctgtcagatgccacag

SEQ ID NO: 3957602 - DNA, 25 bp, Homo sapien
acagtgtccgtagagaatgtgtggc

SEQ ID NO: 3957603 - DNA, 25 bp, Homo sapien
tagagaatgtgtggcccccctccgt

SEQ ID NO: 3957604 - DNA, 25 bp, Homo sapien
ccacagttgtttggggacagtgtcc

SEQ ID NO: 3957605 - DNA, 25 bp, Homo sapien
ggtccccacgcagcagcctcctgag

SEQ ID NO: 3957606 - DNA, 25 bp, Homo sapien
tgcccctcccggtccccacgcagca

SEQ ID NO: 3957607 - DNA, 25 bp, Homo sapien
agcagcctcctgagctgcggatcat

SEQ ID NO: 3957608 - DNA, 25 bp, Homo sapien
cgcagcagcctcctgagctgcggat

SEQ ID NO: 3957609 - DNA, 25 bp, Homo sapien
gcgtgtcctgtgtacgctggcctca

SEQ ID NO: 3957610 - DNA, 25 bp, Homo sapien
ggtgctggcagcgtgctaccgggaa

SEQ ID NO: 3957611 - DNA, 25 bp, Homo sapien
cctgtgtacgctggcctcacacgtg

SEQ ID NO: 3957612 - DNA, 25 bp, Homo sapien
gatggtatctcctgtgcgtgtcctg

SEQ ID NO: 3957613 - DNA, 25 bp, Homo sapien
tgtgccggctgcttctaggagatgc

SEQ ID NO: 3957614 - DNA, 25 bp, Homo sapien
gcggtgactaccatgccctaaggag

SEQ ID NO: 3957615 - DNA, 25 bp, Homo sapien
gacagtgatctgcatggtccattcc

SEQ ID NO: 3957616 - DNA, 25 bp, Homo sapien
tcaatgtgtccttgagacagccacc

SEQ ID NO: 3957617 - DNA, 25 bp, Homo sapien
tcatcgcccctcctctgcggtgggc

SEQ ID NO: 3957618 - DNA, 25 bp, Homo sapien
catcgcccctcctctgcggtgggcg

SEQ ID NO: 3957619 - DNA, 25 bp, Homo sapien
atcgcccctcctctgcggtgggcgg

SEQ ID NO: 3957620 - DNA, 25 bp, Homo sapien
tggctttctccagaataccgaaaac

SEQ ID NO: 3957621 - DNA, 25 bp, Homo sapien
tcagattacaaccttgagccagtga

SEQ ID NO: 3957622 - DNA, 25 bp, Homo sapien
cggcaccgtgctcccaggtagagga

SEQ ID NO: 3957623 - DNA, 25 bp, Homo sapien
ggtagaggacgctggctaagcagga

SEQ ID NO: 3957624 - DNA, 25 bp, Homo sapien
tcctctgcgggacctgggagtcctc

SEQ ID NO: 3957625 - DNA, 25 bp, Homo sapien
tggtaatggaccatgccttggtgct

SEQ ID NO: 3957626 - DNA, 25 bp, Homo sapien
ttcactctgcaccttggcccgcagg

SEQ ID NO: 3957627 - DNA, 25 bp, Homo sapien
gtcaggtccacgaaggccttgaact

SEQ ID NO: 3957628 - DNA, 25 bp, Homo sapien
tcaggtccacgaaggccttgaactc

SEQ ID NO: 3957629 - DNA, 25 bp, Homo sapien
caggtccacgaaggccttgaactcc

SEQ ID NO: 3957630 - DNA, 25 bp, Homo sapien
ggtgctcagcttccgcttgttacca

SEQ ID NO: 3957631 - DNA, 25 bp, Homo sapien
ttgccagactctcgggctcgtgcca

SEQ ID NO: 3957632 - DNA, 25 bp, Homo sapien
ctcgtgccacggtgtcccaaagcag

SEQ ID NO: 3957633 - DNA, 25 bp, Homo sapien
gcaggctctccgatcagggcgatgc

SEQ ID NO: 3957634 - DNA, 25 bp, Homo sapien
gagccgagcgtacatgaccagcatc

SEQ ID NO: 3957635 - DNA, 25 bp, Homo sapien
cagcaaggcatcaaactgcgggcag

SEQ ID NO: 3957636 - DNA, 25 bp, Homo sapien
ccgatgtggcgctcagggatgcccc

SEQ ID NO: 3957637 - DNA, 25 bp, Homo sapien
gggcagtagccgatccgctgccgca

SEQ ID NO: 3957638 - DNA, 25 bp, Homo sapien
cttgaattcccatgcaggccccggg

SEQ ID NO: 3957639 - DNA, 25 bp, Homo sapien
ttggcacacttgaattcccatgcag

SEQ ID NO: 3957640 - DNA, 25 bp, Homo sapien
tgcttggcacacttgaattcccatg

SEQ ID NO: 3957641 - DNA, 25 bp, Homo sapien
gcacacttgaattcccatgcaggcc

SEQ ID NO: 3957642 - DNA, 25 bp, Homo sapien
tggtcttcccggctccattgaagcc

SEQ ID NO: 3957643 - DNA, 25 bp, Homo sapien
tttctgcaccgcgagggagagcctg

SEQ ID NO: 3957644 - DNA, 25 bp, Homo sapien
ctttccgacatcagagctgattctg

SEQ ID NO: 3957645 - DNA, 25 bp, Homo sapien
tcctccccggtcagcattttgaaag

SEQ ID NO: 3957646 - DNA, 25 bp, Homo sapien
gactccaccccaaattgcaagggta

SEQ ID NO: 3957647 - DNA, 25 bp, Homo sapien
aggcctggacgcaaagcagagcagt

SEQ ID NO: 3957648 - DNA, 25 bp, Homo sapien
cagaaaacacggaatgcggaggcct

SEQ ID NO: 3957649 - DNA, 25 bp, Homo sapien
tcagcgccgaaagcttccagggatg

SEQ ID NO: 3957650 - DNA, 25 bp, Homo sapien
ggagagctccttgataatcagaggt

SEQ ID NO: 3957651 - DNA, 25 bp, Homo sapien
gggtcctctcgtccgctacatcttg

SEQ ID NO: 3957652 - DNA, 25 bp, Homo sapien
aggaagcacaggcatccgggtgtat

SEQ ID NO: 3957653 - DNA, 25 bp, Homo sapien
ttgataatcagaggtgtgtggagca

SEQ ID NO: 3957654 - DNA, 25 bp, Homo sapien
catgcgtgaacccagccgcagggcg

SEQ ID NO: 3957655 - DNA, 25 bp, Homo sapien
gacaaagaccgcatgcgtgaaccca

SEQ ID NO: 3957656 - DNA, 25 bp, Homo sapien
ctgattgaccaggacaaagaccgca

SEQ ID NO: 3957657 - DNA, 25 bp, Homo sapien
tgaccaggacaaagaccgcatgcgt

SEQ ID NO: 3957658 - DNA, 25 bp, Homo sapien
ggctgactcctcggcaggggctcac

SEQ ID NO: 3957659 - DNA, 25 bp, Homo sapien
aggctgactcctcggcaggggctca

SEQ ID NO: 3957660 - DNA, 25 bp, Homo sapien
aactcgacagcccttgtgagtggcg

SEQ ID NO: 3957661 - DNA, 25 bp, Homo sapien
ccgccctggctgtaagtgccggctg

SEQ ID NO: 3957662 - DNA, 25 bp, Homo sapien
tgaggccgtacagtgggagaccatc

SEQ ID NO: 3957663 - DNA, 25 bp, Homo sapien
tgtgagtggcgagggctgtgccccg

SEQ ID NO: 3957664 - DNA, 25 bp, Homo sapien
caggttggtctcgatgaggaagagc

SEQ ID NO: 3957665 - DNA, 25 bp, Homo sapien
ggcatagaagttctcctggtactgg

SEQ ID NO: 3957666 - DNA, 25 bp, Homo sapien
gccatggaggccacaaaccggccga

SEQ ID NO: 3957667 - DNA, 25 bp, Homo sapien
aggatgaggtaggcgcaccctgagg

SEQ ID NO: 3957668 - DNA, 25 bp, Homo sapien
tgaaggccagtaggtcacagctgcc

SEQ ID NO: 3957669 - DNA, 25 bp, Homo sapien
gggccaggcacgtaacaatccaatg

SEQ ID NO: 3957670 - DNA, 25 bp, Homo sapien
acagagaccgttacaagcaccgagg

SEQ ID NO: 3957671 - DNA, 25 bp, Homo sapien
tcaaggcgcctgtaacaatgtcccc

SEQ ID NO: 3957672 - DNA, 25 bp, Homo sapien
tgaccacgtcctgaggacgcagggg

SEQ ID NO: 3957673 - DNA, 25 bp, Homo sapien
cacgtcctgaggacgcaggggtgct

SEQ ID NO: 3957674 - DNA, 25 bp, Homo sapien
gacgcaggggtgctgcccggggtcg

SEQ ID NO: 3957675 - DNA, 25 bp, Homo sapien
tcctgaggacgcaggggtgctgccc

SEQ ID NO: 3957676 - DNA, 25 bp, Homo sapien
gaggtgcagtacctccgcgtctcgt

SEQ ID NO: 3957677 - DNA, 25 bp, Homo sapien
gaacacgtgatccagggttttggaa

SEQ ID NO: 3957678 - DNA, 25 bp, Homo sapien
tatatttcttgcagtagtgggcggc

SEQ ID NO: 3957679 - DNA, 25 bp, Homo sapien
cgtagttctcgtagaaactgctgac

SEQ ID NO: 3957680 - DNA, 25 bp, Homo sapien
tcagcctcgtgtaggcagtggccgc

SEQ ID NO: 3957681 - DNA, 25 bp, Homo sapien
catcaggaaggtggcgatgcctgac

SEQ ID NO: 3957682 - DNA, 25 bp, Homo sapien
gcctgacaggatgttgaagatggtc

SEQ ID NO: 3957683 - DNA, 25 bp, Homo sapien
gcacgcacgtcgaaggccttaaaca

SEQ ID NO: 3957684 - DNA, 25 bp, Homo sapien
ccggagctgtaaccaggatggctgc

SEQ ID NO: 3957685 - DNA, 25 bp, Homo sapien
ccgggtgctgcccatgcatggaggg

SEQ ID NO: 3957686 - DNA, 25 bp, Homo sapien
ggtgctgcccatgcatggagggtaa

SEQ ID NO: 3957687 - DNA, 25 bp, Homo sapien
tgctgcccatgcatggagggtaaag

SEQ ID NO: 3957688 - DNA, 25 bp, Homo sapien
tgaccgccaggatggagaacgtgct

SEQ ID NO: 3957689 - DNA, 25 bp, Homo sapien
acgtggactccactcacaaactgca

SEQ ID NO: 3957690 - DNA, 25 bp, Homo sapien
aactgcacatgcttggcctgcacgg

SEQ ID NO: 3957691 - DNA, 25 bp, Homo sapien
gggcaatgtcgaatcccttccggcc

SEQ ID NO: 3957692 - DNA, 25 bp, Homo sapien
agacagggacgggcagtgcacatac

SEQ ID NO: 3957693 - DNA, 25 bp, Homo sapien
tgctctatctatgggcccgtggcag

SEQ ID NO: 3957694 - DNA, 25 bp, Homo sapien
tctatgggcccgtggcagtgcccag

SEQ ID NO: 3957695 - DNA, 25 bp, Homo sapien
cagacacaatgctctatctatgggc

SEQ ID NO: 3957696 - DNA, 25 bp, Homo sapien
atctctgaaggacgctgccacaagg

SEQ ID NO: 3957697 - DNA, 25 bp, Homo sapien
tgaacaaggcgttgacgaccgtgcg

SEQ ID NO: 3957698 - DNA, 25 bp, Homo sapien
cagcagcttgaacagaaggttgtcc

SEQ ID NO: 3957699 - DNA, 25 bp, Homo sapien
agaccacaatggaggcgtgaggccc

SEQ ID NO: 3957700 - DNA, 25 bp, Homo sapien
caaaggtaacttgaagtcactatgc

SEQ ID NO: 3957701 - DNA, 25 bp, Homo sapien
caaagcaaaggtaacttgaagtcac

SEQ ID NO: 3957702 - DNA, 25 bp, Homo sapien
aagcaaaggtaacttgaagtcacta

SEQ ID NO: 3957703 - DNA, 25 bp, Homo sapien
aggtaacttgaagtcactatgcttc

SEQ ID NO: 3957704 - DNA, 25 bp, Homo sapien
gcagtgcgtctttcagatgctctga

SEQ ID NO: 3957705 - DNA, 25 bp, Homo sapien
agctccgaggagtagttgatggcca

SEQ ID NO: 3957706 - DNA, 25 bp, Homo sapien
tcccgggaactgagaagggcacgac

SEQ ID NO: 3957707 - DNA, 25 bp, Homo sapien
gctgtatgcggccttcttcaggaac

SEQ ID NO: 3957708 - DNA, 25 bp, Homo sapien
acagcggtgcgctcctcctcgatga

SEQ ID NO: 3957709 - DNA, 25 bp, Homo sapien
cccagtgttgagcttgacagcggtg

SEQ ID NO: 3957710 - DNA, 25 bp, Homo sapien
tcgatgagggctccaatgccgtcgg

SEQ ID NO: 3957711 - DNA, 25 bp, Homo sapien
ttgctgtccacagcccagtcgctgg

SEQ ID NO: 3957712 - DNA, 25 bp, Homo sapien
ggatgtccatactgctgtccaccag

SEQ ID NO: 3957713 - DNA, 25 bp, Homo sapien
tggatgtccatactgctgtccacca

SEQ ID NO: 3957714 - DNA, 25 bp, Homo sapien
tcccagtcccactcatctttcatga

SEQ ID NO: 3957715 - DNA, 25 bp, Homo sapien
tttcatgatctgctcagagacacca

SEQ ID NO: 3957716 - DNA, 25 bp, Homo sapien
ctcccagtcccactcatctttcatg

SEQ ID NO: 3957717 - DNA, 25 bp, Homo sapien
gctcagagacaccaagtgttgccat

SEQ ID NO: 3957718 - DNA, 25 bp, Homo sapien
tccagtttagcaaagagaccttcaa

SEQ ID NO: 3957719 - DNA, 25 bp, Homo sapien
ggaagacttcctccatggtggtgat

SEQ ID NO: 3957720 - DNA, 25 bp, Homo sapien
atgccccaaagctggcaatgcccag

SEQ ID NO: 3957721 - DNA, 25 bp, Homo sapien
cttcttctccagtttagcaaagaga

SEQ ID NO: 3957722 - DNA, 25 bp, Homo sapien
cacgagtagttctgagtgcagccgc

SEQ ID NO: 3957723 - DNA, 25 bp, Homo sapien
tcacgagtagttctgagtgcagccg

SEQ ID NO: 3957724 - DNA, 25 bp, Homo sapien
caccagcgtcatgtgatagccggca

SEQ ID NO: 3957725 - DNA, 25 bp, Homo sapien
tcttccgggttgcagtgcggctcct

SEQ ID NO: 3957726 - DNA, 25 bp, Homo sapien
aggatgaaagacagctcggccccag

SEQ ID NO: 3957727 - DNA, 25 bp, Homo sapien
tggaccagctgggagatgtcttccg

SEQ ID NO: 3957728 - DNA, 25 bp, Homo sapien
aggtcagcctcgtccatgaagtggg

SEQ ID NO: 3957729 - DNA, 25 bp, Homo sapien
tttctgccgctgaagaagatcccag

SEQ ID NO: 3957730 - DNA, 25 bp, Homo sapien
gaggtgggctcgtccagtatcagca

SEQ ID NO: 3957731 - DNA, 25 bp, Homo sapien
tctgcttgaggaacagcgaggaccc

SEQ ID NO: 3957732 - DNA, 25 bp, Homo sapien
ctggagggagagacacagtctcgcg

SEQ ID NO: 3957733 - DNA, 25 bp, Homo sapien
tggagggagagacacagtctcgcga

SEQ ID NO: 3957734 - DNA, 25 bp, Homo sapien
ggagggagagacacagtctcgcgac

SEQ ID NO: 3957735 - DNA, 25 bp, Homo sapien
gagggagagacacagtctcgcgacg

SEQ ID NO: 3957736 - DNA, 25 bp, Homo sapien
gtcctccaaggatggtgatggcctt

SEQ ID NO: 3957737 - DNA, 25 bp, Homo sapien
tcaagggccaaggtgcccgggccat

SEQ ID NO: 3957738 - DNA, 25 bp, Homo sapien
gcggagccggcttgagtcctccaag

SEQ ID NO: 3957739 - DNA, 25 bp, Homo sapien
tggccttgcggtaggccccatcgag

SEQ ID NO: 3957740 - DNA, 25 bp, Homo sapien
agcctgcgatgagggcgatgccgat

SEQ ID NO: 3957741 - DNA, 25 bp, Homo sapien
ttcagggcacttctgacgtgacagg

SEQ ID NO: 3957742 - DNA, 25 bp, Homo sapien
gaagcggctccgtgagttccacttg

SEQ ID NO: 3957743 - DNA, 25 bp, Homo sapien
gggcgatgccgatggagagcttgcg

SEQ ID NO: 3957744 - DNA, 25 bp, Homo sapien
gccgaccacggccagcaaggttctg

SEQ ID NO: 3957745 - DNA, 25 bp, Homo sapien
accacggccagcaaggttctggtga

SEQ ID NO: 3957746 - DNA, 25 bp, Homo sapien
cgaccacggccagcaaggttctggt

SEQ ID NO: 3957747 - DNA, 25 bp, Homo sapien
ccctggccagcgaggttctggtgag

SEQ ID NO: 3957748 - DNA, 25 bp, Homo sapien
ggtgctctgcgactgtcaagttgtc

SEQ ID NO: 3957749 - DNA, 25 bp, Homo sapien
ccaggctcttccggatctgaaccat

SEQ ID NO: 3957750 - DNA, 25 bp, Homo sapien
caagttgtcaaacaggatgtcgtgc

SEQ ID NO: 3957751 - DNA, 25 bp, Homo sapien
aaacaggatgtcgtgctgcgggcac

SEQ ID NO: 3957752 - DNA, 25 bp, Homo sapien
ggaaatttcatacccgctgatgtat

SEQ ID NO: 3957753 - DNA, 25 bp, Homo sapien
gtcctgggaaatttcatacccgctg

SEQ ID NO: 3957754 - DNA, 25 bp, Homo sapien
atacccgctgatgtatgcccgtcca

SEQ ID NO: 3957755 - DNA, 25 bp, Homo sapien
tttcatacccgctgatgtatgcccg

SEQ ID NO: 3957756 - DNA, 25 bp, Homo sapien
gggtattcacagacagaggcggtga

SEQ ID NO: 3957757 - DNA, 25 bp, Homo sapien
ctgtcaagcttgggtattcacagac

SEQ ID NO: 3957758 - DNA, 25 bp, Homo sapien
cctgtcaagcttgggtattcacaga

SEQ ID NO: 3957759 - DNA, 25 bp, Homo sapien
gtattcacagacagaggcggtgagg

SEQ ID NO: 3957760 - DNA, 25 bp, Homo sapien
cccagcaggacggtgatctgtccct

SEQ ID NO: 3957761 - DNA, 25 bp, Homo sapien
gatctgtccctcgtacaggttgagg

SEQ ID NO: 3957762 - DNA, 25 bp, Homo sapien
tgaggttcaggtctctgacggccgc

SEQ ID NO: 3957763 - DNA, 25 bp, Homo sapien
tgacggccgccctgtccttatttcc

SEQ ID NO: 3957764 - DNA, 25 bp, Homo sapien
tgccgtgctggtaagtcttcccatg

SEQ ID NO: 3957765 - DNA, 25 bp, Homo sapien
gccgtgctggtaagtcttcccatgg

SEQ ID NO: 3957766 - DNA, 25 bp, Homo sapien
tcaaagtactcgtttctgagtgctt

SEQ ID NO: 3957767 - DNA, 25 bp, Homo sapien
tgctttctcggggtcactgtcttct

SEQ ID NO: 3957768 - DNA, 25 bp, Homo sapien
cctctggctcggcttcaaagtactc

SEQ ID NO: 3957769 - DNA, 25 bp, Homo sapien
ttgatcttgatccccgccaccaggt

SEQ ID NO: 3957770 - DNA, 25 bp, Homo sapien
ccacgttgacgggactcaggaggtc

SEQ ID NO: 3957771 - DNA, 25 bp, Homo sapien
ggcacgccgaactgccctgggaaga

SEQ ID NO: 3957772 - DNA, 25 bp, Homo sapien
gaagcagaagtcgtcgtccacgttg

SEQ ID NO: 3957773 - DNA, 25 bp, Homo sapien
ctcaggaggtctcgccactggatgc

SEQ ID NO: 3957774 - DNA, 25 bp, Homo sapien
taataacattcactctagctgggcg

SEQ ID NO: 3957775 - DNA, 25 bp, Homo sapien
taatggagctcgtgtttctcatcat

SEQ ID NO: 3957776 - DNA, 25 bp, Homo sapien
caaacaccctctgtttggccgagga

SEQ ID NO: 3957777 - DNA, 25 bp, Homo sapien
ccgaggaccctgatggaaataatgc

SEQ ID NO: 3957778 - DNA, 25 bp, Homo sapien
gacactgccgactgtagagaaccgt

SEQ ID NO: 3957779 - DNA, 25 bp, Homo sapien
cccacagcaggctttgcagaatgag

SEQ ID NO: 3957780 - DNA, 25 bp, Homo sapien
gcagctaggaactgcatggtgccat

SEQ ID NO: 3957781 - DNA, 25 bp, Homo sapien
gctcagaccaggtttggtgcccaca

SEQ ID NO: 3957782 - DNA, 25 bp, Homo sapien
aactgaaagaggctcaggtcaccga

SEQ ID NO: 3957783 - DNA, 25 bp, Homo sapien
agcctttctgatgtaataattttga

SEQ ID NO: 3957784 - DNA, 25 bp, Homo sapien
tgaaagaggctcaggtcaccgactt

SEQ ID NO: 3957785 - DNA, 25 bp, Homo sapien
gcccagcctttctgatgtaataatt

SEQ ID NO: 3957786 - DNA, 25 bp, Homo sapien
ctgctgccttcagtggtcccaactg

SEQ ID NO: 3957787 - DNA, 25 bp, Homo sapien
aggttactgattcggaaagaacagg

SEQ ID NO: 3957788 - DNA, 25 bp, Homo sapien
cacactcagcgctgtatgcggatgc

SEQ ID NO: 3957789 - DNA, 25 bp, Homo sapien
gctcttgtggttgggtgctctcgaa

SEQ ID NO: 3957790 - DNA, 25 bp, Homo sapien
ttgccatggcgacattagacaggag

SEQ ID NO: 3957791 - DNA, 25 bp, Homo sapien
gagtcatccagttgtaccgaggggc

SEQ ID NO: 3957792 - DNA, 25 bp, Homo sapien
catggcgacattagacaggaggcag

SEQ ID NO: 3957793 - DNA, 25 bp, Homo sapien
tgtaccgaggggccacgaagaagta

SEQ ID NO: 3957794 - DNA, 25 bp, Homo sapien
atggtagagatggcgaagcacagca

SEQ ID NO: 3957795 - DNA, 25 bp, Homo sapien
agatggtagagatggcgaagcacag

SEQ ID NO: 3957796 - DNA, 25 bp, Homo sapien
gcaggaaggcgagcaccagggaggg

SEQ ID NO: 3957797 - DNA, 25 bp, Homo sapien
gtagagatggcgaagcacagcagga

SEQ ID NO: 3957798 - DNA, 25 bp, Homo sapien
cgggacagcacggctacatttggct

SEQ ID NO: 3957799 - DNA, 25 bp, Homo sapien
gggacagcacggctacatttggctt

SEQ ID NO: 3957800 - DNA, 25 bp, Homo sapien
ctgcgggacagcacggctacatttg

SEQ ID NO: 3957801 - DNA, 25 bp, Homo sapien
tgcgggacagcacggctacatttgg

SEQ ID NO: 3957802 - DNA, 25 bp, Homo sapien
aacaagaggaaccaggcactccagt

SEQ ID NO: 3957803 - DNA, 25 bp, Homo sapien
aggaaccaggcactccagtgcagcc

SEQ ID NO: 3957804 - DNA, 25 bp, Homo sapien
agaggaaccaggcactccagtgcag

SEQ ID NO: 3957805 - DNA, 25 bp, Homo sapien
caagaggaaccaggcactccagtgc

SEQ ID NO: 3957806 - DNA, 25 bp, Homo sapien
ctagagtgttggggagccaaagcgg

SEQ ID NO: 3957807 - DNA, 25 bp, Homo sapien
ttggggagccaaagcgggcagtcac

SEQ ID NO: 3957808 - DNA, 25 bp, Homo sapien
gtgttggggagccaaagcgggcagt

SEQ ID NO: 3957809 - DNA, 25 bp, Homo sapien
gagtgttggggagccaaagcgggca

SEQ ID NO: 3957810 - DNA, 25 bp, Homo sapien
ggtacgggaacctcttgatggtcac

SEQ ID NO: 3957811 - DNA, 25 bp, Homo sapien
tgatggtcaccgtcagtctctggaa

SEQ ID NO: 3957812 - DNA, 25 bp, Homo sapien
tggcggcatcggcatggtactccat

SEQ ID NO: 3957813 - DNA, 25 bp, Homo sapien
tgcacgacagcacgggcaatggtga

SEQ ID NO: 3957814 - DNA, 25 bp, Homo sapien
tggcaccagtaagggacatcgctaa

SEQ ID NO: 3957815 - DNA, 25 bp, Homo sapien
gtgacctgtcaagggcatcgctctg

SEQ ID NO: 3957816 - DNA, 25 bp, Homo sapien
catcgctaagcgctggctgcatgca

SEQ ID NO: 3957817 - DNA, 25 bp, Homo sapien
cctagagcattagcctggtgacagc

SEQ ID NO: 3957818 - DNA, 25 bp, Homo sapien
gggctgcccccatatgactgtcact

SEQ ID NO: 3957819 - DNA, 25 bp, Homo sapien
caacagcccgggctggtaacacgaa

SEQ ID NO: 3957820 - DNA, 25 bp, Homo sapien
tcactagtcaacagcccgggctggt

SEQ ID NO: 3957821 - DNA, 25 bp, Homo sapien
cccatatgactgtcactagtcaaca

SEQ ID NO: 3957822 - DNA, 25 bp, Homo sapien
gaaaagggaagtagtgtgccagcct

SEQ ID NO: 3957823 - DNA, 25 bp, Homo sapien
gggtccacatgtaatttctccgtgt

SEQ ID NO: 3957824 - DNA, 25 bp, Homo sapien
aactgaaccgtaggtgatatttcac

SEQ ID NO: 3957825 - DNA, 25 bp, Homo sapien
caggttctccgccatcaggggatgt

SEQ ID NO: 3957826 - DNA, 25 bp, Homo sapien
gttgtcgtacctaatgtagtcctca

SEQ ID NO: 3957827 - DNA, 25 bp, Homo sapien
tcaaagtccttctcggagggaaagc

SEQ ID NO: 3957828 - DNA, 25 bp, Homo sapien
gtgctcgaagaccacggcggccagc

SEQ ID NO: 3957829 - DNA, 25 bp, Homo sapien
ccagcacgctggacgagcagttgtc

SEQ ID NO: 3957830 - DNA, 25 bp, Homo sapien
gcgttgggcacattttccgactgaa

SEQ ID NO: 3957831 - DNA, 25 bp, Homo sapien
gaagaacagaggcagctcctggatg

SEQ ID NO: 3957832 - DNA, 25 bp, Homo sapien
tctcagtgacggtcttggcagcgtc

SEQ ID NO: 3957833 - DNA, 25 bp, Homo sapien
gactgaatcttcaagcggagccaga

SEQ ID NO: 3957834 - DNA, 25 bp, Homo sapien
tgcagggtgtagttcttccagagga

SEQ ID NO: 3957835 - DNA, 25 bp, Homo sapien
agttacagaccaaagacagagagtg

SEQ ID NO: 3957836 - DNA, 25 bp, Homo sapien
tagttacagaccaaagacagagagt

SEQ ID NO: 3957837 - DNA, 25 bp, Homo sapien
ctagttacagaccaaagacagagag

SEQ ID NO: 3957838 - DNA, 25 bp, Homo sapien
taagttcaagtaggcgctgcaaccc

SEQ ID NO: 3957839 - DNA, 25 bp, Homo sapien
gctgcaacccgcaggaaataggaga

SEQ ID NO: 3957840 - DNA, 25 bp, Homo sapien
taaagagggcgaggtgtgcagacgt

SEQ ID NO: 3957841 - DNA, 25 bp, Homo sapien
agtaggtggtctgagtaagttcaag

SEQ ID NO: 3957842 - DNA, 25 bp, Homo sapien
gcagagaggagtccttcccgctcag

SEQ ID NO: 3957843 - DNA, 25 bp, Homo sapien
gtgctggtccactcgctacaactgc

SEQ ID NO: 3957844 - DNA, 25 bp, Homo sapien
tcacagtggaagagtttcaggttca

SEQ ID NO: 3957845 - DNA, 25 bp, Homo sapien
cgtccttcatgtgcggaaaagcctc

SEQ ID NO: 3957846 - DNA, 25 bp, Homo sapien
ggtctcccttcaggactactgggga

SEQ ID NO: 3957847 - DNA, 25 bp, Homo sapien
gaggaggcggctccgcacagagggc

SEQ ID NO: 3957848 - DNA, 25 bp, Homo sapien
ggaggcggctccgcacagagggctc

SEQ ID NO: 3957849 - DNA, 25 bp, Homo sapien
caggtctcccttcaggactactggg

SEQ ID NO: 3957850 - DNA, 25 bp, Homo sapien
ctggagtggggcagggcaaccctga

SEQ ID NO: 3957851 - DNA, 25 bp, Homo sapien
gcagggcaaccctgaggtttgggaa

SEQ ID NO: 3957852 - DNA, 25 bp, Homo sapien
agtggggcagggcaaccctgaggtt

SEQ ID NO: 3957853 - DNA, 25 bp, Homo sapien
ggcagggcaaccctgaggtttggga

SEQ ID NO: 3957854 - DNA, 25 bp, Homo sapien
caggacatcaggaggtgcccagggc

SEQ ID NO: 3957855 - DNA, 25 bp, Homo sapien
gcaggacatcaggaggtgcccaggg

SEQ ID NO: 3957856 - DNA, 25 bp, Homo sapien
ctcgcaggacatcaggaggtgccca

SEQ ID NO: 3957857 - DNA, 25 bp, Homo sapien
tcgcaggacatcaggaggtgcccag

SEQ ID NO: 3957858 - DNA, 25 bp, Homo sapien
attatacaggtgaattttgatagtc

SEQ ID NO: 3957859 - DNA, 25 bp, Homo sapien
tacaggtgaattttgatagtcacga

SEQ ID NO: 3957860 - DNA, 25 bp, Homo sapien
caggtgaattttgatagtcacgatg

SEQ ID NO: 3957861 - DNA, 25 bp, Homo sapien
gtgaattttgatagtcacgatgggc

SEQ ID NO: 3957862 - DNA, 25 bp, Homo sapien
tctaaactttttggactcgcaggga

SEQ ID NO: 3957863 - DNA, 25 bp, Homo sapien
ggcttctaaactttttggactcgca

SEQ ID NO: 3957864 - DNA, 25 bp, Homo sapien
ggactcgcagggacggggatcagct

SEQ ID NO: 3957865 - DNA, 25 bp, Homo sapien
gactcgcagggacggggatcagcta

SEQ ID NO: 3957866 - DNA, 25 bp, Homo sapien
tagcgtgggcggctcaatcttctcc

SEQ ID NO: 3957867 - DNA, 25 bp, Homo sapien
cagcagcttgtactgtagcgtgggc

SEQ ID NO: 3957868 - DNA, 25 bp, Homo sapien
gactgacgggtagcataaatctggg

SEQ ID NO: 3957869 - DNA, 25 bp, Homo sapien
tccacacggacacgaatgtccacac

SEQ ID NO: 3957870 - DNA, 25 bp, Homo sapien
cccgcaccgattgcctcctccattt

SEQ ID NO: 3957871 - DNA, 25 bp, Homo sapien
tgtccaaagacccgcaccgattgcc

SEQ ID NO: 3957872 - DNA, 25 bp, Homo sapien
tccaaagacccgcaccgattgcctc

SEQ ID NO: 3957873 - DNA, 25 bp, Homo sapien
aagacccgcaccgattgcctcctcc

SEQ ID NO: 3957874 - DNA, 25 bp, Homo sapien
tttttgtgtgcaccataggcttgaa

SEQ ID NO: 3957875 - DNA, 25 bp, Homo sapien
ttttgtgtgcaccataggcttgaat

SEQ ID NO: 3957876 - DNA, 25 bp, Homo sapien
ggtatttttgtgtgcaccataggct

SEQ ID NO: 3957877 - DNA, 25 bp, Homo sapien
tatttttgtgtgcaccataggcttg

SEQ ID NO: 3957878 - DNA, 25 bp, Homo sapien
gtgggctagacaacctgcagcagtg

SEQ ID NO: 3957879 - DNA, 25 bp, Homo sapien
gctagacaacctgcagcagtgaaaa

SEQ ID NO: 3957880 - DNA, 25 bp, Homo sapien
gggctagacaacctgcagcagtgaa

SEQ ID NO: 3957881 - DNA, 25 bp, Homo sapien
tctccaaatggggtgggctagacaa

SEQ ID NO: 3957882 - DNA, 25 bp, Homo sapien
ttgatcttaaatgctgggacttagg

SEQ ID NO: 3957883 - DNA, 25 bp, Homo sapien
tataaatgggatgtggacacatggc

SEQ ID NO: 3957884 - DNA, 25 bp, Homo sapien
caatgagagtttataaatgggatgt

SEQ ID NO: 3957885 - DNA, 25 bp, Homo sapien
acctcgtctggccaataaacagaac

SEQ ID NO: 3957886 - DNA, 25 bp, Homo sapien
ccaaagggagctatcgggacagact

SEQ ID NO: 3957887 - DNA, 25 bp, Homo sapien
tccctaggtgcaggaaacgaggtaa

SEQ ID NO: 3957888 - DNA, 25 bp, Homo sapien
tgatggagccctagcttgctggcgc

SEQ ID NO: 3957889 - DNA, 25 bp, Homo sapien
cgtttacaatgaagctctggcaggg

SEQ ID NO: 3957890 - DNA, 25 bp, Homo sapien
tttagaaacaactcgtgctaccctc

SEQ ID NO: 3957891 - DNA, 25 bp, Homo sapien
tgagactacgtcaaaatgggctccc

SEQ ID NO: 3957892 - DNA, 25 bp, Homo sapien
catgcagatggaaggctaacatctt

SEQ ID NO: 3957893 - DNA, 25 bp, Homo sapien
gctcatgcagatggaaggctaacat

SEQ ID NO: 3957894 - DNA, 25 bp, Homo sapien
gtggagggcgcagcaaacgcccgcc

SEQ ID NO: 3957895 - DNA, 25 bp, Homo sapien
ccgcctggactagcggctccccttt

SEQ ID NO: 3957896 - DNA, 25 bp, Homo sapien
gaatccaacccgggcggctttgcca

SEQ ID NO: 3957897 - DNA, 25 bp, Homo sapien
accgtgggccttggattcggatttg

SEQ ID NO: 3957898 - DNA, 25 bp, Homo sapien
ggaaagcggcgccatctccgcaagt

SEQ ID NO: 3957899 - DNA, 25 bp, Homo sapien
ggctgtcggtcgctacatatccacc

SEQ ID NO: 3957900 - DNA, 25 bp, Homo sapien
ctgcggccggaaagcggcgccatct

SEQ ID NO: 3957901 - DNA, 25 bp, Homo sapien
atctccgcaagtgcgcggcggacgc

SEQ ID NO: 3957902 - DNA, 25 bp, Homo sapien
cggccggcgcgcggccctctcgcgg

SEQ ID NO: 3957903 - DNA, 25 bp, Homo sapien
ccggcgcgcggccctctcgcggggt

SEQ ID NO: 3957904 - DNA, 25 bp, Homo sapien
ggcgcgcggccctctcgcggggtcc

SEQ ID NO: 3957905 - DNA, 25 bp, Homo sapien
gcgcgcggccctctcgcggggtccc

SEQ ID NO: 3957906 - DNA, 25 bp, Homo sapien
ctccgctccagcctcgcagtggcgg

SEQ ID NO: 3957907 - DNA, 25 bp, Homo sapien
cagcctcgcagtggcggcggcactg

SEQ ID NO: 3957908 - DNA, 25 bp, Homo sapien
actgacagctgcgtggccgccctgg

SEQ ID NO: 3957909 - DNA, 25 bp, Homo sapien
ggcggcactgacagctgcgtggccg

SEQ ID NO: 3957910 - DNA, 25 bp, Homo sapien
cgcccctgcaggtgcccggtccacc

SEQ ID NO: 3957911 - DNA, 25 bp, Homo sapien
cagcccaaccccgcgcctgcgcggt

SEQ ID NO: 3957912 - DNA, 25 bp, Homo sapien
tgcgcagtcggccgcccctgcaggt

SEQ ID NO: 3957913 - DNA, 25 bp, Homo sapien
ggcgccgcggatggcgcgtgcgcag

SEQ ID NO: 3957914 - DNA, 25 bp, Homo sapien
tccggagagggtcggggtcacctca

SEQ ID NO: 3957915 - DNA, 25 bp, Homo sapien
tcacctcacggagcgagcggaacgg

SEQ ID NO: 3957916 - DNA, 25 bp, Homo sapien
gagagggtcggggtcacctcacgga

SEQ ID NO: 3957917 - DNA, 25 bp, Homo sapien
gagggtcggggtcacctcacggagc

SEQ ID NO: 3957918 - DNA, 25 bp, Homo sapien
gaaagttgatatgacatctataggg

SEQ ID NO: 3957919 - DNA, 25 bp, Homo sapien
gaaggaactttctgctatccgaggt

SEQ ID NO: 3957920 - DNA, 25 bp, Homo sapien
actgagttcctaccatgtgccgcct

SEQ ID NO: 3957921 - DNA, 25 bp, Homo sapien
tgtgtcttgggattcagtgttggaa

SEQ ID NO: 3957922 - DNA, 25 bp, Homo sapien
gggaagaccactgttgcagcatggt

SEQ ID NO: 3957923 - DNA, 25 bp, Homo sapien
tcaggagcggctgtatgtttcccag

SEQ ID NO: 3957924 - DNA, 25 bp, Homo sapien
gcttgcaccacggagaatttccaga

SEQ ID NO: 3957925 - DNA, 25 bp, Homo sapien
gaggtagacgttgttaatatcccca

SEQ ID NO: 3957926 - DNA, 25 bp, Homo sapien
tgttcacctatctggaagctcctct

SEQ ID NO: 3957927 - DNA, 25 bp, Homo sapien
ccccagggtatggtataggacacct

SEQ ID NO: 3957928 - DNA, 25 bp, Homo sapien
tatgacctacaatcaggcaagatgg

SEQ ID NO: 3957929 - DNA, 25 bp, Homo sapien
atacagaagaagagacgcatagggt

SEQ ID NO: 3957930 - DNA, 25 bp, Homo sapien
tagctaggctatgcaacaatctcaa

SEQ ID NO: 3957931 - DNA, 25 bp, Homo sapien
tgacagattcgaggagcatagcaga

SEQ ID NO: 3957932 - DNA, 25 bp, Homo sapien
ggtatatgcagagtaaccttcccca

SEQ ID NO: 3957933 - DNA, 25 bp, Homo sapien
gatcctcccgcgtgaacaattggaa

SEQ ID NO: 3957934 - DNA, 25 bp, Homo sapien
tttcctgagtggatagcccaagcca

SEQ ID NO: 3957935 - DNA, 25 bp, Homo sapien
caaagaagactcgtcggccgtgtgc

SEQ ID NO: 3957936 - DNA, 25 bp, Homo sapien
cattgatcgccctgattggagagcc

SEQ ID NO: 3957937 - DNA, 25 bp, Homo sapien
taacaagccgaagttgagcactggc

SEQ ID NO: 3957938 - DNA, 25 bp, Homo sapien
tgcaagaagccctacagcaggtact

SEQ ID NO: 3957939 - DNA, 25 bp, Homo sapien
tgtgatcctatatccacccatgaag

SEQ ID NO: 3957940 - DNA, 25 bp, Homo sapien
cacatgggtagactggcttagaggc

SEQ ID NO: 3957941 - DNA, 25 bp, Homo sapien
gggccagcaatccatgttgcaagaa

SEQ ID NO: 3957942 - DNA, 25 bp, Homo sapien
cccaaccacaagacctgattgcagt

SEQ ID NO: 3957943 - DNA, 25 bp, Homo sapien
tgcagtggtccatataactatcacc

SEQ ID NO: 3957944 - DNA, 25 bp, Homo sapien
ccacaaccggctggcagtgagagaa

SEQ ID NO: 3957945 - DNA, 25 bp, Homo sapien
ctgcaacctacgacaaagctcctgg

SEQ ID NO: 3957946 - DNA, 25 bp, Homo sapien
taaatggcgtcatcggacaagtggc

SEQ ID NO: 3957947 - DNA, 25 bp, Homo sapien
tgaggacaagcgctatggagaaatc

SEQ ID NO: 3957948 - DNA, 25 bp, Homo sapien
tctaggtgatttccctcgcggtaac

SEQ ID NO: 3957949 - DNA, 25 bp, Homo sapien
tgtgtttatccatcccgcagctggt

SEQ ID NO: 3957950 - DNA, 25 bp, Homo sapien
tggcgggcagctgtccaacttggaa

SEQ ID NO: 3957951 - DNA, 25 bp, Homo sapien
gaagaggcatgtcacccacgcttct

SEQ ID NO: 3957952 - DNA, 25 bp, Homo sapien
gcagtgacagctcccagcggcatcc

SEQ ID NO: 3957953 - DNA, 25 bp, Homo sapien
cacaggggaccgtagcaaggtagaa

SEQ ID NO: 3957954 - DNA, 25 bp, Homo sapien
catgtttacagtgtcgtcccccaag

SEQ ID NO: 3957955 - DNA, 25 bp, Homo sapien
tggacagtgactcgcacacacagcc

SEQ ID NO: 3957956 - DNA, 25 bp, Homo sapien
gtcccccggagagcagtgttcccca

SEQ ID NO: 3957957 - DNA, 25 bp, Homo sapien
tccctggacagtgactcgcacacac

SEQ ID NO: 3957958 - DNA, 25 bp, Homo sapien
acggcgcctggcccccaaatgctct

SEQ ID NO: 3957959 - DNA, 25 bp, Homo sapien
ccgcctcccggatactcctgcctca

SEQ ID NO: 3957960 - DNA, 25 bp, Homo sapien
gcatgatctcaactctcaactcact

SEQ ID NO: 3957961 - DNA, 25 bp, Homo sapien
ctggcccccaaatgctcttgaaccg

SEQ ID NO: 3957962 - DNA, 25 bp, Homo sapien
attaaatgtgaggaggatagtggca

SEQ ID NO: 3957963 - DNA, 25 bp, Homo sapien
ggcagatgagtgatggacgtccttc

SEQ ID NO: 3957964 - DNA, 25 bp, Homo sapien
caactctgcatggagtcagttctct

SEQ ID NO: 3957965 - DNA, 25 bp, Homo sapien
tgtccaggggctcttaatcccaact

SEQ ID NO: 3957966 - DNA, 25 bp, Homo sapien
ccaggcgtcagcaagacggctggtc

SEQ ID NO: 3957967 - DNA, 25 bp, Homo sapien
acggctggtccctgcgttaagagca

SEQ ID NO: 3957968 - DNA, 25 bp, Homo sapien
taagagcactttcaataaggacaga

SEQ ID NO: 3957969 - DNA, 25 bp, Homo sapien
gagcctctcgtataaccttcaccgg

SEQ ID NO: 3957970 - DNA, 25 bp, Homo sapien
ctccctggcggcctcgggggcccag

SEQ ID NO: 3957971 - DNA, 25 bp, Homo sapien
tccctggcggcctcgggggcccagc

SEQ ID NO: 3957972 - DNA, 25 bp, Homo sapien
tctttaaacgaacctgcactgaggg

SEQ ID NO: 3957973 - DNA, 25 bp, Homo sapien
tctgtataaaggacgggacaaggcc

SEQ ID NO: 3957974 - DNA, 25 bp, Homo sapien
gccttatagtccagcgggccagaaa

SEQ ID NO: 3957975 - DNA, 25 bp, Homo sapien
gacacctggagaaagccgggtcttc

SEQ ID NO: 3957976 - DNA, 25 bp, Homo sapien
ctaagcttgacccacagagcggagc

SEQ ID NO: 3957977 - DNA, 25 bp, Homo sapien
tcaggttgaggtccctcaacttgta

SEQ ID NO: 3957978 - DNA, 25 bp, Homo sapien
acagagcggagcgtgagccccgtca

SEQ ID NO: 3957979 - DNA, 25 bp, Homo sapien
cgtgagccccgtcaggttgaggtcc

SEQ ID NO: 3957980 - DNA, 25 bp, Homo sapien
gtgtccagggtagcacccacgtggc

SEQ ID NO: 3957981 - DNA, 25 bp, Homo sapien
tggcctcccatctgaaacggggcat

SEQ ID NO: 3957982 - DNA, 25 bp, Homo sapien
tgctcatctctggtcgtgtccaggg

SEQ ID NO: 3957983 - DNA, 25 bp, Homo sapien
tgctggccctgcacggaacttgttc

SEQ ID NO: 3957984 - DNA, 25 bp, Homo sapien
ctctgctgtcagacccggggccttg

SEQ ID NO: 3957985 - DNA, 25 bp, Homo sapien
cagccccaggagcagtaaagacctg

SEQ ID NO: 3957986 - DNA, 25 bp, Homo sapien
ccacgggctgcgaaggctgagctgc

SEQ ID NO: 3957987 - DNA, 25 bp, Homo sapien
ccggggccttgcctgcctgatggtc

SEQ ID NO: 3957988 - DNA, 25 bp, Homo sapien
ctgggatacccggaaggctgtgaat

SEQ ID NO: 3957989 - DNA, 25 bp, Homo sapien
tgtgaatccttcgtgatgccgggcc

SEQ ID NO: 3957990 - DNA, 25 bp, Homo sapien
agatgatatggcacacccggaggac

SEQ ID NO: 3957991 - DNA, 25 bp, Homo sapien
tgtgccttcgcctgccaaggagtcc

SEQ ID NO: 3957992 - DNA, 25 bp, Homo sapien
ggttcttgccaccacaccttcctga

SEQ ID NO: 3957993 - DNA, 25 bp, Homo sapien
caggttcttgccaccacaccttcct

SEQ ID NO: 3957994 - DNA, 25 bp, Homo sapien
gttcttgccaccacaccttcctgat

SEQ ID NO: 3957995 - DNA, 25 bp, Homo sapien
tacaggttcttgccaccacaccttc

SEQ ID NO: 3957996 - DNA, 25 bp, Homo sapien
tgtctctaccagacataaaaagtaa

SEQ ID NO: 3957997 - DNA, 25 bp, Homo sapien
taggtctaaagacacttgctgagaa

SEQ ID NO: 3957998 - DNA, 25 bp, Homo sapien
acacctgtcactggcttggaactca

SEQ ID NO: 3957999 - DNA, 25 bp, Homo sapien
gaccaatcaaaatgcctgtgctgct

SEQ ID NO: 3958000 - DNA, 25 bp, Homo sapien
gacactgtcaccatccagccccggt

SEQ ID NO: 3958001 - DNA, 25 bp, Homo sapien
acactgtcaccatccagccccggtc

SEQ ID NO: 3958002 - DNA, 25 bp, Homo sapien
tgtcaccatccagccccggtcagac

SEQ ID NO: 3958003 - DNA, 25 bp, Homo sapien
actgtcaccatccagccccggtcag

SEQ ID NO: 3958004 - DNA, 25 bp, Homo sapien
gtcgtatgctgcctcctcacgtttg

SEQ ID NO: 3958005 - DNA, 25 bp, Homo sapien
gagccgcggtcgtatgctgcctcct

SEQ ID NO: 3958006 - DNA, 25 bp, Homo sapien
tcatgtgactaactgcaggacgagg

SEQ ID NO: 3958007 - DNA, 25 bp, Homo sapien
gagggagccgcggtcgtatgctgcc

SEQ ID NO: 3958008 - DNA, 25 bp, Homo sapien
agaaagaagccgcactgggtatgga

SEQ ID NO: 3958009 - DNA, 25 bp, Homo sapien
cgtggcgtttatgaggaaaggccat

SEQ ID NO: 3958010 - DNA, 25 bp, Homo sapien
gaaaggccatgtaggtccctggaga

SEQ ID NO: 3958011 - DNA, 25 bp, Homo sapien
ttgagctctcaaacaggcgtggcgt

SEQ ID NO: 3958012 - DNA, 25 bp, Homo sapien
tgggagggaagtcgccactcatctc

SEQ ID NO: 3958013 - DNA, 25 bp, Homo sapien
taccgccagctttggtgttcattaa

SEQ ID NO: 3958014 - DNA, 25 bp, Homo sapien
gcaagctgacaaacccgtctggaac

SEQ ID NO: 3958015 - DNA, 25 bp, Homo sapien
tggtcttgctgcatcaactccaggg

SEQ ID NO: 3958016 - DNA, 25 bp, Homo sapien
gcaaaagaacttatgagagtaagtc

SEQ ID NO: 3958017 - DNA, 25 bp, Homo sapien
tctatttttgtaagccgcatacttc

SEQ ID NO: 3958018 - DNA, 25 bp, Homo sapien
tagtatctgatattaggtattccca

SEQ ID NO: 3958019 - DNA, 25 bp, Homo sapien
attagccaaaagtggctgctctgcc

SEQ ID NO: 3958020 - DNA, 25 bp, Homo sapien
ggagtgccaaacaagcctcataggc

SEQ ID NO: 3958021 - DNA, 25 bp, Homo sapien
taaggcacggacaacatgaactggc

SEQ ID NO: 3958022 - DNA, 25 bp, Homo sapien
tcttgggaccaaggaagcaaagtca

SEQ ID NO: 3958023 - DNA, 25 bp, Homo sapien
gcaaagtcagtggataccgtgtcct

SEQ ID NO: 3958024 - DNA, 25 bp, Homo sapien
ttaaggtgaagactcggttgattgg

SEQ ID NO: 3958025 - DNA, 25 bp, Homo sapien
gctggggaggcaggatctcgggatc

SEQ ID NO: 3958026 - DNA, 25 bp, Homo sapien
atgagaagacctaggccaggcagcg

SEQ ID NO: 3958027 - DNA, 25 bp, Homo sapien
gtaggcgatgagaagacctaggcca

SEQ ID NO: 3958028 - DNA, 25 bp, Homo sapien
tacagggccttgtgactccaggaag

SEQ ID NO: 3958029 - DNA, 25 bp, Homo sapien
tgagatttaggaagtccgcaggaga

SEQ ID NO: 3958030 - DNA, 25 bp, Homo sapien
ctgcttagagaaatggcggtcacca

SEQ ID NO: 3958031 - DNA, 25 bp, Homo sapien
gacagcctgacagatgtccttctgc

SEQ ID NO: 3958032 - DNA, 25 bp, Homo sapien
tcctttttctccgaagcgagaggtg

SEQ ID NO: 3958033 - DNA, 25 bp, Homo sapien
gaggtgaagtcaccaactgctgggt

SEQ ID NO: 3958034 - DNA, 25 bp, Homo sapien
ttgggtccctgatgcaaaggcagag

SEQ ID NO: 3958035 - DNA, 25 bp, Homo sapien
cccactaatgtttgggtccctgatg

SEQ ID NO: 3958036 - DNA, 25 bp, Homo sapien
ctggtatttagagcgcagcggctga

SEQ ID NO: 3958037 - DNA, 25 bp, Homo sapien
ctgacgggccggatcgccttcgccg

SEQ ID NO: 3958038 - DNA, 25 bp, Homo sapien
gccgcccgcccgcaaaccttcgtgc

SEQ ID NO: 3958039 - DNA, 25 bp, Homo sapien
cgcctcggcccgcagagcttgcccc

SEQ ID NO: 3958040 - DNA, 25 bp, Homo sapien
agacatgtccgagtccaagagcggc

SEQ ID NO: 3958041 - DNA, 25 bp, Homo sapien
aagagcggccccgagtatgcttcgt

SEQ ID NO: 3958042 - DNA, 25 bp, Homo sapien
tgcttcgtttttcgccgtcatgggc

SEQ ID NO: 3958043 - DNA, 25 bp, Homo sapien
cgccatggtcttcagcggtgagcgc

SEQ ID NO: 3958044 - DNA, 25 bp, Homo sapien
cgggcctcgtgtgacagcgggcggg

SEQ ID NO: 3958045 - DNA, 25 bp, Homo sapien
ggtccggtgtgtgacgtcactctga

SEQ ID NO: 3958046 - DNA, 25 bp, Homo sapien
gacgtcactctgacgtaatcccgag

SEQ ID NO: 3958047 - DNA, 25 bp, Homo sapien
ctctgacgtaatcccgagctgtcgg

SEQ ID NO: 3958048 - DNA, 25 bp, Homo sapien
gccttctagggttcttggtggcacc

SEQ ID NO: 3958049 - DNA, 25 bp, Homo sapien
tgaaattgggccttgacaggtcctg

SEQ ID NO: 3958050 - DNA, 25 bp, Homo sapien
caggtcctgggcgtccaatttagtg

SEQ ID NO: 3958051 - DNA, 25 bp, Homo sapien
tccgacgagttaagttctggcccag

SEQ ID NO: 3958052 - DNA, 25 bp, Homo sapien
tggtggactactggcctcacagggt

SEQ ID NO: 3958053 - DNA, 25 bp, Homo sapien
agtctcctgccaacgtgtctgccat

SEQ ID NO: 3958054 - DNA, 25 bp, Homo sapien
tcacagggtccactacttgggttgc

SEQ ID NO: 3958055 - DNA, 25 bp, Homo sapien
catggtattccgctcctggtggcca

SEQ ID NO: 3958056 - DNA, 25 bp, Homo sapien
agccaagagcggtaccggcattgcg

SEQ ID NO: 3958057 - DNA, 25 bp, Homo sapien
ggcacagccaagagcggtaccggca

SEQ ID NO: 3958058 - DNA, 25 bp, Homo sapien
gcggtaccggcattgcggccatgtc

SEQ ID NO: 3958059 - DNA, 25 bp, Homo sapien
ccaagagcggtaccggcattgcggc

SEQ ID NO: 3958060 - DNA, 25 bp, Homo sapien
tagagtgtcgccttgtgggttcctg

SEQ ID NO: 3958061 - DNA, 25 bp, Homo sapien
gtctcccagctatctataaccttag

SEQ ID NO: 3958062 - DNA, 25 bp, Homo sapien
tgcgtctgcggagcggcccttgtct

SEQ ID NO: 3958063 - DNA, 25 bp, Homo sapien
ttcctggatggagccgccctcaccg

SEQ ID NO: 3958064 - DNA, 25 bp, Homo sapien
tgcgcccgtagctctaaaaactgtg

SEQ ID NO: 3958065 - DNA, 25 bp, Homo sapien
tgaacatcagtgctctcgtggctcc

SEQ ID NO: 3958066 - DNA, 25 bp, Homo sapien
tagtgagcctgtgtatccatagggc

SEQ ID NO: 3958067 - DNA, 25 bp, Homo sapien
tcagtggactcttggaatttgcgcc

SEQ ID NO: 3958068 - DNA, 25 bp, Homo sapien
tctgcatgaagtggaccggagacct

SEQ ID NO: 3958069 - DNA, 25 bp, Homo sapien
agtgcttgccggctgtggtgaccct

SEQ ID NO: 3958070 - DNA, 25 bp, Homo sapien
gctccgggttttgcttgtgctcaca

SEQ ID NO: 3958071 - DNA, 25 bp, Homo sapien
agtgccacggatgaccagcgttctg

SEQ ID NO: 3958072 - DNA, 25 bp, Homo sapien
tccctgaacagcttcgaggcgggtg

SEQ ID NO: 3958073 - DNA, 25 bp, Homo sapien
tcagacgtcagggattggtgcagcc

SEQ ID NO: 3958074 - DNA, 25 bp, Homo sapien
cagccgatgtgttagaggttgagca

SEQ ID NO: 3958075 - DNA, 25 bp, Homo sapien
tgcaaagcccagttaaggaaatgtc

SEQ ID NO: 3958076 - DNA, 25 bp, Homo sapien
tcagctaaaacccagagctggcatg

SEQ ID NO: 3958077 - DNA, 25 bp, Homo sapien
cccagagctggcatgttggtcatcc

SEQ ID NO: 3958078 - DNA, 25 bp, Homo sapien
ctcagacgggacgcccagtccagag

SEQ ID NO: 3958079 - DNA, 25 bp, Homo sapien
tggcatgttggtcatccccacctca

SEQ ID NO: 3958080 - DNA, 25 bp, Homo sapien
cagggtttagatgctccagggcagc

SEQ ID NO: 3958081 - DNA, 25 bp, Homo sapien
tccagggcagctgattgacaccggt

SEQ ID NO: 3958082 - DNA, 25 bp, Homo sapien
ccgcctgacccagggtttagatgct

SEQ ID NO: 3958083 - DNA, 25 bp, Homo sapien
ctccagggcagctgattgacaccgg

SEQ ID NO: 3958084 - DNA, 25 bp, Homo sapien
tctggagaccaaggacgttagttct

SEQ ID NO: 3958085 - DNA, 25 bp, Homo sapien
gaggtccccgtctcctgcgtgtttg

SEQ ID NO: 3958086 - DNA, 25 bp, Homo sapien
caagtcagcttgtagcacgcaggga

SEQ ID NO: 3958087 - DNA, 25 bp, Homo sapien
gggaccggcccaatctgtgtttcaa

SEQ ID NO: 3958088 - DNA, 25 bp, Homo sapien
tctgcctcggtgattccaggagccc

SEQ ID NO: 3958089 - DNA, 25 bp, Homo sapien
tggtgtctctcgccccttgctgcat

SEQ ID NO: 3958090 - DNA, 25 bp, Homo sapien
gggacaggaccttgctcctgagtct

SEQ ID NO: 3958091 - DNA, 25 bp, Homo sapien
tgagtcttaggtgtggtgtctctcg

SEQ ID NO: 3958092 - DNA, 25 bp, Homo sapien
tccgcaggatggttgtgtgactgat

SEQ ID NO: 3958093 - DNA, 25 bp, Homo sapien
gcttctaaggtgtcctgtggcggca

SEQ ID NO: 3958094 - DNA, 25 bp, Homo sapien
tgggtgcagccacctgtagagctgc

SEQ ID NO: 3958095 - DNA, 25 bp, Homo sapien
ccttgactttgctgtagcttctaag

SEQ ID NO: 3958096 - DNA, 25 bp, Homo sapien
gtgtgccagtgctggctggcacaca

SEQ ID NO: 3958097 - DNA, 25 bp, Homo sapien
tggcacacagcactgcttggacttc

SEQ ID NO: 3958098 - DNA, 25 bp, Homo sapien
agtgctggctggcacacagcactgc

SEQ ID NO: 3958099 - DNA, 25 bp, Homo sapien
ggcacacagcactgcttggacttcc

SEQ ID NO: 3958100 - DNA, 25 bp, Homo sapien
tctctcccagttgggcctgactctg

SEQ ID NO: 3958101 - DNA, 25 bp, Homo sapien
gctaggttcgtctgcgtttctctct

SEQ ID NO: 3958102 - DNA, 25 bp, Homo sapien
gaaggctgacggctgctcatttccc

SEQ ID NO: 3958103 - DNA, 25 bp, Homo sapien
cttcctgagggcgagcgctaggttc

SEQ ID NO: 3958104 - DNA, 25 bp, Homo sapien
caggattttaccagaaggctcgagt

SEQ ID NO: 3958105 - DNA, 25 bp, Homo sapien
gaaattgagacctggcgcttcctga

SEQ ID NO: 3958106 - DNA, 25 bp, Homo sapien
cctgaggaccagacttgaggcagtt

SEQ ID NO: 3958107 - DNA, 25 bp, Homo sapien
cccgttcagaggtaactggcatcct

SEQ ID NO: 3958108 - DNA, 25 bp, Homo sapien
gctgcgttttgctgagttgcaccgt

SEQ ID NO: 3958109 - DNA, 25 bp, Homo sapien
gagcgttggtgaccacttgcctgct

SEQ ID NO: 3958110 - DNA, 25 bp, Homo sapien
caccgtgggagagcgttggtgacca

SEQ ID NO: 3958111 - DNA, 25 bp, Homo sapien
ttttgctgagttgcaccgtgggaga

SEQ ID NO: 3958112 - DNA, 25 bp, Homo sapien
aatcccctccgccatagggcctgcc

SEQ ID NO: 3958113 - DNA, 25 bp, Homo sapien
ctggtacgagcacaccgagaatccc

SEQ ID NO: 3958114 - DNA, 25 bp, Homo sapien
ggtacgagcacaccgagaatcccct

SEQ ID NO: 3958115 - DNA, 25 bp, Homo sapien
accgagaatcccctccgccataggg

SEQ ID NO: 3958116 - DNA, 25 bp, Homo sapien
attggttttgctagtccaccacagt

SEQ ID NO: 3958117 - DNA, 25 bp, Homo sapien
ccacaggtaagctgtaaatctggaa

SEQ ID NO: 3958118 - DNA, 25 bp, Homo sapien
tagtccaccacagttgtccttggtg

SEQ ID NO: 3958119 - DNA, 25 bp, Homo sapien
ggtaagctgtaaatctggaactcaa

SEQ ID NO: 3958120 - DNA, 25 bp, Homo sapien
ccctgcctggtttctacttctaaga

SEQ ID NO: 3958121 - DNA, 25 bp, Homo sapien
tacccatgggctacatttttacaag

SEQ ID NO: 3958122 - DNA, 25 bp, Homo sapien
tcatacccagacaagttaaagaaat

SEQ ID NO: 3958123 - DNA, 25 bp, Homo sapien
gatggagactgctgaacttcatacc

SEQ ID NO: 3958124 - DNA, 25 bp, Homo sapien
tggaaagtagcaacaggaccagcac

SEQ ID NO: 3958125 - DNA, 25 bp, Homo sapien
caggaccagcacctggtggtcccat

SEQ ID NO: 3958126 - DNA, 25 bp, Homo sapien
gctgtggaaagtagcaacaggacca

SEQ ID NO: 3958127 - DNA, 25 bp, Homo sapien
aacaggaccagcacctggtggtccc

SEQ ID NO: 3958128 - DNA, 25 bp, Homo sapien
gcacctggtagctttaaggacctaa

SEQ ID NO: 3958129 - DNA, 25 bp, Homo sapien
ataagtagggggcagtgactcgtca

SEQ ID NO: 3958130 - DNA, 25 bp, Homo sapien
ggatggcacctggtagctttaagga

SEQ ID NO: 3958131 - DNA, 25 bp, Homo sapien
cagtgactcgtcattgagtggcgcg

SEQ ID NO: 3958132 - DNA, 25 bp, Homo sapien
tgttctcagtagacctgtgccgtgg

SEQ ID NO: 3958133 - DNA, 25 bp, Homo sapien
gatggtgcttattctcccagccaca

SEQ ID NO: 3958134 - DNA, 25 bp, Homo sapien
tctgttgagaacattggcctttccc

SEQ ID NO: 3958135 - DNA, 25 bp, Homo sapien
tgaagtcacagaagcttgtctcgac

SEQ ID NO: 3958136 - DNA, 25 bp, Homo sapien
tggggagattgattgattgccagga

SEQ ID NO: 3958137 - DNA, 25 bp, Homo sapien
tgagtggggagattgattgattgcc

SEQ ID NO: 3958138 - DNA, 25 bp, Homo sapien
ctgagtggggagattgattgattgc

SEQ ID NO: 3958139 - DNA, 25 bp, Homo sapien
agtggggagattgattgattgccag

SEQ ID NO: 3958140 - DNA, 25 bp, Homo sapien
ctgggcaggccttggtcatgaggaa

SEQ ID NO: 3958141 - DNA, 25 bp, Homo sapien
aggcaggccacagctccccgccttc

SEQ ID NO: 3958142 - DNA, 25 bp, Homo sapien
cagggagccagcgtgcgaggctgct

SEQ ID NO: 3958143 - DNA, 25 bp, Homo sapien
tgctggcgaggcaggccacagctcc

SEQ ID NO: 3958144 - DNA, 25 bp, Homo sapien
catttcattagggaggacaaggata

SEQ ID NO: 3958145 - DNA, 25 bp, Homo sapien
tagacaggtgcacctagggtcttat

SEQ ID NO: 3958146 - DNA, 25 bp, Homo sapien
tcagaagctgttgagtaactggaag

SEQ ID NO: 3958147 - DNA, 25 bp, Homo sapien
cttattactgtaaattgttccagag

SEQ ID NO: 3958148 - DNA, 25 bp, Homo sapien
ttaatgcagttgaatcaccacctca

SEQ ID NO: 3958149 - DNA, 25 bp, Homo sapien
tttcctccagatcgtggcaggcggt

SEQ ID NO: 3958150 - DNA, 25 bp, Homo sapien
gcggtctcgggatgctgttaatgca

SEQ ID NO: 3958151 - DNA, 25 bp, Homo sapien
taaacgtttagacacttcacgctca

SEQ ID NO: 3958152 - DNA, 25 bp, Homo sapien
cgaaggcagaagactaccagtaggc

SEQ ID NO: 3958153 - DNA, 25 bp, Homo sapien
gagcttctaaacatcgtcctgccag

SEQ ID NO: 3958154 - DNA, 25 bp, Homo sapien
gaggcctttctacacttcagttgga

SEQ ID NO: 3958155 - DNA, 25 bp, Homo sapien
tcagctttctatgggcagggaccgt

SEQ ID NO: 3958156 - DNA, 25 bp, Homo sapien
ttatggctgtgggtgcaccttgcac

SEQ ID NO: 3958157 - DNA, 25 bp, Homo sapien
aaaccttagtccgtgcattgagagc

SEQ ID NO: 3958158 - DNA, 25 bp, Homo sapien
gaaggctctttttccacggtgagta

SEQ ID NO: 3958159 - DNA, 25 bp, Homo sapien
caatcccggtttttggtgccagccg

SEQ ID NO: 3958160 - DNA, 25 bp, Homo sapien
ggctgcttacaaccacccagtgaaa

SEQ ID NO: 3958161 - DNA, 25 bp, Homo sapien
gattatgccctcatgaaaaatgcct

SEQ ID NO: 3958162 - DNA, 25 bp, Homo sapien
tcaaccatgagactagtccccaaag

SEQ ID NO: 3958163 - DNA, 25 bp, Homo sapien
ttggaaaaccttgggcattctgcat

SEQ ID NO: 3958164 - DNA, 25 bp, Homo sapien
gaagaggttcctgagtttgtacttg

SEQ ID NO: 3958165 - DNA, 25 bp, Homo sapien
gtcgaagaggttcctgagtttgtac

SEQ ID NO: 3958166 - DNA, 25 bp, Homo sapien
gtgttgcaccgttagggctgttagc

SEQ ID NO: 3958167 - DNA, 25 bp, Homo sapien
gtttgtacttgtgttgcaccgttag

SEQ ID NO: 3958168 - DNA, 25 bp, Homo sapien
gggatgtcatgtcgcgcctggatca

SEQ ID NO: 3958169 - DNA, 25 bp, Homo sapien
tatgtaaccagagagcgggatgtca

SEQ ID NO: 3958170 - DNA, 25 bp, Homo sapien
ggttgtcctggctcgagaactggca

SEQ ID NO: 3958171 - DNA, 25 bp, Homo sapien
tacttcacatttcaggacgacgaga

SEQ ID NO: 3958172 - DNA, 25 bp, Homo sapien
tctgttattaaaccttggctcagga

SEQ ID NO: 3958173 - DNA, 25 bp, Homo sapien
tgcggcttgcttggtcggcgtccct

SEQ ID NO: 3958174 - DNA, 25 bp, Homo sapien
ttgctcccctagagcgccatctttt

SEQ ID NO: 3958175 - DNA, 25 bp, Homo sapien
aagccaccgatgtggctccagcaca

SEQ ID NO: 3958176 - DNA, 25 bp, Homo sapien
ccggctcttctgtgttagagcttcg

SEQ ID NO: 3958177 - DNA, 25 bp, Homo sapien
ctgccggcggagtgtgtgtgctctc

SEQ ID NO: 3958178 - DNA, 25 bp, Homo sapien
agagcttcgttctggcctgctccca

SEQ ID NO: 3958179 - DNA, 25 bp, Homo sapien
ctccaagctggcccaagtgtcgtgg

SEQ ID NO: 3958180 - DNA, 25 bp, Homo sapien
aggagctggacgtgcactgacgatc

SEQ ID NO: 3958181 - DNA, 25 bp, Homo sapien
gtctctgcccacgagaagcttcgat

SEQ ID NO: 3958182 - DNA, 25 bp, Homo sapien
tgacgatccgtgtcagaggcttccc

SEQ ID NO: 3958183 - DNA, 25 bp, Homo sapien
aggcttcccggcagcaagatgcgct

SEQ ID NO: 3958184 - DNA, 25 bp, Homo sapien
gcatttcatgcatccgctggtgcca

SEQ ID NO: 3958185 - DNA, 25 bp, Homo sapien
cagaccggtcaagagaatggagtca

SEQ ID NO: 3958186 - DNA, 25 bp, Homo sapien
tgaggactttcacagcgagctggca

SEQ ID NO: 3958187 - DNA, 25 bp, Homo sapien
tcaagcctagtgcacagcggtgtct

SEQ ID NO: 3958188 - DNA, 25 bp, Homo sapien
cccgagctcgaatgatggagaccca

SEQ ID NO: 3958189 - DNA, 25 bp, Homo sapien
tgacccgtggatctgccctgtgcca

SEQ ID NO: 3958190 - DNA, 25 bp, Homo sapien
ttatgaagcggtcaggtgcacacag

SEQ ID NO: 3958191 - DNA, 25 bp, Homo sapien
cagaggccacgggatcaaacgattt

SEQ ID NO: 3958192 - DNA, 25 bp, Homo sapien
ctgttcaaggaagagtaagaggtga

SEQ ID NO: 3958193 - DNA, 25 bp, Homo sapien
cactctcagtggcttcttcacggta

SEQ ID NO: 3958194 - DNA, 25 bp, Homo sapien
aaggttgtagagaatgctggcctcc

SEQ ID NO: 3958195 - DNA, 25 bp, Homo sapien
tgaggaaatggaaacgacgcaaggt

SEQ ID NO: 3958196 - DNA, 25 bp, Homo sapien
ctgcccccgtatgagccacgggagt

SEQ ID NO: 3958197 - DNA, 25 bp, Homo sapien
tgggcttcccgcagagccgtcggaa

SEQ ID NO: 3958198 - DNA, 25 bp, Homo sapien
gaacacggctgcttgttggttgtga

SEQ ID NO: 3958199 - DNA, 25 bp, Homo sapien
gcagagccgtcggaacacggctgct

SEQ ID NO: 3958200 - DNA, 25 bp, Homo sapien
aacagaattgcacacgcttgacctc

SEQ ID NO: 3958201 - DNA, 25 bp, Homo sapien
cagaattgcacacgcttgacctctc

SEQ ID NO: 3958202 - DNA, 25 bp, Homo sapien
gcaacagaattgcacacgcttgacc

SEQ ID NO: 3958203 - DNA, 25 bp, Homo sapien
ctgcaacagaattgcacacgcttga

SEQ ID NO: 3958204 - DNA, 25 bp, Homo sapien
ccagagcggtgcaggtagtgggaac

SEQ ID NO: 3958205 - DNA, 25 bp, Homo sapien
tccaaatgggattggccagagcggt

SEQ ID NO: 3958206 - DNA, 25 bp, Homo sapien
atttccaaatgggattggccagagc

SEQ ID NO: 3958207 - DNA, 25 bp, Homo sapien
gtgggaactccaggtctttgtccag

SEQ ID NO: 3958208 - DNA, 25 bp, Homo sapien
ggttgcaagtcccttcgcttctggg

SEQ ID NO: 3958209 - DNA, 25 bp, Homo sapien
aaagtgtgtcactcggccaggtgcg

SEQ ID NO: 3958210 - DNA, 25 bp, Homo sapien
caggcaaggatttgggtccccgtgt

SEQ ID NO: 3958211 - DNA, 25 bp, Homo sapien
tggatgcgtagcacataaagccggg

SEQ ID NO: 3958212 - DNA, 25 bp, Homo sapien
aaaaaacgggcatttaagtgcgctg

SEQ ID NO: 3958213 - DNA, 25 bp, Homo sapien
ttgtgacgtgggtagagtttctttg

SEQ ID NO: 3958214 - DNA, 25 bp, Homo sapien
ccgaggcaggtcgatcatttgcgcc

SEQ ID NO: 3958215 - DNA, 25 bp, Homo sapien
gatagtcttgttgccctgtagccac

SEQ ID NO: 3958216 - DNA, 25 bp, Homo sapien
tacatcattgtaaaccagggccagt

SEQ ID NO: 3958217 - DNA, 25 bp, Homo sapien
tgtatcttggtgagggcagctgact

SEQ ID NO: 3958218 - DNA, 25 bp, Homo sapien
tgtgccctctatgcaagaaccttgg

SEQ ID NO: 3958219 - DNA, 25 bp, Homo sapien
tctagcttaggctggatcacccacc

SEQ ID NO: 3958220 - DNA, 25 bp, Homo sapien
gggactggaacccacgtatgctgtg

SEQ ID NO: 3958221 - DNA, 25 bp, Homo sapien
caaaaacaggtgctagaatgcccgt

SEQ ID NO: 3958222 - DNA, 25 bp, Homo sapien
gaatgcccgtagcatcatgcacagt

SEQ ID NO: 3958223 - DNA, 25 bp, Homo sapien
gaaacgacgcacgtgtcatcgaatg

SEQ ID NO: 3958224 - DNA, 25 bp, Homo sapien
ttgatgagggtggagacaacaaccc

SEQ ID NO: 3958225 - DNA, 25 bp, Homo sapien
tgggtgtctcgtgagctcaggatca

SEQ ID NO: 3958226 - DNA, 25 bp, Homo sapien
gcccctccaagtatgactggcagat

SEQ ID NO: 3958227 - DNA, 25 bp, Homo sapien
gtctctttccccagcgtcggtagtc

SEQ ID NO: 3958228 - DNA, 25 bp, Homo sapien
cagaggaatcgagggtgagggtggg

SEQ ID NO: 3958229 - DNA, 25 bp, Homo sapien
caggcgtctttgagccggtgagcca

SEQ ID NO: 3958230 - DNA, 25 bp, Homo sapien
gtccaggcgcgtgtcgggtgggagc

SEQ ID NO: 3958231 - DNA, 25 bp, Homo sapien
gcgccagggtgcagggcgccggtgt

SEQ ID NO: 3958232 - DNA, 25 bp, Homo sapien
gccccggacaagtctggctcctggg

SEQ ID NO: 3958233 - DNA, 25 bp, Homo sapien
cagtggctgtggagcctagcgatcc

SEQ ID NO: 3958234 - DNA, 25 bp, Homo sapien
aaagggagcgaatcatcactgggac

SEQ ID NO: 3958235 - DNA, 25 bp, Homo sapien
cactgagtaattaacaaagggagcg

SEQ ID NO: 3958236 - DNA, 25 bp, Homo sapien
gccaaaagcacaggaaggtcaggag

SEQ ID NO: 3958237 - DNA, 25 bp, Homo sapien
gagcagcctgggcaagaaactgaaa

SEQ ID NO: 3958238 - DNA, 25 bp, Homo sapien
ttgagccaggaattcgagagcagcc

SEQ ID NO: 3958239 - DNA, 25 bp, Homo sapien
tgggcaagaaactgaaaccctgtct

SEQ ID NO: 3958240 - DNA, 25 bp, Homo sapien
aatcaaccaggcatggtgctgcaca

SEQ ID NO: 3958241 - DNA, 25 bp, Homo sapien
ggtttaaatgtccacgcctctccag

SEQ ID NO: 3958242 - DNA, 25 bp, Homo sapien
ttttagctaggcgagtacagacggg

SEQ ID NO: 3958243 - DNA, 25 bp, Homo sapien
agaagtgagcccagttagtaccccg

SEQ ID NO: 3958244 - DNA, 25 bp, Homo sapien
gactcagcagtgaccctgtgtgcca

SEQ ID NO: 3958245 - DNA, 25 bp, Homo sapien
gctaagaggatgtcactactgcaat

SEQ ID NO: 3958246 - DNA, 25 bp, Homo sapien
cagtagcagaaccaccttagttgtg

SEQ ID NO: 3958247 - DNA, 25 bp, Homo sapien
tcgacctgatgtgtagacgctcact

SEQ ID NO: 3958248 - DNA, 25 bp, Homo sapien
ttttggttgcaagaacctggctctg

SEQ ID NO: 3958249 - DNA, 25 bp, Homo sapien
tagtacgtctttcaggtgggtggca

SEQ ID NO: 3958250 - DNA, 25 bp, Homo sapien
cacacgtggcaagtgcctgaatcgg

SEQ ID NO: 3958251 - DNA, 25 bp, Homo sapien
cacctggcagaatgactacgaatag

SEQ ID NO: 3958252 - DNA, 25 bp, Homo sapien
ggtcccttcttacgcagcacacgtg

SEQ ID NO: 3958253 - DNA, 25 bp, Homo sapien
acaagccttatactaactttgcggg

SEQ ID NO: 3958254 - DNA, 25 bp, Homo sapien
tcttcgcaaaaggacaggaatttcc

SEQ ID NO: 3958255 - DNA, 25 bp, Homo sapien
tgagcttacatgactgcgcttggct

SEQ ID NO: 3958256 - DNA, 25 bp, Homo sapien
gaagatgcgtccatagtatatactg

SEQ ID NO: 3958257 - DNA, 25 bp, Homo sapien
tcatccccaggatagaaataggcgt

SEQ ID NO: 3958258 - DNA, 25 bp, Homo sapien
catttgccatgcaggaggcttccca

SEQ ID NO: 3958259 - DNA, 25 bp, Homo sapien
tcagcatggcatgaccgtgatcagg

SEQ ID NO: 3958260 - DNA, 25 bp, Homo sapien
taaataacagggcttagtggtcact

SEQ ID NO: 3958261 - DNA, 25 bp, Homo sapien
tctttctagacagcccggtgtgaat

SEQ ID NO: 3958262 - DNA, 25 bp, Homo sapien
tctctttctagacagcccggtgtga

SEQ ID NO: 3958263 - DNA, 25 bp, Homo sapien
tttctagacagcccggtgtgaattc

SEQ ID NO: 3958264 - DNA, 25 bp, Homo sapien
ttctagacagcccggtgtgaattct

SEQ ID NO: 3958265 - DNA, 25 bp, Homo sapien
ccttggtgtcttcgagggcaggcca

SEQ ID NO: 3958266 - DNA, 25 bp, Homo sapien
tacggcttcccaaagactcgattca

SEQ ID NO: 3958267 - DNA, 25 bp, Homo sapien
cttccttggtgtcttcgagggcagg

SEQ ID NO: 3958268 - DNA, 25 bp, Homo sapien
gcaggccaggtggaatacggcttcc

SEQ ID NO: 3958269 - DNA, 25 bp, Homo sapien
gatgggtgggtcaacccagcctgct

SEQ ID NO: 3958270 - DNA, 25 bp, Homo sapien
tatggtttggaaaccggcctgcctg

SEQ ID NO: 3958271 - DNA, 25 bp, Homo sapien
tcctgctcttggtgtggccaggatc

SEQ ID NO: 3958272 - DNA, 25 bp, Homo sapien
ccaagtaggtcagatgccggttcag

SEQ ID NO: 3958273 - DNA, 25 bp, Homo sapien
gctcggcgtccggttctagcggcac

SEQ ID NO: 3958274 - DNA, 25 bp, Homo sapien
tctggagcatcttggccgcacagtt

SEQ ID NO: 3958275 - DNA, 25 bp, Homo sapien
gccgcacagttgtacaagcaccaag

SEQ ID NO: 3958276 - DNA, 25 bp, Homo sapien
caagccaagcgcagatgcgacaggc

SEQ ID NO: 3958277 - DNA, 25 bp, Homo sapien
aggcctgccgcagtggcacagacac

SEQ ID NO: 3958278 - DNA, 25 bp, Homo sapien
tccacggccacggaaatgaggagaa

SEQ ID NO: 3958279 - DNA, 25 bp, Homo sapien
tgcctcacggcagcaaagactacaa

SEQ ID NO: 3958280 - DNA, 25 bp, Homo sapien
aagactacaaccaccagcaggcctg

SEQ ID NO: 3958281 - DNA, 25 bp, Homo sapien
tgcaggttctcccacgtgacggact

SEQ ID NO: 3958282 - DNA, 25 bp, Homo sapien
tcgtcttccgacatagccggcaggt

SEQ ID NO: 3958283 - DNA, 25 bp, Homo sapien
gctttaagaggtccgtatccttcca

SEQ ID NO: 3958284 - DNA, 25 bp, Homo sapien
acggactcgaagaacgggtgtgctt

SEQ ID NO: 3958285 - DNA, 25 bp, Homo sapien
gccttgaggggcagcacaggatccc

SEQ ID NO: 3958286 - DNA, 25 bp, Homo sapien
ctgtgcgaggaaaggggccgagcct

SEQ ID NO: 3958287 - DNA, 25 bp, Homo sapien
gggccgagccttgaggggcagcaca

SEQ ID NO: 3958288 - DNA, 25 bp, Homo sapien
gggcctgcctccccgtccagttgct

SEQ ID NO: 3958289 - DNA, 25 bp, Homo sapien
ctccacgaggtctcttgccttaggg

SEQ ID NO: 3958290 - DNA, 25 bp, Homo sapien
tccacgaggtctcttgccttaggga

SEQ ID NO: 3958291 - DNA, 25 bp, Homo sapien
caaaagtttctccacgaggtctctt

SEQ ID NO: 3958292 - DNA, 25 bp, Homo sapien
aagtttctccacgaggtctcttgcc

SEQ ID NO: 3958293 - DNA, 25 bp, Homo sapien
gtatattatgcatccaagagcccaa

SEQ ID NO: 3958294 - DNA, 25 bp, Homo sapien
gaaatgccttcctcataaacctgtt

SEQ ID NO: 3958295 - DNA, 25 bp, Homo sapien
gcccggcctctttcaattctttata

SEQ ID NO: 3958296 - DNA, 25 bp, Homo sapien
aattcaaaagcataaaaagagatgc

SEQ ID NO: 3958297 - DNA, 25 bp, Homo sapien
gttcttaactatgtttaatatcaca

SEQ ID NO: 3958298 - DNA, 25 bp, Homo sapien
tagacaactaccatcatccgttcag

SEQ ID NO: 3958299 - DNA, 25 bp, Homo sapien
atccgttcagtgtctatccctccag

SEQ ID NO: 3958300 - DNA, 25 bp, Homo sapien
ccatagacaactaccatcatccgtt

SEQ ID NO: 3958301 - DNA, 25 bp, Homo sapien
gacaactaccatcatccgttcagtg

SEQ ID NO: 3958302 - DNA, 25 bp, Homo sapien
gagcagaatcactccagttgggaag

SEQ ID NO: 3958303 - DNA, 25 bp, Homo sapien
gtgtctggccatgctaagaactcag

SEQ ID NO: 3958304 - DNA, 25 bp, Homo sapien
gctagctcttaggtggcgacgacaa

SEQ ID NO: 3958305 - DNA, 25 bp, Homo sapien
tctacaaacgaggaaacgctagctc

SEQ ID NO: 3958306 - DNA, 25 bp, Homo sapien
ggccccttgtaacctggcggagcag

SEQ ID NO: 3958307 - DNA, 25 bp, Homo sapien
caggaaggtggccccttgtaacctg

SEQ ID NO: 3958308 - DNA, 25 bp, Homo sapien
gtggccccttgtaacctggcggagc

SEQ ID NO: 3958309 - DNA, 25 bp, Homo sapien
cccttgtaacctggcggagcaggag

SEQ ID NO: 3958310 - DNA, 25 bp, Homo sapien
agccctcagcagcacttgactggcc

SEQ ID NO: 3958311 - DNA, 25 bp, Homo sapien
ccaccctagacagcacctcagactt

SEQ ID NO: 3958312 - DNA, 25 bp, Homo sapien
actgctccctagacttgaaactcca

SEQ ID NO: 3958313 - DNA, 25 bp, Homo sapien
tccacaaaactgctccctagacttg

SEQ ID NO: 3958314 - DNA, 25 bp, Homo sapien
tccctagacttgaaactccagactc

SEQ ID NO: 3958315 - DNA, 25 bp, Homo sapien
ttgccgtcagctccctggacatcct

SEQ ID NO: 3958316 - DNA, 25 bp, Homo sapien
agcccctgtaccatctgcacttttt

SEQ ID NO: 3958317 - DNA, 25 bp, Homo sapien
acaccgccggtggtcccctggctgg

SEQ ID NO: 3958318 - DNA, 25 bp, Homo sapien
ttccttgacccgcaccggccctgca

SEQ ID NO: 3958319 - DNA, 25 bp, Homo sapien
tgtgtggccgagcaacccgaaggcc

SEQ ID NO: 3958320 - DNA, 25 bp, Homo sapien
ctctcaaagaccctcatgcctgctg

SEQ ID NO: 3958321 - DNA, 25 bp, Homo sapien
gccacgctttcctcactcaatagtt

SEQ ID NO: 3958322 - DNA, 25 bp, Homo sapien
tgcgctctgcgggacgctgtcccac

SEQ ID NO: 3958323 - DNA, 25 bp, Homo sapien
cgctgttcccacgaatgagttggcc

SEQ ID NO: 3958324 - DNA, 25 bp, Homo sapien
aggcggacttctccgtgagcagctc

SEQ ID NO: 3958325 - DNA, 25 bp, Homo sapien
ggacttctccgtgagcagctctgga

SEQ ID NO: 3958326 - DNA, 25 bp, Homo sapien
cagctctggagaaacgtactgcgct

SEQ ID NO: 3958327 - DNA, 25 bp, Homo sapien
tattcggcgtttctgttctttacta

SEQ ID NO: 3958328 - DNA, 25 bp, Homo sapien
tgttctttactatcatcgagtgttg

SEQ ID NO: 3958329 - DNA, 25 bp, Homo sapien
atcatcgagtgttgcttttgtgact

SEQ ID NO: 3958330 - DNA, 25 bp, Homo sapien
cgagtgttgcttttgtgacttgtac

SEQ ID NO: 3958331 - DNA, 25 bp, Homo sapien
caccctatctctcggatgagcgcta

SEQ ID NO: 3958332 - DNA, 25 bp, Homo sapien
tagtgacctgccgtgctgtcgggac

SEQ ID NO: 3958333 - DNA, 25 bp, Homo sapien
agcaagtccgtgaggccaacaccca

SEQ ID NO: 3958334 - DNA, 25 bp, Homo sapien
tttaaacagccacagcgtgcacgga

SEQ ID NO: 3958335 - DNA, 25 bp, Homo sapien
cccgcatgccacgggactaccgacg

SEQ ID NO: 3958336 - DNA, 25 bp, Homo sapien
tggctgctgatgcccccgcatgcca

SEQ ID NO: 3958337 - DNA, 25 bp, Homo sapien
ctggctgctgatgcccccgcatgcc

SEQ ID NO: 3958338 - DNA, 25 bp, Homo sapien
ctgctgatgcccccgcatgccacgg

SEQ ID NO: 3958339 - DNA, 25 bp, Homo sapien
tctcttcaaagccaagggtgccggc

SEQ ID NO: 3958340 - DNA, 25 bp, Homo sapien
gagacacccacactctcttcaaagc

SEQ ID NO: 3958341 - DNA, 25 bp, Homo sapien
cttcaaagccaagggtgccggctgc

SEQ ID NO: 3958342 - DNA, 25 bp, Homo sapien
acactctcttcaaagccaagggtgc

SEQ ID NO: 3958343 - DNA, 25 bp, Homo sapien
attacaggagtcacctggctaagtt

SEQ ID NO: 3958344 - DNA, 25 bp, Homo sapien
gattacaggagtcacctggctaagt

SEQ ID NO: 3958345 - DNA, 25 bp, Homo sapien
ttacaggagtcacctggctaagttt

SEQ ID NO: 3958346 - DNA, 25 bp, Homo sapien
acctagctaaaaacacacctgtatt

SEQ ID NO: 3958347 - DNA, 25 bp, Homo sapien
cacctagctaaaaacacacctgtat

SEQ ID NO: 3958348 - DNA, 25 bp, Homo sapien
aaaaacacacctgtattttcagtag

SEQ ID NO: 3958349 - DNA, 25 bp, Homo sapien
ccacacctagctaaaaacacacctg

SEQ ID NO: 3958350 - DNA, 25 bp, Homo sapien
gaaagaagcatttatcctacttttc

SEQ ID NO: 3958351 - DNA, 25 bp, Homo sapien
ttaatcatcattggaagagaatgga

SEQ ID NO: 3958352 - DNA, 25 bp, Homo sapien
tgataccacgagtcaacccaaaagt

SEQ ID NO: 3958353 - DNA, 25 bp, Homo sapien
ggagaaccaatgtgtggttttcaaa

SEQ ID NO: 3958354 - DNA, 25 bp, Homo sapien
gagaggaccatgttcaacaacgcca

SEQ ID NO: 3958355 - DNA, 25 bp, Homo sapien
caactctgaatgtgatgtagtggcc

SEQ ID NO: 3958356 - DNA, 25 bp, Homo sapien
gagatgccggataaagaacacccac

SEQ ID NO: 3958357 - DNA, 25 bp, Homo sapien
ctcatgaatgtatcaggctgtgacc

SEQ ID NO: 3958358 - DNA, 25 bp, Homo sapien
ggtgggtgatccagcctaagctaga

SEQ ID NO: 3958359 - DNA, 25 bp, Homo sapien
gccctcaggagagcgtctggagtcc

SEQ ID NO: 3958360 - DNA, 25 bp, Homo sapien
ggaaaatccgtcttgaaggcagctc

SEQ ID NO: 3958361 - DNA, 25 bp, Homo sapien
ctagaatggcggcaagctcaaggca

SEQ ID NO: 3958362 - DNA, 25 bp, Homo sapien
cagaggagccactgtagtgactgaa

SEQ ID NO: 3958363 - DNA, 25 bp, Homo sapien
gccactgtagtgactgaagcccacg

SEQ ID NO: 3958364 - DNA, 25 bp, Homo sapien
tggacgatggccatgcacagatgag

SEQ ID NO: 3958365 - DNA, 25 bp, Homo sapien
ctggacgatggccatgcacagatga

SEQ ID NO: 3958366 - DNA, 25 bp, Homo sapien
tccacacctggctgcatgccagaaa

SEQ ID NO: 3958367 - DNA, 25 bp, Homo sapien
tcctgtttggtgagtgctgcctcca

SEQ ID NO: 3958368 - DNA, 25 bp, Homo sapien
ctgaagcccacagcgtccaccctgt

SEQ ID NO: 3958369 - DNA, 25 bp, Homo sapien
tgcccacacctgtggccttcctctc

SEQ ID NO: 3958370 - DNA, 25 bp, Homo sapien
gacactgacagatcctaagaaagct

SEQ ID NO: 3958371 - DNA, 25 bp, Homo sapien
gctcctgaccccacggaatgttgtg

SEQ ID NO: 3958372 - DNA, 25 bp, Homo sapien
tttcatcagcgcacttaaatgcccg

SEQ ID NO: 3958373 - DNA, 25 bp, Homo sapien
tccacacgaagggaaaaatgcccag

SEQ ID NO: 3958374 - DNA, 25 bp, Homo sapien
ttcaactttgtcacagacaacactg

SEQ ID NO: 3958375 - DNA, 25 bp, Homo sapien
tgtgtacacagaaacaggattacca

SEQ ID NO: 3958376 - DNA, 25 bp, Homo sapien
gtgtacacagaaacaggattaccag

SEQ ID NO: 3958377 - DNA, 25 bp, Homo sapien
tctgaaacgccaggaagaccgccct

SEQ ID NO: 3958378 - DNA, 25 bp, Homo sapien
tgggcgggaggtgcgcactctggca

SEQ ID NO: 3958379 - DNA, 25 bp, Homo sapien
gaagaccgccctggctctgtgcagc

SEQ ID NO: 3958380 - DNA, 25 bp, Homo sapien
tttgggcgggaggtgcgcactctgg

SEQ ID NO: 3958381 - DNA, 25 bp, Homo sapien
gaggccccacaggcaccagctgggt

SEQ ID NO: 3958382 - DNA, 25 bp, Homo sapien
ggccccacaggcaccagctgggtac

SEQ ID NO: 3958383 - DNA, 25 bp, Homo sapien
aaggtgccaagagaggccccacagg

SEQ ID NO: 3958384 - DNA, 25 bp, Homo sapien
tcaaggtgccaagagaggccccaca

SEQ ID NO: 3958385 - DNA, 25 bp, Homo sapien
ccagcacacagaatacagggccaat

SEQ ID NO: 3958386 - DNA, 25 bp, Homo sapien
ctcccagcacacagaatacagggcc

SEQ ID NO: 3958387 - DNA, 25 bp, Homo sapien
agcacacagaatacagggccaattc

SEQ ID NO: 3958388 - DNA, 25 bp, Homo sapien
tcccagcacacagaatacagggcca

SEQ ID NO: 3958389 - DNA, 25 bp, Homo sapien
gtacagggatgtgcgcgcccggata

SEQ ID NO: 3958390 - DNA, 25 bp, Homo sapien
agggatgtgcgcgcccggatactac

SEQ ID NO: 3958391 - DNA, 25 bp, Homo sapien
acagggatgtgcgcgcccggatact

SEQ ID NO: 3958392 - DNA, 25 bp, Homo sapien
aggtacagggatgtgcgcgcccgga

SEQ ID NO: 3958393 - DNA, 25 bp, Homo sapien
cacgcgggtggctgggtacgaatgt

SEQ ID NO: 3958394 - DNA, 25 bp, Homo sapien
ctgcacgcgggtggctgggtacgaa

SEQ ID NO: 3958395 - DNA, 25 bp, Homo sapien
ggctgggtacgaatgtggcccccca

SEQ ID NO: 3958396 - DNA, 25 bp, Homo sapien
cgggtggctgggtacgaatgtggcc

SEQ ID NO: 3958397 - DNA, 25 bp, Homo sapien
tgacacaatgcaaacactcctcaga

SEQ ID NO: 3958398 - DNA, 25 bp, Homo sapien
atgacacaatgcaaacactcctcag

SEQ ID NO: 3958399 - DNA, 25 bp, Homo sapien
ctggatgtgcatatcttcatttaac

SEQ ID NO: 3958400 - DNA, 25 bp, Homo sapien
gatctggatgtgcatatcttcattt

SEQ ID NO: 3958401 - DNA, 25 bp, Homo sapien
gatgtgcatatcttcatttaacaaa

SEQ ID NO: 3958402 - DNA, 25 bp, Homo sapien
ggatgtgcatatcttcatttaacaa

SEQ ID NO: 3958403 - DNA, 25 bp, Homo sapien
gctggacacagtagggattcaccac

SEQ ID NO: 3958404 - DNA, 25 bp, Homo sapien
taaagctcacaagcaacaagtgttg

SEQ ID NO: 3958405 - DNA, 25 bp, Homo sapien
gacaaccagggctacaggcctaaag

SEQ ID NO: 3958406 - DNA, 25 bp, Homo sapien
ccaggaaagacacgcaaccattgca

SEQ ID NO: 3958407 - DNA, 25 bp, Homo sapien
tgtaaaatcgggtacaggtctcatc

SEQ ID NO: 3958408 - DNA, 25 bp, Homo sapien
cgaatgaaccgattttgcgaatata

SEQ ID NO: 3958409 - DNA, 25 bp, Homo sapien
agtactctaaagcagacacaatctc

SEQ ID NO: 3958410 - DNA, 25 bp, Homo sapien
gtgaatgatgcccttgccgtgcaag

SEQ ID NO: 3958411 - DNA, 25 bp, Homo sapien
ctgataagaatttttaattcagtgc

SEQ ID NO: 3958412 - DNA, 25 bp, Homo sapien
aatttttaattcagtgcaaactgaa

SEQ ID NO: 3958413 - DNA, 25 bp, Homo sapien
taagaatttttaattcagtgcaaac

SEQ ID NO: 3958414 - DNA, 25 bp, Homo sapien
ttaattcagtgcaaactgaaagtac

SEQ ID NO: 3958415 - DNA, 25 bp, Homo sapien
caagacgaggcaccagcatgatgag

SEQ ID NO: 3958416 - DNA, 25 bp, Homo sapien
atgagggctttctcattaagaacgc

SEQ ID NO: 3958417 - DNA, 25 bp, Homo sapien
gagggctttctcattaagaacgcca

SEQ ID NO: 3958418 - DNA, 25 bp, Homo sapien
aggccccagctccaagacgaggcac

SEQ ID NO: 3958419 - DNA, 25 bp, Homo sapien
cactttgtaagacaaaagccatctc

SEQ ID NO: 3958420 - DNA, 25 bp, Homo sapien
cctggccgagtgacacactttgtaa

SEQ ID NO: 3958421 - DNA, 25 bp, Homo sapien
tgaacttctacacccatgaagtgtg

SEQ ID NO: 3958422 - DNA, 25 bp, Homo sapien
gcaccactgccctacgatggctcca

SEQ ID NO: 3958423 - DNA, 25 bp, Homo sapien
gcaggccagaacgaagctctaacac

SEQ ID NO: 3958424 - DNA, 25 bp, Homo sapien
tgggagcaggccagaacgaagctct

SEQ ID NO: 3958425 - DNA, 25 bp, Homo sapien
cagaacgaagctctaacacagaaga

SEQ ID NO: 3958426 - DNA, 25 bp, Homo sapien
cgccggcagccgaaggagctgcagg

SEQ ID NO: 3958427 - DNA, 25 bp, Homo sapien
tatgatatgtcgcttctccagaatt

SEQ ID NO: 3958428 - DNA, 25 bp, Homo sapien
tgatccaggcgcgacatgacatccc

SEQ ID NO: 3958429 - DNA, 25 bp, Homo sapien
gcttctcgtcgtcctgaaatgtgaa

SEQ ID NO: 3958430 - DNA, 25 bp, Homo sapien
catcccgctctctggttacataggg

SEQ ID NO: 3958431 - DNA, 25 bp, Homo sapien
gaggttgccagttctcgagccagga

SEQ ID NO: 3958432 - DNA, 25 bp, Homo sapien
tggaggttgccagttctcgagccag

SEQ ID NO: 3958433 - DNA, 25 bp, Homo sapien
tctctggaggttgccagttctcgag

SEQ ID NO: 3958434 - DNA, 25 bp, Homo sapien
tctggaggttgccagttctcgagcc

SEQ ID NO: 3958435 - DNA, 25 bp, Homo sapien
gaggaatacgccacgcatggatggc

SEQ ID NO: 3958436 - DNA, 25 bp, Homo sapien
gaaagaattgtgaacgagcaccgat

SEQ ID NO: 3958437 - DNA, 25 bp, Homo sapien
gcaggactcctgatgggacacgtca

SEQ ID NO: 3958438 - DNA, 25 bp, Homo sapien
tcctggaaagcaccatgtgagacgc

SEQ ID NO: 3958439 - DNA, 25 bp, Homo sapien
aaaaatctaaagtgtaagggcagca

SEQ ID NO: 3958440 - DNA, 25 bp, Homo sapien
tgcagaatgcccaaggttttccaaa

SEQ ID NO: 3958441 - DNA, 25 bp, Homo sapien
ctgggtggttgtaagcagccatgca

SEQ ID NO: 3958442 - DNA, 25 bp, Homo sapien
catttttcatgagggcataatcctt

SEQ ID NO: 3958443 - DNA, 25 bp, Homo sapien
ggatgggcaggaacataacaccacg

SEQ ID NO: 3958444 - DNA, 25 bp, Homo sapien
gaggctcggctgcagtgccgtccat

SEQ ID NO: 3958445 - DNA, 25 bp, Homo sapien
tcccaaacttgaagtcctcaggccg

SEQ ID NO: 3958446 - DNA, 25 bp, Homo sapien
taacaccacgctggactggatgggc

SEQ ID NO: 3958447 - DNA, 25 bp, Homo sapien
tctctcagtagggtcctgaagtcca

SEQ ID NO: 3958448 - DNA, 25 bp, Homo sapien
tggtggtttccgatacaactcccca

SEQ ID NO: 3958449 - DNA, 25 bp, Homo sapien
cactacagaagaacaatgcgaggcg

SEQ ID NO: 3958450 - DNA, 25 bp, Homo sapien
gaaccccggagagctcttgattcca

SEQ ID NO: 3958451 - DNA, 25 bp, Homo sapien
tacaagatttctctgcaaggaggct

SEQ ID NO: 3958452 - DNA, 25 bp, Homo sapien
ttctatttctccacgaagggaggga

SEQ ID NO: 3958453 - DNA, 25 bp, Homo sapien
aaactacaatctggagggccactcg

SEQ ID NO: 3958454 - DNA, 25 bp, Homo sapien
gatgccagttacctctgaacgggag

SEQ ID NO: 3958455 - DNA, 25 bp, Homo sapien
gaagcagaatccaactacaaggccc

SEQ ID NO: 3958456 - DNA, 25 bp, Homo sapien
gaggtcacacgcaattctgaagcag

SEQ ID NO: 3958457 - DNA, 25 bp, Homo sapien
gaagttactcctaggccagttgcgg

SEQ ID NO: 3958458 - DNA, 25 bp, Homo sapien
tacatggcatctaggcgacacagtc

SEQ ID NO: 3958459 - DNA, 25 bp, Homo sapien
ctgagcgtctgagcccgtgctctga

SEQ ID NO: 3958460 - DNA, 25 bp, Homo sapien
gaaaagcagccggaagcgctccgag

SEQ ID NO: 3958461 - DNA, 25 bp, Homo sapien
ctccgagcatctgagcgtctgagcc

SEQ ID NO: 3958462 - DNA, 25 bp, Homo sapien
agccggaagcgctccgagcatctga

SEQ ID NO: 3958463 - DNA, 25 bp, Homo sapien
gatgggtgggtcaacccagcctgct

SEQ ID NO: 3958464 - DNA, 25 bp, Homo sapien
tatggtttggaaaccggcctgcctg

SEQ ID NO: 3958465 - DNA, 25 bp, Homo sapien
tcctgctcttggtgtggccaggatc

SEQ ID NO: 3958466 - DNA, 25 bp, Homo sapien
ccaagtaggtcagatgccggttcag

SEQ ID NO: 3958467 - DNA, 25 bp, Homo sapien
gaaacaaggctgaagtgggcgacat

SEQ ID NO: 3958468 - DNA, 25 bp, Homo sapien
gaaagtggaactccgtacacggtgc

SEQ ID NO: 3958469 - DNA, 25 bp, Homo sapien
ccatggcgacagaagtcaaaccaga

SEQ ID NO: 3958470 - DNA, 25 bp, Homo sapien
gaagcttaaagagccaagcgtgctg

SEQ ID NO: 3958471 - DNA, 25 bp, Homo sapien
gctcggcgtccggttctagcggcac

SEQ ID NO: 3958472 - DNA, 25 bp, Homo sapien
tctggagcatcttggccgcacagtt

SEQ ID NO: 3958473 - DNA, 25 bp, Homo sapien
caagccaagcgcagatgcgacaggc

SEQ ID NO: 3958474 - DNA, 25 bp, Homo sapien
gccgcacagttgtacaagcaccaag

SEQ ID NO: 3958475 - DNA, 25 bp, Homo sapien
tccacggccacggaaatgaggagaa

SEQ ID NO: 3958476 - DNA, 25 bp, Homo sapien
tgcctcacggcagcaaagactacaa

SEQ ID NO: 3958477 - DNA, 25 bp, Homo sapien
aggcctgccgcagtggcacagacac

SEQ ID NO: 3958478 - DNA, 25 bp, Homo sapien
aagactacaaccaccagcaggcctg

SEQ ID NO: 3958479 - DNA, 25 bp, Homo sapien
tcgtcttccgacatagccggcaggt

SEQ ID NO: 3958480 - DNA, 25 bp, Homo sapien
gctttaagaggtccgtatccttcca

SEQ ID NO: 3958481 - DNA, 25 bp, Homo sapien
tgcaggttctcccacgtgacggact

SEQ ID NO: 3958482 - DNA, 25 bp, Homo sapien
acggactcgaagaacgggtgtgctt

SEQ ID NO: 3958483 - DNA, 25 bp, Homo sapien
ctccacgaggtctcttgccttaggg

SEQ ID NO: 3958484 - DNA, 25 bp, Homo sapien
tccacgaggtctcttgccttaggga

SEQ ID NO: 3958485 - DNA, 25 bp, Homo sapien
caaaagtttctccacgaggtctctt

SEQ ID NO: 3958486 - DNA, 25 bp, Homo sapien
aagtttctccacgaggtctcttgcc

SEQ ID NO: 3958487 - DNA, 25 bp, Homo sapien
gtatattatgcatccaagagcccaa

SEQ ID NO: 3958488 - DNA, 25 bp, Homo sapien
atccgttcagtgtctatccctccag

SEQ ID NO: 3958489 - DNA, 25 bp, Homo sapien
tagacaactaccatcatccgttcag

SEQ ID NO: 3958490 - DNA, 25 bp, Homo sapien
gacaactaccatcatccgttcagtg

SEQ ID NO: 3958491 - DNA, 25 bp, Homo sapien
ccatagacaactaccatcatccgtt

SEQ ID NO: 3958492 - DNA, 25 bp, Homo sapien
ctctcaaagaccctcatgcctgctg

SEQ ID NO: 3958493 - DNA, 25 bp, Homo sapien
tgcgctctgcgggacgctgtcccac

SEQ ID NO: 3958494 - DNA, 25 bp, Homo sapien
tgtgtggccgagcaacccgaaggcc

SEQ ID NO: 3958495 - DNA, 25 bp, Homo sapien
gccacgctttcctcactcaatagtt

SEQ ID NO: 3958496 - DNA, 25 bp, Homo sapien
cgctgttcccacgaatgagttggcc

SEQ ID NO: 3958497 - DNA, 25 bp, Homo sapien
ggacttctccgtgagcagctctgga

SEQ ID NO: 3958498 - DNA, 25 bp, Homo sapien
aggcggacttctccgtgagcagctc

SEQ ID NO: 3958499 - DNA, 25 bp, Homo sapien
cagctctggagaaacgtactgcgct

SEQ ID NO: 3958500 - DNA, 25 bp, Homo sapien
tattcggcgtttctgttctttacta

SEQ ID NO: 3958501 - DNA, 25 bp, Homo sapien
tgttctttactatcatcgagtgttg

SEQ ID NO: 3958502 - DNA, 25 bp, Homo sapien
atcatcgagtgttgcttttgtgact

SEQ ID NO: 3958503 - DNA, 25 bp, Homo sapien
cgagtgttgcttttgtgacttgtac

SEQ ID NO: 3958504 - DNA, 25 bp, Homo sapien
cccgcatgccacgggactaccgacg

SEQ ID NO: 3958505 - DNA, 25 bp, Homo sapien
tggctgctgatgcccccgcatgcca

SEQ ID NO: 3958506 - DNA, 25 bp, Homo sapien
ctggctgctgatgcccccgcatgcc

SEQ ID NO: 3958507 - DNA, 25 bp, Homo sapien
ctgctgatgcccccgcatgccacgg

SEQ ID NO: 3958508 - DNA, 25 bp, Homo sapien
acctagctaaaaacacacctgtatt

SEQ ID NO: 3958509 - DNA, 25 bp, Homo sapien
cacctagctaaaaacacacctgtat

SEQ ID NO: 3958510 - DNA, 25 bp, Homo sapien
aaaaacacacctgtattttcagtag

SEQ ID NO: 3958511 - DNA, 25 bp, Homo sapien
ccacacctagctaaaaacacacctg

SEQ ID NO: 3958512 - DNA, 25 bp, Homo sapien
gaaagaagcatttatcctacttttc

SEQ ID NO: 3958513 - DNA, 25 bp, Homo sapien
ttaatcatcattggaagagaatgga

SEQ ID NO: 3958514 - DNA, 25 bp, Homo sapien
tgataccacgagtcaacccaaaagt

SEQ ID NO: 3958515 - DNA, 25 bp, Homo sapien
ggagaaccaatgtgtggttttcaaa

SEQ ID NO: 3958516 - DNA, 25 bp, Homo sapien
ctcatgaatgtatcaggctgtgacc

SEQ ID NO: 3958517 - DNA, 25 bp, Homo sapien
caactctgaatgtgatgtagtggcc

SEQ ID NO: 3958518 - DNA, 25 bp, Homo sapien
gagatgccggataaagaacacccac

SEQ ID NO: 3958519 - DNA, 25 bp, Homo sapien
gagaggaccatgttcaacaacgcca

SEQ ID NO: 3958520 - DNA, 25 bp, Homo sapien
ggtgggtgatccagcctaagctaga

SEQ ID NO: 3958521 - DNA, 25 bp, Homo sapien
gaagcgcaacggcagctagtctgag

SEQ ID NO: 3958522 - DNA, 25 bp, Homo sapien
ctagaatggcggcaagctcaaggca

SEQ ID NO: 3958523 - DNA, 25 bp, Homo sapien
ggaaaatccgtcttgaaggcagctc

SEQ ID NO: 3958524 - DNA, 25 bp, Homo sapien
tccacacctggctgcatgccagaaa

SEQ ID NO: 3958525 - DNA, 25 bp, Homo sapien
ctgaagcccacagcgtccaccctgt

SEQ ID NO: 3958526 - DNA, 25 bp, Homo sapien
tcctgtttggtgagtgctgcctcca

SEQ ID NO: 3958527 - DNA, 25 bp, Homo sapien
tgcccacacctgtggccttcctctc

SEQ ID NO: 3958528 - DNA, 25 bp, Homo sapien
tccacacgaagggaaaaatgcccag

SEQ ID NO: 3958529 - DNA, 25 bp, Homo sapien
gacactgacagatcctaagaaagct

SEQ ID NO: 3958530 - DNA, 25 bp, Homo sapien
gctcctgaccccacggaatgttgtg

SEQ ID NO: 3958531 - DNA, 25 bp, Homo sapien
tttcatcagcgcacttaaatgcccg

SEQ ID NO: 3958532 - DNA, 25 bp, Homo sapien
gtacagggatgtgcgcgcccggata

SEQ ID NO: 3958533 - DNA, 25 bp, Homo sapien
acagggatgtgcgcgcccggatact

SEQ ID NO: 3958534 - DNA, 25 bp, Homo sapien
agggatgtgcgcgcccggatactac

SEQ ID NO: 3958535 - DNA, 25 bp, Homo sapien
aggtacagggatgtgcgcgcccgga

SEQ ID NO: 3958536 - DNA, 25 bp, Homo sapien
gatctggatgtgcatatcttcattt

SEQ ID NO: 3958537 - DNA, 25 bp, Homo sapien
ctggatgtgcatatcttcatttaac

SEQ ID NO: 3958538 - DNA, 25 bp, Homo sapien
ggatgtgcatatcttcatttaacaa

SEQ ID NO: 3958539 - DNA, 25 bp, Homo sapien
gatgtgcatatcttcatttaacaaa

SEQ ID NO: 3958540 - DNA, 25 bp, Homo sapien
tggccctgatcatcaaactgacgtc

SEQ ID NO: 3958541 - DNA, 25 bp, Homo sapien
cctgatcatcaaactgacgtcctgc

SEQ ID NO: 3958542 - DNA, 25 bp, Homo sapien
actggccctgatcatcaaactgacg

SEQ ID NO: 3958543 - DNA, 25 bp, Homo sapien
tcactggccctgatcatcaaactga

SEQ ID NO: 3958544 - DNA, 25 bp, Homo sapien
tgtaaaatcgggtacaggtctcatc

SEQ ID NO: 3958545 - DNA, 25 bp, Homo sapien
cgaatgaaccgattttgcgaatata

SEQ ID NO: 3958546 - DNA, 25 bp, Homo sapien
agtactctaaagcagacacaatctc

SEQ ID NO: 3958547 - DNA, 25 bp, Homo sapien
gtgaatgatgcccttgccgtgcaag

SEQ ID NO: 3958548 - DNA, 25 bp, Homo sapien
cgtgcagttaaggaagtgtaaaaat

SEQ ID NO: 3958549 - DNA, 25 bp, Homo sapien
gagcaggtttactccgttgcccaga

SEQ ID NO: 3958550 - DNA, 25 bp, Homo sapien
gctgggaacgtaggtacgcgctacc

SEQ ID NO: 3958551 - DNA, 25 bp, Homo sapien
tgaatatcgtgcagttaaggaagtg

SEQ ID NO: 3958552 - DNA, 25 bp, Homo sapien
cactttgtaagacaaaagccatctc

SEQ ID NO: 3958553 - DNA, 25 bp, Homo sapien
tgaacttctacacccatgaagtgtg

SEQ ID NO: 3958554 - DNA, 25 bp, Homo sapien
gcaccactgccctacgatggctcca

SEQ ID NO: 3958555 - DNA, 25 bp, Homo sapien
cctggccgagtgacacactttgtaa

SEQ ID NO: 3958556 - DNA, 25 bp, Homo sapien
ggacaaagacctggagttcccacta

SEQ ID NO: 3958557 - DNA, 25 bp, Homo sapien
gaagcgaagggacttgcaaccaagg

SEQ ID NO: 3958558 - DNA, 25 bp, Homo sapien
ttcagggcaacgaagagaaacccag

SEQ ID NO: 3958559 - DNA, 25 bp, Homo sapien
tgatgaagggcaacatggaccactg

SEQ ID NO: 3958560 - DNA, 25 bp, Homo sapien
gggaagcctctgacacggatcgtca

SEQ ID NO: 3958561 - DNA, 25 bp, Homo sapien
gaagcttctcgtgggcagagacgcc

SEQ ID NO: 3958562 - DNA, 25 bp, Homo sapien
gatcgtcagtgcacgtccagctcct

SEQ ID NO: 3958563 - DNA, 25 bp, Homo sapien
tccaccaaaatcgaagcttctcgtg

SEQ ID NO: 3958564 - DNA, 25 bp, Homo sapien
gcaggccagaacgaagctctaacac

SEQ ID NO: 3958565 - DNA, 25 bp, Homo sapien
tgggagcaggccagaacgaagctct

SEQ ID NO: 3958566 - DNA, 25 bp, Homo sapien
cagaacgaagctctaacacagaaga

SEQ ID NO: 3958567 - DNA, 25 bp, Homo sapien
cgccggcagccgaaggagctgcagg

SEQ ID NO: 3958568 - DNA, 25 bp, Homo sapien
gaggtaacgtcctgtgcagactccc

SEQ ID NO: 3958569 - DNA, 25 bp, Homo sapien
catcggtggcttctccgggaggtaa

SEQ ID NO: 3958570 - DNA, 25 bp, Homo sapien
cacacagggtctgattccaagtgag

SEQ ID NO: 3958571 - DNA, 25 bp, Homo sapien
gaagagcagatgcagactgcacctg

SEQ ID NO: 3958572 - DNA, 25 bp, Homo sapien
tatgatatgtcgcttctccagaatt

SEQ ID NO: 3958573 - DNA, 25 bp, Homo sapien
tgatccaggcgcgacatgacatccc

SEQ ID NO: 3958574 - DNA, 25 bp, Homo sapien
gcttctcgtcgtcctgaaatgtgaa

SEQ ID NO: 3958575 - DNA, 25 bp, Homo sapien
catcccgctctctggttacataggg

SEQ ID NO: 3958576 - DNA, 25 bp, Homo sapien
catgactcacaaaggtaactggtac

SEQ ID NO: 3958577 - DNA, 25 bp, Homo sapien
caacagtgtcctgtaccctgaaatc

SEQ ID NO: 3958578 - DNA, 25 bp, Homo sapien
tgtaccctgaaatcagcacagaaac

SEQ ID NO: 3958579 - DNA, 25 bp, Homo sapien
tttcaaacattgtacacaacagcct

SEQ ID NO: 3958580 - DNA, 25 bp, Homo sapien
gaggttgccagttctcgagccagga

SEQ ID NO: 3958581 - DNA, 25 bp, Homo sapien
tggaggttgccagttctcgagccag

SEQ ID NO: 3958582 - DNA, 25 bp, Homo sapien
tctctggaggttgccagttctcgag

SEQ ID NO: 3958583 - DNA, 25 bp, Homo sapien
tctggaggttgccagttctcgagcc

SEQ ID NO: 3958584 - DNA, 25 bp, Homo sapien
tcccaaacttgaagtcctcaggccg

SEQ ID NO: 3958585 - DNA, 25 bp, Homo sapien
ggatgggcaggaacataacaccacg

SEQ ID NO: 3958586 - DNA, 25 bp, Homo sapien
gaggctcggctgcagtgccgtccat

SEQ ID NO: 3958587 - DNA, 25 bp, Homo sapien
taacaccacgctggactggatgggc

SEQ ID NO: 3958588 - DNA, 25 bp, Homo sapien
tctctcagtagggtcctgaagtcca

SEQ ID NO: 3958589 - DNA, 25 bp, Homo sapien
tggtggtttccgatacaactcccca

SEQ ID NO: 3958590 - DNA, 25 bp, Homo sapien
cactacagaagaacaatgcgaggcg

SEQ ID NO: 3958591 - DNA, 25 bp, Homo sapien
gaaccccggagagctcttgattcca

SEQ ID NO: 3958592 - DNA, 25 bp, Homo sapien
tacaagatttctctgcaaggaggct

SEQ ID NO: 3958593 - DNA, 25 bp, Homo sapien
ttctatttctccacgaagggaggga

SEQ ID NO: 3958594 - DNA, 25 bp, Homo sapien
aaactacaatctggagggccactcg

SEQ ID NO: 3958595 - DNA, 25 bp, Homo sapien
gatgccagttacctctgaacgggag

SEQ ID NO: 3958596 - DNA, 25 bp, Homo sapien
gaggtcacacgcaattctgaagcag

SEQ ID NO: 3958597 - DNA, 25 bp, Homo sapien
gaagttactcctaggccagttgcgg

SEQ ID NO: 3958598 - DNA, 25 bp, Homo sapien
tacatggcatctaggcgacacagtc

SEQ ID NO: 3958599 - DNA, 25 bp, Homo sapien
gaagcagaatccaactacaaggccc

SEQ ID NO: 3958600 - DNA, 25 bp, Homo sapien
gacagagccagacctaccttattca

SEQ ID NO: 3958601 - DNA, 25 bp, Homo sapien
tcttcagtccagtaagctccaggag

SEQ ID NO: 3958602 - DNA, 25 bp, Homo sapien
gttatactgggcatgctgctttgca

SEQ ID NO: 3958603 - DNA, 25 bp, Homo sapien
gcagccagctcttttcagatagaaa

SEQ ID NO: 3958604 - DNA, 25 bp, Homo sapien
tgaatccctgcgtgctacaagctga

SEQ ID NO: 3958605 - DNA, 25 bp, Homo sapien
cagaactaacgtccttggtctccag

SEQ ID NO: 3958606 - DNA, 25 bp, Homo sapien
gctccgcaaacacgcaggagacggg

SEQ ID NO: 3958607 - DNA, 25 bp, Homo sapien
ttgaaacacagattgggccggtccc

SEQ ID NO: 3958608 - DNA, 25 bp, Homo sapien
gtctgactgcgctgttattggatac

SEQ ID NO: 3958609 - DNA, 25 bp, Homo sapien
aagtagcgggtgttgacaccttttg

SEQ ID NO: 3958610 - DNA, 25 bp, Homo sapien
tgcttgttgttgacttcggacttgg

SEQ ID NO: 3958611 - DNA, 25 bp, Homo sapien
ttgcaaaaggtgttccttgacacct

SEQ ID NO: 3958612 - DNA, 25 bp, Homo sapien
ccaggttacactttggcggagatca

SEQ ID NO: 3958613 - DNA, 25 bp, Homo sapien
tctaggaggagcaatacctgtgtcc

SEQ ID NO: 3958614 - DNA, 25 bp, Homo sapien
gaataagctaaacaaccaggcgact

SEQ ID NO: 3958615 - DNA, 25 bp, Homo sapien
tttattcccgacaaagctgcagcta

SEQ ID NO: 3958616 - DNA, 25 bp, Homo sapien
aggtcacacggcgagattttgtctc

SEQ ID NO: 3958617 - DNA, 25 bp, Homo sapien
aaatctgtattcgaccccaagtagg

SEQ ID NO: 3958618 - DNA, 25 bp, Homo sapien
tgtatcaggcggtgaaagttgctct

SEQ ID NO: 3958619 - DNA, 25 bp, Homo sapien
gaacgagaggtgttgtaggtcacac

SEQ ID NO: 3958620 - DNA, 25 bp, Homo sapien
gaacagcccataaccgagaaacagg

SEQ ID NO: 3958621 - DNA, 25 bp, Homo sapien
tattggctcgttcaaccaaggcctg

SEQ ID NO: 3958622 - DNA, 25 bp, Homo sapien
tgcccgttgtgtgagtaattgccca

SEQ ID NO: 3958623 - DNA, 25 bp, Homo sapien
taccccaagttatgaccgtgcctaa

SEQ ID NO: 3958624 - DNA, 25 bp, Homo sapien
tatacctgggaaacgtgccaaatgc

SEQ ID NO: 3958625 - DNA, 25 bp, Homo sapien
gagacgagaacgagcctgaccaatt

SEQ ID NO: 3958626 - DNA, 25 bp, Homo sapien
tactgtagaaaggagaagaccttgc

SEQ ID NO: 3958627 - DNA, 25 bp, Homo sapien
aaatagcccctgtgttaagaacacg

SEQ ID NO: 3958628 - DNA, 25 bp, Homo sapien
agcctcttgatcttgttgagctgcg

SEQ ID NO: 3958629 - DNA, 25 bp, Homo sapien
tcttgatcttgttgagctgcggggt

SEQ ID NO: 3958630 - DNA, 25 bp, Homo sapien
cctcttgatcttgttgagctgcggg

SEQ ID NO: 3958631 - DNA, 25 bp, Homo sapien
ttgatcttgttgagctgcggggtca

SEQ ID NO: 3958632 - DNA, 25 bp, Homo sapien
cttcacacagcgagggagagcccca

SEQ ID NO: 3958633 - DNA, 25 bp, Homo sapien
acttcacacagcgagggagagcccc

SEQ ID NO: 3958634 - DNA, 25 bp, Homo sapien
tgtgaaagtacctagggaagcgcct

SEQ ID NO: 3958635 - DNA, 25 bp, Homo sapien
gaagcgcctgtcttgagtagtcaga

SEQ ID NO: 3958636 - DNA, 25 bp, Homo sapien
tgggaacaacacgtacctcgcaatg

SEQ ID NO: 3958637 - DNA, 25 bp, Homo sapien
tccagcacggcatggtcaagacatt

SEQ ID NO: 3958638 - DNA, 25 bp, Homo sapien
tacagggccaccctaaagtccagat

SEQ ID NO: 3958639 - DNA, 25 bp, Homo sapien
gatgcaaacccacttgaaccctgaa

SEQ ID NO: 3958640 - DNA, 25 bp, Homo sapien
tacagacaggaaacacggcatgttc

SEQ ID NO: 3958641 - DNA, 25 bp, Homo sapien
gtgaaaatccagtatcagggctgcc

SEQ ID NO: 3958642 - DNA, 25 bp, Homo sapien
aggttcccgggtcaagatcgcgtca

SEQ ID NO: 3958643 - DNA, 25 bp, Homo sapien
aaactttgacatgactctcggcccc

SEQ ID NO: 3958644 - DNA, 25 bp, Homo sapien
tccacgagtgagctgcagaaggttc

SEQ ID NO: 3958645 - DNA, 25 bp, Homo sapien
tccagctgacagagatgcaaaacgc

SEQ ID NO: 3958646 - DNA, 25 bp, Homo sapien
caggtgctttcagcaagaacttgca

SEQ ID NO: 3958647 - DNA, 25 bp, Homo sapien
tcctctacagacagaaccgaaaggt

SEQ ID NO: 3958648 - DNA, 25 bp, Homo sapien
ctgcgccaagccgaaaacaaacttt

SEQ ID NO: 3958649 - DNA, 25 bp, Homo sapien
tcggtgatcctgcacattcggcctc

SEQ ID NO: 3958650 - DNA, 25 bp, Homo sapien
cagagtcctccttccctaagctgaa

SEQ ID NO: 3958651 - DNA, 25 bp, Homo sapien
aacggcggccctcacgctgtgcccg

SEQ ID NO: 3958652 - DNA, 25 bp, Homo sapien
ctggctatgggcctcgcgtctgcgc

SEQ ID NO: 3958653 - DNA, 25 bp, Homo sapien
taagctgaactccagcaacggcggc

SEQ ID NO: 3958654 - DNA, 25 bp, Homo sapien
gctgcctgtggagaactggtgtgag

SEQ ID NO: 3958655 - DNA, 25 bp, Homo sapien
gtggtgagcaactgaacgagcctac

SEQ ID NO: 3958656 - DNA, 25 bp, Homo sapien
actttcatctgttgagatggctgtg

SEQ ID NO: 3958657 - DNA, 25 bp, Homo sapien
tctggcccaaaattgcagggttgta

SEQ ID NO: 3958658 - DNA, 25 bp, Homo sapien
gatctgttccatccgttagcgcgag

SEQ ID NO: 3958659 - DNA, 25 bp, Homo sapien
gattcctttagaaaccgctgcccgc

SEQ ID NO: 3958660 - DNA, 25 bp, Homo sapien
tgtttgggacttcactcgacctgca

SEQ ID NO: 3958661 - DNA, 25 bp, Homo sapien
tagtctcggtcagggagtctgctct

SEQ ID NO: 3958662 - DNA, 25 bp, Homo sapien
agcaggatggtgtgggcgggcaggc

SEQ ID NO: 3958663 - DNA, 25 bp, Homo sapien
ggtgcaacagcagcgctgggaggac

SEQ ID NO: 3958664 - DNA, 25 bp, Homo sapien
cacaggctgggtttttattgggaga

SEQ ID NO: 3958665 - DNA, 25 bp, Homo sapien
ggaaggagcgctatttacaaatgag

SEQ ID NO: 3958666 - DNA, 25 bp, Homo sapien
ttctggccgcccaacctcgctggct

SEQ ID NO: 3958667 - DNA, 25 bp, Homo sapien
ggatccagttgtggtgggcggtgac

SEQ ID NO: 3958668 - DNA, 25 bp, Homo sapien
cgcccaacctcgctggctggaactg

SEQ ID NO: 3958669 - DNA, 25 bp, Homo sapien
gaactgcagtttggggatgatccga

SEQ ID NO: 3958670 - DNA, 25 bp, Homo sapien
gactgacccacgaggcacaccaggg

SEQ ID NO: 3958671 - DNA, 25 bp, Homo sapien
ctgcagccacgactgacccacgagg

SEQ ID NO: 3958672 - DNA, 25 bp, Homo sapien
atgtagacacctgggcggttctggc

SEQ ID NO: 3958673 - DNA, 25 bp, Homo sapien
ctgggcggttctggcgggcacagcc

SEQ ID NO: 3958674 - DNA, 25 bp, Homo sapien
gagtttctgcaggatccgcggttcg

SEQ ID NO: 3958675 - DNA, 25 bp, Homo sapien
aagccggcgcacagcatgtcattct

SEQ ID NO: 3958676 - DNA, 25 bp, Homo sapien
gatgatgggcacagcgagtttctgc

SEQ ID NO: 3958677 - DNA, 25 bp, Homo sapien
tggtagccaaactcggtgtctttgc

SEQ ID NO: 3958678 - DNA, 25 bp, Homo sapien
cagcaggacctggtacagggacgtc

SEQ ID NO: 3958679 - DNA, 25 bp, Homo sapien
gcatacatagcgtgtggtcccggct

SEQ ID NO: 3958680 - DNA, 25 bp, Homo sapien
ggtcccggctgcactagctgccttg

SEQ ID NO: 3958681 - DNA, 25 bp, Homo sapien
tgcccgtctcaaagatcaccgaggg

SEQ ID NO: 3958682 - DNA, 25 bp, Homo sapien
cctggagttggacctaagggaagca

SEQ ID NO: 3958683 - DNA, 25 bp, Homo sapien
tgaaaggctggctcggagagaacca

SEQ ID NO: 3958684 - DNA, 25 bp, Homo sapien
cagcggttgcaactggaagttagcc

SEQ ID NO: 3958685 - DNA, 25 bp, Homo sapien
cgtgcctggccgtgagtatctgaat

SEQ ID NO: 3958686 - DNA, 25 bp, Homo sapien
attcggttcagcatcctggggcgac

SEQ ID NO: 3958687 - DNA, 25 bp, Homo sapien
ggacccactgctccgcgatgaggct

SEQ ID NO: 3958688 - DNA, 25 bp, Homo sapien
ttgcgctggatgctgacttgccagg

SEQ ID NO: 3958689 - DNA, 25 bp, Homo sapien
cagaagtggcttccgttgcgctgga

SEQ ID NO: 3958690 - DNA, 25 bp, Homo sapien
gatagaacaggtgtcaagccctctg

SEQ ID NO: 3958691 - DNA, 25 bp, Homo sapien
cagtcacggttcagggtgatcctca

SEQ ID NO: 3958692 - DNA, 25 bp, Homo sapien
tcctcgccgagaaaggcaacctaac

SEQ ID NO: 3958693 - DNA, 25 bp, Homo sapien
cggaggcactgagataacccaggga

SEQ ID NO: 3958694 - DNA, 25 bp, Homo sapien
tgttgctgccttggccctctgagac

SEQ ID NO: 3958695 - DNA, 25 bp, Homo sapien
ctgttgctgccttggccctctgaga

SEQ ID NO: 3958696 - DNA, 25 bp, Homo sapien
tctgcccggaaaagataaccagtcc

SEQ ID NO: 3958697 - DNA, 25 bp, Homo sapien
tgggcctttaaccaaacactggagc

SEQ ID NO: 3958698 - DNA, 25 bp, Homo sapien
gcaacgggaaatggagagtctgccc

SEQ ID NO: 3958699 - DNA, 25 bp, Homo sapien
cagccctggcactgtaaggttggcc

SEQ ID NO: 3958700 - DNA, 25 bp, Homo sapien
cagcagcaggagcggcaccgccgcc

SEQ ID NO: 3958701 - DNA, 25 bp, Homo sapien
gcaggagcggcaccgccgccggccg

SEQ ID NO: 3958702 - DNA, 25 bp, Homo sapien
agcagcaggagcggcaccgccgccg

SEQ ID NO: 3958703 - DNA, 25 bp, Homo sapien
cagcaggagcggcaccgccgccggc

SEQ ID NO: 3958704 - DNA, 25 bp, Homo sapien
cagaagcgttggagcacgagcgagg

SEQ ID NO: 3958705 - DNA, 25 bp, Homo sapien
gcgcagggccgtggtcggcggtggc

SEQ ID NO: 3958706 - DNA, 25 bp, Homo sapien
acgagcgaggtgcaggctccatgaa

SEQ ID NO: 3958707 - DNA, 25 bp, Homo sapien
cagggccgtggtcggcggtggcaga

SEQ ID NO: 3958708 - DNA, 25 bp, Homo sapien
agcagaccccgagctgaccgcggtg

SEQ ID NO: 3958709 - DNA, 25 bp, Homo sapien
gtgacctagccctgaaccccgagac

SEQ ID NO: 3958710 - DNA, 25 bp, Homo sapien
gttggcctcggttcctggaccctga

SEQ ID NO: 3958711 - DNA, 25 bp, Homo sapien
cacgcgaagtccgtccagcttcatt

SEQ ID NO: 3958712 - DNA, 25 bp, Homo sapien
tgtgctgactggtcagtgaaccaga

SEQ ID NO: 3958713 - DNA, 25 bp, Homo sapien
gtgctgactggtcagtgaaccagac

SEQ ID NO: 3958714 - DNA, 25 bp, Homo sapien
ctgtgctgactggtcagtgaaccag

SEQ ID NO: 3958715 - DNA, 25 bp, Homo sapien
agctccctcccatggatgggtacag

SEQ ID NO: 3958716 - DNA, 25 bp, Homo sapien
cccaggatgttcctgtgcagggtga

SEQ ID NO: 3958717 - DNA, 25 bp, Homo sapien
gtccaagagcgggttctgccaggcc

SEQ ID NO: 3958718 - DNA, 25 bp, Homo sapien
atgggtacaggagaaaaaagcagca

SEQ ID NO: 3958719 - DNA, 25 bp, Homo sapien
tattcctcgcaaagcaaccttggag

SEQ ID NO: 3958720 - DNA, 25 bp, Homo sapien
accttggaggcagtaatgcctggca

SEQ ID NO: 3958721 - DNA, 25 bp, Homo sapien
tcttcacagccatgtcagcgtcagg

SEQ ID NO: 3958722 - DNA, 25 bp, Homo sapien
ctgcaactggcttcttcctgatgcc

SEQ ID NO: 3958723 - DNA, 25 bp, Homo sapien
aaaaaacactgggaccctcgagatg

SEQ ID NO: 3958724 - DNA, 25 bp, Homo sapien
ggatctaggtcccacctgagaaaaa

SEQ ID NO: 3958725 - DNA, 25 bp, Homo sapien
ttgggtcccgtaacatctccaggcc

SEQ ID NO: 3958726 - DNA, 25 bp, Homo sapien
ccacagattgggcacgtgagggact

SEQ ID NO: 3958727 - DNA, 25 bp, Homo sapien
cctggtgaccggaagcctctttctg

SEQ ID NO: 3958728 - DNA, 25 bp, Homo sapien
gagtctcctggtgaccggaagcctc

SEQ ID NO: 3958729 - DNA, 25 bp, Homo sapien
ctggccctttggctgagcaatatcc

SEQ ID NO: 3958730 - DNA, 25 bp, Homo sapien
ggatgctggccctttggctgagcaa

SEQ ID NO: 3958731 - DNA, 25 bp, Homo sapien
caaacaattctctgctgcacctagg

SEQ ID NO: 3958732 - DNA, 25 bp, Homo sapien
ggatggcaactgctctccctggagt

SEQ ID NO: 3958733 - DNA, 25 bp, Homo sapien
gaaccagagcgatagcaaaacacat

SEQ ID NO: 3958734 - DNA, 25 bp, Homo sapien
gctccccgagtgtcagaagttgcct

SEQ ID NO: 3958735 - DNA, 25 bp, Homo sapien
tagaagcagtgagaatcctcctggt

SEQ ID NO: 3958736 - DNA, 25 bp, Homo sapien
ggaggcatccaagaccccataatgt

SEQ ID NO: 3958737 - DNA, 25 bp, Homo sapien
aactcatcattatcgctgcagctgg

SEQ ID NO: 3958738 - DNA, 25 bp, Homo sapien
tccgagcttgttgtgtgaacccagt

SEQ ID NO: 3958739 - DNA, 25 bp, Homo sapien
tctggatggattcctttctggtttg

SEQ ID NO: 3958740 - DNA, 25 bp, Homo sapien
tcctgagcaccatgcaaagccaaga

SEQ ID NO: 3958741 - DNA, 25 bp, Homo sapien
cacagagcggccatccagacagtgg

SEQ ID NO: 3958742 - DNA, 25 bp, Homo sapien
gatcattgctctcactacttacaaa

SEQ ID NO: 3958743 - DNA, 25 bp, Homo sapien
ggtaaagtgtaaacggatgctgtca

SEQ ID NO: 3958744 - DNA, 25 bp, Homo sapien
aacagacccagtttcctggatattt

SEQ ID NO: 3958745 - DNA, 25 bp, Homo sapien
ctgtgattcctttgtgaacaccact

SEQ ID NO: 3958746 - DNA, 25 bp, Homo sapien
tttgcaggcgtcttggaaaaagaga

SEQ ID NO: 3958747 - DNA, 25 bp, Homo sapien
aaaggcaacacgctctggcggcaaa

SEQ ID NO: 3958748 - DNA, 25 bp, Homo sapien
aaggcaacacgctctggcggcaaag

SEQ ID NO: 3958749 - DNA, 25 bp, Homo sapien
aaaaaggcaacacgctctggcggca

SEQ ID NO: 3958750 - DNA, 25 bp, Homo sapien
aaaaaaggcaacacgctctggcggc

SEQ ID NO: 3958751 - DNA, 25 bp, Homo sapien
gatgcatttatgctgtgacagagat

SEQ ID NO: 3958752 - DNA, 25 bp, Homo sapien
ttgaccaggtcacagatgcatttat

SEQ ID NO: 3958753 - DNA, 25 bp, Homo sapien
gagggcagagtgaccccattgacca

SEQ ID NO: 3958754 - DNA, 25 bp, Homo sapien
cgcagcatgctcctgacacagcttg

SEQ ID NO: 3958755 - DNA, 25 bp, Homo sapien
aggccagaaagagccgctgaagtgg

SEQ ID NO: 3958756 - DNA, 25 bp, Homo sapien
tcctcccggcactcatttccagtgt

SEQ ID NO: 3958757 - DNA, 25 bp, Homo sapien
aagagccgctgaagtggcttggaca

SEQ ID NO: 3958758 - DNA, 25 bp, Homo sapien
acgtggaaggccattcctcccggca

SEQ ID NO: 3958759 - DNA, 25 bp, Homo sapien
gctgaaggcccacacaaggccactg

SEQ ID NO: 3958760 - DNA, 25 bp, Homo sapien
aagctgaaggcccacacaaggccac

SEQ ID NO: 3958761 - DNA, 25 bp, Homo sapien
ctggaggaaggcttgcaccacaggg

SEQ ID NO: 3958762 - DNA, 25 bp, Homo sapien
gaaggcttgcaccacagggtcctcc

SEQ ID NO: 3958763 - DNA, 25 bp, Homo sapien
gcattttaggaacatcactccgagg

SEQ ID NO: 3958764 - DNA, 25 bp, Homo sapien
aattgtagtgcgtggagatcgtgcc

SEQ ID NO: 3958765 - DNA, 25 bp, Homo sapien
caagggccagatagggtgtcatgca

SEQ ID NO: 3958766 - DNA, 25 bp, Homo sapien
gagataagtacatcctcccacgggc

SEQ ID NO: 3958767 - DNA, 25 bp, Homo sapien
tgtgaggacggctggctgattatca

SEQ ID NO: 3958768 - DNA, 25 bp, Homo sapien
tatcaggcccagaatcacgggctta

SEQ ID NO: 3958769 - DNA, 25 bp, Homo sapien
gcttcaccggtatcacgtcctgggt

SEQ ID NO: 3958770 - DNA, 25 bp, Homo sapien
atcacgggcttagaaacattaacag

SEQ ID NO: 3958771 - DNA, 25 bp, Homo sapien
tgtgcctgaaaaaacggtacttcgc

SEQ ID NO: 3958772 - DNA, 25 bp, Homo sapien
gttgcactggccaacgggacgctta

SEQ ID NO: 3958773 - DNA, 25 bp, Homo sapien
gcagttagtcgtgctgacgtgcagc

SEQ ID NO: 3958774 - DNA, 25 bp, Homo sapien
tacttcgcggtgtggcttcggcgcc

SEQ ID NO: 3958775 - DNA, 25 bp, Homo sapien
tagatgccgtggggtcgtcgtcttt

SEQ ID NO: 3958776 - DNA, 25 bp, Homo sapien
ccttagatgccgtggggtcgtcgtc

SEQ ID NO: 3958777 - DNA, 25 bp, Homo sapien
cttagatgccgtggggtcgtcgtct

SEQ ID NO: 3958778 - DNA, 25 bp, Homo sapien
cccttagatgccgtggggtcgtcgt

SEQ ID NO: 3958779 - DNA, 25 bp, Homo sapien
caggtctcgaagtgctgcagctaaa

SEQ ID NO: 3958780 - DNA, 25 bp, Homo sapien
taggcgctgcacagaccattcggaa

SEQ ID NO: 3958781 - DNA, 25 bp, Homo sapien
ggagatgcgcctttcagtgaaccag

SEQ ID NO: 3958782 - DNA, 25 bp, Homo sapien
catacaactgccttggctgggcgaa

SEQ ID NO: 3958783 - DNA, 25 bp, Homo sapien
gctaggcgcagatctaggacccgat

SEQ ID NO: 3958784 - DNA, 25 bp, Homo sapien
gaagtggcaggtcacgctctagaac

SEQ ID NO: 3958785 - DNA, 25 bp, Homo sapien
tcgtagtagatcaccagccaggaga

SEQ ID NO: 3958786 - DNA, 25 bp, Homo sapien
gatcaccagtacgacgcaggtctcg

SEQ ID NO: 3958787 - DNA, 25 bp, Homo sapien
gaagaagcaggtccaattcaagccc

SEQ ID NO: 3958788 - DNA, 25 bp, Homo sapien
tcttcagagcggaaaaacaaatcca

SEQ ID NO: 3958789 - DNA, 25 bp, Homo sapien
gaaatctcgcatttcttcaaggcgg

SEQ ID NO: 3958790 - DNA, 25 bp, Homo sapien
aacaaatccagaacatctcaaagaa

SEQ ID NO: 3958791 - DNA, 25 bp, Homo sapien
tctcgcttgtctttgaggcgcagcc

SEQ ID NO: 3958792 - DNA, 25 bp, Homo sapien
agcaaaatctcgcttgtctttgagg

SEQ ID NO: 3958793 - DNA, 25 bp, Homo sapien
ccaaagcaaaatctcgcttgtcttt

SEQ ID NO: 3958794 - DNA, 25 bp, Homo sapien
cccatgccctaaacaaaagtcacag

SEQ ID NO: 3958795 - DNA, 25 bp, Homo sapien
tctgtaacgccacagagacggagct

SEQ ID NO: 3958796 - DNA, 25 bp, Homo sapien
caagggtccataacaagtccccagg

SEQ ID NO: 3958797 - DNA, 25 bp, Homo sapien
tcctagtagggtgacgtcgagaaca

SEQ ID NO: 3958798 - DNA, 25 bp, Homo sapien
tgaaatctggaacaccaccgaggca

SEQ ID NO: 3958799 - DNA, 25 bp, Homo sapien
gagcaggttccagtctgactcttct

SEQ ID NO: 3958800 - DNA, 25 bp, Homo sapien
tatcctacagtggactcgaattctc

SEQ ID NO: 3958801 - DNA, 25 bp, Homo sapien
gacaagatagaggtgagttctcagc

SEQ ID NO: 3958802 - DNA, 25 bp, Homo sapien
tctggaatgtctcctgagcagagca

SEQ ID NO: 3958803 - DNA, 25 bp, Homo sapien
tatccccagatgcagtggaaaaggc

SEQ ID NO: 3958804 - DNA, 25 bp, Homo sapien
aatggaccgtttcttaatcagctgg

SEQ ID NO: 3958805 - DNA, 25 bp, Homo sapien
tcagggagaacagctttggatcacc

SEQ ID NO: 3958806 - DNA, 25 bp, Homo sapien
ggtttacccagaactccatcaagga

SEQ ID NO: 3958807 - DNA, 25 bp, Homo sapien
ccctcggcgcagtaggtctggttcc

SEQ ID NO: 3958808 - DNA, 25 bp, Homo sapien
cgactatcccctcggcgcagtaggt

SEQ ID NO: 3958809 - DNA, 25 bp, Homo sapien
ttgacagcaaatctcgactatcccc

SEQ ID NO: 3958810 - DNA, 25 bp, Homo sapien
tgacagcaaatctcgactatcccct

SEQ ID NO: 3958811 - DNA, 25 bp, Homo sapien
caagaccaagtctcgtacaccacct

SEQ ID NO: 3958812 - DNA, 25 bp, Homo sapien
tcgacgtcgcagctctcgatcatct

SEQ ID NO: 3958813 - DNA, 25 bp, Homo sapien
ccaaatccagaactgctcgcagagg

SEQ ID NO: 3958814 - DNA, 25 bp, Homo sapien
tctcctgaacatccgcccaaatcca

SEQ ID NO: 3958815 - DNA, 25 bp, Homo sapien
cccgtggaaacgctctagatctcga

SEQ ID NO: 3958816 - DNA, 25 bp, Homo sapien
cgtggaaacgctctagatctcgagc

SEQ ID NO: 3958817 - DNA, 25 bp, Homo sapien
gaaacgctctagatctcgagcctct

SEQ ID NO: 3958818 - DNA, 25 bp, Homo sapien
tggaaacgctctagatctcgagcct

SEQ ID NO: 3958819 - DNA, 25 bp, Homo sapien
taaccaggaggcgatctcgaagcag

SEQ ID NO: 3958820 - DNA, 25 bp, Homo sapien
taagccgacgtaggtccagatctcg

SEQ ID NO: 3958821 - DNA, 25 bp, Homo sapien
gactcgcagaaggtccagatccagg

SEQ ID NO: 3958822 - DNA, 25 bp, Homo sapien
tccagtaactcgaagaaggtcccgc

SEQ ID NO: 3958823 - DNA, 25 bp, Homo sapien
ggaatgcttgaaccccttggcagct

SEQ ID NO: 3958824 - DNA, 25 bp, Homo sapien
gctccatgatggatggtccaggtcc

SEQ ID NO: 3958825 - DNA, 25 bp, Homo sapien
aatgagctgcttcagtcgtcctagc

SEQ ID NO: 3958826 - DNA, 25 bp, Homo sapien
tggcagctctagaacacccatgtct

SEQ ID NO: 3958827 - DNA, 25 bp, Homo sapien
cggtggcaccttcggctgtgaacct

SEQ ID NO: 3958828 - DNA, 25 bp, Homo sapien
gctgactctcgaacgccagctgcag

SEQ ID NO: 3958829 - DNA, 25 bp, Homo sapien
acagcagtgaacctggctgactctc

SEQ ID NO: 3958830 - DNA, 25 bp, Homo sapien
agccccagaacagcggtggcacctt

SEQ ID NO: 3958831 - DNA, 25 bp, Homo sapien
gatcagccgaggtctcctgtgcctt

SEQ ID NO: 3958832 - DNA, 25 bp, Homo sapien
cccttcctctagaatgggccaggct

SEQ ID NO: 3958833 - DNA, 25 bp, Homo sapien
tgctttttcagaccaatcccgttgt

SEQ ID NO: 3958834 - DNA, 25 bp, Homo sapien
gctggtgatcacaatggcatgctct

SEQ ID NO: 3958835 - DNA, 25 bp, Homo sapien
gaagaggcgctctagcagttccagt

SEQ ID NO: 3958836 - DNA, 25 bp, Homo sapien
agaggcgctctagcagttccagttc

SEQ ID NO: 3958837 - DNA, 25 bp, Homo sapien
ggaagaggcgctctagcagttccag

SEQ ID NO: 3958838 - DNA, 25 bp, Homo sapien
aagaggcgctctagcagttccagtt

SEQ ID NO: 3958839 - DNA, 25 bp, Homo sapien
gctcgttgcaccctgttctggcgaa

SEQ ID NO: 3958840 - DNA, 25 bp, Homo sapien
cagagggacctttctaaaacgcaca

SEQ ID NO: 3958841 - DNA, 25 bp, Homo sapien
tgtgaggctcttcaccaacgggcct

SEQ ID NO: 3958842 - DNA, 25 bp, Homo sapien
tcttccacatgtagccagagggacc

SEQ ID NO: 3958843 - DNA, 25 bp, Homo sapien
gaggatacagttcaggataccccag

SEQ ID NO: 3958844 - DNA, 25 bp, Homo sapien
gttaatctccgtgagttcttcctgg

SEQ ID NO: 3958845 - DNA, 25 bp, Homo sapien
gaggcatggccccacttgtatccag

SEQ ID NO: 3958846 - DNA, 25 bp, Homo sapien
caggagttggaattagttggtccct

SEQ ID NO: 3958847 - DNA, 25 bp, Homo sapien
acacctttaataaacagtctacaga

SEQ ID NO: 3958848 - DNA, 25 bp, Homo sapien
acacacctttaataaacagtctaca

SEQ ID NO: 3958849 - DNA, 25 bp, Homo sapien
cacctttaataaacagtctacagac

SEQ ID NO: 3958850 - DNA, 25 bp, Homo sapien
cacacctttaataaacagtctacag

SEQ ID NO: 3958851 - DNA, 25 bp, Homo sapien
taacacacctttaataaacagtcta

SEQ ID NO: 3958852 - DNA, 25 bp, Homo sapien
tgtagactgtttattaaaggtgtgt

SEQ ID NO: 3958853 - DNA, 25 bp, Homo sapien
ctgtagactgtttattaaaggtgtg

SEQ ID NO: 3958854 - DNA, 25 bp, Homo sapien
gtctgtagactgtttattaaaggtg

SEQ ID NO: 3958855 - DNA, 25 bp, Homo sapien
tctgtagactgtttattaaaggtgt

SEQ ID NO: 3958856 - DNA, 25 bp, Homo sapien
tagactgtttattaaaggtgtgtta

SEQ ID NO: 3958857 - DNA, 25 bp, Homo sapien
gagggaagtggctgcccccttaaca

SEQ ID NO: 3958858 - DNA, 25 bp, Homo sapien
acacctttaataaacagtctacaga

SEQ ID NO: 3958859 - DNA, 25 bp, Homo sapien
cacctttaataaacagtctacagac

SEQ ID NO: 3958860 - DNA, 25 bp, Homo sapien
tcacggagggaagtggctgccccct

SEQ ID NO: 3958861 - DNA, 25 bp, Homo sapien
cacacctttaataaacagtctacag

SEQ ID NO: 3958862 - DNA, 25 bp, Homo sapien
taacacacctttaataaacagtcta

SEQ ID NO: 3958863 - DNA, 25 bp, Homo sapien
agggggcagccacttccctccgtga

SEQ ID NO: 3958864 - DNA, 25 bp, Homo sapien
ctgtagactgtttattaaaggtgtg

SEQ ID NO: 3958865 - DNA, 25 bp, Homo sapien
tgtagactgtttattaaaggtgtgt

SEQ ID NO: 3958866 - DNA, 25 bp, Homo sapien
gtctgtagactgtttattaaaggtg

SEQ ID NO: 3958867 - DNA, 25 bp, Homo sapien
tctgtagactgtttattaaaggtgt

SEQ ID NO: 3958868 - DNA, 25 bp, Homo sapien
tagactgtttattaaaggtgtgtta

SEQ ID NO: 3958869 - DNA, 25 bp, Homo sapien
cacaggtccacccacgctgggggct

SEQ ID NO: 3958870 - DNA, 25 bp, Homo sapien
atgtccactcccagacgatggccaa

SEQ ID NO: 3958871 - DNA, 25 bp, Homo sapien
gccagtgtcctggtttgacagcatg

SEQ ID NO: 3958872 - DNA, 25 bp, Homo sapien
acacaggtccacccacgctgggggc

SEQ ID NO: 3958873 - DNA, 25 bp, Homo sapien
ttggccatcgtctgggagtggacat

SEQ ID NO: 3958874 - DNA, 25 bp, Homo sapien
agcccccagcgtgggtggacctgtg

SEQ ID NO: 3958875 - DNA, 25 bp, Homo sapien
gcccccagcgtgggtggacctgtgt

SEQ ID NO: 3958876 - DNA, 25 bp, Homo sapien
catgctgtcaaaccaggacactggc

SEQ ID NO: 3958877 - DNA, 25 bp, Homo sapien
agagattccagttttaggcctttct

SEQ ID NO: 3958878 - DNA, 25 bp, Homo sapien
gcctcagggacaagagattccagtt

SEQ ID NO: 3958879 - DNA, 25 bp, Homo sapien
ccaagccattgttagcagctagcca

SEQ ID NO: 3958880 - DNA, 25 bp, Homo sapien
caccatggggacctgggttgccctg

SEQ ID NO: 3958881 - DNA, 25 bp, Homo sapien
ctccttttggggcttgtgcttggca

SEQ ID NO: 3958882 - DNA, 25 bp, Homo sapien
cattgttagcagctagccagccaca

SEQ ID NO: 3958883 - DNA, 25 bp, Homo sapien
ggctagctgctaacaatggcttggg

SEQ ID NO: 3958884 - DNA, 25 bp, Homo sapien
aactggaatctcttgtccctgaggc

SEQ ID NO: 3958885 - DNA, 25 bp, Homo sapien
agggcaacccaggtccccatggtgc

SEQ ID NO: 3958886 - DNA, 25 bp, Homo sapien
agaaaggcctaaaactggaatctct

SEQ ID NO: 3958887 - DNA, 25 bp, Homo sapien
tggtgtggctggctagctgctaaca

SEQ ID NO: 3958888 - DNA, 25 bp, Homo sapien
tgccaagcacaagccccaaaaggag

SEQ ID NO: 3958889 - DNA, 25 bp, Homo sapien
catttcccccaataaaagagatttg

SEQ ID NO: 3958890 - DNA, 25 bp, Homo sapien
caaatctcttttattgggggaaatg

SEQ ID NO: 3958891 - DNA, 25 bp, Homo sapien
cgggaagcagtgccaatgaacaagc

SEQ ID NO: 3958892 - DNA, 25 bp, Homo sapien
tcgggaagcagtgccaatgaacaag

SEQ ID NO: 3958893 - DNA, 25 bp, Homo sapien
cttgttcattggcactgcttcccga

SEQ ID NO: 3958894 - DNA, 25 bp, Homo sapien
gcttgttcattggcactgcttcccg

SEQ ID NO: 3958895 - DNA, 25 bp, Homo sapien
gccctgtgcatcgagccgttttcca

SEQ ID NO: 3958896 - DNA, 25 bp, Homo sapien
gaagcagtgccaatgaacaagccgt

SEQ ID NO: 3958897 - DNA, 25 bp, Homo sapien
agagctgcccgatgtgatgaagccc

SEQ ID NO: 3958898 - DNA, 25 bp, Homo sapien
aagccccaggactcgggaagcagtg

SEQ ID NO: 3958899 - DNA, 25 bp, Homo sapien
agcccgccagagctgcccgatgtga

SEQ ID NO: 3958900 - DNA, 25 bp, Homo sapien
tgacacctttgaggccctgtgcatc

SEQ ID NO: 3958901 - DNA, 25 bp, Homo sapien
tgcacggcttgttcattggcactgc

SEQ ID NO: 3958902 - DNA, 25 bp, Homo sapien
gggcttcatcacatcgggcagctct

SEQ ID NO: 3958903 - DNA, 25 bp, Homo sapien
tcacatcgggcagctctggcgggct

SEQ ID NO: 3958904 - DNA, 25 bp, Homo sapien
attggcactgcttcccgagtcctgg

SEQ ID NO: 3958905 - DNA, 25 bp, Homo sapien
gatgcacagggcctcaaaggtgtca

SEQ ID NO: 3958906 - DNA, 25 bp, Homo sapien
ggaaaacggctcgatgcacagggcc

SEQ ID NO: 3958907 - DNA, 25 bp, Homo sapien
ggatgcctgatcagttgagaaccct

SEQ ID NO: 3958908 - DNA, 25 bp, Homo sapien
ccaagcagagatgggtctcctagct

SEQ ID NO: 3958909 - DNA, 25 bp, Homo sapien
ccagcaagtgcgaaggtctgagtta

SEQ ID NO: 3958910 - DNA, 25 bp, Homo sapien
cagtttgtccagtggtaagtgcccc

SEQ ID NO: 3958911 - DNA, 25 bp, Homo sapien
gaggtgacctgagttggaccctgaa

SEQ ID NO: 3958912 - DNA, 25 bp, Homo sapien
tgtgaccgccacaactgtgatcagg

SEQ ID NO: 3958913 - DNA, 25 bp, Homo sapien
aaggacttggtggtattcaggtcat

SEQ ID NO: 3958914 - DNA, 25 bp, Homo sapien
ggacttggtggtattcaggtcatga

SEQ ID NO: 3958915 - DNA, 25 bp, Homo sapien
cttggtggtattcaggtcatgatgg

SEQ ID NO: 3958916 - DNA, 25 bp, Homo sapien
aggaaagaacttacagaagaacata

SEQ ID NO: 3958917 - DNA, 25 bp, Homo sapien
gggaggaatagtctagatagtctag

SEQ ID NO: 3958918 - DNA, 25 bp, Homo sapien
agcctcagagcgtgggaagcagagg

SEQ ID NO: 3958919 - DNA, 25 bp, Homo sapien
tatgttcttctgtaagttctttcct

SEQ ID NO: 3958920 - DNA, 25 bp, Homo sapien
tagactatctagactattcctcccc

SEQ ID NO: 3958921 - DNA, 25 bp, Homo sapien
ccatcatgacctgaataccaccaag

SEQ ID NO: 3958922 - DNA, 25 bp, Homo sapien
catgacctgaataccaccaagtcct

SEQ ID NO: 3958923 - DNA, 25 bp, Homo sapien
tctagactattcctcccctgctgaa

SEQ ID NO: 3958924 - DNA, 25 bp, Homo sapien
cctctgcttcccacgctctgaggct

SEQ ID NO: 3958925 - DNA, 25 bp, Homo sapien
tctcaactgatcaggcatcccaggg

SEQ ID NO: 3958926 - DNA, 25 bp, Homo sapien
taactcagaccttcgcacttgctgg

SEQ ID NO: 3958927 - DNA, 25 bp, Homo sapien
ggtgccccagcgctatctagtgggt

SEQ ID NO: 3958928 - DNA, 25 bp, Homo sapien
ctttcagggtccaactcaggtcacc

SEQ ID NO: 3958929 - DNA, 25 bp, Homo sapien
cctgatcacagttgtggcggtcaca

SEQ ID NO: 3958930 - DNA, 25 bp, Homo sapien
gggcacttaccactggacaaactgc

SEQ ID NO: 3958931 - DNA, 25 bp, Homo sapien
cacagtggggctggccttccgggca

SEQ ID NO: 3958932 - DNA, 25 bp, Homo sapien
acagtggggctggccttccgggcag

SEQ ID NO: 3958933 - DNA, 25 bp, Homo sapien
tgcccggaaggccagccccactgtg

SEQ ID NO: 3958934 - DNA, 25 bp, Homo sapien
ctgcccggaaggccagccccactgt

SEQ ID NO: 3958935 - DNA, 25 bp, Homo sapien
ccaactcttggatgatggcaagaca

SEQ ID NO: 3958936 - DNA, 25 bp, Homo sapien
caactcttggatgatggcaagacac

SEQ ID NO: 3958937 - DNA, 25 bp, Homo sapien
gtgtcttgccatcatccaagagttg

SEQ ID NO: 3958938 - DNA, 25 bp, Homo sapien
tgtcttgccatcatccaagagttgg

SEQ ID NO: 3958939 - DNA, 25 bp, Homo sapien
cttgccccatgtagggcctctccca

SEQ ID NO: 3958940 - DNA, 25 bp, Homo sapien
ttgccccatgtagggcctctcccaa

SEQ ID NO: 3958941 - DNA, 25 bp, Homo sapien
acttgccccatgtagggcctctccc

SEQ ID NO: 3958942 - DNA, 25 bp, Homo sapien
gacttgccccatgtagggcctctcc

SEQ ID NO: 3958943 - DNA, 25 bp, Homo sapien
ggacttgccccatgtagggcctctc

SEQ ID NO: 3958944 - DNA, 25 bp, Homo sapien
gggacttgccccatgtagggcctct

SEQ ID NO: 3958945 - DNA, 25 bp, Homo sapien
gagaggccctacatggggcaagtcc

SEQ ID NO: 3958946 - DNA, 25 bp, Homo sapien
ggagaggccctacatggggcaagtc

SEQ ID NO: 3958947 - DNA, 25 bp, Homo sapien
ttgggagaggccctacatggggcaa

SEQ ID NO: 3958948 - DNA, 25 bp, Homo sapien
tgggagaggccctacatggggcaag

SEQ ID NO: 3958949 - DNA, 25 bp, Homo sapien
agaggccctacatggggcaagtccc

SEQ ID NO: 3958950 - DNA, 25 bp, Homo sapien
gggagaggccctacatggggcaagt

SEQ ID NO: 3958951 - DNA, 25 bp, Homo sapien
tcagaagtctttgggacttgcccca

SEQ ID NO: 3958952 - DNA, 25 bp, Homo sapien
ttgctggtcagaagtctttgggact

SEQ ID NO: 3958953 - DNA, 25 bp, Homo sapien
catgtagggcctctcccaagatcct

SEQ ID NO: 3958954 - DNA, 25 bp, Homo sapien
tagggcctctcccaagatcctgctt

SEQ ID NO: 3958955 - DNA, 25 bp, Homo sapien
ggacttgccccatgtagggcctctc

SEQ ID NO: 3958956 - DNA, 25 bp, Homo sapien
gggacttgccccatgtagggcctct

SEQ ID NO: 3958957 - DNA, 25 bp, Homo sapien
caggatcttgggagaggccctacat

SEQ ID NO: 3958958 - DNA, 25 bp, Homo sapien
caagtcccaaagacttctgaccagc

SEQ ID NO: 3958959 - DNA, 25 bp, Homo sapien
gggcaagtcccaaagacttctgacc

SEQ ID NO: 3958960 - DNA, 25 bp, Homo sapien
agtcccaaagacttctgaccagcaa

SEQ ID NO: 3958961 - DNA, 25 bp, Homo sapien
agaggccctacatggggcaagtccc

SEQ ID NO: 3958962 - DNA, 25 bp, Homo sapien
aagcaggatcttgggagaggcccta

SEQ ID NO: 3958963 - DNA, 25 bp, Homo sapien
gcatcctcaagcggcctcctgacga

SEQ ID NO: 3958964 - DNA, 25 bp, Homo sapien
catcctcaagcggcctcctgacgag

SEQ ID NO: 3958965 - DNA, 25 bp, Homo sapien
cgaactgaagcgcatcgtcgagggc

SEQ ID NO: 3958966 - DNA, 25 bp, Homo sapien
gaactgaagcgcatcgtcgagggca

SEQ ID NO: 3958967 - DNA, 25 bp, Homo sapien
ctcgtcaggaggccgcttgaggatg

SEQ ID NO: 3958968 - DNA, 25 bp, Homo sapien
tcgtcaggaggccgcttgaggatgc

SEQ ID NO: 3958969 - DNA, 25 bp, Homo sapien
tgccctcgacgatgcgcttcagttc

SEQ ID NO: 3958970 - DNA, 25 bp, Homo sapien
gccctcgacgatgcgcttcagttcg

SEQ ID NO: 3958971 - DNA, 25 bp, Homo sapien
acgtgttcctcatgatccggcgcca

SEQ ID NO: 3958972 - DNA, 25 bp, Homo sapien
gtgttcctcatgatccggcgccaca

SEQ ID NO: 3958973 - DNA, 25 bp, Homo sapien
tgttcctcatgatccggcgccacaa

SEQ ID NO: 3958974 - DNA, 25 bp, Homo sapien
cgtgttcctcatgatccggcgccac

SEQ ID NO: 3958975 - DNA, 25 bp, Homo sapien
gacgtgttcctcatgatccggcgcc

SEQ ID NO: 3958976 - DNA, 25 bp, Homo sapien
gttcctcatgatccggcgccacaag

SEQ ID NO: 3958977 - DNA, 25 bp, Homo sapien
cttgtggcgccggatcatgaggaac

SEQ ID NO: 3958978 - DNA, 25 bp, Homo sapien
tgtggcgccggatcatgaggaacac

SEQ ID NO: 3958979 - DNA, 25 bp, Homo sapien
ttgtggcgccggatcatgaggaaca

SEQ ID NO: 3958980 - DNA, 25 bp, Homo sapien
tggcgccggatcatgaggaacacgt

SEQ ID NO: 3958981 - DNA, 25 bp, Homo sapien
gtggcgccggatcatgaggaacacg

SEQ ID NO: 3958982 - DNA, 25 bp, Homo sapien
ggcgccggatcatgaggaacacgtc

SEQ ID NO: 3958983 - DNA, 25 bp, Homo sapien
gtgctcacgccggcccgccgccccc

SEQ ID NO: 3958984 - DNA, 25 bp, Homo sapien
gctcacgccggcccgccgcccccag

SEQ ID NO: 3958985 - DNA, 25 bp, Homo sapien
cgtgctcacgccggcccgccgcccc

SEQ ID NO: 3958986 - DNA, 25 bp, Homo sapien
tgctcacgccggcccgccgccccca

SEQ ID NO: 3958987 - DNA, 25 bp, Homo sapien
gggggcggcgggccggcgtgagcac

SEQ ID NO: 3958988 - DNA, 25 bp, Homo sapien
ggggcggcgggccggcgtgagcacg

SEQ ID NO: 3958989 - DNA, 25 bp, Homo sapien
tgggggcggcgggccggcgtgagca

SEQ ID NO: 3958990 - DNA, 25 bp, Homo sapien
ctgggggcggcgggccggcgtgagc

SEQ ID NO: 3958991 - DNA, 25 bp, Homo sapien
ctgcgccggcgcgtcgaggggagag

SEQ ID NO: 3958992 - DNA, 25 bp, Homo sapien
ctctcccctcgacgcgccggcgcag

SEQ ID NO: 3958993 - DNA, 25 bp, Homo sapien
gtcgaggggagaggcagcagccgcg

SEQ ID NO: 3958994 - DNA, 25 bp, Homo sapien
cggagcgcggctgcgccggcgcgtc

SEQ ID NO: 3958995 - DNA, 25 bp, Homo sapien
ctgcgccggcgcgtcgaggggagag

SEQ ID NO: 3958996 - DNA, 25 bp, Homo sapien
cgccggcgcgtcgaggggagaggca

SEQ ID NO: 3958997 - DNA, 25 bp, Homo sapien
ccggcgcgtcgaggggagaggcagc

SEQ ID NO: 3958998 - DNA, 25 bp, Homo sapien
tgcgccggcgcgtcgaggggagagg

SEQ ID NO: 3958999 - DNA, 25 bp, Homo sapien
cgcggctgctgcctctcccctcgac

SEQ ID NO: 3959000 - DNA, 25 bp, Homo sapien
ggctgctgcctctcccctcgacgcg

SEQ ID NO: 3959001 - DNA, 25 bp, Homo sapien
ctctcccctcgacgcgccggcgcag

SEQ ID NO: 3959002 - DNA, 25 bp, Homo sapien
gctgcctctcccctcgacgcgccgg

SEQ ID NO: 3959003 - DNA, 25 bp, Homo sapien
tgcctctcccctcgacgcgccggcg

SEQ ID NO: 3959004 - DNA, 25 bp, Homo sapien
gacgcgccggcgcagccgcgctccg

SEQ ID NO: 3959005 - DNA, 25 bp, Homo sapien
catttggggtcttctggccgccgtg

SEQ ID NO: 3959006 - DNA, 25 bp, Homo sapien
gcggcgtagtcgtggccgccatctt

SEQ ID NO: 3959007 - DNA, 25 bp, Homo sapien
gggctccaagctcgggcacaccgag

SEQ ID NO: 3959008 - DNA, 25 bp, Homo sapien
cggtggcgccgtcttgggactggca

SEQ ID NO: 3959009 - DNA, 25 bp, Homo sapien
atgcgaggactgtcgccgctcagag

SEQ ID NO: 3959010 - DNA, 25 bp, Homo sapien
cgctcagaggggcttatgacctgtg

SEQ ID NO: 3959011 - DNA, 25 bp, Homo sapien
gcttagggatggcccgggcgaactc

SEQ ID NO: 3959012 - DNA, 25 bp, Homo sapien
cgggctggatgcgaggactgtcgcc

SEQ ID NO: 3959013 - DNA, 25 bp, Homo sapien
ttggcgaccgctcttcgcaggagga

SEQ ID NO: 3959014 - DNA, 25 bp, Homo sapien
tagaagaggaggcacgggagcggtt

SEQ ID NO: 3959015 - DNA, 25 bp, Homo sapien
aaggcctagagacttgattctcctg

SEQ ID NO: 3959016 - DNA, 25 bp, Homo sapien
gcttggctgcatttcggctctgaaa

SEQ ID NO: 3959017 - DNA, 25 bp, Homo sapien
ggtggccaagctgtactgcagcatg

SEQ ID NO: 3959018 - DNA, 25 bp, Homo sapien
gtggccaagctgtactgcagcatgg

SEQ ID NO: 3959019 - DNA, 25 bp, Homo sapien
cctctatctattggaacgggtggtc

SEQ ID NO: 3959020 - DNA, 25 bp, Homo sapien
cttctgctgatagcccctgtcagct

SEQ ID NO: 3959021 - DNA, 25 bp, Homo sapien
tatctattggaacgggtggtcctgg

SEQ ID NO: 3959022 - DNA, 25 bp, Homo sapien
gacctctatctattggaacgggtgg

SEQ ID NO: 3959023 - DNA, 25 bp, Homo sapien
catttattaagtcacaactttgtag

SEQ ID NO: 3959024 - DNA, 25 bp, Homo sapien
tagggtctctttaggttgaaatgaa

SEQ ID NO: 3959025 - DNA, 25 bp, Homo sapien
tcaggagtggctcagctaggttctc

SEQ ID NO: 3959026 - DNA, 25 bp, Homo sapien
ttgaaatgaagggattggccggcgg

SEQ ID NO: 3959027 - DNA, 25 bp, Homo sapien
tgtctctcagctcttagaggccgct

SEQ ID NO: 3959028 - DNA, 25 bp, Homo sapien
gggactcatggcagattcctggatg

SEQ ID NO: 3959029 - DNA, 25 bp, Homo sapien
tttaggcatcttggcctcgaggcag

SEQ ID NO: 3959030 - DNA, 25 bp, Homo sapien
tatggaggatctccctggtgtcaaa

SEQ ID NO: 3959031 - DNA, 25 bp, Homo sapien
atccaggggctatatgtggccacac

SEQ ID NO: 3959032 - DNA, 25 bp, Homo sapien
aatccaggggctatatgtggccaca

SEQ ID NO: 3959033 - DNA, 25 bp, Homo sapien
ttgggcagggcacaacccttgcccc

SEQ ID NO: 3959034 - DNA, 25 bp, Homo sapien
ggcaggtcagaggtcccccagaatc

SEQ ID NO: 3959035 - DNA, 25 bp, Homo sapien
tggacggttgggcagggcacaaccc

SEQ ID NO: 3959036 - DNA, 25 bp, Homo sapien
gacccctggacggttgggcagggca

SEQ ID NO: 3959037 - DNA, 25 bp, Homo sapien
cctcccaggacttcagttctcaggg

SEQ ID NO: 3959038 - DNA, 25 bp, Homo sapien
gatgtcctgggtcctggagttcagg

SEQ ID NO: 3959039 - DNA, 25 bp, Homo sapien
cagggttccagacccctggcgtggt

SEQ ID NO: 3959040 - DNA, 25 bp, Homo sapien
cctgagcctgagttgggatgtcctg

SEQ ID NO: 3959041 - DNA, 25 bp, Homo sapien
ccacgtggtagaggccgtcgcaggt

SEQ ID NO: 3959042 - DNA, 25 bp, Homo sapien
aggcagcacaatgcgctcagcctgg

SEQ ID NO: 3959043 - DNA, 25 bp, Homo sapien
gcacgtccgcgcccacgtggtagag

SEQ ID NO: 3959044 - DNA, 25 bp, Homo sapien
caggtgcgcgagtccagcagcggca

SEQ ID NO: 3959045 - DNA, 25 bp, Homo sapien
gctctgagtgagaggaggttttgtt

SEQ ID NO: 3959046 - DNA, 25 bp, Homo sapien
ttgttccctagaagccgcgctgggt

SEQ ID NO: 3959047 - DNA, 25 bp, Homo sapien
tgttccctagaagccgcgctgggtc

SEQ ID NO: 3959048 - DNA, 25 bp, Homo sapien
ctctgagtgagaggaggttttgttc

SEQ ID NO: 3959049 - DNA, 25 bp, Homo sapien
acccggcatggtgtgccgggcggcg

SEQ ID NO: 3959050 - DNA, 25 bp, Homo sapien
ccggtgacccggcatggtgtgccgg

SEQ ID NO: 3959051 - DNA, 25 bp, Homo sapien
gcaggcagacgggttggacgcgagc

SEQ ID NO: 3959052 - DNA, 25 bp, Homo sapien
agacgggttggacgcgagcgctcag

SEQ ID NO: 3959053 - DNA, 25 bp, Homo sapien
cgcacgggcaccgagagcgtgcggg

SEQ ID NO: 3959054 - DNA, 25 bp, Homo sapien
tgcagcagtgccaggtcgccgcggg

SEQ ID NO: 3959055 - DNA, 25 bp, Homo sapien
gcagcagcacccgtcgcacgggcac

SEQ ID NO: 3959056 - DNA, 25 bp, Homo sapien
acgcggtactcagctggcagtgccc

SEQ ID NO: 3959057 - DNA, 25 bp, Homo sapien
acacgtgtgccccacgatgctggat

SEQ ID NO: 3959058 - DNA, 25 bp, Homo sapien
tgtgccccacgatgctggatgctcg

SEQ ID NO: 3959059 - DNA, 25 bp, Homo sapien
atgctggatgctcgcctgccacggc

SEQ ID NO: 3959060 - DNA, 25 bp, Homo sapien
ccaacgatccgactggacatgcggg

SEQ ID NO: 3959061 - DNA, 25 bp, Homo sapien
ttccttccctgagtcccagcagctc

SEQ ID NO: 3959062 - DNA, 25 bp, Homo sapien
ctgcagacttccttccctgagtccc

SEQ ID NO: 3959063 - DNA, 25 bp, Homo sapien
gacttccttccctgagtcccagcag

SEQ ID NO: 3959064 - DNA, 25 bp, Homo sapien
gcagacttccttccctgagtcccag

SEQ ID NO: 3959065 - DNA, 25 bp, Homo sapien
gagcaggacctggagacaggaaacc

SEQ ID NO: 3959066 - DNA, 25 bp, Homo sapien
aaggagcaggacctggagacaggaa

SEQ ID NO: 3959067 - DNA, 25 bp, Homo sapien
agaaggagcaggacctggagacagg

SEQ ID NO: 3959068 - DNA, 25 bp, Homo sapien
caggacctggagacaggaaacccct

SEQ ID NO: 3959069 - DNA, 25 bp, Homo sapien
ggtggcactgcctagggcttggact

SEQ ID NO: 3959070 - DNA, 25 bp, Homo sapien
ggctgggtaagggtggcactgccta

SEQ ID NO: 3959071 - DNA, 25 bp, Homo sapien
ggtaagggtggcactgcctagggct

SEQ ID NO: 3959072 - DNA, 25 bp, Homo sapien
tctgtcttcaaggctgggctgggta

SEQ ID NO: 3959073 - DNA, 25 bp, Homo sapien
caccagcccgtcaccccctccgtgg

SEQ ID NO: 3959074 - DNA, 25 bp, Homo sapien
ccccctccgtggtccttctgtctgt

SEQ ID NO: 3959075 - DNA, 25 bp, Homo sapien
ggcaccaatcctcacaccagcccgt

SEQ ID NO: 3959076 - DNA, 25 bp, Homo sapien
accaatcctcacaccagcccgtcac

SEQ ID NO: 3959077 - DNA, 25 bp, Homo sapien
acgttgctggagcttctgcgctcca

SEQ ID NO: 3959078 - DNA, 25 bp, Homo sapien
tccattgttctgtccagaaatccca

SEQ ID NO: 3959079 - DNA, 25 bp, Homo sapien
ccctgcagagcacacgttgctggag

SEQ ID NO: 3959080 - DNA, 25 bp, Homo sapien
agcttctgcgctccattgttctgtc

SEQ ID NO: 3959081 - DNA, 25 bp, Homo sapien
tcatggtgacacgatgctttgggag

SEQ ID NO: 3959082 - DNA, 25 bp, Homo sapien
catggtgacacgatgctttgggagc

SEQ ID NO: 3959083 - DNA, 25 bp, Homo sapien
tttcatggtgacacgatgctttggg

SEQ ID NO: 3959084 - DNA, 25 bp, Homo sapien
ggctttcatggtgacacgatgcttt

SEQ ID NO: 3959085 - DNA, 25 bp, Homo sapien
ttgaaccatcagcagatcgtcctta

SEQ ID NO: 3959086 - DNA, 25 bp, Homo sapien
tagccagtcccacctctacaaggaa

SEQ ID NO: 3959087 - DNA, 25 bp, Homo sapien
ttaaaacccttgaaccatcagcaga

SEQ ID NO: 3959088 - DNA, 25 bp, Homo sapien
caattaccgtcccattgcagggaaa

SEQ ID NO: 3959089 - DNA, 25 bp, Homo sapien
gctcaggtcccttatcatggaatct

SEQ ID NO: 3959090 - DNA, 25 bp, Homo sapien
acagggcccgagcaagtcagctgga

SEQ ID NO: 3959091 - DNA, 25 bp, Homo sapien
tgctgaggtgtgctagaggcttatc

SEQ ID NO: 3959092 - DNA, 25 bp, Homo sapien
tatctaccgatagagaaaccgaggc

SEQ ID NO: 3959093 - DNA, 25 bp, Homo sapien
catgaaagattaggcaaaatgtatg

SEQ ID NO: 3959094 - DNA, 25 bp, Homo sapien
gataaaatgcttagtggaggctggg

SEQ ID NO: 3959095 - DNA, 25 bp, Homo sapien
caacacttgcactagtagaaggtta

SEQ ID NO: 3959096 - DNA, 25 bp, Homo sapien
gtatggctatgtgtcctggttttcc

SEQ ID NO: 3959097 - DNA, 25 bp, Homo sapien
tagttcccgcctcgcttgggcatct

SEQ ID NO: 3959098 - DNA, 25 bp, Homo sapien
gagacatctccgaacacgagctttt

SEQ ID NO: 3959099 - DNA, 25 bp, Homo sapien
gagcttttctcagctggcgtctgag

SEQ ID NO: 3959100 - DNA, 25 bp, Homo sapien
gcatctgacggcctttatctcttct

SEQ ID NO: 3959101 - DNA, 25 bp, Homo sapien
tgccttgagggccagtgcctggtgc

SEQ ID NO: 3959102 - DNA, 25 bp, Homo sapien
ggacacaaagggctgggtgatccat

SEQ ID NO: 3959103 - DNA, 25 bp, Homo sapien
agcctctaagggcagtgccttgagg

SEQ ID NO: 3959104 - DNA, 25 bp, Homo sapien
tgctccacccagatacagcacagag

SEQ ID NO: 3959105 - DNA, 25 bp, Homo sapien
tgcgggtgtctgtaggtcttctcct

SEQ ID NO: 3959106 - DNA, 25 bp, Homo sapien
gtgtctgtaggtcttctcctggtga

SEQ ID NO: 3959107 - DNA, 25 bp, Homo sapien
ggtgtctgtaggtcttctcctggtg

SEQ ID NO: 3959108 - DNA, 25 bp, Homo sapien
cgggtgtctgtaggtcttctcctgg

SEQ ID NO: 3959109 - DNA, 25 bp, Homo sapien
gaattatccactagaggagccgacc

SEQ ID NO: 3959110 - DNA, 25 bp, Homo sapien
ggtgggcatctatggccagtatcaa

SEQ ID NO: 3959111 - DNA, 25 bp, Homo sapien
actccttggcatcaagagcattggc

SEQ ID NO: 3959112 - DNA, 25 bp, Homo sapien
caaactcacccgtgggtcgctaggg

SEQ ID NO: 3959113 - DNA, 25 bp, Homo sapien
gaagcaccagtcttgtaagtcctct

SEQ ID NO: 3959114 - DNA, 25 bp, Homo sapien
gcaccagtcttgtaagtcctctaca

SEQ ID NO: 3959115 - DNA, 25 bp, Homo sapien
agcaccagtcttgtaagtcctctac

SEQ ID NO: 3959116 - DNA, 25 bp, Homo sapien
agaagcaccagtcttgtaagtcctc

SEQ ID NO: 3959117 - DNA, 25 bp, Homo sapien
gacctggcgccaaactggagtgaaa

SEQ ID NO: 3959118 - DNA, 25 bp, Homo sapien
gagcatccagtcttctagggcagca

SEQ ID NO: 3959119 - DNA, 25 bp, Homo sapien
gggaaactgacaccagatgcgaact

SEQ ID NO: 3959120 - DNA, 25 bp, Homo sapien
cactgctctggccatgcgtctaaga

SEQ ID NO: 3959121 - DNA, 25 bp, Homo sapien
tttattattagattccatcaatcct

SEQ ID NO: 3959122 - DNA, 25 bp, Homo sapien
tattagattccatcaatcctaccag

SEQ ID NO: 3959123 - DNA, 25 bp, Homo sapien
ggatcccggactccatggctcatgg

SEQ ID NO: 3959124 - DNA, 25 bp, Homo sapien
gatcccggactccatggctcatggt

SEQ ID NO: 3959125 - DNA, 25 bp, Homo sapien
cagcagcactgggtgggatctggag

SEQ ID NO: 3959126 - DNA, 25 bp, Homo sapien
ggaggtgcctgagtgggatcctggg

SEQ ID NO: 3959127 - DNA, 25 bp, Homo sapien
cactgggtgggatctggaggtgcct

SEQ ID NO: 3959128 - DNA, 25 bp, Homo sapien
ggtcaacagctcaagcagcagcact

SEQ ID NO: 3959129 - DNA, 25 bp, Homo sapien
cccagacatgcctgagtgagattca

SEQ ID NO: 3959130 - DNA, 25 bp, Homo sapien
cgggccccagacatgcctgagtgag

SEQ ID NO: 3959131 - DNA, 25 bp, Homo sapien
ggccccagacatgcctgagtgagat

SEQ ID NO: 3959132 - DNA, 25 bp, Homo sapien
ccccagacatgcctgagtgagattc

SEQ ID NO: 3959133 - DNA, 25 bp, Homo sapien
caccaggccggaaaggccgggcaca

SEQ ID NO: 3959134 - DNA, 25 bp, Homo sapien
caatgccggcctggatccacgtatc

SEQ ID NO: 3959135 - DNA, 25 bp, Homo sapien
cctggatccacgtatcattgatggg

SEQ ID NO: 3959136 - DNA, 25 bp, Homo sapien
gccggcctggatccacgtatcattg

SEQ ID NO: 3959137 - DNA, 25 bp, Homo sapien
ccccaagtgccttcgagaatctgct

SEQ ID NO: 3959138 - DNA, 25 bp, Homo sapien
ggtctgcattgagggagacacctgg

SEQ ID NO: 3959139 - DNA, 25 bp, Homo sapien
gtctgcattgagggagacacctggg

SEQ ID NO: 3959140 - DNA, 25 bp, Homo sapien
gggccccaagtgccttcgagaatct

SEQ ID NO: 3959141 - DNA, 25 bp, Homo sapien
cagagcatgtcgtcctggatgaggc

SEQ ID NO: 3959142 - DNA, 25 bp, Homo sapien
agcacagagcatgtcgtcctggatg

SEQ ID NO: 3959143 - DNA, 25 bp, Homo sapien
tcacacatgttcgagtccaggaggg

SEQ ID NO: 3959144 - DNA, 25 bp, Homo sapien
tctcctaggtggtacatcagctcac

SEQ ID NO: 3959145 - DNA, 25 bp, Homo sapien
ggctggtgagtgcatattccccttc

SEQ ID NO: 3959146 - DNA, 25 bp, Homo sapien
gaggagataaacacgcagaccaacg

SEQ ID NO: 3959147 - DNA, 25 bp, Homo sapien
gcttattcatcccaacacgggcaca

SEQ ID NO: 3959148 - DNA, 25 bp, Homo sapien
gaccaacgtctgtggagaccactca

SEQ ID NO: 3959149 - DNA, 25 bp, Homo sapien
tcagggcaatgtccccgctggtggt

SEQ ID NO: 3959150 - DNA, 25 bp, Homo sapien
gggtgtcagccctccgactttaaca

SEQ ID NO: 3959151 - DNA, 25 bp, Homo sapien
tggtggtcccatggtatgaggagtg

SEQ ID NO: 3959152 - DNA, 25 bp, Homo sapien
ccagcacacggtcccaatggcgagg

SEQ ID NO: 3959153 - DNA, 25 bp, Homo sapien
aggggaatggaaacacggcccactg

SEQ ID NO: 3959154 - DNA, 25 bp, Homo sapien
tgcaggcagccgccaaggggagggg

SEQ ID NO: 3959155 - DNA, 25 bp, Homo sapien
aggggtgaggagcacccccacccag

SEQ ID NO: 3959156 - DNA, 25 bp, Homo sapien
ggaaacacggcccactgcaggcagc

SEQ ID NO: 3959157 - DNA, 25 bp, Homo sapien
gccccactgaggtcaaccacaggcc

SEQ ID NO: 3959158 - DNA, 25 bp, Homo sapien
cggccagcgtccttcctgggtgtct

SEQ ID NO: 3959159 - DNA, 25 bp, Homo sapien
ccccacatacatgccccactgaggt

SEQ ID NO: 3959160 - DNA, 25 bp, Homo sapien
ctgccacggccagcgtccttcctgg

SEQ ID NO: 3959161 - DNA, 25 bp, Homo sapien
tctgcccttgatgtccagggatgag

SEQ ID NO: 3959162 - DNA, 25 bp, Homo sapien
cagctttattccctctcagaaagcc

SEQ ID NO: 3959163 - DNA, 25 bp, Homo sapien
tctgcccttctgacatcccttctga

SEQ ID NO: 3959164 - DNA, 25 bp, Homo sapien
gcgggtgggagacctcagctttatt

SEQ ID NO: 3959165 - DNA, 25 bp, Homo sapien
gaaggcagcacatcccaatgggccc

SEQ ID NO: 3959166 - DNA, 25 bp, Homo sapien
tgaaggcagcacatcccaatgggcc

SEQ ID NO: 3959167 - DNA, 25 bp, Homo sapien
ctgaaggcagcacatcccaatgggc

SEQ ID NO: 3959168 - DNA, 25 bp, Homo sapien
gagcaaaggggggcacacaggctgg

SEQ ID NO: 3959169 - DNA, 25 bp, Homo sapien
gagaagacagaggcgcatcccttac

SEQ ID NO: 3959170 - DNA, 25 bp, Homo sapien
aggagaagacagaggcgcatccctt

SEQ ID NO: 3959171 - DNA, 25 bp, Homo sapien
gagagcaaaggggggcacacaggct

SEQ ID NO: 3959172 - DNA, 25 bp, Homo sapien
caggaagggtcgactcaggagacac

SEQ ID NO: 3959173 - DNA, 25 bp, Homo sapien
catgcgcttggtgttgtgcacggcc

SEQ ID NO: 3959174 - DNA, 25 bp, Homo sapien
actgaagttggcctgacccgagaag

SEQ ID NO: 3959175 - DNA, 25 bp, Homo sapien
caccctactgggctgcgatgtggaa

SEQ ID NO: 3959176 - DNA, 25 bp, Homo sapien
cctaagaaaccacccatctcatggg

SEQ ID NO: 3959177 - DNA, 25 bp, Homo sapien
tgagcatttagctcttccaggtgga

SEQ ID NO: 3959178 - DNA, 25 bp, Homo sapien
gcctgccacggagggaagtcatgta

SEQ ID NO: 3959179 - DNA, 25 bp, Homo sapien
gggtcaacacttagtcccataggca

SEQ ID NO: 3959180 - DNA, 25 bp, Homo sapien
tgatgcccgcagagccagaggcctg

SEQ ID NO: 3959181 - DNA, 25 bp, Homo sapien
agtgagtcgctcgacaaatcggctc

SEQ ID NO: 3959182 - DNA, 25 bp, Homo sapien
agtttagagctttggcagtgagtcg

SEQ ID NO: 3959183 - DNA, 25 bp, Homo sapien
gctttggcagtgagtcgctcgacaa

SEQ ID NO: 3959184 - DNA, 25 bp, Homo sapien
accaccacccgcagctctgccatcc

SEQ ID NO: 3959185 - DNA, 25 bp, Homo sapien
cagctctgccatcctgaggcccctg

SEQ ID NO: 3959186 - DNA, 25 bp, Homo sapien
agctctgccatcctgaggcccctga

SEQ ID NO: 3959187 - DNA, 25 bp, Homo sapien
tccaccaccacccgcagctctgcca

SEQ ID NO: 3959188 - DNA, 25 bp, Homo sapien
ggtcttccaggcctctagactctgc

SEQ ID NO: 3959189 - DNA, 25 bp, Homo sapien
ccaacgcacagtttcggagtcccaa

SEQ ID NO: 3959190 - DNA, 25 bp, Homo sapien
tgccccttctccatcggctgccctg

SEQ ID NO: 3959191 - DNA, 25 bp, Homo sapien
agccctgttttggaatccaacgcac

SEQ ID NO: 3959192 - DNA, 25 bp, Homo sapien
tatatacacaaaagcgctggggccc

SEQ ID NO: 3959193 - DNA, 25 bp, Homo sapien
gatctggccgcctttcagatccgag

SEQ ID NO: 3959194 - DNA, 25 bp, Homo sapien
tatgtgggcagggttacaaatacct

SEQ ID NO: 3959195 - DNA, 25 bp, Homo sapien
aggtagatgagcctatttacggcgg

SEQ ID NO: 3959196 - DNA, 25 bp, Homo sapien
cctggctcggtgccctgagggcccc

SEQ ID NO: 3959197 - DNA, 25 bp, Homo sapien
ccctgagcgcgcccgcggagctgca

SEQ ID NO: 3959198 - DNA, 25 bp, Homo sapien
ccccctgagcgcgcccgcggagctg

SEQ ID NO: 3959199 - DNA, 25 bp, Homo sapien
cccctgagcgcgcccgcggagctgc

SEQ ID NO: 3959200 - DNA, 25 bp, Homo sapien
cctgagcgcgcccgcggagctgcac

SEQ ID NO: 3959201 - DNA, 25 bp, Homo sapien
tgttgcgctcggcacagccctcgcc

SEQ ID NO: 3959202 - DNA, 25 bp, Homo sapien
cagccaggcgccgtccacctggcac

SEQ ID NO: 3959203 - DNA, 25 bp, Homo sapien
gctgatgtagaccccgggcctgttg

SEQ ID NO: 3959204 - DNA, 25 bp, Homo sapien
tagaccccgggcctgttgcgctcgg

SEQ ID NO: 3959205 - DNA, 25 bp, Homo sapien
tgtcagggggcagatgagccccttc

SEQ ID NO: 3959206 - DNA, 25 bp, Homo sapien
cctgtcagggggcagatgagcccct

SEQ ID NO: 3959207 - DNA, 25 bp, Homo sapien
aatccagggcccgtgccctgtcagg

SEQ ID NO: 3959208 - DNA, 25 bp, Homo sapien
ggcagaatccagggcccgtgccctg

SEQ ID NO: 3959209 - DNA, 25 bp, Homo sapien
cagacttccgagtcgatgataggaa

SEQ ID NO: 3959210 - DNA, 25 bp, Homo sapien
agatggctgcagacttccgagtcga

SEQ ID NO: 3959211 - DNA, 25 bp, Homo sapien
tcgatgataggaaccttcagcttct

SEQ ID NO: 3959212 - DNA, 25 bp, Homo sapien
ctgctccccgccagtacagatggct

SEQ ID NO: 3959213 - DNA, 25 bp, Homo sapien
tatatccacagatggttagagccct

SEQ ID NO: 3959214 - DNA, 25 bp, Homo sapien
tcttatatccacagatggttagagc

SEQ ID NO: 3959215 - DNA, 25 bp, Homo sapien
tatccacagatggttagagcccttc

SEQ ID NO: 3959216 - DNA, 25 bp, Homo sapien
atccacagatggttagagcccttcc

SEQ ID NO: 3959217 - DNA, 25 bp, Homo sapien
gcgattctagctcttgaagaagccc

SEQ ID NO: 3959218 - DNA, 25 bp, Homo sapien
aaagtccgcgattctagctcttgaa

SEQ ID NO: 3959219 - DNA, 25 bp, Homo sapien
tggtctacagactgtggtctgcaga

SEQ ID NO: 3959220 - DNA, 25 bp, Homo sapien
cagattgtggactgaaagtccgcga

SEQ ID NO: 3959221 - DNA, 25 bp, Homo sapien
gcaattgtggcatgctaccaccagg

SEQ ID NO: 3959222 - DNA, 25 bp, Homo sapien
ttttctcccgagaattttgcccgca

SEQ ID NO: 3959223 - DNA, 25 bp, Homo sapien
gctgttgcctcaaaacatagccaga

SEQ ID NO: 3959224 - DNA, 25 bp, Homo sapien
aattgaatagcttcacgggtctggc

SEQ ID NO: 3959225 - DNA, 25 bp, Homo sapien
gcaatgtctgcacaggcaccttcct

SEQ ID NO: 3959226 - DNA, 25 bp, Homo sapien
tgtatggagcgctcgagacgcacca

SEQ ID NO: 3959227 - DNA, 25 bp, Homo sapien
tgagaactgtatggagcgctcgaga

SEQ ID NO: 3959228 - DNA, 25 bp, Homo sapien
ctcgagacgcaccagggcaatgtct

SEQ ID NO: 3959229 - DNA, 25 bp, Homo sapien
gaacaggtatggtttgttcaggttg

SEQ ID NO: 3959230 - DNA, 25 bp, Homo sapien
gagaacaggtatggtttgttcaggt

SEQ ID NO: 3959231 - DNA, 25 bp, Homo sapien
agagaacaggtatggtttgttcagg

SEQ ID NO: 3959232 - DNA, 25 bp, Homo sapien
cagagaacaggtatggtttgttcag

SEQ ID NO: 3959233 - DNA, 25 bp, Homo sapien
atgggtgtgaaggcccctgaaggca

SEQ ID NO: 3959234 - DNA, 25 bp, Homo sapien
gatcacccagcggctggtgagcaga

SEQ ID NO: 3959235 - DNA, 25 bp, Homo sapien
atcacccagcggctggtgagcagag

SEQ ID NO: 3959236 - DNA, 25 bp, Homo sapien
ggcagcagtgatcacccagcggctg

SEQ ID NO: 3959237 - DNA, 25 bp, Homo sapien
ctgcgcagtggtgggtcccattctt

SEQ ID NO: 3959238 - DNA, 25 bp, Homo sapien
tgctcacgatccagggccactcgct

SEQ ID NO: 3959239 - DNA, 25 bp, Homo sapien
atccagggccactcgctgtcagtgc

SEQ ID NO: 3959240 - DNA, 25 bp, Homo sapien
cccacaacccggttcagctgctggg

SEQ ID NO: 3959241 - DNA, 25 bp, Homo sapien
caggtatcctggccgcattgaggat

SEQ ID NO: 3959242 - DNA, 25 bp, Homo sapien
ggtatcctggccgcattgaggatgg

SEQ ID NO: 3959243 - DNA, 25 bp, Homo sapien
aggtatcctggccgcattgaggatg

SEQ ID NO: 3959244 - DNA, 25 bp, Homo sapien
acagccgtagaagaaaccgaggcac

SEQ ID NO: 3959245 - DNA, 25 bp, Homo sapien
cacagccgtagaagaaaccgaggca

SEQ ID NO: 3959246 - DNA, 25 bp, Homo sapien
tcacagccgtagaagaaaccgaggc

SEQ ID NO: 3959247 - DNA, 25 bp, Homo sapien
ctgggggcgctccagaaaccaccat

SEQ ID NO: 3959248 - DNA, 25 bp, Homo sapien
ggtgaaggtgccgagacagccccca

SEQ ID NO: 3959249 - DNA, 25 bp, Homo sapien
tgaaggtgccgagacagcccccacc

SEQ ID NO: 3959250 - DNA, 25 bp, Homo sapien
aaggtgccgagacagcccccaccca

SEQ ID NO: 3959251 - DNA, 25 bp, Homo sapien
gagcaggcagcaggctcgagagacc

SEQ ID NO: 3959252 - DNA, 25 bp, Homo sapien
gcaggcagcaggctcgagagaccca

SEQ ID NO: 3959253 - DNA, 25 bp, Homo sapien
gggagcaggcagcaggctcgagaga

SEQ ID NO: 3959254 - DNA, 25 bp, Homo sapien
caggcagcaggctcgagagacccag

SEQ ID NO: 3959255 - DNA, 25 bp, Homo sapien
tacccagccctgattaagtccgaca

SEQ ID NO: 3959256 - DNA, 25 bp, Homo sapien
tcaacagggagcatcaaagaaagct

SEQ ID NO: 3959257 - DNA, 25 bp, Homo sapien
tccaatgaggtaggatgaagcactg

SEQ ID NO: 3959258 - DNA, 25 bp, Homo sapien
taaaaccacacagctcttcaacagg

SEQ ID NO: 3959259 - DNA, 25 bp, Homo sapien
tccttaattgatggttctcttaatc

SEQ ID NO: 3959260 - DNA, 25 bp, Homo sapien
caagggtcttaactatctggatgta

SEQ ID NO: 3959261 - DNA, 25 bp, Homo sapien
gacaccaaaaggattgactaatctc

SEQ ID NO: 3959262 - DNA, 25 bp, Homo sapien
tggatgtactcattgtatgctaaac

SEQ ID NO: 3959263 - DNA, 25 bp, Homo sapien
agaggctgaaggatccgccgcggcg

SEQ ID NO: 3959264 - DNA, 25 bp, Homo sapien
ccgcggcgctgtcgcgggagaggga

SEQ ID NO: 3959265 - DNA, 25 bp, Homo sapien
gtcgacgctcgctgctgcagcggca

SEQ ID NO: 3959266 - DNA, 25 bp, Homo sapien
ccgctgccgtcggtgaggacaggcc

SEQ ID NO: 3959267 - DNA, 25 bp, Homo sapien
ccattttgttggccacacccaaagc

SEQ ID NO: 3959268 - DNA, 25 bp, Homo sapien
cattttgttggccacacccaaagca

SEQ ID NO: 3959269 - DNA, 25 bp, Homo sapien
ggtcggtggaaaattgatgatcgca

SEQ ID NO: 3959270 - DNA, 25 bp, Homo sapien
tcggtggaaaattgatgatcgcata

SEQ ID NO: 3959271 - DNA, 25 bp, Homo sapien
agtggtcggtggaaaattgatgatc

SEQ ID NO: 3959272 - DNA, 25 bp, Homo sapien
ggtggaaaattgatgatcgcatagt

SEQ ID NO: 3959273 - DNA, 25 bp, Homo sapien
ggctgttgtgcggatctattttttt

SEQ ID NO: 3959274 - DNA, 25 bp, Homo sapien
tgtggctgttgtgcggatctatttt

SEQ ID NO: 3959275 - DNA, 25 bp, Homo sapien
gctgttgtgcggatctatttttttt

SEQ ID NO: 3959276 - DNA, 25 bp, Homo sapien
gtgtgtggctgttgtgcggatctat

SEQ ID NO: 3959277 - DNA, 25 bp, Homo sapien
tgtgtggctgttgtgaggttctttt

SEQ ID NO: 3959278 - DNA, 25 bp, Homo sapien
gacgcctttcaacgctgccgccttg

SEQ ID NO: 3959279 - DNA, 25 bp, Homo sapien
tgtggctgttgtgaggttctttttt

SEQ ID NO: 3959280 - DNA, 25 bp, Homo sapien
tggacgcctttcaacgctgccgcct

SEQ ID NO: 3959281 - DNA, 25 bp, Homo sapien
ccccagtgaacagggttctgtgggg

SEQ ID NO: 3959282 - DNA, 25 bp, Homo sapien
agttccccagtgaacagggttctgt

SEQ ID NO: 3959283 - DNA, 25 bp, Homo sapien
ttccccagtgaacagggttctgtgg

SEQ ID NO: 3959284 - DNA, 25 bp, Homo sapien
gagttccccagtgaacagggttctg

SEQ ID NO: 3959285 - DNA, 25 bp, Homo sapien
gaactttggatcaaagtgggagacc

SEQ ID NO: 3959286 - DNA, 25 bp, Homo sapien
catgagtaggcccagaaggacggca

SEQ ID NO: 3959287 - DNA, 25 bp, Homo sapien
tctgcgttgtctccggagccgacca

SEQ ID NO: 3959288 - DNA, 25 bp, Homo sapien
taatggagttaaggagccgctcccc

SEQ ID NO: 3959289 - DNA, 25 bp, Homo sapien
gactggctgtcggaggtagaaaccc

SEQ ID NO: 3959290 - DNA, 25 bp, Homo sapien
gccgtacggtggatcctggacactc

SEQ ID NO: 3959291 - DNA, 25 bp, Homo sapien
gcttggcatctgctgacgggccgta

SEQ ID NO: 3959292 - DNA, 25 bp, Homo sapien
ctgtgccccacacgctggctggagg

SEQ ID NO: 3959293 - DNA, 25 bp, Homo sapien
ccagcgttgcttcacccggttgtct

SEQ ID NO: 3959294 - DNA, 25 bp, Homo sapien
ttctttgagaaagccactatcgagc

SEQ ID NO: 3959295 - DNA, 25 bp, Homo sapien
taattgatgcgttgaattcccagcg

SEQ ID NO: 3959296 - DNA, 25 bp, Homo sapien
tcgagcttacagagaaagttgtgct

SEQ ID NO: 3959297 - DNA, 25 bp, Homo sapien
aatcaggaataaagatgagacctta

SEQ ID NO: 3959298 - DNA, 25 bp, Homo sapien
acctcattctggcagagtctcattc

SEQ ID NO: 3959299 - DNA, 25 bp, Homo sapien
aaagatgagaccttactatggacct

SEQ ID NO: 3959300 - DNA, 25 bp, Homo sapien
gaataaagatgagaccttactatgg

SEQ ID NO: 3959301 - DNA, 25 bp, Homo sapien
tatgatggtaggctaagtcctgtga

SEQ ID NO: 3959302 - DNA, 25 bp, Homo sapien
taaatcccagccactagtatgatgg

SEQ ID NO: 3959303 - DNA, 25 bp, Homo sapien
gcgtcgcatcttttcaccgtagtaa

SEQ ID NO: 3959304 - DNA, 25 bp, Homo sapien
cctgttactaattctgcgtcgcatc

SEQ ID NO: 3959305 - DNA, 25 bp, Homo sapien
ctcatggcttctgtgtggcaggagt

SEQ ID NO: 3959306 - DNA, 25 bp, Homo sapien
gagtccggggaggggactgctgaac

SEQ ID NO: 3959307 - DNA, 25 bp, Homo sapien
caggagtccggggaggggactgctg

SEQ ID NO: 3959308 - DNA, 25 bp, Homo sapien
catggcttctgtgtggcaggagtcc

SEQ ID NO: 3959309 - DNA, 25 bp, Homo sapien
cctgtcacagtgagtagcgcggctg

SEQ ID NO: 3959310 - DNA, 25 bp, Homo sapien
cagaggagggcatctactggcgcta

SEQ ID NO: 3959311 - DNA, 25 bp, Homo sapien
tgtgcctacgcttctgccgcatgaa

SEQ ID NO: 3959312 - DNA, 25 bp, Homo sapien
tccacgaagctcacggtccaggtgt

SEQ ID NO: 3959313 - DNA, 25 bp, Homo sapien
aagttcttccgtggtgggaggagca

SEQ ID NO: 3959314 - DNA, 25 bp, Homo sapien
catgcaaatgaagggcgttgcacgc

SEQ ID NO: 3959315 - DNA, 25 bp, Homo sapien
gaggagcatgttaatgaccatacaa

SEQ ID NO: 3959316 - DNA, 25 bp, Homo sapien
aaacgccgagggttgcgtgtgtcca

SEQ ID NO: 3959317 - DNA, 25 bp, Homo sapien
tgagcctgcttaatccctctgagcc

SEQ ID NO: 3959318 - DNA, 25 bp, Homo sapien
cagagtagggtctgagcctgcttaa

SEQ ID NO: 3959319 - DNA, 25 bp, Homo sapien
ggagcatggtgtccggcctctgtaa

SEQ ID NO: 3959320 - DNA, 25 bp, Homo sapien
tgttgactgcgatgaggagggcccg

SEQ ID NO: 3959321 - DNA, 25 bp, Homo sapien
tcctagagttagcaacaccaggtgt

SEQ ID NO: 3959322 - DNA, 25 bp, Homo sapien
tgctacctgcgcatggacgcactgg

SEQ ID NO: 3959323 - DNA, 25 bp, Homo sapien
ggactggtaaatgtagcccgtctgc

SEQ ID NO: 3959324 - DNA, 25 bp, Homo sapien
ggacctggccgctttgactactggg

SEQ ID NO: 3959325 - DNA, 25 bp, Homo sapien
tactttttattagacacggccaggc

SEQ ID NO: 3959326 - DNA, 25 bp, Homo sapien
tttttattagacacggccaggcaga

SEQ ID NO: 3959327 - DNA, 25 bp, Homo sapien
aatactttttattagacacggccag

SEQ ID NO: 3959328 - DNA, 25 bp, Homo sapien
tcaaatactttttattagacacggc

SEQ ID NO: 3959329 - DNA, 25 bp, Homo sapien
catgggagttcccgaggggccccag

SEQ ID NO: 3959330 - DNA, 25 bp, Homo sapien
tttcaagggcgacgggagagacaca

SEQ ID NO: 3959331 - DNA, 25 bp, Homo sapien
ccagctttcaagggcgacgggagag

SEQ ID NO: 3959332 - DNA, 25 bp, Homo sapien
aaagtgcagaggcagagtctggggc

SEQ ID NO: 3959333 - DNA, 25 bp, Homo sapien
aggctgaggaggttccgaggctcaa

SEQ ID NO: 3959334 - DNA, 25 bp, Homo sapien
aggaggttccgaggctcaaaggagg

SEQ ID NO: 3959335 - DNA, 25 bp, Homo sapien
gctgaggaggttccgaggctcaaag

SEQ ID NO: 3959336 - DNA, 25 bp, Homo sapien
tgaggaggttccgaggctcaaagga

SEQ ID NO: 3959337 - DNA, 25 bp, Homo sapien
aggagagagtagtgacactcaggat

SEQ ID NO: 3959338 - DNA, 25 bp, Homo sapien
gagagagtagtgacactcaggatcc

SEQ ID NO: 3959339 - DNA, 25 bp, Homo sapien
gagagtagtgacactcaggatccaa

SEQ ID NO: 3959340 - DNA, 25 bp, Homo sapien
tgggaggagagagtagtgacactca

SEQ ID NO: 3959341 - DNA, 25 bp, Homo sapien
acctgctccggggggtggaggtgct

SEQ ID NO: 3959342 - DNA, 25 bp, Homo sapien
ggaggtgctccccacagtccgggcc

SEQ ID NO: 3959343 - DNA, 25 bp, Homo sapien
tggaggtgctccccacagtccgggc

SEQ ID NO: 3959344 - DNA, 25 bp, Homo sapien
ccccacagtccgggccaggacagcc

SEQ ID NO: 3959345 - DNA, 25 bp, Homo sapien
caggcgagacaaggagggtgtccag

SEQ ID NO: 3959346 - DNA, 25 bp, Homo sapien
ctgcaggagggcaggcgagacaagg

SEQ ID NO: 3959347 - DNA, 25 bp, Homo sapien
aggagggcaggcgagacaaggaggg

SEQ ID NO: 3959348 - DNA, 25 bp, Homo sapien
ggcaggcgagacaaggagggtgtcc

SEQ ID NO: 3959349 - DNA, 25 bp, Homo sapien
gcagcacttggacagccttcaaagt

SEQ ID NO: 3959350 - DNA, 25 bp, Homo sapien
taaaaacttggtgcactctgaaagc

SEQ ID NO: 3959351 - DNA, 25 bp, Homo sapien
tagggagtgccggatgaaaccagct

SEQ ID NO: 3959352 - DNA, 25 bp, Homo sapien
ggagtgccggatgaaaccagctctg

SEQ ID NO: 3959353 - DNA, 25 bp, Homo sapien
tttagtaaatgtaagcctttctgga

SEQ ID NO: 3959354 - DNA, 25 bp, Homo sapien
gtggtttcctaattacagcctctca

SEQ ID NO: 3959355 - DNA, 25 bp, Homo sapien
tctgctatcaagtgccccgagggat

SEQ ID NO: 3959356 - DNA, 25 bp, Homo sapien
agctgtctgccctgagcgtgtggtt

SEQ ID NO: 3959357 - DNA, 25 bp, Homo sapien
tgtcgtcatcccagttgctggagag

SEQ ID NO: 3959358 - DNA, 25 bp, Homo sapien
gctgtccaggagcaaactgcagggt

SEQ ID NO: 3959359 - DNA, 25 bp, Homo sapien
ctgtccaggagcaaactgcagggtg

SEQ ID NO: 3959360 - DNA, 25 bp, Homo sapien
cctaggctgtcgtcatcccagttgc

SEQ ID NO: 3959361 - DNA, 25 bp, Homo sapien
agggcctccgctgccatgcaccaca

SEQ ID NO: 3959362 - DNA, 25 bp, Homo sapien
agcatcatgacaaggacagaacgca

SEQ ID NO: 3959363 - DNA, 25 bp, Homo sapien
tcatgacaaggacagaacgcagctc

SEQ ID NO: 3959364 - DNA, 25 bp, Homo sapien
acagaacgcagctcggaagacagac

SEQ ID NO: 3959365 - DNA, 25 bp, Homo sapien
cagggggcaggtagccctggcgcag

SEQ ID NO: 3959366 - DNA, 25 bp, Homo sapien
gggcagctccatgttgcatgccact

SEQ ID NO: 3959367 - DNA, 25 bp, Homo sapien
catgttgcatgccacttccaggatg

SEQ ID NO: 3959368 - DNA, 25 bp, Homo sapien
catgccacttccaggatggtgaggc

SEQ ID NO: 3959369 - DNA, 25 bp, Homo sapien
tccagccgcacgcagcatgggtgct

SEQ ID NO: 3959370 - DNA, 25 bp, Homo sapien
tggaacgctttaccgcatagagccg

SEQ ID NO: 3959371 - DNA, 25 bp, Homo sapien
agcagtccgaagtcacccagcttgc

SEQ ID NO: 3959372 - DNA, 25 bp, Homo sapien
ttgacatcaaggtgcaccaggccct

SEQ ID NO: 3959373 - DNA, 25 bp, Homo sapien
tacaggactcatacaagggaaaact

SEQ ID NO: 3959374 - DNA, 25 bp, Homo sapien
agtatgcacagagcaacccctggag

SEQ ID NO: 3959375 - DNA, 25 bp, Homo sapien
gaggtggtacccacgcacacagtga

SEQ ID NO: 3959376 - DNA, 25 bp, Homo sapien
ctgtggtgtgaaaagtgggctcccc

SEQ ID NO: 3959377 - DNA, 25 bp, Homo sapien
gaggtgcagaaacacaaaggaggtc

SEQ ID NO: 3959378 - DNA, 25 bp, Homo sapien
agatgggcctagaagccgtcccctc

SEQ ID NO: 3959379 - DNA, 25 bp, Homo sapien
gtgcagaaacacaaaggaggtcccc

SEQ ID NO: 3959380 - DNA, 25 bp, Homo sapien
gaacggaaggggatcaggctgccca

SEQ ID NO: 3959381 - DNA, 25 bp, Homo sapien
ctcgccccggaatgacacccgccgg

SEQ ID NO: 3959382 - DNA, 25 bp, Homo sapien
ccggcttgggtcatacccagggctc

SEQ ID NO: 3959383 - DNA, 25 bp, Homo sapien
cttgaagacctctccgtaggagcca

SEQ ID NO: 3959384 - DNA, 25 bp, Homo sapien
tgctggaagaaggactctggccggc

SEQ ID NO: 3959385 - DNA, 25 bp, Homo sapien
aggctccggctgagccccctgggcc

SEQ ID NO: 3959386 - DNA, 25 bp, Homo sapien
aagaggcggctgatgggaatgctgc

SEQ ID NO: 3959387 - DNA, 25 bp, Homo sapien
ctggggtccgaggagggaagaggcg

SEQ ID NO: 3959388 - DNA, 25 bp, Homo sapien
ggcggaagtaggctgggactgggat

SEQ ID NO: 3959389 - DNA, 25 bp, Homo sapien
aggctgagtacagggcagcatgtcc

SEQ ID NO: 3959390 - DNA, 25 bp, Homo sapien
agcatgtccactctgataccacctg

SEQ ID NO: 3959391 - DNA, 25 bp, Homo sapien
cagaagagagctatgtctataccac

SEQ ID NO: 3959392 - DNA, 25 bp, Homo sapien
ttctactttaaacggcaatgggagc

SEQ ID NO: 3959393 - DNA, 25 bp, Homo sapien
tagaggctatatctcaggcccggca

SEQ ID NO: 3959394 - DNA, 25 bp, Homo sapien
tttacacaagaaaacctgccaaggc

SEQ ID NO: 3959395 - DNA, 25 bp, Homo sapien
taaattccagctgagtgtggcagac

SEQ ID NO: 3959396 - DNA, 25 bp, Homo sapien
tccacatggcagaggctaaattcca

SEQ ID NO: 3959397 - DNA, 25 bp, Homo sapien
attggaccgtggaacactttatgcc

SEQ ID NO: 3959398 - DNA, 25 bp, Homo sapien
ttggattggaccgtggaacacttta

SEQ ID NO: 3959399 - DNA, 25 bp, Homo sapien
tttaattggattggaccgtggaaca

SEQ ID NO: 3959400 - DNA, 25 bp, Homo sapien
actttatgccccaaggtattgtttg

SEQ ID NO: 3959401 - DNA, 25 bp, Homo sapien
aggtcactggtcacaagcacagcct

SEQ ID NO: 3959402 - DNA, 25 bp, Homo sapien
gggccctgggcgatcgggccgtctc

SEQ ID NO: 3959403 - DNA, 25 bp, Homo sapien
tgggcgatcgggccgtctcgcctca

SEQ ID NO: 3959404 - DNA, 25 bp, Homo sapien
ccacgtgaatccagggtgtccctga

SEQ ID NO: 3959405 - DNA, 25 bp, Homo sapien
gggctcccacgtgaatccagggtgt

SEQ ID NO: 3959406 - DNA, 25 bp, Homo sapien
agacggtaagttcctcccaggcagg

SEQ ID NO: 3959407 - DNA, 25 bp, Homo sapien
cggctgacttcactccgtgggtgtg

SEQ ID NO: 3959408 - DNA, 25 bp, Homo sapien
tcccaggcagggccgcggctgactt

SEQ ID NO: 3959409 - DNA, 25 bp, Homo sapien
gtagacggtaagttcctcccaggca

SEQ ID NO: 3959410 - DNA, 25 bp, Homo sapien
aagaggggctgttgcagaagaagag

SEQ ID NO: 3959411 - DNA, 25 bp, Homo sapien
ctggcgaggcggaggggagcggcga

SEQ ID NO: 3959412 - DNA, 25 bp, Homo sapien
ccctcacggcggggtctgggctcac

SEQ ID NO: 3959413 - DNA, 25 bp, Homo sapien
gtggccacgccgaggcccctcacgg

SEQ ID NO: 3959414 - DNA, 25 bp, Homo sapien
ggagcggcgaggtggccacgccgag

SEQ ID NO: 3959415 - DNA, 25 bp, Homo sapien
tcgggtggctcagcgggccggagtc

SEQ ID NO: 3959416 - DNA, 25 bp, Homo sapien
agctgctcgcgccaaaaattccaaa

SEQ ID NO: 3959417 - DNA, 25 bp, Homo sapien
gagtctgccgtcgactgttccggac

SEQ ID NO: 3959418 - DNA, 25 bp, Homo sapien
tccgcgagggcccagattccgggtc

SEQ ID NO: 3959419 - DNA, 25 bp, Homo sapien
ggctggcgtagtgtttgggtccata

SEQ ID NO: 3959420 - DNA, 25 bp, Homo sapien
ccctcgctgggctggcgtagtgttt

SEQ ID NO: 3959421 - DNA, 25 bp, Homo sapien
gccctcgctgggctggcgtagtgtt

SEQ ID NO: 3959422 - DNA, 25 bp, Homo sapien
tggcgtagtgtttgggtccataaaa

SEQ ID NO: 3959423 - DNA, 25 bp, Homo sapien
ctcctccattctctgagtttgagac

SEQ ID NO: 3959424 - DNA, 25 bp, Homo sapien
tgagcctttctgagcttcggattag

SEQ ID NO: 3959425 - DNA, 25 bp, Homo sapien
aacgaccttgggaatgcactgagcc

SEQ ID NO: 3959426 - DNA, 25 bp, Homo sapien
gcgattggccgcaggatcatagttc

SEQ ID NO: 3959427 - DNA, 25 bp, Homo sapien
ctgtgtgaggaaaggctgtaatata

SEQ ID NO: 3959428 - DNA, 25 bp, Homo sapien
tccgatgtaaatttcactgtgtgag

SEQ ID NO: 3959429 - DNA, 25 bp, Homo sapien
aaatggaaataagtagatggagcag

SEQ ID NO: 3959430 - DNA, 25 bp, Homo sapien
gataagtgcgtggtgtgagggaaac

SEQ ID NO: 3959431 - DNA, 25 bp, Homo sapien
agttaaaggccgcagtgagggccgg

SEQ ID NO: 3959432 - DNA, 25 bp, Homo sapien
tccctggagttaaaggccgcagtga

SEQ ID NO: 3959433 - DNA, 25 bp, Homo sapien
cacttgatccctggagttaaaggcc

SEQ ID NO: 3959434 - DNA, 25 bp, Homo sapien
tgatccctggagttaaaggccgcag

SEQ ID NO: 3959435 - DNA, 25 bp, Homo sapien
ctcggtgtcgcagcgaatccgcaga

SEQ ID NO: 3959436 - DNA, 25 bp, Homo sapien
tttagtccggcaggtcgaggcttca

SEQ ID NO: 3959437 - DNA, 25 bp, Homo sapien
taaacagcaacgagaggacaatctc

SEQ ID NO: 3959438 - DNA, 25 bp, Homo sapien
aaaaattggtgaggcgccgcgcctc

SEQ ID NO: 3959439 - DNA, 25 bp, Homo sapien
gtggaggtatcattttgcgtgcccc

SEQ ID NO: 3959440 - DNA, 25 bp, Homo sapien
gcaaaggcccttttatcaagtgagg

SEQ ID NO: 3959441 - DNA, 25 bp, Homo sapien
tgtcgttgaaggtaggacccgcctg

SEQ ID NO: 3959442 - DNA, 25 bp, Homo sapien
gcctgaccgcagtagcaaatttata

SEQ ID NO: 3959443 - DNA, 25 bp, Homo sapien
gaaacagaggtcagaagttccggag

SEQ ID NO: 3959444 - DNA, 25 bp, Homo sapien
taagatgggcatgtcaagatccaga

SEQ ID NO: 3959445 - DNA, 25 bp, Homo sapien
tccagtgacatctagggaagcccag

SEQ ID NO: 3959446 - DNA, 25 bp, Homo sapien
gacagtctgtcttgttgcaaagcca

SEQ ID NO: 3959447 - DNA, 25 bp, Homo sapien
agtagcgggccatgtaatggctggg

SEQ ID NO: 3959448 - DNA, 25 bp, Homo sapien
acgtaattcttggtagggtactcag

SEQ ID NO: 3959449 - DNA, 25 bp, Homo sapien
gacgtaattcttggtagggtactca

SEQ ID NO: 3959450 - DNA, 25 bp, Homo sapien
tcagacgtaattcttggtagggtac

SEQ ID NO: 3959451 - DNA, 25 bp, Homo sapien
cagcaacaaaaggcctgaggccgcc

SEQ ID NO: 3959452 - DNA, 25 bp, Homo sapien
caaggtagaccagcaagccgaacag

SEQ ID NO: 3959453 - DNA, 25 bp, Homo sapien
aggtggtacacttggccccagcaag

SEQ ID NO: 3959454 - DNA, 25 bp, Homo sapien
gtgtcaggacgactcccaggatctg

SEQ ID NO: 3959455 - DNA, 25 bp, Homo sapien
cagagcttgagactccgcttcacca

SEQ ID NO: 3959456 - DNA, 25 bp, Homo sapien
accacttaagcagcgcggtgacatg

SEQ ID NO: 3959457 - DNA, 25 bp, Homo sapien
agggaaattcctaggccgagtgtcg

SEQ ID NO: 3959458 - DNA, 25 bp, Homo sapien
caggcttagggtagaacagagcttg

SEQ ID NO: 3959459 - DNA, 25 bp, Homo sapien
gcctcagactcccaaactgatggga

SEQ ID NO: 3959460 - DNA, 25 bp, Homo sapien
cagactcccaaactgatgggattaa

SEQ ID NO: 3959461 - DNA, 25 bp, Homo sapien
ctcagactcccaaactgatgggatt

SEQ ID NO: 3959462 - DNA, 25 bp, Homo sapien
agactcccaaactgatgggattaaa

SEQ ID NO: 3959463 - DNA, 25 bp, Homo sapien
taactttaaatggtttggagaggca

SEQ ID NO: 3959464 - DNA, 25 bp, Homo sapien
gctggccctaacagttttccaggga

SEQ ID NO: 3959465 - DNA, 25 bp, Homo sapien
gagggctggccctaagatacagacc

SEQ ID NO: 3959466 - DNA, 25 bp, Homo sapien
caatgcctggaactcagccggcaag

SEQ ID NO: 3959467 - DNA, 25 bp, Homo sapien
cagaactccgttgggctcagtgtcc

SEQ ID NO: 3959468 - DNA, 25 bp, Homo sapien
tggtgcccagatgcctactctgcag

SEQ ID NO: 3959469 - DNA, 25 bp, Homo sapien
cctttgcgggagtcgctggtctctt

SEQ ID NO: 3959470 - DNA, 25 bp, Homo sapien
tgtcctctgttgagggaaggtcttg

SEQ ID NO: 3959471 - DNA, 25 bp, Homo sapien
cagcctcagcagacggagggcctca

SEQ ID NO: 3959472 - DNA, 25 bp, Homo sapien
ccaggatagcgccagagaagcagct

SEQ ID NO: 3959473 - DNA, 25 bp, Homo sapien
aggctgccaggatagcgccagagaa

SEQ ID NO: 3959474 - DNA, 25 bp, Homo sapien
agagctccattatgtccccagctgg

SEQ ID NO: 3959475 - DNA, 25 bp, Homo sapien
ctgaggtcagctgtgaggaccgcct

SEQ ID NO: 3959476 - DNA, 25 bp, Homo sapien
cagctagagctaaaaatggcacgat

SEQ ID NO: 3959477 - DNA, 25 bp, Homo sapien
tgtgaggaccgcctgtgattctgca

SEQ ID NO: 3959478 - DNA, 25 bp, Homo sapien
tgggaaacaacccagaggtcagcta

SEQ ID NO: 3959479 - DNA, 25 bp, Homo sapien
gctgagttgagagaagtgggtggcc

SEQ ID NO: 3959480 - DNA, 25 bp, Homo sapien
cagaaactgcttgcgcagaggctcc

SEQ ID NO: 3959481 - DNA, 25 bp, Homo sapien
catgggggggctgcagtaggggtgg

SEQ ID NO: 3959482 - DNA, 25 bp, Homo sapien
acagaaactgcttgcgcagaggctc

SEQ ID NO: 3959483 - DNA, 25 bp, Homo sapien
gaggcaggctgggatactgacacag

SEQ ID NO: 3959484 - DNA, 25 bp, Homo sapien
agaggcaggctgggatactgacaca

SEQ ID NO: 3959485 - DNA, 25 bp, Homo sapien
ggcaggctgggatactgacacagga

SEQ ID NO: 3959486 - DNA, 25 bp, Homo sapien
aggctgggatactgacacaggaggc

SEQ ID NO: 3959487 - DNA, 25 bp, Homo sapien
gtgacagagatcttgttgggagtcc

SEQ ID NO: 3959488 - DNA, 25 bp, Homo sapien
cagaggtgacagagatcttgttggg

SEQ ID NO: 3959489 - DNA, 25 bp, Homo sapien
agagatcttgttgggagtccctccc

SEQ ID NO: 3959490 - DNA, 25 bp, Homo sapien
gacagagatcttgttgggagtccct

SEQ ID NO: 3959491 - DNA, 25 bp, Homo sapien
ctccaggcgccgcttggtgctcatg

SEQ ID NO: 3959492 - DNA, 25 bp, Homo sapien
gggcacagctcctcggagaggggag

SEQ ID NO: 3959493 - DNA, 25 bp, Homo sapien
ctcatgggcacagctcctcggagag

SEQ ID NO: 3959494 - DNA, 25 bp, Homo sapien
tccaggcgccgcttggtgctcatgg

SEQ ID NO: 3959495 - DNA, 25 bp, Homo sapien
ttcatcctgcagaccagtcctgagc

SEQ ID NO: 3959496 - DNA, 25 bp, Homo sapien
cccaagcccattcctgtctcagctg

SEQ ID NO: 3959497 - DNA, 25 bp, Homo sapien
tccagcagggtacctcggaagtctc

SEQ ID NO: 3959498 - DNA, 25 bp, Homo sapien
agccaaagctcctgcggcccttggt

SEQ ID NO: 3959499 - DNA, 25 bp, Homo sapien
ctgggggcctcgctgcaagggctgc

SEQ ID NO: 3959500 - DNA, 25 bp, Homo sapien
tggcgtccaggccccaagtcacccc

SEQ ID NO: 3959501 - DNA, 25 bp, Homo sapien
ccaaggcggcccgcgggaggcgctg

SEQ ID NO: 3959502 - DNA, 25 bp, Homo sapien
caagtcacccccaaggcggcccgcg

SEQ ID NO: 3959503 - DNA, 25 bp, Homo sapien
gatgggcgtggctttaggcgggcac

SEQ ID NO: 3959504 - DNA, 25 bp, Homo sapien
gggcacagccgcgaggttctgcgcg

SEQ ID NO: 3959505 - DNA, 25 bp, Homo sapien
acgggcggcgcgtggcggaaggcag

SEQ ID NO: 3959506 - DNA, 25 bp, Homo sapien
ctctgagggcgtggccaagagagga

SEQ ID NO: 3959507 - DNA, 25 bp, Homo sapien
caccacttcttaatgtcgggggtct

SEQ ID NO: 3959508 - DNA, 25 bp, Homo sapien
tggacaccacttcttaatgtcgggg

SEQ ID NO: 3959509 - DNA, 25 bp, Homo sapien
atgtcgggggtcttcgcggcgctca

SEQ ID NO: 3959510 - DNA, 25 bp, Homo sapien
tcttaatgtcgggggtcttcgcggc

SEQ ID NO: 3959511 - DNA, 25 bp, Homo sapien
gccaccttcgcgccgaaggcggtag

SEQ ID NO: 3959512 - DNA, 25 bp, Homo sapien
ccacggagaggaaccgctctaggca

SEQ ID NO: 3959513 - DNA, 25 bp, Homo sapien
gcgccgaaggcggtagggcgccacg

SEQ ID NO: 3959514 - DNA, 25 bp, Homo sapien
cgctctaggcacgtaaggcctcgtg

SEQ ID NO: 3959515 - DNA, 25 bp, Homo sapien
agtgacagccccatgtaaagctctt

SEQ ID NO: 3959516 - DNA, 25 bp, Homo sapien
tgacagccccatgtaaagctcttgt

SEQ ID NO: 3959517 - DNA, 25 bp, Homo sapien
gtgacagccccatgtaaagctcttg

SEQ ID NO: 3959518 - DNA, 25 bp, Homo sapien
tgtcgctccattggcctgaagagga

SEQ ID NO: 3959519 - DNA, 25 bp, Homo sapien
tggaagacaatctgggccctgtcgc

SEQ ID NO: 3959520 - DNA, 25 bp, Homo sapien
tccctgccctagaaaagatagacgt

SEQ ID NO: 3959521 - DNA, 25 bp, Homo sapien
aggttactgagaaagccaccggcgg

SEQ ID NO: 3959522 - DNA, 25 bp, Homo sapien
ggccgtggtcggctcagcgccggtc

SEQ ID NO: 3959523 - DNA, 25 bp, Homo sapien
tggtcggctcagcgccggtcccgcc

SEQ ID NO: 3959524 - DNA, 25 bp, Homo sapien
gaggccgtggtcggctcagcgccgg

SEQ ID NO: 3959525 - DNA, 25 bp, Homo sapien
ccgtggtcggctcagcgccggtccc

SEQ ID NO: 3959526 - DNA, 25 bp, Homo sapien
gagtctcgctccagcgagacgcggt

SEQ ID NO: 3959527 - DNA, 25 bp, Homo sapien
gcgccaccttctggcggatggcgcg

SEQ ID NO: 3959528 - DNA, 25 bp, Homo sapien
accttctggcggatggcgcgcagca

SEQ ID NO: 3959529 - DNA, 25 bp, Homo sapien
cgctccagcgagacgcggttgagct

SEQ ID NO: 3959530 - DNA, 25 bp, Homo sapien
gcctcgtcccggtctgagagggcac

SEQ ID NO: 3959531 - DNA, 25 bp, Homo sapien
tcacggcctcgtcccggtctgagag

SEQ ID NO: 3959532 - DNA, 25 bp, Homo sapien
ttgttcacggcctcgtcccggtctg

SEQ ID NO: 3959533 - DNA, 25 bp, Homo sapien
tcccggtctgagagggcactgtgca

SEQ ID NO: 3959534 - DNA, 25 bp, Homo sapien
tctaagatctcttccgggggtgaag

SEQ ID NO: 3959535 - DNA, 25 bp, Homo sapien
gctggactgagggatgttcgcttct

SEQ ID NO: 3959536 - DNA, 25 bp, Homo sapien
tcctccagtatctccgctggactga

SEQ ID NO: 3959537 - DNA, 25 bp, Homo sapien
tatctccgctggactgagggatgtt

SEQ ID NO: 3959538 - DNA, 25 bp, Homo sapien
gccagttctgactgcaacgaggcag

SEQ ID NO: 3959539 - DNA, 25 bp, Homo sapien
ccctggtcgccgtcgtcgaggctgt

SEQ ID NO: 3959540 - DNA, 25 bp, Homo sapien
aacgaggcagccgacacgtcggcgt

SEQ ID NO: 3959541 - DNA, 25 bp, Homo sapien
gggtgtctccgggtgcgtcggcgcc

SEQ ID NO: 3959542 - DNA, 25 bp, Homo sapien
gaagccattgctaagggtccaggca

SEQ ID NO: 3959543 - DNA, 25 bp, Homo sapien
gcaagctgaccccaaagtgcagact

SEQ ID NO: 3959544 - DNA, 25 bp, Homo sapien
tttcctcgcctatagagcagggccg

SEQ ID NO: 3959545 - DNA, 25 bp, Homo sapien
tctccattgcgcagccgtggtctag

SEQ ID NO: 3959546 - DNA, 25 bp, Homo sapien
agcagcaactcctcgtgggtggtct

SEQ ID NO: 3959547 - DNA, 25 bp, Homo sapien
gcaactcctcgtgggtggtctgcag

SEQ ID NO: 3959548 - DNA, 25 bp, Homo sapien
tcctcgtgggtggtctgcagtctgc

SEQ ID NO: 3959549 - DNA, 25 bp, Homo sapien
aactcctcgtgggtggtctgcagtc

SEQ ID NO: 3959550 - DNA, 25 bp, Homo sapien
tggggacaggggcagcccctcccag

SEQ ID NO: 3959551 - DNA, 25 bp, Homo sapien
tggggaaaggcctgagagctgggga

SEQ ID NO: 3959552 - DNA, 25 bp, Homo sapien
ctggggaaaggcctgagagctgggg

SEQ ID NO: 3959553 - DNA, 25 bp, Homo sapien
gagctggggacaggggcagcccctc

SEQ ID NO: 3959554 - DNA, 25 bp, Homo sapien
gggcgtccagttccctctgaagttc

SEQ ID NO: 3959555 - DNA, 25 bp, Homo sapien
cgaagggcgtccagttccctctgaa

SEQ ID NO: 3959556 - DNA, 25 bp, Homo sapien
cctctgaagttcctgctcagtctgg

SEQ ID NO: 3959557 - DNA, 25 bp, Homo sapien
aagggcgtccagttccctctgaagt

SEQ ID NO: 3959558 - DNA, 25 bp, Homo sapien
ctgagccggaggttctgctcgctga

SEQ ID NO: 3959559 - DNA, 25 bp, Homo sapien
ggttctgctcgctgagctcgctgag

SEQ ID NO: 3959560 - DNA, 25 bp, Homo sapien
tgctctgagcgctgctccccaagct

SEQ ID NO: 3959561 - DNA, 25 bp, Homo sapien
tgccaggcctcgccggagctcatgg

SEQ ID NO: 3959562 - DNA, 25 bp, Homo sapien
cagaggcagagaggcaccgatgaga

SEQ ID NO: 3959563 - DNA, 25 bp, Homo sapien
gcacagagagatggcgatggaggga

SEQ ID NO: 3959564 - DNA, 25 bp, Homo sapien
agagatggcgatggagggacagaca

SEQ ID NO: 3959565 - DNA, 25 bp, Homo sapien
gcgatggagggacagacacctaggg

SEQ ID NO: 3959566 - DNA, 25 bp, Homo sapien
aaggttccgagcagacaggacgcgt

SEQ ID NO: 3959567 - DNA, 25 bp, Homo sapien
ccagctgctgccggggcttctggac

SEQ ID NO: 3959568 - DNA, 25 bp, Homo sapien
ctccagctgctgccggggcttctgg

SEQ ID NO: 3959569 - DNA, 25 bp, Homo sapien
tccagctgctgccggggcttctgga

SEQ ID NO: 3959570 - DNA, 25 bp, Homo sapien
tggcagagttcaagccccggcccat

SEQ ID NO: 3959571 - DNA, 25 bp, Homo sapien
ggcgcctgagtctggcagagttcaa

SEQ ID NO: 3959572 - DNA, 25 bp, Homo sapien
ctgaggtcgcaagcgccgtttttgg

SEQ ID NO: 3959573 - DNA, 25 bp, Homo sapien
caagcgccgtttttggcgcctgagt

SEQ ID NO: 3959574 - DNA, 25 bp, Homo sapien
tctctaggccctcaaagcgggatgg

SEQ ID NO: 3959575 - DNA, 25 bp, Homo sapien
catgccggagccaggtagtttcagg

SEQ ID NO: 3959576 - DNA, 25 bp, Homo sapien
tccactagagggagaatcactaacg

SEQ ID NO: 3959577 - DNA, 25 bp, Homo sapien
tcaagcagcttagagtccagagggc

SEQ ID NO: 3959578 - DNA, 25 bp, Homo sapien
ggtggttggagtttagaagaatcaa

SEQ ID NO: 3959579 - DNA, 25 bp, Homo sapien
gaatcaaaagggcttgcggatattg

SEQ ID NO: 3959580 - DNA, 25 bp, Homo sapien
cagagccgaccagtgggtggttgga

SEQ ID NO: 3959581 - DNA, 25 bp, Homo sapien
tgttcactcaagaaaggttggctga

SEQ ID NO: 3959582 - DNA, 25 bp, Homo sapien
gctccgcggccaacagcaggtcttt

SEQ ID NO: 3959583 - DNA, 25 bp, Homo sapien
gctccaagtgctgggcgctcagcgt

SEQ ID NO: 3959584 - DNA, 25 bp, Homo sapien
gctgcaaggctaggtcctcgggctc

SEQ ID NO: 3959585 - DNA, 25 bp, Homo sapien
tcttcatttcgctccagaagcatct

SEQ ID NO: 3959586 - DNA, 25 bp, Homo sapien
ctgcagcatctgcggggacaggtgg

SEQ ID NO: 3959587 - DNA, 25 bp, Homo sapien
ccgaagccgccgggctccctccgag

SEQ ID NO: 3959588 - DNA, 25 bp, Homo sapien
cgaagccgccgggctccctccgagg

SEQ ID NO: 3959589 - DNA, 25 bp, Homo sapien
ggtcaagtaaactcttttataggca

SEQ ID NO: 3959590 - DNA, 25 bp, Homo sapien
taaactcttttataggcataacttg

SEQ ID NO: 3959591 - DNA, 25 bp, Homo sapien
ttctggtcaagtaaactcttttata

SEQ ID NO: 3959592 - DNA, 25 bp, Homo sapien
cttttataggcataacttgttgacc

SEQ ID NO: 3959593 - DNA, 25 bp, Homo sapien
tctgttatggagtaaattgtgccct

SEQ ID NO: 3959594 - DNA, 25 bp, Homo sapien
cgaatttcatctgggtcacacctgg

SEQ ID NO: 3959595 - DNA, 25 bp, Homo sapien
tcttatgttgaccattacaggaatg

SEQ ID NO: 3959596 - DNA, 25 bp, Homo sapien
cacctggctagagcacgaatttcat

SEQ ID NO: 3959597 - DNA, 25 bp, Homo sapien
ggcttgcggagacgaaaacaaatct

SEQ ID NO: 3959598 - DNA, 25 bp, Homo sapien
gtccaaaatttgtacggcaggctgg

SEQ ID NO: 3959599 - DNA, 25 bp, Homo sapien
aacaaatctttacctggcagctgag

SEQ ID NO: 3959600 - DNA, 25 bp, Homo sapien
tggcaatgacaacacccacggtgac

SEQ ID NO: 3959601 - DNA, 25 bp, Homo sapien
caggagaatcagttgaatcctggag

SEQ ID NO: 3959602 - DNA, 25 bp, Homo sapien
ggcaggagaatcagttgaatcctgg

SEQ ID NO: 3959603 - DNA, 25 bp, Homo sapien
gagaatcagttgaatcctggaggca

SEQ ID NO: 3959604 - DNA, 25 bp, Homo sapien
ggagaatcagttgaatcctggaggc

SEQ ID NO: 3959605 - DNA, 25 bp, Homo sapien
tacacagggttgagatccaatggga

SEQ ID NO: 3959606 - DNA, 25 bp, Homo sapien
aaactatggcatcagtagggagact

SEQ ID NO: 3959607 - DNA, 25 bp, Homo sapien
tgacccgggacatatgaggccagaa

SEQ ID NO: 3959608 - DNA, 25 bp, Homo sapien
tactagcacaagacaagacatacag

SEQ ID NO: 3959609 - DNA, 25 bp, Homo sapien
cagagggaaattcttgtgcaagcag

SEQ ID NO: 3959610 - DNA, 25 bp, Homo sapien
aggctgatcgcatgggagctctgca

SEQ ID NO: 3959611 - DNA, 25 bp, Homo sapien
catattaactacattggctgctggg

SEQ ID NO: 3959612 - DNA, 25 bp, Homo sapien
ggtggaggatcctgccctagagctt

SEQ ID NO: 3959613 - DNA, 25 bp, Homo sapien
caggttcctcgcctgagaaatgcga

SEQ ID NO: 3959614 - DNA, 25 bp, Homo sapien
tcacatatgggcttcggctgggcgt

SEQ ID NO: 3959615 - DNA, 25 bp, Homo sapien
gcttgccgatgaaatgagccattca

SEQ ID NO: 3959616 - DNA, 25 bp, Homo sapien
tgggccgcatactgtgcattgtcag

SEQ ID NO: 3959617 - DNA, 25 bp, Homo sapien
ccaacgagcgtcttaggatgaggga

SEQ ID NO: 3959618 - DNA, 25 bp, Homo sapien
tgagcgctcaacaccattacaaaga

SEQ ID NO: 3959619 - DNA, 25 bp, Homo sapien
tgtgtttggtcatccagggacaaag

SEQ ID NO: 3959620 - DNA, 25 bp, Homo sapien
gaagattgagttgagaccactggct

SEQ ID NO: 3959621 - DNA, 25 bp, Homo sapien
gaagttacagatgacatcgatgtcc

SEQ ID NO: 3959622 - DNA, 25 bp, Homo sapien
tgtgtgccccagtgcaccggaagtt

SEQ ID NO: 3959623 - DNA, 25 bp, Homo sapien
tgccccagtgcaccggaagttacag

SEQ ID NO: 3959624 - DNA, 25 bp, Homo sapien
ccagtgcaccggaagttacagatga

SEQ ID NO: 3959625 - DNA, 25 bp, Homo sapien
ccccagatgcatggcgtgacaaggg

SEQ ID NO: 3959626 - DNA, 25 bp, Homo sapien
acagctgtggttgtgtaacttcccc

SEQ ID NO: 3959627 - DNA, 25 bp, Homo sapien
acatttgtcatttgagagttagtgg

SEQ ID NO: 3959628 - DNA, 25 bp, Homo sapien
gaagcccagtatggccaaggagaga

SEQ ID NO: 3959629 - DNA, 25 bp, Homo sapien
ggcaggcggctcaccggttgatgag

SEQ ID NO: 3959630 - DNA, 25 bp, Homo sapien
gccatgaaactcatccgcatggggt

SEQ ID NO: 3959631 - DNA, 25 bp, Homo sapien
catggggtaactggggcctccctgt

SEQ ID NO: 3959632 - DNA, 25 bp, Homo sapien
gctggcgtgtgaatcctctgggtcc

SEQ ID NO: 3959633 - DNA, 25 bp, Homo sapien
gatgtaagggatatggcttgaggag

SEQ ID NO: 3959634 - DNA, 25 bp, Homo sapien
gagggaaggtcttgggtcaaggaca

SEQ ID NO: 3959635 - DNA, 25 bp, Homo sapien
gaggagctctgtgttcccaaggaga

SEQ ID NO: 3959636 - DNA, 25 bp, Homo sapien
ctgagagtgcctgctagaggagctc

SEQ ID NO: 3959637 - DNA, 25 bp, Homo sapien
caaacttctgtgcacaaagtgctcc

SEQ ID NO: 3959638 - DNA, 25 bp, Homo sapien
aatgacatggtcatgcgtcactgca

SEQ ID NO: 3959639 - DNA, 25 bp, Homo sapien
ccccatcggtgtgtaaggtggccta

SEQ ID NO: 3959640 - DNA, 25 bp, Homo sapien
ttgagacggggccttattctgtcct

SEQ ID NO: 3959641 - DNA, 25 bp, Homo sapien
tatgaggcccttctaccagggtccg

SEQ ID NO: 3959642 - DNA, 25 bp, Homo sapien
tggctgtccatgagtttggccacgc

SEQ ID NO: 3959643 - DNA, 25 bp, Homo sapien
gtccggtgggcgaccctgacaagta

SEQ ID NO: 3959644 - DNA, 25 bp, Homo sapien
aggatgaccgcgatggcctgcagca

SEQ ID NO: 3959645 - DNA, 25 bp, Homo sapien
aaccccatatgacaagcccacaagg

SEQ ID NO: 3959646 - DNA, 25 bp, Homo sapien
gaaaccatcattgccccatccagtg

SEQ ID NO: 3959647 - DNA, 25 bp, Homo sapien
actcggagaccttgggtgaccagct

SEQ ID NO: 3959648 - DNA, 25 bp, Homo sapien
gggacctgccgcgaaaccatcattg

SEQ ID NO: 3959649 - DNA, 25 bp, Homo sapien
gagtcatttcacttggcctcatata

SEQ ID NO: 3959650 - DNA, 25 bp, Homo sapien
ttttgacgccatcgccaacatccga

SEQ ID NO: 3959651 - DNA, 25 bp, Homo sapien
catccctgatcgatgtgagggcaat

SEQ ID NO: 3959652 - DNA, 25 bp, Homo sapien
tgtgggcttaccctggaagcggaac

SEQ ID NO: 3959653 - DNA, 25 bp, Homo sapien
aggcaaggccctggcacttttagcg

SEQ ID NO: 3959654 - DNA, 25 bp, Homo sapien
accaggcaaggccctggcactttta

SEQ ID NO: 3959655 - DNA, 25 bp, Homo sapien
ctcaggtgattctccggtgtcagcc

SEQ ID NO: 3959656 - DNA, 25 bp, Homo sapien
aggtctgagccaccaggcaaggccc

SEQ ID NO: 3959657 - DNA, 25 bp, Homo sapien
ggatgggctggtcaccctagatcca

SEQ ID NO: 3959658 - DNA, 25 bp, Homo sapien
ggagacctcctgctgtctcatgcct

SEQ ID NO: 3959659 - DNA, 25 bp, Homo sapien
ggaaaagtctcaggcgggccaggat

SEQ ID NO: 3959660 - DNA, 25 bp, Homo sapien
tccattgcgcccttgatttccagat

SEQ ID NO: 3959661 - DNA, 25 bp, Homo sapien
gtggccacagaacgggaagacctac

SEQ ID NO: 3959662 - DNA, 25 bp, Homo sapien
ggagaggaggtggacgccgtgttct

SEQ ID NO: 3959663 - DNA, 25 bp, Homo sapien
tcgtggccacagaacgggaagacct

SEQ ID NO: 3959664 - DNA, 25 bp, Homo sapien
acgccgtgttctcgtggccacagaa

SEQ ID NO: 3959665 - DNA, 25 bp, Homo sapien
ggctaccctcgcgacctgagcctct

SEQ ID NO: 3959666 - DNA, 25 bp, Homo sapien
gccggcagtactggcgctacgacga

SEQ ID NO: 3959667 - DNA, 25 bp, Homo sapien
tccgcggccggcagtactggcgcta

SEQ ID NO: 3959668 - DNA, 25 bp, Homo sapien
tgtcaccgtcagcaacgcaggtggg

SEQ ID NO: 3959669 - DNA, 25 bp, Homo sapien
ggtgacacctacttcttcaagggcg

SEQ ID NO: 3959670 - DNA, 25 bp, Homo sapien
gaacagcatcaagaccgagccggac

SEQ ID NO: 3959671 - DNA, 25 bp, Homo sapien
ttcaagggcgcccactactggcgct

SEQ ID NO: 3959672 - DNA, 25 bp, Homo sapien
tccttgggcatcagggagcggcggg

SEQ ID NO: 3959673 - DNA, 25 bp, Homo sapien
gggagccatccagaccgaacagcgc

SEQ ID NO: 3959674 - DNA, 25 bp, Homo sapien
gaggccccttgtctgttcccacgga

SEQ ID NO: 3959675 - DNA, 25 bp, Homo sapien
caaccaggccgcaggacgttggcct

SEQ ID NO: 3959676 - DNA, 25 bp, Homo sapien
attgtcagtgcgagctcaaccaggc

SEQ ID NO: 3959677 - DNA, 25 bp, Homo sapien
gccaggaaacgatttgggcctctgt

SEQ ID NO: 3959678 - DNA, 25 bp, Homo sapien
tattagaaacttattcatcccactc

SEQ ID NO: 3959679 - DNA, 25 bp, Homo sapien
ctgggctgccaggaaacgatttggg

SEQ ID NO: 3959680 - DNA, 25 bp, Homo sapien
ttagaaacttattcatcccactcag

SEQ ID NO: 3959681 - DNA, 25 bp, Homo sapien
ctcacttacaccagaagcgcatggg

SEQ ID NO: 3959682 - DNA, 25 bp, Homo sapien
tcactcacttacaccagaagcgcat

SEQ ID NO: 3959683 - DNA, 25 bp, Homo sapien
tttgagatgattggggtaaggacac

SEQ ID NO: 3959684 - DNA, 25 bp, Homo sapien
tacagtttgagatgattggggtaag

SEQ ID NO: 3959685 - DNA, 25 bp, Homo sapien
ggtacagagctacagagaaccccag

SEQ ID NO: 3959686 - DNA, 25 bp, Homo sapien
ccaaaggtgatcaacaacaagagtg

SEQ ID NO: 3959687 - DNA, 25 bp, Homo sapien
gcccagtaagttacattggcctgtg

SEQ ID NO: 3959688 - DNA, 25 bp, Homo sapien
ggaacgtgactgtcaggtacagagc

SEQ ID NO: 3959689 - DNA, 25 bp, Homo sapien
tctgcagcaggagtgtgtctttaag

SEQ ID NO: 3959690 - DNA, 25 bp, Homo sapien
agggatgggccgaagtaaagtggtg

SEQ ID NO: 3959691 - DNA, 25 bp, Homo sapien
gcaaatctgtctgcagttcctttaa

SEQ ID NO: 3959692 - DNA, 25 bp, Homo sapien
acaatcacatcattgaaattacaga

SEQ ID NO: 3959693 - DNA, 25 bp, Homo sapien
ctgcaaatctgtctgcagttccttt

SEQ ID NO: 3959694 - DNA, 25 bp, Homo sapien
aaatctgtctgcagttcctttaagc

SEQ ID NO: 3959695 - DNA, 25 bp, Homo sapien
atggctgcaactgggccgtcctcgg

SEQ ID NO: 3959696 - DNA, 25 bp, Homo sapien
gctgcaactgggccgtcctcgggat

SEQ ID NO: 3959697 - DNA, 25 bp, Homo sapien
gcaactgggccgtcctcgggatcct

SEQ ID NO: 3959698 - DNA, 25 bp, Homo sapien
agcagtggtgataactgctatcata

SEQ ID NO: 3959699 - DNA, 25 bp, Homo sapien
gatgacatctggcctttgggcaggt

SEQ ID NO: 3959700 - DNA, 25 bp, Homo sapien
tgacatctggcctttgggcaggttc

SEQ ID NO: 3959701 - DNA, 25 bp, Homo sapien
atgacatctggcctttgggcaggtt

SEQ ID NO: 3959702 - DNA, 25 bp, Homo sapien
gacatctggcctttgggcaggttca

SEQ ID NO: 3959703 - DNA, 25 bp, Homo sapien
ctggattcgagcctcggtcggggag

SEQ ID NO: 3959704 - DNA, 25 bp, Homo sapien
ggattcgagcctcggtcggggagac

SEQ ID NO: 3959705 - DNA, 25 bp, Homo sapien
tggattcgagcctcggtcggggaga

SEQ ID NO: 3959706 - DNA, 25 bp, Homo sapien
cagcagccggtgagataaagatggg

SEQ ID NO: 3959707 - DNA, 25 bp, Homo sapien
catttctgaggccacgctcaacggg

SEQ ID NO: 3959708 - DNA, 25 bp, Homo sapien
gaggctcccgtcttcctccacttcg

SEQ ID NO: 3959709 - DNA, 25 bp, Homo sapien
ttcgtgcctccgctgactcacacag

SEQ ID NO: 3959710 - DNA, 25 bp, Homo sapien
agaaagcaatgcctcggccagggaa

SEQ ID NO: 3959711 - DNA, 25 bp, Homo sapien
tgaggccagaaagcaatgcctcggc

SEQ ID NO: 3959712 - DNA, 25 bp, Homo sapien
gccagaaagcaatgcctcggccagg

SEQ ID NO: 3959713 - DNA, 25 bp, Homo sapien
aaagcaatgcctcggccagggaagg

SEQ ID NO: 3959714 - DNA, 25 bp, Homo sapien
ggcgcttcggccttactctcaggag

SEQ ID NO: 3959715 - DNA, 25 bp, Homo sapien
gatcctgggtctggccgaaactctt

SEQ ID NO: 3959716 - DNA, 25 bp, Homo sapien
gccaggttggagctattgcggaaac

SEQ ID NO: 3959717 - DNA, 25 bp, Homo sapien
cactctgcgcacaggaaggcgggtt

SEQ ID NO: 3959718 - DNA, 25 bp, Homo sapien
actgcaactccggattgggctcggg

SEQ ID NO: 3959719 - DNA, 25 bp, Homo sapien
agctgcgggaagctcaccccgcagt

SEQ ID NO: 3959720 - DNA, 25 bp, Homo sapien
cgcagtccgcgcagatgaactgcaa

SEQ ID NO: 3959721 - DNA, 25 bp, Homo sapien
tggtgcgccttcaggcgagacagct

SEQ ID NO: 3959722 - DNA, 25 bp, Homo sapien
caagaagggacccatcttcaccagg

SEQ ID NO: 3959723 - DNA, 25 bp, Homo sapien
actctgctaagatgggagtgggcca

SEQ ID NO: 3959724 - DNA, 25 bp, Homo sapien
agcgactgggcgcaaggctctcccg

SEQ ID NO: 3959725 - DNA, 25 bp, Homo sapien
tatctgcctgggactctgctaagat

SEQ ID NO: 3959726 - DNA, 25 bp, Homo sapien
gcaggccacgccttattctctggca

SEQ ID NO: 3959727 - DNA, 25 bp, Homo sapien
ggccacgccttattctctggcacat

SEQ ID NO: 3959728 - DNA, 25 bp, Homo sapien
gtgcaggccacgccttattctctgg

SEQ ID NO: 3959729 - DNA, 25 bp, Homo sapien
aggccacgccttattctctggcaca

SEQ ID NO: 3959730 - DNA, 25 bp, Homo sapien
agccgccagctcctgatctcgggaa

SEQ ID NO: 3959731 - DNA, 25 bp, Homo sapien
tcctgatctcgggaactctcctctg

SEQ ID NO: 3959732 - DNA, 25 bp, Homo sapien
gccagctcctgatctcgggaactct

SEQ ID NO: 3959733 - DNA, 25 bp, Homo sapien
tctcgggaactctcctctggccatg

SEQ ID NO: 3959734 - DNA, 25 bp, Homo sapien
ccttttcctccaaggtgacgtctgc

SEQ ID NO: 3959735 - DNA, 25 bp, Homo sapien
ggaggctcatccgatgggcccagca

SEQ ID NO: 3959736 - DNA, 25 bp, Homo sapien
tcttccgcaggcaattccttcttgg

SEQ ID NO: 3959737 - DNA, 25 bp, Homo sapien
gggacaactcttgccagcattacaa

SEQ ID NO: 3959738 - DNA, 25 bp, Homo sapien
catccgcatgctgctcagcccgctg

SEQ ID NO: 3959739 - DNA, 25 bp, Homo sapien
cccatcatccgcatgctgctcagcc

SEQ ID NO: 3959740 - DNA, 25 bp, Homo sapien
tcaagtccccatcatccgcatgctg

SEQ ID NO: 3959741 - DNA, 25 bp, Homo sapien
aagtccccatcatccgcatgctgct

SEQ ID NO: 3959742 - DNA, 25 bp, Homo sapien
ccaggaggtgcggaggcagcacact

SEQ ID NO: 3959743 - DNA, 25 bp, Homo sapien
gctcccggtggatgccctcgagcag

SEQ ID NO: 3959744 - DNA, 25 bp, Homo sapien
ttggtgtgcagagccggccgcagcc

SEQ ID NO: 3959745 - DNA, 25 bp, Homo sapien
ctgggctcccggtggatgccctcga

SEQ ID NO: 3959746 - DNA, 25 bp, Homo sapien
tctgaacagctggtgagccacctcg

SEQ ID NO: 3959747 - DNA, 25 bp, Homo sapien
gactctggtcgcctggggtcctctg

SEQ ID NO: 3959748 - DNA, 25 bp, Homo sapien
tgctcctgctccacggcagctggga

SEQ ID NO: 3959749 - DNA, 25 bp, Homo sapien
tccacggcagctgggactgattctc

SEQ ID NO: 3959750 - DNA, 25 bp, Homo sapien
tcactgcggggatgcctccctaacg

SEQ ID NO: 3959751 - DNA, 25 bp, Homo sapien
gccagccccgctcttgggtctctct

SEQ ID NO: 3959752 - DNA, 25 bp, Homo sapien
ccttcactgcggggatgcctcccta

SEQ ID NO: 3959753 - DNA, 25 bp, Homo sapien
tgcggggatgcctccctaacgccag

SEQ ID NO: 3959754 - DNA, 25 bp, Homo sapien
cactcggagtccccactacacaggc

SEQ ID NO: 3959755 - DNA, 25 bp, Homo sapien
actcggagtccccactacacaggca

SEQ ID NO: 3959756 - DNA, 25 bp, Homo sapien
gttggcgcctcatggatcgggatcc

SEQ ID NO: 3959757 - DNA, 25 bp, Homo sapien
gtggaggccttcgaccaggcagcct

SEQ ID NO: 3959758 - DNA, 25 bp, Homo sapien
gggcaagacccaggtagaccatata

SEQ ID NO: 3959759 - DNA, 25 bp, Homo sapien
agatatatgtcacccacacagaggg

SEQ ID NO: 3959760 - DNA, 25 bp, Homo sapien
caatagcatcaatcagaatcccagg

SEQ ID NO: 3959761 - DNA, 25 bp, Homo sapien
aatcaattttataggctgggcgcgg

SEQ ID NO: 3959762 - DNA, 25 bp, Homo sapien
gaaggtgggtccagcatcggtaaat

SEQ ID NO: 3959763 - DNA, 25 bp, Homo sapien
cctagaaagtggaccctgaaggtgg

SEQ ID NO: 3959764 - DNA, 25 bp, Homo sapien
gcactccagcatgggaagaagagcg

SEQ ID NO: 3959765 - DNA, 25 bp, Homo sapien
tgcactccagcatgggaagaagagc

SEQ ID NO: 3959766 - DNA, 25 bp, Homo sapien
actccagcatgggaagaagagcgaa

SEQ ID NO: 3959767 - DNA, 25 bp, Homo sapien
tccagcatgggaagaagagcgaaac

SEQ ID NO: 3959768 - DNA, 25 bp, Homo sapien
tggcattgcggctctgggagtcacc

SEQ ID NO: 3959769 - DNA, 25 bp, Homo sapien
tcatgaacgcgtcctgggtaaagcc

SEQ ID NO: 3959770 - DNA, 25 bp, Homo sapien
ggacaactgcagtgctcgctttgaa

SEQ ID NO: 3959771 - DNA, 25 bp, Homo sapien
gggtaaagccatcctcatgagctgg

SEQ ID NO: 3959772 - DNA, 25 bp, Homo sapien
ctcctggtgtccttggtgtgggcat

SEQ ID NO: 3959773 - DNA, 25 bp, Homo sapien
tgggggctcctggtgtccttggtgt

SEQ ID NO: 3959774 - DNA, 25 bp, Homo sapien
tggtgtccttggtgtgggcatccct

SEQ ID NO: 3959775 - DNA, 25 bp, Homo sapien
gggctcctggtgtccttggtgtggg

SEQ ID NO: 3959776 - DNA, 25 bp, Homo sapien
cattaagatggagcccgaagagcca

SEQ ID NO: 3959777 - DNA, 25 bp, Homo sapien
tgttggtttccgacgctgccggagc

SEQ ID NO: 3959778 - DNA, 25 bp, Homo sapien
tctaggttccagatcgtggacatcc

SEQ ID NO: 3959779 - DNA, 25 bp, Homo sapien
ggaggacacggattcttagaggaca

SEQ ID NO: 3959780 - DNA, 25 bp, Homo sapien
gagagtttaaatagccgcatatggc

SEQ ID NO: 3959781 - DNA, 25 bp, Homo sapien
tgtactggacgctgccccaggaagt

SEQ ID NO: 3959782 - DNA, 25 bp, Homo sapien
gcagggctcactcctatagctccat

SEQ ID NO: 3959783 - DNA, 25 bp, Homo sapien
tacttggttttaatcagctcaaatg

SEQ ID NO: 3959784 - DNA, 25 bp, Homo sapien
agggtgcagacctcatccgtggcag

SEQ ID NO: 3959785 - DNA, 25 bp, Homo sapien
tctttttccaggagccgtcgaggtg

SEQ ID NO: 3959786 - DNA, 25 bp, Homo sapien
gcacagcatctctttctgggcaggc

SEQ ID NO: 3959787 - DNA, 25 bp, Homo sapien
ggaagctcgtccctagctggaaacg

SEQ ID NO: 3959788 - DNA, 25 bp, Homo sapien
actgcctcgactgcggcaagagctt

SEQ ID NO: 3959789 - DNA, 25 bp, Homo sapien
aagtgcttcagccagcgttccaacc

SEQ ID NO: 3959790 - DNA, 25 bp, Homo sapien
gtcaagccctatccgtgccccgagt

SEQ ID NO: 3959791 - DNA, 25 bp, Homo sapien
agcgttccaacctcatcgcgcacaa

SEQ ID NO: 3959792 - DNA, 25 bp, Homo sapien
tggagtacgaacctttcaagcaaag

SEQ ID NO: 3959793 - DNA, 25 bp, Homo sapien
gaggacggtcggagcttcattgtca

SEQ ID NO: 3959794 - DNA, 25 bp, Homo sapien
ttcattgtcagggaagacccctcca

SEQ ID NO: 3959795 - DNA, 25 bp, Homo sapien
actggtgcccagtagctgaaatgac

SEQ ID NO: 3959796 - DNA, 25 bp, Homo sapien
caaccttgttaactgaaggccacca

SEQ ID NO: 3959797 - DNA, 25 bp, Homo sapien
gccaaccaatggagtaaactgctaa

SEQ ID NO: 3959798 - DNA, 25 bp, Homo sapien
tacacaggtcatgcatgataaggcc

SEQ ID NO: 3959799 - DNA, 25 bp, Homo sapien
gccctaggctagtcatggagatgaa

SEQ ID NO: 3959800 - DNA, 25 bp, Homo sapien
caagaggttggctggtaagaagtaa

SEQ ID NO: 3959801 - DNA, 25 bp, Homo sapien
ttagactgggcgctctggctaacgt

SEQ ID NO: 3959802 - DNA, 25 bp, Homo sapien
ttaagctataaagggcttagactgg

SEQ ID NO: 3959803 - DNA, 25 bp, Homo sapien
actgggcgctctggctaacgtctgt

SEQ ID NO: 3959804 - DNA, 25 bp, Homo sapien
gagttccagcactcaagcaagaggt

SEQ ID NO: 3959805 - DNA, 25 bp, Homo sapien
cctgagttccagcactcaagcaaga

SEQ ID NO: 3959806 - DNA, 25 bp, Homo sapien
ttccagcactcaagcaagaggtttc

SEQ ID NO: 3959807 - DNA, 25 bp, Homo sapien
gttccagcactcaagcaagaggttt

SEQ ID NO: 3959808 - DNA, 25 bp, Homo sapien
catcctcaagggtagaaaaagctgc

SEQ ID NO: 3959809 - DNA, 25 bp, Homo sapien
ctgtggtaccacatgggcagaattt

SEQ ID NO: 3959810 - DNA, 25 bp, Homo sapien
gagaaacgcgctgctacagaactac

SEQ ID NO: 3959811 - DNA, 25 bp, Homo sapien
ctgctcacagggaagtgtctcatga

SEQ ID NO: 3959812 - DNA, 25 bp, Homo sapien
gccagactcggaagaagtcacccgt

SEQ ID NO: 3959813 - DNA, 25 bp, Homo sapien
agaaagctgctaggtgccgctggtt

SEQ ID NO: 3959814 - DNA, 25 bp, Homo sapien
ctggcgaagccctgtgtgctgcaga

SEQ ID NO: 3959815 - DNA, 25 bp, Homo sapien
cactggagacgctttgcaggctgcg

SEQ ID NO: 3959816 - DNA, 25 bp, Homo sapien
ttccatataacatccctgcggcagg

SEQ ID NO: 3959817 - DNA, 25 bp, Homo sapien
tatgattcgtctgtagcggcctgcc

SEQ ID NO: 3959818 - DNA, 25 bp, Homo sapien
gaatcagctagataacggcccacat

SEQ ID NO: 3959819 - DNA, 25 bp, Homo sapien
gatcatttggtaaacgggacactca

SEQ ID NO: 3959820 - DNA, 25 bp, Homo sapien
gaaggaacaagaaagtgcaatccgg

SEQ ID NO: 3959821 - DNA, 25 bp, Homo sapien
gcaatccggtagtcaatttcaatat

SEQ ID NO: 3959822 - DNA, 25 bp, Homo sapien
gcaaatttgccatataccagcaatg

SEQ ID NO: 3959823 - DNA, 25 bp, Homo sapien
ccagcaatgctcaatagaaaataca

SEQ ID NO: 3959824 - DNA, 25 bp, Homo sapien
taatacagggcgatggatgaacact

SEQ ID NO: 3959825 - DNA, 25 bp, Homo sapien
tgagatccagtgtgatacccagctg

SEQ ID NO: 3959826 - DNA, 25 bp, Homo sapien
tgtatacagttccttgctagccagc

SEQ ID NO: 3959827 - DNA, 25 bp, Homo sapien
gatactgagctggatcacatctaag

SEQ ID NO: 3959828 - DNA, 25 bp, Homo sapien
ctagctgtgagttctcggggcaccc

SEQ ID NO: 3959829 - DNA, 25 bp, Homo sapien
cctttccactgtccgctagctgtga

SEQ ID NO: 3959830 - DNA, 25 bp, Homo sapien
ccgctagctgtgagttctcggggca

SEQ ID NO: 3959831 - DNA, 25 bp, Homo sapien
ccctttccactgtccgctagctgtg

SEQ ID NO: 3959832 - DNA, 25 bp, Homo sapien
cagtcctaagggcacaagttccttc

SEQ ID NO: 3959833 - DNA, 25 bp, Homo sapien
cctcagtcctaagggcacaagttcc

SEQ ID NO: 3959834 - DNA, 25 bp, Homo sapien
tcctcagtcctaagggcacaagttc

SEQ ID NO: 3959835 - DNA, 25 bp, Homo sapien
cttgaattgaaaggggaagggctct

SEQ ID NO: 3959836 - DNA, 25 bp, Homo sapien
tggctaacctggtgaaaccccatct

SEQ ID NO: 3959837 - DNA, 25 bp, Homo sapien
gcaggcggatcccttgaggtctgga

SEQ ID NO: 3959838 - DNA, 25 bp, Homo sapien
tcaagaccagcctggctaacctggt

SEQ ID NO: 3959839 - DNA, 25 bp, Homo sapien
aggcggatcccttgaggtctggagt

SEQ ID NO: 3959840 - DNA, 25 bp, Homo sapien
tgagccatgaaattgcactaccgca

SEQ ID NO: 3959841 - DNA, 25 bp, Homo sapien
gacgctacatcaagctgtttcccaa

SEQ ID NO: 3959842 - DNA, 25 bp, Homo sapien
atttaattactgtggaccttatggg

SEQ ID NO: 3959843 - DNA, 25 bp, Homo sapien
caacggctgaacactgtaaatgtcc

SEQ ID NO: 3959844 - DNA, 25 bp, Homo sapien
gcttgccgcgtcctgctaaggcgac

SEQ ID NO: 3959845 - DNA, 25 bp, Homo sapien
aactcgtggacaaagcagctggtga

SEQ ID NO: 3959846 - DNA, 25 bp, Homo sapien
ctaaggcgacccgaagacagaggat

SEQ ID NO: 3959847 - DNA, 25 bp, Homo sapien
ggccaggtcagtgtcccgcttgccg

SEQ ID NO: 3959848 - DNA, 25 bp, Homo sapien
cacttgtggctaggccatgtgccct

SEQ ID NO: 3959849 - DNA, 25 bp, Homo sapien
gccagggtcgcaaggaaatgtgaaa

SEQ ID NO: 3959850 - DNA, 25 bp, Homo sapien
gcggagacaaaagagaacgaggtaa

SEQ ID NO: 3959851 - DNA, 25 bp, Homo sapien
tttttgtcgctcaagggccagggtc

SEQ ID NO: 3959852 - DNA, 25 bp, Homo sapien
gctccatcggcactaatgccccact

SEQ ID NO: 3959853 - DNA, 25 bp, Homo sapien
cagcactaatgctccactccattgg

SEQ ID NO: 3959854 - DNA, 25 bp, Homo sapien
gcggcactaatgacccgctcctttg

SEQ ID NO: 3959855 - DNA, 25 bp, Homo sapien
tttgacattggtgccccactccatc

SEQ ID NO: 3959856 - DNA, 25 bp, Homo sapien
ggcgggtgtgcgagcaggaggtgct

SEQ ID NO: 3959857 - DNA, 25 bp, Homo sapien
tgaactccgcaaggcctgcctggag

SEQ ID NO: 3959858 - DNA, 25 bp, Homo sapien
tggagatccgcagctcgctccggcg

SEQ ID NO: 3959859 - DNA, 25 bp, Homo sapien
tgctgggccccgactgcgatgaact

SEQ ID NO: 3959860 - DNA, 25 bp, Homo sapien
tgaaggagttgatccaggcacctct

SEQ ID NO: 3959861 - DNA, 25 bp, Homo sapien
tgtgaaggagttgatccaggcacct

SEQ ID NO: 3959862 - DNA, 25 bp, Homo sapien
aaggagttgatccaggcacctctcg

SEQ ID NO: 3959863 - DNA, 25 bp, Homo sapien
ggagttgatccaggcacctctcgca

SEQ ID NO: 3959864 - DNA, 25 bp, Homo sapien
ccaagcctggcgaaaatttgtattt

SEQ ID NO: 3959865 - DNA, 25 bp, Homo sapien
gcgttttgcgtttgcctgaccaaca

SEQ ID NO: 3959866 - DNA, 25 bp, Homo sapien
caaggtatacggagtcacttccacg

SEQ ID NO: 3959867 - DNA, 25 bp, Homo sapien
gttgcaagtctaatccatccgacaa

SEQ ID NO: 3959868 - DNA, 25 bp, Homo sapien
ccacgaccctgagattaagggtctc

SEQ ID NO: 3959869 - DNA, 25 bp, Homo sapien
gagattaagggtctcatgctctacc

SEQ ID NO: 3959870 - DNA, 25 bp, Homo sapien
gaccctgagattaagggtctcatgc

SEQ ID NO: 3959871 - DNA, 25 bp, Homo sapien
agattaagggtctcatgctctaccg

SEQ ID NO: 3959872 - DNA, 25 bp, Homo sapien
ctctgggactcgcaccggggcctct

SEQ ID NO: 3959873 - DNA, 25 bp, Homo sapien
agaatcatacctctagaccaacagg

SEQ ID NO: 3959874 - DNA, 25 bp, Homo sapien
cgcaccggggcctctcgcacccaaa

SEQ ID NO: 3959875 - DNA, 25 bp, Homo sapien
gaatcatacctctagaccaacaggc

SEQ ID NO: 3959876 - DNA, 25 bp, Homo sapien
agattaagagtctcatgctctatcg

SEQ ID NO: 3959877 - DNA, 25 bp, Homo sapien
acgcccaacgtgcggctcgaaccca

SEQ ID NO: 3959878 - DNA, 25 bp, Homo sapien
catgctctatcgactgagctagccg

SEQ ID NO: 3959879 - DNA, 25 bp, Homo sapien
cccaacgtgcggctcgaacccacga

SEQ ID NO: 3959880 - DNA, 25 bp, Homo sapien
ataagtcggatacactttgcatctg

SEQ ID NO: 3959881 - DNA, 25 bp, Homo sapien
tatttgcaatattgtttctgttcct

SEQ ID NO: 3959882 - DNA, 25 bp, Homo sapien
tctgttcctgttaatgagttgttgc

SEQ ID NO: 3959883 - DNA, 25 bp, Homo sapien
agttgtattataagtcggatacact

SEQ ID NO: 3959884 - DNA, 25 bp, Homo sapien
gggacctctcgcaccctaagcgaga

SEQ ID NO: 3959885 - DNA, 25 bp, Homo sapien
ggatttgaacccgggacctctcgca

SEQ ID NO: 3959886 - DNA, 25 bp, Homo sapien
ctcgcaccctaagcgagaatcatac

SEQ ID NO: 3959887 - DNA, 25 bp, Homo sapien
tgaacccgggacctctcgcacccta

SEQ ID NO: 3959888 - DNA, 25 bp, Homo sapien
ctttaaccacggctaccgcagttgg

SEQ ID NO: 3959889 - DNA, 25 bp, Homo sapien
gtgataggaccgaccgcaaggcgaa

SEQ ID NO: 3959890 - DNA, 25 bp, Homo sapien
gactggagccgccataccgtcgaac

SEQ ID NO: 3959891 - DNA, 25 bp, Homo sapien
cgtaaataaacaagcccggcgcatt

SEQ ID NO: 3959892 - DNA, 25 bp, Homo sapien
ggacctctcgcacccaaagcgagaa

SEQ ID NO: 3959893 - DNA, 25 bp, Homo sapien
tgaacccgggacctctcgcacccaa

SEQ ID NO: 3959894 - DNA, 25 bp, Homo sapien
acccaaagcgagaatcataccccta

SEQ ID NO: 3959895 - DNA, 25 bp, Homo sapien
ccaaagcgagaatcatacccctaga

SEQ ID NO: 3959896 - DNA, 25 bp, Homo sapien
tatgtcacaagtaatcaatatatac

SEQ ID NO: 3959897 - DNA, 25 bp, Homo sapien
gcgcagtcctacatctgactacaag

SEQ ID NO: 3959898 - DNA, 25 bp, Homo sapien
ggcacatctcaacttgcacaggcca

SEQ ID NO: 3959899 - DNA, 25 bp, Homo sapien
tctctcattctaaaccttcaaactc

SEQ ID NO: 3959900 - DNA, 25 bp, Homo sapien
accattatggccaacaatgtgaaac

SEQ ID NO: 3959901 - DNA, 25 bp, Homo sapien
aagaaagaaagaggcgccaggcggg

SEQ ID NO: 3959902 - DNA, 25 bp, Homo sapien
tcgagaccattatggccaacaatgt

SEQ ID NO: 3959903 - DNA, 25 bp, Homo sapien
aaagaaagaaagaggcgccaggcgg

SEQ ID NO: 3959904 - DNA, 25 bp, Homo sapien
cagggaatctggtcccagtggccaa

SEQ ID NO: 3959905 - DNA, 25 bp, Homo sapien
ccacagtaagtagaagcattgacca

SEQ ID NO: 3959906 - DNA, 25 bp, Homo sapien
gaatgtcgtcgttgtttggtccaaa

SEQ ID NO: 3959907 - DNA, 25 bp, Homo sapien
aggacccgcctgtgtttccaagaca

SEQ ID NO: 3959908 - DNA, 25 bp, Homo sapien
tagtgaccaccccattgccaaaggt

SEQ ID NO: 3959909 - DNA, 25 bp, Homo sapien
tcttgagaggcaatgtgagctaacc

SEQ ID NO: 3959910 - DNA, 25 bp, Homo sapien
tattgatgagacatggatccaagcc

SEQ ID NO: 3959911 - DNA, 25 bp, Homo sapien
gagacggctgctggagagatcaaca

SEQ ID NO: 3959912 - DNA, 25 bp, Homo sapien
tcatgccgggtacagtttgacagcc

SEQ ID NO: 3959913 - DNA, 25 bp, Homo sapien
gctgagagaccaaggaagaatccat

SEQ ID NO: 3959914 - DNA, 25 bp, Homo sapien
tgctttcgggtcttacaggctgagt

SEQ ID NO: 3959915 - DNA, 25 bp, Homo sapien
gacgactccgatgagaattctgacg

SEQ ID NO: 3959916 - DNA, 25 bp, Homo sapien
tggtataacctaaagtgatgctcat

SEQ ID NO: 3959917 - DNA, 25 bp, Homo sapien
tatggtaggatatgtgtggagtata

SEQ ID NO: 3959918 - DNA, 25 bp, Homo sapien
tcagaatttatggtataacctaaag

SEQ ID NO: 3959919 - DNA, 25 bp, Homo sapien
ccatgaataccaaggacaagtgtat

SEQ ID NO: 3959920 - DNA, 25 bp, Homo sapien
tgtttccctaggttatcaaggactg

SEQ ID NO: 3959921 - DNA, 25 bp, Homo sapien
tacgtggttcacttggccaacacac

SEQ ID NO: 3959922 - DNA, 25 bp, Homo sapien
tctgcatcatgtgggtagatcgctc

SEQ ID NO: 3959923 - DNA, 25 bp, Homo sapien
tgtattctcctatcacagcacacag

SEQ ID NO: 3959924 - DNA, 25 bp, Homo sapien
atcttccttctctgacgtgagttgt

SEQ ID NO: 3959925 - DNA, 25 bp, Homo sapien
ccttctctgacgtgagttgttgagt

SEQ ID NO: 3959926 - DNA, 25 bp, Homo sapien
tctgacgtgagttgttgagtaggat

SEQ ID NO: 3959927 - DNA, 25 bp, Homo sapien
tctctgacgtgagttgttgagtagg

SEQ ID NO: 3959928 - DNA, 25 bp, Homo sapien
agctttcaaatacagagacactgtc

SEQ ID NO: 3959929 - DNA, 25 bp, Homo sapien
gcagaagcttcaccaagggacgagg

SEQ ID NO: 3959930 - DNA, 25 bp, Homo sapien
aagcttcaccaagggacgaggatgc

SEQ ID NO: 3959931 - DNA, 25 bp, Homo sapien
gctttcaaatacagagacactgtct

SEQ ID NO: 3959932 - DNA, 25 bp, Homo sapien
ggtcttgggcccgttagtggcatct

SEQ ID NO: 3959933 - DNA, 25 bp, Homo sapien
cagcttggagtctggcggaactctc

SEQ ID NO: 3959934 - DNA, 25 bp, Homo sapien
tgaaggcttgagctcacatctttca

SEQ ID NO: 3959935 - DNA, 25 bp, Homo sapien
cgaagtaggtcttggcccagcttgg

SEQ ID NO: 3959936 - DNA, 25 bp, Homo sapien
actagaggaaatctgccagagagcc

SEQ ID NO: 3959937 - DNA, 25 bp, Homo sapien
ccacacaccacactcgtttcgcggg

SEQ ID NO: 3959938 - DNA, 25 bp, Homo sapien
cagagccacctcttactagaggaaa

SEQ ID NO: 3959939 - DNA, 25 bp, Homo sapien
cctcttactagaggaaatctgccag

SEQ ID NO: 3959940 - DNA, 25 bp, Homo sapien
cagggattacccaaaagaccaggca

SEQ ID NO: 3959941 - DNA, 25 bp, Homo sapien
caaggtccagcctcctgagaaatac

SEQ ID NO: 3959942 - DNA, 25 bp, Homo sapien
gctggtgaggctacatgagatctaa

SEQ ID NO: 3959943 - DNA, 25 bp, Homo sapien
gagatctaaagaaaacgacagctgg

SEQ ID NO: 3959944 - DNA, 25 bp, Homo sapien
gggtcaataccgaggacatctgcct

SEQ ID NO: 3959945 - DNA, 25 bp, Homo sapien
gctagaagacaggaaatctggggtc

SEQ ID NO: 3959946 - DNA, 25 bp, Homo sapien
aataggttaaatcaggcttggagaa

SEQ ID NO: 3959947 - DNA, 25 bp, Homo sapien
gagaaagagcaatgggctagaagac

SEQ ID NO: 3959948 - DNA, 25 bp, Homo sapien
agctccctccggtgccctttgggcg

SEQ ID NO: 3959949 - DNA, 25 bp, Homo sapien
ggcaggcgacatcccactaaggacc

SEQ ID NO: 3959950 - DNA, 25 bp, Homo sapien
ttgctccctcagcaacggacacgct

SEQ ID NO: 3959951 - DNA, 25 bp, Homo sapien
tttaccgtaaagctcagcgtgcgcc

SEQ ID NO: 3959952 - DNA, 25 bp, Homo sapien
atagaaaaactaggcgcgagcggtc

SEQ ID NO: 3959953 - DNA, 25 bp, Homo sapien
ctcaggctccgggagagatagaaaa

SEQ ID NO: 3959954 - DNA, 25 bp, Homo sapien
tctgcagcccctgagcgtttgctgg

SEQ ID NO: 3959955 - DNA, 25 bp, Homo sapien
aactaggcgcgagcggtcgagccct

SEQ ID NO: 3959956 - DNA, 25 bp, Homo sapien
gccttgtttccggtgcagaagcctg

SEQ ID NO: 3959957 - DNA, 25 bp, Homo sapien
cggcagtctgcgcttgagacgttaa

SEQ ID NO: 3959958 - DNA, 25 bp, Homo sapien
cgttaagacttgagacaggccagag

SEQ ID NO: 3959959 - DNA, 25 bp, Homo sapien
gctgtgacgtcacaaccggtgcctt

SEQ ID NO: 3959960 - DNA, 25 bp, Homo sapien
gcaggtggttggctctagtcatcca

SEQ ID NO: 3959961 - DNA, 25 bp, Homo sapien
ggctctagtcatccacgacgggctg

SEQ ID NO: 3959962 - DNA, 25 bp, Homo sapien
aaggcaggtggttggctctagtcat

SEQ ID NO: 3959963 - DNA, 25 bp, Homo sapien
tggttggctctagtcatccacgacg

SEQ ID NO: 3959964 - DNA, 25 bp, Homo sapien
tctctccgaccggaaaatcaagacg

SEQ ID NO: 3959965 - DNA, 25 bp, Homo sapien
cttaaaggaagcaagctatctctcc

SEQ ID NO: 3959966 - DNA, 25 bp, Homo sapien
gcaagctatctctccgaccggaaaa

SEQ ID NO: 3959967 - DNA, 25 bp, Homo sapien
ggaagcaagctatctctccgaccgg

SEQ ID NO: 3959968 - DNA, 25 bp, Homo sapien
gcctccgttaatcaaagcattatgg

SEQ ID NO: 3959969 - DNA, 25 bp, Homo sapien
cacctatcaaacaatgaaggtggag

SEQ ID NO: 3959970 - DNA, 25 bp, Homo sapien
gatgcttaaccacactactagtcaa

SEQ ID NO: 3959971 - DNA, 25 bp, Homo sapien
ccctgccaactgacaaaaagcaaag

SEQ ID NO: 3959972 - DNA, 25 bp, Homo sapien
tcagtacatgtcttcacccggattg

SEQ ID NO: 3959973 - DNA, 25 bp, Homo sapien
tataatcgggtaggctccgtgggca

SEQ ID NO: 3959974 - DNA, 25 bp, Homo sapien
gctagcacctagtcggcattccgtg

SEQ ID NO: 3959975 - DNA, 25 bp, Homo sapien
ttctcttaagaatcatggcccggca

SEQ ID NO: 3959976 - DNA, 25 bp, Homo sapien
tcggagagcccagaacaatgataca

SEQ ID NO: 3959977 - DNA, 25 bp, Homo sapien
tgtcaaatctttgcgggccatcagg

SEQ ID NO: 3959978 - DNA, 25 bp, Homo sapien
tatggatgtcttgcaggctcccagg

SEQ ID NO: 3959979 - DNA, 25 bp, Homo sapien
cagtagccattctctggcgacagag

SEQ ID NO: 3959980 - DNA, 25 bp, Homo sapien
tgaatacctaggtaggggtccatgg

SEQ ID NO: 3959981 - DNA, 25 bp, Homo sapien
tgggcaacatccctacagggttctc

SEQ ID NO: 3959982 - DNA, 25 bp, Homo sapien
ggtccatgggcaacatccctacagg

SEQ ID NO: 3959983 - DNA, 25 bp, Homo sapien
taggtaggggtccatgggcaacatc

SEQ ID NO: 3959984 - DNA, 25 bp, Homo sapien
tgcctgagcgccaatcagctccgga

SEQ ID NO: 3959985 - DNA, 25 bp, Homo sapien
gcatgtgcctgagcgccaatcagct

SEQ ID NO: 3959986 - DNA, 25 bp, Homo sapien
atgtgcctgagcgccaatcagctcc

SEQ ID NO: 3959987 - DNA, 25 bp, Homo sapien
agcatgtgcctgagcgccaatcagc

SEQ ID NO: 3959988 - DNA, 25 bp, Homo sapien
tgaacatttccatttctgaacgcag

SEQ ID NO: 3959989 - DNA, 25 bp, Homo sapien
catttccatttctgaacgcagggtt

SEQ ID NO: 3959990 - DNA, 25 bp, Homo sapien
atttccatttctgaacgcagggttt

SEQ ID NO: 3959991 - DNA, 25 bp, Homo sapien
aacatttccatttctgaacgcaggg

SEQ ID NO: 3959992 - DNA, 25 bp, Homo sapien
tgttttatctcttgaggagtggtcc

SEQ ID NO: 3959993 - DNA, 25 bp, Homo sapien
tggtggaggagttggatcttttgtt

SEQ ID NO: 3959994 - DNA, 25 bp, Homo sapien
ggagtggtccacttttcagggacag

SEQ ID NO: 3959995 - DNA, 25 bp, Homo sapien
gaagtactttgtgctcttctccaca

SEQ ID NO: 3959996 - DNA, 25 bp, Homo sapien
agttccccaatcagcgcatcgagca

SEQ ID NO: 3959997 - DNA, 25 bp, Homo sapien
tcagcgcatcgagcagggcgatgtc

SEQ ID NO: 3959998 - DNA, 25 bp, Homo sapien
tgtcctgggatacgcgggtgtcata

SEQ ID NO: 3959999 - DNA, 25 bp, Homo sapien
gatacgcgggtgtcatatgccttcc

SEQ ID NO: 3960000 - DNA, 25 bp, Homo sapien
ccataggatcgctgctcctcccctg

SEQ ID NO: 3960001 - DNA, 25 bp, Homo sapien
tccccataggatcgctgctcctccc

SEQ ID NO: 3960002 - DNA, 25 bp, Homo sapien
tcctccccataggatcgctgctcct

SEQ ID NO: 3960003 - DNA, 25 bp, Homo sapien
ttctcctccccataggatcgctgct

SEQ ID NO: 3960004 - DNA, 25 bp, Homo sapien
ggacctgcttcaggtggcgcttaca

SEQ ID NO: 3960005 - DNA, 25 bp, Homo sapien
ggtgctcctgactcagactgcagat

SEQ ID NO: 3960006 - DNA, 25 bp, Homo sapien
cagggcgacctcctcaatggggcgc

SEQ ID NO: 3960007 - DNA, 25 bp, Homo sapien
tcaatggggcgcacccggtggcctt

SEQ ID NO: 3960008 - DNA, 25 bp, Homo sapien
ctttcatgggagtcctggcaccggg

SEQ ID NO: 3960009 - DNA, 25 bp, Homo sapien
ggcttcccgggctcttcctttcatg

SEQ ID NO: 3960010 - DNA, 25 bp, Homo sapien
ctcttcctttcatgggagtcctggc

SEQ ID NO: 3960011 - DNA, 25 bp, Homo sapien
gcaccgggggcagccaggtgagcgg

SEQ ID NO: 3960012 - DNA, 25 bp, Homo sapien
gtgcccagaaactgcctcggggaag

SEQ ID NO: 3960013 - DNA, 25 bp, Homo sapien
cctgggggtgcccagaaactgcctc

SEQ ID NO: 3960014 - DNA, 25 bp, Homo sapien
gggtgcccagaaactgcctcgggga

SEQ ID NO: 3960015 - DNA, 25 bp, Homo sapien
tgaggcctgggggtgcccagaaact

SEQ ID NO: 3960016 - DNA, 25 bp, Homo sapien
aggaatcacgcacacaggtaccgtc

SEQ ID NO: 3960017 - DNA, 25 bp, Homo sapien
caggtaccgtcaactgggtctcctt

SEQ ID NO: 3960018 - DNA, 25 bp, Homo sapien
gcaggaatcacgcacacaggtaccg

SEQ ID NO: 3960019 - DNA, 25 bp, Homo sapien
cacacaggtaccgtcaactgggtct

SEQ ID NO: 3960020 - DNA, 25 bp, Homo sapien
ggactcgcagccgtgtctggtggcc

SEQ ID NO: 3960021 - DNA, 25 bp, Homo sapien
ggggactcgcagccgtgtctggtgg

SEQ ID NO: 3960022 - DNA, 25 bp, Homo sapien
ctcgcagccgtgtctggtggccttc

SEQ ID NO: 3960023 - DNA, 25 bp, Homo sapien
gactcgcagccgtgtctggtggcct

SEQ ID NO: 3960024 - DNA, 25 bp, Homo sapien
ggttctgttgccgagtccagattcg

SEQ ID NO: 3960025 - DNA, 25 bp, Homo sapien
gagaatttctggatttgcgggcgcc

SEQ ID NO: 3960026 - DNA, 25 bp, Homo sapien
cgagtccagattcgcagctgtcttt

SEQ ID NO: 3960027 - DNA, 25 bp, Homo sapien
gccttctcccctgtagaaatggtga

SEQ ID NO: 3960028 - DNA, 25 bp, Homo sapien
ggccttctctctgcgtttgctcagg

SEQ ID NO: 3960029 - DNA, 25 bp, Homo sapien
ggtacacttcgaagggcctgcactc

SEQ ID NO: 3960030 - DNA, 25 bp, Homo sapien
tcccgagggcaggtacacttcgaag

SEQ ID NO: 3960031 - DNA, 25 bp, Homo sapien
tcaaggcttctaggtcgcatctttc

SEQ ID NO: 3960032 - DNA, 25 bp, Homo sapien
ggctcctgggcttgttctcccccag

SEQ ID NO: 3960033 - DNA, 25 bp, Homo sapien
ggagctggacgctgcggaatcatct

SEQ ID NO: 3960034 - DNA, 25 bp, Homo sapien
ccctcggggtggtctggagtcttca

SEQ ID NO: 3960035 - DNA, 25 bp, Homo sapien
tggacgctgcggaatcatctgtgcc

SEQ ID NO: 3960036 - DNA, 25 bp, Homo sapien
atagtaggtgaccagcagagtggcc

SEQ ID NO: 3960037 - DNA, 25 bp, Homo sapien
acttctcgaagtcatagggcaccag

SEQ ID NO: 3960038 - DNA, 25 bp, Homo sapien
gcagcttgaacttgaacttctcgaa

SEQ ID NO: 3960039 - DNA, 25 bp, Homo sapien
gggtgagctgcacggcgtactcttc

SEQ ID NO: 3960040 - DNA, 25 bp, Homo sapien
tggcttctggtaggaaaagaagcct

SEQ ID NO: 3960041 - DNA, 25 bp, Homo sapien
caggagaggctcgagccagctgtct

SEQ ID NO: 3960042 - DNA, 25 bp, Homo sapien
gaggctcgagccagctgtctggctt

SEQ ID NO: 3960043 - DNA, 25 bp, Homo sapien
gtgctgagcaggagaggctcgagcc

SEQ ID NO: 3960044 - DNA, 25 bp, Homo sapien
tcccctacgcagataacactaattg

SEQ ID NO: 3960045 - DNA, 25 bp, Homo sapien
gatcccagcccagatcaatgagatc

SEQ ID NO: 3960046 - DNA, 25 bp, Homo sapien
taactgatctttctgagggcacctc

SEQ ID NO: 3960047 - DNA, 25 bp, Homo sapien
cactaattgtaactgatctttctga

SEQ ID NO: 3960048 - DNA, 25 bp, Homo sapien
tgttgtcgctggtatcccgggagca

SEQ ID NO: 3960049 - DNA, 25 bp, Homo sapien
tggtctgattggcagccgcaacagc

SEQ ID NO: 3960050 - DNA, 25 bp, Homo sapien
cgtttgccgggactgagccgctgtt

SEQ ID NO: 3960051 - DNA, 25 bp, Homo sapien
ccgagtcgcggctctgttggtctga

SEQ ID NO: 3960052 - DNA, 25 bp, Homo sapien
cagccaacatcaggtggtatttctc

SEQ ID NO: 3960053 - DNA, 25 bp, Homo sapien
ccatatcccagccaacatcaggtgg

SEQ ID NO: 3960054 - DNA, 25 bp, Homo sapien
gagggcatcttcatgtgtgggcacc

SEQ ID NO: 3960055 - DNA, 25 bp, Homo sapien
agtggacaccccacgctccaaggac

SEQ ID NO: 3960056 - DNA, 25 bp, Homo sapien
gaacgcatacgggagagagacccta

SEQ ID NO: 3960057 - DNA, 25 bp, Homo sapien
tcatgagtgcggagacagcttctct

SEQ ID NO: 3960058 - DNA, 25 bp, Homo sapien
gaaagcttctctcggagttcccgtc

SEQ ID NO: 3960059 - DNA, 25 bp, Homo sapien
aatcggattcgccacctgagaacgc

SEQ ID NO: 3960060 - DNA, 25 bp, Homo sapien
atgagtcatcagagaactcacacag

SEQ ID NO: 3960061 - DNA, 25 bp, Homo sapien
tatgagtcatcagagaactcacaca

SEQ ID NO: 3960062 - DNA, 25 bp, Homo sapien
ttatgagtcatcagagaactcacac

SEQ ID NO: 3960063 - DNA, 25 bp, Homo sapien
tgactccagaggaacgagagcattc

SEQ ID NO: 3960064 - DNA, 25 bp, Homo sapien
tacgatggcctaacaggagtgccca

SEQ ID NO: 3960065 - DNA, 25 bp, Homo sapien
taaggtggaatttgcaggtcagccc

SEQ ID NO: 3960066 - DNA, 25 bp, Homo sapien
gcccattggcagattacacatgtaa

SEQ ID NO: 3960067 - DNA, 25 bp, Homo sapien
atacagccccggaggaaggtatcca

SEQ ID NO: 3960068 - DNA, 25 bp, Homo sapien
gaacaggctgatggatatagcaact

SEQ ID NO: 3960069 - DNA, 25 bp, Homo sapien
tctaagagtaggaaatcggatgcca

SEQ ID NO: 3960070 - DNA, 25 bp, Homo sapien
tatccagctgttcttcgggtgaaaa

SEQ ID NO: 3960071 - DNA, 25 bp, Homo sapien
ttaataagaccagctagaccttgcc

SEQ ID NO: 3960072 - DNA, 25 bp, Homo sapien
gaggcactgggaatgatctaggtta

SEQ ID NO: 3960073 - DNA, 25 bp, Homo sapien
gaccttgcctgagtggtacagtgaa

SEQ ID NO: 3960074 - DNA, 25 bp, Homo sapien
ttactcttcagtctagcttgcaagc

SEQ ID NO: 3960075 - DNA, 25 bp, Homo sapien
taactagaactagtcagcacagttt

SEQ ID NO: 3960076 - DNA, 25 bp, Homo sapien
tacaccgaagtgttgaggttatcat

SEQ ID NO: 3960077 - DNA, 25 bp, Homo sapien
caaactaatgcttttcgcaaaggca

SEQ ID NO: 3960078 - DNA, 25 bp, Homo sapien
gcatgttactttcacagtaagagga

SEQ ID NO: 3960079 - DNA, 25 bp, Homo sapien
tgctaaaacaagacaattcacagct

SEQ ID NO: 3960080 - DNA, 25 bp, Homo sapien
ccattatataaatgggcactgatat

SEQ ID NO: 3960081 - DNA, 25 bp, Homo sapien
caagacaattcacagctggcctaca

SEQ ID NO: 3960082 - DNA, 25 bp, Homo sapien
gacaattcacagctggcctacatca

SEQ ID NO: 3960083 - DNA, 25 bp, Homo sapien
gttgaaggcccactgaaggagtcct

SEQ ID NO: 3960084 - DNA, 25 bp, Homo sapien
ccttaatattatgaggcctaggttt

SEQ ID NO: 3960085 - DNA, 25 bp, Homo sapien
taatgattagaaccagaagttgaag

SEQ ID NO: 3960086 - DNA, 25 bp, Homo sapien
gaaggagtccttaatattatgaggc

SEQ ID NO: 3960087 - DNA, 25 bp, Homo sapien
tcaacaaagtcaagaaggtagtcca

SEQ ID NO: 3960088 - DNA, 25 bp, Homo sapien
ttttgtaaagaagattttcccatgc

SEQ ID NO: 3960089 - DNA, 25 bp, Homo sapien
tcatcatccaacttagtttccaact

SEQ ID NO: 3960090 - DNA, 25 bp, Homo sapien
tgaaactcaggtgtggcatcaacaa

SEQ ID NO: 3960091 - DNA, 25 bp, Homo sapien
tcaaatattacaagactctcttcaa

SEQ ID NO: 3960092 - DNA, 25 bp, Homo sapien
tgaatcaaggttgaagtgttatggg

SEQ ID NO: 3960093 - DNA, 25 bp, Homo sapien
ctatacagccgtttgcagctcaaga

SEQ ID NO: 3960094 - DNA, 25 bp, Homo sapien
gaacatacattttattcgaccatcc

SEQ ID NO: 3960095 - DNA, 25 bp, Homo sapien
gctcaagatcacaccttgattcatt

SEQ ID NO: 3960096 - DNA, 25 bp, Homo sapien
tatgagttccgtctgcatttgcaca

SEQ ID NO: 3960097 - DNA, 25 bp, Homo sapien
gacgtcctcgtcatgaaatcttaga

SEQ ID NO: 3960098 - DNA, 25 bp, Homo sapien
ggatgagccgggcaactgtccagaa

SEQ ID NO: 3960099 - DNA, 25 bp, Homo sapien
gaaaatgtcggacctcaggaacaaa

SEQ ID NO: 3960100 - DNA, 25 bp, Homo sapien
tcttaccggaacaccggctgagcgt

SEQ ID NO: 3960101 - DNA, 25 bp, Homo sapien
gctagctttgaaatctgttcgccca

SEQ ID NO: 3960102 - DNA, 25 bp, Homo sapien
aaagaggtctgtttcatccccactg

SEQ ID NO: 3960103 - DNA, 25 bp, Homo sapien
ggttcccaattgcatgccgatttcg

SEQ ID NO: 3960104 - DNA, 25 bp, Homo sapien
cagatacacaacctcatgggaagaa

SEQ ID NO: 3960105 - DNA, 25 bp, Homo sapien
catctacctggataagggctccgag

SEQ ID NO: 3960106 - DNA, 25 bp, Homo sapien
ttttgacagatacaacagcctcagt

SEQ ID NO: 3960107 - DNA, 25 bp, Homo sapien
aatatagtattgtcaagcaccgtgc

SEQ ID NO: 3960108 - DNA, 25 bp, Homo sapien
gaaataagggaaatggctggtatct

SEQ ID NO: 3960109 - DNA, 25 bp, Homo sapien
aaataagggaaatggctggtatctc

SEQ ID NO: 3960110 - DNA, 25 bp, Homo sapien
tacataccatcccatccaaaagcaa

SEQ ID NO: 3960111 - DNA, 25 bp, Homo sapien
gcaaaaatagcataatggcctggta

SEQ ID NO: 3960112 - DNA, 25 bp, Homo sapien
gatcaagatctatgcctaagaggag

SEQ ID NO: 3960113 - DNA, 25 bp, Homo sapien
cacaaattcaagtgacttaggcaga

SEQ ID NO: 3960114 - DNA, 25 bp, Homo sapien
aatggtgctccaggatttacttttt

SEQ ID NO: 3960115 - DNA, 25 bp, Homo sapien
gcagctcagtccaaaacgctcaaat

SEQ ID NO: 3960116 - DNA, 25 bp, Homo sapien
agtccaaaacgctcaaatggtgctc

SEQ ID NO: 3960117 - DNA, 25 bp, Homo sapien
tagatgaactgccatagaaagcagc

SEQ ID NO: 3960118 - DNA, 25 bp, Homo sapien
cgcagaggataccacaacaggagag

SEQ ID NO: 3960119 - DNA, 25 bp, Homo sapien
tcttaccaggtgactatgttaggcg

SEQ ID NO: 3960120 - DNA, 25 bp, Homo sapien
agctatttccgattagcggccgcca

SEQ ID NO: 3960121 - DNA, 25 bp, Homo sapien
tgtttctgacctagcgagtggcccg

SEQ ID NO: 3960122 - DNA, 25 bp, Homo sapien
cgacagccacgcagaacagacgcgg

SEQ ID NO: 3960123 - DNA, 25 bp, Homo sapien
caaggccctctaggcttcagcgggt

SEQ ID NO: 3960124 - DNA, 25 bp, Homo sapien
acagccacgcggtgagccggtacaa

SEQ ID NO: 3960125 - DNA, 25 bp, Homo sapien
gatactcggtggcattaacccttcc

SEQ ID NO: 3960126 - DNA, 25 bp, Homo sapien
gccgaggtaaccgagaagcggcttc

SEQ ID NO: 3960127 - DNA, 25 bp, Homo sapien
accgtcgggcacgagaaaccattct

SEQ ID NO: 3960128 - DNA, 25 bp, Homo sapien
tttgagcctcagaaagcgaggagcg

SEQ ID NO: 3960129 - DNA, 25 bp, Homo sapien
ccattttccgtaggcggtggccgcg

SEQ ID NO: 3960130 - DNA, 25 bp, Homo sapien
gcatttccgtgtccggccgatgtca

SEQ ID NO: 3960131 - DNA, 25 bp, Homo sapien
tctgctggctcacttcaggaaaagt

SEQ ID NO: 3960132 - DNA, 25 bp, Homo sapien
cagggctagcagcttctactgatgc

SEQ ID NO: 3960133 - DNA, 25 bp, Homo sapien
atgtcatgcggtcggttgagcctca

SEQ ID NO: 3960134 - DNA, 25 bp, Homo sapien
aatggactgtctcgatcctaagagc

SEQ ID NO: 3960135 - DNA, 25 bp, Homo sapien
gctccggtcagagtaaaaaatctcc

SEQ ID NO: 3960136 - DNA, 25 bp, Homo sapien
gaaagtggctgcgtacttggaccct

SEQ ID NO: 3960137 - DNA, 25 bp, Homo sapien
taagagctcttgctggcacttccgg

SEQ ID NO: 3960138 - DNA, 25 bp, Homo sapien
agaagcaccatccacagagcattga

SEQ ID NO: 3960139 - DNA, 25 bp, Homo sapien
taatgcaggaaaactgtaagactgt

SEQ ID NO: 3960140 - DNA, 25 bp, Homo sapien
caggagctggttgattctcaactag

SEQ ID NO: 3960141 - DNA, 25 bp, Homo sapien
catacgcagttaggctgcttctgca

SEQ ID NO: 3960142 - DNA, 25 bp, Homo sapien
tactggattacactcagaaggccct

SEQ ID NO: 3960143 - DNA, 25 bp, Homo sapien
tttcagaatgaattcccggacagac

SEQ ID NO: 3960144 - DNA, 25 bp, Homo sapien
ttcagaatgaattcccggacagact

SEQ ID NO: 3960145 - DNA, 25 bp, Homo sapien
atgtttcagaatgaattcccggaca

SEQ ID NO: 3960146 - DNA, 25 bp, Homo sapien
tcagaatgaattcccggacagactt

SEQ ID NO: 3960147 - DNA, 25 bp, Homo sapien
taagatgaagtcttgcaatggctgt

SEQ ID NO: 3960148 - DNA, 25 bp, Homo sapien
ttaagatgaagtcttgcaatggctg

SEQ ID NO: 3960149 - DNA, 25 bp, Homo sapien
cttaagatgaagtcttgcaatggct

SEQ ID NO: 3960150 - DNA, 25 bp, Homo sapien
tagactcacgccaacaatccttttg

SEQ ID NO: 3960151 - DNA, 25 bp, Homo sapien
gtagactcacgccaacaatcctttt

SEQ ID NO: 3960152 - DNA, 25 bp, Homo sapien
ctgcatacaacaaaggccaaggaat

SEQ ID NO: 3960153 - DNA, 25 bp, Homo sapien
gcaattccaaggcacgaggtttcat

SEQ ID NO: 3960154 - DNA, 25 bp, Homo sapien
tggcaattccaaggcacgaggtttc

SEQ ID NO: 3960155 - DNA, 25 bp, Homo sapien
ttatctggcaattccaaggcacgag

SEQ ID NO: 3960156 - DNA, 25 bp, Homo sapien
atgtaggaatgattccagtccctta

SEQ ID NO: 3960157 - DNA, 25 bp, Homo sapien
ttctgccaccaggaattatgtagga

SEQ ID NO: 3960158 - DNA, 25 bp, Homo sapien
ctgccaccaggaattatgtaggaat

SEQ ID NO: 3960159 - DNA, 25 bp, Homo sapien
taggaatgattccagtcccttaaac

SEQ ID NO: 3960160 - DNA, 25 bp, Homo sapien
tgtctgagtggctttgaggacttga

SEQ ID NO: 3960161 - DNA, 25 bp, Homo sapien
tctgagtggctttgaggacttgata

SEQ ID NO: 3960162 - DNA, 25 bp, Homo sapien
ctttgtctgagtggctttgaggact

SEQ ID NO: 3960163 - DNA, 25 bp, Homo sapien
tgctttgtctgagtggctttgagga

SEQ ID NO: 3960164 - DNA, 25 bp, Homo sapien
gatagaaattcagtccttggtaaca

SEQ ID NO: 3960165 - DNA, 25 bp, Homo sapien
tgagctgtaggatcaagcatcacct

SEQ ID NO: 3960166 - DNA, 25 bp, Homo sapien
tgttcattgtaaccgaaataattct

SEQ ID NO: 3960167 - DNA, 25 bp, Homo sapien
tcagctacgtgaatctatacattcc

SEQ ID NO: 3960168 - DNA, 25 bp, Homo sapien
ttttcatatgcctgtaggccatatt

SEQ ID NO: 3960169 - DNA, 25 bp, Homo sapien
catatgcctgtaggccatatttatg

SEQ ID NO: 3960170 - DNA, 25 bp, Homo sapien
gagtgccttatattattggttttta

SEQ ID NO: 3960171 - DNA, 25 bp, Homo sapien
cctgtaggccatatttatgtcttca

SEQ ID NO: 3960172 - DNA, 25 bp, Homo sapien
caacgatgcctttcatagcgaaaga

SEQ ID NO: 3960173 - DNA, 25 bp, Homo sapien
gtttgccaactgtcccaacgatgcc

SEQ ID NO: 3960174 - DNA, 25 bp, Homo sapien
tcattatctaatctgcagaccccgt

SEQ ID NO: 3960175 - DNA, 25 bp, Homo sapien
cagaccccgttcaatgtttgccaac

SEQ ID NO: 3960176 - DNA, 25 bp, Homo sapien
ttacagacaggaccggagagttcag

SEQ ID NO: 3960177 - DNA, 25 bp, Homo sapien
cacatttccgatacctaggctcagg

SEQ ID NO: 3960178 - DNA, 25 bp, Homo sapien
ctttgatggtgcactccttgaggac

SEQ ID NO: 3960179 - DNA, 25 bp, Homo sapien
gggtagtggcgtcatcaatcctcat

SEQ ID NO: 3960180 - DNA, 25 bp, Homo sapien
gacatacagggtttatcctatatct

SEQ ID NO: 3960181 - DNA, 25 bp, Homo sapien
tacagggtttatcctatatcttaac

SEQ ID NO: 3960182 - DNA, 25 bp, Homo sapien
ttaagacatacagggtttatcctat

SEQ ID NO: 3960183 - DNA, 25 bp, Homo sapien
ggtttatcctatatcttaactttga

SEQ ID NO: 3960184 - DNA, 25 bp, Homo sapien
ggtgtatgtatcaggttaatcagag

SEQ ID NO: 3960185 - DNA, 25 bp, Homo sapien
taatcagagtaacgtcgacgcacac

SEQ ID NO: 3960186 - DNA, 25 bp, Homo sapien
tgctcagaatattgtgggagatcat

SEQ ID NO: 3960187 - DNA, 25 bp, Homo sapien
caccaacaggccgaggaagtgctgt

SEQ ID NO: 3960188 - DNA, 25 bp, Homo sapien
gcccgatagcttagttagccaacct

SEQ ID NO: 3960189 - DNA, 25 bp, Homo sapien
gatagcttagttagccaaccttact

SEQ ID NO: 3960190 - DNA, 25 bp, Homo sapien
gagcccgatagcttagttagccaac

SEQ ID NO: 3960191 - DNA, 25 bp, Homo sapien
tatgagcccgatagcttagttagcc

SEQ ID NO: 3960192 - DNA, 25 bp, Homo sapien
gtaattcttgtgtcggacatatttc

SEQ ID NO: 3960193 - DNA, 25 bp, Homo sapien
atcaaagtaattcttgtgtcggaca

SEQ ID NO: 3960194 - DNA, 25 bp, Homo sapien
ctagaaatgagaggatttaaacctt

SEQ ID NO: 3960195 - DNA, 25 bp, Homo sapien
atgagaggatttaaacctttattgt

SEQ ID NO: 3960196 - DNA, 25 bp, Homo sapien
ggtaattgccggggtctgccatctt

SEQ ID NO: 3960197 - DNA, 25 bp, Homo sapien
taggtaattgccggggtctgccatc

SEQ ID NO: 3960198 - DNA, 25 bp, Homo sapien
agtcttaggtaattgccggggtctg

SEQ ID NO: 3960199 - DNA, 25 bp, Homo sapien
tcttaggtaattgccggggtctgcc

SEQ ID NO: 3960200 - DNA, 25 bp, Homo sapien
catcttatttgtttatactgcctct

SEQ ID NO: 3960201 - DNA, 25 bp, Homo sapien
aaagctctatagagtcttctcatct

SEQ ID NO: 3960202 - DNA, 25 bp, Homo sapien
atgcaaagatagtaggctagggcct

SEQ ID NO: 3960203 - DNA, 25 bp, Homo sapien
taatgaattaaagctctatagagtc

SEQ ID NO: 3960204 - DNA, 25 bp, Homo sapien
tattacggtgggtgcctagaggtca

SEQ ID NO: 3960205 - DNA, 25 bp, Homo sapien
tcagtgctaggaacaggaagaccct

SEQ ID NO: 3960206 - DNA, 25 bp, Homo sapien
cagggactggctagatctctccaca

SEQ ID NO: 3960207 - DNA, 25 bp, Homo sapien
ccctgtgtgaggactatgttagccc

SEQ ID NO: 3960208 - DNA, 25 bp, Homo sapien
ggttggagcgctcactaaagccctt

SEQ ID NO: 3960209 - DNA, 25 bp, Homo sapien
gcctttttgtagctcagagtgccaa

SEQ ID NO: 3960210 - DNA, 25 bp, Homo sapien
tcacagtgagaacacctgtaaggct

SEQ ID NO: 3960211 - DNA, 25 bp, Homo sapien
tggatgcgccggtgagcactgaact

SEQ ID NO: 3960212 - DNA, 25 bp, Homo sapien
agaaatacaatggactatagagaag

SEQ ID NO: 3960213 - DNA, 25 bp, Homo sapien
cagaaatacaatggactatagagaa

SEQ ID NO: 3960214 - DNA, 25 bp, Homo sapien
acagaaatacaatggactatagaga

SEQ ID NO: 3960215 - DNA, 25 bp, Homo sapien
aaagcaaggtgctaagtacccagcc

SEQ ID NO: 3960216 - DNA, 25 bp, Homo sapien
tggaggcctaaccagcagtctgaca

SEQ ID NO: 3960217 - DNA, 25 bp, Homo sapien
ttctgacacaatgacaaactgaggc

SEQ ID NO: 3960218 - DNA, 25 bp, Homo sapien
cataggctcaggctgtgaaaggcaa

SEQ ID NO: 3960219 - DNA, 25 bp, Homo sapien
catcctttgaccatcagagccaagg

SEQ ID NO: 3960220 - DNA, 25 bp, Homo sapien
tgaccatcagagccaagggagtctt

SEQ ID NO: 3960221 - DNA, 25 bp, Homo sapien
atcctttgaccatcagagccaaggg

SEQ ID NO: 3960222 - DNA, 25 bp, Homo sapien
ttgaccatcagagccaagggagtct

SEQ ID NO: 3960223 - DNA, 25 bp, Homo sapien
agtgccatcttctacctccgtgggt

SEQ ID NO: 3960224 - DNA, 25 bp, Homo sapien
actttgcggtaactcaactgtaggc

SEQ ID NO: 3960225 - DNA, 25 bp, Homo sapien
ctactaagaatagccaggagcgtct

SEQ ID NO: 3960226 - DNA, 25 bp, Homo sapien
ttcttggccaggaacagcatcgctt

SEQ ID NO: 3960227 - DNA, 25 bp, Homo sapien
catgagcgcacattcagcatgaaca

SEQ ID NO: 3960228 - DNA, 25 bp, Homo sapien
ctgtgtgcatgagcgcacattcagc

SEQ ID NO: 3960229 - DNA, 25 bp, Homo sapien
tctggactacttgttctgactctgt

SEQ ID NO: 3960230 - DNA, 25 bp, Homo sapien
ggctccggctctggactacttgttc

SEQ ID NO: 3960231 - DNA, 25 bp, Homo sapien
tgtagagggccctttgtgcagggcc

SEQ ID NO: 3960232 - DNA, 25 bp, Homo sapien
gggatacagctctgttgtcacgcat

SEQ ID NO: 3960233 - DNA, 25 bp, Homo sapien
cctgtagagggccctttgtgcaggg

SEQ ID NO: 3960234 - DNA, 25 bp, Homo sapien
cctctgggtggcacccctgtagagg

SEQ ID NO: 3960235 - DNA, 25 bp, Homo sapien
ctgtaacaacactggagctgctgct

SEQ ID NO: 3960236 - DNA, 25 bp, Homo sapien
gctgctaccgataaaatagcaccac

SEQ ID NO: 3960237 - DNA, 25 bp, Homo sapien
taccgataaaatagcaccactctag

SEQ ID NO: 3960238 - DNA, 25 bp, Homo sapien
tggagctgctgctaccgataaaata

SEQ ID NO: 3960239 - DNA, 25 bp, Homo sapien
cctgtctcctggtcgtggagacctg

SEQ ID NO: 3960240 - DNA, 25 bp, Homo sapien
cacctgtctcctggtcgtggagacc

SEQ ID NO: 3960241 - DNA, 25 bp, Homo sapien
gtctcctggtcgtggagacctgtgt

SEQ ID NO: 3960242 - DNA, 25 bp, Homo sapien
gcacctgtctcctggtcgtggagac

SEQ ID NO: 3960243 - DNA, 25 bp, Homo sapien
ttccattgggatctcagtgattctc

SEQ ID NO: 3960244 - DNA, 25 bp, Homo sapien
ggttcctctggctgaacctcctgtt

SEQ ID NO: 3960245 - DNA, 25 bp, Homo sapien
gctctgtgatcccttaaaagtcggt

SEQ ID NO: 3960246 - DNA, 25 bp, Homo sapien
cccctggtctttggtgtgagctctg

SEQ ID NO: 3960247 - DNA, 25 bp, Homo sapien
tcaaccaagcacctctccagtaact

SEQ ID NO: 3960248 - DNA, 25 bp, Homo sapien
tctccagtaactggattccccgaca

SEQ ID NO: 3960249 - DNA, 25 bp, Homo sapien
cagtaactggattccccgacaactt

SEQ ID NO: 3960250 - DNA, 25 bp, Homo sapien
gattccccgacaacttcataaccaa

SEQ ID NO: 3960251 - DNA, 25 bp, Homo sapien
caggagctctctgtacatcctcaac

SEQ ID NO: 3960252 - DNA, 25 bp, Homo sapien
gttgtccaggagctctctgtacatc

SEQ ID NO: 3960253 - DNA, 25 bp, Homo sapien
tccaggagctctctgtacatcctca

SEQ ID NO: 3960254 - DNA, 25 bp, Homo sapien
ctgttgtccaggagctctctgtaca

SEQ ID NO: 3960255 - DNA, 25 bp, Homo sapien
aagcttcatgtgggccagttacctc

SEQ ID NO: 3960256 - DNA, 25 bp, Homo sapien
ttcatgtgggccagttacctcctgg

SEQ ID NO: 3960257 - DNA, 25 bp, Homo sapien
aaagcttcatgtgggccagttacct

SEQ ID NO: 3960258 - DNA, 25 bp, Homo sapien
gcttcatgtgggccagttacctcct

SEQ ID NO: 3960259 - DNA, 25 bp, Homo sapien
gaggatgggtgtgcctcggtactct

SEQ ID NO: 3960260 - DNA, 25 bp, Homo sapien
ccttgtttgaggatgggtgtgcctc

SEQ ID NO: 3960261 - DNA, 25 bp, Homo sapien
gtgggatccttgtttgaggatgggt

SEQ ID NO: 3960262 - DNA, 25 bp, Homo sapien
agtcagggctgttaccctggagggc

SEQ ID NO: 3960263 - DNA, 25 bp, Homo sapien
aacgaactggcttactctggttgcc

SEQ ID NO: 3960264 - DNA, 25 bp, Homo sapien
tgttctcctgcaaggaatgtctttc

SEQ ID NO: 3960265 - DNA, 25 bp, Homo sapien
gtctttctgtaatccgtgggacatg

SEQ ID NO: 3960266 - DNA, 25 bp, Homo sapien
gtgtcagacatgtgtagagactcac

SEQ ID NO: 3960267 - DNA, 25 bp, Homo sapien
gacaatataaacctatcaaacattc

SEQ ID NO: 3960268 - DNA, 25 bp, Homo sapien
agacaatataaacctatcaaacatt

SEQ ID NO: 3960269 - DNA, 25 bp, Homo sapien
ggacaccagcactcgcgactccaca

SEQ ID NO: 3960270 - DNA, 25 bp, Homo sapien
cggacaccagcactcgcgactccac

SEQ ID NO: 3960271 - DNA, 25 bp, Homo sapien
caccagcactcgcgactccacaaac

SEQ ID NO: 3960272 - DNA, 25 bp, Homo sapien
gacaccagcactcgcgactccacaa

SEQ ID NO: 3960273 - DNA, 25 bp, Homo sapien
tcagcctccgggccggaagtcagcg

SEQ ID NO: 3960274 - DNA, 25 bp, Homo sapien
cggcgcgattcgctccgcccattac

SEQ ID NO: 3960275 - DNA, 25 bp, Homo sapien
agtcagcggcgcgattcgctccgcc

SEQ ID NO: 3960276 - DNA, 25 bp, Homo sapien
gaagtcagcggcgcgattcgctccg

SEQ ID NO: 3960277 - DNA, 25 bp, Homo sapien
gatgttccaggtaggcttttccgga

SEQ ID NO: 3960278 - DNA, 25 bp, Homo sapien
aatcgccaccggaggatagaacgct

SEQ ID NO: 3960279 - DNA, 25 bp, Homo sapien
gcaggaatagacaggtaaggaccct

SEQ ID NO: 3960280 - DNA, 25 bp, Homo sapien
tcacccagggacaacgggcaggaat

SEQ ID NO: 3960281 - DNA, 25 bp, Homo sapien
cactggcagggaagtaatgactagg

SEQ ID NO: 3960282 - DNA, 25 bp, Homo sapien
gaacagctggagttgacactggcag

SEQ ID NO: 3960283 - DNA, 25 bp, Homo sapien
ctcccatggagacaatgaaatttta

SEQ ID NO: 3960284 - DNA, 25 bp, Homo sapien
catattgctataaggagggtaaaac

SEQ ID NO: 3960285 - DNA, 25 bp, Homo sapien
tgacccgtgcagttggtggccaagc

SEQ ID NO: 3960286 - DNA, 25 bp, Homo sapien
tcgttgacacttccgctgacccgtg

SEQ ID NO: 3960287 - DNA, 25 bp, Homo sapien
cagtgtgccgctgtagcgcaagtca

SEQ ID NO: 3960288 - DNA, 25 bp, Homo sapien
gcaagtcatctcgttgacacttccg

SEQ ID NO: 3960289 - DNA, 25 bp, Homo sapien
cagacttaatgcaaagaggactgtc

SEQ ID NO: 3960290 - DNA, 25 bp, Homo sapien
taacttcagagcttgcaaactagag

SEQ ID NO: 3960291 - DNA, 25 bp, Homo sapien
tgaggaggtgtcaatagactaccac

SEQ ID NO: 3960292 - DNA, 25 bp, Homo sapien
tgtactacttagatgggccttggaa

SEQ ID NO: 3960293 - DNA, 25 bp, Homo sapien
ctgtaaacagaagggtgaaatgcca

SEQ ID NO: 3960294 - DNA, 25 bp, Homo sapien
cataaaaagcctgaagctcaccagc

SEQ ID NO: 3960295 - DNA, 25 bp, Homo sapien
cctaacatggaaggctagtatctga

SEQ ID NO: 3960296 - DNA, 25 bp, Homo sapien
tttcacagtaactgacacttccggg

SEQ ID NO: 3960297 - DNA, 25 bp, Homo sapien
gaagactcgtgtggaaaggcaaact

SEQ ID NO: 3960298 - DNA, 25 bp, Homo sapien
ggcaaacttccatattaaggtgcag

SEQ ID NO: 3960299 - DNA, 25 bp, Homo sapien
tttgactgaactcttagggcccctg

SEQ ID NO: 3960300 - DNA, 25 bp, Homo sapien
caggatgtatggcacaaattctcac

SEQ ID NO: 3960301 - DNA, 25 bp, Homo sapien
ggtgtcctgtctcctaagagtggag

SEQ ID NO: 3960302 - DNA, 25 bp, Homo sapien
ggtatctcagagttgcctaataagt

SEQ ID NO: 3960303 - DNA, 25 bp, Homo sapien
cctaataagtaatctaactggagac

SEQ ID NO: 3960304 - DNA, 25 bp, Homo sapien
tatttaacaaaggtcatggtatctc

SEQ ID NO: 3960305 - DNA, 25 bp, Homo sapien
cttgacatacagagcagcacattgt

SEQ ID NO: 3960306 - DNA, 25 bp, Homo sapien
gagcagcacattgtctcaactgtgg

SEQ ID NO: 3960307 - DNA, 25 bp, Homo sapien
ttgacatacagagcagcacattgtc

SEQ ID NO: 3960308 - DNA, 25 bp, Homo sapien
acagagcagcacattgtctcaactg

SEQ ID NO: 3960309 - DNA, 25 bp, Homo sapien
gaaactctctctgggttagggatgt

SEQ ID NO: 3960310 - DNA, 25 bp, Homo sapien
ctcaatctgctgttctgtaggacca

SEQ ID NO: 3960311 - DNA, 25 bp, Homo sapien
tgctgataggcatacaatcgacttt

SEQ ID NO: 3960312 - DNA, 25 bp, Homo sapien
tcacctgaacagtatcttcctgcct

SEQ ID NO: 3960313 - DNA, 25 bp, Homo sapien
gaaaagggctgcagttagacttcca

SEQ ID NO: 3960314 - DNA, 25 bp, Homo sapien
gagaactccggatactaatggccat

SEQ ID NO: 3960315 - DNA, 25 bp, Homo sapien
gcttcagtagcaatttggaggcaaa

SEQ ID NO: 3960316 - DNA, 25 bp, Homo sapien
tataaactagtctacccatttggga

SEQ ID NO: 3960317 - DNA, 25 bp, Homo sapien
tacagatactgaaaagcccaatcac

SEQ ID NO: 3960318 - DNA, 25 bp, Homo sapien
tttagtgacacggattttgcatccc

SEQ ID NO: 3960319 - DNA, 25 bp, Homo sapien
tgcctgggacatatacagtaactgc

SEQ ID NO: 3960320 - DNA, 25 bp, Homo sapien
gatactgcctaaatcacggttgtgc

SEQ ID NO: 3960321 - DNA, 25 bp, Homo sapien
cgtggtgttttttatgtgagttcgc

SEQ ID NO: 3960322 - DNA, 25 bp, Homo sapien
tatgtgagttcgcttatgagtaatg

SEQ ID NO: 3960323 - DNA, 25 bp, Homo sapien
ttcgcttatgagtaatgagatgcaa

SEQ ID NO: 3960324 - DNA, 25 bp, Homo sapien
tacgtggtgttttttatgtgagttc

SEQ ID NO: 3960325 - DNA, 25 bp, Homo sapien
aaactttcctcgcatgttttgcact

SEQ ID NO: 3960326 - DNA, 25 bp, Homo sapien
taaaaggttccgctagcatgtggct

SEQ ID NO: 3960327 - DNA, 25 bp, Homo sapien
tccgctagcatgtggctcttctggt

SEQ ID NO: 3960328 - DNA, 25 bp, Homo sapien
tacatttaaaaggttccgctagcat

SEQ ID NO: 3960329 - DNA, 25 bp, Homo sapien
acagtcaggacactgtaagggcttg

SEQ ID NO: 3960330 - DNA, 25 bp, Homo sapien
aaggaaaggtcatgtcacagtcagg

SEQ ID NO: 3960331 - DNA, 25 bp, Homo sapien
cactgtaagggcttgaattttgaga

SEQ ID NO: 3960332 - DNA, 25 bp, Homo sapien
caaggaaaggtcatgtcacagtcag

SEQ ID NO: 3960333 - DNA, 25 bp, Homo sapien
gatacgaatgtttcctcaggcaaag

SEQ ID NO: 3960334 - DNA, 25 bp, Homo sapien
tcgtaggtgttttcagcactgtggc

SEQ ID NO: 3960335 - DNA, 25 bp, Homo sapien
gaaagggcaggatataaggactgcc

SEQ ID NO: 3960336 - DNA, 25 bp, Homo sapien
tcctcgtcgtggctcttctcggaaa

SEQ ID NO: 3960337 - DNA, 25 bp, Homo sapien
gctacatgtatagggcttctccttt

SEQ ID NO: 3960338 - DNA, 25 bp, Homo sapien
cacatatgctacatgtatagggctt

SEQ ID NO: 3960339 - DNA, 25 bp, Homo sapien
atatgctacatgtatagggcttctc

SEQ ID NO: 3960340 - DNA, 25 bp, Homo sapien
tatgctacatgtatagggcttctcc

SEQ ID NO: 3960341 - DNA, 25 bp, Homo sapien
gctattcatgtgtcgggatagatga

SEQ ID NO: 3960342 - DNA, 25 bp, Homo sapien
cactgcacttggcacacttataagg

SEQ ID NO: 3960343 - DNA, 25 bp, Homo sapien
agtgctggcgaaagctggcactgca

SEQ ID NO: 3960344 - DNA, 25 bp, Homo sapien
atagatgagagtgctggcgaaagct

SEQ ID NO: 3960345 - DNA, 25 bp, Homo sapien
tggtcacactcaggacatttgtaca

SEQ ID NO: 3960346 - DNA, 25 bp, Homo sapien
tgatcgctgaagttttggtcacact

SEQ ID NO: 3960347 - DNA, 25 bp, Homo sapien
caaaactaggtatgaatgatcgctg

SEQ ID NO: 3960348 - DNA, 25 bp, Homo sapien
cctcaggttggctctatgattgaag

SEQ ID NO: 3960349 - DNA, 25 bp, Homo sapien
tcgtcaagttccatagactctaggc

SEQ ID NO: 3960350 - DNA, 25 bp, Homo sapien
taatattttcgcttcagggtttcca

SEQ ID NO: 3960351 - DNA, 25 bp, Homo sapien
tttctaaggcaagctcgtcaagttc

SEQ ID NO: 3960352 - DNA, 25 bp, Homo sapien
gactctaggcttaactgctgattaa

SEQ ID NO: 3960353 - DNA, 25 bp, Homo sapien
ccagatcctcaaagagtattggtcc

SEQ ID NO: 3960354 - DNA, 25 bp, Homo sapien
atcaaagccgcatcctccaaagact

SEQ ID NO: 3960355 - DNA, 25 bp, Homo sapien
agagtcacgcactcctcttgagaaa

SEQ ID NO: 3960356 - DNA, 25 bp, Homo sapien
ctccaaagactcttttgtaccatct

SEQ ID NO: 3960357 - DNA, 25 bp, Homo sapien
tcttgagcgcagaagtagggcaaat

SEQ ID NO: 3960358 - DNA, 25 bp, Homo sapien
tcagatgcacgggataaaaggctcg

SEQ ID NO: 3960359 - DNA, 25 bp, Homo sapien
aaagagctagaaacatcagatgcac

SEQ ID NO: 3960360 - DNA, 25 bp, Homo sapien
ctcggtgtaaaaggttcttgagcgc

SEQ ID NO: 3960361 - DNA, 25 bp, Homo sapien
ggcctcgggcgtcgggggcatggac

SEQ ID NO: 3960362 - DNA, 25 bp, Homo sapien
ctgggcctcgggcgtcgggggcatg

SEQ ID NO: 3960363 - DNA, 25 bp, Homo sapien
cgggcgtcgggggcatggacgccat

SEQ ID NO: 3960364 - DNA, 25 bp, Homo sapien
cctcgggcgtcgggggcatggacgc

SEQ ID NO: 3960365 - DNA, 25 bp, Homo sapien
tcaagacgccacagggacttcgtga

SEQ ID NO: 3960366 - DNA, 25 bp, Homo sapien
tgccttcttcaagacgccacaggga

SEQ ID NO: 3960367 - DNA, 25 bp, Homo sapien
ccttcttcaagacgccacagggact

SEQ ID NO: 3960368 - DNA, 25 bp, Homo sapien
gcgggtggggaatgccttcttcaag

SEQ ID NO: 3960369 - DNA, 25 bp, Homo sapien
ctagcctccctcgattccctccgaa

SEQ ID NO: 3960370 - DNA, 25 bp, Homo sapien
aaaacctacgccgactgctcctcct

SEQ ID NO: 3960371 - DNA, 25 bp, Homo sapien
ttcttaaagggaccaattccgctgc

SEQ ID NO: 3960372 - DNA, 25 bp, Homo sapien
aagggaccaattccgctgccaagtt

SEQ ID NO: 3960373 - DNA, 25 bp, Homo sapien
gctccgcggttaataacaggcctcg

SEQ ID NO: 3960374 - DNA, 25 bp, Homo sapien
tcctttacgcaggagctgcgggaaa

SEQ ID NO: 3960375 - DNA, 25 bp, Homo sapien
acaggagctgcagaaagcgacgccc

SEQ ID NO: 3960376 - DNA, 25 bp, Homo sapien
gaccgagacgcgacgaagaacgcca

SEQ ID NO: 3960377 - DNA, 25 bp, Homo sapien
gttgatactgatcggaaactgacac

SEQ ID NO: 3960378 - DNA, 25 bp, Homo sapien
tactgatcggaaactgacacagagc

SEQ ID NO: 3960379 - DNA, 25 bp, Homo sapien
ttaccgtatccttcatgggaagttg

SEQ ID NO: 3960380 - DNA, 25 bp, Homo sapien
ccttcatgggaagttgatactgatc

SEQ ID NO: 3960381 - DNA, 25 bp, Homo sapien
gtcagtgtccgaccccgcgatgagt

SEQ ID NO: 3960382 - DNA, 25 bp, Homo sapien
tccgtcgggtcagcgatttccgcct

SEQ ID NO: 3960383 - DNA, 25 bp, Homo sapien
ccgcgatgagtggtcgggacaattt

SEQ ID NO: 3960384 - DNA, 25 bp, Homo sapien
acaatttgcaactagagggtggtcc

SEQ ID NO: 3960385 - DNA, 25 bp, Homo sapien
gcttcacccagcagatccgtacgtt

SEQ ID NO: 3960386 - DNA, 25 bp, Homo sapien
ttaacatgcagccaagtgcacagct

SEQ ID NO: 3960387 - DNA, 25 bp, Homo sapien
gaaacaagacgtagcacatcgccat

SEQ ID NO: 3960388 - DNA, 25 bp, Homo sapien
gatccgtacgttttgacaactgtga

SEQ ID NO: 3960389 - DNA, 25 bp, Homo sapien
gagaactgcgatgcagacccaggag

SEQ ID NO: 3960390 - DNA, 25 bp, Homo sapien
caagcacggcttttgtttgggtcaa

SEQ ID NO: 3960391 - DNA, 25 bp, Homo sapien
gaaatatgaggtctacaggcagctc

SEQ ID NO: 3960392 - DNA, 25 bp, Homo sapien
aaagcagtcttggtaccgtgtccgg

SEQ ID NO: 3960393 - DNA, 25 bp, Homo sapien
ctacagaggtgccattgtgggaatg

SEQ ID NO: 3960394 - DNA, 25 bp, Homo sapien
cagaggtgccattgtgggaatgata

SEQ ID NO: 3960395 - DNA, 25 bp, Homo sapien
aggtgccattgtgggaatgatagta

SEQ ID NO: 3960396 - DNA, 25 bp, Homo sapien
acagaggtgccattgtgggaatgat

SEQ ID NO: 3960397 - DNA, 25 bp, Homo sapien
gtatgggagcttggtgcctccagcc

SEQ ID NO: 3960398 - DNA, 25 bp, Homo sapien
tggcaggtacgccacagcagacaca

SEQ ID NO: 3960399 - DNA, 25 bp, Homo sapien
cagagcatgcccatccgtggcaggt

SEQ ID NO: 3960400 - DNA, 25 bp, Homo sapien
agccatctaactgggctcgtcggcc

SEQ ID NO: 3960401 - DNA, 25 bp, Homo sapien
caagctaacacagcaggctccatgg

SEQ ID NO: 3960402 - DNA, 25 bp, Homo sapien
tatggacacacttgaccgtaaaggc

SEQ ID NO: 3960403 - DNA, 25 bp, Homo sapien
gaggaacgcaagtattatggacaca

SEQ ID NO: 3960404 - DNA, 25 bp, Homo sapien
actgggctgtgcacccgactttgga

SEQ ID NO: 3960405 - DNA, 25 bp, Homo sapien
tgtccagcccagtgttgaacagatt

SEQ ID NO: 3960406 - DNA, 25 bp, Homo sapien
tatttctgccccacagggtaaggga

SEQ ID NO: 3960407 - DNA, 25 bp, Homo sapien
ggaagctgagctcgacattaggcct

SEQ ID NO: 3960408 - DNA, 25 bp, Homo sapien
tggacatttgtcctcgggctcagag

SEQ ID NO: 3960409 - DNA, 25 bp, Homo sapien
gacctcttgggcctgagcctagaag

SEQ ID NO: 3960410 - DNA, 25 bp, Homo sapien
ttgtctgggtccatgctggaactgg

SEQ ID NO: 3960411 - DNA, 25 bp, Homo sapien
gagcgggttctcttgcacaagggac

SEQ ID NO: 3960412 - DNA, 25 bp, Homo sapien
cgggatccctatggcctctccaggg

SEQ ID NO: 3960413 - DNA, 25 bp, Homo sapien
ctgtccctgggcaatcgggcttcca

SEQ ID NO: 3960414 - DNA, 25 bp, Homo sapien
ggctgtccctgggcaatcgggcttc

SEQ ID NO: 3960415 - DNA, 25 bp, Homo sapien
gggcaatcgggcttccagaagggct

SEQ ID NO: 3960416 - DNA, 25 bp, Homo sapien
gtccctgggcaatcgggcttccaga

SEQ ID NO: 3960417 - DNA, 25 bp, Homo sapien
ggtggcgggtggctctccaggtaga

SEQ ID NO: 3960418 - DNA, 25 bp, Homo sapien
cagtggctctcacactggccagtgg

SEQ ID NO: 3960419 - DNA, 25 bp, Homo sapien
cgcagccggaagttcttgggcttgc

SEQ ID NO: 3960420 - DNA, 25 bp, Homo sapien
ctcgtagatgttggggggtgcgtca

SEQ ID NO: 3960421 - DNA, 25 bp, Homo sapien
tctcttatgtgcagctcagaaaatg

SEQ ID NO: 3960422 - DNA, 25 bp, Homo sapien
tatgtgcagctcagaaaatgcacag

SEQ ID NO: 3960423 - DNA, 25 bp, Homo sapien
tcttatgtgcagctcagaaaatgca

SEQ ID NO: 3960424 - DNA, 25 bp, Homo sapien
cttctcttatgtgcagctcagaaaa

SEQ ID NO: 3960425 - DNA, 25 bp, Homo sapien
cgtccagacgaactaactccacatt

SEQ ID NO: 3960426 - DNA, 25 bp, Homo sapien
tgtccgtttcccggatgatccggaa

SEQ ID NO: 3960427 - DNA, 25 bp, Homo sapien
cctctgtccgtttcccggatgatcc

SEQ ID NO: 3960428 - DNA, 25 bp, Homo sapien
tccgtttcccggatgatccggaaga

SEQ ID NO: 3960429 - DNA, 25 bp, Homo sapien
ggaacaacagcttgaagaccatcat

SEQ ID NO: 3960430 - DNA, 25 bp, Homo sapien
caagcgcttatacctggtgatggga

SEQ ID NO: 3960431 - DNA, 25 bp, Homo sapien
caaaagcagtatgacacttatctgg

SEQ ID NO: 3960432 - DNA, 25 bp, Homo sapien
gatgtatgtcaactatcaagcgctt

SEQ ID NO: 3960433 - DNA, 25 bp, Homo sapien
cagctcagctaggagccctggtttg

SEQ ID NO: 3960434 - DNA, 25 bp, Homo sapien
ttgaagggcctgtctagccaaagca

SEQ ID NO: 3960435 - DNA, 25 bp, Homo sapien
gactctctcgtctgaatctcaggaa

SEQ ID NO: 3960436 - DNA, 25 bp, Homo sapien
gagttatactcgcatgttgtcagcc

SEQ ID NO: 3960437 - DNA, 25 bp, Homo sapien
gcaagacatagtgcacaacacaggg

SEQ ID NO: 3960438 - DNA, 25 bp, Homo sapien
ggtttcctgcagctcgctacctaag

SEQ ID NO: 3960439 - DNA, 25 bp, Homo sapien
caacacagggacaaaggcaggtttc

SEQ ID NO: 3960440 - DNA, 25 bp, Homo sapien
catggcaatgacagccgggacactt

SEQ ID NO: 3960441 - DNA, 25 bp, Homo sapien
gaaaaagtgttggtacagattcatg

SEQ ID NO: 3960442 - DNA, 25 bp, Homo sapien
agtaatagcactagaagaatttttc

SEQ ID NO: 3960443 - DNA, 25 bp, Homo sapien
gtggcaagcgcccttgggtccagct

SEQ ID NO: 3960444 - DNA, 25 bp, Homo sapien
gaattaagtagagtaatagcactag

SEQ ID NO: 3960445 - DNA, 25 bp, Homo sapien
cttattcaggagttcacaggtacga

SEQ ID NO: 3960446 - DNA, 25 bp, Homo sapien
tccactgacagggaagccagcgtgt

SEQ ID NO: 3960447 - DNA, 25 bp, Homo sapien
gaagcctaacctagctacaaagagc

SEQ ID NO: 3960448 - DNA, 25 bp, Homo sapien
tctaagatgcggaagagtcactgca

SEQ ID NO: 3960449 - DNA, 25 bp, Homo sapien
aactgactttgtgcaaggtctcacc

SEQ ID NO: 3960450 - DNA, 25 bp, Homo sapien
ggtctcaccatgtatagcactgcct

SEQ ID NO: 3960451 - DNA, 25 bp, Homo sapien
gagcacggaagtttctgtcaacagc

SEQ ID NO: 3960452 - DNA, 25 bp, Homo sapien
ccaaagggtatttcattgtgtcacc

SEQ ID NO: 3960453 - DNA, 25 bp, Homo sapien
tgtttctcttttagcgtacaagaag

SEQ ID NO: 3960454 - DNA, 25 bp, Homo sapien
aagtcctcggacttctgatgggaaa

SEQ ID NO: 3960455 - DNA, 25 bp, Homo sapien
caatttttattggtagtagttatca

SEQ ID NO: 3960456 - DNA, 25 bp, Homo sapien
tagttatcaagaacaaagtcctcgg

SEQ ID NO: 3960457 - DNA, 25 bp, Homo sapien
aaacggatgctcctcacgggcttga

SEQ ID NO: 3960458 - DNA, 25 bp, Homo sapien
gaatacatcagagacgactccgtgg

SEQ ID NO: 3960459 - DNA, 25 bp, Homo sapien
gataaccagtgtgccagactccaga

SEQ ID NO: 3960460 - DNA, 25 bp, Homo sapien
gaagtcctcagggtgtaaagctgga

SEQ ID NO: 3960461 - DNA, 25 bp, Homo sapien
cggagtccccaatgtggtttccctg

SEQ ID NO: 3960462 - DNA, 25 bp, Homo sapien
cgtgggagcatttgtcttgatggcc

SEQ ID NO: 3960463 - DNA, 25 bp, Homo sapien
acatttcaacagtgcacgtgggagc

SEQ ID NO: 3960464 - DNA, 25 bp, Homo sapien
gtccccaatgtggtttccctggaga

SEQ ID NO: 3960465 - DNA, 25 bp, Homo sapien
aatgcatatcgccccgtccatcccc

SEQ ID NO: 3960466 - DNA, 25 bp, Homo sapien
tgtggcaatgcatatcgccccgtcc

SEQ ID NO: 3960467 - DNA, 25 bp, Homo sapien
tggcaatgcatatcgccccgtccat

SEQ ID NO: 3960468 - DNA, 25 bp, Homo sapien
tgcatatcgccccgtccatccccag

SEQ ID NO: 3960469 - DNA, 25 bp, Homo sapien
tgagtctccggagacttgagtttac

SEQ ID NO: 3960470 - DNA, 25 bp, Homo sapien
ttgagtctccggagacttgagttta

SEQ ID NO: 3960471 - DNA, 25 bp, Homo sapien
ctccagccaccccaatggcatttcc

SEQ ID NO: 3960472 - DNA, 25 bp, Homo sapien
agagcatttgccagggctttggctc

SEQ ID NO: 3960473 - DNA, 25 bp, Homo sapien
caccccaatggcatttcctcttaag

SEQ ID NO: 3960474 - DNA, 25 bp, Homo sapien
ttcagagcatttgccagggctttgg

SEQ ID NO: 3960475 - DNA, 25 bp, Homo sapien
ctgggcgcctgaagcaccaattgag

SEQ ID NO: 3960476 - DNA, 25 bp, Homo sapien
tctccaaggttctgttcacagccaa

SEQ ID NO: 3960477 - DNA, 25 bp, Homo sapien
caaggcttcccctagcacctgggcg

SEQ ID NO: 3960478 - DNA, 25 bp, Homo sapien
caaggttctgttcacagccaaggct

SEQ ID NO: 3960479 - DNA, 25 bp, Homo sapien
ttgaccttcagtgcacgggccaccg

SEQ ID NO: 3960480 - DNA, 25 bp, Homo sapien
cgggccaccgcacacgctccgtcat

SEQ ID NO: 3960481 - DNA, 25 bp, Homo sapien
gtgttgaccttcagtgcacgggcca

SEQ ID NO: 3960482 - DNA, 25 bp, Homo sapien
acgctccgtcatccccgatggcgtt

SEQ ID NO: 3960483 - DNA, 25 bp, Homo sapien
ctggtgaggctcctgttgagctgta

SEQ ID NO: 3960484 - DNA, 25 bp, Homo sapien
tctaagctggtgaggctcctgttga

SEQ ID NO: 3960485 - DNA, 25 bp, Homo sapien
agctgtagtgcttgtcccagggcct

SEQ ID NO: 3960486 - DNA, 25 bp, Homo sapien
cctgttgagctgtagtgcttgtccc

SEQ ID NO: 3960487 - DNA, 25 bp, Homo sapien
ggaggtgagggtgcggttttctctc

SEQ ID NO: 3960488 - DNA, 25 bp, Homo sapien
aggtgagggtgcggttttctctcac

SEQ ID NO: 3960489 - DNA, 25 bp, Homo sapien
gaggtgagggtgcggttttctctca

SEQ ID NO: 3960490 - DNA, 25 bp, Homo sapien
gcccgggcaccctggtcgtggagga

SEQ ID NO: 3960491 - DNA, 25 bp, Homo sapien
tgcgatggcccgggcaccctggtcg

SEQ ID NO: 3960492 - DNA, 25 bp, Homo sapien
atggcccgggcaccctggtcgtgga

SEQ ID NO: 3960493 - DNA, 25 bp, Homo sapien
cccgggcaccctggtcgtggaggag

SEQ ID NO: 3960494 - DNA, 25 bp, Homo sapien
ggtgcccgtcagcccaggctcggtg

SEQ ID NO: 3960495 - DNA, 25 bp, Homo sapien
aggctcggtgtgggtgtggtcatgg

SEQ ID NO: 3960496 - DNA, 25 bp, Homo sapien
caggctcggtgtgggtgtggtcatg

SEQ ID NO: 3960497 - DNA, 25 bp, Homo sapien
gcccgtcagcccaggctcggtgtgg

SEQ ID NO: 3960498 - DNA, 25 bp, Homo sapien
cgcagagggcatgagcgatggcctg

SEQ ID NO: 3960499 - DNA, 25 bp, Homo sapien
cctcgggactgatggagttttctcg

SEQ ID NO: 3960500 - DNA, 25 bp, Homo sapien
ttcttcagggtgctgttggcgcaga

SEQ ID NO: 3960501 - DNA, 25 bp, Homo sapien
ccaggttcttcagggtgctgttggc

SEQ ID NO: 3960502 - DNA, 25 bp, Homo sapien
actcctgcgtcactgatggaattgc

SEQ ID NO: 3960503 - DNA, 25 bp, Homo sapien
tgcagagggcccccatcagtgctgc

SEQ ID NO: 3960504 - DNA, 25 bp, Homo sapien
gccactcctgcgtcactgatggaat

SEQ ID NO: 3960505 - DNA, 25 bp, Homo sapien
gtgctgccactcctgcgtcactgat

SEQ ID NO: 3960506 - DNA, 25 bp, Homo sapien
cctccatcaccaatactattactgg

SEQ ID NO: 3960507 - DNA, 25 bp, Homo sapien
agggccttggcacctccatcaccaa

SEQ ID NO: 3960508 - DNA, 25 bp, Homo sapien
gctcccatgggcccgatgctgttct

SEQ ID NO: 3960509 - DNA, 25 bp, Homo sapien
ccatgggcccgatgctgttcttctg

SEQ ID NO: 3960510 - DNA, 25 bp, Homo sapien
tcccatgggcccgatgctgttcttc

SEQ ID NO: 3960511 - DNA, 25 bp, Homo sapien
cccatgggcccgatgctgttcttct

SEQ ID NO: 3960512 - DNA, 25 bp, Homo sapien
catggagagggtccggttggaggcc

SEQ ID NO: 3960513 - DNA, 25 bp, Homo sapien
tggcaccatcatccctaacggtgtt

SEQ ID NO: 3960514 - DNA, 25 bp, Homo sapien
caaggcctcagccatggacctggca

SEQ ID NO: 3960515 - DNA, 25 bp, Homo sapien
atccctaacggtgttgccctggagg

SEQ ID NO: 3960516 - DNA, 25 bp, Homo sapien
ctgggacccgcctaaaacagtcaat

SEQ ID NO: 3960517 - DNA, 25 bp, Homo sapien
ctctgggacccgcctaaaacagtca

SEQ ID NO: 3960518 - DNA, 25 bp, Homo sapien
tctgggacccgcctaaaacagtcaa

SEQ ID NO: 3960519 - DNA, 25 bp, Homo sapien
cactcagctaagtatagatataacc

SEQ ID NO: 3960520 - DNA, 25 bp, Homo sapien
tataaccacaggcttttaaaagaga

SEQ ID NO: 3960521 - DNA, 25 bp, Homo sapien
cagaaaagtggtacccactcagcta

SEQ ID NO: 3960522 - DNA, 25 bp, Homo sapien
agatataaccacaggcttttaaaag

SEQ ID NO: 3960523 - DNA, 25 bp, Homo sapien
caacctctgcttcccagactcaagc

SEQ ID NO: 3960524 - DNA, 25 bp, Homo sapien
ctcaagcgattctcctaccttagcc

SEQ ID NO: 3960525 - DNA, 25 bp, Homo sapien
tgtagtggcgcgatctcaacttact

SEQ ID NO: 3960526 - DNA, 25 bp, Homo sapien
tagtagagatgccatttcgccatgt

SEQ ID NO: 3960527 - DNA, 25 bp, Homo sapien
ggccccatgcctgccattgtgaatc

SEQ ID NO: 3960528 - DNA, 25 bp, Homo sapien
ctcccattctcataggtggtgcctg

SEQ ID NO: 3960529 - DNA, 25 bp, Homo sapien
tcacctcccattctcataggtggtg

SEQ ID NO: 3960530 - DNA, 25 bp, Homo sapien
tgtgcccggccccatgcctgccatt

SEQ ID NO: 3960531 - DNA, 25 bp, Homo sapien
cttggccccttgtggtccaatggag

SEQ ID NO: 3960532 - DNA, 25 bp, Homo sapien
ggaggtcagggtgcggttgatcttc

SEQ ID NO: 3960533 - DNA, 25 bp, Homo sapien
gatcttcaaagcgtctgccagcgcc

SEQ ID NO: 3960534 - DNA, 25 bp, Homo sapien
tgccagcgccttggccccttgtggt

SEQ ID NO: 3960535 - DNA, 25 bp, Homo sapien
tgaccaagagggatctggccagagc

SEQ ID NO: 3960536 - DNA, 25 bp, Homo sapien
gacttctgttgaccaagagggatct

SEQ ID NO: 3960537 - DNA, 25 bp, Homo sapien
ccagagaggtcagacttctgttgac

SEQ ID NO: 3960538 - DNA, 25 bp, Homo sapien
agagctttggcccctttgttactga

SEQ ID NO: 3960539 - DNA, 25 bp, Homo sapien
tcttctgaatgcgacagtccttccc

SEQ ID NO: 3960540 - DNA, 25 bp, Homo sapien
tctgaatgcgacagtccttcccact

SEQ ID NO: 3960541 - DNA, 25 bp, Homo sapien
gatcttctgaatgcgacagtccttc

SEQ ID NO: 3960542 - DNA, 25 bp, Homo sapien
ctgatcttctgaatgcgacagtcct

SEQ ID NO: 3960543 - DNA, 25 bp, Homo sapien
cagaacggcatcttccacgggctgt

SEQ ID NO: 3960544 - DNA, 25 bp, Homo sapien
aagttcatggtcctctgttacggca

SEQ ID NO: 3960545 - DNA, 25 bp, Homo sapien
cagcgggtgtgcagcttctatcaga

SEQ ID NO: 3960546 - DNA, 25 bp, Homo sapien
cagacctttcccgtgagagtgaaca

SEQ ID NO: 3960547 - DNA, 25 bp, Homo sapien
gagggccatcctaaagtaccatgag

SEQ ID NO: 3960548 - DNA, 25 bp, Homo sapien
tcctgaaatgcgtgaggaagcccag

SEQ ID NO: 3960549 - DNA, 25 bp, Homo sapien
catgagtagagctcgcacagggtcc

SEQ ID NO: 3960550 - DNA, 25 bp, Homo sapien
caggatacgccgctctcagtgaaga

SEQ ID NO: 3960551 - DNA, 25 bp, Homo sapien
ctgtgtgaagtcgtgttccctcagc

SEQ ID NO: 3960552 - DNA, 25 bp, Homo sapien
cttgctcagcagggccttgcggtgc

SEQ ID NO: 3960553 - DNA, 25 bp, Homo sapien
cagggccttgcggtgcctctgtatc

SEQ ID NO: 3960554 - DNA, 25 bp, Homo sapien
tcagcagggccttgcggtgcctctg

SEQ ID NO: 3960555 - DNA, 25 bp, Homo sapien
ttgctcagcagggccttgcggtgcc

SEQ ID NO: 3960556 - DNA, 25 bp, Homo sapien
tgcgggacagaggccagtggggagg

SEQ ID NO: 3960557 - DNA, 25 bp, Homo sapien
ctgcgggacagaggccagtggggag

SEQ ID NO: 3960558 - DNA, 25 bp, Homo sapien
gcgggacagaggccagtggggaggt

SEQ ID NO: 3960559 - DNA, 25 bp, Homo sapien
ccagcagatccatgagggctttcac

SEQ ID NO: 3960560 - DNA, 25 bp, Homo sapien
cccagcggggcatccggtgtcctat

SEQ ID NO: 3960561 - DNA, 25 bp, Homo sapien
atccggtgtcctatccagggcctgc

SEQ ID NO: 3960562 - DNA, 25 bp, Homo sapien
tccatgagggctttcacctgctcgg

SEQ ID NO: 3960563 - DNA, 25 bp, Homo sapien
tcctcatggagtcggggatcacctc

SEQ ID NO: 3960564 - DNA, 25 bp, Homo sapien
catggagtcggggatcacctccagg

SEQ ID NO: 3960565 - DNA, 25 bp, Homo sapien
tgcttcctcatggagtcggggatca

SEQ ID NO: 3960566 - DNA, 25 bp, Homo sapien
atggagtcggggatcacctccagga

SEQ ID NO: 3960567 - DNA, 25 bp, Homo sapien
tgtgaagagagggcctgaacctgct

SEQ ID NO: 3960568 - DNA, 25 bp, Homo sapien
tgaagagagggcctgaacctgctgc

SEQ ID NO: 3960569 - DNA, 25 bp, Homo sapien
gtgaagagagggcctgaacctgctg

SEQ ID NO: 3960570 - DNA, 25 bp, Homo sapien
ctgtgaagagagggcctgaacctgc

SEQ ID NO: 3960571 - DNA, 25 bp, Homo sapien
tgagggcaggctgagtcacctctct

SEQ ID NO: 3960572 - DNA, 25 bp, Homo sapien
ggctgagtcacctctctgcgccttg

SEQ ID NO: 3960573 - DNA, 25 bp, Homo sapien
acctctctgcgccttggtgtcttca

SEQ ID NO: 3960574 - DNA, 25 bp, Homo sapien
gagtcacctctctgcgccttggtgt

SEQ ID NO: 3960575 - DNA, 25 bp, Homo sapien
gggctcagccttccgttgtccacag

SEQ ID NO: 3960576 - DNA, 25 bp, Homo sapien
cccaggaactcaatggatggggctc

SEQ ID NO: 3960577 - DNA, 25 bp, Homo sapien
gctcagccttccgttgtccacagtt

SEQ ID NO: 3960578 - DNA, 25 bp, Homo sapien
ggaactcaatggatggggctcagcc

SEQ ID NO: 3960579 - DNA, 25 bp, Homo sapien
gagaaaaaacacaatgtggccagca

SEQ ID NO: 3960580 - DNA, 25 bp, Homo sapien
ctaggagaaaaaacacaatgtggcc

SEQ ID NO: 3960581 - DNA, 25 bp, Homo sapien
taggagaaaaaacacaatgtggcca

SEQ ID NO: 3960582 - DNA, 25 bp, Homo sapien
aaaaaacacaatgtggccagcagag

SEQ ID NO: 3960583 - DNA, 25 bp, Homo sapien
gatttctagttttcttctccgatag

SEQ ID NO: 3960584 - DNA, 25 bp, Homo sapien
tccttggagcaataaggttgttgca

SEQ ID NO: 3960585 - DNA, 25 bp, Homo sapien
tactgaaggcatactgtgttctgca

SEQ ID NO: 3960586 - DNA, 25 bp, Homo sapien
gttttactctagactagaccaggag

SEQ ID NO: 3960587 - DNA, 25 bp, Homo sapien
ccagggcagtggcacttcttccgag

SEQ ID NO: 3960588 - DNA, 25 bp, Homo sapien
tggccataggggaagaccctgcagc

SEQ ID NO: 3960589 - DNA, 25 bp, Homo sapien
aaggcctctgcggttgccgtctctc

SEQ ID NO: 3960590 - DNA, 25 bp, Homo sapien
gccgtctctctcgacccttgtctca

SEQ ID NO: 3960591 - DNA, 25 bp, Homo sapien
cccgggcctcgatgctgctccaggg

SEQ ID NO: 3960592 - DNA, 25 bp, Homo sapien
ctcccgggcctcgatgctgctccag

SEQ ID NO: 3960593 - DNA, 25 bp, Homo sapien
gctccagggacagcaagactggggg

SEQ ID NO: 3960594 - DNA, 25 bp, Homo sapien
cagggacagcaagactggggggcct

SEQ ID NO: 3960595 - DNA, 25 bp, Homo sapien
ccagctgcgtggtggtagatgccct

SEQ ID NO: 3960596 - DNA, 25 bp, Homo sapien
gggccgagagcagtgcagccccgac

SEQ ID NO: 3960597 - DNA, 25 bp, Homo sapien
caggaccagggatcagggcacttac

SEQ ID NO: 3960598 - DNA, 25 bp, Homo sapien
gaccagggatcagggcacttaccac

SEQ ID NO: 3960599 - DNA, 25 bp, Homo sapien
agcctttttggtttattgcacatca

SEQ ID NO: 3960600 - DNA, 25 bp, Homo sapien
gacgaggacattcacaaggatggag

SEQ ID NO: 3960601 - DNA, 25 bp, Homo sapien
taacccaaagaatggaatccgctag

SEQ ID NO: 3960602 - DNA, 25 bp, Homo sapien
ggaatccgctagtgaacatgtttgt

SEQ ID NO: 3960603 - DNA, 25 bp, Homo sapien
ttggagactgctggtaacaatgaca

SEQ ID NO: 3960604 - DNA, 25 bp, Homo sapien
tggagactgctggtaacaatgacaa

SEQ ID NO: 3960605 - DNA, 25 bp, Homo sapien
taaatccagtgggtgacatgctcca

SEQ ID NO: 3960606 - DNA, 25 bp, Homo sapien
tctcaggacagacatgtagggcagc

SEQ ID NO: 3960607 - DNA, 25 bp, Homo sapien
cacactgtgagcacggacagaggaa

SEQ ID NO: 3960608 - DNA, 25 bp, Homo sapien
tggtcatcatcacagcgcagagctg

SEQ ID NO: 3960609 - DNA, 25 bp, Homo sapien
aagtccaacagcctgcgcgaggaca

SEQ ID NO: 3960610 - DNA, 25 bp, Homo sapien
atgtagcacctcagcgcctcgtctg

SEQ ID NO: 3960611 - DNA, 25 bp, Homo sapien
gctcccgcagctcaaagggctggta

SEQ ID NO: 3960612 - DNA, 25 bp, Homo sapien
aggacacacggaggccgttctgcct

SEQ ID NO: 3960613 - DNA, 25 bp, Homo sapien
tcaaatgccgctccaaactcacagg

SEQ ID NO: 3960614 - DNA, 25 bp, Homo sapien
ctgcagactcaaatgccgctccaaa

SEQ ID NO: 3960615 - DNA, 25 bp, Homo sapien
gcagactcaaatgccgctccaaact

SEQ ID NO: 3960616 - DNA, 25 bp, Homo sapien
tgccgctccaaactcacaggaggaa

SEQ ID NO: 3960617 - DNA, 25 bp, Homo sapien
caggacgttgtgcaacccctttctc

SEQ ID NO: 3960618 - DNA, 25 bp, Homo sapien
aggtgtctacgggtcccatggagcc

SEQ ID NO: 3960619 - DNA, 25 bp, Homo sapien
aagagccagaccaggacgttgtgca

SEQ ID NO: 3960620 - DNA, 25 bp, Homo sapien
aaggaaggtgtctacgggtcccatg

SEQ ID NO: 3960621 - DNA, 25 bp, Homo sapien
agaggatacatgaggccactgaccc

SEQ ID NO: 3960622 - DNA, 25 bp, Homo sapien
tgaccccatcgcatccatccggtta

SEQ ID NO: 3960623 - DNA, 25 bp, Homo sapien
tgcaggctacgccagcgggatcctg

SEQ ID NO: 3960624 - DNA, 25 bp, Homo sapien
gattggccattaggtctcactcgtg

SEQ ID NO: 3960625 - DNA, 25 bp, Homo sapien
caaggagctgtcactgccatccaca

SEQ ID NO: 3960626 - DNA, 25 bp, Homo sapien
tctgtgagctcaaggagctgtcact

SEQ ID NO: 3960627 - DNA, 25 bp, Homo sapien
ctctgtgagctcaaggagctgtcac

SEQ ID NO: 3960628 - DNA, 25 bp, Homo sapien
ggagctgtcactgccatccacagag

SEQ ID NO: 3960629 - DNA, 25 bp, Homo sapien
atctgggcgtcatcattgaggcctg

SEQ ID NO: 3960630 - DNA, 25 bp, Homo sapien
cccttgaaggcttgtaggtctggga

SEQ ID NO: 3960631 - DNA, 25 bp, Homo sapien
ggtcttagcaggtcccttgggccta

SEQ ID NO: 3960632 - DNA, 25 bp, Homo sapien
tgcctccttggtgggcgacctgctt

SEQ ID NO: 3960633 - DNA, 25 bp, Homo sapien
tggtgagtgtactggaatatctcct

SEQ ID NO: 3960634 - DNA, 25 bp, Homo sapien
gaaccatctggcgtttaggcagagg

SEQ ID NO: 3960635 - DNA, 25 bp, Homo sapien
ccagggtctggtgagtgtactggaa

SEQ ID NO: 3960636 - DNA, 25 bp, Homo sapien
cgtttaggcagagggcggactccaa

SEQ ID NO: 3960637 - DNA, 25 bp, Homo sapien
gcaagttcttcttccgattagcacc

SEQ ID NO: 3960638 - DNA, 25 bp, Homo sapien
gcgtctccataatggaatactgtgg

SEQ ID NO: 3960639 - DNA, 25 bp, Homo sapien
tggcatcggcgttatgggcactttg

SEQ ID NO: 3960640 - DNA, 25 bp, Homo sapien
ttcagcaccggcgtctccataatgg

SEQ ID NO: 3960641 - DNA, 25 bp, Homo sapien
cgaattcagaaagctcggcctgcta

SEQ ID NO: 3960642 - DNA, 25 bp, Homo sapien
aaacgtcccacagagccgaattcag

SEQ ID NO: 3960643 - DNA, 25 bp, Homo sapien
gctccaccagcgcttggcatctggg

SEQ ID NO: 3960644 - DNA, 25 bp, Homo sapien
cgcgcccgaggacttctcttgcaat

SEQ ID NO: 3960645 - DNA, 25 bp, Homo sapien
tgctcatcgtcactgtctccgactt

SEQ ID NO: 3960646 - DNA, 25 bp, Homo sapien
tggtcaatgggaattggcgagaggg

SEQ ID NO: 3960647 - DNA, 25 bp, Homo sapien
ccgctccaggttccagtggtcaatg

SEQ ID NO: 3960648 - DNA, 25 bp, Homo sapien
ccagcagcagtcgtcaattggaatt

SEQ ID NO: 3960649 - DNA, 25 bp, Homo sapien
cccaggcggcgagtgtttcaggaac

SEQ ID NO: 3960650 - DNA, 25 bp, Homo sapien
tcaggaaccgcctgctgaagtgggc

SEQ ID NO: 3960651 - DNA, 25 bp, Homo sapien
gtggagccagcggagaggagtgcgg

SEQ ID NO: 3960652 - DNA, 25 bp, Homo sapien
aagtgggcgcggtcccctgagatgg

SEQ ID NO: 3960653 - DNA, 25 bp, Homo sapien
tgtgcgacttcgttcccttccctgt

SEQ ID NO: 3960654 - DNA, 25 bp, Homo sapien
gtgaggcatgaggacggtgtctggg

SEQ ID NO: 3960655 - DNA, 25 bp, Homo sapien
ctggagagacgggagtgaggcatga

SEQ ID NO: 3960656 - DNA, 25 bp, Homo sapien
tgtttcctactgaggccctgggcgt

SEQ ID NO: 3960657 - DNA, 25 bp, Homo sapien
gcagcacagcttcgcttcttggtgg

SEQ ID NO: 3960658 - DNA, 25 bp, Homo sapien
tcacaggacctagggctaatttcta

SEQ ID NO: 3960659 - DNA, 25 bp, Homo sapien
tggtgccctggctctttagacagcg

SEQ ID NO: 3960660 - DNA, 25 bp, Homo sapien
ggaccgacgctctttgcctttctgg

SEQ ID NO: 3960661 - DNA, 25 bp, Homo sapien
ggagacagcaaggttggggagccca

SEQ ID NO: 3960662 - DNA, 25 bp, Homo sapien
ctggagacagcaaggttggggagcc

SEQ ID NO: 3960663 - DNA, 25 bp, Homo sapien
tggagacagcaaggttggggagccc

SEQ ID NO: 3960664 - DNA, 25 bp, Homo sapien
gagacagcaaggttggggagcccac

SEQ ID NO: 3960665 - DNA, 25 bp, Homo sapien
ggacgacccacttgtgtgatgagac

SEQ ID NO: 3960666 - DNA, 25 bp, Homo sapien
ggagccaggcgatgagaaacctcca

SEQ ID NO: 3960667 - DNA, 25 bp, Homo sapien
ccccaataggaagcggcacgggtgc

SEQ ID NO: 3960668 - DNA, 25 bp, Homo sapien
tgacagcgccactttgttcctcggg

SEQ ID NO: 3960669 - DNA, 25 bp, Homo sapien
tgagatctctccctgagttgatgag

SEQ ID NO: 3960670 - DNA, 25 bp, Homo sapien
gcgggagagcgcactgtcccatctt

SEQ ID NO: 3960671 - DNA, 25 bp, Homo sapien
gagaagagctgttcgtaatccccgg

SEQ ID NO: 3960672 - DNA, 25 bp, Homo sapien
taatccccggcatcatctgagtgcg

SEQ ID NO: 3960673 - DNA, 25 bp, Homo sapien
ctaggagttgcccagaaaccggact

SEQ ID NO: 3960674 - DNA, 25 bp, Homo sapien
tgttcgcacaggtgaacgagctcac

SEQ ID NO: 3960675 - DNA, 25 bp, Homo sapien
catggtttgccctctgagtcagtgg

SEQ ID NO: 3960676 - DNA, 25 bp, Homo sapien
tcagtggcaataggcacctgttcgc

SEQ ID NO: 3960677 - DNA, 25 bp, Homo sapien
gggcggcctcggtgctcacgtcacc

SEQ ID NO: 3960678 - DNA, 25 bp, Homo sapien
atagtgcaggaacgtgcgggcggcc

SEQ ID NO: 3960679 - DNA, 25 bp, Homo sapien
cagtgtccgcagtgtagagatagtg

SEQ ID NO: 3960680 - DNA, 25 bp, Homo sapien
gctgggtcagaaccccgtcctctac

SEQ ID NO: 3960681 - DNA, 25 bp, Homo sapien
gaacttgtgggcgtaaagcacctcc

SEQ ID NO: 3960682 - DNA, 25 bp, Homo sapien
gcgggcatcgggcataaagcacgaa

SEQ ID NO: 3960683 - DNA, 25 bp, Homo sapien
tactggatgaggagcgggcatcggg

SEQ ID NO: 3960684 - DNA, 25 bp, Homo sapien
tccccgctgtccgtctgaaactgga

SEQ ID NO: 3960685 - DNA, 25 bp, Homo sapien
cgccaaagtcagcaaccagcagccc

SEQ ID NO: 3960686 - DNA, 25 bp, Homo sapien
gcgccaaagtcagcaaccagcagcc

SEQ ID NO: 3960687 - DNA, 25 bp, Homo sapien
ggcgccaaagtcagcaaccagcagc

SEQ ID NO: 3960688 - DNA, 25 bp, Homo sapien
gccaaagtcagcaaccagcagcccg

SEQ ID NO: 3960689 - DNA, 25 bp, Homo sapien
ttgtcctgcgatggcaccacaaacc

SEQ ID NO: 3960690 - DNA, 25 bp, Homo sapien
atggcaccacaaacccagtcagagg

SEQ ID NO: 3960691 - DNA, 25 bp, Homo sapien
ccgggtgcttgtcctgcgatggcac

SEQ ID NO: 3960692 - DNA, 25 bp, Homo sapien
aaacccagtcagaggaaggccgccg

SEQ ID NO: 3960693 - DNA, 25 bp, Homo sapien
gagagcgggtgaccttcgctcgctc

SEQ ID NO: 3960694 - DNA, 25 bp, Homo sapien
tggccgaaggcgacgggcccctgga

SEQ ID NO: 3960695 - DNA, 25 bp, Homo sapien
ctgcagtcccttccgagccagccag

SEQ ID NO: 3960696 - DNA, 25 bp, Homo sapien
gaccttcgctcgctcagctctgagt

SEQ ID NO: 3960697 - DNA, 25 bp, Homo sapien
agccagtaaggagagtgaccacgtg

SEQ ID NO: 3960698 - DNA, 25 bp, Homo sapien
gaaagaagccagtaaggagagtgac

SEQ ID NO: 3960699 - DNA, 25 bp, Homo sapien
aagaagccagtaaggagagtgacca

SEQ ID NO: 3960700 - DNA, 25 bp, Homo sapien
gaagccagtaaggagagtgaccacg

SEQ ID NO: 3960701 - DNA, 25 bp, Homo sapien
agctctgcttgcgttcaggtggagg

SEQ ID NO: 3960702 - DNA, 25 bp, Homo sapien
tctgcttgcgttcaggtggaggagg

SEQ ID NO: 3960703 - DNA, 25 bp, Homo sapien
aggacactggcccgctctttcccac

SEQ ID NO: 3960704 - DNA, 25 bp, Homo sapien
ggccccagtcagtgcgctgccctcc

SEQ ID NO: 3960705 - DNA, 25 bp, Homo sapien
cagggccacacggtcctctatctgt

SEQ ID NO: 3960706 - DNA, 25 bp, Homo sapien
ctggactaacaacaatgggggggat

SEQ ID NO: 3960707 - DNA, 25 bp, Homo sapien
cctgtggtttcagagtcctggacta

SEQ ID NO: 3960708 - DNA, 25 bp, Homo sapien
aagtggtggcgtgctagacaattcc

SEQ ID NO: 3960709 - DNA, 25 bp, Homo sapien
gcctctcccagggtcactcttctga

SEQ ID NO: 3960710 - DNA, 25 bp, Homo sapien
cctctcccagggtcactcttctgat

SEQ ID NO: 3960711 - DNA, 25 bp, Homo sapien
ctctcccagggtcactcttctgatc

SEQ ID NO: 3960712 - DNA, 25 bp, Homo sapien
ttccagcctgagcgctggtacagcc

SEQ ID NO: 3960713 - DNA, 25 bp, Homo sapien
actttccagcctgagcgctggtaca

SEQ ID NO: 3960714 - DNA, 25 bp, Homo sapien
cactttccagcctgagcgctggtac

SEQ ID NO: 3960715 - DNA, 25 bp, Homo sapien
tttccagcctgagcgctggtacagc

SEQ ID NO: 3960716 - DNA, 25 bp, Homo sapien
tctccgtttcagacctctactgtga

SEQ ID NO: 3960717 - DNA, 25 bp, Homo sapien
atctccgaccgggacagagccatgg

SEQ ID NO: 3960718 - DNA, 25 bp, Homo sapien
cagacctctactgtgatcactgaag

SEQ ID NO: 3960719 - DNA, 25 bp, Homo sapien
agcaggtcctcggacggtgcctcgt

SEQ ID NO: 3960720 - DNA, 25 bp, Homo sapien
gtagagacgagattgtaccatgtcg

SEQ ID NO: 3960721 - DNA, 25 bp, Homo sapien
cacacagcattatttggcttggttt

SEQ ID NO: 3960722 - DNA, 25 bp, Homo sapien
tgcgtccagcccataaaaagctttt

SEQ ID NO: 3960723 - DNA, 25 bp, Homo sapien
acgagattgtaccatgtcggccagg

SEQ ID NO: 3960724 - DNA, 25 bp, Homo sapien
tgtgctgtctgcagccgcacagcct

SEQ ID NO: 3960725 - DNA, 25 bp, Homo sapien
caaatcgggcactcagggatctgag

SEQ ID NO: 3960726 - DNA, 25 bp, Homo sapien
ccacaaatcgggcactcagggatct

SEQ ID NO: 3960727 - DNA, 25 bp, Homo sapien
gactggttctgctctttaaggtaag

SEQ ID NO: 3960728 - DNA, 25 bp, Homo sapien
tgcccaactgtgtgaatatcccaaa

SEQ ID NO: 3960729 - DNA, 25 bp, Homo sapien
gagcaaatgtgggtccaggtcaaca

SEQ ID NO: 3960730 - DNA, 25 bp, Homo sapien
gctgtggtcaaagcaagttccccaa

SEQ ID NO: 3960731 - DNA, 25 bp, Homo sapien
tctggtcacatacacgggagaggcg

SEQ ID NO: 3960732 - DNA, 25 bp, Homo sapien
tgttcccttcgggtcacgttcatgg

SEQ ID NO: 3960733 - DNA, 25 bp, Homo sapien
atcatgtgccgatgctcctacccgt

SEQ ID NO: 3960734 - DNA, 25 bp, Homo sapien
tctggcagaagaacaaacccttttc

SEQ ID NO: 3960735 - DNA, 25 bp, Homo sapien
tacccgtgcaaactcctgctgcagg

SEQ ID NO: 3960736 - DNA, 25 bp, Homo sapien
ctggggcagggggcccaagcccata

SEQ ID NO: 3960737 - DNA, 25 bp, Homo sapien
tggggcagggggcccaagcccatac

SEQ ID NO: 3960738 - DNA, 25 bp, Homo sapien
ggggcagggggcccaagcccataca

SEQ ID NO: 3960739 - DNA, 25 bp, Homo sapien
cgagggagcactcttctgaagcgtg

SEQ ID NO: 3960740 - DNA, 25 bp, Homo sapien
tcctcttgaggatcctttgggacat

SEQ ID NO: 3960741 - DNA, 25 bp, Homo sapien
ctgtaggaccaattgtgctgtgcgg

SEQ ID NO: 3960742 - DNA, 25 bp, Homo sapien
gaactgctgcattcgctgtaggacc

SEQ ID NO: 3960743 - DNA, 25 bp, Homo sapien
ggctgggagtcgctgttgggcacat

SEQ ID NO: 3960744 - DNA, 25 bp, Homo sapien
ctgggagtcgctgttgggcacattc

SEQ ID NO: 3960745 - DNA, 25 bp, Homo sapien
gaggctgggagtcgctgttgggcac

SEQ ID NO: 3960746 - DNA, 25 bp, Homo sapien
tgggagtcgctgttgggcacattct

SEQ ID NO: 3960747 - DNA, 25 bp, Homo sapien
gagtgggccggttcacttgcttgcc

SEQ ID NO: 3960748 - DNA, 25 bp, Homo sapien
ttcttgctggttacccgtctgggtg

SEQ ID NO: 3960749 - DNA, 25 bp, Homo sapien
tatctgagtgccgtttgaggcagcc

SEQ ID NO: 3960750 - DNA, 25 bp, Homo sapien
cctggctgccagacggaggtttctt

SEQ ID NO: 3960751 - DNA, 25 bp, Homo sapien
tgttgtccaatagatgcctctgaga

SEQ ID NO: 3960752 - DNA, 25 bp, Homo sapien
tctgttaaagtccacaactgggccg

SEQ ID NO: 3960753 - DNA, 25 bp, Homo sapien
tgaacccaagtagaagcctagctga

SEQ ID NO: 3960754 - DNA, 25 bp, Homo sapien
gtcttcagaggagcgagggtcaatc

SEQ ID NO: 3960755 - DNA, 25 bp, Homo sapien
ccagacagagtctgccaacaccttg

SEQ ID NO: 3960756 - DNA, 25 bp, Homo sapien
tatacctgataagaatctatgctgc

SEQ ID NO: 3960757 - DNA, 25 bp, Homo sapien
ttcatatgtgaaggcctcaaccgca

SEQ ID NO: 3960758 - DNA, 25 bp, Homo sapien
gcagtagactctagatatgacacta

SEQ ID NO: 3960759 - DNA, 25 bp, Homo sapien
tcttgagtaactgggtctagaggca

SEQ ID NO: 3960760 - DNA, 25 bp, Homo sapien
agtcagagtgttactatgtggccca

SEQ ID NO: 3960761 - DNA, 25 bp, Homo sapien
gacactcagtccaaatagcccagaa

SEQ ID NO: 3960762 - DNA, 25 bp, Homo sapien
caatcccatgactgatcagtacagg

SEQ ID NO: 3960763 - DNA, 25 bp, Homo sapien
cagtgatgacgggtggtatggaggc

SEQ ID NO: 3960764 - DNA, 25 bp, Homo sapien
agaggcagtgatgacgggtggtatg

SEQ ID NO: 3960765 - DNA, 25 bp, Homo sapien
tggaggacgtgcaggctcagggtgc

SEQ ID NO: 3960766 - DNA, 25 bp, Homo sapien
ctggaggacgtgcaggctcagggtg

SEQ ID NO: 3960767 - DNA, 25 bp, Homo sapien
ggatatacgctgatcttttggcccc

SEQ ID NO: 3960768 - DNA, 25 bp, Homo sapien
tttacctgcagctcatactttgaaa

SEQ ID NO: 3960769 - DNA, 25 bp, Homo sapien
ttggccccaatgagctatttgaaca

SEQ ID NO: 3960770 - DNA, 25 bp, Homo sapien
tctagcatcgtctaaatctgagcat

SEQ ID NO: 3960771 - DNA, 25 bp, Homo sapien
cttgatcagtagaagggtaccctcc

SEQ ID NO: 3960772 - DNA, 25 bp, Homo sapien
gctgggtcacacaacactggctgtc

SEQ ID NO: 3960773 - DNA, 25 bp, Homo sapien
acttggaatctggtagaacaccgcc

SEQ ID NO: 3960774 - DNA, 25 bp, Homo sapien
tttgtacaagcgaggcccaagttcc

SEQ ID NO: 3960775 - DNA, 25 bp, Homo sapien
atttaggtaaataaagctcaaggag

SEQ ID NO: 3960776 - DNA, 25 bp, Homo sapien
tgtcatctgtggtgtcagtccttct

SEQ ID NO: 3960777 - DNA, 25 bp, Homo sapien
aggtaaataaagctcaaggaggtgg

SEQ ID NO: 3960778 - DNA, 25 bp, Homo sapien
atctgtggtgtcagtccttctggcc

SEQ ID NO: 3960779 - DNA, 25 bp, Homo sapien
agcagcaatcatggcgttctcgtat

SEQ ID NO: 3960780 - DNA, 25 bp, Homo sapien
cctagggtcgtcaacaagtccagca

SEQ ID NO: 3960781 - DNA, 25 bp, Homo sapien
caagcagctcattcaagcggcccac

SEQ ID NO: 3960782 - DNA, 25 bp, Homo sapien
attcaagcggcccaccatggcccta

SEQ ID NO: 3960783 - DNA, 25 bp, Homo sapien
gcttgcgcgcagctgattcagcttc

SEQ ID NO: 3960784 - DNA, 25 bp, Homo sapien
tcgcttgcgcgcagctgattcagct

SEQ ID NO: 3960785 - DNA, 25 bp, Homo sapien
gccaggccaggctcgcttgcgcgca

SEQ ID NO: 3960786 - DNA, 25 bp, Homo sapien
ccaggccaggctcgcttgcgcgcag

SEQ ID NO: 3960787 - DNA, 25 bp, Homo sapien
gccatggctaggaagatgcatctcc

SEQ ID NO: 3960788 - DNA, 25 bp, Homo sapien
tggcaacagacagaaacgagcactt

SEQ ID NO: 3960789 - DNA, 25 bp, Homo sapien
taaagtgacctggtgtccgcctcac

SEQ ID NO: 3960790 - DNA, 25 bp, Homo sapien
gcatactggcgctgctgtgcactga

SEQ ID NO: 3960791 - DNA, 25 bp, Homo sapien
ggggttgatctccagcgtgggctgc

SEQ ID NO: 3960792 - DNA, 25 bp, Homo sapien
ggaagtggcgggcagcccccatctc

SEQ ID NO: 3960793 - DNA, 25 bp, Homo sapien
ggtgggtgtccagtcggagggtcac

SEQ ID NO: 3960794 - DNA, 25 bp, Homo sapien
ctgctgcatgcgcaggaagtggcgg

SEQ ID NO: 3960795 - DNA, 25 bp, Homo sapien
catttctcatccaggccatgagctc

SEQ ID NO: 3960796 - DNA, 25 bp, Homo sapien
ttcacgttggtgacacgcgacccca

SEQ ID NO: 3960797 - DNA, 25 bp, Homo sapien
tccttctctgataggcactcggcgg

SEQ ID NO: 3960798 - DNA, 25 bp, Homo sapien
ggtgacacgcgaccccagcacattt

SEQ ID NO: 3960799 - DNA, 25 bp, Homo sapien
tgatccacgactatgtccgtctcca

SEQ ID NO: 3960800 - DNA, 25 bp, Homo sapien
ccttgtagtgatccacgactatgtc

SEQ ID NO: 3960801 - DNA, 25 bp, Homo sapien
tgcagcagggtgagctcatcaaact

SEQ ID NO: 3960802 - DNA, 25 bp, Homo sapien
ttgtcaaactcacgaaggtgcagca

SEQ ID NO: 3960803 - DNA, 25 bp, Homo sapien
cccgcatgcggctggcgtattctga

SEQ ID NO: 3960804 - DNA, 25 bp, Homo sapien
cgaggactcgtagcgcagcagcttt

SEQ ID NO: 3960805 - DNA, 25 bp, Homo sapien
cacaggtagtagatgttgcgggtgc

SEQ ID NO: 3960806 - DNA, 25 bp, Homo sapien
tcatagtagggtgagtgctctgcca

SEQ ID NO: 3960807 - DNA, 25 bp, Homo sapien
tcagcatcttttttactctggtcaa

SEQ ID NO: 3960808 - DNA, 25 bp, Homo sapien
gcctctgctgtaaaacgtcccggag

SEQ ID NO: 3960809 - DNA, 25 bp, Homo sapien
ctcctgctcggtggcggtcacaatg

SEQ ID NO: 3960810 - DNA, 25 bp, Homo sapien
tcccgcatgaacaggccgtaatctt

SEQ ID NO: 3960811 - DNA, 25 bp, Homo sapien
tttcggtgagccaatacctcgccac

SEQ ID NO: 3960812 - DNA, 25 bp, Homo sapien
ttcggtgagccaatacctcgccact

SEQ ID NO: 3960813 - DNA, 25 bp, Homo sapien
gtttcggtgagccaatacctcgcca

SEQ ID NO: 3960814 - DNA, 25 bp, Homo sapien
ccagcaataataatccgggagtcag

SEQ ID NO: 3960815 - DNA, 25 bp, Homo sapien
tcccctcacaggatgaaacacgtgt

SEQ ID NO: 3960816 - DNA, 25 bp, Homo sapien
aaacacgtgtttatgcaggctcagc

SEQ ID NO: 3960817 - DNA, 25 bp, Homo sapien
aacctttgacaaccacaagctggga

SEQ ID NO: 3960818 - DNA, 25 bp, Homo sapien
cagccccgagggacgggatcagtaa

SEQ ID NO: 3960819 - DNA, 25 bp, Homo sapien
aacatgggaagtggtgcaaataaac

SEQ ID NO: 3960820 - DNA, 25 bp, Homo sapien
tgtcccatgatgtagcaattaaaag

SEQ ID NO: 3960821 - DNA, 25 bp, Homo sapien
tatggtacatccctgtgatgtccca

SEQ ID NO: 3960822 - DNA, 25 bp, Homo sapien
ccaacaaggcccgttccatggcatg

SEQ ID NO: 3960823 - DNA, 25 bp, Homo sapien
ggctccaacaaggcccgttccatgg

SEQ ID NO: 3960824 - DNA, 25 bp, Homo sapien
ctccaacaaggcccgttccatggca

SEQ ID NO: 3960825 - DNA, 25 bp, Homo sapien
gggctccaacaaggcccgttccatg

SEQ ID NO: 3960826 - DNA, 25 bp, Homo sapien
gtgcaggccgggcttccccgaccac

SEQ ID NO: 3960827 - DNA, 25 bp, Homo sapien
agctccatgggccacggctagggcc

SEQ ID NO: 3960828 - DNA, 25 bp, Homo sapien
cttcttctggaccacaagcttcaga

SEQ ID NO: 3960829 - DNA, 25 bp, Homo sapien
ttcttctggaccacaagcttcagag

SEQ ID NO: 3960830 - DNA, 25 bp, Homo sapien
tgatgagtgcgctctcctgcagcag

SEQ ID NO: 3960831 - DNA, 25 bp, Homo sapien
agcagctcccggctgaggttcaggg

SEQ ID NO: 3960832 - DNA, 25 bp, Homo sapien
caggggaatgtcctcactgtccacc

SEQ ID NO: 3960833 - DNA, 25 bp, Homo sapien
ctgatgagtgcgctctcctgcagca

SEQ ID NO: 3960834 - DNA, 25 bp, Homo sapien
tcagcacggtccctcacagatgcag

SEQ ID NO: 3960835 - DNA, 25 bp, Homo sapien
tgctcacggactctgagcagcgtac

SEQ ID NO: 3960836 - DNA, 25 bp, Homo sapien
agcgcaggccgacggcggtgctctc

SEQ ID NO: 3960837 - DNA, 25 bp, Homo sapien
ggctgctgagaatggaatcagcacg

SEQ ID NO: 3960838 - DNA, 25 bp, Homo sapien
tttgcggctgtacagtgcaacgctg

SEQ ID NO: 3960839 - DNA, 25 bp, Homo sapien
tacagtgcaacgctggagcccagct

SEQ ID NO: 3960840 - DNA, 25 bp, Homo sapien
tggatgaggactttgcggctgtaca

SEQ ID NO: 3960841 - DNA, 25 bp, Homo sapien
ggctcacatcaaacatggacggttt

SEQ ID NO: 3960842 - DNA, 25 bp, Homo sapien
gcgacgtagcggtagaactcctcat

SEQ ID NO: 3960843 - DNA, 25 bp, Homo sapien
tccgtcttatagtgcagggtgtagc

SEQ ID NO: 3960844 - DNA, 25 bp, Homo sapien
catgtcgggcacgtagaagatgctg

SEQ ID NO: 3960845 - DNA, 25 bp, Homo sapien
tgttgccactcacggacatccttgg

SEQ ID NO: 3960846 - DNA, 25 bp, Homo sapien
cgagctgacgaatacagtgtgggcc

SEQ ID NO: 3960847 - DNA, 25 bp, Homo sapien
catgccgtgtgactccatccaggag

SEQ ID NO: 3960848 - DNA, 25 bp, Homo sapien
tcaggacaacatgtcaggaggacca

SEQ ID NO: 3960849 - DNA, 25 bp, Homo sapien
tcagtcactgaggacagcatgccgt

SEQ ID NO: 3960850 - DNA, 25 bp, Homo sapien
tgcaaggtgttcatccgccttccat

SEQ ID NO: 3960851 - DNA, 25 bp, Homo sapien
tccgccttccattcaagtacaaggg

SEQ ID NO: 3960852 - DNA, 25 bp, Homo sapien
tacaaggggaagctgacgaagttgc

SEQ ID NO: 3960853 - DNA, 25 bp, Homo sapien
gaagttgctgtacttcgttaccaca

SEQ ID NO: 3960854 - DNA, 25 bp, Homo sapien
agcggagcccacgtgagaaccagag

SEQ ID NO: 3960855 - DNA, 25 bp, Homo sapien
cctgggggtactcagggcctccctg

SEQ ID NO: 3960856 - DNA, 25 bp, Homo sapien
cggctgctgcgagactgcaatgtca

SEQ ID NO: 3960857 - DNA, 25 bp, Homo sapien
aacatggctttctgggctgactcct

SEQ ID NO: 3960858 - DNA, 25 bp, Homo sapien
gttctaactcccgaagcttcggcga

SEQ ID NO: 3960859 - DNA, 25 bp, Homo sapien
ccttgcagtcggatttcaggtggat

SEQ ID NO: 3960860 - DNA, 25 bp, Homo sapien
gggcctcgctggaaaactccttgca

SEQ ID NO: 3960861 - DNA, 25 bp, Homo sapien
gcttcggcgatttcaaacactccag

SEQ ID NO: 3960862 - DNA, 25 bp, Homo sapien
tcccgagggtttcataggcagagcc

SEQ ID NO: 3960863 - DNA, 25 bp, Homo sapien
gacactgggacataccctgcatggg

SEQ ID NO: 3960864 - DNA, 25 bp, Homo sapien
tcaggaacgatgagcctgtcgcagg

SEQ ID NO: 3960865 - DNA, 25 bp, Homo sapien
ccagctccaaatcgggtgccagatg

SEQ ID NO: 3960866 - DNA, 25 bp, Homo sapien
gctgccgagcgggaatagacctcca

SEQ ID NO: 3960867 - DNA, 25 bp, Homo sapien
cactctgtcagccaccatgaaagct

SEQ ID NO: 3960868 - DNA, 25 bp, Homo sapien
catgaaagctgagtagaaacccact

SEQ ID NO: 3960869 - DNA, 25 bp, Homo sapien
tctgaaagccactggtaacccaggc

SEQ ID NO: 3960870 - DNA, 25 bp, Homo sapien
gaacgttctgccaggtgcaatgcga

SEQ ID NO: 3960871 - DNA, 25 bp, Homo sapien
cacagagaggtgacacattagccct

SEQ ID NO: 3960872 - DNA, 25 bp, Homo sapien
cattagccctaggacaaccagctgg

SEQ ID NO: 3960873 - DNA, 25 bp, Homo sapien
cctggactctacactttgtgggaaa

SEQ ID NO: 3960874 - DNA, 25 bp, Homo sapien
ttcctgtgtcatcccgataccagta

SEQ ID NO: 3960875 - DNA, 25 bp, Homo sapien
tcttcctgtgtcatcccgataccag

SEQ ID NO: 3960876 - DNA, 25 bp, Homo sapien
ctttgaccccgatctggcaatcgtc

SEQ ID NO: 3960877 - DNA, 25 bp, Homo sapien
tctggcaatcgtccccaggttggac

SEQ ID NO: 3960878 - DNA, 25 bp, Homo sapien
gtcatagcagcttggcctcaccaga

SEQ ID NO: 3960879 - DNA, 25 bp, Homo sapien
agggacagcagaaagttgctttgtt

SEQ ID NO: 3960880 - DNA, 25 bp, Homo sapien
ttacaccagcaattaggaaaagcac

SEQ ID NO: 3960881 - DNA, 25 bp, Homo sapien
cgaaaagactaattctagtcatagc

SEQ ID NO: 3960882 - DNA, 25 bp, Homo sapien
gaatcacaatacagaccaacgcgct

SEQ ID NO: 3960883 - DNA, 25 bp, Homo sapien
ggcactgcctgagtcaaagggccct

SEQ ID NO: 3960884 - DNA, 25 bp, Homo sapien
caggtgttgggaacgcagctctgca

SEQ ID NO: 3960885 - DNA, 25 bp, Homo sapien
cacaaggccttactgaccatgggct

SEQ ID NO: 3960886 - DNA, 25 bp, Homo sapien
tgcttggccgtcagacaccagtttg

SEQ ID NO: 3960887 - DNA, 25 bp, Homo sapien
gcctttctcggcattggtctgcaag

SEQ ID NO: 3960888 - DNA, 25 bp, Homo sapien
agtttgtgacgcagtttttccaagg

SEQ ID NO: 3960889 - DNA, 25 bp, Homo sapien
tggagatcagctcccgtataaacac

SEQ ID NO: 3960890 - DNA, 25 bp, Homo sapien
aaaagcttctttgtctcggcctgga

SEQ ID NO: 3960891 - DNA, 25 bp, Homo sapien
ttttctgagtacagggaccgggcaa

SEQ ID NO: 3960892 - DNA, 25 bp, Homo sapien
gggcaacaatgtccaaaagcttctt

SEQ ID NO: 3960893 - DNA, 25 bp, Homo sapien
ctcggcctggaactcatgtttggaa

SEQ ID NO: 3960894 - DNA, 25 bp, Homo sapien
gtgctgctgataatcgagtgcaggg

SEQ ID NO: 3960895 - DNA, 25 bp, Homo sapien
gcggtctgcgtgctgaacagtcgtc

SEQ ID NO: 3960896 - DNA, 25 bp, Homo sapien
gataatcgagtgcaggggttcctcc

SEQ ID NO: 3960897 - DNA, 25 bp, Homo sapien
ttgtcctcggcggtctgcgtgctga

SEQ ID NO: 3960898 - DNA, 25 bp, Homo sapien
caggctgggtttcgcctggggccca

SEQ ID NO: 3960899 - DNA, 25 bp, Homo sapien
aagctccaggctgggtttcgcctgg

SEQ ID NO: 3960900 - DNA, 25 bp, Homo sapien
actgggctgtggtcctccgaggaca

SEQ ID NO: 3960901 - DNA, 25 bp, Homo sapien
ctccgaggacacagaattggttttc

SEQ ID NO: 3960902 - DNA, 25 bp, Homo sapien
gagatcctatcagtttacgttccca

SEQ ID NO: 3960903 - DNA, 25 bp, Homo sapien
gcagtggtagatactgccaagtcac

SEQ ID NO: 3960904 - DNA, 25 bp, Homo sapien
gggattagagccgtaagacaccacg

SEQ ID NO: 3960905 - DNA, 25 bp, Homo sapien
gagatgaaactcttggatctttgcc

SEQ ID NO: 3960906 - DNA, 25 bp, Homo sapien
taaaatggtagcaataaatccagcc

SEQ ID NO: 3960907 - DNA, 25 bp, Homo sapien
tactcttacattaacagactgaact

SEQ ID NO: 3960908 - DNA, 25 bp, Homo sapien
caaggattgtcagaattggtaaagg

SEQ ID NO: 3960909 - DNA, 25 bp, Homo sapien
ccagccacatcgatatttactctta

SEQ ID NO: 3960910 - DNA, 25 bp, Homo sapien
tcctgcagaggtcgcaccgttttac

SEQ ID NO: 3960911 - DNA, 25 bp, Homo sapien
tgtctacaaggtatgtgcctcaggg

SEQ ID NO: 3960912 - DNA, 25 bp, Homo sapien
tagccaccctagtgagtaggaagtg

SEQ ID NO: 3960913 - DNA, 25 bp, Homo sapien
aattcggtttgactgtgtgaggagc

SEQ ID NO: 3960914 - DNA, 25 bp, Homo sapien
ccacacaggtgacaatgacaagggc

SEQ ID NO: 3960915 - DNA, 25 bp, Homo sapien
cacacaggtgacaatgacaagggca

SEQ ID NO: 3960916 - DNA, 25 bp, Homo sapien
cccattcatccacacaggtgacaat

SEQ ID NO: 3960917 - DNA, 25 bp, Homo sapien
cttcccattcatccacacaggtgac

SEQ ID NO: 3960918 - DNA, 25 bp, Homo sapien
gcgcccgcagcaaaggccgcaggcg

SEQ ID NO: 3960919 - DNA, 25 bp, Homo sapien
gccggcgcccgcagcaaaggccgca

SEQ ID NO: 3960920 - DNA, 25 bp, Homo sapien
gcccgcagcaaaggccgcaggcggc

SEQ ID NO: 3960921 - DNA, 25 bp, Homo sapien
cgcccgcagcaaaggccgcaggcgg

SEQ ID NO: 3960922 - DNA, 25 bp, Homo sapien
cacgcgggaccgtacacgatgggaa

SEQ ID NO: 3960923 - DNA, 25 bp, Homo sapien
gcagccacgcgggaccgtacacgat

SEQ ID NO: 3960924 - DNA, 25 bp, Homo sapien
agccacgcgggaccgtacacgatgg

SEQ ID NO: 3960925 - DNA, 25 bp, Homo sapien
ccacgcgggaccgtacacgatggga

SEQ ID NO: 3960926 - DNA, 25 bp, Homo sapien
tgtgagcccatcaaaagcaccgttt

SEQ ID NO: 3960927 - DNA, 25 bp, Homo sapien
gaatgtcctggtagcaaaatggcca

SEQ ID NO: 3960928 - DNA, 25 bp, Homo sapien
aaatccatacgtccatgaggctgcg

SEQ ID NO: 3960929 - DNA, 25 bp, Homo sapien
aatttagatcaacggcaaagcactg

SEQ ID NO: 3960930 - DNA, 25 bp, Homo sapien
catggctcaaggtttccctacgggt

SEQ ID NO: 3960931 - DNA, 25 bp, Homo sapien
taagtatacagcatgagacacagcg

SEQ ID NO: 3960932 - DNA, 25 bp, Homo sapien
catgtggctaagtgcaagtatcccc

SEQ ID NO: 3960933 - DNA, 25 bp, Homo sapien
tctggattgcccaagacggttgcac

SEQ ID NO: 3960934 - DNA, 25 bp, Homo sapien
tgtgtgagcgacaatcacctgtgag

SEQ ID NO: 3960935 - DNA, 25 bp, Homo sapien
caactgacgaccctaactgtgtgag

SEQ ID NO: 3960936 - DNA, 25 bp, Homo sapien
cacctgtgagcctcgaatgtgtggg

SEQ ID NO: 3960937 - DNA, 25 bp, Homo sapien
tatgagcgaacaaccagaaccatgt

SEQ ID NO: 3960938 - DNA, 25 bp, Homo sapien
gtgtgcacgccggagtcaattccta

SEQ ID NO: 3960939 - DNA, 25 bp, Homo sapien
gagcgcttgcatgatttacactaga

SEQ ID NO: 3960940 - DNA, 25 bp, Homo sapien
caaaaggtccaagaacatgaaaggg

SEQ ID NO: 3960941 - DNA, 25 bp, Homo sapien
cggaagtcgcagttccatctaggaa

SEQ ID NO: 3960942 - DNA, 25 bp, Homo sapien
ccagggacagttcgctggacagcgc

SEQ ID NO: 3960943 - DNA, 25 bp, Homo sapien
cattgcactctgttcggggttcccc

SEQ ID NO: 3960944 - DNA, 25 bp, Homo sapien
tccctgatctatggagctggccatg

SEQ ID NO: 3960945 - DNA, 25 bp, Homo sapien
ttctctagcgtgtcccccgtggtgt

SEQ ID NO: 3960946 - DNA, 25 bp, Homo sapien
tatccgtggtgacgggctggaatgt

SEQ ID NO: 3960947 - DNA, 25 bp, Homo sapien
gctggggctgtatccgtggtgacgg

SEQ ID NO: 3960948 - DNA, 25 bp, Homo sapien
gctgtatccgtggtgacgggctgga

SEQ ID NO: 3960949 - DNA, 25 bp, Homo sapien
gggtgagacgtggtgtggcgaaggc

SEQ ID NO: 3960950 - DNA, 25 bp, Homo sapien
ctggggacccaatctgctgcttcat

SEQ ID NO: 3960951 - DNA, 25 bp, Homo sapien
gctgttgctgcagaatccgctgctg

SEQ ID NO: 3960952 - DNA, 25 bp, Homo sapien
cagggagatgcgaggcctgtggctg

SEQ ID NO: 3960953 - DNA, 25 bp, Homo sapien
tactaagggacgtggcgatctgctg

SEQ ID NO: 3960954 - DNA, 25 bp, Homo sapien
tctggccaagctgtcccatctgagc

SEQ ID NO: 3960955 - DNA, 25 bp, Homo sapien
atctgagccgccatctggcccatgg

SEQ ID NO: 3960956 - DNA, 25 bp, Homo sapien
tgcatggccggtgggtagcctccgg

SEQ ID NO: 3960957 - DNA, 25 bp, Homo sapien
aggctgctggaactggccgtgcccc

SEQ ID NO: 3960958 - DNA, 25 bp, Homo sapien
agctgcctccgtaacatttctcggt

SEQ ID NO: 3960959 - DNA, 25 bp, Homo sapien
cagctgcctccgtaacatttctcgg

SEQ ID NO: 3960960 - DNA, 25 bp, Homo sapien
gctgcctccgtaacatttctcggta

SEQ ID NO: 3960961 - DNA, 25 bp, Homo sapien
ctgcctccgtaacatttctcggtac

SEQ ID NO: 3960962 - DNA, 25 bp, Homo sapien
tcaggcctcccatcgcctgctgctg

SEQ ID NO: 3960963 - DNA, 25 bp, Homo sapien
gggttcaggcctcccatcgcctgct

SEQ ID NO: 3960964 - DNA, 25 bp, Homo sapien
tcctgggttcatgatgttcaaggcc

SEQ ID NO: 3960965 - DNA, 25 bp, Homo sapien
caggcctcccatcgcctgctgctgt

SEQ ID NO: 3960966 - DNA, 25 bp, Homo sapien
gattggccacgtacttggctgtgcg

SEQ ID NO: 3960967 - DNA, 25 bp, Homo sapien
tggctgtgcgctgtttgatgaaagc

SEQ ID NO: 3960968 - DNA, 25 bp, Homo sapien
gatgaaagctgccattagctgcggg

SEQ ID NO: 3960969 - DNA, 25 bp, Homo sapien
gatttgagaatgttcagcacctgct

SEQ ID NO: 3960970 - DNA, 25 bp, Homo sapien
cccgggaggcatgctgggcatgacg

SEQ ID NO: 3960971 - DNA, 25 bp, Homo sapien
ctgggcaagcctggcatgggctgct

SEQ ID NO: 3960972 - DNA, 25 bp, Homo sapien
gcatggatatcacaggcctgggcaa

SEQ ID NO: 3960973 - DNA, 25 bp, Homo sapien
catggatatcacaggcctgggcaag

SEQ ID NO: 3960974 - DNA, 25 bp, Homo sapien
gttgttgatgttcacccggtacagg

SEQ ID NO: 3960975 - DNA, 25 bp, Homo sapien
cagactctgctgaggcacgttgcgg

SEQ ID NO: 3960976 - DNA, 25 bp, Homo sapien
gcacctggctggtaggcttccctgt

SEQ ID NO: 3960977 - DNA, 25 bp, Homo sapien
catcttatgggcatggctcttcgtg

SEQ ID NO: 3960978 - DNA, 25 bp, Homo sapien
acaggatgcttcgtcagaccccagg

SEQ ID NO: 3960979 - DNA, 25 bp, Homo sapien
ggacaggatgcttcgtcagacccca

SEQ ID NO: 3960980 - DNA, 25 bp, Homo sapien
tcgtcagaccccaggccggctgtgg

SEQ ID NO: 3960981 - DNA, 25 bp, Homo sapien
gcacccatgcaaagggacaggatgc

SEQ ID NO: 3960982 - DNA, 25 bp, Homo sapien
tgaggaaggcgtcgcgcccatccat

SEQ ID NO: 3960983 - DNA, 25 bp, Homo sapien
cacgtggtgcttgcactcgttgcag

SEQ ID NO: 3960984 - DNA, 25 bp, Homo sapien
cccatccatgaggtcacagctgagc

SEQ ID NO: 3960985 - DNA, 25 bp, Homo sapien
tccaccagcatgcagagcgtggacc

SEQ ID NO: 3960986 - DNA, 25 bp, Homo sapien
tgtgcttctccatggtggcatacag

SEQ ID NO: 3960987 - DNA, 25 bp, Homo sapien
gtgcttctccatggtggcatacagc

SEQ ID NO: 3960988 - DNA, 25 bp, Homo sapien
ctccttgtgcttctccatggtggca

SEQ ID NO: 3960989 - DNA, 25 bp, Homo sapien
ccttgtgcttctccatggtggcata

SEQ ID NO: 3960990 - DNA, 25 bp, Homo sapien
gcttcttcttgttggcgcggctgat

SEQ ID NO: 3960991 - DNA, 25 bp, Homo sapien
gacacgttgggcatgctgggcttct

SEQ ID NO: 3960992 - DNA, 25 bp, Homo sapien
ctgggacaggtcattggacacgttg

SEQ ID NO: 3960993 - DNA, 25 bp, Homo sapien
ggcattcttgctgtcgccctgactg

SEQ ID NO: 3960994 - DNA, 25 bp, Homo sapien
gacccagagtgcgagttcagaaatt

SEQ ID NO: 3960995 - DNA, 25 bp, Homo sapien
tacgtgaacggctacaggtggctgt

SEQ ID NO: 3960996 - DNA, 25 bp, Homo sapien
tgtgccacaaccagatgcggaagat

SEQ ID NO: 3960997 - DNA, 25 bp, Homo sapien
tgctgcagccttcgggacagagcag

SEQ ID NO: 3960998 - DNA, 25 bp, Homo sapien
cagaaatcaccttcaaaatagggca

SEQ ID NO: 3960999 - DNA, 25 bp, Homo sapien
gaaatcaccttcaaaatagggcagt

SEQ ID NO: 3961000 - DNA, 25 bp, Homo sapien
tggcactggtgagcctgtcttcagt

SEQ ID NO: 3961001 - DNA, 25 bp, Homo sapien
gggccagaaatcaccttcaaaatag

SEQ ID NO: 3961002 - DNA, 25 bp, Homo sapien
gtattttttgatcaggtgggtggca

SEQ ID NO: 3961003 - DNA, 25 bp, Homo sapien
atggatgatccgctctgcaaacgcc

SEQ ID NO: 3961004 - DNA, 25 bp, Homo sapien
actcctgcagtcgttttggcttggg

SEQ ID NO: 3961005 - DNA, 25 bp, Homo sapien
tgggtggcaatggaagatgtaatca

SEQ ID NO: 3961006 - DNA, 25 bp, Homo sapien
gatgaacgtgccagtgaaatcggcc

SEQ ID NO: 3961007 - DNA, 25 bp, Homo sapien
taaagccaggacagaagtaaccaga

SEQ ID NO: 3961008 - DNA, 25 bp, Homo sapien
ggcaaggctcgaactttatcctgag

SEQ ID NO: 3961009 - DNA, 25 bp, Homo sapien
tgaggcctcattaaagaaccaggga

SEQ ID NO: 3961010 - DNA, 25 bp, Homo sapien
gtctccctggttcgagtggctctcc

SEQ ID NO: 3961011 - DNA, 25 bp, Homo sapien
tctccctggttcgagtggctctcct

SEQ ID NO: 3961012 - DNA, 25 bp, Homo sapien
ctggttcgagtggctctcctgcccc

SEQ ID NO: 3961013 - DNA, 25 bp, Homo sapien
ctgtgcggaggcaacgtggccggaa

SEQ ID NO: 3961014 - DNA, 25 bp, Homo sapien
taaatatccaataaggatctcatgg

SEQ ID NO: 3961015 - DNA, 25 bp, Homo sapien
tctcatggtaaacggctgtgcggag

SEQ ID NO: 3961016 - DNA, 25 bp, Homo sapien
agaaatgaatactatccagataaga

SEQ ID NO: 3961017 - DNA, 25 bp, Homo sapien
tggtctatcctaacacggctcactg

SEQ ID NO: 3961018 - DNA, 25 bp, Homo sapien
ctgcgttaggtaagagcgggtccca

SEQ ID NO: 3961019 - DNA, 25 bp, Homo sapien
aaggatgaatggcaccactcggcac

SEQ ID NO: 3961020 - DNA, 25 bp, Homo sapien
ggctcactgaatgacacgccctgga

SEQ ID NO: 3961021 - DNA, 25 bp, Homo sapien
cagagctttggttcgatatgggaaa

SEQ ID NO: 3961022 - DNA, 25 bp, Homo sapien
aaagcagacatccacgccgtcaatt

SEQ ID NO: 3961023 - DNA, 25 bp, Homo sapien
caatcagagccgtattcttggacgt

SEQ ID NO: 3961024 - DNA, 25 bp, Homo sapien
cacgccgtcaatttcctcaaaagca

SEQ ID NO: 3961025 - DNA, 25 bp, Homo sapien
gggtgtatgttccaagaccagcagt

SEQ ID NO: 3961026 - DNA, 25 bp, Homo sapien
tcgcagagcactgtagagagcaggc

SEQ ID NO: 3961027 - DNA, 25 bp, Homo sapien
agccagagccggacatttacaaagg

SEQ ID NO: 3961028 - DNA, 25 bp, Homo sapien
tgcacctctgtgaatgaaatacggg

SEQ ID NO: 3961029 - DNA, 25 bp, Homo sapien
tcagggtgattctggcgccgcaaaa

SEQ ID NO: 3961030 - DNA, 25 bp, Homo sapien
gacctccaccgtcttgtctgagctg

SEQ ID NO: 3961031 - DNA, 25 bp, Homo sapien
gcaaaaatttgttcactcggtcttc

SEQ ID NO: 3961032 - DNA, 25 bp, Homo sapien
gtttcccagtcttgtggtctgcagc

SEQ ID NO: 3961033 - DNA, 25 bp, Homo sapien
tcagtctcaagtctacagggtggct

SEQ ID NO: 3961034 - DNA, 25 bp, Homo sapien
cagaggcaggacattacttcaggac

SEQ ID NO: 3961035 - DNA, 25 bp, Homo sapien
aagtttccgagccttggcgagggca

SEQ ID NO: 3961036 - DNA, 25 bp, Homo sapien
gcaatgactgttctacggaggccta

SEQ ID NO: 3961037 - DNA, 25 bp, Homo sapien
tttcttcaagcagttgtcgcacaca

SEQ ID NO: 3961038 - DNA, 25 bp, Homo sapien
cttcaagcagttgtcgcacacaaaa

SEQ ID NO: 3961039 - DNA, 25 bp, Homo sapien
gttttcttcaagcagttgtcgcaca

SEQ ID NO: 3961040 - DNA, 25 bp, Homo sapien
ccagttttcttcaagcagttgtcgc

SEQ ID NO: 3961041 - DNA, 25 bp, Homo sapien
tagtgcagaacgcaaatctgatgca

SEQ ID NO: 3961042 - DNA, 25 bp, Homo sapien
aaatctgatgcatcttccggccaca

SEQ ID NO: 3961043 - DNA, 25 bp, Homo sapien
caaatgatgtcatagtgcagaacgc

SEQ ID NO: 3961044 - DNA, 25 bp, Homo sapien
ggccacactccttgcaatcaacgaa

SEQ ID NO: 3961045 - DNA, 25 bp, Homo sapien
ttttcaaactgatcctttgaaattg

SEQ ID NO: 3961046 - DNA, 25 bp, Homo sapien
tcttttcaaactgatcctttgaaat

SEQ ID NO: 3961047 - DNA, 25 bp, Homo sapien
ttcaaactgatcctttgaaattgtc

SEQ ID NO: 3961048 - DNA, 25 bp, Homo sapien
ttcttcttttcaaactgatcctttg

SEQ ID NO: 3961049 - DNA, 25 bp, Homo sapien
tctggggctgtgaagggtcgtcacc

SEQ ID NO: 3961050 - DNA, 25 bp, Homo sapien
gggctgtgaagggtcgtcacccagg

SEQ ID NO: 3961051 - DNA, 25 bp, Homo sapien
gtctggggctgtgaagggtcgtcac

SEQ ID NO: 3961052 - DNA, 25 bp, Homo sapien
ctgtgaagggtcgtcacccagggtc

SEQ ID NO: 3961053 - DNA, 25 bp, Homo sapien
gaaacacttctcacagaaatgatac

SEQ ID NO: 3961054 - DNA, 25 bp, Homo sapien
tgtgaaacacttctcacagaaatga

SEQ ID NO: 3961055 - DNA, 25 bp, Homo sapien
ctgtgaaacacttctcacagaaatg

SEQ ID NO: 3961056 - DNA, 25 bp, Homo sapien
gtgaaacacttctcacagaaatgat

SEQ ID NO: 3961057 - DNA, 25 bp, Homo sapien
tcagcaagaaggccatacttgggtg

SEQ ID NO: 3961058 - DNA, 25 bp, Homo sapien
agcaagaaggccatacttgggtgaa

SEQ ID NO: 3961059 - DNA, 25 bp, Homo sapien
tgtcagcaagaaggccatacttggg

SEQ ID NO: 3961060 - DNA, 25 bp, Homo sapien
ctgtcagcaagaaggccatacttgg

SEQ ID NO: 3961061 - DNA, 25 bp, Homo sapien
catttttggtactgggaccaatcat

SEQ ID NO: 3961062 - DNA, 25 bp, Homo sapien
tctgaaagacttagcgaatgactgt

SEQ ID NO: 3961063 - DNA, 25 bp, Homo sapien
taacataaatgcagtcagggtcaaa

SEQ ID NO: 3961064 - DNA, 25 bp, Homo sapien
gtaagacaatatagagcctgggctc

SEQ ID NO: 3961065 - DNA, 25 bp, Homo sapien
gatcgtctgaggaacgctacgccta

SEQ ID NO: 3961066 - DNA, 25 bp, Homo sapien
gaactatggccaactagaagggacc

SEQ ID NO: 3961067 - DNA, 25 bp, Homo sapien
taaaatcagctaaagcaaccctggc

SEQ ID NO: 3961068 - DNA, 25 bp, Homo sapien
gatagatgttattgccagactgccc

SEQ ID NO: 3961069 - DNA, 25 bp, Homo sapien
tctatgtcgccaaggctgataacat

SEQ ID NO: 3961070 - DNA, 25 bp, Homo sapien
gatgaacgtgccttgccctaagaca

SEQ ID NO: 3961071 - DNA, 25 bp, Homo sapien
cctaagacataatgcaggatgctgc

SEQ ID NO: 3961072 - DNA, 25 bp, Homo sapien
gaaataatgtacacagactataacc

SEQ ID NO: 3961073 - DNA, 25 bp, Homo sapien
tattctgatagctgtagtaggcagc

SEQ ID NO: 3961074 - DNA, 25 bp, Homo sapien
cagcatcgcgaggaatggtacacag

SEQ ID NO: 3961075 - DNA, 25 bp, Homo sapien
tcccatagcagcacaaagtctgtgg

SEQ ID NO: 3961076 - DNA, 25 bp, Homo sapien
tgcttcccatagcagcacaaagtct

SEQ ID NO: 3961077 - DNA, 25 bp, Homo sapien
ctgtcttataatgttctagtctact

SEQ ID NO: 3961078 - DNA, 25 bp, Homo sapien
tagtctactatagagactagtaaat

SEQ ID NO: 3961079 - DNA, 25 bp, Homo sapien
tctagtctactatagagactagtaa

SEQ ID NO: 3961080 - DNA, 25 bp, Homo sapien
gtcttataatgttctagtctactat

SEQ ID NO: 3961081 - DNA, 25 bp, Homo sapien
tgttgaacatgagccagacgtcgtc

SEQ ID NO: 3961082 - DNA, 25 bp, Homo sapien
tactgcaaaacttatagactcggga

SEQ ID NO: 3961083 - DNA, 25 bp, Homo sapien
ttccgcttgatggtggagaggtcca

SEQ ID NO: 3961084 - DNA, 25 bp, Homo sapien
gatgtcttgcgattatagagccagg

SEQ ID NO: 3961085 - DNA, 25 bp, Homo sapien
ggatctacaggctgccggaaaggta

SEQ ID NO: 3961086 - DNA, 25 bp, Homo sapien
tcgatacagtgcttctagggttggc

SEQ ID NO: 3961087 - DNA, 25 bp, Homo sapien
agggcctggcgtaactcctctggtt

SEQ ID NO: 3961088 - DNA, 25 bp, Homo sapien
gctgccggaaaggtaatgactctgg

SEQ ID NO: 3961089 - DNA, 25 bp, Homo sapien
gaagcggcaagcatcaggtacatgg

SEQ ID NO: 3961090 - DNA, 25 bp, Homo sapien
gagatgaaaacaggcgcaccaagaa

SEQ ID NO: 3961091 - DNA, 25 bp, Homo sapien
caaattctggaaagcgtcatctgat

SEQ ID NO: 3961092 - DNA, 25 bp, Homo sapien
tggacctgccatcaattctgtgtgg

SEQ ID NO: 3961093 - DNA, 25 bp, Homo sapien
aggacctgctccacgcggcagggct

SEQ ID NO: 3961094 - DNA, 25 bp, Homo sapien
gcagggctgttgcagcgcaccagca

SEQ ID NO: 3961095 - DNA, 25 bp, Homo sapien
ggctctcgagcccttggaggctgct

SEQ ID NO: 3961096 - DNA, 25 bp, Homo sapien
atctcccaaaaacgcggctctcgag

SEQ ID NO: 3961097 - DNA, 25 bp, Homo sapien
actacaggcgcctgtcaccatggcc

SEQ ID NO: 3961098 - DNA, 25 bp, Homo sapien
gactacaggcgcctgtcaccatggc

SEQ ID NO: 3961099 - DNA, 25 bp, Homo sapien
ctacaggcgcctgtcaccatggccg

SEQ ID NO: 3961100 - DNA, 25 bp, Homo sapien
ctctcatccaggctagaacgcactg

SEQ ID NO: 3961101 - DNA, 25 bp, Homo sapien
tcatccaggctagaacgcactggca

SEQ ID NO: 3961102 - DNA, 25 bp, Homo sapien
atccaggctagaacgcactggcaca

SEQ ID NO: 3961103 - DNA, 25 bp, Homo sapien
tcactctctcatccaggctagaacg

SEQ ID NO: 3961104 - DNA, 25 bp, Homo sapien
ttaagcgtttggtacatgtgtgtgg

SEQ ID NO: 3961105 - DNA, 25 bp, Homo sapien
ctggagtccaacagtggcatcacag

SEQ ID NO: 3961106 - DNA, 25 bp, Homo sapien
aaaaaatattcttgatgagatagta

SEQ ID NO: 3961107 - DNA, 25 bp, Homo sapien
ttgatgagatagtaaaaagtattcc

SEQ ID NO: 3961108 - DNA, 25 bp, Homo sapien
ctatagattctggttcaatgtcgca

SEQ ID NO: 3961109 - DNA, 25 bp, Homo sapien
cttccactgtgaggcgggcttacct

SEQ ID NO: 3961110 - DNA, 25 bp, Homo sapien
cacaatcagctgaaagggctacgaa

SEQ ID NO: 3961111 - DNA, 25 bp, Homo sapien
ttcccaaaagtgtcatctgcagcct

SEQ ID NO: 3961112 - DNA, 25 bp, Homo sapien
tatgagtaaagccaagctccttaac

SEQ ID NO: 3961113 - DNA, 25 bp, Homo sapien
tggaatcctaacaccgtggaaaagc

SEQ ID NO: 3961114 - DNA, 25 bp, Homo sapien
tccttaacctgctcaaggacccaga

SEQ ID NO: 3961115 - DNA, 25 bp, Homo sapien
tctcctactcacatacatcactggt

SEQ ID NO: 3961116 - DNA, 25 bp, Homo sapien
gctgtgccgttactgctactctctt

SEQ ID NO: 3961117 - DNA, 25 bp, Homo sapien
gagttgcatttatgattcctcttct

SEQ ID NO: 3961118 - DNA, 25 bp, Homo sapien
tgttaccgcaacctcacgggaagac

SEQ ID NO: 3961119 - DNA, 25 bp, Homo sapien
aagtacttggtgttcattaagtcgc

SEQ ID NO: 3961120 - DNA, 25 bp, Homo sapien
taagtcgcttcagcacagagtcagt

SEQ ID NO: 3961121 - DNA, 25 bp, Homo sapien
tgtagtctacctctgcagaactaga

SEQ ID NO: 3961122 - DNA, 25 bp, Homo sapien
ttggtgctcacaaccagactgctgt

SEQ ID NO: 3961123 - DNA, 25 bp, Homo sapien
cagcttctgccataggttaattagt

SEQ ID NO: 3961124 - DNA, 25 bp, Homo sapien
tggagagcccactacagttggtgct

SEQ ID NO: 3961125 - DNA, 25 bp, Homo sapien
tggattcaccaggatcgggctcagt

SEQ ID NO: 3961126 - DNA, 25 bp, Homo sapien
ggaattggtttctgcgctggccacc

SEQ ID NO: 3961127 - DNA, 25 bp, Homo sapien
tccagcacaggtacgtcaggtcctg

SEQ ID NO: 3961128 - DNA, 25 bp, Homo sapien
ggtagggactctgttatcaatgctg

SEQ ID NO: 3961129 - DNA, 25 bp, Homo sapien
tatcttctaagagtcttggcccaaa

SEQ ID NO: 3961130 - DNA, 25 bp, Homo sapien
ggcctgacacacaatttttatggga

SEQ ID NO: 3961131 - DNA, 25 bp, Homo sapien
ttatgggaaaattatcttctaagag

SEQ ID NO: 3961132 - DNA, 25 bp, Homo sapien
tctaagagtcttggcccaaaaacag

SEQ ID NO: 3961133 - DNA, 25 bp, Homo sapien
gggtgctctgggtttgggtagcact

SEQ ID NO: 3961134 - DNA, 25 bp, Homo sapien
ggaggctgggcgtgcacaggcgtcg

SEQ ID NO: 3961135 - DNA, 25 bp, Homo sapien
cgtcggctgttgctgcgatgactga

SEQ ID NO: 3961136 - DNA, 25 bp, Homo sapien
cactgagccaggagtcggggtggga

SEQ ID NO: 3961137 - DNA, 25 bp, Homo sapien
aggaggcggtgttgggtgcagtggt

SEQ ID NO: 3961138 - DNA, 25 bp, Homo sapien
tcatcccaggtggtgtcgtgtgctg

SEQ ID NO: 3961139 - DNA, 25 bp, Homo sapien
ccggaagacgacacaggagttgatg

SEQ ID NO: 3961140 - DNA, 25 bp, Homo sapien
tgtcactggagggcaaggtagctgg

SEQ ID NO: 3961141 - DNA, 25 bp, Homo sapien
tgagagggttaggaagagcagcacc

SEQ ID NO: 3961142 - DNA, 25 bp, Homo sapien
ccccagcatgttgagagggttagga

SEQ ID NO: 3961143 - DNA, 25 bp, Homo sapien
cagcatgttgagagggttaggaaga

SEQ ID NO: 3961144 - DNA, 25 bp, Homo sapien
catgttgagagggttaggaagagca

SEQ ID NO: 3961145 - DNA, 25 bp, Homo sapien
cagccaaatgtatgggaatttaatc

SEQ ID NO: 3961146 - DNA, 25 bp, Homo sapien
catatccactcggatacattccaag

SEQ ID NO: 3961147 - DNA, 25 bp, Homo sapien
gaaacttatggcttaaacacacaca

SEQ ID NO: 3961148 - DNA, 25 bp, Homo sapien
tgtaatgggcactcctcaataacgg

SEQ ID NO: 3961149 - DNA, 25 bp, Homo sapien
cagtggagacaggtcaaaagaaaca

SEQ ID NO: 3961150 - DNA, 25 bp, Homo sapien
catgggtccttctcactcgcttttt

SEQ ID NO: 3961151 - DNA, 25 bp, Homo sapien
gcctctcagggtcacgttaaagtta

SEQ ID NO: 3961152 - DNA, 25 bp, Homo sapien
ttctgttagcttgatttcacctggc

SEQ ID NO: 3961153 - DNA, 25 bp, Homo sapien
taatttccacgaaggaagacagaaa

SEQ ID NO: 3961154 - DNA, 25 bp, Homo sapien
cattctggaattttaatttccacga

SEQ ID NO: 3961155 - DNA, 25 bp, Homo sapien
tgaaatgtgcattctggaattttaa

SEQ ID NO: 3961156 - DNA, 25 bp, Homo sapien
tttaatttccacgaaggaagacaga

SEQ ID NO: 3961157 - DNA, 25 bp, Homo sapien
ccacggtcccagtggggcacagtac

SEQ ID NO: 3961158 - DNA, 25 bp, Homo sapien
tatttcctagggagccacggtccca

SEQ ID NO: 3961159 - DNA, 25 bp, Homo sapien
cacaagaattttatttcctagggag

SEQ ID NO: 3961160 - DNA, 25 bp, Homo sapien
ttcctagggagccacggtcccagtg

SEQ ID NO: 3961161 - DNA, 25 bp, Homo sapien
ggtgtgtgcacccatcatgttcgga

SEQ ID NO: 3961162 - DNA, 25 bp, Homo sapien
tcatcgccccgctggatgacgggaa

SEQ ID NO: 3961163 - DNA, 25 bp, Homo sapien
ctgtgacacgcctgtttgggctggc

SEQ ID NO: 3961164 - DNA, 25 bp, Homo sapien
agaaactggctctgagcgggcgcct

SEQ ID NO: 3961165 - DNA, 25 bp, Homo sapien
acgaggtcccatgggtgcttgtggc

SEQ ID NO: 3961166 - DNA, 25 bp, Homo sapien
ggtgcttgtggcaactggacgttcc

SEQ ID NO: 3961167 - DNA, 25 bp, Homo sapien
aggtcccatgggtgcttgtggcaac

SEQ ID NO: 3961168 - DNA, 25 bp, Homo sapien
ccatgggtgcttgtggcaactggac

SEQ ID NO: 3961169 - DNA, 25 bp, Homo sapien
tgtaaatgtacccacaacggttcat

SEQ ID NO: 3961170 - DNA, 25 bp, Homo sapien
atgtacccacaacggttcattagga

SEQ ID NO: 3961171 - DNA, 25 bp, Homo sapien
ctgtaaatgtacccacaacggttca

SEQ ID NO: 3961172 - DNA, 25 bp, Homo sapien
taaatgtacccacaacggttcatta

SEQ ID NO: 3961173 - DNA, 25 bp, Homo sapien
gcatgcgattcactggcagggacag

SEQ ID NO: 3961174 - DNA, 25 bp, Homo sapien
cttgcatgcgattcactggcaggga

SEQ ID NO: 3961175 - DNA, 25 bp, Homo sapien
tgagaaacttgcatgcgattcactg

SEQ ID NO: 3961176 - DNA, 25 bp, Homo sapien
agaaacttgcatgcgattcactggc

SEQ ID NO: 3961177 - DNA, 25 bp, Homo sapien
aaacaggctaagggatggcagtagg

SEQ ID NO: 3961178 - DNA, 25 bp, Homo sapien
aaggaaacaggctaagggatggcag

SEQ ID NO: 3961179 - DNA, 25 bp, Homo sapien
cttgtttatgtaaacgcgacctccg

SEQ ID NO: 3961180 - DNA, 25 bp, Homo sapien
atgccttgtttatgtaaacgcgacc

SEQ ID NO: 3961181 - DNA, 25 bp, Homo sapien
tggttccccaagatgccttgtttat

SEQ ID NO: 3961182 - DNA, 25 bp, Homo sapien
tggctggttccccaagatgccttgt

SEQ ID NO: 3961183 - DNA, 25 bp, Homo sapien
tgcaaatacctgatacaccagaagc

SEQ ID NO: 3961184 - DNA, 25 bp, Homo sapien
tatatactccatgcaccaatgtagc

SEQ ID NO: 3961185 - DNA, 25 bp, Homo sapien
gccagagcacggtaaacagcaacct

SEQ ID NO: 3961186 - DNA, 25 bp, Homo sapien
ggagtctgtcccaactacatagatt

SEQ ID NO: 3961187 - DNA, 25 bp, Homo sapien
tgttggcagactcgtacatgtcccc

SEQ ID NO: 3961188 - DNA, 25 bp, Homo sapien
tccatgcggcgatcctttagagctg

SEQ ID NO: 3961189 - DNA, 25 bp, Homo sapien
tccccttccactttcttagcatagg

SEQ ID NO: 3961190 - DNA, 25 bp, Homo sapien
ataggctaccaggttttccatgcgg

SEQ ID NO: 3961191 - DNA, 25 bp, Homo sapien
tatgcactagatggctccgcaggtc

SEQ ID NO: 3961192 - DNA, 25 bp, Homo sapien
tcctgagtgacatgttcgtgccagc

SEQ ID NO: 3961193 - DNA, 25 bp, Homo sapien
gagttggagccatcgttcatcagtg

SEQ ID NO: 3961194 - DNA, 25 bp, Homo sapien
ccttacaccggtgctagaaggagga

SEQ ID NO: 3961195 - DNA, 25 bp, Homo sapien
gctgctgatctgttgttattcctcc

SEQ ID NO: 3961196 - DNA, 25 bp, Homo sapien
tgctggaatgttcattggattattt

SEQ ID NO: 3961197 - DNA, 25 bp, Homo sapien
ccccagggaagtcggaagagctgat

SEQ ID NO: 3961198 - DNA, 25 bp, Homo sapien
ggaagtcggaagagctgattctgaa

SEQ ID NO: 3961199 - DNA, 25 bp, Homo sapien
gttttgaattccactagctggagac

SEQ ID NO: 3961200 - DNA, 25 bp, Homo sapien
gttcatgtaggggagtccgagagca

SEQ ID NO: 3961201 - DNA, 25 bp, Homo sapien
tgaattccactagctggagacccca

SEQ ID NO: 3961202 - DNA, 25 bp, Homo sapien
tttgaattccactagctggagaccc

SEQ ID NO: 3961203 - DNA, 25 bp, Homo sapien
tggcatttttcaaagggaggcaaac

SEQ ID NO: 3961204 - DNA, 25 bp, Homo sapien
tgtcgtgaagatgcacaatgggcaa

SEQ ID NO: 3961205 - DNA, 25 bp, Homo sapien
tgttggtttcgcttgtcactggcat

SEQ ID NO: 3961206 - DNA, 25 bp, Homo sapien
cgtgtgcagttcttccaatgagaga

SEQ ID NO: 3961207 - DNA, 25 bp, Homo sapien
ggtacaattcccactgatgtttgca

SEQ ID NO: 3961208 - DNA, 25 bp, Homo sapien
cagtttgcgtttttcaggatctgca

SEQ ID NO: 3961209 - DNA, 25 bp, Homo sapien
tttcatggttcgacaatgcgggagc

SEQ ID NO: 3961210 - DNA, 25 bp, Homo sapien
cttatgagcatgaagcagtagaacc

SEQ ID NO: 3961211 - DNA, 25 bp, Homo sapien
gaatgcagggctcaactcctaagag

SEQ ID NO: 3961212 - DNA, 25 bp, Homo sapien
gctgagaagcagaacaccatgaatg

SEQ ID NO: 3961213 - DNA, 25 bp, Homo sapien
tacactgcaggaaatttggaaagct

SEQ ID NO: 3961214 - DNA, 25 bp, Homo sapien
gctgggcttgggagcaaaactcttg

SEQ ID NO: 3961215 - DNA, 25 bp, Homo sapien
gaatctaacatgcatttttattagg

SEQ ID NO: 3961216 - DNA, 25 bp, Homo sapien
aaaagaatctaacatgcatttttat

SEQ ID NO: 3961217 - DNA, 25 bp, Homo sapien
taacatgcatttttattaggactgt

SEQ ID NO: 3961218 - DNA, 25 bp, Homo sapien
catgcatttttattaggactgttat

SEQ ID NO: 3961219 - DNA, 25 bp, Homo sapien
tggaaacctgactcctccacaacct

SEQ ID NO: 3961220 - DNA, 25 bp, Homo sapien
aacctgactcctccacaacctccac

SEQ ID NO: 3961221 - DNA, 25 bp, Homo sapien
ctggaaacctgactcctccacaacc

SEQ ID NO: 3961222 - DNA, 25 bp, Homo sapien
gaaacctgactcctccacaacctcc

SEQ ID NO: 3961223 - DNA, 25 bp, Homo sapien
caccaagagcacaccagacatgcag

SEQ ID NO: 3961224 - DNA, 25 bp, Homo sapien
cagctgggaaggtcaggctctcagc

SEQ ID NO: 3961225 - DNA, 25 bp, Homo sapien
gctgcttgtggtcctcacccaccac

SEQ ID NO: 3961226 - DNA, 25 bp, Homo sapien
ccaagagcacaccagacatgcagca

SEQ ID NO: 3961227 - DNA, 25 bp, Homo sapien
catatttggcacgttggtgactgaa

SEQ ID NO: 3961228 - DNA, 25 bp, Homo sapien
gactaaagggctgtccaaatggact

SEQ ID NO: 3961229 - DNA, 25 bp, Homo sapien
tggacttgtgttcccagttattccc

SEQ ID NO: 3961230 - DNA, 25 bp, Homo sapien
catgctctgtttgctggctaactgg

SEQ ID NO: 3961231 - DNA, 25 bp, Homo sapien
cattaaaaagcattgtgaccaagcg

SEQ ID NO: 3961232 - DNA, 25 bp, Homo sapien
gaccaagcgtatcaatcaattaact

SEQ ID NO: 3961233 - DNA, 25 bp, Homo sapien
taactgtttgagaacctacttctgt

SEQ ID NO: 3961234 - DNA, 25 bp, Homo sapien
tggattagccttaacatgactgcag

SEQ ID NO: 3961235 - DNA, 25 bp, Homo sapien
cagagctttccacttgcacacagaa

SEQ ID NO: 3961236 - DNA, 25 bp, Homo sapien
ccagagctttccacttgcacacaga

SEQ ID NO: 3961237 - DNA, 25 bp, Homo sapien
ttgcacacagaattactgacccatc

SEQ ID NO: 3961238 - DNA, 25 bp, Homo sapien
cacagaattactgacccatcagcct

SEQ ID NO: 3961239 - DNA, 25 bp, Homo sapien
aaaacagggtggcaaagtgcggcct

SEQ ID NO: 3961240 - DNA, 25 bp, Homo sapien
cattgcggtcaactatgtgggctct

SEQ ID NO: 3961241 - DNA, 25 bp, Homo sapien
tcctctaagggttgcgtgagaacta

SEQ ID NO: 3961242 - DNA, 25 bp, Homo sapien
tatgcgaagcactaagatgagcagc

SEQ ID NO: 3961243 - DNA, 25 bp, Homo sapien
gataagtcctaactggaagactagt

SEQ ID NO: 3961244 - DNA, 25 bp, Homo sapien
ggtctgaacatttgccctggaagga

SEQ ID NO: 3961245 - DNA, 25 bp, Homo sapien
caaagtatttagcaactctcactgt

SEQ ID NO: 3961246 - DNA, 25 bp, Homo sapien
ttgtcttcttgggttaagatcctcc

SEQ ID NO: 3961247 - DNA, 25 bp, Homo sapien
gaaagctaccttatgctacaataga

SEQ ID NO: 3961248 - DNA, 25 bp, Homo sapien
tcgaagccaagaggacataagcatc

SEQ ID NO: 3961249 - DNA, 25 bp, Homo sapien
gccagtgagatgaaacccaacaccg

SEQ ID NO: 3961250 - DNA, 25 bp, Homo sapien
cccaacaccgagaatttgaagcaaa

SEQ ID NO: 3961251 - DNA, 25 bp, Homo sapien
agtatctgaccaaaatgatggctga

SEQ ID NO: 3961252 - DNA, 25 bp, Homo sapien
tcttgacaagcctgcagtgactctg

SEQ ID NO: 3961253 - DNA, 25 bp, Homo sapien
ctgactgagtactgggagctgatct

SEQ ID NO: 3961254 - DNA, 25 bp, Homo sapien
caggtcccaaccaaaatctgctgaa

SEQ ID NO: 3961255 - DNA, 25 bp, Homo sapien
tcttaatctgtaacatgtgacttgc

SEQ ID NO: 3961256 - DNA, 25 bp, Homo sapien
taaaaacgatactgacctaagagac

SEQ ID NO: 3961257 - DNA, 25 bp, Homo sapien
gagactactaaaagcctaaaagagc

SEQ ID NO: 3961258 - DNA, 25 bp, Homo sapien
tgtgacttgcctacctcctatcctt

SEQ ID NO: 3961259 - DNA, 25 bp, Homo sapien
tcttccaagcatgagtggcacgtgg

SEQ ID NO: 3961260 - DNA, 25 bp, Homo sapien
ggttcacggacacattaggccctgt

SEQ ID NO: 3961261 - DNA, 25 bp, Homo sapien
gatacttcactggatggccacagag

SEQ ID NO: 3961262 - DNA, 25 bp, Homo sapien
cctcagtgggcagtacacaggcaga

SEQ ID NO: 3961263 - DNA, 25 bp, Homo sapien
tattcctgggttgatactagagccg

SEQ ID NO: 3961264 - DNA, 25 bp, Homo sapien
gagatccattcatgacttgcgcctg

SEQ ID NO: 3961265 - DNA, 25 bp, Homo sapien
acctgcgttagggtctcagccagca

SEQ ID NO: 3961266 - DNA, 25 bp, Homo sapien
cattgggtatcagctcatcaggaag

SEQ ID NO: 3961267 - DNA, 25 bp, Homo sapien
tttcttcaggttttctacagcctcc

SEQ ID NO: 3961268 - DNA, 25 bp, Homo sapien
tcttcaggttttctacagcctcctc

SEQ ID NO: 3961269 - DNA, 25 bp, Homo sapien
tcaggttttctacagcctcctcttc

SEQ ID NO: 3961270 - DNA, 25 bp, Homo sapien
ctttcttcaggttttctacagcctc

SEQ ID NO: 3961271 - DNA, 25 bp, Homo sapien
gatactaaagcttaagttgatcacc

SEQ ID NO: 3961272 - DNA, 25 bp, Homo sapien
agtaatgtcttttcgtatgctcacg

SEQ ID NO: 3961273 - DNA, 25 bp, Homo sapien
agcctctacttcccggattcaaaca

SEQ ID NO: 3961274 - DNA, 25 bp, Homo sapien
tatgctcacgaattgactgatggct

SEQ ID NO: 3961275 - DNA, 25 bp, Homo sapien
gaagacagccaatggacaccaagcc

SEQ ID NO: 3961276 - DNA, 25 bp, Homo sapien
agaaggaagcgagtcactgctcagg

SEQ ID NO: 3961277 - DNA, 25 bp, Homo sapien
cagaatcactgatctgctgaagagc

SEQ ID NO: 3961278 - DNA, 25 bp, Homo sapien
tgagatagaatagaagtcggcctcc

SEQ ID NO: 3961279 - DNA, 25 bp, Homo sapien
ccagtttccagttagggtccttatg

SEQ ID NO: 3961280 - DNA, 25 bp, Homo sapien
cccactggggatatactggcccagg

SEQ ID NO: 3961281 - DNA, 25 bp, Homo sapien
agcaccaggtggtaacacctggaat

SEQ ID NO: 3961282 - DNA, 25 bp, Homo sapien
cccaggtgattaacttcagcaccag

SEQ ID NO: 3961283 - DNA, 25 bp, Homo sapien
ggttgctaacctacagatatttcta

SEQ ID NO: 3961284 - DNA, 25 bp, Homo sapien
caacttctgtgtgagctggctgcat

SEQ ID NO: 3961285 - DNA, 25 bp, Homo sapien
tgatgacagtagcaaaacctctaat

SEQ ID NO: 3961286 - DNA, 25 bp, Homo sapien
ttagaagtcctacccatcaagaaac

SEQ ID NO: 3961287 - DNA, 25 bp, Homo sapien
ttgagagtggtccaactgtagcccc

SEQ ID NO: 3961288 - DNA, 25 bp, Homo sapien
gctccccaacgggtgctcagagaat

SEQ ID NO: 3961289 - DNA, 25 bp, Homo sapien
cagtcaccaaattgcagcccatggg

SEQ ID NO: 3961290 - DNA, 25 bp, Homo sapien
gaagtctgcggacccataataggct

SEQ ID NO: 3961291 - DNA, 25 bp, Homo sapien
acagctgtgtctagtgcaaatctga

SEQ ID NO: 3961292 - DNA, 25 bp, Homo sapien
gctaccactgcaagactactggaga

SEQ ID NO: 3961293 - DNA, 25 bp, Homo sapien
gttcgcagcggcacacaagtttttg

SEQ ID NO: 3961294 - DNA, 25 bp, Homo sapien
gaaggcagcgatgtaattcaatttg

SEQ ID NO: 3961295 - DNA, 25 bp, Homo sapien
gttgggcggtccgtccagcaagttc

SEQ ID NO: 3961296 - DNA, 25 bp, Homo sapien
tgtgctgtcattcgccgagaaaccg

SEQ ID NO: 3961297 - DNA, 25 bp, Homo sapien
gggcggtccgtccagcaagttctca

SEQ ID NO: 3961298 - DNA, 25 bp, Homo sapien
ccgggcgagctgagtttggctcttt

SEQ ID NO: 3961299 - DNA, 25 bp, Homo sapien
ctcgcgaaaacagccccgggcacgg

SEQ ID NO: 3961300 - DNA, 25 bp, Homo sapien
gccgccgccgtgaggaaaaacaatg

SEQ ID NO: 3961301 - DNA, 25 bp, Homo sapien
ttaatgaattcgctcgcggcccgac

SEQ ID NO: 3961302 - DNA, 25 bp, Homo sapien
tcccgagcgcgacactccgcggtgg

SEQ ID NO: 3961303 - DNA, 25 bp, Homo sapien
aaacaatgcgccgagcggggtcgcc

SEQ ID NO: 3961304 - DNA, 25 bp, Homo sapien
atcgcgctcgaagccccggtcgggt

SEQ ID NO: 3961305 - DNA, 25 bp, Homo sapien
ggtcgggtccgcgacaagatggcgg

SEQ ID NO: 3961306 - DNA, 25 bp, Homo sapien
ccgcgacaagatggcggctgttgat

SEQ ID NO: 3961307 - DNA, 25 bp, Homo sapien
ggccgagtagatcgcgctcgaagcc

SEQ ID NO: 3961308 - DNA, 25 bp, Homo sapien
gaggcaggacagagacagtagctcc

SEQ ID NO: 3961309 - DNA, 25 bp, Homo sapien
tgagtttcaaggagcctcgtgccct

SEQ ID NO: 3961310 - DNA, 25 bp, Homo sapien
tcctattgggagtgcgatgccggaa

SEQ ID NO: 3961311 - DNA, 25 bp, Homo sapien
taaagtctttcctgcaaaccccagc

SEQ ID NO: 3961312 - DNA, 25 bp, Homo sapien
ctgtggcatacgtagccagggagca

SEQ ID NO: 3961313 - DNA, 25 bp, Homo sapien
tatacgccataagtaaagatgagct

SEQ ID NO: 3961314 - DNA, 25 bp, Homo sapien
tcttcagaccctgtggcatacgtag

SEQ ID NO: 3961315 - DNA, 25 bp, Homo sapien
ggaacctgggggtgcatatacgcca

SEQ ID NO: 3961316 - DNA, 25 bp, Homo sapien
ttcttctacccgatcgtcacggctg

SEQ ID NO: 3961317 - DNA, 25 bp, Homo sapien
tgcaaaccgttcttctacccgatcg

SEQ ID NO: 3961318 - DNA, 25 bp, Homo sapien
ttctctgatgcaaaccgttcttcta

SEQ ID NO: 3961319 - DNA, 25 bp, Homo sapien
tctcatctttacttagtgtcacctt

SEQ ID NO: 3961320 - DNA, 25 bp, Homo sapien
taaacagttgccgaatgaacattcg

SEQ ID NO: 3961321 - DNA, 25 bp, Homo sapien
cgtgaatccttctctggctatgcct

SEQ ID NO: 3961322 - DNA, 25 bp, Homo sapien
gacccaaaattcacggcctcttgtg

SEQ ID NO: 3961323 - DNA, 25 bp, Homo sapien
gcctcttgtgtatcccgtgaatcct

SEQ ID NO: 3961324 - DNA, 25 bp, Homo sapien
tcttggtgttaacctcctttgacat

SEQ ID NO: 3961325 - DNA, 25 bp, Homo sapien
ttcttggtgttaacctcctttgaca

SEQ ID NO: 3961326 - DNA, 25 bp, Homo sapien
ccctgccacgcactgtcccgggcgg

SEQ ID NO: 3961327 - DNA, 25 bp, Homo sapien
gcccctgccacgcactgtcccgggc

SEQ ID NO: 3961328 - DNA, 25 bp, Homo sapien
gggcccctgccacgcactgtcccgg

SEQ ID NO: 3961329 - DNA, 25 bp, Homo sapien
ctgccacgcactgtcccgggcggag

SEQ ID NO: 3961330 - DNA, 25 bp, Homo sapien
attggttaatccctaaagagaatga

SEQ ID NO: 3961331 - DNA, 25 bp, Homo sapien
aattggttaatccctaaagagaatg

SEQ ID NO: 3961332 - DNA, 25 bp, Homo sapien
ttggttaatccctaaagagaatgat

SEQ ID NO: 3961333 - DNA, 25 bp, Homo sapien
ggttaatccctaaagagaatgatta

SEQ ID NO: 3961334 - DNA, 25 bp, Homo sapien
gccaacaaacttgaaaatttggtga

SEQ ID NO: 3961335 - DNA, 25 bp, Homo sapien
atagaaaaccttagtccttgggcag

SEQ ID NO: 3961336 - DNA, 25 bp, Homo sapien
aataagagtatattatcgaaaactt

SEQ ID NO: 3961337 - DNA, 25 bp, Homo sapien
gtatattatcgaaaactttaagcca

SEQ ID NO: 3961338 - DNA, 25 bp, Homo sapien
gagcaataggttacaccatgtggcc

SEQ ID NO: 3961339 - DNA, 25 bp, Homo sapien
caggtgtcaataagcaacacacagg

SEQ ID NO: 3961340 - DNA, 25 bp, Homo sapien
caatgacggaattgccttatgtcga

SEQ ID NO: 3961341 - DNA, 25 bp, Homo sapien
taacaagctgtacaggttggtagcg

SEQ ID NO: 3961342 - DNA, 25 bp, Homo sapien
caaatggcacatctatcttgtcagg

SEQ ID NO: 3961343 - DNA, 25 bp, Homo sapien
ttctgtctgctcttgaaagggtcca

SEQ ID NO: 3961344 - DNA, 25 bp, Homo sapien
atctgcgttaggcaaatctggaaga

SEQ ID NO: 3961345 - DNA, 25 bp, Homo sapien
caggtcatgcacatctgcgttaggc

SEQ ID NO: 3961346 - DNA, 25 bp, Homo sapien
taactcggtagaaaggcaggcttgt

SEQ ID NO: 3961347 - DNA, 25 bp, Homo sapien
tgtaaatgacaccaatacagcgtgc

SEQ ID NO: 3961348 - DNA, 25 bp, Homo sapien
taatgggaaaccatcccggcctgta

SEQ ID NO: 3961349 - DNA, 25 bp, Homo sapien
agtaagatggtctctcaaagctctg

SEQ ID NO: 3961350 - DNA, 25 bp, Homo sapien
acaggcacacgatgccctgcctggc

SEQ ID NO: 3961351 - DNA, 25 bp, Homo sapien
gctacaggcacacgatgccctgcct

SEQ ID NO: 3961352 - DNA, 25 bp, Homo sapien
ggcacacgatgccctgcctggctaa

SEQ ID NO: 3961353 - DNA, 25 bp, Homo sapien
ggctacaggcacacgatgccctgcc

SEQ ID NO: 3961354 - DNA, 25 bp, Homo sapien
tagtcacggatatctgcttccagag

SEQ ID NO: 3961355 - DNA, 25 bp, Homo sapien
tagtctaattcccaggttggccgtc

SEQ ID NO: 3961356 - DNA, 25 bp, Homo sapien
gggttctctgaaaaaggcgctgaat

SEQ ID NO: 3961357 - DNA, 25 bp, Homo sapien
tgaggtggattctctatcaaggcac

SEQ ID NO: 3961358 - DNA, 25 bp, Homo sapien
tcagcggaacggagaaatcatggcc

SEQ ID NO: 3961359 - DNA, 25 bp, Homo sapien
cccagaagggcgcatgttttttaca

SEQ ID NO: 3961360 - DNA, 25 bp, Homo sapien
tgacagttcttgctaaatggccctt

SEQ ID NO: 3961361 - DNA, 25 bp, Homo sapien
tatcatgagatacgccagcactgac

SEQ ID NO: 3961362 - DNA, 25 bp, Homo sapien
ctttctcggtgaagtgaagggtcac

SEQ ID NO: 3961363 - DNA, 25 bp, Homo sapien
gaagggtcacctctcattgtggaag

SEQ ID NO: 3961364 - DNA, 25 bp, Homo sapien
tattccccatgtgacaatcaagctg

SEQ ID NO: 3961365 - DNA, 25 bp, Homo sapien
tactgggttggcctatgccaggcag

SEQ ID NO: 3961366 - DNA, 25 bp, Homo sapien
ctcctgcacggcaactctcttcctg

SEQ ID NO: 3961367 - DNA, 25 bp, Homo sapien
aatttacaattaggctcctgcacgg

SEQ ID NO: 3961368 - DNA, 25 bp, Homo sapien
tttacaattaggctcctgcacggca

SEQ ID NO: 3961369 - DNA, 25 bp, Homo sapien
ttcaaatttacaattaggctcctgc

SEQ ID NO: 3961370 - DNA, 25 bp, Homo sapien
gcagacgtgtctttggaaactacaa

SEQ ID NO: 3961371 - DNA, 25 bp, Homo sapien
caaatgattacagcccatgtgacag

SEQ ID NO: 3961372 - DNA, 25 bp, Homo sapien
atgtgacaggaagcacgcggccttc

SEQ ID NO: 3961373 - DNA, 25 bp, Homo sapien
tctccggatcgtgtgcaaatgtgca

SEQ ID NO: 3961374 - DNA, 25 bp, Homo sapien
tataattcgatctgagctgggactg

SEQ ID NO: 3961375 - DNA, 25 bp, Homo sapien
cctagatacggtgtgagaactccat

SEQ ID NO: 3961376 - DNA, 25 bp, Homo sapien
gaggtattgccaccctgaagcacga

SEQ ID NO: 3961377 - DNA, 25 bp, Homo sapien
gcaagactgacaaggagtgcaccct

SEQ ID NO: 3961378 - DNA, 25 bp, Homo sapien
tgtttcgacaaacagagcacctcgg

SEQ ID NO: 3961379 - DNA, 25 bp, Homo sapien
tgtgcttacatagagaggtcgggtc

SEQ ID NO: 3961380 - DNA, 25 bp, Homo sapien
tgtgatccacacagaagttagggct

SEQ ID NO: 3961381 - DNA, 25 bp, Homo sapien
tctcgtgggacgtgggaaaaagcaa

SEQ ID NO: 3961382 - DNA, 25 bp, Homo sapien
ctttgacgggctccttccacggtct

SEQ ID NO: 3961383 - DNA, 25 bp, Homo sapien
tatggctttgccaaatcgacccctt

SEQ ID NO: 3961384 - DNA, 25 bp, Homo sapien
cttggtgagttcgttggcttcttct

SEQ ID NO: 3961385 - DNA, 25 bp, Homo sapien
cactctttgaaacgttgagcttggt

SEQ ID NO: 3961386 - DNA, 25 bp, Homo sapien
ggtccctctgtagtcgaagtcatag

SEQ ID NO: 3961387 - DNA, 25 bp, Homo sapien
cgatgagctcgttgaggacccggta

SEQ ID NO: 3961388 - DNA, 25 bp, Homo sapien
tgttgttgaagtcgtccaccacgcg

SEQ ID NO: 3961389 - DNA, 25 bp, Homo sapien
taggagctcgtcaaagtccccgatg

SEQ ID NO: 3961390 - DNA, 25 bp, Homo sapien
tctctgctccctttgataactgagc

SEQ ID NO: 3961391 - DNA, 25 bp, Homo sapien
gataactgagcctgctttcagcggg

SEQ ID NO: 3961392 - DNA, 25 bp, Homo sapien
tgctccctttgataactgagcctgc

SEQ ID NO: 3961393 - DNA, 25 bp, Homo sapien
tccctttgataactgagcctgcttt

SEQ ID NO: 3961394 - DNA, 25 bp, Homo sapien
ctgaaattctgtactgcgtcaaggg

SEQ ID NO: 3961395 - DNA, 25 bp, Homo sapien
tgtactgcgtcaaggggcgaagtta

SEQ ID NO: 3961396 - DNA, 25 bp, Homo sapien
tctgtactgcgtcaaggggcgaagt

SEQ ID NO: 3961397 - DNA, 25 bp, Homo sapien
gtcaaggggcgaagttaatacagaa

SEQ ID NO: 3961398 - DNA, 25 bp, Homo sapien
agtgatacggttctgaaggccagcg

SEQ ID NO: 3961399 - DNA, 25 bp, Homo sapien
aatgatgagaactgggcttgtcccc

SEQ ID NO: 3961400 - DNA, 25 bp, Homo sapien
tcttactggatgtcgctaatggcaa

SEQ ID NO: 3961401 - DNA, 25 bp, Homo sapien
tgagcaccaagaccggctgggactt

SEQ ID NO: 3961402 - DNA, 25 bp, Homo sapien
agtgcacgacggcaatcagcgcggc

SEQ ID NO: 3961403 - DNA, 25 bp, Homo sapien
cacagggagacgtagagcaggagca

SEQ ID NO: 3961404 - DNA, 25 bp, Homo sapien
cagcgcggccgagcctgtgaacact

SEQ ID NO: 3961405 - DNA, 25 bp, Homo sapien
ctgtctgggcacagggagacgtaga

SEQ ID NO: 3961406 - DNA, 25 bp, Homo sapien
acgtggtagccagccggcgatccac

SEQ ID NO: 3961407 - DNA, 25 bp, Homo sapien
ttggtgcaggccatgacgtcctcca

SEQ ID NO: 3961408 - DNA, 25 bp, Homo sapien
caggatggccccgatgcagtgacgt

SEQ ID NO: 3961409 - DNA, 25 bp, Homo sapien
tgttggtctcatattcggaggtgac

SEQ ID NO: 3961410 - DNA, 25 bp, Homo sapien
aggcttgacgattcctggtaaatgg

SEQ ID NO: 3961411 - DNA, 25 bp, Homo sapien
gggtcctcaacacggccctcagagg

SEQ ID NO: 3961412 - DNA, 25 bp, Homo sapien
acagcgcaggttcccgtcaacctgg

SEQ ID NO: 3961413 - DNA, 25 bp, Homo sapien
gtaaatggaaccaaatcccaccaca

SEQ ID NO: 3961414 - DNA, 25 bp, Homo sapien
aagtggaccctgaaagggtttgcag

SEQ ID NO: 3961415 - DNA, 25 bp, Homo sapien
ggagttctgggaaacactgagcaca

SEQ ID NO: 3961416 - DNA, 25 bp, Homo sapien
ctgagcacacgccacagacagcatg

SEQ ID NO: 3961417 - DNA, 25 bp, Homo sapien
tttgcaggcgacggctcctttggga

SEQ ID NO: 3961418 - DNA, 25 bp, Homo sapien
gacaagctggcagcggttggggctg

SEQ ID NO: 3961419 - DNA, 25 bp, Homo sapien
gcagtctctgaacctggaaatctgg

SEQ ID NO: 3961420 - DNA, 25 bp, Homo sapien
gctgtggaggcaccgccccctccag

SEQ ID NO: 3961421 - DNA, 25 bp, Homo sapien
ctccagcgaggtggtccccccgcat

SEQ ID NO: 3961422 - DNA, 25 bp, Homo sapien
ggtggccgcctcgtacttcaggaag

SEQ ID NO: 3961423 - DNA, 25 bp, Homo sapien
gacagcgtcagaaacactgtggtcg

SEQ ID NO: 3961424 - DNA, 25 bp, Homo sapien
tgggactagcaaacgtcttcacggg

SEQ ID NO: 3961425 - DNA, 25 bp, Homo sapien
actgtggtcgacagaaacacatcca

SEQ ID NO: 3961426 - DNA, 25 bp, Homo sapien
cacactagtgttcggcaattgaggg

SEQ ID NO: 3961427 - DNA, 25 bp, Homo sapien
caagatgagttactgactggcgcag

SEQ ID NO: 3961428 - DNA, 25 bp, Homo sapien
taacgatgctgacacgtccaagagg

SEQ ID NO: 3961429 - DNA, 25 bp, Homo sapien
tggagaaacaggcaacacgtgcgga

SEQ ID NO: 3961430 - DNA, 25 bp, Homo sapien
cctgtaggatcgctccagctcctga

SEQ ID NO: 3961431 - DNA, 25 bp, Homo sapien
gaactgattaatgggcggcttaaaa

SEQ ID NO: 3961432 - DNA, 25 bp, Homo sapien
tgtaggatcgctccagctcctgatc

SEQ ID NO: 3961433 - DNA, 25 bp, Homo sapien
ctgattaatgggcggcttaaaaaag

SEQ ID NO: 3961434 - DNA, 25 bp, Homo sapien
tttgataacgtccacaaagtgggcg

SEQ ID NO: 3961435 - DNA, 25 bp, Homo sapien
tctgactgttggtgagcttctcctc

SEQ ID NO: 3961436 - DNA, 25 bp, Homo sapien
tcttgaacctcagcggaaggagagc

SEQ ID NO: 3961437 - DNA, 25 bp, Homo sapien
gctgaggagcccgttctgagttttg

SEQ ID NO: 3961438 - DNA, 25 bp, Homo sapien
tctcagaactaagaagtcgacaaga

SEQ ID NO: 3961439 - DNA, 25 bp, Homo sapien
gaactaagaagtcgacaagacagga

SEQ ID NO: 3961440 - DNA, 25 bp, Homo sapien
tcagaactaagaagtcgacaagaca

SEQ ID NO: 3961441 - DNA, 25 bp, Homo sapien
taagaagtcgacaagacaggaatgt

SEQ ID NO: 3961442 - DNA, 25 bp, Homo sapien
ggtggatgcgccaggagaggaactg

SEQ ID NO: 3961443 - DNA, 25 bp, Homo sapien
tggatgcgccaggagaggaactgac

SEQ ID NO: 3961444 - DNA, 25 bp, Homo sapien
tgggtggatgcgccaggagaggaac

SEQ ID NO: 3961445 - DNA, 25 bp, Homo sapien
cttgggtggatgcgccaggagagga

SEQ ID NO: 3961446 - DNA, 25 bp, Homo sapien
ggaacaacagccatgagcttgttac

SEQ ID NO: 3961447 - DNA, 25 bp, Homo sapien
aggaacaacagccatgagcttgtta

SEQ ID NO: 3961448 - DNA, 25 bp, Homo sapien
ttatgctcgtcttggcagccgtttt

SEQ ID NO: 3961449 - DNA, 25 bp, Homo sapien
aatgtgattccgcacgaagggcagg

SEQ ID NO: 3961450 - DNA, 25 bp, Homo sapien
tttgggagcaaatgtgattccgcac

SEQ ID NO: 3961451 - DNA, 25 bp, Homo sapien
cttggtgctgtttttatgctcgtct

SEQ ID NO: 3961452 - DNA, 25 bp, Homo sapien
tgtatgatctcgtcctttgcagcca

SEQ ID NO: 3961453 - DNA, 25 bp, Homo sapien
catccacgcaatatctgcagtctcg

SEQ ID NO: 3961454 - DNA, 25 bp, Homo sapien
ggaccaccgtcatatggctctggcc

SEQ ID NO: 3961455 - DNA, 25 bp, Homo sapien
agcaatgatcattccgcagacggcc

SEQ ID NO: 3961456 - DNA, 25 bp, Homo sapien
gtttcttcacagtcgcaaagccaag

SEQ ID NO: 3961457 - DNA, 25 bp, Homo sapien
tcttcacagtcgcaaagccaaggct

SEQ ID NO: 3961458 - DNA, 25 bp, Homo sapien
cagtttcttcacagtcgcaaagcca

SEQ ID NO: 3961459 - DNA, 25 bp, Homo sapien
tttcttcacagtcgcaaagccaagg

SEQ ID NO: 3961460 - DNA, 25 bp, Homo sapien
tcaaaggttttgacagtctgcgcca

SEQ ID NO: 3961461 - DNA, 25 bp, Homo sapien
ttggctctctgacccgatatcaggt

SEQ ID NO: 3961462 - DNA, 25 bp, Homo sapien
agaaagcaaggcctctgcacagctg

SEQ ID NO: 3961463 - DNA, 25 bp, Homo sapien
tgaggacacctgtgagccgtcaatg

SEQ ID NO: 3961464 - DNA, 25 bp, Homo sapien
tcttggagtaatggctgcatgtttc

SEQ ID NO: 3961465 - DNA, 25 bp, Homo sapien
gctgtatagattacccagcctatgc

SEQ ID NO: 3961466 - DNA, 25 bp, Homo sapien
gcttcacaagcagatggagacggac

SEQ ID NO: 3961467 - DNA, 25 bp, Homo sapien
tcagcccggcaatagcaaaccaggc

SEQ ID NO: 3961468 - DNA, 25 bp, Homo sapien
cctccacacggagaactgaaagacg

SEQ ID NO: 3961469 - DNA, 25 bp, Homo sapien
gagtacagtggctccctcagctcac

SEQ ID NO: 3961470 - DNA, 25 bp, Homo sapien
tatgcctggctaattttttttgtat

SEQ ID NO: 3961471 - DNA, 25 bp, Homo sapien
agtacagtggctccctcagctcact

SEQ ID NO: 3961472 - DNA, 25 bp, Homo sapien
ctatgcctggctaattttttttgta

SEQ ID NO: 3961473 - DNA, 25 bp, Homo sapien
taagtgggatgagatactggttcac

SEQ ID NO: 3961474 - DNA, 25 bp, Homo sapien
aatgggcgtgccatgggtgctctcc

SEQ ID NO: 3961475 - DNA, 25 bp, Homo sapien
ggtgctctccaaccgcattgggctt

SEQ ID NO: 3961476 - DNA, 25 bp, Homo sapien
aacacactgctgcacaatgggcgtg

SEQ ID NO: 3961477 - DNA, 25 bp, Homo sapien
tgtagtagtcagttttaagttgaag

SEQ ID NO: 3961478 - DNA, 25 bp, Homo sapien
ctgtagtagtcagttttaagttgaa

SEQ ID NO: 3961479 - DNA, 25 bp, Homo sapien
ggagatctggatttctccattataa

SEQ ID NO: 3961480 - DNA, 25 bp, Homo sapien
tggagatctggatttctccattata

SEQ ID NO: 3961481 - DNA, 25 bp, Homo sapien
tttggagatctggatttctccatta

SEQ ID NO: 3961482 - DNA, 25 bp, Homo sapien
attttggagatctggatttctccat

SEQ ID NO: 3961483 - DNA, 25 bp, Homo sapien
cctccaacccatcccttccgcatcc

SEQ ID NO: 3961484 - DNA, 25 bp, Homo sapien
ccgcctccaacccatcccttccgca

SEQ ID NO: 3961485 - DNA, 25 bp, Homo sapien
aacccatcccttccgcatccttcat

SEQ ID NO: 3961486 - DNA, 25 bp, Homo sapien
tccaacccatcccttccgcatcctt

SEQ ID NO: 3961487 - DNA, 25 bp, Homo sapien
agaacatgatattctcatacccaga

SEQ ID NO: 3961488 - DNA, 25 bp, Homo sapien
cccctttacagtcaaggatgatttt

SEQ ID NO: 3961489 - DNA, 25 bp, Homo sapien
cctcacttaagtgccttttttgcca

SEQ ID NO: 3961490 - DNA, 25 bp, Homo sapien
caactaggaaaactcatataatggc

SEQ ID NO: 3961491 - DNA, 25 bp, Homo sapien
gacacacaaagccacgtatcctacg

SEQ ID NO: 3961492 - DNA, 25 bp, Homo sapien
aagtataagaaacgcccagactcgg

SEQ ID NO: 3961493 - DNA, 25 bp, Homo sapien
cagactcggtaaatcctgcagatgc

SEQ ID NO: 3961494 - DNA, 25 bp, Homo sapien
tgctgagcgagagaatccagacaca

SEQ ID NO: 3961495 - DNA, 25 bp, Homo sapien
gacagcagcaggttcggaatcacac

SEQ ID NO: 3961496 - DNA, 25 bp, Homo sapien
tgagattctcactcgggtcagaggg

SEQ ID NO: 3961497 - DNA, 25 bp, Homo sapien
gccttagtgcgaactggaacttctc

SEQ ID NO: 3961498 - DNA, 25 bp, Homo sapien
tagtcagtcgtgttggcatgcgcct

SEQ ID NO: 3961499 - DNA, 25 bp, Homo sapien
accatggaggattaaaatcaccaca

SEQ ID NO: 3961500 - DNA, 25 bp, Homo sapien
ccatggaggattaaaatcaccacat

SEQ ID NO: 3961501 - DNA, 25 bp, Homo sapien
tgccagaacccagaaccgtgcctgg

SEQ ID NO: 3961502 - DNA, 25 bp, Homo sapien
ccagcgatcctcctatattattgac

SEQ ID NO: 3961503 - DNA, 25 bp, Homo sapien
aattcttgtcccctattacaagagc

SEQ ID NO: 3961504 - DNA, 25 bp, Homo sapien
tctgttttgtttacggctgtattgc

SEQ ID NO: 3961505 - DNA, 25 bp, Homo sapien
tgtgctcccaggctagttctagaag

SEQ ID NO: 3961506 - DNA, 25 bp, Homo sapien
gatcacggatcctgctccacgatca

SEQ ID NO: 3961507 - DNA, 25 bp, Homo sapien
catgaaactacccttctgcaaagcc

SEQ ID NO: 3961508 - DNA, 25 bp, Homo sapien
ggcacgacacagatttcagagtgaa

SEQ ID NO: 3961509 - DNA, 25 bp, Homo sapien
aagaatagcagtaaggagcttcaaa

SEQ ID NO: 3961510 - DNA, 25 bp, Homo sapien
agaatagcagtaaggagcttcaaac

SEQ ID NO: 3961511 - DNA, 25 bp, Homo sapien
tgccgaggtaaagcagtgcacatac

SEQ ID NO: 3961512 - DNA, 25 bp, Homo sapien
taatttaatacaatcaggatcaggg

SEQ ID NO: 3961513 - DNA, 25 bp, Homo sapien
ttaatacaatcaggatcagggaggg

SEQ ID NO: 3961514 - DNA, 25 bp, Homo sapien
tcagggaggggggatgccgaggtaa

SEQ ID NO: 3961515 - DNA, 25 bp, Homo sapien
aagtattttgcggtggcctcagaaa

SEQ ID NO: 3961516 - DNA, 25 bp, Homo sapien
tttcaactggtcagcaaccacgctc

SEQ ID NO: 3961517 - DNA, 25 bp, Homo sapien
aatgtgaactttgccggccactccc

SEQ ID NO: 3961518 - DNA, 25 bp, Homo sapien
ccatcttccatttcgtaccggtcat

SEQ ID NO: 3961519 - DNA, 25 bp, Homo sapien
atgccgcaaaggacggtgcccgtgt

SEQ ID NO: 3961520 - DNA, 25 bp, Homo sapien
cccaggatgccgcaaaggacggtgc

SEQ ID NO: 3961521 - DNA, 25 bp, Homo sapien
gtcaaatttaaacctcctcatgccc

SEQ ID NO: 3961522 - DNA, 25 bp, Homo sapien
tcgttggaccacacgtcaaatttaa

SEQ ID NO: 3961523 - DNA, 25 bp, Homo sapien
catgtggaccgcaaaatagatgctc

SEQ ID NO: 3961524 - DNA, 25 bp, Homo sapien
ggttgatcttgacgcgcacgctgtt

SEQ ID NO: 3961525 - DNA, 25 bp, Homo sapien
taatgccgggcgtacagcttggtga

SEQ ID NO: 3961526 - DNA, 25 bp, Homo sapien
gaagcaggcttcatcccggaaatgg

SEQ ID NO: 3961527 - DNA, 25 bp, Homo sapien
tggctccgggaccgctttgctcgct

SEQ ID NO: 3961528 - DNA, 25 bp, Homo sapien
tgcgcacaaacaactccgctggcgg

SEQ ID NO: 3961529 - DNA, 25 bp, Homo sapien
aggagccgcgctccgatgcgtcaaa

SEQ ID NO: 3961530 - DNA, 25 bp, Homo sapien
ggaagttcagaccttgagcgctccc

SEQ ID NO: 3961531 - DNA, 25 bp, Homo sapien
tacttaggagatctgcgttggtgtg

SEQ ID NO: 3961532 - DNA, 25 bp, Homo sapien
tgtgggccgacacgcagcagaacat

SEQ ID NO: 3961533 - DNA, 25 bp, Homo sapien
actctctgtacttaggagatctgcg

SEQ ID NO: 3961534 - DNA, 25 bp, Homo sapien
agatctgcgttggtgtgggccgaca

SEQ ID NO: 3961535 - DNA, 25 bp, Homo sapien
gataaggaccagaaacacgccaggt

SEQ ID NO: 3961536 - DNA, 25 bp, Homo sapien
gaagcagacgatgagttcttggcca

SEQ ID NO: 3961537 - DNA, 25 bp, Homo sapien
tgcttaagcgcaaagaagaatgcca

SEQ ID NO: 3961538 - DNA, 25 bp, Homo sapien
tataaaatcggacaactcagaagtg

SEQ ID NO: 3961539 - DNA, 25 bp, Homo sapien
cacgtcgcagcaagcacactgaggg

SEQ ID NO: 3961540 - DNA, 25 bp, Homo sapien
actctgcacagagtgcacgtcgcag

SEQ ID NO: 3961541 - DNA, 25 bp, Homo sapien
ggattacaaactgggggtctcaggc

SEQ ID NO: 3961542 - DNA, 25 bp, Homo sapien
tgaatgaaggggattacaaactggg

SEQ ID NO: 3961543 - DNA, 25 bp, Homo sapien
tgagtgacaacagaatcaggtcttc

SEQ ID NO: 3961544 - DNA, 25 bp, Homo sapien
caccctggacctcaataacatgtat

SEQ ID NO: 3961545 - DNA, 25 bp, Homo sapien
tggcagtttggaaacgaggagacca

SEQ ID NO: 3961546 - DNA, 25 bp, Homo sapien
tgtctagatgtgcaacagccttggc

SEQ ID NO: 3961547 - DNA, 25 bp, Homo sapien
ttatggtagtagaagcaagattgcc

SEQ ID NO: 3961548 - DNA, 25 bp, Homo sapien
gcctgtgacgctgtatatctttcat

SEQ ID NO: 3961549 - DNA, 25 bp, Homo sapien
tatgcgctgcatcgagatgctcttg

SEQ ID NO: 3961550 - DNA, 25 bp, Homo sapien
gcactgcaccctggaattggcctgt

SEQ ID NO: 3961551 - DNA, 25 bp, Homo sapien
cacgcggtgaatgcctgagaggaca

SEQ ID NO: 3961552 - DNA, 25 bp, Homo sapien
ttttcggtcccgatcgaggatctgg

SEQ ID NO: 3961553 - DNA, 25 bp, Homo sapien
tcactgcacaagttcagggcctttt

SEQ ID NO: 3961554 - DNA, 25 bp, Homo sapien
ggactcaatggcaagtcactgcaca

SEQ ID NO: 3961555 - DNA, 25 bp, Homo sapien
tggctgtgtacaaaggagcccctcg

SEQ ID NO: 3961556 - DNA, 25 bp, Homo sapien
tgtggagccgtgcatgctagccttg

SEQ ID NO: 3961557 - DNA, 25 bp, Homo sapien
tctgtactgactgatgggcaggcct

SEQ ID NO: 3961558 - DNA, 25 bp, Homo sapien
cttgttcccaagagaagcggctggc

SEQ ID NO: 3961559 - DNA, 25 bp, Homo sapien
gaagaagtccttataggcctcgcgg

SEQ ID NO: 3961560 - DNA, 25 bp, Homo sapien
tgtggaaactgcaaaggagcaactc

SEQ ID NO: 3961561 - DNA, 25 bp, Homo sapien
caatgttaagccttggtggccaccg

SEQ ID NO: 3961562 - DNA, 25 bp, Homo sapien
tctgaaatttgagagactggcggcc

SEQ ID NO: 3961563 - DNA, 25 bp, Homo sapien
gctgacattggtctttgccaggatg

SEQ ID NO: 3961564 - DNA, 25 bp, Homo sapien
gtcattttgtccttgtaagtctgca

SEQ ID NO: 3961565 - DNA, 25 bp, Homo sapien
tgtaagtctgcaggtagcggtcaac

SEQ ID NO: 3961566 - DNA, 25 bp, Homo sapien
tttatcgggatcttccacaatgtcc

SEQ ID NO: 3961567 - DNA, 25 bp, Homo sapien
ccgtaaacccgcatgagcatttggg

SEQ ID NO: 3961568 - DNA, 25 bp, Homo sapien
tgggtgtccggcttatactcttgtg

SEQ ID NO: 3961569 - DNA, 25 bp, Homo sapien
gaaccactggcacacgtcgttgaag

SEQ ID NO: 3961570 - DNA, 25 bp, Homo sapien
gccagaaggagctgacgtaaaccct

SEQ ID NO: 3961571 - DNA, 25 bp, Homo sapien
tgatgcctggtgtatccacaaaagt

SEQ ID NO: 3961572 - DNA, 25 bp, Homo sapien
gatgccctcgatggttttcagctta

SEQ ID NO: 3961573 - DNA, 25 bp, Homo sapien
gcttgcggttctcgatgatgcctgg

SEQ ID NO: 3961574 - DNA, 25 bp, Homo sapien
ggcccatgcatgaggaccgtgaact

SEQ ID NO: 3961575 - DNA, 25 bp, Homo sapien
caggaacagtaccatgggcttggag

SEQ ID NO: 3961576 - DNA, 25 bp, Homo sapien
tagcgagtattttccagcccaagga

SEQ ID NO: 3961577 - DNA, 25 bp, Homo sapien
caaggaggtagtttatcatggtaga

SEQ ID NO: 3961578 - DNA, 25 bp, Homo sapien
acactccacggtcccaggaacagta

SEQ ID NO: 3961579 - DNA, 25 bp, Homo sapien
tccatgacaaatttgccagtgccca

SEQ ID NO: 3961580 - DNA, 25 bp, Homo sapien
tctagggccactctcaaacactagc

SEQ ID NO: 3961581 - DNA, 25 bp, Homo sapien
tgcatccaatgtccttccgaaggcc

SEQ ID NO: 3961582 - DNA, 25 bp, Homo sapien
gctctcgtgctttcaaatccagtgg

SEQ ID NO: 3961583 - DNA, 25 bp, Homo sapien
gctctggtcttccttctccgaggct

SEQ ID NO: 3961584 - DNA, 25 bp, Homo sapien
ggccccatctttttacagagagcgt

SEQ ID NO: 3961585 - DNA, 25 bp, Homo sapien
ggctaaagctcagtcctaaccaggt

SEQ ID NO: 3961586 - DNA, 25 bp, Homo sapien
tctgtatcttgccttcggatgctct

SEQ ID NO: 3961587 - DNA, 25 bp, Homo sapien
gctcattgtacttgtaggactgctc

SEQ ID NO: 3961588 - DNA, 25 bp, Homo sapien
tcatgctgccggagctcattgtact

SEQ ID NO: 3961589 - DNA, 25 bp, Homo sapien
tgagtggtagatcttccgaagccgc

SEQ ID NO: 3961590 - DNA, 25 bp, Homo sapien
gctccagaggcttgatggatgagtg

SEQ ID NO: 3961591 - DNA, 25 bp, Homo sapien
cctcaatggggcttcttcatttgca

SEQ ID NO: 3961592 - DNA, 25 bp, Homo sapien
gtagtcatcggatggcttgtcctca

SEQ ID NO: 3961593 - DNA, 25 bp, Homo sapien
atgagggtcttctcgatgtgggagc

SEQ ID NO: 3961594 - DNA, 25 bp, Homo sapien
ctcgatgtgggagcggtccctcaat

SEQ ID NO: 3961595 - DNA, 25 bp, Homo sapien
ctgtggagagaagcagacagccaag

SEQ ID NO: 3961596 - DNA, 25 bp, Homo sapien
ccctgatgtccctcctcgggctcct

SEQ ID NO: 3961597 - DNA, 25 bp, Homo sapien
ggtctcactgcccatggactctgta

SEQ ID NO: 3961598 - DNA, 25 bp, Homo sapien
tgtccctgtgacttgtggttcctgt

SEQ ID NO: 3961599 - DNA, 25 bp, Homo sapien
tgtggcttccggaagctctgcacct

SEQ ID NO: 3961600 - DNA, 25 bp, Homo sapien
agtgtcccctgccttaacgctttgg

SEQ ID NO: 3961601 - DNA, 25 bp, Homo sapien
tgcttcttctgagctagccccatcg

SEQ ID NO: 3961602 - DNA, 25 bp, Homo sapien
tcttcggactcctcttcggagggaa

SEQ ID NO: 3961603 - DNA, 25 bp, Homo sapien
tgtgtcaatatctggctccgactct

SEQ ID NO: 3961604 - DNA, 25 bp, Homo sapien
cgcagcgtccctgtcgtccctttcc

SEQ ID NO: 3961605 - DNA, 25 bp, Homo sapien
cttgccactggtgggccattctttt

SEQ ID NO: 3961606 - DNA, 25 bp, Homo sapien
ggagggagggcgcttgccactggtg

SEQ ID NO: 3961607 - DNA, 25 bp, Homo sapien
gctggcttcaggatcggggcccgcg

SEQ ID NO: 3961608 - DNA, 25 bp, Homo sapien
ccacccgacgcggagacttgcagtt

SEQ ID NO: 3961609 - DNA, 25 bp, Homo sapien
tctagacttgcgtctccagcagaga

SEQ ID NO: 3961610 - DNA, 25 bp, Homo sapien
atcttctgtgccacccgacgcggag

SEQ ID NO: 3961611 - DNA, 25 bp, Homo sapien
ggctgtgtctgcataaagcgccctt

SEQ ID NO: 3961612 - DNA, 25 bp, Homo sapien
ctccctactcgcaggcccaccccac

SEQ ID NO: 3961613 - DNA, 25 bp, Homo sapien
tccctactcgcaggcccaccccact

SEQ ID NO: 3961614 - DNA, 25 bp, Homo sapien
cctccctactcgcaggcccacccca

SEQ ID NO: 3961615 - DNA, 25 bp, Homo sapien
gacttcagcacaattgtttttaacc

SEQ ID NO: 3961616 - DNA, 25 bp, Homo sapien
aggctgtggttgacggacctcttga

SEQ ID NO: 3961617 - DNA, 25 bp, Homo sapien
gttgcaataagctttgataacacca

SEQ ID NO: 3961618 - DNA, 25 bp, Homo sapien
gttgacggacctcttgagcctagga

SEQ ID NO: 3961619 - DNA, 25 bp, Homo sapien
ttgtcctgagaacaggagcgaggcc

SEQ ID NO: 3961620 - DNA, 25 bp, Homo sapien
tgtcctgagaacaggagcgaggcca

SEQ ID NO: 3961621 - DNA, 25 bp, Homo sapien
cgagcaggaccagcgccctcatggt

SEQ ID NO: 3961622 - DNA, 25 bp, Homo sapien
ggaggcagccgagcaggaccagcgc

SEQ ID NO: 3961623 - DNA, 25 bp, Homo sapien
tctccgatcaaatgagaagaggtcc

SEQ ID NO: 3961624 - DNA, 25 bp, Homo sapien
taggcgtgagcctgacaagaagagt

SEQ ID NO: 3961625 - DNA, 25 bp, Homo sapien
cctgaaaaactttctccgatcaaat

SEQ ID NO: 3961626 - DNA, 25 bp, Homo sapien
agaagaggtccccagaagcggcaag

SEQ ID NO: 3961627 - DNA, 25 bp, Homo sapien
ggttccagcagaggccaggtatgca

SEQ ID NO: 3961628 - DNA, 25 bp, Homo sapien
tcagagccacacgtcggtgattccg

SEQ ID NO: 3961629 - DNA, 25 bp, Homo sapien
gatgcgggcctcagttgtcaaacag

SEQ ID NO: 3961630 - DNA, 25 bp, Homo sapien
gacagccaggtctcaattgctaaag

SEQ ID NO: 3961631 - DNA, 25 bp, Homo sapien
gagtatgagctcactgaattatcac

SEQ ID NO: 3961632 - DNA, 25 bp, Homo sapien
cacaaagcacgaagagcaggtgatg

SEQ ID NO: 3961633 - DNA, 25 bp, Homo sapien
ctggaggacacaggtcatgagtatg

SEQ ID NO: 3961634 - DNA, 25 bp, Homo sapien
tgaattatcacaaagcacgaagagc

SEQ ID NO: 3961635 - DNA, 25 bp, Homo sapien
tctgggcacgcacttcctgtggcta

SEQ ID NO: 3961636 - DNA, 25 bp, Homo sapien
ctgacttgctgtatcgtgccacacc

SEQ ID NO: 3961637 - DNA, 25 bp, Homo sapien
gttctgggcacgcacttcctgtggc

SEQ ID NO: 3961638 - DNA, 25 bp, Homo sapien
tatcgtgccacacctcaaacggttc

SEQ ID NO: 3961639 - DNA, 25 bp, Homo sapien
ttttgtactcaagactgacccagcg

SEQ ID NO: 3961640 - DNA, 25 bp, Homo sapien
tagggcctagaactagccacggtgc

SEQ ID NO: 3961641 - DNA, 25 bp, Homo sapien
ggttatctgtcttagagggacccaa

SEQ ID NO: 3961642 - DNA, 25 bp, Homo sapien
cagattgaacatgacaactcaggtc

SEQ ID NO: 3961643 - DNA, 25 bp, Homo sapien
gcgtgcaccactacagtccggctaa

SEQ ID NO: 3961644 - DNA, 25 bp, Homo sapien
ggcgtgcaccactacagtccggcta

SEQ ID NO: 3961645 - DNA, 25 bp, Homo sapien
gcaccactacagtccggctaattgt

SEQ ID NO: 3961646 - DNA, 25 bp, Homo sapien
ccactacagtccggctaattgtttt

SEQ ID NO: 3961647 - DNA, 25 bp, Homo sapien
gtatgactgatacaagcttctagaa

SEQ ID NO: 3961648 - DNA, 25 bp, Homo sapien
tgtatgactgatacaagcttctaga

SEQ ID NO: 3961649 - DNA, 25 bp, Homo sapien
atgactgatacaagcttctagaaca

SEQ ID NO: 3961650 - DNA, 25 bp, Homo sapien
tatgactgatacaagcttctagaac

SEQ ID NO: 3961651 - DNA, 25 bp, Homo sapien
aagtcctgtcacccgtttcttgatt

SEQ ID NO: 3961652 - DNA, 25 bp, Homo sapien
aaagtcctgtcacccgtttcttgat

SEQ ID NO: 3961653 - DNA, 25 bp, Homo sapien
agtcctgtcacccgtttcttgatta

SEQ ID NO: 3961654 - DNA, 25 bp, Homo sapien
gtcctgtcacccgtttcttgattac

SEQ ID NO: 3961655 - DNA, 25 bp, Homo sapien
tcagcgcgagctccatgcccggagg

SEQ ID NO: 3961656 - DNA, 25 bp, Homo sapien
agaacctttcgtcagcgcgagctcc

SEQ ID NO: 3961657 - DNA, 25 bp, Homo sapien
cttccagaacctttcgtcagcgcga

SEQ ID NO: 3961658 - DNA, 25 bp, Homo sapien
aggccgccgtcacctgctctccggg

SEQ ID NO: 3961659 - DNA, 25 bp, Homo sapien
ggctgctgtcgaactcccgacttca

SEQ ID NO: 3961660 - DNA, 25 bp, Homo sapien
attctcgtgtcttagcctcccgagt

SEQ ID NO: 3961661 - DNA, 25 bp, Homo sapien
caggctgctgtcgaactcccgactt

SEQ ID NO: 3961662 - DNA, 25 bp, Homo sapien
ctcgtgtcttagcctcccgagtagc

SEQ ID NO: 3961663 - DNA, 25 bp, Homo sapien
tttttggggtggaagatgagacctg

SEQ ID NO: 3961664 - DNA, 25 bp, Homo sapien
caaaggcacggtggcctcttggttt

SEQ ID NO: 3961665 - DNA, 25 bp, Homo sapien
tttggggtggaagatgagacctgga

SEQ ID NO: 3961666 - DNA, 25 bp, Homo sapien
gggtggaagatgagacctggaggca

SEQ ID NO: 3961667 - DNA, 25 bp, Homo sapien
agcagcagcaaaccccaaccaagaa

SEQ ID NO: 3961668 - DNA, 25 bp, Homo sapien
caagaagcaacggagacctccgggc

SEQ ID NO: 3961669 - DNA, 25 bp, Homo sapien
agcagcaaaccccaaccaagaagca

SEQ ID NO: 3961670 - DNA, 25 bp, Homo sapien
cccaaccaagaagcaacggagacct

SEQ ID NO: 3961671 - DNA, 25 bp, Homo sapien
tgaaggctgacaatcccaggctggc

SEQ ID NO: 3961672 - DNA, 25 bp, Homo sapien
acctcgggttgagtggcttcgttca

SEQ ID NO: 3961673 - DNA, 25 bp, Homo sapien
aggccaggcatctccgtgtcagctt

SEQ ID NO: 3961674 - DNA, 25 bp, Homo sapien
ggaaaaaatgctttttggcagagag

SEQ ID NO: 3961675 - DNA, 25 bp, Homo sapien
gtcactgtctgaggcctcggagtcg

SEQ ID NO: 3961676 - DNA, 25 bp, Homo sapien
tgcggacaggcttcacgatgacagc

SEQ ID NO: 3961677 - DNA, 25 bp, Homo sapien
tgggtgccctcgatgtgctggattg

SEQ ID NO: 3961678 - DNA, 25 bp, Homo sapien
ccggctctggtccatggcgtcactg

SEQ ID NO: 3961679 - DNA, 25 bp, Homo sapien
ctggacagggacgaaccactgagaa

SEQ ID NO: 3961680 - DNA, 25 bp, Homo sapien
ggaggcccgctagagtacaggaaaa

SEQ ID NO: 3961681 - DNA, 25 bp, Homo sapien
tcggccggggatacatggccagcca

SEQ ID NO: 3961682 - DNA, 25 bp, Homo sapien
ttgaaaaatccattctgggaagatg

SEQ ID NO: 3961683 - DNA, 25 bp, Homo sapien
aaagagcctgttcccggagtatgac

SEQ ID NO: 3961684 - DNA, 25 bp, Homo sapien
tgttcccggagtatgacccccacaa

SEQ ID NO: 3961685 - DNA, 25 bp, Homo sapien
ttcctccgcttctgcccctcttttc

SEQ ID NO: 3961686 - DNA, 25 bp, Homo sapien
cctaaagagcctgttcccggagtat

SEQ ID NO: 3961687 - DNA, 25 bp, Homo sapien
tggaaacagagttgatgaccgagga

SEQ ID NO: 3961688 - DNA, 25 bp, Homo sapien
gggcccatggtgacgacattgatgt

SEQ ID NO: 3961689 - DNA, 25 bp, Homo sapien
gcggtgctggcacgatcaccgtggg

SEQ ID NO: 3961690 - DNA, 25 bp, Homo sapien
gattttgccgggatgtggaaacaga

SEQ ID NO: 3961691 - DNA, 25 bp, Homo sapien
tggtgcagcagcctcacctgttcct

SEQ ID NO: 3961692 - DNA, 25 bp, Homo sapien
gctgctgctgttcccgctccagctt

SEQ ID NO: 3961693 - DNA, 25 bp, Homo sapien
gctgctgttcccgctccagcttctc

SEQ ID NO: 3961694 - DNA, 25 bp, Homo sapien
tgcagctgcacctgctgcgcaatca

SEQ ID NO: 3961695 - DNA, 25 bp, Homo sapien
gagcttttccgggtacatgtgggcc

SEQ ID NO: 3961696 - DNA, 25 bp, Homo sapien
cttgagcttttccgggtacatgtgg

SEQ ID NO: 3961697 - DNA, 25 bp, Homo sapien
tttccgggtacatgtgggcctccag

SEQ ID NO: 3961698 - DNA, 25 bp, Homo sapien
ttttccgggtacatgtgggcctcca

SEQ ID NO: 3961699 - DNA, 25 bp, Homo sapien
tcctcccagatgtccggggagccta

SEQ ID NO: 3961700 - DNA, 25 bp, Homo sapien
gagcctatgccttcgtccttgtcct

SEQ ID NO: 3961701 - DNA, 25 bp, Homo sapien
atcatgcgcaccgagcgctccttgt

SEQ ID NO: 3961702 - DNA, 25 bp, Homo sapien
cctccagcatcatgcgcaccgagcg

SEQ ID NO: 3961703 - DNA, 25 bp, Homo sapien
gttctgctgcaagagcctggtcttc

SEQ ID NO: 3961704 - DNA, 25 bp, Homo sapien
ccagggagaagatgtactcggctgt

SEQ ID NO: 3961705 - DNA, 25 bp, Homo sapien
gaagcgcttgagctgtgtgttctgc

SEQ ID NO: 3961706 - DNA, 25 bp, Homo sapien
ggagaagatgtactcggctgtctgc

SEQ ID NO: 3961707 - DNA, 25 bp, Homo sapien
ggaatcccgcgttgatgctctgcat

SEQ ID NO: 3961708 - DNA, 25 bp, Homo sapien
gctgttggcgatctcccgccgaatc

SEQ ID NO: 3961709 - DNA, 25 bp, Homo sapien
tgcgtctccgctcgttgctgttggc

SEQ ID NO: 3961710 - DNA, 25 bp, Homo sapien
gctgagcttctctccgtctgtgtgg

SEQ ID NO: 3961711 - DNA, 25 bp, Homo sapien
tcgggggttagtggaatgttggcaa

SEQ ID NO: 3961712 - DNA, 25 bp, Homo sapien
ctcgggggttagtggaatgttggca

SEQ ID NO: 3961713 - DNA, 25 bp, Homo sapien
cgggggttagtggaatgttggcaag

SEQ ID NO: 3961714 - DNA, 25 bp, Homo sapien
ggccaaggcgccctcttcatcattc

SEQ ID NO: 3961715 - DNA, 25 bp, Homo sapien
gacaggctcggccaaggcgccctct

SEQ ID NO: 3961716 - DNA, 25 bp, Homo sapien
gccaaggcgccctcttcatcattca

SEQ ID NO: 3961717 - DNA, 25 bp, Homo sapien
aggctcggccaaggcgccctcttca

SEQ ID NO: 3961718 - DNA, 25 bp, Homo sapien
tttgccaccccaggactgaggaaga

SEQ ID NO: 3961719 - DNA, 25 bp, Homo sapien
gatgcagacgacattcagggacgct

SEQ ID NO: 3961720 - DNA, 25 bp, Homo sapien
tgatttgctaggcacctggagcgcc

SEQ ID NO: 3961721 - DNA, 25 bp, Homo sapien
cttagaaactatgcagacgacgggt

SEQ ID NO: 3961722 - DNA, 25 bp, Homo sapien
aatgctgaccaaccagggcttctga

SEQ ID NO: 3961723 - DNA, 25 bp, Homo sapien
gcttctgatggctgaccaaccaggg

SEQ ID NO: 3961724 - DNA, 25 bp, Homo sapien
gagtgccgctaaccaggaattctta

SEQ ID NO: 3961725 - DNA, 25 bp, Homo sapien
gccgacagagtcctttaatagaatg

SEQ ID NO: 3961726 - DNA, 25 bp, Homo sapien
tcctgaaatgttgcaaagagggcac

SEQ ID NO: 3961727 - DNA, 25 bp, Homo sapien
tttcctgaaatgttgcaaagagggc

SEQ ID NO: 3961728 - DNA, 25 bp, Homo sapien
tgaaatgttgcaaagagggcacctt

SEQ ID NO: 3961729 - DNA, 25 bp, Homo sapien
cctgaaatgttgcaaagagggcacc

SEQ ID NO: 3961730 - DNA, 25 bp, Homo sapien
gccggagaatgcaagatggaaatcc

SEQ ID NO: 3961731 - DNA, 25 bp, Homo sapien
aatccgaatcaaagggcagcgccgg

SEQ ID NO: 3961732 - DNA, 25 bp, Homo sapien
tgcacgagccaggtcccgcgatcag

SEQ ID NO: 3961733 - DNA, 25 bp, Homo sapien
agaatcggccggtcccagatgctgg

SEQ ID NO: 3961734 - DNA, 25 bp, Homo sapien
tcccttacagaattgccttgactag

SEQ ID NO: 3961735 - DNA, 25 bp, Homo sapien
gacctctccggtgcctgaaaaaatg

SEQ ID NO: 3961736 - DNA, 25 bp, Homo sapien
gaatggcaactggagcaagcgtgtc

SEQ ID NO: 3961737 - DNA, 25 bp, Homo sapien
tagggccacaaaaccaaatgcactg

SEQ ID NO: 3961738 - DNA, 25 bp, Homo sapien
gcagtaccgctagccatgtggagtg

SEQ ID NO: 3961739 - DNA, 25 bp, Homo sapien
cacagttcattcacaataaggttgc

SEQ ID NO: 3961740 - DNA, 25 bp, Homo sapien
taagaagcactcaatctagatcccg

SEQ ID NO: 3961741 - DNA, 25 bp, Homo sapien
ataaaataactatgcaactcaccat

SEQ ID NO: 3961742 - DNA, 25 bp, Homo sapien
acagtaagtctttgttatgtatatt

SEQ ID NO: 3961743 - DNA, 25 bp, Homo sapien
tttgttataaaagcagtgggctggg

SEQ ID NO: 3961744 - DNA, 25 bp, Homo sapien
caagagagcgagactacttaaaaaa

SEQ ID NO: 3961745 - DNA, 25 bp, Homo sapien
aaagagttcaagactgtcccgggca

SEQ ID NO: 3961746 - DNA, 25 bp, Homo sapien
tacattccagaacgagactccttct

SEQ ID NO: 3961747 - DNA, 25 bp, Homo sapien
ggaggtagcacacggctgtagtctc

SEQ ID NO: 3961748 - DNA, 25 bp, Homo sapien
caaaaattcgccaggggaggtagca

SEQ ID NO: 3961749 - DNA, 25 bp, Homo sapien
ggtggggtttgatcgcagtggtgca

SEQ ID NO: 3961750 - DNA, 25 bp, Homo sapien
aggcgcccaggcaaccagcagagaa

SEQ ID NO: 3961751 - DNA, 25 bp, Homo sapien
taggccaccgggaagcagttcccta

SEQ ID NO: 3961752 - DNA, 25 bp, Homo sapien
cagcagcaacagacagtggtgccag

SEQ ID NO: 3961753 - DNA, 25 bp, Homo sapien
cagcagagaaggcacccggctctgc

SEQ ID NO: 3961754 - DNA, 25 bp, Homo sapien
ttgaatccaggtctgaacgctgaag

SEQ ID NO: 3961755 - DNA, 25 bp, Homo sapien
tgaatccaggtctgaacgctgaagc

SEQ ID NO: 3961756 - DNA, 25 bp, Homo sapien
ggtgtgaactgtcacttaaggaaca

SEQ ID NO: 3961757 - DNA, 25 bp, Homo sapien
tcaggtagccccctcttttgagaaa

SEQ ID NO: 3961758 - DNA, 25 bp, Homo sapien
ccgcacccggctgctaaagggattt

SEQ ID NO: 3961759 - DNA, 25 bp, Homo sapien
aaggaacagtttaggatagagcaag

SEQ ID NO: 3961760 - DNA, 25 bp, Homo sapien
ggaaagaatgactgtgggcgcctac

SEQ ID NO: 3961761 - DNA, 25 bp, Homo sapien
catccgaggcggtttcccaattcga

SEQ ID NO: 3961762 - DNA, 25 bp, Homo sapien
tccctgggcgcttatgtgacatccg

SEQ ID NO: 3961763 - DNA, 25 bp, Homo sapien
taacgacagataggtagtgaaccca

SEQ ID NO: 3961764 - DNA, 25 bp, Homo sapien
tccgggctgaagcgcagcgattccc

SEQ ID NO: 3961765 - DNA, 25 bp, Homo sapien
ggctgaagcgcagcgattcccgccg

SEQ ID NO: 3961766 - DNA, 25 bp, Homo sapien
tgcctgcctgaggtcggatgcggtc

SEQ ID NO: 3961767 - DNA, 25 bp, Homo sapien
gcgtctcctgtaccttttttctaca

SEQ ID NO: 3961768 - DNA, 25 bp, Homo sapien
aaatcgccaacttccgagcctttgc

SEQ ID NO: 3961769 - DNA, 25 bp, Homo sapien
gctaatgtttaacccggccacactc

SEQ ID NO: 3961770 - DNA, 25 bp, Homo sapien
cattatccacactcaggagaccggg

SEQ ID NO: 3961771 - DNA, 25 bp, Homo sapien
ctcctggaagcgctaggtcccgaaa

SEQ ID NO: 3961772 - DNA, 25 bp, Homo sapien
gaccaaaacatgagcatccattacg

SEQ ID NO: 3961773 - DNA, 25 bp, Homo sapien
ttagaccaaaacatgagcatccatt

SEQ ID NO: 3961774 - DNA, 25 bp, Homo sapien
caaaacatgagcatccattacgagt

SEQ ID NO: 3961775 - DNA, 25 bp, Homo sapien
catgagcatccattacgagtccaca

SEQ ID NO: 3961776 - DNA, 25 bp, Homo sapien
tgtccacataacccatgagcacctg

SEQ ID NO: 3961777 - DNA, 25 bp, Homo sapien
atcgattgtgtgtccacataaccca

SEQ ID NO: 3961778 - DNA, 25 bp, Homo sapien
agcacctgctatgtgtccatctggg

SEQ ID NO: 3961779 - DNA, 25 bp, Homo sapien
gattgtgtgtccacataacccatga

SEQ ID NO: 3961780 - DNA, 25 bp, Homo sapien
gccttgtgatcaagagccacgtgct

SEQ ID NO: 3961781 - DNA, 25 bp, Homo sapien
aagccttgtgcctgccatggatgcc

SEQ ID NO: 3961782 - DNA, 25 bp, Homo sapien
tcaaatgcacgaatgaagacggact

SEQ ID NO: 3961783 - DNA, 25 bp, Homo sapien
ttaaaaccagcgtcagatgcctcac

SEQ ID NO: 3961784 - DNA, 25 bp, Homo sapien
caagaacgcgagtctgtggttcaac

SEQ ID NO: 3961785 - DNA, 25 bp, Homo sapien
caagcggaagctcggattgctcggc

SEQ ID NO: 3961786 - DNA, 25 bp, Homo sapien
gggcctcgtcgttattctaccgtga

SEQ ID NO: 3961787 - DNA, 25 bp, Homo sapien
aaatgctgggaccaagctaggaacc

SEQ ID NO: 3961788 - DNA, 25 bp, Homo sapien
gaaaactggtttgcgccgcccggca

SEQ ID NO: 3961789 - DNA, 25 bp, Homo sapien
ccggcatcgggatccgggacctctg

SEQ ID NO: 3961790 - DNA, 25 bp, Homo sapien
cctgcgcgttcctggaactgggctg

SEQ ID NO: 3961791 - DNA, 25 bp, Homo sapien
aatcagggcccgcagagaggcattc

SEQ ID NO: 3961792 - DNA, 25 bp, Homo sapien
ggtgcctcctcccttggccgggaga

SEQ ID NO: 3961793 - DNA, 25 bp, Homo sapien
ctgcccctcgcaagcccgggtcctt

SEQ ID NO: 3961794 - DNA, 25 bp, Homo sapien
ggagtttgggacaagtcaggcactt

SEQ ID NO: 3961795 - DNA, 25 bp, Homo sapien
tgggacaagtcaggcacttgttact

SEQ ID NO: 3961796 - DNA, 25 bp, Homo sapien
tgaacgttacggacgaaggagaagc

SEQ ID NO: 3961797 - DNA, 25 bp, Homo sapien
ttcagcacgttttattaagcaccta

SEQ ID NO: 3961798 - DNA, 25 bp, Homo sapien
atgtgcagcactgcattggtttctc

SEQ ID NO: 3961799 - DNA, 25 bp, Homo sapien
gaagcactcaatagtgattggatgt

SEQ ID NO: 3961800 - DNA, 25 bp, Homo sapien
gctctgccacggacaagctgtggga

SEQ ID NO: 3961801 - DNA, 25 bp, Homo sapien
gccacggacaagctgtgggaccttg

SEQ ID NO: 3961802 - DNA, 25 bp, Homo sapien
ctgtgggaccttggatgggtcactt

SEQ ID NO: 3961803 - DNA, 25 bp, Homo sapien
tgtgggaccttggatgggtcacttc

SEQ ID NO: 3961804 - DNA, 25 bp, Homo sapien
catcttacagaggacccgcttcctt

SEQ ID NO: 3961805 - DNA, 25 bp, Homo sapien
ccatcttacagaggacccgcttcct

SEQ ID NO: 3961806 - DNA, 25 bp, Homo sapien
ccgctctgggcctccgaggctttca

SEQ ID NO: 3961807 - DNA, 25 bp, Homo sapien
cccgctctgggcctccgaggctttc

SEQ ID NO: 3961808 - DNA, 25 bp, Homo sapien
cgctctgggcctccgaggctttcag

SEQ ID NO: 3961809 - DNA, 25 bp, Homo sapien
tgtggacaagccctactactgcaag

SEQ ID NO: 3961810 - DNA, 25 bp, Homo sapien
gaagatgcctggtgaaccttcagcc

SEQ ID NO: 3961811 - DNA, 25 bp, Homo sapien
cttgaaaggacggagagcagctgct

SEQ ID NO: 3961812 - DNA, 25 bp, Homo sapien
tgagcccatcctgcggacagttgtg

SEQ ID NO: 3961813 - DNA, 25 bp, Homo sapien
gagtggtgggcaaaggcccttctcc

SEQ ID NO: 3961814 - DNA, 25 bp, Homo sapien
tactgtgcccagattactgaggtgc

SEQ ID NO: 3961815 - DNA, 25 bp, Homo sapien
ggagcatcccaaggtccaagtcctc

SEQ ID NO: 3961816 - DNA, 25 bp, Homo sapien
tcaatctgccgcttagagcaggaac

SEQ ID NO: 3961817 - DNA, 25 bp, Homo sapien
taccaagctataaattagaggcggc

SEQ ID NO: 3961818 - DNA, 25 bp, Homo sapien
caagctataaattagaggcggcggg

SEQ ID NO: 3961819 - DNA, 25 bp, Homo sapien
tttattaccaagctataaattagag

SEQ ID NO: 3961820 - DNA, 25 bp, Homo sapien
tattaccaagctataaattagaggc

SEQ ID NO: 3961821 - DNA, 25 bp, Homo sapien
gggcctggattttgagttcctcatc

SEQ ID NO: 3961822 - DNA, 25 bp, Homo sapien
cacgtatggggcatctgcccttttt

SEQ ID NO: 3961823 - DNA, 25 bp, Homo sapien
tcacgtatggggcatctgccctttt

SEQ ID NO: 3961824 - DNA, 25 bp, Homo sapien
gcctggattttgagttcctcatcca

SEQ ID NO: 3961825 - DNA, 25 bp, Homo sapien
tgcccacatgggatggcctattccc

SEQ ID NO: 3961826 - DNA, 25 bp, Homo sapien
tagtgggtcacggataatcaggccg

SEQ ID NO: 3961827 - DNA, 25 bp, Homo sapien
tcagcccaggtccattttttgaagg

SEQ ID NO: 3961828 - DNA, 25 bp, Homo sapien
gataccaatgcttccttcagtggca

SEQ ID NO: 3961829 - DNA, 25 bp, Homo sapien
gaaggagccacccacggatttatca

SEQ ID NO: 3961830 - DNA, 25 bp, Homo sapien
gagccacccacggatttatcattca

SEQ ID NO: 3961831 - DNA, 25 bp, Homo sapien
tcaccttaaataagtgttcatagtt

SEQ ID NO: 3961832 - DNA, 25 bp, Homo sapien
tatcattcaccttaaataagtgttc

SEQ ID NO: 3961833 - DNA, 25 bp, Homo sapien
agggctcagcttggacacgttgaga

SEQ ID NO: 3961834 - DNA, 25 bp, Homo sapien
ggacacgttgagaatctgctgtgcc

SEQ ID NO: 3961835 - DNA, 25 bp, Homo sapien
tcagcttggacacgttgagaatctg

SEQ ID NO: 3961836 - DNA, 25 bp, Homo sapien
ctcagggctcagcttggacacgttg

SEQ ID NO: 3961837 - DNA, 25 bp, Homo sapien
ctgaggccggagaggttggaagcgg

SEQ ID NO: 3961838 - DNA, 25 bp, Homo sapien
tcctcgggcatcagctgcggcccgg

SEQ ID NO: 3961839 - DNA, 25 bp, Homo sapien
gcgtcctcgggcatcagctgcggcc

SEQ ID NO: 3961840 - DNA, 25 bp, Homo sapien
agcgcgtcctcgggcatcagctgcg

SEQ ID NO: 3961841 - DNA, 25 bp, Homo sapien
gtcctcgggcatcagctgcggcccg

SEQ ID NO: 3961842 - DNA, 25 bp, Homo sapien
caccctgggccttccgagttggtgg

SEQ ID NO: 3961843 - DNA, 25 bp, Homo sapien
tgggtgatcgctcagtcctcagcag

SEQ ID NO: 3961844 - DNA, 25 bp, Homo sapien
ggccttccgagttggtggctcaccc

SEQ ID NO: 3961845 - DNA, 25 bp, Homo sapien
ggacatgtgggtgatcgctcagtcc

SEQ ID NO: 3961846 - DNA, 25 bp, Homo sapien
gggacaggtggctaggagctgcctc

SEQ ID NO: 3961847 - DNA, 25 bp, Homo sapien
ggacaggtggctaggagctgcctct

SEQ ID NO: 3961848 - DNA, 25 bp, Homo sapien
ctggagaggaactcccagcccacag

SEQ ID NO: 3961849 - DNA, 25 bp, Homo sapien
agcccacaggggagacggacccatg

SEQ ID NO: 3961850 - DNA, 25 bp, Homo sapien
acaggggagacggacccatgcttac

SEQ ID NO: 3961851 - DNA, 25 bp, Homo sapien
ccacaggggagacggacccatgctt

SEQ ID NO: 3961852 - DNA, 25 bp, Homo sapien
ctgcacgcccatcacaatgatctgg

SEQ ID NO: 3961853 - DNA, 25 bp, Homo sapien
cctgccgcaaggcccgtgcaaaggc

SEQ ID NO: 3961854 - DNA, 25 bp, Homo sapien
gcccatcacaatgatctgggccagg

SEQ ID NO: 3961855 - DNA, 25 bp, Homo sapien
catcacaatgatctgggccaggtac

SEQ ID NO: 3961856 - DNA, 25 bp, Homo sapien
ggctcccggagacccgaggtcatga

SEQ ID NO: 3961857 - DNA, 25 bp, Homo sapien
catggtgggtggcttagttactcac

SEQ ID NO: 3961858 - DNA, 25 bp, Homo sapien
aaagcaccctgaatgaaagcttcca

SEQ ID NO: 3961859 - DNA, 25 bp, Homo sapien
gagatgggccctggaaacggctgcc

SEQ ID NO: 3961860 - DNA, 25 bp, Homo sapien
ggcaggcgggtgaacttgaccgagc

SEQ ID NO: 3961861 - DNA, 25 bp, Homo sapien
aacttgaccgagctcccagaggcag

SEQ ID NO: 3961862 - DNA, 25 bp, Homo sapien
ctcccagaggcagactggccccacc

SEQ ID NO: 3961863 - DNA, 25 bp, Homo sapien
gcaggcaggcgggtgaacttgaccg

SEQ ID NO: 3961864 - DNA, 25 bp, Homo sapien
ttcaaggagctaaaagcccactagg

SEQ ID NO: 3961865 - DNA, 25 bp, Homo sapien
cactatggaccaaatcatgagggag

SEQ ID NO: 3961866 - DNA, 25 bp, Homo sapien
cactaggagggtatttaaacacact

SEQ ID NO: 3961867 - DNA, 25 bp, Homo sapien
tggacctggcagtaactcactctcg

SEQ ID NO: 3961868 - DNA, 25 bp, Homo sapien
ggaagcaacagagtcgagggaaaac

SEQ ID NO: 3961869 - DNA, 25 bp, Homo sapien
cactaagatgtgagcggaagcaaca

SEQ ID NO: 3961870 - DNA, 25 bp, Homo sapien
ctcaagactgagatgggattcggtg

SEQ ID NO: 3961871 - DNA, 25 bp, Homo sapien
tgaacatgccggaacactgcacgtg

SEQ ID NO: 3961872 - DNA, 25 bp, Homo sapien
tgggcaagccgacaagtatcaagaa

SEQ ID NO: 3961873 - DNA, 25 bp, Homo sapien
gcagatcggaaacccaaggctggtg

SEQ ID NO: 3961874 - DNA, 25 bp, Homo sapien
gattccagtggattcgactccagag

SEQ ID NO: 3961875 - DNA, 25 bp, Homo sapien
tgtgactgcaaagccgtagacgcag

SEQ ID NO: 3961876 - DNA, 25 bp, Homo sapien
gaagaccctcctgtgatcacagcga

SEQ ID NO: 3961877 - DNA, 25 bp, Homo sapien
ggatgcacctgatgacacctgcggt

SEQ ID NO: 3961878 - DNA, 25 bp, Homo sapien
gtggaaacttcataacttctggatt

SEQ ID NO: 3961879 - DNA, 25 bp, Homo sapien
caggtgggatgtcattatgggccat

SEQ ID NO: 3961880 - DNA, 25 bp, Homo sapien
tctgctgccatcgtacagccttgca

SEQ ID NO: 3961881 - DNA, 25 bp, Homo sapien
tcccctcggcttgaaacacggctca

SEQ ID NO: 3961882 - DNA, 25 bp, Homo sapien
tgaaggacagaggtgaaagtcagag

SEQ ID NO: 3961883 - DNA, 25 bp, Homo sapien
aagcccctcccgagtggaacaggag

SEQ ID NO: 3961884 - DNA, 25 bp, Homo sapien
aaaagaggtctctgacaccatggga

SEQ ID NO: 3961885 - DNA, 25 bp, Homo sapien
tgggtgaccaaaacaaccactgcct

SEQ ID NO: 3961886 - DNA, 25 bp, Homo sapien
tgtagcacgtgccacaacatcaggg

SEQ ID NO: 3961887 - DNA, 25 bp, Homo sapien
tacgggcatcacaactagacaggag

SEQ ID NO: 3961888 - DNA, 25 bp, Homo sapien
acctgacagtgtggcgcaggtctgt

SEQ ID NO: 3961889 - DNA, 25 bp, Homo sapien
taccctaggtgacctgacagtgtgg

SEQ ID NO: 3961890 - DNA, 25 bp, Homo sapien
acagtgtggcgcaggtctgttgact

SEQ ID NO: 3961891 - DNA, 25 bp, Homo sapien
ttaaagctaccctaggtgacctgac

SEQ ID NO: 3961892 - DNA, 25 bp, Homo sapien
ggctgctcgctcacacgcgggctag

SEQ ID NO: 3961893 - DNA, 25 bp, Homo sapien
tcacacgcgggctaggcacagcgcg

SEQ ID NO: 3961894 - DNA, 25 bp, Homo sapien
taggcacagcgcgaccacgtttgcc

SEQ ID NO: 3961895 - DNA, 25 bp, Homo sapien
gggctaggcacagcgcgaccacgtt

SEQ ID NO: 3961896 - DNA, 25 bp, Homo sapien
ggctcaaactccgacttcctggccc

SEQ ID NO: 3961897 - DNA, 25 bp, Homo sapien
ccggggctcaaactccgacttcctg

SEQ ID NO: 3961898 - DNA, 25 bp, Homo sapien
caaactccgacttcctggccccgcg

SEQ ID NO: 3961899 - DNA, 25 bp, Homo sapien
ggggctcaaactccgacttcctggc

SEQ ID NO: 3961900 - DNA, 25 bp, Homo sapien
cgcagagagcgcgtgcgcgatacgg

SEQ ID NO: 3961901 - DNA, 25 bp, Homo sapien
tcaagcgtggtcggcgggtcagagg

SEQ ID NO: 3961902 - DNA, 25 bp, Homo sapien
aagcgtggtcggcgggtcagaggtc

SEQ ID NO: 3961903 - DNA, 25 bp, Homo sapien
cgtggtcggcgggtcagaggtcaag

SEQ ID NO: 3961904 - DNA, 25 bp, Homo sapien
ccttccactagaatgggagttcctt

SEQ ID NO: 3961905 - DNA, 25 bp, Homo sapien
tgttagatgtcaagcgcctggaaga

SEQ ID NO: 3961906 - DNA, 25 bp, Homo sapien
tgaccttccagccttgagtgatact

SEQ ID NO: 3961907 - DNA, 25 bp, Homo sapien
ggagttccttttgggcaagcatttc

SEQ ID NO: 3961908 - DNA, 25 bp, Homo sapien
ttgcctcggaagtggctctctccct

SEQ ID NO: 3961909 - DNA, 25 bp, Homo sapien
tgaattccctgcctcgctgcatccc

SEQ ID NO: 3961910 - DNA, 25 bp, Homo sapien
caagtcttggctcttagctgaaagt

SEQ ID NO: 3961911 - DNA, 25 bp, Homo sapien
tctgtgcccacattgtacttccttg

SEQ ID NO: 3961912 - DNA, 25 bp, Homo sapien
gaaggtccttgcaagaccttatctc

SEQ ID NO: 3961913 - DNA, 25 bp, Homo sapien
ttactgctgtcttcacactctatat

SEQ ID NO: 3961914 - DNA, 25 bp, Homo sapien
gcataaggaggctgtaagaagctga

SEQ ID NO: 3961915 - DNA, 25 bp, Homo sapien
tatgctcgtgtgcagtctggttccc

SEQ ID NO: 3961916 - DNA, 25 bp, Homo sapien
ccagagaccacagcagcacaagagg

SEQ ID NO: 3961917 - DNA, 25 bp, Homo sapien
agtgaggctgagataaaggggagcc

SEQ ID NO: 3961918 - DNA, 25 bp, Homo sapien
agacccctgtcacccacattcctgt

SEQ ID NO: 3961919 - DNA, 25 bp, Homo sapien
agggccagacccctgtcacccacat

SEQ ID NO: 3961920 - DNA, 25 bp, Homo sapien
tctcctggctacaaacctgggaagt

SEQ ID NO: 3961921 - DNA, 25 bp, Homo sapien
aaacatccaaggcaggtgcgggcca

SEQ ID NO: 3961922 - DNA, 25 bp, Homo sapien
gactggtgctgctctagaaggcctg

SEQ ID NO: 3961923 - DNA, 25 bp, Homo sapien
caaggcccttgaccagaactggaac

SEQ ID NO: 3961924 - DNA, 25 bp, Homo sapien
aagggaggaggcatgcaccgtggca

SEQ ID NO: 3961925 - DNA, 25 bp, Homo sapien
ctgcctgccgggaagtgaggccact

SEQ ID NO: 3961926 - DNA, 25 bp, Homo sapien
gcctgccgggaagtgaggccactca

SEQ ID NO: 3961927 - DNA, 25 bp, Homo sapien
tggcatgtgcgagggaccgcgctgc

SEQ ID NO: 3961928 - DNA, 25 bp, Homo sapien
cgtccacgccttcaaaggagtcctg

SEQ ID NO: 3961929 - DNA, 25 bp, Homo sapien
ctcgtcctcgtccacgccttcaaag

SEQ ID NO: 3961930 - DNA, 25 bp, Homo sapien
tcgtccacgccttcaaaggagtcct

SEQ ID NO: 3961931 - DNA, 25 bp, Homo sapien
tcgtcctcgtccacgccttcaaagg

SEQ ID NO: 3961932 - DNA, 25 bp, Homo sapien
cagaactgccggcttaggctgggtt

SEQ ID NO: 3961933 - DNA, 25 bp, Homo sapien
caagggctactatctctgcacatgg

SEQ ID NO: 3961934 - DNA, 25 bp, Homo sapien
ccccatggtcagtggtagggctctg

SEQ ID NO: 3961935 - DNA, 25 bp, Homo sapien
ttacagccctgacaaaatcgatggg

SEQ ID NO: 3961936 - DNA, 25 bp, Homo sapien
cttccaggtactgcgctgaggatgg

SEQ ID NO: 3961937 - DNA, 25 bp, Homo sapien
gaggatggggcccgacgagcagggg

SEQ ID NO: 3961938 - DNA, 25 bp, Homo sapien
acttttcttccaggtactgcgctga

SEQ ID NO: 3961939 - DNA, 25 bp, Homo sapien
gcccgacgagcaggggcctctcggg

SEQ ID NO: 3961940 - DNA, 25 bp, Homo sapien
tctatggcgcagatctaagaggtgg

SEQ ID NO: 3961941 - DNA, 25 bp, Homo sapien
tcagagactgattgacacagccact

SEQ ID NO: 3961942 - DNA, 25 bp, Homo sapien
caatggagcctcactgtataagccc

SEQ ID NO: 3961943 - DNA, 25 bp, Homo sapien
ccagaggattctgcgtgccaacagg

SEQ ID NO: 3961944 - DNA, 25 bp, Homo sapien
tcccagatcacagccgtgtctggga

SEQ ID NO: 3961945 - DNA, 25 bp, Homo sapien
gtgtctgggaacacgtcatcctgga

SEQ ID NO: 3961946 - DNA, 25 bp, Homo sapien
gccagggctgcccattagcgccttg

SEQ ID NO: 3961947 - DNA, 25 bp, Homo sapien
agggctgcccattagcgccttgcag

SEQ ID NO: 3961948 - DNA, 25 bp, Homo sapien
ggtgtccccatgaacaatgggtagg

SEQ ID NO: 3961949 - DNA, 25 bp, Homo sapien
gaagctgggtcagacgggacccaaa

SEQ ID NO: 3961950 - DNA, 25 bp, Homo sapien
cccatgaacaatgggtagggaagtt

SEQ ID NO: 3961951 - DNA, 25 bp, Homo sapien
cccctctaggcaccgagaaggcggt

SEQ ID NO: 3961952 - DNA, 25 bp, Homo sapien
ctccagggaggactgacgcagccgc

SEQ ID NO: 3961953 - DNA, 25 bp, Homo sapien
gtcgcactccgtcttaggcaggagg

SEQ ID NO: 3961954 - DNA, 25 bp, Homo sapien
tccagggaggactgacgcagccgca

SEQ ID NO: 3961955 - DNA, 25 bp, Homo sapien
acttcccgcacgtcgcactccgtct

SEQ ID NO: 3961956 - DNA, 25 bp, Homo sapien
ccgtacccggcctacagtatgattt

SEQ ID NO: 3961957 - DNA, 25 bp, Homo sapien
tttttaataatggttgagtatgaca

SEQ ID NO: 3961958 - DNA, 25 bp, Homo sapien
tatagtttaaccttatctagtgcaa

SEQ ID NO: 3961959 - DNA, 25 bp, Homo sapien
ttttaggttcatattgtaggttcat

SEQ ID NO: 3961960 - DNA, 25 bp, Homo sapien
gtcaggcgacgtgaagctgttgcac

SEQ ID NO: 3961961 - DNA, 25 bp, Homo sapien
cgtacaggaatacacgggtgtcgcc

SEQ ID NO: 3961962 - DNA, 25 bp, Homo sapien
agcagctcgtacaggaatacacggg

SEQ ID NO: 3961963 - DNA, 25 bp, Homo sapien
gtgaagctgttgcactccaggaaga

SEQ ID NO: 3961964 - DNA, 25 bp, Homo sapien
agggcctcagcttcatataggagca

SEQ ID NO: 3961965 - DNA, 25 bp, Homo sapien
aggcccaacactgccaagggtccgc

SEQ ID NO: 3961966 - DNA, 25 bp, Homo sapien
ggttgagggagccacgtccaggccc

SEQ ID NO: 3961967 - DNA, 25 bp, Homo sapien
cagtgtctgggtcgtagctgggcag

SEQ ID NO: 3961968 - DNA, 25 bp, Homo sapien
catcacatacccagacaatgcgagc

SEQ ID NO: 3961969 - DNA, 25 bp, Homo sapien
tacccagacaatgcgagctccgcgt

SEQ ID NO: 3961970 - DNA, 25 bp, Homo sapien
gctccgcgtcctcccttgggccctg

SEQ ID NO: 3961971 - DNA, 25 bp, Homo sapien
agacagcgaccatcacatacccaga

SEQ ID NO: 3961972 - DNA, 25 bp, Homo sapien
tgtagacccgcacacgcccatcctt

SEQ ID NO: 3961973 - DNA, 25 bp, Homo sapien
tccggggcctgtagacccgcacacg

SEQ ID NO: 3961974 - DNA, 25 bp, Homo sapien
gggcctgtagacccgcacacgccca

SEQ ID NO: 3961975 - DNA, 25 bp, Homo sapien
acacgcccatccttgcagacagtgg

SEQ ID NO: 3961976 - DNA, 25 bp, Homo sapien
tcccagatgcgaacagtgaggtcat

SEQ ID NO: 3961977 - DNA, 25 bp, Homo sapien
gccagtgggtggaagcgcagggagc

SEQ ID NO: 3961978 - DNA, 25 bp, Homo sapien
ggtcccagatgcgaacagtgaggtc

SEQ ID NO: 3961979 - DNA, 25 bp, Homo sapien
gaggacgaggccagcacattggctg

SEQ ID NO: 3961980 - DNA, 25 bp, Homo sapien
ggtacccgccacagtcggatcctgg

SEQ ID NO: 3961981 - DNA, 25 bp, Homo sapien
ggccctctgcgggtacccgccacag

SEQ ID NO: 3961982 - DNA, 25 bp, Homo sapien
tctgcgggtacccgccacagtcgga

SEQ ID NO: 3961983 - DNA, 25 bp, Homo sapien
cacagtcggatcctggcgtcctcac

SEQ ID NO: 3961984 - DNA, 25 bp, Homo sapien
acagcgaggcgatgggggtcaaagg

SEQ ID NO: 3961985 - DNA, 25 bp, Homo sapien
gtgggcagtgccgtgtcgggcaggc

SEQ ID NO: 3961986 - DNA, 25 bp, Homo sapien
ccagatcagtcacagctgccccatt

SEQ ID NO: 3961987 - DNA, 25 bp, Homo sapien
ggtcccaggccagatcagtcacagc

SEQ ID NO: 3961988 - DNA, 25 bp, Homo sapien
tgacccgggcaggtcactaaacctc

SEQ ID NO: 3961989 - DNA, 25 bp, Homo sapien
tgtgacccgggcaggtcactaaacc

SEQ ID NO: 3961990 - DNA, 25 bp, Homo sapien
cttgttggcacagaagccgtcactc

SEQ ID NO: 3961991 - DNA, 25 bp, Homo sapien
gatgtggctgtctcggtgcaggaca

SEQ ID NO: 3961992 - DNA, 25 bp, Homo sapien
tgccctgagcatggcggaacttgga

SEQ ID NO: 3961993 - DNA, 25 bp, Homo sapien
acagtgccctgagcatggcggaact

SEQ ID NO: 3961994 - DNA, 25 bp, Homo sapien
aggctctgcagcgacctcaaactgg

SEQ ID NO: 3961995 - DNA, 25 bp, Homo sapien
ctgcagcgacctcaaactggggctg

SEQ ID NO: 3961996 - DNA, 25 bp, Homo sapien
tctgcagcgacctcaaactggggct

SEQ ID NO: 3961997 - DNA, 25 bp, Homo sapien
gctctgcagcgacctcaaactgggg

SEQ ID NO: 3961998 - DNA, 25 bp, Homo sapien
gagggcgaggtcagcgaactgggag

SEQ ID NO: 3961999 - DNA, 25 bp, Homo sapien
agggcgaggtcagcgaactgggagg

SEQ ID NO: 3962000 - DNA, 25 bp, Homo sapien
ggagggcgaggtcagcgaactggga

SEQ ID NO: 3962001 - DNA, 25 bp, Homo sapien
tctgccagtattttaagagaagcca

SEQ ID NO: 3962002 - DNA, 25 bp, Homo sapien
tgctcctaggtgtactggccaaaag

SEQ ID NO: 3962003 - DNA, 25 bp, Homo sapien
tgtgcccagtgggttagatctgcca

SEQ ID NO: 3962004 - DNA, 25 bp, Homo sapien
gcaagttccttctttatgctccacg

SEQ ID NO: 3962005 - DNA, 25 bp, Homo sapien
agacaggaagtgaagctcgggtggg

SEQ ID NO: 3962006 - DNA, 25 bp, Homo sapien
ggcaggcggggttgaggctgacctt

SEQ ID NO: 3962007 - DNA, 25 bp, Homo sapien
cggggttgaggctgaccttctgcac

SEQ ID NO: 3962008 - DNA, 25 bp, Homo sapien
agtgaagctcgggtggggccggcag

SEQ ID NO: 3962009 - DNA, 25 bp, Homo sapien
tgtccgggaacaggtcctcgtggaa

SEQ ID NO: 3962010 - DNA, 25 bp, Homo sapien
gcacacagccggcagtgtccgggaa

SEQ ID NO: 3962011 - DNA, 25 bp, Homo sapien
gcagtgtccgggaacaggtcctcgt

SEQ ID NO: 3962012 - DNA, 25 bp, Homo sapien
cccaccagctatgggggtcggtggc

SEQ ID NO: 3962013 - DNA, 25 bp, Homo sapien
ggcacgatggctgtgtcgctcagct

SEQ ID NO: 3962014 - DNA, 25 bp, Homo sapien
tcagctgtaggacgcggagtacctc

SEQ ID NO: 3962015 - DNA, 25 bp, Homo sapien
cggagtacctcgcagctcatgacgg

SEQ ID NO: 3962016 - DNA, 25 bp, Homo sapien
gcacatggtagccgatgggcacgat

SEQ ID NO: 3962017 - DNA, 25 bp, Homo sapien
tgcgggaccacctcgtaacagtaca

SEQ ID NO: 3962018 - DNA, 25 bp, Homo sapien
tgctgcgggaccacctcgtaacagt

SEQ ID NO: 3962019 - DNA, 25 bp, Homo sapien
gaccacctcgtaacagtacagctgc

SEQ ID NO: 3962020 - DNA, 25 bp, Homo sapien
cggctgctgcgggaccacctcgtaa

SEQ ID NO: 3962021 - DNA, 25 bp, Homo sapien
tgagccccgtttgctgactgaaccc

SEQ ID NO: 3962022 - DNA, 25 bp, Homo sapien
gaactgagccccgtttgctgactga

SEQ ID NO: 3962023 - DNA, 25 bp, Homo sapien
agtctgaactgagccccgtttgctg

SEQ ID NO: 3962024 - DNA, 25 bp, Homo sapien
atgagtctgaactgagccccgtttg

SEQ ID NO: 3962025 - DNA, 25 bp, Homo sapien
agggtccagcagaggcacgagacac

SEQ ID NO: 3962026 - DNA, 25 bp, Homo sapien
agcccagagtcagggtccagcagag

SEQ ID NO: 3962027 - DNA, 25 bp, Homo sapien
tgccaggaccaggagcccagagtca

SEQ ID NO: 3962028 - DNA, 25 bp, Homo sapien
ccagagtcagggtccagcagaggca

SEQ ID NO: 3962029 - DNA, 25 bp, Homo sapien
tgccccggccgagcctgccagcagc

SEQ ID NO: 3962030 - DNA, 25 bp, Homo sapien
aggcctgctgccccggccgagcctg

SEQ ID NO: 3962031 - DNA, 25 bp, Homo sapien
cccaggcctgctgccccggccgagc

SEQ ID NO: 3962032 - DNA, 25 bp, Homo sapien
tgctgccccggccgagcctgccagc

SEQ ID NO: 3962033 - DNA, 25 bp, Homo sapien
ctgcagcgctacctccaggggagct

SEQ ID NO: 3962034 - DNA, 25 bp, Homo sapien
ggctgcagcgctacctccaggggag

SEQ ID NO: 3962035 - DNA, 25 bp, Homo sapien
gctgcagcgctacctccaggggagc

SEQ ID NO: 3962036 - DNA, 25 bp, Homo sapien
ccagaaccgagtgcctatgaggaca

SEQ ID NO: 3962037 - DNA, 25 bp, Homo sapien
gatgaagaaggagtggccctcgctc

SEQ ID NO: 3962038 - DNA, 25 bp, Homo sapien
gtgactctagtcttggccccaggaa

SEQ ID NO: 3962039 - DNA, 25 bp, Homo sapien
taagacaaacgatgatatgaaggcc

SEQ ID NO: 3962040 - DNA, 25 bp, Homo sapien
cccgtggcgcgggtgttgatgtcag

SEQ ID NO: 3962041 - DNA, 25 bp, Homo sapien
gggtgttgatgtcagtgccgagtca

SEQ ID NO: 3962042 - DNA, 25 bp, Homo sapien
gcgcgggtgttgatgtcagtgccga

SEQ ID NO: 3962043 - DNA, 25 bp, Homo sapien
gttgatgtcagtgccgagtcaggcc

SEQ ID NO: 3962044 - DNA, 25 bp, Homo sapien
tgagcacagacaggaccttggtgtt

SEQ ID NO: 3962045 - DNA, 25 bp, Homo sapien
accctgcgccaagcatggtaccaag

SEQ ID NO: 3962046 - DNA, 25 bp, Homo sapien
tgttccttcagtgcaggctgccagt

SEQ ID NO: 3962047 - DNA, 25 bp, Homo sapien
gcatggtaccaagcacacaaagtgc

SEQ ID NO: 3962048 - DNA, 25 bp, Homo sapien
gctcgtgacatctggaagctccggg

SEQ ID NO: 3962049 - DNA, 25 bp, Homo sapien
gggccaggtgtctgttgcaaggcct

SEQ ID NO: 3962050 - DNA, 25 bp, Homo sapien
gacaggccggatcaggtgccctcac

SEQ ID NO: 3962051 - DNA, 25 bp, Homo sapien
ttgcagcccagatcaggtaccccag

SEQ ID NO: 3962052 - DNA, 25 bp, Homo sapien
cccacctgcgtgccgcagctcctac

SEQ ID NO: 3962053 - DNA, 25 bp, Homo sapien
cagcccacctgcgtgccgcagctcc

SEQ ID NO: 3962054 - DNA, 25 bp, Homo sapien
cccagcccacctgcgtgccgcagct

SEQ ID NO: 3962055 - DNA, 25 bp, Homo sapien
agcccacctgcgtgccgcagctcct

SEQ ID NO: 3962056 - DNA, 25 bp, Homo sapien
aagaaccgcgtgtcccacagcttca

SEQ ID NO: 3962057 - DNA, 25 bp, Homo sapien
gccagggcgctggagaagaaccgcg

SEQ ID NO: 3962058 - DNA, 25 bp, Homo sapien
gcgctggagaagaaccgcgtgtccc

SEQ ID NO: 3962059 - DNA, 25 bp, Homo sapien
acagcttcacttcgcgctcacgcat

SEQ ID NO: 3962060 - DNA, 25 bp, Homo sapien
tgctgttctcatgggcctgcgtgct

SEQ ID NO: 3962061 - DNA, 25 bp, Homo sapien
ccatccatgccagccggctatccct

SEQ ID NO: 3962062 - DNA, 25 bp, Homo sapien
gtagacacaaggtgctcccaggtgc

SEQ ID NO: 3962063 - DNA, 25 bp, Homo sapien
aggtgcccatccatgccagccggct

SEQ ID NO: 3962064 - DNA, 25 bp, Homo sapien
aacgtccagagagcgccaagtagtg

SEQ ID NO: 3962065 - DNA, 25 bp, Homo sapien
ctctgggcaacgtccagagagcgcc

SEQ ID NO: 3962066 - DNA, 25 bp, Homo sapien
agagcgccaagtagtgcctctcctg

SEQ ID NO: 3962067 - DNA, 25 bp, Homo sapien
gagcgccaagtagtgcctctcctgg

SEQ ID NO: 3962068 - DNA, 25 bp, Homo sapien
cagactgtaagtgagggaagaccta

SEQ ID NO: 3962069 - DNA, 25 bp, Homo sapien
tgaaggacctacttttgaagacggc

SEQ ID NO: 3962070 - DNA, 25 bp, Homo sapien
tcacatgtgggaagcctaaaggcac

SEQ ID NO: 3962071 - DNA, 25 bp, Homo sapien
tgaagacggccacaaggagtaagag

SEQ ID NO: 3962072 - DNA, 25 bp, Homo sapien
ggtcaaagatccgcagctgcttgtc

SEQ ID NO: 3962073 - DNA, 25 bp, Homo sapien
ctgagaggcccgcggctttgttctg

SEQ ID NO: 3962074 - DNA, 25 bp, Homo sapien
ctttgttctggggtcaaagatccgc

SEQ ID NO: 3962075 - DNA, 25 bp, Homo sapien
tggggtcaaagatccgcagctgctt

SEQ ID NO: 3962076 - DNA, 25 bp, Homo sapien
cggctccagacggcgctctgcacca

SEQ ID NO: 3962077 - DNA, 25 bp, Homo sapien
atctcggctccagacggcgctctgc

SEQ ID NO: 3962078 - DNA, 25 bp, Homo sapien
ctcggctccagacggcgctctgcac

SEQ ID NO: 3962079 - DNA, 25 bp, Homo sapien
ccatctcggctccagacggcgctct

SEQ ID NO: 3962080 - DNA, 25 bp, Homo sapien
tcacagtggtgcctgctgcgctcac

SEQ ID NO: 3962081 - DNA, 25 bp, Homo sapien
tgctgcttggctgcgtcccagacct

SEQ ID NO: 3962082 - DNA, 25 bp, Homo sapien
ctgctgcttggctgcgtcccagacc

SEQ ID NO: 3962083 - DNA, 25 bp, Homo sapien
gccctggcagtcgccagagttttac

SEQ ID NO: 3962084 - DNA, 25 bp, Homo sapien
gaggtggggtggaactgcagtacct

SEQ ID NO: 3962085 - DNA, 25 bp, Homo sapien
actgcagtacctccactgggaggtc

SEQ ID NO: 3962086 - DNA, 25 bp, Homo sapien
caggccctggcagtcgccagagttt

SEQ ID NO: 3962087 - DNA, 25 bp, Homo sapien
tcctgtcagccgagcctgtggccag

SEQ ID NO: 3962088 - DNA, 25 bp, Homo sapien
cctgtcagccgagcctgtggccagg

SEQ ID NO: 3962089 - DNA, 25 bp, Homo sapien
gtgggccacgcgtcgcttgtcctct

SEQ ID NO: 3962090 - DNA, 25 bp, Homo sapien
acgcgtcgcttgtcctctccttggc

SEQ ID NO: 3962091 - DNA, 25 bp, Homo sapien
ctccttggccttgcagaggcacaat

SEQ ID NO: 3962092 - DNA, 25 bp, Homo sapien
cccaggtgggccacgcgtcgcttgt

SEQ ID NO: 3962093 - DNA, 25 bp, Homo sapien
ccccatctatggtgacgatgaccga

SEQ ID NO: 3962094 - DNA, 25 bp, Homo sapien
gacgatgaccgaatatgtgagcaaa

SEQ ID NO: 3962095 - DNA, 25 bp, Homo sapien
cccaaagcagttccgttccaagtct

SEQ ID NO: 3962096 - DNA, 25 bp, Homo sapien
tatggtgacgatgaccgaatatgtg

SEQ ID NO: 3962097 - DNA, 25 bp, Homo sapien
catgaaggggcggttcctgctcgaa

SEQ ID NO: 3962098 - DNA, 25 bp, Homo sapien
gttcctgctcgaatgtcactgatcc

SEQ ID NO: 3962099 - DNA, 25 bp, Homo sapien
gagttgaaggcgatcaagctgcagc

SEQ ID NO: 3962100 - DNA, 25 bp, Homo sapien
gctgcagcttgatttgatgtggttc

SEQ ID NO: 3962101 - DNA, 25 bp, Homo sapien
tcatcagtcctcctgccgtttcggg

SEQ ID NO: 3962102 - DNA, 25 bp, Homo sapien
gagctgacatcgtttccaaggcgca

SEQ ID NO: 3962103 - DNA, 25 bp, Homo sapien
ggcacctggctcagcaattctttgg

SEQ ID NO: 3962104 - DNA, 25 bp, Homo sapien
agagcagagctgacatcgtttccaa

SEQ ID NO: 3962105 - DNA, 25 bp, Homo sapien
gtgccggaacttggacaccctgaag

SEQ ID NO: 3962106 - DNA, 25 bp, Homo sapien
gggcggccgagcctcggtgtgccgg

SEQ ID NO: 3962107 - DNA, 25 bp, Homo sapien
ccgagcctcggtgtgccggaacttg

SEQ ID NO: 3962108 - DNA, 25 bp, Homo sapien
tcggtgtgccggaacttggacaccc

SEQ ID NO: 3962109 - DNA, 25 bp, Homo sapien
acgtctcctgcggtgcttgcttgcg

SEQ ID NO: 3962110 - DNA, 25 bp, Homo sapien
tttgcggtgtacctagcacgccttc

SEQ ID NO: 3962111 - DNA, 25 bp, Homo sapien
tcggctgcagcattcgcgattttgt

SEQ ID NO: 3962112 - DNA, 25 bp, Homo sapien
gggtctcaggtgcacgctgagcaac

SEQ ID NO: 3962113 - DNA, 25 bp, Homo sapien
gtcaccgaagccatcattgtccctg

SEQ ID NO: 3962114 - DNA, 25 bp, Homo sapien
taaaatttacactttgcatgtcaca

SEQ ID NO: 3962115 - DNA, 25 bp, Homo sapien
ggagaagagacctgacgtgcctact

SEQ ID NO: 3962116 - DNA, 25 bp, Homo sapien
tagaagttatggttgaggccctgga

SEQ ID NO: 3962117 - DNA, 25 bp, Homo sapien
gctgtgggtacctagggcgggacat

SEQ ID NO: 3962118 - DNA, 25 bp, Homo sapien
tcccctcgggagcactcatgctttt

SEQ ID NO: 3962119 - DNA, 25 bp, Homo sapien
gttactagcactgttaggagctgga

SEQ ID NO: 3962120 - DNA, 25 bp, Homo sapien
cttttcttgttgatgttactagcac

SEQ ID NO: 3962121 - DNA, 25 bp, Homo sapien
gagcatttaggttaggtgccccaaa

SEQ ID NO: 3962122 - DNA, 25 bp, Homo sapien
gcacagcttccctaggttgagagca

SEQ ID NO: 3962123 - DNA, 25 bp, Homo sapien
gaaagtacctctagatggtgtcagc

SEQ ID NO: 3962124 - DNA, 25 bp, Homo sapien
tcagcctgggccctaaagaaattgc

SEQ ID NO: 3962125 - DNA, 25 bp, Homo sapien
ggctaagcagttgaaggttccccac

SEQ ID NO: 3962126 - DNA, 25 bp, Homo sapien
gctgaccctcacttggattccagag

SEQ ID NO: 3962127 - DNA, 25 bp, Homo sapien
agagcagggtgcttgccatgacaca

SEQ ID NO: 3962128 - DNA, 25 bp, Homo sapien
ggttccccaccattcagtgagagca

SEQ ID NO: 3962129 - DNA, 25 bp, Homo sapien
gggagaacaatggctttattcagat

SEQ ID NO: 3962130 - DNA, 25 bp, Homo sapien
gatccccacaaggggccgcgaggcg

SEQ ID NO: 3962131 - DNA, 25 bp, Homo sapien
cgatccccacaaggggccgcgaggc

SEQ ID NO: 3962132 - DNA, 25 bp, Homo sapien
ccgatccccacaaggggccgcgagg

SEQ ID NO: 3962133 - DNA, 25 bp, Homo sapien
cccgatccccacaaggggccgcgag

SEQ ID NO: 3962134 - DNA, 25 bp, Homo sapien
gtctcagggtcagctcgatgtcacg

SEQ ID NO: 3962135 - DNA, 25 bp, Homo sapien
tgtcacggtcgggtctcagggcata

SEQ ID NO: 3962136 - DNA, 25 bp, Homo sapien
gcaggttgaagtcccctttgtgctg

SEQ ID NO: 3962137 - DNA, 25 bp, Homo sapien
agccactggtccagcgtcagggcct

SEQ ID NO: 3962138 - DNA, 25 bp, Homo sapien
caagcttttcgtagtcctcaggagt

SEQ ID NO: 3962139 - DNA, 25 bp, Homo sapien
gccaagcttttcgtagtcctcagga

SEQ ID NO: 3962140 - DNA, 25 bp, Homo sapien
aaagccaagcttttcgtagtcctca

SEQ ID NO: 3962141 - DNA, 25 bp, Homo sapien
gcttttcgtagtcctcaggagtcat

SEQ ID NO: 3962142 - DNA, 25 bp, Homo sapien
tgagctgcctgacattgtagatcag

SEQ ID NO: 3962143 - DNA, 25 bp, Homo sapien
ggtcctccgtacaaggtcatttgaa

SEQ ID NO: 3962144 - DNA, 25 bp, Homo sapien
tattgtctcggtccctgacccaggt

SEQ ID NO: 3962145 - DNA, 25 bp, Homo sapien
tacacccagagccactattgtctcg

SEQ ID NO: 3962146 - DNA, 25 bp, Homo sapien
gagtctgtccagtaggcctcctgcc

SEQ ID NO: 3962147 - DNA, 25 bp, Homo sapien
caggggtcggccctatctttctagc

SEQ ID NO: 3962148 - DNA, 25 bp, Homo sapien
ggtcggccctatctttctagcctct

SEQ ID NO: 3962149 - DNA, 25 bp, Homo sapien
aaccaggtacccaagagtctgtcca

SEQ ID NO: 3962150 - DNA, 25 bp, Homo sapien
ggtcaaaacatctaagccagaaatt

SEQ ID NO: 3962151 - DNA, 25 bp, Homo sapien
caaaacatctaagccagaaatttca

SEQ ID NO: 3962152 - DNA, 25 bp, Homo sapien
ttggtcaaaacatctaagccagaaa

SEQ ID NO: 3962153 - DNA, 25 bp, Homo sapien
atttggtcaaaacatctaagccaga

SEQ ID NO: 3962154 - DNA, 25 bp, Homo sapien
cgatgaacgaatgaatttagatgta

SEQ ID NO: 3962155 - DNA, 25 bp, Homo sapien
taaacgttgacgatgaacgaatgaa

SEQ ID NO: 3962156 - DNA, 25 bp, Homo sapien
cgttgacgatgaacgaatgaattta

SEQ ID NO: 3962157 - DNA, 25 bp, Homo sapien
gcagaaaataaacgttgacgatgaa

SEQ ID NO: 3962158 - DNA, 25 bp, Homo sapien
cacaccctccctacgggagctagaa

SEQ ID NO: 3962159 - DNA, 25 bp, Homo sapien
caccctccctacgggagctagaaag

SEQ ID NO: 3962160 - DNA, 25 bp, Homo sapien
gccctgacaaggatgcctgagtcac

SEQ ID NO: 3962161 - DNA, 25 bp, Homo sapien
gacacaccctccctacgggagctag

SEQ ID NO: 3962162 - DNA, 25 bp, Homo sapien
ggtcagacacggacatgccatccat

SEQ ID NO: 3962163 - DNA, 25 bp, Homo sapien
catcgtgcacgaccttgcgggtgtg

SEQ ID NO: 3962164 - DNA, 25 bp, Homo sapien
catgggaacgtcacctgtgggcaag

SEQ ID NO: 3962165 - DNA, 25 bp, Homo sapien
agtgctcagcccgatgttctggccg

SEQ ID NO: 3962166 - DNA, 25 bp, Homo sapien
gatggaatccgggtactgccaccta

SEQ ID NO: 3962167 - DNA, 25 bp, Homo sapien
tctccaaagggtccaagctggttct

SEQ ID NO: 3962168 - DNA, 25 bp, Homo sapien
aatgactcgcaaacttccaggctga

SEQ ID NO: 3962169 - DNA, 25 bp, Homo sapien
tgagctggtatatgtcccgagggca

SEQ ID NO: 3962170 - DNA, 25 bp, Homo sapien
gcgcctgccgccacacccggctaag

SEQ ID NO: 3962171 - DNA, 25 bp, Homo sapien
cggggtcttgctctgtcacccaggc

SEQ ID NO: 3962172 - DNA, 25 bp, Homo sapien
ggggtcttgctctgtcacccaggct

SEQ ID NO: 3962173 - DNA, 25 bp, Homo sapien
cgcctgccgccacacccggctaagt

SEQ ID NO: 3962174 - DNA, 25 bp, Homo sapien
cctttgccgtcaaagtgcgcggcgg

SEQ ID NO: 3962175 - DNA, 25 bp, Homo sapien
caggccgctgtagaccacatagtgg

SEQ ID NO: 3962176 - DNA, 25 bp, Homo sapien
gcacactggtcatgggaacgccaat

SEQ ID NO: 3962177 - DNA, 25 bp, Homo sapien
ttctcaaaatagcagggcagccgca

SEQ ID NO: 3962178 - DNA, 25 bp, Homo sapien
cagcattctaatcccggagcggcca

SEQ ID NO: 3962179 - DNA, 25 bp, Homo sapien
attctaatcccggagcggccaccat

SEQ ID NO: 3962180 - DNA, 25 bp, Homo sapien
caccatctgcgaggttaacatctag

SEQ ID NO: 3962181 - DNA, 25 bp, Homo sapien
cggagcggccaccatctgcgaggtt

SEQ ID NO: 3962182 - DNA, 25 bp, Homo sapien
gactctggcccaccatgtgcaacat

SEQ ID NO: 3962183 - DNA, 25 bp, Homo sapien
agccttctaccagccactgactctg

SEQ ID NO: 3962184 - DNA, 25 bp, Homo sapien
taaacacagccccggaagccttcta

SEQ ID NO: 3962185 - DNA, 25 bp, Homo sapien
tgtgcaacataggacgggggggcag

SEQ ID NO: 3962186 - DNA, 25 bp, Homo sapien
tcaggctctgccatgtacgagcagt

SEQ ID NO: 3962187 - DNA, 25 bp, Homo sapien
gtgagaacaccctgcccatggagct

SEQ ID NO: 3962188 - DNA, 25 bp, Homo sapien
gaggctatacagaggcaccacagct

SEQ ID NO: 3962189 - DNA, 25 bp, Homo sapien
taaaggagaatgcacacgtcccatc

SEQ ID NO: 3962190 - DNA, 25 bp, Homo sapien
gaaccttgaatgtcccatcttccag

SEQ ID NO: 3962191 - DNA, 25 bp, Homo sapien
tttcgggtcaccactcgaaccttga

SEQ ID NO: 3962192 - DNA, 25 bp, Homo sapien
gaaggtggcgtaagccccattcagg

SEQ ID NO: 3962193 - DNA, 25 bp, Homo sapien
cccagtaattggtcacgatgaaggt

SEQ ID NO: 3962194 - DNA, 25 bp, Homo sapien
caaagaatcaaaaagacctctcagg

SEQ ID NO: 3962195 - DNA, 25 bp, Homo sapien
aagaatcaaaaagacctctcaggtc

SEQ ID NO: 3962196 - DNA, 25 bp, Homo sapien
acaaagaatcaaaaagacctctcag

SEQ ID NO: 3962197 - DNA, 25 bp, Homo sapien
gaatcaaaaagacctctcaggtcag

SEQ ID NO: 3962198 - DNA, 25 bp, Homo sapien
ttctcaacgacgattctcattcagg

SEQ ID NO: 3962199 - DNA, 25 bp, Homo sapien
gcgaaaccccgaagggagtgctcca

SEQ ID NO: 3962200 - DNA, 25 bp, Homo sapien
aggaaaccttctcaacgacgattct

SEQ ID NO: 3962201 - DNA, 25 bp, Homo sapien
caacgacgattctcattcaggtatt

SEQ ID NO: 3962202 - DNA, 25 bp, Homo sapien
ccttaagattttgcgcgttgcagct

SEQ ID NO: 3962203 - DNA, 25 bp, Homo sapien
aagattttgcgcgttgcagctgggc

SEQ ID NO: 3962204 - DNA, 25 bp, Homo sapien
taagattttgcgcgttgcagctggg

SEQ ID NO: 3962205 - DNA, 25 bp, Homo sapien
ttaagattttgcgcgttgcagctgg

SEQ ID NO: 3962206 - DNA, 25 bp, Homo sapien
aggagtttgagaccagcctgggcaa

SEQ ID NO: 3962207 - DNA, 25 bp, Homo sapien
cctgggcaacatggtgaaaccatat

SEQ ID NO: 3962208 - DNA, 25 bp, Homo sapien
tgggcaacatggtgaaaccatatct

SEQ ID NO: 3962209 - DNA, 25 bp, Homo sapien
tgaggcacgcagatctcttgagctc

SEQ ID NO: 3962210 - DNA, 25 bp, Homo sapien
ctgtgcctccgaaaaccaccaccag

SEQ ID NO: 3962211 - DNA, 25 bp, Homo sapien
gagaatgggacgaatccggtccaga

SEQ ID NO: 3962212 - DNA, 25 bp, Homo sapien
gaggacgagaatgggacgaatccgg

SEQ ID NO: 3962213 - DNA, 25 bp, Homo sapien
gacgagaatgggacgaatccggtcc

SEQ ID NO: 3962214 - DNA, 25 bp, Homo sapien
aatgggacgaatccggtccagagat

SEQ ID NO: 3962215 - DNA, 25 bp, Homo sapien
gcgacaaaggacacccccattgtct

SEQ ID NO: 3962216 - DNA, 25 bp, Homo sapien
aggagcgacaaaggacacccccatt

SEQ ID NO: 3962217 - DNA, 25 bp, Homo sapien
ttcccgccaggagcgacaaaggaca

SEQ ID NO: 3962218 - DNA, 25 bp, Homo sapien
ggttcccgccaggagcgacaaagga

SEQ ID NO: 3962219 - DNA, 25 bp, Homo sapien
cacctcgtgtcccttgggcccgatc

SEQ ID NO: 3962220 - DNA, 25 bp, Homo sapien
cggagcggcaagacgcctgtcccga

SEQ ID NO: 3962221 - DNA, 25 bp, Homo sapien
cgagatatcggggtcccgcgaccca

SEQ ID NO: 3962222 - DNA, 25 bp, Homo sapien
gcaagacgcctgtcccgagatatcg

SEQ ID NO: 3962223 - DNA, 25 bp, Homo sapien
ttctgcggccgagtccactgcagag

SEQ ID NO: 3962224 - DNA, 25 bp, Homo sapien
ggagctgcgcgctaggcgccaactc

SEQ ID NO: 3962225 - DNA, 25 bp, Homo sapien
cgggaccccgattctgcggccgagt

SEQ ID NO: 3962226 - DNA, 25 bp, Homo sapien
ggcctgggcgggacaagttccagga

SEQ ID NO: 3962227 - DNA, 25 bp, Homo sapien
tcttaaccggatgctacgggtgatg

SEQ ID NO: 3962228 - DNA, 25 bp, Homo sapien
gccccaggcacgtgcacagtgagtt

SEQ ID NO: 3962229 - DNA, 25 bp, Homo sapien
tccagttagaccaaaatgagcgagg

SEQ ID NO: 3962230 - DNA, 25 bp, Homo sapien
gccaatcccgacgtgtcggccgaaa

SEQ ID NO: 3962231 - DNA, 25 bp, Homo sapien
gataattaaagctatgtccatgagt

SEQ ID NO: 3962232 - DNA, 25 bp, Homo sapien
ggcgtcaggcaaagataattaaagc

SEQ ID NO: 3962233 - DNA, 25 bp, Homo sapien
taattttcaggtattgggcgtcagg

SEQ ID NO: 3962234 - DNA, 25 bp, Homo sapien
ctttatcttgcatgaacatcttaat

SEQ ID NO: 3962235 - DNA, 25 bp, Homo sapien
gagcctgagcctgcaacctccagag

SEQ ID NO: 3962236 - DNA, 25 bp, Homo sapien
agcctgcaacctccagagacctggg

SEQ ID NO: 3962237 - DNA, 25 bp, Homo sapien
cctgcaacctccagagacctgggga

SEQ ID NO: 3962238 - DNA, 25 bp, Homo sapien
gagcagagcctgagcctgcaacctc

SEQ ID NO: 3962239 - DNA, 25 bp, Homo sapien
tcggtccaggccttcggacctgggc

SEQ ID NO: 3962240 - DNA, 25 bp, Homo sapien
gcctgagggagtcgctgacgggcac

SEQ ID NO: 3962241 - DNA, 25 bp, Homo sapien
gcttggccgggccacagccctttgg

SEQ ID NO: 3962242 - DNA, 25 bp, Homo sapien
ggcgacagcgacctgcggcaggtga

SEQ ID NO: 3962243 - DNA, 25 bp, Homo sapien
tcctccattgtctgacttgatttcc

SEQ ID NO: 3962244 - DNA, 25 bp, Homo sapien
tgctgttgtgtctggcaagactgct

SEQ ID NO: 3962245 - DNA, 25 bp, Homo sapien
cttcagtagttacttgatctgctgt

SEQ ID NO: 3962246 - DNA, 25 bp, Homo sapien
gcaagactgctatgtgctgctgcag

SEQ ID NO: 3962247 - DNA, 25 bp, Homo sapien
agtagttacttgatctgctgttgtg

SEQ ID NO: 3962248 - DNA, 25 bp, Homo sapien
aaggatacagatggctgggcgtgct

SEQ ID NO: 3962249 - DNA, 25 bp, Homo sapien
ttaagaaggatacagatggctgggc

SEQ ID NO: 3962250 - DNA, 25 bp, Homo sapien
gaaggatacagatggctgggcgtgc

SEQ ID NO: 3962251 - DNA, 25 bp, Homo sapien
atattaagaaggatacagatggctg

SEQ ID NO: 3962252 - DNA, 25 bp, Homo sapien
tagacatcaaggagtcagtggtttg

SEQ ID NO: 3962253 - DNA, 25 bp, Homo sapien
cctagagaacaacatgaagagacct

SEQ ID NO: 3962254 - DNA, 25 bp, Homo sapien
tggcaagcatttgctaccatgactg

SEQ ID NO: 3962255 - DNA, 25 bp, Homo sapien
tgcaataatgataacctaaggcctt

SEQ ID NO: 3962256 - DNA, 25 bp, Homo sapien
gaaagcagaaccgacaggtatttgg

SEQ ID NO: 3962257 - DNA, 25 bp, Homo sapien
tcagcggaagtggaaacctcagagg

SEQ ID NO: 3962258 - DNA, 25 bp, Homo sapien
gaagtgactgccgtgggtgccacat

SEQ ID NO: 3962259 - DNA, 25 bp, Homo sapien
tgggtgtcaccttggttacattcgc

SEQ ID NO: 3962260 - DNA, 25 bp, Homo sapien
gcctttagatgaggctgaacctggg

SEQ ID NO: 3962261 - DNA, 25 bp, Homo sapien
tttacaagtagcctttagatgaggc

SEQ ID NO: 3962262 - DNA, 25 bp, Homo sapien
agtagcctttagatgaggctgaacc

SEQ ID NO: 3962263 - DNA, 25 bp, Homo sapien
ctggggaagcttactctgtccccag

SEQ ID NO: 3962264 - DNA, 25 bp, Homo sapien
tgtctgtgctgtggtagtttcagtg

SEQ ID NO: 3962265 - DNA, 25 bp, Homo sapien
ctgtgctgtggtagtttcagtggct

SEQ ID NO: 3962266 - DNA, 25 bp, Homo sapien
tgtgctgtggtagtttcagtggctt

SEQ ID NO: 3962267 - DNA, 25 bp, Homo sapien
tctgtgctgtggtagtttcagtggc

SEQ ID NO: 3962268 - DNA, 25 bp, Homo sapien
agctgccgcccaccagtgctgcttg

SEQ ID NO: 3962269 - DNA, 25 bp, Homo sapien
tgtagttggcacacctgagcaagct

SEQ ID NO: 3962270 - DNA, 25 bp, Homo sapien
tagttggcacacctgagcaagctca

SEQ ID NO: 3962271 - DNA, 25 bp, Homo sapien
cactctctctggagggcgtcctcta

SEQ ID NO: 3962272 - DNA, 25 bp, Homo sapien
tctacgctgctgaacaagacaaagg

SEQ ID NO: 3962273 - DNA, 25 bp, Homo sapien
tctatgggccatattccgcactggg

SEQ ID NO: 3962274 - DNA, 25 bp, Homo sapien
ttcaatgaactggaccaggccggct

SEQ ID NO: 3962275 - DNA, 25 bp, Homo sapien
taaaagccagatgctagagcctctg

SEQ ID NO: 3962276 - DNA, 25 bp, Homo sapien
gcttccggtagtccctgtttttgca

SEQ ID NO: 3962277 - DNA, 25 bp, Homo sapien
ctcccctgttggaggtgagtggcct

SEQ ID NO: 3962278 - DNA, 25 bp, Homo sapien
cctgtaagtccaagctgtgcgaggg

SEQ ID NO: 3962279 - DNA, 25 bp, Homo sapien
ttccacacttctgggccctaggctg

SEQ ID NO: 3962280 - DNA, 25 bp, Homo sapien
tgctccagcactcaataaagtgggc

SEQ ID NO: 3962281 - DNA, 25 bp, Homo sapien
gcggtttgctcagccccagcttatc

SEQ ID NO: 3962282 - DNA, 25 bp, Homo sapien
tgggctttgcaagctacctccttcc

SEQ ID NO: 3962283 - DNA, 25 bp, Homo sapien
taaccccttgggtgcggtttgctca

SEQ ID NO: 3962284 - DNA, 25 bp, Homo sapien
ctttaaagtgtatccagcactgcta

SEQ ID NO: 3962285 - DNA, 25 bp, Homo sapien
cctcagaagcaagggcatgttatgt

SEQ ID NO: 3962286 - DNA, 25 bp, Homo sapien
aagtcactctaaccgtcttgcaaag

SEQ ID NO: 3962287 - DNA, 25 bp, Homo sapien
ggacatcgtccatcatggctcccag

SEQ ID NO: 3962288 - DNA, 25 bp, Homo sapien
atttaaacaattcattctctaaaag

SEQ ID NO: 3962289 - DNA, 25 bp, Homo sapien
taaacaattcattctctaaaagaga

SEQ ID NO: 3962290 - DNA, 25 bp, Homo sapien
tttgtatttaaacaattcattctct

SEQ ID NO: 3962291 - DNA, 25 bp, Homo sapien
gtatttaaacaattcattctctaaa

SEQ ID NO: 3962292 - DNA, 25 bp, Homo sapien
ccagcttgcagatcccatgcgtgga

SEQ ID NO: 3962293 - DNA, 25 bp, Homo sapien
tctgtgttgcttaagggtgcgcctc

SEQ ID NO: 3962294 - DNA, 25 bp, Homo sapien
ggaaggtgaccttacagccactgcc

SEQ ID NO: 3962295 - DNA, 25 bp, Homo sapien
tttaaactactgaccaagactgcca

SEQ ID NO: 3962296 - DNA, 25 bp, Homo sapien
gaaactacaaactgagactgggcca

SEQ ID NO: 3962297 - DNA, 25 bp, Homo sapien
cagcaatacagggttcacagaggca

SEQ ID NO: 3962298 - DNA, 25 bp, Homo sapien
gacatcctgggcttctatacctgag

SEQ ID NO: 3962299 - DNA, 25 bp, Homo sapien
gggactaactggctaactgctctgg

SEQ ID NO: 3962300 - DNA, 25 bp, Homo sapien
acagggggccagactgacaggcggg

SEQ ID NO: 3962301 - DNA, 25 bp, Homo sapien
gccagactgacaggcgggggagtcc

SEQ ID NO: 3962302 - DNA, 25 bp, Homo sapien
agccccaagtgggagcgggaaagtg

SEQ ID NO: 3962303 - DNA, 25 bp, Homo sapien
gacttctaggggatggtggcacggc

SEQ ID NO: 3962304 - DNA, 25 bp, Homo sapien
ttagcacaggcgcttgtacgtgtag

SEQ ID NO: 3962305 - DNA, 25 bp, Homo sapien
cgcttgtacgtgtagatgtaggctt

SEQ ID NO: 3962306 - DNA, 25 bp, Homo sapien
ggcatgtgtgcgtcacatccttgaa

SEQ ID NO: 3962307 - DNA, 25 bp, Homo sapien
gggcatgtgtgcgtcacatccttga

SEQ ID NO: 3962308 - DNA, 25 bp, Homo sapien
gaagaaacccagcacgaaattcatc

SEQ ID NO: 3962309 - DNA, 25 bp, Homo sapien
tgcacaggcgctccctcaaagatct

SEQ ID NO: 3962310 - DNA, 25 bp, Homo sapien
aattcatcaagccaatctcgtagga

SEQ ID NO: 3962311 - DNA, 25 bp, Homo sapien
ctcaaagatctctccctgcagcact

SEQ ID NO: 3962312 - DNA, 25 bp, Homo sapien
cctggggggtagtagcccatgggtg

SEQ ID NO: 3962313 - DNA, 25 bp, Homo sapien
cagggtagggccctggcgtgtaggg

SEQ ID NO: 3962314 - DNA, 25 bp, Homo sapien
ctggggggtagtagcccatgggtgg

SEQ ID NO: 3962315 - DNA, 25 bp, Homo sapien
gtgacccggcggctcatagggtggg

SEQ ID NO: 3962316 - DNA, 25 bp, Homo sapien
caggctggggcattgggtgacccgg

SEQ ID NO: 3962317 - DNA, 25 bp, Homo sapien
agggtggggggccaatgtccgcagg

SEQ ID NO: 3962318 - DNA, 25 bp, Homo sapien
gccaatgtccgcagggggcagtggc

SEQ ID NO: 3962319 - DNA, 25 bp, Homo sapien
ggctgcatcacagctggggaggaac

SEQ ID NO: 3962320 - DNA, 25 bp, Homo sapien
tgcatcacagctggggaggaacggc

SEQ ID NO: 3962321 - DNA, 25 bp, Homo sapien
tggagggggctgcatcacagctggg

SEQ ID NO: 3962322 - DNA, 25 bp, Homo sapien
ctggagggggctgcatcacagctgg

SEQ ID NO: 3962323 - DNA, 25 bp, Homo sapien
gctgtggggcccccaggataaggag

SEQ ID NO: 3962324 - DNA, 25 bp, Homo sapien
ctgtggggcccccaggataaggagg

SEQ ID NO: 3962325 - DNA, 25 bp, Homo sapien
ggctgtggggcccccaggataagga

SEQ ID NO: 3962326 - DNA, 25 bp, Homo sapien
cctggatggacagggaacaggcagg

SEQ ID NO: 3962327 - DNA, 25 bp, Homo sapien
aatccgtgctactcagagaagggag

SEQ ID NO: 3962328 - DNA, 25 bp, Homo sapien
caaatccgtgctactcagagaaggg

SEQ ID NO: 3962329 - DNA, 25 bp, Homo sapien
ctcaaatccgtgctactcagagaag

SEQ ID NO: 3962330 - DNA, 25 bp, Homo sapien
ctcccatgcatgaggactggactgc

SEQ ID NO: 3962331 - DNA, 25 bp, Homo sapien
ggcttctccctagctgtcactctgc

SEQ ID NO: 3962332 - DNA, 25 bp, Homo sapien
gagtcaagtgaaatcttttccctca

SEQ ID NO: 3962333 - DNA, 25 bp, Homo sapien
cggtcccgtcgcaggtctgcttcct

SEQ ID NO: 3962334 - DNA, 25 bp, Homo sapien
gcactgtgcttggtgagtcactgaa

SEQ ID NO: 3962335 - DNA, 25 bp, Homo sapien
cccatgatgatagggtgtaagccca

SEQ ID NO: 3962336 - DNA, 25 bp, Homo sapien
catctctgagaatgcaggtgttgcc

SEQ ID NO: 3962337 - DNA, 25 bp, Homo sapien
ccaggaaaataagctgcactgtgct

SEQ ID NO: 3962338 - DNA, 25 bp, Homo sapien
aaacagctcatgaagatttcccgaa

SEQ ID NO: 3962339 - DNA, 25 bp, Homo sapien
caaaaccatgttgtgtagggtgtaa

SEQ ID NO: 3962340 - DNA, 25 bp, Homo sapien
tctttcaatcacacgatcagaagca

SEQ ID NO: 3962341 - DNA, 25 bp, Homo sapien
ggtccttctctaccaaggagaggat

SEQ ID NO: 3962342 - DNA, 25 bp, Homo sapien
tggaaggatgctccaccaatacacc

SEQ ID NO: 3962343 - DNA, 25 bp, Homo sapien
tgctccacggtaacccgagacaact

SEQ ID NO: 3962344 - DNA, 25 bp, Homo sapien
taacccgagacaactctttgagaag

SEQ ID NO: 3962345 - DNA, 25 bp, Homo sapien
gagtgcccaaggttggcaatgcccc

SEQ ID NO: 3962346 - DNA, 25 bp, Homo sapien
ggaaaactgaaaggccgatttctgc

SEQ ID NO: 3962347 - DNA, 25 bp, Homo sapien
catggcgtcaggacgccagctggcc

SEQ ID NO: 3962348 - DNA, 25 bp, Homo sapien
cagcttccatgtgctgaataaagga

SEQ ID NO: 3962349 - DNA, 25 bp, Homo sapien
gggcagagccgaggtaaaagacaaa

SEQ ID NO: 3962350 - DNA, 25 bp, Homo sapien
gaagatgctctcagtccagatagca

SEQ ID NO: 3962351 - DNA, 25 bp, Homo sapien
agatgctctcagtccagatagcagc

SEQ ID NO: 3962352 - DNA, 25 bp, Homo sapien
aagatgctctcagtccagatagcag

SEQ ID NO: 3962353 - DNA, 25 bp, Homo sapien
cagttgtcaccagggatagctccac

SEQ ID NO: 3962354 - DNA, 25 bp, Homo sapien
tatggaccacacactatgcgtgagg

SEQ ID NO: 3962355 - DNA, 25 bp, Homo sapien
agaaataaaacatcgggcctggcac

SEQ ID NO: 3962356 - DNA, 25 bp, Homo sapien
caacgtctgtcttaatggcaggcag

SEQ ID NO: 3962357 - DNA, 25 bp, Homo sapien
tgacatcaagtaggtggctcctaga

SEQ ID NO: 3962358 - DNA, 25 bp, Homo sapien
agttctgacatcaagtaggtggctc

SEQ ID NO: 3962359 - DNA, 25 bp, Homo sapien
aaagttctgacatcaagtaggtggc

SEQ ID NO: 3962360 - DNA, 25 bp, Homo sapien
ttctgacatcaagtaggtggctcct

SEQ ID NO: 3962361 - DNA, 25 bp, Homo sapien
gatgaggccgtttcactcagcagag

SEQ ID NO: 3962362 - DNA, 25 bp, Homo sapien
agaacctgagcttgaccatgctggg

SEQ ID NO: 3962363 - DNA, 25 bp, Homo sapien
ggcaggactcttcaggttcaaggat

SEQ ID NO: 3962364 - DNA, 25 bp, Homo sapien
gagaaatgcgtcatggtgtggccac

SEQ ID NO: 3962365 - DNA, 25 bp, Homo sapien
gggtctagggcaatggagtcactca

SEQ ID NO: 3962366 - DNA, 25 bp, Homo sapien
caaactggatggctgagaggcgctc

SEQ ID NO: 3962367 - DNA, 25 bp, Homo sapien
caccgggcagcctgtgaaacatggg

SEQ ID NO: 3962368 - DNA, 25 bp, Homo sapien
aaagttgtgatcaaggccatctccc

SEQ ID NO: 3962369 - DNA, 25 bp, Homo sapien
gcacccggcctgcatgttaatcaga

SEQ ID NO: 3962370 - DNA, 25 bp, Homo sapien
tcttcctgaagtaatacgggttgaa

SEQ ID NO: 3962371 - DNA, 25 bp, Homo sapien
gacactgggactagatctgaattca

SEQ ID NO: 3962372 - DNA, 25 bp, Homo sapien
gaattgtgacaaccaagctcgcttt

SEQ ID NO: 3962373 - DNA, 25 bp, Homo sapien
tctcaagggtgagagacggatttct

SEQ ID NO: 3962374 - DNA, 25 bp, Homo sapien
tctgagactggcaagtgactgggca

SEQ ID NO: 3962375 - DNA, 25 bp, Homo sapien
tgcagtgaacgtcgtgacggcaccg

SEQ ID NO: 3962376 - DNA, 25 bp, Homo sapien
gactgggcataacctttccgattaa

SEQ ID NO: 3962377 - DNA, 25 bp, Homo sapien
cgggtccggacaggcgccggcagaa

SEQ ID NO: 3962378 - DNA, 25 bp, Homo sapien
gcgcggctttgcgcgcacaacgaaa

SEQ ID NO: 3962379 - DNA, 25 bp, Homo sapien
tccagaagcccggtgcccgaggccg

SEQ ID NO: 3962380 - DNA, 25 bp, Homo sapien
gccggcagaacaagaccctcagccc

SEQ ID NO: 3962381 - DNA, 25 bp, Homo sapien
aacgcctcggcagctggcagtcgca

SEQ ID NO: 3962382 - DNA, 25 bp, Homo sapien
aacagcaggaccgaacgcctcggca

SEQ ID NO: 3962383 - DNA, 25 bp, Homo sapien
gcggccgcaacagcaggaccgaacg

SEQ ID NO: 3962384 - DNA, 25 bp, Homo sapien
gcagctggcagtcgcacttctgtca

SEQ ID NO: 3962385 - DNA, 25 bp, Homo sapien
caggactgtttgtgcagctaaggaa

SEQ ID NO: 3962386 - DNA, 25 bp, Homo sapien
gagagtgggatcttctcagacaaga

SEQ ID NO: 3962387 - DNA, 25 bp, Homo sapien
caggttcagacctagctgtacagcc

SEQ ID NO: 3962388 - DNA, 25 bp, Homo sapien
cttgcaagcagtgaccagaggagag

SEQ ID NO: 3962389 - DNA, 25 bp, Homo sapien
cttgaacgccaacgtacctcatttt

SEQ ID NO: 3962390 - DNA, 25 bp, Homo sapien
aaatcttgaacgccaacgtacctca

SEQ ID NO: 3962391 - DNA, 25 bp, Homo sapien
aatcttgaacgccaacgtacctcat

SEQ ID NO: 3962392 - DNA, 25 bp, Homo sapien
tcttgaacgccaacgtacctcattt

SEQ ID NO: 3962393 - DNA, 25 bp, Homo sapien
tccaagtttcgcctgtcttttgctt

SEQ ID NO: 3962394 - DNA, 25 bp, Homo sapien
agatgacagagctctccaagtttcg

SEQ ID NO: 3962395 - DNA, 25 bp, Homo sapien
gtcagaagatgacagagctctccaa

SEQ ID NO: 3962396 - DNA, 25 bp, Homo sapien
agagctctccaagtttcgcctgtct

SEQ ID NO: 3962397 - DNA, 25 bp, Homo sapien
aagttcctttgctttaggcatcgct

SEQ ID NO: 3962398 - DNA, 25 bp, Homo sapien
gtcaacctcactgtcagaatcactg

SEQ ID NO: 3962399 - DNA, 25 bp, Homo sapien
tttgctttaggcatcgcttcgctcg

SEQ ID NO: 3962400 - DNA, 25 bp, Homo sapien
ctttaggcatcgcttcgctcggctc

SEQ ID NO: 3962401 - DNA, 25 bp, Homo sapien
ctctcactgcatatcacacagaggg

SEQ ID NO: 3962402 - DNA, 25 bp, Homo sapien
caggtgggtcttgggtgagaaacct

SEQ ID NO: 3962403 - DNA, 25 bp, Homo sapien
gcaatctccacgcaagatgcaggga

SEQ ID NO: 3962404 - DNA, 25 bp, Homo sapien
ggagtccagagcatgtcccctacat

SEQ ID NO: 3962405 - DNA, 25 bp, Homo sapien
cctgtgctcaccaccgatgcgtttg

SEQ ID NO: 3962406 - DNA, 25 bp, Homo sapien
ccaactgtgaggtcacacggtcttg

SEQ ID NO: 3962407 - DNA, 25 bp, Homo sapien
ctcaccaccgatgcgtttggtggaa

SEQ ID NO: 3962408 - DNA, 25 bp, Homo sapien
cttgctgcggcaattcagggattgg

SEQ ID NO: 3962409 - DNA, 25 bp, Homo sapien
gcatcttgcagaacaagccgtctgt

SEQ ID NO: 3962410 - DNA, 25 bp, Homo sapien
gattcccacgcaggagttggactcg

SEQ ID NO: 3962411 - DNA, 25 bp, Homo sapien
tccaagataagtcggaagtgaggct

SEQ ID NO: 3962412 - DNA, 25 bp, Homo sapien
gaagctccccgtggtgaaaagacag

SEQ ID NO: 3962413 - DNA, 25 bp, Homo sapien
tctctgaagttctgtccgccaggca

SEQ ID NO: 3962414 - DNA, 25 bp, Homo sapien
caaggaacagcaacgctggctgacg

SEQ ID NO: 3962415 - DNA, 25 bp, Homo sapien
tgcttctgaagagcgacacacgtag

SEQ ID NO: 3962416 - DNA, 25 bp, Homo sapien
tccaagccagggatcagcaatgtct

SEQ ID NO: 3962417 - DNA, 25 bp, Homo sapien
tggtggcggcatgggggaagtgtgg

SEQ ID NO: 3962418 - DNA, 25 bp, Homo sapien
tgacgtggctgtcgcggccatcggg

SEQ ID NO: 3962419 - DNA, 25 bp, Homo sapien
ccctgggttctgaggtggcctgttg

SEQ ID NO: 3962420 - DNA, 25 bp, Homo sapien
tctgaagccggagaagggggtgttg

SEQ ID NO: 3962421 - DNA, 25 bp, Homo sapien
cgctgtggaagctctcggaggcctt

SEQ ID NO: 3962422 - DNA, 25 bp, Homo sapien
catggtgagagcgtcagggaagttg

SEQ ID NO: 3962423 - DNA, 25 bp, Homo sapien
gagaacatggtgagagcgtcaggga

SEQ ID NO: 3962424 - DNA, 25 bp, Homo sapien
gaggccttgagacgggagaacatgg

SEQ ID NO: 3962425 - DNA, 25 bp, Homo sapien
ccattctcggaaggctctgtgttcc

SEQ ID NO: 3962426 - DNA, 25 bp, Homo sapien
gagatgcgtggctggcccattctcg

SEQ ID NO: 3962427 - DNA, 25 bp, Homo sapien
ggttcccagaggagaagccttgaga

SEQ ID NO: 3962428 - DNA, 25 bp, Homo sapien
gagatgaaccgacccagcctcactc

SEQ ID NO: 3962429 - DNA, 25 bp, Homo sapien
ttatacacagaactagctcggcctc

SEQ ID NO: 3962430 - DNA, 25 bp, Homo sapien
ggagccgggactcctgctgacccat

SEQ ID NO: 3962431 - DNA, 25 bp, Homo sapien
tgacccatctccaaagaggtcgagc

SEQ ID NO: 3962432 - DNA, 25 bp, Homo sapien
caagattaagtgcaggacccacgga

SEQ ID NO: 3962433 - DNA, 25 bp, Homo sapien
ggtgatggtggctgtaggggatgtt

SEQ ID NO: 3962434 - DNA, 25 bp, Homo sapien
tggtctcctggaaaaaggcgctgag

SEQ ID NO: 3962435 - DNA, 25 bp, Homo sapien
ctcctggaaaaaggcgctgagggct

SEQ ID NO: 3962436 - DNA, 25 bp, Homo sapien
atggtggctgtaggggatgttggtc

SEQ ID NO: 3962437 - DNA, 25 bp, Homo sapien
ctgcaggaagaaaggcccctgctca

SEQ ID NO: 3962438 - DNA, 25 bp, Homo sapien
cccttgttcccaggctcctctgagg

SEQ ID NO: 3962439 - DNA, 25 bp, Homo sapien
tgcaggaagaaaggcccctgctcac

SEQ ID NO: 3962440 - DNA, 25 bp, Homo sapien
gctgcccttgttcccaggctcctct

SEQ ID NO: 3962441 - DNA, 25 bp, Homo sapien
tgccccgtttcaggagattctagcc

SEQ ID NO: 3962442 - DNA, 25 bp, Homo sapien
taggatcaaagccaccacgggttta

SEQ ID NO: 3962443 - DNA, 25 bp, Homo sapien
caaagaggttcgactaggtggctcc

SEQ ID NO: 3962444 - DNA, 25 bp, Homo sapien
taagatcaccagattccagcaagca

SEQ ID NO: 3962445 - DNA, 25 bp, Homo sapien
gagacaccctatctgggtgtcccta

SEQ ID NO: 3962446 - DNA, 25 bp, Homo sapien
cctgcaggagacaccctatctgggt

SEQ ID NO: 3962447 - DNA, 25 bp, Homo sapien
ctgtgtaaatcccaaccccaggagc

SEQ ID NO: 3962448 - DNA, 25 bp, Homo sapien
gcaggccgctgtgagcattctccat

SEQ ID NO: 3962449 - DNA, 25 bp, Homo sapien
gaattgcagcaaatgtgacccagaa

SEQ ID NO: 3962450 - DNA, 25 bp, Homo sapien
ttgcagcaaatgtgacccagaaaca

SEQ ID NO: 3962451 - DNA, 25 bp, Homo sapien
tgcagcaaatgtgacccagaaacac

SEQ ID NO: 3962452 - DNA, 25 bp, Homo sapien
ctgaattgcagcaaatgtgacccag

SEQ ID NO: 3962453 - DNA, 25 bp, Homo sapien
gggatggggtggccatgtgaacccc

SEQ ID NO: 3962454 - DNA, 25 bp, Homo sapien
gatggggtggccatgtgaacccctc

SEQ ID NO: 3962455 - DNA, 25 bp, Homo sapien
agagggatggggtggccatgtgaac

SEQ ID NO: 3962456 - DNA, 25 bp, Homo sapien
ggtggccatgtgaacccctcactca

SEQ ID NO: 3962457 - DNA, 25 bp, Homo sapien
ctgggaacagtctttccccagacat

SEQ ID NO: 3962458 - DNA, 25 bp, Homo sapien
tttcaattaactgtgccgctgaggg

SEQ ID NO: 3962459 - DNA, 25 bp, Homo sapien
ggcagggcccgcttcccaccggaca

SEQ ID NO: 3962460 - DNA, 25 bp, Homo sapien
tcaattaactgtgccgctgagggat

SEQ ID NO: 3962461 - DNA, 25 bp, Homo sapien
atgaatgcggttttgcaagttttgc

SEQ ID NO: 3962462 - DNA, 25 bp, Homo sapien
ggcagcgagggaaccctgcgtgcag

SEQ ID NO: 3962463 - DNA, 25 bp, Homo sapien
gcagatgtgtaactgccatgaatgc

SEQ ID NO: 3962464 - DNA, 25 bp, Homo sapien
agggaaccctgcgtgcagatgtgta

SEQ ID NO: 3962465 - DNA, 25 bp, Homo sapien
ctgacacaaacagggctgatgaggg

SEQ ID NO: 3962466 - DNA, 25 bp, Homo sapien
ggagcactactgtcctatgggttag

SEQ ID NO: 3962467 - DNA, 25 bp, Homo sapien
ggcgcggtgcgtgcgtaaacacaaa

SEQ ID NO: 3962468 - DNA, 25 bp, Homo sapien
gctagcccgaaagctggtgaaccgt

SEQ ID NO: 3962469 - DNA, 25 bp, Homo sapien
caaatgcacatggacgtgtgcgcac

SEQ ID NO: 3962470 - DNA, 25 bp, Homo sapien
ttgggatccggacgccgggcaccgc

SEQ ID NO: 3962471 - DNA, 25 bp, Homo sapien
acgcgggacacactccgcccgtggc

SEQ ID NO: 3962472 - DNA, 25 bp, Homo sapien
gcgcacagccggcacgcgtccacgc

SEQ ID NO: 3962473 - DNA, 25 bp, Homo sapien
gcccggcggccacgcgggacacact

SEQ ID NO: 3962474 - DNA, 25 bp, Homo sapien
gaactggttgatcatgacctggtgc

SEQ ID NO: 3962475 - DNA, 25 bp, Homo sapien
tcgaactgccagtgggccgcctgca

SEQ ID NO: 3962476 - DNA, 25 bp, Homo sapien
cagcacgaactggttgatcatgacc

SEQ ID NO: 3962477 - DNA, 25 bp, Homo sapien
tgcttcgcctggtcggccgcgcagc

SEQ ID NO: 3962478 - DNA, 25 bp, Homo sapien
tccggcctccctcctccgcccgcgc

SEQ ID NO: 3962479 - DNA, 25 bp, Homo sapien
cggcctccctcctccgcccgcgcct

SEQ ID NO: 3962480 - DNA, 25 bp, Homo sapien
gcgctgcccgctccggcctccctcc

SEQ ID NO: 3962481 - DNA, 25 bp, Homo sapien
ccgccgcgctgcccgctccggcctc

SEQ ID NO: 3962482 - DNA, 25 bp, Homo sapien
gccggctccggctaatacaaatatt

SEQ ID NO: 3962483 - DNA, 25 bp, Homo sapien
tttactgtgcggctctgactcaccg

SEQ ID NO: 3962484 - DNA, 25 bp, Homo sapien
tgggatatgtagtccccacggtgcg

SEQ ID NO: 3962485 - DNA, 25 bp, Homo sapien
ccggcgccgcggcatgctgggatat

SEQ ID NO: 3962486 - DNA, 25 bp, Homo sapien
accagagccaggcacgtccatgtcg

SEQ ID NO: 3962487 - DNA, 25 bp, Homo sapien
gcagctgtccagaccgtgaccagag

SEQ ID NO: 3962488 - DNA, 25 bp, Homo sapien
tgtccagaccgtgaccagagccagg

SEQ ID NO: 3962489 - DNA, 25 bp, Homo sapien
tgtgcgcagctgtccagaccgtgac

SEQ ID NO: 3962490 - DNA, 25 bp, Homo sapien
agaagagcgggcacccatggtgcat

SEQ ID NO: 3962491 - DNA, 25 bp, Homo sapien
cattcagaacctgtggagaagagcg

SEQ ID NO: 3962492 - DNA, 25 bp, Homo sapien
cctgtggagaagagcgggcacccat

SEQ ID NO: 3962493 - DNA, 25 bp, Homo sapien
ctctgacattcagaacctgtggaga

SEQ ID NO: 3962494 - DNA, 25 bp, Homo sapien
gccgctgtagctgaccaaattaatt

SEQ ID NO: 3962495 - DNA, 25 bp, Homo sapien
tatagcggcatgatgtcactctagc

SEQ ID NO: 3962496 - DNA, 25 bp, Homo sapien
ggcttgagataaagatctaaacccc

SEQ ID NO: 3962497 - DNA, 25 bp, Homo sapien
tcccagctatgtatgtgtaccacta

SEQ ID NO: 3962498 - DNA, 25 bp, Homo sapien
gacctgaggccgttagaagaaacac

SEQ ID NO: 3962499 - DNA, 25 bp, Homo sapien
acgtggtcttgggtatgtggcctca

SEQ ID NO: 3962500 - DNA, 25 bp, Homo sapien
ttccatagacctgggcgaagaagcg

SEQ ID NO: 3962501 - DNA, 25 bp, Homo sapien
gctttcttctaacagggctctcgcc

SEQ ID NO: 3962502 - DNA, 25 bp, Homo sapien
caacaggtacacgagataaagcagc

SEQ ID NO: 3962503 - DNA, 25 bp, Homo sapien
gaggacagagggaaccaacaggtac

SEQ ID NO: 3962504 - DNA, 25 bp, Homo sapien
gcggcatcccaaggagggaatagcc

SEQ ID NO: 3962505 - DNA, 25 bp, Homo sapien
aggatgatgcctacttttgggctgg

SEQ ID NO: 3962506 - DNA, 25 bp, Homo sapien
caaacgtatgtatcctcctgcctgg

SEQ ID NO: 3962507 - DNA, 25 bp, Homo sapien
gataaacatgggtcagacttctccc

SEQ ID NO: 3962508 - DNA, 25 bp, Homo sapien
ttttagtggtgttcgaggactgccc

SEQ ID NO: 3962509 - DNA, 25 bp, Homo sapien
gccctgaactctggtctgataaaca

SEQ ID NO: 3962510 - DNA, 25 bp, Homo sapien
aaactacatacagtaagatcttaga

SEQ ID NO: 3962511 - DNA, 25 bp, Homo sapien
aactacatacagtaagatcttagag

SEQ ID NO: 3962512 - DNA, 25 bp, Homo sapien
ggcaagttgtaaaaggggtgtcaga

SEQ ID NO: 3962513 - DNA, 25 bp, Homo sapien
ttggcaagttgtaaaaggggtgtca

SEQ ID NO: 3962514 - DNA, 25 bp, Homo sapien
tgttcaaggcccaggtaatcaggga

SEQ ID NO: 3962515 - DNA, 25 bp, Homo sapien
ccgccccgtaggctgtgtggaaaat

SEQ ID NO: 3962516 - DNA, 25 bp, Homo sapien
tgtgactcgctccacatcggtatgt

SEQ ID NO: 3962517 - DNA, 25 bp, Homo sapien
tgcggtgacccctcagaaaatgatc

SEQ ID NO: 3962518 - DNA, 25 bp, Homo sapien
accatgcagcgcctgaaggtctcag

SEQ ID NO: 3962519 - DNA, 25 bp, Homo sapien
ctgcaatacgtgaggttgaggacca

SEQ ID NO: 3962520 - DNA, 25 bp, Homo sapien
cgtggttctcgggaaggacacagac

SEQ ID NO: 3962521 - DNA, 25 bp, Homo sapien
cgtggctgtgccaactgtaactggg

SEQ ID NO: 3962522 - DNA, 25 bp, Homo sapien
caagacgctgtgaccacgggcgtgt

SEQ ID NO: 3962523 - DNA, 25 bp, Homo sapien
gcctccaccccgtggttcttagtga

SEQ ID NO: 3962524 - DNA, 25 bp, Homo sapien
tcttagtgaatgagccatgctgttt

SEQ ID NO: 3962525 - DNA, 25 bp, Homo sapien
ttcccccatgcgctgctgtgcaagg

SEQ ID NO: 3962526 - DNA, 25 bp, Homo sapien
cacctgctgtgcgtcagtggaggca

SEQ ID NO: 3962527 - DNA, 25 bp, Homo sapien
caaggtctcatttaaccgggtggca

SEQ ID NO: 3962528 - DNA, 25 bp, Homo sapien
gattgggctctctcgtgaacaggtg

SEQ ID NO: 3962529 - DNA, 25 bp, Homo sapien
aaggtaaacctcctgggccgcagat

SEQ ID NO: 3962530 - DNA, 25 bp, Homo sapien
cacatggtcgctcactctggaatct

SEQ ID NO: 3962531 - DNA, 25 bp, Homo sapien
cacggacctaacaggtgagtttcca

SEQ ID NO: 3962532 - DNA, 25 bp, Homo sapien
tcatggagttcagggcacctcgctc

SEQ ID NO: 3962533 - DNA, 25 bp, Homo sapien
gagccagcgcttgtattgatgtctg

SEQ ID NO: 3962534 - DNA, 25 bp, Homo sapien
tctagagtgtttgtgtgtaccccgc

SEQ ID NO: 3962535 - DNA, 25 bp, Homo sapien
cgctgtacacccagaaggaccgagt

SEQ ID NO: 3962536 - DNA, 25 bp, Homo sapien
aacttcctgagcaacgccttcgtga

SEQ ID NO: 3962537 - DNA, 25 bp, Homo sapien
ggtgctcaacatgatgcccgaggag

SEQ ID NO: 3962538 - DNA, 25 bp, Homo sapien
ttcaaagtagcttcaccccacgtgg

SEQ ID NO: 3962539 - DNA, 25 bp, Homo sapien
tctttcaccacgtgtgaactgtggg

SEQ ID NO: 3962540 - DNA, 25 bp, Homo sapien
gaagacaataaagtcgctccgcagc

SEQ ID NO: 3962541 - DNA, 25 bp, Homo sapien
tacaacgaagctgtcgaaggagaag

SEQ ID NO: 3962542 - DNA, 25 bp, Homo sapien
tggaaagactccagcggcatcgtca

SEQ ID NO: 3962543 - DNA, 25 bp, Homo sapien
tctgcaagcagctccaggggatggt

SEQ ID NO: 3962544 - DNA, 25 bp, Homo sapien
ccatccctcgtggtctcctacagcc

SEQ ID NO: 3962545 - DNA, 25 bp, Homo sapien
ggatggtgtagaagtgcaggcttac

SEQ ID NO: 3962546 - DNA, 25 bp, Homo sapien
gcacctgtgcgtgtatatggataca

SEQ ID NO: 3962547 - DNA, 25 bp, Homo sapien
gtcttgcctctgtctgccggctgct

SEQ ID NO: 3962548 - DNA, 25 bp, Homo sapien
ggtcccacctcagttggcacctgtg

SEQ ID NO: 3962549 - DNA, 25 bp, Homo sapien
gtggaccaatcacccaacgtcagat

SEQ ID NO: 3962550 - DNA, 25 bp, Homo sapien
cggtgagaagggagggggacaggtg

SEQ ID NO: 3962551 - DNA, 25 bp, Homo sapien
caggtgggtgcatacccacacctgc

SEQ ID NO: 3962552 - DNA, 25 bp, Homo sapien
gacaggtgggtgcatacccacacct

SEQ ID NO: 3962553 - DNA, 25 bp, Homo sapien
gggacaggtgggtgcatacccacac

SEQ ID NO: 3962554 - DNA, 25 bp, Homo sapien
aggctctgggtcactaagcacagtg

SEQ ID NO: 3962555 - DNA, 25 bp, Homo sapien
ggctctgggtcactaagcacagtgc

SEQ ID NO: 3962556 - DNA, 25 bp, Homo sapien
gtctcccgccacttcttcccgttca

SEQ ID NO: 3962557 - DNA, 25 bp, Homo sapien
ttcttcccgttcagcacctgcagct

SEQ ID NO: 3962558 - DNA, 25 bp, Homo sapien
cagtcgtctggtccccggagactca

SEQ ID NO: 3962559 - DNA, 25 bp, Homo sapien
tgcccctcacccgttatggccccag

SEQ ID NO: 3962560 - DNA, 25 bp, Homo sapien
ctcggaaacaaaaggagcgctcagt

SEQ ID NO: 3962561 - DNA, 25 bp, Homo sapien
aaaaggagcgctcagtcgtctggtc

SEQ ID NO: 3962562 - DNA, 25 bp, Homo sapien
atctcacggacacggtcctccaggg

SEQ ID NO: 3962563 - DNA, 25 bp, Homo sapien
ccatctcacggacacggtcctccag

SEQ ID NO: 3962564 - DNA, 25 bp, Homo sapien
agggacgcttgccagcccttggagt

SEQ ID NO: 3962565 - DNA, 25 bp, Homo sapien
atggcctgcagggacgcttgccagc

SEQ ID NO: 3962566 - DNA, 25 bp, Homo sapien
tggactctgggatcatgtgcacaca

SEQ ID NO: 3962567 - DNA, 25 bp, Homo sapien
agtgcggagtcaggccactgctctt

SEQ ID NO: 3962568 - DNA, 25 bp, Homo sapien
ggcacagggcctttctcgagtacct

SEQ ID NO: 3962569 - DNA, 25 bp, Homo sapien
cctggctggaggctacagaagtcac

SEQ ID NO: 3962570 - DNA, 25 bp, Homo sapien
tgcctcactcgagatgacagctcag

SEQ ID NO: 3962571 - DNA, 25 bp, Homo sapien
gggacggctaggcccagagtggctg

SEQ ID NO: 3962572 - DNA, 25 bp, Homo sapien
ctcgagatgacagctcagcttgaca

SEQ ID NO: 3962573 - DNA, 25 bp, Homo sapien
tggtcctgcctcactcgagatgaca

SEQ ID NO: 3962574 - DNA, 25 bp, Homo sapien
gcctggaggtcctcgcgggcgcggt

SEQ ID NO: 3962575 - DNA, 25 bp, Homo sapien
cctggaggtcctcgcgggcgcggtc

SEQ ID NO: 3962576 - DNA, 25 bp, Homo sapien
agctggtccaggacgagggcagcat

SEQ ID NO: 3962577 - DNA, 25 bp, Homo sapien
tggtccaggacgagggcagcatccc

SEQ ID NO: 3962578 - DNA, 25 bp, Homo sapien
aatggcggacgtcatcttcctcttg

SEQ ID NO: 3962579 - DNA, 25 bp, Homo sapien
ccagcgggcaatggcggacgtcatc

SEQ ID NO: 3962580 - DNA, 25 bp, Homo sapien
cactgctgtgccagcgggcaatggc

SEQ ID NO: 3962581 - DNA, 25 bp, Homo sapien
tcagcctccagccggtcggcgtagg

SEQ ID NO: 3962582 - DNA, 25 bp, Homo sapien
ggccagagcggcccttctggacgca

SEQ ID NO: 3962583 - DNA, 25 bp, Homo sapien
tcagcgtcccaagagcgcttacatg

SEQ ID NO: 3962584 - DNA, 25 bp, Homo sapien
gggaatgtgaccaggatatgcctca

SEQ ID NO: 3962585 - DNA, 25 bp, Homo sapien
tgaccaggatatgcctcagcgtccc

SEQ ID NO: 3962586 - DNA, 25 bp, Homo sapien
cagaaagatgcggaggtccacgtcc

SEQ ID NO: 3962587 - DNA, 25 bp, Homo sapien
cttcaggtcgctctcagtgagggtc

SEQ ID NO: 3962588 - DNA, 25 bp, Homo sapien
tgcaggtacttcagacacccgatct

SEQ ID NO: 3962589 - DNA, 25 bp, Homo sapien
caggtacttcagacacccgatctgc

SEQ ID NO: 3962590 - DNA, 25 bp, Homo sapien
cagagacgttttcctccactcggag

SEQ ID NO: 3962591 - DNA, 25 bp, Homo sapien
caacgtatgttgaagggaccgagac

SEQ ID NO: 3962592 - DNA, 25 bp, Homo sapien
gacagtgccttgtgtgtggcgccca

SEQ ID NO: 3962593 - DNA, 25 bp, Homo sapien
caatgctttgtaggcggagagcgct

SEQ ID NO: 3962594 - DNA, 25 bp, Homo sapien
tgagtcacacctctgatccctaagg

SEQ ID NO: 3962595 - DNA, 25 bp, Homo sapien
agcgcctggcacgtcatatacacaa

SEQ ID NO: 3962596 - DNA, 25 bp, Homo sapien
gacaggtcctttccgtggagaggaa

SEQ ID NO: 3962597 - DNA, 25 bp, Homo sapien
ttctgttctcctagcagcgcctggc

SEQ ID NO: 3962598 - DNA, 25 bp, Homo sapien
tgcgagctgagcttttacaggcatg

SEQ ID NO: 3962599 - DNA, 25 bp, Homo sapien
tggactcagcgagaaagccttccct

SEQ ID NO: 3962600 - DNA, 25 bp, Homo sapien
ccttccctgtcagttgcagcgcggg

SEQ ID NO: 3962601 - DNA, 25 bp, Homo sapien
tcaggattcttggtcttcatgtaac

SEQ ID NO: 3962602 - DNA, 25 bp, Homo sapien
tgctctccacagaagcttcgctgct

SEQ ID NO: 3962603 - DNA, 25 bp, Homo sapien
gctctccacagaagcttcgctgctg

SEQ ID NO: 3962604 - DNA, 25 bp, Homo sapien
ctgataaatcccaagcacccggagc

SEQ ID NO: 3962605 - DNA, 25 bp, Homo sapien
tgttgctgtggaacggctcccttaa

SEQ ID NO: 3962606 - DNA, 25 bp, Homo sapien
cattcctcacaagaaccagggccgt

SEQ ID NO: 3962607 - DNA, 25 bp, Homo sapien
cacggaggtgcagttataacagaca

SEQ ID NO: 3962608 - DNA, 25 bp, Homo sapien
gggaggtgacatcccggcagcagag

SEQ ID NO: 3962609 - DNA, 25 bp, Homo sapien
tcttcttccagggggttctcgccac

SEQ ID NO: 3962610 - DNA, 25 bp, Homo sapien
tctcgccactgctgttgaaggtgac

SEQ ID NO: 3962611 - DNA, 25 bp, Homo sapien
atcccgctcattgatgggggaggtg

SEQ ID NO: 3962612 - DNA, 25 bp, Homo sapien
ccagggctcgcggtccctcgtggat

SEQ ID NO: 3962613 - DNA, 25 bp, Homo sapien
tgacacccttcttccggcaaggcct

SEQ ID NO: 3962614 - DNA, 25 bp, Homo sapien
ggtccctcgtggatgctgacaccct

SEQ ID NO: 3962615 - DNA, 25 bp, Homo sapien
cagggcaggactcgtcagaagagct

SEQ ID NO: 3962616 - DNA, 25 bp, Homo sapien
caaggccacgatcttcatgtgtccg

SEQ ID NO: 3962617 - DNA, 25 bp, Homo sapien
actgtggtctctcgcgtccaccttg

SEQ ID NO: 3962618 - DNA, 25 bp, Homo sapien
agagggcgagtaagtgtccatcaag

SEQ ID NO: 3962619 - DNA, 25 bp, Homo sapien
ctgggctccgatagaggctcttggg

SEQ ID NO: 3962620 - DNA, 25 bp, Homo sapien
tgcatgagaaagaggcaggcttgtc

SEQ ID NO: 3962621 - DNA, 25 bp, Homo sapien
gctggtttctgactgcctccctgtg

SEQ ID NO: 3962622 - DNA, 25 bp, Homo sapien
gacagaagggcatatgctggtttct

SEQ ID NO: 3962623 - DNA, 25 bp, Homo sapien
tgtgggaaacatcacatctgcatga

SEQ ID NO: 3962624 - DNA, 25 bp, Homo sapien
tactgcattactttgtagggccgaa

SEQ ID NO: 3962625 - DNA, 25 bp, Homo sapien
gcatcagggttcacccctgccgcag

SEQ ID NO: 3962626 - DNA, 25 bp, Homo sapien
cctgccgcagcatgcagcagtactg

SEQ ID NO: 3962627 - DNA, 25 bp, Homo sapien
cagcccagcctaacgcatcagggtt

SEQ ID NO: 3962628 - DNA, 25 bp, Homo sapien
gggagtaaatccacatatcggctcc

SEQ ID NO: 3962629 - DNA, 25 bp, Homo sapien
gtgattcagaaaatactgcacgatt

SEQ ID NO: 3962630 - DNA, 25 bp, Homo sapien
aatactgcacgattatctcatggcc

SEQ ID NO: 3962631 - DNA, 25 bp, Homo sapien
ttccatcaagggagtaaatccacat

SEQ ID NO: 3962632 - DNA, 25 bp, Homo sapien
tgccgaagcagggtggccctaaact

SEQ ID NO: 3962633 - DNA, 25 bp, Homo sapien
agatgtacgaaaaggcctgtgcctg

SEQ ID NO: 3962634 - DNA, 25 bp, Homo sapien
tagagtcagatgacacctaggccac

SEQ ID NO: 3962635 - DNA, 25 bp, Homo sapien
tcatcttgagcctctcgtgccgaag

SEQ ID NO: 3962636 - DNA, 25 bp, Homo sapien
cgctggtacagtggaagagggctgt

SEQ ID NO: 3962637 - DNA, 25 bp, Homo sapien
gtacagtggaagagggctgtccagc

SEQ ID NO: 3962638 - DNA, 25 bp, Homo sapien
tggtgcccggcgctggtacagtgga

SEQ ID NO: 3962639 - DNA, 25 bp, Homo sapien
gaccatgtgctggtgcccggcgctg

SEQ ID NO: 3962640 - DNA, 25 bp, Homo sapien
gtgcgttacggcctcatctcctctg

SEQ ID NO: 3962641 - DNA, 25 bp, Homo sapien
caagagaacacagaacgtgcgttac

SEQ ID NO: 3962642 - DNA, 25 bp, Homo sapien
gaacacagaacgtgcgttacggcct

SEQ ID NO: 3962643 - DNA, 25 bp, Homo sapien
gaacgtgcgttacggcctcatctcc

SEQ ID NO: 3962644 - DNA, 25 bp, Homo sapien
acacgagcacacacgaacaccgtgg

SEQ ID NO: 3962645 - DNA, 25 bp, Homo sapien
tgcaagaatcagaagtgattacacg

SEQ ID NO: 3962646 - DNA, 25 bp, Homo sapien
gaatcagaagtgattacacgagcac

SEQ ID NO: 3962647 - DNA, 25 bp, Homo sapien
gaagtgattacacgagcacacacga

SEQ ID NO: 3962648 - DNA, 25 bp, Homo sapien
caagcagcaggtgcacgattgtgtc

SEQ ID NO: 3962649 - DNA, 25 bp, Homo sapien
ctggagaagaaagtaggcgatgctc

SEQ ID NO: 3962650 - DNA, 25 bp, Homo sapien
gtcgtggccaatgtaggaggcatac

SEQ ID NO: 3962651 - DNA, 25 bp, Homo sapien
taggcgatgctctcgttgccacagc

SEQ ID NO: 3962652 - DNA, 25 bp, Homo sapien
caagatatgctagacatggccagcc

SEQ ID NO: 3962653 - DNA, 25 bp, Homo sapien
gatccagcctggattgtcaacacag

SEQ ID NO: 3962654 - DNA, 25 bp, Homo sapien
ggcagatggcactcaaccagggaat

SEQ ID NO: 3962655 - DNA, 25 bp, Homo sapien
gatcctacatggttaacgcccacag

SEQ ID NO: 3962656 - DNA, 25 bp, Homo sapien
tgcagcagggctcgaatgcacccag

SEQ ID NO: 3962657 - DNA, 25 bp, Homo sapien
cagccgggattcacatattagacca

SEQ ID NO: 3962658 - DNA, 25 bp, Homo sapien
tgggcagccattccagaaggtcctg

SEQ ID NO: 3962659 - DNA, 25 bp, Homo sapien
cctgataccagggttcagtggcagc

SEQ ID NO: 3962660 - DNA, 25 bp, Homo sapien
tactatgggcaagacgcagccatgg

SEQ ID NO: 3962661 - DNA, 25 bp, Homo sapien
cgggaggtcattccccagaggcact

SEQ ID NO: 3962662 - DNA, 25 bp, Homo sapien
catcacgtgggatcgaagccatcac

SEQ ID NO: 3962663 - DNA, 25 bp, Homo sapien
aaaacggcctctttgtcagggctca

SEQ ID NO: 3962664 - DNA, 25 bp, Homo sapien
aggagttccggctcgctggcttcat

SEQ ID NO: 3962665 - DNA, 25 bp, Homo sapien
tggcttcatcgctgagctcggacat

SEQ ID NO: 3962666 - DNA, 25 bp, Homo sapien
ttcaccacttcatactggccaatgg

SEQ ID NO: 3962667 - DNA, 25 bp, Homo sapien
ccacatggacaagctgcggttcagg

SEQ ID NO: 3962668 - DNA, 25 bp, Homo sapien
agcctctcaaagtcctggaaatata

SEQ ID NO: 3962669 - DNA, 25 bp, Homo sapien
cagcctctcaaagtcctggaaatat

SEQ ID NO: 3962670 - DNA, 25 bp, Homo sapien
ctctcaaagtcctggaaatataggc

SEQ ID NO: 3962671 - DNA, 25 bp, Homo sapien
tcaaagtcctggaaatataggcgtg

SEQ ID NO: 3962672 - DNA, 25 bp, Homo sapien
agtgcagcgcgggacgcccgagcgc

SEQ ID NO: 3962673 - DNA, 25 bp, Homo sapien
cacaggaacgctacggcgcacaggg

SEQ ID NO: 3962674 - DNA, 25 bp, Homo sapien
cagtcacgcggcgagcaagtgcagc

SEQ ID NO: 3962675 - DNA, 25 bp, Homo sapien
gagcgccgggtctaggcgggctgca

SEQ ID NO: 3962676 - DNA, 25 bp, Homo sapien
tgggcctcaggccttgcgccgccct

SEQ ID NO: 3962677 - DNA, 25 bp, Homo sapien
ggagcacgccgggaagctcgcgggt

SEQ ID NO: 3962678 - DNA, 25 bp, Homo sapien
aagtagttgcgggagggcgcggagc

SEQ ID NO: 3962679 - DNA, 25 bp, Homo sapien
ccccaaacagctcgccgccacgctc

SEQ ID NO: 3962680 - DNA, 25 bp, Homo sapien
ccttgtatttaaatagcaggatgcc

SEQ ID NO: 3962681 - DNA, 25 bp, Homo sapien
ttagccagcccatattcaacagtag

SEQ ID NO: 3962682 - DNA, 25 bp, Homo sapien
tcattgctgtaacagtgcattccac

SEQ ID NO: 3962683 - DNA, 25 bp, Homo sapien
tcagtggtgctgtctttagccagcc

SEQ ID NO: 3962684 - DNA, 25 bp, Homo sapien
gaggagtaacgagaatttgctttct

SEQ ID NO: 3962685 - DNA, 25 bp, Homo sapien
tgggattatagcactgtgagctgcc

SEQ ID NO: 3962686 - DNA, 25 bp, Homo sapien
gagtaacgagaatttgctttctctt

SEQ ID NO: 3962687 - DNA, 25 bp, Homo sapien
agaggagtaacgagaatttgctttc

SEQ ID NO: 3962688 - DNA, 25 bp, Homo sapien
gacaggcttccataaagtcccagga

SEQ ID NO: 3962689 - DNA, 25 bp, Homo sapien
gaagtcagacctgcgtccaaagctg

SEQ ID NO: 3962690 - DNA, 25 bp, Homo sapien
gatgaagaagctggagaccacgtcc

SEQ ID NO: 3962691 - DNA, 25 bp, Homo sapien
tgtgtagaatggagcagcggcctca

SEQ ID NO: 3962692 - DNA, 25 bp, Homo sapien
ctggagcgtcggcaaggagcctgcc

SEQ ID NO: 3962693 - DNA, 25 bp, Homo sapien
gtgcaggtcggtgccccggcggaag

SEQ ID NO: 3962694 - DNA, 25 bp, Homo sapien
cctgcccccatgtgggtccgctggt

SEQ ID NO: 3962695 - DNA, 25 bp, Homo sapien
aagccccggccacaggccgggcagg

SEQ ID NO: 3962696 - DNA, 25 bp, Homo sapien
cgctgaagtgcgagctgttgttgaa

SEQ ID NO: 3962697 - DNA, 25 bp, Homo sapien
tgggcgctgaagtgcgagctgttgt

SEQ ID NO: 3962698 - DNA, 25 bp, Homo sapien
ctgtgtgcgtccggcggtgggcgct

SEQ ID NO: 3962699 - DNA, 25 bp, Homo sapien
cggtgggcgctgaagtgcgagctgt

SEQ ID NO: 3962700 - DNA, 25 bp, Homo sapien
tgtgtgcaccctctggtgcgtgctg

SEQ ID NO: 3962701 - DNA, 25 bp, Homo sapien
ccccgctgtgtgtcctgcggtggat

SEQ ID NO: 3962702 - DNA, 25 bp, Homo sapien
cacagactaggcacttgtaaggccg

SEQ ID NO: 3962703 - DNA, 25 bp, Homo sapien
agttggagcggtcgctaaagccctt

SEQ ID NO: 3962704 - DNA, 25 bp, Homo sapien
ccacattcggggcaggtgtacggct

SEQ ID NO: 3962705 - DNA, 25 bp, Homo sapien
gcttgtcagccccatgggaagcccg

SEQ ID NO: 3962706 - DNA, 25 bp, Homo sapien
gcaggtgtacggcttgtcagcccca

SEQ ID NO: 3962707 - DNA, 25 bp, Homo sapien
tgtcagccccatgggaagcccgtct

SEQ ID NO: 3962708 - DNA, 25 bp, Homo sapien
cttggctgatcaggcctgaccaagc

SEQ ID NO: 3962709 - DNA, 25 bp, Homo sapien
cctcttggctgatcaggcctgacca

SEQ ID NO: 3962710 - DNA, 25 bp, Homo sapien
ccgcctcttggctgatcaggcctga

SEQ ID NO: 3962711 - DNA, 25 bp, Homo sapien
gggccgcctcttggctgatcaggcc

SEQ ID NO: 3962712 - DNA, 25 bp, Homo sapien
tggcatcgtgccgagagcactcggt

SEQ ID NO: 3962713 - DNA, 25 bp, Homo sapien
gtgccgagagcactcggtaccactc

SEQ ID NO: 3962714 - DNA, 25 bp, Homo sapien
catcgtgccgagagcactcggtacc

SEQ ID NO: 3962715 - DNA, 25 bp, Homo sapien
tcgtgccgagagcactcggtaccac

SEQ ID NO: 3962716 - DNA, 25 bp, Homo sapien
accgccgtcctccaactggatccca

SEQ ID NO: 3962717 - DNA, 25 bp, Homo sapien
gccgtcctccaactggatcccaggt

SEQ ID NO: 3962718 - DNA, 25 bp, Homo sapien
atcaccgccgtcctccaactggatc

SEQ ID NO: 3962719 - DNA, 25 bp, Homo sapien
gccatcaccgccgtcctccaactgg

SEQ ID NO: 3962720 - DNA, 25 bp, Homo sapien
ggaaatccttctaataggaaaatga

SEQ ID NO: 3962721 - DNA, 25 bp, Homo sapien
tcacagggctcctaaggttccccta

SEQ ID NO: 3962722 - DNA, 25 bp, Homo sapien
caagagggcaagggaaatccttcta

SEQ ID NO: 3962723 - DNA, 25 bp, Homo sapien
cagagaaagcacgatctctaggaac

SEQ ID NO: 3962724 - DNA, 25 bp, Homo sapien
tgctataccacggatgacccaggaa

SEQ ID NO: 3962725 - DNA, 25 bp, Homo sapien
cgtcaggagttctcgccaacatggc

SEQ ID NO: 3962726 - DNA, 25 bp, Homo sapien
tttacagaagacaaccagaataggc

SEQ ID NO: 3962727 - DNA, 25 bp, Homo sapien
tctgaaatgccgatgcgggctgatc

SEQ ID NO: 3962728 - DNA, 25 bp, Homo sapien
tagatccaattttcctcggccccac

SEQ ID NO: 3962729 - DNA, 25 bp, Homo sapien
ttttttaccataggctctggcgccg

SEQ ID NO: 3962730 - DNA, 25 bp, Homo sapien
agaccttttttaccataggctctgg

SEQ ID NO: 3962731 - DNA, 25 bp, Homo sapien
accataggctctggcgccgggtaag

SEQ ID NO: 3962732 - DNA, 25 bp, Homo sapien
tgaggattccacgtaaccacttggg

SEQ ID NO: 3962733 - DNA, 25 bp, Homo sapien
cagagctgggcagaatctcattcct

SEQ ID NO: 3962734 - DNA, 25 bp, Homo sapien
tggatgcctgtcactaaagctactg

SEQ ID NO: 3962735 - DNA, 25 bp, Homo sapien
cacaggtaatgtgcgctcagagatc

SEQ ID NO: 3962736 - DNA, 25 bp, Homo sapien
ggtatacagccacgtcctccaagtt

SEQ ID NO: 3962737 - DNA, 25 bp, Homo sapien
agctgggtccatgcatcttggctcc

SEQ ID NO: 3962738 - DNA, 25 bp, Homo sapien
tcctccccagaaaggtatacagcca

SEQ ID NO: 3962739 - DNA, 25 bp, Homo sapien
gctgagctgggtccatgcatcttgg

SEQ ID NO: 3962740 - DNA, 25 bp, Homo sapien
gaagggcgaggctgacgccatctcc

SEQ ID NO: 3962741 - DNA, 25 bp, Homo sapien
gaggctgacgccatctcctgatgcc

SEQ ID NO: 3962742 - DNA, 25 bp, Homo sapien
gaaaggaagggcgaggctgacgcca

SEQ ID NO: 3962743 - DNA, 25 bp, Homo sapien
gctgacgccatctcctgatgccggg

SEQ ID NO: 3962744 - DNA, 25 bp, Homo sapien
tcccgaggggcacctcgtcatcaga

SEQ ID NO: 3962745 - DNA, 25 bp, Homo sapien
acctcgtcatcagaaagcagctctg

SEQ ID NO: 3962746 - DNA, 25 bp, Homo sapien
tctctctggccacaacagcgggccc

SEQ ID NO: 3962747 - DNA, 25 bp, Homo sapien
ctggctggagaatcgagcctcttcc

SEQ ID NO: 3962748 - DNA, 25 bp, Homo sapien
agacagtgatctccccaccagctcc

SEQ ID NO: 3962749 - DNA, 25 bp, Homo sapien
cagacagtgatctccccaccagctc

SEQ ID NO: 3962750 - DNA, 25 bp, Homo sapien
attaggggatgtgcctcctctgttg

SEQ ID NO: 3962751 - DNA, 25 bp, Homo sapien
caagcattaggggatgtgcctcctc

SEQ ID NO: 3962752 - DNA, 25 bp, Homo sapien
ccgtggtcaagcattaggggatgtg

SEQ ID NO: 3962753 - DNA, 25 bp, Homo sapien
ggtcaagcattaggggatgtgcctc

SEQ ID NO: 3962754 - DNA, 25 bp, Homo sapien
ctgagggtcaaaatgcccccactca

SEQ ID NO: 3962755 - DNA, 25 bp, Homo sapien
gctgctcgcgtacccgagcctggat

SEQ ID NO: 3962756 - DNA, 25 bp, Homo sapien
gcctcctcaccgctctccggctgct

SEQ ID NO: 3962757 - DNA, 25 bp, Homo sapien
cgagcctggatctcccccggcagca

SEQ ID NO: 3962758 - DNA, 25 bp, Homo sapien
ccggctgctgctcgcgtacccgagc

SEQ ID NO: 3962759 - DNA, 25 bp, Homo sapien
ggtcctccgtctccacggagggctc

SEQ ID NO: 3962760 - DNA, 25 bp, Homo sapien
tctctctatacctctggccagacac

SEQ ID NO: 3962761 - DNA, 25 bp, Homo sapien
tagagttgaacctgtctctctctat

SEQ ID NO: 3962762 - DNA, 25 bp, Homo sapien
tccttttcaggccttagagttgaac

SEQ ID NO: 3962763 - DNA, 25 bp, Homo sapien
gccagacacaggaagagagtttttt

SEQ ID NO: 3962764 - DNA, 25 bp, Homo sapien
tctcggcgggagtaggactgcgggc

SEQ ID NO: 3962765 - DNA, 25 bp, Homo sapien
cgggtgggcccgcaggcggcattgt

SEQ ID NO: 3962766 - DNA, 25 bp, Homo sapien
gggtgcaaaccaggccgtgcgggtg

SEQ ID NO: 3962767 - DNA, 25 bp, Homo sapien
tgtgggtaacgtagccgtggcacca

SEQ ID NO: 3962768 - DNA, 25 bp, Homo sapien
tgactaacgtggagaaacctgggcg

SEQ ID NO: 3962769 - DNA, 25 bp, Homo sapien
gcctgactaacgtggagaaacctgg

SEQ ID NO: 3962770 - DNA, 25 bp, Homo sapien
gtggttcatgcctgtaatcctagct

SEQ ID NO: 3962771 - DNA, 25 bp, Homo sapien
actaacgtggagaaacctgggcgtg

SEQ ID NO: 3962772 - DNA, 25 bp, Homo sapien
ccccgcacaagctccgccccgcatg

SEQ ID NO: 3962773 - DNA, 25 bp, Homo sapien
gccccgcacaagctccgccccgcat

SEQ ID NO: 3962774 - DNA, 25 bp, Homo sapien
agccgctggggactcaggaagccca

SEQ ID NO: 3962775 - DNA, 25 bp, Homo sapien
aagcaaggctcacatttaatagatg

SEQ ID NO: 3962776 - DNA, 25 bp, Homo sapien
taatagatgctctggtacataggtg

SEQ ID NO: 3962777 - DNA, 25 bp, Homo sapien
taggtgtgtgttgagagccgctggg

SEQ ID NO: 3962778 - DNA, 25 bp, Homo sapien
actcatcatcagaatcgtcatgggc

SEQ ID NO: 3962779 - DNA, 25 bp, Homo sapien
tcagaactcatcatcagaatcgtca

SEQ ID NO: 3962780 - DNA, 25 bp, Homo sapien
catcatcagaatcgtcatgggcccc

SEQ ID NO: 3962781 - DNA, 25 bp, Homo sapien
gaactcatcatcagaatcgtcatgg

SEQ ID NO: 3962782 - DNA, 25 bp, Homo sapien
attgagtctgatgacgcggtagttc

SEQ ID NO: 3962783 - DNA, 25 bp, Homo sapien
caggttcacccagccgggcccgcgg

SEQ ID NO: 3962784 - DNA, 25 bp, Homo sapien
gccaggttcacccagccgggcccgc

SEQ ID NO: 3962785 - DNA, 25 bp, Homo sapien
tgagtctgatgacgcggtagttctc

SEQ ID NO: 3962786 - DNA, 25 bp, Homo sapien
ggaaattcacagtgcgccatgttct

SEQ ID NO: 3962787 - DNA, 25 bp, Homo sapien
gaggaaattcacagtgcgccatgtt

SEQ ID NO: 3962788 - DNA, 25 bp, Homo sapien
gaaattcacagtgcgccatgttctc

SEQ ID NO: 3962789 - DNA, 25 bp, Homo sapien
aattcacagtgcgccatgttctcca

SEQ ID NO: 3962790 - DNA, 25 bp, Homo sapien
ttcaatgatgccccacttggtcttc

SEQ ID NO: 3962791 - DNA, 25 bp, Homo sapien
cttcaatgatgccccacttggtctt

SEQ ID NO: 3962792 - DNA, 25 bp, Homo sapien
cagcccctaccacggcaaaagggat

SEQ ID NO: 3962793 - DNA, 25 bp, Homo sapien
tggtcagcccctaccacggcaaaag

SEQ ID NO: 3962794 - DNA, 25 bp, Homo sapien
tcagcccctaccacggcaaaaggga

SEQ ID NO: 3962795 - DNA, 25 bp, Homo sapien
ttggtcagcccctaccacggcaaaa

SEQ ID NO: 3962796 - DNA, 25 bp, Homo sapien
ggatgagtagagaatcatatctgct

SEQ ID NO: 3962797 - DNA, 25 bp, Homo sapien
cctgagatgtagagaaagatgagtc

SEQ ID NO: 3962798 - DNA, 25 bp, Homo sapien
aatatgtgcacatttccctgagatg

SEQ ID NO: 3962799 - DNA, 25 bp, Homo sapien
aagatgagtctttggatggaaagga

SEQ ID NO: 3962800 - DNA, 25 bp, Homo sapien
cacatctgggggtagacgtcgatgc

SEQ ID NO: 3962801 - DNA, 25 bp, Homo sapien
ccgtaacttgctgttgaggattttg

SEQ ID NO: 3962802 - DNA, 25 bp, Homo sapien
atgtcctcgtcaaagcacatctggg

SEQ ID NO: 3962803 - DNA, 25 bp, Homo sapien
tagacgtcgatgcagtgggtcctca

SEQ ID NO: 3962804 - DNA, 25 bp, Homo sapien
ccacattcacagtccggcacagccg

SEQ ID NO: 3962805 - DNA, 25 bp, Homo sapien
ctggcaatcacgggcaccacattca

SEQ ID NO: 3962806 - DNA, 25 bp, Homo sapien
tccatggtcaggctgtcggccctgg

SEQ ID NO: 3962807 - DNA, 25 bp, Homo sapien
cctgcgcctgaaggcctctcgctcc

SEQ ID NO: 3962808 - DNA, 25 bp, Homo sapien
tgcaggtactgctcgtattgctcgt

SEQ ID NO: 3962809 - DNA, 25 bp, Homo sapien
agtgcccagtgggtggtacaaagta

SEQ ID NO: 3962810 - DNA, 25 bp, Homo sapien
ggtacaaagtacacgcagcagtgca

SEQ ID NO: 3962811 - DNA, 25 bp, Homo sapien
cagtgcacccgggtgtctgggatgt

SEQ ID NO: 3962812 - DNA, 25 bp, Homo sapien
cgaagccgggcgtgtccgtcaccgt

SEQ ID NO: 3962813 - DNA, 25 bp, Homo sapien
tgtccgtcaccgtcagcttcagctt

SEQ ID NO: 3962814 - DNA, 25 bp, Homo sapien
gcgtgtccgtcaccgtcagcttcag

SEQ ID NO: 3962815 - DNA, 25 bp, Homo sapien
cgggcgtgtccgtcaccgtcagctt

SEQ ID NO: 3962816 - DNA, 25 bp, Homo sapien
gacttgaacagcgtgttcaccatcg

SEQ ID NO: 3962817 - DNA, 25 bp, Homo sapien
gaacagcgtgttcaccatcgtggac

SEQ ID NO: 3962818 - DNA, 25 bp, Homo sapien
tttggacttgaacagcgtgttcacc

SEQ ID NO: 3962819 - DNA, 25 bp, Homo sapien
tgttcaccatcgtggacttgcccag

SEQ ID NO: 3962820 - DNA, 25 bp, Homo sapien
tgatgttgaactcaaaccccatctt

SEQ ID NO: 3962821 - DNA, 25 bp, Homo sapien
atgatgttgaactcaaaccccatct

SEQ ID NO: 3962822 - DNA, 25 bp, Homo sapien
gagagggggagcgcctcagggggtc

SEQ ID NO: 3962823 - DNA, 25 bp, Homo sapien
ccaggagctgccttgtcctggcagg

SEQ ID NO: 3962824 - DNA, 25 bp, Homo sapien
ggacgtgggtcctggtggagcttcc

SEQ ID NO: 3962825 - DNA, 25 bp, Homo sapien
tggtggacgtgggtcctggtggagc

SEQ ID NO: 3962826 - DNA, 25 bp, Homo sapien
ggagcttccaggagctgccttgtcc

SEQ ID NO: 3962827 - DNA, 25 bp, Homo sapien
ttagtagagactggttttccctgtg

SEQ ID NO: 3962828 - DNA, 25 bp, Homo sapien
ccgtcaaaggagtagtttgcagaaa

SEQ ID NO: 3962829 - DNA, 25 bp, Homo sapien
ccggtggtgttgactggcaaaagcc

SEQ ID NO: 3962830 - DNA, 25 bp, Homo sapien
catgtaagtgccgtcaaaggagtag

SEQ ID NO: 3962831 - DNA, 25 bp, Homo sapien
tcatctggaaggtgctcccggtggt

SEQ ID NO: 3962832 - DNA, 25 bp, Homo sapien
tcatcctcacgacactgggaggagg

SEQ ID NO: 3962833 - DNA, 25 bp, Homo sapien
ttcatcctcacgacactgggaggag

SEQ ID NO: 3962834 - DNA, 25 bp, Homo sapien
catcctcacgacactgggaggaggt

SEQ ID NO: 3962835 - DNA, 25 bp, Homo sapien
agatgagtatactgaggcagaaggg

SEQ ID NO: 3962836 - DNA, 25 bp, Homo sapien
cctagctgctcaagggtcgtgggat

SEQ ID NO: 3962837 - DNA, 25 bp, Homo sapien
gaaccaatcgttgaggattccaagg

SEQ ID NO: 3962838 - DNA, 25 bp, Homo sapien
tggattttggtacccacggaggtgc

SEQ ID NO: 3962839 - DNA, 25 bp, Homo sapien
caactctatgatgcaggcacacctg

SEQ ID NO: 3962840 - DNA, 25 bp, Homo sapien
tctgggacctgcacggaactgtact

SEQ ID NO: 3962841 - DNA, 25 bp, Homo sapien
caggaaagacccaagggagtggata

SEQ ID NO: 3962842 - DNA, 25 bp, Homo sapien
gagtggataacttggccctggaacc

SEQ ID NO: 3962843 - DNA, 25 bp, Homo sapien
tagggaacaacgagcgaacctgctt

SEQ ID NO: 3962844 - DNA, 25 bp, Homo sapien
tccaagccttcagtcagcacgactg

SEQ ID NO: 3962845 - DNA, 25 bp, Homo sapien
ttcagtcagcacgactgtgccaggt

SEQ ID NO: 3962846 - DNA, 25 bp, Homo sapien
tggcctctccaagccttcagtcagc

SEQ ID NO: 3962847 - DNA, 25 bp, Homo sapien
gccttcagtcagcacgactgtgcca

SEQ ID NO: 3962848 - DNA, 25 bp, Homo sapien
atccccgggactcatagctcagtgc

SEQ ID NO: 3962849 - DNA, 25 bp, Homo sapien
tgaaacacagtcaccagcactatac

SEQ ID NO: 3962850 - DNA, 25 bp, Homo sapien
tccaaagattcccatggtgatcaga

SEQ ID NO: 3962851 - DNA, 25 bp, Homo sapien
ctttatttcttagacagccctggac

SEQ ID NO: 3962852 - DNA, 25 bp, Homo sapien
cagtgtccattcccggcagtgcaaa

SEQ ID NO: 3962853 - DNA, 25 bp, Homo sapien
ccagtgtccattcccggcagtgcaa

SEQ ID NO: 3962854 - DNA, 25 bp, Homo sapien
agtgtccattcccggcagtgcaaat

SEQ ID NO: 3962855 - DNA, 25 bp, Homo sapien
gatagggagataaatagcagcctgg

SEQ ID NO: 3962856 - DNA, 25 bp, Homo sapien
gagataaatagcagcctggcgttgg

SEQ ID NO: 3962857 - DNA, 25 bp, Homo sapien
gggagataaatagcagcctggcgtt

SEQ ID NO: 3962858 - DNA, 25 bp, Homo sapien
tagggagataaatagcagcctggcg

SEQ ID NO: 3962859 - DNA, 25 bp, Homo sapien
cagaagggtctgtagctccagtagc

SEQ ID NO: 3962860 - DNA, 25 bp, Homo sapien
tccagtagctggagaacacggagat

SEQ ID NO: 3962861 - DNA, 25 bp, Homo sapien
aagggtctgtagctccagtagctgg

SEQ ID NO: 3962862 - DNA, 25 bp, Homo sapien
tcagaagggtctgtagctccagtag

SEQ ID NO: 3962863 - DNA, 25 bp, Homo sapien
tgaagtagaccagggcgtcgttgag

SEQ ID NO: 3962864 - DNA, 25 bp, Homo sapien
cgcactccactttgtgcacgtggct

SEQ ID NO: 3962865 - DNA, 25 bp, Homo sapien
agagctgcagggagacggtgaagta

SEQ ID NO: 3962866 - DNA, 25 bp, Homo sapien
cgtcgttgagccaggggatcacgca

SEQ ID NO: 3962867 - DNA, 25 bp, Homo sapien
ctccaggcgctgagagccccactcg

SEQ ID NO: 3962868 - DNA, 25 bp, Homo sapien
ccagggctatgcagcaccgcgcccc

SEQ ID NO: 3962869 - DNA, 25 bp, Homo sapien
acgttgaccagcaggtcggacggca

SEQ ID NO: 3962870 - DNA, 25 bp, Homo sapien
gaggttgatgtagacgttgaccagc

SEQ ID NO: 3962871 - DNA, 25 bp, Homo sapien
agagcttgttgaggttgatgtagac

SEQ ID NO: 3962872 - DNA, 25 bp, Homo sapien
gatgtagacgttgaccagcaggtcg

SEQ ID NO: 3962873 - DNA, 25 bp, Homo sapien
gggctctggtcagctgcagcatcac

SEQ ID NO: 3962874 - DNA, 25 bp, Homo sapien
gctgcagcatcactgcgtccatcag

SEQ ID NO: 3962875 - DNA, 25 bp, Homo sapien
ggtggtgagccggtttcgggctctg

SEQ ID NO: 3962876 - DNA, 25 bp, Homo sapien
tttcgggctctggtcagctgcagca

SEQ ID NO: 3962877 - DNA, 25 bp, Homo sapien
ccggctggtaagcaggtaaatggct

SEQ ID NO: 3962878 - DNA, 25 bp, Homo sapien
ttgaggacctcagcgcccgtcttga

SEQ ID NO: 3962879 - DNA, 25 bp, Homo sapien
tggtagctctggtcccggctggtaa

SEQ ID NO: 3962880 - DNA, 25 bp, Homo sapien
cgcccgtcttgaactggtagctctg

SEQ ID NO: 3962881 - DNA, 25 bp, Homo sapien
tgctgttaggaaacaccctcccagg

SEQ ID NO: 3962882 - DNA, 25 bp, Homo sapien
ggccaggttctctacctccccacat

SEQ ID NO: 3962883 - DNA, 25 bp, Homo sapien
aggaaacaccctcccaggcttgctg

SEQ ID NO: 3962884 - DNA, 25 bp, Homo sapien
aggttctctacctccccacatggcg

SEQ ID NO: 3962885 - DNA, 25 bp, Homo sapien
agcagctggttgttccggggcatct

SEQ ID NO: 3962886 - DNA, 25 bp, Homo sapien
gttccggggcatcttcaggttcaca

SEQ ID NO: 3962887 - DNA, 25 bp, Homo sapien
actgcttgtcctcccggaaggcgaa

SEQ ID NO: 3962888 - DNA, 25 bp, Homo sapien
ttgtcctcccggaaggcgaagtgca

SEQ ID NO: 3962889 - DNA, 25 bp, Homo sapien
tgtttcactggtccggacgccaggc

SEQ ID NO: 3962890 - DNA, 25 bp, Homo sapien
cgctgtatagggcagagggtctccc

SEQ ID NO: 3962891 - DNA, 25 bp, Homo sapien
aatctgcacaccgatcccgggagaa

SEQ ID NO: 3962892 - DNA, 25 bp, Homo sapien
gctgattcaactgtgatgtgtggcc

SEQ ID NO: 3962893 - DNA, 25 bp, Homo sapien
tggctgagggcatccccctgcagag

SEQ ID NO: 3962894 - DNA, 25 bp, Homo sapien
ctgcagagtcagcacacccttcacc

SEQ ID NO: 3962895 - DNA, 25 bp, Homo sapien
ctggctgagggcatccccctgcaga

SEQ ID NO: 3962896 - DNA, 25 bp, Homo sapien
agagtcagcacacccttcacctggt

SEQ ID NO: 3962897 - DNA, 25 bp, Homo sapien
gtcccatcgcacaaccagctggtct

SEQ ID NO: 3962898 - DNA, 25 bp, Homo sapien
ggacagggctatggccatgcctcct

SEQ ID NO: 3962899 - DNA, 25 bp, Homo sapien
taacatgtggcgtcagagcggtgcc

SEQ ID NO: 3962900 - DNA, 25 bp, Homo sapien
ccggtttccgcctagcccaggctca

SEQ ID NO: 3962901 - DNA, 25 bp, Homo sapien
gagcccggcagagtgaagcgcagag

SEQ ID NO: 3962902 - DNA, 25 bp, Homo sapien
ccacagctgcctaggatgaagttct

SEQ ID NO: 3962903 - DNA, 25 bp, Homo sapien
taggatgaagttctcttgcttggcg

SEQ ID NO: 3962904 - DNA, 25 bp, Homo sapien
gttctcttgcttggcgggcccctca

SEQ ID NO: 3962905 - DNA, 25 bp, Homo sapien
gagcccgatctctgcttataccaca

SEQ ID NO: 3962906 - DNA, 25 bp, Homo sapien
cagggcacctaaccgtgagcccgat

SEQ ID NO: 3962907 - DNA, 25 bp, Homo sapien
ggagctggtagcgcccactcaggcc

SEQ ID NO: 3962908 - DNA, 25 bp, Homo sapien
cgcctcggggaatacaaaacagaca

SEQ ID NO: 3962909 - DNA, 25 bp, Homo sapien
gcactacgccggttacttctgtgag

SEQ ID NO: 3962910 - DNA, 25 bp, Homo sapien
gcagaggcagaattcttcggctccc

SEQ ID NO: 3962911 - DNA, 25 bp, Homo sapien
tcgcgaagcgggtactgttatctcc

SEQ ID NO: 3962912 - DNA, 25 bp, Homo sapien
gctcccagattggatgccgctgctc

SEQ ID NO: 3962913 - DNA, 25 bp, Homo sapien
tgcttcaacacagcgtgcacctcgt

SEQ ID NO: 3962914 - DNA, 25 bp, Homo sapien
acagcgtgcacctcgtcgtgcagca

SEQ ID NO: 3962915 - DNA, 25 bp, Homo sapien
tgcagctgcttcaacacagcgtgca

SEQ ID NO: 3962916 - DNA, 25 bp, Homo sapien
gtgcacctcgtcgtgcagcagccag

SEQ ID NO: 3962917 - DNA, 25 bp, Homo sapien
gcgggacagacccggcggtcgcgcc

SEQ ID NO: 3962918 - DNA, 25 bp, Homo sapien
ctgcgggacagacccggcggtcgcg

SEQ ID NO: 3962919 - DNA, 25 bp, Homo sapien
tgcgggacagacccggcggtcgcgc

SEQ ID NO: 3962920 - DNA, 25 bp, Homo sapien
gacagacccggcggtcgcgcccggc

SEQ ID NO: 3962921 - DNA, 25 bp, Homo sapien
cagcaccgcccgctccgccgccgtc

SEQ ID NO: 3962922 - DNA, 25 bp, Homo sapien
cgcccgctccgccgccgtcgctgcc

SEQ ID NO: 3962923 - DNA, 25 bp, Homo sapien
accgcccgctccgccgccgtcgctg

SEQ ID NO: 3962924 - DNA, 25 bp, Homo sapien
cccgctccgccgccgtcgctgccat

SEQ ID NO: 3962925 - DNA, 25 bp, Homo sapien
aggccgccgccgagcgccctcccca

SEQ ID NO: 3962926 - DNA, 25 bp, Homo sapien
caggccgccgccgagcgccctcccc

SEQ ID NO: 3962927 - DNA, 25 bp, Homo sapien
cgcaggccgccgccgagcgccctcc

SEQ ID NO: 3962928 - DNA, 25 bp, Homo sapien
gccgcaggccgccgccgagcgccct

SEQ ID NO: 3962929 - DNA, 25 bp, Homo sapien
cacccgattggcggagcgggtacca

SEQ ID NO: 3962930 - DNA, 25 bp, Homo sapien
caggccggctccgtgctcgcgattg

SEQ ID NO: 3962931 - DNA, 25 bp, Homo sapien
ccgtgctcgcgattggctggcgcct

SEQ ID NO: 3962932 - DNA, 25 bp, Homo sapien
ttggctggcgcctgtcggtccgcct

SEQ ID NO: 3962933 - DNA, 25 bp, Homo sapien
gcggctgcacgagtcaggcttgctc

SEQ ID NO: 3962934 - DNA, 25 bp, Homo sapien
gcggccggcggctgcacgagtcagg

SEQ ID NO: 3962935 - DNA, 25 bp, Homo sapien
gctgcacgagtcaggcttgctccgg

SEQ ID NO: 3962936 - DNA, 25 bp, Homo sapien
ggacgcggccggcggctgcacgagt

SEQ ID NO: 3962937 - DNA, 25 bp, Homo sapien
cgcccccaggatatgatagggcgct

SEQ ID NO: 3962938 - DNA, 25 bp, Homo sapien
ctctgctccactcgcgctcactcat

SEQ ID NO: 3962939 - DNA, 25 bp, Homo sapien
ccccaggatatgatagggcgctctg

SEQ ID NO: 3962940 - DNA, 25 bp, Homo sapien
caggatatgatagggcgctctgctc

SEQ ID NO: 3962941 - DNA, 25 bp, Homo sapien
cgtttccgtatcaagagctgagcct

SEQ ID NO: 3962942 - DNA, 25 bp, Homo sapien
tatccaaggacaaatgtagggcctc

SEQ ID NO: 3962943 - DNA, 25 bp, Homo sapien
gaagcaccgaagaccatgatgctgg

SEQ ID NO: 3962944 - DNA, 25 bp, Homo sapien
cagtcagttcaggtaggtcaggccc

SEQ ID NO: 3962945 - DNA, 25 bp, Homo sapien
ggctcatcactagtggccctgagga

SEQ ID NO: 3962946 - DNA, 25 bp, Homo sapien
tgaggactccctcccaagggatgga

SEQ ID NO: 3962947 - DNA, 25 bp, Homo sapien
gaaatactgtctccacgggaggaag

SEQ ID NO: 3962948 - DNA, 25 bp, Homo sapien
taaaacagcctagggaggagcgagc

SEQ ID NO: 3962949 - DNA, 25 bp, Homo sapien
tgggtgcacactggacgcttagacg

SEQ ID NO: 3962950 - DNA, 25 bp, Homo sapien
tgggaaggcttccaactctcgttgc

SEQ ID NO: 3962951 - DNA, 25 bp, Homo sapien
cacaaaggcgtctatggagcgctgg

SEQ ID NO: 3962952 - DNA, 25 bp, Homo sapien
aaggcctctccttgtagggaatcca

SEQ ID NO: 3962953 - DNA, 25 bp, Homo sapien
tacacggcggacatatcgttgtcag

SEQ ID NO: 3962954 - DNA, 25 bp, Homo sapien
ttagtgtatgtaggctcggtacacg

SEQ ID NO: 3962955 - DNA, 25 bp, Homo sapien
aggctcggtacacggcggacatatc

SEQ ID NO: 3962956 - DNA, 25 bp, Homo sapien
acatatcgttgtcagactggtccag

SEQ ID NO: 3962957 - DNA, 25 bp, Homo sapien
gagcccaggctgtccggttaggaat

SEQ ID NO: 3962958 - DNA, 25 bp, Homo sapien
agcccaggctgtccggttaggaatc

SEQ ID NO: 3962959 - DNA, 25 bp, Homo sapien
gcccaggctgtccggttaggaatcc

SEQ ID NO: 3962960 - DNA, 25 bp, Homo sapien
ccaggctgtccggttaggaatcctg

SEQ ID NO: 3962961 - DNA, 25 bp, Homo sapien
ggttgaccgcatcacccagcgcaat

SEQ ID NO: 3962962 - DNA, 25 bp, Homo sapien
ggagtcggatggttgaccgcatcac

SEQ ID NO: 3962963 - DNA, 25 bp, Homo sapien
ccatgggagtcggatggttgaccgc

SEQ ID NO: 3962964 - DNA, 25 bp, Homo sapien
tcggatggttgaccgcatcacccag

SEQ ID NO: 3962965 - DNA, 25 bp, Homo sapien
gcaatagtggccatgaagctccctt

SEQ ID NO: 3962966 - DNA, 25 bp, Homo sapien
cagggtcagcccctcggcaatagtg

SEQ ID NO: 3962967 - DNA, 25 bp, Homo sapien
tgggactggcctgtcacgtgggcca

SEQ ID NO: 3962968 - DNA, 25 bp, Homo sapien
ggaccatgttcacgatcagcatcat

SEQ ID NO: 3962969 - DNA, 25 bp, Homo sapien
gccgtgtgggactgacgctgtcatc

SEQ ID NO: 3962970 - DNA, 25 bp, Homo sapien
tgcccagggtaaagactcacggtca

SEQ ID NO: 3962971 - DNA, 25 bp, Homo sapien
actcacggtcacagcccaagaatgc

SEQ ID NO: 3962972 - DNA, 25 bp, Homo sapien
ttccacgcactgactatgcaggtga

SEQ ID NO: 3962973 - DNA, 25 bp, Homo sapien
ccgtcattagacagctgctgattcc

SEQ ID NO: 3962974 - DNA, 25 bp, Homo sapien
taagatcaccaacatcccgtcatta

SEQ ID NO: 3962975 - DNA, 25 bp, Homo sapien
gatcaccaacatcccgtcattagac

SEQ ID NO: 3962976 - DNA, 25 bp, Homo sapien
cgtcattagacagctgctgattccc

SEQ ID NO: 3962977 - DNA, 25 bp, Homo sapien
tgcttctcatcataaggctggcagc

SEQ ID NO: 3962978 - DNA, 25 bp, Homo sapien
catggctgttcagactagctgcggt

SEQ ID NO: 3962979 - DNA, 25 bp, Homo sapien
catgtcaatggctcggctgaacaca

SEQ ID NO: 3962980 - DNA, 25 bp, Homo sapien
ggataggctagtcccaaggctactc

SEQ ID NO: 3962981 - DNA, 25 bp, Homo sapien
tcccagggcggatcccttgcagcac

SEQ ID NO: 3962982 - DNA, 25 bp, Homo sapien
agctcagtgacggtgtcagcgtcca

SEQ ID NO: 3962983 - DNA, 25 bp, Homo sapien
gacggtgtcagcgtccactgttgac

SEQ ID NO: 3962984 - DNA, 25 bp, Homo sapien
tgggccagctcagtgacggtgtcag

SEQ ID NO: 3962985 - DNA, 25 bp, Homo sapien
ggagaagcaatagcccaggctcccg

SEQ ID NO: 3962986 - DNA, 25 bp, Homo sapien
gggacacaagggagaagcaatagcc

SEQ ID NO: 3962987 - DNA, 25 bp, Homo sapien
acacaagggagaagcaatagcccag

SEQ ID NO: 3962988 - DNA, 25 bp, Homo sapien
caagggagaagcaatagcccaggct

SEQ ID NO: 3962989 - DNA, 25 bp, Homo sapien
cagacctcagatcagaatcctgctg

SEQ ID NO: 3962990 - DNA, 25 bp, Homo sapien
ctacagacctcagatcagaatcctg

SEQ ID NO: 3962991 - DNA, 25 bp, Homo sapien
ggagccctacagacctcagatcaga

SEQ ID NO: 3962992 - DNA, 25 bp, Homo sapien
ctcaggagccctacagacctcagat

SEQ ID NO: 3962993 - DNA, 25 bp, Homo sapien
ataagcaagggatagaaaagtactt

SEQ ID NO: 3962994 - DNA, 25 bp, Homo sapien
taagcaagggatagaaaagtacttc

SEQ ID NO: 3962995 - DNA, 25 bp, Homo sapien
aataagcaagggatagaaaagtact

SEQ ID NO: 3962996 - DNA, 25 bp, Homo sapien
tgggatccgacacgcaggcgaaagt

SEQ ID NO: 3962997 - DNA, 25 bp, Homo sapien
cacgcaggcgaaagtgatgtcgcag

SEQ ID NO: 3962998 - DNA, 25 bp, Homo sapien
gatccgacacgcaggcgaaagtgat

SEQ ID NO: 3962999 - DNA, 25 bp, Homo sapien
gccgccttgggatccgacacgcagg

SEQ ID NO: 3963000 - DNA, 25 bp, Homo sapien
gatcctaacgtgagctgcaggcagt

SEQ ID NO: 3963001 - DNA, 25 bp, Homo sapien
agatcctaacgtgagctgcaggcag

SEQ ID NO: 3963002 - DNA, 25 bp, Homo sapien
tgagctgcaggcagtgcacaacaaa

SEQ ID NO: 3963003 - DNA, 25 bp, Homo sapien
gctgcaggcagtgcacaacaaacat

SEQ ID NO: 3963004 - DNA, 25 bp, Homo sapien
tgtgatttacctaatggctgacctg

SEQ ID NO: 3963005 - DNA, 25 bp, Homo sapien
cctgtagtttgacacttagcccact

SEQ ID NO: 3963006 - DNA, 25 bp, Homo sapien
agcaagctctcctattatgccagta

SEQ ID NO: 3963007 - DNA, 25 bp, Homo sapien
tggttgactatggaaaacttcactg

SEQ ID NO: 3963008 - DNA, 25 bp, Homo sapien
tacaagtacttctagttggtattcc

SEQ ID NO: 3963009 - DNA, 25 bp, Homo sapien
cacccggccttgtttgatatatttt

SEQ ID NO: 3963010 - DNA, 25 bp, Homo sapien
ccttcttacgtatttgctacaagta

SEQ ID NO: 3963011 - DNA, 25 bp, Homo sapien
tatagtaggcaggtgccacctcact

SEQ ID NO: 3963012 - DNA, 25 bp, Homo sapien
cccagactccaccgatccaacaggc

SEQ ID NO: 3963013 - DNA, 25 bp, Homo sapien
ccagactccaccgatccaacaggca

SEQ ID NO: 3963014 - DNA, 25 bp, Homo sapien
agactccaccgatccaacaggcacc

SEQ ID NO: 3963015 - DNA, 25 bp, Homo sapien
cagactccaccgatccaacaggcac

SEQ ID NO: 3963016 - DNA, 25 bp, Homo sapien
gagaccaaggcccaaaaatcctatc

SEQ ID NO: 3963017 - DNA, 25 bp, Homo sapien
atgagaccaaggcccaaaaatccta

SEQ ID NO: 3963018 - DNA, 25 bp, Homo sapien
tgagaccaaggcccaaaaatcctat

SEQ ID NO: 3963019 - DNA, 25 bp, Homo sapien
ggctcgctcccttatacagcttggg

SEQ ID NO: 3963020 - DNA, 25 bp, Homo sapien
ggcattttgaaacccctgactgtca

SEQ ID NO: 3963021 - DNA, 25 bp, Homo sapien
tatgatgtgtatggttcagggccag

SEQ ID NO: 3963022 - DNA, 25 bp, Homo sapien
tgtcccaggatgtaaacaggcattt

SEQ ID NO: 3963023 - DNA, 25 bp, Homo sapien
gagcttggaacccaatctttcccag

SEQ ID NO: 3963024 - DNA, 25 bp, Homo sapien
tctccaaagctaagtccttcacctg

SEQ ID NO: 3963025 - DNA, 25 bp, Homo sapien
tcccgtcttcccgttatcaacagaa

SEQ ID NO: 3963026 - DNA, 25 bp, Homo sapien
tatcaacagaatgggccttgcctct

SEQ ID NO: 3963027 - DNA, 25 bp, Homo sapien
cctcagtccacctgagcagctagga

SEQ ID NO: 3963028 - DNA, 25 bp, Homo sapien
ttccacctcagtccacctgagcagc

SEQ ID NO: 3963029 - DNA, 25 bp, Homo sapien
ttgctgtatttcctaggctggtcat

SEQ ID NO: 3963030 - DNA, 25 bp, Homo sapien
cttgctgtatttcctaggctggtca

SEQ ID NO: 3963031 - DNA, 25 bp, Homo sapien
gactctgcggaggagacatgcctac

SEQ ID NO: 3963032 - DNA, 25 bp, Homo sapien
gaagaccatgtgaaaggtacaaact

SEQ ID NO: 3963033 - DNA, 25 bp, Homo sapien
tatggcaactgagagtccttcacac

SEQ ID NO: 3963034 - DNA, 25 bp, Homo sapien
ggaaactgactttagctaacttgct

SEQ ID NO: 3963035 - DNA, 25 bp, Homo sapien
tgtctttatcgataagagttacaac

SEQ ID NO: 3963036 - DNA, 25 bp, Homo sapien
gataagagttacaacatccccccac

SEQ ID NO: 3963037 - DNA, 25 bp, Homo sapien
ccagcaatggctgggacacaaccct

SEQ ID NO: 3963038 - DNA, 25 bp, Homo sapien
tggctgggacacaacccttaaagaa

SEQ ID NO: 3963039 - DNA, 25 bp, Homo sapien
cctggatggaggtggagccagtttc

SEQ ID NO: 3963040 - DNA, 25 bp, Homo sapien
attcacggctgtgctgtcagctgcc

SEQ ID NO: 3963041 - DNA, 25 bp, Homo sapien
ttttgtctgtgggtgtgatgctgcc

SEQ ID NO: 3963042 - DNA, 25 bp, Homo sapien
tgatgctgccattcacggctgtgct

SEQ ID NO: 3963043 - DNA, 25 bp, Homo sapien
cctgcagtttaaggccccaggtgaa

SEQ ID NO: 3963044 - DNA, 25 bp, Homo sapien
aaaatggggaggcatggagcctaca

SEQ ID NO: 3963045 - DNA, 25 bp, Homo sapien
ctgcctgcagtttaaggccccaggt

SEQ ID NO: 3963046 - DNA, 25 bp, Homo sapien
cacatcatcaagtcagtctgcctgc

SEQ ID NO: 3963047 - DNA, 25 bp, Homo sapien
cacatattttcaacttcttcgtgat

SEQ ID NO: 3963048 - DNA, 25 bp, Homo sapien
tcttcacatattttcaacttcttcg

SEQ ID NO: 3963049 - DNA, 25 bp, Homo sapien
ttcacatattttcaacttcttcgtg

SEQ ID NO: 3963050 - DNA, 25 bp, Homo sapien
atattttcaacttcttcgtgattgc

SEQ ID NO: 3963051 - DNA, 25 bp, Homo sapien
gaaggaggaggaaagagactacttg

SEQ ID NO: 3963052 - DNA, 25 bp, Homo sapien
tgaaggaggaggaaagagactactt

SEQ ID NO: 3963053 - DNA, 25 bp, Homo sapien
aggaggaggaaagagactacttgtg

SEQ ID NO: 3963054 - DNA, 25 bp, Homo sapien
aaggaggaggaaagagactacttgt

SEQ ID NO: 3963055 - DNA, 25 bp, Homo sapien
gatggaaatgaggatctgcatcttt

SEQ ID NO: 3963056 - DNA, 25 bp, Homo sapien
atggaaatgaggatctgcatcttta

SEQ ID NO: 3963057 - DNA, 25 bp, Homo sapien
ggaaatgaggatctgcatctttaac

SEQ ID NO: 3963058 - DNA, 25 bp, Homo sapien
gaaatgaggatctgcatctttaaca

SEQ ID NO: 3963059 - DNA, 25 bp, Homo sapien
taaacgcggccatcggtccggccat

SEQ ID NO: 3963060 - DNA, 25 bp, Homo sapien
ctcgcttgcggttggctgccattta

SEQ ID NO: 3963061 - DNA, 25 bp, Homo sapien
cacggtactagactccgggatggtg

SEQ ID NO: 3963062 - DNA, 25 bp, Homo sapien
atcatccccttcacggtactagact

SEQ ID NO: 3963063 - DNA, 25 bp, Homo sapien
tgcctgggctcgctggtgtctgaat

SEQ ID NO: 3963064 - DNA, 25 bp, Homo sapien
caaggtctaatgttccatcatggcc

SEQ ID NO: 3963065 - DNA, 25 bp, Homo sapien
cagaagctggctagaaccctgtgga

SEQ ID NO: 3963066 - DNA, 25 bp, Homo sapien
tcttaggtccagtcagctacagttg

SEQ ID NO: 3963067 - DNA, 25 bp, Homo sapien
gaagagcctgaagacaccctcttct

SEQ ID NO: 3963068 - DNA, 25 bp, Homo sapien
gatttggagcctctctctgaagagc

SEQ ID NO: 3963069 - DNA, 25 bp, Homo sapien
cttttcagaggggatttggagcctc

SEQ ID NO: 3963070 - DNA, 25 bp, Homo sapien
gactttgctcttgggctcttttcag

SEQ ID NO: 3963071 - DNA, 25 bp, Homo sapien
taagtttgcgcttctcatcacctga

SEQ ID NO: 3963072 - DNA, 25 bp, Homo sapien
tcagacaggctaagtttgcgcttct

SEQ ID NO: 3963073 - DNA, 25 bp, Homo sapien
tcccttcagacaggctaagtttgcg

SEQ ID NO: 3963074 - DNA, 25 bp, Homo sapien
caggctaagtttgcgcttctcatca

SEQ ID NO: 3963075 - DNA, 25 bp, Homo sapien
tcacaatgaccctagaaatagattc

SEQ ID NO: 3963076 - DNA, 25 bp, Homo sapien
taataatgataactaccaccacagc

SEQ ID NO: 3963077 - DNA, 25 bp, Homo sapien
gaaatagattctgctgtcgtcccag

SEQ ID NO: 3963078 - DNA, 25 bp, Homo sapien
catgtgctgctacaggcactctgtg

SEQ ID NO: 3963079 - DNA, 25 bp, Homo sapien
tactccagaaaggttagctgcatgg

SEQ ID NO: 3963080 - DNA, 25 bp, Homo sapien
aagaaatggcctgtgctagactcaa

SEQ ID NO: 3963081 - DNA, 25 bp, Homo sapien
ccagtctggcattggtagaaagtga

SEQ ID NO: 3963082 - DNA, 25 bp, Homo sapien
gcaaaacgctgacaccttagaactg

SEQ ID NO: 3963083 - DNA, 25 bp, Homo sapien
tcttcgacagcatctaccgcttgct

SEQ ID NO: 3963084 - DNA, 25 bp, Homo sapien
cctgaggaactcttcgacagcatct

SEQ ID NO: 3963085 - DNA, 25 bp, Homo sapien
ggaactcttcgacagcatctaccgc

SEQ ID NO: 3963086 - DNA, 25 bp, Homo sapien
agcatctaccgcttgctggaatcgt

SEQ ID NO: 3963087 - DNA, 25 bp, Homo sapien
tgagcatgatatggcttcagctgtt

SEQ ID NO: 3963088 - DNA, 25 bp, Homo sapien
ttcagccttcggatagacaggtgac

SEQ ID NO: 3963089 - DNA, 25 bp, Homo sapien
ctgtgtttcagccttcggatagaca

SEQ ID NO: 3963090 - DNA, 25 bp, Homo sapien
ggtgacctgggctgaagccgtgaag

SEQ ID NO: 3963091 - DNA, 25 bp, Homo sapien
gccttcggatagacaggtgacctgg

SEQ ID NO: 3963092 - DNA, 25 bp, Homo sapien
tgttaaaggcgaggtgcagtccagc

SEQ ID NO: 3963093 - DNA, 25 bp, Homo sapien
tgtcttggccatctcgctcagggag

SEQ ID NO: 3963094 - DNA, 25 bp, Homo sapien
ggtctggccctctcctaacagtggg

SEQ ID NO: 3963095 - DNA, 25 bp, Homo sapien
gctcagggagccgaatccgtataaa

SEQ ID NO: 3963096 - DNA, 25 bp, Homo sapien
ttctggatcttggccaattctaaga

SEQ ID NO: 3963097 - DNA, 25 bp, Homo sapien
ggatcttggccaattctaagagatc

SEQ ID NO: 3963098 - DNA, 25 bp, Homo sapien
atcccgtgattccttcagtctttgc

SEQ ID NO: 3963099 - DNA, 25 bp, Homo sapien
attctaagagatccctttgaaagca

SEQ ID NO: 3963100 - DNA, 25 bp, Homo sapien
ttacataaaggtggaatgatgcatg

SEQ ID NO: 3963101 - DNA, 25 bp, Homo sapien
gatgaggcgcatacagttttacata

SEQ ID NO: 3963102 - DNA, 25 bp, Homo sapien
gatgcatggttttgtactcaaagcc

SEQ ID NO: 3963103 - DNA, 25 bp, Homo sapien
ttggtaaaaagagcaaacctggctg

SEQ ID NO: 3963104 - DNA, 25 bp, Homo sapien
tgatcactaaggaagtgttccttct

SEQ ID NO: 3963105 - DNA, 25 bp, Homo sapien
ccttctttagagaagtactgtacat

SEQ ID NO: 3963106 - DNA, 25 bp, Homo sapien
cacaaaataaaatctgccccagcac

SEQ ID NO: 3963107 - DNA, 25 bp, Homo sapien
tgccccagcactgatcactaaggaa

SEQ ID NO: 3963108 - DNA, 25 bp, Homo sapien
ctccttgaaatactgccaccacagg

SEQ ID NO: 3963109 - DNA, 25 bp, Homo sapien
caggctgctaagctggcttgtgata

SEQ ID NO: 3963110 - DNA, 25 bp, Homo sapien
acaggctgctaagctggcttgtgat

SEQ ID NO: 3963111 - DNA, 25 bp, Homo sapien
cacaggctgctaagctggcttgtga

SEQ ID NO: 3963112 - DNA, 25 bp, Homo sapien
ctggatgagtgaagaatactgttta

SEQ ID NO: 3963113 - DNA, 25 bp, Homo sapien
taaagaaatcaaaccggctgggcat

SEQ ID NO: 3963114 - DNA, 25 bp, Homo sapien
aaccaggaagagcatctgacatata

SEQ ID NO: 3963115 - DNA, 25 bp, Homo sapien
taaccgtcagaattagatttaccag

SEQ ID NO: 3963116 - DNA, 25 bp, Homo sapien
agaagcatttctttccgcgaggttt

SEQ ID NO: 3963117 - DNA, 25 bp, Homo sapien
aagcatttctttccgcgaggtttct

SEQ ID NO: 3963118 - DNA, 25 bp, Homo sapien
aaagaagcatttctttccgcgaggt

SEQ ID NO: 3963119 - DNA, 25 bp, Homo sapien
gcatttctttccgcgaggtttcttc

SEQ ID NO: 3963120 - DNA, 25 bp, Homo sapien
caaggaggatatcggccgagtttcc

SEQ ID NO: 3963121 - DNA, 25 bp, Homo sapien
gccaaggaggatatcggccgagttt

SEQ ID NO: 3963122 - DNA, 25 bp, Homo sapien
cctggccaaggaggatatcggccga

SEQ ID NO: 3963123 - DNA, 25 bp, Homo sapien
ctttcctggccaaggaggatatcgg

SEQ ID NO: 3963124 - DNA, 25 bp, Homo sapien
cacaccaagtcgccgagccgcagac

SEQ ID NO: 3963125 - DNA, 25 bp, Homo sapien
cgagccgcagactcacagccgccat

SEQ ID NO: 3963126 - DNA, 25 bp, Homo sapien
aagtcgccgagccgcagactcacag

SEQ ID NO: 3963127 - DNA, 25 bp, Homo sapien
tcgccgagccgcagactcacagccg

SEQ ID NO: 3963128 - DNA, 25 bp, Homo sapien
ttaccacccaaccaccgccgacgca

SEQ ID NO: 3963129 - DNA, 25 bp, Homo sapien
ccaaccaccgccgacgcacgggccg

SEQ ID NO: 3963130 - DNA, 25 bp, Homo sapien
acgcacgggccgccgggaacagcaa

SEQ ID NO: 3963131 - DNA, 25 bp, Homo sapien
cgccgggaacagcaagtcgccccgg

SEQ ID NO: 3963132 - DNA, 25 bp, Homo sapien
tagaaaagaccgaatacaggacttg

SEQ ID NO: 3963133 - DNA, 25 bp, Homo sapien
ggttatgatgaatccgactccttca

SEQ ID NO: 3963134 - DNA, 25 bp, Homo sapien
gactccttcatcgataactctgagg

SEQ ID NO: 3963135 - DNA, 25 bp, Homo sapien
ctctgaggcggtaagtagttactga

SEQ ID NO: 3963136 - DNA, 25 bp, Homo sapien
tgatggctcgcctcttacacgtgtg

SEQ ID NO: 3963137 - DNA, 25 bp, Homo sapien
tcgggaaccctgcagtttagacaag

SEQ ID NO: 3963138 - DNA, 25 bp, Homo sapien
tgccctaatgaggacacgtgcccgt

SEQ ID NO: 3963139 - DNA, 25 bp, Homo sapien
tatcagatcagtaggtgacttgcca

SEQ ID NO: 3963140 - DNA, 25 bp, Homo sapien
aaggcctctggagttccctttggag

SEQ ID NO: 3963141 - DNA, 25 bp, Homo sapien
cagcctggcagtggtttctaaaaac

SEQ ID NO: 3963142 - DNA, 25 bp, Homo sapien
tcagcaagaacgagctccatatgcc

SEQ ID NO: 3963143 - DNA, 25 bp, Homo sapien
tctcaagctttggtctcagcaagaa

SEQ ID NO: 3963144 - DNA, 25 bp, Homo sapien
tctgagagggaaccttggtgatgcc

SEQ ID NO: 3963145 - DNA, 25 bp, Homo sapien
tgatttgatggccttaccctgccct

SEQ ID NO: 3963146 - DNA, 25 bp, Homo sapien
caggtacaggtgctgacaaagctca

SEQ ID NO: 3963147 - DNA, 25 bp, Homo sapien
tacatttgtataggccccagggaat

SEQ ID NO: 3963148 - DNA, 25 bp, Homo sapien
caaacatttgtaaatccagactggg

SEQ ID NO: 3963149 - DNA, 25 bp, Homo sapien
tctccagaagcgatagacctccttg

SEQ ID NO: 3963150 - DNA, 25 bp, Homo sapien
cacgctgtgtgaatcgggttaaaaa

SEQ ID NO: 3963151 - DNA, 25 bp, Homo sapien
tagtgccacgtgcatcatccctaat

SEQ ID NO: 3963152 - DNA, 25 bp, Homo sapien
catggcatctaaagtcaaggcgggc

SEQ ID NO: 3963153 - DNA, 25 bp, Homo sapien
tccctaagcagaccgtgagaatgag

SEQ ID NO: 3963154 - DNA, 25 bp, Homo sapien
tgtacttagcaacgaagcatgccgg

SEQ ID NO: 3963155 - DNA, 25 bp, Homo sapien
aaaggcgactttactgagctaccag

SEQ ID NO: 3963156 - DNA, 25 bp, Homo sapien
aaagggcctgctgtaccacggaaat

SEQ ID NO: 3963157 - DNA, 25 bp, Homo sapien
ttctcagcttcacgggaaagggcct

SEQ ID NO: 3963158 - DNA, 25 bp, Homo sapien
tgtacacgaataactgctggctggt

SEQ ID NO: 3963159 - DNA, 25 bp, Homo sapien
ttgtgaccgcttcagaggcaaggct

SEQ ID NO: 3963160 - DNA, 25 bp, Homo sapien
gagacctgcactgtccctgcgaaat

SEQ ID NO: 3963161 - DNA, 25 bp, Homo sapien
cacctgtgggtgaatctgcctgatc

SEQ ID NO: 3963162 - DNA, 25 bp, Homo sapien
tgctcaaagcggacaaaactcaggc

SEQ ID NO: 3963163 - DNA, 25 bp, Homo sapien
taagctccctggatggtcacagtgc

SEQ ID NO: 3963164 - DNA, 25 bp, Homo sapien
gcagagctcctaagtcaccactcaa

SEQ ID NO: 3963165 - DNA, 25 bp, Homo sapien
cttggagagtggatcagagagacta

SEQ ID NO: 3963166 - DNA, 25 bp, Homo sapien
gaatcattcttaggcagtgcggcag

SEQ ID NO: 3963167 - DNA, 25 bp, Homo sapien
tgtctgccgggtagaaataggcctt

SEQ ID NO: 3963168 - DNA, 25 bp, Homo sapien
ttccctggcgcagcgaaagtctctg

SEQ ID NO: 3963169 - DNA, 25 bp, Homo sapien
tgaaagagcgaatgactgaacagcc

SEQ ID NO: 3963170 - DNA, 25 bp, Homo sapien
gatgcctcttgcctcagggaaacgt

SEQ ID NO: 3963171 - DNA, 25 bp, Homo sapien
tctctgagcacttaccgggcgtgac

SEQ ID NO: 3963172 - DNA, 25 bp, Homo sapien
ctaccatgtggaagtaagtagttct

SEQ ID NO: 3963173 - DNA, 25 bp, Homo sapien
aaagaagaaacatgtggaccgtaca

SEQ ID NO: 3963174 - DNA, 25 bp, Homo sapien
ggcgggggagtaagccttgcatgca

SEQ ID NO: 3963175 - DNA, 25 bp, Homo sapien
accatgtggaagtaagtagttcttc

SEQ ID NO: 3963176 - DNA, 25 bp, Homo sapien
aaacattctctgtaggtgccgggac

SEQ ID NO: 3963177 - DNA, 25 bp, Homo sapien
aaaaggcatcgcagttgtccagtca

SEQ ID NO: 3963178 - DNA, 25 bp, Homo sapien
tataaaatgcttggcctgcaccagg

SEQ ID NO: 3963179 - DNA, 25 bp, Homo sapien
gatacagagacccagatattggcgt

SEQ ID NO: 3963180 - DNA, 25 bp, Homo sapien
gacatagcggtcatactgagcaggg

SEQ ID NO: 3963181 - DNA, 25 bp, Homo sapien
tatcactgaggactccccattggga

SEQ ID NO: 3963182 - DNA, 25 bp, Homo sapien
catcgatgctctcggcaaaggcgct

SEQ ID NO: 3963183 - DNA, 25 bp, Homo sapien
cagtctggagtcatggttggtccca

SEQ ID NO: 3963184 - DNA, 25 bp, Homo sapien
tccacaagctccaggcggaggttcg

SEQ ID NO: 3963185 - DNA, 25 bp, Homo sapien
tctggctagcgcgagccttggcagc

SEQ ID NO: 3963186 - DNA, 25 bp, Homo sapien
ggaggttcgccacttcactttccgc

SEQ ID NO: 3963187 - DNA, 25 bp, Homo sapien
ggcagcctcgtcctcatattggcgg

SEQ ID NO: 3963188 - DNA, 25 bp, Homo sapien
gagcacctccttgacggtgatcttg

SEQ ID NO: 3963189 - DNA, 25 bp, Homo sapien
catgggtcacttctacttccggctg

SEQ ID NO: 3963190 - DNA, 25 bp, Homo sapien
gccctgtcaggctcgatgcgcagga

SEQ ID NO: 3963191 - DNA, 25 bp, Homo sapien
gagtccggcctattcctttgcaggg

SEQ ID NO: 3963192 - DNA, 25 bp, Homo sapien
ttcagtgaacttggcggcaagtgct

SEQ ID NO: 3963193 - DNA, 25 bp, Homo sapien
gcaaactccagattctgcagcctct

SEQ ID NO: 3963194 - DNA, 25 bp, Homo sapien
tgtctgttgatggcataaacttcag

SEQ ID NO: 3963195 - DNA, 25 bp, Homo sapien
ataaacttcagtgaacttggcggca

SEQ ID NO: 3963196 - DNA, 25 bp, Homo sapien
cattctccaagtcgagaagagacct

SEQ ID NO: 3963197 - DNA, 25 bp, Homo sapien
cctggctctcttgctcacgtggctt

SEQ ID NO: 3963198 - DNA, 25 bp, Homo sapien
cttccattctccaagtcgagaagag

SEQ ID NO: 3963199 - DNA, 25 bp, Homo sapien
tccaagtcgagaagagaccttagtt

SEQ ID NO: 3963200 - DNA, 25 bp, Homo sapien
ccccaaagtgtttactgcttcagag

SEQ ID NO: 3963201 - DNA, 25 bp, Homo sapien
tgccagggccggtgcttgctgcttc

SEQ ID NO: 3963202 - DNA, 25 bp, Homo sapien
tgcttctctgaccagggcacggtgg

SEQ ID NO: 3963203 - DNA, 25 bp, Homo sapien
ggcacggtggaataagacccctgct

SEQ ID NO: 3963204 - DNA, 25 bp, Homo sapien
actgctgggaattggcacagatctt

SEQ ID NO: 3963205 - DNA, 25 bp, Homo sapien
cctacttgctatctcatctagcagg

SEQ ID NO: 3963206 - DNA, 25 bp, Homo sapien
tacttgctatctcatctagcaggtt

SEQ ID NO: 3963207 - DNA, 25 bp, Homo sapien
ctgctgggaattggcacagatcttc

SEQ ID NO: 3963208 - DNA, 25 bp, Homo sapien
ccatggatgcagtagctggaaatct

SEQ ID NO: 3963209 - DNA, 25 bp, Homo sapien
aaaaagcaaccatggatgcagtagc

SEQ ID NO: 3963210 - DNA, 25 bp, Homo sapien
gcaaccatggatgcagtagctggaa

SEQ ID NO: 3963211 - DNA, 25 bp, Homo sapien
aagcaaccatggatgcagtagctgg

SEQ ID NO: 3963212 - DNA, 25 bp, Homo sapien
gccttggcgctctgtaggctctgcg

SEQ ID NO: 3963213 - DNA, 25 bp, Homo sapien
gggatgctgactaggaactgcagca

SEQ ID NO: 3963214 - DNA, 25 bp, Homo sapien
actgcagcacgtggtcatggccgcg

SEQ ID NO: 3963215 - DNA, 25 bp, Homo sapien
cggtggaagtgctcgtaggctgcct

SEQ ID NO: 3963216 - DNA, 25 bp, Homo sapien
tggcgcaggttgttgaaacgctggc

SEQ ID NO: 3963217 - DNA, 25 bp, Homo sapien
aggtccggacagtgctcctggaagc

SEQ ID NO: 3963218 - DNA, 25 bp, Homo sapien
ggagggacttctgggcctgtaactc

SEQ ID NO: 3963219 - DNA, 25 bp, Homo sapien
gccagtgtgctcgagcactgcttgg

SEQ ID NO: 3963220 - DNA, 25 bp, Homo sapien
gggcctcaggtcacagacttgaatg

SEQ ID NO: 3963221 - DNA, 25 bp, Homo sapien
aagagatactgggaacatggattgt

SEQ ID NO: 3963222 - DNA, 25 bp, Homo sapien
caaaagcaagtcgtgagatgggagt

SEQ ID NO: 3963223 - DNA, 25 bp, Homo sapien
caactgcgaggtaagcaggccgaga

SEQ ID NO: 3963224 - DNA, 25 bp, Homo sapien
gcttggatttgtgctgtgggcctcc

SEQ ID NO: 3963225 - DNA, 25 bp, Homo sapien
tcctcatctatccagacgggcgggt

SEQ ID NO: 3963226 - DNA, 25 bp, Homo sapien
gtcttgcaacgttgtccaggcggct

SEQ ID NO: 3963227 - DNA, 25 bp, Homo sapien
tgatcttaaaatgctggcacccgaa

SEQ ID NO: 3963228 - DNA, 25 bp, Homo sapien
tcccaggacttgggccctagactca

SEQ ID NO: 3963229 - DNA, 25 bp, Homo sapien
cagagaaggactcccaggacttggg

SEQ ID NO: 3963230 - DNA, 25 bp, Homo sapien
ctcagagaaggactcccaggacttg

SEQ ID NO: 3963231 - DNA, 25 bp, Homo sapien
ctgctcagagaaggactcccaggac

SEQ ID NO: 3963232 - DNA, 25 bp, Homo sapien
attcagatggttctcgtgtgtggcc

SEQ ID NO: 3963233 - DNA, 25 bp, Homo sapien
gattcagatggttctcgtgtgtggc

SEQ ID NO: 3963234 - DNA, 25 bp, Homo sapien
tgattcagatggttctcgtgtgtgg

SEQ ID NO: 3963235 - DNA, 25 bp, Homo sapien
ctcaggttcaatccgcagtagctcg

SEQ ID NO: 3963236 - DNA, 25 bp, Homo sapien
tggatgaaggcttcgccctcagccg

SEQ ID NO: 3963237 - DNA, 25 bp, Homo sapien
tcgtatttccggttggtgtcctcca

SEQ ID NO: 3963238 - DNA, 25 bp, Homo sapien
cgtgctccgcgtcttctcaggttca

SEQ ID NO: 3963239 - DNA, 25 bp, Homo sapien
ctgtgggaaccagggcccctcagtt

SEQ ID NO: 3963240 - DNA, 25 bp, Homo sapien
cctcagttttggacacagccaggca

SEQ ID NO: 3963241 - DNA, 25 bp, Homo sapien
gggcccctcagttttggacacagcc

SEQ ID NO: 3963242 - DNA, 25 bp, Homo sapien
ccagggcccctcagttttggacaca

SEQ ID NO: 3963243 - DNA, 25 bp, Homo sapien
aaccgctgaggtggaatggactagt

SEQ ID NO: 3963244 - DNA, 25 bp, Homo sapien
tggactagtgacaccagaagcaccc

SEQ ID NO: 3963245 - DNA, 25 bp, Homo sapien
tctgtttaatctttgcggcaacccc

SEQ ID NO: 3963246 - DNA, 25 bp, Homo sapien
gtatttttcacgagcatcccaggga

SEQ ID NO: 3963247 - DNA, 25 bp, Homo sapien
tggcccgctcggcactgtcctgcac

SEQ ID NO: 3963248 - DNA, 25 bp, Homo sapien
caggatccctgtgatggccttctcc

SEQ ID NO: 3963249 - DNA, 25 bp, Homo sapien
tggccaccttgtccaagccagccag

SEQ ID NO: 3963250 - DNA, 25 bp, Homo sapien
cagctgccgcccctgtaggtcagag

SEQ ID NO: 3963251 - DNA, 25 bp, Homo sapien
gtcttcagcacctcataccgctgct

SEQ ID NO: 3963252 - DNA, 25 bp, Homo sapien
ctccgggattctcggtcttcagcac

SEQ ID NO: 3963253 - DNA, 25 bp, Homo sapien
ctgctgcagcgtgcgtttgctccca

SEQ ID NO: 3963254 - DNA, 25 bp, Homo sapien
ttctgccgcacgctccggtactggc

SEQ ID NO: 3963255 - DNA, 25 bp, Homo sapien
atcacaaaacacacggccggagcaa

SEQ ID NO: 3963256 - DNA, 25 bp, Homo sapien
ttctgcagggtgtagctgtagcccc

SEQ ID NO: 3963257 - DNA, 25 bp, Homo sapien
agctctccccgttgttcttctgcag

SEQ ID NO: 3963258 - DNA, 25 bp, Homo sapien
tgttcccagcgctgtccatgagctc

SEQ ID NO: 3963259 - DNA, 25 bp, Homo sapien
cggtacttgaggggcaccacctgct

SEQ ID NO: 3963260 - DNA, 25 bp, Homo sapien
ccctgcaccacgtcctcatacttgt

SEQ ID NO: 3963261 - DNA, 25 bp, Homo sapien
gtcacagagtgcctccacggggatg

SEQ ID NO: 3963262 - DNA, 25 bp, Homo sapien
tgagcggagtctcccggcggtactt

SEQ ID NO: 3963263 - DNA, 25 bp, Homo sapien
agcagctcaatctggtaccggtcct

SEQ ID NO: 3963264 - DNA, 25 bp, Homo sapien
ggttcaggtccgagtccaccttgcg

SEQ ID NO: 3963265 - DNA, 25 bp, Homo sapien
gagcgtccttcacgtcttcgtgaaa

SEQ ID NO: 3963266 - DNA, 25 bp, Homo sapien
tccttgaagtcagggccatacttct

SEQ ID NO: 3963267 - DNA, 25 bp, Homo sapien
tactccttccagtctgcgtgcacag

SEQ ID NO: 3963268 - DNA, 25 bp, Homo sapien
agatgagcaggttcaggtactcctt

SEQ ID NO: 3963269 - DNA, 25 bp, Homo sapien
ttcaggtactccttccagtctgcgt

SEQ ID NO: 3963270 - DNA, 25 bp, Homo sapien
tccatgtacttgaggtggctctcct

SEQ ID NO: 3963271 - DNA, 25 bp, Homo sapien
ggaggtgtctggtctcggggtgcat

SEQ ID NO: 3963272 - DNA, 25 bp, Homo sapien
gtgtctggtctcggggtgcatgaac

SEQ ID NO: 3963273 - DNA, 25 bp, Homo sapien
ggtgtctggtctcggggtgcatgaa

SEQ ID NO: 3963274 - DNA, 25 bp, Homo sapien
aggtgtctggtctcggggtgcatga

SEQ ID NO: 3963275 - DNA, 25 bp, Homo sapien
ctctttggcctccaggttccggttg

SEQ ID NO: 3963276 - DNA, 25 bp, Homo sapien
tctttggcctccaggttccggttga

SEQ ID NO: 3963277 - DNA, 25 bp, Homo sapien
caatggagttcctcccggggtgctc

SEQ ID NO: 3963278 - DNA, 25 bp, Homo sapien
ctcaatggagttcctcccggggtgc

SEQ ID NO: 3963279 - DNA, 25 bp, Homo sapien
ggtagtcgaggttgcggtcactcca

SEQ ID NO: 3963280 - DNA, 25 bp, Homo sapien
agtcgtactgcatgcggcccttggc

SEQ ID NO: 3963281 - DNA, 25 bp, Homo sapien
tgtagtcctgcagcgaactcaggtg

SEQ ID NO: 3963282 - DNA, 25 bp, Homo sapien
tacagctcattggtgcagcgctgca

SEQ ID NO: 3963283 - DNA, 25 bp, Homo sapien
agcagtttctggtacttggcccgga

SEQ ID NO: 3963284 - DNA, 25 bp, Homo sapien
gtacttggcccggagttcgctgttc

SEQ ID NO: 3963285 - DNA, 25 bp, Homo sapien
cagtttctggtacttggcccggagt

SEQ ID NO: 3963286 - DNA, 25 bp, Homo sapien
tggcccggagttcgctgttctgctc

SEQ ID NO: 3963287 - DNA, 25 bp, Homo sapien
atgttatgctcctccacttggtggt

SEQ ID NO: 3963288 - DNA, 25 bp, Homo sapien
gggcccgatggccttgacctcattg

SEQ ID NO: 3963289 - DNA, 25 bp, Homo sapien
gtcccaaagctctggttgttcagct

SEQ ID NO: 3963290 - DNA, 25 bp, Homo sapien
cttgtccccgtccttggccaggtgg

SEQ ID NO: 3963291 - DNA, 25 bp, Homo sapien
gatctgcttgtgtttcccgcgcagg

SEQ ID NO: 3963292 - DNA, 25 bp, Homo sapien
cgcccagttgacctgtggatccact

SEQ ID NO: 3963293 - DNA, 25 bp, Homo sapien
tttcccgcgcaggttggtcacacgc

SEQ ID NO: 3963294 - DNA, 25 bp, Homo sapien
ccagtgccgcccagttgacctgtgg

SEQ ID NO: 3963295 - DNA, 25 bp, Homo sapien
tcccacttagtggggctggttggca

SEQ ID NO: 3963296 - DNA, 25 bp, Homo sapien
cccacttagtggggctggttggcac

SEQ ID NO: 3963297 - DNA, 25 bp, Homo sapien
ggctcccacttagtggggctggttg

SEQ ID NO: 3963298 - DNA, 25 bp, Homo sapien
ctcccacttagtggggctggttggc

SEQ ID NO: 3963299 - DNA, 25 bp, Homo sapien
cccctgtgggtgcttcatgtgcttg

SEQ ID NO: 3963300 - DNA, 25 bp, Homo sapien
cttctgcagggtcacgtcccggtgc

SEQ ID NO: 3963301 - DNA, 25 bp, Homo sapien
gcatccgcctctagcacatagagca

SEQ ID NO: 3963302 - DNA, 25 bp, Homo sapien
tggcaatggccgcatccgcctctag

SEQ ID NO: 3963303 - DNA, 25 bp, Homo sapien
gctccgagagctccttgttagagat

SEQ ID NO: 3963304 - DNA, 25 bp, Homo sapien
ggcctctgtgtccacgatgttcttc

SEQ ID NO: 3963305 - DNA, 25 bp, Homo sapien
ctggtcggcattcttctgcagctgc

SEQ ID NO: 3963306 - DNA, 25 bp, Homo sapien
tgttcttctccacctggtcggcatt

SEQ ID NO: 3963307 - DNA, 25 bp, Homo sapien
gcacacccagcttctaatgcttcta

SEQ ID NO: 3963308 - DNA, 25 bp, Homo sapien
cagtcactggcttttagtactacac

SEQ ID NO: 3963309 - DNA, 25 bp, Homo sapien
caccaggccccgactacatattttt

SEQ ID NO: 3963310 - DNA, 25 bp, Homo sapien
gccatgttggcaaaacgcaccatat

SEQ ID NO: 3963311 - DNA, 25 bp, Homo sapien
ccagctcccaaaccagccctttcat

SEQ ID NO: 3963312 - DNA, 25 bp, Homo sapien
gccagctcccaaaccagccctttca

SEQ ID NO: 3963313 - DNA, 25 bp, Homo sapien
ccagcaggaatgtgggtggggcagg

SEQ ID NO: 3963314 - DNA, 25 bp, Homo sapien
taggaagccagcaggaatgtgggtg

SEQ ID NO: 3963315 - DNA, 25 bp, Homo sapien
ctaggaagccagcaggaatgtgggt

SEQ ID NO: 3963316 - DNA, 25 bp, Homo sapien
gcaggaatgtgggtggggcaggaac

SEQ ID NO: 3963317 - DNA, 25 bp, Homo sapien
ggctgcctgctagatgggttttgca

SEQ ID NO: 3963318 - DNA, 25 bp, Homo sapien
gggcctgaatgaggacccagaactt

SEQ ID NO: 3963319 - DNA, 25 bp, Homo sapien
gcaagcctctacgagtcacctcgag

SEQ ID NO: 3963320 - DNA, 25 bp, Homo sapien
tcagccttgttgacgctgtgggtca

SEQ ID NO: 3963321 - DNA, 25 bp, Homo sapien
tgccggggcacgtggaattcacaac

SEQ ID NO: 3963322 - DNA, 25 bp, Homo sapien
tggtgcaagcccagacgtgctttgc

SEQ ID NO: 3963323 - DNA, 25 bp, Homo sapien
caactaacctcagaatttggaacca

SEQ ID NO: 3963324 - DNA, 25 bp, Homo sapien
tgttcacgctgatcctggtgcaagc

SEQ ID NO: 3963325 - DNA, 25 bp, Homo sapien
gcgtctcctgcgcatcctcctccat

SEQ ID NO: 3963326 - DNA, 25 bp, Homo sapien
aacgcgtctcctgcgcatcctcctc

SEQ ID NO: 3963327 - DNA, 25 bp, Homo sapien
ggaacgcgtctcctgcgcatcctcc

SEQ ID NO: 3963328 - DNA, 25 bp, Homo sapien
ctgggaacgcgtctcctgcgcatcc

SEQ ID NO: 3963329 - DNA, 25 bp, Homo sapien
tgaagcgcagggcaatgtatgctct

SEQ ID NO: 3963330 - DNA, 25 bp, Homo sapien
ggtgtgaagcgcagggcaatgtatg

SEQ ID NO: 3963331 - DNA, 25 bp, Homo sapien
gggcaatgtatgctctcttgaaatg

SEQ ID NO: 3963332 - DNA, 25 bp, Homo sapien
gcagggcaatgtatgctctcttgaa

SEQ ID NO: 3963333 - DNA, 25 bp, Homo sapien
ctaccttgggtatgaaagtcaccac

SEQ ID NO: 3963334 - DNA, 25 bp, Homo sapien
ctgtcattaggaacccgggcaacgg

SEQ ID NO: 3963335 - DNA, 25 bp, Homo sapien
agtccaaaggcctgactaccttggg

SEQ ID NO: 3963336 - DNA, 25 bp, Homo sapien
taatcctgagccaacatcgccaggc

SEQ ID NO: 3963337 - DNA, 25 bp, Homo sapien
ctgtccgactggtcggcctaggccg

SEQ ID NO: 3963338 - DNA, 25 bp, Homo sapien
gactggtcggcctaggccggactgc

SEQ ID NO: 3963339 - DNA, 25 bp, Homo sapien
tgtccgactggtcggcctaggccgg

SEQ ID NO: 3963340 - DNA, 25 bp, Homo sapien
tccgactggtcggcctaggccggac

SEQ ID NO: 3963341 - DNA, 25 bp, Homo sapien
cggagcggagctgtgggcgcctcct

SEQ ID NO: 3963342 - DNA, 25 bp, Homo sapien
acactgcccgggaggtcttccaggt

SEQ ID NO: 3963343 - DNA, 25 bp, Homo sapien
gagtcccgcactccgggttcagttc

SEQ ID NO: 3963344 - DNA, 25 bp, Homo sapien
aagagcgtcccggagcggagctgtg

SEQ ID NO: 3963345 - DNA, 25 bp, Homo sapien
tccgggtctgcacagtggggctgta

SEQ ID NO: 3963346 - DNA, 25 bp, Homo sapien
ccgggtctgcacagtggggctgtat

SEQ ID NO: 3963347 - DNA, 25 bp, Homo sapien
gggcgggcgggagcgcaggtgagcg

SEQ ID NO: 3963348 - DNA, 25 bp, Homo sapien
cgggcgggagcgcaggtgagcgagc

SEQ ID NO: 3963349 - DNA, 25 bp, Homo sapien
gagcgcaggtgagcgagcggcggcg

SEQ ID NO: 3963350 - DNA, 25 bp, Homo sapien
ctggcgggccgggcgcgcaccgagg

SEQ ID NO: 3963351 - DNA, 25 bp, Homo sapien
tctgcaacgggttgagacaattagt

SEQ ID NO: 3963352 - DNA, 25 bp, Homo sapien
atctgcaacgggttgagacaattag

SEQ ID NO: 3963353 - DNA, 25 bp, Homo sapien
gccatctgggtacagctgcaatgat

SEQ ID NO: 3963354 - DNA, 25 bp, Homo sapien
ggctgcagacgctgttctgaccctg

SEQ ID NO: 3963355 - DNA, 25 bp, Homo sapien
aatgatggattgtctgcaacagtca

SEQ ID NO: 3963356 - DNA, 25 bp, Homo sapien
tctcatgtgtgtcccgggctggctt

SEQ ID NO: 3963357 - DNA, 25 bp, Homo sapien
acgcggccccggactgctttgaatg

SEQ ID NO: 3963358 - DNA, 25 bp, Homo sapien
gagctagcttgttcagcctgtggcc

SEQ ID NO: 3963359 - DNA, 25 bp, Homo sapien
tccatttggataaacttgcatcgtc

SEQ ID NO: 3963360 - DNA, 25 bp, Homo sapien
tgggctcgttcaagaactttccagc

SEQ ID NO: 3963361 - DNA, 25 bp, Homo sapien
tgagtctggttcgttggcagcccct

SEQ ID NO: 3963362 - DNA, 25 bp, Homo sapien
gatggtccacgccagtggccttgaa

SEQ ID NO: 3963363 - DNA, 25 bp, Homo sapien
ggaaacaagctttcgcgacgtgcca

SEQ ID NO: 3963364 - DNA, 25 bp, Homo sapien
tggccttgaaatttcccctgcagaa

SEQ ID NO: 3963365 - DNA, 25 bp, Homo sapien
cagcgggtggtatgcatagtcccca

SEQ ID NO: 3963366 - DNA, 25 bp, Homo sapien
tcatctcctgcagcgggtggtatgc

SEQ ID NO: 3963367 - DNA, 25 bp, Homo sapien
atgcatagtccccatgcaggcgccg

SEQ ID NO: 3963368 - DNA, 25 bp, Homo sapien
cccgttcatctcctgcagcgggtgg

SEQ ID NO: 3963369 - DNA, 25 bp, Homo sapien
cagggtgagggctagccaggcggtc

SEQ ID NO: 3963370 - DNA, 25 bp, Homo sapien
ttgctgcagtgctgatcagcaggag

SEQ ID NO: 3963371 - DNA, 25 bp, Homo sapien
gcgccagggtgagggctagccaggc

SEQ ID NO: 3963372 - DNA, 25 bp, Homo sapien
aggacaggtttgctgcagtgctgat

SEQ ID NO: 3963373 - DNA, 25 bp, Homo sapien
ggactgtgcacctcgtctgtgcaaa

SEQ ID NO: 3963374 - DNA, 25 bp, Homo sapien
cctcgtctgtgcaaaatagtgagat

SEQ ID NO: 3963375 - DNA, 25 bp, Homo sapien
tgtgcacctcgtctgtgcaaaatag

SEQ ID NO: 3963376 - DNA, 25 bp, Homo sapien
gagcccaggactgtgcacctcgtct

SEQ ID NO: 3963377 - DNA, 25 bp, Homo sapien
gttctcccgccctcagggtggcttc

SEQ ID NO: 3963378 - DNA, 25 bp, Homo sapien
agttctcccgccctcagggtggctt

SEQ ID NO: 3963379 - DNA, 25 bp, Homo sapien
ctcccgccctcagggtggcttcagg

SEQ ID NO: 3963380 - DNA, 25 bp, Homo sapien
ccgccctcagggtggcttcaggtgg

SEQ ID NO: 3963381 - DNA, 25 bp, Homo sapien
aggagcgtctgcccatacccctccc

SEQ ID NO: 3963382 - DNA, 25 bp, Homo sapien
gagcgtctgcccatacccctcccct

SEQ ID NO: 3963383 - DNA, 25 bp, Homo sapien
gagcaggagcgtctgcccatacccc

SEQ ID NO: 3963384 - DNA, 25 bp, Homo sapien
gcaggagcgtctgcccatacccctc

SEQ ID NO: 3963385 - DNA, 25 bp, Homo sapien
tgcagttgccagtcttggggtcaca

SEQ ID NO: 3963386 - DNA, 25 bp, Homo sapien
cagttgccagtcttggggtcacagg

SEQ ID NO: 3963387 - DNA, 25 bp, Homo sapien
tcacagggacaatggtgctcacact

SEQ ID NO: 3963388 - DNA, 25 bp, Homo sapien
tgctcacacttacaaggcctctggc

SEQ ID NO: 3963389 - DNA, 25 bp, Homo sapien
tcgacaggacaggatacctgcccct

SEQ ID NO: 3963390 - DNA, 25 bp, Homo sapien
tcagagcctttctcgacaggacagg

SEQ ID NO: 3963391 - DNA, 25 bp, Homo sapien
aaaggttggggcctccagtgtcaga

SEQ ID NO: 3963392 - DNA, 25 bp, Homo sapien
cagtgtcagagcctttctcgacagg

SEQ ID NO: 3963393 - DNA, 25 bp, Homo sapien
gttggacccggtccatccggcatca

SEQ ID NO: 3963394 - DNA, 25 bp, Homo sapien
ttggacccggtccatccggcatcac

SEQ ID NO: 3963395 - DNA, 25 bp, Homo sapien
agttggacccggtccatccggcatc

SEQ ID NO: 3963396 - DNA, 25 bp, Homo sapien
cacacaccacggtggacacttggcg

SEQ ID NO: 3963397 - DNA, 25 bp, Homo sapien
aagtgcccggtgcattggcagtgcc

SEQ ID NO: 3963398 - DNA, 25 bp, Homo sapien
tggccgtggcagtcaggcggctggc

SEQ ID NO: 3963399 - DNA, 25 bp, Homo sapien
agtccagctcatcacagccgggacc

SEQ ID NO: 3963400 - DNA, 25 bp, Homo sapien
tgtgtgaggagaggacacccccaga

SEQ ID NO: 3963401 - DNA, 25 bp, Homo sapien
gaggagaggacacccccagacggcc

SEQ ID NO: 3963402 - DNA, 25 bp, Homo sapien
tgtgaggagaggacacccccagacg

SEQ ID NO: 3963403 - DNA, 25 bp, Homo sapien
tgaggagaggacacccccagacggc

SEQ ID NO: 3963404 - DNA, 25 bp, Homo sapien
agatggcgtctatctatttttgaga

SEQ ID NO: 3963405 - DNA, 25 bp, Homo sapien
ctcctgagcagctgtaaccgtaagg

SEQ ID NO: 3963406 - DNA, 25 bp, Homo sapien
aggtattgcgatccttccacccgag

SEQ ID NO: 3963407 - DNA, 25 bp, Homo sapien
cagctgtaaccgtaaggtgtgcacc

SEQ ID NO: 3963408 - DNA, 25 bp, Homo sapien
agacgttagtcatttgggcctcgaa

SEQ ID NO: 3963409 - DNA, 25 bp, Homo sapien
tgtctctaactcagggtccacagcg

SEQ ID NO: 3963410 - DNA, 25 bp, Homo sapien
tagtataaaaaagtggcagccatgg

SEQ ID NO: 3963411 - DNA, 25 bp, Homo sapien
gatgcggatcaaaggtggacattcc

SEQ ID NO: 3963412 - DNA, 25 bp, Homo sapien
ctctgcactgtagggcttggcttcc

SEQ ID NO: 3963413 - DNA, 25 bp, Homo sapien
cagcagatcccaatggtatgaagca

SEQ ID NO: 3963414 - DNA, 25 bp, Homo sapien
gaagcaaaccagcttcccgttgaaa

SEQ ID NO: 3963415 - DNA, 25 bp, Homo sapien
tcatcttagctcgaggatcccacat

SEQ ID NO: 3963416 - DNA, 25 bp, Homo sapien
ttggggtaggctggtctgaggggac

SEQ ID NO: 3963417 - DNA, 25 bp, Homo sapien
gaactcgtacttgtgggcgatgccc

SEQ ID NO: 3963418 - DNA, 25 bp, Homo sapien
tggccaaaggccaggtcgaactcgt

SEQ ID NO: 3963419 - DNA, 25 bp, Homo sapien
caaagtacaggtccgagtcatcaca

SEQ ID NO: 3963420 - DNA, 25 bp, Homo sapien
gatgcagcgctcataaaagtggcca

SEQ ID NO: 3963421 - DNA, 25 bp, Homo sapien
tgaggattctcagtgtgggcctcag

SEQ ID NO: 3963422 - DNA, 25 bp, Homo sapien
tcagaggtgagcactgaagcactta

SEQ ID NO: 3963423 - DNA, 25 bp, Homo sapien
tggagaaggtccgtcctccaccctg

SEQ ID NO: 3963424 - DNA, 25 bp, Homo sapien
tgtgactcagacagttccaccccat

SEQ ID NO: 3963425 - DNA, 25 bp, Homo sapien
gatgaagtggaagaagtcacactgc

SEQ ID NO: 3963426 - DNA, 25 bp, Homo sapien
ccttccccaagccaaggagcagctt

SEQ ID NO: 3963427 - DNA, 25 bp, Homo sapien
gaagaagtcacactgcaaggtgggt

SEQ ID NO: 3963428 - DNA, 25 bp, Homo sapien
aagtggaagaagtcacactgcaagg

SEQ ID NO: 3963429 - DNA, 25 bp, Homo sapien
tcctccttggcacacccctgagtcc

SEQ ID NO: 3963430 - DNA, 25 bp, Homo sapien
gggagtaaacacacgctcgaaagtg

SEQ ID NO: 3963431 - DNA, 25 bp, Homo sapien
cacacgctcgaaagtgctctgaaag

SEQ ID NO: 3963432 - DNA, 25 bp, Homo sapien
ccaggcatggggagtaaacacacgc

SEQ ID NO: 3963433 - DNA, 25 bp, Homo sapien
tttctcacgtaatccatctccccgc

SEQ ID NO: 3963434 - DNA, 25 bp, Homo sapien
cccggatcggatcccagctgtcatt

SEQ ID NO: 3963435 - DNA, 25 bp, Homo sapien
cgcttccccggatcggatcccagct

SEQ ID NO: 3963436 - DNA, 25 bp, Homo sapien
tgtcatttggctccctgttaaactc

SEQ ID NO: 3963437 - DNA, 25 bp, Homo sapien
gataccgaatttcaacccaatatag

SEQ ID NO: 3963438 - DNA, 25 bp, Homo sapien
aggaggagccgacaaaccccattat

SEQ ID NO: 3963439 - DNA, 25 bp, Homo sapien
gctgcctattgtcaggaaaatctac

SEQ ID NO: 3963440 - DNA, 25 bp, Homo sapien
aaacagagatcctaggagtgacaaa

SEQ ID NO: 3963441 - DNA, 25 bp, Homo sapien
ctgtctgcttgccaggaagcctgct

SEQ ID NO: 3963442 - DNA, 25 bp, Homo sapien
tgcagttcacagctaaacttagcct

SEQ ID NO: 3963443 - DNA, 25 bp, Homo sapien
cacagctaaacttagcctggcaacg

SEQ ID NO: 3963444 - DNA, 25 bp, Homo sapien
gagaataaacctgggtcacttggcg

SEQ ID NO: 3963445 - DNA, 25 bp, Homo sapien
cactgagggttgactgaccacagcc

SEQ ID NO: 3963446 - DNA, 25 bp, Homo sapien
aatccacgcgggaaggtagacagcc

SEQ ID NO: 3963447 - DNA, 25 bp, Homo sapien
cataaaaggcacgtgagctacaggc

SEQ ID NO: 3963448 - DNA, 25 bp, Homo sapien
tgacccctggtagcaaaagcattac

SEQ ID NO: 3963449 - DNA, 25 bp, Homo sapien
tacgaaatggaataaaggactggct

SEQ ID NO: 3963450 - DNA, 25 bp, Homo sapien
ggaaattgccaagggcttgcccagc

SEQ ID NO: 3963451 - DNA, 25 bp, Homo sapien
taatgcccgcttatgtctgagaacc

SEQ ID NO: 3963452 - DNA, 25 bp, Homo sapien
cgtcacgttcagagccaaaaggagt

SEQ ID NO: 3963453 - DNA, 25 bp, Homo sapien
gggtcatgggggtggtctgccagcc

SEQ ID NO: 3963454 - DNA, 25 bp, Homo sapien
aaggacagagtgtccctccgtccag

SEQ ID NO: 3963455 - DNA, 25 bp, Homo sapien
cgctcctccgccggctgatgcacgt

SEQ ID NO: 3963456 - DNA, 25 bp, Homo sapien
atgcacgtccctcggcgagcagatg

SEQ ID NO: 3963457 - DNA, 25 bp, Homo sapien
gaagaggcaaagagggactctcctc

SEQ ID NO: 3963458 - DNA, 25 bp, Homo sapien
tcctctagagtatctggagggagtg

SEQ ID NO: 3963459 - DNA, 25 bp, Homo sapien
tgtggccctgataccttgatcctgg

SEQ ID NO: 3963460 - DNA, 25 bp, Homo sapien
agctgagcatcatctgagacaacag

SEQ ID NO: 3963461 - DNA, 25 bp, Homo sapien
tctttcttccaagggataggagaac

SEQ ID NO: 3963462 - DNA, 25 bp, Homo sapien
caggatcccaagacaaatccctctt

SEQ ID NO: 3963463 - DNA, 25 bp, Homo sapien
ggtacctcatgtaggtcaggtggct

SEQ ID NO: 3963464 - DNA, 25 bp, Homo sapien
ggacatatgaattaggccccactga

SEQ ID NO: 3963465 - DNA, 25 bp, Homo sapien
tcacagtgacagcaatgcgccctca

SEQ ID NO: 3963466 - DNA, 25 bp, Homo sapien
cacagtgacagcaatgcgccctcac

SEQ ID NO: 3963467 - DNA, 25 bp, Homo sapien
tccgaatttcccctagccctgtggc

SEQ ID NO: 3963468 - DNA, 25 bp, Homo sapien
ccgttgtcctacattggcttggtct

SEQ ID NO: 3963469 - DNA, 25 bp, Homo sapien
gcttggtctgggctcgtattcctcc

SEQ ID NO: 3963470 - DNA, 25 bp, Homo sapien
gtggccgcatctcacccacaagggt

SEQ ID NO: 3963471 - DNA, 25 bp, Homo sapien
tcccagactgttcttctacccgagt

SEQ ID NO: 3963472 - DNA, 25 bp, Homo sapien
ggcttaggcggtacctgacacaaag

SEQ ID NO: 3963473 - DNA, 25 bp, Homo sapien
gcttcctgagattctaggccccaca

SEQ ID NO: 3963474 - DNA, 25 bp, Homo sapien
tgaaagaaatcccagactgttcttc

SEQ ID NO: 3963475 - DNA, 25 bp, Homo sapien
ggtactggtgctgcggtcatgtctc

SEQ ID NO: 3963476 - DNA, 25 bp, Homo sapien
catgttaaggagtcctctgggaaga

SEQ ID NO: 3963477 - DNA, 25 bp, Homo sapien
tactgctgttggcactggtactggt

SEQ ID NO: 3963478 - DNA, 25 bp, Homo sapien
ggtgaacaacatccctgcagctcct

SEQ ID NO: 3963479 - DNA, 25 bp, Homo sapien
aaaatcccttccagacgtagccctg

SEQ ID NO: 3963480 - DNA, 25 bp, Homo sapien
gaatgaaccctgacacgttttctga

SEQ ID NO: 3963481 - DNA, 25 bp, Homo sapien
tgtaagtgccttggaaaatcccttc

SEQ ID NO: 3963482 - DNA, 25 bp, Homo sapien
tggactggccttcatgtaactgcag

SEQ ID NO: 3963483 - DNA, 25 bp, Homo sapien
cttccctgctgctttgatacaggag

SEQ ID NO: 3963484 - DNA, 25 bp, Homo sapien
agttggggggactcctgcatcagct

SEQ ID NO: 3963485 - DNA, 25 bp, Homo sapien
cctgcatcagcttcagggaaatgac

SEQ ID NO: 3963486 - DNA, 25 bp, Homo sapien
cctgctgctttgatacaggaggagg

SEQ ID NO: 3963487 - DNA, 25 bp, Homo sapien
cctgcctctttcgtctcctgtgctg

SEQ ID NO: 3963488 - DNA, 25 bp, Homo sapien
ttcctgcctctttcgtctcctgtgc

SEQ ID NO: 3963489 - DNA, 25 bp, Homo sapien
ctgcctctttcgtctcctgtgctga

SEQ ID NO: 3963490 - DNA, 25 bp, Homo sapien
tgcctctttcgtctcctgtgctgac

SEQ ID NO: 3963491 - DNA, 25 bp, Homo sapien
tgaacgttacaccttctatgtccct

SEQ ID NO: 3963492 - DNA, 25 bp, Homo sapien
cagggtgcttccgtttcactgatgt

SEQ ID NO: 3963493 - DNA, 25 bp, Homo sapien
gagcaacagtgatgtcacctgcagg

SEQ ID NO: 3963494 - DNA, 25 bp, Homo sapien
tctcacacttgaggccgatttttca

SEQ ID NO: 3963495 - DNA, 25 bp, Homo sapien
gagtcagccaaaagatcaggatgag

SEQ ID NO: 3963496 - DNA, 25 bp, Homo sapien
caagtcggcagagaatgcagacctc

SEQ ID NO: 3963497 - DNA, 25 bp, Homo sapien
ggatgagcagctccaaacaaactgc

SEQ ID NO: 3963498 - DNA, 25 bp, Homo sapien
taggacagtctaggtccctacagcc

SEQ ID NO: 3963499 - DNA, 25 bp, Homo sapien
tttgataagcgcagtccaccttctg

SEQ ID NO: 3963500 - DNA, 25 bp, Homo sapien
cagctttgataagcgcagtccacct

SEQ ID NO: 3963501 - DNA, 25 bp, Homo sapien
actccagctttgataagcgcagtcc

SEQ ID NO: 3963502 - DNA, 25 bp, Homo sapien
ctttgataagcgcagtccaccttct

SEQ ID NO: 3963503 - DNA, 25 bp, Homo sapien
tctgattcgtacaccctcttctggg

SEQ ID NO: 3963504 - DNA, 25 bp, Homo sapien
gaatcagtagcttgagtccaaacca

SEQ ID NO: 3963505 - DNA, 25 bp, Homo sapien
taggacgcagggaagagacgacatt

SEQ ID NO: 3963506 - DNA, 25 bp, Homo sapien
tctgtgtgatgtttgcgaagtctcc

SEQ ID NO: 3963507 - DNA, 25 bp, Homo sapien
acaaaaatgtggtcccgctctgggc

SEQ ID NO: 3963508 - DNA, 25 bp, Homo sapien
tagcgctctgctcagatgtgagaag

SEQ ID NO: 3963509 - DNA, 25 bp, Homo sapien
gggtcacctggccactaggaacaaa

SEQ ID NO: 3963510 - DNA, 25 bp, Homo sapien
agcaaatgagcagggcgaaccggct

SEQ ID NO: 3963511 - DNA, 25 bp, Homo sapien
cgcgggaggacggctccagcacagg

SEQ ID NO: 3963512 - DNA, 25 bp, Homo sapien
tgcgcgcaggtcgagggccgaggcg

SEQ ID NO: 3963513 - DNA, 25 bp, Homo sapien
gcgcgcaggtcgagggccgaggcgc

SEQ ID NO: 3963514 - DNA, 25 bp, Homo sapien
cgcgcaggtcgagggccgaggcgcc

SEQ ID NO: 3963515 - DNA, 25 bp, Homo sapien
ctgcggtggagcttgcggcccggca

SEQ ID NO: 3963516 - DNA, 25 bp, Homo sapien
cgggcggcgatgcccccgctggctc

SEQ ID NO: 3963517 - DNA, 25 bp, Homo sapien
gcctgcagcggccggctctactgaa

SEQ ID NO: 3963518 - DNA, 25 bp, Homo sapien
gcgggcggcgatgcccccgctggct

SEQ ID NO: 3963519 - DNA, 25 bp, Homo sapien
ccccggcacggcagaactggagagt

SEQ ID NO: 3963520 - DNA, 25 bp, Homo sapien
tccgccgggaagaccttcccagtga

SEQ ID NO: 3963521 - DNA, 25 bp, Homo sapien
aaacttccccggcacggcagaactg

SEQ ID NO: 3963522 - DNA, 25 bp, Homo sapien
cggtggttgggcccaggatccgccg

SEQ ID NO: 3963523 - DNA, 25 bp, Homo sapien
tttgcccgactaattgtatgctcag

SEQ ID NO: 3963524 - DNA, 25 bp, Homo sapien
ctcagaacaggcagttactccttca

SEQ ID NO: 3963525 - DNA, 25 bp, Homo sapien
catgcatgttattttgcccgactaa

SEQ ID NO: 3963526 - DNA, 25 bp, Homo sapien
tccaaactgtcaccccagtgcacat

SEQ ID NO: 3963527 - DNA, 25 bp, Homo sapien
tcacatgctcagttccagacctgag

SEQ ID NO: 3963528 - DNA, 25 bp, Homo sapien
gctcttggtccctgttataaattcc

SEQ ID NO: 3963529 - DNA, 25 bp, Homo sapien
aatagaactggcttcatgtgggtca

SEQ ID NO: 3963530 - DNA, 25 bp, Homo sapien
cagacctgagcaatgattgacttgc

SEQ ID NO: 3963531 - DNA, 25 bp, Homo sapien
ctccagttcatctgccacctctcca

SEQ ID NO: 3963532 - DNA, 25 bp, Homo sapien
cctctccagcaacctccatgcacat

SEQ ID NO: 3963533 - DNA, 25 bp, Homo sapien
gtgtggttcagcctgcctctccagt

SEQ ID NO: 3963534 - DNA, 25 bp, Homo sapien
agtgtggttcagcctgcctctccag

SEQ ID NO: 3963535 - DNA, 25 bp, Homo sapien
cattataagggaggataaaggcccg

SEQ ID NO: 3963536 - DNA, 25 bp, Homo sapien
tggaaaatttgctcaccccatggag

SEQ ID NO: 3963537 - DNA, 25 bp, Homo sapien
ttctaaagcagattgatgtccaggc

SEQ ID NO: 3963538 - DNA, 25 bp, Homo sapien
taaaggcccgtggatagacaaagca

SEQ ID NO: 3963539 - DNA, 25 bp, Homo sapien
cagcgtagggcagtaactctggtac

SEQ ID NO: 3963540 - DNA, 25 bp, Homo sapien
cacagaagggaatctcaagtagcct

SEQ ID NO: 3963541 - DNA, 25 bp, Homo sapien
tacccagggcttgtactaggctact

SEQ ID NO: 3963542 - DNA, 25 bp, Homo sapien
ggaagtgttggatggaaaccccaca

SEQ ID NO: 3963543 - DNA, 25 bp, Homo sapien
aaggcagagtgtagccgccagtcct

SEQ ID NO: 3963544 - DNA, 25 bp, Homo sapien
gagattttcgcgatgtggcgctaca

SEQ ID NO: 3963545 - DNA, 25 bp, Homo sapien
tagtgtcacacaccgtcctttctgg

SEQ ID NO: 3963546 - DNA, 25 bp, Homo sapien
ttagtcctcggctctccatgcttgg

SEQ ID NO: 3963547 - DNA, 25 bp, Homo sapien
tgtgtcttgcttaacccctgacagc

SEQ ID NO: 3963548 - DNA, 25 bp, Homo sapien
tcgagacctaactcaaatgctcagg

SEQ ID NO: 3963549 - DNA, 25 bp, Homo sapien
gctacgcaacttgtgcatctctgga

SEQ ID NO: 3963550 - DNA, 25 bp, Homo sapien
taaaagagagattcggataccaagt

SEQ ID NO: 3963551 - DNA, 25 bp, Homo sapien
gacttgagtcacatactgctgatgg

SEQ ID NO: 3963552 - DNA, 25 bp, Homo sapien
tgggcaagacccactatgtccactg

SEQ ID NO: 3963553 - DNA, 25 bp, Homo sapien
tatatcccctgcctatgtgctgaag

SEQ ID NO: 3963554 - DNA, 25 bp, Homo sapien
tcatctggttggtcgcagcctgaga

SEQ ID NO: 3963555 - DNA, 25 bp, Homo sapien
gtcagcatccgccaggagaagcata

SEQ ID NO: 3963556 - DNA, 25 bp, Homo sapien
caggagggagtaggtcatcactgtc

SEQ ID NO: 3963557 - DNA, 25 bp, Homo sapien
ggaagcatgcccacagggaagtcgc

SEQ ID NO: 3963558 - DNA, 25 bp, Homo sapien
ggtgccctgtgagagtcctgttctg

SEQ ID NO: 3963559 - DNA, 25 bp, Homo sapien
gattggccccacagtaggagattgg

SEQ ID NO: 3963560 - DNA, 25 bp, Homo sapien
tttgttgaattcgtagcagctccat

SEQ ID NO: 3963561 - DNA, 25 bp, Homo sapien
cacaagaaatggacgtgggaattgc

SEQ ID NO: 3963562 - DNA, 25 bp, Homo sapien
gcacagaggatccattgattttgtt

SEQ ID NO: 3963563 - DNA, 25 bp, Homo sapien
gacagtctccagcaatgtaaggcag

SEQ ID NO: 3963564 - DNA, 25 bp, Homo sapien
tcttagagctcctgaaagtgacacc

SEQ ID NO: 3963565 - DNA, 25 bp, Homo sapien
tatctctgacgacgctcacatggtg

SEQ ID NO: 3963566 - DNA, 25 bp, Homo sapien
aacaggctgcctcaaatatggtaac

SEQ ID NO: 3963567 - DNA, 25 bp, Homo sapien
cacaacaacaaagaacgttgctcag

SEQ ID NO: 3963568 - DNA, 25 bp, Homo sapien
ttctccaaagtaccatcacgtcttc

SEQ ID NO: 3963569 - DNA, 25 bp, Homo sapien
ctattctcgactccccttgttgaag

SEQ ID NO: 3963570 - DNA, 25 bp, Homo sapien
cagtgcaatttgactcaggtgttgc

SEQ ID NO: 3963571 - DNA, 25 bp, Homo sapien
tggtgctcaggacgtgcttttctcc

SEQ ID NO: 3963572 - DNA, 25 bp, Homo sapien
tcttcttggtgctcaggacgtgctt

SEQ ID NO: 3963573 - DNA, 25 bp, Homo sapien
gctcaggacgtgcttttctcccttt

SEQ ID NO: 3963574 - DNA, 25 bp, Homo sapien
tcttggtgctcaggacgtgcttttc

SEQ ID NO: 3963575 - DNA, 25 bp, Homo sapien
gctctgcattggtgacaatgggcta

SEQ ID NO: 3963576 - DNA, 25 bp, Homo sapien
acaatgggctagtctcttcttggga

SEQ ID NO: 3963577 - DNA, 25 bp, Homo sapien
ttccagctctgcattggtgacaatg

SEQ ID NO: 3963578 - DNA, 25 bp, Homo sapien
attggtgacaatgggctagtctctt

SEQ ID NO: 3963579 - DNA, 25 bp, Homo sapien
gacttcttgggtcatgtctgattca

SEQ ID NO: 3963580 - DNA, 25 bp, Homo sapien
gaaatgacctggttggactcccagg

SEQ ID NO: 3963581 - DNA, 25 bp, Homo sapien
ttgtcttgcactgtcatgggctctt

SEQ ID NO: 3963582 - DNA, 25 bp, Homo sapien
gggtctgggcccaatgtggcttgtc

SEQ ID NO: 3963583 - DNA, 25 bp, Homo sapien
gagcacaaagaccatttccagagat

SEQ ID NO: 3963584 - DNA, 25 bp, Homo sapien
tgaaaaccaattcggcaggagtgct

SEQ ID NO: 3963585 - DNA, 25 bp, Homo sapien
tccccttcagtgttccagacagata

SEQ ID NO: 3963586 - DNA, 25 bp, Homo sapien
taaaacagccgaggtaattgtggag

SEQ ID NO: 3963587 - DNA, 25 bp, Homo sapien
ggatctcagactgactaattagcct

SEQ ID NO: 3963588 - DNA, 25 bp, Homo sapien
gcctgccggattgctgaagccacag

SEQ ID NO: 3963589 - DNA, 25 bp, Homo sapien
ttagccttgcctgccggattgctga

SEQ ID NO: 3963590 - DNA, 25 bp, Homo sapien
ctcagactgactaattagccttgcc

SEQ ID NO: 3963591 - DNA, 25 bp, Homo sapien
ttctgcttccaaggggaagctggat

SEQ ID NO: 3963592 - DNA, 25 bp, Homo sapien
cttctgcttccaaggggaagctgga

SEQ ID NO: 3963593 - DNA, 25 bp, Homo sapien
ccaaggggaagctggatagggcctc

SEQ ID NO: 3963594 - DNA, 25 bp, Homo sapien
cttccaaggggaagctggatagggc

SEQ ID NO: 3963595 - DNA, 25 bp, Homo sapien
tctgctccttccagacacgtcccca

SEQ ID NO: 3963596 - DNA, 25 bp, Homo sapien
ctctgctccttccagacacgtcccc

SEQ ID NO: 3963597 - DNA, 25 bp, Homo sapien
ctgctccttccagacacgtccccat

SEQ ID NO: 3963598 - DNA, 25 bp, Homo sapien
gaaagcaggatctgccatgagacca

SEQ ID NO: 3963599 - DNA, 25 bp, Homo sapien
cagagctgccaacacgaagttgcat

SEQ ID NO: 3963600 - DNA, 25 bp, Homo sapien
agctctgagcctgggcgtcttgcca

SEQ ID NO: 3963601 - DNA, 25 bp, Homo sapien
aattcagggcttggtcgaaagcagg

SEQ ID NO: 3963602 - DNA, 25 bp, Homo sapien
ccccagtctccaaatcgtcagcatt

SEQ ID NO: 3963603 - DNA, 25 bp, Homo sapien
cagtctccaaatcgtcagcattaag

SEQ ID NO: 3963604 - DNA, 25 bp, Homo sapien
tcatctccccagtctccaaatcgtc

SEQ ID NO: 3963605 - DNA, 25 bp, Homo sapien
agtctccaaatcgtcagcattaaga

SEQ ID NO: 3963606 - DNA, 25 bp, Homo sapien
tgatatagggttggattcggtgacc

SEQ ID NO: 3963607 - DNA, 25 bp, Homo sapien
tagggttggattcggtgacctctca

SEQ ID NO: 3963608 - DNA, 25 bp, Homo sapien
gattcggtgacctctcaaatcctct

SEQ ID NO: 3963609 - DNA, 25 bp, Homo sapien
ggttggattcggtgacctctcaaat

SEQ ID NO: 3963610 - DNA, 25 bp, Homo sapien
gagttgttgtgcacccattctgcca

SEQ ID NO: 3963611 - DNA, 25 bp, Homo sapien
ctactccgtatggagttgttgtgca

SEQ ID NO: 3963612 - DNA, 25 bp, Homo sapien
caaggtcatagctactccgtatgga

SEQ ID NO: 3963613 - DNA, 25 bp, Homo sapien
ggagttgttgtgcacccattctgcc

SEQ ID NO: 3963614 - DNA, 25 bp, Homo sapien
gtcttgcaagaggccaatgctataa

SEQ ID NO: 3963615 - DNA, 25 bp, Homo sapien
caggtcttgcaagaggccaatgcta

SEQ ID NO: 3963616 - DNA, 25 bp, Homo sapien
gcaggtcttgcaagaggccaatgct

SEQ ID NO: 3963617 - DNA, 25 bp, Homo sapien
ggtcttgcaagaggccaatgctata

SEQ ID NO: 3963618 - DNA, 25 bp, Homo sapien
cgattgtcccatgactcctattaac

SEQ ID NO: 3963619 - DNA, 25 bp, Homo sapien
ttctttgtgacatagcatttacacg

SEQ ID NO: 3963620 - DNA, 25 bp, Homo sapien
gacatagcatttacacgattgtccc

SEQ ID NO: 3963621 - DNA, 25 bp, Homo sapien
tttacacgattgtcccatgactcct

SEQ ID NO: 3963622 - DNA, 25 bp, Homo sapien
gcatgtctcgtagcttggcatcctg

SEQ ID NO: 3963623 - DNA, 25 bp, Homo sapien
atcctggcaaagtgccttgtagcct

SEQ ID NO: 3963624 - DNA, 25 bp, Homo sapien
ctctgcatgtctcgtagcttggcat

SEQ ID NO: 3963625 - DNA, 25 bp, Homo sapien
ccttgtagcctgcaaagtgccttgc

SEQ ID NO: 3963626 - DNA, 25 bp, Homo sapien
gtagccaactcgctgtccccaatgt

SEQ ID NO: 3963627 - DNA, 25 bp, Homo sapien
ctgtggccgccatatcagacactgt

SEQ ID NO: 3963628 - DNA, 25 bp, Homo sapien
aaccccattctttcacccacagtag

SEQ ID NO: 3963629 - DNA, 25 bp, Homo sapien
cagacactgtatgttcattcttggc

SEQ ID NO: 3963630 - DNA, 25 bp, Homo sapien
tgaagtctgcaacggatgtattttt

SEQ ID NO: 3963631 - DNA, 25 bp, Homo sapien
tcttctgccccttgagatcttgagg

SEQ ID NO: 3963632 - DNA, 25 bp, Homo sapien
ggtcccatcattgccccagggactg

SEQ ID NO: 3963633 - DNA, 25 bp, Homo sapien
gtttgcatctgttctttccctattc

SEQ ID NO: 3963634 - DNA, 25 bp, Homo sapien
ctgggagagaggcaccgtagcagag

SEQ ID NO: 3963635 - DNA, 25 bp, Homo sapien
gggagagaggcaccgtagcagagat

SEQ ID NO: 3963636 - DNA, 25 bp, Homo sapien
gagagaggcaccgtagcagagattt

SEQ ID NO: 3963637 - DNA, 25 bp, Homo sapien
agagaggcaccgtagcagagatttg

SEQ ID NO: 3963638 - DNA, 25 bp, Homo sapien
cttcagtttctgaccaccttttggg

SEQ ID NO: 3963639 - DNA, 25 bp, Homo sapien
gaagagaaagagtcctcaaggtagg

SEQ ID NO: 3963640 - DNA, 25 bp, Homo sapien
gagagtggctcctagtggttcccaa

SEQ ID NO: 3963641 - DNA, 25 bp, Homo sapien
ggtcatgagcctcttgcatgtaagg

SEQ ID NO: 3963642 - DNA, 25 bp, Homo sapien
tcagcgcactctatcagggtcatga

SEQ ID NO: 3963643 - DNA, 25 bp, Homo sapien
gagacctagaggcttccggctgcta

SEQ ID NO: 3963644 - DNA, 25 bp, Homo sapien
tagttgcccctgttacgtgaatctc

SEQ ID NO: 3963645 - DNA, 25 bp, Homo sapien
tgctattgaggatgtttcttggctg

SEQ ID NO: 3963646 - DNA, 25 bp, Homo sapien
ttggctgagggcctagagatctagt

SEQ ID NO: 3963647 - DNA, 25 bp, Homo sapien
tctagagaacgaggcacaactctgt

SEQ ID NO: 3963648 - DNA, 25 bp, Homo sapien
acaactctgttaagccttcctgctg

SEQ ID NO: 3963649 - DNA, 25 bp, Homo sapien
gaacgaggcacaactctgttaagcc

SEQ ID NO: 3963650 - DNA, 25 bp, Homo sapien
agctctagagaacgaggcacaactc

SEQ ID NO: 3963651 - DNA, 25 bp, Homo sapien
cagagatacagatgtacctgtatac

SEQ ID NO: 3963652 - DNA, 25 bp, Homo sapien
cctgaagagtgctcaggaaggatga

SEQ ID NO: 3963653 - DNA, 25 bp, Homo sapien
gagttcgaggttccttagtccaatg

SEQ ID NO: 3963654 - DNA, 25 bp, Homo sapien
gatttctgcaggtttgtgcctgaag

SEQ ID NO: 3963655 - DNA, 25 bp, Homo sapien
taaggtgtggacaactgacacctgc

SEQ ID NO: 3963656 - DNA, 25 bp, Homo sapien
tagagctcagctagttcagacaaaa

SEQ ID NO: 3963657 - DNA, 25 bp, Homo sapien
caaactgattcccattaaggtgtgg

SEQ ID NO: 3963658 - DNA, 25 bp, Homo sapien
gattctcaatcttcaatatggccct

SEQ ID NO: 3963659 - DNA, 25 bp, Homo sapien
cattgttcaagaacaagccagatac

SEQ ID NO: 3963660 - DNA, 25 bp, Homo sapien
gaagagcagtctatgtctcttccct

SEQ ID NO: 3963661 - DNA, 25 bp, Homo sapien
tacctgatgaagagcagtctatgtc

SEQ ID NO: 3963662 - DNA, 25 bp, Homo sapien
acagggcattgttcaagaacaagcc

SEQ ID NO: 3963663 - DNA, 25 bp, Homo sapien
ctggattcttgggttccatcttgtg

SEQ ID NO: 3963664 - DNA, 25 bp, Homo sapien
gcagtgtcgggcacacgctgccttg

SEQ ID NO: 3963665 - DNA, 25 bp, Homo sapien
gattcttgggttccatcttgtgcct

SEQ ID NO: 3963666 - DNA, 25 bp, Homo sapien
taaatctcatggcagtgtcgggcac

SEQ ID NO: 3963667 - DNA, 25 bp, Homo sapien
tttgctagttccacacaatgaatgg

SEQ ID NO: 3963668 - DNA, 25 bp, Homo sapien
ttccacacaatgaatggtgatactg

SEQ ID NO: 3963669 - DNA, 25 bp, Homo sapien
tcacacagcgacctaggagagagcc

SEQ ID NO: 3963670 - DNA, 25 bp, Homo sapien
gaatggtgatactgactaagggcat

SEQ ID NO: 3963671 - DNA, 25 bp, Homo sapien
tgatgattcactgggagagaagctg

SEQ ID NO: 3963672 - DNA, 25 bp, Homo sapien
ctgaatgtcaaagtcccccacgctg

SEQ ID NO: 3963673 - DNA, 25 bp, Homo sapien
tgcccacacatcaagccctgaatgt

SEQ ID NO: 3963674 - DNA, 25 bp, Homo sapien
tcatatggtatgatgattcactggg

SEQ ID NO: 3963675 - DNA, 25 bp, Homo sapien
ttattcagcagcaaagcccatggtt

SEQ ID NO: 3963676 - DNA, 25 bp, Homo sapien
tattcagcagcaaagcccatggttg

SEQ ID NO: 3963677 - DNA, 25 bp, Homo sapien
attcagcagcaaagcccatggttgc

SEQ ID NO: 3963678 - DNA, 25 bp, Homo sapien
tcagcagcaaagcccatggttgctt

SEQ ID NO: 3963679 - DNA, 25 bp, Homo sapien
cactgtccagatggtcatgacttct

SEQ ID NO: 3963680 - DNA, 25 bp, Homo sapien
atggtcatgacttctgtggccctga

SEQ ID NO: 3963681 - DNA, 25 bp, Homo sapien
ctgtccagatggtcatgacttctgt

SEQ ID NO: 3963682 - DNA, 25 bp, Homo sapien
gatggtcatgacttctgtggccctg

SEQ ID NO: 3963683 - DNA, 25 bp, Homo sapien
ctgaaggacagcaaggtgccttccg

SEQ ID NO: 3963684 - DNA, 25 bp, Homo sapien
aaggacagcaaggtgccttccgacc

SEQ ID NO: 3963685 - DNA, 25 bp, Homo sapien
gaaggacagcaaggtgccttccgac

SEQ ID NO: 3963686 - DNA, 25 bp, Homo sapien
aggacagcaaggtgccttccgacct

SEQ ID NO: 3963687 - DNA, 25 bp, Homo sapien
tgccgttgtgcctaccagtcggcct

SEQ ID NO: 3963688 - DNA, 25 bp, Homo sapien
cctcagaagtcacacctgccgttgt

SEQ ID NO: 3963689 - DNA, 25 bp, Homo sapien
ccagggactcaataatttctgctcc

SEQ ID NO: 3963690 - DNA, 25 bp, Homo sapien
ccactctggtaggaggtctacacct

SEQ ID NO: 3963691 - DNA, 25 bp, Homo sapien
gtgagccatttaccatacctgccat

SEQ ID NO: 3963692 - DNA, 25 bp, Homo sapien
gaatgtgagccatttaccatacctg

SEQ ID NO: 3963693 - DNA, 25 bp, Homo sapien
tgtgagccatttaccatacctgcca

SEQ ID NO: 3963694 - DNA, 25 bp, Homo sapien
ctgaatgtgagccatttaccatacc

SEQ ID NO: 3963695 - DNA, 25 bp, Homo sapien
ccgtcaaagaatcggtgatcaattc

SEQ ID NO: 3963696 - DNA, 25 bp, Homo sapien
caaagaatcggtgatcaattccaat

SEQ ID NO: 3963697 - DNA, 25 bp, Homo sapien
taatcgggggctccgtcaaagaatc

SEQ ID NO: 3963698 - DNA, 25 bp, Homo sapien
gggctccgtcaaagaatcggtgatc

SEQ ID NO: 3963699 - DNA, 25 bp, Homo sapien
tttccttgcctcactggcggcccct

SEQ ID NO: 3963700 - DNA, 25 bp, Homo sapien
ccttgcctcactggcggcccctgca

SEQ ID NO: 3963701 - DNA, 25 bp, Homo sapien
cagctttccttgcctcactggcggc

SEQ ID NO: 3963702 - DNA, 25 bp, Homo sapien
gctttccttgcctcactggcggccc

SEQ ID NO: 3963703 - DNA, 25 bp, Homo sapien
cttttcgcatttgcctcagaagcag

SEQ ID NO: 3963704 - DNA, 25 bp, Homo sapien
ggtacatctcccttttcgcatttgc

SEQ ID NO: 3963705 - DNA, 25 bp, Homo sapien
catgggtgcttctaaccgggtacat

SEQ ID NO: 3963706 - DNA, 25 bp, Homo sapien
accgggtacatctcccttttcgcat

SEQ ID NO: 3963707 - DNA, 25 bp, Homo sapien
tgagatgagtggattcctttgtgtt

SEQ ID NO: 3963708 - DNA, 25 bp, Homo sapien
tgtgagatgagtggattcctttgtg

SEQ ID NO: 3963709 - DNA, 25 bp, Homo sapien
ctgtgagatgagtggattcctttgt

SEQ ID NO: 3963710 - DNA, 25 bp, Homo sapien
gatgagtggattcctttgtgtttcc

SEQ ID NO: 3963711 - DNA, 25 bp, Homo sapien
tcaaaagtttgtctgaaggccttgc

SEQ ID NO: 3963712 - DNA, 25 bp, Homo sapien
caaaagtttgtctgaaggccttgcc

SEQ ID NO: 3963713 - DNA, 25 bp, Homo sapien
tggtcaaaagtttgtctgaaggcct

SEQ ID NO: 3963714 - DNA, 25 bp, Homo sapien
gtcaaaagtttgtctgaaggccttg

SEQ ID NO: 3963715 - DNA, 25 bp, Homo sapien
tgtgtgggacactcaggctcagaac

SEQ ID NO: 3963716 - DNA, 25 bp, Homo sapien
ggctcagaacacttgcttggatctg

SEQ ID NO: 3963717 - DNA, 25 bp, Homo sapien
ggctgatgcaatcccaagaaactcc

SEQ ID NO: 3963718 - DNA, 25 bp, Homo sapien
caagaaactccagtcagcgttctct

SEQ ID NO: 3963719 - DNA, 25 bp, Homo sapien
tctgctggaacctgctcccaaattg

SEQ ID NO: 3963720 - DNA, 25 bp, Homo sapien
gctgacgccatcatatctgctggaa

SEQ ID NO: 3963721 - DNA, 25 bp, Homo sapien
gtttaacctggtcaaggcagatcca

SEQ ID NO: 3963722 - DNA, 25 bp, Homo sapien
cacactgaagcctatgctgacgcca

SEQ ID NO: 3963723 - DNA, 25 bp, Homo sapien
cacttcggtaggcttgggtgcaaag

SEQ ID NO: 3963724 - DNA, 25 bp, Homo sapien
ctctttggtacaaacacttcggtag

SEQ ID NO: 3963725 - DNA, 25 bp, Homo sapien
tggtacaaacacttcggtaggcttg

SEQ ID NO: 3963726 - DNA, 25 bp, Homo sapien
tgcaaaggtgaatgtcttccagata

SEQ ID NO: 3963727 - DNA, 25 bp, Homo sapien
cattcctttgtcaatgccagaagcc

SEQ ID NO: 3963728 - DNA, 25 bp, Homo sapien
gctctcgagcttcccggcgcggtgt

SEQ ID NO: 3963729 - DNA, 25 bp, Homo sapien
accacttgccgagtcttgccgctga

SEQ ID NO: 3963730 - DNA, 25 bp, Homo sapien
tttctgcctcaccacttgccgagtc

SEQ ID NO: 3963731 - DNA, 25 bp, Homo sapien
cttcagggcagacccgtcttgagcg

SEQ ID NO: 3963732 - DNA, 25 bp, Homo sapien
tcttgagcgattgtaggtgctggct

SEQ ID NO: 3963733 - DNA, 25 bp, Homo sapien
tggctacaaaccactctccaggagt

SEQ ID NO: 3963734 - DNA, 25 bp, Homo sapien
gctatgagtgagctggtccatggct

SEQ ID NO: 3963735 - DNA, 25 bp, Homo sapien
ctctcaacaagggtaggagctgttt

SEQ ID NO: 3963736 - DNA, 25 bp, Homo sapien
gagggtgactggagggcctcctcca

SEQ ID NO: 3963737 - DNA, 25 bp, Homo sapien
tgatgggttaatgggcacactctca

SEQ ID NO: 3963738 - DNA, 25 bp, Homo sapien
acacagacaggtactccttggtgcc

SEQ ID NO: 3963739 - DNA, 25 bp, Homo sapien
cctctgttgagggagacgtggtggg

SEQ ID NO: 3963740 - DNA, 25 bp, Homo sapien
acgtggtgggtctcctgctttacga

SEQ ID NO: 3963741 - DNA, 25 bp, Homo sapien
gggtctcctgctttacgagtctcaa

SEQ ID NO: 3963742 - DNA, 25 bp, Homo sapien
ttacgagtctcaatgggctgtccca

SEQ ID NO: 3963743 - DNA, 25 bp, Homo sapien
gggctgccacggatgtgtgcctcct

SEQ ID NO: 3963744 - DNA, 25 bp, Homo sapien
gctgccacggatgtgtgcctcctgg

SEQ ID NO: 3963745 - DNA, 25 bp, Homo sapien
ccacggatgtgtgcctcctggatgt

SEQ ID NO: 3963746 - DNA, 25 bp, Homo sapien
tgccacggatgtgtgcctcctggat

SEQ ID NO: 3963747 - DNA, 25 bp, Homo sapien
tggtgtaagggttccatttgaaata

SEQ ID NO: 3963748 - DNA, 25 bp, Homo sapien
ctatagctttgaggattacaaccac

SEQ ID NO: 3963749 - DNA, 25 bp, Homo sapien
gagcggtgcttgaagaataagccat

SEQ ID NO: 3963750 - DNA, 25 bp, Homo sapien
taatttcttggcctcttcacaaatt

SEQ ID NO: 3963751 - DNA, 25 bp, Homo sapien
aaagtgatgggcagccggacaaagt

SEQ ID NO: 3963752 - DNA, 25 bp, Homo sapien
ctctctaaccacatcccttgagaaa

SEQ ID NO: 3963753 - DNA, 25 bp, Homo sapien
ggcagccggacaaagttcccttcaa

SEQ ID NO: 3963754 - DNA, 25 bp, Homo sapien
tcaacctggtgtgtttcagagaatg

SEQ ID NO: 3963755 - DNA, 25 bp, Homo sapien
agtgctggatcccttctggtgatca

SEQ ID NO: 3963756 - DNA, 25 bp, Homo sapien
gccagttagagctggtgaccacttt

SEQ ID NO: 3963757 - DNA, 25 bp, Homo sapien
gcctgccagttagagctggtgacca

SEQ ID NO: 3963758 - DNA, 25 bp, Homo sapien
ggacagcctgccagttagagctggt

SEQ ID NO: 3963759 - DNA, 25 bp, Homo sapien
taaacaagttcctatgaaggtgtca

SEQ ID NO: 3963760 - DNA, 25 bp, Homo sapien
acctggacctccgatccgcaagaaa

SEQ ID NO: 3963761 - DNA, 25 bp, Homo sapien
tggacctccgatccgcaagaaattg

SEQ ID NO: 3963762 - DNA, 25 bp, Homo sapien
aggtgtcaggctgaatgtgctcctg

SEQ ID NO: 3963763 - DNA, 25 bp, Homo sapien
ccttgcctttagctccactgggctc

SEQ ID NO: 3963764 - DNA, 25 bp, Homo sapien
tccttgcctttagctccactgggct

SEQ ID NO: 3963765 - DNA, 25 bp, Homo sapien
tattgggtgcttacatatggtgaac

SEQ ID NO: 3963766 - DNA, 25 bp, Homo sapien
cacgatcagggaaagaatgcttcag

SEQ ID NO: 3963767 - DNA, 25 bp, Homo sapien
gaagactgagaagctatgacctgaa

SEQ ID NO: 3963768 - DNA, 25 bp, Homo sapien
aaattagtccctactcttagagagc

SEQ ID NO: 3963769 - DNA, 25 bp, Homo sapien
ccaagtgattggctcttttcagaca

SEQ ID NO: 3963770 - DNA, 25 bp, Homo sapien
ttctccaagtgattggctcttttca

SEQ ID NO: 3963771 - DNA, 25 bp, Homo sapien
caagtgattggctcttttcagacac

SEQ ID NO: 3963772 - DNA, 25 bp, Homo sapien
ctccaagtgattggctcttttcaga

SEQ ID NO: 3963773 - DNA, 25 bp, Homo sapien
tctttcccaaaatactggcatctgc

SEQ ID NO: 3963774 - DNA, 25 bp, Homo sapien
ctttcccaaaatactggcatctgcc

SEQ ID NO: 3963775 - DNA, 25 bp, Homo sapien
ctctttcccaaaatactggcatctg

SEQ ID NO: 3963776 - DNA, 25 bp, Homo sapien
tttcccaaaatactggcatctgcca

SEQ ID NO: 3963777 - DNA, 25 bp, Homo sapien
aggtatttaagtttctgactcaggc

SEQ ID NO: 3963778 - DNA, 25 bp, Homo sapien
ggcaggtgccgctcattggcaccac

SEQ ID NO: 3963779 - DNA, 25 bp, Homo sapien
agtttctgactcaggctagacgcag

SEQ ID NO: 3963780 - DNA, 25 bp, Homo sapien
aggtgccgctcattggcaccacctg

SEQ ID NO: 3963781 - DNA, 25 bp, Homo sapien
agcctggactctttgacaaggcatt

SEQ ID NO: 3963782 - DNA, 25 bp, Homo sapien
gcctggactctttgacaaggcattc

SEQ ID NO: 3963783 - DNA, 25 bp, Homo sapien
ggagcctggactctttgacaaggca

SEQ ID NO: 3963784 - DNA, 25 bp, Homo sapien
gagcctggactctttgacaaggcat

SEQ ID NO: 3963785 - DNA, 25 bp, Homo sapien
gaatgctgcttgtcgctaaagccat

SEQ ID NO: 3963786 - DNA, 25 bp, Homo sapien
ttaccgatggcttgtcacaaagacc

SEQ ID NO: 3963787 - DNA, 25 bp, Homo sapien
gaaggctgagaaactaagcattggg

SEQ ID NO: 3963788 - DNA, 25 bp, Homo sapien
ggcttgtcacaaagaccgtgaggaa

SEQ ID NO: 3963789 - DNA, 25 bp, Homo sapien
aggaaggctgagaaactaagcattg

SEQ ID NO: 3963790 - DNA, 25 bp, Homo sapien
gctccctgaaggaggtgaagataga

SEQ ID NO: 3963791 - DNA, 25 bp, Homo sapien
aagggaggctccctgaaggaggtga

SEQ ID NO: 3963792 - DNA, 25 bp, Homo sapien
tcagtggggccaagggaggctccct

SEQ ID NO: 3963793 - DNA, 25 bp, Homo sapien
attcagtggggccaagggaggctcc

SEQ ID NO: 3963794 - DNA, 25 bp, Homo sapien
gaagcccctgcgtggtttccagcag

SEQ ID NO: 3963795 - DNA, 25 bp, Homo sapien
tctgattcctgtgacctggacgcac

SEQ ID NO: 3963796 - DNA, 25 bp, Homo sapien
gagctgctgatggattctgcccgac

SEQ ID NO: 3963797 - DNA, 25 bp, Homo sapien
ggaaagccctcatccgggatctggc

SEQ ID NO: 3963798 - DNA, 25 bp, Homo sapien
gacggtgggtttaactctctgagca

SEQ ID NO: 3963799 - DNA, 25 bp, Homo sapien
ccatcattggccctggacggtgggt

SEQ ID NO: 3963800 - DNA, 25 bp, Homo sapien
ggtgctccggattctgactcattcg

SEQ ID NO: 3963801 - DNA, 25 bp, Homo sapien
ggtggtcacagacgcgtccacggta

SEQ ID NO: 3963802 - DNA, 25 bp, Homo sapien
ctggagttgcccatggttgtctaat

SEQ ID NO: 3963803 - DNA, 25 bp, Homo sapien
tagcaagttggtgatgcctttttaa

SEQ ID NO: 3963804 - DNA, 25 bp, Homo sapien
ctctttgttaaacttggtgtagcaa

SEQ ID NO: 3963805 - DNA, 25 bp, Homo sapien
catggttgtctaatctctttgttaa

SEQ ID NO: 3963806 - DNA, 25 bp, Homo sapien
ggatgtcaccaactaaatcgccaac

SEQ ID NO: 3963807 - DNA, 25 bp, Homo sapien
taaagagatggatgtcaccaactaa

SEQ ID NO: 3963808 - DNA, 25 bp, Homo sapien
ttgtaaggcatgttgtggaagccat

SEQ ID NO: 3963809 - DNA, 25 bp, Homo sapien
cacaggcctggaattcaccaaccat

SEQ ID NO: 3963810 - DNA, 25 bp, Homo sapien
tcctgctcagaggccgcgggaagct

SEQ ID NO: 3963811 - DNA, 25 bp, Homo sapien
caaggatccaactctgcccgggttc

SEQ ID NO: 3963812 - DNA, 25 bp, Homo sapien
tgcgcataggacttgggagaccaca

SEQ ID NO: 3963813 - DNA, 25 bp, Homo sapien
tcttttgcacccgactgctcctgct

SEQ ID NO: 3963814 - DNA, 25 bp, Homo sapien
cctgcggcgctggaacttttcttag

SEQ ID NO: 3963815 - DNA, 25 bp, Homo sapien
actccctgtctttggaaacccacag

SEQ ID NO: 3963816 - DNA, 25 bp, Homo sapien
tcttaggaatacccgctactccctg

SEQ ID NO: 3963817 - DNA, 25 bp, Homo sapien
gggcctgcggcgctggaacttttct

SEQ ID NO: 3963818 - DNA, 25 bp, Homo sapien
tcgctggcttggttctttggcccag

SEQ ID NO: 3963819 - DNA, 25 bp, Homo sapien
ggcttggttctttggcccagcctcc

SEQ ID NO: 3963820 - DNA, 25 bp, Homo sapien
cggacgttgtcgctggcttggttct

SEQ ID NO: 3963821 - DNA, 25 bp, Homo sapien
tctgggccggacgttgtcgctggct

SEQ ID NO: 3963822 - DNA, 25 bp, Homo sapien
tcggcggctgaagacctccggctgc

SEQ ID NO: 3963823 - DNA, 25 bp, Homo sapien
gctccggccgatggttccagaggaa

SEQ ID NO: 3963824 - DNA, 25 bp, Homo sapien
gctcctgccaagcttggcggcgcga

SEQ ID NO: 3963825 - DNA, 25 bp, Homo sapien
agaggaagccgtccccttgctaagg

SEQ ID NO: 3963826 - DNA, 25 bp, Homo sapien
gtctggcctactccggcattccgaa

SEQ ID NO: 3963827 - DNA, 25 bp, Homo sapien
tcctggacaaggatgtaccgagagg

SEQ ID NO: 3963828 - DNA, 25 bp, Homo sapien
caaacggctccctgagcggagttgg

SEQ ID NO: 3963829 - DNA, 25 bp, Homo sapien
cacggaagtcgctcagcagaaaact

SEQ ID NO: 3963830 - DNA, 25 bp, Homo sapien
cgggtgtctgtacaagcagccttgg

SEQ ID NO: 3963831 - DNA, 25 bp, Homo sapien
tctctggctccatggttcagatcag

SEQ ID NO: 3963832 - DNA, 25 bp, Homo sapien
cagatcagaacctggcgttgggtag

SEQ ID NO: 3963833 - DNA, 25 bp, Homo sapien
gggaactgatttgataggaactcac

SEQ ID NO: 3963834 - DNA, 25 bp, Homo sapien
ggtccgcagaaggtagtacataagc

SEQ ID NO: 3963835 - DNA, 25 bp, Homo sapien
tatttctcttcatgaccggtgtttg

SEQ ID NO: 3963836 - DNA, 25 bp, Homo sapien
tccaggattgggtatctaataagag

SEQ ID NO: 3963837 - DNA, 25 bp, Homo sapien
tttctaatgatgcacagcgcgggca

SEQ ID NO: 3963838 - DNA, 25 bp, Homo sapien
gcaggggttgtgaatcccaacttca

SEQ ID NO: 3963839 - DNA, 25 bp, Homo sapien
cagggctgggtgattgaagacttcc

SEQ ID NO: 3963840 - DNA, 25 bp, Homo sapien
gaagacttccaagtcccttccaaga

SEQ ID NO: 3963841 - DNA, 25 bp, Homo sapien
cagggttgattctctgacagcaggg

SEQ ID NO: 3963842 - DNA, 25 bp, Homo sapien
gcatctgccctcacattggtcttca

SEQ ID NO: 3963843 - DNA, 25 bp, Homo sapien
ttccagcagcgcactcgaagtggca

SEQ ID NO: 3963844 - DNA, 25 bp, Homo sapien
tctgcttggaatacttgccaggtag

SEQ ID NO: 3963845 - DNA, 25 bp, Homo sapien
caggtagttctcaattaatgggccc

SEQ ID NO: 3963846 - DNA, 25 bp, Homo sapien
tggcctcttggctggtttgagacac

SEQ ID NO: 3963847 - DNA, 25 bp, Homo sapien
ctgttgatttcccgctttctgcctt

SEQ ID NO: 3963848 - DNA, 25 bp, Homo sapien
cctcttggctggtttgagacacttc

SEQ ID NO: 3963849 - DNA, 25 bp, Homo sapien
gttgatttcccgctttctgccttct

SEQ ID NO: 3963850 - DNA, 25 bp, Homo sapien
tagtgggtcactaggcagttctggt

SEQ ID NO: 3963851 - DNA, 25 bp, Homo sapien
tagaatgtgagtgcctagtgggtca

SEQ ID NO: 3963852 - DNA, 25 bp, Homo sapien
tgggagatatagaatgtgagtgcct

SEQ ID NO: 3963853 - DNA, 25 bp, Homo sapien
ggaggattctgcagtaagtttgaag

SEQ ID NO: 3963854 - DNA, 25 bp, Homo sapien
gcagcatgtgccgtagggtagtaca

SEQ ID NO: 3963855 - DNA, 25 bp, Homo sapien
catagctcagtaatactgaactcac

SEQ ID NO: 3963856 - DNA, 25 bp, Homo sapien
gcgagttctgttcttctcatccgtg

SEQ ID NO: 3963857 - DNA, 25 bp, Homo sapien
caatcaccatcaagtgcgagttctg

SEQ ID NO: 3963858 - DNA, 25 bp, Homo sapien
catagagttgtaggcttgagttccc

SEQ ID NO: 3963859 - DNA, 25 bp, Homo sapien
tcaccctgtgtaccaagagtggaac

SEQ ID NO: 3963860 - DNA, 25 bp, Homo sapien
catagacactagagggagtgttgcc

SEQ ID NO: 3963861 - DNA, 25 bp, Homo sapien
gtggaacctgagagccctacataga

SEQ ID NO: 3963862 - DNA, 25 bp, Homo sapien
gaaaagtagactgtaagtgaattgt

SEQ ID NO: 3963863 - DNA, 25 bp, Homo sapien
ggttgtatgatgatccatagatgaa

SEQ ID NO: 3963864 - DNA, 25 bp, Homo sapien
tgtgtaggggttgtatgatgatcca

SEQ ID NO: 3963865 - DNA, 25 bp, Homo sapien
caatcctggggggggctgatcattc

SEQ ID NO: 3963866 - DNA, 25 bp, Homo sapien
cgtgtgcttgggctcagtattcaaa

SEQ ID NO: 3963867 - DNA, 25 bp, Homo sapien
tgaagatttgcagcgctcaaggatc

SEQ ID NO: 3963868 - DNA, 25 bp, Homo sapien
gaaggaactccttctcagagacatt

SEQ ID NO: 3963869 - DNA, 25 bp, Homo sapien
aaggatcttggcatctatctcccca

SEQ ID NO: 3963870 - DNA, 25 bp, Homo sapien
tgcccacaccgacttctggaagaca

SEQ ID NO: 3963871 - DNA, 25 bp, Homo sapien
ggagagtggcctgggaatagagcct

SEQ ID NO: 3963872 - DNA, 25 bp, Homo sapien
ggaggacattcctggtcaaggagac

SEQ ID NO: 3963873 - DNA, 25 bp, Homo sapien
gtggatggtttggtgctgcccacac

SEQ ID NO: 3963874 - DNA, 25 bp, Homo sapien
caagcattgcccgtcatgatcaagt

SEQ ID NO: 3963875 - DNA, 25 bp, Homo sapien
gcttgcttttagagggcccagagat

SEQ ID NO: 3963876 - DNA, 25 bp, Homo sapien
tcagacgcacatggcaatctaaggc

SEQ ID NO: 3963877 - DNA, 25 bp, Homo sapien
tagacactgtctgcttgggttttcc

SEQ ID NO: 3963878 - DNA, 25 bp, Homo sapien
cctgttgttctgtaagatatcccta

SEQ ID NO: 3963879 - DNA, 25 bp, Homo sapien
tcctgttgttctgtaagatatccct

SEQ ID NO: 3963880 - DNA, 25 bp, Homo sapien
gttgttctgtaagatatccctatat

SEQ ID NO: 3963881 - DNA, 25 bp, Homo sapien
tgttgttctgtaagatatccctata

SEQ ID NO: 3963882 - DNA, 25 bp, Homo sapien
aaagtgtggataaatcaagatcatc

SEQ ID NO: 3963883 - DNA, 25 bp, Homo sapien
agaaagtgtggataaatcaagatca

SEQ ID NO: 3963884 - DNA, 25 bp, Homo sapien
ccccagtagccagttgtttctcagt

SEQ ID NO: 3963885 - DNA, 25 bp, Homo sapien
cagtagccagttgtttctcagtgtg

SEQ ID NO: 3963886 - DNA, 25 bp, Homo sapien
cagccttcagaaggagcaggaggcc

SEQ ID NO: 3963887 - DNA, 25 bp, Homo sapien
agaccaccagccttcagaaggagca

SEQ ID NO: 3963888 - DNA, 25 bp, Homo sapien
agccttcagaaggagcaggaggcca

SEQ ID NO: 3963889 - DNA, 25 bp, Homo sapien
ctcccagaccaccagccttcagaag

SEQ ID NO: 3963890 - DNA, 25 bp, Homo sapien
tttctggagaggcggttgctttttc

SEQ ID NO: 3963891 - DNA, 25 bp, Homo sapien
ggagaggcggttgctttttccagcc

SEQ ID NO: 3963892 - DNA, 25 bp, Homo sapien
ttctggagaggcggttgctttttcc

SEQ ID NO: 3963893 - DNA, 25 bp, Homo sapien
ttactggcagtgagatcctgcagcc

SEQ ID NO: 3963894 - DNA, 25 bp, Homo sapien
cctgacccttttgtctgtgccttac

SEQ ID NO: 3963895 - DNA, 25 bp, Homo sapien
tgctgacattccttcgactttggga

SEQ ID NO: 3963896 - DNA, 25 bp, Homo sapien
gaactgagataggataagtttttgc

SEQ ID NO: 3963897 - DNA, 25 bp, Homo sapien
ggaacctgcccaacgtggccagtta

SEQ ID NO: 3963898 - DNA, 25 bp, Homo sapien
tattggcagcaagtccttgagtcct

SEQ ID NO: 3963899 - DNA, 25 bp, Homo sapien
gttccatacccacagactctattcc

SEQ ID NO: 3963900 - DNA, 25 bp, Homo sapien
gagtcctcactgacaaggagatgcc

SEQ ID NO: 3963901 - DNA, 25 bp, Homo sapien
tggaccaccaaatgtcttgcagact

SEQ ID NO: 3963902 - DNA, 25 bp, Homo sapien
cccagatttcctagttgtcattgct

SEQ ID NO: 3963903 - DNA, 25 bp, Homo sapien
gattcctgggacgttttgcaaataa

SEQ ID NO: 3963904 - DNA, 25 bp, Homo sapien
aatactttggactttagctgtgggt

SEQ ID NO: 3963905 - DNA, 25 bp, Homo sapien
gtttgcagagctcttgatgggggag

SEQ ID NO: 3963906 - DNA, 25 bp, Homo sapien
tttgcagagctcttgatgggggagg

SEQ ID NO: 3963907 - DNA, 25 bp, Homo sapien
ccatcttgcaaatttgcagctgagt

SEQ ID NO: 3963908 - DNA, 25 bp, Homo sapien
aattagataattggtgccccggatc

SEQ ID NO: 3963909 - DNA, 25 bp, Homo sapien
gctgagtaaatatacggaacattag

SEQ ID NO: 3963910 - DNA, 25 bp, Homo sapien
tatacggaacattagcagcaattag

SEQ ID NO: 3963911 - DNA, 25 bp, Homo sapien
caatttcccagcaccaagttgtggc

SEQ ID NO: 3963912 - DNA, 25 bp, Homo sapien
aatttcccagcaccaagttgtggcc

SEQ ID NO: 3963913 - DNA, 25 bp, Homo sapien
gcaatttcccagcaccaagttgtgg

SEQ ID NO: 3963914 - DNA, 25 bp, Homo sapien
cctgccttgggcaatttcccagcac

SEQ ID NO: 3963915 - DNA, 25 bp, Homo sapien
tcaggtcagtggagacagatctccc

SEQ ID NO: 3963916 - DNA, 25 bp, Homo sapien
ccctgaagttgagtctcaggtcagt

SEQ ID NO: 3963917 - DNA, 25 bp, Homo sapien
cacttagtgagttagatgtcagctg

SEQ ID NO: 3963918 - DNA, 25 bp, Homo sapien
taagatctggttgtctgcggaatgt

SEQ ID NO: 3963919 - DNA, 25 bp, Homo sapien
taattcgagaatggagctatgtctt

SEQ ID NO: 3963920 - DNA, 25 bp, Homo sapien
tcatgcttcagtgtctagcgtgtgt

SEQ ID NO: 3963921 - DNA, 25 bp, Homo sapien
tacttccgtattccttgactctgaa

SEQ ID NO: 3963922 - DNA, 25 bp, Homo sapien
ctttggttaatggttgcaggggtat

SEQ ID NO: 3963923 - DNA, 25 bp, Homo sapien
tgctcttgcacgcgtgcatgctgct

SEQ ID NO: 3963924 - DNA, 25 bp, Homo sapien
ctctgctcttgcacgcgtgcatgct

SEQ ID NO: 3963925 - DNA, 25 bp, Homo sapien
tctgctcttgcacgcgtgcatgctg

SEQ ID NO: 3963926 - DNA, 25 bp, Homo sapien
cctctgctcttgcacgcgtgcatgc

SEQ ID NO: 3963927 - DNA, 25 bp, Homo sapien
ccggagatgcgtcctcagctgttca

SEQ ID NO: 3963928 - DNA, 25 bp, Homo sapien
caaatgcagccggagatgcgtcctc

SEQ ID NO: 3963929 - DNA, 25 bp, Homo sapien
tttcatgtttatttcgggctggagc

SEQ ID NO: 3963930 - DNA, 25 bp, Homo sapien
tcatgtttatttcgggctggagcca

SEQ ID NO: 3963931 - DNA, 25 bp, Homo sapien
ggcgaaagcttcaagatcagcagtg

SEQ ID NO: 3963932 - DNA, 25 bp, Homo sapien
cttggctcccttcctggcgaaagct

SEQ ID NO: 3963933 - DNA, 25 bp, Homo sapien
aaattaatgaaagcggctgctgagc

SEQ ID NO: 3963934 - DNA, 25 bp, Homo sapien
tgggatacggttatgacctgtagca

SEQ ID NO: 3963935 - DNA, 25 bp, Homo sapien
ttgcagtatctgtagctgctttggg

SEQ ID NO: 3963936 - DNA, 25 bp, Homo sapien
tttatagttggcatatcgtctttag

SEQ ID NO: 3963937 - DNA, 25 bp, Homo sapien
acagatctttatgggttccgtgttc

SEQ ID NO: 3963938 - DNA, 25 bp, Homo sapien
gcagaagaatggacgcacgggcttt

SEQ ID NO: 3963939 - DNA, 25 bp, Homo sapien
cagagatgaatgtttcaaggttttc

SEQ ID NO: 3963940 - DNA, 25 bp, Homo sapien
gcagagatgaatgtttcaaggtttt

SEQ ID NO: 3963941 - DNA, 25 bp, Homo sapien
ctgcccagcacaggtatcatcactt

SEQ ID NO: 3963942 - DNA, 25 bp, Homo sapien
cagcacaggtatcatcacttttgtc

SEQ ID NO: 3963943 - DNA, 25 bp, Homo sapien
tcagggccatgctgatctggactgt

SEQ ID NO: 3963944 - DNA, 25 bp, Homo sapien
aggtatcatcacttttgtctctgct

SEQ ID NO: 3963945 - DNA, 25 bp, Homo sapien
ccatccagcagacctctggacacta

SEQ ID NO: 3963946 - DNA, 25 bp, Homo sapien
ggcctggggcctcaagaggtattaa

SEQ ID NO: 3963947 - DNA, 25 bp, Homo sapien
tgggccccatccagcagacctctgg

SEQ ID NO: 3963948 - DNA, 25 bp, Homo sapien
tggggcctcaagaggtattaacatc

SEQ ID NO: 3963949 - DNA, 25 bp, Homo sapien
gaccagatggataatcttgggggta

SEQ ID NO: 3963950 - DNA, 25 bp, Homo sapien
cttctgctagggttcctggaccaga

SEQ ID NO: 3963951 - DNA, 25 bp, Homo sapien
tctgctagggttcctggaccagatg

SEQ ID NO: 3963952 - DNA, 25 bp, Homo sapien
tgctagggttcctggaccagatgga

SEQ ID NO: 3963953 - DNA, 25 bp, Homo sapien
tgggaatctatcagctggggtttga

SEQ ID NO: 3963954 - DNA, 25 bp, Homo sapien
taaacagagtttgtaggcagggtaa

SEQ ID NO: 3963955 - DNA, 25 bp, Homo sapien
gagtggagaaagcatcccaagagtg

SEQ ID NO: 3963956 - DNA, 25 bp, Homo sapien
tgaaaggtggagctgggaatctatc

SEQ ID NO: 3963957 - DNA, 25 bp, Homo sapien
ctgccttgatgctgatagtggctgt

SEQ ID NO: 3963958 - DNA, 25 bp, Homo sapien
ctgactgttggaggatgctgtcctc

SEQ ID NO: 3963959 - DNA, 25 bp, Homo sapien
aagaaaaggccctccatactgctga

SEQ ID NO: 3963960 - DNA, 25 bp, Homo sapien
ccttcacagtggccagttgagcatt

SEQ ID NO: 3963961 - DNA, 25 bp, Homo sapien
cagttgagcattcacattgactttc

SEQ ID NO: 3963962 - DNA, 25 bp, Homo sapien
tatgggccatgttggagacaggatt

SEQ ID NO: 3963963 - DNA, 25 bp, Homo sapien
acggtacctctgaatgtgctgtgtg

SEQ ID NO: 3963964 - DNA, 25 bp, Homo sapien
taattctccattgtaacttgaattg

SEQ ID NO: 3963965 - DNA, 25 bp, Homo sapien
tgctgtgtgtggtggagtataattc

SEQ ID NO: 3963966 - DNA, 25 bp, Homo sapien
gacccaggtgtaagattcagcatct

SEQ ID NO: 3963967 - DNA, 25 bp, Homo sapien
tctgaggagatatccggaggaccac

SEQ ID NO: 3963968 - DNA, 25 bp, Homo sapien
gaagaagctggcaagcattacctgc

SEQ ID NO: 3963969 - DNA, 25 bp, Homo sapien
ggaccacagtgaacattcctactcc

SEQ ID NO: 3963970 - DNA, 25 bp, Homo sapien
gtgccaatgcactcaaaggataagg

SEQ ID NO: 3963971 - DNA, 25 bp, Homo sapien
tatgccgtgaaggtaaaatatccta

SEQ ID NO: 3963972 - DNA, 25 bp, Homo sapien
cctacttctcagatagagggtgcaa

SEQ ID NO: 3963973 - DNA, 25 bp, Homo sapien
tagtccaggaccacaacagggattt

SEQ ID NO: 3963974 - DNA, 25 bp, Homo sapien
gttgaccccttcaagcaacctgcat

SEQ ID NO: 3963975 - DNA, 25 bp, Homo sapien
gccactggtgctggttgaccccttc

SEQ ID NO: 3963976 - DNA, 25 bp, Homo sapien
ggtgctggttgaccccttcaagcaa

SEQ ID NO: 3963977 - DNA, 25 bp, Homo sapien
tggttgaccccttcaagcaacctgc

SEQ ID NO: 3963978 - DNA, 25 bp, Homo sapien
tctgtctgtggccatgactcccaat

SEQ ID NO: 3963979 - DNA, 25 bp, Homo sapien
gtctgtggccatgactcccaattac

SEQ ID NO: 3963980 - DNA, 25 bp, Homo sapien
ttaattgttgagatgacatggcagc

SEQ ID NO: 3963981 - DNA, 25 bp, Homo sapien
ggaaatggctttcgcgggtgattaa

SEQ ID NO: 3963982 - DNA, 25 bp, Homo sapien
caagaaagatagatttgaccaggag

SEQ ID NO: 3963983 - DNA, 25 bp, Homo sapien
aagaaagatagatttgaccaggagt

SEQ ID NO: 3963984 - DNA, 25 bp, Homo sapien
agaaagatagatttgaccaggagtt

SEQ ID NO: 3963985 - DNA, 25 bp, Homo sapien
gaaagatagatttgaccaggagttc

SEQ ID NO: 3963986 - DNA, 25 bp, Homo sapien
ctcccggtgactatgaggatggcag

SEQ ID NO: 3963987 - DNA, 25 bp, Homo sapien
tcccggtgactatgaggatggcagg

SEQ ID NO: 3963988 - DNA, 25 bp, Homo sapien
cccggtgactatgaggatggcaggt

SEQ ID NO: 3963989 - DNA, 25 bp, Homo sapien
gcaccattataggaggaacctgttt

SEQ ID NO: 3963990 - DNA, 25 bp, Homo sapien
ccttcctggaatcaagtggtttagc

SEQ ID NO: 3963991 - DNA, 25 bp, Homo sapien
tagcttgtagattgggccttatttc

SEQ ID NO: 3963992 - DNA, 25 bp, Homo sapien
ctgttttcctagcttgtagattggg

SEQ ID NO: 3963993 - DNA, 25 bp, Homo sapien
tcagttgtgatctgtttcgccaaag

SEQ ID NO: 3963994 - DNA, 25 bp, Homo sapien
tgtgatctgtttcgccaaaggagga

SEQ ID NO: 3963995 - DNA, 25 bp, Homo sapien
cagttgtgatctgtttcgccaaagg

SEQ ID NO: 3963996 - DNA, 25 bp, Homo sapien
gttgtgatctgtttcgccaaaggag

SEQ ID NO: 3963997 - DNA, 25 bp, Homo sapien
tatagactctacttggagccacttc

SEQ ID NO: 3963998 - DNA, 25 bp, Homo sapien
ttctgctttcaacatagcctgtcga

SEQ ID NO: 3963999 - DNA, 25 bp, Homo sapien
tgagaagcccatcaatgtggcctgg

SEQ ID NO: 3964000 - DNA, 25 bp, Homo sapien
tctcaaattgagaagcccatcaatg

SEQ ID NO: 3964001 - DNA, 25 bp, Homo sapien
tcaaggtccaggcttctaaatgcct

SEQ ID NO: 3964002 - DNA, 25 bp, Homo sapien
tccttctgtaatgcccagccttggg

SEQ ID NO: 3964003 - DNA, 25 bp, Homo sapien
ccttgggcatctgataggtgccttg

SEQ ID NO: 3964004 - DNA, 25 bp, Homo sapien
tgagtcagaaagcactctcctgggc

SEQ ID NO: 3964005 - DNA, 25 bp, Homo sapien
tcttacagtgtcattgtagtacaca

SEQ ID NO: 3964006 - DNA, 25 bp, Homo sapien
tgaatttacagatacgtaaactctt

SEQ ID NO: 3964007 - DNA, 25 bp, Homo sapien
tacgtaaactcttacagtgtcattg

SEQ ID NO: 3964008 - DNA, 25 bp, Homo sapien
tacagatacgtaaactcttacagtg

SEQ ID NO: 3964009 - DNA, 25 bp, Homo sapien
tttcacttccttctacttgttccat

SEQ ID NO: 3964010 - DNA, 25 bp, Homo sapien
ggctagtggctgcttccagtctgga

SEQ ID NO: 3964011 - DNA, 25 bp, Homo sapien
tttagctcctgagacccaagaggga

SEQ ID NO: 3964012 - DNA, 25 bp, Homo sapien
tttgccctcatccgaagcagctgag

SEQ ID NO: 3964013 - DNA, 25 bp, Homo sapien
ggagctcttttagctcctgagaccc

SEQ ID NO: 3964014 - DNA, 25 bp, Homo sapien
cagttggtgtccagacattctcgta

SEQ ID NO: 3964015 - DNA, 25 bp, Homo sapien
tgtttgtcttattctggacacccag

SEQ ID NO: 3964016 - DNA, 25 bp, Homo sapien
tgggttctggactctagatgtttaa

SEQ ID NO: 3964017 - DNA, 25 bp, Homo sapien
cagacattctcgtactgtgggtcag

SEQ ID NO: 3964018 - DNA, 25 bp, Homo sapien
tttccatgtggccttgcaagctcca

SEQ ID NO: 3964019 - DNA, 25 bp, Homo sapien
ctgagttgttcgggcacatgcagga

SEQ ID NO: 3964020 - DNA, 25 bp, Homo sapien
tgtgcgtcaaggctgggtcttgagt

SEQ ID NO: 3964021 - DNA, 25 bp, Homo sapien
ttctttccatgtggccttgcaagct

SEQ ID NO: 3964022 - DNA, 25 bp, Homo sapien
tcaggttttgctgtagatccggaac

SEQ ID NO: 3964023 - DNA, 25 bp, Homo sapien
gtcaggttttgctgtagatccggaa

SEQ ID NO: 3964024 - DNA, 25 bp, Homo sapien
ggttttgctgtagatccggaactac

SEQ ID NO: 3964025 - DNA, 25 bp, Homo sapien
caggttttgctgtagatccggaact

SEQ ID NO: 3964026 - DNA, 25 bp, Homo sapien
tggtccgagtacttgcctaacagcc

SEQ ID NO: 3964027 - DNA, 25 bp, Homo sapien
tctactttcaatgttcttccctgga

SEQ ID NO: 3964028 - DNA, 25 bp, Homo sapien
actcctccccagtggcgtttggaag

SEQ ID NO: 3964029 - DNA, 25 bp, Homo sapien
ggtttccggagccacactctcatct

SEQ ID NO: 3964030 - DNA, 25 bp, Homo sapien
ctctggatcaaaagcaagcctatca

SEQ ID NO: 3964031 - DNA, 25 bp, Homo sapien
agcaagcctatcatctgatctctgg

SEQ ID NO: 3964032 - DNA, 25 bp, Homo sapien
ccttggtggtgaacaaagccagctg

SEQ ID NO: 3964033 - DNA, 25 bp, Homo sapien
cttggtggtgaacaaagccagctgg

SEQ ID NO: 3964034 - DNA, 25 bp, Homo sapien
acagcgggtcttatcagtcactggg

SEQ ID NO: 3964035 - DNA, 25 bp, Homo sapien
tcacactggtcgacagcgggtctta

SEQ ID NO: 3964036 - DNA, 25 bp, Homo sapien
actgggacttggtgcttcaccctct

SEQ ID NO: 3964037 - DNA, 25 bp, Homo sapien
ctaggtccatgagacttgaggtgtt

SEQ ID NO: 3964038 - DNA, 25 bp, Homo sapien
tgtgtcaatactgggcaggaagctg

SEQ ID NO: 3964039 - DNA, 25 bp, Homo sapien
tgtttgcagagaactaggcagcttc

SEQ ID NO: 3964040 - DNA, 25 bp, Homo sapien
gtttgtttgcagagaactaggcagc

SEQ ID NO: 3964041 - DNA, 25 bp, Homo sapien
ggctgcatcatcatccctactaagt

SEQ ID NO: 3964042 - DNA, 25 bp, Homo sapien
cagggcaaagtccaggtgaggctgg

SEQ ID NO: 3964043 - DNA, 25 bp, Homo sapien
agggcaaagtccaggtgaggctggt

SEQ ID NO: 3964044 - DNA, 25 bp, Homo sapien
cacagggcaaagtccaggtgaggct

SEQ ID NO: 3964045 - DNA, 25 bp, Homo sapien
acagggcaaagtccaggtgaggctg

SEQ ID NO: 3964046 - DNA, 25 bp, Homo sapien
cttttgaacatatgtcctggtgagg

SEQ ID NO: 3964047 - DNA, 25 bp, Homo sapien
ccaattaatccactgctcgaggtta

SEQ ID NO: 3964048 - DNA, 25 bp, Homo sapien
gattggcagatcgtttcttggactc

SEQ ID NO: 3964049 - DNA, 25 bp, Homo sapien
tggaaactctgatagtgccaattaa

SEQ ID NO: 3964050 - DNA, 25 bp, Homo sapien
ccagattgcctatcagggttgtcaa

SEQ ID NO: 3964051 - DNA, 25 bp, Homo sapien
cagttgccagattgcctatcagggt

SEQ ID NO: 3964052 - DNA, 25 bp, Homo sapien
tattttgaagcagttgccagattgc

SEQ ID NO: 3964053 - DNA, 25 bp, Homo sapien
cctatcagggttgtcaaaagggaca

SEQ ID NO: 3964054 - DNA, 25 bp, Homo sapien
ctggttaacaaagcttgtccatagg

SEQ ID NO: 3964055 - DNA, 25 bp, Homo sapien
atatcagccagtggagtgctggtcc

SEQ ID NO: 3964056 - DNA, 25 bp, Homo sapien
cttttcatcagagacatgcttggac

SEQ ID NO: 3964057 - DNA, 25 bp, Homo sapien
catggcctcttggtgtgctgtgatg

SEQ ID NO: 3964058 - DNA, 25 bp, Homo sapien
tgatgagtcttcatgggaaggaggc

SEQ ID NO: 3964059 - DNA, 25 bp, Homo sapien
actctgtccttggtgatgagtcttc

SEQ ID NO: 3964060 - DNA, 25 bp, Homo sapien
atgagtcttcatgggaaggaggcat

SEQ ID NO: 3964061 - DNA, 25 bp, Homo sapien
agtactctgtccttggtgatgagtc

SEQ ID NO: 3964062 - DNA, 25 bp, Homo sapien
gctcctcttggaatgtgtacagttg

SEQ ID NO: 3964063 - DNA, 25 bp, Homo sapien
tccacttagaccaaagtgctcctct

SEQ ID NO: 3964064 - DNA, 25 bp, Homo sapien
cagatcatccttgctggaaatccat

SEQ ID NO: 3964065 - DNA, 25 bp, Homo sapien
tcattcctaaatgggcttgacagct

SEQ ID NO: 3964066 - DNA, 25 bp, Homo sapien
ttagctttgagctgactaccttcag

SEQ ID NO: 3964067 - DNA, 25 bp, Homo sapien
tagctttgagctgactaccttcaga

SEQ ID NO: 3964068 - DNA, 25 bp, Homo sapien
gctttgagctgactaccttcagaag

SEQ ID NO: 3964069 - DNA, 25 bp, Homo sapien
ttgagctgactaccttcagaagaag

SEQ ID NO: 3964070 - DNA, 25 bp, Homo sapien
ccacttgtccccctttatgccttga

SEQ ID NO: 3964071 - DNA, 25 bp, Homo sapien
acttgtccccctttatgccttgact

SEQ ID NO: 3964072 - DNA, 25 bp, Homo sapien
ttgtccccctttatgccttgactga

SEQ ID NO: 3964073 - DNA, 25 bp, Homo sapien
tgtccccctttatgccttgactgac

SEQ ID NO: 3964074 - DNA, 25 bp, Homo sapien
gatgccttgccgtatctgctctgca

SEQ ID NO: 3964075 - DNA, 25 bp, Homo sapien
cagtcccctggtgcgagacctttaa

SEQ ID NO: 3964076 - DNA, 25 bp, Homo sapien
gctcgtttccttccaaatgcccaag

SEQ ID NO: 3964077 - DNA, 25 bp, Homo sapien
tttctatgaattagggctcgtttcc

SEQ ID NO: 3964078 - DNA, 25 bp, Homo sapien
tcctgatgattgttaactggctgag

SEQ ID NO: 3964079 - DNA, 25 bp, Homo sapien
ctgtttctgactgggactctggctc

SEQ ID NO: 3964080 - DNA, 25 bp, Homo sapien
ccatctctggaaaagtgctgaattc

SEQ ID NO: 3964081 - DNA, 25 bp, Homo sapien
cagttgagcactccctttacccagg

SEQ ID NO: 3964082 - DNA, 25 bp, Homo sapien
tggtcccagaaagccgatacgatgc

SEQ ID NO: 3964083 - DNA, 25 bp, Homo sapien
ccgatacgatgctctctgagagtga

SEQ ID NO: 3964084 - DNA, 25 bp, Homo sapien
gaaagccgatacgatgctctctgag

SEQ ID NO: 3964085 - DNA, 25 bp, Homo sapien
aaaaagatgtggtcccagaaagccg

SEQ ID NO: 3964086 - DNA, 25 bp, Homo sapien
agaacatcagatggccccgtgagag

SEQ ID NO: 3964087 - DNA, 25 bp, Homo sapien
tgagaacatcagatggccccgtgag

SEQ ID NO: 3964088 - DNA, 25 bp, Homo sapien
ccccgtgagagctggcagagtgtct

SEQ ID NO: 3964089 - DNA, 25 bp, Homo sapien
gattgagaacatcagatggccccgt

SEQ ID NO: 3964090 - DNA, 25 bp, Homo sapien
ggcgcggccctggacctgccgcacc

SEQ ID NO: 3964091 - DNA, 25 bp, Homo sapien
ggtgcggcaggtccagggccgcgcc

SEQ ID NO: 3964092 - DNA, 25 bp, Homo sapien
gttcctcccacaatgtaccagtccg

SEQ ID NO: 3964093 - DNA, 25 bp, Homo sapien
ccgcactaagtccttcggaatgcct

SEQ ID NO: 3964094 - DNA, 25 bp, Homo sapien
cactcctgactgaaattgtcagtgg

SEQ ID NO: 3964095 - DNA, 25 bp, Homo sapien
gccctgtgggaatgaccaagtgtat

SEQ ID NO: 3964096 - DNA, 25 bp, Homo sapien
gcaggacctgccagatgatgagcag

SEQ ID NO: 3964097 - DNA, 25 bp, Homo sapien
gtagctggcaggacctgccagatga

SEQ ID NO: 3964098 - DNA, 25 bp, Homo sapien
ctggagagtagcgtgagtgacaggt

SEQ ID NO: 3964099 - DNA, 25 bp, Homo sapien
tagcgtgagtgacaggtagctggca

SEQ ID NO: 3964100 - DNA, 25 bp, Homo sapien
gcagtgtgcagtggccatcctggaa

SEQ ID NO: 3964101 - DNA, 25 bp, Homo sapien
tcttcatcaaataggacttgttcct

SEQ ID NO: 3964102 - DNA, 25 bp, Homo sapien
agagtcgagggcactgttggttcca

SEQ ID NO: 3964103 - DNA, 25 bp, Homo sapien
catcctggaaaggacagagtcgagg

SEQ ID NO: 3964104 - DNA, 25 bp, Homo sapien
gagacatagagggtgtcctttgttg

SEQ ID NO: 3964105 - DNA, 25 bp, Homo sapien
gagactgagacatagagggtgtcct

SEQ ID NO: 3964106 - DNA, 25 bp, Homo sapien
gactgagacatagagggtgtccttt

SEQ ID NO: 3964107 - DNA, 25 bp, Homo sapien
acatagagggtgtcctttgttgggc

SEQ ID NO: 3964108 - DNA, 25 bp, Homo sapien
aggatggaaagaaaggagcctctac

SEQ ID NO: 3964109 - DNA, 25 bp, Homo sapien
ctcctccaccatggaaggcaggatg

SEQ ID NO: 3964110 - DNA, 25 bp, Homo sapien
ctccctcctccaccatggaaggcag

SEQ ID NO: 3964111 - DNA, 25 bp, Homo sapien
cctcctccaccatggaaggcaggat

SEQ ID NO: 3964112 - DNA, 25 bp, Homo sapien
tcctctgtaagcagcccagtgccat

SEQ ID NO: 3964113 - DNA, 25 bp, Homo sapien
tggagtgatgaacccctcctctgta

SEQ ID NO: 3964114 - DNA, 25 bp, Homo sapien
agcccagtgccataggcttttcacc

SEQ ID NO: 3964115 - DNA, 25 bp, Homo sapien
tagccagcaggatcattggagtgat

SEQ ID NO: 3964116 - DNA, 25 bp, Homo sapien
ccgctggtgggaacttgtgtgcttc

SEQ ID NO: 3964117 - DNA, 25 bp, Homo sapien
ccttgcttcaggctcaatggagtgg

SEQ ID NO: 3964118 - DNA, 25 bp, Homo sapien
aactcccgtatagagggtccgctgg

SEQ ID NO: 3964119 - DNA, 25 bp, Homo sapien
tcgttgtccctgtgtaaagcatcca

SEQ ID NO: 3964120 - DNA, 25 bp, Homo sapien
ttgtttctcccacgtgaaggaaaga

SEQ ID NO: 3964121 - DNA, 25 bp, Homo sapien
ctcttgatttagcagccaggatgaa

SEQ ID NO: 3964122 - DNA, 25 bp, Homo sapien
agattgtttctcccacgtgaaggaa

SEQ ID NO: 3964123 - DNA, 25 bp, Homo sapien
tcttgatttagcagccaggatgaaa

SEQ ID NO: 3964124 - DNA, 25 bp, Homo sapien
gtttgtatctgttttggaattcatc

SEQ ID NO: 3964125 - DNA, 25 bp, Homo sapien
ctgtttgtatctgttttggaattca

SEQ ID NO: 3964126 - DNA, 25 bp, Homo sapien
tatctgttttggaattcatctgtca

SEQ ID NO: 3964127 - DNA, 25 bp, Homo sapien
tgtatctgttttggaattcatctgt

SEQ ID NO: 3964128 - DNA, 25 bp, Homo sapien
ggcttgaaagcatgagacctgtgtc

SEQ ID NO: 3964129 - DNA, 25 bp, Homo sapien
gtctcaggaaggctggcgaccagcc

SEQ ID NO: 3964130 - DNA, 25 bp, Homo sapien
tgaacatcacaagcaagagcaattt

SEQ ID NO: 3964131 - DNA, 25 bp, Homo sapien
cagactgatgagatgcctgtgttaa

SEQ ID NO: 3964132 - DNA, 25 bp, Homo sapien
cctcgggtctgccagatggctcagg

SEQ ID NO: 3964133 - DNA, 25 bp, Homo sapien
tgagggccaagtgtcctgggatcct

SEQ ID NO: 3964134 - DNA, 25 bp, Homo sapien
agcgtgtctgggcaatgagggccaa

SEQ ID NO: 3964135 - DNA, 25 bp, Homo sapien
gcacttggtacacactctgctggtg

SEQ ID NO: 3964136 - DNA, 25 bp, Homo sapien
gcatgagatattcccgagacatatg

SEQ ID NO: 3964137 - DNA, 25 bp, Homo sapien
agtcttattgccctttgtgtccctg

SEQ ID NO: 3964138 - DNA, 25 bp, Homo sapien
caaccaccaggaaaattggcagtag

SEQ ID NO: 3964139 - DNA, 25 bp, Homo sapien
gacatatggaatggagccaaccacc

SEQ ID NO: 3964140 - DNA, 25 bp, Homo sapien
cactgtagaggggataatcaccttc

SEQ ID NO: 3964141 - DNA, 25 bp, Homo sapien
tcccaaatgcactaagtggaagagg

SEQ ID NO: 3964142 - DNA, 25 bp, Homo sapien
cgctgttgccgaggtgcactgtaga

SEQ ID NO: 3964143 - DNA, 25 bp, Homo sapien
ggagcgtctggttggcgctgttgcc

SEQ ID NO: 3964144 - DNA, 25 bp, Homo sapien
tcggcgcggccctggacctgccgca

SEQ ID NO: 3964145 - DNA, 25 bp, Homo sapien
tgcggcaggtccagggccgcgccga

SEQ ID NO: 3964146 - DNA, 25 bp, Homo sapien
catacagagagaactgctgatcaaa

SEQ ID NO: 3964147 - DNA, 25 bp, Homo sapien
taactgatggcaattgcaataagtg

SEQ ID NO: 3964148 - DNA, 25 bp, Homo sapien
gaactgctgatcaaataagtaactg

SEQ ID NO: 3964149 - DNA, 25 bp, Homo sapien
catctttgctatcatacagagagaa

SEQ ID NO: 3964150 - DNA, 25 bp, Homo sapien
ccatcagttcccagaacttaggtgt

SEQ ID NO: 3964151 - DNA, 25 bp, Homo sapien
aggtgtctttcccaaaacaccatgg

SEQ ID NO: 3964152 - DNA, 25 bp, Homo sapien
tctttcccaaaacaccatgggtcat

SEQ ID NO: 3964153 - DNA, 25 bp, Homo sapien
tcagttcccagaacttaggtgtctt

SEQ ID NO: 3964154 - DNA, 25 bp, Homo sapien
taaaccaagtgacgaaaccagagcc

SEQ ID NO: 3964155 - DNA, 25 bp, Homo sapien
ttccaagacctagtggccgtggtct

SEQ ID NO: 3964156 - DNA, 25 bp, Homo sapien
tctgttattggtatccatagggctg

SEQ ID NO: 3964157 - DNA, 25 bp, Homo sapien
tcttgtttcagcatcaggaagcttt

SEQ ID NO: 3964158 - DNA, 25 bp, Homo sapien
cataccgcataatataacatccatc

SEQ ID NO: 3964159 - DNA, 25 bp, Homo sapien
taccaggaagccaccagctttcatc

SEQ ID NO: 3964160 - DNA, 25 bp, Homo sapien
tgtggttttgcccttacaagtacca

SEQ ID NO: 3964161 - DNA, 25 bp, Homo sapien
ttataaatacataccgcataatata

SEQ ID NO: 3964162 - DNA, 25 bp, Homo sapien
cagtaagctgtttgagtcgcaggct

SEQ ID NO: 3964163 - DNA, 25 bp, Homo sapien
tctgagttaggaaaacatctcctgg

SEQ ID NO: 3964164 - DNA, 25 bp, Homo sapien
ttgcttggcccatgacaatgactgc

SEQ ID NO: 3964165 - DNA, 25 bp, Homo sapien
tgagtgattgttcttggcagagcag

SEQ ID NO: 3964166 - DNA, 25 bp, Homo sapien
cagtgttctttgtgcaataatgttc

SEQ ID NO: 3964167 - DNA, 25 bp, Homo sapien
cctgtcccagccgaattatgtttat

SEQ ID NO: 3964168 - DNA, 25 bp, Homo sapien
gtcagtgttcagtgttctttgtgca

SEQ ID NO: 3964169 - DNA, 25 bp, Homo sapien
tcccagccgaattatgtttatcttt

SEQ ID NO: 3964170 - DNA, 25 bp, Homo sapien
catgctactcgcagttgttggcaag

SEQ ID NO: 3964171 - DNA, 25 bp, Homo sapien
tgcatgtctctcgtctgttccgtca

SEQ ID NO: 3964172 - DNA, 25 bp, Homo sapien
gaagtgatttctgacgaggacacag

SEQ ID NO: 3964173 - DNA, 25 bp, Homo sapien
gcagaaagaacgaaccccgtgcatg

SEQ ID NO: 3964174 - DNA, 25 bp, Homo sapien
tacctggtcaccaggtaatcaccag

SEQ ID NO: 3964175 - DNA, 25 bp, Homo sapien
gtcaccaggtaatcaccagggctgt

SEQ ID NO: 3964176 - DNA, 25 bp, Homo sapien
tggtcaccaggtaatcaccagggct

SEQ ID NO: 3964177 - DNA, 25 bp, Homo sapien
cctggtcaccaggtaatcaccaggg

SEQ ID NO: 3964178 - DNA, 25 bp, Homo sapien
gaaaagacaatctggatgatggatt

SEQ ID NO: 3964179 - DNA, 25 bp, Homo sapien
tttcccctaacagtgtgttgaagag

SEQ ID NO: 3964180 - DNA, 25 bp, Homo sapien
tccccgctggacagccatgtcatat

SEQ ID NO: 3964181 - DNA, 25 bp, Homo sapien
tcatattccgacattctccaacctt

SEQ ID NO: 3964182 - DNA, 25 bp, Homo sapien
gacggtcggcgcggccctggacctg

SEQ ID NO: 3964183 - DNA, 25 bp, Homo sapien
caggtccagggccgcgccgaccgtc

SEQ ID NO: 3964184 - DNA, 25 bp, Homo sapien
ttccaccagagcatttgcaccttca

SEQ ID NO: 3964185 - DNA, 25 bp, Homo sapien
tggtggaggtagacccagtaaattg

SEQ ID NO: 3964186 - DNA, 25 bp, Homo sapien
gggatgctgaatagacaccagccat

SEQ ID NO: 3964187 - DNA, 25 bp, Homo sapien
gggccttgcaaggtatttccaccag

SEQ ID NO: 3964188 - DNA, 25 bp, Homo sapien
caggagacctgatcctcgggtgtca

SEQ ID NO: 3964189 - DNA, 25 bp, Homo sapien
agacctgatcctcgggtgtcacatg

SEQ ID NO: 3964190 - DNA, 25 bp, Homo sapien
cagccaggagacctgatcctcgggt

SEQ ID NO: 3964191 - DNA, 25 bp, Homo sapien
tcccctccttcaaagagctcagaat

SEQ ID NO: 3964192 - DNA, 25 bp, Homo sapien
aaaccccttccctagatgcatctgc

SEQ ID NO: 3964193 - DNA, 25 bp, Homo sapien
tgagtcagtcctttatggcttcttc

SEQ ID NO: 3964194 - DNA, 25 bp, Homo sapien
agggtccagccgctcacaccctctt

SEQ ID NO: 3964195 - DNA, 25 bp, Homo sapien
tggcccccttgttgaatttattaca

SEQ ID NO: 3964196 - DNA, 25 bp, Homo sapien
tcagattcaccaccagggaggtttc

SEQ ID NO: 3964197 - DNA, 25 bp, Homo sapien
gtctccttcaaggctattttcagat

SEQ ID NO: 3964198 - DNA, 25 bp, Homo sapien
ggctattttcagattcaccaccagg

SEQ ID NO: 3964199 - DNA, 25 bp, Homo sapien
tttcagattcaccaccagggaggtt

SEQ ID NO: 3964200 - DNA, 25 bp, Homo sapien
gagcttcctggtattggtccatctt

SEQ ID NO: 3964201 - DNA, 25 bp, Homo sapien
agcttcctggtattggtccatcttg

SEQ ID NO: 3964202 - DNA, 25 bp, Homo sapien
gcttcctggtattggtccatcttga

SEQ ID NO: 3964203 - DNA, 25 bp, Homo sapien
cttcctggtattggtccatcttgac

SEQ ID NO: 3964204 - DNA, 25 bp, Homo sapien
gagtacagtgtgctggcaccaggtg

SEQ ID NO: 3964205 - DNA, 25 bp, Homo sapien
gaggagtacagtgtgctggcaccag

SEQ ID NO: 3964206 - DNA, 25 bp, Homo sapien
ccttggaggagtacagtgtgctggc

SEQ ID NO: 3964207 - DNA, 25 bp, Homo sapien
tggaggagtacagtgtgctggcacc

SEQ ID NO: 3964208 - DNA, 25 bp, Homo sapien
tctgctatcggtgttgtcactgagc

SEQ ID NO: 3964209 - DNA, 25 bp, Homo sapien
tttctgagtagcagttggccctgag

SEQ ID NO: 3964210 - DNA, 25 bp, Homo sapien
ataaggaggcggacctggtgcacat

SEQ ID NO: 3964211 - DNA, 25 bp, Homo sapien
cacggatggatgtgagttctgctac

SEQ ID NO: 3964212 - DNA, 25 bp, Homo sapien
ccttaattcccagagtaagggtgag

SEQ ID NO: 3964213 - DNA, 25 bp, Homo sapien
gtgagaagtcctttcctaagggaga

SEQ ID NO: 3964214 - DNA, 25 bp, Homo sapien
cccagagtaagggtgagaagtcctt

SEQ ID NO: 3964215 - DNA, 25 bp, Homo sapien
tgagaagtcctttcctaagggagac

SEQ ID NO: 3964216 - DNA, 25 bp, Homo sapien
tcttgcttgatgacaccggacttgc

SEQ ID NO: 3964217 - DNA, 25 bp, Homo sapien
tctgcccaggcagataggtgggcct

SEQ ID NO: 3964218 - DNA, 25 bp, Homo sapien
gaatgactctccaagccctggtaga

SEQ ID NO: 3964219 - DNA, 25 bp, Homo sapien
ccctggtagagggttgcactgccct

SEQ ID NO: 3964220 - DNA, 25 bp, Homo sapien
tggataaaagagaaatcggctttcc

SEQ ID NO: 3964221 - DNA, 25 bp, Homo sapien
cctgaaatgcctccgttccacttgg

SEQ ID NO: 3964222 - DNA, 25 bp, Homo sapien
cacttggataaaagagaaatcggct

SEQ ID NO: 3964223 - DNA, 25 bp, Homo sapien
tgcctccgttccacttggataaaag

SEQ ID NO: 3964224 - DNA, 25 bp, Homo sapien
tccacggaatgcaattagaacagaa

SEQ ID NO: 3964225 - DNA, 25 bp, Homo sapien
ttctcggaagagacgtacaccttgt

SEQ ID NO: 3964226 - DNA, 25 bp, Homo sapien
cagaaagtcggctgtacccaaggcc

SEQ ID NO: 3964227 - DNA, 25 bp, Homo sapien
tagccttgtaacctctcgaggccag

SEQ ID NO: 3964228 - DNA, 25 bp, Homo sapien
gcgcggccctggacctgccgcaccg

SEQ ID NO: 3964229 - DNA, 25 bp, Homo sapien
cggtgcggcaggtccagggccgcgc

SEQ ID NO: 3964230 - DNA, 25 bp, Homo sapien
ttgttatgtagaacaattcagccag

SEQ ID NO: 3964231 - DNA, 25 bp, Homo sapien
caggaatgggacttgccttctcgga

SEQ ID NO: 3964232 - DNA, 25 bp, Homo sapien
ggacttgccttctcggatgctggtc

SEQ ID NO: 3964233 - DNA, 25 bp, Homo sapien
gctggtctgctttcccatgaatgtg

SEQ ID NO: 3964234 - DNA, 25 bp, Homo sapien
tgtgtttggttcagggtaaggttca

SEQ ID NO: 3964235 - DNA, 25 bp, Homo sapien
acacagaattcaggaacatatctac

SEQ ID NO: 3964236 - DNA, 25 bp, Homo sapien
acagaattcaggaacatatctacat

SEQ ID NO: 3964237 - DNA, 25 bp, Homo sapien
tctcatcattgtaaacacagaattc

SEQ ID NO: 3964238 - DNA, 25 bp, Homo sapien
aaacacagaattcaggaacatatct

SEQ ID NO: 3964239 - DNA, 25 bp, Homo sapien
ggtagccgtgggagatgtcatctcc

SEQ ID NO: 3964240 - DNA, 25 bp, Homo sapien
ttcagtagagaagttacagctcttc

SEQ ID NO: 3964241 - DNA, 25 bp, Homo sapien
cctccccgagtgaggagagatgggt

SEQ ID NO: 3964242 - DNA, 25 bp, Homo sapien
gctttgtgggcttccgatctgtgca

SEQ ID NO: 3964243 - DNA, 25 bp, Homo sapien
gccattagggcaaagaggaggtctc

SEQ ID NO: 3964244 - DNA, 25 bp, Homo sapien
tagtagtcaggtttaggagatgcac

SEQ ID NO: 3964245 - DNA, 25 bp, Homo sapien
catagtccctagatgagcatttgag

SEQ ID NO: 3964246 - DNA, 25 bp, Homo sapien
caagaagtggatagcaaggccctgg

SEQ ID NO: 3964247 - DNA, 25 bp, Homo sapien
gatttcctccacctttcacaataat

SEQ ID NO: 3964248 - DNA, 25 bp, Homo sapien
cacctttcacaataatctgcccaat

SEQ ID NO: 3964249 - DNA, 25 bp, Homo sapien
ctttcacaataatctgcccaatttc

SEQ ID NO: 3964250 - DNA, 25 bp, Homo sapien
ttcctccacctttcacaataatctg

SEQ ID NO: 3964251 - DNA, 25 bp, Homo sapien
tacatgacatctaccgcattgggtc

SEQ ID NO: 3964252 - DNA, 25 bp, Homo sapien
tgacttcatctctatagctgcaaaa

SEQ ID NO: 3964253 - DNA, 25 bp, Homo sapien
ctgttgttattcttacaccctaggg

SEQ ID NO: 3964254 - DNA, 25 bp, Homo sapien
tccatttacttcagtactggtggca

SEQ ID NO: 3964255 - DNA, 25 bp, Homo sapien
tggatctttgcccacatagcactgt

SEQ ID NO: 3964256 - DNA, 25 bp, Homo sapien
ctgtctctggcctcgagttgtaaaa

SEQ ID NO: 3964257 - DNA, 25 bp, Homo sapien
ggatctttgcccacatagcactgtc

SEQ ID NO: 3964258 - DNA, 25 bp, Homo sapien
gcctcgagttgtaaaaattatccaa

SEQ ID NO: 3964259 - DNA, 25 bp, Homo sapien
ctggtccttggagtgccagaatggt

SEQ ID NO: 3964260 - DNA, 25 bp, Homo sapien
ttcaattggagaattgctgggtttc

SEQ ID NO: 3964261 - DNA, 25 bp, Homo sapien
tgtctccataaacaacacatctggt

SEQ ID NO: 3964262 - DNA, 25 bp, Homo sapien
tgggaagcacataattgtctccata

SEQ ID NO: 3964263 - DNA, 25 bp, Homo sapien
tgctgagctcccaaactcaacaatg

SEQ ID NO: 3964264 - DNA, 25 bp, Homo sapien
tcccaaactcaacaatgatcgtcat

SEQ ID NO: 3964265 - DNA, 25 bp, Homo sapien
gctcccaaactcaacaatgatcgtc

SEQ ID NO: 3964266 - DNA, 25 bp, Homo sapien
gagctcccaaactcaacaatgatcg

SEQ ID NO: 3964267 - DNA, 25 bp, Homo sapien
tcctaaacgataagcagatgaactt

SEQ ID NO: 3964268 - DNA, 25 bp, Homo sapien
ccatgtgaaaaaggaatatgctaac

SEQ ID NO: 3964269 - DNA, 25 bp, Homo sapien
aaaaggaatatgctaacagaagggc

SEQ ID NO: 3964270 - DNA, 25 bp, Homo sapien
aacttccaggttcaatgatttggga

SEQ ID NO: 3964271 - DNA, 25 bp, Homo sapien
tactcacttcgtaccattgttcctt

SEQ ID NO: 3964272 - DNA, 25 bp, Homo sapien
gtgctgccaaagttggactactcac

SEQ ID NO: 3964273 - DNA, 25 bp, Homo sapien
tccttaaaacttctatagggtgctg

SEQ ID NO: 3964274 - DNA, 25 bp, Homo sapien
taaaacttctatagggtgctgccaa

SEQ ID NO: 3964275 - DNA, 25 bp, Homo sapien
catgcacaaatgatggattgcctga

SEQ ID NO: 3964276 - DNA, 25 bp, Homo sapien
tcgccatgcacaaatgatggattgc

SEQ ID NO: 3964277 - DNA, 25 bp, Homo sapien
caaatgatggattgcctgaactgct

SEQ ID NO: 3964278 - DNA, 25 bp, Homo sapien
tggcatcgccatgcacaaatgatgg

SEQ ID NO: 3964279 - DNA, 25 bp, Homo sapien
ccattgtaatcaagtcagaagcttg

SEQ ID NO: 3964280 - DNA, 25 bp, Homo sapien
tgaaatattggtgggcagaaagcat

SEQ ID NO: 3964281 - DNA, 25 bp, Homo sapien
gtttagattgtgaatgaaatattgg

SEQ ID NO: 3964282 - DNA, 25 bp, Homo sapien
aaagcatatgaagtaaagtggataa

SEQ ID NO: 3964283 - DNA, 25 bp, Homo sapien
tactgaaacgtagtcacctgttggg

SEQ ID NO: 3964284 - DNA, 25 bp, Homo sapien
gtcacctgttgggttgaacacagca

SEQ ID NO: 3964285 - DNA, 25 bp, Homo sapien
gctgtaagggaatcctgaactatca

SEQ ID NO: 3964286 - DNA, 25 bp, Homo sapien
gcagctgtttagcagctgtaaggga

SEQ ID NO: 3964287 - DNA, 25 bp, Homo sapien
gacttcagagctatgatgatcatca

SEQ ID NO: 3964288 - DNA, 25 bp, Homo sapien
tgtgctgccacaactgcgaggactt

SEQ ID NO: 3964289 - DNA, 25 bp, Homo sapien
taaagattaacggtgaccagtgcca

SEQ ID NO: 3964290 - DNA, 25 bp, Homo sapien
accagtgccacatgtgctgccacaa

SEQ ID NO: 3964291 - DNA, 25 bp, Homo sapien
cccaaggttattgcagcgccttact

SEQ ID NO: 3964292 - DNA, 25 bp, Homo sapien
gcagcgccttactttatagcaacaa

SEQ ID NO: 3964293 - DNA, 25 bp, Homo sapien
tatagcaacaattataccccactcc

SEQ ID NO: 3964294 - DNA, 25 bp, Homo sapien
caaattcccaaggttattgcagcgc

SEQ ID NO: 3964295 - DNA, 25 bp, Homo sapien
tcagagatactggactgagcaattc

SEQ ID NO: 3964296 - DNA, 25 bp, Homo sapien
gagatactggactgagcaattctga

SEQ ID NO: 3964297 - DNA, 25 bp, Homo sapien
ctgaacctgatgctggtcagaatca

SEQ ID NO: 3964298 - DNA, 25 bp, Homo sapien
gtcagaatcaggactgatcttcagg

SEQ ID NO: 3964299 - DNA, 25 bp, Homo sapien
taaggcattggtaactggcttctta

SEQ ID NO: 3964300 - DNA, 25 bp, Homo sapien
agtaaggcattggtaactggcttct

SEQ ID NO: 3964301 - DNA, 25 bp, Homo sapien
tctgagctttagttctgatctgagt

SEQ ID NO: 3964302 - DNA, 25 bp, Homo sapien
tagcactaaactttccggtgctttc

SEQ ID NO: 3964303 - DNA, 25 bp, Homo sapien
ccctgaaaacgcactctcctctgtt

SEQ ID NO: 3964304 - DNA, 25 bp, Homo sapien
atacaggcccctgaaaacgcactct

SEQ ID NO: 3964305 - DNA, 25 bp, Homo sapien
ttcttgaaatacaggcccctgaaaa

SEQ ID NO: 3964306 - DNA, 25 bp, Homo sapien
aaatacaggcccctgaaaacgcact

SEQ ID NO: 3964307 - DNA, 25 bp, Homo sapien
tccgacatactaatcagtaaatgat

SEQ ID NO: 3964308 - DNA, 25 bp, Homo sapien
ggtccgtagggaagactgatcatca

SEQ ID NO: 3964309 - DNA, 25 bp, Homo sapien
ctgatcatcattgactgtttcccct

SEQ ID NO: 3964310 - DNA, 25 bp, Homo sapien
ttgcttctttccgacatactaatca

SEQ ID NO: 3964311 - DNA, 25 bp, Homo sapien
cctggctcctgactttggggaagaa

SEQ ID NO: 3964312 - DNA, 25 bp, Homo sapien
gaaatataggcagtaatgagcagca

SEQ ID NO: 3964313 - DNA, 25 bp, Homo sapien
gggaagaagaaatataggcagtaat

SEQ ID NO: 3964314 - DNA, 25 bp, Homo sapien
aagaaatataggcagtaatgagcag

SEQ ID NO: 3964315 - DNA, 25 bp, Homo sapien
tacgtggataaggaactttcagtaa

SEQ ID NO: 3964316 - DNA, 25 bp, Homo sapien
taatacgtggataaggaactttcag

SEQ ID NO: 3964317 - DNA, 25 bp, Homo sapien
tggcagtaatacgtggataaggaac

SEQ ID NO: 3964318 - DNA, 25 bp, Homo sapien
gtcatggcagtaatacgtggataag

SEQ ID NO: 3964319 - DNA, 25 bp, Homo sapien
gcttccagctgaactacatgaaagt

SEQ ID NO: 3964320 - DNA, 25 bp, Homo sapien
agttgactgaaactttgagaccata

SEQ ID NO: 3964321 - DNA, 25 bp, Homo sapien
ccagctgaactacatgaaagttgac

SEQ ID NO: 3964322 - DNA, 25 bp, Homo sapien
ctacatgaaagttgactgaaacttt

SEQ ID NO: 3964323 - DNA, 25 bp, Homo sapien
tgcttgggttctatgaatgggtctt

SEQ ID NO: 3964324 - DNA, 25 bp, Homo sapien
tgaatgggtcttgatcagtttctga

SEQ ID NO: 3964325 - DNA, 25 bp, Homo sapien
caaaaaccttcatttggagtgggct

SEQ ID NO: 3964326 - DNA, 25 bp, Homo sapien
gctgttgactccaaaaaccttcatt

SEQ ID NO: 3964327 - DNA, 25 bp, Homo sapien
catccagttattgcaagcatgaggt

SEQ ID NO: 3964328 - DNA, 25 bp, Homo sapien
gcatgaaaaatacccatccccttgg

SEQ ID NO: 3964329 - DNA, 25 bp, Homo sapien
caagtttgacggtggcatgcaggaa

SEQ ID NO: 3964330 - DNA, 25 bp, Homo sapien
cacgtgtaacaatccatcatgggag

SEQ ID NO: 3964331 - DNA, 25 bp, Homo sapien
tctggaagtcagtcaatgtgtcaat

SEQ ID NO: 3964332 - DNA, 25 bp, Homo sapien
aagtcagtcaatgtgtcaatcttct

SEQ ID NO: 3964333 - DNA, 25 bp, Homo sapien
tggaagtcagtcaatgtgtcaatct

SEQ ID NO: 3964334 - DNA, 25 bp, Homo sapien
tctctggaagtcagtcaatgtgtca

SEQ ID NO: 3964335 - DNA, 25 bp, Homo sapien
tgaagcattcaataaggaaggtctt

SEQ ID NO: 3964336 - DNA, 25 bp, Homo sapien
ggactcagggatgaagcattcaata

SEQ ID NO: 3964337 - DNA, 25 bp, Homo sapien
cattcaataaggaaggtcttggcag

SEQ ID NO: 3964338 - DNA, 25 bp, Homo sapien
tcaataaggaaggtcttggcagcca

SEQ ID NO: 3964339 - DNA, 25 bp, Homo sapien
tgatttcgttttagcgaaaagcttc

SEQ ID NO: 3964340 - DNA, 25 bp, Homo sapien
taagcttcacagcagcattggcagc

SEQ ID NO: 3964341 - DNA, 25 bp, Homo sapien
aaagcttcttaagcttcacagcagc

SEQ ID NO: 3964342 - DNA, 25 bp, Homo sapien
tcacagcagcattggcagcttttct

SEQ ID NO: 3964343 - DNA, 25 bp, Homo sapien
ggctataactaacttaaagtgcatg

SEQ ID NO: 3964344 - DNA, 25 bp, Homo sapien
gcatttgtaaatcgtcagtgcattc

SEQ ID NO: 3964345 - DNA, 25 bp, Homo sapien
tgcattctgcatctttggctataac

SEQ ID NO: 3964346 - DNA, 25 bp, Homo sapien
ttgtaaatcgtcagtgcattctgca

SEQ ID NO: 3964347 - DNA, 25 bp, Homo sapien
tccttgatccctcagattggtgatt

SEQ ID NO: 3964348 - DNA, 25 bp, Homo sapien
tcagattggtgattgggtggttttc

SEQ ID NO: 3964349 - DNA, 25 bp, Homo sapien
tgtggacccacgttctggtgatact

SEQ ID NO: 3964350 - DNA, 25 bp, Homo sapien
gacccacgttctggtgatactcctt

SEQ ID NO: 3964351 - DNA, 25 bp, Homo sapien
cctgcatcaagatgcgttttgatct

SEQ ID NO: 3964352 - DNA, 25 bp, Homo sapien
aagggagccgctcttgaacctgcat

SEQ ID NO: 3964353 - DNA, 25 bp, Homo sapien
tattttactctactgagctgggaag

SEQ ID NO: 3964354 - DNA, 25 bp, Homo sapien
tcaagatgcgttttgatcttccaaa

SEQ ID NO: 3964355 - DNA, 25 bp, Homo sapien
gctgtaaaacatcctctaacatcag

SEQ ID NO: 3964356 - DNA, 25 bp, Homo sapien
cctgtgatcccactgtaggagcagc

SEQ ID NO: 3964357 - DNA, 25 bp, Homo sapien
gattctcgagcaagttccctgtgat

SEQ ID NO: 3964358 - DNA, 25 bp, Homo sapien
aaaaggtagctgtccttccagcagg

SEQ ID NO: 3964359 - DNA, 25 bp, Homo sapien
gacatggtgcgatgtctttttcact

SEQ ID NO: 3964360 - DNA, 25 bp, Homo sapien
tacattaatgggtccttttgccttc

SEQ ID NO: 3964361 - DNA, 25 bp, Homo sapien
caaagagggactattgtggcaacaa

SEQ ID NO: 3964362 - DNA, 25 bp, Homo sapien
aagttgctggatgtaatttgaagac

SEQ ID NO: 3964363 - DNA, 25 bp, Homo sapien
tcctctctgaaattaatttttctta

SEQ ID NO: 3964364 - DNA, 25 bp, Homo sapien
ctcaagcaactttattttcctctct

SEQ ID NO: 3964365 - DNA, 25 bp, Homo sapien
agcaactttattttcctctctgaaa

SEQ ID NO: 3964366 - DNA, 25 bp, Homo sapien
ctttattttcctctctgaaattaat

SEQ ID NO: 3964367 - DNA, 25 bp, Homo sapien
gttctgggcacctatattggtgatg

SEQ ID NO: 3964368 - DNA, 25 bp, Homo sapien
tctgggcacctatattggtgatgag

SEQ ID NO: 3964369 - DNA, 25 bp, Homo sapien
tatattggtgatgaggaacttatta

SEQ ID NO: 3964370 - DNA, 25 bp, Homo sapien
ggcacctatattggtgatgaggaac

SEQ ID NO: 3964371 - DNA, 25 bp, Homo sapien
tacttggccttgcaaatagagtact

SEQ ID NO: 3964372 - DNA, 25 bp, Homo sapien
tcatttatccttgttaggccagcaa

SEQ ID NO: 3964373 - DNA, 25 bp, Homo sapien
tctcttggagatgcattatcaggca

SEQ ID NO: 3964374 - DNA, 25 bp, Homo sapien
cagcacaggctaatgttagtgacac

SEQ ID NO: 3964375 - DNA, 25 bp, Homo sapien
ttgtgttttcacatggtcttccttc

SEQ ID NO: 3964376 - DNA, 25 bp, Homo sapien
tcttgtgttttcacatggtcttcct

SEQ ID NO: 3964377 - DNA, 25 bp, Homo sapien
gctttgacatcttgtgttttcacat

SEQ ID NO: 3964378 - DNA, 25 bp, Homo sapien
ttgctttgacatcttgtgttttcac

SEQ ID NO: 3964379 - DNA, 25 bp, Homo sapien
taaatcttttgctggcccggaactg

SEQ ID NO: 3964380 - DNA, 25 bp, Homo sapien
atttttactcaagtgatgggcttcc

SEQ ID NO: 3964381 - DNA, 25 bp, Homo sapien
tggcccggaactgaaactcacagca

SEQ ID NO: 3964382 - DNA, 25 bp, Homo sapien
ctttgataaatcttttgctggcccg

SEQ ID NO: 3964383 - DNA, 25 bp, Homo sapien
ggagaaacatttgctatccgaaaat

SEQ ID NO: 3964384 - DNA, 25 bp, Homo sapien
ttggagagcctctaaaggatgtcca

SEQ ID NO: 3964385 - DNA, 25 bp, Homo sapien
ggatgtccagtggaggagaaacatt

SEQ ID NO: 3964386 - DNA, 25 bp, Homo sapien
tgaatttgaacattagcaggccttg

SEQ ID NO: 3964387 - DNA, 25 bp, Homo sapien
tgtcatagacacctagaactgtgga

SEQ ID NO: 3964388 - DNA, 25 bp, Homo sapien
catagacacctagaactgtggaaac

SEQ ID NO: 3964389 - DNA, 25 bp, Homo sapien
tatgtcatagacacctagaactgtg

SEQ ID NO: 3964390 - DNA, 25 bp, Homo sapien
tagacacctagaactgtggaaacat

SEQ ID NO: 3964391 - DNA, 25 bp, Homo sapien
tttgacactttgagatgtctaaagc

SEQ ID NO: 3964392 - DNA, 25 bp, Homo sapien
aattgaatttctgacaagacaaccc

SEQ ID NO: 3964393 - DNA, 25 bp, Homo sapien
gacaacccttgacacaaccaattgg

SEQ ID NO: 3964394 - DNA, 25 bp, Homo sapien
ctaaagcatactgagggcaattgat

SEQ ID NO: 3964395 - DNA, 25 bp, Homo sapien
ttcaccttcagctaatcctttctgc

SEQ ID NO: 3964396 - DNA, 25 bp, Homo sapien
accttcagctaatcctttctgcctt

SEQ ID NO: 3964397 - DNA, 25 bp, Homo sapien
tgtccattcaccttcagctaatcct

SEQ ID NO: 3964398 - DNA, 25 bp, Homo sapien
cattcaccttcagctaatcctttct

SEQ ID NO: 3964399 - DNA, 25 bp, Homo sapien
agcaggtatcgattccaaagtcatt

SEQ ID NO: 3964400 - DNA, 25 bp, Homo sapien
cagcaggtatcgattccaaagtcat

SEQ ID NO: 3964401 - DNA, 25 bp, Homo sapien
gcaggtatcgattccaaagtcatta

SEQ ID NO: 3964402 - DNA, 25 bp, Homo sapien
tcagcaggtatcgattccaaagtca

SEQ ID NO: 3964403 - DNA, 25 bp, Homo sapien
cagtgaaaacgaaccagctttccgt

SEQ ID NO: 3964404 - DNA, 25 bp, Homo sapien
cagctttccgtttccactcagcatt

SEQ ID NO: 3964405 - DNA, 25 bp, Homo sapien
tccactcagcatttgtttgaattaa

SEQ ID NO: 3964406 - DNA, 25 bp, Homo sapien
tcagtgaaaacgaaccagctttccg

SEQ ID NO: 3964407 - DNA, 25 bp, Homo sapien
aacacagtagttgcctctgtagggc

SEQ ID NO: 3964408 - DNA, 25 bp, Homo sapien
gagtacaaagatgcaaaacacagta

SEQ ID NO: 3964409 - DNA, 25 bp, Homo sapien
caaagatgcaaaacacagtagttgc

SEQ ID NO: 3964410 - DNA, 25 bp, Homo sapien
gatgcaaaacacagtagttgcctct

SEQ ID NO: 3964411 - DNA, 25 bp, Homo sapien
ggtccttccttaccatcagtgctca

SEQ ID NO: 3964412 - DNA, 25 bp, Homo sapien
tgaggacttgctgttccaggtcctt

SEQ ID NO: 3964413 - DNA, 25 bp, Homo sapien
catcaaactgtgttcatcgctaatg

SEQ ID NO: 3964414 - DNA, 25 bp, Homo sapien
taggtttagtcctttgaggacttgc

SEQ ID NO: 3964415 - DNA, 25 bp, Homo sapien
tagtcacgttattcagggaagaaga

SEQ ID NO: 3964416 - DNA, 25 bp, Homo sapien
gaagccacccaaatgatgacctggg

SEQ ID NO: 3964417 - DNA, 25 bp, Homo sapien
gcttgactgccaatctgtaatctac

SEQ ID NO: 3964418 - DNA, 25 bp, Homo sapien
tctacaattgtcctaaaagcttgct

SEQ ID NO: 3964419 - DNA, 25 bp, Homo sapien
agagggaattgagtaccattcagag

SEQ ID NO: 3964420 - DNA, 25 bp, Homo sapien
gagggaattgagtaccattcagagg

SEQ ID NO: 3964421 - DNA, 25 bp, Homo sapien
gagagggaattgagtaccattcaga

SEQ ID NO: 3964422 - DNA, 25 bp, Homo sapien
tggtattgaagtaccgccttggctc

SEQ ID NO: 3964423 - DNA, 25 bp, Homo sapien
tctaattcaggatctggaagcctca

SEQ ID NO: 3964424 - DNA, 25 bp, Homo sapien
tttgcccactgaagaataaaggttc

SEQ ID NO: 3964425 - DNA, 25 bp, Homo sapien
gatatactaccataagcaccagcat

SEQ ID NO: 3964426 - DNA, 25 bp, Homo sapien
tcctctttcttggttatcctgccca

SEQ ID NO: 3964427 - DNA, 25 bp, Homo sapien
ttcttggttatcctgcccaggtcca

SEQ ID NO: 3964428 - DNA, 25 bp, Homo sapien
tctttcttggttatcctgcccaggt

SEQ ID NO: 3964429 - DNA, 25 bp, Homo sapien
atcctctttcttggttatcctgccc

SEQ ID NO: 3964430 - DNA, 25 bp, Homo sapien
aaaatcttgtttctgccctctcgat

SEQ ID NO: 3964431 - DNA, 25 bp, Homo sapien
gaatgacttgagtggtgggtaatac

SEQ ID NO: 3964432 - DNA, 25 bp, Homo sapien
tctgccctctcgatgactcatttct

SEQ ID NO: 3964433 - DNA, 25 bp, Homo sapien
atgacttgagtggtgggtaatacag

SEQ ID NO: 3964434 - DNA, 25 bp, Homo sapien
tagcagtcacttttgaggtgataga

SEQ ID NO: 3964435 - DNA, 25 bp, Homo sapien
ctggatcttcctgcttgttaactgg

SEQ ID NO: 3964436 - DNA, 25 bp, Homo sapien
ggagtcttttgcatggagttagcag

SEQ ID NO: 3964437 - DNA, 25 bp, Homo sapien
agttgaaatacagttcttcaccttc

SEQ ID NO: 3964438 - DNA, 25 bp, Homo sapien
gacttgtgttccagatgcaaggcct

SEQ ID NO: 3964439 - DNA, 25 bp, Homo sapien
tagtgagacccaggaacctaagtat

SEQ ID NO: 3964440 - DNA, 25 bp, Homo sapien
tggcacagccaagggatgtttctac

SEQ ID NO: 3964441 - DNA, 25 bp, Homo sapien
ttttgtgcactgaagggactgactg

SEQ ID NO: 3964442 - DNA, 25 bp, Homo sapien
tcccacaggtagttgagggaacctc

SEQ ID NO: 3964443 - DNA, 25 bp, Homo sapien
ttttgacatcagatccatggcgtgg

SEQ ID NO: 3964444 - DNA, 25 bp, Homo sapien
taaacaacaattttgagtgacagct

SEQ ID NO: 3964445 - DNA, 25 bp, Homo sapien
gtttagaaatgagcatccaagctct

SEQ ID NO: 3964446 - DNA, 25 bp, Homo sapien
ggtaaggctctctttgaattgtcag

SEQ ID NO: 3964447 - DNA, 25 bp, Homo sapien
aatttggcttctcccaatctagccc

SEQ ID NO: 3964448 - DNA, 25 bp, Homo sapien
tgaattggagatatataaaactgac

SEQ ID NO: 3964449 - DNA, 25 bp, Homo sapien
cctgaaactttgcaattgagtctga

SEQ ID NO: 3964450 - DNA, 25 bp, Homo sapien
ctatagaattctgaacagatggtct

SEQ ID NO: 3964451 - DNA, 25 bp, Homo sapien
ttctatagaattctgaacagatggt

SEQ ID NO: 3964452 - DNA, 25 bp, Homo sapien
tctatagaattctgaacagatggtc

SEQ ID NO: 3964453 - DNA, 25 bp, Homo sapien
agggcgagtgttaaaactgcgtcca

SEQ ID NO: 3964454 - DNA, 25 bp, Homo sapien
gctatagtactttcggtacattgtg

SEQ ID NO: 3964455 - DNA, 25 bp, Homo sapien
gagtgttaaaactgcgtccatatct

SEQ ID NO: 3964456 - DNA, 25 bp, Homo sapien
tacaagttgtaaatgtttgctatag

SEQ ID NO: 3964457 - DNA, 25 bp, Homo sapien
atgaatatctgtcttgcatagcaca

SEQ ID NO: 3964458 - DNA, 25 bp, Homo sapien
tcccaatgatcctctgctgcatatg

SEQ ID NO: 3964459 - DNA, 25 bp, Homo sapien
cagggtgtttccctattacagccat

SEQ ID NO: 3964460 - DNA, 25 bp, Homo sapien
gcatagcacattaacttcccaatga

SEQ ID NO: 3964461 - DNA, 25 bp, Homo sapien
ccttccaaagattgtgtgtgccttt

SEQ ID NO: 3964462 - DNA, 25 bp, Homo sapien
gatgccttcgaacatccttcttcat

SEQ ID NO: 3964463 - DNA, 25 bp, Homo sapien
tcagctttcagctggtatatccagc

SEQ ID NO: 3964464 - DNA, 25 bp, Homo sapien
caaaggttatagatgtgatgccttc

SEQ ID NO: 3964465 - DNA, 25 bp, Homo sapien
ttctatagccttcatattgttcact

SEQ ID NO: 3964466 - DNA, 25 bp, Homo sapien
aagtgcctttttgatttgatgctct

SEQ ID NO: 3964467 - DNA, 25 bp, Homo sapien
gtcaagtgcctttttgatttgatgc

SEQ ID NO: 3964468 - DNA, 25 bp, Homo sapien
tggaattctatagccttcatattgt

SEQ ID NO: 3964469 - DNA, 25 bp, Homo sapien
acttatctgtgtgcagacttgttcc

SEQ ID NO: 3964470 - DNA, 25 bp, Homo sapien
gaacttatctgtgtgcagacttgtt

SEQ ID NO: 3964471 - DNA, 25 bp, Homo sapien
ttatctgtgtgcagacttgttccat

SEQ ID NO: 3964472 - DNA, 25 bp, Homo sapien
cttatctgtgtgcagacttgttcca

SEQ ID NO: 3964473 - DNA, 25 bp, Homo sapien
tttacaggactctaaatttgtggta

SEQ ID NO: 3964474 - DNA, 25 bp, Homo sapien
gttgacagggtaatgttcaacgcaa

SEQ ID NO: 3964475 - DNA, 25 bp, Homo sapien
gcatattttgtagtcaaatacttga

SEQ ID NO: 3964476 - DNA, 25 bp, Homo sapien
gtaccatttagttaatctccctata

SEQ ID NO: 3964477 - DNA, 25 bp, Homo sapien
ttactgcctccaattctgagatgag

SEQ ID NO: 3964478 - DNA, 25 bp, Homo sapien
gcccagaaacttatcaattactgcc

SEQ ID NO: 3964479 - DNA, 25 bp, Homo sapien
tcttattctacgatgatttttttgg

SEQ ID NO: 3964480 - DNA, 25 bp, Homo sapien
tgagagtctgcatgatgcttattct

SEQ ID NO: 3964481 - DNA, 25 bp, Homo sapien
tggaagaactgtgatctaaggttga

SEQ ID NO: 3964482 - DNA, 25 bp, Homo sapien
agaagttgaagataccgagtagaac

SEQ ID NO: 3964483 - DNA, 25 bp, Homo sapien
gatctaaggttgaaagaagtatcag

SEQ ID NO: 3964484 - DNA, 25 bp, Homo sapien
tgaagataccgagtagaacaagttc

SEQ ID NO: 3964485 - DNA, 25 bp, Homo sapien
gcatcgcagaaaataattaggtctt

SEQ ID NO: 3964486 - DNA, 25 bp, Homo sapien
gatttaattctgcatcgcagaaaat

SEQ ID NO: 3964487 - DNA, 25 bp, Homo sapien
gacttccaagatatccactacctct

SEQ ID NO: 3964488 - DNA, 25 bp, Homo sapien
ggctgacttccaagatatccactac

SEQ ID NO: 3964489 - DNA, 25 bp, Homo sapien
tggcagttccttctactttccttct

SEQ ID NO: 3964490 - DNA, 25 bp, Homo sapien
ttggcagttccttctactttccttc

SEQ ID NO: 3964491 - DNA, 25 bp, Homo sapien
tggcttgccgcctgtcagaaacgat

SEQ ID NO: 3964492 - DNA, 25 bp, Homo sapien
acagttcacctcagatggcttgccg

SEQ ID NO: 3964493 - DNA, 25 bp, Homo sapien
tctctccaagagtggcaaccttttg

SEQ ID NO: 3964494 - DNA, 25 bp, Homo sapien
tcgtacagtgtcagcttcacagttc

SEQ ID NO: 3964495 - DNA, 25 bp, Homo sapien
tctatctgaagagtaaaaggtcctg

SEQ ID NO: 3964496 - DNA, 25 bp, Homo sapien
ggtcctgatgttgacaatctgggcc

SEQ ID NO: 3964497 - DNA, 25 bp, Homo sapien
tctcttgcattcattgggacggcca

SEQ ID NO: 3964498 - DNA, 25 bp, Homo sapien
cagcatcttgtgtctgaagaataaa

SEQ ID NO: 3964499 - DNA, 25 bp, Homo sapien
ctcagggttcttagactacacagga

SEQ ID NO: 3964500 - DNA, 25 bp, Homo sapien
catgctaagaaaaggagcgaacaag

SEQ ID NO: 3964501 - DNA, 25 bp, Homo sapien
caggaagcatagcagtattaggaag

SEQ ID NO: 3964502 - DNA, 25 bp, Homo sapien
gagagagctcatttatcaccaaagg

SEQ ID NO: 3964503 - DNA, 25 bp, Homo sapien
tggttcgcacatggattcagcttga

SEQ ID NO: 3964504 - DNA, 25 bp, Homo sapien
ctctggaagaatctccactggttcg

SEQ ID NO: 3964505 - DNA, 25 bp, Homo sapien
gaatctccactggttcgcacatgga

SEQ ID NO: 3964506 - DNA, 25 bp, Homo sapien
ccactggttcgcacatggattcagc

SEQ ID NO: 3964507 - DNA, 25 bp, Homo sapien
tagtatgattccacagcagggtctg

SEQ ID NO: 3964508 - DNA, 25 bp, Homo sapien
ttagtatgattccacagcagggtct

SEQ ID NO: 3964509 - DNA, 25 bp, Homo sapien
tctctaactcctctggagaaagagc

SEQ ID NO: 3964510 - DNA, 25 bp, Homo sapien
tcagtgagacccagatttagatctg

SEQ ID NO: 3964511 - DNA, 25 bp, Homo sapien
tttatagtggttagggctgtgtgct

SEQ ID NO: 3964512 - DNA, 25 bp, Homo sapien
caataacatactaccctgtgtggct

SEQ ID NO: 3964513 - DNA, 25 bp, Homo sapien
gctttcaccccaattgccttgctga

SEQ ID NO: 3964514 - DNA, 25 bp, Homo sapien
taaaaggcagacaaggtagagtaaa

SEQ ID NO: 3964515 - DNA, 25 bp, Homo sapien
caaagcggttcataaaccctgcagg

SEQ ID NO: 3964516 - DNA, 25 bp, Homo sapien
gacaaggtagagtaaaccagcaatt

SEQ ID NO: 3964517 - DNA, 25 bp, Homo sapien
ccatgtggaaaagcactaaggcttt

SEQ ID NO: 3964518 - DNA, 25 bp, Homo sapien
catgtggaaaagcactaaggctttc

SEQ ID NO: 3964519 - DNA, 25 bp, Homo sapien
gtggaaaagcactaaggctttctct

SEQ ID NO: 3964520 - DNA, 25 bp, Homo sapien
gaaaagcactaaggctttctcttat

SEQ ID NO: 3964521 - DNA, 25 bp, Homo sapien
gtaggcaccgaccttgaagaatgag

SEQ ID NO: 3964522 - DNA, 25 bp, Homo sapien
gagttgaattgggtcactacatcag

SEQ ID NO: 3964523 - DNA, 25 bp, Homo sapien
tgtcaggtaggcaccgaccttgaag

SEQ ID NO: 3964524 - DNA, 25 bp, Homo sapien
gagaaagtgtcaggtaggcaccgac

SEQ ID NO: 3964525 - DNA, 25 bp, Homo sapien
catggcatgaatatgccagatgtgg

SEQ ID NO: 3964526 - DNA, 25 bp, Homo sapien
cctccatggcatgaatatgccagat

SEQ ID NO: 3964527 - DNA, 25 bp, Homo sapien
ctttccctccatggcatgaatatgc

SEQ ID NO: 3964528 - DNA, 25 bp, Homo sapien
tgactttccctccatggcatgaata

SEQ ID NO: 3964529 - DNA, 25 bp, Homo sapien
cacagtgatgtaagccataaattct

SEQ ID NO: 3964530 - DNA, 25 bp, Homo sapien
ttttttccctcaaggcagttgtcat

SEQ ID NO: 3964531 - DNA, 25 bp, Homo sapien
aacactgggataagaggatcatcaa

SEQ ID NO: 3964532 - DNA, 25 bp, Homo sapien
cagttgtcatttctaaacactggga

SEQ ID NO: 3964533 - DNA, 25 bp, Homo sapien
tccacacagtgcatacattccagac

SEQ ID NO: 3964534 - DNA, 25 bp, Homo sapien
cacagtgcatacattccagacagac

SEQ ID NO: 3964535 - DNA, 25 bp, Homo sapien
cacacagtgcatacattccagacag

SEQ ID NO: 3964536 - DNA, 25 bp, Homo sapien
ctccacacagtgcatacattccaga

SEQ ID NO: 3964537 - DNA, 25 bp, Homo sapien
gaaaagctaactggattaaggccat

SEQ ID NO: 3964538 - DNA, 25 bp, Homo sapien
ttgaaaagctaactggattaaggcc

SEQ ID NO: 3964539 - DNA, 25 bp, Homo sapien
tgaaaagctaactggattaaggcca

SEQ ID NO: 3964540 - DNA, 25 bp, Homo sapien
tgtttattacaagcctatcttgacc

SEQ ID NO: 3964541 - DNA, 25 bp, Homo sapien
atcttcaccaagaccatctctttct

SEQ ID NO: 3964542 - DNA, 25 bp, Homo sapien
tcacattttcggtcttttctctgca

SEQ ID NO: 3964543 - DNA, 25 bp, Homo sapien
tcagggcatcatgtttattacaagc

SEQ ID NO: 3964544 - DNA, 25 bp, Homo sapien
tcctgggtacatttcatttagtgaa

SEQ ID NO: 3964545 - DNA, 25 bp, Homo sapien
tgtcccagagcaggtcggagcatac

SEQ ID NO: 3964546 - DNA, 25 bp, Homo sapien
tctgggctctattatggcattaggc

SEQ ID NO: 3964547 - DNA, 25 bp, Homo sapien
tattaaagatgcaagacactggtac

SEQ ID NO: 3964548 - DNA, 25 bp, Homo sapien
cttgcaggtaacaaccccagtgttg

SEQ ID NO: 3964549 - DNA, 25 bp, Homo sapien
tgctcactttcaaatcgtggattac

SEQ ID NO: 3964550 - DNA, 25 bp, Homo sapien
ttccttgcaggtaacaaccccagtg

SEQ ID NO: 3964551 - DNA, 25 bp, Homo sapien
ggacaagaatatgctcactttcaaa

SEQ ID NO: 3964552 - DNA, 25 bp, Homo sapien
taatatgtaccagacagagttcact

SEQ ID NO: 3964553 - DNA, 25 bp, Homo sapien
tttccatgcaacatatagtacacaa

SEQ ID NO: 3964554 - DNA, 25 bp, Homo sapien
ggcacatctattccctttcagtaac

SEQ ID NO: 3964555 - DNA, 25 bp, Homo sapien
cactgttgccaaggataatttgaaa

SEQ ID NO: 3964556 - DNA, 25 bp, Homo sapien
agtcttcttcaacgtgaccttggtt

SEQ ID NO: 3964557 - DNA, 25 bp, Homo sapien
ttccttttcagtcacgtcttctaca

SEQ ID NO: 3964558 - DNA, 25 bp, Homo sapien
agtcaagtcttcttcaacgtgacct

SEQ ID NO: 3964559 - DNA, 25 bp, Homo sapien
tcagtcacgtcttctacagctgttc

SEQ ID NO: 3964560 - DNA, 25 bp, Homo sapien
ctcctagatcagtccctgactccac

SEQ ID NO: 3964561 - DNA, 25 bp, Homo sapien
tactcctagatcagtccctgactcc

SEQ ID NO: 3964562 - DNA, 25 bp, Homo sapien
actcctagatcagtccctgactcca

SEQ ID NO: 3964563 - DNA, 25 bp, Homo sapien
cctactcctagatcagtccctgact

SEQ ID NO: 3964564 - DNA, 25 bp, Homo sapien
gatctgaatccttggtcattctgct

SEQ ID NO: 3964565 - DNA, 25 bp, Homo sapien
tgcttttctcaggccatggccactg

SEQ ID NO: 3964566 - DNA, 25 bp, Homo sapien
tagatgtgctcacataatggaaggt

SEQ ID NO: 3964567 - DNA, 25 bp, Homo sapien
aaagggcactgcatttctgcaggat

SEQ ID NO: 3964568 - DNA, 25 bp, Homo sapien
ttctgcaggatccagcaaagatttg

SEQ ID NO: 3964569 - DNA, 25 bp, Homo sapien
caaagatttgttgacattgagctga

SEQ ID NO: 3964570 - DNA, 25 bp, Homo sapien
tatgaagtcaaaactcatccttcgc

SEQ ID NO: 3964571 - DNA, 25 bp, Homo sapien
tcaaaggtgaaatgcagcatgccat

SEQ ID NO: 3964572 - DNA, 25 bp, Homo sapien
gccacacgttctctatctttaaatc

SEQ ID NO: 3964573 - DNA, 25 bp, Homo sapien
ctcgcattagccttttgggaatcca

SEQ ID NO: 3964574 - DNA, 25 bp, Homo sapien
tattgacgtactgacaactgagtag

SEQ ID NO: 3964575 - DNA, 25 bp, Homo sapien
cataattctgaatggtcattggtat

SEQ ID NO: 3964576 - DNA, 25 bp, Homo sapien
gagtagattctgagatgacaagtta

SEQ ID NO: 3964577 - DNA, 25 bp, Homo sapien
gatgacaagttaaatggtgctccca

SEQ ID NO: 3964578 - DNA, 25 bp, Homo sapien
atccattctttgatctccccaaatg

SEQ ID NO: 3964579 - DNA, 25 bp, Homo sapien
tatccattctttgatctccccaaat

SEQ ID NO: 3964580 - DNA, 25 bp, Homo sapien
gcatttggagatgacctaaaccagt

SEQ ID NO: 3964581 - DNA, 25 bp, Homo sapien
agcttcccagctgtattgtactgtc

SEQ ID NO: 3964582 - DNA, 25 bp, Homo sapien
gggatccaggctcaacttcatagca

SEQ ID NO: 3964583 - DNA, 25 bp, Homo sapien
ctaaaccagtttgggacagagccac

SEQ ID NO: 3964584 - DNA, 25 bp, Homo sapien
tcaggattatcttgactatttttgg

SEQ ID NO: 3964585 - DNA, 25 bp, Homo sapien
ggattatcttgactatttttggcca

SEQ ID NO: 3964586 - DNA, 25 bp, Homo sapien
aggattatcttgactatttttggcc

SEQ ID NO: 3964587 - DNA, 25 bp, Homo sapien
caggattatcttgactatttttggc

SEQ ID NO: 3964588 - DNA, 25 bp, Homo sapien
ggtaagacagtcttcataacacacg

SEQ ID NO: 3964589 - DNA, 25 bp, Homo sapien
tgggcagtggtaagacagtcttcat

SEQ ID NO: 3964590 - DNA, 25 bp, Homo sapien
cataacacacggagaaaactgtttt

SEQ ID NO: 3964591 - DNA, 25 bp, Homo sapien
cttcataacacacggagaaaactgt

SEQ ID NO: 3964592 - DNA, 25 bp, Homo sapien
tctggattctgtattctgcattagc

SEQ ID NO: 3964593 - DNA, 25 bp, Homo sapien
attagtctggattctgtattctgca

SEQ ID NO: 3964594 - DNA, 25 bp, Homo sapien
cttctgtaacttatgtgtagtctgc

SEQ ID NO: 3964595 - DNA, 25 bp, Homo sapien
atgtgtagtctgcattagtctggat

SEQ ID NO: 3964596 - DNA, 25 bp, Homo sapien
catttgatgcttccctttgttggct

SEQ ID NO: 3964597 - DNA, 25 bp, Homo sapien
gcaacaaatcgcctttggaaagtcc

SEQ ID NO: 3964598 - DNA, 25 bp, Homo sapien
ccccaagggagagtcctaaagagct

SEQ ID NO: 3964599 - DNA, 25 bp, Homo sapien
tcactgtaggcaacaaagccccaag

SEQ ID NO: 3964600 - DNA, 25 bp, Homo sapien
gaaattgtgggtcctctggatcaac

SEQ ID NO: 3964601 - DNA, 25 bp, Homo sapien
cagaaattgtgggtcctctggatca

SEQ ID NO: 3964602 - DNA, 25 bp, Homo sapien
ctgaatacggaaattggagtgatac

SEQ ID NO: 3964603 - DNA, 25 bp, Homo sapien
tggagtgatacatcagaaattgtgg

SEQ ID NO: 3964604 - DNA, 25 bp, Homo sapien
cattgtcatgatcatgtcgactctc

SEQ ID NO: 3964605 - DNA, 25 bp, Homo sapien
ttgtagatggatttgcaaagggaca

SEQ ID NO: 3964606 - DNA, 25 bp, Homo sapien
catgtcgactctctctgggaagatc

SEQ ID NO: 3964607 - DNA, 25 bp, Homo sapien
caattggccctaactatttctttgg

SEQ ID NO: 3964608 - DNA, 25 bp, Homo sapien
aagttatccaactgagtgattggtc

SEQ ID NO: 3964609 - DNA, 25 bp, Homo sapien
caagttatccaactgagtgattggt

SEQ ID NO: 3964610 - DNA, 25 bp, Homo sapien
agttatccaactgagtgattggtca

SEQ ID NO: 3964611 - DNA, 25 bp, Homo sapien
tcaccagaaagagcattatcttctt

SEQ ID NO: 3964612 - DNA, 25 bp, Homo sapien
accaaatttgaccatccacctgctt

SEQ ID NO: 3964613 - DNA, 25 bp, Homo sapien
tttgaagacagcgataggcaacata

SEQ ID NO: 3964614 - DNA, 25 bp, Homo sapien
cagcgataggcaacataaggcctcc

SEQ ID NO: 3964615 - DNA, 25 bp, Homo sapien
caaaccaaatttgaccatccacctg

SEQ ID NO: 3964616 - DNA, 25 bp, Homo sapien
tcacgagtcatcagtctgttccaca

SEQ ID NO: 3964617 - DNA, 25 bp, Homo sapien
tgattggaaccacatagaacactga

SEQ ID NO: 3964618 - DNA, 25 bp, Homo sapien
tctgttccacaagtagaatctttga

SEQ ID NO: 3964619 - DNA, 25 bp, Homo sapien
gaagaatcgattggtgaggctgcct

SEQ ID NO: 3964620 - DNA, 25 bp, Homo sapien
tatgcctttattgatcatgaatatg

SEQ ID NO: 3964621 - DNA, 25 bp, Homo sapien
gctgattggagcacacgtttttaaa

SEQ ID NO: 3964622 - DNA, 25 bp, Homo sapien
ctctgctgattggagcacacgtttt

SEQ ID NO: 3964623 - DNA, 25 bp, Homo sapien
gattggagcacacgtttttaaatac

SEQ ID NO: 3964624 - DNA, 25 bp, Homo sapien
agttcagccctacatttatagacat

SEQ ID NO: 3964625 - DNA, 25 bp, Homo sapien
catgggaatttcgatccatgtctag

SEQ ID NO: 3964626 - DNA, 25 bp, Homo sapien
aatttcgatccatgtctagcctgtc

SEQ ID NO: 3964627 - DNA, 25 bp, Homo sapien
tgggaatttcgatccatgtctagcc

SEQ ID NO: 3964628 - DNA, 25 bp, Homo sapien
gtcatacgttcctggactgaaggct

SEQ ID NO: 3964629 - DNA, 25 bp, Homo sapien
aatttgctgattgtgccattcagtt

SEQ ID NO: 3964630 - DNA, 25 bp, Homo sapien
gcttgctccttggtcatacgttcct

SEQ ID NO: 3964631 - DNA, 25 bp, Homo sapien
cattcagttgactctgcccttgctc

SEQ ID NO: 3964632 - DNA, 25 bp, Homo sapien
taattcacataactccacatagata

SEQ ID NO: 3964633 - DNA, 25 bp, Homo sapien
gcttcctctaatgtagtcttatcat

SEQ ID NO: 3964634 - DNA, 25 bp, Homo sapien
taggatgtatttatcttagccaagc

SEQ ID NO: 3964635 - DNA, 25 bp, Homo sapien
gatattgagatttatgtagtaggat

SEQ ID NO: 3964636 - DNA, 25 bp, Homo sapien
tgaacttgcctgcagttgatacatt

SEQ ID NO: 3964637 - DNA, 25 bp, Homo sapien
ctgaacttgcctgcagttgatacat

SEQ ID NO: 3964638 - DNA, 25 bp, Homo sapien
ccgagaatgtttagtcatgacaacc

SEQ ID NO: 3964639 - DNA, 25 bp, Homo sapien
ttaatcaggggacccactttggtga

SEQ ID NO: 3964640 - DNA, 25 bp, Homo sapien
tcccacttcccgagaatgtttagtc

SEQ ID NO: 3964641 - DNA, 25 bp, Homo sapien
accaaaagagattcgttaatcaggg

SEQ ID NO: 3964642 - DNA, 25 bp, Homo sapien
gcagccaaggtccaagaggtaggga

SEQ ID NO: 3964643 - DNA, 25 bp, Homo sapien
tgcagccaaggtccaagaggtaggg

SEQ ID NO: 3964644 - DNA, 25 bp, Homo sapien
cctgatatatcacgaagaacaagtt

SEQ ID NO: 3964645 - DNA, 25 bp, Homo sapien
tgcacctgatatatcacgaagaaca

SEQ ID NO: 3964646 - DNA, 25 bp, Homo sapien
tctgtgcacctgatatatcacgaag

SEQ ID NO: 3964647 - DNA, 25 bp, Homo sapien
tttctgtgcacctgatatatcacga

SEQ ID NO: 3964648 - DNA, 25 bp, Homo sapien
agctaaggggcacttcttccaggac

SEQ ID NO: 3964649 - DNA, 25 bp, Homo sapien
tcagctttcaaggacaaagctaagg

SEQ ID NO: 3964650 - DNA, 25 bp, Homo sapien
accatccatggtcatctcagccagt

SEQ ID NO: 3964651 - DNA, 25 bp, Homo sapien
tcatctcagccagtagagcccagac

SEQ ID NO: 3964652 - DNA, 25 bp, Homo sapien
caagtgattgctccgtcttgtgatc

SEQ ID NO: 3964653 - DNA, 25 bp, Homo sapien
gatcatcttccaagatgtgatgtaa

SEQ ID NO: 3964654 - DNA, 25 bp, Homo sapien
tgctccgtcttgtgatcatcttcca

SEQ ID NO: 3964655 - DNA, 25 bp, Homo sapien
caaagggcaagtgattgctccgtct

SEQ ID NO: 3964656 - DNA, 25 bp, Homo sapien
ctgtagtcagtagggcgacattggc

SEQ ID NO: 3964657 - DNA, 25 bp, Homo sapien
tcttcattacatagtgccactcttg

SEQ ID NO: 3964658 - DNA, 25 bp, Homo sapien
ggctggtgacagctcctaagatgct

SEQ ID NO: 3964659 - DNA, 25 bp, Homo sapien
caaagggtatctattccgtggttca

SEQ ID NO: 3964660 - DNA, 25 bp, Homo sapien
cctattcaaatttaggcgactttgc

SEQ ID NO: 3964661 - DNA, 25 bp, Homo sapien
agggctctgcttggacaagttcaaa

SEQ ID NO: 3964662 - DNA, 25 bp, Homo sapien
gatgggacttcatctaagctgtctc

SEQ ID NO: 3964663 - DNA, 25 bp, Homo sapien
tgtactgcatccttcatcttctgag

SEQ ID NO: 3964664 - DNA, 25 bp, Homo sapien
cctgtctccacggatacaccaaggg

SEQ ID NO: 3964665 - DNA, 25 bp, Homo sapien
gctgctttccgccataaagcacttg

SEQ ID NO: 3964666 - DNA, 25 bp, Homo sapien
tgatcctagaacaagctgagcaagg

SEQ ID NO: 3964667 - DNA, 25 bp, Homo sapien
atactgatcctagaacaagctgagc

SEQ ID NO: 3964668 - DNA, 25 bp, Homo sapien
gaagcttccctgtcataccgtgcat

SEQ ID NO: 3964669 - DNA, 25 bp, Homo sapien
tgtcataccgtgcatttactcccag

SEQ ID NO: 3964670 - DNA, 25 bp, Homo sapien
tgttgtcatctggtattgttttcat

SEQ ID NO: 3964671 - DNA, 25 bp, Homo sapien
cgtgcatttactcccagtttgttgt

SEQ ID NO: 3964672 - DNA, 25 bp, Homo sapien
actttgaaagcattgagagctgaac

SEQ ID NO: 3964673 - DNA, 25 bp, Homo sapien
ctttgaaagcattgagagctgaacc

SEQ ID NO: 3964674 - DNA, 25 bp, Homo sapien
agactttgaaagcattgagagctga

SEQ ID NO: 3964675 - DNA, 25 bp, Homo sapien
gactttgaaagcattgagagctgaa

SEQ ID NO: 3964676 - DNA, 25 bp, Homo sapien
tgtacaccacgactaccttaatatt

SEQ ID NO: 3964677 - DNA, 25 bp, Homo sapien
aggcttgtacaccacgactacctta

SEQ ID NO: 3964678 - DNA, 25 bp, Homo sapien
ggcttgtacaccacgactaccttaa

SEQ ID NO: 3964679 - DNA, 25 bp, Homo sapien
cttgtacaccacgactaccttaata

SEQ ID NO: 3964680 - DNA, 25 bp, Homo sapien
cagctcttttgctgagctgtcagaa

SEQ ID NO: 3964681 - DNA, 25 bp, Homo sapien
agcagtctacagctcttttgctgag

SEQ ID NO: 3964682 - DNA, 25 bp, Homo sapien
ttctgatatgttcagcagtctacag

SEQ ID NO: 3964683 - DNA, 25 bp, Homo sapien
gagctgtcagaagacgtgactttcc

SEQ ID NO: 3964684 - DNA, 25 bp, Homo sapien
tcattcgatgctgctacaaaacctt

SEQ ID NO: 3964685 - DNA, 25 bp, Homo sapien
cttaagggagcacagcaattgctaa

SEQ ID NO: 3964686 - DNA, 25 bp, Homo sapien
ctgatcttcatcattcgatgctgct

SEQ ID NO: 3964687 - DNA, 25 bp, Homo sapien
tgcaaaatgcttgaaactttgtcct

SEQ ID NO: 3964688 - DNA, 25 bp, Homo sapien
tatagggcactgatctaaaagccat

SEQ ID NO: 3964689 - DNA, 25 bp, Homo sapien
ttatagggcactgatctaaaagcca

SEQ ID NO: 3964690 - DNA, 25 bp, Homo sapien
tttatagggcactgatctaaaagcc

SEQ ID NO: 3964691 - DNA, 25 bp, Homo sapien
gtttatagggcactgatctaaaagc

SEQ ID NO: 3964692 - DNA, 25 bp, Homo sapien
gcattgctgcagcaaccaacttcat

SEQ ID NO: 3964693 - DNA, 25 bp, Homo sapien
tgtcttccaagcattgctgcagcaa

SEQ ID NO: 3964694 - DNA, 25 bp, Homo sapien
tcttccaagcattgctgcagcaacc

SEQ ID NO: 3964695 - DNA, 25 bp, Homo sapien
cttgtcttccaagcattgctgcagc

SEQ ID NO: 3964696 - DNA, 25 bp, Homo sapien
gctgggcacattgctactgaactga

SEQ ID NO: 3964697 - DNA, 25 bp, Homo sapien
tgcttcgtatcatgtgctgggcaca

SEQ ID NO: 3964698 - DNA, 25 bp, Homo sapien
taaatatctgtgcttcgtatcatgt

SEQ ID NO: 3964699 - DNA, 25 bp, Homo sapien
tgaactgatatcaaatggcttttcc

SEQ ID NO: 3964700 - DNA, 25 bp, Homo sapien
ccattcgaaaatttgtcaatggtag

SEQ ID NO: 3964701 - DNA, 25 bp, Homo sapien
ggtaggatcctagctgcgttgtaac

SEQ ID NO: 3964702 - DNA, 25 bp, Homo sapien
gaggatgtcaagactcccattcgaa

SEQ ID NO: 3964703 - DNA, 25 bp, Homo sapien
actgatagtaaaggtgctgaatgac

SEQ ID NO: 3964704 - DNA, 25 bp, Homo sapien
gctgtcaagttctactattaatcga

SEQ ID NO: 3964705 - DNA, 25 bp, Homo sapien
gccttgaggaatgtgtaaagatcca

SEQ ID NO: 3964706 - DNA, 25 bp, Homo sapien
taggtctcctgccagttagcatgcc

SEQ ID NO: 3964707 - DNA, 25 bp, Homo sapien
gaggaactatggcacactggaagag

SEQ ID NO: 3964708 - DNA, 25 bp, Homo sapien
gtgctgaagtgattaggaacagtct

SEQ ID NO: 3964709 - DNA, 25 bp, Homo sapien
cagagcgatgactctgtgctgaagt

SEQ ID NO: 3964710 - DNA, 25 bp, Homo sapien
cccacagaagataaaccctgagctg

SEQ ID NO: 3964711 - DNA, 25 bp, Homo sapien
taaatgccacgtttagccttccaga

SEQ ID NO: 3964712 - DNA, 25 bp, Homo sapien
tgcatacgtcagaaaaagtggaggc

SEQ ID NO: 3964713 - DNA, 25 bp, Homo sapien
tacgtcagaaaaagtggaggcactc

SEQ ID NO: 3964714 - DNA, 25 bp, Homo sapien
ttgcagtgaaatccaatgcatacgt

SEQ ID NO: 3964715 - DNA, 25 bp, Homo sapien
gaaatccaatgcatacgtcagaaaa

SEQ ID NO: 3964716 - DNA, 25 bp, Homo sapien
cagaggatctgcagagaatccttag

SEQ ID NO: 3964717 - DNA, 25 bp, Homo sapien
agctcgccttttgccccagaggatc

SEQ ID NO: 3964718 - DNA, 25 bp, Homo sapien
aggatctgcagagaatccttagcac

SEQ ID NO: 3964719 - DNA, 25 bp, Homo sapien
cagctcgccttttgccccagaggat

SEQ ID NO: 3964720 - DNA, 25 bp, Homo sapien
tcacttttgatttttccaatgtcca

SEQ ID NO: 3964721 - DNA, 25 bp, Homo sapien
tttctcacttttgatttttccaatg

SEQ ID NO: 3964722 - DNA, 25 bp, Homo sapien
cacttttgatttttccaatgtccat

SEQ ID NO: 3964723 - DNA, 25 bp, Homo sapien
tctcacttttgatttttccaatgtc

SEQ ID NO: 3964724 - DNA, 25 bp, Homo sapien
tatgtctccagatgatgcacacatg

SEQ ID NO: 3964725 - DNA, 25 bp, Homo sapien
tgtgtacaattgaccctactcatgg

SEQ ID NO: 3964726 - DNA, 25 bp, Homo sapien
gattctgagtgagctagataaaaca

SEQ ID NO: 3964727 - DNA, 25 bp, Homo sapien
cagaagtgagtggatatctctacaa

SEQ ID NO: 3964728 - DNA, 25 bp, Homo sapien
cttcttgttcatatgatgtcaccat

SEQ ID NO: 3964729 - DNA, 25 bp, Homo sapien
taacctagctagtagactatcaatt

SEQ ID NO: 3964730 - DNA, 25 bp, Homo sapien
cctagctagtagactatcaattttg

SEQ ID NO: 3964731 - DNA, 25 bp, Homo sapien
ttcttggttaacctagctagtagac

SEQ ID NO: 3964732 - DNA, 25 bp, Homo sapien
ggttaacctagctagtagactatca

SEQ ID NO: 3964733 - DNA, 25 bp, Homo sapien
cacgcagcagggttcctttgacaga

SEQ ID NO: 3964734 - DNA, 25 bp, Homo sapien
ccaccacgcagcagggttcctttga

SEQ ID NO: 3964735 - DNA, 25 bp, Homo sapien
ccacgcagcagggttcctttgacag

SEQ ID NO: 3964736 - DNA, 25 bp, Homo sapien
caccacgcagcagggttcctttgac

SEQ ID NO: 3964737 - DNA, 25 bp, Homo sapien
caccgctttattattctcggtgtat

SEQ ID NO: 3964738 - DNA, 25 bp, Homo sapien
ctttattattctcggtgtattttgc

SEQ ID NO: 3964739 - DNA, 25 bp, Homo sapien
tttatacaccgctttattattctcg

SEQ ID NO: 3964740 - DNA, 25 bp, Homo sapien
ttattctcggtgtattttgctttgt

SEQ ID NO: 3964741 - DNA, 25 bp, Homo sapien
gcatgggtcccacctttgctcaaag

SEQ ID NO: 3964742 - DNA, 25 bp, Homo sapien
ttgtgcatgggtcccacctttgctc

SEQ ID NO: 3964743 - DNA, 25 bp, Homo sapien
gtgcatgggtcccacctttgctcaa

SEQ ID NO: 3964744 - DNA, 25 bp, Homo sapien
catctcttccttgagaattcccaag

SEQ ID NO: 3964745 - DNA, 25 bp, Homo sapien
tccagcaaatggtacacatcagggt

SEQ ID NO: 3964746 - DNA, 25 bp, Homo sapien
tgacctctcacaacattcggcactg

SEQ ID NO: 3964747 - DNA, 25 bp, Homo sapien
catgtcccgtgcaattctgaactct

SEQ ID NO: 3964748 - DNA, 25 bp, Homo sapien
tgtagccagctcataacggcttgtg

SEQ ID NO: 3964749 - DNA, 25 bp, Homo sapien
ctatatttagaatgaacaccaaggg

SEQ ID NO: 3964750 - DNA, 25 bp, Homo sapien
tatgcaattagcctttatgaaatcc

SEQ ID NO: 3964751 - DNA, 25 bp, Homo sapien
catacattctgccttgttagtaaaa

SEQ ID NO: 3964752 - DNA, 25 bp, Homo sapien
gccaaaaacctcaagcctgtggtgt

SEQ ID NO: 3964753 - DNA, 25 bp, Homo sapien
tactactactctaggcaaggcactg

SEQ ID NO: 3964754 - DNA, 25 bp, Homo sapien
tgtatcacaatcactgggagggctt

SEQ ID NO: 3964755 - DNA, 25 bp, Homo sapien
aaatgccaggtatctcatgtcgacc

SEQ ID NO: 3964756 - DNA, 25 bp, Homo sapien
gaacaactggccaaggtcctaagaa

SEQ ID NO: 3964757 - DNA, 25 bp, Homo sapien
tgtgcctgaactacatgaagtcatg

SEQ ID NO: 3964758 - DNA, 25 bp, Homo sapien
catctctgcctgacaaacttctgac

SEQ ID NO: 3964759 - DNA, 25 bp, Homo sapien
tgaagtcatggacatcaggatcttt

SEQ ID NO: 3964760 - DNA, 25 bp, Homo sapien
gatctttaggacaccctcattatca

SEQ ID NO: 3964761 - DNA, 25 bp, Homo sapien
tacatgaaactgaaccctgctgtgc

SEQ ID NO: 3964762 - DNA, 25 bp, Homo sapien
ccaggccagtatttaggaaacgtca

SEQ ID NO: 3964763 - DNA, 25 bp, Homo sapien
tattctaccggcacaaagggatctt

SEQ ID NO: 3964764 - DNA, 25 bp, Homo sapien
taaaaagtcccgatgcagtgagtgt

SEQ ID NO: 3964765 - DNA, 25 bp, Homo sapien
cagcaggtcgcctgtagcctttggg

SEQ ID NO: 3964766 - DNA, 25 bp, Homo sapien
caagagcgaaattctttcctgatca

SEQ ID NO: 3964767 - DNA, 25 bp, Homo sapien
gaaggatgatgtacttgacaagagc

SEQ ID NO: 3964768 - DNA, 25 bp, Homo sapien
cacaaagttagtggtcatgaaggat

SEQ ID NO: 3964769 - DNA, 25 bp, Homo sapien
agcagatccccgctttggcgttgaa

SEQ ID NO: 3964770 - DNA, 25 bp, Homo sapien
tttgcaatcggagagatgagtcacc

SEQ ID NO: 3964771 - DNA, 25 bp, Homo sapien
gagtggcgtgtcttgctctttgcaa

SEQ ID NO: 3964772 - DNA, 25 bp, Homo sapien
taaattgcatactgtgccccagcag

SEQ ID NO: 3964773 - DNA, 25 bp, Homo sapien
cataccctacggaaatgcgactgag

SEQ ID NO: 3964774 - DNA, 25 bp, Homo sapien
gagctgtatccagttgaggctacca

SEQ ID NO: 3964775 - DNA, 25 bp, Homo sapien
caatgtgctgcgatatcttcctgga

SEQ ID NO: 3964776 - DNA, 25 bp, Homo sapien
tgccaacagacaggaggaaccagac

SEQ ID NO: 3964777 - DNA, 25 bp, Homo sapien
tggccaggcctccttagttcagtct

SEQ ID NO: 3964778 - DNA, 25 bp, Homo sapien
tcagtctgagggacattgggcctgc

SEQ ID NO: 3964779 - DNA, 25 bp, Homo sapien
ggcataaacattaatccccgggatc

SEQ ID NO: 3964780 - DNA, 25 bp, Homo sapien
attgggcctgctttcagagtgactg

SEQ ID NO: 3964781 - DNA, 25 bp, Homo sapien
acatcactgtaacacatgcttctga

SEQ ID NO: 3964782 - DNA, 25 bp, Homo sapien
atcactgtaacacatgcttctgaac

SEQ ID NO: 3964783 - DNA, 25 bp, Homo sapien
cacatcactgtaacacatgcttctg

SEQ ID NO: 3964784 - DNA, 25 bp, Homo sapien
gcacatcactgtaacacatgcttct

SEQ ID NO: 3964785 - DNA, 25 bp, Homo sapien
ggaacgtggatagagggacacgcac

SEQ ID NO: 3964786 - DNA, 25 bp, Homo sapien
tgggggaacgtggatagagggacac

SEQ ID NO: 3964787 - DNA, 25 bp, Homo sapien
gtgggggaacgtggatagagggaca

SEQ ID NO: 3964788 - DNA, 25 bp, Homo sapien
ggggaacgtggatagagggacacgc

SEQ ID NO: 3964789 - DNA, 25 bp, Homo sapien
ttaaacttgtagatgacgaacactg

SEQ ID NO: 3964790 - DNA, 25 bp, Homo sapien
gatccactgtgggttggagtgaggt

SEQ ID NO: 3964791 - DNA, 25 bp, Homo sapien
ctgtgggttggagtgaggtccacca

SEQ ID NO: 3964792 - DNA, 25 bp, Homo sapien
agcagcatcagcatggcagatccac

SEQ ID NO: 3964793 - DNA, 25 bp, Homo sapien
actttgcaattaatttctaccctct

SEQ ID NO: 3964794 - DNA, 25 bp, Homo sapien
ccatctcacagtcaaacctgttgta

SEQ ID NO: 3964795 - DNA, 25 bp, Homo sapien
cagtcaaacctgttgtacctgtaga

SEQ ID NO: 3964796 - DNA, 25 bp, Homo sapien
tttgcaattaatttctaccctctta

SEQ ID NO: 3964797 - DNA, 25 bp, Homo sapien
ggttgttaagaccagtgaagaggcc

SEQ ID NO: 3964798 - DNA, 25 bp, Homo sapien
aagaggccaccgtcgtaagcatcat

SEQ ID NO: 3964799 - DNA, 25 bp, Homo sapien
tactggagatagtcgttcacctttc

SEQ ID NO: 3964800 - DNA, 25 bp, Homo sapien
cattctgccaattaggttagctcca

SEQ ID NO: 3964801 - DNA, 25 bp, Homo sapien
catacctgtcaggagtggttagacc

SEQ ID NO: 3964802 - DNA, 25 bp, Homo sapien
gtcaggagtggttagacccttaaga

SEQ ID NO: 3964803 - DNA, 25 bp, Homo sapien
catgaaaaccaagaaccacaggaat

SEQ ID NO: 3964804 - DNA, 25 bp, Homo sapien
tcagaaacatacctgtcaggagtgg

SEQ ID NO: 3964805 - DNA, 25 bp, Homo sapien
cacaattgctgttcccgttgacacg

SEQ ID NO: 3964806 - DNA, 25 bp, Homo sapien
gccagctctaatgcgttatgaccag

SEQ ID NO: 3964807 - DNA, 25 bp, Homo sapien
tgagtgactgtgctcctgtggacac

SEQ ID NO: 3964808 - DNA, 25 bp, Homo sapien
taagaaaatcgagccctgagtgact

SEQ ID NO: 3964809 - DNA, 25 bp, Homo sapien
tctgttgtttaacggttctccatta

SEQ ID NO: 3964810 - DNA, 25 bp, Homo sapien
gaaggaagcacggactaggattccc

SEQ ID NO: 3964811 - DNA, 25 bp, Homo sapien
aagggaacctccaagatccgatgac

SEQ ID NO: 3964812 - DNA, 25 bp, Homo sapien
cagaaccccgggacatggacactga

SEQ ID NO: 3964813 - DNA, 25 bp, Homo sapien
cagcatggacaaggactcggactcc

SEQ ID NO: 3964814 - DNA, 25 bp, Homo sapien
tgagcagcatggacaaggactcgga

SEQ ID NO: 3964815 - DNA, 25 bp, Homo sapien
gagttttggttgagcgtgtggatca

SEQ ID NO: 3964816 - DNA, 25 bp, Homo sapien
tcagctcgaagtgtactgagttttg

SEQ ID NO: 3964817 - DNA, 25 bp, Homo sapien
gaactgaactgccccacagataaac

SEQ ID NO: 3964818 - DNA, 25 bp, Homo sapien
agaagcccctgattggtgacagaac

SEQ ID NO: 3964819 - DNA, 25 bp, Homo sapien
tgcagaagcccctgattggtgacag

SEQ ID NO: 3964820 - DNA, 25 bp, Homo sapien
agaactgaactgccccacagataaa

SEQ ID NO: 3964821 - DNA, 25 bp, Homo sapien
catgctttgtgagaaaaaatttgca

SEQ ID NO: 3964822 - DNA, 25 bp, Homo sapien
cagtgctggcatcttcatggaaagg

SEQ ID NO: 3964823 - DNA, 25 bp, Homo sapien
gacattatatatgctgtgaacacta

SEQ ID NO: 3964824 - DNA, 25 bp, Homo sapien
tttctagcagaacacatcttaggtg

SEQ ID NO: 3964825 - DNA, 25 bp, Homo sapien
taaaaggacagtggaggctcaattc

SEQ ID NO: 3964826 - DNA, 25 bp, Homo sapien
tcattacatacagcacaagagggaa

SEQ ID NO: 3964827 - DNA, 25 bp, Homo sapien
gtggagcggccatcacaagcatttc

SEQ ID NO: 3964828 - DNA, 25 bp, Homo sapien
tgggcagggccttcaatcaagaaag

SEQ ID NO: 3964829 - DNA, 25 bp, Homo sapien
acaaagagttcagcagtggtgggta

SEQ ID NO: 3964830 - DNA, 25 bp, Homo sapien
cagctggatcctgatagggtaggac

SEQ ID NO: 3964831 - DNA, 25 bp, Homo sapien
gggtaagccagggagcaccgccacc

SEQ ID NO: 3964832 - DNA, 25 bp, Homo sapien
ccaggatgtgctggcctggaacccc

SEQ ID NO: 3964833 - DNA, 25 bp, Homo sapien
tataattcctaatggcctaattgtg

SEQ ID NO: 3964834 - DNA, 25 bp, Homo sapien
ctaatggcctaattgtgaactctgc

SEQ ID NO: 3964835 - DNA, 25 bp, Homo sapien
gtggacaaaggagtttaggatgtac

SEQ ID NO: 3964836 - DNA, 25 bp, Homo sapien
cttcactggcaggtacagtagctgg

SEQ ID NO: 3964837 - DNA, 25 bp, Homo sapien
tcttcctgctgggttagtttgtttg

SEQ ID NO: 3964838 - DNA, 25 bp, Homo sapien
tccatagttgcatcccctttagggc

SEQ ID NO: 3964839 - DNA, 25 bp, Homo sapien
gaccccatgtttgtccgtggttcca

SEQ ID NO: 3964840 - DNA, 25 bp, Homo sapien
taagcagaacaagagtcacaagagg

SEQ ID NO: 3964841 - DNA, 25 bp, Homo sapien
ggacaagcgaagagaccggaattcc

SEQ ID NO: 3964842 - DNA, 25 bp, Homo sapien
cgggttgtagtcatccaggtttgga

SEQ ID NO: 3964843 - DNA, 25 bp, Homo sapien
tccactcagggatgtccgggttgta

SEQ ID NO: 3964844 - DNA, 25 bp, Homo sapien
gattttttgatgactcgaccgatgt

SEQ ID NO: 3964845 - DNA, 25 bp, Homo sapien
agtaaatctgaaggatatgcttccc

SEQ ID NO: 3964846 - DNA, 25 bp, Homo sapien
catatactgcgatggtctttgtgtc

SEQ ID NO: 3964847 - DNA, 25 bp, Homo sapien
ctgaaggatatgcttccctccaagg

SEQ ID NO: 3964848 - DNA, 25 bp, Homo sapien
tctgaagtaaatctgaaggatatgc

SEQ ID NO: 3964849 - DNA, 25 bp, Homo sapien
taagctagggctgctaagagtcact

SEQ ID NO: 3964850 - DNA, 25 bp, Homo sapien
tacttgagcaccaagggagcttgtt

SEQ ID NO: 3964851 - DNA, 25 bp, Homo sapien
cttcaggcagcgtgaattgagcttc

SEQ ID NO: 3964852 - DNA, 25 bp, Homo sapien
tagatcgcatgtggaaggtgaaccc

SEQ ID NO: 3964853 - DNA, 25 bp, Homo sapien
cactgccgtcgcattgacctctttg

SEQ ID NO: 3964854 - DNA, 25 bp, Homo sapien
gggccacagcactgccgtcgcattg

SEQ ID NO: 3964855 - DNA, 25 bp, Homo sapien
taccaccacacgtaagtgagggtgc

SEQ ID NO: 3964856 - DNA, 25 bp, Homo sapien
tccgtgttgtttccgtaccaccaca

SEQ ID NO: 3964857 - DNA, 25 bp, Homo sapien
aagagacaggtgcacgtgctccaag

SEQ ID NO: 3964858 - DNA, 25 bp, Homo sapien
gggaagagacaggtgcacgtgctcc

SEQ ID NO: 3964859 - DNA, 25 bp, Homo sapien
acaaagggaagagacaggtgcacgt

SEQ ID NO: 3964860 - DNA, 25 bp, Homo sapien
aaagggaagagacaggtgcacgtgc

SEQ ID NO: 3964861 - DNA, 25 bp, Homo sapien
tggcatccacagtcactcatgacac

SEQ ID NO: 3964862 - DNA, 25 bp, Homo sapien
cctgagagtgtgactcggttatgtt

SEQ ID NO: 3964863 - DNA, 25 bp, Homo sapien
cggttatgttcttgttctgacttgc

SEQ ID NO: 3964864 - DNA, 25 bp, Homo sapien
cttgctttgagcataaagtgatgcc

SEQ ID NO: 3964865 - DNA, 25 bp, Homo sapien
acaggacggcgctgtcagaacccag

SEQ ID NO: 3964866 - DNA, 25 bp, Homo sapien
aagttacatgtaagtacaggacggc

SEQ ID NO: 3964867 - DNA, 25 bp, Homo sapien
gtaagtacaggacggcgctgtcaga

SEQ ID NO: 3964868 - DNA, 25 bp, Homo sapien
tacatgtaagtacaggacggcgctg

SEQ ID NO: 3964869 - DNA, 25 bp, Homo sapien
tgacgtaagacaccgcgataccatc

SEQ ID NO: 3964870 - DNA, 25 bp, Homo sapien
tgcacggtcacacggaaaatgccca

SEQ ID NO: 3964871 - DNA, 25 bp, Homo sapien
ccatggagctgagattgacgtaaga

SEQ ID NO: 3964872 - DNA, 25 bp, Homo sapien
tctgatagacgtgtttgatcccatc

SEQ ID NO: 3964873 - DNA, 25 bp, Homo sapien
gccatgtatgacagcagaaggcagc

SEQ ID NO: 3964874 - DNA, 25 bp, Homo sapien
tgctgtcgctttccactaaaggtga

SEQ ID NO: 3964875 - DNA, 25 bp, Homo sapien
tactccaatcaaatgtgaagtcccc

SEQ ID NO: 3964876 - DNA, 25 bp, Homo sapien
gtccccaggacctcctgatattggg

SEQ ID NO: 3964877 - DNA, 25 bp, Homo sapien
caaagcagctaggacagagtgttcc

SEQ ID NO: 3964878 - DNA, 25 bp, Homo sapien
tcatgctgtataggtgtttcttcac

SEQ ID NO: 3964879 - DNA, 25 bp, Homo sapien
caaaactgagctctggaagatgact

SEQ ID NO: 3964880 - DNA, 25 bp, Homo sapien
gtgttcccaggatgtctggtttgaa

SEQ ID NO: 3964881 - DNA, 25 bp, Homo sapien
aaacctacagtgaacttagatgctc

SEQ ID NO: 3964882 - DNA, 25 bp, Homo sapien
aacctacagtgaacttagatgctct

SEQ ID NO: 3964883 - DNA, 25 bp, Homo sapien
ttctaattgcaccatgagagtgacg

SEQ ID NO: 3964884 - DNA, 25 bp, Homo sapien
ttccatcagccgtgactatccgcag

SEQ ID NO: 3964885 - DNA, 25 bp, Homo sapien
gttgtgtccttgttccgctgtcagc

SEQ ID NO: 3964886 - DNA, 25 bp, Homo sapien
ccctgggcacttctgcggtttggca

SEQ ID NO: 3964887 - DNA, 25 bp, Homo sapien
cctgcaataacaggagttctgctta

SEQ ID NO: 3964888 - DNA, 25 bp, Homo sapien
tgaatcctgcaataacaggagttct

SEQ ID NO: 3964889 - DNA, 25 bp, Homo sapien
aatcctgcaataacaggagttctgc

SEQ ID NO: 3964890 - DNA, 25 bp, Homo sapien
cctgaatcctgcaataacaggagtt

SEQ ID NO: 3964891 - DNA, 25 bp, Homo sapien
aatggttctattttcatcccagcag

SEQ ID NO: 3964892 - DNA, 25 bp, Homo sapien
atggttctattttcatcccagcagc

SEQ ID NO: 3964893 - DNA, 25 bp, Homo sapien
tggttctattttcatcccagcagct

SEQ ID NO: 3964894 - DNA, 25 bp, Homo sapien
ttggtaaagcattcttcaatctgcc

SEQ ID NO: 3964895 - DNA, 25 bp, Homo sapien
gcgctctgaatattactgggatgca

SEQ ID NO: 3964896 - DNA, 25 bp, Homo sapien
acttatgattatgttggacctgcgc

SEQ ID NO: 3964897 - DNA, 25 bp, Homo sapien
ctccgtaataacaaggcaacttatg

SEQ ID NO: 3964898 - DNA, 25 bp, Homo sapien
tcaaggcaacagctctttggactat

SEQ ID NO: 3964899 - DNA, 25 bp, Homo sapien
tccatggctggctaagcaggctttc

SEQ ID NO: 3964900 - DNA, 25 bp, Homo sapien
tgtagcagccatagcatcagcaatc

SEQ ID NO: 3964901 - DNA, 25 bp, Homo sapien
tggactattcccctcaatggagtaa

SEQ ID NO: 3964902 - DNA, 25 bp, Homo sapien
gaactgggacatatggccacacaca

SEQ ID NO: 3964903 - DNA, 25 bp, Homo sapien
ttagagagttgcacctcacacaggg

SEQ ID NO: 3964904 - DNA, 25 bp, Homo sapien
gagcctaccagttgtacgactaagt

SEQ ID NO: 3964905 - DNA, 25 bp, Homo sapien
gcttgatgaaatggtgaactgggac

SEQ ID NO: 3964906 - DNA, 25 bp, Homo sapien
gatgtgggcaagaatcgccatgtga

SEQ ID NO: 3964907 - DNA, 25 bp, Homo sapien
aagaatcgccatgtgagaaagcaag

SEQ ID NO: 3964908 - DNA, 25 bp, Homo sapien
taagaattgttaatgccaaggccat

SEQ ID NO: 3964909 - DNA, 25 bp, Homo sapien
attgttaatgccaaggccattgatg

SEQ ID NO: 3964910 - DNA, 25 bp, Homo sapien
accccagtgtcatgcatgaaaagat

SEQ ID NO: 3964911 - DNA, 25 bp, Homo sapien
caaccccagtgtcatgcatgaaaag

SEQ ID NO: 3964912 - DNA, 25 bp, Homo sapien
ccaaccccagtgtcatgcatgaaaa

SEQ ID NO: 3964913 - DNA, 25 bp, Homo sapien
cccaaccccagtgtcatgcatgaaa

SEQ ID NO: 3964914 - DNA, 25 bp, Homo sapien
tctgtagcaaccaacaattattgag

SEQ ID NO: 3964915 - DNA, 25 bp, Homo sapien
tccttgacgcacactgaaaagtatc

SEQ ID NO: 3964916 - DNA, 25 bp, Homo sapien
ggttcttggctagaaaacagctaca

SEQ ID NO: 3964917 - DNA, 25 bp, Homo sapien
gatgagtctgtaaataatgcaagtg

SEQ ID NO: 3964918 - DNA, 25 bp, Homo sapien
tatgtagagaggaagttttcaagtt

SEQ ID NO: 3964919 - DNA, 25 bp, Homo sapien
ttatgtagagaggaagttttcaagt

SEQ ID NO: 3964920 - DNA, 25 bp, Homo sapien
atgtagagaggaagttttcaagttt

SEQ ID NO: 3964921 - DNA, 25 bp, Homo sapien
tatttgtaaatagatacctaactta

SEQ ID NO: 3964922 - DNA, 25 bp, Homo sapien
cttggacccactgtatatttgtaaa

SEQ ID NO: 3964923 - DNA, 25 bp, Homo sapien
ccaaatgtatcttgatagtataaac

SEQ ID NO: 3964924 - DNA, 25 bp, Homo sapien
attttgctagaatttatgtgtgtat

SEQ ID NO: 3964925 - DNA, 25 bp, Homo sapien
tcttccatgaggaattaatggcccc

SEQ ID NO: 3964926 - DNA, 25 bp, Homo sapien
aacacattatctggcctgagtggca

SEQ ID NO: 3964927 - DNA, 25 bp, Homo sapien
taaattttgcagtatgctccccggt

SEQ ID NO: 3964928 - DNA, 25 bp, Homo sapien
tattgagaaactaaccctgaagagc

SEQ ID NO: 3964929 - DNA, 25 bp, Homo sapien
taaggtgatgactatgtgctaggca

SEQ ID NO: 3964930 - DNA, 25 bp, Homo sapien
gacatttaatcaaattctgaaggca

SEQ ID NO: 3964931 - DNA, 25 bp, Homo sapien
acatacagtgtgacatttaatcaaa

SEQ ID NO: 3964932 - DNA, 25 bp, Homo sapien
tttgtaaggtgatgactatgtgcta

SEQ ID NO: 3964933 - DNA, 25 bp, Homo sapien
tcaccgaacaaaacatccccaattg

SEQ ID NO: 3964934 - DNA, 25 bp, Homo sapien
cccaattgtatttcactctcaatcc

SEQ ID NO: 3964935 - DNA, 25 bp, Homo sapien
ctcactttttcaccgaacaaaacat

SEQ ID NO: 3964936 - DNA, 25 bp, Homo sapien
catccccaattgtatttcactctca

SEQ ID NO: 3964937 - DNA, 25 bp, Homo sapien
caccttcatgtcaaatgacatgtag

SEQ ID NO: 3964938 - DNA, 25 bp, Homo sapien
tttccaccttcatgtcaaatgacat

SEQ ID NO: 3964939 - DNA, 25 bp, Homo sapien
ttgctttccaccttcatgtcaaatg

SEQ ID NO: 3964940 - DNA, 25 bp, Homo sapien
gctttccaccttcatgtcaaatgac

SEQ ID NO: 3964941 - DNA, 25 bp, Homo sapien
tattgggcacaataataaccgatgc

SEQ ID NO: 3964942 - DNA, 25 bp, Homo sapien
cccatcatggagaagcaggtaaacc

SEQ ID NO: 3964943 - DNA, 25 bp, Homo sapien
tgtgggtatgagaaaccctgacgcc

SEQ ID NO: 3964944 - DNA, 25 bp, Homo sapien
cagggagccaatcgtggagaacaca

SEQ ID NO: 3964945 - DNA, 25 bp, Homo sapien
aaaatgccggcaggcactggccatt

SEQ ID NO: 3964946 - DNA, 25 bp, Homo sapien
gaaccaaaatgccggcaggcactgg

SEQ ID NO: 3964947 - DNA, 25 bp, Homo sapien
cccaagctgcaatcctttgacagag

SEQ ID NO: 3964948 - DNA, 25 bp, Homo sapien
ctattgaggtaactctgtcccaagc

SEQ ID NO: 3964949 - DNA, 25 bp, Homo sapien
caagacatctggatctaccaagaga

SEQ ID NO: 3964950 - DNA, 25 bp, Homo sapien
ctttgggatgctcttccaagacatc

SEQ ID NO: 3964951 - DNA, 25 bp, Homo sapien
ccttggtgagaaattcatcgcagag

SEQ ID NO: 3964952 - DNA, 25 bp, Homo sapien
tttaacacggccacatgtggcacag

SEQ ID NO: 3964953 - DNA, 25 bp, Homo sapien
tacttcggaaatagccaaagacttc

SEQ ID NO: 3964954 - DNA, 25 bp, Homo sapien
cctctgagttgcctgatattcttgg

SEQ ID NO: 3964955 - DNA, 25 bp, Homo sapien
gagcctctgagttgcctgatattct

SEQ ID NO: 3964956 - DNA, 25 bp, Homo sapien
ctctctacttcggaaatagccaaag

SEQ ID NO: 3964957 - DNA, 25 bp, Homo sapien
caagcattagtatgaactggcccat

SEQ ID NO: 3964958 - DNA, 25 bp, Homo sapien
ttttgcacataccagcaggatttgg

SEQ ID NO: 3964959 - DNA, 25 bp, Homo sapien
gcaggcagcaatcggcaagcattag

SEQ ID NO: 3964960 - DNA, 25 bp, Homo sapien
ggacaaccagtgtttgcttcaggaa

SEQ ID NO: 3964961 - DNA, 25 bp, Homo sapien
taacattgacaacaagccaagggct

SEQ ID NO: 3964962 - DNA, 25 bp, Homo sapien
tgaacaattaacattgacaacaagc

SEQ ID NO: 3964963 - DNA, 25 bp, Homo sapien
ttcacagtgcccacaagctagcttt

SEQ ID NO: 3964964 - DNA, 25 bp, Homo sapien
caagccaagggcttcacagtgccca

SEQ ID NO: 3964965 - DNA, 25 bp, Homo sapien
tatgaagctggccacttagccctat

SEQ ID NO: 3964966 - DNA, 25 bp, Homo sapien
gcccatgtggatttgatacaccaaa

SEQ ID NO: 3964967 - DNA, 25 bp, Homo sapien
tccaggagataattgcacaagctca

SEQ ID NO: 3964968 - DNA, 25 bp, Homo sapien
ccacttagccctatgtatgttacta

SEQ ID NO: 3964969 - DNA, 25 bp, Homo sapien
ttccttgcatacacttccgctctga

SEQ ID NO: 3964970 - DNA, 25 bp, Homo sapien
catacacttccgctctgattttcgc

SEQ ID NO: 3964971 - DNA, 25 bp, Homo sapien
ttgcatacacttccgctctgatttt

SEQ ID NO: 3964972 - DNA, 25 bp, Homo sapien
tacacttccgctctgattttcgctt

SEQ ID NO: 3964973 - DNA, 25 bp, Homo sapien
cttgggcacatagcttggactttct

SEQ ID NO: 3964974 - DNA, 25 bp, Homo sapien
aagcagagaaggatcacagatactt

SEQ ID NO: 3964975 - DNA, 25 bp, Homo sapien
gaaggatcacagatacttgggcaca

SEQ ID NO: 3964976 - DNA, 25 bp, Homo sapien
cagatacttgggcacatagcttgga

SEQ ID NO: 3964977 - DNA, 25 bp, Homo sapien
tgtaatctactttgaccagctgcca

SEQ ID NO: 3964978 - DNA, 25 bp, Homo sapien
tcggcacaccgtctatcaaaaatgg

SEQ ID NO: 3964979 - DNA, 25 bp, Homo sapien
tatcaaaaatggacttgtaatctac

SEQ ID NO: 3964980 - DNA, 25 bp, Homo sapien
tgtagtcctcttcggcacaccgtct

SEQ ID NO: 3964981 - DNA, 25 bp, Homo sapien
aaaagtggaatagatgtgaaactgt

SEQ ID NO: 3964982 - DNA, 25 bp, Homo sapien
ggaatagatgtgaaactgtatttgc

SEQ ID NO: 3964983 - DNA, 25 bp, Homo sapien
gtgaaactgtatttgctccaagatc

SEQ ID NO: 3964984 - DNA, 25 bp, Homo sapien
tagatgtgaaactgtatttgctcca

SEQ ID NO: 3964985 - DNA, 25 bp, Homo sapien
tgggagagatgtgtgtttcatagca

SEQ ID NO: 3964986 - DNA, 25 bp, Homo sapien
caaagatgtcgaattgggagagatg

SEQ ID NO: 3964987 - DNA, 25 bp, Homo sapien
tttcatagcaaccaggactccacct

SEQ ID NO: 3964988 - DNA, 25 bp, Homo sapien
gatgtgtgtttcatagcaaccagga

SEQ ID NO: 3964989 - DNA, 25 bp, Homo sapien
ctgtctccaggtgttccctgcatct

SEQ ID NO: 3964990 - DNA, 25 bp, Homo sapien
tctccaggtgttccctgcatctgaa

SEQ ID NO: 3964991 - DNA, 25 bp, Homo sapien
aggtgttccctgcatctgaagagac

SEQ ID NO: 3964992 - DNA, 25 bp, Homo sapien
tccaggtgttccctgcatctgaaga

SEQ ID NO: 3964993 - DNA, 25 bp, Homo sapien
atgccactatgatgcttggagctgt

SEQ ID NO: 3964994 - DNA, 25 bp, Homo sapien
cactatgatgcttggagctgtgtct

SEQ ID NO: 3964995 - DNA, 25 bp, Homo sapien
ctgatgtgtagggattctcagagac

SEQ ID NO: 3964996 - DNA, 25 bp, Homo sapien
ggcaatgatccctgatgtgtaggga

SEQ ID NO: 3964997 - DNA, 25 bp, Homo sapien
aggtgaaggtgtagtgagcaatagg

SEQ ID NO: 3964998 - DNA, 25 bp, Homo sapien
ttcaggtgaaggtgtagtgagcaat

SEQ ID NO: 3964999 - DNA, 25 bp, Homo sapien
tcaggtgaaggtgtagtgagcaata

SEQ ID NO: 3965000 - DNA, 25 bp, Homo sapien
cttcaggtgaaggtgtagtgagcaa

SEQ ID NO: 3965001 - DNA, 25 bp, Homo sapien
ccaatcctgaggcattggacgcagg

SEQ ID NO: 3965002 - DNA, 25 bp, Homo sapien
aatcctgaggcattggacgcaggtg

SEQ ID NO: 3965003 - DNA, 25 bp, Homo sapien
tgaggcattggacgcaggtggacca

SEQ ID NO: 3965004 - DNA, 25 bp, Homo sapien
gagcccaatcctgaggcattggacg

SEQ ID NO: 3965005 - DNA, 25 bp, Homo sapien
gaggcattctgcttcaataggaaga

SEQ ID NO: 3965006 - DNA, 25 bp, Homo sapien
tactgtgtgaggcattctgcttcaa

SEQ ID NO: 3965007 - DNA, 25 bp, Homo sapien
gcattctgcttcaataggaagactc

SEQ ID NO: 3965008 - DNA, 25 bp, Homo sapien
tgtgaggcattctgcttcaatagga

SEQ ID NO: 3965009 - DNA, 25 bp, Homo sapien
ccccttagatccgtgtccggcgcct

SEQ ID NO: 3965010 - DNA, 25 bp, Homo sapien
cttcacttggttgtcaatcttcttg

SEQ ID NO: 3965011 - DNA, 25 bp, Homo sapien
ccggcgcctgcagcaaacgccagtc

SEQ ID NO: 3965012 - DNA, 25 bp, Homo sapien
ttggttgtcaatcttcttgttagcc

SEQ ID NO: 3965013 - DNA, 25 bp, Homo sapien
catcattcattgcaattctactggg

SEQ ID NO: 3965014 - DNA, 25 bp, Homo sapien
ctctcatcattcattgcaattctac

SEQ ID NO: 3965015 - DNA, 25 bp, Homo sapien
caggctctgtgtcagccaatattct

SEQ ID NO: 3965016 - DNA, 25 bp, Homo sapien
ctcatcattcattgcaattctactg

SEQ ID NO: 3965017 - DNA, 25 bp, Homo sapien
gacaccacgtgtgtctgagatgtag

SEQ ID NO: 3965018 - DNA, 25 bp, Homo sapien
ttcttggaccgctgcgaacacctga

SEQ ID NO: 3965019 - DNA, 25 bp, Homo sapien
gattctcatcggtgctgataacatg

SEQ ID NO: 3965020 - DNA, 25 bp, Homo sapien
gggtgaagtagacaccacgtgtgtc

SEQ ID NO: 3965021 - DNA, 25 bp, Homo sapien
catatttcggaagcttcatttgggc

SEQ ID NO: 3965022 - DNA, 25 bp, Homo sapien
cttgggcaaagcatatttcggaagc

SEQ ID NO: 3965023 - DNA, 25 bp, Homo sapien
tgggcaaatgcattccttcggtagg

SEQ ID NO: 3965024 - DNA, 25 bp, Homo sapien
acgtagtaatgtggccgccctcctg

SEQ ID NO: 3965025 - DNA, 25 bp, Homo sapien
acaagactgtaagaagctcgagcta

SEQ ID NO: 3965026 - DNA, 25 bp, Homo sapien
acagttctgcattcggcaagttaga

SEQ ID NO: 3965027 - DNA, 25 bp, Homo sapien
cctgttggcctctgtacagttctgc

SEQ ID NO: 3965028 - DNA, 25 bp, Homo sapien
gagtctgggtcaatgtagcctggaa

SEQ ID NO: 3965029 - DNA, 25 bp, Homo sapien
gaacaaacacataatgatcctgaac

SEQ ID NO: 3965030 - DNA, 25 bp, Homo sapien
aaattaaattagagtcctctattct

SEQ ID NO: 3965031 - DNA, 25 bp, Homo sapien
gggatagctctcaagtgctttaacc

SEQ ID NO: 3965032 - DNA, 25 bp, Homo sapien
gctttaacctgtctagtcctggtga

SEQ ID NO: 3965033 - DNA, 25 bp, Homo sapien
ccatttccgaagatggggatagctc

SEQ ID NO: 3965034 - DNA, 25 bp, Homo sapien
ttatcaccctccataccagctatca

SEQ ID NO: 3965035 - DNA, 25 bp, Homo sapien
ttttatcaccctccataccagctat

SEQ ID NO: 3965036 - DNA, 25 bp, Homo sapien
tcaccctccataccagctatcatac

SEQ ID NO: 3965037 - DNA, 25 bp, Homo sapien
tttttatcaccctccataccagcta

SEQ ID NO: 3965038 - DNA, 25 bp, Homo sapien
atgcacaaggtctggttctttattt

SEQ ID NO: 3965039 - DNA, 25 bp, Homo sapien
gatgcacaaggtctggttctttatt

SEQ ID NO: 3965040 - DNA, 25 bp, Homo sapien
ggtggtgactctcctcacactgaag

SEQ ID NO: 3965041 - DNA, 25 bp, Homo sapien
tgatacatggcctgcaattcagagc

SEQ ID NO: 3965042 - DNA, 25 bp, Homo sapien
gaagcattaactggatccgcaggtg

SEQ ID NO: 3965043 - DNA, 25 bp, Homo sapien
tactgcagcgactactaggctttgg

SEQ ID NO: 3965044 - DNA, 25 bp, Homo sapien
taaggacatgaattagagcaaagcc

SEQ ID NO: 3965045 - DNA, 25 bp, Homo sapien
tcttgccatgcctgtgaaaaccttg

SEQ ID NO: 3965046 - DNA, 25 bp, Homo sapien
gctttctctaaattatagaattgtc

SEQ ID NO: 3965047 - DNA, 25 bp, Homo sapien
tgacagctttctctaaattatagaa

SEQ ID NO: 3965048 - DNA, 25 bp, Homo sapien
cttgacagctttctctaaattatag

SEQ ID NO: 3965049 - DNA, 25 bp, Homo sapien
ggaattcttagtgaagtctcgagaa

SEQ ID NO: 3965050 - DNA, 25 bp, Homo sapien
tcactcatggtaatcacttgcattc

SEQ ID NO: 3965051 - DNA, 25 bp, Homo sapien
tattgttcaaagatagagaagctgc

SEQ ID NO: 3965052 - DNA, 25 bp, Homo sapien
gtctcgagaagtgactgaatattgt

SEQ ID NO: 3965053 - DNA, 25 bp, Homo sapien
gcaggaggtttccttatttaaggca

SEQ ID NO: 3965054 - DNA, 25 bp, Homo sapien
ttggataccactgatcgtccaccac

SEQ ID NO: 3965055 - DNA, 25 bp, Homo sapien
gtagagaatttggcttttggcagga

SEQ ID NO: 3965056 - DNA, 25 bp, Homo sapien
taaggcatttggataccactgatcg

SEQ ID NO: 3965057 - DNA, 25 bp, Homo sapien
aaccccttcttggataagctgccat

SEQ ID NO: 3965058 - DNA, 25 bp, Homo sapien
tacaaccccttcttggataagctgc

SEQ ID NO: 3965059 - DNA, 25 bp, Homo sapien
caaccccttcttggataagctgcca

SEQ ID NO: 3965060 - DNA, 25 bp, Homo sapien
tggtacaaccccttcttggataagc

SEQ ID NO: 3965061 - DNA, 25 bp, Homo sapien
gccatctgtctttgtttgctttaag

SEQ ID NO: 3965062 - DNA, 25 bp, Homo sapien
ttgctttaagaagaatgcagataaa

SEQ ID NO: 3965063 - DNA, 25 bp, Homo sapien
tccttgccatctgtctttgtttgct

SEQ ID NO: 3965064 - DNA, 25 bp, Homo sapien
cacattggcttgtttccttgccatc

SEQ ID NO: 3965065 - DNA, 25 bp, Homo sapien
ccaactgttaggcatctctggcgcc

SEQ ID NO: 3965066 - DNA, 25 bp, Homo sapien
agagctttgagccaactgttaggca

SEQ ID NO: 3965067 - DNA, 25 bp, Homo sapien
tctggcgccatcctctgaatgtctt

SEQ ID NO: 3965068 - DNA, 25 bp, Homo sapien
gccagggttagtttcattgagagct

SEQ ID NO: 3965069 - DNA, 25 bp, Homo sapien
ggtagcagccatttccaactttcat

SEQ ID NO: 3965070 - DNA, 25 bp, Homo sapien
gggtagcagccatttccaactttca

SEQ ID NO: 3965071 - DNA, 25 bp, Homo sapien
taagagtatcaaagctgaacagtca

SEQ ID NO: 3965072 - DNA, 25 bp, Homo sapien
gggagctgatgtagactggatccaa

SEQ ID NO: 3965073 - DNA, 25 bp, Homo sapien
aagataagagtatcaaagctgaaca

SEQ ID NO: 3965074 - DNA, 25 bp, Homo sapien
tgtagactggatccaaatgtcatta

SEQ ID NO: 3965075 - DNA, 25 bp, Homo sapien
gaagggagggccaatatatgactgt

SEQ ID NO: 3965076 - DNA, 25 bp, Homo sapien
gccaatatatgactgtgggcgagtt

SEQ ID NO: 3965077 - DNA, 25 bp, Homo sapien
tgtgggcgagtttgatttgtgaaca

SEQ ID NO: 3965078 - DNA, 25 bp, Homo sapien
ggcgagtttgatttgtgaacacctc

SEQ ID NO: 3965079 - DNA, 25 bp, Homo sapien
tgctcctggtaaggggcagcaggcc

SEQ ID NO: 3965080 - DNA, 25 bp, Homo sapien
tgaacgtccacaagggtgggaattg

SEQ ID NO: 3965081 - DNA, 25 bp, Homo sapien
gtccacaagggtgggaattgcacag

SEQ ID NO: 3965082 - DNA, 25 bp, Homo sapien
gcagcaggcccttctctggagctac

SEQ ID NO: 3965083 - DNA, 25 bp, Homo sapien
tggataaggacagcaaggggcctct

SEQ ID NO: 3965084 - DNA, 25 bp, Homo sapien
ctggataaggacagcaaggggcctc

SEQ ID NO: 3965085 - DNA, 25 bp, Homo sapien
tctggataaggacagcaaggggcct

SEQ ID NO: 3965086 - DNA, 25 bp, Homo sapien
ggcaggtaaatctggtcctcgctgt

SEQ ID NO: 3965087 - DNA, 25 bp, Homo sapien
tctggcatcggtgggggggaattaa

SEQ ID NO: 3965088 - DNA, 25 bp, Homo sapien
ttaggcaggtaaatctggtcctcgc

SEQ ID NO: 3965089 - DNA, 25 bp, Homo sapien
cctctggcatcggtgggggggaatt

SEQ ID NO: 3965090 - DNA, 25 bp, Homo sapien
gctttgaatgtagaagttcagccgg

SEQ ID NO: 3965091 - DNA, 25 bp, Homo sapien
cagccggtacttttgataagttgcc

SEQ ID NO: 3965092 - DNA, 25 bp, Homo sapien
cttttggtcttgactgtatgccaga

SEQ ID NO: 3965093 - DNA, 25 bp, Homo sapien
gataagttgccccttcatctgagct

SEQ ID NO: 3965094 - DNA, 25 bp, Homo sapien
acattcaccaagcagacggcgttcc

SEQ ID NO: 3965095 - DNA, 25 bp, Homo sapien
attcaccaagcagacggcgttccct

SEQ ID NO: 3965096 - DNA, 25 bp, Homo sapien
cacattcaccaagcagacggcgttc

SEQ ID NO: 3965097 - DNA, 25 bp, Homo sapien
tcaccaagcagacggcgttccctca

SEQ ID NO: 3965098 - DNA, 25 bp, Homo sapien
ggcaaaaatctctgatgtaatgttc

SEQ ID NO: 3965099 - DNA, 25 bp, Homo sapien
aatggatgggaaaaggataatagga

SEQ ID NO: 3965100 - DNA, 25 bp, Homo sapien
cagcatgattcttccgtagattgga

SEQ ID NO: 3965101 - DNA, 25 bp, Homo sapien
tgttcttattggtggagaaacattt

SEQ ID NO: 3965102 - DNA, 25 bp, Homo sapien
ttcttagaactggatctagaatttc

SEQ ID NO: 3965103 - DNA, 25 bp, Homo sapien
tctgtaaggtttagatcaaattcag

SEQ ID NO: 3965104 - DNA, 25 bp, Homo sapien
tttctgtaaggtttagatcaaattc

SEQ ID NO: 3965105 - DNA, 25 bp, Homo sapien
actcattcttagaactggatctaga

SEQ ID NO: 3965106 - DNA, 25 bp, Homo sapien
ttccactgctgcattatactcataa

SEQ ID NO: 3965107 - DNA, 25 bp, Homo sapien
tccactgctgcattatactcataag

SEQ ID NO: 3965108 - DNA, 25 bp, Homo sapien
agatgatggctttttcagactgcat

SEQ ID NO: 3965109 - DNA, 25 bp, Homo sapien
cagatgatggctttttcagactgca

SEQ ID NO: 3965110 - DNA, 25 bp, Homo sapien
tatgctatgcggctccatctcgaat

SEQ ID NO: 3965111 - DNA, 25 bp, Homo sapien
tagatgataagtggccaaaccagga

SEQ ID NO: 3965112 - DNA, 25 bp, Homo sapien
gcccagctagtatagacgacagttt

SEQ ID NO: 3965113 - DNA, 25 bp, Homo sapien
agttcacgccatttggtcaggcaca

SEQ ID NO: 3965114 - DNA, 25 bp, Homo sapien
taaaacttcgttaaaatgctggctc

SEQ ID NO: 3965115 - DNA, 25 bp, Homo sapien
tcatgcccggcctgactttacagta

SEQ ID NO: 3965116 - DNA, 25 bp, Homo sapien
cagggcacttgaccacacttataag

SEQ ID NO: 3965117 - DNA, 25 bp, Homo sapien
gtgatggcctcaatagtctgtaaca

SEQ ID NO: 3965118 - DNA, 25 bp, Homo sapien
gactaaaagtctcgaagttcttaga

SEQ ID NO: 3965119 - DNA, 25 bp, Homo sapien
acctcccagactaaaagtctcgaag

SEQ ID NO: 3965120 - DNA, 25 bp, Homo sapien
cgagaatggggagtaataggtatac

SEQ ID NO: 3965121 - DNA, 25 bp, Homo sapien
ttcttagacattggaaatgaagttg

SEQ ID NO: 3965122 - DNA, 25 bp, Homo sapien
caggctgcccttttgagaagatggc

SEQ ID NO: 3965123 - DNA, 25 bp, Homo sapien
tgatccaatctgtactgggctccca

SEQ ID NO: 3965124 - DNA, 25 bp, Homo sapien
tgccaggctgcccttttgagaagat

SEQ ID NO: 3965125 - DNA, 25 bp, Homo sapien
atgatccaatctgtactgggctccc

SEQ ID NO: 3965126 - DNA, 25 bp, Homo sapien
ggatcttgaaagacatgacggccaa

SEQ ID NO: 3965127 - DNA, 25 bp, Homo sapien
tgtacaattccactcatcacggcag

SEQ ID NO: 3965128 - DNA, 25 bp, Homo sapien
tgacggccaaaatgcaaaatggaga

SEQ ID NO: 3965129 - DNA, 25 bp, Homo sapien
ggagatgagtgacagcccagctttg

SEQ ID NO: 3965130 - DNA, 25 bp, Homo sapien
gaaagaaccctcttctgtgtatttg

SEQ ID NO: 3965131 - DNA, 25 bp, Homo sapien
tcttccattagttctacagccttca

SEQ ID NO: 3965132 - DNA, 25 bp, Homo sapien
tcacagactccccttcactatatat

SEQ ID NO: 3965133 - DNA, 25 bp, Homo sapien
tgtaggctgatatgagcacctggct

SEQ ID NO: 3965134 - DNA, 25 bp, Homo sapien
tttagcaaatcgggacttcttgtct

SEQ ID NO: 3965135 - DNA, 25 bp, Homo sapien
agcaaatcgggacttcttgtctcaa

SEQ ID NO: 3965136 - DNA, 25 bp, Homo sapien
gcaaatcgggacttcttgtctcaat

SEQ ID NO: 3965137 - DNA, 25 bp, Homo sapien
tagcaaatcgggacttcttgtctca

SEQ ID NO: 3965138 - DNA, 25 bp, Homo sapien
tctgtgggagtctgtaaatgtcagc

SEQ ID NO: 3965139 - DNA, 25 bp, Homo sapien
gaacaatgggcatctatggtagtaa

SEQ ID NO: 3965140 - DNA, 25 bp, Homo sapien
gtaattgactgagtcctctgtggga

SEQ ID NO: 3965141 - DNA, 25 bp, Homo sapien
gggtaaaggtcagctctcttggaac

SEQ ID NO: 3965142 - DNA, 25 bp, Homo sapien
cacatagagatagctcaaaatggtt

SEQ ID NO: 3965143 - DNA, 25 bp, Homo sapien
ttgttggtaggacacacatagagat

SEQ ID NO: 3965144 - DNA, 25 bp, Homo sapien
taggacacacatagagatagctcaa

SEQ ID NO: 3965145 - DNA, 25 bp, Homo sapien
cataggttgttccataatcggttga

SEQ ID NO: 3965146 - DNA, 25 bp, Homo sapien
attttcacacatccaagtggtacag

SEQ ID NO: 3965147 - DNA, 25 bp, Homo sapien
ggttgtccaagcgtgtcccaaagaa

SEQ ID NO: 3965148 - DNA, 25 bp, Homo sapien
catggctttgtaataagcaattgat

SEQ ID NO: 3965149 - DNA, 25 bp, Homo sapien
tacagatcagcggttgtccaagcgt

SEQ ID NO: 3965150 - DNA, 25 bp, Homo sapien
tctgtcgatgcctttgccaatcagg

SEQ ID NO: 3965151 - DNA, 25 bp, Homo sapien
ggacacagtgaccttgggttggcac

SEQ ID NO: 3965152 - DNA, 25 bp, Homo sapien
gctgatctgtcgatgcctttgccaa

SEQ ID NO: 3965153 - DNA, 25 bp, Homo sapien
gacacagtgaccttgggttggcact

SEQ ID NO: 3965154 - DNA, 25 bp, Homo sapien
cgcattgggtgcatcacagactctg

SEQ ID NO: 3965155 - DNA, 25 bp, Homo sapien
ggtggcataaaaatagctccgaaag

SEQ ID NO: 3965156 - DNA, 25 bp, Homo sapien
gactctgctccttaataacttagga

SEQ ID NO: 3965157 - DNA, 25 bp, Homo sapien
aaatagctccgaaagccaagggcgc

SEQ ID NO: 3965158 - DNA, 25 bp, Homo sapien
tccctgaacctttcagcgtaacttg

SEQ ID NO: 3965159 - DNA, 25 bp, Homo sapien
ttctgagctgaatgagcttccctct

SEQ ID NO: 3965160 - DNA, 25 bp, Homo sapien
tggattccctgaacctttcagcgta

SEQ ID NO: 3965161 - DNA, 25 bp, Homo sapien
gaacctttcagcgtaacttgcagaa

SEQ ID NO: 3965162 - DNA, 25 bp, Homo sapien
ctagggcaggccatcactatttctg

SEQ ID NO: 3965163 - DNA, 25 bp, Homo sapien
tggctagaacttgttgcagtagtcc

SEQ ID NO: 3965164 - DNA, 25 bp, Homo sapien
caggtaaatttactagcagctcccc

SEQ ID NO: 3965165 - DNA, 25 bp, Homo sapien
catgtctttgcaaaggcaatatcca

SEQ ID NO: 3965166 - DNA, 25 bp, Homo sapien
tgctgtttgtaatattggcgagttg

SEQ ID NO: 3965167 - DNA, 25 bp, Homo sapien
tccaaacaacgaaccactgctgttt

SEQ ID NO: 3965168 - DNA, 25 bp, Homo sapien
tgccttccaaacaacgaaccactgc

SEQ ID NO: 3965169 - DNA, 25 bp, Homo sapien
tgtttgtaatattggcgagttgtca

SEQ ID NO: 3965170 - DNA, 25 bp, Homo sapien
tccatcaaaacatacatatgcaaat

SEQ ID NO: 3965171 - DNA, 25 bp, Homo sapien
aatgaagtcaatgttacttggctct

SEQ ID NO: 3965172 - DNA, 25 bp, Homo sapien
tcaatgttacttggctctcctagct

SEQ ID NO: 3965173 - DNA, 25 bp, Homo sapien
tcctagcttttccatcaaaacatac

SEQ ID NO: 3965174 - DNA, 25 bp, Homo sapien
gaatgaactgcaattcccctggttc

SEQ ID NO: 3965175 - DNA, 25 bp, Homo sapien
gcaataaatacctaagttctctgtg

SEQ ID NO: 3965176 - DNA, 25 bp, Homo sapien
ccagcttcacccaagatacctggag

SEQ ID NO: 3965177 - DNA, 25 bp, Homo sapien
ggaggcaataaatacctaagttctc

SEQ ID NO: 3965178 - DNA, 25 bp, Homo sapien
ggcaggtcttacaagaactcttctt

SEQ ID NO: 3965179 - DNA, 25 bp, Homo sapien
ttctttcattgttgcaggaaacgtg

SEQ ID NO: 3965180 - DNA, 25 bp, Homo sapien
ttcattgttgcaggaaacgtgaaca

SEQ ID NO: 3965181 - DNA, 25 bp, Homo sapien
aaacgtgaacaactaacagggctat

SEQ ID NO: 3965182 - DNA, 25 bp, Homo sapien
ctttgtagcaggggttttgaaacat

SEQ ID NO: 3965183 - DNA, 25 bp, Homo sapien
tagcaggggttttgaaacatctgga

SEQ ID NO: 3965184 - DNA, 25 bp, Homo sapien
gtagcaggggttttgaaacatctgg

SEQ ID NO: 3965185 - DNA, 25 bp, Homo sapien
ttgtagcaggggttttgaaacatct

SEQ ID NO: 3965186 - DNA, 25 bp, Homo sapien
taggaaccagttaaccacctgtgtc

SEQ ID NO: 3965187 - DNA, 25 bp, Homo sapien
cgaaatgagcatggcactggaaacc

SEQ ID NO: 3965188 - DNA, 25 bp, Homo sapien
caaatctaggatacgctgctgagaa

SEQ ID NO: 3965189 - DNA, 25 bp, Homo sapien
tggccactgtcactgatcaaaagat

SEQ ID NO: 3965190 - DNA, 25 bp, Homo sapien
aaaagaggtttactgtgagtgccag

SEQ ID NO: 3965191 - DNA, 25 bp, Homo sapien
taatgaattgctttcctgactgaga

SEQ ID NO: 3965192 - DNA, 25 bp, Homo sapien
gccaaggccatacatctggtaatga

SEQ ID NO: 3965193 - DNA, 25 bp, Homo sapien
tatacaaagcagtaaagccaaggcc

SEQ ID NO: 3965194 - DNA, 25 bp, Homo sapien
cctgtgtgataatggcaatgccact

SEQ ID NO: 3965195 - DNA, 25 bp, Homo sapien
tgattaaaagccagatcgtgagcct

SEQ ID NO: 3965196 - DNA, 25 bp, Homo sapien
gccagatcgtgagcctgtgtgataa

SEQ ID NO: 3965197 - DNA, 25 bp, Homo sapien
gcctgtgtgataatggcaatgccac

SEQ ID NO: 3965198 - DNA, 25 bp, Homo sapien
tcccatgtcctcatccctacaccca

SEQ ID NO: 3965199 - DNA, 25 bp, Homo sapien
ctcccatgtcctcatccctacaccc

SEQ ID NO: 3965200 - DNA, 25 bp, Homo sapien
cccatgtcctcatccctacacccac

SEQ ID NO: 3965201 - DNA, 25 bp, Homo sapien
cctcccatgtcctcatccctacacc

SEQ ID NO: 3965202 - DNA, 25 bp, Homo sapien
aacttgccgccttgctccaggaaag

SEQ ID NO: 3965203 - DNA, 25 bp, Homo sapien
catggcatgctcctgggaaaacact

SEQ ID NO: 3965204 - DNA, 25 bp, Homo sapien
ggcaccacggcaagaacatctctag

SEQ ID NO: 3965205 - DNA, 25 bp, Homo sapien
tatgacctggatgggtgcatctcca

SEQ ID NO: 3965206 - DNA, 25 bp, Homo sapien
tgcattgggcaggagctactccaaa

SEQ ID NO: 3965207 - DNA, 25 bp, Homo sapien
tgctgctagtgacagccctgagaaa

SEQ ID NO: 3965208 - DNA, 25 bp, Homo sapien
aaaggaagcgtaagaacaagaggat

SEQ ID NO: 3965209 - DNA, 25 bp, Homo sapien
ataggtggtatggaaggactttgtc

SEQ ID NO: 3965210 - DNA, 25 bp, Homo sapien
ggcatcatcgtgggaaagccccctg

SEQ ID NO: 3965211 - DNA, 25 bp, Homo sapien
cagagatgttgccttatgaataatg

SEQ ID NO: 3965212 - DNA, 25 bp, Homo sapien
ggttgtgtatgtcagcactctgccc

SEQ ID NO: 3965213 - DNA, 25 bp, Homo sapien
tgtgtatgtcagcactctgccctgg

SEQ ID NO: 3965214 - DNA, 25 bp, Homo sapien
cgtgttcaggtctaaatgcaaaaga

SEQ ID NO: 3965215 - DNA, 25 bp, Homo sapien
gcaaaagagattacatgtagatgat

SEQ ID NO: 3965216 - DNA, 25 bp, Homo sapien
cacgatcgtgttcaggtctaaatgc

SEQ ID NO: 3965217 - DNA, 25 bp, Homo sapien
tggacagcacgatcgtgttcaggtc

SEQ ID NO: 3965218 - DNA, 25 bp, Homo sapien
cttctttgacagcaatgtcatggaa

SEQ ID NO: 3965219 - DNA, 25 bp, Homo sapien
tgtcatggaatttctcgaggtcacg

SEQ ID NO: 3965220 - DNA, 25 bp, Homo sapien
ggaaataacagattcctgccttgaa

SEQ ID NO: 3965221 - DNA, 25 bp, Homo sapien
gctgaacaggaatgcctagagctct

SEQ ID NO: 3965222 - DNA, 25 bp, Homo sapien
cagatctttgtccccctctaaaaag

SEQ ID NO: 3965223 - DNA, 25 bp, Homo sapien
cacagatctttgtccccctctaaaa

SEQ ID NO: 3965224 - DNA, 25 bp, Homo sapien
ctccaaagcgagctctctgtgatgc

SEQ ID NO: 3965225 - DNA, 25 bp, Homo sapien
ctctgtgatgctccccaggttatag

SEQ ID NO: 3965226 - DNA, 25 bp, Homo sapien
gctctctgtgatgctccccaggtta

SEQ ID NO: 3965227 - DNA, 25 bp, Homo sapien
agctctctgtgatgctccccaggtt

SEQ ID NO: 3965228 - DNA, 25 bp, Homo sapien
catagagctttgtcaaaatgagaat

SEQ ID NO: 3965229 - DNA, 25 bp, Homo sapien
agagctttgtcaaaatgagaatcac

SEQ ID NO: 3965230 - DNA, 25 bp, Homo sapien
tcatagagctttgtcaaaatgagaa

SEQ ID NO: 3965231 - DNA, 25 bp, Homo sapien
tagagctttgtcaaaatgagaatca

SEQ ID NO: 3965232 - DNA, 25 bp, Homo sapien
ttagcgcttttagggaaggctggca

SEQ ID NO: 3965233 - DNA, 25 bp, Homo sapien
tttagcgcttttagggaaggctggc

SEQ ID NO: 3965234 - DNA, 25 bp, Homo sapien
acacaactcaggtactcactgagca

SEQ ID NO: 3965235 - DNA, 25 bp, Homo sapien
agagctgccaaatatgcacacaact

SEQ ID NO: 3965236 - DNA, 25 bp, Homo sapien
cccgttacagctgctccggaagaca

SEQ ID NO: 3965237 - DNA, 25 bp, Homo sapien
cttcccgttacagctgctccggaag

SEQ ID NO: 3965238 - DNA, 25 bp, Homo sapien
cccttctcagtcacaccaaaaccct

SEQ ID NO: 3965239 - DNA, 25 bp, Homo sapien
ccttctcagtcacaccaaaaccctt

SEQ ID NO: 3965240 - DNA, 25 bp, Homo sapien
tagttttcaatcgattatttgagat

SEQ ID NO: 3965241 - DNA, 25 bp, Homo sapien
ttttcaatcgattatttgagatttc

SEQ ID NO: 3965242 - DNA, 25 bp, Homo sapien
ctttagttttcaatcgattatttga

SEQ ID NO: 3965243 - DNA, 25 bp, Homo sapien
ttagttttcaatcgattatttgaga

SEQ ID NO: 3965244 - DNA, 25 bp, Homo sapien
tttaccatcttattactgaacaacg

SEQ ID NO: 3965245 - DNA, 25 bp, Homo sapien
caacgatgcatccttatgttagata

SEQ ID NO: 3965246 - DNA, 25 bp, Homo sapien
aatcagtttctgttaagggatccag

SEQ ID NO: 3965247 - DNA, 25 bp, Homo sapien
ccagagccaaaatcactacatttaa

SEQ ID NO: 3965248 - DNA, 25 bp, Homo sapien
gggagtgggcaagggcttcttctcc

SEQ ID NO: 3965249 - DNA, 25 bp, Homo sapien
gtgggcaagggcttcttctcccaca

SEQ ID NO: 3965250 - DNA, 25 bp, Homo sapien
agggtagaagggtgccagaaacagt

SEQ ID NO: 3965251 - DNA, 25 bp, Homo sapien
gctgttctcaaatcacccattcctt

SEQ ID NO: 3965252 - DNA, 25 bp, Homo sapien
taacatatctcatccagtcaagctc

SEQ ID NO: 3965253 - DNA, 25 bp, Homo sapien
aaacaaggccttctaacagatttgg

SEQ ID NO: 3965254 - DNA, 25 bp, Homo sapien
cctctggagtagtatagggctttcc

SEQ ID NO: 3965255 - DNA, 25 bp, Homo sapien
tagattacctgctcagaaacaagta

SEQ ID NO: 3965256 - DNA, 25 bp, Homo sapien
tcaaagtggtcctgagaacatgctc

SEQ ID NO: 3965257 - DNA, 25 bp, Homo sapien
tgtcaaagtggtcctgagaacatgc

SEQ ID NO: 3965258 - DNA, 25 bp, Homo sapien
agtggtcctgagaacatgctcccat

SEQ ID NO: 3965259 - DNA, 25 bp, Homo sapien
aaagtggtcctgagaacatgctccc

SEQ ID NO: 3965260 - DNA, 25 bp, Homo sapien
gcaaactaagataattgtgcctaga

SEQ ID NO: 3965261 - DNA, 25 bp, Homo sapien
ggtaggttccatgattgtctcttca

SEQ ID NO: 3965262 - DNA, 25 bp, Homo sapien
tctcttcataatggaacaagtctga

SEQ ID NO: 3965263 - DNA, 25 bp, Homo sapien
aagaggcaaccggtaggttccatga

SEQ ID NO: 3965264 - DNA, 25 bp, Homo sapien
ctatagtgaatgtgtcttgcagata

SEQ ID NO: 3965265 - DNA, 25 bp, Homo sapien
gaatgtgtcttgcagataatttcag

SEQ ID NO: 3965266 - DNA, 25 bp, Homo sapien
gtgaatgtgtcttgcagataatttc

SEQ ID NO: 3965267 - DNA, 25 bp, Homo sapien
tagtgaatgtgtcttgcagataatt

SEQ ID NO: 3965268 - DNA, 25 bp, Homo sapien
taagtcaactgaaccacatggagcc

SEQ ID NO: 3965269 - DNA, 25 bp, Homo sapien
tcaaaccagatatcaccccactgag

SEQ ID NO: 3965270 - DNA, 25 bp, Homo sapien
catgctgtaagatctgcctagacgg

SEQ ID NO: 3965271 - DNA, 25 bp, Homo sapien
cctagacggatgaaggcaattccca

SEQ ID NO: 3965272 - DNA, 25 bp, Homo sapien
ccaggactcctcctgccagcgtgtc

SEQ ID NO: 3965273 - DNA, 25 bp, Homo sapien
ctcctcctgccagcgtgtctgacct

SEQ ID NO: 3965274 - DNA, 25 bp, Homo sapien
aggactcctcctgccagcgtgtctg

SEQ ID NO: 3965275 - DNA, 25 bp, Homo sapien
gactcctcctgccagcgtgtctgac

SEQ ID NO: 3965276 - DNA, 25 bp, Homo sapien
ctaatgtccccatccgagcatccat

SEQ ID NO: 3965277 - DNA, 25 bp, Homo sapien
gagggatgagtagggtgatggtggc

SEQ ID NO: 3965278 - DNA, 25 bp, Homo sapien
gggatgagtagggtgatggtggctc

SEQ ID NO: 3965279 - DNA, 25 bp, Homo sapien
cattcctcactaatgtccccatccg

SEQ ID NO: 3965280 - DNA, 25 bp, Homo sapien
tttctcatttatgatctccttgaca

SEQ ID NO: 3965281 - DNA, 25 bp, Homo sapien
atttatgatctccttgacaccgact

SEQ ID NO: 3965282 - DNA, 25 bp, Homo sapien
tctcatttatgatctccttgacacc

SEQ ID NO: 3965283 - DNA, 25 bp, Homo sapien
tcatttatgatctccttgacaccga

SEQ ID NO: 3965284 - DNA, 25 bp, Homo sapien
tctggatccagcctgatttatcagc

SEQ ID NO: 3965285 - DNA, 25 bp, Homo sapien
ccatggaaaaccacactctggatcc

SEQ ID NO: 3965286 - DNA, 25 bp, Homo sapien
tgctgcagggaaagataccctttct

SEQ ID NO: 3965287 - DNA, 25 bp, Homo sapien
caagggcaccgcagaagtttcagtc

SEQ ID NO: 3965288 - DNA, 25 bp, Homo sapien
cagttcacattctgggtagaccagg

SEQ ID NO: 3965289 - DNA, 25 bp, Homo sapien
acattctgggtagaccaggtccacc

SEQ ID NO: 3965290 - DNA, 25 bp, Homo sapien
tcagttcacattctgggtagaccag

SEQ ID NO: 3965291 - DNA, 25 bp, Homo sapien
ttcacattctgggtagaccaggtcc

SEQ ID NO: 3965292 - DNA, 25 bp, Homo sapien
tcacttcacgtctaggtttttggta

SEQ ID NO: 3965293 - DNA, 25 bp, Homo sapien
gttcccattcttgttcacacgaaca

SEQ ID NO: 3965294 - DNA, 25 bp, Homo sapien
tccatactgatattctcctggcggg

SEQ ID NO: 3965295 - DNA, 25 bp, Homo sapien
ttccataaaagtaggacttccacag

SEQ ID NO: 3965296 - DNA, 25 bp, Homo sapien
tttctagggctgacaggtttttaca

SEQ ID NO: 3965297 - DNA, 25 bp, Homo sapien
caggtttttacagaaaatggtcact

SEQ ID NO: 3965298 - DNA, 25 bp, Homo sapien
ctagggctgacaggtttttacagaa

SEQ ID NO: 3965299 - DNA, 25 bp, Homo sapien
tacagaaaatggtcacttttaaaca

SEQ ID NO: 3965300 - DNA, 25 bp, Homo sapien
ttttggaaataagtagggcacacta

SEQ ID NO: 3965301 - DNA, 25 bp, Homo sapien
cagctaggaagctacctgtgtacaa

SEQ ID NO: 3965302 - DNA, 25 bp, Homo sapien
tcatagccatcctctaaggcaggta

SEQ ID NO: 3965303 - DNA, 25 bp, Homo sapien
gaatctgagcggacatattggtagc

SEQ ID NO: 3965304 - DNA, 25 bp, Homo sapien
ttgaggttcattctcggccttgtcc

SEQ ID NO: 3965305 - DNA, 25 bp, Homo sapien
catacgaagtagtttcagtgctcta

SEQ ID NO: 3965306 - DNA, 25 bp, Homo sapien
tatttggaatcacgcattatgcagc

SEQ ID NO: 3965307 - DNA, 25 bp, Homo sapien
tcgtcatcacccagagtacaaagtt

SEQ ID NO: 3965308 - DNA, 25 bp, Homo sapien
ttttctcccatctatgcccagggac

SEQ ID NO: 3965309 - DNA, 25 bp, Homo sapien
cagggactcttcatattttgaacta

SEQ ID NO: 3965310 - DNA, 25 bp, Homo sapien
cattcagttgtgttctctatcactc

SEQ ID NO: 3965311 - DNA, 25 bp, Homo sapien
ctcttccattcagttgtgttctcta

SEQ ID NO: 3965312 - DNA, 25 bp, Homo sapien
tacaaacactctggtcataaagccc

SEQ ID NO: 3965313 - DNA, 25 bp, Homo sapien
tccaaataattctcagcagtctgaa

SEQ ID NO: 3965314 - DNA, 25 bp, Homo sapien
tctggtcataaagcccatgtttccc

SEQ ID NO: 3965315 - DNA, 25 bp, Homo sapien
taacataattatgctcatgcaatcc

SEQ ID NO: 3965316 - DNA, 25 bp, Homo sapien
cttcccagcagtaatattagacagt

SEQ ID NO: 3965317 - DNA, 25 bp, Homo sapien
gaaagttcctgatacatctacgttg

SEQ ID NO: 3965318 - DNA, 25 bp, Homo sapien
cgttgattggttctattacttccca

SEQ ID NO: 3965319 - DNA, 25 bp, Homo sapien
cctaacggaatagtcactaacttct

SEQ ID NO: 3965320 - DNA, 25 bp, Homo sapien
tagggaaggtcatgagaagtcaagc

SEQ ID NO: 3965321 - DNA, 25 bp, Homo sapien
gcaaagatggaattaatagccgagg

SEQ ID NO: 3965322 - DNA, 25 bp, Homo sapien
tgggtaatttgcctaaccagctgaa

SEQ ID NO: 3965323 - DNA, 25 bp, Homo sapien
gaaaataaatatcggcttaggcctc

SEQ ID NO: 3965324 - DNA, 25 bp, Homo sapien
ggcaggccaacgatgtaacaaagta

SEQ ID NO: 3965325 - DNA, 25 bp, Homo sapien
aaaataggctggatcgatcaactgc

SEQ ID NO: 3965326 - DNA, 25 bp, Homo sapien
gaatactctgcacagttacactgga

SEQ ID NO: 3965327 - DNA, 25 bp, Homo sapien
taacgcaaatggatacggcaggcca

SEQ ID NO: 3965328 - DNA, 25 bp, Homo sapien
aaaaagtggcatagatattctagtt

SEQ ID NO: 3965329 - DNA, 25 bp, Homo sapien
aaaagtggcatagatattctagtta

SEQ ID NO: 3965330 - DNA, 25 bp, Homo sapien
caggttattccaggtgtaaaatgaa

SEQ ID NO: 3965331 - DNA, 25 bp, Homo sapien
aatagatactatttctggcgagtca

SEQ ID NO: 3965332 - DNA, 25 bp, Homo sapien
tgtatcctcatcacttagcacagag

SEQ ID NO: 3965333 - DNA, 25 bp, Homo sapien
gtttaagttatcctagacacatgaa

SEQ ID NO: 3965334 - DNA, 25 bp, Homo sapien
tctgtttgggcctccataggtctgg

SEQ ID NO: 3965335 - DNA, 25 bp, Homo sapien
aggatatatctgtttgggcctccat

SEQ ID NO: 3965336 - DNA, 25 bp, Homo sapien
cactactttgatttccttagaatac

SEQ ID NO: 3965337 - DNA, 25 bp, Homo sapien
tgggcctccataggtctggactcct

SEQ ID NO: 3965338 - DNA, 25 bp, Homo sapien
ctattcctggtgatgagactctgat

SEQ ID NO: 3965339 - DNA, 25 bp, Homo sapien
tccgttcagattcaagacaccaagt

SEQ ID NO: 3965340 - DNA, 25 bp, Homo sapien
tgttctgaagtaccacatgcatgat

SEQ ID NO: 3965341 - DNA, 25 bp, Homo sapien
tacaagtcttgctggagcaggcttc

SEQ ID NO: 3965342 - DNA, 25 bp, Homo sapien
atgccagaagatccccccaggtgtt

SEQ ID NO: 3965343 - DNA, 25 bp, Homo sapien
tagcaacagtttccatcaatcgaga

SEQ ID NO: 3965344 - DNA, 25 bp, Homo sapien
caggtgttccaccaactctagcaac

SEQ ID NO: 3965345 - DNA, 25 bp, Homo sapien
cccagcacctttcatgccagaagat

SEQ ID NO: 3965346 - DNA, 25 bp, Homo sapien
tcaaaacaccctcgcttagcgctgt

SEQ ID NO: 3965347 - DNA, 25 bp, Homo sapien
tagcgctgttagaagatgctggaga

SEQ ID NO: 3965348 - DNA, 25 bp, Homo sapien
cctgaaacttgcatccacttggtcc

SEQ ID NO: 3965349 - DNA, 25 bp, Homo sapien
tgccctgaaacttgcatccacttgg

SEQ ID NO: 3965350 - DNA, 25 bp, Homo sapien
caaacgtggtgctggtcagtctcag

SEQ ID NO: 3965351 - DNA, 25 bp, Homo sapien
tcctccatccggaagcgggtggctt

SEQ ID NO: 3965352 - DNA, 25 bp, Homo sapien
agcgtgcagcaaccgccatggatgc

SEQ ID NO: 3965353 - DNA, 25 bp, Homo sapien
agtctcccgtcagcgcaaacgtggt

SEQ ID NO: 3965354 - DNA, 25 bp, Homo sapien
gggcgcagaggatcaagagccccgc

SEQ ID NO: 3965355 - DNA, 25 bp, Homo sapien
gcgcagaggatcaagagccccgcgc

SEQ ID NO: 3965356 - DNA, 25 bp, Homo sapien
gagccccgcgccggcgaggagcgcg

SEQ ID NO: 3965357 - DNA, 25 bp, Homo sapien
cccggggcgcagaggatcaagagcc

SEQ ID NO: 3965358 - DNA, 25 bp, Homo sapien
ccagaacgaaggtggcggcacgagc

SEQ ID NO: 3965359 - DNA, 25 bp, Homo sapien
gggcaggtggcggccgcttgcccgg

SEQ ID NO: 3965360 - DNA, 25 bp, Homo sapien
gggtcccagaacgaaggtggcggca

SEQ ID NO: 3965361 - DNA, 25 bp, Homo sapien
ggcggcacgagctctgcgctggcgg

SEQ ID NO: 3965362 - DNA, 25 bp, Homo sapien
ccaggtgatcacatctccaaactgc

SEQ ID NO: 3965363 - DNA, 25 bp, Homo sapien
ctccaaactgctccaccagaggcat

SEQ ID NO: 3965364 - DNA, 25 bp, Homo sapien
cacatctccaaactgctccaccaga

SEQ ID NO: 3965365 - DNA, 25 bp, Homo sapien
caggtgatcacatctccaaactgct

SEQ ID NO: 3965366 - DNA, 25 bp, Homo sapien
taggcaacactctatcatctggatg

SEQ ID NO: 3965367 - DNA, 25 bp, Homo sapien
gagcaagaggtacacaactccggct

SEQ ID NO: 3965368 - DNA, 25 bp, Homo sapien
gctacttgggtatgctcagcaatca

SEQ ID NO: 3965369 - DNA, 25 bp, Homo sapien
aactccggctctgcttataggcaac

SEQ ID NO: 3965370 - DNA, 25 bp, Homo sapien
acacaccgagaaggatggtgaggac

SEQ ID NO: 3965371 - DNA, 25 bp, Homo sapien
tggtgaggacgtaataggagccggc

SEQ ID NO: 3965372 - DNA, 25 bp, Homo sapien
ggcagcgagtctcccggagccggtg

SEQ ID NO: 3965373 - DNA, 25 bp, Homo sapien
cacacaccgagaaggatggtgagga

SEQ ID NO: 3965374 - DNA, 25 bp, Homo sapien
ggccatgatccttcaactcatcatc

SEQ ID NO: 3965375 - DNA, 25 bp, Homo sapien
catgatccttcaactcatcatccag

SEQ ID NO: 3965376 - DNA, 25 bp, Homo sapien
atgatccttcaactcatcatccagt

SEQ ID NO: 3965377 - DNA, 25 bp, Homo sapien
caaggccatgatccttcaactcatc

SEQ ID NO: 3965378 - DNA, 25 bp, Homo sapien
gttgattgattgaatggtcctgtgc

SEQ ID NO: 3965379 - DNA, 25 bp, Homo sapien
agttgattgattgaatggtcctgtg

SEQ ID NO: 3965380 - DNA, 25 bp, Homo sapien
ggatgtccacttggttttcgctcaa

SEQ ID NO: 3965381 - DNA, 25 bp, Homo sapien
tgtccacttggttttcgctcaatat

SEQ ID NO: 3965382 - DNA, 25 bp, Homo sapien
gaggatgtccacttggttttcgctc

SEQ ID NO: 3965383 - DNA, 25 bp, Homo sapien
acttggttttcgctcaatatttcca

SEQ ID NO: 3965384 - DNA, 25 bp, Homo sapien
gtatacgtaggccacagcaatatca

SEQ ID NO: 3965385 - DNA, 25 bp, Homo sapien
aagtttcagaattagcttcaaaact

SEQ ID NO: 3965386 - DNA, 25 bp, Homo sapien
ttgtgagtgtatacgtaggccacag

SEQ ID NO: 3965387 - DNA, 25 bp, Homo sapien
taggccacagcaatatcaagttgtt

SEQ ID NO: 3965388 - DNA, 25 bp, Homo sapien
atatcttatagtccgcagtttgatc

SEQ ID NO: 3965389 - DNA, 25 bp, Homo sapien
tgtctcttcgggttccttgaagtgt

SEQ ID NO: 3965390 - DNA, 25 bp, Homo sapien
ctgtatatcttatagtccgcagttt

SEQ ID NO: 3965391 - DNA, 25 bp, Homo sapien
ctctgtctcttcgggttccttgaag

SEQ ID NO: 3965392 - DNA, 25 bp, Homo sapien
catttctagattctcgtaactggta

SEQ ID NO: 3965393 - DNA, 25 bp, Homo sapien
tctagattctcgtaactggtaatgt

SEQ ID NO: 3965394 - DNA, 25 bp, Homo sapien
caaggtcatttctagattctcgtaa

SEQ ID NO: 3965395 - DNA, 25 bp, Homo sapien
ttacaaggtcatttctagattctcg

SEQ ID NO: 3965396 - DNA, 25 bp, Homo sapien
gatataagattttgcacatagcagg

SEQ ID NO: 3965397 - DNA, 25 bp, Homo sapien
ccagacatagccctaatgaagccat

SEQ ID NO: 3965398 - DNA, 25 bp, Homo sapien
cacatagcaggtatccagacatagc

SEQ ID NO: 3965399 - DNA, 25 bp, Homo sapien
ttcatctctacctggagatataaga

SEQ ID NO: 3965400 - DNA, 25 bp, Homo sapien
tcaaacgaggcagatacctacaagg

SEQ ID NO: 3965401 - DNA, 25 bp, Homo sapien
gaggcagatacctacaaggtccatc

SEQ ID NO: 3965402 - DNA, 25 bp, Homo sapien
caacaaccaaggtcaagtcttaaca

SEQ ID NO: 3965403 - DNA, 25 bp, Homo sapien
tggccttattggagaagtactgtgc

SEQ ID NO: 3965404 - DNA, 25 bp, Homo sapien
gtgacccaccattgttgcaccagtg

SEQ ID NO: 3965405 - DNA, 25 bp, Homo sapien
gatgaaatggccctagtaagctgcg

SEQ ID NO: 3965406 - DNA, 25 bp, Homo sapien
ggaatcagccctcagtaggatgaaa

SEQ ID NO: 3965407 - DNA, 25 bp, Homo sapien
ggaacagattcccatgtgacccacc

SEQ ID NO: 3965408 - DNA, 25 bp, Homo sapien
catgacactactccagcaactgttg

SEQ ID NO: 3965409 - DNA, 25 bp, Homo sapien
tccagcaactgttgcatatgtgtgt

SEQ ID NO: 3965410 - DNA, 25 bp, Homo sapien
gtgtgtgtaacaatgtatgatgcaa

SEQ ID NO: 3965411 - DNA, 25 bp, Homo sapien
tgtatgatgcaaagctgtactccat

SEQ ID NO: 3965412 - DNA, 25 bp, Homo sapien
aattgtgtattgtcaatccaaaaga

SEQ ID NO: 3965413 - DNA, 25 bp, Homo sapien
attgtgtattgtcaatccaaaagaa

SEQ ID NO: 3965414 - DNA, 25 bp, Homo sapien
ttgtgtattgtcaatccaaaagaat

SEQ ID NO: 3965415 - DNA, 25 bp, Homo sapien
agcagcgacactccagctctcataa

SEQ ID NO: 3965416 - DNA, 25 bp, Homo sapien
tctgtggttgatgaattatgcatgc

SEQ ID NO: 3965417 - DNA, 25 bp, Homo sapien
ttcttaaatagtggtctgtggttga

SEQ ID NO: 3965418 - DNA, 25 bp, Homo sapien
gaattatgcatgcagtaagcagcga

SEQ ID NO: 3965419 - DNA, 25 bp, Homo sapien
tctcatttaaaaatcgtactctttc

SEQ ID NO: 3965420 - DNA, 25 bp, Homo sapien
tttccggctcaactgaacaggggcc

SEQ ID NO: 3965421 - DNA, 25 bp, Homo sapien
tgccagggaatgacaagtcatctca

SEQ ID NO: 3965422 - DNA, 25 bp, Homo sapien
ccagggaatgacaagtcatctcatt

SEQ ID NO: 3965423 - DNA, 25 bp, Homo sapien
tagtttagatcaattaccctagcca

SEQ ID NO: 3965424 - DNA, 25 bp, Homo sapien
attgaccttaaccacagagcatgga

SEQ ID NO: 3965425 - DNA, 25 bp, Homo sapien
cagacacgctaagatatctcctgta

SEQ ID NO: 3965426 - DNA, 25 bp, Homo sapien
gattttccaatggtagtttagatca

SEQ ID NO: 3965427 - DNA, 25 bp, Homo sapien
tcctgtttcactagggatgtagtag

SEQ ID NO: 3965428 - DNA, 25 bp, Homo sapien
gatgtaggaataggactcaattcca

SEQ ID NO: 3965429 - DNA, 25 bp, Homo sapien
gatgtagtagatgtaggaataggac

SEQ ID NO: 3965430 - DNA, 25 bp, Homo sapien
tcttgtgtcccatagtaactcttct

SEQ ID NO: 3965431 - DNA, 25 bp, Homo sapien
tcaaagcagcaacctgacctgctag

SEQ ID NO: 3965432 - DNA, 25 bp, Homo sapien
tcctgaatcaaagcagcaacctgac

SEQ ID NO: 3965433 - DNA, 25 bp, Homo sapien
gcagcaacctgacctgctaggacca

SEQ ID NO: 3965434 - DNA, 25 bp, Homo sapien
tgacctgctaggaccaccaacactt

SEQ ID NO: 3965435 - DNA, 25 bp, Homo sapien
gcactggcttctctcttgatgagag

SEQ ID NO: 3965436 - DNA, 25 bp, Homo sapien
cttgacagcaagcactggcttctct

SEQ ID NO: 3965437 - DNA, 25 bp, Homo sapien
gatgagagactgatttgttgagtca

SEQ ID NO: 3965438 - DNA, 25 bp, Homo sapien
cttgatgagagactgatttgttgag

SEQ ID NO: 3965439 - DNA, 25 bp, Homo sapien
agttaaaacctatgtgtagaaggca

SEQ ID NO: 3965440 - DNA, 25 bp, Homo sapien
gtagaaggcaatgctctgagtatct

SEQ ID NO: 3965441 - DNA, 25 bp, Homo sapien
tagaaggcaatgctctgagtatctg

SEQ ID NO: 3965442 - DNA, 25 bp, Homo sapien
aaaacctatgtgtagaaggcaatgc

SEQ ID NO: 3965443 - DNA, 25 bp, Homo sapien
cacttttggatgctcagacattgcc

SEQ ID NO: 3965444 - DNA, 25 bp, Homo sapien
gatgctcagacattgccctggttgc

SEQ ID NO: 3965445 - DNA, 25 bp, Homo sapien
gctctccggtttgaaacaattggaa

SEQ ID NO: 3965446 - DNA, 25 bp, Homo sapien
gccctggttgctctccggtttgaaa

SEQ ID NO: 3965447 - DNA, 25 bp, Homo sapien
tacttgcattcctctcttagctaac

SEQ ID NO: 3965448 - DNA, 25 bp, Homo sapien
gcctgggctagatgcagctcatttt

SEQ ID NO: 3965449 - DNA, 25 bp, Homo sapien
tattgccgaattctctgtcctgttt

SEQ ID NO: 3965450 - DNA, 25 bp, Homo sapien
gaaacacgcatctgttctctctgga

SEQ ID NO: 3965451 - DNA, 25 bp, Homo sapien
caatactggtattctcctcttggac

SEQ ID NO: 3965452 - DNA, 25 bp, Homo sapien
tggactttacgagtgggaataatat

SEQ ID NO: 3965453 - DNA, 25 bp, Homo sapien
aatactggtattctcctcttggact

SEQ ID NO: 3965454 - DNA, 25 bp, Homo sapien
ctcctcttggactttacgagtggga

SEQ ID NO: 3965455 - DNA, 25 bp, Homo sapien
gatatcaatcctaattcagacactc

SEQ ID NO: 3965456 - DNA, 25 bp, Homo sapien
tcagacactctaccaataaccattg

SEQ ID NO: 3965457 - DNA, 25 bp, Homo sapien
cattggtaatgataggcaggctcct

SEQ ID NO: 3965458 - DNA, 25 bp, Homo sapien
agcactgactgatatcaatcctaat

SEQ ID NO: 3965459 - DNA, 25 bp, Homo sapien
cactagttttgggagacatcgttgt

SEQ ID NO: 3965460 - DNA, 25 bp, Homo sapien
cgttgttgaactatgagtagtccaa

SEQ ID NO: 3965461 - DNA, 25 bp, Homo sapien
tcataacccagacccaaagctttgc

SEQ ID NO: 3965462 - DNA, 25 bp, Homo sapien
agtagtccaatttcataacccagac

SEQ ID NO: 3965463 - DNA, 25 bp, Homo sapien
ggccactataattccatctatgatg

SEQ ID NO: 3965464 - DNA, 25 bp, Homo sapien
attcagggtagaggcgtacttttca

SEQ ID NO: 3965465 - DNA, 25 bp, Homo sapien
tgatgagcgtaaccaaggaatgaag

SEQ ID NO: 3965466 - DNA, 25 bp, Homo sapien
aagtttggctagaggtgaattcagg

SEQ ID NO: 3965467 - DNA, 25 bp, Homo sapien
gggccctagtccaattacactgaag

SEQ ID NO: 3965468 - DNA, 25 bp, Homo sapien
tgggtacttcgttgtccttgtccat

SEQ ID NO: 3965469 - DNA, 25 bp, Homo sapien
acattctgggtacttcgttgtcctt

SEQ ID NO: 3965470 - DNA, 25 bp, Homo sapien
gccctagtccaattacactgaagcc

SEQ ID NO: 3965471 - DNA, 25 bp, Homo sapien
ggtgaaactatctccattttttcat

SEQ ID NO: 3965472 - DNA, 25 bp, Homo sapien
ctgacactgtatgttggtgaaacta

SEQ ID NO: 3965473 - DNA, 25 bp, Homo sapien
atcactgctgacactgtatgttggt

SEQ ID NO: 3965474 - DNA, 25 bp, Homo sapien
cactgctgacactgtatgttggtga

SEQ ID NO: 3965475 - DNA, 25 bp, Homo sapien
aagtgaccggggaaacagtggtcat

SEQ ID NO: 3965476 - DNA, 25 bp, Homo sapien
tatatgtctttaaacctgcattgtt

SEQ ID NO: 3965477 - DNA, 25 bp, Homo sapien
ccagctatcattggcccaaagagtg

SEQ ID NO: 3965478 - DNA, 25 bp, Homo sapien
gaaacagtggtcatatttgggttta

SEQ ID NO: 3965479 - DNA, 25 bp, Homo sapien
tgatcaggaggtggatagctcccat

SEQ ID NO: 3965480 - DNA, 25 bp, Homo sapien
gagaaactgactgatcaggaggtgg

SEQ ID NO: 3965481 - DNA, 25 bp, Homo sapien
ggagaaactgactgatcaggaggtg

SEQ ID NO: 3965482 - DNA, 25 bp, Homo sapien
ggatcacctgtctcatctagaaagt

SEQ ID NO: 3965483 - DNA, 25 bp, Homo sapien
tgtcctactttccagagacttggga

SEQ ID NO: 3965484 - DNA, 25 bp, Homo sapien
gaactaatacaaggctaagagctaa

SEQ ID NO: 3965485 - DNA, 25 bp, Homo sapien
gtaaaaacactaacgcctgctgtcc

SEQ ID NO: 3965486 - DNA, 25 bp, Homo sapien
tattggccttctccatgtgagttct

SEQ ID NO: 3965487 - DNA, 25 bp, Homo sapien
gagcaaattctgtcttaactagtcc

SEQ ID NO: 3965488 - DNA, 25 bp, Homo sapien
gattaaatgctgcacccaatgaaag

SEQ ID NO: 3965489 - DNA, 25 bp, Homo sapien
taaacaaggacatcctattggcctt

SEQ ID NO: 3965490 - DNA, 25 bp, Homo sapien
acaacattacaaatcgtatgattgg

SEQ ID NO: 3965491 - DNA, 25 bp, Homo sapien
ggagatgtgagcctgaagtttcttc

SEQ ID NO: 3965492 - DNA, 25 bp, Homo sapien
aaatcgtatgattggtttctaagtg

SEQ ID NO: 3965493 - DNA, 25 bp, Homo sapien
caaaagatcaagataacaacattac

SEQ ID NO: 3965494 - DNA, 25 bp, Homo sapien
aacatcataatcctgtttgccgttc

SEQ ID NO: 3965495 - DNA, 25 bp, Homo sapien
catcataatcctgtttgccgttcat

SEQ ID NO: 3965496 - DNA, 25 bp, Homo sapien
ctctgtaactcgatgtcaacatcat

SEQ ID NO: 3965497 - DNA, 25 bp, Homo sapien
tctgtaactcgatgtcaacatcata

SEQ ID NO: 3965498 - DNA, 25 bp, Homo sapien
cttagagtgatgattgctcggaact

SEQ ID NO: 3965499 - DNA, 25 bp, Homo sapien
gtgatgattgctcggaactttgaag

SEQ ID NO: 3965500 - DNA, 25 bp, Homo sapien
gatgattgctcggaactttgaagag

SEQ ID NO: 3965501 - DNA, 25 bp, Homo sapien
gagtgatgattgctcggaactttga

SEQ ID NO: 3965502 - DNA, 25 bp, Homo sapien
tgcagactccatttgcagtacggat

SEQ ID NO: 3965503 - DNA, 25 bp, Homo sapien
tgcagtacggatgagaggagacttt

SEQ ID NO: 3965504 - DNA, 25 bp, Homo sapien
ggctgctgactttttactaaaccta

SEQ ID NO: 3965505 - DNA, 25 bp, Homo sapien
ctggctgctgactttttactaaacc

SEQ ID NO: 3965506 - DNA, 25 bp, Homo sapien
cactccgtggagatctctcagatac

SEQ ID NO: 3965507 - DNA, 25 bp, Homo sapien
accaccaatcacactccgtggagat

SEQ ID NO: 3965508 - DNA, 25 bp, Homo sapien
acattcgtggtgatgaagagtcagt

SEQ ID NO: 3965509 - DNA, 25 bp, Homo sapien
ttgaattctgacattcgtggtgatg

SEQ ID NO: 3965510 - DNA, 25 bp, Homo sapien
actccaaagactctgaagaagacat

SEQ ID NO: 3965511 - DNA, 25 bp, Homo sapien
accatgattggtaaccttctcccca

SEQ ID NO: 3965512 - DNA, 25 bp, Homo sapien
gatgaattatccaacagtaataggt

SEQ ID NO: 3965513 - DNA, 25 bp, Homo sapien
caaacccattggctgtcaagagagt

SEQ ID NO: 3965514 - DNA, 25 bp, Homo sapien
taggaggtggacttgcaaatcccag

SEQ ID NO: 3965515 - DNA, 25 bp, Homo sapien
cagtccagatggtcctagtgtaggc

SEQ ID NO: 3965516 - DNA, 25 bp, Homo sapien
tagtgtaggctccacaccattaaag

SEQ ID NO: 3965517 - DNA, 25 bp, Homo sapien
attctgactctctcatagtaggagg

SEQ ID NO: 3965518 - DNA, 25 bp, Homo sapien
cctcatcatgatgtacccttctgaa

SEQ ID NO: 3965519 - DNA, 25 bp, Homo sapien
tcatgatgtacccttctgaatactt

SEQ ID NO: 3965520 - DNA, 25 bp, Homo sapien
ccatgacataaatgattcctgctgt

SEQ ID NO: 3965521 - DNA, 25 bp, Homo sapien
tactttccagtatttggcagtcaca

SEQ ID NO: 3965522 - DNA, 25 bp, Homo sapien
ttcctcagaacctctaagcctttcc

SEQ ID NO: 3965523 - DNA, 25 bp, Homo sapien
cttcctcagaacctctaagcctttc

SEQ ID NO: 3965524 - DNA, 25 bp, Homo sapien
gaagatgcaaaaagtcacactgtgg

SEQ ID NO: 3965525 - DNA, 25 bp, Homo sapien
agatgcaaaaagtcacactgtggca

SEQ ID NO: 3965526 - DNA, 25 bp, Homo sapien
acactgtggcatcgcgtcgcccatg

SEQ ID NO: 3965527 - DNA, 25 bp, Homo sapien
tctgaagatgcaaaaagtcacactg

SEQ ID NO: 3965528 - DNA, 25 bp, Homo sapien
tccgagcatttacaaactccatggg

SEQ ID NO: 3965529 - DNA, 25 bp, Homo sapien
ctccatgggcactgcataaagctgc

SEQ ID NO: 3965530 - DNA, 25 bp, Homo sapien
tctgcatcctccgagcatttacaaa

SEQ ID NO: 3965531 - DNA, 25 bp, Homo sapien
gagcatttacaaactccatgggcac

SEQ ID NO: 3965532 - DNA, 25 bp, Homo sapien
tagaatcccgtgactcctgacaaaa

SEQ ID NO: 3965533 - DNA, 25 bp, Homo sapien
gagatctcgagtattacaattttat

SEQ ID NO: 3965534 - DNA, 25 bp, Homo sapien
cattggtttgtctcacccagattgg

SEQ ID NO: 3965535 - DNA, 25 bp, Homo sapien
caggtttgctgcagctatagaatcc

SEQ ID NO: 3965536 - DNA, 25 bp, Homo sapien
ggagatagacccctgaatggcagac

SEQ ID NO: 3965537 - DNA, 25 bp, Homo sapien
tatttggccaagcagtcaagacagg

SEQ ID NO: 3965538 - DNA, 25 bp, Homo sapien
tgaatgcccgaagtgatacaactga

SEQ ID NO: 3965539 - DNA, 25 bp, Homo sapien
ccatagcttgccaggaaaaagggtc

SEQ ID NO: 3965540 - DNA, 25 bp, Homo sapien
ggattctcagtttggagtgtaaatg

SEQ ID NO: 3965541 - DNA, 25 bp, Homo sapien
gaggattctcagtttggagtgtaaa

SEQ ID NO: 3965542 - DNA, 25 bp, Homo sapien
tctacttctgaaggaggattctcag

SEQ ID NO: 3965543 - DNA, 25 bp, Homo sapien
aggaggattctcagtttggagtgta

SEQ ID NO: 3965544 - DNA, 25 bp, Homo sapien
tgtatctttggttcgtaacttcaca

SEQ ID NO: 3965545 - DNA, 25 bp, Homo sapien
aaagctagcattattgcagtaatag

SEQ ID NO: 3965546 - DNA, 25 bp, Homo sapien
gacctgcacgttgaaatggaaaaaa

SEQ ID NO: 3965547 - DNA, 25 bp, Homo sapien
gcagtaatagtgtacaattccattt

SEQ ID NO: 3965548 - DNA, 25 bp, Homo sapien
ctacttcattgctgactggtgggag

SEQ ID NO: 3965549 - DNA, 25 bp, Homo sapien
cttcattgctgactggtgggaggta

SEQ ID NO: 3965550 - DNA, 25 bp, Homo sapien
tacttcattgctgactggtgggagg

SEQ ID NO: 3965551 - DNA, 25 bp, Homo sapien
ttcattgctgactggtgggaggtag

SEQ ID NO: 3965552 - DNA, 25 bp, Homo sapien
ccagcgttccttcccattggagaat

SEQ ID NO: 3965553 - DNA, 25 bp, Homo sapien
gttccttcccattggagaatgcagc

SEQ ID NO: 3965554 - DNA, 25 bp, Homo sapien
gaggacccagcgttccttcccattg

SEQ ID NO: 3965555 - DNA, 25 bp, Homo sapien
atgtgaggacccagcgttccttccc

SEQ ID NO: 3965556 - DNA, 25 bp, Homo sapien
tgcaagctttcgtagagaggcctct

SEQ ID NO: 3965557 - DNA, 25 bp, Homo sapien
gaatggcaacatcattgctttcagc

SEQ ID NO: 3965558 - DNA, 25 bp, Homo sapien
cttctcagctgtagaccataatgaa

SEQ ID NO: 3965559 - DNA, 25 bp, Homo sapien
ccataatgaatacgtgaaaggatga

SEQ ID NO: 3965560 - DNA, 25 bp, Homo sapien
catctgttccttttcggagacaaat

SEQ ID NO: 3965561 - DNA, 25 bp, Homo sapien
ctgacaagtcaactgtgaatggaat

SEQ ID NO: 3965562 - DNA, 25 bp, Homo sapien
tttcggagacaaattgaccctgaaa

SEQ ID NO: 3965563 - DNA, 25 bp, Homo sapien
cggagacaaattgaccctgaaagca

SEQ ID NO: 3965564 - DNA, 25 bp, Homo sapien
taacttctctgcgatggggtcttaa

SEQ ID NO: 3965565 - DNA, 25 bp, Homo sapien
tgcgatggggtcttaacagacaatg

SEQ ID NO: 3965566 - DNA, 25 bp, Homo sapien
ctctttaacttctctgcgatggggt

SEQ ID NO: 3965567 - DNA, 25 bp, Homo sapien
ctctgcgatggggtcttaacagaca

SEQ ID NO: 3965568 - DNA, 25 bp, Homo sapien
actggcatatggctgctggatctgg

SEQ ID NO: 3965569 - DNA, 25 bp, Homo sapien
tggcatatggctgctggatctggct

SEQ ID NO: 3965570 - DNA, 25 bp, Homo sapien
cagactggcatatggctgctggatc

SEQ ID NO: 3965571 - DNA, 25 bp, Homo sapien
ggcatatggctgctggatctggcta

SEQ ID NO: 3965572 - DNA, 25 bp, Homo sapien
cactaatcctatcttggtccagatc

SEQ ID NO: 3965573 - DNA, 25 bp, Homo sapien
tcttgattgttcttgagatattcac

SEQ ID NO: 3965574 - DNA, 25 bp, Homo sapien
tcttacattcttgattgttcttgag

SEQ ID NO: 3965575 - DNA, 25 bp, Homo sapien
gttcttgagatattcactaatccta

SEQ ID NO: 3965576 - DNA, 25 bp, Homo sapien
gctggttgtaaatttgctgtagtgc

SEQ ID NO: 3965577 - DNA, 25 bp, Homo sapien
tcatcaacaagtagcttgtttctag

SEQ ID NO: 3965578 - DNA, 25 bp, Homo sapien
ttcatcaacaagtagcttgtttcta

SEQ ID NO: 3965579 - DNA, 25 bp, Homo sapien
tttgctgtagtgcaagtaaccaatc

SEQ ID NO: 3965580 - DNA, 25 bp, Homo sapien
gatattcctggaactagccgcctct

SEQ ID NO: 3965581 - DNA, 25 bp, Homo sapien
tcttttgatattcctggaactagcc

SEQ ID NO: 3965582 - DNA, 25 bp, Homo sapien
ttgatattcctggaactagccgcct

SEQ ID NO: 3965583 - DNA, 25 bp, Homo sapien
attcctggaactagccgcctctgag

SEQ ID NO: 3965584 - DNA, 25 bp, Homo sapien
tcatgcaggtttatctgctgaagtt

SEQ ID NO: 3965585 - DNA, 25 bp, Homo sapien
ttatctgctgaagttgcttgcattc

SEQ ID NO: 3965586 - DNA, 25 bp, Homo sapien
gtttatctgctgaagttgcttgcat

SEQ ID NO: 3965587 - DNA, 25 bp, Homo sapien
tgcaggtttatctgctgaagttgct

SEQ ID NO: 3965588 - DNA, 25 bp, Homo sapien
gacttaagcccaagccaagaaacac

SEQ ID NO: 3965589 - DNA, 25 bp, Homo sapien
ttcaatgtggccgatcccactccag

SEQ ID NO: 3965590 - DNA, 25 bp, Homo sapien
agttccagacatgggcataagactt

SEQ ID NO: 3965591 - DNA, 25 bp, Homo sapien
gggctcaatagcttccctgccctca

SEQ ID NO: 3965592 - DNA, 25 bp, Homo sapien
aacatggctagggttggaggcactc

SEQ ID NO: 3965593 - DNA, 25 bp, Homo sapien
gaatcccgagtcttgtatggtccca

SEQ ID NO: 3965594 - DNA, 25 bp, Homo sapien
tatggtgttcaagagttcgcaggac

SEQ ID NO: 3965595 - DNA, 25 bp, Homo sapien
tagaagtggccatctcatagcagca

SEQ ID NO: 3965596 - DNA, 25 bp, Homo sapien
cttcctaactggtttgccagtcatt

SEQ ID NO: 3965597 - DNA, 25 bp, Homo sapien
gaataccaatggacttcctaactgg

SEQ ID NO: 3965598 - DNA, 25 bp, Homo sapien
ttttcgaataccaatggacttccta

SEQ ID NO: 3965599 - DNA, 25 bp, Homo sapien
tcattttcgaataccaatggacttc

SEQ ID NO: 3965600 - DNA, 25 bp, Homo sapien
tcacagtattgttctttcctgagga

SEQ ID NO: 3965601 - DNA, 25 bp, Homo sapien
tgtggtgatttcagagtttaaggac

SEQ ID NO: 3965602 - DNA, 25 bp, Homo sapien
cgtatggatattgggttttcccagc

SEQ ID NO: 3965603 - DNA, 25 bp, Homo sapien
atttttgcccagaacgatgtccagg

SEQ ID NO: 3965604 - DNA, 25 bp, Homo sapien
tgtgcttgtggtgtattgctagaga

SEQ ID NO: 3965605 - DNA, 25 bp, Homo sapien
tccaatcagggcaaggttgttgaag

SEQ ID NO: 3965606 - DNA, 25 bp, Homo sapien
caccaggcttcccatattggtattg

SEQ ID NO: 3965607 - DNA, 25 bp, Homo sapien
gggggaagtgtctcatctgctctca

SEQ ID NO: 3965608 - DNA, 25 bp, Homo sapien
aagtgtagtgctaactgaattctag

SEQ ID NO: 3965609 - DNA, 25 bp, Homo sapien
ctgtgtctggtgcatatttcccttc

SEQ ID NO: 3965610 - DNA, 25 bp, Homo sapien
tggtgcatatttcccttcgactata

SEQ ID NO: 3965611 - DNA, 25 bp, Homo sapien
ttcccttcgactatatccaccttta

SEQ ID NO: 3965612 - DNA, 25 bp, Homo sapien
gactatatccacctttattttgttg

SEQ ID NO: 3965613 - DNA, 25 bp, Homo sapien
attcagcattgacagtgtgctttag

SEQ ID NO: 3965614 - DNA, 25 bp, Homo sapien
cattgacagtgtgctttagtaatga

SEQ ID NO: 3965615 - DNA, 25 bp, Homo sapien
cagtgtgctttagtaatgacatata

SEQ ID NO: 3965616 - DNA, 25 bp, Homo sapien
cagcattgacagtgtgctttagtaa

SEQ ID NO: 3965617 - DNA, 25 bp, Homo sapien
tatcctgtttaaattctgctcgctc

SEQ ID NO: 3965618 - DNA, 25 bp, Homo sapien
catttctgaggtactgatagcttaa

SEQ ID NO: 3965619 - DNA, 25 bp, Homo sapien
ttaaattctgctcgctccaaggctc

SEQ ID NO: 3965620 - DNA, 25 bp, Homo sapien
tgtccatttctgaggtactgatagc

SEQ ID NO: 3965621 - DNA, 25 bp, Homo sapien
agctgctctgactaattgaggcatc

SEQ ID NO: 3965622 - DNA, 25 bp, Homo sapien
ccggcttcagatggcccaggatcat

SEQ ID NO: 3965623 - DNA, 25 bp, Homo sapien
gactaattgaggcatccggcttcag

SEQ ID NO: 3965624 - DNA, 25 bp, Homo sapien
gcatccggcttcagatggcccagga

SEQ ID NO: 3965625 - DNA, 25 bp, Homo sapien
tccttctggacctcagtgctttcac

SEQ ID NO: 3965626 - DNA, 25 bp, Homo sapien
ttctggacctcagtgctttcactct

SEQ ID NO: 3965627 - DNA, 25 bp, Homo sapien
gtccttctggacctcagtgctttca

SEQ ID NO: 3965628 - DNA, 25 bp, Homo sapien
gaaagagaatattccattctgctgt

SEQ ID NO: 3965629 - DNA, 25 bp, Homo sapien
cagcctgaaagagaatattccattc

SEQ ID NO: 3965630 - DNA, 25 bp, Homo sapien
atattccattctgctgttttcagca

SEQ ID NO: 3965631 - DNA, 25 bp, Homo sapien
ctgaaagagaatattccattctgct

SEQ ID NO: 3965632 - DNA, 25 bp, Homo sapien
ggtgaattcatcaggaaagtccatt

SEQ ID NO: 3965633 - DNA, 25 bp, Homo sapien
caggtgaattcatcaggaaagtcca

SEQ ID NO: 3965634 - DNA, 25 bp, Homo sapien
ccaggtgaattcatcaggaaagtcc

SEQ ID NO: 3965635 - DNA, 25 bp, Homo sapien
aggtgaattcatcaggaaagtccat

SEQ ID NO: 3965636 - DNA, 25 bp, Homo sapien
cttgttagcagggatcctttctggg

SEQ ID NO: 3965637 - DNA, 25 bp, Homo sapien
atcttgttagcagggatcctttctg

SEQ ID NO: 3965638 - DNA, 25 bp, Homo sapien
tgggcatatttctggagcaggtccc

SEQ ID NO: 3965639 - DNA, 25 bp, Homo sapien
taatcttgttagcagggatcctttc

SEQ ID NO: 3965640 - DNA, 25 bp, Homo sapien
aggcaacttactgataggaattctg

SEQ ID NO: 3965641 - DNA, 25 bp, Homo sapien
agcaacaatgcaagatcttcaggcc

SEQ ID NO: 3965642 - DNA, 25 bp, Homo sapien
aaggcaacttactgataggaattct

SEQ ID NO: 3965643 - DNA, 25 bp, Homo sapien
tttgaagcaacaatgcaagatcttc

SEQ ID NO: 3965644 - DNA, 25 bp, Homo sapien
tatagcaggtaagcgtctgtcattg

SEQ ID NO: 3965645 - DNA, 25 bp, Homo sapien
caaatatagcaggtaagcgtctgtc

SEQ ID NO: 3965646 - DNA, 25 bp, Homo sapien
catcaaatatagcaggtaagcgtct

SEQ ID NO: 3965647 - DNA, 25 bp, Homo sapien
ccatcaaatatagcaggtaagcgtc

SEQ ID NO: 3965648 - DNA, 25 bp, Homo sapien
tgatgactacctccgtctactatcc

SEQ ID NO: 3965649 - DNA, 25 bp, Homo sapien
caactatccttggtacaattggaaa

SEQ ID NO: 3965650 - DNA, 25 bp, Homo sapien
taatccaaggaagttgacattcagt

SEQ ID NO: 3965651 - DNA, 25 bp, Homo sapien
aaagaaggaggcaatacttgtgaca

SEQ ID NO: 3965652 - DNA, 25 bp, Homo sapien
tcagtgtcggtctctgctgcggcaa

SEQ ID NO: 3965653 - DNA, 25 bp, Homo sapien
cagaggcaatcacgtgtggaagacc

SEQ ID NO: 3965654 - DNA, 25 bp, Homo sapien
tgctcgagcccagtcacatatattc

SEQ ID NO: 3965655 - DNA, 25 bp, Homo sapien
tgaaccaggccctagccaactgatc

SEQ ID NO: 3965656 - DNA, 25 bp, Homo sapien
gaaacttgagggtctgatcttgcaa

SEQ ID NO: 3965657 - DNA, 25 bp, Homo sapien
taacaaatgacactgccagctgttg

SEQ ID NO: 3965658 - DNA, 25 bp, Homo sapien
aaatctctctcttggccagaggcat

SEQ ID NO: 3965659 - DNA, 25 bp, Homo sapien
gctgttgaaacttgagggtctgatc

SEQ ID NO: 3965660 - DNA, 25 bp, Homo sapien
tgcagaagtgtcagtcatgtttgga

SEQ ID NO: 3965661 - DNA, 25 bp, Homo sapien
tagcccgtttccttcctgagtacat

SEQ ID NO: 3965662 - DNA, 25 bp, Homo sapien
tgaggcaccagtagcctcctggtag

SEQ ID NO: 3965663 - DNA, 25 bp, Homo sapien
tcatgtttggagataggtttgtctc

SEQ ID NO: 3965664 - DNA, 25 bp, Homo sapien
agacaggtgatatcaggacaatgag

SEQ ID NO: 3965665 - DNA, 25 bp, Homo sapien
gctgtaaaatgtggccatcccataa

SEQ ID NO: 3965666 - DNA, 25 bp, Homo sapien
tactcatcttcatgtgatctattgc

SEQ ID NO: 3965667 - DNA, 25 bp, Homo sapien
ttgcttttaattggttgactcgaac

SEQ ID NO: 3965668 - DNA, 25 bp, Homo sapien
aagatcctctctggattatgtccca

SEQ ID NO: 3965669 - DNA, 25 bp, Homo sapien
agtgactgattgcaggtcacagaac

SEQ ID NO: 3965670 - DNA, 25 bp, Homo sapien
agaactagtacacagccaccaaggc

SEQ ID NO: 3965671 - DNA, 25 bp, Homo sapien
tttacagacggaaagagaggagctc

SEQ ID NO: 3965672 - DNA, 25 bp, Homo sapien
atcttcaacatctactcaggaagtg

SEQ ID NO: 3965673 - DNA, 25 bp, Homo sapien
tgctgtcatgtacaacacctacacc

SEQ ID NO: 3965674 - DNA, 25 bp, Homo sapien
gctgtcatgtacaacacctacaccc

SEQ ID NO: 3965675 - DNA, 25 bp, Homo sapien
ttgctgtcatgtacaacacctacac

SEQ ID NO: 3965676 - DNA, 25 bp, Homo sapien
gattctgtgcgaagtggcctcctct

SEQ ID NO: 3965677 - DNA, 25 bp, Homo sapien
ccagaactttcggttcagcagggct

SEQ ID NO: 3965678 - DNA, 25 bp, Homo sapien
ccgaactgaagtcactggctgagca

SEQ ID NO: 3965679 - DNA, 25 bp, Homo sapien
tgcgggccagaccattggacagttg

SEQ ID NO: 3965680 - DNA, 25 bp, Homo sapien
agggcggccgatgccaggtctccgg

SEQ ID NO: 3965681 - DNA, 25 bp, Homo sapien
ggagggcggccgatgccaggtctcc

SEQ ID NO: 3965682 - DNA, 25 bp, Homo sapien
gagggcggccgatgccaggtctccg

SEQ ID NO: 3965683 - DNA, 25 bp, Homo sapien
gtggctggagatccaaaatcgaggt

SEQ ID NO: 3965684 - DNA, 25 bp, Homo sapien
tgataaatgttaagatcagagagtc

SEQ ID NO: 3965685 - DNA, 25 bp, Homo sapien
ctgtccacatgggccatcattcatg

SEQ ID NO: 3965686 - DNA, 25 bp, Homo sapien
tttccagttgctcgtattagactgt

SEQ ID NO: 3965687 - DNA, 25 bp, Homo sapien
tccagttgctcgtattagactgtct

SEQ ID NO: 3965688 - DNA, 25 bp, Homo sapien
tatttccagttgctcgtattagact

SEQ ID NO: 3965689 - DNA, 25 bp, Homo sapien
gttgctcgtattagactgtctttta

SEQ ID NO: 3965690 - DNA, 25 bp, Homo sapien
cgccagtttttcggggcctgtcgag

SEQ ID NO: 3965691 - DNA, 25 bp, Homo sapien
aggtgtccttggcctagaccattct

SEQ ID NO: 3965692 - DNA, 25 bp, Homo sapien
ggtgtccttggcctagaccattctg

SEQ ID NO: 3965693 - DNA, 25 bp, Homo sapien
ttcggggcctgtcgagcatccacag

SEQ ID NO: 3965694 - DNA, 25 bp, Homo sapien
cagcagcgaataatcctctttgaag

SEQ ID NO: 3965695 - DNA, 25 bp, Homo sapien
agcagcgaataatcctctttgaaga

SEQ ID NO: 3965696 - DNA, 25 bp, Homo sapien
ttcacataactggttacacatgaag

SEQ ID NO: 3965697 - DNA, 25 bp, Homo sapien
aagtctggagttacagaccagtctg

SEQ ID NO: 3965698 - DNA, 25 bp, Homo sapien
cataactggttacacatgaagagga

SEQ ID NO: 3965699 - DNA, 25 bp, Homo sapien
ctgaagtctggagttacagaccagt

SEQ ID NO: 3965700 - DNA, 25 bp, Homo sapien
tgcttgtaatttggcattacaatag

SEQ ID NO: 3965701 - DNA, 25 bp, Homo sapien
ggcattacaatagacaatcatgtag

SEQ ID NO: 3965702 - DNA, 25 bp, Homo sapien
caatcatgtaggataggaagctctg

SEQ ID NO: 3965703 - DNA, 25 bp, Homo sapien
acaatcatgtaggataggaagctct

SEQ ID NO: 3965704 - DNA, 25 bp, Homo sapien
tcagctattaacttccttaggattc

SEQ ID NO: 3965705 - DNA, 25 bp, Homo sapien
tctgctctggttgagtatcttgtgc

SEQ ID NO: 3965706 - DNA, 25 bp, Homo sapien
ggaatctagtagctgcagccttcag

SEQ ID NO: 3965707 - DNA, 25 bp, Homo sapien
tggttgagtatcttgtgccccaggc

SEQ ID NO: 3965708 - DNA, 25 bp, Homo sapien
gatggtacttttataatcatccaat

SEQ ID NO: 3965709 - DNA, 25 bp, Homo sapien
gtacttttataatcatccaatgcaa

SEQ ID NO: 3965710 - DNA, 25 bp, Homo sapien
ctagatggtacttttataatcatcc

SEQ ID NO: 3965711 - DNA, 25 bp, Homo sapien
tggtacttttataatcatccaatgc

SEQ ID NO: 3965712 - DNA, 25 bp, Homo sapien
gttagcctcaagttgactgataaac

SEQ ID NO: 3965713 - DNA, 25 bp, Homo sapien
caatgtctgttagcctcaagttgac

SEQ ID NO: 3965714 - DNA, 25 bp, Homo sapien
ggatcagaaggcttgatattgttgc

SEQ ID NO: 3965715 - DNA, 25 bp, Homo sapien
tcttctacaaattgatgagatgagt

SEQ ID NO: 3965716 - DNA, 25 bp, Homo sapien
catgatgaaggtggcgggttgtcca

SEQ ID NO: 3965717 - DNA, 25 bp, Homo sapien
aaattgcaatgtactgatggcagcc

SEQ ID NO: 3965718 - DNA, 25 bp, Homo sapien
gagcagtgcagtcaggcagagacag

SEQ ID NO: 3965719 - DNA, 25 bp, Homo sapien
tggagcggccgctgctatcatgccc

SEQ ID NO: 3965720 - DNA, 25 bp, Homo sapien
gcgcctctgcgtgggggtaacctgg

SEQ ID NO: 3965721 - DNA, 25 bp, Homo sapien
cacttcggggacctagtcagcggcg

SEQ ID NO: 3965722 - DNA, 25 bp, Homo sapien
cgtggagcctgacagtcccagaggc

SEQ ID NO: 3965723 - DNA, 25 bp, Homo sapien
taacctggggctgactccgcagggt

SEQ ID NO: 3965724 - DNA, 25 bp, Homo sapien
aagtgggagcctgggcagcccctga

SEQ ID NO: 3965725 - DNA, 25 bp, Homo sapien
tgggcaagtgggagcctgggcagcc

SEQ ID NO: 3965726 - DNA, 25 bp, Homo sapien
ctgggcaagtgggagcctgggcagc

SEQ ID NO: 3965727 - DNA, 25 bp, Homo sapien
tgggagcctgggcagcccctgagct

SEQ ID NO: 3965728 - DNA, 25 bp, Homo sapien
tgaggccatggaggaagctcgcaga

SEQ ID NO: 3965729 - DNA, 25 bp, Homo sapien
ggaggaagctcgcagagacgtcacc

SEQ ID NO: 3965730 - DNA, 25 bp, Homo sapien
ccatggaggaagctcgcagagacgt

SEQ ID NO: 3965731 - DNA, 25 bp, Homo sapien
aagctcgcagagacgtcacccctgg

SEQ ID NO: 3965732 - DNA, 25 bp, Homo sapien
tctccttggccctgatatttgtgtc

SEQ ID NO: 3965733 - DNA, 25 bp, Homo sapien
gtctccttggccctgatatttgtgt

SEQ ID NO: 3965734 - DNA, 25 bp, Homo sapien
cattgtatgatgatctggctggtct

SEQ ID NO: 3965735 - DNA, 25 bp, Homo sapien
tatttgtgtcattgtatgatgatct

SEQ ID NO: 3965736 - DNA, 25 bp, Homo sapien
ttcaaaatgcctaagccacagcggt

SEQ ID NO: 3965737 - DNA, 25 bp, Homo sapien
ccactggaccaaggaatgtccgcag

SEQ ID NO: 3965738 - DNA, 25 bp, Homo sapien
accaaggaatgtccgcagcctggga

SEQ ID NO: 3965739 - DNA, 25 bp, Homo sapien
aagccgagtcccgtctgtgcaggac

SEQ ID NO: 3965740 - DNA, 25 bp, Homo sapien
ctggaccatcacagatgcttcgggt

SEQ ID NO: 3965741 - DNA, 25 bp, Homo sapien
tccagctctgatgccaacttggaca

SEQ ID NO: 3965742 - DNA, 25 bp, Homo sapien
tcttacagtagagggtaagtaggtc

SEQ ID NO: 3965743 - DNA, 25 bp, Homo sapien
ggaccatcacagatgcttcgggtaa

SEQ ID NO: 3965744 - DNA, 25 bp, Homo sapien
ttgaatatacgcattctctgcttca

SEQ ID NO: 3965745 - DNA, 25 bp, Homo sapien
attgaatatacgcattctctgcttc

SEQ ID NO: 3965746 - DNA, 25 bp, Homo sapien
ctgatattgaatatacgcattctct

SEQ ID NO: 3965747 - DNA, 25 bp, Homo sapien
gatattgaatatacgcattctctgc

SEQ ID NO: 3965748 - DNA, 25 bp, Homo sapien
gcagagacagcttgatgtcgatttg

SEQ ID NO: 3965749 - DNA, 25 bp, Homo sapien
catactgacggtatcgccaaacatc

SEQ ID NO: 3965750 - DNA, 25 bp, Homo sapien
ctgacggtatcgccaaacatcttga

SEQ ID NO: 3965751 - DNA, 25 bp, Homo sapien
ccatactgacggtatcgccaaacat

SEQ ID NO: 3965752 - DNA, 25 bp, Homo sapien
ttcatcaggaatagagatatattca

SEQ ID NO: 3965753 - DNA, 25 bp, Homo sapien
tcatcaggaatagagatatattcag

SEQ ID NO: 3965754 - DNA, 25 bp, Homo sapien
ttatattctactggcccctttatta

SEQ ID NO: 3965755 - DNA, 25 bp, Homo sapien
tatattctactggcccctttattat

SEQ ID NO: 3965756 - DNA, 25 bp, Homo sapien
agtcgttccatggagtcaccttcct

SEQ ID NO: 3965757 - DNA, 25 bp, Homo sapien
cgttccatggagtcaccttcctcat

SEQ ID NO: 3965758 - DNA, 25 bp, Homo sapien
ataacaagtcgttccatggagtcac

SEQ ID NO: 3965759 - DNA, 25 bp, Homo sapien
aacaagtcgttccatggagtcacct

SEQ ID NO: 3965760 - DNA, 25 bp, Homo sapien
ccgtctaaaccaggccagtctgaag

SEQ ID NO: 3965761 - DNA, 25 bp, Homo sapien
tttccttgagatccagtctgcgcat

SEQ ID NO: 3965762 - DNA, 25 bp, Homo sapien
caggccagtctgaagctttccttga

SEQ ID NO: 3965763 - DNA, 25 bp, Homo sapien
gactctccgtctaaaccaggccagt

SEQ ID NO: 3965764 - DNA, 25 bp, Homo sapien
agagcttgtagtccctcagctgcca

SEQ ID NO: 3965765 - DNA, 25 bp, Homo sapien
gggcagctactaagaaacttacagc

SEQ ID NO: 3965766 - DNA, 25 bp, Homo sapien
gaaagagcaagctatcaagagctcg

SEQ ID NO: 3965767 - DNA, 25 bp, Homo sapien
cactgccatgtgtatagcaatgatc

SEQ ID NO: 3965768 - DNA, 25 bp, Homo sapien
ttagattttgccacgaggaaagttc

SEQ ID NO: 3965769 - DNA, 25 bp, Homo sapien
tctctactaaacctgttatatgggt

SEQ ID NO: 3965770 - DNA, 25 bp, Homo sapien
caaaattatttcctacatccctcag

SEQ ID NO: 3965771 - DNA, 25 bp, Homo sapien
gttatttcatttcgtgcttcagcaa

SEQ ID NO: 3965772 - DNA, 25 bp, Homo sapien
tttatgctgactggactctaacatg

SEQ ID NO: 3965773 - DNA, 25 bp, Homo sapien
ctttatgctgactggactctaacat

SEQ ID NO: 3965774 - DNA, 25 bp, Homo sapien
ctggttgtggagaacatacaggcat

SEQ ID NO: 3965775 - DNA, 25 bp, Homo sapien
tctaacatgatagctggttgtggag

SEQ ID NO: 3965776 - DNA, 25 bp, Homo sapien
ccatgatagcagcacacatgagctg

SEQ ID NO: 3965777 - DNA, 25 bp, Homo sapien
gtgttttcccacatgaatggcctgc

SEQ ID NO: 3965778 - DNA, 25 bp, Homo sapien
ggccctgcccctcaaatttgtcttg

SEQ ID NO: 3965779 - DNA, 25 bp, Homo sapien
ttgaggttttatcccagaatctctc

SEQ ID NO: 3965780 - DNA, 25 bp, Homo sapien
ttgtccttctgattctgatggaagt

SEQ ID NO: 3965781 - DNA, 25 bp, Homo sapien
tcttcctgtgagctcaggtgcttga

SEQ ID NO: 3965782 - DNA, 25 bp, Homo sapien
gcttgacagctgacctggaaaggga

SEQ ID NO: 3965783 - DNA, 25 bp, Homo sapien
ggaaagggagttgtatttgtcagct

SEQ ID NO: 3965784 - DNA, 25 bp, Homo sapien
caatgtctccataaggactggattt

SEQ ID NO: 3965785 - DNA, 25 bp, Homo sapien
tatcagttaggtcaatgtctccata

SEQ ID NO: 3965786 - DNA, 25 bp, Homo sapien
gatttctgggttactctatgaccaa

SEQ ID NO: 3965787 - DNA, 25 bp, Homo sapien
gggttactctatgaccaaattccat

SEQ ID NO: 3965788 - DNA, 25 bp, Homo sapien
tcagctttttatctgacctgcagtc

SEQ ID NO: 3965789 - DNA, 25 bp, Homo sapien
ggtcatcattggaagttagtaacag

SEQ ID NO: 3965790 - DNA, 25 bp, Homo sapien
gattgtgctcataggcattcagctt

SEQ ID NO: 3965791 - DNA, 25 bp, Homo sapien
tagtaacagtaacaatctggtaagt

SEQ ID NO: 3965792 - DNA, 25 bp, Homo sapien
agacttctaattccaaaagattcat

SEQ ID NO: 3965793 - DNA, 25 bp, Homo sapien
gagacttctaattccaaaagattca

SEQ ID NO: 3965794 - DNA, 25 bp, Homo sapien
aatgtagttcctagccttgccagtg

SEQ ID NO: 3965795 - DNA, 25 bp, Homo sapien
gaaattagaccttgcacatacctgg

SEQ ID NO: 3965796 - DNA, 25 bp, Homo sapien
aagcagagccagtacaaacattgtg

SEQ ID NO: 3965797 - DNA, 25 bp, Homo sapien
tcatgtacttggttggcctaggaac

SEQ ID NO: 3965798 - DNA, 25 bp, Homo sapien
catgctggctgtgctcaaaacgtga

SEQ ID NO: 3965799 - DNA, 25 bp, Homo sapien
gctaccactaccaacacagtgcttg

SEQ ID NO: 3965800 - DNA, 25 bp, Homo sapien
aacgtgatgaatgaactcagttgca

SEQ ID NO: 3965801 - DNA, 25 bp, Homo sapien
cagttgcagttatggtcatggtcaa

SEQ ID NO: 3965802 - DNA, 25 bp, Homo sapien
ctggagaggtgacgccgctgtctgc

SEQ ID NO: 3965803 - DNA, 25 bp, Homo sapien
ctttcccagcttttcccacgattgg

SEQ ID NO: 3965804 - DNA, 25 bp, Homo sapien
tctcagttgggcaattgtaagggaa

SEQ ID NO: 3965805 - DNA, 25 bp, Homo sapien
cacgattggagccaagagaggtccc

SEQ ID NO: 3965806 - DNA, 25 bp, Homo sapien
gggaggtcagcgaagacagttctag

SEQ ID NO: 3965807 - DNA, 25 bp, Homo sapien
gggcttggagataggagcaagtcgc

SEQ ID NO: 3965808 - DNA, 25 bp, Homo sapien
atgaagggggaggtcagcgaagaca

SEQ ID NO: 3965809 - DNA, 25 bp, Homo sapien
ataggagcaagtcgcaggcggaggg

SEQ ID NO: 3965810 - DNA, 25 bp, Homo sapien
gcgcggatcgcctgcgccactgtcc

SEQ ID NO: 3965811 - DNA, 25 bp, Homo sapien
caggccttccagtcgctgtggggac

SEQ ID NO: 3965812 - DNA, 25 bp, Homo sapien
agcacaggacttgagggagctgcgg

SEQ ID NO: 3965813 - DNA, 25 bp, Homo sapien
tttgccaattaccagcgccacctgg

SEQ ID NO: 3965814 - DNA, 25 bp, Homo sapien
gaaagctattctgcagcaagtccac

SEQ ID NO: 3965815 - DNA, 25 bp, Homo sapien
ccagtctagagaggaaaagctaagc

SEQ ID NO: 3965816 - DNA, 25 bp, Homo sapien
gccttcacatgcattgagacaagaa

SEQ ID NO: 3965817 - DNA, 25 bp, Homo sapien
ccggggctgtgcgttgaaagctatt

SEQ ID NO: 3965818 - DNA, 25 bp, Homo sapien
tctatcagggatagtcatcgtattc

SEQ ID NO: 3965819 - DNA, 25 bp, Homo sapien
tttgagggagaacagctactcgtat

SEQ ID NO: 3965820 - DNA, 25 bp, Homo sapien
cctaggccagctagattagccagat

SEQ ID NO: 3965821 - DNA, 25 bp, Homo sapien
catcgtattcaacagagtgctcagc

SEQ ID NO: 3965822 - DNA, 25 bp, Homo sapien
gatgactgggagcttctggagcctc

SEQ ID NO: 3965823 - DNA, 25 bp, Homo sapien
gactgggagcttctggagcctccat

SEQ ID NO: 3965824 - DNA, 25 bp, Homo sapien
agagatgactgggagcttctggagc

SEQ ID NO: 3965825 - DNA, 25 bp, Homo sapien
cagagatgactgggagcttctggag

SEQ ID NO: 3965826 - DNA, 25 bp, Homo sapien
caaagaactggtaatccaggcatcc

SEQ ID NO: 3965827 - DNA, 25 bp, Homo sapien
cagtgcctggaagggctattttgcc

SEQ ID NO: 3965828 - DNA, 25 bp, Homo sapien
tgtgatccagccaagccttcgttca

SEQ ID NO: 3965829 - DNA, 25 bp, Homo sapien
ccagccagctgagttctgactaaca

SEQ ID NO: 3965830 - DNA, 25 bp, Homo sapien
tgctaaagaattctacataaaattg

SEQ ID NO: 3965831 - DNA, 25 bp, Homo sapien
gtgttcatgaactctttctctgcta

SEQ ID NO: 3965832 - DNA, 25 bp, Homo sapien
tcatgaactctttctctgctaaaga

SEQ ID NO: 3965833 - DNA, 25 bp, Homo sapien
gttcatgaactctttctctgctaaa

SEQ ID NO: 3965834 - DNA, 25 bp, Homo sapien
ttggctttgggatacatacttacag

SEQ ID NO: 3965835 - DNA, 25 bp, Homo sapien
ggctttgggatacatacttacaggc

SEQ ID NO: 3965836 - DNA, 25 bp, Homo sapien
ctttgggatacatacttacaggctt

SEQ ID NO: 3965837 - DNA, 25 bp, Homo sapien
tggctttgggatacatacttacagg

SEQ ID NO: 3965838 - DNA, 25 bp, Homo sapien
tcactgtactctcagaactgcatac

SEQ ID NO: 3965839 - DNA, 25 bp, Homo sapien
gaaccagccaaggatatctgagagt

SEQ ID NO: 3965840 - DNA, 25 bp, Homo sapien
tgtgcagcggacactgaatgatgcc

SEQ ID NO: 3965841 - DNA, 25 bp, Homo sapien
gagtattcgcaatgagcagctgcaa

SEQ ID NO: 3965842 - DNA, 25 bp, Homo sapien
tctataatcgcatctttgagccaga

SEQ ID NO: 3965843 - DNA, 25 bp, Homo sapien
aacagtgttaaaggatattgatgaa

SEQ ID NO: 3965844 - DNA, 25 bp, Homo sapien
gatgaactggatgactttccaagaa

SEQ ID NO: 3965845 - DNA, 25 bp, Homo sapien
gatattgatgaactggatgactttc

SEQ ID NO: 3965846 - DNA, 25 bp, Homo sapien
caaatccaaacagtgttaaaggata

SEQ ID NO: 3965847 - DNA, 25 bp, Homo sapien
cagatagagctgctattgtccctaa

SEQ ID NO: 3965848 - DNA, 25 bp, Homo sapien
cagaggcaagatttacagatagagc

SEQ ID NO: 3965849 - DNA, 25 bp, Homo sapien
tgccatttgctttaggtgagaccat

SEQ ID NO: 3965850 - DNA, 25 bp, Homo sapien
gtccctaagtcttccttggcatgag

SEQ ID NO: 3965851 - DNA, 25 bp, Homo sapien
gacacactttgatgcaatctgattc

SEQ ID NO: 3965852 - DNA, 25 bp, Homo sapien
tttcctctgacacactttgatgcaa

SEQ ID NO: 3965853 - DNA, 25 bp, Homo sapien
catcacgatgggtggaccataaccc

SEQ ID NO: 3965854 - DNA, 25 bp, Homo sapien
cgatgggtggaccataacccatttg

SEQ ID NO: 3965855 - DNA, 25 bp, Homo sapien
tccaccgttgttccacatgcacagc

SEQ ID NO: 3965856 - DNA, 25 bp, Homo sapien
cacaataacccagcctgctactcca

SEQ ID NO: 3965857 - DNA, 25 bp, Homo sapien
tgacaaagcttaaggcccacgtttc

SEQ ID NO: 3965858 - DNA, 25 bp, Homo sapien
cagcccagctgggctgttattttct

SEQ ID NO: 3965859 - DNA, 25 bp, Homo sapien
caccaatggttgaatagagcaagac

SEQ ID NO: 3965860 - DNA, 25 bp, Homo sapien
taccaagaggtaggcactgcgctaa

SEQ ID NO: 3965861 - DNA, 25 bp, Homo sapien
gaggtgacctctaccggtaacagag

SEQ ID NO: 3965862 - DNA, 25 bp, Homo sapien
tgcgctaagcccttcacatcggtta

SEQ ID NO: 3965863 - DNA, 25 bp, Homo sapien
gagctaaccaatgatttattcaggc

SEQ ID NO: 3965864 - DNA, 25 bp, Homo sapien
gatttattcaggcaatgtcacgttt

SEQ ID NO: 3965865 - DNA, 25 bp, Homo sapien
tatcattgacaagagctaaccaatg

SEQ ID NO: 3965866 - DNA, 25 bp, Homo sapien
ttctcctgtatcattgacaagagct

SEQ ID NO: 3965867 - DNA, 25 bp, Homo sapien
ttaacctgatgctgaagtccaaaca

SEQ ID NO: 3965868 - DNA, 25 bp, Homo sapien
caccttgtatgttgactcagtgcca

SEQ ID NO: 3965869 - DNA, 25 bp, Homo sapien
cctggcctctgaggtgttaacctga

SEQ ID NO: 3965870 - DNA, 25 bp, Homo sapien
taacagctgcaagtgccaacaaact

SEQ ID NO: 3965871 - DNA, 25 bp, Homo sapien
catatgcatcaactccgaatccaca

SEQ ID NO: 3965872 - DNA, 25 bp, Homo sapien
tacataaagcatatgcatcaactcc

SEQ ID NO: 3965873 - DNA, 25 bp, Homo sapien
taaagcatatgcatcaactccgaat

SEQ ID NO: 3965874 - DNA, 25 bp, Homo sapien
aagcatatgcatcaactccgaatcc

SEQ ID NO: 3965875 - DNA, 25 bp, Homo sapien
ttcccttgtaataagtacggtgaca

SEQ ID NO: 3965876 - DNA, 25 bp, Homo sapien
gtaaagtagatgcagcctggataat

SEQ ID NO: 3965877 - DNA, 25 bp, Homo sapien
tgtaattctgtgtcttagcctgaat

SEQ ID NO: 3965878 - DNA, 25 bp, Homo sapien
gtaataagtacggtgacatttcact

SEQ ID NO: 3965879 - DNA, 25 bp, Homo sapien
tattttcagtcatcattgaaggcat

SEQ ID NO: 3965880 - DNA, 25 bp, Homo sapien
gacccaaagattattttcagtcatc

SEQ ID NO: 3965881 - DNA, 25 bp, Homo sapien
cccaaagattattttcagtcatcat

SEQ ID NO: 3965882 - DNA, 25 bp, Homo sapien
attattttcagtcatcattgaaggc

SEQ ID NO: 3965883 - DNA, 25 bp, Homo sapien
ctagaaccggtgagttttctgccct

SEQ ID NO: 3965884 - DNA, 25 bp, Homo sapien
tacttggtgttactggaagcgtgga

SEQ ID NO: 3965885 - DNA, 25 bp, Homo sapien
gaagcgtggatgaaacttacacaga

SEQ ID NO: 3965886 - DNA, 25 bp, Homo sapien
tgtagttctttgtacaccatggagg

SEQ ID NO: 3965887 - DNA, 25 bp, Homo sapien
gtaaaaggcaaacgattcatacaat

SEQ ID NO: 3965888 - DNA, 25 bp, Homo sapien
taaaaggcaaacgattcatacaatc

SEQ ID NO: 3965889 - DNA, 25 bp, Homo sapien
caaacgattcatacaatctgaagag

SEQ ID NO: 3965890 - DNA, 25 bp, Homo sapien
gcaaacgattcatacaatctgaaga

SEQ ID NO: 3965891 - DNA, 25 bp, Homo sapien
gaaccactgaaacacgtgaaaaatc

SEQ ID NO: 3965892 - DNA, 25 bp, Homo sapien
agtgaaggcaactggtaaatagccc

SEQ ID NO: 3965893 - DNA, 25 bp, Homo sapien
gtgggaatgaacagcgttaagggcc

SEQ ID NO: 3965894 - DNA, 25 bp, Homo sapien
gtgaaaaatcgagcacattcaggag

SEQ ID NO: 3965895 - DNA, 25 bp, Homo sapien
gacacaaggagatagcacagaagca

SEQ ID NO: 3965896 - DNA, 25 bp, Homo sapien
tcattgcatcctgttaaggttgagt

SEQ ID NO: 3965897 - DNA, 25 bp, Homo sapien
tgccggggacacaaggagatagcac

SEQ ID NO: 3965898 - DNA, 25 bp, Homo sapien
ttgagttggtaaaggagcttcccac

SEQ ID NO: 3965899 - DNA, 25 bp, Homo sapien
cagtctctcctgatattgtttgatc

SEQ ID NO: 3965900 - DNA, 25 bp, Homo sapien
gatattgtttgatcctaatgctgac

SEQ ID NO: 3965901 - DNA, 25 bp, Homo sapien
tcctgatattgtttgatcctaatgc

SEQ ID NO: 3965902 - DNA, 25 bp, Homo sapien
tctctcctgatattgtttgatccta

SEQ ID NO: 3965903 - DNA, 25 bp, Homo sapien
aggccacagcatgcttcttgtggaa

SEQ ID NO: 3965904 - DNA, 25 bp, Homo sapien
tggaaccaacaatggtggaattttc

SEQ ID NO: 3965905 - DNA, 25 bp, Homo sapien
aactgaatagctgaacattttcagg

SEQ ID NO: 3965906 - DNA, 25 bp, Homo sapien
ctcctaactgaatagctgaacattt

SEQ ID NO: 3965907 - DNA, 25 bp, Homo sapien
tctctatctgagaccacttcaacct

SEQ ID NO: 3965908 - DNA, 25 bp, Homo sapien
gttttccagatccaaagtcgcttcc

SEQ ID NO: 3965909 - DNA, 25 bp, Homo sapien
attagtctgttcctatgttgctaat

SEQ ID NO: 3965910 - DNA, 25 bp, Homo sapien
actgggcgatttataaggaaagagg

SEQ ID NO: 3965911 - DNA, 25 bp, Homo sapien
cagtggaaacctgtgatagatgatc

SEQ ID NO: 3965912 - DNA, 25 bp, Homo sapien
cataaagacgtgctctccaaggcag

SEQ ID NO: 3965913 - DNA, 25 bp, Homo sapien
caaggcagtccatcctgaactgttg

SEQ ID NO: 3965914 - DNA, 25 bp, Homo sapien
cagactgtgtagttgcaaggtcaca

SEQ ID NO: 3965915 - DNA, 25 bp, Homo sapien
cgtagtgtactcctgagtgcttgca

SEQ ID NO: 3965916 - DNA, 25 bp, Homo sapien
cagagtcctgtagtgagtttccagt

SEQ ID NO: 3965917 - DNA, 25 bp, Homo sapien
cacaatctctagtggcgtagtgtac

SEQ ID NO: 3965918 - DNA, 25 bp, Homo sapien
tccagttgagatccatgtagagcag

SEQ ID NO: 3965919 - DNA, 25 bp, Homo sapien
accctgtgggtaatagctgatattg

SEQ ID NO: 3965920 - DNA, 25 bp, Homo sapien
caaataccctgtgggtaatagctga

SEQ ID NO: 3965921 - DNA, 25 bp, Homo sapien
tcacctcaaataccctgtgggtaat

SEQ ID NO: 3965922 - DNA, 25 bp, Homo sapien
tcctcacctcaaataccctgtgggt

SEQ ID NO: 3965923 - DNA, 25 bp, Homo sapien
aaatcctttaagcatgctttcactt

SEQ ID NO: 3965924 - DNA, 25 bp, Homo sapien
taaatcctttaagcatgctttcact

SEQ ID NO: 3965925 - DNA, 25 bp, Homo sapien
ctttaagcatgctttcactttcaag

SEQ ID NO: 3965926 - DNA, 25 bp, Homo sapien
tcctttaagcatgctttcactttca

SEQ ID NO: 3965927 - DNA, 25 bp, Homo sapien
tcctccttcactttggctccaacaa

SEQ ID NO: 3965928 - DNA, 25 bp, Homo sapien
tccttcactttggctccaacaacag

SEQ ID NO: 3965929 - DNA, 25 bp, Homo sapien
ttcctccttcactttggctccaaca

SEQ ID NO: 3965930 - DNA, 25 bp, Homo sapien
ttcactttggctccaacaacagaag

SEQ ID NO: 3965931 - DNA, 25 bp, Homo sapien
aagctcagtttctcatagaaaaggt

SEQ ID NO: 3965932 - DNA, 25 bp, Homo sapien
gatgacctttaactctgactcccca

SEQ ID NO: 3965933 - DNA, 25 bp, Homo sapien
ggacttggacctttagcctgtgtca

SEQ ID NO: 3965934 - DNA, 25 bp, Homo sapien
tcacatggtgcttttggtagagggt

SEQ ID NO: 3965935 - DNA, 25 bp, Homo sapien
cagagcactaatggtccgggacttg

SEQ ID NO: 3965936 - DNA, 25 bp, Homo sapien
ctttgtgtaaccctcagaagtagac

SEQ ID NO: 3965937 - DNA, 25 bp, Homo sapien
tagacaaggtcttgatatatcgtcc

SEQ ID NO: 3965938 - DNA, 25 bp, Homo sapien
ttagacaaggtcttgatatatcgtc

SEQ ID NO: 3965939 - DNA, 25 bp, Homo sapien
gctatgaatctacctggtcctgggt

SEQ ID NO: 3965940 - DNA, 25 bp, Homo sapien
tatgggcttgatgtttctagttgtg

SEQ ID NO: 3965941 - DNA, 25 bp, Homo sapien
tcattaaggttatgggcttgatgtt

SEQ ID NO: 3965942 - DNA, 25 bp, Homo sapien
ggtagaattccgctatgaatctacc

SEQ ID NO: 3965943 - DNA, 25 bp, Homo sapien
gggtagttgcctccacatactgatc

SEQ ID NO: 3965944 - DNA, 25 bp, Homo sapien
tgaaggcagttacgtctccaggaca

SEQ ID NO: 3965945 - DNA, 25 bp, Homo sapien
agcgtactattccacatctcttggg

SEQ ID NO: 3965946 - DNA, 25 bp, Homo sapien
gaatggagttaacgcaagcatgccc

SEQ ID NO: 3965947 - DNA, 25 bp, Homo sapien
ccaaagttgcatttttctgtggaag

SEQ ID NO: 3965948 - DNA, 25 bp, Homo sapien
tgcatttttctgtggaagaaggcaa

SEQ ID NO: 3965949 - DNA, 25 bp, Homo sapien
agaaggcaaggctgttataatcaca

SEQ ID NO: 3965950 - DNA, 25 bp, Homo sapien
tataatcacagctgcattaggatgg

SEQ ID NO: 3965951 - DNA, 25 bp, Homo sapien
cagtcacttgcctggcggaaggttc

SEQ ID NO: 3965952 - DNA, 25 bp, Homo sapien
cggaaggttcctgttgtgttacttg

SEQ ID NO: 3965953 - DNA, 25 bp, Homo sapien
aagacagtccttctgcccctaagaa

SEQ ID NO: 3965954 - DNA, 25 bp, Homo sapien
catgatcctgctatgggcttttcca

SEQ ID NO: 3965955 - DNA, 25 bp, Homo sapien
tggagagcatctgactgtaaggcct

SEQ ID NO: 3965956 - DNA, 25 bp, Homo sapien
ctgcagaggaacatctctggagagc

SEQ ID NO: 3965957 - DNA, 25 bp, Homo sapien
tggcctgttttagatgccccaacag

SEQ ID NO: 3965958 - DNA, 25 bp, Homo sapien
ccaaggagccttagatataacagtc

SEQ ID NO: 3965959 - DNA, 25 bp, Homo sapien
tctatggcttgattccgacatcgtc

SEQ ID NO: 3965960 - DNA, 25 bp, Homo sapien
ttccgtaattattagtttctgggca

SEQ ID NO: 3965961 - DNA, 25 bp, Homo sapien
gattccgacatcgtcttctccatct

SEQ ID NO: 3965962 - DNA, 25 bp, Homo sapien
gggcatctatggcttgattccgaca

SEQ ID NO: 3965963 - DNA, 25 bp, Homo sapien
tgtatacaaatctgcccagcacctc

SEQ ID NO: 3965964 - DNA, 25 bp, Homo sapien
ttgtgtatacaaatctgcccagcac

SEQ ID NO: 3965965 - DNA, 25 bp, Homo sapien
cttgtgtatacaaatctgcccagca

SEQ ID NO: 3965966 - DNA, 25 bp, Homo sapien
tgtgtatacaaatctgcccagcacc

SEQ ID NO: 3965967 - DNA, 25 bp, Homo sapien
tgtgttccaaagatccaggacaggg

SEQ ID NO: 3965968 - DNA, 25 bp, Homo sapien
ctgtgttccaaagatccaggacagg

SEQ ID NO: 3965969 - DNA, 25 bp, Homo sapien
tgttccaaagatccaggacagggag

SEQ ID NO: 3965970 - DNA, 25 bp, Homo sapien
ttccaaagatccaggacagggagct

SEQ ID NO: 3965971 - DNA, 25 bp, Homo sapien
tgctgcacgtgccaggattcatgcc

SEQ ID NO: 3965972 - DNA, 25 bp, Homo sapien
caggggatctgacttgatgtgtttt

SEQ ID NO: 3965973 - DNA, 25 bp, Homo sapien
cagtattctgctgcacgtgccagga

SEQ ID NO: 3965974 - DNA, 25 bp, Homo sapien
tattctgctgcacgtgccaggattc

SEQ ID NO: 3965975 - DNA, 25 bp, Homo sapien
gccttcgacatccaaaaagagatag

SEQ ID NO: 3965976 - DNA, 25 bp, Homo sapien
tcttcgcttggcagataaggtcccc

SEQ ID NO: 3965977 - DNA, 25 bp, Homo sapien
agcattcaaaccatctcccaaaagc

SEQ ID NO: 3965978 - DNA, 25 bp, Homo sapien
aggtccccggaagcattcaaaccat

SEQ ID NO: 3965979 - DNA, 25 bp, Homo sapien
gggaagcagccaccagttaccagtg

SEQ ID NO: 3965980 - DNA, 25 bp, Homo sapien
catgtgaataagcagcacgggaagc

SEQ ID NO: 3965981 - DNA, 25 bp, Homo sapien
taccagtgttcaactctgctccaaa

SEQ ID NO: 3965982 - DNA, 25 bp, Homo sapien
ttgtgttcccagtggtcatgtgaat

SEQ ID NO: 3965983 - DNA, 25 bp, Homo sapien
gacacattccaacttagccctttgt

SEQ ID NO: 3965984 - DNA, 25 bp, Homo sapien
gacatgacacattccaacttagccc

SEQ ID NO: 3965985 - DNA, 25 bp, Homo sapien
atgacatgacacattccaacttagc

SEQ ID NO: 3965986 - DNA, 25 bp, Homo sapien
catgacacattccaacttagccctt

SEQ ID NO: 3965987 - DNA, 25 bp, Homo sapien
ctacgttcatgtatttcaagaaaca

SEQ ID NO: 3965988 - DNA, 25 bp, Homo sapien
gaatttagcaaggtactagatataa

SEQ ID NO: 3965989 - DNA, 25 bp, Homo sapien
cagggtctaacagctatcagcactg

SEQ ID NO: 3965990 - DNA, 25 bp, Homo sapien
tctctgaaatcacactgcaacaatc

SEQ ID NO: 3965991 - DNA, 25 bp, Homo sapien
tctggaagcttctgaggatctaagg

SEQ ID NO: 3965992 - DNA, 25 bp, Homo sapien
ggaggttccagcatcaaaacaagac

SEQ ID NO: 3965993 - DNA, 25 bp, Homo sapien
tggagagtgggccaaggaactttct

SEQ ID NO: 3965994 - DNA, 25 bp, Homo sapien
gatctaaggaggcttggtcagcgtc

SEQ ID NO: 3965995 - DNA, 25 bp, Homo sapien
caggtcattcttcccttagacaggg

SEQ ID NO: 3965996 - DNA, 25 bp, Homo sapien
tttctctggagttgcttaaggcccc

SEQ ID NO: 3965997 - DNA, 25 bp, Homo sapien
tcaaatagttcagcctagtctggcc

SEQ ID NO: 3965998 - DNA, 25 bp, Homo sapien
ccagtagggtggcatgcatgaatcc

SEQ ID NO: 3965999 - DNA, 25 bp, Homo sapien
cctttgcatgtaagatgcatccttt

SEQ ID NO: 3966000 - DNA, 25 bp, Homo sapien
tttgcatgtaagatgcatcctttac

SEQ ID NO: 3966001 - DNA, 25 bp, Homo sapien
aaaagacctttgcatgtaagatgca

SEQ ID NO: 3966002 - DNA, 25 bp, Homo sapien
ccaaaagacctttgcatgtaagatg

SEQ ID NO: 3966003 - DNA, 25 bp, Homo sapien
aagagcctcattaatcctggattct

SEQ ID NO: 3966004 - DNA, 25 bp, Homo sapien
tctgagaagctttggagacctggag

SEQ ID NO: 3966005 - DNA, 25 bp, Homo sapien
gtccatgatgacatctcatttggca

SEQ ID NO: 3966006 - DNA, 25 bp, Homo sapien
accaatttggaaggactgagatgtc

SEQ ID NO: 3966007 - DNA, 25 bp, Homo sapien
tacatacacactttggattgttgtc

SEQ ID NO: 3966008 - DNA, 25 bp, Homo sapien
ccagctctcgtgtgattattcttca

SEQ ID NO: 3966009 - DNA, 25 bp, Homo sapien
ggtttagccaactcacaattccaca

SEQ ID NO: 3966010 - DNA, 25 bp, Homo sapien
tattattaccgtttctccttgacaa

SEQ ID NO: 3966011 - DNA, 25 bp, Homo sapien
cagagagtcgcctgtcggagcaaat

SEQ ID NO: 3966012 - DNA, 25 bp, Homo sapien
cggagcaaatgtgacgctgattggc

SEQ ID NO: 3966013 - DNA, 25 bp, Homo sapien
gctccaggcactctcaaggatccgg

SEQ ID NO: 3966014 - DNA, 25 bp, Homo sapien
ccagctgcaaatgggtagctttgcc

SEQ ID NO: 3966015 - DNA, 25 bp, Homo sapien
gggctcggggctttggtacagagga

SEQ ID NO: 3966016 - DNA, 25 bp, Homo sapien
cagacgcccggatgcggaggaccca

SEQ ID NO: 3966017 - DNA, 25 bp, Homo sapien
tcgatgtcccaagtgacaaagcccc

SEQ ID NO: 3966018 - DNA, 25 bp, Homo sapien
tcatctcgatgtcccaagtgacaaa

SEQ ID NO: 3966019 - DNA, 25 bp, Homo sapien
atcccgggagccatagcggcagaga

SEQ ID NO: 3966020 - DNA, 25 bp, Homo sapien
aggtggcagcgaggggctctgcttt

SEQ ID NO: 3966021 - DNA, 25 bp, Homo sapien
tcccggacccgaggtggcagcgagg

SEQ ID NO: 3966022 - DNA, 25 bp, Homo sapien
ccatcccgggagccatagcggcaga

SEQ ID NO: 3966023 - DNA, 25 bp, Homo sapien
gggtggccgcgggtgctgagccagt

SEQ ID NO: 3966024 - DNA, 25 bp, Homo sapien
gtcgccgccgcgcaggcgggcgctg

SEQ ID NO: 3966025 - DNA, 25 bp, Homo sapien
cgcgcaggcgggcgctggagtctca

SEQ ID NO: 3966026 - DNA, 25 bp, Homo sapien
gtggccgcgggtgctgagccagtcg

SEQ ID NO: 3966027 - DNA, 25 bp, Homo sapien
gctgccggctgcggacagacccgat

SEQ ID NO: 3966028 - DNA, 25 bp, Homo sapien
accaccaccgcagttgccacgaccc

SEQ ID NO: 3966029 - DNA, 25 bp, Homo sapien
ggctgcggacagacccgatgcgcca

SEQ ID NO: 3966030 - DNA, 25 bp, Homo sapien
ccaccaccaccgcagttgccacgac

SEQ ID NO: 3966031 - DNA, 25 bp, Homo sapien
ggatcccaaagcttgccgtgggttg

SEQ ID NO: 3966032 - DNA, 25 bp, Homo sapien
actctttgtgcgttgaggctttgac

SEQ ID NO: 3966033 - DNA, 25 bp, Homo sapien
gttctctaacccggcgcactctggg

SEQ ID NO: 3966034 - DNA, 25 bp, Homo sapien
ccgtgggttggaggcttcctactct

SEQ ID NO: 3966035 - DNA, 25 bp, Homo sapien
catgactgagaattatactatcacc

SEQ ID NO: 3966036 - DNA, 25 bp, Homo sapien
ctcatctaagtgtgacagctctctc

SEQ ID NO: 3966037 - DNA, 25 bp, Homo sapien
aactctggaatatttactagctgaa

SEQ ID NO: 3966038 - DNA, 25 bp, Homo sapien
aaggcaactagacatactgctgaat

SEQ ID NO: 3966039 - DNA, 25 bp, Homo sapien
tcacgattatgatttgaagcaatgc

SEQ ID NO: 3966040 - DNA, 25 bp, Homo sapien
gaagcaatgcaaggatgtggtaaag

SEQ ID NO: 3966041 - DNA, 25 bp, Homo sapien
gataagtgcacataagtttttcctg

SEQ ID NO: 3966042 - DNA, 25 bp, Homo sapien
tttctcacaatccatgttgctctgg

SEQ ID NO: 3966043 - DNA, 25 bp, Homo sapien
cgttcaatttgcagaagttccagtg

SEQ ID NO: 3966044 - DNA, 25 bp, Homo sapien
ttcaatttgcagaagttccagtgct

SEQ ID NO: 3966045 - DNA, 25 bp, Homo sapien
gttcaatttgcagaagttccagtgc

SEQ ID NO: 3966046 - DNA, 25 bp, Homo sapien
aaagcatcttgctgccatgcaccaa

SEQ ID NO: 3966047 - DNA, 25 bp, Homo sapien
gaaagcatcttgctgccatgcacca

SEQ ID NO: 3966048 - DNA, 25 bp, Homo sapien
caccaatcccactgtgattgttcat

SEQ ID NO: 3966049 - DNA, 25 bp, Homo sapien
tgccatgcaccaatcccactgtgat

SEQ ID NO: 3966050 - DNA, 25 bp, Homo sapien
gcctgctaatttgcacatgtctgca

SEQ ID NO: 3966051 - DNA, 25 bp, Homo sapien
catgtctgcatcaagccctccaaga

SEQ ID NO: 3966052 - DNA, 25 bp, Homo sapien
gctaatttgcacatgtctgcatcaa

SEQ ID NO: 3966053 - DNA, 25 bp, Homo sapien
ctgggcctgctaatttgcacatgtc

SEQ ID NO: 3966054 - DNA, 25 bp, Homo sapien
catattctcttgtttcttctagtaa

SEQ ID NO: 3966055 - DNA, 25 bp, Homo sapien
ctcttgtttcttctagtaatttcat

SEQ ID NO: 3966056 - DNA, 25 bp, Homo sapien
tattctcttgtttcttctagtaatt

SEQ ID NO: 3966057 - DNA, 25 bp, Homo sapien
ctacatattctcttgtttcttctag

SEQ ID NO: 3966058 - DNA, 25 bp, Homo sapien
tgctgacggtcaccacaaacattta

SEQ ID NO: 3966059 - DNA, 25 bp, Homo sapien
aagaatagaagccacagctcagagc

SEQ ID NO: 3966060 - DNA, 25 bp, Homo sapien
gaagcattgaccatgcacaaggctg

SEQ ID NO: 3966061 - DNA, 25 bp, Homo sapien
ggaaaagctggacaaactactatac

SEQ ID NO: 3966062 - DNA, 25 bp, Homo sapien
gtgcccagttagcaagacaccatca

SEQ ID NO: 3966063 - DNA, 25 bp, Homo sapien
caatgtgcccagttagcaagacacc

SEQ ID NO: 3966064 - DNA, 25 bp, Homo sapien
ccacggaggccttgggagttatcag

SEQ ID NO: 3966065 - DNA, 25 bp, Homo sapien
ccttgggagttatcagctgcaatgt

SEQ ID NO: 3966066 - DNA, 25 bp, Homo sapien
ctgacacaagggtgacgactttcat

SEQ ID NO: 3966067 - DNA, 25 bp, Homo sapien
gggtgacgactttcattagtgtcat

SEQ ID NO: 3966068 - DNA, 25 bp, Homo sapien
gacacaagggtgacgactttcatta

SEQ ID NO: 3966069 - DNA, 25 bp, Homo sapien
caagggtgacgactttcattagtgt

SEQ ID NO: 3966070 - DNA, 25 bp, Homo sapien
tccttgttcacccttgtagatatca

SEQ ID NO: 3966071 - DNA, 25 bp, Homo sapien
tgtagatatcaccaatacctgtctt

SEQ ID NO: 3966072 - DNA, 25 bp, Homo sapien
caccaatacctgtcttttttgccac

SEQ ID NO: 3966073 - DNA, 25 bp, Homo sapien
catcagcaattcaggagttgcctcc

SEQ ID NO: 3966074 - DNA, 25 bp, Homo sapien
cattttccatgctcagtaggagagg

SEQ ID NO: 3966075 - DNA, 25 bp, Homo sapien
gagggatcaacccagcaaagcctca

SEQ ID NO: 3966076 - DNA, 25 bp, Homo sapien
tggtgggaaatttcctggtggccat

SEQ ID NO: 3966077 - DNA, 25 bp, Homo sapien
gatccagctctcctttggacagaat

SEQ ID NO: 3966078 - DNA, 25 bp, Homo sapien
acactgaacgctctcttttcatctc

SEQ ID NO: 3966079 - DNA, 25 bp, Homo sapien
ggtagaacatgtagatattcaagaa

SEQ ID NO: 3966080 - DNA, 25 bp, Homo sapien
cactgaacgctctcttttcatctcc

SEQ ID NO: 3966081 - DNA, 25 bp, Homo sapien
tgcgtgtgctgctcctcacatgaat

SEQ ID NO: 3966082 - DNA, 25 bp, Homo sapien
ggtgagtcagcagatagcaatgaaa

SEQ ID NO: 3966083 - DNA, 25 bp, Homo sapien
gctgctcctcacatgaatcaggtga

SEQ ID NO: 3966084 - DNA, 25 bp, Homo sapien
tcacatgaatcaggtgagtcagcag

SEQ ID NO: 3966085 - DNA, 25 bp, Homo sapien
taatagggactaaggcatctatggg

SEQ ID NO: 3966086 - DNA, 25 bp, Homo sapien
agtgactgctgtaatagggactaag

SEQ ID NO: 3966087 - DNA, 25 bp, Homo sapien
catctatgggatggcgttgatagga

SEQ ID NO: 3966088 - DNA, 25 bp, Homo sapien
gctgtaatagggactaaggcatcta

SEQ ID NO: 3966089 - DNA, 25 bp, Homo sapien
gactgtcgaggcagctttagcttgc

SEQ ID NO: 3966090 - DNA, 25 bp, Homo sapien
cggaagcactcccaagagagacagg

SEQ ID NO: 3966091 - DNA, 25 bp, Homo sapien
tcaacactgatgactgtcgaggcag

SEQ ID NO: 3966092 - DNA, 25 bp, Homo sapien
gcaaacacctggctaaactgttcag

SEQ ID NO: 3966093 - DNA, 25 bp, Homo sapien
tgtcagaattgagcggattttcaag

SEQ ID NO: 3966094 - DNA, 25 bp, Homo sapien
aattgagcggattttcaagagaaag

SEQ ID NO: 3966095 - DNA, 25 bp, Homo sapien
ccatgtgtcagaattgagcggattt

SEQ ID NO: 3966096 - DNA, 25 bp, Homo sapien
ttccatgtgtcagaattgagcggat

SEQ ID NO: 3966097 - DNA, 25 bp, Homo sapien
aacttgagttgcctccttgctctcc

SEQ ID NO: 3966098 - DNA, 25 bp, Homo sapien
ttgctctcctcggtgcactttggtt

SEQ ID NO: 3966099 - DNA, 25 bp, Homo sapien
ttcctagatcccgtctcactcttgg

SEQ ID NO: 3966100 - DNA, 25 bp, Homo sapien
gcactttggttccattcctagatcc

SEQ ID NO: 3966101 - DNA, 25 bp, Homo sapien
tattttctctcagtttcagtgtcat

SEQ ID NO: 3966102 - DNA, 25 bp, Homo sapien
gttttattttctctcagtttcagtg

SEQ ID NO: 3966103 - DNA, 25 bp, Homo sapien
aattcagtggttttattttctctca

SEQ ID NO: 3966104 - DNA, 25 bp, Homo sapien
tttattttctctcagtttcagtgtc

SEQ ID NO: 3966105 - DNA, 25 bp, Homo sapien
gaaaaagtctcacttgggatgaagc

SEQ ID NO: 3966106 - DNA, 25 bp, Homo sapien
aagggtgatgaaagtctgctcagaa

SEQ ID NO: 3966107 - DNA, 25 bp, Homo sapien
tcttgaccataatgcataaggaagg

SEQ ID NO: 3966108 - DNA, 25 bp, Homo sapien
tccaacgagctcacaaggtttcttc

SEQ ID NO: 3966109 - DNA, 25 bp, Homo sapien
ctcttccgtatagtaaatgcttcca

SEQ ID NO: 3966110 - DNA, 25 bp, Homo sapien
gtatttatgccttccactagtagtg

SEQ ID NO: 3966111 - DNA, 25 bp, Homo sapien
ttccactagtagtggaatatctggc

SEQ ID NO: 3966112 - DNA, 25 bp, Homo sapien
tacaatacggccaccagaaaactct

SEQ ID NO: 3966113 - DNA, 25 bp, Homo sapien
ggtgcctattcctcctataagggcg

SEQ ID NO: 3966114 - DNA, 25 bp, Homo sapien
tcacggttgtatgtggtgaggcctc

SEQ ID NO: 3966115 - DNA, 25 bp, Homo sapien
gattaggattctaccctcatgccgc

SEQ ID NO: 3966116 - DNA, 25 bp, Homo sapien
tggcattccctctgagcttgcaagg

SEQ ID NO: 3966117 - DNA, 25 bp, Homo sapien
gacctgccgactgacagccatgctt

SEQ ID NO: 3966118 - DNA, 25 bp, Homo sapien
tacacagagcctttgcaagtagaaa

SEQ ID NO: 3966119 - DNA, 25 bp, Homo sapien
taggaccccaaccatataggacctg

SEQ ID NO: 3966120 - DNA, 25 bp, Homo sapien
aagtagaaagattcactgggctctg

SEQ ID NO: 3966121 - DNA, 25 bp, Homo sapien
ctcagggactccaaccaaatatgac

SEQ ID NO: 3966122 - DNA, 25 bp, Homo sapien
ctatttctcagggactccaaccaaa

SEQ ID NO: 3966123 - DNA, 25 bp, Homo sapien
ttctcagggactccaaccaaatatg

SEQ ID NO: 3966124 - DNA, 25 bp, Homo sapien
tatttctcagggactccaaccaaat

SEQ ID NO: 3966125 - DNA, 25 bp, Homo sapien
gtatctggattcttgagaagcgcac

SEQ ID NO: 3966126 - DNA, 25 bp, Homo sapien
gagtatctggattcttgagaagcgc

SEQ ID NO: 3966127 - DNA, 25 bp, Homo sapien
cacagagtatctggattcttgagaa

SEQ ID NO: 3966128 - DNA, 25 bp, Homo sapien
cagagtatctggattcttgagaagc

SEQ ID NO: 3966129 - DNA, 25 bp, Homo sapien
gggatatccaacacataaagctgtt

SEQ ID NO: 3966130 - DNA, 25 bp, Homo sapien
gccactggtcaggcaaaggtgcttc

SEQ ID NO: 3966131 - DNA, 25 bp, Homo sapien
tcgatgccccatggctgcaaggaca

SEQ ID NO: 3966132 - DNA, 25 bp, Homo sapien
taaagctgttatgcaaaccaaatgc

SEQ ID NO: 3966133 - DNA, 25 bp, Homo sapien
tttgcagctgattagagctgactgg

SEQ ID NO: 3966134 - DNA, 25 bp, Homo sapien
gctgattagagctgactggttgttg

SEQ ID NO: 3966135 - DNA, 25 bp, Homo sapien
cagcccttttggtcattgatggaaa

SEQ ID NO: 3966136 - DNA, 25 bp, Homo sapien
tgggacttggagaatgtacagccct

SEQ ID NO: 3966137 - DNA, 25 bp, Homo sapien
tgccgaaagggttctgcaaaaatgg

SEQ ID NO: 3966138 - DNA, 25 bp, Homo sapien
caaagatgccagtactgaaggtgcc

SEQ ID NO: 3966139 - DNA, 25 bp, Homo sapien
tgtctgtgactaagatatcattccc

SEQ ID NO: 3966140 - DNA, 25 bp, Homo sapien
catgtcttatgctcatgaaaacacc

SEQ ID NO: 3966141 - DNA, 25 bp, Homo sapien
cactgaggcattcctacaagggctt

SEQ ID NO: 3966142 - DNA, 25 bp, Homo sapien
tacacttgagaatgtgttcccatca

SEQ ID NO: 3966143 - DNA, 25 bp, Homo sapien
gcagacgcatctccatgctggcaag

SEQ ID NO: 3966144 - DNA, 25 bp, Homo sapien
gatggctgccagttactttcttgga

SEQ ID NO: 3966145 - DNA, 25 bp, Homo sapien
ttcccagaacgccttctctagcaga

SEQ ID NO: 3966146 - DNA, 25 bp, Homo sapien
catggagtgaagttgcttaaacgct

SEQ ID NO: 3966147 - DNA, 25 bp, Homo sapien
gtgaccattttacttctagcgctgc

SEQ ID NO: 3966148 - DNA, 25 bp, Homo sapien
tgtacataaagcaggaccacttttc

SEQ ID NO: 3966149 - DNA, 25 bp, Homo sapien
tttttatctacatcacatggagtga

SEQ ID NO: 3966150 - DNA, 25 bp, Homo sapien
ttctaccatgtgactaccggcaaag

SEQ ID NO: 3966151 - DNA, 25 bp, Homo sapien
ctgtggcatagccccttctaccatg

SEQ ID NO: 3966152 - DNA, 25 bp, Homo sapien
ctaccatgtgactaccggcaaagag

SEQ ID NO: 3966153 - DNA, 25 bp, Homo sapien
tagctgtggcatagccccttctacc

SEQ ID NO: 3966154 - DNA, 25 bp, Homo sapien
tgtgctgccttcttgtgtccccaac

SEQ ID NO: 3966155 - DNA, 25 bp, Homo sapien
ccaaggctgtgtgggaagctcctca

SEQ ID NO: 3966156 - DNA, 25 bp, Homo sapien
agttgggaggctgaactcctgcatc

SEQ ID NO: 3966157 - DNA, 25 bp, Homo sapien
agaaaagttgggaggctgaactcct

SEQ ID NO: 3966158 - DNA, 25 bp, Homo sapien
ggtgtcatggtcctgcttggacact

SEQ ID NO: 3966159 - DNA, 25 bp, Homo sapien
cataacacgatgatgatggtgtcat

SEQ ID NO: 3966160 - DNA, 25 bp, Homo sapien
tcaaccttaacataacacgatgatg

SEQ ID NO: 3966161 - DNA, 25 bp, Homo sapien
tgcttggacacttttcatgccccat

SEQ ID NO: 3966162 - DNA, 25 bp, Homo sapien
ggctggagccaatgactgtacctat

SEQ ID NO: 3966163 - DNA, 25 bp, Homo sapien
tgagtagctcttatgtgcctggtcc

SEQ ID NO: 3966164 - DNA, 25 bp, Homo sapien
gctgggccccaaggaactacaagtc

SEQ ID NO: 3966165 - DNA, 25 bp, Homo sapien
gaagtagcgcaatccacctggtgca

SEQ ID NO: 3966166 - DNA, 25 bp, Homo sapien
caccatgaagaaagagacagctaag

SEQ ID NO: 3966167 - DNA, 25 bp, Homo sapien
catgaagaaagagacagctaagaca

SEQ ID NO: 3966168 - DNA, 25 bp, Homo sapien
agcaccatgaagaaagagacagcta

SEQ ID NO: 3966169 - DNA, 25 bp, Homo sapien
gggacagcaccatgaagaaagagac

SEQ ID NO: 3966170 - DNA, 25 bp, Homo sapien
gatcataaatatagtctcatgagca

SEQ ID NO: 3966171 - DNA, 25 bp, Homo sapien
tcctccagagcattttacaaaaaca

SEQ ID NO: 3966172 - DNA, 25 bp, Homo sapien
gatgtactagcacctggaacatgac

SEQ ID NO: 3966173 - DNA, 25 bp, Homo sapien
gatgtcagggatctgccacgtttct

SEQ ID NO: 3966174 - DNA, 25 bp, Homo sapien
cccatcactggccaaagaagtcggg

SEQ ID NO: 3966175 - DNA, 25 bp, Homo sapien
tggcggccctgtttctgcaattcct

SEQ ID NO: 3966176 - DNA, 25 bp, Homo sapien
tctgatgagccactcgagagcttcc

SEQ ID NO: 3966177 - DNA, 25 bp, Homo sapien
caggtcaggtggtaattgttgagcc

SEQ ID NO: 3966178 - DNA, 25 bp, Homo sapien
gatgggttgcgtctctctgatgagc

SEQ ID NO: 3966179 - DNA, 25 bp, Homo sapien
catcctggtgtaagcctggggccac

SEQ ID NO: 3966180 - DNA, 25 bp, Homo sapien
cagccaaacgcccatggcccttttg

SEQ ID NO: 3966181 - DNA, 25 bp, Homo sapien
ggagtgtggacagcctcggtggagc

SEQ ID NO: 3966182 - DNA, 25 bp, Homo sapien
gcagctcaacagtaaggcaacggca

SEQ ID NO: 3966183 - DNA, 25 bp, Homo sapien
agtgatgacgatgcagacccaaacc

SEQ ID NO: 3966184 - DNA, 25 bp, Homo sapien
tctgaccaaggtcctttgctgccat

SEQ ID NO: 3966185 - DNA, 25 bp, Homo sapien
cctgacagtctgcagctggccatat

SEQ ID NO: 3966186 - DNA, 25 bp, Homo sapien
gccatattcatatctgaccaaggtc

SEQ ID NO: 3966187 - DNA, 25 bp, Homo sapien
gcaaggcccatgtgggtcctgtgag

SEQ ID NO: 3966188 - DNA, 25 bp, Homo sapien
ttttccatatccatctacaagctgc

SEQ ID NO: 3966189 - DNA, 25 bp, Homo sapien
acccggtatcagcaaggcccatgtg

SEQ ID NO: 3966190 - DNA, 25 bp, Homo sapien
acaagctgcataacccacccggtat

SEQ ID NO: 3966191 - DNA, 25 bp, Homo sapien
gctgggcaagtaagcactgttgtgc

SEQ ID NO: 3966192 - DNA, 25 bp, Homo sapien
gaagggctggtactatctttctcct

SEQ ID NO: 3966193 - DNA, 25 bp, Homo sapien
cagagtgaccacagtagtaaccgag

SEQ ID NO: 3966194 - DNA, 25 bp, Homo sapien
taagacccataaccctctgagctgg

SEQ ID NO: 3966195 - DNA, 25 bp, Homo sapien
tgttagaggttcaaaggtcaggctt

SEQ ID NO: 3966196 - DNA, 25 bp, Homo sapien
ccacatctatcattttggtctgaat

SEQ ID NO: 3966197 - DNA, 25 bp, Homo sapien
taagagaatccacatctatcatttt

SEQ ID NO: 3966198 - DNA, 25 bp, Homo sapien
tagaggttcaaaggtcaggcttccc

SEQ ID NO: 3966199 - DNA, 25 bp, Homo sapien
ttggtcttcacaggaaccacaagga

SEQ ID NO: 3966200 - DNA, 25 bp, Homo sapien
caaggacaacattctcaatgcgaat

SEQ ID NO: 3966201 - DNA, 25 bp, Homo sapien
tctcaatgcgaattccaaaagcccc

SEQ ID NO: 3966202 - DNA, 25 bp, Homo sapien
aaagccccatcttcatagtacccgg

SEQ ID NO: 3966203 - DNA, 25 bp, Homo sapien
tcatggttcacatccgtaagacaca

SEQ ID NO: 3966204 - DNA, 25 bp, Homo sapien
gagaaactttcactccttggatgac

SEQ ID NO: 3966205 - DNA, 25 bp, Homo sapien
ggatgactgccctactccaaaggag

SEQ ID NO: 3966206 - DNA, 25 bp, Homo sapien
gaaacgggtgaagagcccactctat

SEQ ID NO: 3966207 - DNA, 25 bp, Homo sapien
cctcatggacattcaaaaaagaccc

SEQ ID NO: 3966208 - DNA, 25 bp, Homo sapien
ttttgtaactgatgccgcaaggacc

SEQ ID NO: 3966209 - DNA, 25 bp, Homo sapien
cgtgcaagtaatctaggcctgaatc

SEQ ID NO: 3966210 - DNA, 25 bp, Homo sapien
ccagtcccgtgcaagtaatctaggc

SEQ ID NO: 3966211 - DNA, 25 bp, Homo sapien
tgaacgggcaaaggagtcaagaagg

SEQ ID NO: 3966212 - DNA, 25 bp, Homo sapien
aacgggcaaaggagtcaagaaggtg

SEQ ID NO: 3966213 - DNA, 25 bp, Homo sapien
cgggcaaaggagtcaagaaggtgac

SEQ ID NO: 3966214 - DNA, 25 bp, Homo sapien
ctgaacgggcaaaggagtcaagaag

SEQ ID NO: 3966215 - DNA, 25 bp, Homo sapien
cacacagaggccgtatcagacatgg

SEQ ID NO: 3966216 - DNA, 25 bp, Homo sapien
ggagggttcagatttcagcacagca

SEQ ID NO: 3966217 - DNA, 25 bp, Homo sapien
gaagctaggcgatcatccattcagg

SEQ ID NO: 3966218 - DNA, 25 bp, Homo sapien
tcagacatggacgttcccttgccag

SEQ ID NO: 3966219 - DNA, 25 bp, Homo sapien
tatgtggcccttgaggacatatgtg

SEQ ID NO: 3966220 - DNA, 25 bp, Homo sapien
ggttccagtcgggaaaacggctgca

SEQ ID NO: 3966221 - DNA, 25 bp, Homo sapien
acagctatgtggcccttgaggacat

SEQ ID NO: 3966222 - DNA, 25 bp, Homo sapien
cagtcgggaaaacggctgcactcac

SEQ ID NO: 3966223 - DNA, 25 bp, Homo sapien
gtaggctgtaggggtcccaaaatgc

SEQ ID NO: 3966224 - DNA, 25 bp, Homo sapien
cgtaggctgtaggggtcccaaaatg

SEQ ID NO: 3966225 - DNA, 25 bp, Homo sapien
aggctgtaggggtcccaaaatgcat

SEQ ID NO: 3966226 - DNA, 25 bp, Homo sapien
taggctgtaggggtcccaaaatgca

SEQ ID NO: 3966227 - DNA, 25 bp, Homo sapien
tgtccgcgtcacatctgtggtgcca

SEQ ID NO: 3966228 - DNA, 25 bp, Homo sapien
tccgcgtcacatctgtggtgccatc

SEQ ID NO: 3966229 - DNA, 25 bp, Homo sapien
gtccgcgtcacatctgtggtgccat

SEQ ID NO: 3966230 - DNA, 25 bp, Homo sapien
ccgcgtcacatctgtggtgccatcc

SEQ ID NO: 3966231 - DNA, 25 bp, Homo sapien
tgagaagccccatacaatgctggtg

SEQ ID NO: 3966232 - DNA, 25 bp, Homo sapien
caagcatgtggacaagtgagaagcc

SEQ ID NO: 3966233 - DNA, 25 bp, Homo sapien
gctaaataaactgggagtgacgtca

SEQ ID NO: 3966234 - DNA, 25 bp, Homo sapien
cattcttggtctacagcataagggc

SEQ ID NO: 3966235 - DNA, 25 bp, Homo sapien
ctttcaacggttccaaaagcttgct

SEQ ID NO: 3966236 - DNA, 25 bp, Homo sapien
ccagagatgatagccgtgaaagcag

SEQ ID NO: 3966237 - DNA, 25 bp, Homo sapien
tcgtgccctcttaatgcagacaggg

SEQ ID NO: 3966238 - DNA, 25 bp, Homo sapien
gggcagccctcatttctcatttatt

SEQ ID NO: 3966239 - DNA, 25 bp, Homo sapien
caataaggtacacctcatccaggga

SEQ ID NO: 3966240 - DNA, 25 bp, Homo sapien
catccagggacaaggtcctattcgt

SEQ ID NO: 3966241 - DNA, 25 bp, Homo sapien
ttgtattgagcacccgagtcaataa

SEQ ID NO: 3966242 - DNA, 25 bp, Homo sapien
ggtcctattcgtctcagggactggc

SEQ ID NO: 3966243 - DNA, 25 bp, Homo sapien
tgagaacgattagatgcaacaggac

SEQ ID NO: 3966244 - DNA, 25 bp, Homo sapien
gacaggcaggagtggatgtctcaac

SEQ ID NO: 3966245 - DNA, 25 bp, Homo sapien
tgggaggaggacacacaagagctct

SEQ ID NO: 3966246 - DNA, 25 bp, Homo sapien
gctgggaaaaggaatggatcacgat

SEQ ID NO: 3966247 - DNA, 25 bp, Homo sapien
tatcactgcactgggaaacacccaa

SEQ ID NO: 3966248 - DNA, 25 bp, Homo sapien
cctcttcagcaataagggcaccagt

SEQ ID NO: 3966249 - DNA, 25 bp, Homo sapien
ggatgagagcactccaagtctctgc

SEQ ID NO: 3966250 - DNA, 25 bp, Homo sapien
tgcagctgaagtgaggttgtcctcc

SEQ ID NO: 3966251 - DNA, 25 bp, Homo sapien
aggcttccaaccacccacaatgaag

SEQ ID NO: 3966252 - DNA, 25 bp, Homo sapien
aaatgccaacgcagaggcaaatttc

SEQ ID NO: 3966253 - DNA, 25 bp, Homo sapien
atgaagaaatgccaacgcagaggca

SEQ ID NO: 3966254 - DNA, 25 bp, Homo sapien
cagaaccccgcctctaaacaggctt

SEQ ID NO: 3966255 - DNA, 25 bp, Homo sapien
tcagtcctagacatatcagtgcccc

SEQ ID NO: 3966256 - DNA, 25 bp, Homo sapien
gtgccatactgagcctaagaagagg

SEQ ID NO: 3966257 - DNA, 25 bp, Homo sapien
caaagcggtttgaaccaggcagagc

SEQ ID NO: 3966258 - DNA, 25 bp, Homo sapien
tatggactagtacaaaacagctgct

SEQ ID NO: 3966259 - DNA, 25 bp, Homo sapien
agcaaggccaggcagcatgctcctc

SEQ ID NO: 3966260 - DNA, 25 bp, Homo sapien
caggcagcatgctcctccgcatgcc

SEQ ID NO: 3966261 - DNA, 25 bp, Homo sapien
tcaggctcctgtgcagaagcagcaa

SEQ ID NO: 3966262 - DNA, 25 bp, Homo sapien
ggccaggcagcatgctcctccgcat

SEQ ID NO: 3966263 - DNA, 25 bp, Homo sapien
cgtagtgaatgatggcgccgttggg

SEQ ID NO: 3966264 - DNA, 25 bp, Homo sapien
ggaaattgttgggaagctcaggtcc

SEQ ID NO: 3966265 - DNA, 25 bp, Homo sapien
tgatggcgccgttgggtcccgtact

SEQ ID NO: 3966266 - DNA, 25 bp, Homo sapien
gggaagctcaggtccacaaagtctg

SEQ ID NO: 3966267 - DNA, 25 bp, Homo sapien
tgcgaaactcctcagctttgtcagc

SEQ ID NO: 3966268 - DNA, 25 bp, Homo sapien
agatctctgtcacaccacctttggg

SEQ ID NO: 3966269 - DNA, 25 bp, Homo sapien
gcagctgagatctctgtcacaccac

SEQ ID NO: 3966270 - DNA, 25 bp, Homo sapien
aactcctcagctttgtcagcagctg

SEQ ID NO: 3966271 - DNA, 25 bp, Homo sapien
agagttcacagagagcaacagcatc

SEQ ID NO: 3966272 - DNA, 25 bp, Homo sapien
ccagttaaagagttcacagagagca

SEQ ID NO: 3966273 - DNA, 25 bp, Homo sapien
gttcacagagagcaacagcatcttt

SEQ ID NO: 3966274 - DNA, 25 bp, Homo sapien
cacagagagcaacagcatctttaat

SEQ ID NO: 3966275 - DNA, 25 bp, Homo sapien
tgagcccgcctcatgccttctgact

SEQ ID NO: 3966276 - DNA, 25 bp, Homo sapien
cttcacagctttggcgatgcagatg

SEQ ID NO: 3966277 - DNA, 25 bp, Homo sapien
tgtaaggcatacagcagcggtggtc

SEQ ID NO: 3966278 - DNA, 25 bp, Homo sapien
ctgactcagctgaattcttcacagc

SEQ ID NO: 3966279 - DNA, 25 bp, Homo sapien
catagctggccttgtcactgaccca

SEQ ID NO: 3966280 - DNA, 25 bp, Homo sapien
gatgcacctggatcctgtattcggc

SEQ ID NO: 3966281 - DNA, 25 bp, Homo sapien
gatggtctcgctcacagcatagctg

SEQ ID NO: 3966282 - DNA, 25 bp, Homo sapien
tatgcggtcaccatcaatgaagagc

SEQ ID NO: 3966283 - DNA, 25 bp, Homo sapien
atgattgcgtaggagaaaaatactg

SEQ ID NO: 3966284 - DNA, 25 bp, Homo sapien
atgatcgtctctagtcctatgattg

SEQ ID NO: 3966285 - DNA, 25 bp, Homo sapien
ctagtcctatgattgcgtaggagaa

SEQ ID NO: 3966286 - DNA, 25 bp, Homo sapien
aaaaatactggattgtgctccacat

SEQ ID NO: 3966287 - DNA, 25 bp, Homo sapien
cctgtcacctgtctgacttaagatg

SEQ ID NO: 3966288 - DNA, 25 bp, Homo sapien
cttgtagcgggagggaagagcttca

SEQ ID NO: 3966289 - DNA, 25 bp, Homo sapien
tcaaaatccctgtcacctgtctgac

SEQ ID NO: 3966290 - DNA, 25 bp, Homo sapien
cctgtctgacttaagatgttaaggg

SEQ ID NO: 3966291 - DNA, 25 bp, Homo sapien
atgggtctgctctggcaccacgact

SEQ ID NO: 3966292 - DNA, 25 bp, Homo sapien
tgggtctgctctggcaccacgactg

SEQ ID NO: 3966293 - DNA, 25 bp, Homo sapien
ggggacctgcggacagccagtaaca

SEQ ID NO: 3966294 - DNA, 25 bp, Homo sapien
accacgactgggtgggggacctgcg

SEQ ID NO: 3966295 - DNA, 25 bp, Homo sapien
agaccaggagagagcacagttctgg

SEQ ID NO: 3966296 - DNA, 25 bp, Homo sapien
acagaccaggagagagcacagttct

SEQ ID NO: 3966297 - DNA, 25 bp, Homo sapien
gacagaccaggagagagcacagttc

SEQ ID NO: 3966298 - DNA, 25 bp, Homo sapien
cagaccaggagagagcacagttctg

SEQ ID NO: 3966299 - DNA, 25 bp, Homo sapien
tgggtcaaatccactcagaaaccag

SEQ ID NO: 3966300 - DNA, 25 bp, Homo sapien
gcaaaaagataaagcagtgcctctt

SEQ ID NO: 3966301 - DNA, 25 bp, Homo sapien
gaaggttcaaccagattccgtcagg

SEQ ID NO: 3966302 - DNA, 25 bp, Homo sapien
gcagtagggtctcattctctagtga

SEQ ID NO: 3966303 - DNA, 25 bp, Homo sapien
tgacgttcctctcagccattttcaa

SEQ ID NO: 3966304 - DNA, 25 bp, Homo sapien
acaaaccacatgacgttcctctcag

SEQ ID NO: 3966305 - DNA, 25 bp, Homo sapien
tcaaccgaaggtctgcaaccttgtc

SEQ ID NO: 3966306 - DNA, 25 bp, Homo sapien
tcctctcagccattttcaaccgaag

SEQ ID NO: 3966307 - DNA, 25 bp, Homo sapien
tgctctgcaagatgaaatcgtggtg

SEQ ID NO: 3966308 - DNA, 25 bp, Homo sapien
gggacacacagggacctatatcaac

SEQ ID NO: 3966309 - DNA, 25 bp, Homo sapien
tcagtgctaagacctaggaattccc

SEQ ID NO: 3966310 - DNA, 25 bp, Homo sapien
tatcaacacactacccagcaaaggg

SEQ ID NO: 3966311 - DNA, 25 bp, Homo sapien
tccccattccgcaatacccctctgg

SEQ ID NO: 3966312 - DNA, 25 bp, Homo sapien
catcctccccattccgcaatacccc

SEQ ID NO: 3966313 - DNA, 25 bp, Homo sapien
atcctccccattccgcaatacccct

SEQ ID NO: 3966314 - DNA, 25 bp, Homo sapien
ccattccgcaatacccctctggtga

SEQ ID NO: 3966315 - DNA, 25 bp, Homo sapien
agaggcttgcaagggcgctcaggac

SEQ ID NO: 3966316 - DNA, 25 bp, Homo sapien
aatgaggtgatggccggcacttctc

SEQ ID NO: 3966317 - DNA, 25 bp, Homo sapien
gatggccggcacttctcagaacttt

SEQ ID NO: 3966318 - DNA, 25 bp, Homo sapien
ggacggtctgtccagattttgtcaa

SEQ ID NO: 3966319 - DNA, 25 bp, Homo sapien
gccgaacgcccattgcagcagggca

SEQ ID NO: 3966320 - DNA, 25 bp, Homo sapien
ccttcagaaaggtggtcctgccatg

SEQ ID NO: 3966321 - DNA, 25 bp, Homo sapien
cagccatgagccgaacgcccattgc

SEQ ID NO: 3966322 - DNA, 25 bp, Homo sapien
aaccttcagaaaggtggtcctgcca

SEQ ID NO: 3966323 - DNA, 25 bp, Homo sapien
tcctgagttggtgtgtccttcagac

SEQ ID NO: 3966324 - DNA, 25 bp, Homo sapien
ttcctgagttggtgtgtccttcaga

SEQ ID NO: 3966325 - DNA, 25 bp, Homo sapien
ctgtaggaatgatcaaggggtccac

SEQ ID NO: 3966326 - DNA, 25 bp, Homo sapien
caaggggtccacaccaaccctggat

SEQ ID NO: 3966327 - DNA, 25 bp, Homo sapien
taaaaggattaagatccaggagtcc

SEQ ID NO: 3966328 - DNA, 25 bp, Homo sapien
tgaggacctctaggatccctgccca

SEQ ID NO: 3966329 - DNA, 25 bp, Homo sapien
gtttgggctagccatgcctgtaccc

SEQ ID NO: 3966330 - DNA, 25 bp, Homo sapien
cctgcccagatcaggccaactaagt

SEQ ID NO: 3966331 - DNA, 25 bp, Homo sapien
cgtcagtccacatggctgcatgctc

SEQ ID NO: 3966332 - DNA, 25 bp, Homo sapien
ccagttgctgtccatttgcttggca

SEQ ID NO: 3966333 - DNA, 25 bp, Homo sapien
cctggagaaagtagcgcccgtcagt

SEQ ID NO: 3966334 - DNA, 25 bp, Homo sapien
ccatcttcataagtgtccagttgct

SEQ ID NO: 3966335 - DNA, 25 bp, Homo sapien
gaagaccacactactgaaaacaagc

SEQ ID NO: 3966336 - DNA, 25 bp, Homo sapien
aaaatgacagtagacaggcaagagc

SEQ ID NO: 3966337 - DNA, 25 bp, Homo sapien
gctcagaagctgcacaaaatgacag

SEQ ID NO: 3966338 - DNA, 25 bp, Homo sapien
gatgggtccttgactccaaagaaac

SEQ ID NO: 3966339 - DNA, 25 bp, Homo sapien
gtcagccaaagccaatcctaatgcg

SEQ ID NO: 3966340 - DNA, 25 bp, Homo sapien
gcacttacgccaaaggaagcagcat

SEQ ID NO: 3966341 - DNA, 25 bp, Homo sapien
taatgcgccaaccaacacaagcact

SEQ ID NO: 3966342 - DNA, 25 bp, Homo sapien
caccaatgcagcttagagttaacct

SEQ ID NO: 3966343 - DNA, 25 bp, Homo sapien
aagcccgccgacagtcacatggagc

SEQ ID NO: 3966344 - DNA, 25 bp, Homo sapien
ccagagacaaaagcccgccgacagt

SEQ ID NO: 3966345 - DNA, 25 bp, Homo sapien
ccgcagagccatcgaatccagagac

SEQ ID NO: 3966346 - DNA, 25 bp, Homo sapien
cgcagagccatcgaatccagagaca

SEQ ID NO: 3966347 - DNA, 25 bp, Homo sapien
gcctgcctgagtacagagctgctgc

SEQ ID NO: 3966348 - DNA, 25 bp, Homo sapien
tagtaggtcaggatccaaagccagg

SEQ ID NO: 3966349 - DNA, 25 bp, Homo sapien
caggcctgcctgagtacagagctgc

SEQ ID NO: 3966350 - DNA, 25 bp, Homo sapien
aagttaatagtaggtcaggatccaa

SEQ ID NO: 3966351 - DNA, 25 bp, Homo sapien
cacactgacaggctatgcagaagcc

SEQ ID NO: 3966352 - DNA, 25 bp, Homo sapien
agaactgcccaaaccaactgctaca

SEQ ID NO: 3966353 - DNA, 25 bp, Homo sapien
tgtgctccagttgcgggaaccacca

SEQ ID NO: 3966354 - DNA, 25 bp, Homo sapien
tcatgtgctccagttgcgggaacca

SEQ ID NO: 3966355 - DNA, 25 bp, Homo sapien
cccaaaccaactgctacataatcat

SEQ ID NO: 3966356 - DNA, 25 bp, Homo sapien
tctaatgaacacaaacgaacctcac

SEQ ID NO: 3966357 - DNA, 25 bp, Homo sapien
tagatctaacagttatgcacccagc

SEQ ID NO: 3966358 - DNA, 25 bp, Homo sapien
tgaagttgaccaatcttatttgtct

SEQ ID NO: 3966359 - DNA, 25 bp, Homo sapien
aagtactcaggactacagccatgag

SEQ ID NO: 3966360 - DNA, 25 bp, Homo sapien
aatcttgaggttgagttgttcccag

SEQ ID NO: 3966361 - DNA, 25 bp, Homo sapien
gctcctaaggccaggaaatccatgt

SEQ ID NO: 3966362 - DNA, 25 bp, Homo sapien
tgttcccaggttaatacaggcctga

SEQ ID NO: 3966363 - DNA, 25 bp, Homo sapien
tccaggcagagatccaatcttgagg

SEQ ID NO: 3966364 - DNA, 25 bp, Homo sapien
tggcttgtctcagctgccgaagcag

SEQ ID NO: 3966365 - DNA, 25 bp, Homo sapien
tctcccgatgggatgatgtaggcct

SEQ ID NO: 3966366 - DNA, 25 bp, Homo sapien
ggttcggtcacatactcagagttcc

SEQ ID NO: 3966367 - DNA, 25 bp, Homo sapien
tgtaggcctggatcggttcggtcac

SEQ ID NO: 3966368 - DNA, 25 bp, Homo sapien
cactcaacactttccctcttcctac

SEQ ID NO: 3966369 - DNA, 25 bp, Homo sapien
ccccatcaacactcaacactttccc

SEQ ID NO: 3966370 - DNA, 25 bp, Homo sapien
atcaacactcaacactttccctctt

SEQ ID NO: 3966371 - DNA, 25 bp, Homo sapien
ccatcaacactcaacactttccctc

SEQ ID NO: 3966372 - DNA, 25 bp, Homo sapien
ccttcaggccgatcacattcatgtt

SEQ ID NO: 3966373 - DNA, 25 bp, Homo sapien
gatagcaacaggcaatggctgaggc

SEQ ID NO: 3966374 - DNA, 25 bp, Homo sapien
gatgaaagaagtcccaataccataa

SEQ ID NO: 3966375 - DNA, 25 bp, Homo sapien
ctgaagtgaatacagtgggccctgg

SEQ ID NO: 3966376 - DNA, 25 bp, Homo sapien
cacctcgttaggttcaattattctt

SEQ ID NO: 3966377 - DNA, 25 bp, Homo sapien
gagtgtgtcacctcgttaggttcaa

SEQ ID NO: 3966378 - DNA, 25 bp, Homo sapien
tgtgtcacctcgttaggttcaatta

SEQ ID NO: 3966379 - DNA, 25 bp, Homo sapien
gtctcctgagtgtgtcacctcgtta

SEQ ID NO: 3966380 - DNA, 25 bp, Homo sapien
tactcgcggtggctttctggaggct

SEQ ID NO: 3966381 - DNA, 25 bp, Homo sapien
tggaggctgccattcggcggtgacg

SEQ ID NO: 3966382 - DNA, 25 bp, Homo sapien
tgacgtgccccagcccacgtcaggg

SEQ ID NO: 3966383 - DNA, 25 bp, Homo sapien
cttactcgcggtggctttctggagg

SEQ ID NO: 3966384 - DNA, 25 bp, Homo sapien
accatggtaacctgcaggccaacag

SEQ ID NO: 3966385 - DNA, 25 bp, Homo sapien
ctgttggatcccaggccaacagatc

SEQ ID NO: 3966386 - DNA, 25 bp, Homo sapien
aacagatcctgttggatcccaggcc

SEQ ID NO: 3966387 - DNA, 25 bp, Homo sapien
agtgtgcaccatggtaacctgcagg

SEQ ID NO: 3966388 - DNA, 25 bp, Homo sapien
tcctcctccacaaaatgaggtggtg

SEQ ID NO: 3966389 - DNA, 25 bp, Homo sapien
ctctaagttggagttcagcacagct

SEQ ID NO: 3966390 - DNA, 25 bp, Homo sapien
ctgtgaaaacaacctgttcccatgg

SEQ ID NO: 3966391 - DNA, 25 bp, Homo sapien
ccagagttgcccgagtgtgtgagca

SEQ ID NO: 3966392 - DNA, 25 bp, Homo sapien
tcttcgccagagttgcccgagtgtg

SEQ ID NO: 3966393 - DNA, 25 bp, Homo sapien
ggctctgcccaaccctccgcttcat

SEQ ID NO: 3966394 - DNA, 25 bp, Homo sapien
ccaaccctccgcttcatccatgcac

SEQ ID NO: 3966395 - DNA, 25 bp, Homo sapien
aaggctctgcccaaccctccgcttc

SEQ ID NO: 3966396 - DNA, 25 bp, Homo sapien
tctgcccaaccctccgcttcatcca

SEQ ID NO: 3966397 - DNA, 25 bp, Homo sapien
ggatattgcacatcctcaaaatgag

SEQ ID NO: 3966398 - DNA, 25 bp, Homo sapien
cctcgggactgtcgcacatcctgtt

SEQ ID NO: 3966399 - DNA, 25 bp, Homo sapien
ttgcacatcctcaaaatgagcccct

SEQ ID NO: 3966400 - DNA, 25 bp, Homo sapien
cttcctttgtgcctcgggactgtcg

SEQ ID NO: 3966401 - DNA, 25 bp, Homo sapien
gctgtgaactatgccaagccccttg

SEQ ID NO: 3966402 - DNA, 25 bp, Homo sapien
tcagtgacaaagcaggttcaaaggc

SEQ ID NO: 3966403 - DNA, 25 bp, Homo sapien
tacttgcctatgagcacttggttgg

SEQ ID NO: 3966404 - DNA, 25 bp, Homo sapien
acaggttgcaggttcaggtccccaa

SEQ ID NO: 3966405 - DNA, 25 bp, Homo sapien
cctgagtggatggtgctctgcttct

SEQ ID NO: 3966406 - DNA, 25 bp, Homo sapien
acagtgctgagcatagaggatgtca

SEQ ID NO: 3966407 - DNA, 25 bp, Homo sapien
cctgttacagaagtcagcacctaga

SEQ ID NO: 3966408 - DNA, 25 bp, Homo sapien
cagttgctggctcaaagtaggcaga

SEQ ID NO: 3966409 - DNA, 25 bp, Homo sapien
aaactcctctaaggccttgctgcca

SEQ ID NO: 3966410 - DNA, 25 bp, Homo sapien
tggctcacggttccagagcgcatgt

SEQ ID NO: 3966411 - DNA, 25 bp, Homo sapien
ttgcacctcccaaatggctcacggt

SEQ ID NO: 3966412 - DNA, 25 bp, Homo sapien
ttaaactcctctaaggccttgctgc

SEQ ID NO: 3966413 - DNA, 25 bp, Homo sapien
gggtgttaattagaggcattaactg

SEQ ID NO: 3966414 - DNA, 25 bp, Homo sapien
ttcctgagaacccatgaactctctc

SEQ ID NO: 3966415 - DNA, 25 bp, Homo sapien
ggcattaactgtagcattcctgaga

SEQ ID NO: 3966416 - DNA, 25 bp, Homo sapien
tgtagcattcctgagaacccatgaa

SEQ ID NO: 3966417 - DNA, 25 bp, Homo sapien
tatggcgtttgaaggggccctcgta

SEQ ID NO: 3966418 - DNA, 25 bp, Homo sapien
cactccggaaggtctttgtatggcg

SEQ ID NO: 3966419 - DNA, 25 bp, Homo sapien
ggaaggtctttgtatggcgtttgaa

SEQ ID NO: 3966420 - DNA, 25 bp, Homo sapien
gcacactgggcactccggaaggtct

SEQ ID NO: 3966421 - DNA, 25 bp, Homo sapien
gagtgcaatggagatacctgctacc

SEQ ID NO: 3966422 - DNA, 25 bp, Homo sapien
aatagagtgcaatggagatacctgc

SEQ ID NO: 3966423 - DNA, 25 bp, Homo sapien
tgcaatggagatacctgctaccacc

SEQ ID NO: 3966424 - DNA, 25 bp, Homo sapien
ggtgaggtggcaaatagagtgcaat

SEQ ID NO: 3966425 - DNA, 25 bp, Homo sapien
cagggagaggagcatcatcagttta

SEQ ID NO: 3966426 - DNA, 25 bp, Homo sapien
gagaggagcatcatcagtttaggtg

SEQ ID NO: 3966427 - DNA, 25 bp, Homo sapien
ttcagagacaggctttgctgggtga

SEQ ID NO: 3966428 - DNA, 25 bp, Homo sapien
agatcctcagcctcatcacttccca

SEQ ID NO: 3966429 - DNA, 25 bp, Homo sapien
ttacagtaatcataggcctcatggg

SEQ ID NO: 3966430 - DNA, 25 bp, Homo sapien
gatcacacgatggaggcagctagac

SEQ ID NO: 3966431 - DNA, 25 bp, Homo sapien
tattgtgctaacacactggtgagtc

SEQ ID NO: 3966432 - DNA, 25 bp, Homo sapien
tggtgagtcacaatcccatgtgcca

SEQ ID NO: 3966433 - DNA, 25 bp, Homo sapien
cattttctagtaacgcccctcagtc

SEQ ID NO: 3966434 - DNA, 25 bp, Homo sapien
tggttcaaatgaggccgatgccacc

SEQ ID NO: 3966435 - DNA, 25 bp, Homo sapien
cctcttagtccatgtggttcaaatg

SEQ ID NO: 3966436 - DNA, 25 bp, Homo sapien
catctgttggttttgcccactctgc

SEQ ID NO: 3966437 - DNA, 25 bp, Homo sapien
cagccacagagcatgggaaactcaa

SEQ ID NO: 3966438 - DNA, 25 bp, Homo sapien
tcaagtttgcttcctaaccagctcc

SEQ ID NO: 3966439 - DNA, 25 bp, Homo sapien
acagagcatgggaaactcaagtttg

SEQ ID NO: 3966440 - DNA, 25 bp, Homo sapien
agtttgcttcctaaccagctccctt

SEQ ID NO: 3966441 - DNA, 25 bp, Homo sapien
ttctccagtagggttaagttttgca

SEQ ID NO: 3966442 - DNA, 25 bp, Homo sapien
tctccagtagggttaagttttgcat

SEQ ID NO: 3966443 - DNA, 25 bp, Homo sapien
ggcccttggtaatgccgtgttttga

SEQ ID NO: 3966444 - DNA, 25 bp, Homo sapien
tggcccttggtaatgccgtgttttg

SEQ ID NO: 3966445 - DNA, 25 bp, Homo sapien
gctctccaaaggcattgaggctctg

SEQ ID NO: 3966446 - DNA, 25 bp, Homo sapien
gcccttggtaatgccgtgttttgaa

SEQ ID NO: 3966447 - DNA, 25 bp, Homo sapien
tgcagaattgaaacgaaagccagcc

SEQ ID NO: 3966448 - DNA, 25 bp, Homo sapien
tgtacatgacaaccccgctggagtt

SEQ ID NO: 3966449 - DNA, 25 bp, Homo sapien
gagaacatgtttagcacacacagag

SEQ ID NO: 3966450 - DNA, 25 bp, Homo sapien
aaagtaccatgataagctgctcagg

SEQ ID NO: 3966451 - DNA, 25 bp, Homo sapien
gttccttagggtcttgggcctcatg

SEQ ID NO: 3966452 - DNA, 25 bp, Homo sapien
attcagaaacccaggctccttccga

SEQ ID NO: 3966453 - DNA, 25 bp, Homo sapien
cagtatccaactgaagacagctctc

SEQ ID NO: 3966454 - DNA, 25 bp, Homo sapien
gctcccctccatgtgatgattcaga

SEQ ID NO: 3966455 - DNA, 25 bp, Homo sapien
tctggcaccttgacggaaaaaatgt

SEQ ID NO: 3966456 - DNA, 25 bp, Homo sapien
taactgcttgtacagccaggaacgt

SEQ ID NO: 3966457 - DNA, 25 bp, Homo sapien
gaaaggcactgtgtcatctcacgca

SEQ ID NO: 3966458 - DNA, 25 bp, Homo sapien
tatactgtggtggacccaagacctg

SEQ ID NO: 3966459 - DNA, 25 bp, Homo sapien
ggctcgcctgcattacggagggtca

SEQ ID NO: 3966460 - DNA, 25 bp, Homo sapien
tgaccaaacaactgagaccatagcc

SEQ ID NO: 3966461 - DNA, 25 bp, Homo sapien
tagagcaggccaacagaatttcaac

SEQ ID NO: 3966462 - DNA, 25 bp, Homo sapien
tacagcatgctagcaaactggaact

SEQ ID NO: 3966463 - DNA, 25 bp, Homo sapien
ttcccctagtagaatgacaaccagg

SEQ ID NO: 3966464 - DNA, 25 bp, Homo sapien
tcaactgagcaagtatttgtcgact

SEQ ID NO: 3966465 - DNA, 25 bp, Homo sapien
gcattttacatgaaccgactcttga

SEQ ID NO: 3966466 - DNA, 25 bp, Homo sapien
gcagagaggaacgatctgttaccat

SEQ ID NO: 3966467 - DNA, 25 bp, Homo sapien
taaggcagcctaagcagttttccag

SEQ ID NO: 3966468 - DNA, 25 bp, Homo sapien
aaacccgggcagtttgactgtggag

SEQ ID NO: 3966469 - DNA, 25 bp, Homo sapien
ttagaatgtgtcctacaactgatgg

SEQ ID NO: 3966470 - DNA, 25 bp, Homo sapien
caactgatggcacgttagcattgtg

SEQ ID NO: 3966471 - DNA, 25 bp, Homo sapien
gatctgtttccgctgaggcttctgc

SEQ ID NO: 3966472 - DNA, 25 bp, Homo sapien
tgaaccttgaggatcccctccaaaa

SEQ ID NO: 3966473 - DNA, 25 bp, Homo sapien
gctcgggaccttttgctggatctgt

SEQ ID NO: 3966474 - DNA, 25 bp, Homo sapien
gacttgggcacggaagcatagaccc

SEQ ID NO: 3966475 - DNA, 25 bp, Homo sapien
gcagagtttgacacagtctctagga

SEQ ID NO: 3966476 - DNA, 25 bp, Homo sapien
gaacttggatcagaatgagaactcc

SEQ ID NO: 3966477 - DNA, 25 bp, Homo sapien
tctgtgggacacttgttcaaaatgc

SEQ ID NO: 3966478 - DNA, 25 bp, Homo sapien
gaagggaccacaaaaagagatgcct

SEQ ID NO: 3966479 - DNA, 25 bp, Homo sapien
gtggcacagcggctggcgaggagag

SEQ ID NO: 3966480 - DNA, 25 bp, Homo sapien
gcggttggtgctgaacacgtgcatc

SEQ ID NO: 3966481 - DNA, 25 bp, Homo sapien
cgtgcatccttgttgaagctctgca

SEQ ID NO: 3966482 - DNA, 25 bp, Homo sapien
agaggaggcggttggtgctgaacac

SEQ ID NO: 3966483 - DNA, 25 bp, Homo sapien
caaagactctttctcgctagttcgt

SEQ ID NO: 3966484 - DNA, 25 bp, Homo sapien
tgtgcttctctcacgtaaacagccg

SEQ ID NO: 3966485 - DNA, 25 bp, Homo sapien
catatcctgcggctgttcttgtgct

SEQ ID NO: 3966486 - DNA, 25 bp, Homo sapien
tatcccaagaaagcccaaagaacca

SEQ ID NO: 3966487 - DNA, 25 bp, Homo sapien
cagcaggagtgatacttcgggatag

SEQ ID NO: 3966488 - DNA, 25 bp, Homo sapien
ttcgggatagagagcattccaggac

SEQ ID NO: 3966489 - DNA, 25 bp, Homo sapien
caggagtgatacttcgggatagaga

SEQ ID NO: 3966490 - DNA, 25 bp, Homo sapien
gtgatacttcgggatagagagcatt

SEQ ID NO: 3966491 - DNA, 25 bp, Homo sapien
tggctgtcttgaccctgaaccacgc

SEQ ID NO: 3966492 - DNA, 25 bp, Homo sapien
ttcagttaagggatccagttctctt

SEQ ID NO: 3966493 - DNA, 25 bp, Homo sapien
ctcttcagttaagggatccagttct

SEQ ID NO: 3966494 - DNA, 25 bp, Homo sapien
ctggctgtcttgaccctgaaccacg

SEQ ID NO: 3966495 - DNA, 25 bp, Homo sapien
gtaagccatctacggccaaagccca

SEQ ID NO: 3966496 - DNA, 25 bp, Homo sapien
ctgagtaagccatctacggccaaag

SEQ ID NO: 3966497 - DNA, 25 bp, Homo sapien
ctggaaagttctgggagaatcctgg

SEQ ID NO: 3966498 - DNA, 25 bp, Homo sapien
caaagcccaactggaaagttctggg

SEQ ID NO: 3966499 - DNA, 25 bp, Homo sapien
gccccaatttggttccctggctcaa

SEQ ID NO: 3966500 - DNA, 25 bp, Homo sapien
gatttcacttgattggtggccaccc

SEQ ID NO: 3966501 - DNA, 25 bp, Homo sapien
cctggctcaagttcagcagaatgat

SEQ ID NO: 3966502 - DNA, 25 bp, Homo sapien
cctcccaatggcagactttaacaga

SEQ ID NO: 3966503 - DNA, 25 bp, Homo sapien
ggtaagttgcaatatctccgtcagg

SEQ ID NO: 3966504 - DNA, 25 bp, Homo sapien
tctagcgcaggaccatttggcgtca

SEQ ID NO: 3966505 - DNA, 25 bp, Homo sapien
gattcgttcaagtccacagctcatt

SEQ ID NO: 3966506 - DNA, 25 bp, Homo sapien
tagtgcagaccccaagcatagtggt

SEQ ID NO: 3966507 - DNA, 25 bp, Homo sapien
tgaggtcactctaacttaagcaaag

SEQ ID NO: 3966508 - DNA, 25 bp, Homo sapien
gggtcagcccctatctcagaagagg

SEQ ID NO: 3966509 - DNA, 25 bp, Homo sapien
taatgtgttactactcccaggaagg

SEQ ID NO: 3966510 - DNA, 25 bp, Homo sapien
tatgaggtcttcgtagcagtatcta

SEQ ID NO: 3966511 - DNA, 25 bp, Homo sapien
ccaatgtttgaaattagcagggctc

SEQ ID NO: 3966512 - DNA, 25 bp, Homo sapien
tactaatcagtttcaaggcatacaa

SEQ ID NO: 3966513 - DNA, 25 bp, Homo sapien
gaaagattccgcctcctctcataag

SEQ ID NO: 3966514 - DNA, 25 bp, Homo sapien
tctgcctcttatgaagcaatactag

SEQ ID NO: 3966515 - DNA, 25 bp, Homo sapien
gctgctgttggtctgaggctgcagt

SEQ ID NO: 3966516 - DNA, 25 bp, Homo sapien
tctgaggctgcagtaggtttctgtg

SEQ ID NO: 3966517 - DNA, 25 bp, Homo sapien
tactcagcattgagagaagctgctg

SEQ ID NO: 3966518 - DNA, 25 bp, Homo sapien
ggtttctgtgcagcattgcagaatc

SEQ ID NO: 3966519 - DNA, 25 bp, Homo sapien
gccaaagcgggagtgaagactctcg

SEQ ID NO: 3966520 - DNA, 25 bp, Homo sapien
gatgcctcgacttttcgcctcaaag

SEQ ID NO: 3966521 - DNA, 25 bp, Homo sapien
tctcataaggttcagaggccgggag

SEQ ID NO: 3966522 - DNA, 25 bp, Homo sapien
gcccggccccgcattcattttgaag

SEQ ID NO: 3966523 - DNA, 25 bp, Homo sapien
gggaaacacaaagccggctacgcgc

SEQ ID NO: 3966524 - DNA, 25 bp, Homo sapien
cgcagcggcggatccggcggctgct

SEQ ID NO: 3966525 - DNA, 25 bp, Homo sapien
gctctgcggcgcttaagaggcggcc

SEQ ID NO: 3966526 - DNA, 25 bp, Homo sapien
caaagccggctacgcgctgcgaggt

SEQ ID NO: 3966527 - DNA, 25 bp, Homo sapien
tcattggctgtccctgcggcctcag

SEQ ID NO: 3966528 - DNA, 25 bp, Homo sapien
ctcattggctgtccctgcggcctca

SEQ ID NO: 3966529 - DNA, 25 bp, Homo sapien
tctcattggctgtccctgcggcctc

SEQ ID NO: 3966530 - DNA, 25 bp, Homo sapien
acggccaggccagaggggagcgtac

SEQ ID NO: 3966531 - DNA, 25 bp, Homo sapien
gtgggcccgacgcttcgcgcgtctg

SEQ ID NO: 3966532 - DNA, 25 bp, Homo sapien
cgggtgggcccgacgcttcgcgcgt

SEQ ID NO: 3966533 - DNA, 25 bp, Homo sapien
ggggtggcggtgcacggcctgcggc

SEQ ID NO: 3966534 - DNA, 25 bp, Homo sapien
cgcttcgcgcgtctgctggttttcc

SEQ ID NO: 3966535 - DNA, 25 bp, Homo sapien
taaaccttatcacctttctgattac

SEQ ID NO: 3966536 - DNA, 25 bp, Homo sapien
gcactaattcccattggagattcca

SEQ ID NO: 3966537 - DNA, 25 bp, Homo sapien
tctgcagtaaatcagtaaaccttat

SEQ ID NO: 3966538 - DNA, 25 bp, Homo sapien
ccagagggcactaattcccattgga

SEQ ID NO: 3966539 - DNA, 25 bp, Homo sapien
tgatcacagatacgttaaggcaagc

SEQ ID NO: 3966540 - DNA, 25 bp, Homo sapien
caagcagtggattaagcaggataac

SEQ ID NO: 3966541 - DNA, 25 bp, Homo sapien
tacctactagaggaggtggaactca

SEQ ID NO: 3966542 - DNA, 25 bp, Homo sapien
tgtgagtgactcagcctgtttaact

SEQ ID NO: 3966543 - DNA, 25 bp, Homo sapien
gctcaaagggaagagtgccatctac

SEQ ID NO: 3966544 - DNA, 25 bp, Homo sapien
gacaggatcttagtaccaagtggaa

SEQ ID NO: 3966545 - DNA, 25 bp, Homo sapien
ccaggcccagcttcatttggaggat

SEQ ID NO: 3966546 - DNA, 25 bp, Homo sapien
gaatggccagcatcaagttgagcag

SEQ ID NO: 3966547 - DNA, 25 bp, Homo sapien
caaaggacagattctttccaaaata

SEQ ID NO: 3966548 - DNA, 25 bp, Homo sapien
aggagcttgtcaactcccagagttt

SEQ ID NO: 3966549 - DNA, 25 bp, Homo sapien
tccaaaatacgtgaaatgagcaagg

SEQ ID NO: 3966550 - DNA, 25 bp, Homo sapien
tgttgtcagctcttcggaagctaga

SEQ ID NO: 3966551 - DNA, 25 bp, Homo sapien
tctggtattgagccttcctaactct

SEQ ID NO: 3966552 - DNA, 25 bp, Homo sapien
cttctggtattgagccttcctaact

SEQ ID NO: 3966553 - DNA, 25 bp, Homo sapien
ttctggtattgagccttcctaactc

SEQ ID NO: 3966554 - DNA, 25 bp, Homo sapien
gcttctggtattgagccttcctaac

SEQ ID NO: 3966555 - DNA, 25 bp, Homo sapien
ctcagtcagtccgctaccacctcct

SEQ ID NO: 3966556 - DNA, 25 bp, Homo sapien
cccactcagtcagtccgctaccacc

SEQ ID NO: 3966557 - DNA, 25 bp, Homo sapien
cagtcagtccgctaccacctcctcc

SEQ ID NO: 3966558 - DNA, 25 bp, Homo sapien
cactcagtcagtccgctaccacctc

SEQ ID NO: 3966559 - DNA, 25 bp, Homo sapien
gaagttcagaagcaattgtcatgag

SEQ ID NO: 3966560 - DNA, 25 bp, Homo sapien
ccgcttccaccgagtttttgtactg

SEQ ID NO: 3966561 - DNA, 25 bp, Homo sapien
tgtactgctcctgtcactttgcttc

SEQ ID NO: 3966562 - DNA, 25 bp, Homo sapien
tcagaagttcagaagcaattgtcat

SEQ ID NO: 3966563 - DNA, 25 bp, Homo sapien
gacttcgggattcatagcactttag

SEQ ID NO: 3966564 - DNA, 25 bp, Homo sapien
taccacatgtttgagatgcctagta

SEQ ID NO: 3966565 - DNA, 25 bp, Homo sapien
ccctatttggagtagacagtttgtc

SEQ ID NO: 3966566 - DNA, 25 bp, Homo sapien
gcactttagttggagacagtttctc

SEQ ID NO: 3966567 - DNA, 25 bp, Homo sapien
acttaggaaagtcaccatggaaggg

SEQ ID NO: 3966568 - DNA, 25 bp, Homo sapien
gggtattatgagtcaagagccttac

SEQ ID NO: 3966569 - DNA, 25 bp, Homo sapien
tcacctcagtgagttaataaaccct

SEQ ID NO: 3966570 - DNA, 25 bp, Homo sapien
ctctaagtggacagtaaagaaagga

SEQ ID NO: 3966571 - DNA, 25 bp, Homo sapien
catttttcattatgggcttcttcat

SEQ ID NO: 3966572 - DNA, 25 bp, Homo sapien
gcctctttctcctcatttttcatta

SEQ ID NO: 3966573 - DNA, 25 bp, Homo sapien
tcatttttcattatgggcttcttca

SEQ ID NO: 3966574 - DNA, 25 bp, Homo sapien
acagctgggcctctttctcctcatt

SEQ ID NO: 3966575 - DNA, 25 bp, Homo sapien
gagagatattttgaccgcatcaatg

SEQ ID NO: 3966576 - DNA, 25 bp, Homo sapien
gaggaacatgtctcctgatctacga

SEQ ID NO: 3966577 - DNA, 25 bp, Homo sapien
ccagaatacattagggagaggaaca

SEQ ID NO: 3966578 - DNA, 25 bp, Homo sapien
gatgccagccaaggcgtgattacca

SEQ ID NO: 3966579 - DNA, 25 bp, Homo sapien
gacatactgagtacattccctttgg

SEQ ID NO: 3966580 - DNA, 25 bp, Homo sapien
gattctaacaggacatgccatctcg

SEQ ID NO: 3966581 - DNA, 25 bp, Homo sapien
gatagaaaagcacttctggtcagca

SEQ ID NO: 3966582 - DNA, 25 bp, Homo sapien
taccctcttctgtgaaggctcagaa

SEQ ID NO: 3966583 - DNA, 25 bp, Homo sapien
cagtataaaatttcctcacctgaag

SEQ ID NO: 3966584 - DNA, 25 bp, Homo sapien
tatagcattagtatacactggcaca

SEQ ID NO: 3966585 - DNA, 25 bp, Homo sapien
tgccagtgagcaagtgagaattttt

SEQ ID NO: 3966586 - DNA, 25 bp, Homo sapien
agttttaattagctctgccctcatg

SEQ ID NO: 3966587 - DNA, 25 bp, Homo sapien
tcttaagggtgagttggcatgcaaa

SEQ ID NO: 3966588 - DNA, 25 bp, Homo sapien
catatgataatgcagagttgagcca

SEQ ID NO: 3966589 - DNA, 25 bp, Homo sapien
cagcaggtctaatcccaccagtaag

SEQ ID NO: 3966590 - DNA, 25 bp, Homo sapien
tcacccaagtgatgtcacagttcga

SEQ ID NO: 3966591 - DNA, 25 bp, Homo sapien
agcaggaatgacctgtggtgatagc

SEQ ID NO: 3966592 - DNA, 25 bp, Homo sapien
tacttttgcttaagatgcagcagag

SEQ ID NO: 3966593 - DNA, 25 bp, Homo sapien
gaaattggtggatacctgagaagca

SEQ ID NO: 3966594 - DNA, 25 bp, Homo sapien
ggtgatagcaacctttaggataaag

SEQ ID NO: 3966595 - DNA, 25 bp, Homo sapien
aacccatcagggcataacctacgaa

SEQ ID NO: 3966596 - DNA, 25 bp, Homo sapien
catacacttcatgggggcgctaagc

SEQ ID NO: 3966597 - DNA, 25 bp, Homo sapien
tcatgcttgtcataccacagttttc

SEQ ID NO: 3966598 - DNA, 25 bp, Homo sapien
cgctaagcccggattcaagaaaagg

SEQ ID NO: 3966599 - DNA, 25 bp, Homo sapien
tgggggaacagcttgagctggagag

SEQ ID NO: 3966600 - DNA, 25 bp, Homo sapien
tggagcctcgagaacatagccatcg

SEQ ID NO: 3966601 - DNA, 25 bp, Homo sapien
tagtctggtaaatggtctgcatcag

SEQ ID NO: 3966602 - DNA, 25 bp, Homo sapien
agcccagccagtgaaacatggagcc

SEQ ID NO: 3966603 - DNA, 25 bp, Homo sapien
catcggccaaaagcgtagtctggta

SEQ ID NO: 3966604 - DNA, 25 bp, Homo sapien
tgtaggagtgccagccacaggctta

SEQ ID NO: 3966605 - DNA, 25 bp, Homo sapien
ctaagagcagcgcttcctctacttc

SEQ ID NO: 3966606 - DNA, 25 bp, Homo sapien
agcccagtagcatgtgtaggagtgc

SEQ ID NO: 3966607 - DNA, 25 bp, Homo sapien
agctctaagagcagcgcttcctcta

SEQ ID NO: 3966608 - DNA, 25 bp, Homo sapien
tccagtcctctactcccacagttgt

SEQ ID NO: 3966609 - DNA, 25 bp, Homo sapien
agccagctgcatgagtcatccagtc

SEQ ID NO: 3966610 - DNA, 25 bp, Homo sapien
gtcctctactcccacagttgtccat

SEQ ID NO: 3966611 - DNA, 25 bp, Homo sapien
ctgtagcagctccaatctgtcatca

SEQ ID NO: 3966612 - DNA, 25 bp, Homo sapien
gccctgccacctggcaagccagcct

SEQ ID NO: 3966613 - DNA, 25 bp, Homo sapien
gccacctggcaagccagccttcttt

SEQ ID NO: 3966614 - DNA, 25 bp, Homo sapien
cctggcaagccagccttctttccca

SEQ ID NO: 3966615 - DNA, 25 bp, Homo sapien
cctgccacctggcaagccagccttc

SEQ ID NO: 3966616 - DNA, 25 bp, Homo sapien
tcttcctttaccaaactccagtagc

SEQ ID NO: 3966617 - DNA, 25 bp, Homo sapien
gcacactgatagaggatgtttcctt

SEQ ID NO: 3966618 - DNA, 25 bp, Homo sapien
cagtgaccgccttagctctccaagc

SEQ ID NO: 3966619 - DNA, 25 bp, Homo sapien
aaactccagtagcacttcaggatca

SEQ ID NO: 3966620 - DNA, 25 bp, Homo sapien
ggccctggctatttcatcttggaaa

SEQ ID NO: 3966621 - DNA, 25 bp, Homo sapien
tcttggaaatctaggaaagcctgtg

SEQ ID NO: 3966622 - DNA, 25 bp, Homo sapien
tctggtaacagaggttagaccaagc

SEQ ID NO: 3966623 - DNA, 25 bp, Homo sapien
tttgccccttgaaagctgaggaggc

SEQ ID NO: 3966624 - DNA, 25 bp, Homo sapien
ctaaaggtccacatgtcaaatgcac

SEQ ID NO: 3966625 - DNA, 25 bp, Homo sapien
tgcagttgagacatcagccagagcc

SEQ ID NO: 3966626 - DNA, 25 bp, Homo sapien
tgcaggcagcttgagtgccctcgtg

SEQ ID NO: 3966627 - DNA, 25 bp, Homo sapien
gctgttggcgggaccttagatgctc

SEQ ID NO: 3966628 - DNA, 25 bp, Homo sapien
tagatgctccccgtatgggcctctc

SEQ ID NO: 3966629 - DNA, 25 bp, Homo sapien
accacagtgacacacacttgcactt

SEQ ID NO: 3966630 - DNA, 25 bp, Homo sapien
cactgggagatggaacgtgatccgg

SEQ ID NO: 3966631 - DNA, 25 bp, Homo sapien
tcggtggctacatggatgctttcct

SEQ ID NO: 3966632 - DNA, 25 bp, Homo sapien
atggaacgtgatccggggcatgacc

SEQ ID NO: 3966633 - DNA, 25 bp, Homo sapien
ccccgccatcggtggctacatggat

SEQ ID NO: 3966634 - DNA, 25 bp, Homo sapien
cactggtagtctcatctcctaaggc

SEQ ID NO: 3966635 - DNA, 25 bp, Homo sapien
tccttgggttggaagtttgaggagc

SEQ ID NO: 3966636 - DNA, 25 bp, Homo sapien
ttgaggagccagtgttactgttgga

SEQ ID NO: 3966637 - DNA, 25 bp, Homo sapien
tctcatctcctaaggcacattttct

SEQ ID NO: 3966638 - DNA, 25 bp, Homo sapien
gaagcaggtcaacagctgttagcca

SEQ ID NO: 3966639 - DNA, 25 bp, Homo sapien
cagactgtaagggacttaaaatcca

SEQ ID NO: 3966640 - DNA, 25 bp, Homo sapien
tgttagccagcgctccagactgtaa

SEQ ID NO: 3966641 - DNA, 25 bp, Homo sapien
gaaagaatactatagctgggcgcag

SEQ ID NO: 3966642 - DNA, 25 bp, Homo sapien
tggagccagaagttttgccaaggac

SEQ ID NO: 3966643 - DNA, 25 bp, Homo sapien
atggagccagaagttttgccaagga

SEQ ID NO: 3966644 - DNA, 25 bp, Homo sapien
catggagccagaagttttgccaagg

SEQ ID NO: 3966645 - DNA, 25 bp, Homo sapien
tcactggagggcacgagaggcccct

SEQ ID NO: 3966646 - DNA, 25 bp, Homo sapien
tcagctctagcgtagggatgagccc

SEQ ID NO: 3966647 - DNA, 25 bp, Homo sapien
cctcctgggacacaccctctgtccc

SEQ ID NO: 3966648 - DNA, 25 bp, Homo sapien
gatgaagggagtgtgggtcggtgcc

SEQ ID NO: 3966649 - DNA, 25 bp, Homo sapien
ctgcccgtggcctggaacacttcca

SEQ ID NO: 3966650 - DNA, 25 bp, Homo sapien
tgcccgtggcctggaacacttccag

SEQ ID NO: 3966651 - DNA, 25 bp, Homo sapien
catgccacggccacttttcactgga

SEQ ID NO: 3966652 - DNA, 25 bp, Homo sapien
gggagaaaatgttgaccacagagat

SEQ ID NO: 3966653 - DNA, 25 bp, Homo sapien
agatcatgccacggccacttttcac

SEQ ID NO: 3966654 - DNA, 25 bp, Homo sapien
tgctgccgtccctcctcaccccgac

SEQ ID NO: 3966655 - DNA, 25 bp, Homo sapien
gatccaggcttccagcacgggatgg

SEQ ID NO: 3966656 - DNA, 25 bp, Homo sapien
ctcagggagaggctcaaggctgctt

SEQ ID NO: 3966657 - DNA, 25 bp, Homo sapien
tccactcccttccagcgtggcccca

SEQ ID NO: 3966658 - DNA, 25 bp, Homo sapien
ttgggagagcctggttgtggccacc

SEQ ID NO: 3966659 - DNA, 25 bp, Homo sapien
cttctgtgtctttcaaaggacccgt

SEQ ID NO: 3966660 - DNA, 25 bp, Homo sapien
tgtgtctttcaaaggacccgtcaag

SEQ ID NO: 3966661 - DNA, 25 bp, Homo sapien
aatagctttgagtgtttggaagtag

SEQ ID NO: 3966662 - DNA, 25 bp, Homo sapien
tgtaaaatagctttgagtgtttgga

SEQ ID NO: 3966663 - DNA, 25 bp, Homo sapien
tgctccctcattcgctggcttcaaa

SEQ ID NO: 3966664 - DNA, 25 bp, Homo sapien
tcgctggcttcaaaagccccagctt

SEQ ID NO: 3966665 - DNA, 25 bp, Homo sapien
atgcacgctctctgctttcccgctc

SEQ ID NO: 3966666 - DNA, 25 bp, Homo sapien
tgctttcccgctccctgagctctgc

SEQ ID NO: 3966667 - DNA, 25 bp, Homo sapien
tataccagtttgcaaccagtgacac

SEQ ID NO: 3966668 - DNA, 25 bp, Homo sapien
gtgtgaatgcacatgcacgctcatg

SEQ ID NO: 3966669 - DNA, 25 bp, Homo sapien
cacgtttgaaacctggctataccag

SEQ ID NO: 3966670 - DNA, 25 bp, Homo sapien
gactttcagagccacaaatcccttg

SEQ ID NO: 3966671 - DNA, 25 bp, Homo sapien
ttgaagtgacgaccccggagctgcc

SEQ ID NO: 3966672 - DNA, 25 bp, Homo sapien
atggtacagttgaagtgacgacccc

SEQ ID NO: 3966673 - DNA, 25 bp, Homo sapien
agttgaagtgacgaccccggagctg

SEQ ID NO: 3966674 - DNA, 25 bp, Homo sapien
gtacagttgaagtgacgaccccgga

SEQ ID NO: 3966675 - DNA, 25 bp, Homo sapien
gtgttttgcagtgctctgacagcca

SEQ ID NO: 3966676 - DNA, 25 bp, Homo sapien
gatgtcacgtgtctctctcttgcta

SEQ ID NO: 3966677 - DNA, 25 bp, Homo sapien
cactgatgcgatttgaaggacttgg

SEQ ID NO: 3966678 - DNA, 25 bp, Homo sapien
tggttccagcgtgccagctgagcat

SEQ ID NO: 3966679 - DNA, 25 bp, Homo sapien
atgccaccaattgccaggccttctt

SEQ ID NO: 3966680 - DNA, 25 bp, Homo sapien
caagtaccatgtgctagattctgtt

SEQ ID NO: 3966681 - DNA, 25 bp, Homo sapien
tgggatgatggtgcagacaagtacc

SEQ ID NO: 3966682 - DNA, 25 bp, Homo sapien
ccgtggtcacatctccttgggatga

SEQ ID NO: 3966683 - DNA, 25 bp, Homo sapien
caggaaaccgacaactttcaaagct

SEQ ID NO: 3966684 - DNA, 25 bp, Homo sapien
aagctctccactctgcgtgagcccc

SEQ ID NO: 3966685 - DNA, 25 bp, Homo sapien
gcaggaaaccgacaactttcaaagc

SEQ ID NO: 3966686 - DNA, 25 bp, Homo sapien
gctctccactctgcgtgagccccag

SEQ ID NO: 3966687 - DNA, 25 bp, Homo sapien
tgcagtaccaatggcccctgctctc

SEQ ID NO: 3966688 - DNA, 25 bp, Homo sapien
ctgcagtaccaatggcccctgctct

SEQ ID NO: 3966689 - DNA, 25 bp, Homo sapien
ctctcctgctattgccagatgttgg

SEQ ID NO: 3966690 - DNA, 25 bp, Homo sapien
gaccttgaaaacacgatggctgcac

SEQ ID NO: 3966691 - DNA, 25 bp, Homo sapien
tgacttggtctctgggatgtggccc

SEQ ID NO: 3966692 - DNA, 25 bp, Homo sapien
tagtgggaaggttgatgtctctgga

SEQ ID NO: 3966693 - DNA, 25 bp, Homo sapien
caagagatggtactgggcactctgg

SEQ ID NO: 3966694 - DNA, 25 bp, Homo sapien
catgagaactgtgctttggataagg

SEQ ID NO: 3966695 - DNA, 25 bp, Homo sapien
aactttttcacccatgagaactgtg

SEQ ID NO: 3966696 - DNA, 25 bp, Homo sapien
gagaactgtgctttggataaggaaa

SEQ ID NO: 3966697 - DNA, 25 bp, Homo sapien
tcacccatgagaactgtgctttgga

SEQ ID NO: 3966698 - DNA, 25 bp, Homo sapien
cactggaacgagaagccatgaacgg

SEQ ID NO: 3966699 - DNA, 25 bp, Homo sapien
aacgagaagccatgaacggccggca

SEQ ID NO: 3966700 - DNA, 25 bp, Homo sapien
ctggaacgagaagccatgaacggcc

SEQ ID NO: 3966701 - DNA, 25 bp, Homo sapien
gccatgaacggccggcaccgaggct

SEQ ID NO: 3966702 - DNA, 25 bp, Homo sapien
ttcaacaccagcgagaactcgatgg

SEQ ID NO: 3966703 - DNA, 25 bp, Homo sapien
tcaacacttttctgcagaacgtgca

SEQ ID NO: 3966704 - DNA, 25 bp, Homo sapien
cagcgagaactcgatggagaagcac

SEQ ID NO: 3966705 - DNA, 25 bp, Homo sapien
gaacgtgcagattctgctcgaggcc

SEQ ID NO: 3966706 - DNA, 25 bp, Homo sapien
atctctttgaggtcgcttttcttcc

SEQ ID NO: 3966707 - DNA, 25 bp, Homo sapien
gggagtgttgttgtttgctgacaac

SEQ ID NO: 3966708 - DNA, 25 bp, Homo sapien
tttgctgacaactgagccgagagct

SEQ ID NO: 3966709 - DNA, 25 bp, Homo sapien
tccggagccttctcaggcagacaag

SEQ ID NO: 3966710 - DNA, 25 bp, Homo sapien
gcgtgtgcagcgtatccagcaccgt

SEQ ID NO: 3966711 - DNA, 25 bp, Homo sapien
cacgcgtgtgcagcgtatccagcac

SEQ ID NO: 3966712 - DNA, 25 bp, Homo sapien
tgtgcagcgtatccagcaccgtcct

SEQ ID NO: 3966713 - DNA, 25 bp, Homo sapien
ggcacgcgtgtgcagcgtatccagc

SEQ ID NO: 3966714 - DNA, 25 bp, Homo sapien
ttttcccggagtgcctgggttgcga

SEQ ID NO: 3966715 - DNA, 25 bp, Homo sapien
gctgtgcagccgaatcgcttcgcaa

SEQ ID NO: 3966716 - DNA, 25 bp, Homo sapien
taaaggaaccgtgtgttggcagcgc

SEQ ID NO: 3966717 - DNA, 25 bp, Homo sapien
tgcagacgctgtaaggccaaaacga

SEQ ID NO: 3966718 - DNA, 25 bp, Homo sapien
tgtgcacagcaataacgcgagtcgg

SEQ ID NO: 3966719 - DNA, 25 bp, Homo sapien
cgcgcgtcacggcaatccgcgtgtg

SEQ ID NO: 3966720 - DNA, 25 bp, Homo sapien
ttctgctcgctgcacacaatgcccg

SEQ ID NO: 3966721 - DNA, 25 bp, Homo sapien
cgctggcggcgctcgtcgttgtttt

SEQ ID NO: 3966722 - DNA, 25 bp, Homo sapien
gagagggatctgggcgttccgatag

SEQ ID NO: 3966723 - DNA, 25 bp, Homo sapien
tacatcattcagtcgttgggggagg

SEQ ID NO: 3966724 - DNA, 25 bp, Homo sapien
ttccagcatctaccgggtccctggt

SEQ ID NO: 3966725 - DNA, 25 bp, Homo sapien
cgttccgataggattccagcatcta

SEQ ID NO: 3966726 - DNA, 25 bp, Homo sapien
ccctcccagctagagacacatggtt

SEQ ID NO: 3966727 - DNA, 25 bp, Homo sapien
atcacttgatctcggtttctccgcc

SEQ ID NO: 3966728 - DNA, 25 bp, Homo sapien
cagctagagacacatggtttccaca

SEQ ID NO: 3966729 - DNA, 25 bp, Homo sapien
gcgagttcccctataatcacttgat

SEQ ID NO: 3966730 - DNA, 25 bp, Homo sapien
tcggtgagacctttctgagatgcat

SEQ ID NO: 3966731 - DNA, 25 bp, Homo sapien
tagctgcgtcgttcagccaatcggc

SEQ ID NO: 3966732 - DNA, 25 bp, Homo sapien
tcttctgtccggagatgagtgtcgg

SEQ ID NO: 3966733 - DNA, 25 bp, Homo sapien
tcttctgacgtcacgcgttgctggg

SEQ ID NO: 3966734 - DNA, 25 bp, Homo sapien
gccttattttccatcgtagccagaa

SEQ ID NO: 3966735 - DNA, 25 bp, Homo sapien
tagtgttcaccaagttgtggccaca

SEQ ID NO: 3966736 - DNA, 25 bp, Homo sapien
actgcttttcgttcccttgttgagg

SEQ ID NO: 3966737 - DNA, 25 bp, Homo sapien
cttgttgaggtttccgtactggtag

SEQ ID NO: 3966738 - DNA, 25 bp, Homo sapien
gcttttttgaggatattgttacggc

SEQ ID NO: 3966739 - DNA, 25 bp, Homo sapien
gaggatattgttacggctttcagaa

SEQ ID NO: 3966740 - DNA, 25 bp, Homo sapien
tacggctttcagaatcacggagctc

SEQ ID NO: 3966741 - DNA, 25 bp, Homo sapien
aatcacggagctcccaaggactgtg

SEQ ID NO: 3966742 - DNA, 25 bp, Homo sapien
ggaggattgtccacaccagcattcc

SEQ ID NO: 3966743 - DNA, 25 bp, Homo sapien
tcttggccacagacctctaatatcc

SEQ ID NO: 3966744 - DNA, 25 bp, Homo sapien
caagtccactctcctgtacaacatg

SEQ ID NO: 3966745 - DNA, 25 bp, Homo sapien
gacctctaatatccaactccagtgt

SEQ ID NO: 3966746 - DNA, 25 bp, Homo sapien
aatttagacacagcaaaattagaaa

SEQ ID NO: 3966747 - DNA, 25 bp, Homo sapien
aaatttagacacagcaaaattagaa

SEQ ID NO: 3966748 - DNA, 25 bp, Homo sapien
gaaatttagacacagcaaaattaga

SEQ ID NO: 3966749 - DNA, 25 bp, Homo sapien
caaggtttgcggtcatcaccaggag

SEQ ID NO: 3966750 - DNA, 25 bp, Homo sapien
tcaactcttggaactgaacagtgct

SEQ ID NO: 3966751 - DNA, 25 bp, Homo sapien
gatcctttgggaatgcaacttcgtc

SEQ ID NO: 3966752 - DNA, 25 bp, Homo sapien
gactctgatggcaacctttccttgg

SEQ ID NO: 3966753 - DNA, 25 bp, Homo sapien
agccgtctcagataaacactgcctc

SEQ ID NO: 3966754 - DNA, 25 bp, Homo sapien
ccagattcagccgtctcagataaac

SEQ ID NO: 3966755 - DNA, 25 bp, Homo sapien
aacttccagattcagccgtctcaga

SEQ ID NO: 3966756 - DNA, 25 bp, Homo sapien
gattcagccgtctcagataaacact

SEQ ID NO: 3966757 - DNA, 25 bp, Homo sapien
tcgcttggtgcgtttccgtgtggtt

SEQ ID NO: 3966758 - DNA, 25 bp, Homo sapien
gcgtttccgtgtggttgggatgtca

SEQ ID NO: 3966759 - DNA, 25 bp, Homo sapien
ctgagtcgcttggtgcgtttccgtg

SEQ ID NO: 3966760 - DNA, 25 bp, Homo sapien
tttccgtgtggttgggatgtcagcc

SEQ ID NO: 3966761 - DNA, 25 bp, Homo sapien
ctgggaggcggcagctacctctcgg

SEQ ID NO: 3966762 - DNA, 25 bp, Homo sapien
ggcagctacctctcgggtttagcat

SEQ ID NO: 3966763 - DNA, 25 bp, Homo sapien
gaggcggcagctacctctcgggttt

SEQ ID NO: 3966764 - DNA, 25 bp, Homo sapien
ggcggcagctacctctcgggtttag

SEQ ID NO: 3966765 - DNA, 25 bp, Homo sapien
gagagcttacgcatgaacttaggca

SEQ ID NO: 3966766 - DNA, 25 bp, Homo sapien
agctgccgctgacttgaggagagct

SEQ ID NO: 3966767 - DNA, 25 bp, Homo sapien
gacttgaggagagcttacgcatgaa

SEQ ID NO: 3966768 - DNA, 25 bp, Homo sapien
cgctgacttgaggagagcttacgca

SEQ ID NO: 3966769 - DNA, 25 bp, Homo sapien
gaaaggttttctgctgttcttcacg

SEQ ID NO: 3966770 - DNA, 25 bp, Homo sapien
aggttttctgctgttcttcacgttt

SEQ ID NO: 3966771 - DNA, 25 bp, Homo sapien
tgggcgagggaaaggttttctgctg

SEQ ID NO: 3966772 - DNA, 25 bp, Homo sapien
gggaaaggttttctgctgttcttca

SEQ ID NO: 3966773 - DNA, 25 bp, Homo sapien
gaggggaggaggctgcagtagtcat

SEQ ID NO: 3966774 - DNA, 25 bp, Homo sapien
aggaggggaggaggctgcagtagtc

SEQ ID NO: 3966775 - DNA, 25 bp, Homo sapien
ggggaagaggaggggaggaggctgc

SEQ ID NO: 3966776 - DNA, 25 bp, Homo sapien
agaggaggggaggaggctgcagtag

SEQ ID NO: 3966777 - DNA, 25 bp, Homo sapien
ccccatccgtggctgtgatcgttat

SEQ ID NO: 3966778 - DNA, 25 bp, Homo sapien
caaatgactcccttgagagagagat

SEQ ID NO: 3966779 - DNA, 25 bp, Homo sapien
tatactttagggagaggacagaaca

SEQ ID NO: 3966780 - DNA, 25 bp, Homo sapien
tctgggggactttctccattttcaa

SEQ ID NO: 3966781 - DNA, 25 bp, Homo sapien
aattctaccctcaactaacagatgt

SEQ ID NO: 3966782 - DNA, 25 bp, Homo sapien
aaattctaccctcaactaacagatg

SEQ ID NO: 3966783 - DNA, 25 bp, Homo sapien
agtccagatccaaaacgacctagtc

SEQ ID NO: 3966784 - DNA, 25 bp, Homo sapien
cctgggaaagtccagatccaaaacg

SEQ ID NO: 3966785 - DNA, 25 bp, Homo sapien
gatatacgttctctgggtttcttag

SEQ ID NO: 3966786 - DNA, 25 bp, Homo sapien
ggcaaaattggaagactgcgagcat

SEQ ID NO: 3966787 - DNA, 25 bp, Homo sapien
catgcgattctacaaaaaagatgat

SEQ ID NO: 3966788 - DNA, 25 bp, Homo sapien
gaaatgtccacaaatgttaccatgg

SEQ ID NO: 3966789 - DNA, 25 bp, Homo sapien
aaagtagttcttaaggcatgttcac

SEQ ID NO: 3966790 - DNA, 25 bp, Homo sapien
ttcagttgggccctttgtggtcagg

SEQ ID NO: 3966791 - DNA, 25 bp, Homo sapien
gctaggctgcctccaaaagttactc

SEQ ID NO: 3966792 - DNA, 25 bp, Homo sapien
aaagtgctaatctgtaagtgcccta

SEQ ID NO: 3966793 - DNA, 25 bp, Homo sapien
ggtacatttacctaagtggcagcta

SEQ ID NO: 3966794 - DNA, 25 bp, Homo sapien
gttacagggcatccattgctcttgg

SEQ ID NO: 3966795 - DNA, 25 bp, Homo sapien
tggcagctaaggacatgtggtaact

SEQ ID NO: 3966796 - DNA, 25 bp, Homo sapien
aatgacatgtatcttccacaggtac

SEQ ID NO: 3966797 - DNA, 25 bp, Homo sapien
gtaccatccttatcctgagctggca

SEQ ID NO: 3966798 - DNA, 25 bp, Homo sapien
taaaatagagatgggccttgttgcc

SEQ ID NO: 3966799 - DNA, 25 bp, Homo sapien
catctgtggtacacttggctaaagc

SEQ ID NO: 3966800 - DNA, 25 bp, Homo sapien
tctgaagcaattcggatatagagcc

SEQ ID NO: 3966801 - DNA, 25 bp, Homo sapien
gcctcccaaggagaacaaatattca

SEQ ID NO: 3966802 - DNA, 25 bp, Homo sapien
gatttgagttgattgagaagaggac

SEQ ID NO: 3966803 - DNA, 25 bp, Homo sapien
tatgaacccttcctgagctttatgg

SEQ ID NO: 3966804 - DNA, 25 bp, Homo sapien
tcagaggacctgtatttaagcaaat

SEQ ID NO: 3966805 - DNA, 25 bp, Homo sapien
tgcacaaaatgaatgaggtctgggc

SEQ ID NO: 3966806 - DNA, 25 bp, Homo sapien
gagaccttacccctggctgtttgga

SEQ ID NO: 3966807 - DNA, 25 bp, Homo sapien
gattagcaggccaaggtctgagcca

SEQ ID NO: 3966808 - DNA, 25 bp, Homo sapien
tgcattgttagcactaggcacccag

SEQ ID NO: 3966809 - DNA, 25 bp, Homo sapien
ctgagccagcaaacaacaaccataa

SEQ ID NO: 3966810 - DNA, 25 bp, Homo sapien
tgctttaccccaatcaaggccacaa

SEQ ID NO: 3966811 - DNA, 25 bp, Homo sapien
gattatcaccatggctctttcagcc

SEQ ID NO: 3966812 - DNA, 25 bp, Homo sapien
ccccaagttgagaaagtagctcttc

SEQ ID NO: 3966813 - DNA, 25 bp, Homo sapien
gatcacctgcggtgttcgtcaaaca

SEQ ID NO: 3966814 - DNA, 25 bp, Homo sapien
ttatagttaacagttctcagacggg

SEQ ID NO: 3966815 - DNA, 25 bp, Homo sapien
gcatcttgttttggtttgacgccta

SEQ ID NO: 3966816 - DNA, 25 bp, Homo sapien
tacaatctacagacacatgagtcac

SEQ ID NO: 3966817 - DNA, 25 bp, Homo sapien
tctatagtgcttatgccggatactc

SEQ ID NO: 3966818 - DNA, 25 bp, Homo sapien
tacagttataattggatgcctcaaa

SEQ ID NO: 3966819 - DNA, 25 bp, Homo sapien
tgccactctgcagagtaatagcaga

SEQ ID NO: 3966820 - DNA, 25 bp, Homo sapien
gaaacatgccctagtatacaaatta

SEQ ID NO: 3966821 - DNA, 25 bp, Homo sapien
aatgggtgtttgtagatttttggtg

SEQ ID NO: 3966822 - DNA, 25 bp, Homo sapien
tgggtgtttgtagatttttggtgga

SEQ ID NO: 3966823 - DNA, 25 bp, Homo sapien
atgggtgtttgtagatttttggtgg

SEQ ID NO: 3966824 - DNA, 25 bp, Homo sapien
caccaaaaatctacaaacacccatt

SEQ ID NO: 3966825 - DNA, 25 bp, Homo sapien
tccaccaaaaatctacaaacaccca

SEQ ID NO: 3966826 - DNA, 25 bp, Homo sapien
ccaccaaaaatctacaaacacccat

SEQ ID NO: 3966827 - DNA, 25 bp, Homo sapien
taagtattccttccattagaagaaa

SEQ ID NO: 3966828 - DNA, 25 bp, Homo sapien
tgcttaagtattccttccattagaa

SEQ ID NO: 3966829 - DNA, 25 bp, Homo sapien
tccattagaagaaattggatcttaa

SEQ ID NO: 3966830 - DNA, 25 bp, Homo sapien
acttgcacacggcattcatgcaaga

SEQ ID NO: 3966831 - DNA, 25 bp, Homo sapien
tgtgtgagaggtttcagtaaatgct

SEQ ID NO: 3966832 - DNA, 25 bp, Homo sapien
ctgagtgtgtgagaggtttcagtaa

SEQ ID NO: 3966833 - DNA, 25 bp, Homo sapien
ttaagatccaatttcttctaatgga

SEQ ID NO: 3966834 - DNA, 25 bp, Homo sapien
tctaatggaaggaatacttaagcat

SEQ ID NO: 3966835 - DNA, 25 bp, Homo sapien
ttcttctaatggaaggaatacttaa

SEQ ID NO: 3966836 - DNA, 25 bp, Homo sapien
ttactgaaacctctcacacactcag

SEQ ID NO: 3966837 - DNA, 25 bp, Homo sapien
tcttgcatgaatgccgtgtgcaagt

SEQ ID NO: 3966838 - DNA, 25 bp, Homo sapien
agcatttactgaaacctctcacaca

SEQ ID NO: 3966839 - DNA, 25 bp, Homo sapien
aaagggtaaagtctttagctgtcag

SEQ ID NO: 3966840 - DNA, 25 bp, Homo sapien
agctgtcagcacttaaagcaattaa

SEQ ID NO: 3966841 - DNA, 25 bp, Homo sapien
aagggtaaagtctttagctgtcagc

SEQ ID NO: 3966842 - DNA, 25 bp, Homo sapien
ttaattgctttaagtgctgacagct

SEQ ID NO: 3966843 - DNA, 25 bp, Homo sapien
gctgacagctaaagactttaccctt

SEQ ID NO: 3966844 - DNA, 25 bp, Homo sapien
ctgacagctaaagactttacccttt

SEQ ID NO: 3966845 - DNA, 25 bp, Homo sapien
ggtaaagtctttagctgtcagcact

SEQ ID NO: 3966846 - DNA, 25 bp, Homo sapien
aaagggtaaagtctttagctgtcag

SEQ ID NO: 3966847 - DNA, 25 bp, Homo sapien
gctgtcagcacttaaagcaattaaa

SEQ ID NO: 3966848 - DNA, 25 bp, Homo sapien
agctgtcagcacttaaagcaattaa

SEQ ID NO: 3966849 - DNA, 25 bp, Homo sapien
aagggtaaagtctttagctgtcagc

SEQ ID NO: 3966850 - DNA, 25 bp, Homo sapien
gggtaaagtctttagctgtcagcac

SEQ ID NO: 3966851 - DNA, 25 bp, Homo sapien
tttaattgctttaagtgctgacagc

SEQ ID NO: 3966852 - DNA, 25 bp, Homo sapien
gtgctgacagctaaagactttaccc

SEQ ID NO: 3966853 - DNA, 25 bp, Homo sapien
ttaattgctttaagtgctgacagct

SEQ ID NO: 3966854 - DNA, 25 bp, Homo sapien
aagtgctgacagctaaagactttac

SEQ ID NO: 3966855 - DNA, 25 bp, Homo sapien
gctgacagctaaagactttaccctt

SEQ ID NO: 3966856 - DNA, 25 bp, Homo sapien
agtgctgacagctaaagactttacc

SEQ ID NO: 3966857 - DNA, 25 bp, Homo sapien
tgaacatcatcacagttatcctgag

SEQ ID NO: 3966858 - DNA, 25 bp, Homo sapien
gacacatactctagcaattcattgg

SEQ ID NO: 3966859 - DNA, 25 bp, Homo sapien
taagaaaccttaggatgagctccct

SEQ ID NO: 3966860 - DNA, 25 bp, Homo sapien
tccatttacggcagtggtaccatgt

SEQ ID NO: 3966861 - DNA, 25 bp, Homo sapien
caaaaagctgatgtatagccctgta

SEQ ID NO: 3966862 - DNA, 25 bp, Homo sapien
tatcaggcgcctacttaacctatgg

SEQ ID NO: 3966863 - DNA, 25 bp, Homo sapien
tctttaagcttaactgaacgacagc

SEQ ID NO: 3966864 - DNA, 25 bp, Homo sapien
catggtaccactgccgtaaatggaa

SEQ ID NO: 3966865 - DNA, 25 bp, Homo sapien
taggcctgggaaacaagttattgag

SEQ ID NO: 3966866 - DNA, 25 bp, Homo sapien
aaagggagctcatcctaaggtttct

SEQ ID NO: 3966867 - DNA, 25 bp, Homo sapien
caccataggttaagtaggcgcctga

SEQ ID NO: 3966868 - DNA, 25 bp, Homo sapien
aattttagagatggcctaataggcc

SEQ ID NO: 3966869 - DNA, 25 bp, Homo sapien
cagaaaaactgttggatttcatctc

SEQ ID NO: 3966870 - DNA, 25 bp, Homo sapien
gagtaagcaagataccattgtcgtc

SEQ ID NO: 3966871 - DNA, 25 bp, Homo sapien
cagtagaatgaaacgtgaagaaatt

SEQ ID NO: 3966872 - DNA, 25 bp, Homo sapien
cattgtcgtcattggttggcttcag

SEQ ID NO: 3966873 - DNA, 25 bp, Homo sapien
ctgcagggctttacatttacctttt

SEQ ID NO: 3966874 - DNA, 25 bp, Homo sapien
tctcattatcagtaccacggttccc

SEQ ID NO: 3966875 - DNA, 25 bp, Homo sapien
gaaccgtggtactgataatgagaaa

SEQ ID NO: 3966876 - DNA, 25 bp, Homo sapien
actttgagggaaccgtggtactgat

SEQ ID NO: 3966877 - DNA, 25 bp, Homo sapien
tgacgacaatggtatcttgcttact

SEQ ID NO: 3966878 - DNA, 25 bp, Homo sapien
aaaaggtaaatgtaaagccctgcag

SEQ ID NO: 3966879 - DNA, 25 bp, Homo sapien
gagatgaaatccaacagtttttctg

SEQ ID NO: 3966880 - DNA, 25 bp, Homo sapien
tactgaagccaaccaatgacgacaa

SEQ ID NO: 3966881 - DNA, 25 bp, Homo sapien
cacctgagagtgtgactggtaaagt

SEQ ID NO: 3966882 - DNA, 25 bp, Homo sapien
agatacctctaaatacaatgtcagg

SEQ ID NO: 3966883 - DNA, 25 bp, Homo sapien
taaagttggagtaggaacctgtgga

SEQ ID NO: 3966884 - DNA, 25 bp, Homo sapien
taaagaggagtatttttgcttcacc

SEQ ID NO: 3966885 - DNA, 25 bp, Homo sapien
ggaattgctgataaacctatgacac

SEQ ID NO: 3966886 - DNA, 25 bp, Homo sapien
cctatgacacaatatcaagatacct

SEQ ID NO: 3966887 - DNA, 25 bp, Homo sapien
actttaccagtcacactctcaggtg

SEQ ID NO: 3966888 - DNA, 25 bp, Homo sapien
ggtgaagcaaaaatactcctcttta

SEQ ID NO: 3966889 - DNA, 25 bp, Homo sapien
cctgacattgtatttagaggtatct

SEQ ID NO: 3966890 - DNA, 25 bp, Homo sapien
aggtatcttgatattgtgtcatagg

SEQ ID NO: 3966891 - DNA, 25 bp, Homo sapien
gcaattccacaggttcctactccaa

SEQ ID NO: 3966892 - DNA, 25 bp, Homo sapien
tgtcataggtttatcagcaattcca

SEQ ID NO: 3966893 - DNA, 25 bp, Homo sapien
tgaaaaaagctcagagaataaaaga

SEQ ID NO: 3966894 - DNA, 25 bp, Homo sapien
taaaagaacttgagcaggaaagaga

SEQ ID NO: 3966895 - DNA, 25 bp, Homo sapien
aatggcaacaattcaacaacagagc

SEQ ID NO: 3966896 - DNA, 25 bp, Homo sapien
gcaacaattcaacaacagagcctat

SEQ ID NO: 3966897 - DNA, 25 bp, Homo sapien
caacaacagagcctattctaaaaac

SEQ ID NO: 3966898 - DNA, 25 bp, Homo sapien
gaaatgattgcccagcagcgtgaat

SEQ ID NO: 3966899 - DNA, 25 bp, Homo sapien
tctctttcctgctcaagttctttta

SEQ ID NO: 3966900 - DNA, 25 bp, Homo sapien
tagaataggctctgttgttgaattg

SEQ ID NO: 3966901 - DNA, 25 bp, Homo sapien
gtttttagaataggctctgttgttg

SEQ ID NO: 3966902 - DNA, 25 bp, Homo sapien
tcttttattctctgagcttttttca

SEQ ID NO: 3966903 - DNA, 25 bp, Homo sapien
gctctgttgttgaattgttgccatt

SEQ ID NO: 3966904 - DNA, 25 bp, Homo sapien
tattcacgctgctgggcaatcattt

SEQ ID NO: 3966905 - DNA, 25 bp, Homo sapien
tgaagaaaatggcaccgctgcaatc

SEQ ID NO: 3966906 - DNA, 25 bp, Homo sapien
gactccactgttgaacctcaagcct

SEQ ID NO: 3966907 - DNA, 25 bp, Homo sapien
gaggacagtggcaacaaacccatgt

SEQ ID NO: 3966908 - DNA, 25 bp, Homo sapien
gaacctcaagcctgtagaagaagga

SEQ ID NO: 3966909 - DNA, 25 bp, Homo sapien
cacctttgctggttatggcaatgct

SEQ ID NO: 3966910 - DNA, 25 bp, Homo sapien
ggcaatgctgaagtgactccactgt

SEQ ID NO: 3966911 - DNA, 25 bp, Homo sapien
ccttcttctacaggcttgaggttca

SEQ ID NO: 3966912 - DNA, 25 bp, Homo sapien
acagtggagtcacttcagcattgcc

SEQ ID NO: 3966913 - DNA, 25 bp, Homo sapien
caaaggtgattgcagcggtgccatt

SEQ ID NO: 3966914 - DNA, 25 bp, Homo sapien
acatgggtttgttgccactgtcctc

SEQ ID NO: 3966915 - DNA, 25 bp, Homo sapien
agcattgccataaccagcaaaggtg

SEQ ID NO: 3966916 - DNA, 25 bp, Homo sapien
caggcttgaggttcaacagtggagt

SEQ ID NO: 3966917 - DNA, 25 bp, Homo sapien
gatagcagataactaacttcaacca

SEQ ID NO: 3966918 - DNA, 25 bp, Homo sapien
tgtaggctgagtactaaacctttac

SEQ ID NO: 3966919 - DNA, 25 bp, Homo sapien
taggtacatgtaagagacttgccca

SEQ ID NO: 3966920 - DNA, 25 bp, Homo sapien
gacttgcccagcaatattatgattg

SEQ ID NO: 3966921 - DNA, 25 bp, Homo sapien
tacagtataagtcttgtaggctgag

SEQ ID NO: 3966922 - DNA, 25 bp, Homo sapien
cattaaatcacgttgagtaggtaca

SEQ ID NO: 3966923 - DNA, 25 bp, Homo sapien
gagtggttgaagttagttatctgct

SEQ ID NO: 3966924 - DNA, 25 bp, Homo sapien
taaaggtttagtactcagcctacaa

SEQ ID NO: 3966925 - DNA, 25 bp, Homo sapien
gcctacaagacttatactgtagtga

SEQ ID NO: 3966926 - DNA, 25 bp, Homo sapien
caatcataatattgctgggcaagtc

SEQ ID NO: 3966927 - DNA, 25 bp, Homo sapien
tgggcaagtctcttacatgtaccta

SEQ ID NO: 3966928 - DNA, 25 bp, Homo sapien
catgtacctactcaacgtgatttaa

SEQ ID NO: 3966929 - DNA, 25 bp, Homo sapien
ctataagaaatatcttttcgctggg

SEQ ID NO: 3966930 - DNA, 25 bp, Homo sapien
ggagaagaatggctgggattctgga

SEQ ID NO: 3966931 - DNA, 25 bp, Homo sapien
gaaatatcttttcgctgggtgtggt

SEQ ID NO: 3966932 - DNA, 25 bp, Homo sapien
tgacatcattcctataagaaatatc

SEQ ID NO: 3966933 - DNA, 25 bp, Homo sapien
taagaaatatcttttcgctgggtgt

SEQ ID NO: 3966934 - DNA, 25 bp, Homo sapien
aatggctgggattctggaggaaaga

SEQ ID NO: 3966935 - DNA, 25 bp, Homo sapien
gatatttcttataggaatgatgtca

SEQ ID NO: 3966936 - DNA, 25 bp, Homo sapien
ccacacccagcgaaaagatatttct

SEQ ID NO: 3966937 - DNA, 25 bp, Homo sapien
tctttcctccagaatcccagccatt

SEQ ID NO: 3966938 - DNA, 25 bp, Homo sapien
agaatcccagccattcttctcccca

SEQ ID NO: 3966939 - DNA, 25 bp, Homo sapien
accacacccagcgaaaagatatttc

SEQ ID NO: 3966940 - DNA, 25 bp, Homo sapien
cccagcgaaaagatatttcttatag

SEQ ID NO: 3966941 - DNA, 25 bp, Homo sapien
tgtatggcagtctggagtgaagatg

SEQ ID NO: 3966942 - DNA, 25 bp, Homo sapien
ctactcaacctactcattcatggaa

SEQ ID NO: 3966943 - DNA, 25 bp, Homo sapien
gaaagtaggagacaagtgtatggca

SEQ ID NO: 3966944 - DNA, 25 bp, Homo sapien
ctcaaccttctgagacgcttgcaag

SEQ ID NO: 3966945 - DNA, 25 bp, Homo sapien
gacagttttgcttctactcaaccta

SEQ ID NO: 3966946 - DNA, 25 bp, Homo sapien
taggagacaagtgtatggcagtctg

SEQ ID NO: 3966947 - DNA, 25 bp, Homo sapien
cttgcaagcgtctcagaaggttgag

SEQ ID NO: 3966948 - DNA, 25 bp, Homo sapien
tgaatgagtaggttgagtagaagca

SEQ ID NO: 3966949 - DNA, 25 bp, Homo sapien
taggttgagtagaagcaaaactgtc

SEQ ID NO: 3966950 - DNA, 25 bp, Homo sapien
gactgccatacacttgtctcctact

SEQ ID NO: 3966951 - DNA, 25 bp, Homo sapien
catcttcactccagactgccataca

SEQ ID NO: 3966952 - DNA, 25 bp, Homo sapien
ttccatgaatgagtaggttgagtag

SEQ ID NO: 3966953 - DNA, 25 bp, Homo sapien
gctgatatgtagatcacaacacctg

SEQ ID NO: 3966954 - DNA, 25 bp, Homo sapien
gcccatctgtcgatgaaggagcagt

SEQ ID NO: 3966955 - DNA, 25 bp, Homo sapien
tgcttcctggaattgccgattactg

SEQ ID NO: 3966956 - DNA, 25 bp, Homo sapien
gagtgcaccccatttgacctgctga

SEQ ID NO: 3966957 - DNA, 25 bp, Homo sapien
ccttccttcagtaagcagagtgctt

SEQ ID NO: 3966958 - DNA, 25 bp, Homo sapien
tggaattgccgattactgtaactgc

SEQ ID NO: 3966959 - DNA, 25 bp, Homo sapien
caggtgttgtgatctacatatcagc

SEQ ID NO: 3966960 - DNA, 25 bp, Homo sapien
aagcactctgcttactgaaggaagg

SEQ ID NO: 3966961 - DNA, 25 bp, Homo sapien
tctacatatcagcaggtcaaatggg

SEQ ID NO: 3966962 - DNA, 25 bp, Homo sapien
cagtaatcggcaattccaggaagca

SEQ ID NO: 3966963 - DNA, 25 bp, Homo sapien
tgctccttcatcgacagatgggcag

SEQ ID NO: 3966964 - DNA, 25 bp, Homo sapien
gcagttacagtaatcggcaattcca

SEQ ID NO: 3966965 - DNA, 25 bp, Homo sapien
aagctgcattatctggaaatggaga

SEQ ID NO: 3966966 - DNA, 25 bp, Homo sapien
gaagctgcattatctggaaatggag

SEQ ID NO: 3966967 - DNA, 25 bp, Homo sapien
gaaaatgaagatttgctaaaattga

SEQ ID NO: 3966968 - DNA, 25 bp, Homo sapien
agctgcattatctggaaatggagaa

SEQ ID NO: 3966969 - DNA, 25 bp, Homo sapien
ggatttagcaaagcagctggcaagc

SEQ ID NO: 3966970 - DNA, 25 bp, Homo sapien
ctccatttccagataatgcagcttc

SEQ ID NO: 3966971 - DNA, 25 bp, Homo sapien
gcttgccagctgctttgctaaatcc

SEQ ID NO: 3966972 - DNA, 25 bp, Homo sapien
tcaattttagcaaatcttcattttc

SEQ ID NO: 3966973 - DNA, 25 bp, Homo sapien
tctccatttccagataatgcagctt

SEQ ID NO: 3966974 - DNA, 25 bp, Homo sapien
ttctccatttccagataatgcagct

SEQ ID NO: 3966975 - DNA, 25 bp, Homo sapien
gcacctaccctgtggataggagtta

SEQ ID NO: 3966976 - DNA, 25 bp, Homo sapien
cgataaatatttaagcgactgggcg

SEQ ID NO: 3966977 - DNA, 25 bp, Homo sapien
tggctttggaagcatactgtagtgc

SEQ ID NO: 3966978 - DNA, 25 bp, Homo sapien
gaatgcctaaatgggagagtacctg

SEQ ID NO: 3966979 - DNA, 25 bp, Homo sapien
gattattgagccgaattcagcacct

SEQ ID NO: 3966980 - DNA, 25 bp, Homo sapien
ctgagctggatttggcgaaaggcac

SEQ ID NO: 3966981 - DNA, 25 bp, Homo sapien
gaatgtgcctttcgccaaatccagc

SEQ ID NO: 3966982 - DNA, 25 bp, Homo sapien
gcactacagtatgcttccaaagcca

SEQ ID NO: 3966983 - DNA, 25 bp, Homo sapien
taactcctatccacagggtaggtgc

SEQ ID NO: 3966984 - DNA, 25 bp, Homo sapien
cagggtaggtgctgaattcggctca

SEQ ID NO: 3966985 - DNA, 25 bp, Homo sapien
aaaaagcactactctgttggaaaag

SEQ ID NO: 3966986 - DNA, 25 bp, Homo sapien
aacaaaaatctttcgcccagtcgct

SEQ ID NO: 3966987 - DNA, 25 bp, Homo sapien
agagcagcctgggtcgctgtaactc

SEQ ID NO: 3966988 - DNA, 25 bp, Homo sapien
ctcggaaacgtggtacatttgctta

SEQ ID NO: 3966989 - DNA, 25 bp, Homo sapien
ggtacatttgcttataaaccatcaa

SEQ ID NO: 3966990 - DNA, 25 bp, Homo sapien
gcctgggtcgctgtaactcttaggg

SEQ ID NO: 3966991 - DNA, 25 bp, Homo sapien
gctcccagcctttggttggacggga

SEQ ID NO: 3966992 - DNA, 25 bp, Homo sapien
tttgcaggctcccagcctttggttg

SEQ ID NO: 3966993 - DNA, 25 bp, Homo sapien
caaccaaaggctgggagcctgcaaa

SEQ ID NO: 3966994 - DNA, 25 bp, Homo sapien
taagcaaatgtaccacgtttccgag

SEQ ID NO: 3966995 - DNA, 25 bp, Homo sapien
tcccgtccaaccaaaggctgggagc

SEQ ID NO: 3966996 - DNA, 25 bp, Homo sapien
cccctaagagttacagcgacccagg

SEQ ID NO: 3966997 - DNA, 25 bp, Homo sapien
ttgatggtttataagcaaatgtacc

SEQ ID NO: 3966998 - DNA, 25 bp, Homo sapien
gagttacagcgacccaggctgctct

SEQ ID NO: 3966999 - DNA, 25 bp, Homo sapien
tgatcgagttgtggcgggctttgag

SEQ ID NO: 3967000 - DNA, 25 bp, Homo sapien
atgatcgagttgtggcgggctttga

SEQ ID NO: 3967001 - DNA, 25 bp, Homo sapien
ctcaaagcccgccacaactcgatca

SEQ ID NO: 3967002 - DNA, 25 bp, Homo sapien
tcaaagcccgccacaactcgatcat

SEQ ID NO: 3967003 - DNA, 25 bp, Homo sapien
ctggcgtgtggatttccacgtccga

SEQ ID NO: 3967004 - DNA, 25 bp, Homo sapien
gagctggcgtgtggatttccacgtc

SEQ ID NO: 3967005 - DNA, 25 bp, Homo sapien
agcctgcctgttggagcgcggcggg

SEQ ID NO: 3967006 - DNA, 25 bp, Homo sapien
tccctcccgaggtgaagcggaggcc

SEQ ID NO: 3967007 - DNA, 25 bp, Homo sapien
ccggcggtggtcttggagctggcgt

SEQ ID NO: 3967008 - DNA, 25 bp, Homo sapien
ctggccctggatcccggagccacgg

SEQ ID NO: 3967009 - DNA, 25 bp, Homo sapien
gccagctccaagaccaccgccggag

SEQ ID NO: 3967010 - DNA, 25 bp, Homo sapien
gacgtggaaatccacacgccagctc

SEQ ID NO: 3967011 - DNA, 25 bp, Homo sapien
ccgtggctccgggatccagggccag

SEQ ID NO: 3967012 - DNA, 25 bp, Homo sapien
ggcctccgcttcacctcgggaggga

SEQ ID NO: 3967013 - DNA, 25 bp, Homo sapien
tcggacgtggaaatccacacgccag

SEQ ID NO: 3967014 - DNA, 25 bp, Homo sapien
gctctggctgagagacggccgtggc

SEQ ID NO: 3967015 - DNA, 25 bp, Homo sapien
cctcgccgccgaccgagttcttcct

SEQ ID NO: 3967016 - DNA, 25 bp, Homo sapien
ccttgctgtcgtcgcggtgattttc

SEQ ID NO: 3967017 - DNA, 25 bp, Homo sapien
gtcgccttgctgtcgtcgcggtgat

SEQ ID NO: 3967018 - DNA, 25 bp, Homo sapien
agaccgggtcgccttgctgtcgtcg

SEQ ID NO: 3967019 - DNA, 25 bp, Homo sapien
ttttcagaccgggtcgccttgctgt

SEQ ID NO: 3967020 - DNA, 25 bp, Homo sapien
taccactgggctcatttgccccgac

SEQ ID NO: 3967021 - DNA, 25 bp, Homo sapien
aatcaccgcgacgacagcaaggcga

SEQ ID NO: 3967022 - DNA, 25 bp, Homo sapien
aggaagaactcggtcggcggcgagg

SEQ ID NO: 3967023 - DNA, 25 bp, Homo sapien
caaatgagcccagtggtagtggcgg

SEQ ID NO: 3967024 - DNA, 25 bp, Homo sapien
gaaaatcaccgcgacgacagcaagg

SEQ ID NO: 3967025 - DNA, 25 bp, Homo sapien
aggaacgccgggcactggaaggagg

SEQ ID NO: 3967026 - DNA, 25 bp, Homo sapien
acagcaaggcgacccggtctgaaaa

SEQ ID NO: 3967027 - DNA, 25 bp, Homo sapien
cctggctgtcagggacacgaagtag

SEQ ID NO: 3967028 - DNA, 25 bp, Homo sapien
tccctggctgtcagggacacgaagt

SEQ ID NO: 3967029 - DNA, 25 bp, Homo sapien
gcgcgccctctagccagtccctggc

SEQ ID NO: 3967030 - DNA, 25 bp, Homo sapien
tccgcgcgccctctagccagtccct

SEQ ID NO: 3967031 - DNA, 25 bp, Homo sapien
atttgaacacatcgtagctgacttg

SEQ ID NO: 3967032 - DNA, 25 bp, Homo sapien
aaagtttgccgaccgacacgcttta

SEQ ID NO: 3967033 - DNA, 25 bp, Homo sapien
ttacccccacccaaagtcatatcca

SEQ ID NO: 3967034 - DNA, 25 bp, Homo sapien
ggtccatgggctaaacccagcctac

SEQ ID NO: 3967035 - DNA, 25 bp, Homo sapien
ctcctaaagtgcaggcaactgcacc

SEQ ID NO: 3967036 - DNA, 25 bp, Homo sapien
accgacacgctttaagatgtcagtc

SEQ ID NO: 3967037 - DNA, 25 bp, Homo sapien
acttggcaaattgtggtccatgggc

SEQ ID NO: 3967038 - DNA, 25 bp, Homo sapien
tatgaaaggaaaagtgttgattctt

SEQ ID NO: 3967039 - DNA, 25 bp, Homo sapien
gatagtcatatgtagtagtgagctc

SEQ ID NO: 3967040 - DNA, 25 bp, Homo sapien
agtagaatggtttgaacagagactg

SEQ ID NO: 3967041 - DNA, 25 bp, Homo sapien
cagagactgtgtggattacaaagct

SEQ ID NO: 3967042 - DNA, 25 bp, Homo sapien
gcaataaaggcctgagacacaaagt

SEQ ID NO: 3967043 - DNA, 25 bp, Homo sapien
tatagatgacaggaagcaacctttc

SEQ ID NO: 3967044 - DNA, 25 bp, Homo sapien
cataaaaaggcccacttctcgcgga

SEQ ID NO: 3967045 - DNA, 25 bp, Homo sapien
accagctcgaccacgtggagaaacc

SEQ ID NO: 3967046 - DNA, 25 bp, Homo sapien
gagtatcacccctatttttggtatc

SEQ ID NO: 3967047 - DNA, 25 bp, Homo sapien
tctgagtatcacccctatttttggt

SEQ ID NO: 3967048 - DNA, 25 bp, Homo sapien
atcacccctatttttggtatctctg

SEQ ID NO: 3967049 - DNA, 25 bp, Homo sapien
gtatcacccctatttttggtatctc

SEQ ID NO: 3967050 - DNA, 25 bp, Homo sapien
ctgaccaccagagtgactttctgca

SEQ ID NO: 3967051 - DNA, 25 bp, Homo sapien
tgaccaccagagtgactttctgcag

SEQ ID NO: 3967052 - DNA, 25 bp, Homo sapien
gagaaaagcacaataagctgccaag

SEQ ID NO: 3967053 - DNA, 25 bp, Homo sapien
gctgccaaggatgagtcaaatttca

SEQ ID NO: 3967054 - DNA, 25 bp, Homo sapien
tagagcgtctttgctcagaggcagc

SEQ ID NO: 3967055 - DNA, 25 bp, Homo sapien
cccagggaagggcaacaaatggagc

SEQ ID NO: 3967056 - DNA, 25 bp, Homo sapien
cattcaggatggcatgaggtctttc

SEQ ID NO: 3967057 - DNA, 25 bp, Homo sapien
aagagatcagtccactcccacatgg

SEQ ID NO: 3967058 - DNA, 25 bp, Homo sapien
caacattcatttcagccaagagatc

SEQ ID NO: 3967059 - DNA, 25 bp, Homo sapien
ccctgaccttcttataaagctttca

SEQ ID NO: 3967060 - DNA, 25 bp, Homo sapien
ccgtgacataggttactgggcaaga

SEQ ID NO: 3967061 - DNA, 25 bp, Homo sapien
aattgcattgcatccagtgattgtc

SEQ ID NO: 3967062 - DNA, 25 bp, Homo sapien
gccaatttcttggtggccaatttgt

SEQ ID NO: 3967063 - DNA, 25 bp, Homo sapien
atttgttgtcattgccctcccctgc

SEQ ID NO: 3967064 - DNA, 25 bp, Homo sapien
caaatgagtaagatcgctgtgttcc

SEQ ID NO: 3967065 - DNA, 25 bp, Homo sapien
gctgtgttccctgcttggattctgg

SEQ ID NO: 3967066 - DNA, 25 bp, Homo sapien
gagcattctgggcaatagcatgcaa

SEQ ID NO: 3967067 - DNA, 25 bp, Homo sapien
ggcagaccacttcatatggcaagaa

SEQ ID NO: 3967068 - DNA, 25 bp, Homo sapien
accctgatgtgtgatgcctgccgct

SEQ ID NO: 3967069 - DNA, 25 bp, Homo sapien
cctgatgtgtgatgcctgccgctca

SEQ ID NO: 3967070 - DNA, 25 bp, Homo sapien
ctgatgtgtgatgcctgccgctcac

SEQ ID NO: 3967071 - DNA, 25 bp, Homo sapien
caccctgatgtgtgatgcctgccgc

SEQ ID NO: 3967072 - DNA, 25 bp, Homo sapien
gagcagaaacgttattctcaggatg

SEQ ID NO: 3967073 - DNA, 25 bp, Homo sapien
cagaaacgttattctcaggatggtg

SEQ ID NO: 3967074 - DNA, 25 bp, Homo sapien
aacgttattctcaggatggtgactg

SEQ ID NO: 3967075 - DNA, 25 bp, Homo sapien
ctgggagcagaaacgttattctcag

SEQ ID NO: 3967076 - DNA, 25 bp, Homo sapien
ggcacaccccacataggtgcacagg

SEQ ID NO: 3967077 - DNA, 25 bp, Homo sapien
cacaggtgctgctccgactgggtgg

SEQ ID NO: 3967078 - DNA, 25 bp, Homo sapien
ctgcggccgtcaggtgcccggcaca

SEQ ID NO: 3967079 - DNA, 25 bp, Homo sapien
tgctccgactgggtggctctccttg

SEQ ID NO: 3967080 - DNA, 25 bp, Homo sapien
ggctgtgttattgctatcagtccac

SEQ ID NO: 3967081 - DNA, 25 bp, Homo sapien
ccacagggctgagcgttcttcccga

SEQ ID NO: 3967082 - DNA, 25 bp, Homo sapien
gctgtcccctggagatagctgccct

SEQ ID NO: 3967083 - DNA, 25 bp, Homo sapien
cagttgtcatggaggaagcgatgaa

SEQ ID NO: 3967084 - DNA, 25 bp, Homo sapien
agcacagctgctggcgcctacccat

SEQ ID NO: 3967085 - DNA, 25 bp, Homo sapien
tccatccatgccctcgcgggaccag

SEQ ID NO: 3967086 - DNA, 25 bp, Homo sapien
gccctgcaggccttgagcctgtgca

SEQ ID NO: 3967087 - DNA, 25 bp, Homo sapien
gcctgtgcattgctcagcaagcaca

SEQ ID NO: 3967088 - DNA, 25 bp, Homo sapien
tttgttgaggaatttgtaccgatgc

SEQ ID NO: 3967089 - DNA, 25 bp, Homo sapien
gaatttgtaccgatgcagggcaact

SEQ ID NO: 3967090 - DNA, 25 bp, Homo sapien
tgtaccgatgcagggcaactcatgc

SEQ ID NO: 3967091 - DNA, 25 bp, Homo sapien
gggcaactcatgcattctacaaata

SEQ ID NO: 3967092 - DNA, 25 bp, Homo sapien
tgaacacttaaacttgaatttcagc

SEQ ID NO: 3967093 - DNA, 25 bp, Homo sapien
atttatgaacacttaaacttgaatt

SEQ ID NO: 3967094 - DNA, 25 bp, Homo sapien
cacttaaacttgaatttcagctggg

SEQ ID NO: 3967095 - DNA, 25 bp, Homo sapien
taaacttgaatttcagctgggtgca

SEQ ID NO: 3967096 - DNA, 25 bp, Homo sapien
tttccccttgacattgataggcctg

SEQ ID NO: 3967097 - DNA, 25 bp, Homo sapien
ttccccttgacattgataggcctga

SEQ ID NO: 3967098 - DNA, 25 bp, Homo sapien
tcttggtcttaaaactggagaagca

SEQ ID NO: 3967099 - DNA, 25 bp, Homo sapien
tccccttgacattgataggcctgaa

SEQ ID NO: 3967100 - DNA, 25 bp, Homo sapien
taagctgcattctcaggtggatccc

SEQ ID NO: 3967101 - DNA, 25 bp, Homo sapien
ttggataattcacagctcaacagct

SEQ ID NO: 3967102 - DNA, 25 bp, Homo sapien
caagacacgacaacttctggtagaa

SEQ ID NO: 3967103 - DNA, 25 bp, Homo sapien
tcatggtgaaagaatggctgccaca

SEQ ID NO: 3967104 - DNA, 25 bp, Homo sapien
gccgaggttatatggcagcaagcct

SEQ ID NO: 3967105 - DNA, 25 bp, Homo sapien
gtgacagtagggaggcgggtgccga

SEQ ID NO: 3967106 - DNA, 25 bp, Homo sapien
agagtaagtatggcactggcgcagc

SEQ ID NO: 3967107 - DNA, 25 bp, Homo sapien
cgggtgccgaggttatatggcagca

SEQ ID NO: 3967108 - DNA, 25 bp, Homo sapien
caagagcagttggtttacactaaga

SEQ ID NO: 3967109 - DNA, 25 bp, Homo sapien
gctggccacccgctgggaggtcttt

SEQ ID NO: 3967110 - DNA, 25 bp, Homo sapien
taaattggtaaggatccataggcac

SEQ ID NO: 3967111 - DNA, 25 bp, Homo sapien
tctttagtgctcctcgtctcccagg

SEQ ID NO: 3967112 - DNA, 25 bp, Homo sapien
caggatgccgcagaagggcatttcc

SEQ ID NO: 3967113 - DNA, 25 bp, Homo sapien
aggatgccgcagaagggcatttcct

SEQ ID NO: 3967114 - DNA, 25 bp, Homo sapien
cgaatgctgactctacaccctggta

SEQ ID NO: 3967115 - DNA, 25 bp, Homo sapien
ttgaagcccaggcatcgaatgctga

SEQ ID NO: 3967116 - DNA, 25 bp, Homo sapien
gaatgagactctgaatgactgacga

SEQ ID NO: 3967117 - DNA, 25 bp, Homo sapien
gatggtgcctgactctcaacacatg

SEQ ID NO: 3967118 - DNA, 25 bp, Homo sapien
tcagaaaagggaaaaaatatccaga

SEQ ID NO: 3967119 - DNA, 25 bp, Homo sapien
catatggctaacaagtggcctggca

SEQ ID NO: 3967120 - DNA, 25 bp, Homo sapien
tagagagtctaagctacccagaggg

SEQ ID NO: 3967121 - DNA, 25 bp, Homo sapien
taggccttagggcttccggtgacca

SEQ ID NO: 3967122 - DNA, 25 bp, Homo sapien
ccaggataggaagtgttgcaggccc

SEQ ID NO: 3967123 - DNA, 25 bp, Homo sapien
gagctgctaaggtgctgagtcacca

SEQ ID NO: 3967124 - DNA, 25 bp, Homo sapien
ggagctgctaaggtgctgagtcacc

SEQ ID NO: 3967125 - DNA, 25 bp, Homo sapien
ctgctaaggtgctgagtcaccacct

SEQ ID NO: 3967126 - DNA, 25 bp, Homo sapien
ctgagtcaccaccttgatgtcagct

SEQ ID NO: 3967127 - DNA, 25 bp, Homo sapien
caggcctagaaggtctctggtgagt

SEQ ID NO: 3967128 - DNA, 25 bp, Homo sapien
ctctggtgagtggcaacttcagagc

SEQ ID NO: 3967129 - DNA, 25 bp, Homo sapien
agggctccaggcctagaaggtctct

SEQ ID NO: 3967130 - DNA, 25 bp, Homo sapien
caaggaagggctccaggcctagaag

SEQ ID NO: 3967131 - DNA, 25 bp, Homo sapien
gaagatgtgcaccataaaatcccgg

SEQ ID NO: 3967132 - DNA, 25 bp, Homo sapien
catgaaacgtcctggttgcctcggc

SEQ ID NO: 3967133 - DNA, 25 bp, Homo sapien
cagtagcaaaggaaggtttcgggct

SEQ ID NO: 3967134 - DNA, 25 bp, Homo sapien
tcccggtggctgaattagttgtgtc

SEQ ID NO: 3967135 - DNA, 25 bp, Homo sapien
aaggcaggaactggactggacacac

SEQ ID NO: 3967136 - DNA, 25 bp, Homo sapien
gctggcgctggcaaaacctctgtga

SEQ ID NO: 3967137 - DNA, 25 bp, Homo sapien
gacaatcaccttcatgctggagatg

SEQ ID NO: 3967138 - DNA, 25 bp, Homo sapien
cctctgtgagatgctgactcaggac

SEQ ID NO: 3967139 - DNA, 25 bp, Homo sapien
aaatgttaccgcctgctttggagcc

SEQ ID NO: 3967140 - DNA, 25 bp, Homo sapien
gagtgcttggcttttacctgccctg

SEQ ID NO: 3967141 - DNA, 25 bp, Homo sapien
tcaaagttgaattcctccaccaggg

SEQ ID NO: 3967142 - DNA, 25 bp, Homo sapien
gccagtccccagtaagcatgaatct

SEQ ID NO: 3967143 - DNA, 25 bp, Homo sapien
ggtctggagaccacgctctaggttt

SEQ ID NO: 3967144 - DNA, 25 bp, Homo sapien
tgatggcacagaaaggcagccacgt

SEQ ID NO: 3967145 - DNA, 25 bp, Homo sapien
cagtcaccagttgcactggccacag

SEQ ID NO: 3967146 - DNA, 25 bp, Homo sapien
ggatgggaacgggaggtctggagac

SEQ ID NO: 3967147 - DNA, 25 bp, Homo sapien
catccaggatgttaaccaggaaggg

SEQ ID NO: 3967148 - DNA, 25 bp, Homo sapien
aaggtgctcctggaacgacttcagc

SEQ ID NO: 3967149 - DNA, 25 bp, Homo sapien
cacactgtgtggcatcggaaaagcc

SEQ ID NO: 3967150 - DNA, 25 bp, Homo sapien
tccgaggcctattcccagcaaggtg

SEQ ID NO: 3967151 - DNA, 25 bp, Homo sapien
ttggctccaataggtccccagacac

SEQ ID NO: 3967152 - DNA, 25 bp, Homo sapien
gaagttggctccaataggtccccag

SEQ ID NO: 3967153 - DNA, 25 bp, Homo sapien
tgcaggaagttggctccaataggtc

SEQ ID NO: 3967154 - DNA, 25 bp, Homo sapien
caggaagttggctccaataggtccc

SEQ ID NO: 3967155 - DNA, 25 bp, Homo sapien
atgattccatcaatgttgatcaagc

SEQ ID NO: 3967156 - DNA, 25 bp, Homo sapien
tatgattccatcaatgttgatcaag

SEQ ID NO: 3967157 - DNA, 25 bp, Homo sapien
tgattccatcaatgttgatcaagca

SEQ ID NO: 3967158 - DNA, 25 bp, Homo sapien
gagcacccaacaacccttcggccca

SEQ ID NO: 3967159 - DNA, 25 bp, Homo sapien
gaggagcacccaacaacccttcggc

SEQ ID NO: 3967160 - DNA, 25 bp, Homo sapien
ccatgcccttccaactgggctgcac

SEQ ID NO: 3967161 - DNA, 25 bp, Homo sapien
gccagaatttcaggctcaggcttga

SEQ ID NO: 3967162 - DNA, 25 bp, Homo sapien
cgctccagcagacctgctgttgggt

SEQ ID NO: 3967163 - DNA, 25 bp, Homo sapien
aatgactgatgccagaatttcaggc

SEQ ID NO: 3967164 - DNA, 25 bp, Homo sapien
ctcgctccagcagacctgctgttgg

SEQ ID NO: 3967165 - DNA, 25 bp, Homo sapien
ggatcccagtagtcaaatacaaggg

SEQ ID NO: 3967166 - DNA, 25 bp, Homo sapien
gaggccatacaaagcagccctgtgg

SEQ ID NO: 3967167 - DNA, 25 bp, Homo sapien
cagttcagagcccactttttggtac

SEQ ID NO: 3967168 - DNA, 25 bp, Homo sapien
tgggaaacgcggctgtgagaataac

SEQ ID NO: 3967169 - DNA, 25 bp, Homo sapien
ggcaacacacgtccatgtgttggca

SEQ ID NO: 3967170 - DNA, 25 bp, Homo sapien
cctcaaaggcaacacacgtccatgt

SEQ ID NO: 3967171 - DNA, 25 bp, Homo sapien
ctctctgacatagccccacattcgc

SEQ ID NO: 3967172 - DNA, 25 bp, Homo sapien
tcactcaagctcaaggcctccattt

SEQ ID NO: 3967173 - DNA, 25 bp, Homo sapien
gagctcttctcacttctctgacacc

SEQ ID NO: 3967174 - DNA, 25 bp, Homo sapien
tcttctcacttctctgacacctcca

SEQ ID NO: 3967175 - DNA, 25 bp, Homo sapien
ggctgagctcttctcacttctctga

SEQ ID NO: 3967176 - DNA, 25 bp, Homo sapien
aggctgagctcttctcacttctctg

SEQ ID NO: 3967177 - DNA, 25 bp, Homo sapien
ctggattccaggtgaacctcggaag

SEQ ID NO: 3967178 - DNA, 25 bp, Homo sapien
tccaggtgaacctcggaaggcacag

SEQ ID NO: 3967179 - DNA, 25 bp, Homo sapien
tgaacctcggaaggcacagttaatg

SEQ ID NO: 3967180 - DNA, 25 bp, Homo sapien
aatgaaccttgttcccagctggaac

SEQ ID NO: 3967181 - DNA, 25 bp, Homo sapien
ccctcaatgctagatcctgtccaga

SEQ ID NO: 3967182 - DNA, 25 bp, Homo sapien
gatgccctcaatgctagatcctgtc

SEQ ID NO: 3967183 - DNA, 25 bp, Homo sapien
cactggtacctgcttgatgtttacc

SEQ ID NO: 3967184 - DNA, 25 bp, Homo sapien
ctgcttgatgtttacccttcaggac

SEQ ID NO: 3967185 - DNA, 25 bp, Homo sapien
cacagctggctaccccagcaggaat

SEQ ID NO: 3967186 - DNA, 25 bp, Homo sapien
cagctggctaccccagcaggaatgg

SEQ ID NO: 3967187 - DNA, 25 bp, Homo sapien
acagctggctaccccagcaggaatg

SEQ ID NO: 3967188 - DNA, 25 bp, Homo sapien
ccccacctgttctcgaggtcctgat

SEQ ID NO: 3967189 - DNA, 25 bp, Homo sapien
tccccacctgttctcgaggtcctga

SEQ ID NO: 3967190 - DNA, 25 bp, Homo sapien
acctgttctcgaggtcctgatccca

SEQ ID NO: 3967191 - DNA, 25 bp, Homo sapien
ccacctgttctcgaggtcctgatcc

SEQ ID NO: 3967192 - DNA, 25 bp, Homo sapien
cacccactgaattatgagtgatggc

SEQ ID NO: 3967193 - DNA, 25 bp, Homo sapien
tgaattatgagtgatggcccctcca

SEQ ID NO: 3967194 - DNA, 25 bp, Homo sapien
cccactgaattatgagtgatggccc

SEQ ID NO: 3967195 - DNA, 25 bp, Homo sapien
cactgaattatgagtgatggcccct

SEQ ID NO: 3967196 - DNA, 25 bp, Homo sapien
ggcatgaggcccctaaaacaggcat

SEQ ID NO: 3967197 - DNA, 25 bp, Homo sapien
aggcatgaggcccctaaaacaggca

SEQ ID NO: 3967198 - DNA, 25 bp, Homo sapien
aagtctcctacagagtgctccagca

SEQ ID NO: 3967199 - DNA, 25 bp, Homo sapien
catgaggcccctaaaacaggcatac

SEQ ID NO: 3967200 - DNA, 25 bp, Homo sapien
gagcctatgtccatcacttgccagt

SEQ ID NO: 3967201 - DNA, 25 bp, Homo sapien
gagatgctggagtttcagtcgttca

SEQ ID NO: 3967202 - DNA, 25 bp, Homo sapien
tgagcactgcgggtcacaatcaagg

SEQ ID NO: 3967203 - DNA, 25 bp, Homo sapien
gatgattggatcaaagaagcccaga

SEQ ID NO: 3967204 - DNA, 25 bp, Homo sapien
atgttgcattatcttaagcaaatta

SEQ ID NO: 3967205 - DNA, 25 bp, Homo sapien
tccgtcctgatctgcttttctcatg

SEQ ID NO: 3967206 - DNA, 25 bp, Homo sapien
gaattccgtcctgatctgcttttct

SEQ ID NO: 3967207 - DNA, 25 bp, Homo sapien
aattaattaatcctttgagccacag

SEQ ID NO: 3967208 - DNA, 25 bp, Homo sapien
tttaccccaagcagtttcctctgcc

SEQ ID NO: 3967209 - DNA, 25 bp, Homo sapien
ctccagtacgcaccatgctgggggg

SEQ ID NO: 3967210 - DNA, 25 bp, Homo sapien
ttaccccaagcagtttcctctgcct

SEQ ID NO: 3967211 - DNA, 25 bp, Homo sapien
tctttaccccaagcagtttcctctg

SEQ ID NO: 3967212 - DNA, 25 bp, Homo sapien
gaaaacagtataacgaatccggcca

SEQ ID NO: 3967213 - DNA, 25 bp, Homo sapien
ggttctcagcccacgtccgtgaagc

SEQ ID NO: 3967214 - DNA, 25 bp, Homo sapien
tcgaggcaaatctccgacgtcctct

SEQ ID NO: 3967215 - DNA, 25 bp, Homo sapien
cgcagacctcggtagcgacgggaat

SEQ ID NO: 3967216 - DNA, 25 bp, Homo sapien
aaggtcacgtcgctcgacgggcgcc

SEQ ID NO: 3967217 - DNA, 25 bp, Homo sapien
tgcgcaagatgctccgcaaggaggc

SEQ ID NO: 3967218 - DNA, 25 bp, Homo sapien
aacctcaactcggtggtgctgcggc

SEQ ID NO: 3967219 - DNA, 25 bp, Homo sapien
tctggccttcgctgcctcgaacgtg

SEQ ID NO: 3967220 - DNA, 25 bp, Homo sapien
tctgcttgtggcctgacaacatttt

SEQ ID NO: 3967221 - DNA, 25 bp, Homo sapien
tgatgaaatacaccatataggctag

SEQ ID NO: 3967222 - DNA, 25 bp, Homo sapien
atcttaggatcaacagtgtcttagg

SEQ ID NO: 3967223 - DNA, 25 bp, Homo sapien
catctctaaaacctgggtgcatctt

SEQ ID NO: 3967224 - DNA, 25 bp, Homo sapien
aatgaacttcagacggacctcaggg

SEQ ID NO: 3967225 - DNA, 25 bp, Homo sapien
ccttcgaggtggtagcagtagattc

SEQ ID NO: 3967226 - DNA, 25 bp, Homo sapien
taaatacctgcagcaacgtgggaga

SEQ ID NO: 3967227 - DNA, 25 bp, Homo sapien
taaaactgggatggaggaatcggcc

SEQ ID NO: 3967228 - DNA, 25 bp, Homo sapien
caagctgatggcgtttagatccttc

SEQ ID NO: 3967229 - DNA, 25 bp, Homo sapien
gaaccctcactccacttaatagtct

SEQ ID NO: 3967230 - DNA, 25 bp, Homo sapien
gaccaactctacactggcttccagt

SEQ ID NO: 3967231 - DNA, 25 bp, Homo sapien
gctggagatggctctagaaccctca

SEQ ID NO: 3967232 - DNA, 25 bp, Homo sapien
ctaggtagagcaagatgatgtgaaa

SEQ ID NO: 3967233 - DNA, 25 bp, Homo sapien
cccaaggagcttagagagtagaagt

SEQ ID NO: 3967234 - DNA, 25 bp, Homo sapien
gaaaattgtaaaggctggatcagtg

SEQ ID NO: 3967235 - DNA, 25 bp, Homo sapien
ggatcagtgagaattgtcattgcca

SEQ ID NO: 3967236 - DNA, 25 bp, Homo sapien
tccagtccacagccgtcctgctctt

SEQ ID NO: 3967237 - DNA, 25 bp, Homo sapien
tcagcttccacaggaaaggatcaat

SEQ ID NO: 3967238 - DNA, 25 bp, Homo sapien
cagcttccacaggaaaggatcaatc

SEQ ID NO: 3967239 - DNA, 25 bp, Homo sapien
agtatctgctagatcaggatgtggg

SEQ ID NO: 3967240 - DNA, 25 bp, Homo sapien
cccatatgtctgtggcaattgttga

SEQ ID NO: 3967241 - DNA, 25 bp, Homo sapien
ccccatatgtctgtggcaattgttg

SEQ ID NO: 3967242 - DNA, 25 bp, Homo sapien
tgatggttgtagaagtatctgctag

SEQ ID NO: 3967243 - DNA, 25 bp, Homo sapien
tttctggtctgatgatgctagggtg

SEQ ID NO: 3967244 - DNA, 25 bp, Homo sapien
tgctagggtgggcattccaagtact

SEQ ID NO: 3967245 - DNA, 25 bp, Homo sapien
tctgatgatgctagggtgggcattc

SEQ ID NO: 3967246 - DNA, 25 bp, Homo sapien
tgaggagaagagttaccgttttctc

SEQ ID NO: 3967247 - DNA, 25 bp, Homo sapien
tggaaaaccagccacactgtcacaa

SEQ ID NO: 3967248 - DNA, 25 bp, Homo sapien
agccacactgtcacaagatagcacc

SEQ ID NO: 3967249 - DNA, 25 bp, Homo sapien
accagggatgactggattaggacca

SEQ ID NO: 3967250 - DNA, 25 bp, Homo sapien
ccagggatgactggattaggaccaa

SEQ ID NO: 3967251 - DNA, 25 bp, Homo sapien
tgacattgaatggacagtcggccca

SEQ ID NO: 3967252 - DNA, 25 bp, Homo sapien
caacctggttgttccgtttcacaga

SEQ ID NO: 3967253 - DNA, 25 bp, Homo sapien
gacagacatatgttgttacacagcg

SEQ ID NO: 3967254 - DNA, 25 bp, Homo sapien
tgagttcctcagtgcgtgggcctct

SEQ ID NO: 3967255 - DNA, 25 bp, Homo sapien
ttcctgcgtgcttcaatttctcggt

SEQ ID NO: 3967256 - DNA, 25 bp, Homo sapien
tctcggtttacaagcaattttggct

SEQ ID NO: 3967257 - DNA, 25 bp, Homo sapien
gcatcccacaattacaagaacttct

SEQ ID NO: 3967258 - DNA, 25 bp, Homo sapien
ttttggctttgtgatgcatcccaca

SEQ ID NO: 3967259 - DNA, 25 bp, Homo sapien
tgaagatgtgacactcagaataacc

SEQ ID NO: 3967260 - DNA, 25 bp, Homo sapien
cactcagaataaccattcgcctttc

SEQ ID NO: 3967261 - DNA, 25 bp, Homo sapien
tgtgacactcagaataaccattcgc

SEQ ID NO: 3967262 - DNA, 25 bp, Homo sapien
aaagatgaagatgtgacactcagaa

SEQ ID NO: 3967263 - DNA, 25 bp, Homo sapien
agctttttgatctggttgtccctgt

SEQ ID NO: 3967264 - DNA, 25 bp, Homo sapien
agtgtaaggtaggctgatgacttcc

SEQ ID NO: 3967265 - DNA, 25 bp, Homo sapien
tagtgtaaggtaggctgatgacttc

SEQ ID NO: 3967266 - DNA, 25 bp, Homo sapien
ttctgggatgtacaaatgcagggat

SEQ ID NO: 3967267 - DNA, 25 bp, Homo sapien
gatgtacaaatgcagggatgaaggc

SEQ ID NO: 3967268 - DNA, 25 bp, Homo sapien
tgggatgtacaaatgcagggatgaa

SEQ ID NO: 3967269 - DNA, 25 bp, Homo sapien
atgtacaaatgcagggatgaaggca

SEQ ID NO: 3967270 - DNA, 25 bp, Homo sapien
ccttcaggtgagtggttctcctctg

SEQ ID NO: 3967271 - DNA, 25 bp, Homo sapien
gccttcaggtgagtggttctcctct

SEQ ID NO: 3967272 - DNA, 25 bp, Homo sapien
aaagacaggaatccagctcgaatct

SEQ ID NO: 3967273 - DNA, 25 bp, Homo sapien
gcagttctccgttgtttagctatga

SEQ ID NO: 3967274 - DNA, 25 bp, Homo sapien
acatggatcatatgtcaaactcggg

SEQ ID NO: 3967275 - DNA, 25 bp, Homo sapien
tatgagctagtaggcactgtgcggc

SEQ ID NO: 3967276 - DNA, 25 bp, Homo sapien
gagtttgtatgaaccatgcactgga

SEQ ID NO: 3967277 - DNA, 25 bp, Homo sapien
tgacaaggatcagacagacctaggg

SEQ ID NO: 3967278 - DNA, 25 bp, Homo sapien
cactagcacctagtatctttcaggc

SEQ ID NO: 3967279 - DNA, 25 bp, Homo sapien
ataattagggccagaattgtctcca

SEQ ID NO: 3967280 - DNA, 25 bp, Homo sapien
gacagacctagggttgccactagca

SEQ ID NO: 3967281 - DNA, 25 bp, Homo sapien
tcgagcattgacaaatcccttcggg

SEQ ID NO: 3967282 - DNA, 25 bp, Homo sapien
ttaaacagcgcggaatcacgtggcc

SEQ ID NO: 3967283 - DNA, 25 bp, Homo sapien
gattgtaaacgttcctatggagagc

SEQ ID NO: 3967284 - DNA, 25 bp, Homo sapien
tccgagtgggcaattcgtaaccagc

SEQ ID NO: 3967285 - DNA, 25 bp, Homo sapien
tgagcactccttctttggaacgtgg

SEQ ID NO: 3967286 - DNA, 25 bp, Homo sapien
gaacgtgggttctttcaggctggcc

SEQ ID NO: 3967287 - DNA, 25 bp, Homo sapien
tcctgcttgcaggatacggagcgcc

SEQ ID NO: 3967288 - DNA, 25 bp, Homo sapien
tctgtcaaaatggtcttcccgcgcg

SEQ ID NO: 3967289 - DNA, 25 bp, Homo sapien
tgtccttgtaccagtggtttctagg

SEQ ID NO: 3967290 - DNA, 25 bp, Homo sapien
tgatactgtccttgtaccagtggtt

SEQ ID NO: 3967291 - DNA, 25 bp, Homo sapien
aaagctgctgtggtcacacatgaag

SEQ ID NO: 3967292 - DNA, 25 bp, Homo sapien
tccatagttgtctcctctagcccag

SEQ ID NO: 3967293 - DNA, 25 bp, Homo sapien
caggcctggtgtggtctgacacatc

SEQ ID NO: 3967294 - DNA, 25 bp, Homo sapien
aacaaaggcaactgcaggattccac

SEQ ID NO: 3967295 - DNA, 25 bp, Homo sapien
aaacaaaggcaactgcaggattcca

SEQ ID NO: 3967296 - DNA, 25 bp, Homo sapien
caatgacagcagctggcacggcctt

SEQ ID NO: 3967297 - DNA, 25 bp, Homo sapien
cctttgacagatttgtgctccagct

SEQ ID NO: 3967298 - DNA, 25 bp, Homo sapien
cactgttcccaggaaggatgggtct

SEQ ID NO: 3967299 - DNA, 25 bp, Homo sapien
gccttggaccccagggaatgagctc

SEQ ID NO: 3967300 - DNA, 25 bp, Homo sapien
ctgcatagaatatttccagggccat

SEQ ID NO: 3967301 - DNA, 25 bp, Homo sapien
tctctgcatagaatatttccagggc

SEQ ID NO: 3967302 - DNA, 25 bp, Homo sapien
gtatttctctgcatagaatatttcc

SEQ ID NO: 3967303 - DNA, 25 bp, Homo sapien
tttctctgcatagaatatttccagg

SEQ ID NO: 3967304 - DNA, 25 bp, Homo sapien
tttcgtgctgggctgcccctccatg

SEQ ID NO: 3967305 - DNA, 25 bp, Homo sapien
tgggctgcccctccatgggacaact

SEQ ID NO: 3967306 - DNA, 25 bp, Homo sapien
ggacaactgctttgtcctcttccca

SEQ ID NO: 3967307 - DNA, 25 bp, Homo sapien
gggacaactgctttgtcctcttccc

SEQ ID NO: 3967308 - DNA, 25 bp, Homo sapien
taacgaacggaacaatctattgagc

SEQ ID NO: 3967309 - DNA, 25 bp, Homo sapien
caatctattgagctaactacctacc

SEQ ID NO: 3967310 - DNA, 25 bp, Homo sapien
agctaactacctaccttcggaccag

SEQ ID NO: 3967311 - DNA, 25 bp, Homo sapien
agttctatgtgtaacgaacggaaca

SEQ ID NO: 3967312 - DNA, 25 bp, Homo sapien
aactgacaatttggagagccccggg

SEQ ID NO: 3967313 - DNA, 25 bp, Homo sapien
cagaattttcctccgcgtggttgcg

SEQ ID NO: 3967314 - DNA, 25 bp, Homo sapien
ttgaaaggccgcaggatgtccgcgt

SEQ ID NO: 3967315 - DNA, 25 bp, Homo sapien
tccacagctgtgaaccggtgagtgc

SEQ ID NO: 3967316 - DNA, 25 bp, Homo sapien
agtgagcgcccgtggcccgggaccg

SEQ ID NO: 3967317 - DNA, 25 bp, Homo sapien
cttgagctctctcgccgcgatcccg

SEQ ID NO: 3967318 - DNA, 25 bp, Homo sapien
gccagtgagcgcccgtggcccggga

SEQ ID NO: 3967319 - DNA, 25 bp, Homo sapien
cgggaccgcccctcccttgagctct

SEQ ID NO: 3967320 - DNA, 25 bp, Homo sapien
ttggtgtggataggagccagcactt

SEQ ID NO: 3967321 - DNA, 25 bp, Homo sapien
gccagcacttgaatggtaccattaa

SEQ ID NO: 3967322 - DNA, 25 bp, Homo sapien
tggataggagccagcacttgaatgg

SEQ ID NO: 3967323 - DNA, 25 bp, Homo sapien
aagggagatgatcttcagtggtgtt

SEQ ID NO: 3967324 - DNA, 25 bp, Homo sapien
cgtttctccgcgcacttggacaggg

SEQ ID NO: 3967325 - DNA, 25 bp, Homo sapien
tggcattgcttttacccggtgggct

SEQ ID NO: 3967326 - DNA, 25 bp, Homo sapien
tatcttgtccgatgacggctctcgg

SEQ ID NO: 3967327 - DNA, 25 bp, Homo sapien
taatcagccacttagctctgaagac

SEQ ID NO: 3967328 - DNA, 25 bp, Homo sapien
agggaggcgatgcctggcgccgcgg

SEQ ID NO: 3967329 - DNA, 25 bp, Homo sapien
gggaggcgatgcctggcgccgcggg

SEQ ID NO: 3967330 - DNA, 25 bp, Homo sapien
gagggaggcgatgcctggcgccgcg

SEQ ID NO: 3967331 - DNA, 25 bp, Homo sapien
cctttggcagtctgagggtgtatct

SEQ ID NO: 3967332 - DNA, 25 bp, Homo sapien
tcctttggcagtctgagggtgtatc

SEQ ID NO: 3967333 - DNA, 25 bp, Homo sapien
ttggcagtctgagggtgtatcttcc

SEQ ID NO: 3967334 - DNA, 25 bp, Homo sapien
ttcctttggcagtctgagggtgtat

SEQ ID NO: 3967335 - DNA, 25 bp, Homo sapien
tgcttctcgagggtccgtttgctca

SEQ ID NO: 3967336 - DNA, 25 bp, Homo sapien
ttggaggaagacaggtgcttctcga

SEQ ID NO: 3967337 - DNA, 25 bp, Homo sapien
gatgcacctataccaggtttgatca

SEQ ID NO: 3967338 - DNA, 25 bp, Homo sapien
tcaccccagctttgatgcacctata

SEQ ID NO: 3967339 - DNA, 25 bp, Homo sapien
agaagtatgtgctacaaaacactgt

SEQ ID NO: 3967340 - DNA, 25 bp, Homo sapien
gagtttctgatttgtcttggtacag

SEQ ID NO: 3967341 - DNA, 25 bp, Homo sapien
taaaagcctcataaactacagctta

SEQ ID NO: 3967342 - DNA, 25 bp, Homo sapien
catttgcccaagatattgttagaac

SEQ ID NO: 3967343 - DNA, 25 bp, Homo sapien
gttgtttgcgcatttgtaaaacgag

SEQ ID NO: 3967344 - DNA, 25 bp, Homo sapien
cggtagagagtgttgtttgcgcatt

SEQ ID NO: 3967345 - DNA, 25 bp, Homo sapien
aggagagcgatctgcctgaattgcg

SEQ ID NO: 3967346 - DNA, 25 bp, Homo sapien
tctgcctgaattgcggtagagagtg

SEQ ID NO: 3967347 - DNA, 25 bp, Homo sapien
tttgtggtcgctgccgaggatcagc

SEQ ID NO: 3967348 - DNA, 25 bp, Homo sapien
cgcgaccttacgcattccttgtcat

SEQ ID NO: 3967349 - DNA, 25 bp, Homo sapien
tccttgtcatcttgtccttggcggg

SEQ ID NO: 3967350 - DNA, 25 bp, Homo sapien
atcagcactttcacacgcgacctta

SEQ ID NO: 3967351 - DNA, 25 bp, Homo sapien
aatgaaccagtgttatatttggctc

SEQ ID NO: 3967352 - DNA, 25 bp, Homo sapien
tcttggtaaactgactgcttttata

SEQ ID NO: 3967353 - DNA, 25 bp, Homo sapien
tgactgcttttatatggtccttagc

SEQ ID NO: 3967354 - DNA, 25 bp, Homo sapien
tttcttatcagacactgggtcagag

SEQ ID NO: 3967355 - DNA, 25 bp, Homo sapien
actgaatatgtcggaaggtggctcc

SEQ ID NO: 3967356 - DNA, 25 bp, Homo sapien
cccatcttccttgcaagagtgttga

SEQ ID NO: 3967357 - DNA, 25 bp, Homo sapien
cttgcaagagtgttgacaccctgtg

SEQ ID NO: 3967358 - DNA, 25 bp, Homo sapien
cacagacgttctggacagtgtcatg

SEQ ID NO: 3967359 - DNA, 25 bp, Homo sapien
cagtgtcatgtgaggtggcattgga

SEQ ID NO: 3967360 - DNA, 25 bp, Homo sapien
cgtggaactggatacagaaggtgtc

SEQ ID NO: 3967361 - DNA, 25 bp, Homo sapien
tcattgaagacagcgtggaactgga

SEQ ID NO: 3967362 - DNA, 25 bp, Homo sapien
tggcaggttcattgaagacagcgtg

SEQ ID NO: 3967363 - DNA, 25 bp, Homo sapien
gaactggatacagaaggtgtcattt

SEQ ID NO: 3967364 - DNA, 25 bp, Homo sapien
tcagtgatacagattgctaaaggca

SEQ ID NO: 3967365 - DNA, 25 bp, Homo sapien
tccatagacagcctagggtacccct

SEQ ID NO: 3967366 - DNA, 25 bp, Homo sapien
aaatagccccgcaccatgtgacact

SEQ ID NO: 3967367 - DNA, 25 bp, Homo sapien
gaaaagtacttcagatgctggcaga

SEQ ID NO: 3967368 - DNA, 25 bp, Homo sapien
tctgagtttcaatccccagggtccg

SEQ ID NO: 3967369 - DNA, 25 bp, Homo sapien
agggtccgcactggccaggatctgt

SEQ ID NO: 3967370 - DNA, 25 bp, Homo sapien
tgtaagagcctgtgggcttgatgct

SEQ ID NO: 3967371 - DNA, 25 bp, Homo sapien
aatgctgcataggttctgagtttca

SEQ ID NO: 3967372 - DNA, 25 bp, Homo sapien
ctaactttggcgtccatatttgtaa

SEQ ID NO: 3967373 - DNA, 25 bp, Homo sapien
taactttggcgtccatatttgtaaa

SEQ ID NO: 3967374 - DNA, 25 bp, Homo sapien
ctttggcgtccatatttgtaaagtg

SEQ ID NO: 3967375 - DNA, 25 bp, Homo sapien
aactttggcgtccatatttgtaaag

SEQ ID NO: 3967376 - DNA, 25 bp, Homo sapien
cttttagtgtgagaatcacagaaga

SEQ ID NO: 3967377 - DNA, 25 bp, Homo sapien
ttctccctgctctttagggctttta

SEQ ID NO: 3967378 - DNA, 25 bp, Homo sapien
gggcttttagtgtgagaatcacaga

SEQ ID NO: 3967379 - DNA, 25 bp, Homo sapien
tttagggcttttagtgtgagaatca

SEQ ID NO: 3967380 - DNA, 25 bp, Homo sapien
gagagacctgctgatgagagcagct

SEQ ID NO: 3967381 - DNA, 25 bp, Homo sapien
ttctagaacttgctgagagacctgc

SEQ ID NO: 3967382 - DNA, 25 bp, Homo sapien
tctagaacttgctgagagacctgct

SEQ ID NO: 3967383 - DNA, 25 bp, Homo sapien
taagttctgccatggagggacggga

SEQ ID NO: 3967384 - DNA, 25 bp, Homo sapien
cctcggagtgggcagtgtgaacatt

SEQ ID NO: 3967385 - DNA, 25 bp, Homo sapien
tcccatgggccttggtaagttctgc

SEQ ID NO: 3967386 - DNA, 25 bp, Homo sapien
gaacatttgctcttgtgaatgccgt

SEQ ID NO: 3967387 - DNA, 25 bp, Homo sapien
ggcatcgtcctcccagcagtaaatc

SEQ ID NO: 3967388 - DNA, 25 bp, Homo sapien
aggcatcgtcctcccagcagtaaat

SEQ ID NO: 3967389 - DNA, 25 bp, Homo sapien
ctgtccaggcatcgtcctcccagca

SEQ ID NO: 3967390 - DNA, 25 bp, Homo sapien
ccaggcatcgtcctcccagcagtaa

SEQ ID NO: 3967391 - DNA, 25 bp, Homo sapien
gacaggcccagtaatatccctgcag

SEQ ID NO: 3967392 - DNA, 25 bp, Homo sapien
tgggccatatcgttgccctggtgga

SEQ ID NO: 3967393 - DNA, 25 bp, Homo sapien
gcaggaaccattgacttgaatcacg

SEQ ID NO: 3967394 - DNA, 25 bp, Homo sapien
atttcctgagagtgcttcgtcaaga

SEQ ID NO: 3967395 - DNA, 25 bp, Homo sapien
tgtaagtgtaccaggtttcttgagg

SEQ ID NO: 3967396 - DNA, 25 bp, Homo sapien
cttgaggcagtgcctggaaaccttg

SEQ ID NO: 3967397 - DNA, 25 bp, Homo sapien
gtaagtgtaccaggtttcttgaggc

SEQ ID NO: 3967398 - DNA, 25 bp, Homo sapien
cctctcagtggaatgttctgtccca

SEQ ID NO: 3967399 - DNA, 25 bp, Homo sapien
cggcctctccctctcagtggaatgt

SEQ ID NO: 3967400 - DNA, 25 bp, Homo sapien
tcagtggaatgttctgtcccaggag

SEQ ID NO: 3967401 - DNA, 25 bp, Homo sapien
tctcagtggaatgttctgtcccagg

SEQ ID NO: 3967402 - DNA, 25 bp, Homo sapien
gctctgaccacgaaagggctcaggt

SEQ ID NO: 3967403 - DNA, 25 bp, Homo sapien
tttggctctgaccacgaaagggctc

SEQ ID NO: 3967404 - DNA, 25 bp, Homo sapien
ctgaccacgaaagggctcaggtttg

SEQ ID NO: 3967405 - DNA, 25 bp, Homo sapien
tggtttggctctgaccacgaaaggg

SEQ ID NO: 3967406 - DNA, 25 bp, Homo sapien
gaacactggcccttgtaccctggct

SEQ ID NO: 3967407 - DNA, 25 bp, Homo sapien
agacaggcctgaggggaaccgcatc

SEQ ID NO: 3967408 - DNA, 25 bp, Homo sapien
taccctggctgtagcgcagacaggc

SEQ ID NO: 3967409 - DNA, 25 bp, Homo sapien
ccagccgtccgtcatcactgtagag

SEQ ID NO: 3967410 - DNA, 25 bp, Homo sapien
tctcacattcatggaccttcaggtc

SEQ ID NO: 3967411 - DNA, 25 bp, Homo sapien
cattagatgcctctgaatctcacat

SEQ ID NO: 3967412 - DNA, 25 bp, Homo sapien
ctgaatctcacattcatggaccttc

SEQ ID NO: 3967413 - DNA, 25 bp, Homo sapien
ccttgcatttggcattagatgcctc

SEQ ID NO: 3967414 - DNA, 25 bp, Homo sapien
acgcaccccatcgttgggttccaga

SEQ ID NO: 3967415 - DNA, 25 bp, Homo sapien
ccacataaattctgcccttgccgtt

SEQ ID NO: 3967416 - DNA, 25 bp, Homo sapien
catcgttgggttccagagcaaaaac

SEQ ID NO: 3967417 - DNA, 25 bp, Homo sapien
ggttaagtgtgagtcaccgccacat

SEQ ID NO: 3967418 - DNA, 25 bp, Homo sapien
gtcaagggtgagaacttggtctcct

SEQ ID NO: 3967419 - DNA, 25 bp, Homo sapien
tggaaccatcagcatccctcctggt

SEQ ID NO: 3967420 - DNA, 25 bp, Homo sapien
cataacagaccccaggaaaccctag

SEQ ID NO: 3967421 - DNA, 25 bp, Homo sapien
atccctcctggttccccataacaga

SEQ ID NO: 3967422 - DNA, 25 bp, Homo sapien
tggttccccataacagaccccagga

SEQ ID NO: 3967423 - DNA, 25 bp, Homo sapien
taaggctctgaaaggatccgtacag

SEQ ID NO: 3967424 - DNA, 25 bp, Homo sapien
attcttataagtaccaggatccctg

SEQ ID NO: 3967425 - DNA, 25 bp, Homo sapien
tcaccaccgtattgcagaagggaag

SEQ ID NO: 3967426 - DNA, 25 bp, Homo sapien
tccgtacagccagcgacaaacaatg

SEQ ID NO: 3967427 - DNA, 25 bp, Homo sapien
tgcccctgatactcagcaatgcaga

SEQ ID NO: 3967428 - DNA, 25 bp, Homo sapien
tgcagacttgtctggaaacacggac

SEQ ID NO: 3967429 - DNA, 25 bp, Homo sapien
gcagcttggcatttccgagccaact

SEQ ID NO: 3967430 - DNA, 25 bp, Homo sapien
gaaacacggacaacaaggcagcttg

SEQ ID NO: 3967431 - DNA, 25 bp, Homo sapien
cacttcctgacgattcaagatggca

SEQ ID NO: 3967432 - DNA, 25 bp, Homo sapien
tccttcacttcctgacgattcaaga

SEQ ID NO: 3967433 - DNA, 25 bp, Homo sapien
tcctgacgattcaagatggcaattc

SEQ ID NO: 3967434 - DNA, 25 bp, Homo sapien
ttcacttcctgacgattcaagatgg

SEQ ID NO: 3967435 - DNA, 25 bp, Homo sapien
gcaccgggctgatgcttgtggctgg

SEQ ID NO: 3967436 - DNA, 25 bp, Homo sapien
ctgatgcttgtggctgggaaacgcc

SEQ ID NO: 3967437 - DNA, 25 bp, Homo sapien
gctgtagtttcaccagcaccgggct

SEQ ID NO: 3967438 - DNA, 25 bp, Homo sapien
cctggggcccttgaaggtagcattc

SEQ ID NO: 3967439 - DNA, 25 bp, Homo sapien
cttctgttttatgggcctctggaga

SEQ ID NO: 3967440 - DNA, 25 bp, Homo sapien
gcttctgttttatgggcctctggag

SEQ ID NO: 3967441 - DNA, 25 bp, Homo sapien
cctttcctaggaaggactcattcca

SEQ ID NO: 3967442 - DNA, 25 bp, Homo sapien
tgctcaacaaagaacctatttcctt

SEQ ID NO: 3967443 - DNA, 25 bp, Homo sapien
taggaaggactcattccacattggc

SEQ ID NO: 3967444 - DNA, 25 bp, Homo sapien
aggaataacagttaaccagacagga

SEQ ID NO: 3967445 - DNA, 25 bp, Homo sapien
gggaacgaatcctgcctttgttctg

SEQ ID NO: 3967446 - DNA, 25 bp, Homo sapien
gcgctgagcttgttcgttctgggaa

SEQ ID NO: 3967447 - DNA, 25 bp, Homo sapien
ggatgtagccttttcggcgctgagc

SEQ ID NO: 3967448 - DNA, 25 bp, Homo sapien
tttgtctgtgcaggatgtagccttt

SEQ ID NO: 3967449 - DNA, 25 bp, Homo sapien
tggtaacaagaggctggaaccccta

SEQ ID NO: 3967450 - DNA, 25 bp, Homo sapien
aacaagaggctggaacccctaccat

SEQ ID NO: 3967451 - DNA, 25 bp, Homo sapien
tctggtaacaagaggctggaacccc

SEQ ID NO: 3967452 - DNA, 25 bp, Homo sapien
cttctggtaacaagaggctggaacc

SEQ ID NO: 3967453 - DNA, 25 bp, Homo sapien
cattatactcacactcatccgttgg

SEQ ID NO: 3967454 - DNA, 25 bp, Homo sapien
ccaggcaatgaatgacccaggtcag

SEQ ID NO: 3967455 - DNA, 25 bp, Homo sapien
catgctgctccggttaacctcagga

SEQ ID NO: 3967456 - DNA, 25 bp, Homo sapien
tctgactttgctagaaacccgggaa

SEQ ID NO: 3967457 - DNA, 25 bp, Homo sapien
tggccacagtcggtgctgtcacttc

SEQ ID NO: 3967458 - DNA, 25 bp, Homo sapien
ggtggccacagtcggtgctgtcact

SEQ ID NO: 3967459 - DNA, 25 bp, Homo sapien
ccacagtcggtgctgtcacttccct

SEQ ID NO: 3967460 - DNA, 25 bp, Homo sapien
ggggtggccacagtcggtgctgtca

SEQ ID NO: 3967461 - DNA, 25 bp, Homo sapien
caatgcagtattaatggcaaccagg

SEQ ID NO: 3967462 - DNA, 25 bp, Homo sapien
cagccgttagtatcagggtttccca

SEQ ID NO: 3967463 - DNA, 25 bp, Homo sapien
gtttcccattcttggacagtccgag

SEQ ID NO: 3967464 - DNA, 25 bp, Homo sapien
ttagattatacttgaactggaccag

SEQ ID NO: 3967465 - DNA, 25 bp, Homo sapien
tatgcaagcctaggaagaacagagc

SEQ ID NO: 3967466 - DNA, 25 bp, Homo sapien
cagggacagatctccatgctgggaa

SEQ ID NO: 3967467 - DNA, 25 bp, Homo sapien
tgtgccccgtttgcccgtgagatct

SEQ ID NO: 3967468 - DNA, 25 bp, Homo sapien
aaacctgtctgataaggagcggcct

SEQ ID NO: 3967469 - DNA, 25 bp, Homo sapien
tcagaaaatctgtggataagacaac

SEQ ID NO: 3967470 - DNA, 25 bp, Homo sapien
tgtggataagacaacaggcacatca

SEQ ID NO: 3967471 - DNA, 25 bp, Homo sapien
tgcagcctttagaggagtccacagt

SEQ ID NO: 3967472 - DNA, 25 bp, Homo sapien
cacagtaatcgccttttgtcctctc

SEQ ID NO: 3967473 - DNA, 25 bp, Homo sapien
cagccatcatgggtactgcttgaga

SEQ ID NO: 3967474 - DNA, 25 bp, Homo sapien
gagtgtctggcccaaccttgtcaac

SEQ ID NO: 3967475 - DNA, 25 bp, Homo sapien
ggacgacaaccctatttcctgagtg

SEQ ID NO: 3967476 - DNA, 25 bp, Homo sapien
tctcatagaactcgggatgcctacc

SEQ ID NO: 3967477 - DNA, 25 bp, Homo sapien
tcagatactggccacaccaggaggc

SEQ ID NO: 3967478 - DNA, 25 bp, Homo sapien
cactgatcagtagagtataggtgag

SEQ ID NO: 3967479 - DNA, 25 bp, Homo sapien
tgagttatgagactaattcagatac

SEQ ID NO: 3967480 - DNA, 25 bp, Homo sapien
gatgaggatgaccaccaactgctga

SEQ ID NO: 3967481 - DNA, 25 bp, Homo sapien
aggcatcttaagtactacaatgaca

SEQ ID NO: 3967482 - DNA, 25 bp, Homo sapien
aaatgaacaaggcatcttaagtact

SEQ ID NO: 3967483 - DNA, 25 bp, Homo sapien
gaacaaggcatcttaagtactacaa

SEQ ID NO: 3967484 - DNA, 25 bp, Homo sapien
tgtatttattgcacaggcacaataa

SEQ ID NO: 3967485 - DNA, 25 bp, Homo sapien
aaggttctggttatcaccctcaggg

SEQ ID NO: 3967486 - DNA, 25 bp, Homo sapien
ccaggtagaatgtgatcagtgcccc

SEQ ID NO: 3967487 - DNA, 25 bp, Homo sapien
cattagagatgattcccaggcaggg

SEQ ID NO: 3967488 - DNA, 25 bp, Homo sapien
ccaacactgtgaggaatcagcggca

SEQ ID NO: 3967489 - DNA, 25 bp, Homo sapien
tgattagcaaaggaacttcaaagag

SEQ ID NO: 3967490 - DNA, 25 bp, Homo sapien
tatttccatctcaaaggtttgaggg

SEQ ID NO: 3967491 - DNA, 25 bp, Homo sapien
gagagaaacttcttagcatgggatc

SEQ ID NO: 3967492 - DNA, 25 bp, Homo sapien
tcacttggagtgttcgcctaagcag

SEQ ID NO: 3967493 - DNA, 25 bp, Homo sapien
cagaacgccctgtgaggagaatggg

SEQ ID NO: 3967494 - DNA, 25 bp, Homo sapien
ttcagccgagtttgcagaacgccct

SEQ ID NO: 3967495 - DNA, 25 bp, Homo sapien
gctcaaaacctttgcttcagccgag

SEQ ID NO: 3967496 - DNA, 25 bp, Homo sapien
gagctgggtcgaggaagcttcatcc

SEQ ID NO: 3967497 - DNA, 25 bp, Homo sapien
gctcaactcccgctccagccagtcc

SEQ ID NO: 3967498 - DNA, 25 bp, Homo sapien
cccgacttcccgctcaactcccgct

SEQ ID NO: 3967499 - DNA, 25 bp, Homo sapien
aggagccacatgcgcatgcgccctc

SEQ ID NO: 3967500 - DNA, 25 bp, Homo sapien
caactcccgctccagccagtcccag

SEQ ID NO: 3967501 - DNA, 25 bp, Homo sapien
caaggagttactggtatttatgccc

SEQ ID NO: 3967502 - DNA, 25 bp, Homo sapien
tgtctgcagacgtcaatttcgcccc

SEQ ID NO: 3967503 - DNA, 25 bp, Homo sapien
cctttctgtgaaacgcatgccatct

SEQ ID NO: 3967504 - DNA, 25 bp, Homo sapien
tgtgagaactcgctacgtagccagc

SEQ ID NO: 3967505 - DNA, 25 bp, Homo sapien
attggcttattgtattctgattttg

SEQ ID NO: 3967506 - DNA, 25 bp, Homo sapien
atattggcttattgtattctgattt

SEQ ID NO: 3967507 - DNA, 25 bp, Homo sapien
tctaatctatatattggcttattgt

SEQ ID NO: 3967508 - DNA, 25 bp, Homo sapien
atctatatattggcttattgtattc

SEQ ID NO: 3967509 - DNA, 25 bp, Homo sapien
aggtatgagtctccttgcctggcct

SEQ ID NO: 3967510 - DNA, 25 bp, Homo sapien
tatgagtctccttgcctggcctaga

SEQ ID NO: 3967511 - DNA, 25 bp, Homo sapien
tctttgtcttgtgctaagtggggat

SEQ ID NO: 3967512 - DNA, 25 bp, Homo sapien
cttgtgctaagtggggattattaac

SEQ ID NO: 3967513 - DNA, 25 bp, Homo sapien
caaaaactcagatttgatattgatg

SEQ ID NO: 3967514 - DNA, 25 bp, Homo sapien
ctctgtttggatagtgaacttatta

SEQ ID NO: 3967515 - DNA, 25 bp, Homo sapien
gttttatgctaagatatatagtagg

SEQ ID NO: 3967516 - DNA, 25 bp, Homo sapien
tgactctgtttggatagtgaactta

SEQ ID NO: 3967517 - DNA, 25 bp, Homo sapien
tttgcattgatgtctgactgccact

SEQ ID NO: 3967518 - DNA, 25 bp, Homo sapien
gcagaaagcgttttgtaagcgaagg

SEQ ID NO: 3967519 - DNA, 25 bp, Homo sapien
ccagagagctactgaatataagaac

SEQ ID NO: 3967520 - DNA, 25 bp, Homo sapien
ggaggtcgtcttaaaccagagagct

SEQ ID NO: 3967521 - DNA, 25 bp, Homo sapien
tagcattaaacgtgacatggcacat

SEQ ID NO: 3967522 - DNA, 25 bp, Homo sapien
gcttagctgactacagaataggtga

SEQ ID NO: 3967523 - DNA, 25 bp, Homo sapien
ccattgctctcgtttgggcaacaag

SEQ ID NO: 3967524 - DNA, 25 bp, Homo sapien
caaggcctcaacgtctgtgctaatt

SEQ ID NO: 3967525 - DNA, 25 bp, Homo sapien
caacaaacactttatgcaagattgg

SEQ ID NO: 3967526 - DNA, 25 bp, Homo sapien
taaaagcccaacaaacactttatgc

SEQ ID NO: 3967527 - DNA, 25 bp, Homo sapien
gcccaacaaacactttatgcaagat

SEQ ID NO: 3967528 - DNA, 25 bp, Homo sapien
caaacactttatgcaagattggaat

SEQ ID NO: 3967529 - DNA, 25 bp, Homo sapien
ccttgtgcccaagaatgctataaaa

SEQ ID NO: 3967530 - DNA, 25 bp, Homo sapien
caagaatgctataaaagatcccaag

SEQ ID NO: 3967531 - DNA, 25 bp, Homo sapien
gtatttaatcccttgtgcccaagaa

SEQ ID NO: 3967532 - DNA, 25 bp, Homo sapien
tttaatcccttgtgcccaagaatgc

SEQ ID NO: 3967533 - DNA, 25 bp, Homo sapien
caaaccagagtgtttacattcacaa

SEQ ID NO: 3967534 - DNA, 25 bp, Homo sapien
ctgtttatgttcaatacaaaccaga

SEQ ID NO: 3967535 - DNA, 25 bp, Homo sapien
cttggttcatagtttaactgtttat

SEQ ID NO: 3967536 - DNA, 25 bp, Homo sapien
catgacttaaaccccataaaacttg

SEQ ID NO: 3967537 - DNA, 25 bp, Homo sapien
ggcgaattgtattctgtgctgcttg

SEQ ID NO: 3967538 - DNA, 25 bp, Homo sapien
tacacagcaccattgtcattatatc

SEQ ID NO: 3967539 - DNA, 25 bp, Homo sapien
tcagtgggttatttgccgttgatcc

SEQ ID NO: 3967540 - DNA, 25 bp, Homo sapien
taaggcaggttgttccctaaagtgc

SEQ ID NO: 3967541 - DNA, 25 bp, Homo sapien
gacaagttttgagcgttctacccaa

SEQ ID NO: 3967542 - DNA, 25 bp, Homo sapien
tcatattgagtagggcatggtagct

SEQ ID NO: 3967543 - DNA, 25 bp, Homo sapien
agcgcatttcttactagtagggtgc

SEQ ID NO: 3967544 - DNA, 25 bp, Homo sapien
gagttttgctctggaaccagaaaga

SEQ ID NO: 3967545 - DNA, 25 bp, Homo sapien
atgccaaaggggttggattgtttgt

SEQ ID NO: 3967546 - DNA, 25 bp, Homo sapien
tgggatgccaaaggggttggattgt

SEQ ID NO: 3967547 - DNA, 25 bp, Homo sapien
cctaggcaacacattgagatccctt

SEQ ID NO: 3967548 - DNA, 25 bp, Homo sapien
taggcaacacattgagatcccttct

SEQ ID NO: 3967549 - DNA, 25 bp, Homo sapien
gctattaagcctgctatgtgacact

SEQ ID NO: 3967550 - DNA, 25 bp, Homo sapien
tacggaacacaatagctgcagatgt

SEQ ID NO: 3967551 - DNA, 25 bp, Homo sapien
atcagtaggctagggcaggagccca

SEQ ID NO: 3967552 - DNA, 25 bp, Homo sapien
ctacggttgtgccagctgtacccaa

SEQ ID NO: 3967553 - DNA, 25 bp, Homo sapien
tggaagaacttcccggaacattgac

SEQ ID NO: 3967554 - DNA, 25 bp, Homo sapien
ttggaagaacttcccggaacattga

SEQ ID NO: 3967555 - DNA, 25 bp, Homo sapien
agaacttcccggaacattgacttca

SEQ ID NO: 3967556 - DNA, 25 bp, Homo sapien
ctgagttgttggatatagtgttttt

SEQ ID NO: 3967557 - DNA, 25 bp, Homo sapien
gagttgttggatatagtgttttttc

SEQ ID NO: 3967558 - DNA, 25 bp, Homo sapien
tgagttgttggatatagtgtttttt

SEQ ID NO: 3967559 - DNA, 25 bp, Homo sapien
agatgcttttctagacggtcccacc

SEQ ID NO: 3967560 - DNA, 25 bp, Homo sapien
tacacagctgcaattggtaacgaag

SEQ ID NO: 3967561 - DNA, 25 bp, Homo sapien
ggttcgttgatagcatctcccctga

SEQ ID NO: 3967562 - DNA, 25 bp, Homo sapien
aaaaggtatttgtgtgtagccagcg

SEQ ID NO: 3967563 - DNA, 25 bp, Homo sapien
catgatacgccactgaaagggagga

SEQ ID NO: 3967564 - DNA, 25 bp, Homo sapien
cactggctgggctacactttgttga

SEQ ID NO: 3967565 - DNA, 25 bp, Homo sapien
tgggccaagggagaaacataacagc

SEQ ID NO: 3967566 - DNA, 25 bp, Homo sapien
gcctgccagtggtacctagtgatca

SEQ ID NO: 3967567 - DNA, 25 bp, Homo sapien
gcatgatggtttatccacaggtcca

SEQ ID NO: 3967568 - DNA, 25 bp, Homo sapien
tctaccaggctagagagatgccttt

SEQ ID NO: 3967569 - DNA, 25 bp, Homo sapien
cagtctcttgacttgcagaagcact

SEQ ID NO: 3967570 - DNA, 25 bp, Homo sapien
ttaataattagcgaagcccttagtc

SEQ ID NO: 3967571 - DNA, 25 bp, Homo sapien
ttaatggactttctgataagattcc

SEQ ID NO: 3967572 - DNA, 25 bp, Homo sapien
gcttgcttgtatacccctccgattg

SEQ ID NO: 3967573 - DNA, 25 bp, Homo sapien
tgcaaatcctggtataaaggatggt

SEQ ID NO: 3967574 - DNA, 25 bp, Homo sapien
gattgatacaataaccacgttgttc

SEQ ID NO: 3967575 - DNA, 25 bp, Homo sapien
gaacacactttgtattcctagggca

SEQ ID NO: 3967576 - DNA, 25 bp, Homo sapien
taatagcaggactgtttagaaactt

SEQ ID NO: 3967577 - DNA, 25 bp, Homo sapien
gaccatcctggacaaagctgtattt

SEQ ID NO: 3967578 - DNA, 25 bp, Homo sapien
tgggaccagtattgcctagaacaca

SEQ ID NO: 3967579 - DNA, 25 bp, Homo sapien
gagggcaattagctttagactgcac

SEQ ID NO: 3967580 - DNA, 25 bp, Homo sapien
tatgctaattgtacagaccccagtt

SEQ ID NO: 3967581 - DNA, 25 bp, Homo sapien
ccaaggagccgttccatgggtctat

SEQ ID NO: 3967582 - DNA, 25 bp, Homo sapien
cttgggttaaacagctgaagagggc

SEQ ID NO: 3967583 - DNA, 25 bp, Homo sapien
cacagcagccggaccctaactttta

SEQ ID NO: 3967584 - DNA, 25 bp, Homo sapien
cattaaacttaagagaactactgtc

SEQ ID NO: 3967585 - DNA, 25 bp, Homo sapien
caatgtcaatatgtgcctgaattca

SEQ ID NO: 3967586 - DNA, 25 bp, Homo sapien
tgaattcaatacgtcccctaactgg

SEQ ID NO: 3967587 - DNA, 25 bp, Homo sapien
tagtcttattcctgaaacccaggtc

SEQ ID NO: 3967588 - DNA, 25 bp, Homo sapien
cacacctggcaaggcactgtttaat

SEQ ID NO: 3967589 - DNA, 25 bp, Homo sapien
tattaatagagtgagtaggctgtcc

SEQ ID NO: 3967590 - DNA, 25 bp, Homo sapien
tgctaaaacctgtgatcttaattgg

SEQ ID NO: 3967591 - DNA, 25 bp, Homo sapien
caagagacacccgatatattcaaac

SEQ ID NO: 3967592 - DNA, 25 bp, Homo sapien
ggctggaagtgtcttgggcatccaa

SEQ ID NO: 3967593 - DNA, 25 bp, Homo sapien
tagcaggcgctcagctgaatttctg

SEQ ID NO: 3967594 - DNA, 25 bp, Homo sapien
tgtcttgcctaacaataagtgtctg

SEQ ID NO: 3967595 - DNA, 25 bp, Homo sapien
gcatctgtattgttgactggctgga

SEQ ID NO: 3967596 - DNA, 25 bp, Homo sapien
cacaaaaggtgactgctacaacaga

SEQ ID NO: 3967597 - DNA, 25 bp, Homo sapien
ggaaacacatctccacgggtaacag

SEQ ID NO: 3967598 - DNA, 25 bp, Homo sapien
ttttggctggcgtgtaagtactaag

SEQ ID NO: 3967599 - DNA, 25 bp, Homo sapien
tccaacccggtattaccaagatgac

SEQ ID NO: 3967600 - DNA, 25 bp, Homo sapien
gcagctttaagcatccaacccggta

SEQ ID NO: 3967601 - DNA, 25 bp, Homo sapien
tcttgactcaagcatacagaagaaa

SEQ ID NO: 3967602 - DNA, 25 bp, Homo sapien
gagttcttgactcaagcatacagaa

SEQ ID NO: 3967603 - DNA, 25 bp, Homo sapien
gaaactgtagacctgcaggaatccc

SEQ ID NO: 3967604 - DNA, 25 bp, Homo sapien
gaggcgtggtcaagagctccgtttt

SEQ ID NO: 3967605 - DNA, 25 bp, Homo sapien
aagactcaaaggagagacgcggaaa

SEQ ID NO: 3967606 - DNA, 25 bp, Homo sapien
tccgttttgccggagttaggagctc

SEQ ID NO: 3967607 - DNA, 25 bp, Homo sapien
ggcggcctgtagagcggcctcaccc

SEQ ID NO: 3967608 - DNA, 25 bp, Homo sapien
gcggcctgtagagcggcctcacccc

SEQ ID NO: 3967609 - DNA, 25 bp, Homo sapien
tgtagagcggcctcaccccacaggg

SEQ ID NO: 3967610 - DNA, 25 bp, Homo sapien
gcctgtagagcggcctcaccccaca

SEQ ID NO: 3967611 - DNA, 25 bp, Homo sapien
cagacgtctcagtaaaataagggcc

SEQ ID NO: 3967612 - DNA, 25 bp, Homo sapien
catctccgtaagtgaccagacgtct

SEQ ID NO: 3967613 - DNA, 25 bp, Homo sapien
ccaattcggaagtgccaaatgcaac

SEQ ID NO: 3967614 - DNA, 25 bp, Homo sapien
caaatgcaacttccgggcaggagag

SEQ ID NO: 3967615 - DNA, 25 bp, Homo sapien
taacggtgagactggcgaaggaaaa

SEQ ID NO: 3967616 - DNA, 25 bp, Homo sapien
aggaatctccttttgccattatcag

SEQ ID NO: 3967617 - DNA, 25 bp, Homo sapien
tggaaacaggaagccaggaatctcc

SEQ ID NO: 3967618 - DNA, 25 bp, Homo sapien
ggctcagctgttgccccgggtaacg

SEQ ID NO: 3967619 - DNA, 25 bp, Homo sapien
cgccgccgctttcctggttgctgtc

SEQ ID NO: 3967620 - DNA, 25 bp, Homo sapien
ccgccgctttcctggttgctgtctc

SEQ ID NO: 3967621 - DNA, 25 bp, Homo sapien
cgccgctttcctggttgctgtctcc

SEQ ID NO: 3967622 - DNA, 25 bp, Homo sapien
gccgccgctttcctggttgctgtct

SEQ ID NO: 3967623 - DNA, 25 bp, Homo sapien
ttccgtaggcttatgagctctttct

SEQ ID NO: 3967624 - DNA, 25 bp, Homo sapien
cgtaggcttatgagctctttcttct

SEQ ID NO: 3967625 - DNA, 25 bp, Homo sapien
tcttggcctgtttccgtaggcttat

SEQ ID NO: 3967626 - DNA, 25 bp, Homo sapien
cctgtttccgtaggcttatgagctc

SEQ ID NO: 3967627 - DNA, 25 bp, Homo sapien
gtaaggcggtgggatgcagtcaaac

SEQ ID NO: 3967628 - DNA, 25 bp, Homo sapien
tgtcgtaaggcggtgggatgcagtc

SEQ ID NO: 3967629 - DNA, 25 bp, Homo sapien
tcttgtcgtaaggcggtgggatgca

SEQ ID NO: 3967630 - DNA, 25 bp, Homo sapien
cgctttttcttgtcgtaaggcggtg

SEQ ID NO: 3967631 - DNA, 25 bp, Homo sapien
tgaggtctgtgaaagcttcaaatgt

SEQ ID NO: 3967632 - DNA, 25 bp, Homo sapien
tttttggtccaatcctgactctgtg

SEQ ID NO: 3967633 - DNA, 25 bp, Homo sapien
tgccatcttcggctgccccttggga

SEQ ID NO: 3967634 - DNA, 25 bp, Homo sapien
ttcgcacagtcagccagaagatggg

SEQ ID NO: 3967635 - DNA, 25 bp, Homo sapien
catatggagctcattgtttaacagc

SEQ ID NO: 3967636 - DNA, 25 bp, Homo sapien
tctcacctctatacattccattggg

SEQ ID NO: 3967637 - DNA, 25 bp, Homo sapien
tctgatcttggagtttataagcctc

SEQ ID NO: 3967638 - DNA, 25 bp, Homo sapien
aagtcattgatgctctgtttgtcca

SEQ ID NO: 3967639 - DNA, 25 bp, Homo sapien
tagttgggcgttgtgttttacacaa

SEQ ID NO: 3967640 - DNA, 25 bp, Homo sapien
tagatgtcactggattttaccaagt

SEQ ID NO: 3967641 - DNA, 25 bp, Homo sapien
ggtcaaacctatgttcgtaatgaga

SEQ ID NO: 3967642 - DNA, 25 bp, Homo sapien
gatcaactaagaaatggaaggcagg

SEQ ID NO: 3967643 - DNA, 25 bp, Homo sapien
caaccgctaccagccactccaaaaa

SEQ ID NO: 3967644 - DNA, 25 bp, Homo sapien
aaacccatcagactaacaacagctg

SEQ ID NO: 3967645 - DNA, 25 bp, Homo sapien
cgctaccagccactccaaaaacatg

SEQ ID NO: 3967646 - DNA, 25 bp, Homo sapien
ggaaacccatcagactaacaacagc

SEQ ID NO: 3967647 - DNA, 25 bp, Homo sapien
gggatcaattcaacagaagaactaa

SEQ ID NO: 3967648 - DNA, 25 bp, Homo sapien
ggatcaattcaacagaagaactaac

SEQ ID NO: 3967649 - DNA, 25 bp, Homo sapien
caattcaacagaagaactaactatc

SEQ ID NO: 3967650 - DNA, 25 bp, Homo sapien
tcaacagaagaactaactatcctaa

SEQ ID NO: 3967651 - DNA, 25 bp, Homo sapien
gcttcttccctaagcggaggtctga

SEQ ID NO: 3967652 - DNA, 25 bp, Homo sapien
ttgttcggagataggagaaggctct

SEQ ID NO: 3967653 - DNA, 25 bp, Homo sapien
ctgggaggacacgtagccgcttctt

SEQ ID NO: 3967654 - DNA, 25 bp, Homo sapien
gatttctgcaacacggcagggtgca

SEQ ID NO: 3967655 - DNA, 25 bp, Homo sapien
aactttggaagtctcgcggcgctcc

SEQ ID NO: 3967656 - DNA, 25 bp, Homo sapien
tataaaacgagtccaccgtgagcgc

SEQ ID NO: 3967657 - DNA, 25 bp, Homo sapien
tgtaaggcgacagacataggacccc

SEQ ID NO: 3967658 - DNA, 25 bp, Homo sapien
tccagacgtaactcacaccggaggt

SEQ ID NO: 3967659 - DNA, 25 bp, Homo sapien
gctgtattaggagctcggagcaaga

SEQ ID NO: 3967660 - DNA, 25 bp, Homo sapien
ttccaagttatcaggccaccgatga

SEQ ID NO: 3967661 - DNA, 25 bp, Homo sapien
tctgaagcgcgagccaggcgcagtt

SEQ ID NO: 3967662 - DNA, 25 bp, Homo sapien
tctctcccgccgcttagaaataaaa

SEQ ID NO: 3967663 - DNA, 25 bp, Homo sapien
ccaggagcagccgttggccgagggc

SEQ ID NO: 3967664 - DNA, 25 bp, Homo sapien
gccagcgggcgcccgcgttcatgtt

SEQ ID NO: 3967665 - DNA, 25 bp, Homo sapien
cgcgttcatgttccgccaggagcag

SEQ ID NO: 3967666 - DNA, 25 bp, Homo sapien
aggagcagccgttggccgagggcag

SEQ ID NO: 3967667 - DNA, 25 bp, Homo sapien
caacgaggtcatgggctactggtac

SEQ ID NO: 3967668 - DNA, 25 bp, Homo sapien
tggtccatcacacaggccatcgagt

SEQ ID NO: 3967669 - DNA, 25 bp, Homo sapien
cttggtgcgagatctacctggcgct

SEQ ID NO: 3967670 - DNA, 25 bp, Homo sapien
atcgagtacaacctgaagcgcacgc

SEQ ID NO: 3967671 - DNA, 25 bp, Homo sapien
ggccgagccgcgctgcgagatcaac

SEQ ID NO: 3967672 - DNA, 25 bp, Homo sapien
tcatctcgtcgtgcatcggctcctt

SEQ ID NO: 3967673 - DNA, 25 bp, Homo sapien
ccagaagtggtacgtcatctcgtcg

SEQ ID NO: 3967674 - DNA, 25 bp, Homo sapien
tgcgagatcaacgaccagaagtggt

SEQ ID NO: 3967675 - DNA, 25 bp, Homo sapien
gcatctaccagatcgccaagcgtcg

SEQ ID NO: 3967676 - DNA, 25 bp, Homo sapien
catcatgatcctggtctacgtgcgc

SEQ ID NO: 3967677 - DNA, 25 bp, Homo sapien
tggaggagagctcgtcttccgacca

SEQ ID NO: 3967678 - DNA, 25 bp, Homo sapien
acaccgacgcgctggacctggagga

SEQ ID NO: 3967679 - DNA, 25 bp, Homo sapien
gggatcgggacgccggctgcagggc

SEQ ID NO: 3967680 - DNA, 25 bp, Homo sapien
agcgcgtcggggctgccaaggcgtc

SEQ ID NO: 3967681 - DNA, 25 bp, Homo sapien
tcggggctgccaaggcgtcgcgctg

SEQ ID NO: 3967682 - DNA, 25 bp, Homo sapien
tcgggacgccggctgcagggccggg

SEQ ID NO: 3967683 - DNA, 25 bp, Homo sapien
agtgttcgtggtgtgctggttcccc

SEQ ID NO: 3967684 - DNA, 25 bp, Homo sapien
ttcttcttcacctacacgctcacgg

SEQ ID NO: 3967685 - DNA, 25 bp, Homo sapien
gctcacggccgtcgggtgctccgtg

SEQ ID NO: 3967686 - DNA, 25 bp, Homo sapien
gctggccgtggtcatcggagtgttc

SEQ ID NO: 3967687 - DNA, 25 bp, Homo sapien
ttcaaccacgatttccgccgcgcct

SEQ ID NO: 3967688 - DNA, 25 bp, Homo sapien
gtcatctacaccatcttcaaccacg

SEQ ID NO: 3967689 - DNA, 25 bp, Homo sapien
tttccgccgcgccttcaagaagatc

SEQ ID NO: 3967690 - DNA, 25 bp, Homo sapien
tgcaacagctcgttgaacccggtca

SEQ ID NO: 3967691 - DNA, 25 bp, Homo sapien
aagcggatcgtgtgaggtttccgct

SEQ ID NO: 3967692 - DNA, 25 bp, Homo sapien
tcgtgtgaggtttccgctggcgccc

SEQ ID NO: 3967693 - DNA, 25 bp, Homo sapien
cggggggacaggaagcggatcgtgt

SEQ ID NO: 3967694 - DNA, 25 bp, Homo sapien
ggacaggaagcggatcgtgtgaggt

SEQ ID NO: 3967695 - DNA, 25 bp, Homo sapien
aggggtgcttagccccagggcactc

SEQ ID NO: 3967696 - DNA, 25 bp, Homo sapien
gggcatcgaggggtgcttagcccca

SEQ ID NO: 3967697 - DNA, 25 bp, Homo sapien
tgcaggcagcggggggcatcgaggg

SEQ ID NO: 3967698 - DNA, 25 bp, Homo sapien
ccagggcactcagaaacccgggcgc

SEQ ID NO: 3967699 - DNA, 25 bp, Homo sapien
cacatccccagttgttggtttggcc

SEQ ID NO: 3967700 - DNA, 25 bp, Homo sapien
cccagttgttggtttggccactctt

SEQ ID NO: 3967701 - DNA, 25 bp, Homo sapien
aggcccacacatccccagttgttgg

SEQ ID NO: 3967702 - DNA, 25 bp, Homo sapien
ctacaagggaagcttcttgctgcca

SEQ ID NO: 3967703 - DNA, 25 bp, Homo sapien
gtagagagccctgagaaatgatctg

SEQ ID NO: 3967704 - DNA, 25 bp, Homo sapien
ggtagagagccctgagaaatgatct

SEQ ID NO: 3967705 - DNA, 25 bp, Homo sapien
tagagagccctgagaaatgatctgg

SEQ ID NO: 3967706 - DNA, 25 bp, Homo sapien
cctggttacactggggagtctgctg

SEQ ID NO: 3967707 - DNA, 25 bp, Homo sapien
ctgtcccctggttacactggggagt

SEQ ID NO: 3967708 - DNA, 25 bp, Homo sapien
ccctggttacactggggagtctgct

SEQ ID NO: 3967709 - DNA, 25 bp, Homo sapien
tcccctggttacactggggagtctg

SEQ ID NO: 3967710 - DNA, 25 bp, Homo sapien
gaccacgatgcatttctagacttga

SEQ ID NO: 3967711 - DNA, 25 bp, Homo sapien
tagacttgaaactgagatctcctgg

SEQ ID NO: 3967712 - DNA, 25 bp, Homo sapien
tacgagacctgtaacgaccacgatg

SEQ ID NO: 3967713 - DNA, 25 bp, Homo sapien
agaagagctccaggacccatacgag

SEQ ID NO: 3967714 - DNA, 25 bp, Homo sapien
tctggacactcttcgattccatctc

SEQ ID NO: 3967715 - DNA, 25 bp, Homo sapien
tttggtcctgtgagctgtaggtctg

SEQ ID NO: 3967716 - DNA, 25 bp, Homo sapien
gtaatctctggacactcttcgattc

SEQ ID NO: 3967717 - DNA, 25 bp, Homo sapien
gctttggtcctgtgagctgtaggtc

SEQ ID NO: 3967718 - DNA, 25 bp, Homo sapien
tggaagcaaccacggccatttaacc

SEQ ID NO: 3967719 - DNA, 25 bp, Homo sapien
atttaaccaaggtccattgccctgg

SEQ ID NO: 3967720 - DNA, 25 bp, Homo sapien
ggaaggttcatgtggcccattagct

SEQ ID NO: 3967721 - DNA, 25 bp, Homo sapien
aatggacctggattcgtggcctgag

SEQ ID NO: 3967722 - DNA, 25 bp, Homo sapien
tgctccaaggaagggcgtttggttc

SEQ ID NO: 3967723 - DNA, 25 bp, Homo sapien
ttttcttgtactgggccacaaggaa

SEQ ID NO: 3967724 - DNA, 25 bp, Homo sapien
tggttcccacaagagtcgtggatct

SEQ ID NO: 3967725 - DNA, 25 bp, Homo sapien
tgttttcttgtactgggccacaagg

SEQ ID NO: 3967726 - DNA, 25 bp, Homo sapien
aatgccgcctagagtagctggctgg

SEQ ID NO: 3967727 - DNA, 25 bp, Homo sapien
ctggagctcaggacatgggatgtct

SEQ ID NO: 3967728 - DNA, 25 bp, Homo sapien
agtttgagaaatgccgcctagagta

SEQ ID NO: 3967729 - DNA, 25 bp, Homo sapien
agctcaggacatgggatgtctggat

SEQ ID NO: 3967730 - DNA, 25 bp, Homo sapien
gccagtccctgtgaacggctctgaa

SEQ ID NO: 3967731 - DNA, 25 bp, Homo sapien
agtccctgtgaacggctctgaacat

SEQ ID NO: 3967732 - DNA, 25 bp, Homo sapien
cagccagtccctgtgaacggctctg

SEQ ID NO: 3967733 - DNA, 25 bp, Homo sapien
cagtccctgtgaacggctctgaaca

SEQ ID NO: 3967734 - DNA, 25 bp, Homo sapien
gccaatagctgttgcaatatatgat

SEQ ID NO: 3967735 - DNA, 25 bp, Homo sapien
catcccgaagtaccaccaccaccat

SEQ ID NO: 3967736 - DNA, 25 bp, Homo sapien
attggcagccacatcccgaagtacc

SEQ ID NO: 3967737 - DNA, 25 bp, Homo sapien
ccaatagctgttgcaatatatgatt

SEQ ID NO: 3967738 - DNA, 25 bp, Homo sapien
cattgaacttggtgcatctgatctt

SEQ ID NO: 3967739 - DNA, 25 bp, Homo sapien
tgatcttgaagtgccccagtgggtg

SEQ ID NO: 3967740 - DNA, 25 bp, Homo sapien
cctcgctgtacttgacatgactggg

SEQ ID NO: 3967741 - DNA, 25 bp, Homo sapien
tgacagaattgggtccccttggcat

SEQ ID NO: 3967742 - DNA, 25 bp, Homo sapien
tgtgtctttgtgaaacacagagagc

SEQ ID NO: 3967743 - DNA, 25 bp, Homo sapien
taattaattttctggacggtgagct

SEQ ID NO: 3967744 - DNA, 25 bp, Homo sapien
aattaattttctggacggtgagctg

SEQ ID NO: 3967745 - DNA, 25 bp, Homo sapien
acagagagctgatcagatttccggg

SEQ ID NO: 3967746 - DNA, 25 bp, Homo sapien
cttggagtcatggtggtaagccaac

SEQ ID NO: 3967747 - DNA, 25 bp, Homo sapien
gccaactgtaccgttgtttgtcagg

SEQ ID NO: 3967748 - DNA, 25 bp, Homo sapien
tcatggtggtaagccaacattgctg

SEQ ID NO: 3967749 - DNA, 25 bp, Homo sapien
tgactgccaactgtaccgttgtttg

SEQ ID NO: 3967750 - DNA, 25 bp, Homo sapien
catttaggtaaattctggctgcagg

SEQ ID NO: 3967751 - DNA, 25 bp, Homo sapien
ctgttcctctagatgctgtggcatt

SEQ ID NO: 3967752 - DNA, 25 bp, Homo sapien
ctgtggcatttaggtaaattctggc

SEQ ID NO: 3967753 - DNA, 25 bp, Homo sapien
tttaggtaaattctggctgcaggca

SEQ ID NO: 3967754 - DNA, 25 bp, Homo sapien
gaaattgttgtggttggatcagtcc

SEQ ID NO: 3967755 - DNA, 25 bp, Homo sapien
gactctcaggagtggtgaaattgtt

SEQ ID NO: 3967756 - DNA, 25 bp, Homo sapien
tcctcaccaagtgagggctcctttg

SEQ ID NO: 3967757 - DNA, 25 bp, Homo sapien
tgagggctcctttgacttatggatt

SEQ ID NO: 3967758 - DNA, 25 bp, Homo sapien
ggcagatgatctccactaaggttat

SEQ ID NO: 3967759 - DNA, 25 bp, Homo sapien
cagtggtcaggccactgtatgggca

SEQ ID NO: 3967760 - DNA, 25 bp, Homo sapien
ttttagtccctcacacatagcgtgg

SEQ ID NO: 3967761 - DNA, 25 bp, Homo sapien
gttgtgaaagtctggtgagtctgcc

SEQ ID NO: 3967762 - DNA, 25 bp, Homo sapien
tgtaccagttagtcatttcctgttt

SEQ ID NO: 3967763 - DNA, 25 bp, Homo sapien
catggcctgacacagagcaggtatt

SEQ ID NO: 3967764 - DNA, 25 bp, Homo sapien
gacacagagcaggtattttattgaa

SEQ ID NO: 3967765 - DNA, 25 bp, Homo sapien
ttcttgccactcactctgattcgag

SEQ ID NO: 3967766 - DNA, 25 bp, Homo sapien
gacattgcacctccaataggccctg

SEQ ID NO: 3967767 - DNA, 25 bp, Homo sapien
ccctggcaatcttttatgtggacat

SEQ ID NO: 3967768 - DNA, 25 bp, Homo sapien
tgcacctccaataggccctgaatca

SEQ ID NO: 3967769 - DNA, 25 bp, Homo sapien
atgtggacattgcacctccaatagg

SEQ ID NO: 3967770 - DNA, 25 bp, Homo sapien
tcctcatccacaacagcaaattctg

SEQ ID NO: 3967771 - DNA, 25 bp, Homo sapien
tgctggtgttggtattgttgtcatt

SEQ ID NO: 3967772 - DNA, 25 bp, Homo sapien
ctggtgttggtattgttgtcattgt

SEQ ID NO: 3967773 - DNA, 25 bp, Homo sapien
tcatcctcatccacaacagcaaatt

SEQ ID NO: 3967774 - DNA, 25 bp, Homo sapien
gcttgggatcccctcaagaaggaaa

SEQ ID NO: 3967775 - DNA, 25 bp, Homo sapien
cttatttggctcagctgaaagtgca

SEQ ID NO: 3967776 - DNA, 25 bp, Homo sapien
ctgtggggtgcctattctgcagctc

SEQ ID NO: 3967777 - DNA, 25 bp, Homo sapien
attgcaaatctcattttcatgtcag

SEQ ID NO: 3967778 - DNA, 25 bp, Homo sapien
ttcggattgtgtaggactctccagc

SEQ ID NO: 3967779 - DNA, 25 bp, Homo sapien
tacgccgaagggcacttgggagagt

SEQ ID NO: 3967780 - DNA, 25 bp, Homo sapien
ccttgctccaaatccgcagaatgca

SEQ ID NO: 3967781 - DNA, 25 bp, Homo sapien
tttctcaccgttgcttagccttgct

SEQ ID NO: 3967782 - DNA, 25 bp, Homo sapien
gaacatccagtacttgaaaccctgc

SEQ ID NO: 3967783 - DNA, 25 bp, Homo sapien
ccagtacttgaaaccctgcacctag

SEQ ID NO: 3967784 - DNA, 25 bp, Homo sapien
ctgcacctagcgtttttgtttctct

SEQ ID NO: 3967785 - DNA, 25 bp, Homo sapien
tgaaaccctgcacctagcgtttttg

SEQ ID NO: 3967786 - DNA, 25 bp, Homo sapien
tgaatgtgcctcgtgttccctcagc

SEQ ID NO: 3967787 - DNA, 25 bp, Homo sapien
gaatttcctggacggctctgtacca

SEQ ID NO: 3967788 - DNA, 25 bp, Homo sapien
ggcaagactccagcacattgcaggg

SEQ ID NO: 3967789 - DNA, 25 bp, Homo sapien
tccattcagggtagtggacggtgac

SEQ ID NO: 3967790 - DNA, 25 bp, Homo sapien
ttggcaggagttcttcagggaatac

SEQ ID NO: 3967791 - DNA, 25 bp, Homo sapien
ctgagaagcagaccctctccttggc

SEQ ID NO: 3967792 - DNA, 25 bp, Homo sapien
tggcaggagttcttcagggaatacc

SEQ ID NO: 3967793 - DNA, 25 bp, Homo sapien
tccttggcaggagttcttcagggaa

SEQ ID NO: 3967794 - DNA, 25 bp, Homo sapien
tggcatgagtccgtgagacaccagg

SEQ ID NO: 3967795 - DNA, 25 bp, Homo sapien
tggatgcagcaggataaagggtaac

SEQ ID NO: 3967796 - DNA, 25 bp, Homo sapien
tgtccccaggttgattatgttctcc

SEQ ID NO: 3967797 - DNA, 25 bp, Homo sapien
tcttcccatacttggatgcagcagg

SEQ ID NO: 3967798 - DNA, 25 bp, Homo sapien
gatgtccattcagctgtcactctcc

SEQ ID NO: 3967799 - DNA, 25 bp, Homo sapien
gtcactctcctgaaggaagatctgg

SEQ ID NO: 3967800 - DNA, 25 bp, Homo sapien
atctggaagaggcaccaaccatctg

SEQ ID NO: 3967801 - DNA, 25 bp, Homo sapien
tctgctgctttatgcatccaagttc

SEQ ID NO: 3967802 - DNA, 25 bp, Homo sapien
tctccctgatatttggcatcttcct

SEQ ID NO: 3967803 - DNA, 25 bp, Homo sapien
ggagtgatcctgttttacaaatctc

SEQ ID NO: 3967804 - DNA, 25 bp, Homo sapien
ttacaaatctctccctgatatttgg

SEQ ID NO: 3967805 - DNA, 25 bp, Homo sapien
cttcaataaaattgggagtgatcct

SEQ ID NO: 3967806 - DNA, 25 bp, Homo sapien
tggctttcaaaatttggggatacca

SEQ ID NO: 3967807 - DNA, 25 bp, Homo sapien
ttcagcatgatggtctacatattga

SEQ ID NO: 3967808 - DNA, 25 bp, Homo sapien
gaaaaatttcagcatgatggtctac

SEQ ID NO: 3967809 - DNA, 25 bp, Homo sapien
catattgagtcgacgctggttgctt

SEQ ID NO: 3967810 - DNA, 25 bp, Homo sapien
aggcaatctaaactaaacctctgca

SEQ ID NO: 3967811 - DNA, 25 bp, Homo sapien
tctaaactaaacctctgcagagact

SEQ ID NO: 3967812 - DNA, 25 bp, Homo sapien
ctctgcagagactccaaatcatata

SEQ ID NO: 3967813 - DNA, 25 bp, Homo sapien
ctgcagagactccaaatcatatata

SEQ ID NO: 3967814 - DNA, 25 bp, Homo sapien
tcactcttccccttagcagcagcca

SEQ ID NO: 3967815 - DNA, 25 bp, Homo sapien
ttcaaatccatcaacaagtggcctt

SEQ ID NO: 3967816 - DNA, 25 bp, Homo sapien
atgagacgcagcagcaacacctaga

SEQ ID NO: 3967817 - DNA, 25 bp, Homo sapien
gacataagaagatgagacgcagcag

SEQ ID NO: 3967818 - DNA, 25 bp, Homo sapien
gcatttttgctcctgcattccagag

SEQ ID NO: 3967819 - DNA, 25 bp, Homo sapien
gagtcgctttgactgagtcctccat

SEQ ID NO: 3967820 - DNA, 25 bp, Homo sapien
tagaggccagatacctcaactccac

SEQ ID NO: 3967821 - DNA, 25 bp, Homo sapien
ttcccggtggcttctaagtgactgg

SEQ ID NO: 3967822 - DNA, 25 bp, Homo sapien
tcttcctcacctgacagaggccagg

SEQ ID NO: 3967823 - DNA, 25 bp, Homo sapien
ctcacctgacagaggccaggtttgc

SEQ ID NO: 3967824 - DNA, 25 bp, Homo sapien
caggtttgccccacagctgtgcatg

SEQ ID NO: 3967825 - DNA, 25 bp, Homo sapien
ctgtgcatgtctgtgaatggtccat

SEQ ID NO: 3967826 - DNA, 25 bp, Homo sapien
ctgaaagtggtacgtgatcatttga

SEQ ID NO: 3967827 - DNA, 25 bp, Homo sapien
gaaagtggtacgtgatcatttgatg

SEQ ID NO: 3967828 - DNA, 25 bp, Homo sapien
ggtacgtgatcatttgatggttctg

SEQ ID NO: 3967829 - DNA, 25 bp, Homo sapien
aagtggtacgtgatcatttgatggt

SEQ ID NO: 3967830 - DNA, 25 bp, Homo sapien
tgtgatgtgagctagttcattcaag

SEQ ID NO: 3967831 - DNA, 25 bp, Homo sapien
gccagcttcttaggatttgggagcc

SEQ ID NO: 3967832 - DNA, 25 bp, Homo sapien
ccagcttcttaggatttgggagccg

SEQ ID NO: 3967833 - DNA, 25 bp, Homo sapien
cattcaagtttaaatgccagcttct

SEQ ID NO: 3967834 - DNA, 25 bp, Homo sapien
ggagactggcaattgaggttcccat

SEQ ID NO: 3967835 - DNA, 25 bp, Homo sapien
gcagaggggctgttacatgggggga

SEQ ID NO: 3967836 - DNA, 25 bp, Homo sapien
ctgctttctgagtgcccgcagaggg

SEQ ID NO: 3967837 - DNA, 25 bp, Homo sapien
tctgctttctgagtgcccgcagagg

SEQ ID NO: 3967838 - DNA, 25 bp, Homo sapien
caccctttggtgatcatctccagtg

SEQ ID NO: 3967839 - DNA, 25 bp, Homo sapien
tatattcccgtttatgagccttttc

SEQ ID NO: 3967840 - DNA, 25 bp, Homo sapien
aaatggtcatgtaggatgttttata

SEQ ID NO: 3967841 - DNA, 25 bp, Homo sapien
tgatgctgcctcttgggttgccctt

SEQ ID NO: 3967842 - DNA, 25 bp, Homo sapien
gcctcttctacatggtcactcttga

SEQ ID NO: 3967843 - DNA, 25 bp, Homo sapien
gctacatcatttggcctccctctat

SEQ ID NO: 3967844 - DNA, 25 bp, Homo sapien
gtggatatctagagatgcctcttct

SEQ ID NO: 3967845 - DNA, 25 bp, Homo sapien
tgcgatggttaattctggtgccgtg

SEQ ID NO: 3967846 - DNA, 25 bp, Homo sapien
accgataactttgtagtgcccaaca

SEQ ID NO: 3967847 - DNA, 25 bp, Homo sapien
gaccgataactttgtagtgcccaac

SEQ ID NO: 3967848 - DNA, 25 bp, Homo sapien
tgaggagcatttgtgaggatgttct

SEQ ID NO: 3967849 - DNA, 25 bp, Homo sapien
gatgttcttgattgagtgcttcttc

SEQ ID NO: 3967850 - DNA, 25 bp, Homo sapien
tgaggatgttcttgattgagtgctt

SEQ ID NO: 3967851 - DNA, 25 bp, Homo sapien
gagagtaggattcctgaggagcatt

SEQ ID NO: 3967852 - DNA, 25 bp, Homo sapien
agccaggaggatgcgtgaacgtcct

SEQ ID NO: 3967853 - DNA, 25 bp, Homo sapien
gaggatgcgtgaacgtccttgtgac

SEQ ID NO: 3967854 - DNA, 25 bp, Homo sapien
caggaggatgcgtgaacgtccttgt

SEQ ID NO: 3967855 - DNA, 25 bp, Homo sapien
gtagccaggaggatgcgtgaacgtc

SEQ ID NO: 3967856 - DNA, 25 bp, Homo sapien
tcccctggtggctgactatgtgcgt

SEQ ID NO: 3967857 - DNA, 25 bp, Homo sapien
tgccctgtccagctttcacgattat

SEQ ID NO: 3967858 - DNA, 25 bp, Homo sapien
tatgtgcgtgcctgtccaggccctg

SEQ ID NO: 3967859 - DNA, 25 bp, Homo sapien
tgagacctttcagtcagacgctggt

SEQ ID NO: 3967860 - DNA, 25 bp, Homo sapien
caattatcttggttaattcaggctt

SEQ ID NO: 3967861 - DNA, 25 bp, Homo sapien
tgccaattatcttggttaattcagg

SEQ ID NO: 3967862 - DNA, 25 bp, Homo sapien
gaccctttgccaattatcttggtta

SEQ ID NO: 3967863 - DNA, 25 bp, Homo sapien
ctgtgaccctttgccaattatcttg

SEQ ID NO: 3967864 - DNA, 25 bp, Homo sapien
tctcattgggtgtgctgtgcctaaa

SEQ ID NO: 3967865 - DNA, 25 bp, Homo sapien
caatcgactgaagcacccttttggg

SEQ ID NO: 3967866 - DNA, 25 bp, Homo sapien
tctttagccctagacactggtacgc

SEQ ID NO: 3967867 - DNA, 25 bp, Homo sapien
aactagaagtgttggttggttccat

SEQ ID NO: 3967868 - DNA, 25 bp, Homo sapien
cattaaatgcctgtggtggatactc

SEQ ID NO: 3967869 - DNA, 25 bp, Homo sapien
gctagggatacatcagggactcaaa

SEQ ID NO: 3967870 - DNA, 25 bp, Homo sapien
ttttccatggtgcagctagggatac

SEQ ID NO: 3967871 - DNA, 25 bp, Homo sapien
ggactcaaatctgccccaacaaact

SEQ ID NO: 3967872 - DNA, 25 bp, Homo sapien
gtttgagcttctactccattggagt

SEQ ID NO: 3967873 - DNA, 25 bp, Homo sapien
tggaacttgattttctttgttattg

SEQ ID NO: 3967874 - DNA, 25 bp, Homo sapien
tgaagtttgagcttctactccattg

SEQ ID NO: 3967875 - DNA, 25 bp, Homo sapien
cttctactccattggagtctccgca

SEQ ID NO: 3967876 - DNA, 25 bp, Homo sapien
ccccactgcctactgtcctctgcga

SEQ ID NO: 3967877 - DNA, 25 bp, Homo sapien
cccactgcctactgtcctctgcgat

SEQ ID NO: 3967878 - DNA, 25 bp, Homo sapien
ccactgcctactgtcctctgcgatg

SEQ ID NO: 3967879 - DNA, 25 bp, Homo sapien
tatgatatgagtaggcgaagcctct

SEQ ID NO: 3967880 - DNA, 25 bp, Homo sapien
ctctagagagaggttcgcttttgga

SEQ ID NO: 3967881 - DNA, 25 bp, Homo sapien
gcaatagcctaaatgaagacctcat

SEQ ID NO: 3967882 - DNA, 25 bp, Homo sapien
caatagggccatggtgtggattcaa

SEQ ID NO: 3967883 - DNA, 25 bp, Homo sapien
taattctcctccgaaaccttggtga

SEQ ID NO: 3967884 - DNA, 25 bp, Homo sapien
caccttgtaaggaacagcatatttc

SEQ ID NO: 3967885 - DNA, 25 bp, Homo sapien
catggtgctctttatcccattgagt

SEQ ID NO: 3967886 - DNA, 25 bp, Homo sapien
ccattgagtttcaactgggtccacc

SEQ ID NO: 3967887 - DNA, 25 bp, Homo sapien
caactccttgggaatgttatgaggt

SEQ ID NO: 3967888 - DNA, 25 bp, Homo sapien
gaggcataatgtggtcaaagtcttc

SEQ ID NO: 3967889 - DNA, 25 bp, Homo sapien
ctttctaaggcagcaagttgggctg

SEQ ID NO: 3967890 - DNA, 25 bp, Homo sapien
ccatagtgtttgtagctcacaggat

SEQ ID NO: 3967891 - DNA, 25 bp, Homo sapien
actgacttccaagtatgagcagcag

SEQ ID NO: 3967892 - DNA, 25 bp, Homo sapien
tcatgatggggaactctgggtccca

SEQ ID NO: 3967893 - DNA, 25 bp, Homo sapien
tcaaagtttactggatggtaatagg

SEQ ID NO: 3967894 - DNA, 25 bp, Homo sapien
tctgggtcccataattgcatcaaag

SEQ ID NO: 3967895 - DNA, 25 bp, Homo sapien
tgaataatgtgcagtttaaggtttg

SEQ ID NO: 3967896 - DNA, 25 bp, Homo sapien
catcagctaccctgagctcagagat

SEQ ID NO: 3967897 - DNA, 25 bp, Homo sapien
ttgaataatgtgcagtttaaggttt

SEQ ID NO: 3967898 - DNA, 25 bp, Homo sapien
tgctgacagcctgaccatcagctac

SEQ ID NO: 3967899 - DNA, 25 bp, Homo sapien
agttctctgggttatgtcaacagga

SEQ ID NO: 3967900 - DNA, 25 bp, Homo sapien
aaagtactggtttcagctgccacag

SEQ ID NO: 3967901 - DNA, 25 bp, Homo sapien
cctgcagggattggcatttatcaaa

SEQ ID NO: 3967902 - DNA, 25 bp, Homo sapien
gatgtctggaataggtaaagttctc

SEQ ID NO: 3967903 - DNA, 25 bp, Homo sapien
cttgaaatcttgtgttcctgttgga

SEQ ID NO: 3967904 - DNA, 25 bp, Homo sapien
ggaaacttgaaatcttgtgttcctg

SEQ ID NO: 3967905 - DNA, 25 bp, Homo sapien
tcttgtgttcctgttggaggttgat

SEQ ID NO: 3967906 - DNA, 25 bp, Homo sapien
gaaatcttgtgttcctgttggaggt

SEQ ID NO: 3967907 - DNA, 25 bp, Homo sapien
cacccattgatctggtgagtcggct

SEQ ID NO: 3967908 - DNA, 25 bp, Homo sapien
gccacacacccattgatctggtgag

SEQ ID NO: 3967909 - DNA, 25 bp, Homo sapien
cacacccattgatctggtgagtcgg

SEQ ID NO: 3967910 - DNA, 25 bp, Homo sapien
cattgatctggtgagtcggcttgct

SEQ ID NO: 3967911 - DNA, 25 bp, Homo sapien
ggtggctacaattgaccggctgttt

SEQ ID NO: 3967912 - DNA, 25 bp, Homo sapien
taatttggaaatggtctgatccaca

SEQ ID NO: 3967913 - DNA, 25 bp, Homo sapien
ctttagaggaaggtaggtggctaca

SEQ ID NO: 3967914 - DNA, 25 bp, Homo sapien
tgttgccaagagtgacctttagagg

SEQ ID NO: 3967915 - DNA, 25 bp, Homo sapien
gaaagaagatgtggcagtgtgatga

SEQ ID NO: 3967916 - DNA, 25 bp, Homo sapien
gctgtgcactttgtgtcttgtgctg

SEQ ID NO: 3967917 - DNA, 25 bp, Homo sapien
ttccaaagctggaccgctgggccca

SEQ ID NO: 3967918 - DNA, 25 bp, Homo sapien
gcagcagtattgttcttggccaaat

SEQ ID NO: 3967919 - DNA, 25 bp, Homo sapien
tcctgccagcagcagtattgttctt

SEQ ID NO: 3967920 - DNA, 25 bp, Homo sapien
ccacaggttctgacttcaggagccc

SEQ ID NO: 3967921 - DNA, 25 bp, Homo sapien
ggaccacaggttctgacttcaggag

SEQ ID NO: 3967922 - DNA, 25 bp, Homo sapien
cagccccaagatagcaagcttggtt

SEQ ID NO: 3967923 - DNA, 25 bp, Homo sapien
caccagccccaagatagcaagcttg

SEQ ID NO: 3967924 - DNA, 25 bp, Homo sapien
gcctcagtctgggattttgaagctg

SEQ ID NO: 3967925 - DNA, 25 bp, Homo sapien
ttttgaagctgttgtgttgcctcca

SEQ ID NO: 3967926 - DNA, 25 bp, Homo sapien
ccactttgttgtgcccttgagtgcc

SEQ ID NO: 3967927 - DNA, 25 bp, Homo sapien
cttgagtgcccagaagggctattgc

SEQ ID NO: 3967928 - DNA, 25 bp, Homo sapien
tgcccagaagggctattgcagtgac

SEQ ID NO: 3967929 - DNA, 25 bp, Homo sapien
aataaccaccactttgttgtgccct

SEQ ID NO: 3967930 - DNA, 25 bp, Homo sapien
catacacttgcatgggagctttgga

SEQ ID NO: 3967931 - DNA, 25 bp, Homo sapien
tggaccagcagcatagaccatggaa

SEQ ID NO: 3967932 - DNA, 25 bp, Homo sapien
tgcaggccgcaccttgattcagagc

SEQ ID NO: 3967933 - DNA, 25 bp, Homo sapien
gtagaaaagatcacgccataggctc

SEQ ID NO: 3967934 - DNA, 25 bp, Homo sapien
caacttctgttaccacacacttctc

SEQ ID NO: 3967935 - DNA, 25 bp, Homo sapien
aacttctgttaccacacacttctca

SEQ ID NO: 3967936 - DNA, 25 bp, Homo sapien
agcaacttctgttaccacacacttc

SEQ ID NO: 3967937 - DNA, 25 bp, Homo sapien
gcaacttctgttaccacacacttct

SEQ ID NO: 3967938 - DNA, 25 bp, Homo sapien
ctgggaaggacatattcagtttcat

SEQ ID NO: 3967939 - DNA, 25 bp, Homo sapien
cagggtcactctgtttacatgctca

SEQ ID NO: 3967940 - DNA, 25 bp, Homo sapien
tatttcaatgcatcttccagggtgg

SEQ ID NO: 3967941 - DNA, 25 bp, Homo sapien
tctgcagtggctgaaaacgaaggct

SEQ ID NO: 3967942 - DNA, 25 bp, Homo sapien
gctgtctaacagcaatgtcccagtc

SEQ ID NO: 3967943 - DNA, 25 bp, Homo sapien
aagtttggtaggatagagaagctgc

SEQ ID NO: 3967944 - DNA, 25 bp, Homo sapien
gatggtggccgaacaatcagcagca

SEQ ID NO: 3967945 - DNA, 25 bp, Homo sapien
gatgacaaggaactaagaaccccaa

SEQ ID NO: 3967946 - DNA, 25 bp, Homo sapien
ggctctggtggctcaatttgcttag

SEQ ID NO: 3967947 - DNA, 25 bp, Homo sapien
gcaggcacactgagaagggtgtatc

SEQ ID NO: 3967948 - DNA, 25 bp, Homo sapien
tctttcggataatttgcaggcacac

SEQ ID NO: 3967949 - DNA, 25 bp, Homo sapien
gtatctactactctgggagatccta

SEQ ID NO: 3967950 - DNA, 25 bp, Homo sapien
tggtcttgggtcttctttcggataa

SEQ ID NO: 3967951 - DNA, 25 bp, Homo sapien
cactcagctcagtgtgagatgctgg

SEQ ID NO: 3967952 - DNA, 25 bp, Homo sapien
atggagagtaacaaggtgttaggga

SEQ ID NO: 3967953 - DNA, 25 bp, Homo sapien
ggagagtaacaaggtgttagggaca

SEQ ID NO: 3967954 - DNA, 25 bp, Homo sapien
ctggaatggagagtaacaaggtgtt

SEQ ID NO: 3967955 - DNA, 25 bp, Homo sapien
ttttgccttttcatggaactcagag

SEQ ID NO: 3967956 - DNA, 25 bp, Homo sapien
tttgccttttcatggaactcagagg

SEQ ID NO: 3967957 - DNA, 25 bp, Homo sapien
tatacatctagtccttctagctgga

SEQ ID NO: 3967958 - DNA, 25 bp, Homo sapien
taacaacaatgcacttacacagggc

SEQ ID NO: 3967959 - DNA, 25 bp, Homo sapien
tgactagggagtcagctacgccaag

SEQ ID NO: 3967960 - DNA, 25 bp, Homo sapien
gccacatggctctcacaagaggact

SEQ ID NO: 3967961 - DNA, 25 bp, Homo sapien
taggcattttctgtgtggagtccac

SEQ ID NO: 3967962 - DNA, 25 bp, Homo sapien
tattggtccctacaagttcttgaag

SEQ ID NO: 3967963 - DNA, 25 bp, Homo sapien
ttgaaggccgtagtccttgaagact

SEQ ID NO: 3967964 - DNA, 25 bp, Homo sapien
atctgcttgggcgtaggcattttct

SEQ ID NO: 3967965 - DNA, 25 bp, Homo sapien
tagcaccattcctgtacaaagtagg

SEQ ID NO: 3967966 - DNA, 25 bp, Homo sapien
gaagaacaggcttagcaccattcct

SEQ ID NO: 3967967 - DNA, 25 bp, Homo sapien
cctgtacaaagtaggtaatggatgc

SEQ ID NO: 3967968 - DNA, 25 bp, Homo sapien
aaagtaggtaatggatgcatgtttc

SEQ ID NO: 3967969 - DNA, 25 bp, Homo sapien
ggaaaactggcgctcagctgcccct

SEQ ID NO: 3967970 - DNA, 25 bp, Homo sapien
gccccaaaatgccagtcactgcatc

SEQ ID NO: 3967971 - DNA, 25 bp, Homo sapien
caggaaaactggcgctcagctgccc

SEQ ID NO: 3967972 - DNA, 25 bp, Homo sapien
ccccaaaatgccagtcactgcatcc

SEQ ID NO: 3967973 - DNA, 25 bp, Homo sapien
tttggcggcctgaagcttatgtgca

SEQ ID NO: 3967974 - DNA, 25 bp, Homo sapien
gagggcctgctgctacactgttgct

SEQ ID NO: 3967975 - DNA, 25 bp, Homo sapien
cagaggctcagaccttgttttggcg

SEQ ID NO: 3967976 - DNA, 25 bp, Homo sapien
tatgtgcaaagctgaacccggagac

SEQ ID NO: 3967977 - DNA, 25 bp, Homo sapien
tatctgatctgaggtgggcttattg

SEQ ID NO: 3967978 - DNA, 25 bp, Homo sapien
gttgggagtgctgagatccaattct

SEQ ID NO: 3967979 - DNA, 25 bp, Homo sapien
tgagatccaattctgactctcttat

SEQ ID NO: 3967980 - DNA, 25 bp, Homo sapien
tgggtagagatggttgggagtgctg

SEQ ID NO: 3967981 - DNA, 25 bp, Homo sapien
tcttagacctccgaagaaccacaac

SEQ ID NO: 3967982 - DNA, 25 bp, Homo sapien
catttaagtgtcactagatttcctt

SEQ ID NO: 3967983 - DNA, 25 bp, Homo sapien
cctccgaagaaccacaactaaattg

SEQ ID NO: 3967984 - DNA, 25 bp, Homo sapien
ccacaactaaattggtagcctgacc

SEQ ID NO: 3967985 - DNA, 25 bp, Homo sapien
ttttctaatataagtacttcctcca

SEQ ID NO: 3967986 - DNA, 25 bp, Homo sapien
tcagacagcttagagtgccctcttg

SEQ ID NO: 3967987 - DNA, 25 bp, Homo sapien
aaattccagggttcttggaagatag

SEQ ID NO: 3967988 - DNA, 25 bp, Homo sapien
tcactgctacgatgatccaccagat

SEQ ID NO: 3967989 - DNA, 25 bp, Homo sapien
tagagctactacagcaaagatcact

SEQ ID NO: 3967990 - DNA, 25 bp, Homo sapien
tccatattcatttgcactaagtcca

SEQ ID NO: 3967991 - DNA, 25 bp, Homo sapien
gcactaagtccattactgaaagata

SEQ ID NO: 3967992 - DNA, 25 bp, Homo sapien
catttggcaatcatcctacatttcc

SEQ ID NO: 3967993 - DNA, 25 bp, Homo sapien
acttctatggcctcgaggaactctc

SEQ ID NO: 3967994 - DNA, 25 bp, Homo sapien
ggagaagacccctggaatgatacac

SEQ ID NO: 3967995 - DNA, 25 bp, Homo sapien
gaagccacgtgctctacatttgggc

SEQ ID NO: 3967996 - DNA, 25 bp, Homo sapien
aaagtcaggtcaaggagaagccacg

SEQ ID NO: 3967997 - DNA, 25 bp, Homo sapien
catttgggcctaccagtttcaggag

SEQ ID NO: 3967998 - DNA, 25 bp, Homo sapien
caaccctttctgtaccacagctata

SEQ ID NO: 3967999 - DNA, 25 bp, Homo sapien
ctcctggccagtattctccaaaatg

SEQ ID NO: 3968000 - DNA, 25 bp, Homo sapien
aatgtctctgtatgagattgttggg

SEQ ID NO: 3968001 - DNA, 25 bp, Homo sapien
tatattacctaccagcaatgagggt

SEQ ID NO: 3968002 - DNA, 25 bp, Homo sapien
aggtccaccgaggacatgggcacaa

SEQ ID NO: 3968003 - DNA, 25 bp, Homo sapien
cgaggacatgggcacaaatggcacc

SEQ ID NO: 3968004 - DNA, 25 bp, Homo sapien
actgcctaaacaggtccaccgagga

SEQ ID NO: 3968005 - DNA, 25 bp, Homo sapien
taaacaggtccaccgaggacatggg

SEQ ID NO: 3968006 - DNA, 25 bp, Homo sapien
gaaatccctttgacagaatgggctg

SEQ ID NO: 3968007 - DNA, 25 bp, Homo sapien
gggctgcacccccaattgcattctg

SEQ ID NO: 3968008 - DNA, 25 bp, Homo sapien
cctttgacagaatgggctgcacccc

SEQ ID NO: 3968009 - DNA, 25 bp, Homo sapien
caagacttgaaatccctttgacaga

SEQ ID NO: 3968010 - DNA, 25 bp, Homo sapien
tctcagctcgagatccaaagaactc

SEQ ID NO: 3968011 - DNA, 25 bp, Homo sapien
ccacagttctactctggttaaacct

SEQ ID NO: 3968012 - DNA, 25 bp, Homo sapien
acttgttgagttggataatctggcc

SEQ ID NO: 3968013 - DNA, 25 bp, Homo sapien
gaagagcaaagtctgggttctttgc

SEQ ID NO: 3968014 - DNA, 25 bp, Homo sapien
actgccaccaacacagttcctgcaa

SEQ ID NO: 3968015 - DNA, 25 bp, Homo sapien
ctgctacaactaccagtggtgaaac

SEQ ID NO: 3968016 - DNA, 25 bp, Homo sapien
gagacattgccaaaagccacctttc

SEQ ID NO: 3968017 - DNA, 25 bp, Homo sapien
gaaacatgttactgccactatcact

SEQ ID NO: 3968018 - DNA, 25 bp, Homo sapien
attctgctccaaacttagatcactg

SEQ ID NO: 3968019 - DNA, 25 bp, Homo sapien
ggaagtccttacatatacccttcca

SEQ ID NO: 3968020 - DNA, 25 bp, Homo sapien
tctgctccaaacttagatcactgtc

SEQ ID NO: 3968021 - DNA, 25 bp, Homo sapien
gaagtccttacatatacccttccat

SEQ ID NO: 3968022 - DNA, 25 bp, Homo sapien
tccttgttgcagccgtgacacactt

SEQ ID NO: 3968023 - DNA, 25 bp, Homo sapien
cttgttgcagccgtgacacacttca

SEQ ID NO: 3968024 - DNA, 25 bp, Homo sapien
ttgttgcagccgtgacacacttcat

SEQ ID NO: 3968025 - DNA, 25 bp, Homo sapien
tttccttgttgcagccgtgacacac

SEQ ID NO: 3968026 - DNA, 25 bp, Homo sapien
tcttctccatgggagttcccccagg

SEQ ID NO: 3968027 - DNA, 25 bp, Homo sapien
ctttgcaaaacagtcaggttggcag

SEQ ID NO: 3968028 - DNA, 25 bp, Homo sapien
gcaaaacagtcaggttggcagattt

SEQ ID NO: 3968029 - DNA, 25 bp, Homo sapien
gaacttgatagatctgatctttgca

SEQ ID NO: 3968030 - DNA, 25 bp, Homo sapien
aaattactctgagctacgggaggac

SEQ ID NO: 3968031 - DNA, 25 bp, Homo sapien
acagagaagtgcttaaaggagctga

SEQ ID NO: 3968032 - DNA, 25 bp, Homo sapien
tgagctacgggaggacattcaaacc

SEQ ID NO: 3968033 - DNA, 25 bp, Homo sapien
ttactctgagctacgggaggacatt

SEQ ID NO: 3968034 - DNA, 25 bp, Homo sapien
tctcctctccagacattccatgttt

SEQ ID NO: 3968035 - DNA, 25 bp, Homo sapien
gccatttgagctcatgctttgctga

SEQ ID NO: 3968036 - DNA, 25 bp, Homo sapien
ctgccaagtgttctgggttgcattc

SEQ ID NO: 3968037 - DNA, 25 bp, Homo sapien
tccatgtttagaatcataggcgcct

SEQ ID NO: 3968038 - DNA, 25 bp, Homo sapien
ggcaaacatccagggataagccctt

SEQ ID NO: 3968039 - DNA, 25 bp, Homo sapien
tgtgctttgcctacttcatagccag

SEQ ID NO: 3968040 - DNA, 25 bp, Homo sapien
ccttggtgaacctctgtgctttgcc

SEQ ID NO: 3968041 - DNA, 25 bp, Homo sapien
cctaatgagcagctgctttcagtcc

SEQ ID NO: 3968042 - DNA, 25 bp, Homo sapien
ggctggcctggagtatctccaaagt

SEQ ID NO: 3968043 - DNA, 25 bp, Homo sapien
aggggctggcctggagtatctccaa

SEQ ID NO: 3968044 - DNA, 25 bp, Homo sapien
tgaggggctggcctggagtatctcc

SEQ ID NO: 3968045 - DNA, 25 bp, Homo sapien
gggctggcctggagtatctccaaag

SEQ ID NO: 3968046 - DNA, 25 bp, Homo sapien
actagcttggaacggacccatgtgg

SEQ ID NO: 3968047 - DNA, 25 bp, Homo sapien
acttcttgtccccaagtcagatttg

SEQ ID NO: 3968048 - DNA, 25 bp, Homo sapien
ctgagttgctggattaactagcttg

SEQ ID NO: 3968049 - DNA, 25 bp, Homo sapien
gatttgtgagacaaatgtccttaca

SEQ ID NO: 3968050 - DNA, 25 bp, Homo sapien
gctctttgataccacagcatcatct

SEQ ID NO: 3968051 - DNA, 25 bp, Homo sapien
gataccacagcatcatctgatgttt

SEQ ID NO: 3968052 - DNA, 25 bp, Homo sapien
acaagatgctctttgataccacagc

SEQ ID NO: 3968053 - DNA, 25 bp, Homo sapien
caagatgctctttgataccacagca

SEQ ID NO: 3968054 - DNA, 25 bp, Homo sapien
tcaccaaataatgaacaggcatatt

SEQ ID NO: 3968055 - DNA, 25 bp, Homo sapien
ggtgtgggagtcatttcgttcacca

SEQ ID NO: 3968056 - DNA, 25 bp, Homo sapien
cgatagattccccactccgattgat

SEQ ID NO: 3968057 - DNA, 25 bp, Homo sapien
caatggattggttctgttactcccc

SEQ ID NO: 3968058 - DNA, 25 bp, Homo sapien
caggccttggacttcaactgaagct

SEQ ID NO: 3968059 - DNA, 25 bp, Homo sapien
cttggacttcaactgaagctttcat

SEQ ID NO: 3968060 - DNA, 25 bp, Homo sapien
gccttggacttcaactgaagctttc

SEQ ID NO: 3968061 - DNA, 25 bp, Homo sapien
ggccttggacttcaactgaagcttt

SEQ ID NO: 3968062 - DNA, 25 bp, Homo sapien
agtactctaccgtctgcttccatct

SEQ ID NO: 3968063 - DNA, 25 bp, Homo sapien
agcattcacagtactctaccgtctg

SEQ ID NO: 3968064 - DNA, 25 bp, Homo sapien
gtactctaccgtctgcttccatctg

SEQ ID NO: 3968065 - DNA, 25 bp, Homo sapien
ttcacagtactctaccgtctgcttc

SEQ ID NO: 3968066 - DNA, 25 bp, Homo sapien
gagcatagtaggcaccaggttctgc

SEQ ID NO: 3968067 - DNA, 25 bp, Homo sapien
tgcacctggtcaagaatcggctttc

SEQ ID NO: 3968068 - DNA, 25 bp, Homo sapien
tacatttggtcttggacagctactc

SEQ ID NO: 3968069 - DNA, 25 bp, Homo sapien
actctttaagtgttgtatgtgaaac

SEQ ID NO: 3968070 - DNA, 25 bp, Homo sapien
tcatcgccatctgcattctcgtcac

SEQ ID NO: 3968071 - DNA, 25 bp, Homo sapien
accaggacacctagcataagctcct

SEQ ID NO: 3968072 - DNA, 25 bp, Homo sapien
gacacctagcataagctccttcatg

SEQ ID NO: 3968073 - DNA, 25 bp, Homo sapien
attctcgtcaccctctgaggcactt

SEQ ID NO: 3968074 - DNA, 25 bp, Homo sapien
tcttgactatggctcacgtttccct

SEQ ID NO: 3968075 - DNA, 25 bp, Homo sapien
tagtaacttttttagcatgctggac

SEQ ID NO: 3968076 - DNA, 25 bp, Homo sapien
cattgtgcacggtaagttgcgcaga

SEQ ID NO: 3968077 - DNA, 25 bp, Homo sapien
tcccggtaggaaaatgctagtgcct

SEQ ID NO: 3968078 - DNA, 25 bp, Homo sapien
gccaaatggcaaacaccattccata

SEQ ID NO: 3968079 - DNA, 25 bp, Homo sapien
ttccataggaaagaagatcaccttg

SEQ ID NO: 3968080 - DNA, 25 bp, Homo sapien
tggcaaacaccattccataggaaag

SEQ ID NO: 3968081 - DNA, 25 bp, Homo sapien
caaacaccattccataggaaagaag

SEQ ID NO: 3968082 - DNA, 25 bp, Homo sapien
agtaagtagaattgcatttataccc

SEQ ID NO: 3968083 - DNA, 25 bp, Homo sapien
gtagaattgcatttatacccaaagt

SEQ ID NO: 3968084 - DNA, 25 bp, Homo sapien
tgctgcttgattaaagtaagtagaa

SEQ ID NO: 3968085 - DNA, 25 bp, Homo sapien
attgcatttatacccaaagttggcc

SEQ ID NO: 3968086 - DNA, 25 bp, Homo sapien
ggtggagaaagacctagatgttgca

SEQ ID NO: 3968087 - DNA, 25 bp, Homo sapien
agaaagacctagatgttgcagtaag

SEQ ID NO: 3968088 - DNA, 25 bp, Homo sapien
tttctccaaaatccatacttcacct

SEQ ID NO: 3968089 - DNA, 25 bp, Homo sapien
ggagaaagacctagatgttgcagta

SEQ ID NO: 3968090 - DNA, 25 bp, Homo sapien
cttccactgagagtgagctcaggag

SEQ ID NO: 3968091 - DNA, 25 bp, Homo sapien
tgcttccactgagagtgagctcagg

SEQ ID NO: 3968092 - DNA, 25 bp, Homo sapien
gtgagctcaggagggactgaaagga

SEQ ID NO: 3968093 - DNA, 25 bp, Homo sapien
cgtgcttccactgagagtgagctca

SEQ ID NO: 3968094 - DNA, 25 bp, Homo sapien
aagctttggcatcaccattacaacc

SEQ ID NO: 3968095 - DNA, 25 bp, Homo sapien
gctttggcatcaccattacaaccct

SEQ ID NO: 3968096 - DNA, 25 bp, Homo sapien
tccaagctttggcatcaccattaca

SEQ ID NO: 3968097 - DNA, 25 bp, Homo sapien
ccatccaagctttggcatcaccatt

SEQ ID NO: 3968098 - DNA, 25 bp, Homo sapien
catgagatacacgtcatactttgcc

SEQ ID NO: 3968099 - DNA, 25 bp, Homo sapien
atactttgccgcatattcgtcattg

SEQ ID NO: 3968100 - DNA, 25 bp, Homo sapien
gatacacgtcatactttgccgcata

SEQ ID NO: 3968101 - DNA, 25 bp, Homo sapien
ctttgaggcatgagatacacgtcat

SEQ ID NO: 3968102 - DNA, 25 bp, Homo sapien
gtctgcttcctttactagaatattc

SEQ ID NO: 3968103 - DNA, 25 bp, Homo sapien
cttcatccagttgaaatagcctgca

SEQ ID NO: 3968104 - DNA, 25 bp, Homo sapien
tacttcatccagttgaaatagcctg

SEQ ID NO: 3968105 - DNA, 25 bp, Homo sapien
acctacttcatccagttgaaatagc

SEQ ID NO: 3968106 - DNA, 25 bp, Homo sapien
tcagcctgattcatgccacatttct

SEQ ID NO: 3968107 - DNA, 25 bp, Homo sapien
ttccaagacaatccatctatacatc

SEQ ID NO: 3968108 - DNA, 25 bp, Homo sapien
ccaagacaatccatctatacatcat

SEQ ID NO: 3968109 - DNA, 25 bp, Homo sapien
tccaagacaatccatctatacatca

SEQ ID NO: 3968110 - DNA, 25 bp, Homo sapien
gcagctactaagtgacccatgggtg

SEQ ID NO: 3968111 - DNA, 25 bp, Homo sapien
catgggtgggcagtgtctacaacag

SEQ ID NO: 3968112 - DNA, 25 bp, Homo sapien
tttcagaccatggtggaccgtggac

SEQ ID NO: 3968113 - DNA, 25 bp, Homo sapien
gatttcatcacggtctagtactcag

SEQ ID NO: 3968114 - DNA, 25 bp, Homo sapien
gcattctctggtgtaactatttgtg

SEQ ID NO: 3968115 - DNA, 25 bp, Homo sapien
tacatgcaggatggtaggaacattt

SEQ ID NO: 3968116 - DNA, 25 bp, Homo sapien
tgccacttaaggtagcaaaccccag

SEQ ID NO: 3968117 - DNA, 25 bp, Homo sapien
aaagcatgtagctcctattatgtcc

SEQ ID NO: 3968118 - DNA, 25 bp, Homo sapien
ctcttccttgtgacatgcatgtctc

SEQ ID NO: 3968119 - DNA, 25 bp, Homo sapien
ggatgcaaatgatggcagcctcttc

SEQ ID NO: 3968120 - DNA, 25 bp, Homo sapien
gatgcaaatgatggcagcctcttcc

SEQ ID NO: 3968121 - DNA, 25 bp, Homo sapien
tgtgacatgcatgtctcttattttc

SEQ ID NO: 3968122 - DNA, 25 bp, Homo sapien
cataaattgttgtaccaagccatag

SEQ ID NO: 3968123 - DNA, 25 bp, Homo sapien
cccagtggagaaataggtgattcaa

SEQ ID NO: 3968124 - DNA, 25 bp, Homo sapien
cacatggacatcaatttgcaagttt

SEQ ID NO: 3968125 - DNA, 25 bp, Homo sapien
taatctccattggaaatagcacatg

SEQ ID NO: 3968126 - DNA, 25 bp, Homo sapien
cagaagacgaaagacaaagtgcagc

SEQ ID NO: 3968127 - DNA, 25 bp, Homo sapien
tctggataaatgctaatgtgataac

SEQ ID NO: 3968128 - DNA, 25 bp, Homo sapien
cttttgtaccgatgcaatatatgag

SEQ ID NO: 3968129 - DNA, 25 bp, Homo sapien
cagctttggacctctcgagtgtcct

SEQ ID NO: 3968130 - DNA, 25 bp, Homo sapien
tgcccagattagagaccagttgagg

SEQ ID NO: 3968131 - DNA, 25 bp, Homo sapien
atgtaggtgtggagtcagactgccc

SEQ ID NO: 3968132 - DNA, 25 bp, Homo sapien
ttgcataagcattcctgctgcattg

SEQ ID NO: 3968133 - DNA, 25 bp, Homo sapien
tgcattgtataacctgagagccagc

SEQ ID NO: 3968134 - DNA, 25 bp, Homo sapien
ccttttcgttcctgcctgaagcaca

SEQ ID NO: 3968135 - DNA, 25 bp, Homo sapien
ttttcgttcctgcctgaagcacagg

SEQ ID NO: 3968136 - DNA, 25 bp, Homo sapien
tttcgttcctgcctgaagcacaggg

SEQ ID NO: 3968137 - DNA, 25 bp, Homo sapien
cttttcgttcctgcctgaagcacag

SEQ ID NO: 3968138 - DNA, 25 bp, Homo sapien
gacagggcccctatcttggaggtga

SEQ ID NO: 3968139 - DNA, 25 bp, Homo sapien
tagccttgtgtagggagtaacagcc

SEQ ID NO: 3968140 - DNA, 25 bp, Homo sapien
tcaggtcatgggatgccaagcatgc

SEQ ID NO: 3968141 - DNA, 25 bp, Homo sapien
tctgtgtgttatcgaggaaagcttc

SEQ ID NO: 3968142 - DNA, 25 bp, Homo sapien
cgcattacgatcactgtaaaaaggg

SEQ ID NO: 3968143 - DNA, 25 bp, Homo sapien
ttctgcacaagaagcacgcagctcc

SEQ ID NO: 3968144 - DNA, 25 bp, Homo sapien
cctctgatgcatgcagcaaatcgca

SEQ ID NO: 3968145 - DNA, 25 bp, Homo sapien
tctcggaatagtgcacagaatcttc

SEQ ID NO: 3968146 - DNA, 25 bp, Homo sapien
tgggatactatctccttagcagcag

SEQ ID NO: 3968147 - DNA, 25 bp, Homo sapien
tcaggtccgttttgacacaggaaca

SEQ ID NO: 3968148 - DNA, 25 bp, Homo sapien
cggattttccctaagataatgactg

SEQ ID NO: 3968149 - DNA, 25 bp, Homo sapien
tgagggttgatatcccggattttcc

SEQ ID NO: 3968150 - DNA, 25 bp, Homo sapien
cctccaggaaaactagtaagaaatg

SEQ ID NO: 3968151 - DNA, 25 bp, Homo sapien
gagggaaaacgtgcttcagtggaaa

SEQ ID NO: 3968152 - DNA, 25 bp, Homo sapien
ttcccatcgtttggagggaagagga

SEQ ID NO: 3968153 - DNA, 25 bp, Homo sapien
tacaatcaactggatactcactttc

SEQ ID NO: 3968154 - DNA, 25 bp, Homo sapien
ctccaaatcccctgaaccagaaata

SEQ ID NO: 3968155 - DNA, 25 bp, Homo sapien
ccagaaatatcctgccattgtcggg

SEQ ID NO: 3968156 - DNA, 25 bp, Homo sapien
tgagaacctgaacgcctccaaatcc

SEQ ID NO: 3968157 - DNA, 25 bp, Homo sapien
gaaccagaaatatcctgccattgtc

SEQ ID NO: 3968158 - DNA, 25 bp, Homo sapien
tgctccaaatgccaacctcaaagtg

SEQ ID NO: 3968159 - DNA, 25 bp, Homo sapien
tgcagcatggggacatgctccaaat

SEQ ID NO: 3968160 - DNA, 25 bp, Homo sapien
tctgcaataactgggagcctgggca

SEQ ID NO: 3968161 - DNA, 25 bp, Homo sapien
gtggctgagatattcgctgtcttcc

SEQ ID NO: 3968162 - DNA, 25 bp, Homo sapien
aaaagctccctgtgctgaagaaaaa

SEQ ID NO: 3968163 - DNA, 25 bp, Homo sapien
gatgtctggcacaagacccttgcca

SEQ ID NO: 3968164 - DNA, 25 bp, Homo sapien
ggaatgtccttataccacatcttgg

SEQ ID NO: 3968165 - DNA, 25 bp, Homo sapien
gaaataaagactcctggaatgccac

SEQ ID NO: 3968166 - DNA, 25 bp, Homo sapien
ccatctataaggactgcagtttgca

SEQ ID NO: 3968167 - DNA, 25 bp, Homo sapien
tgtgtcttagctgcattgtaatggg

SEQ ID NO: 3968168 - DNA, 25 bp, Homo sapien
tgacgcagcattgttctaaaactag

SEQ ID NO: 3968169 - DNA, 25 bp, Homo sapien
gttaccagattcatgaccttcagcg

SEQ ID NO: 3968170 - DNA, 25 bp, Homo sapien
aaaactagttagtagtttctgagca

SEQ ID NO: 3968171 - DNA, 25 bp, Homo sapien
catttagtgatgtcagccctgggga

SEQ ID NO: 3968172 - DNA, 25 bp, Homo sapien
actggcatttagtgatgtcagccct

SEQ ID NO: 3968173 - DNA, 25 bp, Homo sapien
ttagtgatgtcagccctggggaaag

SEQ ID NO: 3968174 - DNA, 25 bp, Homo sapien
ctgtaaactggcatttagtgatgtc

SEQ ID NO: 3968175 - DNA, 25 bp, Homo sapien
actgccccatctaccatagaataaa

SEQ ID NO: 3968176 - DNA, 25 bp, Homo sapien
gaaagatcggccaatactgccccat

SEQ ID NO: 3968177 - DNA, 25 bp, Homo sapien
tgtggttccagtgtccaagccctca

SEQ ID NO: 3968178 - DNA, 25 bp, Homo sapien
tgtacagcaattgaaagcagagtct

SEQ ID NO: 3968179 - DNA, 25 bp, Homo sapien
taaaagaccaaagtagactgtgact

SEQ ID NO: 3968180 - DNA, 25 bp, Homo sapien
tctaactttgaacataaaagaccaa

SEQ ID NO: 3968181 - DNA, 25 bp, Homo sapien
ttggggataaactcatagttctctg

SEQ ID NO: 3968182 - DNA, 25 bp, Homo sapien
gcttgcattctgtgactctacaaca

SEQ ID NO: 3968183 - DNA, 25 bp, Homo sapien
tctccctgcagcgacctctgaaatg

SEQ ID NO: 3968184 - DNA, 25 bp, Homo sapien
catccttttggttggctaaggacat

SEQ ID NO: 3968185 - DNA, 25 bp, Homo sapien
tcgctatggcccagatgtcatcctt

SEQ ID NO: 3968186 - DNA, 25 bp, Homo sapien
attaattctgactgtttaaaagagc

SEQ ID NO: 3968187 - DNA, 25 bp, Homo sapien
tagaacttgaaagtgccaacggtag

SEQ ID NO: 3968188 - DNA, 25 bp, Homo sapien
aatagaacttgaaagtgccaacggt

SEQ ID NO: 3968189 - DNA, 25 bp, Homo sapien
agaacttgaaagtgccaacggtagt

SEQ ID NO: 3968190 - DNA, 25 bp, Homo sapien
tcaatagaacttgaaagtgccaacg

SEQ ID NO: 3968191 - DNA, 25 bp, Homo sapien
ctggaagatgcggtcaagataagct

SEQ ID NO: 3968192 - DNA, 25 bp, Homo sapien
gagacactggaagatgcggtcaaga

SEQ ID NO: 3968193 - DNA, 25 bp, Homo sapien
caagataagctgtcggtggaatgtg

SEQ ID NO: 3968194 - DNA, 25 bp, Homo sapien
gaagatgcggtcaagataagctgtc

SEQ ID NO: 3968195 - DNA, 25 bp, Homo sapien
agcaccaggctccattgaagcagaa

SEQ ID NO: 3968196 - DNA, 25 bp, Homo sapien
gggagtgccaacaacatgagttcag

SEQ ID NO: 3968197 - DNA, 25 bp, Homo sapien
ctcgactgctcagggagtgccaaca

SEQ ID NO: 3968198 - DNA, 25 bp, Homo sapien
tgcccctctcgactgctcagggagt

SEQ ID NO: 3968199 - DNA, 25 bp, Homo sapien
tgccaacaacatgagttcagctgac

SEQ ID NO: 3968200 - DNA, 25 bp, Homo sapien
gagatggattactccaagccccgtg

SEQ ID NO: 3968201 - DNA, 25 bp, Homo sapien
gaaaagtcagctgcaggtggcgtct

SEQ ID NO: 3968202 - DNA, 25 bp, Homo sapien
tctggccttcgagcggcagagattc

SEQ ID NO: 3968203 - DNA, 25 bp, Homo sapien
ggctcagtgcttcccgagatggatt

SEQ ID NO: 3968204 - DNA, 25 bp, Homo sapien
ctgcagggagtagtgtctagcaaga

SEQ ID NO: 3968205 - DNA, 25 bp, Homo sapien
tagtgtctagcaagaactccatccc

SEQ ID NO: 3968206 - DNA, 25 bp, Homo sapien
tagcaagaactccatccctgttcat

SEQ ID NO: 3968207 - DNA, 25 bp, Homo sapien
tgtccccacgggtaggggctcctgc

SEQ ID NO: 3968208 - DNA, 25 bp, Homo sapien
gcccaccagtaaggagtgaggaaca

SEQ ID NO: 3968209 - DNA, 25 bp, Homo sapien
cccatggatacagcaaccatatagt

SEQ ID NO: 3968210 - DNA, 25 bp, Homo sapien
tatgggcataggattagcccaccag

SEQ ID NO: 3968211 - DNA, 25 bp, Homo sapien
caaagagggcattgttaataattac

SEQ ID NO: 3968212 - DNA, 25 bp, Homo sapien
gtccacttgcgttctttcctttctg

SEQ ID NO: 3968213 - DNA, 25 bp, Homo sapien
ctatgtaggttgggaactttcagca

SEQ ID NO: 3968214 - DNA, 25 bp, Homo sapien
ggtgtgtccacttgcgttctttcct

SEQ ID NO: 3968215 - DNA, 25 bp, Homo sapien
gagggtgtgtccacttgcgttcttt

SEQ ID NO: 3968216 - DNA, 25 bp, Homo sapien
ggtcttgggcgtcaatcagtttcac

SEQ ID NO: 3968217 - DNA, 25 bp, Homo sapien
aaggacacggacatcatcagcaggc

SEQ ID NO: 3968218 - DNA, 25 bp, Homo sapien
catatcatgcatccaaaggacacgg

SEQ ID NO: 3968219 - DNA, 25 bp, Homo sapien
tcagcaggcacacgtttaccaccgt

SEQ ID NO: 3968220 - DNA, 25 bp, Homo sapien
gacagtttttcactaccggatgcca

SEQ ID NO: 3968221 - DNA, 25 bp, Homo sapien
taaccattaccagtcagtagggcca

SEQ ID NO: 3968222 - DNA, 25 bp, Homo sapien
tccagaaggaagactcgaagccatc

SEQ ID NO: 3968223 - DNA, 25 bp, Homo sapien
cacaactcgagtgggtaccagtcac

SEQ ID NO: 3968224 - DNA, 25 bp, Homo sapien
aacagctgtacctgtgagaggcagg

SEQ ID NO: 3968225 - DNA, 25 bp, Homo sapien
agctgtacctgtgagaggcaggtat

SEQ ID NO: 3968226 - DNA, 25 bp, Homo sapien
cagctgtacctgtgagaggcaggta

SEQ ID NO: 3968227 - DNA, 25 bp, Homo sapien
gaaacagctgtacctgtgagaggca

SEQ ID NO: 3968228 - DNA, 25 bp, Homo sapien
gcagcactaagtataccatgtaaga

SEQ ID NO: 3968229 - DNA, 25 bp, Homo sapien
catgtaagattcagttccagaacac

SEQ ID NO: 3968230 - DNA, 25 bp, Homo sapien
ggtggacgaggtacagacataaaac

SEQ ID NO: 3968231 - DNA, 25 bp, Homo sapien
caatggcacttgtttatatgagcaa

SEQ ID NO: 3968232 - DNA, 25 bp, Homo sapien
catttgccagcagtgccacacgtta

SEQ ID NO: 3968233 - DNA, 25 bp, Homo sapien
cagagctgggaagatcacagatcca

SEQ ID NO: 3968234 - DNA, 25 bp, Homo sapien
tgcgatggcaccttcaactcttgag

SEQ ID NO: 3968235 - DNA, 25 bp, Homo sapien
ccaggagatcacttcgggacagggc

SEQ ID NO: 3968236 - DNA, 25 bp, Homo sapien
gaggtagaaaagtgctgctcagttc

SEQ ID NO: 3968237 - DNA, 25 bp, Homo sapien
cggttgcattgaggtagaaaagtgc

SEQ ID NO: 3968238 - DNA, 25 bp, Homo sapien
ttctagaagtttttgtcggttgcat

SEQ ID NO: 3968239 - DNA, 25 bp, Homo sapien
ttttgtcggttgcattgaggtagaa

SEQ ID NO: 3968240 - DNA, 25 bp, Homo sapien
gtcacaaacagtccctcacaaaagg

SEQ ID NO: 3968241 - DNA, 25 bp, Homo sapien
gcaccttgaaacatattgataccag

SEQ ID NO: 3968242 - DNA, 25 bp, Homo sapien
taattaagagccaagattgtggtcc

SEQ ID NO: 3968243 - DNA, 25 bp, Homo sapien
caaaaggccgctagtatctctatag

SEQ ID NO: 3968244 - DNA, 25 bp, Homo sapien
acaagacaatatgtggcactctcag

SEQ ID NO: 3968245 - DNA, 25 bp, Homo sapien
caatatccttaaacattttcacagc

SEQ ID NO: 3968246 - DNA, 25 bp, Homo sapien
tcttcacaagacaatatgtggcact

SEQ ID NO: 3968247 - DNA, 25 bp, Homo sapien
acagcattcttcacaagacaatatg

SEQ ID NO: 3968248 - DNA, 25 bp, Homo sapien
gaaagcacaggcctcgaggttagga

SEQ ID NO: 3968249 - DNA, 25 bp, Homo sapien
taccaaagccgaatatacccagagc

SEQ ID NO: 3968250 - DNA, 25 bp, Homo sapien
gattgtacatcagtggaaccagaga

SEQ ID NO: 3968251 - DNA, 25 bp, Homo sapien
aaacaaagaagacggagcgctggcc

SEQ ID NO: 3968252 - DNA, 25 bp, Homo sapien
tattaggtatttgtgcaacttttgc

SEQ ID NO: 3968253 - DNA, 25 bp, Homo sapien
ccaaggagtctctgtaagaaggtga

SEQ ID NO: 3968254 - DNA, 25 bp, Homo sapien
agagctgtaggcctccagcaaaggc

SEQ ID NO: 3968255 - DNA, 25 bp, Homo sapien
tactcaggttctggaacaggaccac

SEQ ID NO: 3968256 - DNA, 25 bp, Homo sapien
tagcaaaactgctgcctcatgaggg

SEQ ID NO: 3968257 - DNA, 25 bp, Homo sapien
tgaatgccctacttgtgatacgctg

SEQ ID NO: 3968258 - DNA, 25 bp, Homo sapien
ccagtaacgtgagaagatggccact

SEQ ID NO: 3968259 - DNA, 25 bp, Homo sapien
tgctttatggccgagaggctctcac

SEQ ID NO: 3968260 - DNA, 25 bp, Homo sapien
cactgctgctcagcaagactaggac

SEQ ID NO: 3968261 - DNA, 25 bp, Homo sapien
tcaggtagcaatctcgctgttcctc

SEQ ID NO: 3968262 - DNA, 25 bp, Homo sapien
tcatcacttctccaagacaaaggtt

SEQ ID NO: 3968263 - DNA, 25 bp, Homo sapien
gactgatatcttcctggtcatcgtg

SEQ ID NO: 3968264 - DNA, 25 bp, Homo sapien
ctggataaactttcctactgtttca

SEQ ID NO: 3968265 - DNA, 25 bp, Homo sapien
tgtaagaatgccatactggataaac

SEQ ID NO: 3968266 - DNA, 25 bp, Homo sapien
taagaatgccatactggataaactt

SEQ ID NO: 3968267 - DNA, 25 bp, Homo sapien
gtaagaatgccatactggataaact

SEQ ID NO: 3968268 - DNA, 25 bp, Homo sapien
atggtgccttcattggagagaaggt

SEQ ID NO: 3968269 - DNA, 25 bp, Homo sapien
ttcattggagagaaggtagcacagg

SEQ ID NO: 3968270 - DNA, 25 bp, Homo sapien
ccttcattggagagaaggtagcaca

SEQ ID NO: 3968271 - DNA, 25 bp, Homo sapien
tgccttcattggagagaaggtagca

SEQ ID NO: 3968272 - DNA, 25 bp, Homo sapien
caggtcaaaatcacgagccaggact

SEQ ID NO: 3968273 - DNA, 25 bp, Homo sapien
aactcatcgttcctgctagtgtggg

SEQ ID NO: 3968274 - DNA, 25 bp, Homo sapien
taaagacatgaagtaccccattgct

SEQ ID NO: 3968275 - DNA, 25 bp, Homo sapien
caaagaagtcttcgaccaatgtgga

SEQ ID NO: 3968276 - DNA, 25 bp, Homo sapien
tgtgtggacataatggcacaggact

SEQ ID NO: 3968277 - DNA, 25 bp, Homo sapien
tgtgtgtggacataatggcacagga

SEQ ID NO: 3968278 - DNA, 25 bp, Homo sapien
gtgtggacataatggcacaggactt

SEQ ID NO: 3968279 - DNA, 25 bp, Homo sapien
atgtgtgtggacataatggcacagg

SEQ ID NO: 3968280 - DNA, 25 bp, Homo sapien
atttctggactcattaatggacgtg

SEQ ID NO: 3968281 - DNA, 25 bp, Homo sapien
ttgcaatcaacctccttcgtaggga

SEQ ID NO: 3968282 - DNA, 25 bp, Homo sapien
cattaatggacgtgtctctaccttc

SEQ ID NO: 3968283 - DNA, 25 bp, Homo sapien
acctccttcgtagggattcatctgt

SEQ ID NO: 3968284 - DNA, 25 bp, Homo sapien
cagacaccggtttctgactttggct

SEQ ID NO: 3968285 - DNA, 25 bp, Homo sapien
cttgaaggaagtatagctggtaaca

SEQ ID NO: 3968286 - DNA, 25 bp, Homo sapien
ggtaacaacgcttgctccagggaaa

SEQ ID NO: 3968287 - DNA, 25 bp, Homo sapien
tccagggaaagtagagcagacaccg

SEQ ID NO: 3968288 - DNA, 25 bp, Homo sapien
taaattactgctaactataatttcc

SEQ ID NO: 3968289 - DNA, 25 bp, Homo sapien
tccactcggacacaaccatagtttt

SEQ ID NO: 3968290 - DNA, 25 bp, Homo sapien
tccacaggctctcattcttcttagg

SEQ ID NO: 3968291 - DNA, 25 bp, Homo sapien
taaggaaaatggctgtgcaaaatcc

SEQ ID NO: 3968292 - DNA, 25 bp, Homo sapien
taataacacctcttgctacactcca

SEQ ID NO: 3968293 - DNA, 25 bp, Homo sapien
cactcctagaacgtgtgccttccag

SEQ ID NO: 3968294 - DNA, 25 bp, Homo sapien
aactgacaaaagtcctgcccgagca

SEQ ID NO: 3968295 - DNA, 25 bp, Homo sapien
ccaagaattgctgctgtcgaagtaa

SEQ ID NO: 3968296 - DNA, 25 bp, Homo sapien
gataatgcgatcataggagattcca

SEQ ID NO: 3968297 - DNA, 25 bp, Homo sapien
gaagcccccaagcttatggatcaag

SEQ ID NO: 3968298 - DNA, 25 bp, Homo sapien
gaacatctttccgtccatctggtgt

SEQ ID NO: 3968299 - DNA, 25 bp, Homo sapien
agccttcgtcgtatgaagaagcccc

SEQ ID NO: 3968300 - DNA, 25 bp, Homo sapien
catctggtgtttcatcgagccttcg

SEQ ID NO: 3968301 - DNA, 25 bp, Homo sapien
tgggatctatgaactggtagaaaca

SEQ ID NO: 3968302 - DNA, 25 bp, Homo sapien
agattgggatgttgagattattgcc

SEQ ID NO: 3968303 - DNA, 25 bp, Homo sapien
agtgagcagcagatagtcaatatgg

SEQ ID NO: 3968304 - DNA, 25 bp, Homo sapien
gatgttgagattattgcctgaagca

SEQ ID NO: 3968305 - DNA, 25 bp, Homo sapien
gctagagtcactcaaacactggcta

SEQ ID NO: 3968306 - DNA, 25 bp, Homo sapien
tgacctataccctttctgagaagca

SEQ ID NO: 3968307 - DNA, 25 bp, Homo sapien
aattcaatcacactttgcaactgca

SEQ ID NO: 3968308 - DNA, 25 bp, Homo sapien
gaagaagagcaatcaagagttccag

SEQ ID NO: 3968309 - DNA, 25 bp, Homo sapien
ttccaaaagaagctgttgaacagtt

SEQ ID NO: 3968310 - DNA, 25 bp, Homo sapien
tccaaaagaagctgttgaacagttt

SEQ ID NO: 3968311 - DNA, 25 bp, Homo sapien
caaaagaagctgttgaacagtttta

SEQ ID NO: 3968312 - DNA, 25 bp, Homo sapien
ccaaaagaagctgttgaacagtttt

SEQ ID NO: 3968313 - DNA, 25 bp, Homo sapien
tttgttaacggcttttgattgctgc

SEQ ID NO: 3968314 - DNA, 25 bp, Homo sapien
tgatcattgccggtgagacagtggc

SEQ ID NO: 3968315 - DNA, 25 bp, Homo sapien
gctgggcagaaccatcagggtttaa

SEQ ID NO: 3968316 - DNA, 25 bp, Homo sapien
cagtggcaaccatttcttgaagaat

SEQ ID NO: 3968317 - DNA, 25 bp, Homo sapien
atgcacatctcgctcttgaataaaa

SEQ ID NO: 3968318 - DNA, 25 bp, Homo sapien
gaaaggcgtcttgcaagccatccgc

SEQ ID NO: 3968319 - DNA, 25 bp, Homo sapien
ggcaaacatgcccttatgcacatct

SEQ ID NO: 3968320 - DNA, 25 bp, Homo sapien
attttcagtcacattggtggcaaac

SEQ ID NO: 3968321 - DNA, 25 bp, Homo sapien
ataacattccgcaaacccaaagacg

SEQ ID NO: 3968322 - DNA, 25 bp, Homo sapien
cgcaaacccaaagacgggatactgg

SEQ ID NO: 3968323 - DNA, 25 bp, Homo sapien
cattccgcaaacccaaagacgggat

SEQ ID NO: 3968324 - DNA, 25 bp, Homo sapien
ccgcaaacccaaagacgggatactg

SEQ ID NO: 3968325 - DNA, 25 bp, Homo sapien
taaacccctttataccagactcaga

SEQ ID NO: 3968326 - DNA, 25 bp, Homo sapien
taacataaactgcttgggttccaca

SEQ ID NO: 3968327 - DNA, 25 bp, Homo sapien
ttacctagccacacaagttacaagc

SEQ ID NO: 3968328 - DNA, 25 bp, Homo sapien
ccatcaggtactatagtagggcaaa

SEQ ID NO: 3968329 - DNA, 25 bp, Homo sapien
cttttccgactcattaggctttctt

SEQ ID NO: 3968330 - DNA, 25 bp, Homo sapien
tgaagatggtgggtctaaagccaca

SEQ ID NO: 3968331 - DNA, 25 bp, Homo sapien
ccaacaaatggccttttccgactca

SEQ ID NO: 3968332 - DNA, 25 bp, Homo sapien
gggagtgcaggagtaacaacatctt

SEQ ID NO: 3968333 - DNA, 25 bp, Homo sapien
catcgaccaacactgtattctgatg

SEQ ID NO: 3968334 - DNA, 25 bp, Homo sapien
tgtgcttacatcgaccaacactgta

SEQ ID NO: 3968335 - DNA, 25 bp, Homo sapien
tattctgatgaatgtggcagataag

SEQ ID NO: 3968336 - DNA, 25 bp, Homo sapien
ctcacttgtgtgcttacatcgacca

SEQ ID NO: 3968337 - DNA, 25 bp, Homo sapien
cacaaagtgtaattcccaaatcatg

SEQ ID NO: 3968338 - DNA, 25 bp, Homo sapien
gtcacaaagtgtaattcccaaatca

SEQ ID NO: 3968339 - DNA, 25 bp, Homo sapien
tcacaaagtgtaattcccaaatcat

SEQ ID NO: 3968340 - DNA, 25 bp, Homo sapien
caaagtgtaattcccaaatcatgtg

SEQ ID NO: 3968341 - DNA, 25 bp, Homo sapien
cagtttcgggtgcagaatgtccata

SEQ ID NO: 3968342 - DNA, 25 bp, Homo sapien
tcaggactcagctatcagtttcggg

SEQ ID NO: 3968343 - DNA, 25 bp, Homo sapien
acataaaacttcaggactcagctat

SEQ ID NO: 3968344 - DNA, 25 bp, Homo sapien
tgtccatacaacaggggagccgctg

SEQ ID NO: 3968345 - DNA, 25 bp, Homo sapien
tgcagaagcccgcacttccagtccc

SEQ ID NO: 3968346 - DNA, 25 bp, Homo sapien
ctgatgacgcaaccggcgcgtggca

SEQ ID NO: 3968347 - DNA, 25 bp, Homo sapien
tccagtcccggccaatgccagctgc

SEQ ID NO: 3968348 - DNA, 25 bp, Homo sapien
gctgcagtggcgcaccctgatgacg

SEQ ID NO: 3968349 - DNA, 25 bp, Homo sapien
caatgttgtcttctgttactctcgg

SEQ ID NO: 3968350 - DNA, 25 bp, Homo sapien
acattcctgattgtcactatgtagg

SEQ ID NO: 3968351 - DNA, 25 bp, Homo sapien
tgtgtaagccattacaatgttgtct

SEQ ID NO: 3968352 - DNA, 25 bp, Homo sapien
tactctcgggtaacattcctgattg

SEQ ID NO: 3968353 - DNA, 25 bp, Homo sapien
caggtgttgacagagccaagagcca

SEQ ID NO: 3968354 - DNA, 25 bp, Homo sapien
taaattggccgcagagaatctaggt

SEQ ID NO: 3968355 - DNA, 25 bp, Homo sapien
taatcacctgtgtcagtcatggcgc

SEQ ID NO: 3968356 - DNA, 25 bp, Homo sapien
cctcataggctacaactgggaccaa

SEQ ID NO: 3968357 - DNA, 25 bp, Homo sapien
cagatcatagctggtaaaaggtgta

SEQ ID NO: 3968358 - DNA, 25 bp, Homo sapien
tcagcatgtttttcgtttccaggta

SEQ ID NO: 3968359 - DNA, 25 bp, Homo sapien
tttggcatctgggaacagttcgatt

SEQ ID NO: 3968360 - DNA, 25 bp, Homo sapien
tttccaggtataaacgtgcatagtt

SEQ ID NO: 3968361 - DNA, 25 bp, Homo sapien
gcgcccagccacctggagggcatta

SEQ ID NO: 3968362 - DNA, 25 bp, Homo sapien
acttatatgtgggatacagaaatgt

SEQ ID NO: 3968363 - DNA, 25 bp, Homo sapien
tatgtgggatacagaaatgttgaac

SEQ ID NO: 3968364 - DNA, 25 bp, Homo sapien
tatatgtgggatacagaaatgttga

SEQ ID NO: 3968365 - DNA, 25 bp, Homo sapien
caccactctgaagatcaacttttat

SEQ ID NO: 3968366 - DNA, 25 bp, Homo sapien
aagctggtgacctgaattaacacca

SEQ ID NO: 3968367 - DNA, 25 bp, Homo sapien
gcagtctctaagctgcatctaagtg

SEQ ID NO: 3968368 - DNA, 25 bp, Homo sapien
tttgcagcagtctctaagctgcatc

SEQ ID NO: 3968369 - DNA, 25 bp, Homo sapien
tgggggaccactgagcaaaagttca

SEQ ID NO: 3968370 - DNA, 25 bp, Homo sapien
tccaaggggagcctgatgggagtca

SEQ ID NO: 3968371 - DNA, 25 bp, Homo sapien
cctgggggaccactgagcaaaagtt

SEQ ID NO: 3968372 - DNA, 25 bp, Homo sapien
gggagcctgatgggagtcagaattg

SEQ ID NO: 3968373 - DNA, 25 bp, Homo sapien
ccaggggagtgaatactgggatcca

SEQ ID NO: 3968374 - DNA, 25 bp, Homo sapien
tgaccccaggggagtgaatactggg

SEQ ID NO: 3968375 - DNA, 25 bp, Homo sapien
ttcccataggagtgaccccagggga

SEQ ID NO: 3968376 - DNA, 25 bp, Homo sapien
accccaggggagtgaatactgggat

SEQ ID NO: 3968377 - DNA, 25 bp, Homo sapien
taaaaacattcttttccactcaata

SEQ ID NO: 3968378 - DNA, 25 bp, Homo sapien
aacattcttttccactcaatactaa

SEQ ID NO: 3968379 - DNA, 25 bp, Homo sapien
cattcttttccactcaatactaaaa

SEQ ID NO: 3968380 - DNA, 25 bp, Homo sapien
aaaacattcttttccactcaatact

SEQ ID NO: 3968381 - DNA, 25 bp, Homo sapien
tccaatcagtcgattagcaaagctg

SEQ ID NO: 3968382 - DNA, 25 bp, Homo sapien
gaataagcaaggtctggttcctctg

SEQ ID NO: 3968383 - DNA, 25 bp, Homo sapien
gacagactttgggtgctccacagta

SEQ ID NO: 3968384 - DNA, 25 bp, Homo sapien
tttgcacggccagaggctgacagac

SEQ ID NO: 3968385 - DNA, 25 bp, Homo sapien
caagaagacggccccttgagtaact

SEQ ID NO: 3968386 - DNA, 25 bp, Homo sapien
tgtgaggtccaaagcccactaggcc

SEQ ID NO: 3968387 - DNA, 25 bp, Homo sapien
gtgaggtccaaagcccactaggcct

SEQ ID NO: 3968388 - DNA, 25 bp, Homo sapien
tgaagccaagaagacggccccttga

SEQ ID NO: 3968389 - DNA, 25 bp, Homo sapien
ttagctctcagggtagagaagagag

SEQ ID NO: 3968390 - DNA, 25 bp, Homo sapien
tagctctcagggtagagaagagagt

SEQ ID NO: 3968391 - DNA, 25 bp, Homo sapien
gaagagagtaaagaatgaagtccag

SEQ ID NO: 3968392 - DNA, 25 bp, Homo sapien
tagagaagagagtaaagaatgaagt

SEQ ID NO: 3968393 - DNA, 25 bp, Homo sapien
acagcttcacaagacaacggcgttc

SEQ ID NO: 3968394 - DNA, 25 bp, Homo sapien
aagccagcagtgcctacagcttcac

SEQ ID NO: 3968395 - DNA, 25 bp, Homo sapien
aagacaacggcgttcccactctgct

SEQ ID NO: 3968396 - DNA, 25 bp, Homo sapien
ccactctgctgggagcttgacatgc

SEQ ID NO: 3968397 - DNA, 25 bp, Homo sapien
tacagcatgtttcagacattgcctg

SEQ ID NO: 3968398 - DNA, 25 bp, Homo sapien
cattgcctgtgcattgcttccttct

SEQ ID NO: 3968399 - DNA, 25 bp, Homo sapien
gaagtacccagtgaacatgaccaaa

SEQ ID NO: 3968400 - DNA, 25 bp, Homo sapien
cactggcgaacgaatacagcatgtt

SEQ ID NO: 3968401 - DNA, 25 bp, Homo sapien
ttccatgtaaaagagacattgccca

SEQ ID NO: 3968402 - DNA, 25 bp, Homo sapien
gacttattactagcttgggcccctc

SEQ ID NO: 3968403 - DNA, 25 bp, Homo sapien
tcttcttagaagtaggatccacagc

SEQ ID NO: 3968404 - DNA, 25 bp, Homo sapien
agcgttggcctgacttattactagc

SEQ ID NO: 3968405 - DNA, 25 bp, Homo sapien
cacttatttgttgtggtccacctcc

SEQ ID NO: 3968406 - DNA, 25 bp, Homo sapien
ccacctccctcagttaggaaggtct

SEQ ID NO: 3968407 - DNA, 25 bp, Homo sapien
tatttcacttatttgttgtggtcca

SEQ ID NO: 3968408 - DNA, 25 bp, Homo sapien
cacctccctcagttaggaaggtctt

SEQ ID NO: 3968409 - DNA, 25 bp, Homo sapien
ggcacaggaaccaacagcacgaagt

SEQ ID NO: 3968410 - DNA, 25 bp, Homo sapien
agcccaccagttgccctccctgctt

SEQ ID NO: 3968411 - DNA, 25 bp, Homo sapien
gcacgaagttggcctcagcttcacc

SEQ ID NO: 3968412 - DNA, 25 bp, Homo sapien
tgagcaccacccgagcccaccagtt

SEQ ID NO: 3968413 - DNA, 25 bp, Homo sapien
cagccataaatggatttcctgtcaa

SEQ ID NO: 3968414 - DNA, 25 bp, Homo sapien
cttggaggcgtccacacagccataa

SEQ ID NO: 3968415 - DNA, 25 bp, Homo sapien
gccataaatggatttcctgtcaatt

SEQ ID NO: 3968416 - DNA, 25 bp, Homo sapien
gtccacacagccataaatggatttc

SEQ ID NO: 3968417 - DNA, 25 bp, Homo sapien
gcaacataaacttactgctcatatt

SEQ ID NO: 3968418 - DNA, 25 bp, Homo sapien
ttagtctttaaaggcagttggagtg

SEQ ID NO: 3968419 - DNA, 25 bp, Homo sapien
ctttccataatcaaaactattgctc

SEQ ID NO: 3968420 - DNA, 25 bp, Homo sapien
taccatgtgaagaaagcttgcaaca

SEQ ID NO: 3968421 - DNA, 25 bp, Homo sapien
aagcattctgatggtccctttttcc

SEQ ID NO: 3968422 - DNA, 25 bp, Homo sapien
ccaagtgagacctgaaggatagtgt

SEQ ID NO: 3968423 - DNA, 25 bp, Homo sapien
acaatctccaagtgagacctgaagg

SEQ ID NO: 3968424 - DNA, 25 bp, Homo sapien
tgagacctgaaggatagtgtgacat

SEQ ID NO: 3968425 - DNA, 25 bp, Homo sapien
gacctgaaggatagtgtgacatgaa

SEQ ID NO: 3968426 - DNA, 25 bp, Homo sapien
acataacttacataagcacatgggc

SEQ ID NO: 3968427 - DNA, 25 bp, Homo sapien
cataacttacataagcacatgggct

SEQ ID NO: 3968428 - DNA, 25 bp, Homo sapien
taacttacataagcacatgggctag

SEQ ID NO: 3968429 - DNA, 25 bp, Homo sapien
aacttacataagcacatgggctagg

SEQ ID NO: 3968430 - DNA, 25 bp, Homo sapien
tgtgtaccccagaatggcacagagt

SEQ ID NO: 3968431 - DNA, 25 bp, Homo sapien
gatggactgcttagttactgctacg

SEQ ID NO: 3968432 - DNA, 25 bp, Homo sapien
tagactgcaagccaaagatcaaggg

SEQ ID NO: 3968433 - DNA, 25 bp, Homo sapien
ggagcgaagcctaccacaatgaaaa

SEQ ID NO: 3968434 - DNA, 25 bp, Homo sapien
cttgcacaagaaagacaggcttcat

SEQ ID NO: 3968435 - DNA, 25 bp, Homo sapien
tatctggcagctagggcagttgcac

SEQ ID NO: 3968436 - DNA, 25 bp, Homo sapien
tgctgtcagatatgagctcctatct

SEQ ID NO: 3968437 - DNA, 25 bp, Homo sapien
caaattctcaagttaatgggctgta

SEQ ID NO: 3968438 - DNA, 25 bp, Homo sapien
tgggatatcgactgcatcttgaaga

SEQ ID NO: 3968439 - DNA, 25 bp, Homo sapien
ccaaagactttcatgtgactccaca

SEQ ID NO: 3968440 - DNA, 25 bp, Homo sapien
ccagaaccacacctcttaaatggga

SEQ ID NO: 3968441 - DNA, 25 bp, Homo sapien
tgggagactggatcaatgccccaga

SEQ ID NO: 3968442 - DNA, 25 bp, Homo sapien
tcctcagtaaattcgggagtggaag

SEQ ID NO: 3968443 - DNA, 25 bp, Homo sapien
ttcctcagtaaattcgggagtggaa

SEQ ID NO: 3968444 - DNA, 25 bp, Homo sapien
tttcctcagtaaattcgggagtgga

SEQ ID NO: 3968445 - DNA, 25 bp, Homo sapien
tcccaatgccaccagggtgcttgca

SEQ ID NO: 3968446 - DNA, 25 bp, Homo sapien
ccaatgccaccagggtgcttgcagt

SEQ ID NO: 3968447 - DNA, 25 bp, Homo sapien
ctctctttagcaaatcgtaccctcc

SEQ ID NO: 3968448 - DNA, 25 bp, Homo sapien
tttagcaaatcgtaccctcccaatg

SEQ ID NO: 3968449 - DNA, 25 bp, Homo sapien
tctccaaatagacagtatctggaca

SEQ ID NO: 3968450 - DNA, 25 bp, Homo sapien
gtgtctccaaatagacagtatctgg

SEQ ID NO: 3968451 - DNA, 25 bp, Homo sapien
gttgacagtgtctccaaatagacag

SEQ ID NO: 3968452 - DNA, 25 bp, Homo sapien
ccatgttgacagtgtctccaaatag

SEQ ID NO: 3968453 - DNA, 25 bp, Homo sapien
tccccagcacaccagccaccacagg

SEQ ID NO: 3968454 - DNA, 25 bp, Homo sapien
ggtaatccccagcacaccagccacc

SEQ ID NO: 3968455 - DNA, 25 bp, Homo sapien
cccagcacaccagccaccacaggac

SEQ ID NO: 3968456 - DNA, 25 bp, Homo sapien
aatccccagcacaccagccaccaca

SEQ ID NO: 3968457 - DNA, 25 bp, Homo sapien
ccatcaggccatcagttttgtctac

SEQ ID NO: 3968458 - DNA, 25 bp, Homo sapien
ggaccatcaggccatcagttttgtc

SEQ ID NO: 3968459 - DNA, 25 bp, Homo sapien
tggaccatcaggccatcagttttgt

SEQ ID NO: 3968460 - DNA, 25 bp, Homo sapien
accatcaggccatcagttttgtcta

SEQ ID NO: 3968461 - DNA, 25 bp, Homo sapien
tgtagaggccaatacgaagctggag

SEQ ID NO: 3968462 - DNA, 25 bp, Homo sapien
ctgtgtagaggccaatacgaagctg

SEQ ID NO: 3968463 - DNA, 25 bp, Homo sapien
caatacgaagctggagcttctcctg

SEQ ID NO: 3968464 - DNA, 25 bp, Homo sapien
gaggccaatacgaagctggagcttc

SEQ ID NO: 3968465 - DNA, 25 bp, Homo sapien
ggcttccattgtggtagggagtcca

SEQ ID NO: 3968466 - DNA, 25 bp, Homo sapien
tggcttccattgtggtagggagtcc

SEQ ID NO: 3968467 - DNA, 25 bp, Homo sapien
caccatgtatgcatctccaatggtc

SEQ ID NO: 3968468 - DNA, 25 bp, Homo sapien
catgtatgcatctccaatggtctca

SEQ ID NO: 3968469 - DNA, 25 bp, Homo sapien
tgtatgcatctccaatggtctcaac

SEQ ID NO: 3968470 - DNA, 25 bp, Homo sapien
tagccaccatgtatgcatctccaat

SEQ ID NO: 3968471 - DNA, 25 bp, Homo sapien
aaaatattgagtttctgccgtgaag

SEQ ID NO: 3968472 - DNA, 25 bp, Homo sapien
cctgcaaggagcacacgtgatcgca

SEQ ID NO: 3968473 - DNA, 25 bp, Homo sapien
attctccatcatgccccggagacag

SEQ ID NO: 3968474 - DNA, 25 bp, Homo sapien
agtgacatagactgaaatggagctt

SEQ ID NO: 3968475 - DNA, 25 bp, Homo sapien
taaactgtacacgtcattgaggagc

SEQ ID NO: 3968476 - DNA, 25 bp, Homo sapien
gatgatgtgatcgaataaactgtac

SEQ ID NO: 3968477 - DNA, 25 bp, Homo sapien
gaccttccggctagtagttgttctc

SEQ ID NO: 3968478 - DNA, 25 bp, Homo sapien
atgttctggttccacggaccttccg

SEQ ID NO: 3968479 - DNA, 25 bp, Homo sapien
catcacactggccagtatgctcaca

SEQ ID NO: 3968480 - DNA, 25 bp, Homo sapien
tggcatacacttccagcttgctcat

SEQ ID NO: 3968481 - DNA, 25 bp, Homo sapien
gcatacacttccagcttgctcatca

SEQ ID NO: 3968482 - DNA, 25 bp, Homo sapien
tgctcatcacactggccagtatgct

SEQ ID NO: 3968483 - DNA, 25 bp, Homo sapien
cctctgggactggcctctcgtaaag

SEQ ID NO: 3968484 - DNA, 25 bp, Homo sapien
ctgggactggcctctcgtaaagttt

SEQ ID NO: 3968485 - DNA, 25 bp, Homo sapien
cagggtctttgatttggttgatgat

SEQ ID NO: 3968486 - DNA, 25 bp, Homo sapien
ctgcagggtctttgatttggttgat

SEQ ID NO: 3968487 - DNA, 25 bp, Homo sapien
gaccagggcatctccgggaactgca

SEQ ID NO: 3968488 - DNA, 25 bp, Homo sapien
catccggtgcctcgtggaggtcatc

SEQ ID NO: 3968489 - DNA, 25 bp, Homo sapien
gatcagctccctcatcagaatggcg

SEQ ID NO: 3968490 - DNA, 25 bp, Homo sapien
ggcccgtggtcccaatggtagatca

SEQ ID NO: 3968491 - DNA, 25 bp, Homo sapien
aaaagaatgggatgtccgcatggag

SEQ ID NO: 3968492 - DNA, 25 bp, Homo sapien
aaagaatgggatgtccgcatggagt

SEQ ID NO: 3968493 - DNA, 25 bp, Homo sapien
aatgggatgtccgcatggagtgagg

SEQ ID NO: 3968494 - DNA, 25 bp, Homo sapien
gggatgtccgcatggagtgagggta

SEQ ID NO: 3968495 - DNA, 25 bp, Homo sapien
ctgccaggcaaaacaggaaaagcca

SEQ ID NO: 3968496 - DNA, 25 bp, Homo sapien
ccaggcaaaacaggaaaagccacct

SEQ ID NO: 3968497 - DNA, 25 bp, Homo sapien
gccaggcaaaacaggaaaagccacc

SEQ ID NO: 3968498 - DNA, 25 bp, Homo sapien
tgccaggcaaaacaggaaaagccac

SEQ ID NO: 3968499 - DNA, 25 bp, Homo sapien
tttttctcgttctcctcagttgaac

SEQ ID NO: 3968500 - DNA, 25 bp, Homo sapien
tctcctcagttgaacggaacagcca

SEQ ID NO: 3968501 - DNA, 25 bp, Homo sapien
gaacggaacagccacatatcatcag

SEQ ID NO: 3968502 - DNA, 25 bp, Homo sapien
catatcatcagctccagaggaaggc

SEQ ID NO: 3968503 - DNA, 25 bp, Homo sapien
cttgagttcccacagcccgaatcac

SEQ ID NO: 3968504 - DNA, 25 bp, Homo sapien
gtatttttagccatgcttgagttcc

SEQ ID NO: 3968505 - DNA, 25 bp, Homo sapien
cactgtctcatcatatgttctgtat

SEQ ID NO: 3968506 - DNA, 25 bp, Homo sapien
gtcactgtctcatcatatgttctgt

SEQ ID NO: 3968507 - DNA, 25 bp, Homo sapien
tgcagccgaccatccatcaggcagt

SEQ ID NO: 3968508 - DNA, 25 bp, Homo sapien
gcagccgaccatccatcaggcagtt

SEQ ID NO: 3968509 - DNA, 25 bp, Homo sapien
ctgcagccgaccatccatcaggcag

SEQ ID NO: 3968510 - DNA, 25 bp, Homo sapien
cagccgaccatccatcaggcagttg

SEQ ID NO: 3968511 - DNA, 25 bp, Homo sapien
gtgaaaatgagcaaatgaggcagac

SEQ ID NO: 3968512 - DNA, 25 bp, Homo sapien
gcaaatgaggcagaccaggtgctga

SEQ ID NO: 3968513 - DNA, 25 bp, Homo sapien
gaggcagaccaggtgctgataacac

SEQ ID NO: 3968514 - DNA, 25 bp, Homo sapien
tgctgataacactgctggaaggaac

SEQ ID NO: 3968515 - DNA, 25 bp, Homo sapien
ttactagcttactcttcacttccaa

SEQ ID NO: 3968516 - DNA, 25 bp, Homo sapien
ctagcttactcttcacttccaatat

SEQ ID NO: 3968517 - DNA, 25 bp, Homo sapien
tactagcttactcttcacttccaat

SEQ ID NO: 3968518 - DNA, 25 bp, Homo sapien
aggaggcagataattagagtccaga

SEQ ID NO: 3968519 - DNA, 25 bp, Homo sapien
tttgtcgcttctggtggtaaaagta

SEQ ID NO: 3968520 - DNA, 25 bp, Homo sapien
gtcactggctttgtcgcttctggtg

SEQ ID NO: 3968521 - DNA, 25 bp, Homo sapien
ctggctttgtcgcttctggtggtaa

SEQ ID NO: 3968522 - DNA, 25 bp, Homo sapien
tctggtggtaaaagtataggcagca

SEQ ID NO: 3968523 - DNA, 25 bp, Homo sapien
gcaacaggcaggaattggtctctct

SEQ ID NO: 3968524 - DNA, 25 bp, Homo sapien
ccagcccctaattggcttctagttg

SEQ ID NO: 3968525 - DNA, 25 bp, Homo sapien
tccaactccctctgaattacacgcc

SEQ ID NO: 3968526 - DNA, 25 bp, Homo sapien
ttctagttgtgagactgacttctcc

SEQ ID NO: 3968527 - DNA, 25 bp, Homo sapien
gagtttgaatatccaatccatttca

SEQ ID NO: 3968528 - DNA, 25 bp, Homo sapien
caatccatttcatgatccgagtttc

SEQ ID NO: 3968529 - DNA, 25 bp, Homo sapien
gaatatccaatccatttcatgatcc

SEQ ID NO: 3968530 - DNA, 25 bp, Homo sapien
ccatttcatgatccgagtttctcaa

SEQ ID NO: 3968531 - DNA, 25 bp, Homo sapien
ggtggttcggtgcaaataccaaaga

SEQ ID NO: 3968532 - DNA, 25 bp, Homo sapien
caatgcagatgttaggtggttcggt

SEQ ID NO: 3968533 - DNA, 25 bp, Homo sapien
gaagggaacaatgctctcgtgcctt

SEQ ID NO: 3968534 - DNA, 25 bp, Homo sapien
ccttttttgcaatactgggtgacaa

SEQ ID NO: 3968535 - DNA, 25 bp, Homo sapien
gcttctgcttggtcaccaacgtaac

SEQ ID NO: 3968536 - DNA, 25 bp, Homo sapien
acaatcggcttcctaacccaggctt

SEQ ID NO: 3968537 - DNA, 25 bp, Homo sapien
atttcctgtagcacaatcggcttcc

SEQ ID NO: 3968538 - DNA, 25 bp, Homo sapien
caacgtaacggatggccacatggtt

SEQ ID NO: 3968539 - DNA, 25 bp, Homo sapien
tggctcttgacaaaagagctgaggt

SEQ ID NO: 3968540 - DNA, 25 bp, Homo sapien
tcatcacactagatgagttactgtt

SEQ ID NO: 3968541 - DNA, 25 bp, Homo sapien
tactgttgatgccttttgacacagg

SEQ ID NO: 3968542 - DNA, 25 bp, Homo sapien
cctactgcggcatagaagagctctt

SEQ ID NO: 3968543 - DNA, 25 bp, Homo sapien
cagacctatgatggcagctcccaag

SEQ ID NO: 3968544 - DNA, 25 bp, Homo sapien
aattgatttgccaccagatgtcttt

SEQ ID NO: 3968545 - DNA, 25 bp, Homo sapien
ctgcatccttaaaatcagacctatg

SEQ ID NO: 3968546 - DNA, 25 bp, Homo sapien
tatcatcaaaattgatttgccacca

SEQ ID NO: 3968547 - DNA, 25 bp, Homo sapien
cagagctcattataaaatccacagc

SEQ ID NO: 3968548 - DNA, 25 bp, Homo sapien
gcagactgagtttcacagagctcat

SEQ ID NO: 3968549 - DNA, 25 bp, Homo sapien
aagcagactgagtttcacagagctc

SEQ ID NO: 3968550 - DNA, 25 bp, Homo sapien
ccgtaaaagcagactgagtttcaca

SEQ ID NO: 3968551 - DNA, 25 bp, Homo sapien
caggaagggagccatgcggccaggt

SEQ ID NO: 3968552 - DNA, 25 bp, Homo sapien
gagccatgcggccaggtcatattgg

SEQ ID NO: 3968553 - DNA, 25 bp, Homo sapien
catgcggccaggtcatattggagaa

SEQ ID NO: 3968554 - DNA, 25 bp, Homo sapien
ggccaggtcatattggagaaattcc

SEQ ID NO: 3968555 - DNA, 25 bp, Homo sapien
agaaatgtccggccagtatctgatt

SEQ ID NO: 3968556 - DNA, 25 bp, Homo sapien
gaaatgtccggccagtatctgatta

SEQ ID NO: 3968557 - DNA, 25 bp, Homo sapien
aaatgtccggccagtatctgattac

SEQ ID NO: 3968558 - DNA, 25 bp, Homo sapien
gcagaaatgtccggccagtatctga

SEQ ID NO: 3968559 - DNA, 25 bp, Homo sapien
agagtaatccatgtgcctttctccc

SEQ ID NO: 3968560 - DNA, 25 bp, Homo sapien
gcagggcatagacagagtaatccat

SEQ ID NO: 3968561 - DNA, 25 bp, Homo sapien
tttgataactgtcataatgaagaaa

SEQ ID NO: 3968562 - DNA, 25 bp, Homo sapien
catagacagagtaatccatgtgcct

SEQ ID NO: 3968563 - DNA, 25 bp, Homo sapien
cctgcttcacggtctcagcatagag

SEQ ID NO: 3968564 - DNA, 25 bp, Homo sapien
tggaagtcgcctccagcctttacca

SEQ ID NO: 3968565 - DNA, 25 bp, Homo sapien
gcactgtggtctgactggaaccctt

SEQ ID NO: 3968566 - DNA, 25 bp, Homo sapien
caggacggcgtcgtgaaggtaggca

SEQ ID NO: 3968567 - DNA, 25 bp, Homo sapien
ccactccatcctgggtctaggtcct

SEQ ID NO: 3968568 - DNA, 25 bp, Homo sapien
gaccactccatcctgggtctaggtc

SEQ ID NO: 3968569 - DNA, 25 bp, Homo sapien
accactccatcctgggtctaggtcc

SEQ ID NO: 3968570 - DNA, 25 bp, Homo sapien
caccttttggaggtgcatcattttc

SEQ ID NO: 3968571 - DNA, 25 bp, Homo sapien
cgacctcctcggtgtttggtagact

SEQ ID NO: 3968572 - DNA, 25 bp, Homo sapien
ccttttctgtaggagctgagggcaa

SEQ ID NO: 3968573 - DNA, 25 bp, Homo sapien
gaagcagtgacccatacaccttttg

SEQ ID NO: 3968574 - DNA, 25 bp, Homo sapien
cagagccattgagtggtcaacggta

SEQ ID NO: 3968575 - DNA, 25 bp, Homo sapien
gagccattgagtggtcaacggtacc

SEQ ID NO: 3968576 - DNA, 25 bp, Homo sapien
taccagagccattgagtggtcaacg

SEQ ID NO: 3968577 - DNA, 25 bp, Homo sapien
ccattgagtggtcaacggtacccac

SEQ ID NO: 3968578 - DNA, 25 bp, Homo sapien
tctccagtgctgagtcccaggtttg

SEQ ID NO: 3968579 - DNA, 25 bp, Homo sapien
gatgaaaacaaattctccagtgctg

SEQ ID NO: 3968580 - DNA, 25 bp, Homo sapien
aaattctccagtgctgagtcccagg

SEQ ID NO: 3968581 - DNA, 25 bp, Homo sapien
atgatgaaaacaaattctccagtgc

SEQ ID NO: 3968582 - DNA, 25 bp, Homo sapien
catcctctgagctgcacgttaagat

SEQ ID NO: 3968583 - DNA, 25 bp, Homo sapien
tattgttggtgtatctcatgctggc

SEQ ID NO: 3968584 - DNA, 25 bp, Homo sapien
cagcccaggtactggagactttcct

SEQ ID NO: 3968585 - DNA, 25 bp, Homo sapien
tcttgaagaaggactagactattgt

SEQ ID NO: 3968586 - DNA, 25 bp, Homo sapien
caattgatgatatcctccaaagatg

SEQ ID NO: 3968587 - DNA, 25 bp, Homo sapien
gtttcacacaggtgtcagacagttt

SEQ ID NO: 3968588 - DNA, 25 bp, Homo sapien
catggggtgttccactcagaggcca

SEQ ID NO: 3968589 - DNA, 25 bp, Homo sapien
tgtccaacaaagtcaaacatggggt

SEQ ID NO: 3968590 - DNA, 25 bp, Homo sapien
agtttcacacaggtgtcagacagtt

SEQ ID NO: 3968591 - DNA, 25 bp, Homo sapien
aatctgttcgttctggacctggttg

SEQ ID NO: 3968592 - DNA, 25 bp, Homo sapien
caagagactccttggtgctgcaggc

SEQ ID NO: 3968593 - DNA, 25 bp, Homo sapien
ccactagctctgagttgaccttgtc

SEQ ID NO: 3968594 - DNA, 25 bp, Homo sapien
gcatgctggtccaaacagggcagaa

SEQ ID NO: 3968595 - DNA, 25 bp, Homo sapien
ggcaatctggaggcctgcacccagc

SEQ ID NO: 3968596 - DNA, 25 bp, Homo sapien
ccagcacactggcaaagagcatcag

SEQ ID NO: 3968597 - DNA, 25 bp, Homo sapien
cattcaatccctgaacagagcccag

SEQ ID NO: 3968598 - DNA, 25 bp, Homo sapien
gaagcctacggtgagtttagcagcc

SEQ ID NO: 3968599 - DNA, 25 bp, Homo sapien
tgggtgctcagcatgacattcaatc

SEQ ID NO: 3968600 - DNA, 25 bp, Homo sapien
tgggacccgtggagcattggcccct

SEQ ID NO: 3968601 - DNA, 25 bp, Homo sapien
tggcccctccagtgaagtgaagcaa

SEQ ID NO: 3968602 - DNA, 25 bp, Homo sapien
tgagttggtaatgggctctgcagca

SEQ ID NO: 3968603 - DNA, 25 bp, Homo sapien
cacatgtctggtattgggtctggct

SEQ ID NO: 3968604 - DNA, 25 bp, Homo sapien
tcctggagcatctgaggagttccat

SEQ ID NO: 3968605 - DNA, 25 bp, Homo sapien
ctgtctagtggtgatgctgtgagtt

SEQ ID NO: 3968606 - DNA, 25 bp, Homo sapien
tatatttccctaaagaggtgcgacc

SEQ ID NO: 3968607 - DNA, 25 bp, Homo sapien
gtgactgccgatacctcctgctgtg

SEQ ID NO: 3968608 - DNA, 25 bp, Homo sapien
tgtgacagattcaaaggttccaggg

SEQ ID NO: 3968609 - DNA, 25 bp, Homo sapien
cttcttccaaggtaagctgcaatga

SEQ ID NO: 3968610 - DNA, 25 bp, Homo sapien
tacacagtagcttcgggtgtgtccc

SEQ ID NO: 3968611 - DNA, 25 bp, Homo sapien
ggtgtgtcccagtcagtcctaggag

SEQ ID NO: 3968612 - DNA, 25 bp, Homo sapien
gaagggcacgaccttgaaagtttgc

SEQ ID NO: 3968613 - DNA, 25 bp, Homo sapien
ctttgaaactgttgacccttgacca

SEQ ID NO: 3968614 - DNA, 25 bp, Homo sapien
agcttgttgcctgcactttgaaact

SEQ ID NO: 3968615 - DNA, 25 bp, Homo sapien
cctggcaatgacaccgttgacaaga

SEQ ID NO: 3968616 - DNA, 25 bp, Homo sapien
tgaggtgcatcccatagagcactgg

SEQ ID NO: 3968617 - DNA, 25 bp, Homo sapien
gctgccaaagctgaggtgcatccca

SEQ ID NO: 3968618 - DNA, 25 bp, Homo sapien
caaagctgaggtgcatcccatagag

SEQ ID NO: 3968619 - DNA, 25 bp, Homo sapien
catcccatagagcactggtctcaaa

SEQ ID NO: 3968620 - DNA, 25 bp, Homo sapien
ggaattggctttatcttctactgga

SEQ ID NO: 3968621 - DNA, 25 bp, Homo sapien
gcctggggaattggctttatcttct

SEQ ID NO: 3968622 - DNA, 25 bp, Homo sapien
tctactggaccagaagttctgagca

SEQ ID NO: 3968623 - DNA, 25 bp, Homo sapien
cttctactggaccagaagttctgag

SEQ ID NO: 3968624 - DNA, 25 bp, Homo sapien
gtgcacatgtatccctcatgaccgt

SEQ ID NO: 3968625 - DNA, 25 bp, Homo sapien
cacatgtatccctcatgaccgttct

SEQ ID NO: 3968626 - DNA, 25 bp, Homo sapien
acatgtatccctcatgaccgttctt

SEQ ID NO: 3968627 - DNA, 25 bp, Homo sapien
gcacatgtatccctcatgaccgttc

SEQ ID NO: 3968628 - DNA, 25 bp, Homo sapien
gctgtctgtattagttcgttatcac

SEQ ID NO: 3968629 - DNA, 25 bp, Homo sapien
tttcctgtagtcttcaagcttgcta

SEQ ID NO: 3968630 - DNA, 25 bp, Homo sapien
cgttatcacactgttacgaagaaat

SEQ ID NO: 3968631 - DNA, 25 bp, Homo sapien
gctaatgtgtatccacacaatgatg

SEQ ID NO: 3968632 - DNA, 25 bp, Homo sapien
ccaggtaggcagataggttgagcct

SEQ ID NO: 3968633 - DNA, 25 bp, Homo sapien
caggtaggcagataggttgagccta

SEQ ID NO: 3968634 - DNA, 25 bp, Homo sapien
cccaggtaggcagataggttgagcc

SEQ ID NO: 3968635 - DNA, 25 bp, Homo sapien
aacttgattctttctcaatgctgag

SEQ ID NO: 3968636 - DNA, 25 bp, Homo sapien
tttctcaatgctgagtatttcttca

SEQ ID NO: 3968637 - DNA, 25 bp, Homo sapien
tgattctttctcaatgctgagtatt

SEQ ID NO: 3968638 - DNA, 25 bp, Homo sapien
tacaacttgattctttctcaatgct

SEQ ID NO: 3968639 - DNA, 25 bp, Homo sapien
tggtatgatgatatagagacaagac

SEQ ID NO: 3968640 - DNA, 25 bp, Homo sapien
agtttcaatgacatgcgtcagggtg

SEQ ID NO: 3968641 - DNA, 25 bp, Homo sapien
gaacacactagataaaagcccagag

SEQ ID NO: 3968642 - DNA, 25 bp, Homo sapien
gcccagagagtgagcttaattgact

SEQ ID NO: 3968643 - DNA, 25 bp, Homo sapien
gcatgtaccaatgtccatggtgagt

SEQ ID NO: 3968644 - DNA, 25 bp, Homo sapien
acagttaaccagcatgtaccaatgt

SEQ ID NO: 3968645 - DNA, 25 bp, Homo sapien
taaccagcatgtaccaatgtccatg

SEQ ID NO: 3968646 - DNA, 25 bp, Homo sapien
cagcatgtaccaatgtccatggtga

SEQ ID NO: 3968647 - DNA, 25 bp, Homo sapien
cagaaaataattgtcgttgttagag

SEQ ID NO: 3968648 - DNA, 25 bp, Homo sapien
actagtagattaagtgagtaagtcc

SEQ ID NO: 3968649 - DNA, 25 bp, Homo sapien
taccttctgtcatgggactagtaga

SEQ ID NO: 3968650 - DNA, 25 bp, Homo sapien
gtaacagccctttcacatatccaac

SEQ ID NO: 3968651 - DNA, 25 bp, Homo sapien
cctactatcctcctcaaataaaaca

SEQ ID NO: 3968652 - DNA, 25 bp, Homo sapien
tcttgcaaggcaatcaggtacttag

SEQ ID NO: 3968653 - DNA, 25 bp, Homo sapien
tagagaaaggcttcaccccgagcct

SEQ ID NO: 3968654 - DNA, 25 bp, Homo sapien
ccttatggacccctttgatgatgac

SEQ ID NO: 3968655 - DNA, 25 bp, Homo sapien
gtgatctgtgacacaccccaaaagg

SEQ ID NO: 3968656 - DNA, 25 bp, Homo sapien
tctacataaggtgtgagatgtcccc

SEQ ID NO: 3968657 - DNA, 25 bp, Homo sapien
cataccggaggaggtctgctcttct

SEQ ID NO: 3968658 - DNA, 25 bp, Homo sapien
tgatttgagaaccaagagccatgtc

SEQ ID NO: 3968659 - DNA, 25 bp, Homo sapien
gagtggactccaggcttttcaggct

SEQ ID NO: 3968660 - DNA, 25 bp, Homo sapien
tgagatctttcttgtaccactttac

SEQ ID NO: 3968661 - DNA, 25 bp, Homo sapien
agatctttcttgtaccactttacta

SEQ ID NO: 3968662 - DNA, 25 bp, Homo sapien
gagatctttcttgtaccactttact

SEQ ID NO: 3968663 - DNA, 25 bp, Homo sapien
tttgagatctttcttgtaccacttt

SEQ ID NO: 3968664 - DNA, 25 bp, Homo sapien
actctacagtggaggaaattgaagc

SEQ ID NO: 3968665 - DNA, 25 bp, Homo sapien
tcgtgtaattgtcactggagctgcc

SEQ ID NO: 3968666 - DNA, 25 bp, Homo sapien
aattctcataacaacgctgcacagg

SEQ ID NO: 3968667 - DNA, 25 bp, Homo sapien
ttctggtcccagctatggatagtga

SEQ ID NO: 3968668 - DNA, 25 bp, Homo sapien
cttcatcctcactgtcttcatgttg

SEQ ID NO: 3968669 - DNA, 25 bp, Homo sapien
gtcttcatcctcactgtcttcatgt

SEQ ID NO: 3968670 - DNA, 25 bp, Homo sapien
aggtcttcatcctcactgtcttcat

SEQ ID NO: 3968671 - DNA, 25 bp, Homo sapien
catcctcactgtcttcatgttgagt

SEQ ID NO: 3968672 - DNA, 25 bp, Homo sapien
catttttgccctgtgtattgccata

SEQ ID NO: 3968673 - DNA, 25 bp, Homo sapien
gagttcttcacagagtaatacaggt

SEQ ID NO: 3968674 - DNA, 25 bp, Homo sapien
taggttttaaactgcttagacagga

SEQ ID NO: 3968675 - DNA, 25 bp, Homo sapien
tgagtatctccctatttgaaatgct

SEQ ID NO: 3968676 - DNA, 25 bp, Homo sapien
gcttggccatgcatattgtctcaat

SEQ ID NO: 3968677 - DNA, 25 bp, Homo sapien
tcacccagatggataattagttcat

SEQ ID NO: 3968678 - DNA, 25 bp, Homo sapien
tcagttccacctgaaatttgtccaa

SEQ ID NO: 3968679 - DNA, 25 bp, Homo sapien
gtccaagtgcttggccatgcatatt

SEQ ID NO: 3968680 - DNA, 25 bp, Homo sapien
gattggcaaattgtagcactggcta

SEQ ID NO: 3968681 - DNA, 25 bp, Homo sapien
gataccagatggctcacaaagtgga

SEQ ID NO: 3968682 - DNA, 25 bp, Homo sapien
tgtacagataaagtttgcccaccct

SEQ ID NO: 3968683 - DNA, 25 bp, Homo sapien
ggtcctgttgctaactccttcccga

SEQ ID NO: 3968684 - DNA, 25 bp, Homo sapien
gagatgtagtctcgctcactgtgtc

SEQ ID NO: 3968685 - DNA, 25 bp, Homo sapien
tttgagatgtagtctcgctcactgt

SEQ ID NO: 3968686 - DNA, 25 bp, Homo sapien
tgagatgtagtctcgctcactgtgt

SEQ ID NO: 3968687 - DNA, 25 bp, Homo sapien
gatgtagtctcgctcactgtgtcac

SEQ ID NO: 3968688 - DNA, 25 bp, Homo sapien
cgaactgttttatacacactgtgct

SEQ ID NO: 3968689 - DNA, 25 bp, Homo sapien
ttgacatggacaagccagaggcgct

SEQ ID NO: 3968690 - DNA, 25 bp, Homo sapien
gattacagttccatggtgttgaaaa

SEQ ID NO: 3968691 - DNA, 25 bp, Homo sapien
ctccttatcccaaaacaacgaactg

SEQ ID NO: 3968692 - DNA, 25 bp, Homo sapien
tcaacatgcctgtcttcaagatccc

SEQ ID NO: 3968693 - DNA, 25 bp, Homo sapien
tcaaagggaccctctgtgccttctt

SEQ ID NO: 3968694 - DNA, 25 bp, Homo sapien
tagttttagcctatcactcatgtca

SEQ ID NO: 3968695 - DNA, 25 bp, Homo sapien
taacttgccaacagtctctatgctt

SEQ ID NO: 3968696 - DNA, 25 bp, Homo sapien
ctacagtttgctgctgagctggaag

SEQ ID NO: 3968697 - DNA, 25 bp, Homo sapien
aaatcatggcactagggcacctttg

SEQ ID NO: 3968698 - DNA, 25 bp, Homo sapien
agaacatcttaaccagagtaggctc

SEQ ID NO: 3968699 - DNA, 25 bp, Homo sapien
cagaaaatgccgttaacttacttgg

SEQ ID NO: 3968700 - DNA, 25 bp, Homo sapien
gaactgtatctgcaggtgaggtcca

SEQ ID NO: 3968701 - DNA, 25 bp, Homo sapien
gtttcagcatcacagggacactttt

SEQ ID NO: 3968702 - DNA, 25 bp, Homo sapien
cccctctggggcttgatctgtttca

SEQ ID NO: 3968703 - DNA, 25 bp, Homo sapien
cctctggggcttgatctgtttcagc

SEQ ID NO: 3968704 - DNA, 25 bp, Homo sapien
catcacagggacacttttccacaca

SEQ ID NO: 3968705 - DNA, 25 bp, Homo sapien
tcccaaatttgatgatcccgaatag

SEQ ID NO: 3968706 - DNA, 25 bp, Homo sapien
tcataacaagctaggaacaggtatt

SEQ ID NO: 3968707 - DNA, 25 bp, Homo sapien
tatcacggccgtcataagaggttaa

SEQ ID NO: 3968708 - DNA, 25 bp, Homo sapien
gactaatgtggttaaagacagctcc

SEQ ID NO: 3968709 - DNA, 25 bp, Homo sapien
taaacatgcccttccatttccatac

SEQ ID NO: 3968710 - DNA, 25 bp, Homo sapien
ttaaacatgcccttccatttccata

SEQ ID NO: 3968711 - DNA, 25 bp, Homo sapien
gaattttgtctccatataaccagta

SEQ ID NO: 3968712 - DNA, 25 bp, Homo sapien
aattttgtctccatataaccagtat

SEQ ID NO: 3968713 - DNA, 25 bp, Homo sapien
agaattttgtctccatataaccagt

SEQ ID NO: 3968714 - DNA, 25 bp, Homo sapien
cttctataaaggaatcatcaagaat

SEQ ID NO: 3968715 - DNA, 25 bp, Homo sapien
cagggacttgtgaagaaggttttga

SEQ ID NO: 3968716 - DNA, 25 bp, Homo sapien
cctttttgcagctgtattcgaggct

SEQ ID NO: 3968717 - DNA, 25 bp, Homo sapien
gctcttcggtgcagggacttgtgaa

SEQ ID NO: 3968718 - DNA, 25 bp, Homo sapien
tattcgaggctcttcggtgcaggga

SEQ ID NO: 3968719 - DNA, 25 bp, Homo sapien
tatctgctttttgtttcaactgttc

SEQ ID NO: 3968720 - DNA, 25 bp, Homo sapien
cttctgactctcttatctgcttttt

SEQ ID NO: 3968721 - DNA, 25 bp, Homo sapien
acttctgactctcttatctgctttt

SEQ ID NO: 3968722 - DNA, 25 bp, Homo sapien
ctgctttttgtttcaactgttctat

SEQ ID NO: 3968723 - DNA, 25 bp, Homo sapien
caagttgctgataatttaaaggcca

SEQ ID NO: 3968724 - DNA, 25 bp, Homo sapien
actgtcagagtgatatggcaaaacc

SEQ ID NO: 3968725 - DNA, 25 bp, Homo sapien
ggccacaggttgttttagcatggaa

SEQ ID NO: 3968726 - DNA, 25 bp, Homo sapien
aaaaaggccctatgctaagaaccag

SEQ ID NO: 3968727 - DNA, 25 bp, Homo sapien
tatggaagaggtaagactggaacga

SEQ ID NO: 3968728 - DNA, 25 bp, Homo sapien
ggagtatattctccgccctcatgaa

SEQ ID NO: 3968729 - DNA, 25 bp, Homo sapien
agggatcaggactttatctcacagg

SEQ ID NO: 3968730 - DNA, 25 bp, Homo sapien
tgagacttcatgagctaccatagag

SEQ ID NO: 3968731 - DNA, 25 bp, Homo sapien
tgtattggtgacagccttctcttac

SEQ ID NO: 3968732 - DNA, 25 bp, Homo sapien
aagctgtattggtgacagccttctc

SEQ ID NO: 3968733 - DNA, 25 bp, Homo sapien
gctgtattggtgacagccttctctt

SEQ ID NO: 3968734 - DNA, 25 bp, Homo sapien
tgttaagctgtattggtgacagcct

SEQ ID NO: 3968735 - DNA, 25 bp, Homo sapien
ccatctacttcccatatcatatgga

SEQ ID NO: 3968736 - DNA, 25 bp, Homo sapien
acaaagacttcatctagttgataat

SEQ ID NO: 3968737 - DNA, 25 bp, Homo sapien
catctacttcccatatcatatggaa

SEQ ID NO: 3968738 - DNA, 25 bp, Homo sapien
gataatactgaattcgatctttagc

SEQ ID NO: 3968739 - DNA, 25 bp, Homo sapien
tttgccaaatgaccgatgcctgatg

SEQ ID NO: 3968740 - DNA, 25 bp, Homo sapien
tatctaccactgtgagcctgacagc

SEQ ID NO: 3968741 - DNA, 25 bp, Homo sapien
caatgtaatacggaagaacatccac

SEQ ID NO: 3968742 - DNA, 25 bp, Homo sapien
caaagagcaagatagactgatgagt

SEQ ID NO: 3968743 - DNA, 25 bp, Homo sapien
ttctcttcaatccatgactcaatag

SEQ ID NO: 3968744 - DNA, 25 bp, Homo sapien
tcaatccatgactcaatagaagttt

SEQ ID NO: 3968745 - DNA, 25 bp, Homo sapien
atgactcaatagaagttttgtttct

SEQ ID NO: 3968746 - DNA, 25 bp, Homo sapien
tcttcaatccatgactcaatagaag

SEQ ID NO: 3968747 - DNA, 25 bp, Homo sapien
tcccaaggcaaacaaggtggtagca

SEQ ID NO: 3968748 - DNA, 25 bp, Homo sapien
caacagctatggttgttcctaaagc

SEQ ID NO: 3968749 - DNA, 25 bp, Homo sapien
caattggaagaggatctctccgggc

SEQ ID NO: 3968750 - DNA, 25 bp, Homo sapien
caaatgcagctaatccaaatggaac

SEQ ID NO: 3968751 - DNA, 25 bp, Homo sapien
gttgatccaaggacagtgatggtcc

SEQ ID NO: 3968752 - DNA, 25 bp, Homo sapien
gctaaaaggagaaacagtgtgaacg

SEQ ID NO: 3968753 - DNA, 25 bp, Homo sapien
tgaacgaagcatgattttggtaacc

SEQ ID NO: 3968754 - DNA, 25 bp, Homo sapien
tgaaagcagcatggatacaacccag

SEQ ID NO: 3968755 - DNA, 25 bp, Homo sapien
tagcactaatgtagtataagcaaca

SEQ ID NO: 3968756 - DNA, 25 bp, Homo sapien
gatcagtcctcgctgaacagcaaga

SEQ ID NO: 3968757 - DNA, 25 bp, Homo sapien
ggcgattatggacacaagtattctg

SEQ ID NO: 3968758 - DNA, 25 bp, Homo sapien
accttgcagtgaatagaagtagcac

SEQ ID NO: 3968759 - DNA, 25 bp, Homo sapien
cttggcagactttacaatactggag

SEQ ID NO: 3968760 - DNA, 25 bp, Homo sapien
tacaatactggagatacatggtatc

SEQ ID NO: 3968761 - DNA, 25 bp, Homo sapien
agtgatgtgaacgtggtgccttgta

SEQ ID NO: 3968762 - DNA, 25 bp, Homo sapien
tgccttgtatgcttggcagacttta

SEQ ID NO: 3968763 - DNA, 25 bp, Homo sapien
cccttagcaggaaacatggacattc

SEQ ID NO: 3968764 - DNA, 25 bp, Homo sapien
tgacaagccatcaggtgtggtccct

SEQ ID NO: 3968765 - DNA, 25 bp, Homo sapien
tgtttctgaatacgtggtcccacca

SEQ ID NO: 3968766 - DNA, 25 bp, Homo sapien
gtctccgagcctaaatgatcagtga

SEQ ID NO: 3968767 - DNA, 25 bp, Homo sapien
caccaagggctatgatgggacccca

SEQ ID NO: 3968768 - DNA, 25 bp, Homo sapien
aaagcccggaccgacaaacatggca

SEQ ID NO: 3968769 - DNA, 25 bp, Homo sapien
taagggccaataccacaacacagag

SEQ ID NO: 3968770 - DNA, 25 bp, Homo sapien
cacagagtcaatcatggccatggta

SEQ ID NO: 3968771 - DNA, 25 bp, Homo sapien
gagaatccagtgtcttggtctgaaa

SEQ ID NO: 3968772 - DNA, 25 bp, Homo sapien
ctttatcttaactaggagaatccag

SEQ ID NO: 3968773 - DNA, 25 bp, Homo sapien
taattgtcatgccttcaagctgtga

SEQ ID NO: 3968774 - DNA, 25 bp, Homo sapien
atttccatgtgccacaagtccatgt

SEQ ID NO: 3968775 - DNA, 25 bp, Homo sapien
tgctcccactctggtgggacaaaga

SEQ ID NO: 3968776 - DNA, 25 bp, Homo sapien
aaaatcgtgcttatattccctgcct

SEQ ID NO: 3968777 - DNA, 25 bp, Homo sapien
caaagaccaccaaaatcgtgcttat

SEQ ID NO: 3968778 - DNA, 25 bp, Homo sapien
cgtgcttatattccctgccttgact

SEQ ID NO: 3968779 - DNA, 25 bp, Homo sapien
gccatcgcatatccggggcggcctg

SEQ ID NO: 3968780 - DNA, 25 bp, Homo sapien
gctcctcagccatcgcatatccggg

SEQ ID NO: 3968781 - DNA, 25 bp, Homo sapien
ctgctcctcagccatcgcatatccg

SEQ ID NO: 3968782 - DNA, 25 bp, Homo sapien
ctcagccatcgcatatccggggcgg

SEQ ID NO: 3968783 - DNA, 25 bp, Homo sapien
gagtgcgggacctgctacaagccga

SEQ ID NO: 3968784 - DNA, 25 bp, Homo sapien
gatgactccgtcatggacacctcag

SEQ ID NO: 3968785 - DNA, 25 bp, Homo sapien
gggacctgctacaagccgagcacct

SEQ ID NO: 3968786 - DNA, 25 bp, Homo sapien
ctccttggatgactccgtcatggac

SEQ ID NO: 3968787 - DNA, 25 bp, Homo sapien
tgacaattcttaacacatagaagga

SEQ ID NO: 3968788 - DNA, 25 bp, Homo sapien
tgtgacaattcttaacacatagaag

SEQ ID NO: 3968789 - DNA, 25 bp, Homo sapien
tttaatgtgacaattcttaacacat

SEQ ID NO: 3968790 - DNA, 25 bp, Homo sapien
taatgtgacaattcttaacacatag

SEQ ID NO: 3968791 - DNA, 25 bp, Homo sapien
gcttactgacttgtattattgaata

SEQ ID NO: 3968792 - DNA, 25 bp, Homo sapien
ggaagaatgcttactgacttgtatt

SEQ ID NO: 3968793 - DNA, 25 bp, Homo sapien
ttagctgtagtattatataaggccc

SEQ ID NO: 3968794 - DNA, 25 bp, Homo sapien
ggagcttcattacaattgaaaggag

SEQ ID NO: 3968795 - DNA, 25 bp, Homo sapien
cattggcgagtgcagtgttgagcta

SEQ ID NO: 3968796 - DNA, 25 bp, Homo sapien
ttccagccaaagcagttaattcccc

SEQ ID NO: 3968797 - DNA, 25 bp, Homo sapien
ggaggtgaactataatttacttgag

SEQ ID NO: 3968798 - DNA, 25 bp, Homo sapien
taataatgacttgtgcttgcccctt

SEQ ID NO: 3968799 - DNA, 25 bp, Homo sapien
ttctcaaagagtacaatactgggca

SEQ ID NO: 3968800 - DNA, 25 bp, Homo sapien
agtcagctaacccaacctttagtct

SEQ ID NO: 3968801 - DNA, 25 bp, Homo sapien
aattgtatacttggataagtgttcc

SEQ ID NO: 3968802 - DNA, 25 bp, Homo sapien
taggccagggatgtccaatttttta

SEQ ID NO: 3968803 - DNA, 25 bp, Homo sapien
gagaagaagtgtacaattgcccagg

SEQ ID NO: 3968804 - DNA, 25 bp, Homo sapien
tgctaatgctttttcctcgtttgct

SEQ ID NO: 3968805 - DNA, 25 bp, Homo sapien
tctgtgaatgtttctcaagaaggaa

SEQ ID NO: 3968806 - DNA, 25 bp, Homo sapien
tgactaggtgtttcaagagatggca

SEQ ID NO: 3968807 - DNA, 25 bp, Homo sapien
atggtcaccgttaaccttgacaaga

SEQ ID NO: 3968808 - DNA, 25 bp, Homo sapien
acctgtaggttgagtggtaggacct

SEQ ID NO: 3968809 - DNA, 25 bp, Homo sapien
ggtaggacctaagattcagcaaatc

SEQ ID NO: 3968810 - DNA, 25 bp, Homo sapien
tagattgtcagcatgatggtcaccg

SEQ ID NO: 3968811 - DNA, 25 bp, Homo sapien
agctaacatgatttaagacacagcc

SEQ ID NO: 3968812 - DNA, 25 bp, Homo sapien
tacttacactattccagatgctgac

SEQ ID NO: 3968813 - DNA, 25 bp, Homo sapien
gacacagccacaccgtattcaatag

SEQ ID NO: 3968814 - DNA, 25 bp, Homo sapien
agatgctgacaacaacatctgggca

SEQ ID NO: 3968815 - DNA, 25 bp, Homo sapien
ttgcgcagctcctcacacaagttga

SEQ ID NO: 3968816 - DNA, 25 bp, Homo sapien
gccgagctccgtttgaatcctacat

SEQ ID NO: 3968817 - DNA, 25 bp, Homo sapien
ttgtagtgcatagggagctgatctg

SEQ ID NO: 3968818 - DNA, 25 bp, Homo sapien
taagaagacaagcactcagctgctc

SEQ ID NO: 3968819 - DNA, 25 bp, Homo sapien
ctgtaccacttgatgaccttgctcc

SEQ ID NO: 3968820 - DNA, 25 bp, Homo sapien
gaatcacgatctgtaccacttgatg

SEQ ID NO: 3968821 - DNA, 25 bp, Homo sapien
catccttgaatcacgatctgtacca

SEQ ID NO: 3968822 - DNA, 25 bp, Homo sapien
gcagcctcacatccttgaatcacga

SEQ ID NO: 3968823 - DNA, 25 bp, Homo sapien
agaccagggtggcaggtattattca

SEQ ID NO: 3968824 - DNA, 25 bp, Homo sapien
taagaccagggtggcaggtattatt

SEQ ID NO: 3968825 - DNA, 25 bp, Homo sapien
cagggtggcaggtattattcattga

SEQ ID NO: 3968826 - DNA, 25 bp, Homo sapien
gaccagggtggcaggtattattcat

SEQ ID NO: 3968827 - DNA, 25 bp, Homo sapien
ctttctgggaagacttggtgacttt

SEQ ID NO: 3968828 - DNA, 25 bp, Homo sapien
tgggaagacttggtgactttgccag

SEQ ID NO: 3968829 - DNA, 25 bp, Homo sapien
tctgggaagacttggtgactttgcc

SEQ ID NO: 3968830 - DNA, 25 bp, Homo sapien
agctttctgggaagacttggtgact

SEQ ID NO: 3968831 - DNA, 25 bp, Homo sapien
tggatagtctgagaagctctcgaca

SEQ ID NO: 3968832 - DNA, 25 bp, Homo sapien
ccagagatggatagtctgagaagct

SEQ ID NO: 3968833 - DNA, 25 bp, Homo sapien
gatggatagtctgagaagctctcga

SEQ ID NO: 3968834 - DNA, 25 bp, Homo sapien
gctctcgacacacatgggcttgcca

SEQ ID NO: 3968835 - DNA, 25 bp, Homo sapien
ccagactttaagaatttagggccat

SEQ ID NO: 3968836 - DNA, 25 bp, Homo sapien
caacaatggcagcatcaccagactt

SEQ ID NO: 3968837 - DNA, 25 bp, Homo sapien
caatggcagcatcaccagactttaa

SEQ ID NO: 3968838 - DNA, 25 bp, Homo sapien
aatggcagcatcaccagactttaag

SEQ ID NO: 3968839 - DNA, 25 bp, Homo sapien
tttttaccggaacggtgatcaatca

SEQ ID NO: 3968840 - DNA, 25 bp, Homo sapien
catccctacggttgtcaccatgcag

SEQ ID NO: 3968841 - DNA, 25 bp, Homo sapien
taagagagagaacattgtggttgca

SEQ ID NO: 3968842 - DNA, 25 bp, Homo sapien
tctttaagcattgaagcaggcaaca

SEQ ID NO: 3968843 - DNA, 25 bp, Homo sapien
gagatgtgtggtatgcatccctacg

SEQ ID NO: 3968844 - DNA, 25 bp, Homo sapien
ccaccatcagcttaggaactaccat

SEQ ID NO: 3968845 - DNA, 25 bp, Homo sapien
taagtgctcccgtaactggcaacct

SEQ ID NO: 3968846 - DNA, 25 bp, Homo sapien
gaatcttgctgtgccaatgggcgct

SEQ ID NO: 3968847 - DNA, 25 bp, Homo sapien
ctggcaacctcagatccaccatcag

SEQ ID NO: 3968848 - DNA, 25 bp, Homo sapien
tctcagtagacttgttttccagtcc

SEQ ID NO: 3968849 - DNA, 25 bp, Homo sapien
tacattgaccattcgacttgcgagc

SEQ ID NO: 3968850 - DNA, 25 bp, Homo sapien
ttatcgcatacttggcaatagacca

SEQ ID NO: 3968851 - DNA, 25 bp, Homo sapien
gttcttcccataggtcctctcagta

SEQ ID NO: 3968852 - DNA, 25 bp, Homo sapien
tgaaaaataaacatcggagtggctt

SEQ ID NO: 3968853 - DNA, 25 bp, Homo sapien
gcaaccacaacttgcatggaatgaa

SEQ ID NO: 3968854 - DNA, 25 bp, Homo sapien
taattttgttcagcgcgttgttgat

SEQ ID NO: 3968855 - DNA, 25 bp, Homo sapien
gatgaagtaatagtgaaccaaacag

SEQ ID NO: 3968856 - DNA, 25 bp, Homo sapien
acgactggctgtagtttgctcctca

SEQ ID NO: 3968857 - DNA, 25 bp, Homo sapien
cgactggctgtagtttgctcctcat

SEQ ID NO: 3968858 - DNA, 25 bp, Homo sapien
cataatatctcatagaaggtatccc

SEQ ID NO: 3968859 - DNA, 25 bp, Homo sapien
tatctcatagaaggtatccctctca

SEQ ID NO: 3968860 - DNA, 25 bp, Homo sapien
tcagcacataatatctcatagaagg

SEQ ID NO: 3968861 - DNA, 25 bp, Homo sapien
gaaggtatccctctcagcattttcc

SEQ ID NO: 3968862 - DNA, 25 bp, Homo sapien
ctgttgtcctaagcgcctttgtttg

SEQ ID NO: 3968863 - DNA, 25 bp, Homo sapien
caggaatgcggttgcattcaggtct

SEQ ID NO: 3968864 - DNA, 25 bp, Homo sapien
aaccctcaaatctgaaggccatttc

SEQ ID NO: 3968865 - DNA, 25 bp, Homo sapien
ttgtgtgtatatccgctttatcagg

SEQ ID NO: 3968866 - DNA, 25 bp, Homo sapien
tcagtcaatcctccgttcaccattt

SEQ ID NO: 3968867 - DNA, 25 bp, Homo sapien
tccaaaacataccagtccgtctttg

SEQ ID NO: 3968868 - DNA, 25 bp, Homo sapien
ccagtccgtctttgactgtattttg

SEQ ID NO: 3968869 - DNA, 25 bp, Homo sapien
gtctggacccagaacaggaagagtc

SEQ ID NO: 3968870 - DNA, 25 bp, Homo sapien
agaagcagcttgcagagtaggattg

SEQ ID NO: 3968871 - DNA, 25 bp, Homo sapien
ctcaaaaggcccgaaacaagaagca

SEQ ID NO: 3968872 - DNA, 25 bp, Homo sapien
agccaatgtttgaaaccctcaaaag

SEQ ID NO: 3968873 - DNA, 25 bp, Homo sapien
ctgtggaaagccaatgtttgaaacc

SEQ ID NO: 3968874 - DNA, 25 bp, Homo sapien
cctgacaacgtagccaaaccagact

SEQ ID NO: 3968875 - DNA, 25 bp, Homo sapien
caaaccagactttccatcctgatct

SEQ ID NO: 3968876 - DNA, 25 bp, Homo sapien
caacgtagccaaaccagactttcca

SEQ ID NO: 3968877 - DNA, 25 bp, Homo sapien
ttgccccttccaggcgaccttgtcc

SEQ ID NO: 3968878 - DNA, 25 bp, Homo sapien
ctgtgcacactggaggatcaccgct

SEQ ID NO: 3968879 - DNA, 25 bp, Homo sapien
taactccagagacagctctgtgcac

SEQ ID NO: 3968880 - DNA, 25 bp, Homo sapien
caccaggagtctgtaactcagatat

SEQ ID NO: 3968881 - DNA, 25 bp, Homo sapien
gcttctgagcgtgtgctgctttcaa

SEQ ID NO: 3968882 - DNA, 25 bp, Homo sapien
tttagcaagggcaaggtttttctga

SEQ ID NO: 3968883 - DNA, 25 bp, Homo sapien
cagtagtttagcaagggcaaggttt

SEQ ID NO: 3968884 - DNA, 25 bp, Homo sapien
ttagcaagggcaaggtttttctgag

SEQ ID NO: 3968885 - DNA, 25 bp, Homo sapien
tcacagtagtttagcaagggcaagg

SEQ ID NO: 3968886 - DNA, 25 bp, Homo sapien
tccagcatggagaacatggctgtcc

SEQ ID NO: 3968887 - DNA, 25 bp, Homo sapien
catgtggttcgggaaggtctcgacc

SEQ ID NO: 3968888 - DNA, 25 bp, Homo sapien
gcttgccaacaagtacatatgtagt

SEQ ID NO: 3968889 - DNA, 25 bp, Homo sapien
ggaaatcctggtgacaggtaaaagc

SEQ ID NO: 3968890 - DNA, 25 bp, Homo sapien
tccagtcatagcatgtagcacgaaa

SEQ ID NO: 3968891 - DNA, 25 bp, Homo sapien
tagcatgtagcacgaaatccttaat

SEQ ID NO: 3968892 - DNA, 25 bp, Homo sapien
ggcttttccagtcatagcatgtagc

SEQ ID NO: 3968893 - DNA, 25 bp, Homo sapien
tgtagcacgaaatccttaattgtcc

SEQ ID NO: 3968894 - DNA, 25 bp, Homo sapien
caatctctataaaaggcccctctgt

SEQ ID NO: 3968895 - DNA, 25 bp, Homo sapien
taaatgtgctggcatgagagatatg

SEQ ID NO: 3968896 - DNA, 25 bp, Homo sapien
tgtagatcttaatgctcttaaacca

SEQ ID NO: 3968897 - DNA, 25 bp, Homo sapien
ttccaatctctataaaaggcccctc

SEQ ID NO: 3968898 - DNA, 25 bp, Homo sapien
gggtttccctgcattgcattgccca

SEQ ID NO: 3968899 - DNA, 25 bp, Homo sapien
agggtttccctgcattgcattgccc

SEQ ID NO: 3968900 - DNA, 25 bp, Homo sapien
agagcttgctgccttgatcatgcag

SEQ ID NO: 3968901 - DNA, 25 bp, Homo sapien
tgtgggcaccgctgtaacctgttcc

SEQ ID NO: 3968902 - DNA, 25 bp, Homo sapien
ccttgatcatgcagctgagctgtct

SEQ ID NO: 3968903 - DNA, 25 bp, Homo sapien
ctgtgggcaccgctgtaacctgttc

SEQ ID NO: 3968904 - DNA, 25 bp, Homo sapien
tgactggaaggtaatactgaacttg

SEQ ID NO: 3968905 - DNA, 25 bp, Homo sapien
gaacttgggttaaggctccatgcat

SEQ ID NO: 3968906 - DNA, 25 bp, Homo sapien
ctggaaggtaatactgaacttgggt

SEQ ID NO: 3968907 - DNA, 25 bp, Homo sapien
taatactgaacttgggttaaggctc

SEQ ID NO: 3968908 - DNA, 25 bp, Homo sapien
tcaatgatttgagtagtaccatcac

SEQ ID NO: 3968909 - DNA, 25 bp, Homo sapien
gatgtcaatgatttgagtagtacca

SEQ ID NO: 3968910 - DNA, 25 bp, Homo sapien
atttcccagatgtcaatgatttgag

SEQ ID NO: 3968911 - DNA, 25 bp, Homo sapien
gatttgagtagtaccatcactgttt

SEQ ID NO: 3968912 - DNA, 25 bp, Homo sapien
cattgggtataaggaaaagggcata

SEQ ID NO: 3968913 - DNA, 25 bp, Homo sapien
tgctttttcccataattgctgaggt

SEQ ID NO: 3968914 - DNA, 25 bp, Homo sapien
tgagggttaattctactagcattag

SEQ ID NO: 3968915 - DNA, 25 bp, Homo sapien
ctagcattagtaagaaacattgggt

SEQ ID NO: 3968916 - DNA, 25 bp, Homo sapien
cacgtgacccatccactgaggttca

SEQ ID NO: 3968917 - DNA, 25 bp, Homo sapien
cacacgtgacccatccactgaggtt

SEQ ID NO: 3968918 - DNA, 25 bp, Homo sapien
tcaggaggctttttacgccacacgt

SEQ ID NO: 3968919 - DNA, 25 bp, Homo sapien
gctttttacgccacacgtgacccat

SEQ ID NO: 3968920 - DNA, 25 bp, Homo sapien
cctggtagcaagagacttttggaaa

SEQ ID NO: 3968921 - DNA, 25 bp, Homo sapien
tccagaacctggtagcaagagactt

SEQ ID NO: 3968922 - DNA, 25 bp, Homo sapien
tcatacccactttccacgttttgcc

SEQ ID NO: 3968923 - DNA, 25 bp, Homo sapien
gaacctggtagcaagagacttttgg

SEQ ID NO: 3968924 - DNA, 25 bp, Homo sapien
gattgtagttgggagcttttctctt

SEQ ID NO: 3968925 - DNA, 25 bp, Homo sapien
ttacggtctctagagcttctccctc

SEQ ID NO: 3968926 - DNA, 25 bp, Homo sapien
ttgggagcttttctcttacggtctc

SEQ ID NO: 3968927 - DNA, 25 bp, Homo sapien
cacgcatattggtccttgtgaaagg

SEQ ID NO: 3968928 - DNA, 25 bp, Homo sapien
cacatgtggcctttcccactctgaa

SEQ ID NO: 3968929 - DNA, 25 bp, Homo sapien
agcacatgtggcctttcccactctg

SEQ ID NO: 3968930 - DNA, 25 bp, Homo sapien
catgtggcctttcccactctgaacc

SEQ ID NO: 3968931 - DNA, 25 bp, Homo sapien
tgtggcctttcccactctgaaccat

SEQ ID NO: 3968932 - DNA, 25 bp, Homo sapien
attccactgacatcgtgtctctcca

SEQ ID NO: 3968933 - DNA, 25 bp, Homo sapien
atcaaggctgcccagaatggtcccc

SEQ ID NO: 3968934 - DNA, 25 bp, Homo sapien
gatctccagttcctgatataggacc

SEQ ID NO: 3968935 - DNA, 25 bp, Homo sapien
atataggaccccgttctagctttag

SEQ ID NO: 3968936 - DNA, 25 bp, Homo sapien
ggcacgttcagctctggaatacaag

SEQ ID NO: 3968937 - DNA, 25 bp, Homo sapien
gcacgttcagctctggaatacaagg

SEQ ID NO: 3968938 - DNA, 25 bp, Homo sapien
taagaccaagtctgcagcaccttga

SEQ ID NO: 3968939 - DNA, 25 bp, Homo sapien
cctcaaagaggaatacggagagtat

SEQ ID NO: 3968940 - DNA, 25 bp, Homo sapien
tggaacaaggttccccatgtgtttc

SEQ ID NO: 3968941 - DNA, 25 bp, Homo sapien
ttccttctggcaaactcagagttca

SEQ ID NO: 3968942 - DNA, 25 bp, Homo sapien
ggttgtgtagaaggaggccctcaaa

SEQ ID NO: 3968943 - DNA, 25 bp, Homo sapien
gtttccagggttggcagccacactc

SEQ ID NO: 3968944 - DNA, 25 bp, Homo sapien
ttttgaagtttccagggttggcagc

SEQ ID NO: 3968945 - DNA, 25 bp, Homo sapien
ttgaagtttccagggttggcagcca

SEQ ID NO: 3968946 - DNA, 25 bp, Homo sapien
ttccagggttggcagccacactcat

SEQ ID NO: 3968947 - DNA, 25 bp, Homo sapien
tgcccaacaagtcctttattactta

SEQ ID NO: 3968948 - DNA, 25 bp, Homo sapien
agatttatattccacagcagagatg

SEQ ID NO: 3968949 - DNA, 25 bp, Homo sapien
agagatgcagggaagttgcccaaca

SEQ ID NO: 3968950 - DNA, 25 bp, Homo sapien
tctccagatttatattccacagcag

SEQ ID NO: 3968951 - DNA, 25 bp, Homo sapien
gaaatgctgaaggtatgattctcct

SEQ ID NO: 3968952 - DNA, 25 bp, Homo sapien
gtgctattctgattacattatcgac

SEQ ID NO: 3968953 - DNA, 25 bp, Homo sapien
tttcacccactgcatttctgttgct

SEQ ID NO: 3968954 - DNA, 25 bp, Homo sapien
tatcgactagtctgaagcagagctg

SEQ ID NO: 3968955 - DNA, 25 bp, Homo sapien
agggtctgcacgtggaccaaatgtc

SEQ ID NO: 3968956 - DNA, 25 bp, Homo sapien
cagggtctgcacgtggaccaaatgt

SEQ ID NO: 3968957 - DNA, 25 bp, Homo sapien
cagacagcgagatgatctgattggc

SEQ ID NO: 3968958 - DNA, 25 bp, Homo sapien
agatgatctgattggcccaagtcca

SEQ ID NO: 3968959 - DNA, 25 bp, Homo sapien
cagcgagatgatctgattggcccaa

SEQ ID NO: 3968960 - DNA, 25 bp, Homo sapien
tcagaaacagacagcgagatgatct

SEQ ID NO: 3968961 - DNA, 25 bp, Homo sapien
ccaacctcatgtgataggtgacctc

SEQ ID NO: 3968962 - DNA, 25 bp, Homo sapien
cttggatcctcatgcctttcctgga

SEQ ID NO: 3968963 - DNA, 25 bp, Homo sapien
ccgcatattccacttccgattttga

SEQ ID NO: 3968964 - DNA, 25 bp, Homo sapien
ttgaccttcagtggtttgcagctcc

SEQ ID NO: 3968965 - DNA, 25 bp, Homo sapien
tggaaaaggatgttgcaatgacgct

SEQ ID NO: 3968966 - DNA, 25 bp, Homo sapien
caggccctgcgtgaaggccctttgg

SEQ ID NO: 3968967 - DNA, 25 bp, Homo sapien
ttggcgtctttttcggcgtggaagc

SEQ ID NO: 3968968 - DNA, 25 bp, Homo sapien
caatgacgcttggatcaggccaggc

SEQ ID NO: 3968969 - DNA, 25 bp, Homo sapien
tccaacaagcaagaaggacagccga

SEQ ID NO: 3968970 - DNA, 25 bp, Homo sapien
tgagccgattccagcatgtgctgct

SEQ ID NO: 3968971 - DNA, 25 bp, Homo sapien
tctaggcactcctgaacaaatgccg

SEQ ID NO: 3968972 - DNA, 25 bp, Homo sapien
tcctgaacaaatgccgaacaagcac

SEQ ID NO: 3968973 - DNA, 25 bp, Homo sapien
caggagccttcctgaaggcagccat

SEQ ID NO: 3968974 - DNA, 25 bp, Homo sapien
ggctccccaggagccttcctgaagg

SEQ ID NO: 3968975 - DNA, 25 bp, Homo sapien
tgggctccccaggagccttcctgaa

SEQ ID NO: 3968976 - DNA, 25 bp, Homo sapien
tccccaggagccttcctgaaggcag

SEQ ID NO: 3968977 - DNA, 25 bp, Homo sapien
cctccccaacaaaggcagctctgga

SEQ ID NO: 3968978 - DNA, 25 bp, Homo sapien
agaggaatgaccagaggcaatgcag

SEQ ID NO: 3968979 - DNA, 25 bp, Homo sapien
agaggcaatgcagagaagcccctcc

SEQ ID NO: 3968980 - DNA, 25 bp, Homo sapien
tccttcagaatccttgtcagaggaa

SEQ ID NO: 3968981 - DNA, 25 bp, Homo sapien
ggatcccgtctgcatgtgctcacat

SEQ ID NO: 3968982 - DNA, 25 bp, Homo sapien
caccatcagggtgtaactgccagga

SEQ ID NO: 3968983 - DNA, 25 bp, Homo sapien
catctttgcggatttgggcctctac

SEQ ID NO: 3968984 - DNA, 25 bp, Homo sapien
taggatacccttgcaatgaaagacc

SEQ ID NO: 3968985 - DNA, 25 bp, Homo sapien
gcaacaggtgggacctgtttttggc

SEQ ID NO: 3968986 - DNA, 25 bp, Homo sapien
caacaggtgggacctgtttttggcg

SEQ ID NO: 3968987 - DNA, 25 bp, Homo sapien
tgttgaagaaaaatgccctagtcat

SEQ ID NO: 3968988 - DNA, 25 bp, Homo sapien
ctgttgaagaaaaatgccctagtca

SEQ ID NO: 3968989 - DNA, 25 bp, Homo sapien
cttgctaaaggtcccaattgctgcc

SEQ ID NO: 3968990 - DNA, 25 bp, Homo sapien
taaaggtcccaattgctgccaagaa

SEQ ID NO: 3968991 - DNA, 25 bp, Homo sapien
gctaaaggtcccaattgctgccaag

SEQ ID NO: 3968992 - DNA, 25 bp, Homo sapien
ttcttgctaaaggtcccaattgctg

SEQ ID NO: 3968993 - DNA, 25 bp, Homo sapien
aaagcctgtgatgcactcttgttcc

SEQ ID NO: 3968994 - DNA, 25 bp, Homo sapien
cacactcggtgaagtggaagcacag

SEQ ID NO: 3968995 - DNA, 25 bp, Homo sapien
cctggctctgttacaggcatctgca

SEQ ID NO: 3968996 - DNA, 25 bp, Homo sapien
tgttaaggaagccagtgttatttga

SEQ ID NO: 3968997 - DNA, 25 bp, Homo sapien
catatttattaccccaaaatttgca

SEQ ID NO: 3968998 - DNA, 25 bp, Homo sapien
tagggtcagattctgttaaactttc

SEQ ID NO: 3968999 - DNA, 25 bp, Homo sapien
cctaatgatgactaggatagggtca

SEQ ID NO: 3969000 - DNA, 25 bp, Homo sapien
taaaattatgatcccaacgcctaga

SEQ ID NO: 3969001 - DNA, 25 bp, Homo sapien
tatacgtactatttgtaacccttgc

SEQ ID NO: 3969002 - DNA, 25 bp, Homo sapien
gcatcatagccgtttggaactacag

SEQ ID NO: 3969003 - DNA, 25 bp, Homo sapien
tggcatcatagccgtttggaactac

SEQ ID NO: 3969004 - DNA, 25 bp, Homo sapien
ggcatcatagccgtttggaactaca

SEQ ID NO: 3969005 - DNA, 25 bp, Homo sapien
ctggcatcatagccgtttggaacta

SEQ ID NO: 3969006 - DNA, 25 bp, Homo sapien
tcagtgcggctgtgaaccaaagcaa

SEQ ID NO: 3969007 - DNA, 25 bp, Homo sapien
tcaggttgttccctttgctgaggac

SEQ ID NO: 3969008 - DNA, 25 bp, Homo sapien
gaggtggaccccagttcactaggct

SEQ ID NO: 3969009 - DNA, 25 bp, Homo sapien
tgctccagggtcgacttcagagcct

SEQ ID NO: 3969010 - DNA, 25 bp, Homo sapien
gcagctgtcctcactgcagtggatg

SEQ ID NO: 3969011 - DNA, 25 bp, Homo sapien
cagctgtcctcactgcagtggatgt

SEQ ID NO: 3969012 - DNA, 25 bp, Homo sapien
ctaatctagatatgccagggctcag

SEQ ID NO: 3969013 - DNA, 25 bp, Homo sapien
cagagcgtgctgattcctgttgagc

SEQ ID NO: 3969014 - DNA, 25 bp, Homo sapien
caggtctctcggatgactgactaca

SEQ ID NO: 3969015 - DNA, 25 bp, Homo sapien
gattggcccagagatagcatctagt

SEQ ID NO: 3969016 - DNA, 25 bp, Homo sapien
ggagatcttagtgtagatccacagt

SEQ ID NO: 3969017 - DNA, 25 bp, Homo sapien
gagatcttagtgtagatccacagta

SEQ ID NO: 3969018 - DNA, 25 bp, Homo sapien
aggagatcttagtgtagatccacag

SEQ ID NO: 3969019 - DNA, 25 bp, Homo sapien
cttctgaaatacatgaaaccagagc

SEQ ID NO: 3969020 - DNA, 25 bp, Homo sapien
ttggcttggccagatgcctcgtctt

SEQ ID NO: 3969021 - DNA, 25 bp, Homo sapien
tcttggcttggccagatgcctcgtc

SEQ ID NO: 3969022 - DNA, 25 bp, Homo sapien
ggcttggccagatgcctcgtcttgt

SEQ ID NO: 3969023 - DNA, 25 bp, Homo sapien
cacgatcactctttgggcagttctc

SEQ ID NO: 3969024 - DNA, 25 bp, Homo sapien
agagactgcattctttcacgatcac

SEQ ID NO: 3969025 - DNA, 25 bp, Homo sapien
tctttcacgatcactctttgggcag

SEQ ID NO: 3969026 - DNA, 25 bp, Homo sapien
gcattctttcacgatcactctttgg

SEQ ID NO: 3969027 - DNA, 25 bp, Homo sapien
tgtgcaacgcgactgtgccatgtgc

SEQ ID NO: 3969028 - DNA, 25 bp, Homo sapien
gcaacgcgactgtgccatgtgctgg

SEQ ID NO: 3969029 - DNA, 25 bp, Homo sapien
gggtggtagaggtgaattccacatg

SEQ ID NO: 3969030 - DNA, 25 bp, Homo sapien
tgtgtgcaacgcgactgtgccatgt

SEQ ID NO: 3969031 - DNA, 25 bp, Homo sapien
cttggaagcaacagagcgggcggtg

SEQ ID NO: 3969032 - DNA, 25 bp, Homo sapien
ttggaagcaacagagcgggcggtgg

SEQ ID NO: 3969033 - DNA, 25 bp, Homo sapien
aacctggcctcggacggcgtttgtg

SEQ ID NO: 3969034 - DNA, 25 bp, Homo sapien
gcaaagctgccgtttgattagccaa

SEQ ID NO: 3969035 - DNA, 25 bp, Homo sapien
tagaatcatccagaaccgcatcctg

SEQ ID NO: 3969036 - DNA, 25 bp, Homo sapien
catcctagggatcatcgtggtcatc

SEQ ID NO: 3969037 - DNA, 25 bp, Homo sapien
tatctgctctcccttgataaacagc

SEQ ID NO: 3969038 - DNA, 25 bp, Homo sapien
gctctcccttgataaacagcaacaa

SEQ ID NO: 3969039 - DNA, 25 bp, Homo sapien
cctgatggcgatcactttttctgtc

SEQ ID NO: 3969040 - DNA, 25 bp, Homo sapien
ctgatggcgatcactttttctgtca

SEQ ID NO: 3969041 - DNA, 25 bp, Homo sapien
gacaaaatggtcacatgaatcattc

SEQ ID NO: 3969042 - DNA, 25 bp, Homo sapien
caaaatggtcacatgaatcattctg

SEQ ID NO: 3969043 - DNA, 25 bp, Homo sapien
taagacaaaatggtcacatgaatca

SEQ ID NO: 3969044 - DNA, 25 bp, Homo sapien
attaagacaaaatggtcacatgaat

SEQ ID NO: 3969045 - DNA, 25 bp, Homo sapien
cgccgttgggctgaagtgcaaagag

SEQ ID NO: 3969046 - DNA, 25 bp, Homo sapien
ggctgaagtgcaaagagtgtaaaaa

SEQ ID NO: 3969047 - DNA, 25 bp, Homo sapien
ccgttgggctgaagtgcaaagagtg

SEQ ID NO: 3969048 - DNA, 25 bp, Homo sapien
ttgggctgaagtgcaaagagtgtaa

SEQ ID NO: 3969049 - DNA, 25 bp, Homo sapien
tggattgtcttattttggaaccagc

SEQ ID NO: 3969050 - DNA, 25 bp, Homo sapien
aatggtgaacaaaattgtgcggctc

SEQ ID NO: 3969051 - DNA, 25 bp, Homo sapien
tgtcttattttggaaccagcttggt

SEQ ID NO: 3969052 - DNA, 25 bp, Homo sapien
tgaacaaaattgtgcggctctggcc

SEQ ID NO: 3969053 - DNA, 25 bp, Homo sapien
gatagcaagggcaagtaggccccct

SEQ ID NO: 3969054 - DNA, 25 bp, Homo sapien
ttttctagcaccaggggatagcaag

SEQ ID NO: 3969055 - DNA, 25 bp, Homo sapien
aggcgagcagggcaaaagcaagatg

SEQ ID NO: 3969056 - DNA, 25 bp, Homo sapien
caagtaggcccccttgagctcatca

SEQ ID NO: 3969057 - DNA, 25 bp, Homo sapien
cagtgccacttcgttaccgcaactt

SEQ ID NO: 3969058 - DNA, 25 bp, Homo sapien
gagttgagaatgaacacatcctccc

SEQ ID NO: 3969059 - DNA, 25 bp, Homo sapien
cacttattttgccagggtaagcacc

SEQ ID NO: 3969060 - DNA, 25 bp, Homo sapien
tgttttttcgtgacgaggccccaca

SEQ ID NO: 3969061 - DNA, 25 bp, Homo sapien
ccgtcagagactctccgctcaattt

SEQ ID NO: 3969062 - DNA, 25 bp, Homo sapien
actgtggccgtcagagactctccgc

SEQ ID NO: 3969063 - DNA, 25 bp, Homo sapien
gggacactgtggccgtcagagactc

SEQ ID NO: 3969064 - DNA, 25 bp, Homo sapien
tggccgtcagagactctccgctcaa

SEQ ID NO: 3969065 - DNA, 25 bp, Homo sapien
gagagaagacacgtgggatccactt

SEQ ID NO: 3969066 - DNA, 25 bp, Homo sapien
cctgagcactgtgcatggtgtggga

SEQ ID NO: 3969067 - DNA, 25 bp, Homo sapien
attatcgtttgtccccatccaaaag

SEQ ID NO: 3969068 - DNA, 25 bp, Homo sapien
cagcaagttctctgttaattatcgt

SEQ ID NO: 3969069 - DNA, 25 bp, Homo sapien
caatgactcttggataacctatttt

SEQ ID NO: 3969070 - DNA, 25 bp, Homo sapien
tagacactgcctattgatttttccc

SEQ ID NO: 3969071 - DNA, 25 bp, Homo sapien
gactcttggataacctattttctca

SEQ ID NO: 3969072 - DNA, 25 bp, Homo sapien
attttgatagcccaagtgaatagac

SEQ ID NO: 3969073 - DNA, 25 bp, Homo sapien
ctgcacttcatccattttagccaaa

SEQ ID NO: 3969074 - DNA, 25 bp, Homo sapien
gcccaccaagctgcccagcagcgca

SEQ ID NO: 3969075 - DNA, 25 bp, Homo sapien
cagcagcgcatccacatcagactta

SEQ ID NO: 3969076 - DNA, 25 bp, Homo sapien
tccattttagccaaaggggccctgc

SEQ ID NO: 3969077 - DNA, 25 bp, Homo sapien
atgaagggcggcactgacccaagtt

SEQ ID NO: 3969078 - DNA, 25 bp, Homo sapien
cagaagaatgaagggcggcactgac

SEQ ID NO: 3969079 - DNA, 25 bp, Homo sapien
cccaagttggctccggtggagttgt

SEQ ID NO: 3969080 - DNA, 25 bp, Homo sapien
ggcactgacccaagttggctccggt

SEQ ID NO: 3969081 - DNA, 25 bp, Homo sapien
gataccagcaccagttgggtctgag

SEQ ID NO: 3969082 - DNA, 25 bp, Homo sapien
gatgcaaaggtctgctgataccagc

SEQ ID NO: 3969083 - DNA, 25 bp, Homo sapien
taattctgctagacctggtgcctcc

SEQ ID NO: 3969084 - DNA, 25 bp, Homo sapien
aattaatcgatagcagagtcctccc

SEQ ID NO: 3969085 - DNA, 25 bp, Homo sapien
gggagaatgcaagccaccaggcaat

SEQ ID NO: 3969086 - DNA, 25 bp, Homo sapien
ctgtgattggttccatgcaaagaac

SEQ ID NO: 3969087 - DNA, 25 bp, Homo sapien
aaagaaccctctcatggtacagcag

SEQ ID NO: 3969088 - DNA, 25 bp, Homo sapien
atttcagctcttgttaccacctctc

SEQ ID NO: 3969089 - DNA, 25 bp, Homo sapien
caaagccaaaaggagccctctctca

SEQ ID NO: 3969090 - DNA, 25 bp, Homo sapien
tcccaaagccaaaaggagccctctc

SEQ ID NO: 3969091 - DNA, 25 bp, Homo sapien
caaaaggagccctctctcatggatg

SEQ ID NO: 3969092 - DNA, 25 bp, Homo sapien
aagccaaaaggagccctctctcatg

SEQ ID NO: 3969093 - DNA, 25 bp, Homo sapien
tctcctccccggtggcagtcaattg

SEQ ID NO: 3969094 - DNA, 25 bp, Homo sapien
aacacggagccccagaatgtcgctt

SEQ ID NO: 3969095 - DNA, 25 bp, Homo sapien
aagaaacaatgcacgaaaaagcagt

SEQ ID NO: 3969096 - DNA, 25 bp, Homo sapien
ggcagtcaattgattacttgtcagt

SEQ ID NO: 3969097 - DNA, 25 bp, Homo sapien
tcaggccacgtgtagtagcacttga

SEQ ID NO: 3969098 - DNA, 25 bp, Homo sapien
ggaatcaggccacgtgtagtagcac

SEQ ID NO: 3969099 - DNA, 25 bp, Homo sapien
cacgtgtagtagcacttgaatctgt

SEQ ID NO: 3969100 - DNA, 25 bp, Homo sapien
aagattggaatcaggccacgtgtag

SEQ ID NO: 3969101 - DNA, 25 bp, Homo sapien
gaagaggggcgttgggagccacacc

SEQ ID NO: 3969102 - DNA, 25 bp, Homo sapien
caagatggtgcaaggggcattggtc

SEQ ID NO: 3969103 - DNA, 25 bp, Homo sapien
gagccacaccaccaagatggtgcaa

SEQ ID NO: 3969104 - DNA, 25 bp, Homo sapien
ggcattggtcatgcagctggccaac

SEQ ID NO: 3969105 - DNA, 25 bp, Homo sapien
agggaaagtgggcgtctgaatctgg

SEQ ID NO: 3969106 - DNA, 25 bp, Homo sapien
accagggaaagtgggcgtctgaatc

SEQ ID NO: 3969107 - DNA, 25 bp, Homo sapien
cagggaaagtgggcgtctgaatctg

SEQ ID NO: 3969108 - DNA, 25 bp, Homo sapien
ccagggaaagtgggcgtctgaatct

SEQ ID NO: 3969109 - DNA, 25 bp, Homo sapien
agaaaggtggtgaagaattcattcc

SEQ ID NO: 3969110 - DNA, 25 bp, Homo sapien
ctgtcatcacaaaatagaaaggtgg

SEQ ID NO: 3969111 - DNA, 25 bp, Homo sapien
agcaccagatgtggggtgcggcact

SEQ ID NO: 3969112 - DNA, 25 bp, Homo sapien
tagaaaggtggtgaagaattcattc

SEQ ID NO: 3969113 - DNA, 25 bp, Homo sapien
tcccattggctgttccaggttggca

SEQ ID NO: 3969114 - DNA, 25 bp, Homo sapien
acagagcatgcacagacctcgcctg

SEQ ID NO: 3969115 - DNA, 25 bp, Homo sapien
ttggctgttccaggttggcacaggt

SEQ ID NO: 3969116 - DNA, 25 bp, Homo sapien
cgcctgctgattggctgaatcctgg

SEQ ID NO: 3969117 - DNA, 25 bp, Homo sapien
gggcttgtggtccgcaaatccacct

SEQ ID NO: 3969118 - DNA, 25 bp, Homo sapien
ttgtggtccgcaaatccacctgtct

SEQ ID NO: 3969119 - DNA, 25 bp, Homo sapien
gtggtccgcaaatccacctgtctca

SEQ ID NO: 3969120 - DNA, 25 bp, Homo sapien
gcttgtggtccgcaaatccacctgt

SEQ ID NO: 3969121 - DNA, 25 bp, Homo sapien
tcccccaccaaggaagaggggctgc

SEQ ID NO: 3969122 - DNA, 25 bp, Homo sapien
aaggaagaggggctgcctggacttc

SEQ ID NO: 3969123 - DNA, 25 bp, Homo sapien
ccaaggaagaggggctgcctggact

SEQ ID NO: 3969124 - DNA, 25 bp, Homo sapien
ggaagaggggctgcctggacttcat

SEQ ID NO: 3969125 - DNA, 25 bp, Homo sapien
aatgcctggctctagagaaatgctt

SEQ ID NO: 3969126 - DNA, 25 bp, Homo sapien
gaaatgctttcagaactaacttgcg

SEQ ID NO: 3969127 - DNA, 25 bp, Homo sapien
aactaacttgcgcagcagcgaccct

SEQ ID NO: 3969128 - DNA, 25 bp, Homo sapien
gagaagcggtagcttcgtctctcct

SEQ ID NO: 3969129 - DNA, 25 bp, Homo sapien
aaaatggcagcccacagatgcacag

SEQ ID NO: 3969130 - DNA, 25 bp, Homo sapien
gatgtccaaacgcaaagtcttcctg

SEQ ID NO: 3969131 - DNA, 25 bp, Homo sapien
gagcttgctctcctagcaatattag

SEQ ID NO: 3969132 - DNA, 25 bp, Homo sapien
ggtaacacggccacacaaaatggca

SEQ ID NO: 3969133 - DNA, 25 bp, Homo sapien
cgttgcttggtggtctctgtcctga

SEQ ID NO: 3969134 - DNA, 25 bp, Homo sapien
aggcagcacgttgcttggtggtctc

SEQ ID NO: 3969135 - DNA, 25 bp, Homo sapien
gacagtgtggacaaggacaggagca

SEQ ID NO: 3969136 - DNA, 25 bp, Homo sapien
ggtggtctctgtcctgaagccaatg

SEQ ID NO: 3969137 - DNA, 25 bp, Homo sapien
tggccacgcttgacactttctcttc

SEQ ID NO: 3969138 - DNA, 25 bp, Homo sapien
atttggccacgcttgacactttctc

SEQ ID NO: 3969139 - DNA, 25 bp, Homo sapien
catgaagaggctagtggatttggca

SEQ ID NO: 3969140 - DNA, 25 bp, Homo sapien
ttctcatttggccacgcttgacact

SEQ ID NO: 3969141 - DNA, 25 bp, Homo sapien
tcattgcttcaccagagcacagaac

SEQ ID NO: 3969142 - DNA, 25 bp, Homo sapien
tgatgtggccatgcagacatgacag

SEQ ID NO: 3969143 - DNA, 25 bp, Homo sapien
taaacattgggcttggccgctgatg

SEQ ID NO: 3969144 - DNA, 25 bp, Homo sapien
gcatgctgtgatgaatgacgctggc

SEQ ID NO: 3969145 - DNA, 25 bp, Homo sapien
tgagatggacgctcagtgacccgga

SEQ ID NO: 3969146 - DNA, 25 bp, Homo sapien
tgacccggattagggtgctctgccc

SEQ ID NO: 3969147 - DNA, 25 bp, Homo sapien
cgggcctcgctgacgtcatcaatta

SEQ ID NO: 3969148 - DNA, 25 bp, Homo sapien
tcatcaattatgcatggtcctgggc

SEQ ID NO: 3969149 - DNA, 25 bp, Homo sapien
agaagcagcttgacagccgggccct

SEQ ID NO: 3969150 - DNA, 25 bp, Homo sapien
agcagcttgacagccgggccctgtc

SEQ ID NO: 3969151 - DNA, 25 bp, Homo sapien
ctagaagcagcttgacagccgggcc

SEQ ID NO: 3969152 - DNA, 25 bp, Homo sapien
aagcagcttgacagccgggccctgt

SEQ ID NO: 3969153 - DNA, 25 bp, Homo sapien
ccaagtataacacaggattgtgatc

SEQ ID NO: 3969154 - DNA, 25 bp, Homo sapien
ctttgtgcccttcaccaagtataac

SEQ ID NO: 3969155 - DNA, 25 bp, Homo sapien
tgcccttcaccaagtataacacagg

SEQ ID NO: 3969156 - DNA, 25 bp, Homo sapien
cttcaccaagtataacacaggattg

SEQ ID NO: 3969157 - DNA, 25 bp, Homo sapien
taaacccagtgtgactcggtgcaaa

SEQ ID NO: 3969158 - DNA, 25 bp, Homo sapien
ccgaggcagtcagtggttaagacaa

SEQ ID NO: 3969159 - DNA, 25 bp, Homo sapien
aacttagccaattgaagaaccgagg

SEQ ID NO: 3969160 - DNA, 25 bp, Homo sapien
gagtctcggatgaacagctctctag

SEQ ID NO: 3969161 - DNA, 25 bp, Homo sapien
tttccactgttgtgtgcccccttgg

SEQ ID NO: 3969162 - DNA, 25 bp, Homo sapien
caaaaaaggcccctcttcagtagca

SEQ ID NO: 3969163 - DNA, 25 bp, Homo sapien
ttcagtagcatggatggaagacatt

SEQ ID NO: 3969164 - DNA, 25 bp, Homo sapien
ggagtaaaacaaagcattgaccttg

SEQ ID NO: 3969165 - DNA, 25 bp, Homo sapien
aggtcactgagctgtaattctgtct

SEQ ID NO: 3969166 - DNA, 25 bp, Homo sapien
tctgcagagtgacaggaaattgggc

SEQ ID NO: 3969167 - DNA, 25 bp, Homo sapien
tcctagagcctcttcgaagcctttt

SEQ ID NO: 3969168 - DNA, 25 bp, Homo sapien
aattctgtctttgccttgcctggtt

SEQ ID NO: 3969169 - DNA, 25 bp, Homo sapien
ttgtagagagcggggtctgttgtcc

SEQ ID NO: 3969170 - DNA, 25 bp, Homo sapien
tgtagagagcggggtctgttgtcca

SEQ ID NO: 3969171 - DNA, 25 bp, Homo sapien
tttgtagagagcggggtctgttgtc

SEQ ID NO: 3969172 - DNA, 25 bp, Homo sapien
tccttcaaagacgagggcgaacagg

SEQ ID NO: 3969173 - DNA, 25 bp, Homo sapien
taggcgccaacgacgaactgatttc

SEQ ID NO: 3969174 - DNA, 25 bp, Homo sapien
gaagagctccgaaaactcctcggca

SEQ ID NO: 3969175 - DNA, 25 bp, Homo sapien
gatgtcaaatcgtctctagtcaatg

SEQ ID NO: 3969176 - DNA, 25 bp, Homo sapien
cacttcgccacgttcttgctttcag

SEQ ID NO: 3969177 - DNA, 25 bp, Homo sapien
tgttggggagacctctctgtccaag

SEQ ID NO: 3969178 - DNA, 25 bp, Homo sapien
tttcagtttgctgcctcgtgatgtt

SEQ ID NO: 3969179 - DNA, 25 bp, Homo sapien
tctgccttttgtggactggatttgt

SEQ ID NO: 3969180 - DNA, 25 bp, Homo sapien
cacaaagacaactaggagaggatcc

SEQ ID NO: 3969181 - DNA, 25 bp, Homo sapien
catgaatcagtaaggccaccaggac

SEQ ID NO: 3969182 - DNA, 25 bp, Homo sapien
agttcccatctgagctttaccaaag

SEQ ID NO: 3969183 - DNA, 25 bp, Homo sapien
gagagtgtccttaccccatgttggc

SEQ ID NO: 3969184 - DNA, 25 bp, Homo sapien
gagtgttcgaccactttgtcaactt

SEQ ID NO: 3969185 - DNA, 25 bp, Homo sapien
gaccactttgtcaacttggtgttct

SEQ ID NO: 3969186 - DNA, 25 bp, Homo sapien
ttgagatgagtgttcgaccactttg

SEQ ID NO: 3969187 - DNA, 25 bp, Homo sapien
gttcgaccactttgtcaacttggtg

SEQ ID NO: 3969188 - DNA, 25 bp, Homo sapien
gtaactatggttggactggtgtcta

SEQ ID NO: 3969189 - DNA, 25 bp, Homo sapien
tggcatcatccaaacagtggtaact

SEQ ID NO: 3969190 - DNA, 25 bp, Homo sapien
ctggtgtctatttctatgaccatct

SEQ ID NO: 3969191 - DNA, 25 bp, Homo sapien
catccaaacagtggtaactatggtt

SEQ ID NO: 3969192 - DNA, 25 bp, Homo sapien
cattgttgatgattgaaattgaaga

SEQ ID NO: 3969193 - DNA, 25 bp, Homo sapien
tgttgatgattgaaattgaagaatt

SEQ ID NO: 3969194 - DNA, 25 bp, Homo sapien
ttgttgatgattgaaattgaagaat

SEQ ID NO: 3969195 - DNA, 25 bp, Homo sapien
ttttaagttgattcagtaagcattg

SEQ ID NO: 3969196 - DNA, 25 bp, Homo sapien
tgtaaactgtacttcaacaagatgg

SEQ ID NO: 3969197 - DNA, 25 bp, Homo sapien
gagcagaaaatgtagcttgaactgg

SEQ ID NO: 3969198 - DNA, 25 bp, Homo sapien
tatgatccgatgacaaatctgcctt

SEQ ID NO: 3969199 - DNA, 25 bp, Homo sapien
gcttgaactggcgtgatgttagcaa

SEQ ID NO: 3969200 - DNA, 25 bp, Homo sapien
gagagaaaatccatttaaatctcat

SEQ ID NO: 3969201 - DNA, 25 bp, Homo sapien
tagagagaaaatccatttaaatctc

SEQ ID NO: 3969202 - DNA, 25 bp, Homo sapien
ctgtagagagaaaatccatttaaat

SEQ ID NO: 3969203 - DNA, 25 bp, Homo sapien
tgtagagagaaaatccatttaaatc

SEQ ID NO: 3969204 - DNA, 25 bp, Homo sapien
cacatagtgggtgctgaatgtatac

SEQ ID NO: 3969205 - DNA, 25 bp, Homo sapien
gttttcagagctagatattggtgtt

SEQ ID NO: 3969206 - DNA, 25 bp, Homo sapien
ggtgaatgaaagcattgaacttgag

SEQ ID NO: 3969207 - DNA, 25 bp, Homo sapien
gctactaagtggtgacccagctttg

SEQ ID NO: 3969208 - DNA, 25 bp, Homo sapien
tataaggacctcatatcctaatttc

SEQ ID NO: 3969209 - DNA, 25 bp, Homo sapien
gtataaggacctcatatcctaattt

SEQ ID NO: 3969210 - DNA, 25 bp, Homo sapien
gatgttcttagaagactccaaccct

SEQ ID NO: 3969211 - DNA, 25 bp, Homo sapien
taaaagactggagtgcataaggagc

SEQ ID NO: 3969212 - DNA, 25 bp, Homo sapien
tcattgtatgaggtcatggtgcaca

SEQ ID NO: 3969213 - DNA, 25 bp, Homo sapien
gccttggagacttcgcctgttgaaa

SEQ ID NO: 3969214 - DNA, 25 bp, Homo sapien
tctggagaacagacccttaaggaaa

SEQ ID NO: 3969215 - DNA, 25 bp, Homo sapien
tatacacagtgtgaactgggcaggc

SEQ ID NO: 3969216 - DNA, 25 bp, Homo sapien
caggatgtgcttccaaatctgaagg

SEQ ID NO: 3969217 - DNA, 25 bp, Homo sapien
tccgctttgcgggttagaatggcca

SEQ ID NO: 3969218 - DNA, 25 bp, Homo sapien
acttgttgctgttgctacattttca

SEQ ID NO: 3969219 - DNA, 25 bp, Homo sapien
tcctcacagaagatacgatttgtga

SEQ ID NO: 3969220 - DNA, 25 bp, Homo sapien
cagtatgttttaggcagcctgcttt

SEQ ID NO: 3969221 - DNA, 25 bp, Homo sapien
cagaagatacgatttgtgaagctgt

SEQ ID NO: 3969222 - DNA, 25 bp, Homo sapien
tcgccctgagagtggatttttatct

SEQ ID NO: 3969223 - DNA, 25 bp, Homo sapien
ttatcgtttctttcgccctgagagt

SEQ ID NO: 3969224 - DNA, 25 bp, Homo sapien
gtttctttcgccctgagagtggatt

SEQ ID NO: 3969225 - DNA, 25 bp, Homo sapien
tttttatctttcgatctgacttctg

SEQ ID NO: 3969226 - DNA, 25 bp, Homo sapien
tcaagagcgtcaacaatgtgggaaa

SEQ ID NO: 3969227 - DNA, 25 bp, Homo sapien
tctcaagagcgtcaacaatgtggga

SEQ ID NO: 3969228 - DNA, 25 bp, Homo sapien
ctctcaagagcgtcaacaatgtggg

SEQ ID NO: 3969229 - DNA, 25 bp, Homo sapien
tatgtgaatgtcctggcggatgctc

SEQ ID NO: 3969230 - DNA, 25 bp, Homo sapien
gctgggatgtagcactagacttgcc

SEQ ID NO: 3969231 - DNA, 25 bp, Homo sapien
tgacatgctcatgagagtttgcggc

SEQ ID NO: 3969232 - DNA, 25 bp, Homo sapien
gactgaggccttgcacgtgacattg

SEQ ID NO: 3969233 - DNA, 25 bp, Homo sapien
gacattggtgaggactcgcagcctc

SEQ ID NO: 3969234 - DNA, 25 bp, Homo sapien
tttgagtgccaagacagaccgtttg

SEQ ID NO: 3969235 - DNA, 25 bp, Homo sapien
aagttgtgggccagactcggactgc

SEQ ID NO: 3969236 - DNA, 25 bp, Homo sapien
ttccttgggaactctcagcctctgg

SEQ ID NO: 3969237 - DNA, 25 bp, Homo sapien
gaccgtttgatggaagccctctggg

SEQ ID NO: 3969238 - DNA, 25 bp, Homo sapien
ctagtcagggcttgttacatatgga

SEQ ID NO: 3969239 - DNA, 25 bp, Homo sapien
tgtcggtctgttcagctgtagctga

SEQ ID NO: 3969240 - DNA, 25 bp, Homo sapien
tggagaaggcccctgtcggtctgtt

SEQ ID NO: 3969241 - DNA, 25 bp, Homo sapien
gttacatatggagcagagacagcgc

SEQ ID NO: 3969242 - DNA, 25 bp, Homo sapien
ggaaacatcactgtgaaggtggaat

SEQ ID NO: 3969243 - DNA, 25 bp, Homo sapien
gtggaatgagccacatacagaggtg

SEQ ID NO: 3969244 - DNA, 25 bp, Homo sapien
ccacactggcgaacctatggattct

SEQ ID NO: 3969245 - DNA, 25 bp, Homo sapien
gagccttggaaggagtagggcacgt

SEQ ID NO: 3969246 - DNA, 25 bp, Homo sapien
tctctcctaagctgacttctggagg

SEQ ID NO: 3969247 - DNA, 25 bp, Homo sapien
tctcctaagctgacttctggagggc

SEQ ID NO: 3969248 - DNA, 25 bp, Homo sapien
tctctctcctaagctgacttctgga

SEQ ID NO: 3969249 - DNA, 25 bp, Homo sapien
ctcctaagctgacttctggagggca

SEQ ID NO: 3969250 - DNA, 25 bp, Homo sapien
agtgctggtgaagcctgaaggccaa

SEQ ID NO: 3969251 - DNA, 25 bp, Homo sapien
gggatttccggccagtgatcagtgc

SEQ ID NO: 3969252 - DNA, 25 bp, Homo sapien
gtttagctgttcagtcagaacccaa

SEQ ID NO: 3969253 - DNA, 25 bp, Homo sapien
gccaaagagatggtttccttcaacc

SEQ ID NO: 3969254 - DNA, 25 bp, Homo sapien
cttgcaagggcatttgctcttctgg

SEQ ID NO: 3969255 - DNA, 25 bp, Homo sapien
tgcagggagactgtgcttctcagag

SEQ ID NO: 3969256 - DNA, 25 bp, Homo sapien
gggagactgtgcttctcagagatgt

SEQ ID NO: 3969257 - DNA, 25 bp, Homo sapien
caagggcatttgctcttctgggact

SEQ ID NO: 3969258 - DNA, 25 bp, Homo sapien
gctgctgccttttcgtgaaagggtt

SEQ ID NO: 3969259 - DNA, 25 bp, Homo sapien
tgccttttcgtgaaagggttgacac

SEQ ID NO: 3969260 - DNA, 25 bp, Homo sapien
agctgctgccttttcgtgaaagggt

SEQ ID NO: 3969261 - DNA, 25 bp, Homo sapien
gctgccttttcgtgaaagggttgac

SEQ ID NO: 3969262 - DNA, 25 bp, Homo sapien
ttctcccccaggaagagtgaccagg

SEQ ID NO: 3969263 - DNA, 25 bp, Homo sapien
tcccccaggaagagtgaccagggac

SEQ ID NO: 3969264 - DNA, 25 bp, Homo sapien
tctcccccaggaagagtgaccaggg

SEQ ID NO: 3969265 - DNA, 25 bp, Homo sapien
cttctcccccaggaagagtgaccag

SEQ ID NO: 3969266 - DNA, 25 bp, Homo sapien
tgccgtatgaggcacccttagtttt

SEQ ID NO: 3969267 - DNA, 25 bp, Homo sapien
gatgagatctctgccggaccaaaga

SEQ ID NO: 3969268 - DNA, 25 bp, Homo sapien
tctgcctcaaaacctagcacagctg

SEQ ID NO: 3969269 - DNA, 25 bp, Homo sapien
taaatggtgacaaattcatgggctt

SEQ ID NO: 3969270 - DNA, 25 bp, Homo sapien
gctctgggtacatgagtgtgagata

SEQ ID NO: 3969271 - DNA, 25 bp, Homo sapien
tactgcactattccagtcggacagg

SEQ ID NO: 3969272 - DNA, 25 bp, Homo sapien
aagacagtggcatcggatttactgc

SEQ ID NO: 3969273 - DNA, 25 bp, Homo sapien
gatatggataccctaggctctgccc

SEQ ID NO: 3969274 - DNA, 25 bp, Homo sapien
gttcgtgcagtgagcgtgtcttcct

SEQ ID NO: 3969275 - DNA, 25 bp, Homo sapien
agtgacaggcggtttgagaactccg

SEQ ID NO: 3969276 - DNA, 25 bp, Homo sapien
tatcgtcactgctgcaggtgaaaga

SEQ ID NO: 3969277 - DNA, 25 bp, Homo sapien
agcagggcctgaaacttttatcgtc

SEQ ID NO: 3969278 - DNA, 25 bp, Homo sapien
agagtattttatttatgtgtttcca

SEQ ID NO: 3969279 - DNA, 25 bp, Homo sapien
tgtagtggtccaacaaagagtattt

SEQ ID NO: 3969280 - DNA, 25 bp, Homo sapien
tattttatttatgtgtttccaagcc

SEQ ID NO: 3969281 - DNA, 25 bp, Homo sapien
ctgtagtggtccaacaaagagtatt

SEQ ID NO: 3969282 - DNA, 25 bp, Homo sapien
gattaaacagaagagatgtgactcc

SEQ ID NO: 3969283 - DNA, 25 bp, Homo sapien
catactcgttgtttacacgaaggga

SEQ ID NO: 3969284 - DNA, 25 bp, Homo sapien
tattgtcttgtgagtgttgagtgat

SEQ ID NO: 3969285 - DNA, 25 bp, Homo sapien
gcctggcttcactaagatagtcttg

SEQ ID NO: 3969286 - DNA, 25 bp, Homo sapien
gtctgctttgtagcgagctgtcccc

SEQ ID NO: 3969287 - DNA, 25 bp, Homo sapien
catgtggtgccagtagtgtctgctt

SEQ ID NO: 3969288 - DNA, 25 bp, Homo sapien
cctcccacttttgggctcagaaaga

SEQ ID NO: 3969289 - DNA, 25 bp, Homo sapien
ccagccacccatgtggtgccagtag

SEQ ID NO: 3969290 - DNA, 25 bp, Homo sapien
tgtcctcatcgttatcccaaattgc

SEQ ID NO: 3969291 - DNA, 25 bp, Homo sapien
tgccaccctgtttgcgcaagggttt

SEQ ID NO: 3969292 - DNA, 25 bp, Homo sapien
gaggaagtcattctccaagtgtttg

SEQ ID NO: 3969293 - DNA, 25 bp, Homo sapien
ggtttgagattgtgtggcccctcct

SEQ ID NO: 3969294 - DNA, 25 bp, Homo sapien
acactcaaagcctttgatcttttgc

SEQ ID NO: 3969295 - DNA, 25 bp, Homo sapien
aagcctttgatcttttgctttggag

SEQ ID NO: 3969296 - DNA, 25 bp, Homo sapien
ctttggaggtaacatcaaaaggaag

SEQ ID NO: 3969297 - DNA, 25 bp, Homo sapien
gcctttgatcttttgctttggaggt

SEQ ID NO: 3969298 - DNA, 25 bp, Homo sapien
ctttttggtgtatgctcagagcatc

SEQ ID NO: 3969299 - DNA, 25 bp, Homo sapien
ttggacatcttcctggtcagtgtcc

SEQ ID NO: 3969300 - DNA, 25 bp, Homo sapien
tgctcagagcatccttggacatctt

SEQ ID NO: 3969301 - DNA, 25 bp, Homo sapien
tggtgtatgctcagagcatccttgg

SEQ ID NO: 3969302 - DNA, 25 bp, Homo sapien
ctaaaaccatgcttgggagcgccac

SEQ ID NO: 3969303 - DNA, 25 bp, Homo sapien
ttctgctcatggaatagcctcaggc

SEQ ID NO: 3969304 - DNA, 25 bp, Homo sapien
ccaggtgtggcctcaaaattctgct

SEQ ID NO: 3969305 - DNA, 25 bp, Homo sapien
gattagttgctcaacccaggtgtgg

SEQ ID NO: 3969306 - DNA, 25 bp, Homo sapien
aagcttgagtctgtgattcctgggc

SEQ ID NO: 3969307 - DNA, 25 bp, Homo sapien
cagggccttctcctagttgagtgag

SEQ ID NO: 3969308 - DNA, 25 bp, Homo sapien
tcctgcaatgtcctatagaagcttg

SEQ ID NO: 3969309 - DNA, 25 bp, Homo sapien
ttctccaggcctgttcggcagcatg

SEQ ID NO: 3969310 - DNA, 25 bp, Homo sapien
gccattgagtttagtcctgtgagta

SEQ ID NO: 3969311 - DNA, 25 bp, Homo sapien
tactcccttgagtattgccattgag

SEQ ID NO: 3969312 - DNA, 25 bp, Homo sapien
agtattgccgttgagtattactccc

SEQ ID NO: 3969313 - DNA, 25 bp, Homo sapien
agcgttactgcctcgagtattgccg

SEQ ID NO: 3969314 - DNA, 25 bp, Homo sapien
ttgcggctgccattccttggggtct

SEQ ID NO: 3969315 - DNA, 25 bp, Homo sapien
tgcggctgccattccttggggtctg

SEQ ID NO: 3969316 - DNA, 25 bp, Homo sapien
tctcccttggcttgttgacagcgtg

SEQ ID NO: 3969317 - DNA, 25 bp, Homo sapien
tgtttttatgccttgcgctggtaag

SEQ ID NO: 3969318 - DNA, 25 bp, Homo sapien
gtgttctgggcattttcgcatctcc

SEQ ID NO: 3969319 - DNA, 25 bp, Homo sapien
gatggtcccgaaacagggtgccaag

SEQ ID NO: 3969320 - DNA, 25 bp, Homo sapien
gagatgcagcgacttagaacacccg

SEQ ID NO: 3969321 - DNA, 25 bp, Homo sapien
tgctgccaggtttcacccaaatgca

SEQ ID NO: 3969322 - DNA, 25 bp, Homo sapien
tgtttcgtgggacggctttgcctcc

SEQ ID NO: 3969323 - DNA, 25 bp, Homo sapien
tcagaattctgctgggcttgcaagc

SEQ ID NO: 3969324 - DNA, 25 bp, Homo sapien
gcttcgtctcttaacaatttccatg

SEQ ID NO: 3969325 - DNA, 25 bp, Homo sapien
atttgttggcttcgtctcttaacaa

SEQ ID NO: 3969326 - DNA, 25 bp, Homo sapien
ttcgtctcttaacaatttccatggt

SEQ ID NO: 3969327 - DNA, 25 bp, Homo sapien
gttggcttcgtctcttaacaatttc

SEQ ID NO: 3969328 - DNA, 25 bp, Homo sapien
cctaaggggcccattggttgtgaga

SEQ ID NO: 3969329 - DNA, 25 bp, Homo sapien
ggagggtctggtgaaattccatacc

SEQ ID NO: 3969330 - DNA, 25 bp, Homo sapien
taccgattgtccgtgtgtgagctgc

SEQ ID NO: 3969331 - DNA, 25 bp, Homo sapien
tgctgtaccatagcctccctgcaga

SEQ ID NO: 3969332 - DNA, 25 bp, Homo sapien
tcaaggaatgggcttggatttgtgt

SEQ ID NO: 3969333 - DNA, 25 bp, Homo sapien
ggatttggttagctctctctgggca

SEQ ID NO: 3969334 - DNA, 25 bp, Homo sapien
tatataggcaatgatcctgggctgc

SEQ ID NO: 3969335 - DNA, 25 bp, Homo sapien
cagcggttctgtggcatcaagttgc

SEQ ID NO: 3969336 - DNA, 25 bp, Homo sapien
gcatcaagttgcactgggaaggaga

SEQ ID NO: 3969337 - DNA, 25 bp, Homo sapien
tgtattgtaggcttggagtgctgaa

SEQ ID NO: 3969338 - DNA, 25 bp, Homo sapien
ttgtaggcttggagtgctgaaatgt

SEQ ID NO: 3969339 - DNA, 25 bp, Homo sapien
tatgtgtattgtaggcttggagtgc

SEQ ID NO: 3969340 - DNA, 25 bp, Homo sapien
aaaattatgtgtattgtaggcttgg

SEQ ID NO: 3969341 - DNA, 25 bp, Homo sapien
gctggcaaaactccccgagagcgga

SEQ ID NO: 3969342 - DNA, 25 bp, Homo sapien
ggcaaaactccccgagagcggacat

SEQ ID NO: 3969343 - DNA, 25 bp, Homo sapien
ctggcaaaactccccgagagcggac

SEQ ID NO: 3969344 - DNA, 25 bp, Homo sapien
tggcaaaactccccgagagcggaca

SEQ ID NO: 3969345 - DNA, 25 bp, Homo sapien
tcagggacagtgcataggtgtaaag

SEQ ID NO: 3969346 - DNA, 25 bp, Homo sapien
cagtgcataggtgtaaagaagttgc

SEQ ID NO: 3969347 - DNA, 25 bp, Homo sapien
ggacagtgcataggtgtaaagaagt

SEQ ID NO: 3969348 - DNA, 25 bp, Homo sapien
cataggtgtaaagaagttgctggtt

SEQ ID NO: 3969349 - DNA, 25 bp, Homo sapien
cagctggcaactgtctacaatcttt

SEQ ID NO: 3969350 - DNA, 25 bp, Homo sapien
tggcaactgtctacaatcttttggg

SEQ ID NO: 3969351 - DNA, 25 bp, Homo sapien
cctcttgtagatggagacctttgtc

SEQ ID NO: 3969352 - DNA, 25 bp, Homo sapien
ctgtctacaatcttttgggctttct

SEQ ID NO: 3969353 - DNA, 25 bp, Homo sapien
acaccaggggtgagaaggaggattt

SEQ ID NO: 3969354 - DNA, 25 bp, Homo sapien
ctgacaccaggggtgagaaggagga

SEQ ID NO: 3969355 - DNA, 25 bp, Homo sapien
tgacaccaggggtgagaaggaggat

SEQ ID NO: 3969356 - DNA, 25 bp, Homo sapien
gacaccaggggtgagaaggaggatt

SEQ ID NO: 3969357 - DNA, 25 bp, Homo sapien
attttttgtacttcttggtctggtg

SEQ ID NO: 3969358 - DNA, 25 bp, Homo sapien
tggtgtgttttgttgtgtaatgagc

SEQ ID NO: 3969359 - DNA, 25 bp, Homo sapien
gtgtgttttgttgtgtaatgagcat

SEQ ID NO: 3969360 - DNA, 25 bp, Homo sapien
tttgtacttcttggtctggtgtgtt

SEQ ID NO: 3969361 - DNA, 25 bp, Homo sapien
cagcgtattttctgcgggcaggaca

SEQ ID NO: 3969362 - DNA, 25 bp, Homo sapien
ctgctgcaaagggctcattgacata

SEQ ID NO: 3969363 - DNA, 25 bp, Homo sapien
gcttctgggtgtcgtgctgtgactg

SEQ ID NO: 3969364 - DNA, 25 bp, Homo sapien
agggccagcgtattttctgcgggca

SEQ ID NO: 3969365 - DNA, 25 bp, Homo sapien
cttcgagtggagcttttgtgctggt

SEQ ID NO: 3969366 - DNA, 25 bp, Homo sapien
caggcactggccatgcttcgagtgg

SEQ ID NO: 3969367 - DNA, 25 bp, Homo sapien
cctgtaggctgagcaagtccccgtt

SEQ ID NO: 3969368 - DNA, 25 bp, Homo sapien
gaccctggctcatccagcagggcgt

SEQ ID NO: 3969369 - DNA, 25 bp, Homo sapien
ttgtttctctcacaaggacaccgtc

SEQ ID NO: 3969370 - DNA, 25 bp, Homo sapien
ttcctgctctgagggcacaagctgc

SEQ ID NO: 3969371 - DNA, 25 bp, Homo sapien
caaggacaccgtctgtgttgctcag

SEQ ID NO: 3969372 - DNA, 25 bp, Homo sapien
gcacaagctgcttgtttctctcaca

SEQ ID NO: 3969373 - DNA, 25 bp, Homo sapien
ggtggcaagctgagcatacagttgt

SEQ ID NO: 3969374 - DNA, 25 bp, Homo sapien
aaattggtggcaagctgagcataca

SEQ ID NO: 3969375 - DNA, 25 bp, Homo sapien
atggaaaattggtggcaagctgagc

SEQ ID NO: 3969376 - DNA, 25 bp, Homo sapien
gaaaattggtggcaagctgagcata

SEQ ID NO: 3969377 - DNA, 25 bp, Homo sapien
agccccgaaaggctacagtgttgat

SEQ ID NO: 3969378 - DNA, 25 bp, Homo sapien
gcagccccgaaaggctacagtgttg

SEQ ID NO: 3969379 - DNA, 25 bp, Homo sapien
tgcagccccgaaaggctacagtgtt

SEQ ID NO: 3969380 - DNA, 25 bp, Homo sapien
cctgcagccccgaaaggctacagtg

SEQ ID NO: 3969381 - DNA, 25 bp, Homo sapien
tcagctggcctgatgtatcccactt

SEQ ID NO: 3969382 - DNA, 25 bp, Homo sapien
tttttcatccgaacccagaatgagg

SEQ ID NO: 3969383 - DNA, 25 bp, Homo sapien
tgaaattatgggagaaaggaacatt

SEQ ID NO: 3969384 - DNA, 25 bp, Homo sapien
cagaatgaggatgtacccaaggaaa

SEQ ID NO: 3969385 - DNA, 25 bp, Homo sapien
ccatgtatcttgaggacatgacaca

SEQ ID NO: 3969386 - DNA, 25 bp, Homo sapien
gaccaagcttgaactgcggattcat

SEQ ID NO: 3969387 - DNA, 25 bp, Homo sapien
gacatgacacatggaccaagcttga

SEQ ID NO: 3969388 - DNA, 25 bp, Homo sapien
gtctctttgctctccatgacccatg

SEQ ID NO: 3969389 - DNA, 25 bp, Homo sapien
atgttgaaagaaaacttagaggtct

SEQ ID NO: 3969390 - DNA, 25 bp, Homo sapien
tgcaaatgatagaccggagctttgg

SEQ ID NO: 3969391 - DNA, 25 bp, Homo sapien
tgatagaccggagctttggttctgc

SEQ ID NO: 3969392 - DNA, 25 bp, Homo sapien
atgctagctcccctgttcctgattt

SEQ ID NO: 3969393 - DNA, 25 bp, Homo sapien
aaggagtctcacatcggagccagga

SEQ ID NO: 3969394 - DNA, 25 bp, Homo sapien
ttaatcaggcacacatacaggcggg

SEQ ID NO: 3969395 - DNA, 25 bp, Homo sapien
tattatcccgatttggcagatgagg

SEQ ID NO: 3969396 - DNA, 25 bp, Homo sapien
ggtttccggacaccagactaggctg

SEQ ID NO: 3969397 - DNA, 25 bp, Homo sapien
gacatgattcatttgccacttggaa

SEQ ID NO: 3969398 - DNA, 25 bp, Homo sapien
gctgtagcatgggttttttacaaag

SEQ ID NO: 3969399 - DNA, 25 bp, Homo sapien
aaatgtgctgtagcatgggtttttt

SEQ ID NO: 3969400 - DNA, 25 bp, Homo sapien
catttgccacttggaaaagcgtcat

SEQ ID NO: 3969401 - DNA, 25 bp, Homo sapien
ttgcccaaactgagaagccagacat

SEQ ID NO: 3969402 - DNA, 25 bp, Homo sapien
tggttgcccaaactgagaagccaga

SEQ ID NO: 3969403 - DNA, 25 bp, Homo sapien
ggaaagttgctgtgagtaggtgatg

SEQ ID NO: 3969404 - DNA, 25 bp, Homo sapien
gaggaaagttgctgtgagtaggtga

SEQ ID NO: 3969405 - DNA, 25 bp, Homo sapien
gattctgtctttcaaccttggttca

SEQ ID NO: 3969406 - DNA, 25 bp, Homo sapien
gttacattcaaatatgccatgaaag

SEQ ID NO: 3969407 - DNA, 25 bp, Homo sapien
acagggcttcctttcgggagagaat

SEQ ID NO: 3969408 - DNA, 25 bp, Homo sapien
acaacttgtgactgcccaacagggc

SEQ ID NO: 3969409 - DNA, 25 bp, Homo sapien
tttagagtagagatgaagagggggt

SEQ ID NO: 3969410 - DNA, 25 bp, Homo sapien
ggtccccgagggcaacatggactcc

SEQ ID NO: 3969411 - DNA, 25 bp, Homo sapien
ttcctggtcagtttgtgagaaggag

SEQ ID NO: 3969412 - DNA, 25 bp, Homo sapien
atcctccgggcagctcatagcccca

SEQ ID NO: 3969413 - DNA, 25 bp, Homo sapien
ttgcttcctggtcagtttgtgagaa

SEQ ID NO: 3969414 - DNA, 25 bp, Homo sapien
agcagttctctgtgcctcgctggga

SEQ ID NO: 3969415 - DNA, 25 bp, Homo sapien
gtattctgaggtccagcgtctgcat

SEQ ID NO: 3969416 - DNA, 25 bp, Homo sapien
ccccgttggtgaagtggagacctgt

SEQ ID NO: 3969417 - DNA, 25 bp, Homo sapien
caaagagcttatggatgacagcagt

SEQ ID NO: 3969418 - DNA, 25 bp, Homo sapien
tctcttctggaagctcgtcccgtcc

SEQ ID NO: 3969419 - DNA, 25 bp, Homo sapien
tcttctggaagctcgtcccgtccgc

SEQ ID NO: 3969420 - DNA, 25 bp, Homo sapien
tctggaagctcgtcccgtccgcagg

SEQ ID NO: 3969421 - DNA, 25 bp, Homo sapien
cccccttgctgtacttgtaccttca

SEQ ID NO: 3969422 - DNA, 25 bp, Homo sapien
cctcgctggatgtttcagccactcc

SEQ ID NO: 3969423 - DNA, 25 bp, Homo sapien
caggttctcgtgtctgcttggtaca

SEQ ID NO: 3969424 - DNA, 25 bp, Homo sapien
gcaagagctgattcatcggcctgat

SEQ ID NO: 3969425 - DNA, 25 bp, Homo sapien
gtacagttgagatctgcaagagctg

SEQ ID NO: 3969426 - DNA, 25 bp, Homo sapien
tttgtaaaaccagatattcaagaat

SEQ ID NO: 3969427 - DNA, 25 bp, Homo sapien
ctttgtaaaaccagatattcaagaa

SEQ ID NO: 3969428 - DNA, 25 bp, Homo sapien
ttgtaaaaccagatattcaagaata

SEQ ID NO: 3969429 - DNA, 25 bp, Homo sapien
tggcaagaatgctttggtgagcgta

SEQ ID NO: 3969430 - DNA, 25 bp, Homo sapien
tggatcacatggctggtcggtgtca

SEQ ID NO: 3969431 - DNA, 25 bp, Homo sapien
gctcccactggatcacatggctggt

SEQ ID NO: 3969432 - DNA, 25 bp, Homo sapien
gagcgtaagatagcggctcccactg

SEQ ID NO: 3969433 - DNA, 25 bp, Homo sapien
ggacatgggagagtttttgctttga

SEQ ID NO: 3969434 - DNA, 25 bp, Homo sapien
aggacatgggagagtttttgctttg

SEQ ID NO: 3969435 - DNA, 25 bp, Homo sapien
gcagcagctgtagggaatgttatca

SEQ ID NO: 3969436 - DNA, 25 bp, Homo sapien
agttggctgcccctaggctcatagg

SEQ ID NO: 3969437 - DNA, 25 bp, Homo sapien
aatgttatcagtgttgggactgggc

SEQ ID NO: 3969438 - DNA, 25 bp, Homo sapien
tggactgcaaccaagctgagagctg

SEQ ID NO: 3969439 - DNA, 25 bp, Homo sapien
cacaccccaggaatgatgatacgtt

SEQ ID NO: 3969440 - DNA, 25 bp, Homo sapien
cttgcggcctggacgactccatgtg

SEQ ID NO: 3969441 - DNA, 25 bp, Homo sapien
actccatgtgcgagttgctggcgca

SEQ ID NO: 3969442 - DNA, 25 bp, Homo sapien
ctgttgactctggtgtcggccgctg

SEQ ID NO: 3969443 - DNA, 25 bp, Homo sapien
ttggcacactgctgacggctgcaca

SEQ ID NO: 3969444 - DNA, 25 bp, Homo sapien
cttggcacactgctgacggctgcac

SEQ ID NO: 3969445 - DNA, 25 bp, Homo sapien
gcacactcatcactgcggggctcat

SEQ ID NO: 3969446 - DNA, 25 bp, Homo sapien
ctcatcacacattgacaccagcacc

SEQ ID NO: 3969447 - DNA, 25 bp, Homo sapien
cgttgatgtggccacacggagagct

SEQ ID NO: 3969448 - DNA, 25 bp, Homo sapien
ctaggcatgatgatgctctgaagac

SEQ ID NO: 3969449 - DNA, 25 bp, Homo sapien
gttttgtcccgatttgccacacgga

SEQ ID NO: 3969450 - DNA, 25 bp, Homo sapien
gttgtaaatattaagaagcctaggc

SEQ ID NO: 3969451 - DNA, 25 bp, Homo sapien
tgcgacagtgtgatcctttttggaa

SEQ ID NO: 3969452 - DNA, 25 bp, Homo sapien
ctaagcagtcagatttgcgacagtg

SEQ ID NO: 3969453 - DNA, 25 bp, Homo sapien
tggaaccaaggttgccagcgaatgg

SEQ ID NO: 3969454 - DNA, 25 bp, Homo sapien
caaggtggtgtcaagttgatcctgc

SEQ ID NO: 3969455 - DNA, 25 bp, Homo sapien
tcatcccagtaaagccttgaccttc

SEQ ID NO: 3969456 - DNA, 25 bp, Homo sapien
tcagataatgttaaggttaaccact

SEQ ID NO: 3969457 - DNA, 25 bp, Homo sapien
gccttggttaatatctcaagttcag

SEQ ID NO: 3969458 - DNA, 25 bp, Homo sapien
ttcatcttattacctttcatcccag

SEQ ID NO: 3969459 - DNA, 25 bp, Homo sapien
gtgattacattccaactcgtgccaa

SEQ ID NO: 3969460 - DNA, 25 bp, Homo sapien
tcagagagtacagctagtcagtggg

SEQ ID NO: 3969461 - DNA, 25 bp, Homo sapien
catgctctgtctgtgcgaggttaag

SEQ ID NO: 3969462 - DNA, 25 bp, Homo sapien
tcgtgccaactttgagcagagtggc

SEQ ID NO: 3969463 - DNA, 25 bp, Homo sapien
tctccaaggttacgcgtgtgtacgt

SEQ ID NO: 3969464 - DNA, 25 bp, Homo sapien
ctgtctccaaggttacgcgtgtgta

SEQ ID NO: 3969465 - DNA, 25 bp, Homo sapien
gctggtttggatggttgctctttgt

SEQ ID NO: 3969466 - DNA, 25 bp, Homo sapien
ctggtttggatggttgctctttgtt

SEQ ID NO: 3969467 - DNA, 25 bp, Homo sapien
ggaccatccgccttactcagtgaat

SEQ ID NO: 3969468 - DNA, 25 bp, Homo sapien
catccagaatagtgtataaccaaat

SEQ ID NO: 3969469 - DNA, 25 bp, Homo sapien
cttgtgacttagtcaaactgacaca

SEQ ID NO: 3969470 - DNA, 25 bp, Homo sapien
caaatatccgggcaccttgtgactt

SEQ ID NO: 3969471 - DNA, 25 bp, Homo sapien
ctagaaacaattggagggctaacca

SEQ ID NO: 3969472 - DNA, 25 bp, Homo sapien
acaattggagggctaaccaagtcac

SEQ ID NO: 3969473 - DNA, 25 bp, Homo sapien
ccttctagaaacaattggagggcta

SEQ ID NO: 3969474 - DNA, 25 bp, Homo sapien
ttccttctagaaacaattggagggc

SEQ ID NO: 3969475 - DNA, 25 bp, Homo sapien
catgcttgccgaatgactcacgctc

SEQ ID NO: 3969476 - DNA, 25 bp, Homo sapien
tcaaatggactcatgcttgccgaat

SEQ ID NO: 3969477 - DNA, 25 bp, Homo sapien
tcacgctcctgtttacaaatcagct

SEQ ID NO: 3969478 - DNA, 25 bp, Homo sapien
tgactcacgctcctgtttacaaatc

SEQ ID NO: 3969479 - DNA, 25 bp, Homo sapien
ccatccactgcgatccctgaattct

SEQ ID NO: 3969480 - DNA, 25 bp, Homo sapien
gtctgggtgtgctgaccgctgatag

SEQ ID NO: 3969481 - DNA, 25 bp, Homo sapien
agggatatcatagccataaaaacgc

SEQ ID NO: 3969482 - DNA, 25 bp, Homo sapien
atccctgaattcttgttgggtcact

SEQ ID NO: 3969483 - DNA, 25 bp, Homo sapien
ccgtgaatggctttactcgcagatg

SEQ ID NO: 3969484 - DNA, 25 bp, Homo sapien
gaatggctttactcgcagatgttgc

SEQ ID NO: 3969485 - DNA, 25 bp, Homo sapien
ttactcgcagatgttgctctccaag

SEQ ID NO: 3969486 - DNA, 25 bp, Homo sapien
tgaggcagccgtgaatggctttact

SEQ ID NO: 3969487 - DNA, 25 bp, Homo sapien
ggatattcccgcagtctgctccact

SEQ ID NO: 3969488 - DNA, 25 bp, Homo sapien
tttttggcaaggtgcttccccgctc

SEQ ID NO: 3969489 - DNA, 25 bp, Homo sapien
ccgctccgtgatgcaattcttgcat

SEQ ID NO: 3969490 - DNA, 25 bp, Homo sapien
caggcggtggtcatgggatattccc

SEQ ID NO: 3969491 - DNA, 25 bp, Homo sapien
ttctctgctgatcaaccgccgtggt

SEQ ID NO: 3969492 - DNA, 25 bp, Homo sapien
cttttaggctaaatgagcggacaaa

SEQ ID NO: 3969493 - DNA, 25 bp, Homo sapien
aaatgagcggacaaattttctctgc

SEQ ID NO: 3969494 - DNA, 25 bp, Homo sapien
cgccgtggtagcatcagtgggcact

SEQ ID NO: 3969495 - DNA, 25 bp, Homo sapien
tgtgtgacatgtcatccccacagtt

SEQ ID NO: 3969496 - DNA, 25 bp, Homo sapien
tcactcgtagagaagatttgggcct

SEQ ID NO: 3969497 - DNA, 25 bp, Homo sapien
agatttgggcctttggtgtgtgaca

SEQ ID NO: 3969498 - DNA, 25 bp, Homo sapien
catgtcatccccacagttgattgtt

SEQ ID NO: 3969499 - DNA, 25 bp, Homo sapien
gccataggaggccagatttgctttt

SEQ ID NO: 3969500 - DNA, 25 bp, Homo sapien
gcttttcctggtcaatgtctggcct

SEQ ID NO: 3969501 - DNA, 25 bp, Homo sapien
cttttcctggtcaatgtctggcctc

SEQ ID NO: 3969502 - DNA, 25 bp, Homo sapien
ttagtttggtggaagcgccatagga

SEQ ID NO: 3969503 - DNA, 25 bp, Homo sapien
ggcctgtttgtgctcagagtgaaag

SEQ ID NO: 3969504 - DNA, 25 bp, Homo sapien
gatctaaattagaggcctgtttgtg

SEQ ID NO: 3969505 - DNA, 25 bp, Homo sapien
tggctgggaagatctaaattagagg

SEQ ID NO: 3969506 - DNA, 25 bp, Homo sapien
cctgtttgtgctcagagtgaaagtt

SEQ ID NO: 3969507 - DNA, 25 bp, Homo sapien
cctgacccttgtgatgtaatgatat

SEQ ID NO: 3969508 - DNA, 25 bp, Homo sapien
ctgacccttgtgatgtaatgatatg

SEQ ID NO: 3969509 - DNA, 25 bp, Homo sapien
ccttgtgatgtaatgatatgttggg

SEQ ID NO: 3969510 - DNA, 25 bp, Homo sapien
gacccttgtgatgtaatgatatgtt

SEQ ID NO: 3969511 - DNA, 25 bp, Homo sapien
aaatctacaagatccaggtctccgt

SEQ ID NO: 3969512 - DNA, 25 bp, Homo sapien
gcaaaatctacaagatccaggtctc

SEQ ID NO: 3969513 - DNA, 25 bp, Homo sapien
cagcaaaatctacaagatccaggtc

SEQ ID NO: 3969514 - DNA, 25 bp, Homo sapien
tctacaagatccaggtctccgttgg

SEQ ID NO: 3969515 - DNA, 25 bp, Homo sapien
gcctgtacacctagcatgctctgga

SEQ ID NO: 3969516 - DNA, 25 bp, Homo sapien
tattattgccaccacgtaggacaca

SEQ ID NO: 3969517 - DNA, 25 bp, Homo sapien
ccatttgatagatagtgccgacttg

SEQ ID NO: 3969518 - DNA, 25 bp, Homo sapien
taactgcagtgccatagttgtcagc

SEQ ID NO: 3969519 - DNA, 25 bp, Homo sapien
ctgccccacgacttagatgaaacca

SEQ ID NO: 3969520 - DNA, 25 bp, Homo sapien
tgcaccagccctcagtgcatcccca

SEQ ID NO: 3969521 - DNA, 25 bp, Homo sapien
agctgctacatgcacgggaagacca

SEQ ID NO: 3969522 - DNA, 25 bp, Homo sapien
gaagaccagagctgccgtcttcctg

SEQ ID NO: 3969523 - DNA, 25 bp, Homo sapien
gacttgccatcgcagccaattgaga

SEQ ID NO: 3969524 - DNA, 25 bp, Homo sapien
gatgcttctgccgtgcgttttgctg

SEQ ID NO: 3969525 - DNA, 25 bp, Homo sapien
tcagtgtcacactcgagtgaacagt

SEQ ID NO: 3969526 - DNA, 25 bp, Homo sapien
gaaggtaacagccatcgcacacatg

SEQ ID NO: 3969527 - DNA, 25 bp, Homo sapien
acctgaaccctcttcttagtgggag

SEQ ID NO: 3969528 - DNA, 25 bp, Homo sapien
tttatgtataaataagctagtcgct

SEQ ID NO: 3969529 - DNA, 25 bp, Homo sapien
gctagtcgctaacatgtactcagca

SEQ ID NO: 3969530 - DNA, 25 bp, Homo sapien
aaaatccactatccttctggcactg

SEQ ID NO: 3969531 - DNA, 25 bp, Homo sapien
atctttattaccggaagttgtggct

SEQ ID NO: 3969532 - DNA, 25 bp, Homo sapien
cagctgtatgagaagctcagagcac

SEQ ID NO: 3969533 - DNA, 25 bp, Homo sapien
tgtccagatatgctggcttctgatc

SEQ ID NO: 3969534 - DNA, 25 bp, Homo sapien
cagatgctgtccagatatgctggct

SEQ ID NO: 3969535 - DNA, 25 bp, Homo sapien
tgggtgtgagtactgagagcatcaa

SEQ ID NO: 3969536 - DNA, 25 bp, Homo sapien
aatggtatgtcttttgtgcgagtgg

SEQ ID NO: 3969537 - DNA, 25 bp, Homo sapien
ttttcgtacttattaatggtatgtc

SEQ ID NO: 3969538 - DNA, 25 bp, Homo sapien
gctgtgttccactccccatgatggt

SEQ ID NO: 3969539 - DNA, 25 bp, Homo sapien
agcctccagccccctttgcccccat

SEQ ID NO: 3969540 - DNA, 25 bp, Homo sapien
gagagcctccagccccctttgcccc

SEQ ID NO: 3969541 - DNA, 25 bp, Homo sapien
cttcttggtcttcctttgagagcct

SEQ ID NO: 3969542 - DNA, 25 bp, Homo sapien
tcttggtcttcctttgagagcctcc

SEQ ID NO: 3969543 - DNA, 25 bp, Homo sapien
tgcctgccctggtcgtggccgtcat

SEQ ID NO: 3969544 - DNA, 25 bp, Homo sapien
ttccttgccaacattcctaaacttc

SEQ ID NO: 3969545 - DNA, 25 bp, Homo sapien
tggatttgggtgcctttccttgcca

SEQ ID NO: 3969546 - DNA, 25 bp, Homo sapien
gatttgggtgcctttccttgccaac

SEQ ID NO: 3969547 - DNA, 25 bp, Homo sapien
ccttgccaacattcctaaacttcat

SEQ ID NO: 3969548 - DNA, 25 bp, Homo sapien
ccacgggcagtgatcagttagcgct

SEQ ID NO: 3969549 - DNA, 25 bp, Homo sapien
catcgactgatgagaccagaggctc

SEQ ID NO: 3969550 - DNA, 25 bp, Homo sapien
gaggctccgccaataaaaggttaca

SEQ ID NO: 3969551 - DNA, 25 bp, Homo sapien
ttgccgcgggctgagaatttcatcg

SEQ ID NO: 3969552 - DNA, 25 bp, Homo sapien
gatgcagtagtaaagggccttccaa

SEQ ID NO: 3969553 - DNA, 25 bp, Homo sapien
tcggagttcagcaacgggccggctc

SEQ ID NO: 3969554 - DNA, 25 bp, Homo sapien
tccctgatggatgactcggagttca

SEQ ID NO: 3969555 - DNA, 25 bp, Homo sapien
gggccggctccaatgacaaatacaa

SEQ ID NO: 3969556 - DNA, 25 bp, Homo sapien
catagcatggtaagtcagcacattc

SEQ ID NO: 3969557 - DNA, 25 bp, Homo sapien
gttgcaacaaaaaagcatagcatgg

SEQ ID NO: 3969558 - DNA, 25 bp, Homo sapien
tcaattatcgctatttgaagatcaa

SEQ ID NO: 3969559 - DNA, 25 bp, Homo sapien
aaaaatttgacacctctgatgcagt

SEQ ID NO: 3969560 - DNA, 25 bp, Homo sapien
accaagttaaagacaccaatgctcc

SEQ ID NO: 3969561 - DNA, 25 bp, Homo sapien
aaagttgcccatcctgtttgccgca

SEQ ID NO: 3969562 - DNA, 25 bp, Homo sapien
tgtaaaagaggacgatttctggcct

SEQ ID NO: 3969563 - DNA, 25 bp, Homo sapien
cacaggaaggccagataagtccaga

SEQ ID NO: 3969564 - DNA, 25 bp, Homo sapien
taagtccagaaagagaggccacgga

SEQ ID NO: 3969565 - DNA, 25 bp, Homo sapien
cattctgactattggaatactagcg

SEQ ID NO: 3969566 - DNA, 25 bp, Homo sapien
tcaacagtcaaaaaagcgagttagc

SEQ ID NO: 3969567 - DNA, 25 bp, Homo sapien
ccaggaagcttcgtttcttctgctt

SEQ ID NO: 3969568 - DNA, 25 bp, Homo sapien
caaaaaagcgagttagcattctgac

SEQ ID NO: 3969569 - DNA, 25 bp, Homo sapien
ctgatcagtgaaggaaacagctgtt

SEQ ID NO: 3969570 - DNA, 25 bp, Homo sapien
tgtgtgggcgcttggcgatgagggt

SEQ ID NO: 3969571 - DNA, 25 bp, Homo sapien
gatgagggtggcatggccaagttgc

SEQ ID NO: 3969572 - DNA, 25 bp, Homo sapien
ccaaatgaggaacagcgtctggatg

SEQ ID NO: 3969573 - DNA, 25 bp, Homo sapien
ttgcagagcgctatgcttaagggtt

SEQ ID NO: 3969574 - DNA, 25 bp, Homo sapien
gagttcagtacagcaacgcaggctc

SEQ ID NO: 3969575 - DNA, 25 bp, Homo sapien
tcagtacagcaacgcaggctcttca

SEQ ID NO: 3969576 - DNA, 25 bp, Homo sapien
gttcagtacagcaacgcaggctctt

SEQ ID NO: 3969577 - DNA, 25 bp, Homo sapien
gtacagcaacgcaggctcttcacac

SEQ ID NO: 3969578 - DNA, 25 bp, Homo sapien
gccttacgttgagctgtttcccttg

SEQ ID NO: 3969579 - DNA, 25 bp, Homo sapien
aaggaacctggccttacgttgagct

SEQ ID NO: 3969580 - DNA, 25 bp, Homo sapien
tgtatttaggtgaaatagttcccga

SEQ ID NO: 3969581 - DNA, 25 bp, Homo sapien
tgaacattggttcgctgtcactggc

SEQ ID NO: 3969582 - DNA, 25 bp, Homo sapien
cccctgctccgtgaattaaatcaga

SEQ ID NO: 3969583 - DNA, 25 bp, Homo sapien
tggaatcatggctgtgtatcccccc

SEQ ID NO: 3969584 - DNA, 25 bp, Homo sapien
aaatcaggagtggaatcatggctgt

SEQ ID NO: 3969585 - DNA, 25 bp, Homo sapien
tgtgtatcccccctgctccgtgaat

SEQ ID NO: 3969586 - DNA, 25 bp, Homo sapien
ctagagggatagtgaactgtgtcat

SEQ ID NO: 3969587 - DNA, 25 bp, Homo sapien
cagcgggtatgtatctttccaacca

SEQ ID NO: 3969588 - DNA, 25 bp, Homo sapien
catgtcagcgggtatgtatctttcc

SEQ ID NO: 3969589 - DNA, 25 bp, Homo sapien
ggtatgtatctttccaaccaaagag

SEQ ID NO: 3969590 - DNA, 25 bp, Homo sapien
tctttcatgtcagcgggtatgtatc

SEQ ID NO: 3969591 - DNA, 25 bp, Homo sapien
gggtagtagcgtggccacttccctg

SEQ ID NO: 3969592 - DNA, 25 bp, Homo sapien
tcactaagtgtagggtttatccact

SEQ ID NO: 3969593 - DNA, 25 bp, Homo sapien
gtgtagggtttatccactttctcat

SEQ ID NO: 3969594 - DNA, 25 bp, Homo sapien
tctacccatatcgtaggccctttct

SEQ ID NO: 3969595 - DNA, 25 bp, Homo sapien
gctttggagccaagaccacctgagt

SEQ ID NO: 3969596 - DNA, 25 bp, Homo sapien
tgggcattaaacttgtaggcagcag

SEQ ID NO: 3969597 - DNA, 25 bp, Homo sapien
taaaatgagtccatctgcgtagcac

SEQ ID NO: 3969598 - DNA, 25 bp, Homo sapien
cattcatgggaggagtggtatcatc

SEQ ID NO: 3969599 - DNA, 25 bp, Homo sapien
tgccaaccgaaaacctttgtagctg

SEQ ID NO: 3969600 - DNA, 25 bp, Homo sapien
cccatttgggcatagctttagctta

SEQ ID NO: 3969601 - DNA, 25 bp, Homo sapien
cagcctgggtgtatcttcagagacc

SEQ ID NO: 3969602 - DNA, 25 bp, Homo sapien
ccctggtcctaggtgccagagttcc

SEQ ID NO: 3969603 - DNA, 25 bp, Homo sapien
aagcaattttgaagcagccctccag

SEQ ID NO: 3969604 - DNA, 25 bp, Homo sapien
gaatcacaacgctgttgggccagta

SEQ ID NO: 3969605 - DNA, 25 bp, Homo sapien
tcttaaacgaaaaaccagctgccgc

SEQ ID NO: 3969606 - DNA, 25 bp, Homo sapien
tgtattaaatacgagcttgcgaacc

SEQ ID NO: 3969607 - DNA, 25 bp, Homo sapien
ctccagcctgctcaatgtgggctcc

SEQ ID NO: 3969608 - DNA, 25 bp, Homo sapien
ttataacaaaattcttagccctgtc

SEQ ID NO: 3969609 - DNA, 25 bp, Homo sapien
tgctgctcggacaagtggggggcac

SEQ ID NO: 3969610 - DNA, 25 bp, Homo sapien
taacaaaattcttagccctgtctgc

SEQ ID NO: 3969611 - DNA, 25 bp, Homo sapien
agcatgccgcatatgttttccgtca

SEQ ID NO: 3969612 - DNA, 25 bp, Homo sapien
tgtttccatcgtgaaccccactgag

SEQ ID NO: 3969613 - DNA, 25 bp, Homo sapien
ctggagcacccgagcatcttgtttc

SEQ ID NO: 3969614 - DNA, 25 bp, Homo sapien
ttccgtcatttcatgagctccaggg

SEQ ID NO: 3969615 - DNA, 25 bp, Homo sapien
gatgctgcagtcaaaagagcactgg

SEQ ID NO: 3969616 - DNA, 25 bp, Homo sapien
atgctgcagtcaaaagagcactgga

SEQ ID NO: 3969617 - DNA, 25 bp, Homo sapien
ttgatgctgcagtcaaaagagcact

SEQ ID NO: 3969618 - DNA, 25 bp, Homo sapien
cagaggtattttgaattaacttctc

SEQ ID NO: 3969619 - DNA, 25 bp, Homo sapien
ccagaggtattttgaattaacttct

SEQ ID NO: 3969620 - DNA, 25 bp, Homo sapien
tgtaaaaggcatcctctttacatac

SEQ ID NO: 3969621 - DNA, 25 bp, Homo sapien
gtaaaaggcatcctctttacatact

SEQ ID NO: 3969622 - DNA, 25 bp, Homo sapien
ctgtaaaaggcatcctctttacata

SEQ ID NO: 3969623 - DNA, 25 bp, Homo sapien
gggtgtgcttatggcgcccctgcgc

SEQ ID NO: 3969624 - DNA, 25 bp, Homo sapien
ctgctggagtcccatcggggggtcc

SEQ ID NO: 3969625 - DNA, 25 bp, Homo sapien
tcccatcggggggtcctgcccagtg

SEQ ID NO: 3969626 - DNA, 25 bp, Homo sapien
ctttcctgtctgctacgggggaccg

SEQ ID NO: 3969627 - DNA, 25 bp, Homo sapien
tgcgctggatctggcatgctactgc

SEQ ID NO: 3969628 - DNA, 25 bp, Homo sapien
tctggaacgttccatttagaggaca

SEQ ID NO: 3969629 - DNA, 25 bp, Homo sapien
cgttccatttagaggacagcccctc

SEQ ID NO: 3969630 - DNA, 25 bp, Homo sapien
gctctcaaaagccagtatgcgctgg

SEQ ID NO: 3969631 - DNA, 25 bp, Homo sapien
tccaaaaatgtggcggcttgtccta

SEQ ID NO: 3969632 - DNA, 25 bp, Homo sapien
aaaatgtggcggcttgtcctatctg

SEQ ID NO: 3969633 - DNA, 25 bp, Homo sapien
tgtggcggcttgtcctatctgagtc

SEQ ID NO: 3969634 - DNA, 25 bp, Homo sapien
ggcggcttgtcctatctgagtctgg

SEQ ID NO: 3969635 - DNA, 25 bp, Homo sapien
cgttgttcagcacagcggttaaaaa

SEQ ID NO: 3969636 - DNA, 25 bp, Homo sapien
taattgaggctcagaccagatggtc

SEQ ID NO: 3969637 - DNA, 25 bp, Homo sapien
ccagggcaaccggtatcgttgttca

SEQ ID NO: 3969638 - DNA, 25 bp, Homo sapien
gtgagtccagatctctcggtaattg

SEQ ID NO: 3969639 - DNA, 25 bp, Homo sapien
agcagagctgagcatagttaacggg

SEQ ID NO: 3969640 - DNA, 25 bp, Homo sapien
tctgaggatgcaatcgtctccactt

SEQ ID NO: 3969641 - DNA, 25 bp, Homo sapien
tcattggcataattgagcagagctg

SEQ ID NO: 3969642 - DNA, 25 bp, Homo sapien
gccctggcattatccttgtctctca

SEQ ID NO: 3969643 - DNA, 25 bp, Homo sapien
tagccaatgttacccagagctttct

SEQ ID NO: 3969644 - DNA, 25 bp, Homo sapien
agctttctgactctgataccctatg

SEQ ID NO: 3969645 - DNA, 25 bp, Homo sapien
cgactagtcatgtggtggtagccaa

SEQ ID NO: 3969646 - DNA, 25 bp, Homo sapien
aatgattaagtccttgtgcatgagc

SEQ ID NO: 3969647 - DNA, 25 bp, Homo sapien
cctcattcccacagactccctccat

SEQ ID NO: 3969648 - DNA, 25 bp, Homo sapien
gcctcattcccacagactccctcca

SEQ ID NO: 3969649 - DNA, 25 bp, Homo sapien
tgcctcattcccacagactccctcc

SEQ ID NO: 3969650 - DNA, 25 bp, Homo sapien
agagggggaggccacacatttccac

SEQ ID NO: 3969651 - DNA, 25 bp, Homo sapien
aggacccccgatgctgcaacctgag

SEQ ID NO: 3969652 - DNA, 25 bp, Homo sapien
tagagaaagagaacctcctcgggga

SEQ ID NO: 3969653 - DNA, 25 bp, Homo sapien
tttccacacaagagccaagatgtgt

SEQ ID NO: 3969654 - DNA, 25 bp, Homo sapien
gcatcaaattggataagggctgcag

SEQ ID NO: 3969655 - DNA, 25 bp, Homo sapien
tatggaactgagaacggaaaggctt

SEQ ID NO: 3969656 - DNA, 25 bp, Homo sapien
gaagaatttggcaagggagcctttc

SEQ ID NO: 3969657 - DNA, 25 bp, Homo sapien
tgcggtgcagggtccttaaccttgg

SEQ ID NO: 3969658 - DNA, 25 bp, Homo sapien
taaagcaaaattacccagctactag

SEQ ID NO: 3969659 - DNA, 25 bp, Homo sapien
caaactactgagcttcatgtattgg

SEQ ID NO: 3969660 - DNA, 25 bp, Homo sapien
tacgtccaacgaaagcaaactactg

SEQ ID NO: 3969661 - DNA, 25 bp, Homo sapien
cagctactagtcttcttgatagcaa

SEQ ID NO: 3969662 - DNA, 25 bp, Homo sapien
gatgtaatcacttcaaaaaccccac

SEQ ID NO: 3969663 - DNA, 25 bp, Homo sapien
cctgggagggttggaacatttctga

SEQ ID NO: 3969664 - DNA, 25 bp, Homo sapien
cattccggggctagatcctgctgcc

SEQ ID NO: 3969665 - DNA, 25 bp, Homo sapien
aacatttctgatgaacgggctgatg

SEQ ID NO: 3969666 - DNA, 25 bp, Homo sapien
cttgctccttcagagggaagactgc

SEQ ID NO: 3969667 - DNA, 25 bp, Homo sapien
atttaggtggtcatatacttttgaa

SEQ ID NO: 3969668 - DNA, 25 bp, Homo sapien
aaatggtgaatggagttcccaaggt

SEQ ID NO: 3969669 - DNA, 25 bp, Homo sapien
tgaaatggtgaatggagttcccaag

SEQ ID NO: 3969670 - DNA, 25 bp, Homo sapien
aagagttggtatttaggtggtcata

SEQ ID NO: 3969671 - DNA, 25 bp, Homo sapien
accatatgccgtggacttcacagcc

SEQ ID NO: 3969672 - DNA, 25 bp, Homo sapien
cctggtgccaaccatatgccgtgga

SEQ ID NO: 3969673 - DNA, 25 bp, Homo sapien
tgccaaccatatgccgtggacttca

SEQ ID NO: 3969674 - DNA, 25 bp, Homo sapien
cccaggcaggcaggtataggcctgc

SEQ ID NO: 3969675 - DNA, 25 bp, Homo sapien
gccaagaaagccctttatgtcaact

SEQ ID NO: 3969676 - DNA, 25 bp, Homo sapien
gaaggacccatgagtgaacaggacc

SEQ ID NO: 3969677 - DNA, 25 bp, Homo sapien
catgagtgaacaggaccatgtcacc

SEQ ID NO: 3969678 - DNA, 25 bp, Homo sapien
aagaaagccctttatgtcaactggg

SEQ ID NO: 3969679 - DNA, 25 bp, Homo sapien
gttttgagggaatacctgccaggtc

SEQ ID NO: 3969680 - DNA, 25 bp, Homo sapien
ttgggttttgagggaatacctgcca

SEQ ID NO: 3969681 - DNA, 25 bp, Homo sapien
gatctatactaaggaagaaacaaat

SEQ ID NO: 3969682 - DNA, 25 bp, Homo sapien
cttaataagggtttgataagcaaat

SEQ ID NO: 3969683 - DNA, 25 bp, Homo sapien
cttctgagtagcatatagcatggct

SEQ ID NO: 3969684 - DNA, 25 bp, Homo sapien
acaaatggtatagacgacagatgct

SEQ ID NO: 3969685 - DNA, 25 bp, Homo sapien
ttttgcctgtaatggcatgtggagg

SEQ ID NO: 3969686 - DNA, 25 bp, Homo sapien
tagctgccgatcacgggcaacatga

SEQ ID NO: 3969687 - DNA, 25 bp, Homo sapien
acatgaaagggttccatttgcaggc

SEQ ID NO: 3969688 - DNA, 25 bp, Homo sapien
gatggccctgcttctaggatctggg

SEQ ID NO: 3969689 - DNA, 25 bp, Homo sapien
taggaggaggtcaagttgctgggca

SEQ ID NO: 3969690 - DNA, 25 bp, Homo sapien
ttgttctctgcttccgagtggacct

SEQ ID NO: 3969691 - DNA, 25 bp, Homo sapien
ccgagtggacctgcccatggtactc

SEQ ID NO: 3969692 - DNA, 25 bp, Homo sapien
tgctgccaggtctaggaggaggtca

SEQ ID NO: 3969693 - DNA, 25 bp, Homo sapien
cgggccaagcaattaagaaactgta

SEQ ID NO: 3969694 - DNA, 25 bp, Homo sapien
aattttcccagcgtgtccggcgata

SEQ ID NO: 3969695 - DNA, 25 bp, Homo sapien
caaagtgcacctatagagcagagtc

SEQ ID NO: 3969696 - DNA, 25 bp, Homo sapien
cgataattccaacacgaccgctttg

SEQ ID NO: 3969697 - DNA, 25 bp, Homo sapien
ccaaggtgactaggaggaatgtcta

SEQ ID NO: 3969698 - DNA, 25 bp, Homo sapien
ttttggagtgagatagacaaggtag

SEQ ID NO: 3969699 - DNA, 25 bp, Homo sapien
ttcctgaggtaatggccgcaagctg

SEQ ID NO: 3969700 - DNA, 25 bp, Homo sapien
gacaaggtagaaatcccaaggtgac

SEQ ID NO: 3969701 - DNA, 25 bp, Homo sapien
ctgggtagctatcatgaccaagagt

SEQ ID NO: 3969702 - DNA, 25 bp, Homo sapien
gggtagctatcatgaccaagagtca

SEQ ID NO: 3969703 - DNA, 25 bp, Homo sapien
tgggtagctatcatgaccaagagtc

SEQ ID NO: 3969704 - DNA, 25 bp, Homo sapien
ccccagtgggcacccgtaaggcaca

SEQ ID NO: 3969705 - DNA, 25 bp, Homo sapien
tgatagatgagcgtgactcccacca

SEQ ID NO: 3969706 - DNA, 25 bp, Homo sapien
tgaccagaatgcgtgggcagagatc

SEQ ID NO: 3969707 - DNA, 25 bp, Homo sapien
tcctccacgggaaaggagagtgccg

SEQ ID NO: 3969708 - DNA, 25 bp, Homo sapien
tggcacaaaagctccccgatcattt

SEQ ID NO: 3969709 - DNA, 25 bp, Homo sapien
ggggcagcttgtgagtgggagtttt

SEQ ID NO: 3969710 - DNA, 25 bp, Homo sapien
tgagtgggagttttgaagagctctt

SEQ ID NO: 3969711 - DNA, 25 bp, Homo sapien
ggcagcttgtgagtgggagttttga

SEQ ID NO: 3969712 - DNA, 25 bp, Homo sapien
cagcttgtgagtgggagttttgaag

SEQ ID NO: 3969713 - DNA, 25 bp, Homo sapien
tccccatcaacataagtgctaagaa

SEQ ID NO: 3969714 - DNA, 25 bp, Homo sapien
gctaagaacacttgagtgaaggaat

SEQ ID NO: 3969715 - DNA, 25 bp, Homo sapien
caacttcaatgaggattgcagctaa

SEQ ID NO: 3969716 - DNA, 25 bp, Homo sapien
ccagaaggcacaggactaactgcat

SEQ ID NO: 3969717 - DNA, 25 bp, Homo sapien
cttggttgatatcctggcaagattc

SEQ ID NO: 3969718 - DNA, 25 bp, Homo sapien
tggttgatatcctggcaagattccc

SEQ ID NO: 3969719 - DNA, 25 bp, Homo sapien
ttgatatcctggcaagattccctgt

SEQ ID NO: 3969720 - DNA, 25 bp, Homo sapien
gatatcctggcaagattccctgtgg

SEQ ID NO: 3969721 - DNA, 25 bp, Homo sapien
gacagtgccaaaaataactcttgca

SEQ ID NO: 3969722 - DNA, 25 bp, Homo sapien
tcatttagacagtgccaaaaataac

SEQ ID NO: 3969723 - DNA, 25 bp, Homo sapien
tttagacagtgccaaaaataactct

SEQ ID NO: 3969724 - DNA, 25 bp, Homo sapien
tagacagtgccaaaaataactcttg

SEQ ID NO: 3969725 - DNA, 25 bp, Homo sapien
ttggaaaagggatatttgtggcacc

SEQ ID NO: 3969726 - DNA, 25 bp, Homo sapien
ggatatttgtggcaccatatgtttc

SEQ ID NO: 3969727 - DNA, 25 bp, Homo sapien
ccatatgtttctcccagcccgactg

SEQ ID NO: 3969728 - DNA, 25 bp, Homo sapien
aaagggatatttgtggcaccatatg

SEQ ID NO: 3969729 - DNA, 25 bp, Homo sapien
gaaacgggattaacgctcaggccag

SEQ ID NO: 3969730 - DNA, 25 bp, Homo sapien
tcggcatggacccttggatacagag

SEQ ID NO: 3969731 - DNA, 25 bp, Homo sapien
ttctgagtgcagtccggaatggcat

SEQ ID NO: 3969732 - DNA, 25 bp, Homo sapien
gcacccgggttgttcagatttgtaa

SEQ ID NO: 3969733 - DNA, 25 bp, Homo sapien
gcttgacggagagcgttgtcagtta

SEQ ID NO: 3969734 - DNA, 25 bp, Homo sapien
gacggagagcgttgtcagttacatc

SEQ ID NO: 3969735 - DNA, 25 bp, Homo sapien
cagagcttgacggagagcgttgtca

SEQ ID NO: 3969736 - DNA, 25 bp, Homo sapien
ctgcagagcttgacggagagcgttg

SEQ ID NO: 3969737 - DNA, 25 bp, Homo sapien
cctctgtgatgaggaaaccagatct

SEQ ID NO: 3969738 - DNA, 25 bp, Homo sapien
gacagtgtaatgaccaggcttgacc

SEQ ID NO: 3969739 - DNA, 25 bp, Homo sapien
cttgcagcaatcatcagagccttgg

SEQ ID NO: 3969740 - DNA, 25 bp, Homo sapien
gaccatgaccatttggcttgcagca

SEQ ID NO: 3969741 - DNA, 25 bp, Homo sapien
catctctcagagagtaagcgtgaaa

SEQ ID NO: 3969742 - DNA, 25 bp, Homo sapien
gccactccgtctggcactctgggag

SEQ ID NO: 3969743 - DNA, 25 bp, Homo sapien
gcaatgcattcggttgtccccacgg

SEQ ID NO: 3969744 - DNA, 25 bp, Homo sapien
gcagattaatgaatgcgagcccagc

SEQ ID NO: 3969745 - DNA, 25 bp, Homo sapien
gagctccttgcttgatgttttgtga

SEQ ID NO: 3969746 - DNA, 25 bp, Homo sapien
gctctgagctccttgcttgatgttt

SEQ ID NO: 3969747 - DNA, 25 bp, Homo sapien
tttgtgaataaagggccagcaacag

SEQ ID NO: 3969748 - DNA, 25 bp, Homo sapien
cctgaaagcctccactccggagaag

SEQ ID NO: 3969749 - DNA, 25 bp, Homo sapien
caaagagaagggatgcagcgtggac

SEQ ID NO: 3969750 - DNA, 25 bp, Homo sapien
cagcgtggacccacaaataataact

SEQ ID NO: 3969751 - DNA, 25 bp, Homo sapien
agaagggatgcagcgtggacccaca

SEQ ID NO: 3969752 - DNA, 25 bp, Homo sapien
gatgcagcgtggacccacaaataat

SEQ ID NO: 3969753 - DNA, 25 bp, Homo sapien
agcaaggcttagcagtgtgtgttta

SEQ ID NO: 3969754 - DNA, 25 bp, Homo sapien
ctataaaggcaaagggcaatcttgg

SEQ ID NO: 3969755 - DNA, 25 bp, Homo sapien
gggaactgttgaagcaaggcttagc

SEQ ID NO: 3969756 - DNA, 25 bp, Homo sapien
ctgttgaagcaaggcttagcagtgt

SEQ ID NO: 3969757 - DNA, 25 bp, Homo sapien
gtgcaaactctttctattgccccac

SEQ ID NO: 3969758 - DNA, 25 bp, Homo sapien
taagtcttctgttagccctgggcac

SEQ ID NO: 3969759 - DNA, 25 bp, Homo sapien
cattcttgttatcagtgggcttggc

SEQ ID NO: 3969760 - DNA, 25 bp, Homo sapien
gcacgtcctcattttggttggccca

SEQ ID NO: 3969761 - DNA, 25 bp, Homo sapien
gagttgctgctcaggaacaggaaag

SEQ ID NO: 3969762 - DNA, 25 bp, Homo sapien
gaagcccaaagacttggagatcaag

SEQ ID NO: 3969763 - DNA, 25 bp, Homo sapien
tgcttctgcagtgtgtgttttgtgt

SEQ ID NO: 3969764 - DNA, 25 bp, Homo sapien
gacgggttccgtgtgacccagtgac

SEQ ID NO: 3969765 - DNA, 25 bp, Homo sapien
gcctgtcccgtcgtcagttctcatg

SEQ ID NO: 3969766 - DNA, 25 bp, Homo sapien
tccactgctgacaaaataaatcagc

SEQ ID NO: 3969767 - DNA, 25 bp, Homo sapien
tgaaatatttccactgctgacaaaa

SEQ ID NO: 3969768 - DNA, 25 bp, Homo sapien
atatttccactgctgacaaaataaa

SEQ ID NO: 3969769 - DNA, 25 bp, Homo sapien
atttccactgctgacaaaataaatc

SEQ ID NO: 3969770 - DNA, 25 bp, Homo sapien
ttggcaccttctatgccgctgatca

SEQ ID NO: 3969771 - DNA, 25 bp, Homo sapien
ggcattaaatattaaggctgcatat

SEQ ID NO: 3969772 - DNA, 25 bp, Homo sapien
ggcaccttctatgccgctgatcact

SEQ ID NO: 3969773 - DNA, 25 bp, Homo sapien
tcccttggcaccttctatgccgctg

SEQ ID NO: 3969774 - DNA, 25 bp, Homo sapien
tcttccgatgaccatttttatccac

SEQ ID NO: 3969775 - DNA, 25 bp, Homo sapien
ggatgaatttcttccgatgaccatt

SEQ ID NO: 3969776 - DNA, 25 bp, Homo sapien
acatgggggcgggatgaatttcttc

SEQ ID NO: 3969777 - DNA, 25 bp, Homo sapien
tttttatccactgcatctgagctca

SEQ ID NO: 3969778 - DNA, 25 bp, Homo sapien
accaagtgcggcagaccagtgggcc

SEQ ID NO: 3969779 - DNA, 25 bp, Homo sapien
gtgtaacccgcatctgcacaccaag

SEQ ID NO: 3969780 - DNA, 25 bp, Homo sapien
cattttggagccgtaagagagccat

SEQ ID NO: 3969781 - DNA, 25 bp, Homo sapien
cgctttgctgtgtaacccgcatctg

SEQ ID NO: 3969782 - DNA, 25 bp, Homo sapien
ctccacccataagtgcacttccttc

SEQ ID NO: 3969783 - DNA, 25 bp, Homo sapien
cacccataagtgcacttccttcagt

SEQ ID NO: 3969784 - DNA, 25 bp, Homo sapien
ccacccataagtgcacttccttcag

SEQ ID NO: 3969785 - DNA, 25 bp, Homo sapien
cccataagtgcacttccttcagttt

SEQ ID NO: 3969786 - DNA, 25 bp, Homo sapien
gaaagcatctctaaactgggccaac

SEQ ID NO: 3969787 - DNA, 25 bp, Homo sapien
ctgggccaacactgatgatcgtaat

SEQ ID NO: 3969788 - DNA, 25 bp, Homo sapien
gattatacagattgaggctcagctc

SEQ ID NO: 3969789 - DNA, 25 bp, Homo sapien
cagtagggaggtcttgccaccagat

SEQ ID NO: 3969790 - DNA, 25 bp, Homo sapien
agctatgaggcactcattgcccggg

SEQ ID NO: 3969791 - DNA, 25 bp, Homo sapien
tctagaagaggtactaattccctgg

SEQ ID NO: 3969792 - DNA, 25 bp, Homo sapien
gatacacttggagatctggaacaga

SEQ ID NO: 3969793 - DNA, 25 bp, Homo sapien
gaagctagagcctgttgggactcca

SEQ ID NO: 3969794 - DNA, 25 bp, Homo sapien
ctgtttcatgagataggaagacaca

SEQ ID NO: 3969795 - DNA, 25 bp, Homo sapien
tatattcagtaattcttcctgctct

SEQ ID NO: 3969796 - DNA, 25 bp, Homo sapien
ttcctgctctggaaagagatccaaa

SEQ ID NO: 3969797 - DNA, 25 bp, Homo sapien
tccaaaatggctaaatatttctttc

SEQ ID NO: 3969798 - DNA, 25 bp, Homo sapien
cgaataccttccagctgattgtaag

SEQ ID NO: 3969799 - DNA, 25 bp, Homo sapien
tagcctcagtgaaagttcccagcag

SEQ ID NO: 3969800 - DNA, 25 bp, Homo sapien
gtaactggccacaaaacgctgtaaa

SEQ ID NO: 3969801 - DNA, 25 bp, Homo sapien
gagattgattgcagggcatgaccca

SEQ ID NO: 3969802 - DNA, 25 bp, Homo sapien
gaagcgctcccttaaggatacagta

SEQ ID NO: 3969803 - DNA, 25 bp, Homo sapien
ttatcagcagaccagacgcagggaa

SEQ ID NO: 3969804 - DNA, 25 bp, Homo sapien
tcaaaccattgtccctcaaggaaga

SEQ ID NO: 3969805 - DNA, 25 bp, Homo sapien
caagatagacatcgcaatttgccaa

SEQ ID NO: 3969806 - DNA, 25 bp, Homo sapien
tccagccggttgggttttgttgctc

SEQ ID NO: 3969807 - DNA, 25 bp, Homo sapien
tggagtttggaagccgaacagttgg

SEQ ID NO: 3969808 - DNA, 25 bp, Homo sapien
cagccggttgggttttgttgctcgt

SEQ ID NO: 3969809 - DNA, 25 bp, Homo sapien
ttttgttgctcgtggagtttggaag

SEQ ID NO: 3969810 - DNA, 25 bp, Homo sapien
gccagctgcagttgtttattgtgga

SEQ ID NO: 3969811 - DNA, 25 bp, Homo sapien
tccactgtgcgagaaacagaacagg

SEQ ID NO: 3969812 - DNA, 25 bp, Homo sapien
tcatggagttcttcctcgctttggc

SEQ ID NO: 3969813 - DNA, 25 bp, Homo sapien
tcctcgctttggctgtttcaatatc

SEQ ID NO: 3969814 - DNA, 25 bp, Homo sapien
ttctctcctgcccccttcccaggca

SEQ ID NO: 3969815 - DNA, 25 bp, Homo sapien
ctgcagcaggcttctctcctgcccc

SEQ ID NO: 3969816 - DNA, 25 bp, Homo sapien
tctctcctgcccccttcccaggcat

SEQ ID NO: 3969817 - DNA, 25 bp, Homo sapien
ggcttctctcctgcccccttcccag

SEQ ID NO: 3969818 - DNA, 25 bp, Homo sapien
taggtgaaacagtggtacaggagtt

SEQ ID NO: 3969819 - DNA, 25 bp, Homo sapien
aagaggggatgctgtacaactggaa

SEQ ID NO: 3969820 - DNA, 25 bp, Homo sapien
aatggtgtaggtgaaacagtggtac

SEQ ID NO: 3969821 - DNA, 25 bp, Homo sapien
aaacagtggtacaggagttcagaag

SEQ ID NO: 3969822 - DNA, 25 bp, Homo sapien
gttccttctcagagcggccgtcctg

SEQ ID NO: 3969823 - DNA, 25 bp, Homo sapien
aactccaccatctccctgtgggttt

SEQ ID NO: 3969824 - DNA, 25 bp, Homo sapien
ttccctcagtgcacgtgggctggtg

SEQ ID NO: 3969825 - DNA, 25 bp, Homo sapien
gggttttccctcagtgcacgtgggc

SEQ ID NO: 3969826 - DNA, 25 bp, Homo sapien
gagcaggaccttgcacacaatcaca

SEQ ID NO: 3969827 - DNA, 25 bp, Homo sapien
tggcagagcaggaccttgcacacaa

SEQ ID NO: 3969828 - DNA, 25 bp, Homo sapien
cagagcaggaccttgcacacaatca

SEQ ID NO: 3969829 - DNA, 25 bp, Homo sapien
aggaccttgcacacaatcacaggat

SEQ ID NO: 3969830 - DNA, 25 bp, Homo sapien
gcaggggtggccttttgcccatctc

SEQ ID NO: 3969831 - DNA, 25 bp, Homo sapien
ggtggccttttgcccatctcttgcc

SEQ ID NO: 3969832 - DNA, 25 bp, Homo sapien
ttttgcccatctcttgccgcagtct

SEQ ID NO: 3969833 - DNA, 25 bp, Homo sapien
ggccttttgcccatctcttgccgca

SEQ ID NO: 3969834 - DNA, 25 bp, Homo sapien
gcccagagtgtgccctggacttgtg

SEQ ID NO: 3969835 - DNA, 25 bp, Homo sapien
gtgtgccctggacttgtgggcacca

SEQ ID NO: 3969836 - DNA, 25 bp, Homo sapien
tgtgccctggacttgtgggcaccat

SEQ ID NO: 3969837 - DNA, 25 bp, Homo sapien
gtggcccagagtgtgccctggactt

SEQ ID NO: 3969838 - DNA, 25 bp, Homo sapien
aggtaagagtgaggaattgggcata

SEQ ID NO: 3969839 - DNA, 25 bp, Homo sapien
ggtaagagtgaggaattgggcatac

SEQ ID NO: 3969840 - DNA, 25 bp, Homo sapien
gaatggctggcgagacataggaaga

SEQ ID NO: 3969841 - DNA, 25 bp, Homo sapien
tctgatgtctctttaatcaatggct

SEQ ID NO: 3969842 - DNA, 25 bp, Homo sapien
gtttgaaaggaatggctggcgagac

SEQ ID NO: 3969843 - DNA, 25 bp, Homo sapien
atctgatgtctctttaatcaatggc

SEQ ID NO: 3969844 - DNA, 25 bp, Homo sapien
ctacagttgagcctcttgaggagta

SEQ ID NO: 3969845 - DNA, 25 bp, Homo sapien
cctcttgaggagtaaagtggatctt

SEQ ID NO: 3969846 - DNA, 25 bp, Homo sapien
gagtaaagtggatcttggagtccat

SEQ ID NO: 3969847 - DNA, 25 bp, Homo sapien
ggatcttggagtccatccaataata

SEQ ID NO: 3969848 - DNA, 25 bp, Homo sapien
cacttggttatgctcagcctggtga

SEQ ID NO: 3969849 - DNA, 25 bp, Homo sapien
atctgatgtctggaggcgagtgact

SEQ ID NO: 3969850 - DNA, 25 bp, Homo sapien
gatggaagtgttacgacccagggca

SEQ ID NO: 3969851 - DNA, 25 bp, Homo sapien
caaagaggcagctattgttgttttc

SEQ ID NO: 3969852 - DNA, 25 bp, Homo sapien
cacattcttccccaggccggcatcc

SEQ ID NO: 3969853 - DNA, 25 bp, Homo sapien
gggaaaggagtcagtcaacgtattg

SEQ ID NO: 3969854 - DNA, 25 bp, Homo sapien
gtcagtcaacgtattgttccaacat

SEQ ID NO: 3969855 - DNA, 25 bp, Homo sapien
gccggcatcccagtgtgggaaagga

SEQ ID NO: 3969856 - DNA, 25 bp, Homo sapien
tggagagctaaacgcctgggtttga

SEQ ID NO: 3969857 - DNA, 25 bp, Homo sapien
tgcatatggagagctaaacgcctgg

SEQ ID NO: 3969858 - DNA, 25 bp, Homo sapien
catatggagagctaaacgcctgggt

SEQ ID NO: 3969859 - DNA, 25 bp, Homo sapien
aatgcatatggagagctaaacgcct

SEQ ID NO: 3969860 - DNA, 25 bp, Homo sapien
gaagccaggggctcatgttacccca

SEQ ID NO: 3969861 - DNA, 25 bp, Homo sapien
gggctcatgttaccccagagctgcc

SEQ ID NO: 3969862 - DNA, 25 bp, Homo sapien
ccagagctgcccacaactggctttc

SEQ ID NO: 3969863 - DNA, 25 bp, Homo sapien
agagctgcccacaactggctttcct

SEQ ID NO: 3969864 - DNA, 25 bp, Homo sapien
gagtgacaagcagctaatttccaaa

SEQ ID NO: 3969865 - DNA, 25 bp, Homo sapien
caaatccgattccaagcgagtgagt

SEQ ID NO: 3969866 - DNA, 25 bp, Homo sapien
aaggacatgagatccaaatccgatt

SEQ ID NO: 3969867 - DNA, 25 bp, Homo sapien
tccaagcgagtgagtgacaagcagc

SEQ ID NO: 3969868 - DNA, 25 bp, Homo sapien
attccacatacaggcaagatccagg

SEQ ID NO: 3969869 - DNA, 25 bp, Homo sapien
ccacatacaggcaagatccaggcct

SEQ ID NO: 3969870 - DNA, 25 bp, Homo sapien
aatattccacatacaggcaagatcc

SEQ ID NO: 3969871 - DNA, 25 bp, Homo sapien
tcaatattccacatacaggcaagat

SEQ ID NO: 3969872 - DNA, 25 bp, Homo sapien
ttgcagctctaacttgctagattcc

SEQ ID NO: 3969873 - DNA, 25 bp, Homo sapien
gctctaacttgctagattcctccat

SEQ ID NO: 3969874 - DNA, 25 bp, Homo sapien
gcagctctaacttgctagattcctc

SEQ ID NO: 3969875 - DNA, 25 bp, Homo sapien
agctctaacttgctagattcctcca

SEQ ID NO: 3969876 - DNA, 25 bp, Homo sapien
cctcagtggcacagggtagactgcc

SEQ ID NO: 3969877 - DNA, 25 bp, Homo sapien
tgatttcatacttgtgactggggcc

SEQ ID NO: 3969878 - DNA, 25 bp, Homo sapien
cctgttctatgaaattctgggaaaa

SEQ ID NO: 3969879 - DNA, 25 bp, Homo sapien
ctcagtggcacagggtagactgccc

SEQ ID NO: 3969880 - DNA, 25 bp, Homo sapien
ttagatagcatctgatagcactgat

SEQ ID NO: 3969881 - DNA, 25 bp, Homo sapien
gcactgatactcagttgagttaact

SEQ ID NO: 3969882 - DNA, 25 bp, Homo sapien
cttgaatggtcttagatagcatctg

SEQ ID NO: 3969883 - DNA, 25 bp, Homo sapien
ccttttcctgctatatcgagatggg

SEQ ID NO: 3969884 - DNA, 25 bp, Homo sapien
aattggccatcatttagccaaacac

SEQ ID NO: 3969885 - DNA, 25 bp, Homo sapien
atgaaaattggccatcatttagcca

SEQ ID NO: 3969886 - DNA, 25 bp, Homo sapien
tattagatgaaaattggccatcatt

SEQ ID NO: 3969887 - DNA, 25 bp, Homo sapien
ggccatcatttagccaaacacacat

SEQ ID NO: 3969888 - DNA, 25 bp, Homo sapien
ccggaagttatctggtctgtagaca

SEQ ID NO: 3969889 - DNA, 25 bp, Homo sapien
ctcccagctctccggaagttatctg

SEQ ID NO: 3969890 - DNA, 25 bp, Homo sapien
cggaagttatctggtctgtagacaa

SEQ ID NO: 3969891 - DNA, 25 bp, Homo sapien
actttccacttgttgaggttggaga

SEQ ID NO: 3969892 - DNA, 25 bp, Homo sapien
tagcagtaggaagatctgggcagaa

SEQ ID NO: 3969893 - DNA, 25 bp, Homo sapien
cagccttctgggtgtatcacatacc

SEQ ID NO: 3969894 - DNA, 25 bp, Homo sapien
tgtgtatacgtgtcagctctcaacc

SEQ ID NO: 3969895 - DNA, 25 bp, Homo sapien
aactcccagcttcagaggtaagata

SEQ ID NO: 3969896 - DNA, 25 bp, Homo sapien
taatttgaccaaagcccgagaggtg

SEQ ID NO: 3969897 - DNA, 25 bp, Homo sapien
taaaagtgaccctcagggatgtgcc

SEQ ID NO: 3969898 - DNA, 25 bp, Homo sapien
gctatttgatagaatgggccacagc

SEQ ID NO: 3969899 - DNA, 25 bp, Homo sapien
tgggacagcagaatgggtaccctcc

SEQ ID NO: 3969900 - DNA, 25 bp, Homo sapien
gacaatcttaggatagtccagggca

SEQ ID NO: 3969901 - DNA, 25 bp, Homo sapien
ttttcatcatttccgagccagagag

SEQ ID NO: 3969902 - DNA, 25 bp, Homo sapien
gaacctggctatagttacctgcaaa

SEQ ID NO: 3969903 - DNA, 25 bp, Homo sapien
cacaaggtcataaggagaacaggct

SEQ ID NO: 3969904 - DNA, 25 bp, Homo sapien
gcagacaaagttctaaagatggaag

SEQ ID NO: 3969905 - DNA, 25 bp, Homo sapien
taaactcgtgttattctgaaaagac

SEQ ID NO: 3969906 - DNA, 25 bp, Homo sapien
ttcatcctaagcatacagctcctgg

SEQ ID NO: 3969907 - DNA, 25 bp, Homo sapien
aattgatagtgagtccttgggctgc

SEQ ID NO: 3969908 - DNA, 25 bp, Homo sapien
gccagtggttatagaatgttccctt

SEQ ID NO: 3969909 - DNA, 25 bp, Homo sapien
ggtctgcactgtaggattgttaagc

SEQ ID NO: 3969910 - DNA, 25 bp, Homo sapien
gacagaggccagtggttatagaatg

SEQ ID NO: 3969911 - DNA, 25 bp, Homo sapien
tgttaagcagtttcgtttgagtttg

SEQ ID NO: 3969912 - DNA, 25 bp, Homo sapien
taaggttgcctggacattccaagaa

SEQ ID NO: 3969913 - DNA, 25 bp, Homo sapien
cagctttaccgctaaagccatggct

SEQ ID NO: 3969914 - DNA, 25 bp, Homo sapien
ttcctaacagctttaccgctaaagc

SEQ ID NO: 3969915 - DNA, 25 bp, Homo sapien
tttcctaaggttgcctggacattcc

SEQ ID NO: 3969916 - DNA, 25 bp, Homo sapien
attcccagcaccctggttaggacca

SEQ ID NO: 3969917 - DNA, 25 bp, Homo sapien
tcccagcaccctggttaggaccagg

SEQ ID NO: 3969918 - DNA, 25 bp, Homo sapien
ccagcaccctggttaggaccaggct

SEQ ID NO: 3969919 - DNA, 25 bp, Homo sapien
gcaccctggttaggaccaggctctg

SEQ ID NO: 3969920 - DNA, 25 bp, Homo sapien
acttgaccgtgagacccttcttgag

SEQ ID NO: 3969921 - DNA, 25 bp, Homo sapien
gcctgctcattggaatgccagacag

SEQ ID NO: 3969922 - DNA, 25 bp, Homo sapien
cagggaaactgtcgtgtgagagaca

SEQ ID NO: 3969923 - DNA, 25 bp, Homo sapien
gagacagacattttcacttgaccgt

SEQ ID NO: 3969924 - DNA, 25 bp, Homo sapien
gctgggatacgaacacagtctctaa

SEQ ID NO: 3969925 - DNA, 25 bp, Homo sapien
tgtacctcagtccaatattgctacc

SEQ ID NO: 3969926 - DNA, 25 bp, Homo sapien
cttaggcgggtggaagagtctccct

SEQ ID NO: 3969927 - DNA, 25 bp, Homo sapien
taaattgctagtggccttaggcggg

SEQ ID NO: 3969928 - DNA, 25 bp, Homo sapien
ccaatttgattgctacagagcagga

SEQ ID NO: 3969929 - DNA, 25 bp, Homo sapien
caggagatttggttctcaaaatagc

SEQ ID NO: 3969930 - DNA, 25 bp, Homo sapien
tgcaaagcaacacttgaaaagcccc

SEQ ID NO: 3969931 - DNA, 25 bp, Homo sapien
caaaatagccatgcgtttgggaaat

SEQ ID NO: 3969932 - DNA, 25 bp, Homo sapien
tgcaatggaggtgtcttccctacag

SEQ ID NO: 3969933 - DNA, 25 bp, Homo sapien
tctgcaatggaggtgtcttccctac

SEQ ID NO: 3969934 - DNA, 25 bp, Homo sapien
caatggaggtgtcttccctacagac

SEQ ID NO: 3969935 - DNA, 25 bp, Homo sapien
gtctgcaatggaggtgtcttcccta

SEQ ID NO: 3969936 - DNA, 25 bp, Homo sapien
cagacgccgcattgtcacctggttg

SEQ ID NO: 3969937 - DNA, 25 bp, Homo sapien
ccttgtctgaacagtgatgagttgg

SEQ ID NO: 3969938 - DNA, 25 bp, Homo sapien
gaggtcgtggcaagctgagatctta

SEQ ID NO: 3969939 - DNA, 25 bp, Homo sapien
tgagttggactgaaaactctcccag

SEQ ID NO: 3969940 - DNA, 25 bp, Homo sapien
gattcatgagcagctatgccccaga

SEQ ID NO: 3969941 - DNA, 25 bp, Homo sapien
tgtgcacagagaggcaacgaaggcc

SEQ ID NO: 3969942 - DNA, 25 bp, Homo sapien
tcaaccacgagtgttcagcaaggcc

SEQ ID NO: 3969943 - DNA, 25 bp, Homo sapien
gatgactgtaggagagcacgcagaa

SEQ ID NO: 3969944 - DNA, 25 bp, Homo sapien
ctgtgtggactttccattgatttct

SEQ ID NO: 3969945 - DNA, 25 bp, Homo sapien
tctttccagcagctggcttgcttct

SEQ ID NO: 3969946 - DNA, 25 bp, Homo sapien
attgatttctttccagcagctggct

SEQ ID NO: 3969947 - DNA, 25 bp, Homo sapien
tccagcagctggcttgcttcttcat

SEQ ID NO: 3969948 - DNA, 25 bp, Homo sapien
taactgaaacacgaatatggcccac

SEQ ID NO: 3969949 - DNA, 25 bp, Homo sapien
aaacacgaatatggcccacgtatcg

SEQ ID NO: 3969950 - DNA, 25 bp, Homo sapien
tgctataactgaaacacgaatatgg

SEQ ID NO: 3969951 - DNA, 25 bp, Homo sapien
tcagaccacattctaaggcagcttc

SEQ ID NO: 3969952 - DNA, 25 bp, Homo sapien
catgagctcaggatgacattccctt

SEQ ID NO: 3969953 - DNA, 25 bp, Homo sapien
tctgatctctacgaccaagaaattc

SEQ ID NO: 3969954 - DNA, 25 bp, Homo sapien
ggtcttcgaatctcagggagcaatg

SEQ ID NO: 3969955 - DNA, 25 bp, Homo sapien
gaaattcttttacagagccccttgc

SEQ ID NO: 3969956 - DNA, 25 bp, Homo sapien
ttctgcatctgtcagacagtaaatg

SEQ ID NO: 3969957 - DNA, 25 bp, Homo sapien
tctgcatctgtcagacagtaaatgt

SEQ ID NO: 3969958 - DNA, 25 bp, Homo sapien
gagcagcgaaggcgctctgtccaaa

SEQ ID NO: 3969959 - DNA, 25 bp, Homo sapien
gcgaaggcgctctgtccaaatgcac

SEQ ID NO: 3969960 - DNA, 25 bp, Homo sapien
aagatggtgagttgggtccattcac

SEQ ID NO: 3969961 - DNA, 25 bp, Homo sapien
tcaaatggtcgtaatagaggcgggt

SEQ ID NO: 3969962 - DNA, 25 bp, Homo sapien
gactctgagttgcacatgggtacac

SEQ ID NO: 3969963 - DNA, 25 bp, Homo sapien
tgggtacacgcagggaagaagtatt

SEQ ID NO: 3969964 - DNA, 25 bp, Homo sapien
tcagcccgcctccagcccagtgcag

SEQ ID NO: 3969965 - DNA, 25 bp, Homo sapien
ctgaagacagagctgggccctcagc

SEQ ID NO: 3969966 - DNA, 25 bp, Homo sapien
tttctgaagacagagctgggccctc

SEQ ID NO: 3969967 - DNA, 25 bp, Homo sapien
ctcagcccgcctccagcccagtgca

SEQ ID NO: 3969968 - DNA, 25 bp, Homo sapien
tcttaggaagatggcagcgcttcac

SEQ ID NO: 3969969 - DNA, 25 bp, Homo sapien
gcgcttcacagatgcagtgcccaag

SEQ ID NO: 3969970 - DNA, 25 bp, Homo sapien
caacagtgtcaagattgagaagccc

SEQ ID NO: 3969971 - DNA, 25 bp, Homo sapien
tgagaagcccttgtgtagacccaag

SEQ ID NO: 3969972 - DNA, 25 bp, Homo sapien
tgtacgcagccctgatgttgtgtgt

SEQ ID NO: 3969973 - DNA, 25 bp, Homo sapien
gtgtgtacgcagccctgatgttgtg

SEQ ID NO: 3969974 - DNA, 25 bp, Homo sapien
gtgtacgcagccctgatgttgtgtg

SEQ ID NO: 3969975 - DNA, 25 bp, Homo sapien
tacgcagccctgatgttgtgtgtgt

SEQ ID NO: 3969976 - DNA, 25 bp, Homo sapien
tcttgagacggcattgagcaatgtg

SEQ ID NO: 3969977 - DNA, 25 bp, Homo sapien
cctgccagtcttgagacggcattga

SEQ ID NO: 3969978 - DNA, 25 bp, Homo sapien
agtgaacctgccagtcttgagacgg

SEQ ID NO: 3969979 - DNA, 25 bp, Homo sapien
ccagtcttgagacggcattgagcaa

SEQ ID NO: 3969980 - DNA, 25 bp, Homo sapien
ccaggcatagggtagaacatgcaag

SEQ ID NO: 3969981 - DNA, 25 bp, Homo sapien
gaagagatggtgtgattagagtccc

SEQ ID NO: 3969982 - DNA, 25 bp, Homo sapien
tagagtcccaaccttttatccagca

SEQ ID NO: 3969983 - DNA, 25 bp, Homo sapien
tagttcattcggagctgagcctctg

SEQ ID NO: 3969984 - DNA, 25 bp, Homo sapien
tgtgcctgtcccgaccagttcaagg

SEQ ID NO: 3969985 - DNA, 25 bp, Homo sapien
tctggtgacccatctttcgcgaaag

SEQ ID NO: 3969986 - DNA, 25 bp, Homo sapien
cggcataagcggagatccaagttca

SEQ ID NO: 3969987 - DNA, 25 bp, Homo sapien
ttctcacctaaagggatagggcgtg

SEQ ID NO: 3969988 - DNA, 25 bp, Homo sapien
tatgatctgtgcaggaaatcttcag

SEQ ID NO: 3969989 - DNA, 25 bp, Homo sapien
gtcaagctgattgccaacactttgt

SEQ ID NO: 3969990 - DNA, 25 bp, Homo sapien
ccaggtcagagactccaagtggtgc

SEQ ID NO: 3969991 - DNA, 25 bp, Homo sapien
gccaactctatgaccacatgattga

SEQ ID NO: 3969992 - DNA, 25 bp, Homo sapien
gcctgtctctggtgaacaaacttcc

SEQ ID NO: 3969993 - DNA, 25 bp, Homo sapien
ccattccagcttgccgaaatcaaag

SEQ ID NO: 3969994 - DNA, 25 bp, Homo sapien
tctcaggaatcagggtggacatggc

SEQ ID NO: 3969995 - DNA, 25 bp, Homo sapien
atgggctggtgggccattccagctt

SEQ ID NO: 3969996 - DNA, 25 bp, Homo sapien
ctttttgacgtgcagaatctcagtg

SEQ ID NO: 3969997 - DNA, 25 bp, Homo sapien
ttctttttgacgtgcagaatctcag

SEQ ID NO: 3969998 - DNA, 25 bp, Homo sapien
tttttgacgtgcagaatctcagtgg

SEQ ID NO: 3969999 - DNA, 25 bp, Homo sapien
ttttgacgtgcagaatctcagtggc

SEQ ID NO: 3970000 - DNA, 25 bp, Homo sapien
cagcctccactgcttctgccccccg

SEQ ID NO: 3970001 - DNA, 25 bp, Homo sapien
ccagcctccactgcttctgcccccc

SEQ ID NO: 3970002 - DNA, 25 bp, Homo sapien
tccagcctccactgcttctgccccc

SEQ ID NO: 3970003 - DNA, 25 bp, Homo sapien
ctccagcctccactgcttctgcccc

SEQ ID NO: 3970004 - DNA, 25 bp, Homo sapien
aaaaagggccttcaaggcaggaatg

SEQ ID NO: 3970005 - DNA, 25 bp, Homo sapien
tcatatccagcgagtccctgaccct

SEQ ID NO: 3970006 - DNA, 25 bp, Homo sapien
catatccagcgagtccctgaccctt

SEQ ID NO: 3970007 - DNA, 25 bp, Homo sapien
atatccagcgagtccctgacccttt

SEQ ID NO: 3970008 - DNA, 25 bp, Homo sapien
tctcagacccatgaaattaggcgcc

SEQ ID NO: 3970009 - DNA, 25 bp, Homo sapien
cctggcccgggattgatgtagcccc

SEQ ID NO: 3970010 - DNA, 25 bp, Homo sapien
tagccccggtaggtttgcctctgca

SEQ ID NO: 3970011 - DNA, 25 bp, Homo sapien
tttaacctgcgtgtcatctgcctgg

SEQ ID NO: 3970012 - DNA, 25 bp, Homo sapien
aggccccttgcgttggccagttccg

SEQ ID NO: 3970013 - DNA, 25 bp, Homo sapien
gtccagccaacacctctggtcaggt

SEQ ID NO: 3970014 - DNA, 25 bp, Homo sapien
ggttcaagtctgatttatacttgac

SEQ ID NO: 3970015 - DNA, 25 bp, Homo sapien
ttgcgttggccagttccgcagcccg

SEQ ID NO: 3970016 - DNA, 25 bp, Homo sapien
tcaagggagtgggtggaggtggctc

SEQ ID NO: 3970017 - DNA, 25 bp, Homo sapien
caagggagtgggtggaggtggctca

SEQ ID NO: 3970018 - DNA, 25 bp, Homo sapien
aagggagtgggtggaggtggctcac

SEQ ID NO: 3970019 - DNA, 25 bp, Homo sapien
gcctgtagtgcacatcactggccag

SEQ ID NO: 3970020 - DNA, 25 bp, Homo sapien
cttcatccttgggtcatcgtcgaca

SEQ ID NO: 3970021 - DNA, 25 bp, Homo sapien
ccttctgagcatgcctgaggcccag

SEQ ID NO: 3970022 - DNA, 25 bp, Homo sapien
gacactgcggtacccgatctgcagg

SEQ ID NO: 3970023 - DNA, 25 bp, Homo sapien
agaatacctgctatgttcctgacac

SEQ ID NO: 3970024 - DNA, 25 bp, Homo sapien
acttgtccatctagggcaaaagccc

SEQ ID NO: 3970025 - DNA, 25 bp, Homo sapien
gacaaacagccaaatttcctaagtg

SEQ ID NO: 3970026 - DNA, 25 bp, Homo sapien
gacacttgtctagtcaatggtgccc

SEQ ID NO: 3970027 - DNA, 25 bp, Homo sapien
gagagataatcttgacaggtcctgg

SEQ ID NO: 3970028 - DNA, 25 bp, Homo sapien
gagaaaaactcatcagtgaccgcag

SEQ ID NO: 3970029 - DNA, 25 bp, Homo sapien
ggtttgcctttcaacagaactggga

SEQ ID NO: 3970030 - DNA, 25 bp, Homo sapien
tcagtgaccgcaggagagaacatgg

SEQ ID NO: 3970031 - DNA, 25 bp, Homo sapien
tgaagtcataactgccagcccgggt

SEQ ID NO: 3970032 - DNA, 25 bp, Homo sapien
tgctcccaggagtttctgtagactt

SEQ ID NO: 3970033 - DNA, 25 bp, Homo sapien
atctccctagatgcccgggcagtct

SEQ ID NO: 3970034 - DNA, 25 bp, Homo sapien
atcactggcgatctccctagatgcc

SEQ ID NO: 3970035 - DNA, 25 bp, Homo sapien
cttggcgactccctagcactgggat

SEQ ID NO: 3970036 - DNA, 25 bp, Homo sapien
tggtactcagcaggagtggttctta

SEQ ID NO: 3970037 - DNA, 25 bp, Homo sapien
ctttgttggttcctaggacggcaca

SEQ ID NO: 3970038 - DNA, 25 bp, Homo sapien
gacggcacagcctatagctccatgt

SEQ ID NO: 3970039 - DNA, 25 bp, Homo sapien
aacacccgatgccgtaaaccctgag

SEQ ID NO: 3970040 - DNA, 25 bp, Homo sapien
tcgcctctgactccaacacccgatg

SEQ ID NO: 3970041 - DNA, 25 bp, Homo sapien
cctgagccaaacgtctactgtgttc

SEQ ID NO: 3970042 - DNA, 25 bp, Homo sapien
gagccaaacgtctactgtgttctag

SEQ ID NO: 3970043 - DNA, 25 bp, Homo sapien
ggccccaaatgcactggcagcttta

SEQ ID NO: 3970044 - DNA, 25 bp, Homo sapien
tttatcccactttctacagcgatgg

SEQ ID NO: 3970045 - DNA, 25 bp, Homo sapien
gatgggtctccaatcgttcctcaaa

SEQ ID NO: 3970046 - DNA, 25 bp, Homo sapien
gaccggcatcccttgtgagagggaa

SEQ ID NO: 3970047 - DNA, 25 bp, Homo sapien
tctgtgcagggattctgcatctcca

SEQ ID NO: 3970048 - DNA, 25 bp, Homo sapien
gtcactcagatgcagcgcattgagg

SEQ ID NO: 3970049 - DNA, 25 bp, Homo sapien
cattgaggcgagctcgggtgaaatc

SEQ ID NO: 3970050 - DNA, 25 bp, Homo sapien
ctgcatctccagatctatacatgcg

SEQ ID NO: 3970051 - DNA, 25 bp, Homo sapien
cttggcatgaaccaggtctggggag

SEQ ID NO: 3970052 - DNA, 25 bp, Homo sapien
cattgcagtgcatatagctgttctt

SEQ ID NO: 3970053 - DNA, 25 bp, Homo sapien
tctggggagtcaaccactgtggtga

SEQ ID NO: 3970054 - DNA, 25 bp, Homo sapien
ctcattgcagtgcatatagctgttc

SEQ ID NO: 3970055 - DNA, 25 bp, Homo sapien
ggatctcagcgccagccatcctatg

SEQ ID NO: 3970056 - DNA, 25 bp, Homo sapien
cgatcaggtctgacttgtagcgcaa

SEQ ID NO: 3970057 - DNA, 25 bp, Homo sapien
cccttcatgccgatcaggtctgact

SEQ ID NO: 3970058 - DNA, 25 bp, Homo sapien
atcctatgcccttcatgccgatcag

SEQ ID NO: 3970059 - DNA, 25 bp, Homo sapien
gctgtgaacttgtgatactgtgtcc

SEQ ID NO: 3970060 - DNA, 25 bp, Homo sapien
ctgtgtcctgtagtcgtggtcgctg

SEQ ID NO: 3970061 - DNA, 25 bp, Homo sapien
caggtcctcgggcagtgctgtgaac

SEQ ID NO: 3970062 - DNA, 25 bp, Homo sapien
tagtcgtggtcgctggccagagcct

SEQ ID NO: 3970063 - DNA, 25 bp, Homo sapien
tatgagtttccctcgctccttcaca

SEQ ID NO: 3970064 - DNA, 25 bp, Homo sapien
tcctgtactgaagctcgctctgcag

SEQ ID NO: 3970065 - DNA, 25 bp, Homo sapien
tccatgggcagatggaactgggctt

SEQ ID NO: 3970066 - DNA, 25 bp, Homo sapien
ttggcatggaccaggtgcaccatgt

SEQ ID NO: 3970067 - DNA, 25 bp, Homo sapien
tgtagccttgagcacgaagattacg

SEQ ID NO: 3970068 - DNA, 25 bp, Homo sapien
aaggggagcgcttctattgtcagct

SEQ ID NO: 3970069 - DNA, 25 bp, Homo sapien
cttgagcacgaagattacgccagga

SEQ ID NO: 3970070 - DNA, 25 bp, Homo sapien
agcacgaagattacgccaggactct

SEQ ID NO: 3970071 - DNA, 25 bp, Homo sapien
gacccagggtcattgtatactcgtg

SEQ ID NO: 3970072 - DNA, 25 bp, Homo sapien
cgtttttgctcggatgaactcgggc

SEQ ID NO: 3970073 - DNA, 25 bp, Homo sapien
tactcgtgtcttgcatcctctccag

SEQ ID NO: 3970074 - DNA, 25 bp, Homo sapien
ggttggctgcattcgtttttgctcg

SEQ ID NO: 3970075 - DNA, 25 bp, Homo sapien
aaaagaccattccaaagccatcagg

SEQ ID NO: 3970076 - DNA, 25 bp, Homo sapien
aaagaccattccaaagccatcagga

SEQ ID NO: 3970077 - DNA, 25 bp, Homo sapien
aagaccattccaaagccatcaggag

SEQ ID NO: 3970078 - DNA, 25 bp, Homo sapien
taaaaagaccattccaaagccatca

SEQ ID NO: 3970079 - DNA, 25 bp, Homo sapien
agtggggatgctgccgatatttact

SEQ ID NO: 3970080 - DNA, 25 bp, Homo sapien
gttgctgaatttcgcatgaaggagg

SEQ ID NO: 3970081 - DNA, 25 bp, Homo sapien
acagctgtgtacttgaatgagtggg

SEQ ID NO: 3970082 - DNA, 25 bp, Homo sapien
ctcattcgttatctggttgctgaat

SEQ ID NO: 3970083 - DNA, 25 bp, Homo sapien
tggaatgacacatgcaacacctcgc

SEQ ID NO: 3970084 - DNA, 25 bp, Homo sapien
caatctctaacgtgcctggaatgac

SEQ ID NO: 3970085 - DNA, 25 bp, Homo sapien
taaagttcaggtctgaccggtacaa

SEQ ID NO: 3970086 - DNA, 25 bp, Homo sapien
tcactgatgagttccgatgctttct

SEQ ID NO: 3970087 - DNA, 25 bp, Homo sapien
tcagcctcaggtcttctgccaagga

SEQ ID NO: 3970088 - DNA, 25 bp, Homo sapien
tgtccaacggcagatggaactgcgc

SEQ ID NO: 3970089 - DNA, 25 bp, Homo sapien
ggaactgcgcctttgagtgttcaaa

SEQ ID NO: 3970090 - DNA, 25 bp, Homo sapien
ttggcatgcaccagggcggccatgt

SEQ ID NO: 3970091 - DNA, 25 bp, Homo sapien
gtgaggtcgcatacactgaatgtgc

SEQ ID NO: 3970092 - DNA, 25 bp, Homo sapien
actctgcagtgaggtcgcatacact

SEQ ID NO: 3970093 - DNA, 25 bp, Homo sapien
atgtgcaaggctgatatcatcttcc

SEQ ID NO: 3970094 - DNA, 25 bp, Homo sapien
gctccgggaaccaagcatctgtcct

SEQ ID NO: 3970095 - DNA, 25 bp, Homo sapien
cgaagtttgctccaggattccttat

SEQ ID NO: 3970096 - DNA, 25 bp, Homo sapien
tcagtttatagccaccatctcgaag

SEQ ID NO: 3970097 - DNA, 25 bp, Homo sapien
gaagggcatccaacctcagtttata

SEQ ID NO: 3970098 - DNA, 25 bp, Homo sapien
ggaatggaagggcatccaacctcag

SEQ ID NO: 3970099 - DNA, 25 bp, Homo sapien
ttcatggcattcagcttggccagca

SEQ ID NO: 3970100 - DNA, 25 bp, Homo sapien
gggaggtcagcagtcggtgtgtaat

SEQ ID NO: 3970101 - DNA, 25 bp, Homo sapien
gcagtcggtgtgtaatgatgcttta

SEQ ID NO: 3970102 - DNA, 25 bp, Homo sapien
tattcatggcattcagcttggccag

SEQ ID NO: 3970103 - DNA, 25 bp, Homo sapien
tccactgcttgggtataactaattc

SEQ ID NO: 3970104 - DNA, 25 bp, Homo sapien
ggaccatctccggagtgtctttaat

SEQ ID NO: 3970105 - DNA, 25 bp, Homo sapien
tactggtaaacttcaaagcatctgg

SEQ ID NO: 3970106 - DNA, 25 bp, Homo sapien
gtataactaattctggcctggacca

SEQ ID NO: 3970107 - DNA, 25 bp, Homo sapien
gcctgctccacatttaatgacccgg

SEQ ID NO: 3970108 - DNA, 25 bp, Homo sapien
cacatttaatgacccggtggcgacc

SEQ ID NO: 3970109 - DNA, 25 bp, Homo sapien
cacttcacatctgccctgtattggt

SEQ ID NO: 3970110 - DNA, 25 bp, Homo sapien
ggtggcgacccagcccatgcctttc

SEQ ID NO: 3970111 - DNA, 25 bp, Homo sapien
ccatgtccagggagacgtggcattg

SEQ ID NO: 3970112 - DNA, 25 bp, Homo sapien
taaatgctgagctttgcgggcatgc

SEQ ID NO: 3970113 - DNA, 25 bp, Homo sapien
gatgttccgctgtcttgtagcctac

SEQ ID NO: 3970114 - DNA, 25 bp, Homo sapien
gcaaagccgtaaagtgatgttccgc

SEQ ID NO: 3970115 - DNA, 25 bp, Homo sapien
tggatctctcataatcctccttgta

SEQ ID NO: 3970116 - DNA, 25 bp, Homo sapien
tcatttgcgaatctccctgtacatc

SEQ ID NO: 3970117 - DNA, 25 bp, Homo sapien
tcttttgccccaatgagcttccctc

SEQ ID NO: 3970118 - DNA, 25 bp, Homo sapien
cagtgagtggctcatttgcgaatct

SEQ ID NO: 3970119 - DNA, 25 bp, Homo sapien
gtcaaggaatcaagacgcagctcaa

SEQ ID NO: 3970120 - DNA, 25 bp, Homo sapien
ggaatcaagacgcagctcaaaccct

SEQ ID NO: 3970121 - DNA, 25 bp, Homo sapien
tcaagacgcagctcaaacccttttg

SEQ ID NO: 3970122 - DNA, 25 bp, Homo sapien
gacgcagctcaaacccttttgcttt

SEQ ID NO: 3970123 - DNA, 25 bp, Homo sapien
ctgagatttgcagcattggctcggg

SEQ ID NO: 3970124 - DNA, 25 bp, Homo sapien
ctttgctgatggtatactgatggac

SEQ ID NO: 3970125 - DNA, 25 bp, Homo sapien
tggacagactgctcatttcctgcct

SEQ ID NO: 3970126 - DNA, 25 bp, Homo sapien
ttggctcgggcctgcaggaagagag

SEQ ID NO: 3970127 - DNA, 25 bp, Homo sapien
gagatgatgagagaaggagaagcag

SEQ ID NO: 3970128 - DNA, 25 bp, Homo sapien
tggcaggatacagtcaaggagatga

SEQ ID NO: 3970129 - DNA, 25 bp, Homo sapien
cagatcagactctgagtggcaggat

SEQ ID NO: 3970130 - DNA, 25 bp, Homo sapien
ctgagtggcaggatacagtcaagga

SEQ ID NO: 3970131 - DNA, 25 bp, Homo sapien
ggtcacgctggtgaacttcagctca

SEQ ID NO: 3970132 - DNA, 25 bp, Homo sapien
ccatctgggagctgtcggtcacgct

SEQ ID NO: 3970133 - DNA, 25 bp, Homo sapien
catcgaccctctgccggtagttttt

SEQ ID NO: 3970134 - DNA, 25 bp, Homo sapien
tgaacttcagctcatcgaccctctg

SEQ ID NO: 3970135 - DNA, 25 bp, Homo sapien
tctcagtaagtttaagggtgtggaa

SEQ ID NO: 3970136 - DNA, 25 bp, Homo sapien
gtggaaagttagctgagaatgtgct

SEQ ID NO: 3970137 - DNA, 25 bp, Homo sapien
gttagctgagaatgtgctacaggtg

SEQ ID NO: 3970138 - DNA, 25 bp, Homo sapien
gaatgtgctacaggtgtgaaatgaa

SEQ ID NO: 3970139 - DNA, 25 bp, Homo sapien
ttgttccaagttgagactcccctct

SEQ ID NO: 3970140 - DNA, 25 bp, Homo sapien
gctgaccagctgtccagccttcttg

SEQ ID NO: 3970141 - DNA, 25 bp, Homo sapien
ttggcttgttccaagttgagactcc

SEQ ID NO: 3970142 - DNA, 25 bp, Homo sapien
actcccctctgtcagccacccaact

SEQ ID NO: 3970143 - DNA, 25 bp, Homo sapien
catgccaggtcagccttgtactgca

SEQ ID NO: 3970144 - DNA, 25 bp, Homo sapien
tccatgccaggtcagccttgtactg

SEQ ID NO: 3970145 - DNA, 25 bp, Homo sapien
atgccaggtcagccttgtactgcag

SEQ ID NO: 3970146 - DNA, 25 bp, Homo sapien
atccatgccaggtcagccttgtact

SEQ ID NO: 3970147 - DNA, 25 bp, Homo sapien
caggcagcacagtgtattcatgcag

SEQ ID NO: 3970148 - DNA, 25 bp, Homo sapien
gctctggagcccataggccttcttg

SEQ ID NO: 3970149 - DNA, 25 bp, Homo sapien
ttcttcctgtagtccaggtcactgg

SEQ ID NO: 3970150 - DNA, 25 bp, Homo sapien
gtttgggccttcttagcatgcctga

SEQ ID NO: 3970151 - DNA, 25 bp, Homo sapien
catgggcaggtgaaaccgggtctta

SEQ ID NO: 3970152 - DNA, 25 bp, Homo sapien
gtgaaaccgggtcttactctcttca

SEQ ID NO: 3970153 - DNA, 25 bp, Homo sapien
tgaaaccgggtcttactctcttcaa

SEQ ID NO: 3970154 - DNA, 25 bp, Homo sapien
gcctagagtcggctgttcccatggc

SEQ ID NO: 3970155 - DNA, 25 bp, Homo sapien
ctgctcatcttagcaatctgcaggg

SEQ ID NO: 3970156 - DNA, 25 bp, Homo sapien
tgcagaagcctagagtcggctgttc

SEQ ID NO: 3970157 - DNA, 25 bp, Homo sapien
ctcactgctcatcttagcaatctgc

SEQ ID NO: 3970158 - DNA, 25 bp, Homo sapien
attgctagcaagctccccagaggct

SEQ ID NO: 3970159 - DNA, 25 bp, Homo sapien
ttgctagcaagctccccagaggctt

SEQ ID NO: 3970160 - DNA, 25 bp, Homo sapien
tgctagcaagctccccagaggcttt

SEQ ID NO: 3970161 - DNA, 25 bp, Homo sapien
tctcatagtcagcacggtaattcac

SEQ ID NO: 3970162 - DNA, 25 bp, Homo sapien
ctcactgaagagtttggcattggtt

SEQ ID NO: 3970163 - DNA, 25 bp, Homo sapien
attggttttggccttcaccagctga

SEQ ID NO: 3970164 - DNA, 25 bp, Homo sapien
gaggaacatcctggggcaatgtgta

SEQ ID NO: 3970165 - DNA, 25 bp, Homo sapien
gggtgtcagtcaccgagctgtactt

SEQ ID NO: 3970166 - DNA, 25 bp, Homo sapien
gattttggcttgaacaatctgtggg

SEQ ID NO: 3970167 - DNA, 25 bp, Homo sapien
gctgctgggcattgattttggcttg

SEQ ID NO: 3970168 - DNA, 25 bp, Homo sapien
gtacttcaacttgtcgatgctctgc

SEQ ID NO: 3970169 - DNA, 25 bp, Homo sapien
tatcatgtttataatcagctttgta

SEQ ID NO: 3970170 - DNA, 25 bp, Homo sapien
taggaaggcgtgagagtggctgggt

SEQ ID NO: 3970171 - DNA, 25 bp, Homo sapien
tggctgggtagttgtagtcgacaat

SEQ ID NO: 3970172 - DNA, 25 bp, Homo sapien
gggcaccagtttcatagctgtttga

SEQ ID NO: 3970173 - DNA, 25 bp, Homo sapien
tgccaggctgccaactttcatagca

SEQ ID NO: 3970174 - DNA, 25 bp, Homo sapien
cttcatagcggcctctcatgtggtt

SEQ ID NO: 3970175 - DNA, 25 bp, Homo sapien
gtccataccaactccttcatagcgg

SEQ ID NO: 3970176 - DNA, 25 bp, Homo sapien
tttcatagcatgcagagtgcgtctg

SEQ ID NO: 3970177 - DNA, 25 bp, Homo sapien
agatcttgctcacgttcctgaattg

SEQ ID NO: 3970178 - DNA, 25 bp, Homo sapien
ttcacagtagttgatactgtgacct

SEQ ID NO: 3970179 - DNA, 25 bp, Homo sapien
ttttgagatcttgctcacgttcctg

SEQ ID NO: 3970180 - DNA, 25 bp, Homo sapien
tactgtgacctctactactttccag

SEQ ID NO: 3970181 - DNA, 25 bp, Homo sapien
agtttgtttacgctctgagcctgtt

SEQ ID NO: 3970182 - DNA, 25 bp, Homo sapien
ttattgaagtcctgcctgtatttta

SEQ ID NO: 3970183 - DNA, 25 bp, Homo sapien
tgcagcgcctttcatcttattgaag

SEQ ID NO: 3970184 - DNA, 25 bp, Homo sapien
tcttgagctggaagcgagtgataat

SEQ ID NO: 3970185 - DNA, 25 bp, Homo sapien
agttcgtgagctttcttggcgttct

SEQ ID NO: 3970186 - DNA, 25 bp, Homo sapien
gagtgatcatagctgggaagctgcc

SEQ ID NO: 3970187 - DNA, 25 bp, Homo sapien
ggcgttctgatatgctggagtgatc

SEQ ID NO: 3970188 - DNA, 25 bp, Homo sapien
gtgatcatagctgggaagctgccct

SEQ ID NO: 3970189 - DNA, 25 bp, Homo sapien
cattcccttgtcaagatgccctcag

SEQ ID NO: 3970190 - DNA, 25 bp, Homo sapien
gatgccctcagctccaatggctgga

SEQ ID NO: 3970191 - DNA, 25 bp, Homo sapien
tggccatattggtctgcacattccc

SEQ ID NO: 3970192 - DNA, 25 bp, Homo sapien
tttgatattgttgatggtacctcac

SEQ ID NO: 3970193 - DNA, 25 bp, Homo sapien
tctccctaacatgaccacattgtca

SEQ ID NO: 3970194 - DNA, 25 bp, Homo sapien
ttcagggtaaatgcaaaagtcaaca

SEQ ID NO: 3970195 - DNA, 25 bp, Homo sapien
gaagttggactcctcagacccaggt

SEQ ID NO: 3970196 - DNA, 25 bp, Homo sapien
gtcaacaggaagttggactcctcag

SEQ ID NO: 3970197 - DNA, 25 bp, Homo sapien
gctatctgataggcgggtgtgatca

SEQ ID NO: 3970198 - DNA, 25 bp, Homo sapien
cttttggctatctgataggcgggtg

SEQ ID NO: 3970199 - DNA, 25 bp, Homo sapien
ctgataggcgggtgtgatcatcgca

SEQ ID NO: 3970200 - DNA, 25 bp, Homo sapien
ttttggctatctgataggcgggtgt

SEQ ID NO: 3970201 - DNA, 25 bp, Homo sapien
tcagccctcaaggagttgtcagcca

SEQ ID NO: 3970202 - DNA, 25 bp, Homo sapien
gaaaccatgtatgacgcagaagctg

SEQ ID NO: 3970203 - DNA, 25 bp, Homo sapien
gctctgctaagggttccatgacatc

SEQ ID NO: 3970204 - DNA, 25 bp, Homo sapien
gggcctgggcagagtaataagtcct

SEQ ID NO: 3970205 - DNA, 25 bp, Homo sapien
agctcaggagtatccaccaccgtgg

SEQ ID NO: 3970206 - DNA, 25 bp, Homo sapien
gagatgcgttcatcatgccctctct

SEQ ID NO: 3970207 - DNA, 25 bp, Homo sapien
tgtgccccagccttgctccgtagca

SEQ ID NO: 3970208 - DNA, 25 bp, Homo sapien
tggagaacctggagatgcgttcatc

SEQ ID NO: 3970209 - DNA, 25 bp, Homo sapien
ccccttgcccctgggttgctcatag

SEQ ID NO: 3970210 - DNA, 25 bp, Homo sapien
tgcccctgggttgctcatagtcttc

SEQ ID NO: 3970211 - DNA, 25 bp, Homo sapien
ccttgcccctgggttgctcatagtc

SEQ ID NO: 3970212 - DNA, 25 bp, Homo sapien
ggctggaaagctccccttgcccctg

SEQ ID NO: 3970213 - DNA, 25 bp, Homo sapien
gttggtcagaaccaatgtcagcatg

SEQ ID NO: 3970214 - DNA, 25 bp, Homo sapien
tgttggtcagaaccaatgtcagcat

SEQ ID NO: 3970215 - DNA, 25 bp, Homo sapien
agtcatgaggactaacagtgttttc

SEQ ID NO: 3970216 - DNA, 25 bp, Homo sapien
catgaggactaacagtgttttccaa

SEQ ID NO: 3970217 - DNA, 25 bp, Homo sapien
tgaggactaacagtgttttccaaag

SEQ ID NO: 3970218 - DNA, 25 bp, Homo sapien
gtcatgaggactaacagtgttttcc

SEQ ID NO: 3970219 - DNA, 25 bp, Homo sapien
ccccatatccagtccaataggctct

SEQ ID NO: 3970220 - DNA, 25 bp, Homo sapien
cttccccatatccagtccaataggc

SEQ ID NO: 3970221 - DNA, 25 bp, Homo sapien
caagagactttcgagcctcaaccat

SEQ ID NO: 3970222 - DNA, 25 bp, Homo sapien
tgggcaccaagcattcccttcccca

SEQ ID NO: 3970223 - DNA, 25 bp, Homo sapien
cagtggctgcctgttaggtgcacct

SEQ ID NO: 3970224 - DNA, 25 bp, Homo sapien
agtggctgcctgttaggtgcacctt

SEQ ID NO: 3970225 - DNA, 25 bp, Homo sapien
ccagtggctgcctgttaggtgcacc

SEQ ID NO: 3970226 - DNA, 25 bp, Homo sapien
gccagtggctgcctgttaggtgcac

SEQ ID NO: 3970227 - DNA, 25 bp, Homo sapien
gtcccagtgaaaaactgatttacac

SEQ ID NO: 3970228 - DNA, 25 bp, Homo sapien
actgatttacactgttcaccatctt

SEQ ID NO: 3970229 - DNA, 25 bp, Homo sapien
aaaaactgatttacactgttcacca

SEQ ID NO: 3970230 - DNA, 25 bp, Homo sapien
aaactgatttacactgttcaccatc

SEQ ID NO: 3970231 - DNA, 25 bp, Homo sapien
gcaaggtcactacctctatctcata

SEQ ID NO: 3970232 - DNA, 25 bp, Homo sapien
cacttagtgaaaataaggtatcttg

SEQ ID NO: 3970233 - DNA, 25 bp, Homo sapien
aattagttctaagcacttagtgaaa

SEQ ID NO: 3970234 - DNA, 25 bp, Homo sapien
atcttggcagcatgtgtagagagcc

SEQ ID NO: 3970235 - DNA, 25 bp, Homo sapien
cacatttagatttaatggagtgtga

SEQ ID NO: 3970236 - DNA, 25 bp, Homo sapien
aatggagtgtgatagacactggtga

SEQ ID NO: 3970237 - DNA, 25 bp, Homo sapien
cactgatggcctctggaaatgtcct

SEQ ID NO: 3970238 - DNA, 25 bp, Homo sapien
atagacactggtgaaagtgttgttc

SEQ ID NO: 3970239 - DNA, 25 bp, Homo sapien
gcgtgacagtacggctttttctggt

SEQ ID NO: 3970240 - DNA, 25 bp, Homo sapien
ttctggtgactcacaaagttattaa

SEQ ID NO: 3970241 - DNA, 25 bp, Homo sapien
gactcacaaagttattaacagacag

SEQ ID NO: 3970242 - DNA, 25 bp, Homo sapien
gtgacagtacggctttttctggtga

SEQ ID NO: 3970243 - DNA, 25 bp, Homo sapien
cagctgatcttctcggcaggataaa

SEQ ID NO: 3970244 - DNA, 25 bp, Homo sapien
ttctcggcaggataaaccccatacc

SEQ ID NO: 3970245 - DNA, 25 bp, Homo sapien
tatacagctgatcttctcggcagga

SEQ ID NO: 3970246 - DNA, 25 bp, Homo sapien
tgatcttctcggcaggataaacccc

SEQ ID NO: 3970247 - DNA, 25 bp, Homo sapien
agtcagcagttggatggtttttaaa

SEQ ID NO: 3970248 - DNA, 25 bp, Homo sapien
tgtgggcacctcgatctttcagaat

SEQ ID NO: 3970249 - DNA, 25 bp, Homo sapien
aaatccgacgaccataaaattcctg

SEQ ID NO: 3970250 - DNA, 25 bp, Homo sapien
aggagaacccccagtctagttcaag

SEQ ID NO: 3970251 - DNA, 25 bp, Homo sapien
aacgaacactttcgttgagggctga

SEQ ID NO: 3970252 - DNA, 25 bp, Homo sapien
gaacactttcgttgagggctgactt

SEQ ID NO: 3970253 - DNA, 25 bp, Homo sapien
acgaacactttcgttgagggctgac

SEQ ID NO: 3970254 - DNA, 25 bp, Homo sapien
cgaacactttcgttgagggctgact

SEQ ID NO: 3970255 - DNA, 25 bp, Homo sapien
aagaggaccaggaccgagacacagg

SEQ ID NO: 3970256 - DNA, 25 bp, Homo sapien
aggtgatacgtagccacccaagagg

SEQ ID NO: 3970257 - DNA, 25 bp, Homo sapien
gagacacaggcctaacttgtccagt

SEQ ID NO: 3970258 - DNA, 25 bp, Homo sapien
cccttcattatgatcaaggaaagga

SEQ ID NO: 3970259 - DNA, 25 bp, Homo sapien
ggcacccacgactttggtggcacca

SEQ ID NO: 3970260 - DNA, 25 bp, Homo sapien
ttggtggcaccaggctgttcatcca

SEQ ID NO: 3970261 - DNA, 25 bp, Homo sapien
ggtggcaccaggctgttcatccaca

SEQ ID NO: 3970262 - DNA, 25 bp, Homo sapien
aggtggcacccacgactttggtggc

SEQ ID NO: 3970263 - DNA, 25 bp, Homo sapien
gcaaattttcttcgtgtacacggct

SEQ ID NO: 3970264 - DNA, 25 bp, Homo sapien
tcactttggcagagggatggtatag

SEQ ID NO: 3970265 - DNA, 25 bp, Homo sapien
tccttccacccaagtgggtcagcaa

SEQ ID NO: 3970266 - DNA, 25 bp, Homo sapien
atgggctttccagcggcggacggat

SEQ ID NO: 3970267 - DNA, 25 bp, Homo sapien
agtgtacgtttcaggagcagcaagc

SEQ ID NO: 3970268 - DNA, 25 bp, Homo sapien
cgagcagtgggctttccagtgaaga

SEQ ID NO: 3970269 - DNA, 25 bp, Homo sapien
cacaggacaccaaaacgtgggcaga

SEQ ID NO: 3970270 - DNA, 25 bp, Homo sapien
aagagggccaagtgtacgtttcagg

SEQ ID NO: 3970271 - DNA, 25 bp, Homo sapien
gagtgccgttttgcagcctggtgta

SEQ ID NO: 3970272 - DNA, 25 bp, Homo sapien
cagcctggtgtagatttgggacttc

SEQ ID NO: 3970273 - DNA, 25 bp, Homo sapien
atgttttgccgtcatgtgagtgccg

SEQ ID NO: 3970274 - DNA, 25 bp, Homo sapien
gccgtcatgtgagtgccgttttgca

SEQ ID NO: 3970275 - DNA, 25 bp, Homo sapien
ggatgctacaatggggagccggggc

SEQ ID NO: 3970276 - DNA, 25 bp, Homo sapien
ccacaggagccatcccagggttggg

SEQ ID NO: 3970277 - DNA, 25 bp, Homo sapien
agacagttgcttttttccacaggag

SEQ ID NO: 3970278 - DNA, 25 bp, Homo sapien
cagggttgggggatgctacaatggg

SEQ ID NO: 3970279 - DNA, 25 bp, Homo sapien
gacttgaaagaatctcagtggcctt

SEQ ID NO: 3970280 - DNA, 25 bp, Homo sapien
ggaagaaagactcatacccgttgat

SEQ ID NO: 3970281 - DNA, 25 bp, Homo sapien
gtcgttcatcagcttcggaagaaag

SEQ ID NO: 3970282 - DNA, 25 bp, Homo sapien
tcttctgcagtgaggtcctaggaac

SEQ ID NO: 3970283 - DNA, 25 bp, Homo sapien
tccagaggccgtgcttcctgaggta

SEQ ID NO: 3970284 - DNA, 25 bp, Homo sapien
tgaatcggcaccacgcaggaatgtg

SEQ ID NO: 3970285 - DNA, 25 bp, Homo sapien
gtagagcgagctggtgttctccgcc

SEQ ID NO: 3970286 - DNA, 25 bp, Homo sapien
cagctggagaggtgtttgataccgt

SEQ ID NO: 3970287 - DNA, 25 bp, Homo sapien
gtggacgcagagctccgactagccg

SEQ ID NO: 3970288 - DNA, 25 bp, Homo sapien
gatcaggtcacacgggcgggtggac

SEQ ID NO: 3970289 - DNA, 25 bp, Homo sapien
gagctccgactagccgcaagtccag

SEQ ID NO: 3970290 - DNA, 25 bp, Homo sapien
cggatcaggtcacacgggcgggtgg

SEQ ID NO: 3970291 - DNA, 25 bp, Homo sapien
ggaccgagcttgatgatggcatcca

SEQ ID NO: 3970292 - DNA, 25 bp, Homo sapien
ttaggcttgccgagggaccgagctt

SEQ ID NO: 3970293 - DNA, 25 bp, Homo sapien
actcggggcccatcaatgacacaga

SEQ ID NO: 3970294 - DNA, 25 bp, Homo sapien
cttgccgagggaccgagcttgatga

SEQ ID NO: 3970295 - DNA, 25 bp, Homo sapien
gtttgcacttggcaaaaagaatccc

SEQ ID NO: 3970296 - DNA, 25 bp, Homo sapien
aatgtttgacaaaacacagccaagg

SEQ ID NO: 3970297 - DNA, 25 bp, Homo sapien
cagaatgtgggtattgagtgtgatt

SEQ ID NO: 3970298 - DNA, 25 bp, Homo sapien
aattggtggtaacagtggtagagtc

SEQ ID NO: 3970299 - DNA, 25 bp, Homo sapien
tcatcgttgttgagaaccccagttc

SEQ ID NO: 3970300 - DNA, 25 bp, Homo sapien
tcgttgttgagaaccccagttcctc

SEQ ID NO: 3970301 - DNA, 25 bp, Homo sapien
atcgttgttgagaaccccagttcct

SEQ ID NO: 3970302 - DNA, 25 bp, Homo sapien
catcgttgttgagaaccccagttcc

SEQ ID NO: 3970303 - DNA, 25 bp, Homo sapien
tcatcagcccaatgtgtttatgaac

SEQ ID NO: 3970304 - DNA, 25 bp, Homo sapien
tttatgaactgctacaaatcggtct

SEQ ID NO: 3970305 - DNA, 25 bp, Homo sapien
gtctgaaagtcctgcggtcactgaa

SEQ ID NO: 3970306 - DNA, 25 bp, Homo sapien
aaagtcctgcggtcactgaatttac

SEQ ID NO: 3970307 - DNA, 25 bp, Homo sapien
ccaaggattgattgcctttgacttc

SEQ ID NO: 3970308 - DNA, 25 bp, Homo sapien
agctactctggtgaccaaggattga

SEQ ID NO: 3970309 - DNA, 25 bp, Homo sapien
ctttgacttcctcgaagcacaccat

SEQ ID NO: 3970310 - DNA, 25 bp, Homo sapien
tctggtgaccaaggattgattgcct

SEQ ID NO: 3970311 - DNA, 25 bp, Homo sapien
cagcttttcatctttcaggcccttt

SEQ ID NO: 3970312 - DNA, 25 bp, Homo sapien
agcttttcatctttcaggccctttt

SEQ ID NO: 3970313 - DNA, 25 bp, Homo sapien
gcttttcatctttcaggcccttttc

SEQ ID NO: 3970314 - DNA, 25 bp, Homo sapien
cttttggcatctacatctgcttttg

SEQ ID NO: 3970315 - DNA, 25 bp, Homo sapien
gcatctacatctgcttttgctctaa

SEQ ID NO: 3970316 - DNA, 25 bp, Homo sapien
tctgtggatctcgaagtcctctttt

SEQ ID NO: 3970317 - DNA, 25 bp, Homo sapien
ctgacttcaatcttctgtggatctc

SEQ ID NO: 3970318 - DNA, 25 bp, Homo sapien
gggtaaattggcgttgttctcaata

SEQ ID NO: 3970319 - DNA, 25 bp, Homo sapien
gtaaattggcgttgttctcaataag

SEQ ID NO: 3970320 - DNA, 25 bp, Homo sapien
tgttctcaataagggttattgtgac

SEQ ID NO: 3970321 - DNA, 25 bp, Homo sapien
ttgagggtaaattggcgttgttctc

SEQ ID NO: 3970322 - DNA, 25 bp, Homo sapien
tcttcactaatggatccattgacta

SEQ ID NO: 3970323 - DNA, 25 bp, Homo sapien
taatggatccattgactaattgatc

SEQ ID NO: 3970324 - DNA, 25 bp, Homo sapien
ttcttcactaatggatccattgact

SEQ ID NO: 3970325 - DNA, 25 bp, Homo sapien
cactaatggatccattgactaattg

SEQ ID NO: 3970326 - DNA, 25 bp, Homo sapien
tatttaatgtgagaacgcatgccct

SEQ ID NO: 3970327 - DNA, 25 bp, Homo sapien
tctcacgaaggagttagcatcatcc

SEQ ID NO: 3970328 - DNA, 25 bp, Homo sapien
aaaagtagtttactgcagtactgtt

SEQ ID NO: 3970329 - DNA, 25 bp, Homo sapien
atgtcgagctgtggtccccggtgtt

SEQ ID NO: 3970330 - DNA, 25 bp, Homo sapien
aatctgctgcctgttagtcttgacg

SEQ ID NO: 3970331 - DNA, 25 bp, Homo sapien
cttcattcttttgtcggtgaagcaa

SEQ ID NO: 3970332 - DNA, 25 bp, Homo sapien
cggacggttagcaacatctctctca

SEQ ID NO: 3970333 - DNA, 25 bp, Homo sapien
tcttgacgctgtcatctgagcggac

SEQ ID NO: 3970334 - DNA, 25 bp, Homo sapien
ggaaagggtgacaaagtatctccat

SEQ ID NO: 3970335 - DNA, 25 bp, Homo sapien
caggaaagggtgacaaagtatctcc

SEQ ID NO: 3970336 - DNA, 25 bp, Homo sapien
aaagggtgacaaagtatctccatgg

SEQ ID NO: 3970337 - DNA, 25 bp, Homo sapien
accaggaaagggtgacaaagtatct

SEQ ID NO: 3970338 - DNA, 25 bp, Homo sapien
gacttgccagatagggaattaaccc

SEQ ID NO: 3970339 - DNA, 25 bp, Homo sapien
ggagtcagacccctggatggacttg

SEQ ID NO: 3970340 - DNA, 25 bp, Homo sapien
gaacctggctctcctacgactaaag

SEQ ID NO: 3970341 - DNA, 25 bp, Homo sapien
gctctcctacgactaaagaaggtat

SEQ ID NO: 3970342 - DNA, 25 bp, Homo sapien
ccttatacctcatacaaagactaac

SEQ ID NO: 3970343 - DNA, 25 bp, Homo sapien
cctcatacaaagactaactcaagat

SEQ ID NO: 3970344 - DNA, 25 bp, Homo sapien
tacctcatacaaagactaactcaag

SEQ ID NO: 3970345 - DNA, 25 bp, Homo sapien
tatacctcatacaaagactaactca

SEQ ID NO: 3970346 - DNA, 25 bp, Homo sapien
ctttgtctgcccctgtctgagtgtg

SEQ ID NO: 3970347 - DNA, 25 bp, Homo sapien
tgtgtctattggcagagaccatgtc

SEQ ID NO: 3970348 - DNA, 25 bp, Homo sapien
caagggtaagggtctaacctcatct

SEQ ID NO: 3970349 - DNA, 25 bp, Homo sapien
agggtaagggtctaacctcatctct

SEQ ID NO: 3970350 - DNA, 25 bp, Homo sapien
gagaggcattcagcaccacgaacat

SEQ ID NO: 3970351 - DNA, 25 bp, Homo sapien
ttaactactactgaatcctcggagg

SEQ ID NO: 3970352 - DNA, 25 bp, Homo sapien
cagaatataactgcccatggagggc

SEQ ID NO: 3970353 - DNA, 25 bp, Homo sapien
gctacatccaaggaacttaactact

SEQ ID NO: 3970354 - DNA, 25 bp, Homo sapien
caatatccagcttccaatttccact

SEQ ID NO: 3970355 - DNA, 25 bp, Homo sapien
tgctcctagatttccaggtgcccac

SEQ ID NO: 3970356 - DNA, 25 bp, Homo sapien
atatttctccattgtgctcctagat

SEQ ID NO: 3970357 - DNA, 25 bp, Homo sapien
tggacaaagcgcttcatttctaggt

SEQ ID NO: 3970358 - DNA, 25 bp, Homo sapien
attgcgtgtatacttaataacatgc

SEQ ID NO: 3970359 - DNA, 25 bp, Homo sapien
tccgctaggataagatgtaagatgt

SEQ ID NO: 3970360 - DNA, 25 bp, Homo sapien
caaaaatcgattaccttattgcgtg

SEQ ID NO: 3970361 - DNA, 25 bp, Homo sapien
taatacagatatgaaacttagaaca

SEQ ID NO: 3970362 - DNA, 25 bp, Homo sapien
cctgtaggtcgaaatgccaaaatct

SEQ ID NO: 3970363 - DNA, 25 bp, Homo sapien
ctagtgaacttgttagagtgtgtcc

SEQ ID NO: 3970364 - DNA, 25 bp, Homo sapien
aacatctgctattctagtgaacttg

SEQ ID NO: 3970365 - DNA, 25 bp, Homo sapien
tagagtgtgtccatcctgtaggtcg

SEQ ID NO: 3970366 - DNA, 25 bp, Homo sapien
gggacatgcccacttttgaacctaa

SEQ ID NO: 3970367 - DNA, 25 bp, Homo sapien
tgcatcattgggagaaggtgaacca

SEQ ID NO: 3970368 - DNA, 25 bp, Homo sapien
gagtgaattaatttctggtatattg

SEQ ID NO: 3970369 - DNA, 25 bp, Homo sapien
ccaatgaactgcacatgtcggtagt

SEQ ID NO: 3970370 - DNA, 25 bp, Homo sapien
gataacctcttgctgagatggaaag

SEQ ID NO: 3970371 - DNA, 25 bp, Homo sapien
tccaatagagtaagtgccacagaca

SEQ ID NO: 3970372 - DNA, 25 bp, Homo sapien
cagacaacaagagcatgtgggttta

SEQ ID NO: 3970373 - DNA, 25 bp, Homo sapien
tgttgatggcaaaccggataacctc

SEQ ID NO: 3970374 - DNA, 25 bp, Homo sapien
ctgtggtatggaaacatggtactta

SEQ ID NO: 3970375 - DNA, 25 bp, Homo sapien
taactccaaacactatcaaaaaatc

SEQ ID NO: 3970376 - DNA, 25 bp, Homo sapien
agaatatttctagcaagccagctat

SEQ ID NO: 3970377 - DNA, 25 bp, Homo sapien
tatctccatgcaatataacccagtg

SEQ ID NO: 3970378 - DNA, 25 bp, Homo sapien
catgcaaatacaacagatccagttg

SEQ ID NO: 3970379 - DNA, 25 bp, Homo sapien
tatggactttctggtccgcaagaag

SEQ ID NO: 3970380 - DNA, 25 bp, Homo sapien
ggatctgctctgaagtctcccgtgt

SEQ ID NO: 3970381 - DNA, 25 bp, Homo sapien
cgcaagaagagaacgttccatgctg

SEQ ID NO: 3970382 - DNA, 25 bp, Homo sapien
gtgtaatatgacagtaccattagga

SEQ ID NO: 3970383 - DNA, 25 bp, Homo sapien
ttgcacatgaagcttgttcttcaac

SEQ ID NO: 3970384 - DNA, 25 bp, Homo sapien
gacaccattcacaatacattcagtg

SEQ ID NO: 3970385 - DNA, 25 bp, Homo sapien
accattcacaatacattcagtgtcc

SEQ ID NO: 3970386 - DNA, 25 bp, Homo sapien
gcacatgaagcttgttcttcaacaa

SEQ ID NO: 3970387 - DNA, 25 bp, Homo sapien
tgagaaaataggctgtgcaaccttc

SEQ ID NO: 3970388 - DNA, 25 bp, Homo sapien
tgtgaagtgtttagacaatccagca

SEQ ID NO: 3970389 - DNA, 25 bp, Homo sapien
tgaaaggcatcaactgtaaagccgg

SEQ ID NO: 3970390 - DNA, 25 bp, Homo sapien
tcaaccacgccatactgaaaggcat

SEQ ID NO: 3970391 - DNA, 25 bp, Homo sapien
tctcatcctggtccttcagtaaggg

SEQ ID NO: 3970392 - DNA, 25 bp, Homo sapien
tacttcggagcaggtgtactagaca

SEQ ID NO: 3970393 - DNA, 25 bp, Homo sapien
aaattgtagctttaccaactggcac

SEQ ID NO: 3970394 - DNA, 25 bp, Homo sapien
gacgctgtgacctctcactagaaag

SEQ ID NO: 3970395 - DNA, 25 bp, Homo sapien
agtgtcttcatcactttgaagtgga

SEQ ID NO: 3970396 - DNA, 25 bp, Homo sapien
tcatcttcttcgaggctgccatctt

SEQ ID NO: 3970397 - DNA, 25 bp, Homo sapien
cagttgttcttgtgaatcatccggt

SEQ ID NO: 3970398 - DNA, 25 bp, Homo sapien
ttcatcgatatcatgagtgtcttca

SEQ ID NO: 3970399 - DNA, 25 bp, Homo sapien
tgttctgagttgtttgcaagacgca

SEQ ID NO: 3970400 - DNA, 25 bp, Homo sapien
tacaaaggacgcctgacttagtctc

SEQ ID NO: 3970401 - DNA, 25 bp, Homo sapien
gctagcaggaagtgagtgtatctct

SEQ ID NO: 3970402 - DNA, 25 bp, Homo sapien
cctgacgcaggtgatgggctgctaa

SEQ ID NO: 3970403 - DNA, 25 bp, Homo sapien
gaggtgtctgccctatcaatgagga

SEQ ID NO: 3970404 - DNA, 25 bp, Homo sapien
tttcagagcgtggtggagaatccaa

SEQ ID NO: 3970405 - DNA, 25 bp, Homo sapien
tggacagtatccatcataaactgga

SEQ ID NO: 3970406 - DNA, 25 bp, Homo sapien
caaaaacatgccatcgaggtgtctg

SEQ ID NO: 3970407 - DNA, 25 bp, Homo sapien
acctctttagcttctgcggctcttt

SEQ ID NO: 3970408 - DNA, 25 bp, Homo sapien
tagagccattatttggatcaactcg

SEQ ID NO: 3970409 - DNA, 25 bp, Homo sapien
cacaacttgaattctgactagaagc

SEQ ID NO: 3970410 - DNA, 25 bp, Homo sapien
ttgagttctacagagttttcctgga

SEQ ID NO: 3970411 - DNA, 25 bp, Homo sapien
taatggcaaatataggttcaacagc

SEQ ID NO: 3970412 - DNA, 25 bp, Homo sapien
caaaaaactgcgaagtcactgccct

SEQ ID NO: 3970413 - DNA, 25 bp, Homo sapien
gacaaagggcttaacaggtatccca

SEQ ID NO: 3970414 - DNA, 25 bp, Homo sapien
cagttctttcaagtggacaaccgtc

SEQ ID NO: 3970415 - DNA, 25 bp, Homo sapien
tctgactccgtattgcacccatggt

SEQ ID NO: 3970416 - DNA, 25 bp, Homo sapien
aaagagtgggcttgtattgaggtct

SEQ ID NO: 3970417 - DNA, 25 bp, Homo sapien
tccaggttaagcatagcgagctcca

SEQ ID NO: 3970418 - DNA, 25 bp, Homo sapien
ctcccttatcttttggcattagagg

SEQ ID NO: 3970419 - DNA, 25 bp, Homo sapien
ttcagcactcccagatgacaaaacg

SEQ ID NO: 3970420 - DNA, 25 bp, Homo sapien
gtgaaagccactcgcgccagtcact

SEQ ID NO: 3970421 - DNA, 25 bp, Homo sapien
cactcccagatgacaaaacgctgtg

SEQ ID NO: 3970422 - DNA, 25 bp, Homo sapien
aaacgctgtgtttgtgtataagtga

SEQ ID NO: 3970423 - DNA, 25 bp, Homo sapien
aagaaaaaagtgtcattggcgtgga

SEQ ID NO: 3970424 - DNA, 25 bp, Homo sapien
gggatgtttcccttagcgcctctgg

SEQ ID NO: 3970425 - DNA, 25 bp, Homo sapien
ccctaaggccttattccatgttgaa

SEQ ID NO: 3970426 - DNA, 25 bp, Homo sapien
tccccgggaactgcgccgatttgga

SEQ ID NO: 3970427 - DNA, 25 bp, Homo sapien
taatggctattatctaaggaaaagc

SEQ ID NO: 3970428 - DNA, 25 bp, Homo sapien
aatcaacttgcttcctctaaatcag

SEQ ID NO: 3970429 - DNA, 25 bp, Homo sapien
taaagaagcaactatgccctaagat

SEQ ID NO: 3970430 - DNA, 25 bp, Homo sapien
cacagtcgcaaatgagaaatcgcaa

SEQ ID NO: 3970431 - DNA, 25 bp, Homo sapien
aaaactctataaagattctttgcca

SEQ ID NO: 3970432 - DNA, 25 bp, Homo sapien
ctctataaagattctttgccacctt

SEQ ID NO: 3970433 - DNA, 25 bp, Homo sapien
aaactctataaagattctttgccac

SEQ ID NO: 3970434 - DNA, 25 bp, Homo sapien
aactctataaagattctttgccacc

SEQ ID NO: 3970435 - DNA, 25 bp, Homo sapien
tgaatcacagtatgagctagctcct

SEQ ID NO: 3970436 - DNA, 25 bp, Homo sapien
ggccatttgctttactcatcaagag

SEQ ID NO: 3970437 - DNA, 25 bp, Homo sapien
ggaatgtgggttttcctatacctca

SEQ ID NO: 3970438 - DNA, 25 bp, Homo sapien
gaaatagagaaagtggagccctcgt

SEQ ID NO: 3970439 - DNA, 25 bp, Homo sapien
tctaatgtgtgctaagcttgtgaaa

SEQ ID NO: 3970440 - DNA, 25 bp, Homo sapien
ggaatgtattgttcgtgcatgcctg

SEQ ID NO: 3970441 - DNA, 25 bp, Homo sapien
gactctgccctacaactatcttctg

SEQ ID NO: 3970442 - DNA, 25 bp, Homo sapien
ttgagcatgtacagggtgggctccc

SEQ ID NO: 3970443 - DNA, 25 bp, Homo sapien
ttaggattcggaggtacaagcagct

SEQ ID NO: 3970444 - DNA, 25 bp, Homo sapien
gagaggaatccatttaggattcgga

SEQ ID NO: 3970445 - DNA, 25 bp, Homo sapien
gcaaccggatgcttaggccagagag

SEQ ID NO: 3970446 - DNA, 25 bp, Homo sapien
tctgtgagggcccttgaagcaaccg

SEQ ID NO: 3970447 - DNA, 25 bp, Homo sapien
gcttagaaagggtcatcaaacttct

SEQ ID NO: 3970448 - DNA, 25 bp, Homo sapien
ggcttagaaagggtcatcaaacttc

SEQ ID NO: 3970449 - DNA, 25 bp, Homo sapien
gtcttgctctgaagtcgtttatata

SEQ ID NO: 3970450 - DNA, 25 bp, Homo sapien
tcttgctctgaagtcgtttatataa

SEQ ID NO: 3970451 - DNA, 25 bp, Homo sapien
acgagggaacacagcccaccaagtg

SEQ ID NO: 3970452 - DNA, 25 bp, Homo sapien
aacgagggaacacagcccaccaagt

SEQ ID NO: 3970453 - DNA, 25 bp, Homo sapien
cttgaagaacgagggaacacagccc

SEQ ID NO: 3970454 - DNA, 25 bp, Homo sapien
aagaacgagggaacacagcccacca

SEQ ID NO: 3970455 - DNA, 25 bp, Homo sapien
atttgaattgaggtatcagtaaggc

SEQ ID NO: 3970456 - DNA, 25 bp, Homo sapien
cttgacaatttgaattgaggtatca

SEQ ID NO: 3970457 - DNA, 25 bp, Homo sapien
tgacaatttgaattgaggtatcagt

SEQ ID NO: 3970458 - DNA, 25 bp, Homo sapien
tgaattgaggtatcagtaaggcaaa

SEQ ID NO: 3970459 - DNA, 25 bp, Homo sapien
tcccacatcagtccctacctctcct

SEQ ID NO: 3970460 - DNA, 25 bp, Homo sapien
cccacatcagtccctacctctcctc

SEQ ID NO: 3970461 - DNA, 25 bp, Homo sapien
gtctgtcccacatcagtccctacct

SEQ ID NO: 3970462 - DNA, 25 bp, Homo sapien
gtgtctgtcccacatcagtccctac

SEQ ID NO: 3970463 - DNA, 25 bp, Homo sapien
acagcaatgtaattttaccgcgggt

SEQ ID NO: 3970464 - DNA, 25 bp, Homo sapien
cagcaatgtaattttaccgcgggtt

SEQ ID NO: 3970465 - DNA, 25 bp, Homo sapien
agtcaatgttcagtgcagtaaaaac

SEQ ID NO: 3970466 - DNA, 25 bp, Homo sapien
gctcatagtcaatgttcagtgcagt

SEQ ID NO: 3970467 - DNA, 25 bp, Homo sapien
cttcccttggtatcttgtatttctg

SEQ ID NO: 3970468 - DNA, 25 bp, Homo sapien
catagtcaatgttcagtgcagtaaa

SEQ ID NO: 3970469 - DNA, 25 bp, Homo sapien
gaaagaacccgcatgacaaatactt

SEQ ID NO: 3970470 - DNA, 25 bp, Homo sapien
cacactccataagtgttccataaac

SEQ ID NO: 3970471 - DNA, 25 bp, Homo sapien
attcacactccataagtgttccata

SEQ ID NO: 3970472 - DNA, 25 bp, Homo sapien
ccccagaaagaacccgcatgacaaa

SEQ ID NO: 3970473 - DNA, 25 bp, Homo sapien
agcagaattaggatgaggattttct

SEQ ID NO: 3970474 - DNA, 25 bp, Homo sapien
ttgaccaggggtagcagaattagga

SEQ ID NO: 3970475 - DNA, 25 bp, Homo sapien
gtgaattgaccaggggtagcagaat

SEQ ID NO: 3970476 - DNA, 25 bp, Homo sapien
cttgaggtgaattgaccaggggtag

SEQ ID NO: 3970477 - DNA, 25 bp, Homo sapien
cagaagccagggggtttaaggagct

SEQ ID NO: 3970478 - DNA, 25 bp, Homo sapien
tcttctgcacctggggggtgacctg

SEQ ID NO: 3970479 - DNA, 25 bp, Homo sapien
gtccagccggcctctcatttcccag

SEQ ID NO: 3970480 - DNA, 25 bp, Homo sapien
ttctctgcaaactcattcaaactca

SEQ ID NO: 3970481 - DNA, 25 bp, Homo sapien
tcatcatcaacaggttctgtgtttt

SEQ ID NO: 3970482 - DNA, 25 bp, Homo sapien
ggcatcatcatcaacaggttctgtg

SEQ ID NO: 3970483 - DNA, 25 bp, Homo sapien
gcaaactcattcaaactcactttct

SEQ ID NO: 3970484 - DNA, 25 bp, Homo sapien
gggctgggccagttgcttagtcctt

SEQ ID NO: 3970485 - DNA, 25 bp, Homo sapien
cccctgcccacgggagaggaaatga

SEQ ID NO: 3970486 - DNA, 25 bp, Homo sapien
agtcctttgaagctggaatagctgc

SEQ ID NO: 3970487 - DNA, 25 bp, Homo sapien
tctaaatcagcaagggcggctctgg

SEQ ID NO: 3970488 - DNA, 25 bp, Homo sapien
tccagtgagggtgatcttcgctggc

SEQ ID NO: 3970489 - DNA, 25 bp, Homo sapien
taaactagcttgacatttggattgt

SEQ ID NO: 3970490 - DNA, 25 bp, Homo sapien
cagtgagggtgatcttcgctggcac

SEQ ID NO: 3970491 - DNA, 25 bp, Homo sapien
ttgtgatcaaaacacaatttgactt

SEQ ID NO: 3970492 - DNA, 25 bp, Homo sapien
caggttaccccccagtgtcccacag

SEQ ID NO: 3970493 - DNA, 25 bp, Homo sapien
gagttcccttgatggggcaaataca

SEQ ID NO: 3970494 - DNA, 25 bp, Homo sapien
gcaaatacatctccatccccaatgg

SEQ ID NO: 3970495 - DNA, 25 bp, Homo sapien
cccctcgtcaacctgagacacttcc

SEQ ID NO: 3970496 - DNA, 25 bp, Homo sapien
taagtgcacggctcagttgtgttaa

SEQ ID NO: 3970497 - DNA, 25 bp, Homo sapien
gggtcattcagtcgttgtcttcgtg

SEQ ID NO: 3970498 - DNA, 25 bp, Homo sapien
tccatcactgtgtatgactccgaaa

SEQ ID NO: 3970499 - DNA, 25 bp, Homo sapien
aatagacgtacagagtttcagggct

SEQ ID NO: 3970500 - DNA, 25 bp, Homo sapien
tccagaacctacaacggccgtgaca

SEQ ID NO: 3970501 - DNA, 25 bp, Homo sapien
ctgttccttccagaacctacaacgg

SEQ ID NO: 3970502 - DNA, 25 bp, Homo sapien
ccttccagaacctacaacggccgtg

SEQ ID NO: 3970503 - DNA, 25 bp, Homo sapien
tgttccttccagaacctacaacggc

SEQ ID NO: 3970504 - DNA, 25 bp, Homo sapien
tcagtcccaaggagttagcctcttt

SEQ ID NO: 3970505 - DNA, 25 bp, Homo sapien
caggttccctaatcacacgaaaaag

SEQ ID NO: 3970506 - DNA, 25 bp, Homo sapien
tctttggggtacacatccggtgctg

SEQ ID NO: 3970507 - DNA, 25 bp, Homo sapien
agaatccaggttccctaatcacacg

SEQ ID NO: 3970508 - DNA, 25 bp, Homo sapien
tctgtcccagggtcccaatagcgct

SEQ ID NO: 3970509 - DNA, 25 bp, Homo sapien
cccctccaccagtgtagaatggtgg

SEQ ID NO: 3970510 - DNA, 25 bp, Homo sapien
ccagtgtagaatggtgggtcataag

SEQ ID NO: 3970511 - DNA, 25 bp, Homo sapien
gtcccaatagcgctaacataagccc

SEQ ID NO: 3970512 - DNA, 25 bp, Homo sapien
gcactgagccaatgcaatcctcctt

SEQ ID NO: 3970513 - DNA, 25 bp, Homo sapien
gagctccgtgggtgcccctggaatc

SEQ ID NO: 3970514 - DNA, 25 bp, Homo sapien
tccttctgcacacggagagactcag

SEQ ID NO: 3970515 - DNA, 25 bp, Homo sapien
tggaaagcactgagccaatgcaatc

SEQ ID NO: 3970516 - DNA, 25 bp, Homo sapien
gtgaattgtagctccccgagctgac

SEQ ID NO: 3970517 - DNA, 25 bp, Homo sapien
tagctccccgagctgacggtatact

SEQ ID NO: 3970518 - DNA, 25 bp, Homo sapien
cccgagctgacggtatactctccag

SEQ ID NO: 3970519 - DNA, 25 bp, Homo sapien
tgacggtatactctccaggaaaggg

SEQ ID NO: 3970520 - DNA, 25 bp, Homo sapien
catacaaggcttctccgagaagcca

SEQ ID NO: 3970521 - DNA, 25 bp, Homo sapien
aaggcttctccgagaagccagctca

SEQ ID NO: 3970522 - DNA, 25 bp, Homo sapien
ggcttctccgagaagccagctcagc

SEQ ID NO: 3970523 - DNA, 25 bp, Homo sapien
tacaaggcttctccgagaagccagc

SEQ ID NO: 3970524 - DNA, 25 bp, Homo sapien
caaaggaagcctacgagccttgtaa

SEQ ID NO: 3970525 - DNA, 25 bp, Homo sapien
agccttgtaagtggagggtcccgat

SEQ ID NO: 3970526 - DNA, 25 bp, Homo sapien
gctctgtctctgagatcgggaacca

SEQ ID NO: 3970527 - DNA, 25 bp, Homo sapien
gagtgtcgagcccagactcataccc

SEQ ID NO: 3970528 - DNA, 25 bp, Homo sapien
aggcgactttctttctcgggctgca

SEQ ID NO: 3970529 - DNA, 25 bp, Homo sapien
gccacgcaaacactgtgacacactg

SEQ ID NO: 3970530 - DNA, 25 bp, Homo sapien
gacaaaatgtgaaaagcgaggccca

SEQ ID NO: 3970531 - DNA, 25 bp, Homo sapien
gggcttccaggcgactttctttctc

SEQ ID NO: 3970532 - DNA, 25 bp, Homo sapien
tacttgatcatttttatggcccatg

SEQ ID NO: 3970533 - DNA, 25 bp, Homo sapien
tgacaccccaggctgaattttccag

SEQ ID NO: 3970534 - DNA, 25 bp, Homo sapien
aggccaccgtaaggattgatttgaa

SEQ ID NO: 3970535 - DNA, 25 bp, Homo sapien
acacaaaggtataaggtgttccatc

SEQ ID NO: 3970536 - DNA, 25 bp, Homo sapien
attgtcctgctcatcctccacccac

SEQ ID NO: 3970537 - DNA, 25 bp, Homo sapien
tcattgtcctgctcatcctccaccc

SEQ ID NO: 3970538 - DNA, 25 bp, Homo sapien
cattgtcctgctcatcctccaccca

SEQ ID NO: 3970539 - DNA, 25 bp, Homo sapien
ccaaaatacaaaggtggtagtgcca

SEQ ID NO: 3970540 - DNA, 25 bp, Homo sapien
tccaaaatacaaaggtggtagtgcc

SEQ ID NO: 3970541 - DNA, 25 bp, Homo sapien
ttccaaaatacaaaggtggtagtgc

SEQ ID NO: 3970542 - DNA, 25 bp, Homo sapien
caaaatacaaaggtggtagtgccac

SEQ ID NO: 3970543 - DNA, 25 bp, Homo sapien
cagctttccctttcgcacagcaaag

SEQ ID NO: 3970544 - DNA, 25 bp, Homo sapien
ccaggagggctctattacaggagca

SEQ ID NO: 3970545 - DNA, 25 bp, Homo sapien
tcatccaatggttgtatccaggccc

SEQ ID NO: 3970546 - DNA, 25 bp, Homo sapien
gcaggtcgctctgaatactatgaca

SEQ ID NO: 3970547 - DNA, 25 bp, Homo sapien
caatgtcactttgattaaaaattgt

SEQ ID NO: 3970548 - DNA, 25 bp, Homo sapien
tacaatgtcactttgattaaaaatt

SEQ ID NO: 3970549 - DNA, 25 bp, Homo sapien
ttatgaatacaatgtcactttgatt

SEQ ID NO: 3970550 - DNA, 25 bp, Homo sapien
gaatacaatgtcactttgattaaaa

SEQ ID NO: 3970551 - DNA, 25 bp, Homo sapien
cagtcttgaccatgtcttcttgtca

SEQ ID NO: 3970552 - DNA, 25 bp, Homo sapien
ggtatgatctgaacttgaccttcag

SEQ ID NO: 3970553 - DNA, 25 bp, Homo sapien
gctgttcaatcaccatggcagagca

SEQ ID NO: 3970554 - DNA, 25 bp, Homo sapien
cagctgtaactaaactctccggtat

SEQ ID NO: 3970555 - DNA, 25 bp, Homo sapien
tgtttctgcagtaagtggcatcact

SEQ ID NO: 3970556 - DNA, 25 bp, Homo sapien
tgcagagggacagaagaccctttgt

SEQ ID NO: 3970557 - DNA, 25 bp, Homo sapien
tctaatacgaagttcccagacagcc

SEQ ID NO: 3970558 - DNA, 25 bp, Homo sapien
ctattgatgcaggtttatcagtgac

SEQ ID NO: 3970559 - DNA, 25 bp, Homo sapien
gatacctgtaaaagttgatacgttg

SEQ ID NO: 3970560 - DNA, 25 bp, Homo sapien
tccgatacctgtaaaagttgatacg

SEQ ID NO: 3970561 - DNA, 25 bp, Homo sapien
tacctgtaaaagttgatacgttgaa

SEQ ID NO: 3970562 - DNA, 25 bp, Homo sapien
aatatccgatacctgtaaaagttga

SEQ ID NO: 3970563 - DNA, 25 bp, Homo sapien
tattttgagactgccccttgtgggt

SEQ ID NO: 3970564 - DNA, 25 bp, Homo sapien
caagttctggccttatcgcacacag

SEQ ID NO: 3970565 - DNA, 25 bp, Homo sapien
tacggcaaagttactggcaatctgg

SEQ ID NO: 3970566 - DNA, 25 bp, Homo sapien
taaggttgacacactctattccggt

SEQ ID NO: 3970567 - DNA, 25 bp, Homo sapien
caaggtaaggatatgagcttggtca

SEQ ID NO: 3970568 - DNA, 25 bp, Homo sapien
cagctgtggaagtcggtctctcctt

SEQ ID NO: 3970569 - DNA, 25 bp, Homo sapien
tctctccttgcaaggtaaggatatg

SEQ ID NO: 3970570 - DNA, 25 bp, Homo sapien
tcatattgatgaccatcaacgaaca

SEQ ID NO: 3970571 - DNA, 25 bp, Homo sapien
gatgttcgttacgggcgctgttctt

SEQ ID NO: 3970572 - DNA, 25 bp, Homo sapien
ttccaatgctagaaggacctgtgag

SEQ ID NO: 3970573 - DNA, 25 bp, Homo sapien
ggcgctgttcttattccaatgctag

SEQ ID NO: 3970574 - DNA, 25 bp, Homo sapien
ccaatgctagaaggacctgtgagca

SEQ ID NO: 3970575 - DNA, 25 bp, Homo sapien
cattcttgacagatgcgcgcttggc

SEQ ID NO: 3970576 - DNA, 25 bp, Homo sapien
gaacagcgcccagagagcattcttg

SEQ ID NO: 3970577 - DNA, 25 bp, Homo sapien
cagaggatccttgcaagaacagcgc

SEQ ID NO: 3970578 - DNA, 25 bp, Homo sapien
tgtgtacgattccaaagggccctca

SEQ ID NO: 3970579 - DNA, 25 bp, Homo sapien
tactctggtgcaactaactactgtg

SEQ ID NO: 3970580 - DNA, 25 bp, Homo sapien
tccaatagaaaatcacagcctgcgg

SEQ ID NO: 3970581 - DNA, 25 bp, Homo sapien
tcagtcccagtagcgatggcagtgg

SEQ ID NO: 3970582 - DNA, 25 bp, Homo sapien
tacattttcacagccggattcaagg

SEQ ID NO: 3970583 - DNA, 25 bp, Homo sapien
tttctgttgttcactcgggaatcat

SEQ ID NO: 3970584 - DNA, 25 bp, Homo sapien
cactcgggaatcatttccagtaaca

SEQ ID NO: 3970585 - DNA, 25 bp, Homo sapien
ttgttcactcgggaatcatttccag

SEQ ID NO: 3970586 - DNA, 25 bp, Homo sapien
gggaatcatttccagtaacagggat

SEQ ID NO: 3970587 - DNA, 25 bp, Homo sapien
tggactctggacagatgtcttagac

SEQ ID NO: 3970588 - DNA, 25 bp, Homo sapien
tacattataggaacccagatacttg

SEQ ID NO: 3970589 - DNA, 25 bp, Homo sapien
catcttagctaactgtgcctctgaa

SEQ ID NO: 3970590 - DNA, 25 bp, Homo sapien
ggaactgggttcaatctaacacatg

SEQ ID NO: 3970591 - DNA, 25 bp, Homo sapien
cactggagttgattctcagggagct

SEQ ID NO: 3970592 - DNA, 25 bp, Homo sapien
gggtcacctccatcacactggagtt

SEQ ID NO: 3970593 - DNA, 25 bp, Homo sapien
gcccacatgagcacagtttgaagtt

SEQ ID NO: 3970594 - DNA, 25 bp, Homo sapien
tgcagccctgcacgatgcttctgtg

SEQ ID NO: 3970595 - DNA, 25 bp, Homo sapien
tcagataggtgaactgcggagactt

SEQ ID NO: 3970596 - DNA, 25 bp, Homo sapien
tcaagagattgacaccagcttccct

SEQ ID NO: 3970597 - DNA, 25 bp, Homo sapien
cgttctgtccgagctgagtcttcaa

SEQ ID NO: 3970598 - DNA, 25 bp, Homo sapien
cggagacttccgtgtccactgcgtt

SEQ ID NO: 3970599 - DNA, 25 bp, Homo sapien
tcgaatggaagaaacggcaaagcca

SEQ ID NO: 3970600 - DNA, 25 bp, Homo sapien
cagaatttagcctagggagtgcact

SEQ ID NO: 3970601 - DNA, 25 bp, Homo sapien
tgataagctgtttggtcgaatggaa

SEQ ID NO: 3970602 - DNA, 25 bp, Homo sapien
cttgttactaaagatggccgcttca

SEQ ID NO: 3970603 - DNA, 25 bp, Homo sapien
tccgaacttccggatcctgagaagc

SEQ ID NO: 3970604 - DNA, 25 bp, Homo sapien
tccacttccagacccaggatgacat

SEQ ID NO: 3970605 - DNA, 25 bp, Homo sapien
gtcagatacccagtccctaagaatg

SEQ ID NO: 3970606 - DNA, 25 bp, Homo sapien
gagtttgacccatgtggctccactt

SEQ ID NO: 3970607 - DNA, 25 bp, Homo sapien
tggcaggctcggttccctcctcgct

SEQ ID NO: 3970608 - DNA, 25 bp, Homo sapien
atcctttgattcacgtacggccccg

SEQ ID NO: 3970609 - DNA, 25 bp, Homo sapien
tcctcgctctgcatcctttgattca

SEQ ID NO: 3970610 - DNA, 25 bp, Homo sapien
cgctctgcatcctttgattcacgta

SEQ ID NO: 3970611 - DNA, 25 bp, Homo sapien
tcacatggatcctttccagaccacg

SEQ ID NO: 3970612 - DNA, 25 bp, Homo sapien
ggatcctttccagaccacgggcact

SEQ ID NO: 3970613 - DNA, 25 bp, Homo sapien
ctgtcatcgccatactgtgttctct

SEQ ID NO: 3970614 - DNA, 25 bp, Homo sapien
ccctgtcatcgccatactgtgttct

SEQ ID NO: 3970615 - DNA, 25 bp, Homo sapien
gcttgtttcttcatactaatgtcat

SEQ ID NO: 3970616 - DNA, 25 bp, Homo sapien
gggtgatgaccagaaactgctttgc

SEQ ID NO: 3970617 - DNA, 25 bp, Homo sapien
gaatctgttttggtacattgggtga

SEQ ID NO: 3970618 - DNA, 25 bp, Homo sapien
tgtcatctacagtgccaaaactaca

SEQ ID NO: 3970619 - DNA, 25 bp, Homo sapien
gaggaaacgcagatacagccaaacc

SEQ ID NO: 3970620 - DNA, 25 bp, Homo sapien
gtcgagtgggcacagacaaatggaa

SEQ ID NO: 3970621 - DNA, 25 bp, Homo sapien
cagctccggatggtgagaagtgttc

SEQ ID NO: 3970622 - DNA, 25 bp, Homo sapien
tctttcctgctctataccaagttgt

SEQ ID NO: 3970623 - DNA, 25 bp, Homo sapien
gaaatgggaactgtattacacctgt

SEQ ID NO: 3970624 - DNA, 25 bp, Homo sapien
aacatcttgggctttgacatacaag

SEQ ID NO: 3970625 - DNA, 25 bp, Homo sapien
cctgtgggtccagtatgatctttaa

SEQ ID NO: 3970626 - DNA, 25 bp, Homo sapien
ttaaaaatcatcagcaacatcttgg

SEQ ID NO: 3970627 - DNA, 25 bp, Homo sapien
agatcataacccctccacttccgag

SEQ ID NO: 3970628 - DNA, 25 bp, Homo sapien
ctccacttccgagactggccttcaa

SEQ ID NO: 3970629 - DNA, 25 bp, Homo sapien
ccttcaatgaggaatttagggcttt

SEQ ID NO: 3970630 - DNA, 25 bp, Homo sapien
actggccttcaatgaggaatttagg

SEQ ID NO: 3970631 - DNA, 25 bp, Homo sapien
ccatgaggatggaaatgccctggtc

SEQ ID NO: 3970632 - DNA, 25 bp, Homo sapien
ggatgttccaaagcctcatgtacga

SEQ ID NO: 3970633 - DNA, 25 bp, Homo sapien
ttaggaaacgtgcagaaccaccagg

SEQ ID NO: 3970634 - DNA, 25 bp, Homo sapien
tagataaaccctcttctcaggccag

SEQ ID NO: 3970635 - DNA, 25 bp, Homo sapien
taaaactcacccgatatgctggagt

SEQ ID NO: 3970636 - DNA, 25 bp, Homo sapien
gcaatatctgcataagagccacggt

SEQ ID NO: 3970637 - DNA, 25 bp, Homo sapien
gatactacggcaacacttaagtgtc

SEQ ID NO: 3970638 - DNA, 25 bp, Homo sapien
gagcccaacttttagagcccaaaca

SEQ ID NO: 3970639 - DNA, 25 bp, Homo sapien
ttaataagacgttctatttctgttc

SEQ ID NO: 3970640 - DNA, 25 bp, Homo sapien
taataagacgttctatttctgttcc

SEQ ID NO: 3970641 - DNA, 25 bp, Homo sapien
tttactggttggtgtgtgaatgaga

SEQ ID NO: 3970642 - DNA, 25 bp, Homo sapien
tgattgctagatcagactgtgaaac

SEQ ID NO: 3970643 - DNA, 25 bp, Homo sapien
acagaaacagcccagctgattgcta

SEQ ID NO: 3970644 - DNA, 25 bp, Homo sapien
tttgccatgtttactggttggtgtg

SEQ ID NO: 3970645 - DNA, 25 bp, Homo sapien
gaactttgttaaaatcagatgcctc

SEQ ID NO: 3970646 - DNA, 25 bp, Homo sapien
tagtaacgtatcctccaaaacagcc

SEQ ID NO: 3970647 - DNA, 25 bp, Homo sapien
gatgccaccccgtctacttaaatga

SEQ ID NO: 3970648 - DNA, 25 bp, Homo sapien
taatccattgtcagctggatgggat

SEQ ID NO: 3970649 - DNA, 25 bp, Homo sapien
ctattgtagcattcggagtaaagac

SEQ ID NO: 3970650 - DNA, 25 bp, Homo sapien
gtcaactaatcataaagataagcat

SEQ ID NO: 3970651 - DNA, 25 bp, Homo sapien
tccttattaatcaaaagttgagctt

SEQ ID NO: 3970652 - DNA, 25 bp, Homo sapien
aaaatggaatctgcaaaagtcaact

SEQ ID NO: 3970653 - DNA, 25 bp, Homo sapien
ggaaagttatccacagctactgagg

SEQ ID NO: 3970654 - DNA, 25 bp, Homo sapien
cgggcatgtgctttttgcagcctaa

SEQ ID NO: 3970655 - DNA, 25 bp, Homo sapien
tgcactgcttcgagcattcagggac

SEQ ID NO: 3970656 - DNA, 25 bp, Homo sapien
caacatggccttatctacttgtgga

SEQ ID NO: 3970657 - DNA, 25 bp, Homo sapien
tctttgtcatagcttccactctcaa

SEQ ID NO: 3970658 - DNA, 25 bp, Homo sapien
ctgatgaactagaacgacttcccat

SEQ ID NO: 3970659 - DNA, 25 bp, Homo sapien
ctagaacgacttcccatgctgctga

SEQ ID NO: 3970660 - DNA, 25 bp, Homo sapien
tcaacctgatctaattttcttcgtg

SEQ ID NO: 3970661 - DNA, 25 bp, Homo sapien
actttaggcagagggctatgtcatt

SEQ ID NO: 3970662 - DNA, 25 bp, Homo sapien
gattattcgtcacaattatcaggac

SEQ ID NO: 3970663 - DNA, 25 bp, Homo sapien
aaatggcatagacaagagaaagttc

SEQ ID NO: 3970664 - DNA, 25 bp, Homo sapien
aagttcttgaatacatactttaggc

SEQ ID NO: 3970665 - DNA, 25 bp, Homo sapien
acatacagcttcaatcaatgtggca

SEQ ID NO: 3970666 - DNA, 25 bp, Homo sapien
catggtctaagtgtggaagaatttt

SEQ ID NO: 3970667 - DNA, 25 bp, Homo sapien
caaacacattcatggtctaagtgtg

SEQ ID NO: 3970668 - DNA, 25 bp, Homo sapien
catacagcttcaatcaatgtggcag

SEQ ID NO: 3970669 - DNA, 25 bp, Homo sapien
tacctgggtactcaatgctttaact

SEQ ID NO: 3970670 - DNA, 25 bp, Homo sapien
tgagatccttgatactagaggcatg

SEQ ID NO: 3970671 - DNA, 25 bp, Homo sapien
tgtttgtctacaagcgagttcagct

SEQ ID NO: 3970672 - DNA, 25 bp, Homo sapien
ttcagcttgcagagtttggacttcc

SEQ ID NO: 3970673 - DNA, 25 bp, Homo sapien
tcacactggctttgtaactgacttt

SEQ ID NO: 3970674 - DNA, 25 bp, Homo sapien
tcctactgccttcgatgtctttttg

SEQ ID NO: 3970675 - DNA, 25 bp, Homo sapien
tactagtgagcctttctgtaaacag

SEQ ID NO: 3970676 - DNA, 25 bp, Homo sapien
tttatcaaattgtgactgcaaagaa

SEQ ID NO: 3970677 - DNA, 25 bp, Homo sapien
tttcagctttttggcgattaataat

SEQ ID NO: 3970678 - DNA, 25 bp, Homo sapien
tgctcctgtagctgatctgcagttt

SEQ ID NO: 3970679 - DNA, 25 bp, Homo sapien
tgttcttaatcgttcatcttctaga

SEQ ID NO: 3970680 - DNA, 25 bp, Homo sapien
tgcagttttcaccttgtccaataaa

SEQ ID NO: 3970681 - DNA, 25 bp, Homo sapien
gtgttcttaactcatccataccctc

SEQ ID NO: 3970682 - DNA, 25 bp, Homo sapien
tcagtgttcttaactcatccatacc

SEQ ID NO: 3970683 - DNA, 25 bp, Homo sapien
cataccctccttaaatgttctcttc

SEQ ID NO: 3970684 - DNA, 25 bp, Homo sapien
atccataccctccttaaatgttctc

SEQ ID NO: 3970685 - DNA, 25 bp, Homo sapien
ctaagctttgcatcaagctcatttg

SEQ ID NO: 3970686 - DNA, 25 bp, Homo sapien
tctaagctttgcatcaagctcattt

SEQ ID NO: 3970687 - DNA, 25 bp, Homo sapien
tctccttttgtgactctaagctttg

SEQ ID NO: 3970688 - DNA, 25 bp, Homo sapien
ccttttgtgactctaagctttgcat

SEQ ID NO: 3970689 - DNA, 25 bp, Homo sapien
cctgacagttttttcgtatctgatc

SEQ ID NO: 3970690 - DNA, 25 bp, Homo sapien
gttttttcgtatctgatctgcttct

SEQ ID NO: 3970691 - DNA, 25 bp, Homo sapien
catatcctgacagttttttcgtatc

SEQ ID NO: 3970692 - DNA, 25 bp, Homo sapien
gacagttttttcgtatctgatctgc

SEQ ID NO: 3970693 - DNA, 25 bp, Homo sapien
tgatgaatggtaagaagtgaccggc

SEQ ID NO: 3970694 - DNA, 25 bp, Homo sapien
gaaggttcttgtcctagcactgtca

SEQ ID NO: 3970695 - DNA, 25 bp, Homo sapien
aagacagagacacagttgggtacag

SEQ ID NO: 3970696 - DNA, 25 bp, Homo sapien
agtgaccggcaagtaggaaggttct

SEQ ID NO: 3970697 - DNA, 25 bp, Homo sapien
ccattacaggacaatattctccttc

SEQ ID NO: 3970698 - DNA, 25 bp, Homo sapien
aaaaggcagatcagatgccgcctac

SEQ ID NO: 3970699 - DNA, 25 bp, Homo sapien
tataatttaggcatgccctggattc

SEQ ID NO: 3970700 - DNA, 25 bp, Homo sapien
tttggtatcatctcctctcagtagc

SEQ ID NO: 3970701 - DNA, 25 bp, Homo sapien
tctccctaagcaaactgatccatgg

SEQ ID NO: 3970702 - DNA, 25 bp, Homo sapien
tcagagatcactgtcctatgctgcc

SEQ ID NO: 3970703 - DNA, 25 bp, Homo sapien
gaatacagttatagaacactacagt

SEQ ID NO: 3970704 - DNA, 25 bp, Homo sapien
tatctcctcaattcaggtagactgc

SEQ ID NO: 3970705 - DNA, 25 bp, Homo sapien
tggcttctaatgactgggccttctg

SEQ ID NO: 3970706 - DNA, 25 bp, Homo sapien
tgatgacgtgagagttaatgtcttc

SEQ ID NO: 3970707 - DNA, 25 bp, Homo sapien
ctatttctctgatgagtctagtcgt

SEQ ID NO: 3970708 - DNA, 25 bp, Homo sapien
gcccactttactttgatgacgtgag

SEQ ID NO: 3970709 - DNA, 25 bp, Homo sapien
tgatgagtctagtcgtttcgccttc

SEQ ID NO: 3970710 - DNA, 25 bp, Homo sapien
ctttttcttggcgtgcctcttcaca

SEQ ID NO: 3970711 - DNA, 25 bp, Homo sapien
ggtgcaaccgtcctttctcctgaga

SEQ ID NO: 3970712 - DNA, 25 bp, Homo sapien
caagttccttatttgcatctctaag

SEQ ID NO: 3970713 - DNA, 25 bp, Homo sapien
tcctttcgaagatctaaagattcct

SEQ ID NO: 3970714 - DNA, 25 bp, Homo sapien
tcttcatcaccggtttaagtgtgcc

SEQ ID NO: 3970715 - DNA, 25 bp, Homo sapien
ggaccctgactgtatagccgacaat

SEQ ID NO: 3970716 - DNA, 25 bp, Homo sapien
tcccaactggtgtcccaggaacatg

SEQ ID NO: 3970717 - DNA, 25 bp, Homo sapien
gttgggttcacccaacagaaggcag

SEQ ID NO: 3970718 - DNA, 25 bp, Homo sapien
tgtaacgtcttgagctattagttga

SEQ ID NO: 3970719 - DNA, 25 bp, Homo sapien
tgatctctggaagctttaacttctt

SEQ ID NO: 3970720 - DNA, 25 bp, Homo sapien
ctgttccatccgttgggccatctct

SEQ ID NO: 3970721 - DNA, 25 bp, Homo sapien
gaactgcatttttagctgtaacgtc

SEQ ID NO: 3970722 - DNA, 25 bp, Homo sapien
ctgaacaaatgtctacgaagagctc

SEQ ID NO: 3970723 - DNA, 25 bp, Homo sapien
gaacaaatgtctacgaagagctcct

SEQ ID NO: 3970724 - DNA, 25 bp, Homo sapien
aaatgtctacgaagagctcctgatg

SEQ ID NO: 3970725 - DNA, 25 bp, Homo sapien
tttctgaacaaatgtctacgaagag

SEQ ID NO: 3970726 - DNA, 25 bp, Homo sapien
cagtaaggatatgaatagcaacagc

SEQ ID NO: 3970727 - DNA, 25 bp, Homo sapien
ggccttggagtcttgaagagatact

SEQ ID NO: 3970728 - DNA, 25 bp, Homo sapien
gaattttatctcgaatccctgtgcc

SEQ ID NO: 3970729 - DNA, 25 bp, Homo sapien
tctgcagattggttgtccaacagtg

SEQ ID NO: 3970730 - DNA, 25 bp, Homo sapien
tcttggtgcagtctgtatcataggg

SEQ ID NO: 3970731 - DNA, 25 bp, Homo sapien
gcaaactccgtagataagagctcag

SEQ ID NO: 3970732 - DNA, 25 bp, Homo sapien
tttttatgatatgttcctgctgcaa

SEQ ID NO: 3970733 - DNA, 25 bp, Homo sapien
tctgatgctgaaacgctctttattt

SEQ ID NO: 3970734 - DNA, 25 bp, Homo sapien
cctgggcttcaattcgattattatg

SEQ ID NO: 3970735 - DNA, 25 bp, Homo sapien
gaaaacaagttgcatgagtcttcct

SEQ ID NO: 3970736 - DNA, 25 bp, Homo sapien
gaccttaattccaccaatatttgtg

SEQ ID NO: 3970737 - DNA, 25 bp, Homo sapien
ttaggttgacataaagttttatcag

SEQ ID NO: 3970738 - DNA, 25 bp, Homo sapien
tctgctcctgatcttcgttttacat

SEQ ID NO: 3970739 - DNA, 25 bp, Homo sapien
atctgctcctgatcttcgttttaca

SEQ ID NO: 3970740 - DNA, 25 bp, Homo sapien
tatacccagatttaagattcctcag

SEQ ID NO: 3970741 - DNA, 25 bp, Homo sapien
agtggcggcaaagttacatcggacc

SEQ ID NO: 3970742 - DNA, 25 bp, Homo sapien
gaccaagggattcttaaaggactgc

SEQ ID NO: 3970743 - DNA, 25 bp, Homo sapien
tttacactgtatgactggagaccca

SEQ ID NO: 3970744 - DNA, 25 bp, Homo sapien
tcatcagctgtaggcaactggtcaa

SEQ ID NO: 3970745 - DNA, 25 bp, Homo sapien
gctgtaggcaactggtcaagaaaca

SEQ ID NO: 3970746 - DNA, 25 bp, Homo sapien
tcagctgtaggcaactggtcaagaa

SEQ ID NO: 3970747 - DNA, 25 bp, Homo sapien
gtaggcaactggtcaagaaacaatt

SEQ ID NO: 3970748 - DNA, 25 bp, Homo sapien
ctgggactgtactgcgtatttttac

SEQ ID NO: 3970749 - DNA, 25 bp, Homo sapien
tgttctgactcgaaatccaggactt

SEQ ID NO: 3970750 - DNA, 25 bp, Homo sapien
ttatcaagtgaaagaagtaggattc

SEQ ID NO: 3970751 - DNA, 25 bp, Homo sapien
ccacaggtaacaagattatcaagtg

SEQ ID NO: 3970752 - DNA, 25 bp, Homo sapien
cctttggcctgcatgagtcagggac

SEQ ID NO: 3970753 - DNA, 25 bp, Homo sapien
tgacgcagcacaccttgaggtcctg

SEQ ID NO: 3970754 - DNA, 25 bp, Homo sapien
tcctgggtaacctgtctgcagtggg

SEQ ID NO: 3970755 - DNA, 25 bp, Homo sapien
aaaagaccgcggtgagaaacacagc

SEQ ID NO: 3970756 - DNA, 25 bp, Homo sapien
gaacacgtgggcacattgagttgca

SEQ ID NO: 3970757 - DNA, 25 bp, Homo sapien
tagagcacaagctgcttccggggaa

SEQ ID NO: 3970758 - DNA, 25 bp, Homo sapien
aggcgtgcgctgaggccaggagggc

SEQ ID NO: 3970759 - DNA, 25 bp, Homo sapien
tggacgcggagtgcgcaggcgtgcg

SEQ ID NO: 3970760 - DNA, 25 bp, Homo sapien
cagagacaggttcggatccgcggtc

SEQ ID NO: 3970761 - DNA, 25 bp, Homo sapien
cttggaaccttgctgcgagggtttg

SEQ ID NO: 3970762 - DNA, 25 bp, Homo sapien
cgttgggcgctggacgttgaggttg

SEQ ID NO: 3970763 - DNA, 25 bp, Homo sapien
gagtttggaaatagcgcttccaggc

SEQ ID NO: 3970764 - DNA, 25 bp, Homo sapien
gttttgtggccctacttgcatccaa

SEQ ID NO: 3970765 - DNA, 25 bp, Homo sapien
gctgcctggaattggcaagtcgagc

SEQ ID NO: 3970766 - DNA, 25 bp, Homo sapien
ggaattggcaagtcgagctcttctg

SEQ ID NO: 3970767 - DNA, 25 bp, Homo sapien
tgggatcagccaaagaggacacctg

SEQ ID NO: 3970768 - DNA, 25 bp, Homo sapien
aacgccctccaatcttaagcaagga

SEQ ID NO: 3970769 - DNA, 25 bp, Homo sapien
tgctcagcattgtgctttgtggcat

SEQ ID NO: 3970770 - DNA, 25 bp, Homo sapien
gatggccaaaaggtcggcttattac

SEQ ID NO: 3970771 - DNA, 25 bp, Homo sapien
taagcaaggatgatggccaaaaggt

SEQ ID NO: 3970772 - DNA, 25 bp, Homo sapien
gagacaaacaggtgtcccacgtggc

SEQ ID NO: 3970773 - DNA, 25 bp, Homo sapien
gtgccggctgccgatgaccgattca

SEQ ID NO: 3970774 - DNA, 25 bp, Homo sapien
gccgatgccgctttaaaaaacgcga

SEQ ID NO: 3970775 - DNA, 25 bp, Homo sapien
gaccgattcacgctcccggtactgg

SEQ ID NO: 3970776 - DNA, 25 bp, Homo sapien
ggaagagcgcacctggcgcgcgcct

SEQ ID NO: 3970777 - DNA, 25 bp, Homo sapien
gctttgttcgcattgtctgcgcgca

SEQ ID NO: 3970778 - DNA, 25 bp, Homo sapien
ggtgcgggctttgttcgcattgtct

SEQ ID NO: 3970779 - DNA, 25 bp, Homo sapien
ttcgcattgtctgcgcgcacctgag

SEQ ID NO: 3970780 - DNA, 25 bp, Homo sapien
cgcatgcctcatagtaccaggtgca

SEQ ID NO: 3970781 - DNA, 25 bp, Homo sapien
tactgtgtgcctctgcgtactggtg

SEQ ID NO: 3970782 - DNA, 25 bp, Homo sapien
cgtactggtgcctctgtgtaccgca

SEQ ID NO: 3970783 - DNA, 25 bp, Homo sapien
gtaccagtgcctctgcataccgcag

SEQ ID NO: 3970784 - DNA, 25 bp, Homo sapien
ccagtgcatctgtgtaccgcgtact

SEQ ID NO: 3970785 - DNA, 25 bp, Homo sapien
gtgtaccgcgtacttctggtcatag

SEQ ID NO: 3970786 - DNA, 25 bp, Homo sapien
ctgtgtaccagtgcatctgtgtacc

SEQ ID NO: 3970787 - DNA, 25 bp, Homo sapien
tgcatctgtgtaccgcgtacttctg

SEQ ID NO: 3970788 - DNA, 25 bp, Homo sapien
ccctttgatcgtgtctgtagagctc

SEQ ID NO: 3970789 - DNA, 25 bp, Homo sapien
gctcctgacatactggctcttgcca

SEQ ID NO: 3970790 - DNA, 25 bp, Homo sapien
acctttctccctttgatcgtgtctg

SEQ ID NO: 3970791 - DNA, 25 bp, Homo sapien
gatcgtgtctgtagagctcctgaca

SEQ ID NO: 3970792 - DNA, 25 bp, Homo sapien
caagctgtcacagcctcgtgaggct

SEQ ID NO: 3970793 - DNA, 25 bp, Homo sapien
tatattatttcagggcgggcatggc

SEQ ID NO: 3970794 - DNA, 25 bp, Homo sapien
tggctcacggtttatgcttcagaaa

SEQ ID NO: 3970795 - DNA, 25 bp, Homo sapien
gaacctagcgaggatcagaaatgct

SEQ ID NO: 3970796 - DNA, 25 bp, Homo sapien
cagacagaggaagtttgcggtgcac

SEQ ID NO: 3970797 - DNA, 25 bp, Homo sapien
tgagccccagagtgaatagtggtgc

SEQ ID NO: 3970798 - DNA, 25 bp, Homo sapien
aacgggccagcaagtgcaggtcaga

SEQ ID NO: 3970799 - DNA, 25 bp, Homo sapien
tcccgacatgggaaagatgacaacg

SEQ ID NO: 3970800 - DNA, 25 bp, Homo sapien
ttcctgcctccgcctttcatagtgc

SEQ ID NO: 3970801 - DNA, 25 bp, Homo sapien
agacacgcaccaccgtggccggcta

SEQ ID NO: 3970802 - DNA, 25 bp, Homo sapien
tgagctcaattcctgcctccgcctt

SEQ ID NO: 3970803 - DNA, 25 bp, Homo sapien
tacagtggcagaatcatggcttggt

SEQ ID NO: 3970804 - DNA, 25 bp, Homo sapien
catccaggaccccacagtacatgta

SEQ ID NO: 3970805 - DNA, 25 bp, Homo sapien
gatagtttctcagacgttcctggtg

SEQ ID NO: 3970806 - DNA, 25 bp, Homo sapien
ccttccccgtagctgtgatagtttc

SEQ ID NO: 3970807 - DNA, 25 bp, Homo sapien
acagtacatgtagtcagccgccttc

SEQ ID NO: 3970808 - DNA, 25 bp, Homo sapien
tcatgacaactaggagggaggccac

SEQ ID NO: 3970809 - DNA, 25 bp, Homo sapien
taagcaccccggagaaagtcatgac

SEQ ID NO: 3970810 - DNA, 25 bp, Homo sapien
caactacagagaaggcctgggcact

SEQ ID NO: 3970811 - DNA, 25 bp, Homo sapien
cagaggttggcttcctaaggccaga

SEQ ID NO: 3970812 - DNA, 25 bp, Homo sapien
aaaaatggcctgaccacagcaatga

SEQ ID NO: 3970813 - DNA, 25 bp, Homo sapien
acaagtgttagagaactgatacaca

SEQ ID NO: 3970814 - DNA, 25 bp, Homo sapien
ccaattttaagagggcgatcaccct

SEQ ID NO: 3970815 - DNA, 25 bp, Homo sapien
ccacttggtaaaaggtcaccaaatg

SEQ ID NO: 3970816 - DNA, 25 bp, Homo sapien
tctcaaaactcatgtcatagatggt

SEQ ID NO: 3970817 - DNA, 25 bp, Homo sapien
taaaatcactgaagactgagttggg

SEQ ID NO: 3970818 - DNA, 25 bp, Homo sapien
taaagacagttgattcaggcctgcc

SEQ ID NO: 3970819 - DNA, 25 bp, Homo sapien
caggcctgccttggactggaaagaa

SEQ ID NO: 3970820 - DNA, 25 bp, Homo sapien
gtttacatccaatagacttaggtct

SEQ ID NO: 3970821 - DNA, 25 bp, Homo sapien
ggatggtttaatccccaactgctaa

SEQ ID NO: 3970822 - DNA, 25 bp, Homo sapien
tggccaggagtttaggtcttctcac

SEQ ID NO: 3970823 - DNA, 25 bp, Homo sapien
gggccctgcttccttgattcatctt

SEQ ID NO: 3970824 - DNA, 25 bp, Homo sapien
tcaccaaggtccacattgacatgag

SEQ ID NO: 3970825 - DNA, 25 bp, Homo sapien
ctttcgcatagtttttgctttaaca

SEQ ID NO: 3970826 - DNA, 25 bp, Homo sapien
aagcaggattgtcaccaaggtccac

SEQ ID NO: 3970827 - DNA, 25 bp, Homo sapien
ccacattgacatgagagtctttaga

SEQ ID NO: 3970828 - DNA, 25 bp, Homo sapien
aacttgctcctttcttctcccattc

SEQ ID NO: 3970829 - DNA, 25 bp, Homo sapien
taacttgctcctttcttctcccatt

SEQ ID NO: 3970830 - DNA, 25 bp, Homo sapien
ctaacttgctcctttcttctcccat

SEQ ID NO: 3970831 - DNA, 25 bp, Homo sapien
tagggtaccattcaaataccagcac

SEQ ID NO: 3970832 - DNA, 25 bp, Homo sapien
caccaaaaagatagttagttatcca

SEQ ID NO: 3970833 - DNA, 25 bp, Homo sapien
gaaggatgctcgaaccaagtgcaga

SEQ ID NO: 3970834 - DNA, 25 bp, Homo sapien
tagccatcagggagaaaccgcatca

SEQ ID NO: 3970835 - DNA, 25 bp, Homo sapien
aagatgggcccctaccttagtgaca

SEQ ID NO: 3970836 - DNA, 25 bp, Homo sapien
tgacatttctgctggccccaaggga

SEQ ID NO: 3970837 - DNA, 25 bp, Homo sapien
tcttgagtgtggttgcagagttgac

SEQ ID NO: 3970838 - DNA, 25 bp, Homo sapien
agtgcctttgcctgtgaccacgacc

SEQ ID NO: 3970839 - DNA, 25 bp, Homo sapien
acgaccgagagaggcctgttcttga

SEQ ID NO: 3970840 - DNA, 25 bp, Homo sapien
tttgcctgtgaccacgaccgagaga

SEQ ID NO: 3970841 - DNA, 25 bp, Homo sapien
cagaggcaggtgtgacagctttggg

SEQ ID NO: 3970842 - DNA, 25 bp, Homo sapien
tggggcagaggcaggtgtgacagct

SEQ ID NO: 3970843 - DNA, 25 bp, Homo sapien
ctggggcagaggcaggtgtgacagc

SEQ ID NO: 3970844 - DNA, 25 bp, Homo sapien
gcagaggcaggtgtgacagctttgg

SEQ ID NO: 3970845 - DNA, 25 bp, Homo sapien
ggagccctgcaagcagcccagaggc

SEQ ID NO: 3970846 - DNA, 25 bp, Homo sapien
ccagaggccgcagttccagcactca

SEQ ID NO: 3970847 - DNA, 25 bp, Homo sapien
cagaggccgcagttccagcactcac

SEQ ID NO: 3970848 - DNA, 25 bp, Homo sapien
catgtccagggagccctgcaagcag

SEQ ID NO: 3970849 - DNA, 25 bp, Homo sapien
gctccaggtccacgcgcctgctctc

SEQ ID NO: 3970850 - DNA, 25 bp, Homo sapien
cacggtggtgcctaacgtcacaggc

SEQ ID NO: 3970851 - DNA, 25 bp, Homo sapien
tccaggtgggtggtgtccacggtgg

SEQ ID NO: 3970852 - DNA, 25 bp, Homo sapien
tcgccccggcactcctcgtcaattt

SEQ ID NO: 3970853 - DNA, 25 bp, Homo sapien
cagcttctgtccgattcttgccaag

SEQ ID NO: 3970854 - DNA, 25 bp, Homo sapien
tctctttccggagctgagccaggtg

SEQ ID NO: 3970855 - DNA, 25 bp, Homo sapien
gtgtaccgcttcacctcagcttctg

SEQ ID NO: 3970856 - DNA, 25 bp, Homo sapien
cccgtttctctttccggagctgagc

SEQ ID NO: 3970857 - DNA, 25 bp, Homo sapien
agattctctgctgttccgtctggat

SEQ ID NO: 3970858 - DNA, 25 bp, Homo sapien
accacggcatccgggcagctcggtg

SEQ ID NO: 3970859 - DNA, 25 bp, Homo sapien
tgattctcagggaaggatcctctgg

SEQ ID NO: 3970860 - DNA, 25 bp, Homo sapien
actggtcacgcgcaacctgtccttc

SEQ ID NO: 3970861 - DNA, 25 bp, Homo sapien
ttgggggaaagcagacctgactcag

SEQ ID NO: 3970862 - DNA, 25 bp, Homo sapien
ggacactttatgcagggctcatctg

SEQ ID NO: 3970863 - DNA, 25 bp, Homo sapien
tgagtctgccgggagggcctcagtt

SEQ ID NO: 3970864 - DNA, 25 bp, Homo sapien
ggttctctggacactttatgcaggg

SEQ ID NO: 3970865 - DNA, 25 bp, Homo sapien
cccaggttctctggacactttatgc

SEQ ID NO: 3970866 - DNA, 25 bp, Homo sapien
ctctcatttgggtcatctgcaacag

SEQ ID NO: 3970867 - DNA, 25 bp, Homo sapien
aggtacactcggtcagattctctct

SEQ ID NO: 3970868 - DNA, 25 bp, Homo sapien
tgaggtccaggtacactcggtcaga

SEQ ID NO: 3970869 - DNA, 25 bp, Homo sapien
ctcatttgggtcatctgcaacaggg

SEQ ID NO: 3970870 - DNA, 25 bp, Homo sapien
agtctggggcattcaacattacctc

SEQ ID NO: 3970871 - DNA, 25 bp, Homo sapien
cctcagctgtggagggggtaccagc

SEQ ID NO: 3970872 - DNA, 25 bp, Homo sapien
gggcattcaacattacctctactcc

SEQ ID NO: 3970873 - DNA, 25 bp, Homo sapien
tctggggcattcaacattacctcta

SEQ ID NO: 3970874 - DNA, 25 bp, Homo sapien
gacaggtccacgtcgtcatacagct

SEQ ID NO: 3970875 - DNA, 25 bp, Homo sapien
taggcaggccatcgatgtaagtgtt

SEQ ID NO: 3970876 - DNA, 25 bp, Homo sapien
gtgagctctgacaggtccacgtcgt

SEQ ID NO: 3970877 - DNA, 25 bp, Homo sapien
tcctggcggtcctggctaggcaggc

SEQ ID NO: 3970878 - DNA, 25 bp, Homo sapien
ttgccgtgaaagtggtggccacaca

SEQ ID NO: 3970879 - DNA, 25 bp, Homo sapien
gtttcagtggctcagccggcttcca

SEQ ID NO: 3970880 - DNA, 25 bp, Homo sapien
cactatccccgtttggtccatgaga

SEQ ID NO: 3970881 - DNA, 25 bp, Homo sapien
ggtgaaagcaccagactccaaggat

SEQ ID NO: 3970882 - DNA, 25 bp, Homo sapien
caatacaggagaccctatcggcatc

SEQ ID NO: 3970883 - DNA, 25 bp, Homo sapien
catagtcgtaggtgaactcttctgg

SEQ ID NO: 3970884 - DNA, 25 bp, Homo sapien
tcttggagcctgactcagagagcag

SEQ ID NO: 3970885 - DNA, 25 bp, Homo sapien
aagagagagtttttggccgcactca

SEQ ID NO: 3970886 - DNA, 25 bp, Homo sapien
ggaacgaggccaagagagacataag

SEQ ID NO: 3970887 - DNA, 25 bp, Homo sapien
ctggaacgaggccaagagagacata

SEQ ID NO: 3970888 - DNA, 25 bp, Homo sapien
gaacgaggccaagagagacataagc

SEQ ID NO: 3970889 - DNA, 25 bp, Homo sapien
acgaggccaagagagacataagcag

SEQ ID NO: 3970890 - DNA, 25 bp, Homo sapien
agccaccaccgccacaccctggctg

SEQ ID NO: 3970891 - DNA, 25 bp, Homo sapien
tggagactggcagcaaacagccacc

SEQ ID NO: 3970892 - DNA, 25 bp, Homo sapien
cctggagactggcagcaaacagcca

SEQ ID NO: 3970893 - DNA, 25 bp, Homo sapien
agtcctggagactggcagcaaacag

SEQ ID NO: 3970894 - DNA, 25 bp, Homo sapien
agtgcaggtgattgtccctgacaga

SEQ ID NO: 3970895 - DNA, 25 bp, Homo sapien
cttgctccggttccggtcctggtag

SEQ ID NO: 3970896 - DNA, 25 bp, Homo sapien
ccttgtggaggatgcggaaggagta

SEQ ID NO: 3970897 - DNA, 25 bp, Homo sapien
accagcgagacttccactggctgtt

SEQ ID NO: 3970898 - DNA, 25 bp, Homo sapien
ctgcaggaggaagtgcagatgcagg

SEQ ID NO: 3970899 - DNA, 25 bp, Homo sapien
agtgcagatgcaggaggggacaggg

SEQ ID NO: 3970900 - DNA, 25 bp, Homo sapien
caggaggaagtgcagatgcaggagg

SEQ ID NO: 3970901 - DNA, 25 bp, Homo sapien
ggaagtgcagatgcaggaggggaca

SEQ ID NO: 3970902 - DNA, 25 bp, Homo sapien
agcggatgcggatgcaagaggggac

SEQ ID NO: 3970903 - DNA, 25 bp, Homo sapien
cggatgcggatgcaagaggggactg

SEQ ID NO: 3970904 - DNA, 25 bp, Homo sapien
ggaagcggatgcggatgcaagaggg

SEQ ID NO: 3970905 - DNA, 25 bp, Homo sapien
aggggaagcggatgcggatgcaaga

SEQ ID NO: 3970906 - DNA, 25 bp, Homo sapien
tggatgtctcgagggacctctccac

SEQ ID NO: 3970907 - DNA, 25 bp, Homo sapien
ggatgtctcgagggacctctccaca

SEQ ID NO: 3970908 - DNA, 25 bp, Homo sapien
gatgtctcgagggacctctccacag

SEQ ID NO: 3970909 - DNA, 25 bp, Homo sapien
tcccatactctgaagccgacaggta

SEQ ID NO: 3970910 - DNA, 25 bp, Homo sapien
atccacggagctcccatactctgaa

SEQ ID NO: 3970911 - DNA, 25 bp, Homo sapien
ccgacaggtacttctcagctatatc

SEQ ID NO: 3970912 - DNA, 25 bp, Homo sapien
ggacctcagggtggccatccacgga

SEQ ID NO: 3970913 - DNA, 25 bp, Homo sapien
tcagatgctccttcggaaggcaggc

SEQ ID NO: 3970914 - DNA, 25 bp, Homo sapien
ggtgtactggtttccttcagatgct

SEQ ID NO: 3970915 - DNA, 25 bp, Homo sapien
tttctggcagttaaagcgctgggca

SEQ ID NO: 3970916 - DNA, 25 bp, Homo sapien
gcaggccgctcacttcctggatgac

SEQ ID NO: 3970917 - DNA, 25 bp, Homo sapien
gagggctcgttgtttagctcctttc

SEQ ID NO: 3970918 - DNA, 25 bp, Homo sapien
ggctcgttgtttagctcctttccgc

SEQ ID NO: 3970919 - DNA, 25 bp, Homo sapien
ttccgcaggtcccacacgttcatgg

SEQ ID NO: 3970920 - DNA, 25 bp, Homo sapien
ccacacgttcatgggcatgcgaggg

SEQ ID NO: 3970921 - DNA, 25 bp, Homo sapien
aagtccacctctgcacttgtctgag

SEQ ID NO: 3970922 - DNA, 25 bp, Homo sapien
tgcggatatgcagaattgggacaca

SEQ ID NO: 3970923 - DNA, 25 bp, Homo sapien
gcttcacaaagccaatgcaggtagg

SEQ ID NO: 3970924 - DNA, 25 bp, Homo sapien
ccaaagcgcaagagtgggcggcttc

SEQ ID NO: 3970925 - DNA, 25 bp, Homo sapien
cattcctggtgcaaactttacatcc

SEQ ID NO: 3970926 - DNA, 25 bp, Homo sapien
gcaaactttacatccgctggaagca

SEQ ID NO: 3970927 - DNA, 25 bp, Homo sapien
ctttacatccgctggaagcatcaag

SEQ ID NO: 3970928 - DNA, 25 bp, Homo sapien
gctgggtttggaggtccctctggaa

SEQ ID NO: 3970929 - DNA, 25 bp, Homo sapien
taggttcacgtccagctgagggctg

SEQ ID NO: 3970930 - DNA, 25 bp, Homo sapien
catcggcgtgatcttcagcttgtgc

SEQ ID NO: 3970931 - DNA, 25 bp, Homo sapien
ctccttgtgaatgacgctgctgccc

SEQ ID NO: 3970932 - DNA, 25 bp, Homo sapien
caatcacatcggcattcatcggcgt

SEQ ID NO: 3970933 - DNA, 25 bp, Homo sapien
cagatgcgggcgtcacgcatcagct

SEQ ID NO: 3970934 - DNA, 25 bp, Homo sapien
cagaagcctgttgtccttgatgaca

SEQ ID NO: 3970935 - DNA, 25 bp, Homo sapien
cagccacttcttgcgccacaggaag

SEQ ID NO: 3970936 - DNA, 25 bp, Homo sapien
aggactcgtaggagctgctcacagc

SEQ ID NO: 3970937 - DNA, 25 bp, Homo sapien
ctgcaaggaagaccagctcggtcag

SEQ ID NO: 3970938 - DNA, 25 bp, Homo sapien
aagaccagctcggtcagggccccat

SEQ ID NO: 3970939 - DNA, 25 bp, Homo sapien
gcaggggacagtcctgaagcagcat

SEQ ID NO: 3970940 - DNA, 25 bp, Homo sapien
ccagctcggtcagggccccatgggg

SEQ ID NO: 3970941 - DNA, 25 bp, Homo sapien
ctcagcaaggcttcttggatgctgc

SEQ ID NO: 3970942 - DNA, 25 bp, Homo sapien
cccaaataccctctcccagtcatag

SEQ ID NO: 3970943 - DNA, 25 bp, Homo sapien
ccagtcatagcccttcttcaaacct

SEQ ID NO: 3970944 - DNA, 25 bp, Homo sapien
aataccctctcccagtcatagccct

SEQ ID NO: 3970945 - DNA, 25 bp, Homo sapien
tagcccttcttcaaacctccactca

SEQ ID NO: 3970946 - DNA, 25 bp, Homo sapien
ccaaggtgatcgtggcataaatgac

SEQ ID NO: 3970947 - DNA, 25 bp, Homo sapien
ggtgatcgtggcataaatgactcct

SEQ ID NO: 3970948 - DNA, 25 bp, Homo sapien
cataaatgactccttcgggcacctg

SEQ ID NO: 3970949 - DNA, 25 bp, Homo sapien
aaatgactccttcgggcacctgcac

SEQ ID NO: 3970950 - DNA, 25 bp, Homo sapien
ggagactccgtctttgggatggcaa

SEQ ID NO: 3970951 - DNA, 25 bp, Homo sapien
gatggcaagctgtttccgttctgga

SEQ ID NO: 3970952 - DNA, 25 bp, Homo sapien
tgtgtcatatggctcagcctcttca

SEQ ID NO: 3970953 - DNA, 25 bp, Homo sapien
agggatgtgtcatatggctcagcct

SEQ ID NO: 3970954 - DNA, 25 bp, Homo sapien
gccttggactaagagtgatggctgc

SEQ ID NO: 3970955 - DNA, 25 bp, Homo sapien
catggggttccagcggccatggcct

SEQ ID NO: 3970956 - DNA, 25 bp, Homo sapien
tctgaggaagagacgccacagggca

SEQ ID NO: 3970957 - DNA, 25 bp, Homo sapien
tgtggtccttgcgagagaaacagat

SEQ ID NO: 3970958 - DNA, 25 bp, Homo sapien
tcacgtcagggaaatcaggggtcct

SEQ ID NO: 3970959 - DNA, 25 bp, Homo sapien
cacgtcagggaaatcaggggtcctg

SEQ ID NO: 3970960 - DNA, 25 bp, Homo sapien
tcagggaaatcaggggtcctgaact

SEQ ID NO: 3970961 - DNA, 25 bp, Homo sapien
cgtcagggaaatcaggggtcctgaa

SEQ ID NO: 3970962 - DNA, 25 bp, Homo sapien
gctccccattgggtagcaggccctg

SEQ ID NO: 3970963 - DNA, 25 bp, Homo sapien
aaggtgccgaagacacttctgagcc

SEQ ID NO: 3970964 - DNA, 25 bp, Homo sapien
gagtggccaacctcatctggatgag

SEQ ID NO: 3970965 - DNA, 25 bp, Homo sapien
gaaggcaagtgacccccgccagagt

SEQ ID NO: 3970966 - DNA, 25 bp, Homo sapien
caaccctcggtgcacttggaaggaa

SEQ ID NO: 3970967 - DNA, 25 bp, Homo sapien
tgttcatataaatgtactcctcatc

SEQ ID NO: 3970968 - DNA, 25 bp, Homo sapien
gttcatataaatgtactcctcatca

SEQ ID NO: 3970969 - DNA, 25 bp, Homo sapien
gaaggagacacaggctttgtgtgac

SEQ ID NO: 3970970 - DNA, 25 bp, Homo sapien
ggagacacaggctttgtgtgacttc

SEQ ID NO: 3970971 - DNA, 25 bp, Homo sapien
aggagacacaggctttgtgtgactt

SEQ ID NO: 3970972 - DNA, 25 bp, Homo sapien
aggaaggagacacaggctttgtgtg

SEQ ID NO: 3970973 - DNA, 25 bp, Homo sapien
ggctgatccagtgtgtatagataac

SEQ ID NO: 3970974 - DNA, 25 bp, Homo sapien
tgtgtatagataacccaggtcacac

SEQ ID NO: 3970975 - DNA, 25 bp, Homo sapien
tggaagtttagttcgcaggcctcta

SEQ ID NO: 3970976 - DNA, 25 bp, Homo sapien
cctagtctgaattacttgaatgggc

SEQ ID NO: 3970977 - DNA, 25 bp, Homo sapien
gaccgcccaaactccagccaacagg

SEQ ID NO: 3970978 - DNA, 25 bp, Homo sapien
cactctgttgcacgaccacagaccg

SEQ ID NO: 3970979 - DNA, 25 bp, Homo sapien
gttgcacgaccacagaccgcccaaa

SEQ ID NO: 3970980 - DNA, 25 bp, Homo sapien
acagaccgcccaaactccagccaac

SEQ ID NO: 3970981 - DNA, 25 bp, Homo sapien
tcccacgatgggctgctttgatgtg

SEQ ID NO: 3970982 - DNA, 25 bp, Homo sapien
ggacgctccctacaaagccttcagg

SEQ ID NO: 3970983 - DNA, 25 bp, Homo sapien
tgttgaccagcactcccggcggcag

SEQ ID NO: 3970984 - DNA, 25 bp, Homo sapien
tttgtaatgtagatttcccatctgt

SEQ ID NO: 3970985 - DNA, 25 bp, Homo sapien
tgctgcttttggtgtaaagccggag

SEQ ID NO: 3970986 - DNA, 25 bp, Homo sapien
gaggaagtcatccaactctgtcagc

SEQ ID NO: 3970987 - DNA, 25 bp, Homo sapien
ttttggtgtaaagccggaggagctc

SEQ ID NO: 3970988 - DNA, 25 bp, Homo sapien
ggttctcctggtcaagaatcttgag

SEQ ID NO: 3970989 - DNA, 25 bp, Homo sapien
ctgggcagaagatgggattctcagc

SEQ ID NO: 3970990 - DNA, 25 bp, Homo sapien
gaggaagggtttggtgtgaggtctg

SEQ ID NO: 3970991 - DNA, 25 bp, Homo sapien
aggtctggcagcgtatggggggact

SEQ ID NO: 3970992 - DNA, 25 bp, Homo sapien
tgggcagaagatgggattctcagct

SEQ ID NO: 3970993 - DNA, 25 bp, Homo sapien
tggagatgaacagcctccgctgaag

SEQ ID NO: 3970994 - DNA, 25 bp, Homo sapien
gagatgaacagcctccgctgaagtc

SEQ ID NO: 3970995 - DNA, 25 bp, Homo sapien
gctgaagtcccagccctaccaggtg

SEQ ID NO: 3970996 - DNA, 25 bp, Homo sapien
cttggagatgaacagcctccgctga

SEQ ID NO: 3970997 - DNA, 25 bp, Homo sapien
agcctcccccgtggtcactgtcata

SEQ ID NO: 3970998 - DNA, 25 bp, Homo sapien
ccggacacagcacccctctttcctt

SEQ ID NO: 3970999 - DNA, 25 bp, Homo sapien
ccgtggtcactgtcatactccacag

SEQ ID NO: 3971000 - DNA, 25 bp, Homo sapien
tccaaagccctgcagactgaagcag

SEQ ID NO: 3971001 - DNA, 25 bp, Homo sapien
tcaccacaccctcatccaaggcaat

SEQ ID NO: 3971002 - DNA, 25 bp, Homo sapien
tcatccaaggcaatggtgctgctgg

SEQ ID NO: 3971003 - DNA, 25 bp, Homo sapien
ccaaggcaatggtgctgctgggcct

SEQ ID NO: 3971004 - DNA, 25 bp, Homo sapien
gccaagagccgcactgccagcatca

SEQ ID NO: 3971005 - DNA, 25 bp, Homo sapien
tttcatttcggtctcttcctcgtcc

SEQ ID NO: 3971006 - DNA, 25 bp, Homo sapien
cacactttcatttcggtctcttcct

SEQ ID NO: 3971007 - DNA, 25 bp, Homo sapien
tcatttcggtctcttcctcgtcctc

SEQ ID NO: 3971008 - DNA, 25 bp, Homo sapien
actttcatttcggtctcttcctcgt

SEQ ID NO: 3971009 - DNA, 25 bp, Homo sapien
ctaccgggggctgagctgatttacc

SEQ ID NO: 3971010 - DNA, 25 bp, Homo sapien
ctgtggcccctgcactgagcaagat

SEQ ID NO: 3971011 - DNA, 25 bp, Homo sapien
tggcccctgcactgagcaagatcct

SEQ ID NO: 3971012 - DNA, 25 bp, Homo sapien
tcctccactaccgggggctgagctg

SEQ ID NO: 3971013 - DNA, 25 bp, Homo sapien
taacagaagtaagtgtgttcctaag

SEQ ID NO: 3971014 - DNA, 25 bp, Homo sapien
gatgctcatcacgtacttgtaacca

SEQ ID NO: 3971015 - DNA, 25 bp, Homo sapien
gactacatacagcatgggccaccat

SEQ ID NO: 3971016 - DNA, 25 bp, Homo sapien
tcagtctttcaagtaagctaggact

SEQ ID NO: 3971017 - DNA, 25 bp, Homo sapien
tggtgccacccctacgataggctgt

SEQ ID NO: 3971018 - DNA, 25 bp, Homo sapien
tatttgccgtaaagcctcccaggca

SEQ ID NO: 3971019 - DNA, 25 bp, Homo sapien
tccttcagaatgagggtaccaatca

SEQ ID NO: 3971020 - DNA, 25 bp, Homo sapien
tcaggagtacttcccaagaaactgt

SEQ ID NO: 3971021 - DNA, 25 bp, Homo sapien
agtggattgctctgcttgcaagaac

SEQ ID NO: 3971022 - DNA, 25 bp, Homo sapien
gcaagtggattgctctgcttgcaag

SEQ ID NO: 3971023 - DNA, 25 bp, Homo sapien
caagtggattgctctgcttgcaaga

SEQ ID NO: 3971024 - DNA, 25 bp, Homo sapien
ctgcaagtggattgctctgcttgca

SEQ ID NO: 3971025 - DNA, 25 bp, Homo sapien
cttatccacggaattctcaagacag

SEQ ID NO: 3971026 - DNA, 25 bp, Homo sapien
tttccgcttcaatgctaagcatgtt

SEQ ID NO: 3971027 - DNA, 25 bp, Homo sapien
gacagcggcttacaattcttttccg

SEQ ID NO: 3971028 - DNA, 25 bp, Homo sapien
ggaattctcaagacagcggcttaca

SEQ ID NO: 3971029 - DNA, 25 bp, Homo sapien
caagaggaggagacatcccataagg

SEQ ID NO: 3971030 - DNA, 25 bp, Homo sapien
aaggcagtgcgtgagaggcaccatc

SEQ ID NO: 3971031 - DNA, 25 bp, Homo sapien
gacaactgcagagggttttacatat

SEQ ID NO: 3971032 - DNA, 25 bp, Homo sapien
caaaggatgcaacaacatggtctgc

SEQ ID NO: 3971033 - DNA, 25 bp, Homo sapien
catttagggccgctgtgagcgtaga

SEQ ID NO: 3971034 - DNA, 25 bp, Homo sapien
cgctgtgagcgtagatggaggacat

SEQ ID NO: 3971035 - DNA, 25 bp, Homo sapien
cacttgtccaaagcctccatttagg

SEQ ID NO: 3971036 - DNA, 25 bp, Homo sapien
tggaggacattcatcactgggaaca

SEQ ID NO: 3971037 - DNA, 25 bp, Homo sapien
cagcaaatgagagacagctgttggg

SEQ ID NO: 3971038 - DNA, 25 bp, Homo sapien
atgagagacagctgttgggcttgaa

SEQ ID NO: 3971039 - DNA, 25 bp, Homo sapien
tgaatggcatgtggctgaacgttgc

SEQ ID NO: 3971040 - DNA, 25 bp, Homo sapien
cagctgttgggcttgaatggcatgt

SEQ ID NO: 3971041 - DNA, 25 bp, Homo sapien
aaagcagatgcccacctgtgtgcca

SEQ ID NO: 3971042 - DNA, 25 bp, Homo sapien
cacactcagtggggacttccaaagg

SEQ ID NO: 3971043 - DNA, 25 bp, Homo sapien
gaacaaagcagatgcccacctgtgt

SEQ ID NO: 3971044 - DNA, 25 bp, Homo sapien
agcagatgcccacctgtgtgccaga

SEQ ID NO: 3971045 - DNA, 25 bp, Homo sapien
cagggactcgaagcactgactgagc

SEQ ID NO: 3971046 - DNA, 25 bp, Homo sapien
tgaaggtgggtgtgatcgggaaggt

SEQ ID NO: 3971047 - DNA, 25 bp, Homo sapien
gccagaggtgatcaaccagggctgg

SEQ ID NO: 3971048 - DNA, 25 bp, Homo sapien
ccccatatgaagtataagcagcagg

SEQ ID NO: 3971049 - DNA, 25 bp, Homo sapien
taggacttctgacaccttcaacgga

SEQ ID NO: 3971050 - DNA, 25 bp, Homo sapien
catggagaaaatgcctatggtagga

SEQ ID NO: 3971051 - DNA, 25 bp, Homo sapien
gctgtgagacaggtaagttaaggtc

SEQ ID NO: 3971052 - DNA, 25 bp, Homo sapien
caggccctcggtaacctcatggaga

SEQ ID NO: 3971053 - DNA, 25 bp, Homo sapien
tgagggaaatgatggaatatatttt

SEQ ID NO: 3971054 - DNA, 25 bp, Homo sapien
atgagggaaatgatggaatatattt

SEQ ID NO: 3971055 - DNA, 25 bp, Homo sapien
actcttgattgtgatgccctgctta

SEQ ID NO: 3971056 - DNA, 25 bp, Homo sapien
gcttaatatcaacaaggcagcagca

SEQ ID NO: 3971057 - DNA, 25 bp, Homo sapien
ttttaataaccactcttgattgtga

SEQ ID NO: 3971058 - DNA, 25 bp, Homo sapien
gatgccctgcttaatatcaacaagg

SEQ ID NO: 3971059 - DNA, 25 bp, Homo sapien
ggttccttaggcccagcaggccctc

SEQ ID NO: 3971060 - DNA, 25 bp, Homo sapien
ctgcatgaaagctccctcgcaccat

SEQ ID NO: 3971061 - DNA, 25 bp, Homo sapien
cactgcatgaaagctccctcgcacc

SEQ ID NO: 3971062 - DNA, 25 bp, Homo sapien
actgcatgaaagctccctcgcacca

SEQ ID NO: 3971063 - DNA, 25 bp, Homo sapien
tcactgcatgaaagctccctcgcac

SEQ ID NO: 3971064 - DNA, 25 bp, Homo sapien
tataccacacgtgagattagtgctg

SEQ ID NO: 3971065 - DNA, 25 bp, Homo sapien
cactgggcccaaccaatttgtgttt

SEQ ID NO: 3971066 - DNA, 25 bp, Homo sapien
ccacggccatgagggttgtacaaga

SEQ ID NO: 3971067 - DNA, 25 bp, Homo sapien
tagacttccatcaacagacacaatg

SEQ ID NO: 3971068 - DNA, 25 bp, Homo sapien
gaaatctatacgcacagacacatgg

SEQ ID NO: 3971069 - DNA, 25 bp, Homo sapien
tccactccaatagaacaaggtcctt

SEQ ID NO: 3971070 - DNA, 25 bp, Homo sapien
tatttgctgcaagctatgtgaccac

SEQ ID NO: 3971071 - DNA, 25 bp, Homo sapien
gcagccaagcctgaaagcatagagg

SEQ ID NO: 3971072 - DNA, 25 bp, Homo sapien
gaggtaactaagtgccccaaagcca

SEQ ID NO: 3971073 - DNA, 25 bp, Homo sapien
caagaaacgaggctgacactgacct

SEQ ID NO: 3971074 - DNA, 25 bp, Homo sapien
taggagcaccccgtatcctctgaac

SEQ ID NO: 3971075 - DNA, 25 bp, Homo sapien
gctgctggtttgctcttacgctcaa

SEQ ID NO: 3971076 - DNA, 25 bp, Homo sapien
tgcagcaggccatgagaagtgacac

SEQ ID NO: 3971077 - DNA, 25 bp, Homo sapien
ctctggacctgaggattgtggaaga

SEQ ID NO: 3971078 - DNA, 25 bp, Homo sapien
aaagccccagggttagcaaatagct

SEQ ID NO: 3971079 - DNA, 25 bp, Homo sapien
gaagtgacaccctttagggcttgag

SEQ ID NO: 3971080 - DNA, 25 bp, Homo sapien
ctccaagggtaggactgtacattca

SEQ ID NO: 3971081 - DNA, 25 bp, Homo sapien
tccaagggtaggactgtacattcac

SEQ ID NO: 3971082 - DNA, 25 bp, Homo sapien
tcttcctggtacacagtggttgctg

SEQ ID NO: 3971083 - DNA, 25 bp, Homo sapien
ccaggactgtatctgcctttgaagt

SEQ ID NO: 3971084 - DNA, 25 bp, Homo sapien
tctctgagctaacagctggctagcc

SEQ ID NO: 3971085 - DNA, 25 bp, Homo sapien
ctggggctgagcttccgtacaagct

SEQ ID NO: 3971086 - DNA, 25 bp, Homo sapien
gtgtttttgcatcagtccaatgcaa

SEQ ID NO: 3971087 - DNA, 25 bp, Homo sapien
ttttgcatcagtccaatgcaacgcg

SEQ ID NO: 3971088 - DNA, 25 bp, Homo sapien
atcagtccaatgcaacgcgtccagg

SEQ ID NO: 3971089 - DNA, 25 bp, Homo sapien
cttctccccgctcaatgcagtttgt

SEQ ID NO: 3971090 - DNA, 25 bp, Homo sapien
acgcagaaacctgccggatccttct

SEQ ID NO: 3971091 - DNA, 25 bp, Homo sapien
ttctctgtaccaccagacagcaaca

SEQ ID NO: 3971092 - DNA, 25 bp, Homo sapien
aacctgccggatccttctctgtacc

SEQ ID NO: 3971093 - DNA, 25 bp, Homo sapien
gatccttctctgtaccaccagacag

SEQ ID NO: 3971094 - DNA, 25 bp, Homo sapien
tcggcaaagacccttcctgaatata

SEQ ID NO: 3971095 - DNA, 25 bp, Homo sapien
gacttggatcttttgccttcaccag

SEQ ID NO: 3971096 - DNA, 25 bp, Homo sapien
ccaggctacccagatgagaaaaagc

SEQ ID NO: 3971097 - DNA, 25 bp, Homo sapien
gaatatatgaagctctgtctgggac

SEQ ID NO: 3971098 - DNA, 25 bp, Homo sapien
cggagaccggtccagcaaaagagaa

SEQ ID NO: 3971099 - DNA, 25 bp, Homo sapien
ggtcccaacaggtccctttatgtca

SEQ ID NO: 3971100 - DNA, 25 bp, Homo sapien
catttcctcccgcaggtttggcgga

SEQ ID NO: 3971101 - DNA, 25 bp, Homo sapien
tatgtcagtttcagggatcagagcc

SEQ ID NO: 3971102 - DNA, 25 bp, Homo sapien
cctcttaggcccaggtccgggctgg

SEQ ID NO: 3971103 - DNA, 25 bp, Homo sapien
gggctctgcttatcccgagtcctgg

SEQ ID NO: 3971104 - DNA, 25 bp, Homo sapien
tcctggcaagacgagtcctagccct

SEQ ID NO: 3971105 - DNA, 25 bp, Homo sapien
ttatcccgagtcctggcaagacgag

SEQ ID NO: 3971106 - DNA, 25 bp, Homo sapien
aagggagtgggtgtgcgccgcgcga

SEQ ID NO: 3971107 - DNA, 25 bp, Homo sapien
ctgggcgaaagggagtgggtgtgcg

SEQ ID NO: 3971108 - DNA, 25 bp, Homo sapien
gcgaaagggagtgggtgtgcgccgc

SEQ ID NO: 3971109 - DNA, 25 bp, Homo sapien
gccgcgcgaggaacccgcgccctca

SEQ ID NO: 3971110 - DNA, 25 bp, Homo sapien
tggcccctccccgtgaggtcacgct

SEQ ID NO: 3971111 - DNA, 25 bp, Homo sapien
gggccacggagtgcgctcctcgcgg

SEQ ID NO: 3971112 - DNA, 25 bp, Homo sapien
gctgctctcccggcgctcggctcag

SEQ ID NO: 3971113 - DNA, 25 bp, Homo sapien
ctccccgtgaggtcacgctcgcggc

SEQ ID NO: 3971114 - DNA, 25 bp, Homo sapien
gagaactccggcccgccgaggctga

SEQ ID NO: 3971115 - DNA, 25 bp, Homo sapien
ccgccgaggctgacagtcggctctt

SEQ ID NO: 3971116 - DNA, 25 bp, Homo sapien
tcggctcttgagtcggtgcgcgccc

SEQ ID NO: 3971117 - DNA, 25 bp, Homo sapien
gctgacagtcggctcttgagtcggt

SEQ ID NO: 3971118 - DNA, 25 bp, Homo sapien
acaagtcagggagtgccgtttccgg

SEQ ID NO: 3971119 - DNA, 25 bp, Homo sapien
ggccaacgccacaagtcagggagtg

SEQ ID NO: 3971120 - DNA, 25 bp, Homo sapien
cagtaaacctgaccgccttggaggg

SEQ ID NO: 3971121 - DNA, 25 bp, Homo sapien
gtggcgccggttccataaggaagct

SEQ ID NO: 3971122 - DNA, 25 bp, Homo sapien
acccaggactgcagatgggtgccac

SEQ ID NO: 3971123 - DNA, 25 bp, Homo sapien
ctgagcttagtatagacatccaatc

SEQ ID NO: 3971124 - DNA, 25 bp, Homo sapien
aatttccgatctgggctagtttgcc

SEQ ID NO: 3971125 - DNA, 25 bp, Homo sapien
gttttgacttggtcaatttccgatc

SEQ ID NO: 3971126 - DNA, 25 bp, Homo sapien
caaaggcagtgtgagattcgctgac

SEQ ID NO: 3971127 - DNA, 25 bp, Homo sapien
tctagcaactgaagtgaggcacggg

SEQ ID NO: 3971128 - DNA, 25 bp, Homo sapien
gaggcacgggtcaacttccattgga

SEQ ID NO: 3971129 - DNA, 25 bp, Homo sapien
cctttgataaagctgcctgggaggg

SEQ ID NO: 3971130 - DNA, 25 bp, Homo sapien
tattcacgaagttgtgagtatgaca

SEQ ID NO: 3971131 - DNA, 25 bp, Homo sapien
ctttattcacgaagttgtgagtatg

SEQ ID NO: 3971132 - DNA, 25 bp, Homo sapien
cacaactttattcacgaagttgtga

SEQ ID NO: 3971133 - DNA, 25 bp, Homo sapien
ttcacgaagttgtgagtatgacagt

SEQ ID NO: 3971134 - DNA, 25 bp, Homo sapien
tttcacagggaacacgacacagctt

SEQ ID NO: 3971135 - DNA, 25 bp, Homo sapien
catatatgatcagtaagcagctcac

SEQ ID NO: 3971136 - DNA, 25 bp, Homo sapien
cagagagcttcaatgcggagtcatc

SEQ ID NO: 3971137 - DNA, 25 bp, Homo sapien
caagcatgtggcacttagcgcgcca

SEQ ID NO: 3971138 - DNA, 25 bp, Homo sapien
ttttgaggacaagcatgctgagccc

SEQ ID NO: 3971139 - DNA, 25 bp, Homo sapien
gcagttagcaggaaccaggttgccc

SEQ ID NO: 3971140 - DNA, 25 bp, Homo sapien
cacaggagggttgatgagacagtct

SEQ ID NO: 3971141 - DNA, 25 bp, Homo sapien
cattgccagctagacgtctccgagt

SEQ ID NO: 3971142 - DNA, 25 bp, Homo sapien
tcccggtgaacagtagagaacaagg

SEQ ID NO: 3971143 - DNA, 25 bp, Homo sapien
caaatgacagcggtgagccacgtgt

SEQ ID NO: 3971144 - DNA, 25 bp, Homo sapien
caagtgttactgttggctggcccga

SEQ ID NO: 3971145 - DNA, 25 bp, Homo sapien
gcaaactgcagtgtggcttccaacc

SEQ ID NO: 3971146 - DNA, 25 bp, Homo sapien
tttttcttcatgtcgttgcgtctcc

SEQ ID NO: 3971147 - DNA, 25 bp, Homo sapien
ggtaacctgtcaaactcctgtatgg

SEQ ID NO: 3971148 - DNA, 25 bp, Homo sapien
aaagaggtaacctgtcaaactcctg

SEQ ID NO: 3971149 - DNA, 25 bp, Homo sapien
tgtcgttgcgtctccaaagaggtaa

SEQ ID NO: 3971150 - DNA, 25 bp, Homo sapien
catagggatctgcagttgggactgg

SEQ ID NO: 3971151 - DNA, 25 bp, Homo sapien
tagggatctgcagttgggactggat

SEQ ID NO: 3971152 - DNA, 25 bp, Homo sapien
gttgggggagtgcatagggatctgc

SEQ ID NO: 3971153 - DNA, 25 bp, Homo sapien
ggatctgcagttgggactggatttt

SEQ ID NO: 3971154 - DNA, 25 bp, Homo sapien
tgaggattttgtttcgccctctgtt

SEQ ID NO: 3971155 - DNA, 25 bp, Homo sapien
tcaccatgagcatttcatatggaaa

SEQ ID NO: 3971156 - DNA, 25 bp, Homo sapien
ttttgtttcgccctctgttggtcac

SEQ ID NO: 3971157 - DNA, 25 bp, Homo sapien
gccctctgttggtcaccatgagcat

SEQ ID NO: 3971158 - DNA, 25 bp, Homo sapien
agagcttccaagagactgtcatgac

SEQ ID NO: 3971159 - DNA, 25 bp, Homo sapien
tctgcaaggccagtggaagctccag

SEQ ID NO: 3971160 - DNA, 25 bp, Homo sapien
taggcacatgtcgtcatgccaagca

SEQ ID NO: 3971161 - DNA, 25 bp, Homo sapien
gctagtactcccaagatagagcttc

SEQ ID NO: 3971162 - DNA, 25 bp, Homo sapien
gggcatagacactcctcggtccatt

SEQ ID NO: 3971163 - DNA, 25 bp, Homo sapien
gacactcctcggtccattctcattg

SEQ ID NO: 3971164 - DNA, 25 bp, Homo sapien
atagacactcctcggtccattctca

SEQ ID NO: 3971165 - DNA, 25 bp, Homo sapien
gcatagacactcctcggtccattct

SEQ ID NO: 3971166 - DNA, 25 bp, Homo sapien
agttccaggtgaggcatgaaatagt

SEQ ID NO: 3971167 - DNA, 25 bp, Homo sapien
ggcatgtctgctcttcacggctata

SEQ ID NO: 3971168 - DNA, 25 bp, Homo sapien
gttcatgcagtgtccccaaggcctg

SEQ ID NO: 3971169 - DNA, 25 bp, Homo sapien
tatatgagcagacccttgatgctgg

SEQ ID NO: 3971170 - DNA, 25 bp, Homo sapien
tcttttcatttgagaacgcgcagga

SEQ ID NO: 3971171 - DNA, 25 bp, Homo sapien
tatcggtgtggccaattcaagaaag

SEQ ID NO: 3971172 - DNA, 25 bp, Homo sapien
aacatggctgttctatcggtgtggc

SEQ ID NO: 3971173 - DNA, 25 bp, Homo sapien
gactagagagatcaaccacaacaag

SEQ ID NO: 3971174 - DNA, 25 bp, Homo sapien
aacagaaactgttgccttggagcca

SEQ ID NO: 3971175 - DNA, 25 bp, Homo sapien
gaagacgtggccatgctcagcctgg

SEQ ID NO: 3971176 - DNA, 25 bp, Homo sapien
agacgtggccatgctcagcctggcc

SEQ ID NO: 3971177 - DNA, 25 bp, Homo sapien
aagacgtggccatgctcagcctggc

SEQ ID NO: 3971178 - DNA, 25 bp, Homo sapien
atagctgttatactgagcgaagtcg

SEQ ID NO: 3971179 - DNA, 25 bp, Homo sapien
gctgttatactgagcgaagtcggta

SEQ ID NO: 3971180 - DNA, 25 bp, Homo sapien
tactgagcgaagtcggtagaaacag

SEQ ID NO: 3971181 - DNA, 25 bp, Homo sapien
gttatactgagcgaagtcggtagaa

SEQ ID NO: 3971182 - DNA, 25 bp, Homo sapien
cagttttagatgatggaatatgtga

SEQ ID NO: 3971183 - DNA, 25 bp, Homo sapien
tgcagttttagatgatggaatatgt

SEQ ID NO: 3971184 - DNA, 25 bp, Homo sapien
gcagttttagatgatggaatatgtg

SEQ ID NO: 3971185 - DNA, 25 bp, Homo sapien
atgcagttttagatgatggaatatg

SEQ ID NO: 3971186 - DNA, 25 bp, Homo sapien
agggaaagtcaagtccacgcggttg

SEQ ID NO: 3971187 - DNA, 25 bp, Homo sapien
tcaatataaccctaataacactatg

SEQ ID NO: 3971188 - DNA, 25 bp, Homo sapien
tgtgcttcctatagctctggcatgg

SEQ ID NO: 3971189 - DNA, 25 bp, Homo sapien
catggagctaagtgttcagcatgct

SEQ ID NO: 3971190 - DNA, 25 bp, Homo sapien
agttgatgggagaatcgtagcgact

SEQ ID NO: 3971191 - DNA, 25 bp, Homo sapien
tagcgactggctaacagagatgacc

SEQ ID NO: 3971192 - DNA, 25 bp, Homo sapien
gagatgacctttcccggctctcttt

SEQ ID NO: 3971193 - DNA, 25 bp, Homo sapien
tctttcaagatcaactgtcccaggc

SEQ ID NO: 3971194 - DNA, 25 bp, Homo sapien
tctttgtagcagatcccacaagaag

SEQ ID NO: 3971195 - DNA, 25 bp, Homo sapien
ctgaatgcatgtggccccagagcct

SEQ ID NO: 3971196 - DNA, 25 bp, Homo sapien
ttctcttgctggagggcctgaatgc

SEQ ID NO: 3971197 - DNA, 25 bp, Homo sapien
gtagcagatcccacaagaagtttct

SEQ ID NO: 3971198 - DNA, 25 bp, Homo sapien
tgaagctgccgacgtctcagaagtt

SEQ ID NO: 3971199 - DNA, 25 bp, Homo sapien
cttcttgaagctgccgacgtctcag

SEQ ID NO: 3971200 - DNA, 25 bp, Homo sapien
cttcattaattgctcttcttgaagc

SEQ ID NO: 3971201 - DNA, 25 bp, Homo sapien
ccgacgtctcagaagttcctcatca

SEQ ID NO: 3971202 - DNA, 25 bp, Homo sapien
catgtttttaagcatgtcatcttga

SEQ ID NO: 3971203 - DNA, 25 bp, Homo sapien
tgacttagccgtgacagttgcatac

SEQ ID NO: 3971204 - DNA, 25 bp, Homo sapien
gcagtttgtccctttgacttagccg

SEQ ID NO: 3971205 - DNA, 25 bp, Homo sapien
catcttgagctctcctagcagtttg

SEQ ID NO: 3971206 - DNA, 25 bp, Homo sapien
tctcaatctttggtgtctcgctggg

SEQ ID NO: 3971207 - DNA, 25 bp, Homo sapien
tggaaaacttgatgatatcttctga

SEQ ID NO: 3971208 - DNA, 25 bp, Homo sapien
caggccagtggtccgtctcaatctt

SEQ ID NO: 3971209 - DNA, 25 bp, Homo sapien
cttctgaggacttgctctgggctgc

SEQ ID NO: 3971210 - DNA, 25 bp, Homo sapien
acaacaaaaggatgacttcaaacag

SEQ ID NO: 3971211 - DNA, 25 bp, Homo sapien
ttaacaacaaaaggatgacttcaaa

SEQ ID NO: 3971212 - DNA, 25 bp, Homo sapien
taacaacaaaaggatgacttcaaac

SEQ ID NO: 3971213 - DNA, 25 bp, Homo sapien
caacaaaaggatgacttcaaacagt

SEQ ID NO: 3971214 - DNA, 25 bp, Homo sapien
ttctgaaaacgcctgaagaccagct

SEQ ID NO: 3971215 - DNA, 25 bp, Homo sapien
tgtcagctgaattctaaaggcagcc

SEQ ID NO: 3971216 - DNA, 25 bp, Homo sapien
tgacgtcacagagccatttagggag

SEQ ID NO: 3971217 - DNA, 25 bp, Homo sapien
gccttgacctctgtgttagcctgta

SEQ ID NO: 3971218 - DNA, 25 bp, Homo sapien
atgggtggctttcggtaaatgttga

SEQ ID NO: 3971219 - DNA, 25 bp, Homo sapien
ggtggctttcggtaaatgttgattc

SEQ ID NO: 3971220 - DNA, 25 bp, Homo sapien
tagatgggtggctttcggtaaatgt

SEQ ID NO: 3971221 - DNA, 25 bp, Homo sapien
tttgtagatgggtggctttcggtaa

SEQ ID NO: 3971222 - DNA, 25 bp, Homo sapien
tatgggaaccagttcagcgatggga

SEQ ID NO: 3971223 - DNA, 25 bp, Homo sapien
taaaacaggaagaaacgcaagcagt

SEQ ID NO: 3971224 - DNA, 25 bp, Homo sapien
tgctattgtctagaaattgagcccc

SEQ ID NO: 3971225 - DNA, 25 bp, Homo sapien
taaagatgtgattaactcatgagcc

SEQ ID NO: 3971226 - DNA, 25 bp, Homo sapien
ttagtcaatgacagcaaaccacaga

SEQ ID NO: 3971227 - DNA, 25 bp, Homo sapien
catgagagatgagacaagacgaggt

SEQ ID NO: 3971228 - DNA, 25 bp, Homo sapien
taggtcagatcctgcaatttagggt

SEQ ID NO: 3971229 - DNA, 25 bp, Homo sapien
tctgttatgcgctgcagaaagacca

SEQ ID NO: 3971230 - DNA, 25 bp, Homo sapien
tgagcgtaagttggagttagagggc

SEQ ID NO: 3971231 - DNA, 25 bp, Homo sapien
cgtaagttggagttagagggcggct

SEQ ID NO: 3971232 - DNA, 25 bp, Homo sapien
atgtttaggggcctgagcgtaagtt

SEQ ID NO: 3971233 - DNA, 25 bp, Homo sapien
gggcctgagcgtaagttggagttag

SEQ ID NO: 3971234 - DNA, 25 bp, Homo sapien
gttccggccgctggacggctcattg

SEQ ID NO: 3971235 - DNA, 25 bp, Homo sapien
ttccggccgctggacggctcattgc

SEQ ID NO: 3971236 - DNA, 25 bp, Homo sapien
ttagaagcagctagcggtcaggtgc

SEQ ID NO: 3971237 - DNA, 25 bp, Homo sapien
caggtttagttttccgttgcagaga

SEQ ID NO: 3971238 - DNA, 25 bp, Homo sapien
taaatcccaagcgtgtaaaggagcg

SEQ ID NO: 3971239 - DNA, 25 bp, Homo sapien
ggtcaggtgcgtcattccaatggca

SEQ ID NO: 3971240 - DNA, 25 bp, Homo sapien
gtgtggaagggtgcagactggagga

SEQ ID NO: 3971241 - DNA, 25 bp, Homo sapien
tggaagggtgcagactggaggagca

SEQ ID NO: 3971242 - DNA, 25 bp, Homo sapien
agggtgcagactggaggagcaacag

SEQ ID NO: 3971243 - DNA, 25 bp, Homo sapien
acagctggaatgtcatgagaaagga

SEQ ID NO: 3971244 - DNA, 25 bp, Homo sapien
tcatatgaacaaactataggcacac

SEQ ID NO: 3971245 - DNA, 25 bp, Homo sapien
gcagtgtgcccaaagcagccaatga

SEQ ID NO: 3971246 - DNA, 25 bp, Homo sapien
taaagcaccatttaggaacataggg

SEQ ID NO: 3971247 - DNA, 25 bp, Homo sapien
tttaaatccagaacacctgacggtg

SEQ ID NO: 3971248 - DNA, 25 bp, Homo sapien
tctctaaagtataatcttgacattt

SEQ ID NO: 3971249 - DNA, 25 bp, Homo sapien
taatctgtcggctgagcatgatagc

SEQ ID NO: 3971250 - DNA, 25 bp, Homo sapien
tttaaaataatctgtcggctgagca

SEQ ID NO: 3971251 - DNA, 25 bp, Homo sapien
tgtcggctgagcatgatagctcacg

SEQ ID NO: 3971252 - DNA, 25 bp, Homo sapien
ggttcaaatcaagttcgcaccattc

SEQ ID NO: 3971253 - DNA, 25 bp, Homo sapien
tcgcaccattctgggaactcctact

SEQ ID NO: 3971254 - DNA, 25 bp, Homo sapien
gaagcattgccgacaatgatgaaaa

SEQ ID NO: 3971255 - DNA, 25 bp, Homo sapien
ctgaggacggctgcagaagcattgc

SEQ ID NO: 3971256 - DNA, 25 bp, Homo sapien
ggtatagtcatgacacacgcaggca

SEQ ID NO: 3971257 - DNA, 25 bp, Homo sapien
taaatctccactatgcagggtgctg

SEQ ID NO: 3971258 - DNA, 25 bp, Homo sapien
tcccaatgagagatgctatgcccgt

SEQ ID NO: 3971259 - DNA, 25 bp, Homo sapien
aaagctcggcactaactcttggaga

SEQ ID NO: 3971260 - DNA, 25 bp, Homo sapien
gctgctggtgcgcaggtacgacaac

SEQ ID NO: 3971261 - DNA, 25 bp, Homo sapien
tgctggtgcgcaggtacgacaacct

SEQ ID NO: 3971262 - DNA, 25 bp, Homo sapien
ctggtgcgcaggtacgacaacctct

SEQ ID NO: 3971263 - DNA, 25 bp, Homo sapien
ggtgcgcaggtacgacaacctctgc

SEQ ID NO: 3971264 - DNA, 25 bp, Homo sapien
aggagtcaggggcagggcacggtgg

SEQ ID NO: 3971265 - DNA, 25 bp, Homo sapien
gtcaggggcagggcacggtggaaac

SEQ ID NO: 3971266 - DNA, 25 bp, Homo sapien
ctgtgcagcaaggagtcaggggcag

SEQ ID NO: 3971267 - DNA, 25 bp, Homo sapien
gagtcaggggcagggcacggtggaa

SEQ ID NO: 3971268 - DNA, 25 bp, Homo sapien
tgttcagccagtagcaggcacgtca

SEQ ID NO: 3971269 - DNA, 25 bp, Homo sapien
cagaaccctctgaaatgcttattaa

SEQ ID NO: 3971270 - DNA, 25 bp, Homo sapien
tgtatttatatgtaagggtcaggtt

SEQ ID NO: 3971271 - DNA, 25 bp, Homo sapien
cacccggatggtctctgttcagcca

SEQ ID NO: 3971272 - DNA, 25 bp, Homo sapien
aatcgggactcacgtcctgggcatg

SEQ ID NO: 3971273 - DNA, 25 bp, Homo sapien
gcttaaatcgggactcacgtcctgg

SEQ ID NO: 3971274 - DNA, 25 bp, Homo sapien
caaatggacaaaggcttaaatcggg

SEQ ID NO: 3971275 - DNA, 25 bp, Homo sapien
caaaggcttaaatcgggactcacgt

SEQ ID NO: 3971276 - DNA, 25 bp, Homo sapien
tgcttccagtagctcgctgtcaaaa

SEQ ID NO: 3971277 - DNA, 25 bp, Homo sapien
ttaaaagtgatcaagaacagccctg

SEQ ID NO: 3971278 - DNA, 25 bp, Homo sapien
tatatagagtgaatccaggaacagt

SEQ ID NO: 3971279 - DNA, 25 bp, Homo sapien
caggcttaggatgactgatgtttca

SEQ ID NO: 3971280 - DNA, 25 bp, Homo sapien
ggctcgtggaccgatggatcatccg

SEQ ID NO: 3971281 - DNA, 25 bp, Homo sapien
ttgatggagccctggctcgtggacc

SEQ ID NO: 3971282 - DNA, 25 bp, Homo sapien
tcatccgatcccgaacatcctggta

SEQ ID NO: 3971283 - DNA, 25 bp, Homo sapien
acgtggttggagtgtagctgtggcg

SEQ ID NO: 3971284 - DNA, 25 bp, Homo sapien
tggagtaggagacaaagtcctcgga

SEQ ID NO: 3971285 - DNA, 25 bp, Homo sapien
ctgctgatggagtaggagacaaagt

SEQ ID NO: 3971286 - DNA, 25 bp, Homo sapien
ttctgctgatggagtaggagacaaa

SEQ ID NO: 3971287 - DNA, 25 bp, Homo sapien
gagtaggagacaaagtcctcggaga

SEQ ID NO: 3971288 - DNA, 25 bp, Homo sapien
gctcataggtaataagatctggacg

SEQ ID NO: 3971289 - DNA, 25 bp, Homo sapien
tcctgtttgtcatcatagcccgaag

SEQ ID NO: 3971290 - DNA, 25 bp, Homo sapien
ccgaagtgtagaaaggctcataggt

SEQ ID NO: 3971291 - DNA, 25 bp, Homo sapien
attgccttgaccttcggaatggctg

SEQ ID NO: 3971292 - DNA, 25 bp, Homo sapien
tgtggtagaatttaggaacactcag

SEQ ID NO: 3971293 - DNA, 25 bp, Homo sapien
tagataaatgtgcaaaccttaagga

SEQ ID NO: 3971294 - DNA, 25 bp, Homo sapien
gagacggagtcttaggtgcaagaat

SEQ ID NO: 3971295 - DNA, 25 bp, Homo sapien
cagatggtccaataatcctctcaga

SEQ ID NO: 3971296 - DNA, 25 bp, Homo sapien
gcctggcctagaataaatactttcc

SEQ ID NO: 3971297 - DNA, 25 bp, Homo sapien
taaatactttccgaggatgtcctgg

SEQ ID NO: 3971298 - DNA, 25 bp, Homo sapien
gacctggtgagccaggaatactgga

SEQ ID NO: 3971299 - DNA, 25 bp, Homo sapien
caggaatactggagcctggcctaga

SEQ ID NO: 3971300 - DNA, 25 bp, Homo sapien
aaggtaaatgcaaactagttgtacg

SEQ ID NO: 3971301 - DNA, 25 bp, Homo sapien
gacttgtaagacttcggaccctggc

SEQ ID NO: 3971302 - DNA, 25 bp, Homo sapien
agttgtacgatccagttttgaaaag

SEQ ID NO: 3971303 - DNA, 25 bp, Homo sapien
tctggtttacctttgagcacacctc

SEQ ID NO: 3971304 - DNA, 25 bp, Homo sapien
gcgcacaaagctgcctcggagttct

SEQ ID NO: 3971305 - DNA, 25 bp, Homo sapien
gaacagacctaacagaagcatccat

SEQ ID NO: 3971306 - DNA, 25 bp, Homo sapien
gaggacctccctgattcaatccaga

SEQ ID NO: 3971307 - DNA, 25 bp, Homo sapien
tctactagcggcatgagaacagacc

SEQ ID NO: 3971308 - DNA, 25 bp, Homo sapien
ctgctactcgcatcttcaaacttta

SEQ ID NO: 3971309 - DNA, 25 bp, Homo sapien
caaactttagtgttgagaaatgccc

SEQ ID NO: 3971310 - DNA, 25 bp, Homo sapien
tgtcttagagccatccctctgctac

SEQ ID NO: 3971311 - DNA, 25 bp, Homo sapien
tcaaagtcaggtgaactggtcatca

SEQ ID NO: 3971312 - DNA, 25 bp, Homo sapien
tacagaacgcagcaaggtgtaccag

SEQ ID NO: 3971313 - DNA, 25 bp, Homo sapien
gaacgcagcaaggtgtaccagcata

SEQ ID NO: 3971314 - DNA, 25 bp, Homo sapien
cttcttcatgtacagaacgcagcaa

SEQ ID NO: 3971315 - DNA, 25 bp, Homo sapien
tcatgtacagaacgcagcaaggtgt

SEQ ID NO: 3971316 - DNA, 25 bp, Homo sapien
tccactttggtaattaatgcccttc

SEQ ID NO: 3971317 - DNA, 25 bp, Homo sapien
agtcccgccaggagctgacagatag

SEQ ID NO: 3971318 - DNA, 25 bp, Homo sapien
tgggcttccccagcgttctctacag

SEQ ID NO: 3971319 - DNA, 25 bp, Homo sapien
tacagctaccgcacttggactcctt

SEQ ID NO: 3971320 - DNA, 25 bp, Homo sapien
tatggctaagatatcttcaaaaggc

SEQ ID NO: 3971321 - DNA, 25 bp, Homo sapien
cacttaacttactgacatgctgtcc

SEQ ID NO: 3971322 - DNA, 25 bp, Homo sapien
cagaattttacaggtgatcgtgaca

SEQ ID NO: 3971323 - DNA, 25 bp, Homo sapien
gatgtccagggtaacaacagtgacc

SEQ ID NO: 3971324 - DNA, 25 bp, Homo sapien
catctggcaactagatcagaatgat

SEQ ID NO: 3971325 - DNA, 25 bp, Homo sapien
gacaccttatactaagtcctgttga

SEQ ID NO: 3971326 - DNA, 25 bp, Homo sapien
gatcagaatgatcttatgaacactg

SEQ ID NO: 3971327 - DNA, 25 bp, Homo sapien
tgggacaactactgatataaggtga

SEQ ID NO: 3971328 - DNA, 25 bp, Homo sapien
ttgaagttcactagacaaggtgggg

SEQ ID NO: 3971329 - DNA, 25 bp, Homo sapien
aggagggtgctgtgcgcacacacca

SEQ ID NO: 3971330 - DNA, 25 bp, Homo sapien
tacttggacgaagtgaaagctggga

SEQ ID NO: 3971331 - DNA, 25 bp, Homo sapien
tgccatcagccgttattacatgaaa

SEQ ID NO: 3971332 - DNA, 25 bp, Homo sapien
cagctgtctgatgaactgtaaagac

SEQ ID NO: 3971333 - DNA, 25 bp, Homo sapien
gactttcctgctatagattttactt

SEQ ID NO: 3971334 - DNA, 25 bp, Homo sapien
tttctgcagcacagagtactgaatg

SEQ ID NO: 3971335 - DNA, 25 bp, Homo sapien
aaaatgactttcctgctatagattt

SEQ ID NO: 3971336 - DNA, 25 bp, Homo sapien
gagctcattctcaatatagataaca

SEQ ID NO: 3971337 - DNA, 25 bp, Homo sapien
tccaagaagacaacagccagagtca

SEQ ID NO: 3971338 - DNA, 25 bp, Homo sapien
gctgctgctctgaatgaaaacatcc

SEQ ID NO: 3971339 - DNA, 25 bp, Homo sapien
aacacgggaccaaaagatagcttct

SEQ ID NO: 3971340 - DNA, 25 bp, Homo sapien
tgggtgctgagcagatacttgtgca

SEQ ID NO: 3971341 - DNA, 25 bp, Homo sapien
atgaagaacgccgaatgtttggcag

SEQ ID NO: 3971342 - DNA, 25 bp, Homo sapien
tgcagagacggagaccgtcctgtgc

SEQ ID NO: 3971343 - DNA, 25 bp, Homo sapien
aaagaaatcggatgaagaacgccga

SEQ ID NO: 3971344 - DNA, 25 bp, Homo sapien
ctgtgcgtcgaatcagacttttgga

SEQ ID NO: 3971345 - DNA, 25 bp, Homo sapien
cctcggtcttcgtagattgcttaca

SEQ ID NO: 3971346 - DNA, 25 bp, Homo sapien
gcagcttttcctcggtcttcgtaga

SEQ ID NO: 3971347 - DNA, 25 bp, Homo sapien
ttacagtcgggatgccaaacggtgg

SEQ ID NO: 3971348 - DNA, 25 bp, Homo sapien
tagattgcttacagtcgggatgcca

SEQ ID NO: 3971349 - DNA, 25 bp, Homo sapien
gaagcattcgccgtgaaggttctgc

SEQ ID NO: 3971350 - DNA, 25 bp, Homo sapien
cagagacagggttgattggcactcc

SEQ ID NO: 3971351 - DNA, 25 bp, Homo sapien
tacggaagcacaactccagaaggtt

SEQ ID NO: 3971352 - DNA, 25 bp, Homo sapien
ggcactattgttctccagaggtcag

SEQ ID NO: 3971353 - DNA, 25 bp, Homo sapien
taaaatgcttacacagatggtgctg

SEQ ID NO: 3971354 - DNA, 25 bp, Homo sapien
taccacaacggaacgagcaatagct

SEQ ID NO: 3971355 - DNA, 25 bp, Homo sapien
tgcacaggtagttgagacccagtaa

SEQ ID NO: 3971356 - DNA, 25 bp, Homo sapien
caggtacacatagtgccatgtgcaa

SEQ ID NO: 3971357 - DNA, 25 bp, Homo sapien
agatacatttcctctccttctgtga

SEQ ID NO: 3971358 - DNA, 25 bp, Homo sapien
gatacatttcctctccttctgtgaa

SEQ ID NO: 3971359 - DNA, 25 bp, Homo sapien
cttgaagatacatttcctctccttc

SEQ ID NO: 3971360 - DNA, 25 bp, Homo sapien
acatttcctctccttctgtgaacat

SEQ ID NO: 3971361 - DNA, 25 bp, Homo sapien
agctggggtggtaatgtttgtcacc

SEQ ID NO: 3971362 - DNA, 25 bp, Homo sapien
catcgtgcacagctggggtggtaat

SEQ ID NO: 3971363 - DNA, 25 bp, Homo sapien
tgcatctgctgcatcgtgcacagct

SEQ ID NO: 3971364 - DNA, 25 bp, Homo sapien
tggggtggtaatgtttgtcacctgc

SEQ ID NO: 3971365 - DNA, 25 bp, Homo sapien
caagatgctgaacatgtcaagacat

SEQ ID NO: 3971366 - DNA, 25 bp, Homo sapien
tgtcttgacctatgtatttccttca

SEQ ID NO: 3971367 - DNA, 25 bp, Homo sapien
caagacattcggtgagccagagtca

SEQ ID NO: 3971368 - DNA, 25 bp, Homo sapien
taaccctagcccattgtaatgccag

SEQ ID NO: 3971369 - DNA, 25 bp, Homo sapien
tgcctgagcctgagtggccagcggt

SEQ ID NO: 3971370 - DNA, 25 bp, Homo sapien
tggccccaggcacataactggcagc

SEQ ID NO: 3971371 - DNA, 25 bp, Homo sapien
ccagcggtgctgctagagagctcac

SEQ ID NO: 3971372 - DNA, 25 bp, Homo sapien
agccgtcctgcctgagcctgagtgg

SEQ ID NO: 3971373 - DNA, 25 bp, Homo sapien
gaggcttttctcctgatgcagcatc

SEQ ID NO: 3971374 - DNA, 25 bp, Homo sapien
aggcttttctcctgatgcagcatca

SEQ ID NO: 3971375 - DNA, 25 bp, Homo sapien
ggaggcttttctcctgatgcagcat

SEQ ID NO: 3971376 - DNA, 25 bp, Homo sapien
ggcttttctcctgatgcagcatcat

SEQ ID NO: 3971377 - DNA, 25 bp, Homo sapien
ctgaatctgatgttccctgaccagg

SEQ ID NO: 3971378 - DNA, 25 bp, Homo sapien
cccatggtatgggatgctgtgatcc

SEQ ID NO: 3971379 - DNA, 25 bp, Homo sapien
tgaattcttgcaaagcatccctgac

SEQ ID NO: 3971380 - DNA, 25 bp, Homo sapien
tacaacacagtctggagggtaacca

SEQ ID NO: 3971381 - DNA, 25 bp, Homo sapien
tctcatcaacaaacaatctcaggtg

SEQ ID NO: 3971382 - DNA, 25 bp, Homo sapien
ccagctgttcggagcatcattaagt

SEQ ID NO: 3971383 - DNA, 25 bp, Homo sapien
atctcaggtggacagatgctctctc

SEQ ID NO: 3971384 - DNA, 25 bp, Homo sapien
gtaaagctgcttggtaccacttcct

SEQ ID NO: 3971385 - DNA, 25 bp, Homo sapien
cagatactttctcacctaaagttac

SEQ ID NO: 3971386 - DNA, 25 bp, Homo sapien
agcaaatagtatgagcaggcactgt

SEQ ID NO: 3971387 - DNA, 25 bp, Homo sapien
gcaaatagtatgagcaggcactgtg

SEQ ID NO: 3971388 - DNA, 25 bp, Homo sapien
gttcatcaatgactgagcaaatagt

SEQ ID NO: 3971389 - DNA, 25 bp, Homo sapien
catcaatgactgagcaaatagtatg

SEQ ID NO: 3971390 - DNA, 25 bp, Homo sapien
gaagctcggctaaggcaacgtgcat

SEQ ID NO: 3971391 - DNA, 25 bp, Homo sapien
caagaggctttgtagatgccagacc

SEQ ID NO: 3971392 - DNA, 25 bp, Homo sapien
tcaagttcagaacacggccaagagg

SEQ ID NO: 3971393 - DNA, 25 bp, Homo sapien
caacgtgcatccctctagagacgca

SEQ ID NO: 3971394 - DNA, 25 bp, Homo sapien
cagcaaccacaatgggccagtccat

SEQ ID NO: 3971395 - DNA, 25 bp, Homo sapien
tagttcaacacaccagcaaccacaa

SEQ ID NO: 3971396 - DNA, 25 bp, Homo sapien
acaccagcaaccacaatgggccagt

SEQ ID NO: 3971397 - DNA, 25 bp, Homo sapien
agttcaacacaccagcaaccacaat

SEQ ID NO: 3971398 - DNA, 25 bp, Homo sapien
tccaaaattccaaactctatccctg

SEQ ID NO: 3971399 - DNA, 25 bp, Homo sapien
tgttttgctatggagccattaacat

SEQ ID NO: 3971400 - DNA, 25 bp, Homo sapien
cagctttgtgttttgctatggagcc

SEQ ID NO: 3971401 - DNA, 25 bp, Homo sapien
tgctatggagccattaacatagttc

SEQ ID NO: 3971402 - DNA, 25 bp, Homo sapien
cgtggaattcattgaagatcacctc

SEQ ID NO: 3971403 - DNA, 25 bp, Homo sapien
aagatcacctctgtcgggtaggtgg

SEQ ID NO: 3971404 - DNA, 25 bp, Homo sapien
aggtcatgaaaattcccgtggaatt

SEQ ID NO: 3971405 - DNA, 25 bp, Homo sapien
gaaaattcccgtggaattcattgaa

SEQ ID NO: 3971406 - DNA, 25 bp, Homo sapien
cagtcctccacaagagatcaaactc

SEQ ID NO: 3971407 - DNA, 25 bp, Homo sapien
tatttcagtcctccacaagagatca

SEQ ID NO: 3971408 - DNA, 25 bp, Homo sapien
ttatttcagtcctccacaagagatc

SEQ ID NO: 3971409 - DNA, 25 bp, Homo sapien
tttcagtcctccacaagagatcaaa

SEQ ID NO: 3971410 - DNA, 25 bp, Homo sapien
ccccaatcagggcacttctgagaag

SEQ ID NO: 3971411 - DNA, 25 bp, Homo sapien
caggccccaatcagggcacttctga

SEQ ID NO: 3971412 - DNA, 25 bp, Homo sapien
caatcagggcacttctgagaagagc

SEQ ID NO: 3971413 - DNA, 25 bp, Homo sapien
ggccccaatcagggcacttctgaga

SEQ ID NO: 3971414 - DNA, 25 bp, Homo sapien
gatgagggatggactcagggccagg

SEQ ID NO: 3971415 - DNA, 25 bp, Homo sapien
gggatgagggatggactcagggcca

SEQ ID NO: 3971416 - DNA, 25 bp, Homo sapien
atgagggatggactcagggccagga

SEQ ID NO: 3971417 - DNA, 25 bp, Homo sapien
gagggatgagggatggactcagggc

SEQ ID NO: 3971418 - DNA, 25 bp, Homo sapien
ccaacagccttcctggggatatgct

SEQ ID NO: 3971419 - DNA, 25 bp, Homo sapien
gatgggaccgctcggactccaagct

SEQ ID NO: 3971420 - DNA, 25 bp, Homo sapien
tccaagctccccatcaggtgggtcc

SEQ ID NO: 3971421 - DNA, 25 bp, Homo sapien
tgtgcatcacactctgagcgctgtg

SEQ ID NO: 3971422 - DNA, 25 bp, Homo sapien
tgggccatactctccacgctggcag

SEQ ID NO: 3971423 - DNA, 25 bp, Homo sapien
ccatactctccacgctggcaggtgg

SEQ ID NO: 3971424 - DNA, 25 bp, Homo sapien
gtgggccacagatgaggcagtctta

SEQ ID NO: 3971425 - DNA, 25 bp, Homo sapien
acagatgaggcagtcttacttcttc

SEQ ID NO: 3971426 - DNA, 25 bp, Homo sapien
ttctgtgtctcaccccagaggaact

SEQ ID NO: 3971427 - DNA, 25 bp, Homo sapien
tagggtagcgactccttctgaactc

SEQ ID NO: 3971428 - DNA, 25 bp, Homo sapien
aattctgtgtctcaccccagaggaa

SEQ ID NO: 3971429 - DNA, 25 bp, Homo sapien
ggagaagtagggtagcgactccttc

SEQ ID NO: 3971430 - DNA, 25 bp, Homo sapien
ctggaggcggttgcacctgaacttg

SEQ ID NO: 3971431 - DNA, 25 bp, Homo sapien
ggttgcacctgaacttgacaggctt

SEQ ID NO: 3971432 - DNA, 25 bp, Homo sapien
ggcggttgcacctgaacttgacagg

SEQ ID NO: 3971433 - DNA, 25 bp, Homo sapien
gaggcggttgcacctgaacttgaca

SEQ ID NO: 3971434 - DNA, 25 bp, Homo sapien
gaagccaatgcctctacctttcccc

SEQ ID NO: 3971435 - DNA, 25 bp, Homo sapien
tgaatctgcacacgcccacagatgc

SEQ ID NO: 3971436 - DNA, 25 bp, Homo sapien
cagatgcatgcatagacatatgcac

SEQ ID NO: 3971437 - DNA, 25 bp, Homo sapien
gtttggggaagccaatgcctctacc

SEQ ID NO: 3971438 - DNA, 25 bp, Homo sapien
gtccttttcacagtacggagcacca

SEQ ID NO: 3971439 - DNA, 25 bp, Homo sapien
cttttcacagtacggagcaccatcc

SEQ ID NO: 3971440 - DNA, 25 bp, Homo sapien
aaactggtgacacgcctcacatttc

SEQ ID NO: 3971441 - DNA, 25 bp, Homo sapien
gtgataaactggtgacacgcctcac

SEQ ID NO: 3971442 - DNA, 25 bp, Homo sapien
tcagctctcaggaggcctccggagc

SEQ ID NO: 3971443 - DNA, 25 bp, Homo sapien
cgcctccttcagctcagtcaacctc

SEQ ID NO: 3971444 - DNA, 25 bp, Homo sapien
aaggggcccacatgccagagtacag

SEQ ID NO: 3971445 - DNA, 25 bp, Homo sapien
cagagtacagcctctgaacagcctg

SEQ ID NO: 3971446 - DNA, 25 bp, Homo sapien
taaagcaccccaagtgccactgctt

SEQ ID NO: 3971447 - DNA, 25 bp, Homo sapien
gcgcctgcccattcttgatatctct

SEQ ID NO: 3971448 - DNA, 25 bp, Homo sapien
ttcccgcaggacttgcatttaaagc

SEQ ID NO: 3971449 - DNA, 25 bp, Homo sapien
ttgatatctcttccgcagccggcac

SEQ ID NO: 3971450 - DNA, 25 bp, Homo sapien
gccagtggttactacacatttcctt

SEQ ID NO: 3971451 - DNA, 25 bp, Homo sapien
cagccgccagtggttactacacatt

SEQ ID NO: 3971452 - DNA, 25 bp, Homo sapien
gcagccgccagtggttactacacat

SEQ ID NO: 3971453 - DNA, 25 bp, Homo sapien
gccgccagtggttactacacatttc

SEQ ID NO: 3971454 - DNA, 25 bp, Homo sapien
ctcggaaggacacagaacggaagct

SEQ ID NO: 3971455 - DNA, 25 bp, Homo sapien
gaacggaagcttcatgaacctccgt

SEQ ID NO: 3971456 - DNA, 25 bp, Homo sapien
tctacggggacggatgtccttcacc

SEQ ID NO: 3971457 - DNA, 25 bp, Homo sapien
tcatgaacctccgtggatctacggg

SEQ ID NO: 3971458 - DNA, 25 bp, Homo sapien
ttctggtatatttcacagagcctac

SEQ ID NO: 3971459 - DNA, 25 bp, Homo sapien
agcccacgtgagaatcctgacccga

SEQ ID NO: 3971460 - DNA, 25 bp, Homo sapien
cgtgagaatcctgacccgaagtatt

SEQ ID NO: 3971461 - DNA, 25 bp, Homo sapien
tcctgacccgaagtattctggtata

SEQ ID NO: 3971462 - DNA, 25 bp, Homo sapien
caaagccatggtcttcactcaagcc

SEQ ID NO: 3971463 - DNA, 25 bp, Homo sapien
agccatggtcttcactcaagcctga

SEQ ID NO: 3971464 - DNA, 25 bp, Homo sapien
gtcttcactcaagcctgacactgtg

SEQ ID NO: 3971465 - DNA, 25 bp, Homo sapien
catggtcttcactcaagcctgacac

SEQ ID NO: 3971466 - DNA, 25 bp, Homo sapien
taaaacccatgaggaacttgccagt

SEQ ID NO: 3971467 - DNA, 25 bp, Homo sapien
gctggtgattggcattggaattatt

SEQ ID NO: 3971468 - DNA, 25 bp, Homo sapien
taggtgaatatgcagtggcatcgag

SEQ ID NO: 3971469 - DNA, 25 bp, Homo sapien
cagtggcatcgaggaaataaaaccc

SEQ ID NO: 3971470 - DNA, 25 bp, Homo sapien
gagtcagcagcgagctcttcacaca

SEQ ID NO: 3971471 - DNA, 25 bp, Homo sapien
gagctgagagtcagcagcgagctct

SEQ ID NO: 3971472 - DNA, 25 bp, Homo sapien
agcagcgagctcttcacacagcagg

SEQ ID NO: 3971473 - DNA, 25 bp, Homo sapien
acagagagctgagagtcagcagcga

SEQ ID NO: 3971474 - DNA, 25 bp, Homo sapien
tggatcagattctgctaacaagctg

SEQ ID NO: 3971475 - DNA, 25 bp, Homo sapien
ttctgctaacaagctgcctttaaca

SEQ ID NO: 3971476 - DNA, 25 bp, Homo sapien
ctgaacgtggatcagattctgctaa

SEQ ID NO: 3971477 - DNA, 25 bp, Homo sapien
gaacgtggatcagattctgctaaca

SEQ ID NO: 3971478 - DNA, 25 bp, Homo sapien
ttgctgtcttaatggccatgctgga

SEQ ID NO: 3971479 - DNA, 25 bp, Homo sapien
gtcttaatggccatgctggacacac

SEQ ID NO: 3971480 - DNA, 25 bp, Homo sapien
ctattttaagtgaaggttcttgttg

SEQ ID NO: 3971481 - DNA, 25 bp, Homo sapien
ctgtcttaatggccatgctggacac

SEQ ID NO: 3971482 - DNA, 25 bp, Homo sapien
tcggtaaccaattctcaaggtcaag

SEQ ID NO: 3971483 - DNA, 25 bp, Homo sapien
tatccacgaccaggatgtgaacagg

SEQ ID NO: 3971484 - DNA, 25 bp, Homo sapien
gctaatgacgttcgcaggatggctc

SEQ ID NO: 3971485 - DNA, 25 bp, Homo sapien
tatcagaattgagagtccgagaact

SEQ ID NO: 3971486 - DNA, 25 bp, Homo sapien
atttctcagggcctgcttggaatag

SEQ ID NO: 3971487 - DNA, 25 bp, Homo sapien
tgcaatcagggctggactcaatggc

SEQ ID NO: 3971488 - DNA, 25 bp, Homo sapien
tctcagggcctgcttggaatagggt

SEQ ID NO: 3971489 - DNA, 25 bp, Homo sapien
ctcaatggctgatctgatgagccca

SEQ ID NO: 3971490 - DNA, 25 bp, Homo sapien
ttctgaggatgtcaatatcataggg

SEQ ID NO: 3971491 - DNA, 25 bp, Homo sapien
catttctgaggatgtcaatatcata

SEQ ID NO: 3971492 - DNA, 25 bp, Homo sapien
ctgaggatgtcaatatcatagggac

SEQ ID NO: 3971493 - DNA, 25 bp, Homo sapien
ggatgtcaatatcatagggactgac

SEQ ID NO: 3971494 - DNA, 25 bp, Homo sapien
tgtactcaaagttgaggagatccat

SEQ ID NO: 3971495 - DNA, 25 bp, Homo sapien
gctggctccctatatgttcagaaaa

SEQ ID NO: 3971496 - DNA, 25 bp, Homo sapien
gggctggctccctatatgttcagaa

SEQ ID NO: 3971497 - DNA, 25 bp, Homo sapien
gttgtactcaaagttgaggagatcc

SEQ ID NO: 3971498 - DNA, 25 bp, Homo sapien
gatactgtctatggaacattgggca

SEQ ID NO: 3971499 - DNA, 25 bp, Homo sapien
caacacttggtataacagggaggct

SEQ ID NO: 3971500 - DNA, 25 bp, Homo sapien
aaatatcagggaccggaacatggca

SEQ ID NO: 3971501 - DNA, 25 bp, Homo sapien
ctgtgcctcccatgtagaaagtgca

SEQ ID NO: 3971502 - DNA, 25 bp, Homo sapien
ctggaggttaccttcccagtgacca

SEQ ID NO: 3971503 - DNA, 25 bp, Homo sapien
ttggtaatgtactttcaaagcaagc

SEQ ID NO: 3971504 - DNA, 25 bp, Homo sapien
gtgaccagaggctaactgtatctct

SEQ ID NO: 3971505 - DNA, 25 bp, Homo sapien
taatggggtgacaattcccactgga

SEQ ID NO: 3971506 - DNA, 25 bp, Homo sapien
tctcaaaaaggaaggcacctgcctg

SEQ ID NO: 3971507 - DNA, 25 bp, Homo sapien
cacacctaggctgatgctcgtcatc

SEQ ID NO: 3971508 - DNA, 25 bp, Homo sapien
ctgagctacctctggactacatagg

SEQ ID NO: 3971509 - DNA, 25 bp, Homo sapien
catgatgcctacgtcaagaatctac

SEQ ID NO: 3971510 - DNA, 25 bp, Homo sapien
tggtttctttcggactggacgacat

SEQ ID NO: 3971511 - DNA, 25 bp, Homo sapien
agagttgacaaaggcagtctctccc

SEQ ID NO: 3971512 - DNA, 25 bp, Homo sapien
catcggctgtgcacagagttgacaa

SEQ ID NO: 3971513 - DNA, 25 bp, Homo sapien
tcccattgaatgtgactcggtctcc

SEQ ID NO: 3971514 - DNA, 25 bp, Homo sapien
gcagaaagacatcgccctcaaggtt

SEQ ID NO: 3971515 - DNA, 25 bp, Homo sapien
aaagacatcgccctcaaggttattg

SEQ ID NO: 3971516 - DNA, 25 bp, Homo sapien
ggaggcagaaagacatcgccctcaa

SEQ ID NO: 3971517 - DNA, 25 bp, Homo sapien
gacatcgccctcaaggttattgcag

SEQ ID NO: 3971518 - DNA, 25 bp, Homo sapien
ctttaacagcccaaaccagcatttc

SEQ ID NO: 3971519 - DNA, 25 bp, Homo sapien
tttaacagcccaaaccagcatttct

SEQ ID NO: 3971520 - DNA, 25 bp, Homo sapien
cagatagtacaagcaaagcaattgg

SEQ ID NO: 3971521 - DNA, 25 bp, Homo sapien
acaagcaaagcaattgggatggtag

SEQ ID NO: 3971522 - DNA, 25 bp, Homo sapien
ttgcagatagtacaagcaaagcaat

SEQ ID NO: 3971523 - DNA, 25 bp, Homo sapien
tagtacaagcaaagcaattgggatg

SEQ ID NO: 3971524 - DNA, 25 bp, Homo sapien
cagccatggcagcgtgtcccgtaca

SEQ ID NO: 3971525 - DNA, 25 bp, Homo sapien
cccagagcagtcaccacttcgccct

SEQ ID NO: 3971526 - DNA, 25 bp, Homo sapien
ttcgccctccacgaactccccacag

SEQ ID NO: 3971527 - DNA, 25 bp, Homo sapien
agccatggcagcgtgtcccgtacat

SEQ ID NO: 3971528 - DNA, 25 bp, Homo sapien
gcagagatactctccgttctttatg

SEQ ID NO: 3971529 - DNA, 25 bp, Homo sapien
gatactctccgttctttatgaagaa

SEQ ID NO: 3971530 - DNA, 25 bp, Homo sapien
gagatactctccgttctttatgaag

SEQ ID NO: 3971531 - DNA, 25 bp, Homo sapien
cagagatactctccgttctttatga

SEQ ID NO: 3971532 - DNA, 25 bp, Homo sapien
ctctcctctgcccccactgttctcc

SEQ ID NO: 3971533 - DNA, 25 bp, Homo sapien
aacctctcctctgcccccactgttc

SEQ ID NO: 3971534 - DNA, 25 bp, Homo sapien
ctcctctgcccccactgttctccca

SEQ ID NO: 3971535 - DNA, 25 bp, Homo sapien
tcctctgcccccactgttctcccac

SEQ ID NO: 3971536 - DNA, 25 bp, Homo sapien
ggattggcctcattctgattgcaaa

SEQ ID NO: 3971537 - DNA, 25 bp, Homo sapien
cacgtgtggattggcctcattctga

SEQ ID NO: 3971538 - DNA, 25 bp, Homo sapien
aaattccttcagcaacaataggcag

SEQ ID NO: 3971539 - DNA, 25 bp, Homo sapien
gggaacccacgtgtggattggcctc

SEQ ID NO: 3971540 - DNA, 25 bp, Homo sapien
tagcccagagctcaaaatagctgag

SEQ ID NO: 3971541 - DNA, 25 bp, Homo sapien
agcagagactcatcaacaataatgt

SEQ ID NO: 3971542 - DNA, 25 bp, Homo sapien
gagactcatcaacaataatgtgagg

SEQ ID NO: 3971543 - DNA, 25 bp, Homo sapien
tcaaaagtaccatccactgtagccc

SEQ ID NO: 3971544 - DNA, 25 bp, Homo sapien
aagacgatgctttcatcaacaggtt

SEQ ID NO: 3971545 - DNA, 25 bp, Homo sapien
ggtaaagacgatgctttcatcaaca

SEQ ID NO: 3971546 - DNA, 25 bp, Homo sapien
cttccaaatcaatatggtaaagacg

SEQ ID NO: 3971547 - DNA, 25 bp, Homo sapien
tttgatcttgcatgtaagcccccca

SEQ ID NO: 3971548 - DNA, 25 bp, Homo sapien
tgcctacaaaattctgtccagtaac

SEQ ID NO: 3971549 - DNA, 25 bp, Homo sapien
tacaattgcctacaaaattctgtcc

SEQ ID NO: 3971550 - DNA, 25 bp, Homo sapien
attgcctacaaaattctgtccagta

SEQ ID NO: 3971551 - DNA, 25 bp, Homo sapien
caattgcctacaaaattctgtccag

SEQ ID NO: 3971552 - DNA, 25 bp, Homo sapien
ctagaccccaaccacggagatgctg

SEQ ID NO: 3971553 - DNA, 25 bp, Homo sapien
agaagctggttgaaaatgctagacc

SEQ ID NO: 3971554 - DNA, 25 bp, Homo sapien
gctggttgaaaatgctagaccccaa

SEQ ID NO: 3971555 - DNA, 25 bp, Homo sapien
ttgaaaatgctagaccccaaccacg

SEQ ID NO: 3971556 - DNA, 25 bp, Homo sapien
ggcttttcatggcagatagtgggac

SEQ ID NO: 3971557 - DNA, 25 bp, Homo sapien
tagcagaaagcctgtcactgatgct

SEQ ID NO: 3971558 - DNA, 25 bp, Homo sapien
ttagttttagttctgcaggcatagc

SEQ ID NO: 3971559 - DNA, 25 bp, Homo sapien
gaaggaaagtgagatccaccctttg

SEQ ID NO: 3971560 - DNA, 25 bp, Homo sapien
cttggtccttggtcttttctaaatg

SEQ ID NO: 3971561 - DNA, 25 bp, Homo sapien
ggcagtctccttggtccttggtctt

SEQ ID NO: 3971562 - DNA, 25 bp, Homo sapien
gattctctgggcagtctccttggtc

SEQ ID NO: 3971563 - DNA, 25 bp, Homo sapien
atttggctgaacaatcttgattctc

SEQ ID NO: 3971564 - DNA, 25 bp, Homo sapien
gaatcactggttttagcaggactcg

SEQ ID NO: 3971565 - DNA, 25 bp, Homo sapien
gccctagagtctaactgaatcccaa

SEQ ID NO: 3971566 - DNA, 25 bp, Homo sapien
ctcagtgttagtcccttcttccagg

SEQ ID NO: 3971567 - DNA, 25 bp, Homo sapien
gcaggactcgttctcgccctagagt

SEQ ID NO: 3971568 - DNA, 25 bp, Homo sapien
tggagttaaggggatgggctggacc

SEQ ID NO: 3971569 - DNA, 25 bp, Homo sapien
ggctggacccaaggcaagccccgac

SEQ ID NO: 3971570 - DNA, 25 bp, Homo sapien
aaggcaagccccgaccatggcatgc

SEQ ID NO: 3971571 - DNA, 25 bp, Homo sapien
cagtgaccggatgtggagttaaggg

SEQ ID NO: 3971572 - DNA, 25 bp, Homo sapien
tttgcaggtgaaacacttgatgtgg

SEQ ID NO: 3971573 - DNA, 25 bp, Homo sapien
gcttctctgatgggtggtgagggtc

SEQ ID NO: 3971574 - DNA, 25 bp, Homo sapien
tggtctggacccgaagcacttcacc

SEQ ID NO: 3971575 - DNA, 25 bp, Homo sapien
gtctggacccgaagcacttcaccct

SEQ ID NO: 3971576 - DNA, 25 bp, Homo sapien
aaatcaacaaaagatccaggtgagt

SEQ ID NO: 3971577 - DNA, 25 bp, Homo sapien
tcatggtatctctgtaattttggtg

SEQ ID NO: 3971578 - DNA, 25 bp, Homo sapien
gagccacagagattgattcgacagt

SEQ ID NO: 3971579 - DNA, 25 bp, Homo sapien
tgagtagagagcattcctgcaaaag

SEQ ID NO: 3971580 - DNA, 25 bp, Homo sapien
acccagtttagaggaattctcacta

SEQ ID NO: 3971581 - DNA, 25 bp, Homo sapien
aaggtaacgggattcctccactgca

SEQ ID NO: 3971582 - DNA, 25 bp, Homo sapien
ggtaacgggattcctccactgcaga

SEQ ID NO: 3971583 - DNA, 25 bp, Homo sapien
gtttagaggaattctcactactcag

SEQ ID NO: 3971584 - DNA, 25 bp, Homo sapien
caggtcctggcgcttctctgaagct

SEQ ID NO: 3971585 - DNA, 25 bp, Homo sapien
tctgtctaaatcaaacttgacccat

SEQ ID NO: 3971586 - DNA, 25 bp, Homo sapien
tgacccatacggcatagcccaggtc

SEQ ID NO: 3971587 - DNA, 25 bp, Homo sapien
tcaaacttgacccatacggcatagc

SEQ ID NO: 3971588 - DNA, 25 bp, Homo sapien
caagtggcagctacttgaagctaca

SEQ ID NO: 3971589 - DNA, 25 bp, Homo sapien
gctacatacacagttacccagtcat

SEQ ID NO: 3971590 - DNA, 25 bp, Homo sapien
tgctgtggcaagtggcagctacttg

SEQ ID NO: 3971591 - DNA, 25 bp, Homo sapien
gctacttgaagctacatacacagtt

SEQ ID NO: 3971592 - DNA, 25 bp, Homo sapien
ctgcagatacagaaattgtacttcg

SEQ ID NO: 3971593 - DNA, 25 bp, Homo sapien
tacagaaattgtacttcgaaaatct

SEQ ID NO: 3971594 - DNA, 25 bp, Homo sapien
gcagatacagaaattgtacttcgaa

SEQ ID NO: 3971595 - DNA, 25 bp, Homo sapien
aattgtacttcgaaaatcttgaggg

SEQ ID NO: 3971596 - DNA, 25 bp, Homo sapien
tgtctgcacacccactgggagatga

SEQ ID NO: 3971597 - DNA, 25 bp, Homo sapien
ccagtgtctgcacacccactgggag

SEQ ID NO: 3971598 - DNA, 25 bp, Homo sapien
agtgtctgcacacccactgggagat

SEQ ID NO: 3971599 - DNA, 25 bp, Homo sapien
ctgcacacccactgggagatgaaag

SEQ ID NO: 3971600 - DNA, 25 bp, Homo sapien
tggtagagacgtgatttgcccacta

SEQ ID NO: 3971601 - DNA, 25 bp, Homo sapien
agctccctggaagcacactgcccct

SEQ ID NO: 3971602 - DNA, 25 bp, Homo sapien
ccaggaagtggtagagacgtgattt

SEQ ID NO: 3971603 - DNA, 25 bp, Homo sapien
gatttgcccactaccaactgcagca

SEQ ID NO: 3971604 - DNA, 25 bp, Homo sapien
ttttgtcaaaacctgtcccgttgca

SEQ ID NO: 3971605 - DNA, 25 bp, Homo sapien
cttctgttaaggataaagtggcaaa

SEQ ID NO: 3971606 - DNA, 25 bp, Homo sapien
cagatgacaccaaattccggccaac

SEQ ID NO: 3971607 - DNA, 25 bp, Homo sapien
tgcaagtgaagaaacccaacgtaac

SEQ ID NO: 3971608 - DNA, 25 bp, Homo sapien
ccattgctgtatgatgtggccaaaa

SEQ ID NO: 3971609 - DNA, 25 bp, Homo sapien
gctgtatgatgtggccaaaatgcta

SEQ ID NO: 3971610 - DNA, 25 bp, Homo sapien
tatgtccattgctgtatgatgtggc

SEQ ID NO: 3971611 - DNA, 25 bp, Homo sapien
ctctccttatgtccattgctgtatg

SEQ ID NO: 3971612 - DNA, 25 bp, Homo sapien
ttcttggccactgggatctcacagg

SEQ ID NO: 3971613 - DNA, 25 bp, Homo sapien
ccagagtgacagtgatgttctttac

SEQ ID NO: 3971614 - DNA, 25 bp, Homo sapien
gtatcatatactgacagcagtttct

SEQ ID NO: 3971615 - DNA, 25 bp, Homo sapien
gggatctcacaggtctgcttcatta

SEQ ID NO: 3971616 - DNA, 25 bp, Homo sapien
aggatcctctttcttgacccctagg

SEQ ID NO: 3971617 - DNA, 25 bp, Homo sapien
gaatgcgatggcaaagagggccacc

SEQ ID NO: 3971618 - DNA, 25 bp, Homo sapien
gggtgagtctcttgcagtacatctt

SEQ ID NO: 3971619 - DNA, 25 bp, Homo sapien
agtacatcttctgcaggaatttgga

SEQ ID NO: 3971620 - DNA, 25 bp, Homo sapien
aaagggcaagcaggagatgataacg

SEQ ID NO: 3971621 - DNA, 25 bp, Homo sapien
tcctcgacaggtggtaaagaagcaa

SEQ ID NO: 3971622 - DNA, 25 bp, Homo sapien
gatgataacggaatagggaagtttc

SEQ ID NO: 3971623 - DNA, 25 bp, Homo sapien
tctaaacccttgagagctttctgag

SEQ ID NO: 3971624 - DNA, 25 bp, Homo sapien
aatgggtgcctggtcaggagaacaa

SEQ ID NO: 3971625 - DNA, 25 bp, Homo sapien
taaccatttcatcaagattccggaa

SEQ ID NO: 3971626 - DNA, 25 bp, Homo sapien
gataataaggtcaaaggatgtcagc

SEQ ID NO: 3971627 - DNA, 25 bp, Homo sapien
tccacactagtggaggcaaccagcc

SEQ ID NO: 3971628 - DNA, 25 bp, Homo sapien
gagacacagtgccacttctgaaagg

SEQ ID NO: 3971629 - DNA, 25 bp, Homo sapien
acagtgccacttctgaaaggctcac

SEQ ID NO: 3971630 - DNA, 25 bp, Homo sapien
acacagtgccacttctgaaaggctc

SEQ ID NO: 3971631 - DNA, 25 bp, Homo sapien
tggagacacagtgccacttctgaaa

SEQ ID NO: 3971632 - DNA, 25 bp, Homo sapien
taggtcttccaagagtcccgcaaga

SEQ ID NO: 3971633 - DNA, 25 bp, Homo sapien
gaatgcctggactaaacgatcccca

SEQ ID NO: 3971634 - DNA, 25 bp, Homo sapien
caatctaagctttgggaagtctcca

SEQ ID NO: 3971635 - DNA, 25 bp, Homo sapien
gacttgtagagcaatgtgaacccag

SEQ ID NO: 3971636 - DNA, 25 bp, Homo sapien
catttcaggaccacgcctagtgcat

SEQ ID NO: 3971637 - DNA, 25 bp, Homo sapien
cccgatgcggtggtgaaattaaaga

SEQ ID NO: 3971638 - DNA, 25 bp, Homo sapien
tcctttcagccggatctagcgaggc

SEQ ID NO: 3971639 - DNA, 25 bp, Homo sapien
ggttatacacgcagagcacctgaag

SEQ ID NO: 3971640 - DNA, 25 bp, Homo sapien
gagccctgcggtgccattccaactt

SEQ ID NO: 3971641 - DNA, 25 bp, Homo sapien
gcaaccatgcacagtgatcgatatt

SEQ ID NO: 3971642 - DNA, 25 bp, Homo sapien
cacagtgatcgatatttataattac

SEQ ID NO: 3971643 - DNA, 25 bp, Homo sapien
ccatgcacagtgatcgatatttata

SEQ ID NO: 3971644 - DNA, 25 bp, Homo sapien
tggcaaccgggtcctccgacgagca

SEQ ID NO: 3971645 - DNA, 25 bp, Homo sapien
gcaaccgggtcctccgacgagcagg

SEQ ID NO: 3971646 - DNA, 25 bp, Homo sapien
catggcaaccgggtcctccgacgag

SEQ ID NO: 3971647 - DNA, 25 bp, Homo sapien
caaccgggtcctccgacgagcagga

SEQ ID NO: 3971648 - DNA, 25 bp, Homo sapien
ctcggcagacagatccgcgggcgct

SEQ ID NO: 3971649 - DNA, 25 bp, Homo sapien
cccggcatccgcttgtgaggtccgg

SEQ ID NO: 3971650 - DNA, 25 bp, Homo sapien
gctgaaaccactcgctacagctgct

SEQ ID NO: 3971651 - DNA, 25 bp, Homo sapien
gggctgtggtctcgagtcccgcccc

SEQ ID NO: 3971652 - DNA, 25 bp, Homo sapien
cgaggacgggctatgaaaagctccc

SEQ ID NO: 3971653 - DNA, 25 bp, Homo sapien
ggacgggctatgaaaagctcccgaa

SEQ ID NO: 3971654 - DNA, 25 bp, Homo sapien
gggctatgaaaagctcccgaacgct

SEQ ID NO: 3971655 - DNA, 25 bp, Homo sapien
ctatgaaaagctcccgaacgctggc

SEQ ID NO: 3971656 - DNA, 25 bp, Homo sapien
gtcctgtgacctgtcctgctgtcct

SEQ ID NO: 3971657 - DNA, 25 bp, Homo sapien
tgtcctgtgacctgtcctgctgtcc

SEQ ID NO: 3971658 - DNA, 25 bp, Homo sapien
ccgaccgcatgccatatacatccac

SEQ ID NO: 3971659 - DNA, 25 bp, Homo sapien
cgggtcccgaccgcatgccatatac

SEQ ID NO: 3971660 - DNA, 25 bp, Homo sapien
gaccgcatgccatatacatccacca

SEQ ID NO: 3971661 - DNA, 25 bp, Homo sapien
ggtcccgaccgcatgccatatacat

SEQ ID NO: 3971662 - DNA, 25 bp, Homo sapien
ggatggacatatctatttttgcaaa

SEQ ID NO: 3971663 - DNA, 25 bp, Homo sapien
gctctgaagttgactatgttgtaat

SEQ ID NO: 3971664 - DNA, 25 bp, Homo sapien
ctatgttgtaatgaaggatggacat

SEQ ID NO: 3971665 - DNA, 25 bp, Homo sapien
tgtaatgaaggatggacatatctat

SEQ ID NO: 3971666 - DNA, 25 bp, Homo sapien
gaaactagagttaaggagagtgagc

SEQ ID NO: 3971667 - DNA, 25 bp, Homo sapien
cagagtgctgaattactgcatgaaa

SEQ ID NO: 3971668 - DNA, 25 bp, Homo sapien
gctcaaggatgaaatggtgacacaa

SEQ ID NO: 3971669 - DNA, 25 bp, Homo sapien
ggtgacacaacaggactagatgaaa

SEQ ID NO: 3971670 - DNA, 25 bp, Homo sapien
gtcctgccactaaggcacttactac

SEQ ID NO: 3971671 - DNA, 25 bp, Homo sapien
gaaaccacggaaacaactgtcctgc

SEQ ID NO: 3971672 - DNA, 25 bp, Homo sapien
caagcactgcgttatagtctgaaga

SEQ ID NO: 3971673 - DNA, 25 bp, Homo sapien
tctgaagaaaccacggaaacaactg

SEQ ID NO: 3971674 - DNA, 25 bp, Homo sapien
gctttgtcttgtacccatggccgtc

SEQ ID NO: 3971675 - DNA, 25 bp, Homo sapien
caggtccatggctgatttgccaagt

SEQ ID NO: 3971676 - DNA, 25 bp, Homo sapien
tgccaagttaacaggagtccatcca

SEQ ID NO: 3971677 - DNA, 25 bp, Homo sapien
ggtcatgccccagaatcattaggat

SEQ ID NO: 3971678 - DNA, 25 bp, Homo sapien
aaggcatggcttcttcatccccgct

SEQ ID NO: 3971679 - DNA, 25 bp, Homo sapien
ttagcagagcttgtaaggggactgg

SEQ ID NO: 3971680 - DNA, 25 bp, Homo sapien
gaaggcatggcttcttcatccccgc

SEQ ID NO: 3971681 - DNA, 25 bp, Homo sapien
agcagagcttgtaaggggactgggc

SEQ ID NO: 3971682 - DNA, 25 bp, Homo sapien
caaaaggatcaacgctgttacatac

SEQ ID NO: 3971683 - DNA, 25 bp, Homo sapien
gctgttacatacacgcccacgtggg

SEQ ID NO: 3971684 - DNA, 25 bp, Homo sapien
catacacgcccacgtgggcagtagt

SEQ ID NO: 3971685 - DNA, 25 bp, Homo sapien
gatcaacgctgttacatacacgccc

SEQ ID NO: 3971686 - DNA, 25 bp, Homo sapien
cagcaaatgagtgatagtggcacgc

SEQ ID NO: 3971687 - DNA, 25 bp, Homo sapien
cctatgagcggtgaaggaggtccca

SEQ ID NO: 3971688 - DNA, 25 bp, Homo sapien
tagtggcacgcctatgagcggtgaa

SEQ ID NO: 3971689 - DNA, 25 bp, Homo sapien
tttctcagagctgcacaatttcccc

SEQ ID NO: 3971690 - DNA, 25 bp, Homo sapien
tggggacccaaggagcggtgctgcc

SEQ ID NO: 3971691 - DNA, 25 bp, Homo sapien
tggatttccaagcaatgagaaatgg

SEQ ID NO: 3971692 - DNA, 25 bp, Homo sapien
ggatttccaagcaatgagaaatggg

SEQ ID NO: 3971693 - DNA, 25 bp, Homo sapien
aaggagcggtgctgccccacaattc

SEQ ID NO: 3971694 - DNA, 25 bp, Homo sapien
gaacatgggacttctaccactactg

SEQ ID NO: 3971695 - DNA, 25 bp, Homo sapien
tattctatgccaatgtgaagcacgg

SEQ ID NO: 3971696 - DNA, 25 bp, Homo sapien
gaaacagacgctgtctagaggcact

SEQ ID NO: 3971697 - DNA, 25 bp, Homo sapien
tctacgccagcctttaagatgagga

SEQ ID NO: 3971698 - DNA, 25 bp, Homo sapien
tcagccctaccaggttcttctagag

SEQ ID NO: 3971699 - DNA, 25 bp, Homo sapien
tttaagatggagatccccgagggcc

SEQ ID NO: 3971700 - DNA, 25 bp, Homo sapien
taataaacatcgtagtgtgggaacc

SEQ ID NO: 3971701 - DNA, 25 bp, Homo sapien
ctaaacattaggtgcagtgtacact

SEQ ID NO: 3971702 - DNA, 25 bp, Homo sapien
actacatatggatcatgaagacggc

SEQ ID NO: 3971703 - DNA, 25 bp, Homo sapien
tgcaactgtcttctaagagactgcg

SEQ ID NO: 3971704 - DNA, 25 bp, Homo sapien
tgcagacacctgtgaactaagttcc

SEQ ID NO: 3971705 - DNA, 25 bp, Homo sapien
taggtcaagatgcaaagcaaactac

SEQ ID NO: 3971706 - DNA, 25 bp, Homo sapien
cagttaaatacctagcagaggccaa

SEQ ID NO: 3971707 - DNA, 25 bp, Homo sapien
tagacttgcagtggtatctgcctga

SEQ ID NO: 3971708 - DNA, 25 bp, Homo sapien
aaagaagcaccagtggattcaggtc

SEQ ID NO: 3971709 - DNA, 25 bp, Homo sapien
ggtatctgcctgacagcaacctctt

SEQ ID NO: 3971710 - DNA, 25 bp, Homo sapien
aaaggggtgcaattggacttccaga

SEQ ID NO: 3971711 - DNA, 25 bp, Homo sapien
gactcggcccatttgaggttctcct

SEQ ID NO: 3971712 - DNA, 25 bp, Homo sapien
ttgctgctaaacagaacagattcag

SEQ ID NO: 3971713 - DNA, 25 bp, Homo sapien
acttccagacagtgacgactcggcc

SEQ ID NO: 3971714 - DNA, 25 bp, Homo sapien
caaagcaggctgtgattttctgagc

SEQ ID NO: 3971715 - DNA, 25 bp, Homo sapien
gcaggctgtgattttctgagcatac

SEQ ID NO: 3971716 - DNA, 25 bp, Homo sapien
aagcaggctgtgattttctgagcat

SEQ ID NO: 3971717 - DNA, 25 bp, Homo sapien
ccatccctccaaagcaggctgtgat

SEQ ID NO: 3971718 - DNA, 25 bp, Homo sapien
atatgctccggtctgggcaggtctc

SEQ ID NO: 3971719 - DNA, 25 bp, Homo sapien
tggcatatgctccggtctgggcagg

SEQ ID NO: 3971720 - DNA, 25 bp, Homo sapien
atgctccggtctgggcaggtctcct

SEQ ID NO: 3971721 - DNA, 25 bp, Homo sapien
gcatatgctccggtctgggcaggtc

SEQ ID NO: 3971722 - DNA, 25 bp, Homo sapien
ttcccgtaatgccacttgcccaaga

SEQ ID NO: 3971723 - DNA, 25 bp, Homo sapien
ctcttcccgtaatgccacttgccca

SEQ ID NO: 3971724 - DNA, 25 bp, Homo sapien
cttctcttcccgtaatgccacttgc

SEQ ID NO: 3971725 - DNA, 25 bp, Homo sapien
gcttctcttcccgtaatgccacttg

SEQ ID NO: 3971726 - DNA, 25 bp, Homo sapien
catatcttctccattaataattcag

SEQ ID NO: 3971727 - DNA, 25 bp, Homo sapien
tgctcaaaatggaacaagcagccaa

SEQ ID NO: 3971728 - DNA, 25 bp, Homo sapien
ccatatcttctccattaataattca

SEQ ID NO: 3971729 - DNA, 25 bp, Homo sapien
ctgctcaaaatggaacaagcagcca

SEQ ID NO: 3971730 - DNA, 25 bp, Homo sapien
gagttcagctttagcttcacagaac

SEQ ID NO: 3971731 - DNA, 25 bp, Homo sapien
aactcctgtagtttatggtcacaag

SEQ ID NO: 3971732 - DNA, 25 bp, Homo sapien
cacagaactcctgtagtttatggtc

SEQ ID NO: 3971733 - DNA, 25 bp, Homo sapien
ctttagcttcacagaactcctgtag

SEQ ID NO: 3971734 - DNA, 25 bp, Homo sapien
gagatacggtttctgtagattccag

SEQ ID NO: 3971735 - DNA, 25 bp, Homo sapien
gctggtagcaagtggaaagactcca

SEQ ID NO: 3971736 - DNA, 25 bp, Homo sapien
tatgactgagcttcaagtcaactgc

SEQ ID NO: 3971737 - DNA, 25 bp, Homo sapien
tgctgagtgttctagagatacggtt

SEQ ID NO: 3971738 - DNA, 25 bp, Homo sapien
tgggtacaaaggcaaacccaagctc

SEQ ID NO: 3971739 - DNA, 25 bp, Homo sapien
gtacctcgtaacaagtgtatacatg

SEQ ID NO: 3971740 - DNA, 25 bp, Homo sapien
tattcatcagttacagcgtgtgcca

SEQ ID NO: 3971741 - DNA, 25 bp, Homo sapien
catgtgaagtgtagcagacccggct

SEQ ID NO: 3971742 - DNA, 25 bp, Homo sapien
gatgagggtccgtgagctcagtcat

SEQ ID NO: 3971743 - DNA, 25 bp, Homo sapien
ctcccatggtgtgatgagggtccgt

SEQ ID NO: 3971744 - DNA, 25 bp, Homo sapien
tagtctcccatggtgtgatgagggt

SEQ ID NO: 3971745 - DNA, 25 bp, Homo sapien
tgatgagggtccgtgagctcagtca

SEQ ID NO: 3971746 - DNA, 25 bp, Homo sapien
gaaaggctgcaacactcctcaaagg

SEQ ID NO: 3971747 - DNA, 25 bp, Homo sapien
cattatggctttggaaacagttccc

SEQ ID NO: 3971748 - DNA, 25 bp, Homo sapien
tctgggaagccactattagaacacg

SEQ ID NO: 3971749 - DNA, 25 bp, Homo sapien
gaattactatctcaaccagatgggc

SEQ ID NO: 3971750 - DNA, 25 bp, Homo sapien
tcaactcttcaattcagctaggcat

SEQ ID NO: 3971751 - DNA, 25 bp, Homo sapien
actcaactcttcaattcagctaggc

SEQ ID NO: 3971752 - DNA, 25 bp, Homo sapien
ctcaactcttcaattcagctaggca

SEQ ID NO: 3971753 - DNA, 25 bp, Homo sapien
caactcttcaattcagctaggcata

SEQ ID NO: 3971754 - DNA, 25 bp, Homo sapien
gttgaagaacaccgtgggattgact

SEQ ID NO: 3971755 - DNA, 25 bp, Homo sapien
cccagaacacgaaggttttctgctg

SEQ ID NO: 3971756 - DNA, 25 bp, Homo sapien
aagaacaccgtgggattgactatgg

SEQ ID NO: 3971757 - DNA, 25 bp, Homo sapien
tgaagaacaccgtgggattgactat

SEQ ID NO: 3971758 - DNA, 25 bp, Homo sapien
agattgggatcatagctagctctac

SEQ ID NO: 3971759 - DNA, 25 bp, Homo sapien
attgggatcatagctagctctacca

SEQ ID NO: 3971760 - DNA, 25 bp, Homo sapien
ttgggatcatagctagctctaccat

SEQ ID NO: 3971761 - DNA, 25 bp, Homo sapien
gattgggatcatagctagctctacc

SEQ ID NO: 3971762 - DNA, 25 bp, Homo sapien
catatgaaggatgcattcgagcatt

SEQ ID NO: 3971763 - DNA, 25 bp, Homo sapien
tccatgagagaattaagcaaaaagt

SEQ ID NO: 3971764 - DNA, 25 bp, Homo sapien
gactctactcttgattctaccaaag

SEQ ID NO: 3971765 - DNA, 25 bp, Homo sapien
gctaatacatttccagatgcataag

SEQ ID NO: 3971766 - DNA, 25 bp, Homo sapien
taggtcaccagtgggcaggatgcaa

SEQ ID NO: 3971767 - DNA, 25 bp, Homo sapien
tatcctaaagtgaaacatgggcacc

SEQ ID NO: 3971768 - DNA, 25 bp, Homo sapien
gacttgactagaaccaaccagtgtg

SEQ ID NO: 3971769 - DNA, 25 bp, Homo sapien
aggcgaagacctcaaacagtggaat

SEQ ID NO: 3971770 - DNA, 25 bp, Homo sapien
ctgggacccataattaacccagaag

SEQ ID NO: 3971771 - DNA, 25 bp, Homo sapien
gtgtctgccaagtgtccctgggacc

SEQ ID NO: 3971772 - DNA, 25 bp, Homo sapien
cagaaggtcttccggggggaatcag

SEQ ID NO: 3971773 - DNA, 25 bp, Homo sapien
gctaccatggtatcttttatacatc

SEQ ID NO: 3971774 - DNA, 25 bp, Homo sapien
ttttagttatgctaccatggtatct

SEQ ID NO: 3971775 - DNA, 25 bp, Homo sapien
tagttatgctaccatggtatctttt

SEQ ID NO: 3971776 - DNA, 25 bp, Homo sapien
tatgctaccatggtatcttttatac

SEQ ID NO: 3971777 - DNA, 25 bp, Homo sapien
catccaggccatgaagatccccaaa

SEQ ID NO: 3971778 - DNA, 25 bp, Homo sapien
agctccacagaccacggggacatgg

SEQ ID NO: 3971779 - DNA, 25 bp, Homo sapien
ccaaatgctgagattgaggaatctg

SEQ ID NO: 3971780 - DNA, 25 bp, Homo sapien
gacagaaaagtgaagtgggccatcc

SEQ ID NO: 3971781 - DNA, 25 bp, Homo sapien
atggtcaaggccaagctgtcgaaaa

SEQ ID NO: 3971782 - DNA, 25 bp, Homo sapien
gatttgatagttatacacagaatag

SEQ ID NO: 3971783 - DNA, 25 bp, Homo sapien
tcaaggccaagctgtcgaaaatgga

SEQ ID NO: 3971784 - DNA, 25 bp, Homo sapien
ccaagctgtcgaaaatggatttgat

SEQ ID NO: 3971785 - DNA, 25 bp, Homo sapien
tgttgataatattctcaactgggct

SEQ ID NO: 3971786 - DNA, 25 bp, Homo sapien
ctgaaggtggatagaatatatcctt

SEQ ID NO: 3971787 - DNA, 25 bp, Homo sapien
gctgaaggtggatagaatatatcct

SEQ ID NO: 3971788 - DNA, 25 bp, Homo sapien
aaagccgtagatctctcgctgtcca

SEQ ID NO: 3971789 - DNA, 25 bp, Homo sapien
ctaaaagccgtagatctctcgctgt

SEQ ID NO: 3971790 - DNA, 25 bp, Homo sapien
gccgtagatctctcgctgtccatca

SEQ ID NO: 3971791 - DNA, 25 bp, Homo sapien
tagatctctcgctgtccatcattct

SEQ ID NO: 3971792 - DNA, 25 bp, Homo sapien
aatcgtgctgcctcaagccctggat

SEQ ID NO: 3971793 - DNA, 25 bp, Homo sapien
atcaaggtcaagggcgagggcttcc

SEQ ID NO: 3971794 - DNA, 25 bp, Homo sapien
ggatttcttccatagccgagctgca

SEQ ID NO: 3971795 - DNA, 25 bp, Homo sapien
ggcgccgactttggcccttaggctc

SEQ ID NO: 3971796 - DNA, 25 bp, Homo sapien
ccgctccgcgcagcaaggccgacgg

SEQ ID NO: 3971797 - DNA, 25 bp, Homo sapien
tccgcgcagcaaggccgacgggcgg

SEQ ID NO: 3971798 - DNA, 25 bp, Homo sapien
aaggcagccccggagcgcccgcccg

SEQ ID NO: 3971799 - DNA, 25 bp, Homo sapien
ctggaaggcgttggacagccccgca

SEQ ID NO: 3971800 - DNA, 25 bp, Homo sapien
ctctgtccccgaggaacgagggtct

SEQ ID NO: 3971801 - DNA, 25 bp, Homo sapien
gtgggtgctccgaatggctctccag

SEQ ID NO: 3971802 - DNA, 25 bp, Homo sapien
aaaataacgtgggtgctccgaatgg

SEQ ID NO: 3971803 - DNA, 25 bp, Homo sapien
tccttcccctaagtgatgcccttga

SEQ ID NO: 3971804 - DNA, 25 bp, Homo sapien
caaatccccctctgcgagaaacacc

SEQ ID NO: 3971805 - DNA, 25 bp, Homo sapien
tccccctctgcgagaaacacccaag

SEQ ID NO: 3971806 - DNA, 25 bp, Homo sapien
cctctgcgagaaacacccaagaatg

SEQ ID NO: 3971807 - DNA, 25 bp, Homo sapien
cccctctgcgagaaacacccaagaa

SEQ ID NO: 3971808 - DNA, 25 bp, Homo sapien
caaatggtagcgtctatggcatgca

SEQ ID NO: 3971809 - DNA, 25 bp, Homo sapien
cagattataaatcaaagggtcacac

SEQ ID NO: 3971810 - DNA, 25 bp, Homo sapien
gaagacacaaagtgcctttctggca

SEQ ID NO: 3971811 - DNA, 25 bp, Homo sapien
cagaatgcagacactagaccctgtc

SEQ ID NO: 3971812 - DNA, 25 bp, Homo sapien
gaaagttcacagtatagatttcact

SEQ ID NO: 3971813 - DNA, 25 bp, Homo sapien
ctttcacagtccacacctgtgaagt

SEQ ID NO: 3971814 - DNA, 25 bp, Homo sapien
cagtgacagcatcaattcgaaagtt

SEQ ID NO: 3971815 - DNA, 25 bp, Homo sapien
tcacagtccacacctgtgaagtcac

SEQ ID NO: 3971816 - DNA, 25 bp, Homo sapien
tgggatttcctgtttcaatgttgaa

SEQ ID NO: 3971817 - DNA, 25 bp, Homo sapien
ctcatgtgggatttcctgtttcaat

SEQ ID NO: 3971818 - DNA, 25 bp, Homo sapien
ttttaaagttagcaaagccatttca

SEQ ID NO: 3971819 - DNA, 25 bp, Homo sapien
catgtgctcatgtgggatttcctgt

SEQ ID NO: 3971820 - DNA, 25 bp, Homo sapien
tcttaacgagtcttccaaatcggtc

SEQ ID NO: 3971821 - DNA, 25 bp, Homo sapien
cactgttttcttaacgagtcttcca

SEQ ID NO: 3971822 - DNA, 25 bp, Homo sapien
tgaatgctatacgcatatatggacg

SEQ ID NO: 3971823 - DNA, 25 bp, Homo sapien
ctgaatgctatacgcatatatggac

SEQ ID NO: 3971824 - DNA, 25 bp, Homo sapien
gaatgctatacgcatatatggacgg

SEQ ID NO: 3971825 - DNA, 25 bp, Homo sapien
gcacgccgtggaggcggtaaggccg

SEQ ID NO: 3971826 - DNA, 25 bp, Homo sapien
ctgcagcacgccgtggaggcggtaa

SEQ ID NO: 3971827 - DNA, 25 bp, Homo sapien
gcggcggcggatcgaggagctctcc

SEQ ID NO: 3971828 - DNA, 25 bp, Homo sapien
cggcggatcgaggagctctccaggt

SEQ ID NO: 3971829 - DNA, 25 bp, Homo sapien
caagacaaaagaaacgagcaagcac

SEQ ID NO: 3971830 - DNA, 25 bp, Homo sapien
agcaagcaccgcttgggcttggttc

SEQ ID NO: 3971831 - DNA, 25 bp, Homo sapien
aacgccgctcggtggtcgcctcatt

SEQ ID NO: 3971832 - DNA, 25 bp, Homo sapien
ggaaaaaaagtggtcagcgttgagc

SEQ ID NO: 3971833 - DNA, 25 bp, Homo sapien
gagtttgctttcgacagcttccaag

SEQ ID NO: 3971834 - DNA, 25 bp, Homo sapien
ttggagggtccagtcgagtttgctt

SEQ ID NO: 3971835 - DNA, 25 bp, Homo sapien
tctcctttgagggttttagacacca

SEQ ID NO: 3971836 - DNA, 25 bp, Homo sapien
ttcctggacactcttcgtttatcct

SEQ ID NO: 3971837 - DNA, 25 bp, Homo sapien
taaaatgggccttacagcataggac

SEQ ID NO: 3971838 - DNA, 25 bp, Homo sapien
caaaacatgttcatcgtagcgtctg

SEQ ID NO: 3971839 - DNA, 25 bp, Homo sapien
tattcactgtgatcaaggctttgca

SEQ ID NO: 3971840 - DNA, 25 bp, Homo sapien
tctgtagcagaactggcgtgtgccc

SEQ ID NO: 3971841 - DNA, 25 bp, Homo sapien
tgagccgcattctttacttgataga

SEQ ID NO: 3971842 - DNA, 25 bp, Homo sapien
cgttacagtgaagtgctaaaaccac

SEQ ID NO: 3971843 - DNA, 25 bp, Homo sapien
tcagtattgacagaagacgttacag

SEQ ID NO: 3971844 - DNA, 25 bp, Homo sapien
gaccaaaattcttagctcgcttaca

SEQ ID NO: 3971845 - DNA, 25 bp, Homo sapien
atcacattttctgggccctgtaaaa

SEQ ID NO: 3971846 - DNA, 25 bp, Homo sapien
gtccctccgtggagaaactcttcag

SEQ ID NO: 3971847 - DNA, 25 bp, Homo sapien
tactgacagtgttaccagcgtctgg

SEQ ID NO: 3971848 - DNA, 25 bp, Homo sapien
tgaaagttgtgtaggttactgacag

SEQ ID NO: 3971849 - DNA, 25 bp, Homo sapien
cacactgttggtggttctcgccgtg

SEQ ID NO: 3971850 - DNA, 25 bp, Homo sapien
gcagcgtggagaagacacaatactc

SEQ ID NO: 3971851 - DNA, 25 bp, Homo sapien
ctgctgatataagtaaagtttgtaa

SEQ ID NO: 3971852 - DNA, 25 bp, Homo sapien
tctcgccgtgcagcgtggagaagac

SEQ ID NO: 3971853 - DNA, 25 bp, Homo sapien
gactggactattctacccacagtag

SEQ ID NO: 3971854 - DNA, 25 bp, Homo sapien
cacatacggttacttttgactggac

SEQ ID NO: 3971855 - DNA, 25 bp, Homo sapien
tggtgaccaccattaatagacatga

SEQ ID NO: 3971856 - DNA, 25 bp, Homo sapien
tgtaagtccatagatgtaggaaccg

SEQ ID NO: 3971857 - DNA, 25 bp, Homo sapien
cttgccctggcacgaactcttgtag

SEQ ID NO: 3971858 - DNA, 25 bp, Homo sapien
cattaggctttttgcgacgctcgtg

SEQ ID NO: 3971859 - DNA, 25 bp, Homo sapien
gaccattgaattagctctggacagg

SEQ ID NO: 3971860 - DNA, 25 bp, Homo sapien
tctggacaggaatctcgggcatctc

SEQ ID NO: 3971861 - DNA, 25 bp, Homo sapien
tgtaactgcatccttagtcacagaa

SEQ ID NO: 3971862 - DNA, 25 bp, Homo sapien
cccttcccgacatatgagaaacaaa

SEQ ID NO: 3971863 - DNA, 25 bp, Homo sapien
acacaggctagggtatattttactc

SEQ ID NO: 3971864 - DNA, 25 bp, Homo sapien
cacagaactacctacatacattggg

SEQ ID NO: 3971865 - DNA, 25 bp, Homo sapien
gtccaagaccagcttagacaatgtg

SEQ ID NO: 3971866 - DNA, 25 bp, Homo sapien
gaccagcttagacaatgtggcgaaa

SEQ ID NO: 3971867 - DNA, 25 bp, Homo sapien
gaaactcttgtctcagtaaataaat

SEQ ID NO: 3971868 - DNA, 25 bp, Homo sapien
agagtccaagaccagcttagacaat

SEQ ID NO: 3971869 - DNA, 25 bp, Homo sapien
ttatcaactggcataaaaatctgtg

SEQ ID NO: 3971870 - DNA, 25 bp, Homo sapien
gaacatattgcatgtgatgtctcat

SEQ ID NO: 3971871 - DNA, 25 bp, Homo sapien
ctgtgccattcaattggaaggaatc

SEQ ID NO: 3971872 - DNA, 25 bp, Homo sapien
taaaaagcctcggagaacatattgc

SEQ ID NO: 3971873 - DNA, 25 bp, Homo sapien
ttagagatcatcttatctagtgact

SEQ ID NO: 3971874 - DNA, 25 bp, Homo sapien
ttcaaaaataggcatcgttgtcttg

SEQ ID NO: 3971875 - DNA, 25 bp, Homo sapien
gcatcgttgtcttgttagctattta

SEQ ID NO: 3971876 - DNA, 25 bp, Homo sapien
tgtacctgttaaaagaactaaatca

SEQ ID NO: 3971877 - DNA, 25 bp, Homo sapien
cctcatacaatagtttgggtgctgt

SEQ ID NO: 3971878 - DNA, 25 bp, Homo sapien
gaatttacaggtagacatctgttct

SEQ ID NO: 3971879 - DNA, 25 bp, Homo sapien
cccaacttagttgtaatgtgttatc

SEQ ID NO: 3971880 - DNA, 25 bp, Homo sapien
ctttcctcttaatgtcctggactgg

SEQ ID NO: 3971881 - DNA, 25 bp, Homo sapien
tggcttgcaattatcagcctcagca

SEQ ID NO: 3971882 - DNA, 25 bp, Homo sapien
ggcttgcaattatcagcctcagcag

SEQ ID NO: 3971883 - DNA, 25 bp, Homo sapien
cttgcaattatcagcctcagcagct

SEQ ID NO: 3971884 - DNA, 25 bp, Homo sapien
gcttgcaattatcagcctcagcagc

SEQ ID NO: 3971885 - DNA, 25 bp, Homo sapien
aagtggccattattgatctctttct

SEQ ID NO: 3971886 - DNA, 25 bp, Homo sapien
gtggccattattgatctctttcttc

SEQ ID NO: 3971887 - DNA, 25 bp, Homo sapien
tagttgacatttgaatcctgtgtgc

SEQ ID NO: 3971888 - DNA, 25 bp, Homo sapien
tggccttgcagttggctcagttgtt

SEQ ID NO: 3971889 - DNA, 25 bp, Homo sapien
tgttttcctgctttgtagtctctaa

SEQ ID NO: 3971890 - DNA, 25 bp, Homo sapien
aaggaaaaagagtgttaataccatg

SEQ ID NO: 3971891 - DNA, 25 bp, Homo sapien
cactaaaacaattcttagtatgaga

SEQ ID NO: 3971892 - DNA, 25 bp, Homo sapien
tatgcatcagtacagcattttcaac

SEQ ID NO: 3971893 - DNA, 25 bp, Homo sapien
tctctattgctgaatacttaagtag

SEQ ID NO: 3971894 - DNA, 25 bp, Homo sapien
ttattatgataaattcctgggaggg

SEQ ID NO: 3971895 - DNA, 25 bp, Homo sapien
ggttttatatgttgttgctaattta

SEQ ID NO: 3971896 - DNA, 25 bp, Homo sapien
atttctctattgctgaatacttaag

SEQ ID NO: 3971897 - DNA, 25 bp, Homo sapien
tcagaaagcggaatgccaaaaataa

SEQ ID NO: 3971898 - DNA, 25 bp, Homo sapien
tgtcatgtcggcatgattcatcatg

SEQ ID NO: 3971899 - DNA, 25 bp, Homo sapien
acatctcgggttattttggtttgtg

SEQ ID NO: 3971900 - DNA, 25 bp, Homo sapien
tggtttgtgttatgttcagaaagcg

SEQ ID NO: 3971901 - DNA, 25 bp, Homo sapien
caaaaccactgggactcgacaaagg

SEQ ID NO: 3971902 - DNA, 25 bp, Homo sapien
cttatcatttgtaggagggcacaga

SEQ ID NO: 3971903 - DNA, 25 bp, Homo sapien
tatttcaggcagtacaacactttcc

SEQ ID NO: 3971904 - DNA, 25 bp, Homo sapien
taagtcattgaggtagctctgtgcc

SEQ ID NO: 3971905 - DNA, 25 bp, Homo sapien
aagtggctatgatcacgtcttcaaa

SEQ ID NO: 3971906 - DNA, 25 bp, Homo sapien
ggagtgtcagctgcctctttttgtc

SEQ ID NO: 3971907 - DNA, 25 bp, Homo sapien
ccactgatttaaggcaagatgaact

SEQ ID NO: 3971908 - DNA, 25 bp, Homo sapien
aagatgaactgaaagtggctatgat

SEQ ID NO: 3971909 - DNA, 25 bp, Homo sapien
ggaaacagctgactagtttccattg

SEQ ID NO: 3971910 - DNA, 25 bp, Homo sapien
cagttctacgtggaaacagctgact

SEQ ID NO: 3971911 - DNA, 25 bp, Homo sapien
tgtaagatggctcttttgctcttgg

SEQ ID NO: 3971912 - DNA, 25 bp, Homo sapien
tctgaattcagttctacgtggaaac

SEQ ID NO: 3971913 - DNA, 25 bp, Homo sapien
caaggctgagatacgctaggagagt

SEQ ID NO: 3971914 - DNA, 25 bp, Homo sapien
gcattagagacaaccttgagacaca

SEQ ID NO: 3971915 - DNA, 25 bp, Homo sapien
tgaacattcggtaaaggaacacgga

SEQ ID NO: 3971916 - DNA, 25 bp, Homo sapien
gaacacggaatgtcaagcgcattag

SEQ ID NO: 3971917 - DNA, 25 bp, Homo sapien
ctcggcgtcacgtccagggtaattg

SEQ ID NO: 3971918 - DNA, 25 bp, Homo sapien
tgcctaggcagatggctgaccacta

SEQ ID NO: 3971919 - DNA, 25 bp, Homo sapien
ctgaccactaggtgggcctcggcgt

SEQ ID NO: 3971920 - DNA, 25 bp, Homo sapien
aaatcacttgctgtgccaagccaac

SEQ ID NO: 3971921 - DNA, 25 bp, Homo sapien
catttagatggggtaaagcacctga

SEQ ID NO: 3971922 - DNA, 25 bp, Homo sapien
agcacctgaaatacaatgagcatca

SEQ ID NO: 3971923 - DNA, 25 bp, Homo sapien
aatacaatgagcatcactattttca

SEQ ID NO: 3971924 - DNA, 25 bp, Homo sapien
cataaagctgctcatcatttagatg

SEQ ID NO: 3971925 - DNA, 25 bp, Homo sapien
tctgtcccgggagtcagcaggtaag

SEQ ID NO: 3971926 - DNA, 25 bp, Homo sapien
tgatccacatagttctacagcaggg

SEQ ID NO: 3971927 - DNA, 25 bp, Homo sapien
tgttggctgctagcgtccactccat

SEQ ID NO: 3971928 - DNA, 25 bp, Homo sapien
aaaggcagcaagatatctgtcccgg

SEQ ID NO: 3971929 - DNA, 25 bp, Homo sapien
gcgctctacgcgcaggtgtcccagt

SEQ ID NO: 3971930 - DNA, 25 bp, Homo sapien
gtgtcccagtccaagccgtgcgaga

SEQ ID NO: 3971931 - DNA, 25 bp, Homo sapien
cagtccaagccgtgcgagaggaccg

SEQ ID NO: 3971932 - DNA, 25 bp, Homo sapien
ttctcgggccgctgtgtcaactcca

SEQ ID NO: 3971933 - DNA, 25 bp, Homo sapien
ttttgactattaagaatgaggctgc

SEQ ID NO: 3971934 - DNA, 25 bp, Homo sapien
gaagtctgtgcctcgtttgggttta

SEQ ID NO: 3971935 - DNA, 25 bp, Homo sapien
tacatccaggagcatgcaaacattt

SEQ ID NO: 3971936 - DNA, 25 bp, Homo sapien
tactaagtgccttattgggagatac

SEQ ID NO: 3971937 - DNA, 25 bp, Homo sapien
ccagtaatatctaagattattaccc

SEQ ID NO: 3971938 - DNA, 25 bp, Homo sapien
ctttaggccagtaatatctaagatt

SEQ ID NO: 3971939 - DNA, 25 bp, Homo sapien
taggccagtaatatctaagattatt

SEQ ID NO: 3971940 - DNA, 25 bp, Homo sapien
cagtaatatctaagattattaccca

SEQ ID NO: 3971941 - DNA, 25 bp, Homo sapien
ggtcttctactttccagccttcaga

SEQ ID NO: 3971942 - DNA, 25 bp, Homo sapien
aacaggctaagacatatggcaagtc

SEQ ID NO: 3971943 - DNA, 25 bp, Homo sapien
aagtgctgggattgggacctttaag

SEQ ID NO: 3971944 - DNA, 25 bp, Homo sapien
tctcaaactttacgaagattatggc

SEQ ID NO: 3971945 - DNA, 25 bp, Homo sapien
tatgtgtacgtcagcaacttttcct

SEQ ID NO: 3971946 - DNA, 25 bp, Homo sapien
ctatgtgtacgtcagcaacttttcc

SEQ ID NO: 3971947 - DNA, 25 bp, Homo sapien
aaataaaggtctgcgaatgtctgtg

SEQ ID NO: 3971948 - DNA, 25 bp, Homo sapien
ttgataaataaaggtctgcgaatgt

SEQ ID NO: 3971949 - DNA, 25 bp, Homo sapien
taaaggtctgcgaatgtctgtgatg

SEQ ID NO: 3971950 - DNA, 25 bp, Homo sapien
gtctgcgaatgtctgtgatgatgaa

SEQ ID NO: 3971951 - DNA, 25 bp, Homo sapien
gataggcccttgtgtatattgttcc

SEQ ID NO: 3971952 - DNA, 25 bp, Homo sapien
agacatgccagtttgctacatgggt

SEQ ID NO: 3971953 - DNA, 25 bp, Homo sapien
ttttagatttagtggtagacatgcc

SEQ ID NO: 3971954 - DNA, 25 bp, Homo sapien
ccttcttcatgtctatgtgtactct

SEQ ID NO: 3971955 - DNA, 25 bp, Homo sapien
tggagctctgcaactctacaacaat

SEQ ID NO: 3971956 - DNA, 25 bp, Homo sapien
ggttcctaggtctcctgaaccatgg

SEQ ID NO: 3971957 - DNA, 25 bp, Homo sapien
gaaccatggccctttttgcataaca

SEQ ID NO: 3971958 - DNA, 25 bp, Homo sapien
aacaattagatcatcatcctgctgg

SEQ ID NO: 3971959 - DNA, 25 bp, Homo sapien
tgctatcagtcatcagggcctcatt

SEQ ID NO: 3971960 - DNA, 25 bp, Homo sapien
gctatcagtcatcagggcctcattt

SEQ ID NO: 3971961 - DNA, 25 bp, Homo sapien
tatttgctacgacagattttctgaa

SEQ ID NO: 3971962 - DNA, 25 bp, Homo sapien
ctactgaatataagtaacttttcta

SEQ ID NO: 3971963 - DNA, 25 bp, Homo sapien
ctgttgacaggatctggtatctgga

SEQ ID NO: 3971964 - DNA, 25 bp, Homo sapien
tatatacactattatttgctacgac

SEQ ID NO: 3971965 - DNA, 25 bp, Homo sapien
tgacgtactagcacagcatctggaa

SEQ ID NO: 3971966 - DNA, 25 bp, Homo sapien
ccgtgtgggactataagcaattaac

SEQ ID NO: 3971967 - DNA, 25 bp, Homo sapien
tgcgcagcactcaatggatagatgt

SEQ ID NO: 3971968 - DNA, 25 bp, Homo sapien
tccaatcatcgatgtgacgtactag

SEQ ID NO: 3971969 - DNA, 25 bp, Homo sapien
tgtaaacctgtttccaaagacttca

SEQ ID NO: 3971970 - DNA, 25 bp, Homo sapien
taggttactttatcagtcggctgaa

SEQ ID NO: 3971971 - DNA, 25 bp, Homo sapien
cagccaggacaaacaatgagtattt

SEQ ID NO: 3971972 - DNA, 25 bp, Homo sapien
tgtttgcaagatacactaaggttag

SEQ ID NO: 3971973 - DNA, 25 bp, Homo sapien
aactgcccaggtacttagattattg

SEQ ID NO: 3971974 - DNA, 25 bp, Homo sapien
caggagcccatcatggttagtacca

SEQ ID NO: 3971975 - DNA, 25 bp, Homo sapien
gaattctatctgacacagctttgtg

SEQ ID NO: 3971976 - DNA, 25 bp, Homo sapien
ttccacaagaaagatcaggagccca

SEQ ID NO: 3971977 - DNA, 25 bp, Homo sapien
cagttccattgatgagaggccatct

SEQ ID NO: 3971978 - DNA, 25 bp, Homo sapien
aaatacagattatatatatttagtg

SEQ ID NO: 3971979 - DNA, 25 bp, Homo sapien
caaatacagattatatatatttagt

SEQ ID NO: 3971980 - DNA, 25 bp, Homo sapien
atacagattatatatatttagtgtc

SEQ ID NO: 3971981 - DNA, 25 bp, Homo sapien
acagattatatatatttagtgtcat

SEQ ID NO: 3971982 - DNA, 25 bp, Homo sapien
ctagatcttgatgatggaataagct

SEQ ID NO: 3971983 - DNA, 25 bp, Homo sapien
gatggaataagcttacttcttgagg

SEQ ID NO: 3971984 - DNA, 25 bp, Homo sapien
cttgatgatggaataagcttacttc

SEQ ID NO: 3971985 - DNA, 25 bp, Homo sapien
gatcttgatgatggaataagcttac

SEQ ID NO: 3971986 - DNA, 25 bp, Homo sapien
acatttgggacaagtaggtttatgg

SEQ ID NO: 3971987 - DNA, 25 bp, Homo sapien
tatggatgctgattttgtgagacgt

SEQ ID NO: 3971988 - DNA, 25 bp, Homo sapien
ggacaagtaggtttatggatgctga

SEQ ID NO: 3971989 - DNA, 25 bp, Homo sapien
tgtgagacgtgttgtttgtgagtct

SEQ ID NO: 3971990 - DNA, 25 bp, Homo sapien
tgttccttgggtgatgcaatgtttc

SEQ ID NO: 3971991 - DNA, 25 bp, Homo sapien
ttccagtgttacgaaatagctttca

SEQ ID NO: 3971992 - DNA, 25 bp, Homo sapien
gtgttcatacctggatgtctgtgca

SEQ ID NO: 3971993 - DNA, 25 bp, Homo sapien
ccttgatctacactgttgtcaaagc

SEQ ID NO: 3971994 - DNA, 25 bp, Homo sapien
tcattggcaaatcccactgcttgac

SEQ ID NO: 3971995 - DNA, 25 bp, Homo sapien
actgcttgacccataccattttccc

SEQ ID NO: 3971996 - DNA, 25 bp, Homo sapien
cctttgctcattggcaaatcccact

SEQ ID NO: 3971997 - DNA, 25 bp, Homo sapien
gtttacttggaattctagcacctgc

SEQ ID NO: 3971998 - DNA, 25 bp, Homo sapien
tgagttttgtcctggacggtctgtc

SEQ ID NO: 3971999 - DNA, 25 bp, Homo sapien
ttttgtcctggacggtctgtcccac

SEQ ID NO: 3972000 - DNA, 25 bp, Homo sapien
gagttttgtcctggacggtctgtcc

SEQ ID NO: 3972001 - DNA, 25 bp, Homo sapien
tgtcctggacggtctgtcccaccat

SEQ ID NO: 3972002 - DNA, 25 bp, Homo sapien
tgaagcagctgtcctattaagagca

SEQ ID NO: 3972003 - DNA, 25 bp, Homo sapien
cacattaagcccagtcctctgctct

SEQ ID NO: 3972004 - DNA, 25 bp, Homo sapien
gcagctgtcctattaagagcattga

SEQ ID NO: 3972005 - DNA, 25 bp, Homo sapien
tggcctcattcctggaccacattaa

SEQ ID NO: 3972006 - DNA, 25 bp, Homo sapien
actatctgtagttgtctcctctggc

SEQ ID NO: 3972007 - DNA, 25 bp, Homo sapien
tgaacacaggttctctttggattgc

SEQ ID NO: 3972008 - DNA, 25 bp, Homo sapien
cctctggcaactctattttactgaa

SEQ ID NO: 3972009 - DNA, 25 bp, Homo sapien
ctctggcaactctattttactgaac

SEQ ID NO: 3972010 - DNA, 25 bp, Homo sapien
tccatgtatgacacctcacacatga

SEQ ID NO: 3972011 - DNA, 25 bp, Homo sapien
gcacttgctccatgtatgacacctc

SEQ ID NO: 3972012 - DNA, 25 bp, Homo sapien
ccaaagcttctctgagcacttgctc

SEQ ID NO: 3972013 - DNA, 25 bp, Homo sapien
tgaactctggggaatatgagaagta

SEQ ID NO: 3972014 - DNA, 25 bp, Homo sapien
catcagggagcttagttctatgtag

SEQ ID NO: 3972015 - DNA, 25 bp, Homo sapien
ttcagtgagaagagcatcagggagc

SEQ ID NO: 3972016 - DNA, 25 bp, Homo sapien
gcaccttaaacttgtcagggttctg

SEQ ID NO: 3972017 - DNA, 25 bp, Homo sapien
ttctatgtagtatcacagaaccaaa

SEQ ID NO: 3972018 - DNA, 25 bp, Homo sapien
atcaggatacagaaaggagatggaa

SEQ ID NO: 3972019 - DNA, 25 bp, Homo sapien
gctccagaactgtaatgcttcaagt

SEQ ID NO: 3972020 - DNA, 25 bp, Homo sapien
ctccagaactgtaatgcttcaagta

SEQ ID NO: 3972021 - DNA, 25 bp, Homo sapien
cagaactgtaatgcttcaagtaatt

SEQ ID NO: 3972022 - DNA, 25 bp, Homo sapien
cagtccttagccacatacattctct

SEQ ID NO: 3972023 - DNA, 25 bp, Homo sapien
ggctgtgagcaccagtccttagcca

SEQ ID NO: 3972024 - DNA, 25 bp, Homo sapien
gccacatacattctcttgtattctg

SEQ ID NO: 3972025 - DNA, 25 bp, Homo sapien
tgagcaccagtccttagccacatac

SEQ ID NO: 3972026 - DNA, 25 bp, Homo sapien
tctcacctgcagaggctccaccaac

SEQ ID NO: 3972027 - DNA, 25 bp, Homo sapien
tttctcacctgcagaggctccacca

SEQ ID NO: 3972028 - DNA, 25 bp, Homo sapien
cttttctcacctgcagaggctccac

SEQ ID NO: 3972029 - DNA, 25 bp, Homo sapien
ttttctcacctgcagaggctccacc

SEQ ID NO: 3972030 - DNA, 25 bp, Homo sapien
ttgcttgcttcaaagccaccccttc

SEQ ID NO: 3972031 - DNA, 25 bp, Homo sapien
gtggctaccgctatgctctcaggag

SEQ ID NO: 3972032 - DNA, 25 bp, Homo sapien
tcaggagccagttgtctatcatatc

SEQ ID NO: 3972033 - DNA, 25 bp, Homo sapien
tcaatggaatgccagcgaccgactg

SEQ ID NO: 3972034 - DNA, 25 bp, Homo sapien
cagcgaccgactgtctttctatcta

SEQ ID NO: 3972035 - DNA, 25 bp, Homo sapien
gggtcacctcatagggccagtggtc

SEQ ID NO: 3972036 - DNA, 25 bp, Homo sapien
cagtggtccgtcagcaaatccagaa

SEQ ID NO: 3972037 - DNA, 25 bp, Homo sapien
tcgggtcctcccacagactgtttaa

SEQ ID NO: 3972038 - DNA, 25 bp, Homo sapien
tgatagctggtttaatctcgggtcc

SEQ ID NO: 3972039 - DNA, 25 bp, Homo sapien
aaaggtcacctctttcatgaaacta

SEQ ID NO: 3972040 - DNA, 25 bp, Homo sapien
gcaccaagagaatttcgaattcaaa

SEQ ID NO: 3972041 - DNA, 25 bp, Homo sapien
tcaaaggtcacctctttcatgaaac

SEQ ID NO: 3972042 - DNA, 25 bp, Homo sapien
gaatttcgaattcaaaggtcacctc

SEQ ID NO: 3972043 - DNA, 25 bp, Homo sapien
ctcttaagctagctgtaaattcaca

SEQ ID NO: 3972044 - DNA, 25 bp, Homo sapien
tccaactcttaagctagctgtaaat

SEQ ID NO: 3972045 - DNA, 25 bp, Homo sapien
tgtaaattcacactttctactgccc

SEQ ID NO: 3972046 - DNA, 25 bp, Homo sapien
aatgtcccagagtccaactcttaag

SEQ ID NO: 3972047 - DNA, 25 bp, Homo sapien
ggtaaatggccatactctctcccta

SEQ ID NO: 3972048 - DNA, 25 bp, Homo sapien
cctggcagaggcctaatagaggaag

SEQ ID NO: 3972049 - DNA, 25 bp, Homo sapien
tctgaaattaagataaggccatcct

SEQ ID NO: 3972050 - DNA, 25 bp, Homo sapien
caattgactagctattggctcctgc

SEQ ID NO: 3972051 - DNA, 25 bp, Homo sapien
agaagatctttccgatcatatttca

SEQ ID NO: 3972052 - DNA, 25 bp, Homo sapien
ttaagaagatctttccgatcatatt

SEQ ID NO: 3972053 - DNA, 25 bp, Homo sapien
agatctttccgatcatatttcagtt

SEQ ID NO: 3972054 - DNA, 25 bp, Homo sapien
tttaagaagatctttccgatcatat

SEQ ID NO: 3972055 - DNA, 25 bp, Homo sapien
cattttcaaccagcagcggaggctg

SEQ ID NO: 3972056 - DNA, 25 bp, Homo sapien
cggaggctgcagtcattcacgagca

SEQ ID NO: 3972057 - DNA, 25 bp, Homo sapien
catcaggaaatcaggggagcctcgg

SEQ ID NO: 3972058 - DNA, 25 bp, Homo sapien
ccaactgtggttcgagtggctgcaa

SEQ ID NO: 3972059 - DNA, 25 bp, Homo sapien
tgggtgatggatgggaacaagttga

SEQ ID NO: 3972060 - DNA, 25 bp, Homo sapien
tggatgggaacaagttgaaagaata

SEQ ID NO: 3972061 - DNA, 25 bp, Homo sapien
caagttgaaagaatagtatgcagaa

SEQ ID NO: 3972062 - DNA, 25 bp, Homo sapien
agttgaaagaatagtatgcagaagc

SEQ ID NO: 3972063 - DNA, 25 bp, Homo sapien
taatggtaccttttagtgtctgaca

SEQ ID NO: 3972064 - DNA, 25 bp, Homo sapien
ttaatggtaccttttagtgtctgac

SEQ ID NO: 3972065 - DNA, 25 bp, Homo sapien
tggaggcggtcagcctggtttaatc

SEQ ID NO: 3972066 - DNA, 25 bp, Homo sapien
caaattagtgttgagggaggtttct

SEQ ID NO: 3972067 - DNA, 25 bp, Homo sapien
cggtttacaggtttgctcgatggcc

SEQ ID NO: 3972068 - DNA, 25 bp, Homo sapien
tattagagttatggccgtcaagttg

SEQ ID NO: 3972069 - DNA, 25 bp, Homo sapien
cagatgccgactggggactcatgaa

SEQ ID NO: 3972070 - DNA, 25 bp, Homo sapien
cttttactgcagatgccgactgggg

SEQ ID NO: 3972071 - DNA, 25 bp, Homo sapien
atgccgactggggactcatgaaatg

SEQ ID NO: 3972072 - DNA, 25 bp, Homo sapien
actgcagatgccgactggggactca

SEQ ID NO: 3972073 - DNA, 25 bp, Homo sapien
cacactctgcatctgtcctaaacag

SEQ ID NO: 3972074 - DNA, 25 bp, Homo sapien
taaggccataacaggtctccactcc

SEQ ID NO: 3972075 - DNA, 25 bp, Homo sapien
tctgtcctaaacagggaccacctga

SEQ ID NO: 3972076 - DNA, 25 bp, Homo sapien
cttgtctaggagaccttaaggccat

SEQ ID NO: 3972077 - DNA, 25 bp, Homo sapien
tctccgtggtatcttgccactgccc

SEQ ID NO: 3972078 - DNA, 25 bp, Homo sapien
ctctccgtggtatcttgccactgcc

SEQ ID NO: 3972079 - DNA, 25 bp, Homo sapien
gtggtatcttgccactgccctccat

SEQ ID NO: 3972080 - DNA, 25 bp, Homo sapien
tccgtggtatcttgccactgccctc

SEQ ID NO: 3972081 - DNA, 25 bp, Homo sapien
ttagcagacaaattgtgagataatg

SEQ ID NO: 3972082 - DNA, 25 bp, Homo sapien
tagcagacaaattgtgagataatgt

SEQ ID NO: 3972083 - DNA, 25 bp, Homo sapien
gcagacaaattgtgagataatgtgt

SEQ ID NO: 3972084 - DNA, 25 bp, Homo sapien
gtaaagaagctagggcagctgctgc

SEQ ID NO: 3972085 - DNA, 25 bp, Homo sapien
cgtgaagttgtggtaaaatgtgttc

SEQ ID NO: 3972086 - DNA, 25 bp, Homo sapien
caggcacgtgaagttgtggtaaaat

SEQ ID NO: 3972087 - DNA, 25 bp, Homo sapien
cagtttattctgatcttatcaggca

SEQ ID NO: 3972088 - DNA, 25 bp, Homo sapien
tctgatcttatcaggcacgtgaagt

SEQ ID NO: 3972089 - DNA, 25 bp, Homo sapien
ggtcctggatgaagatgcgcccaaa

SEQ ID NO: 3972090 - DNA, 25 bp, Homo sapien
ggctgttgggtggactctcgccaca

SEQ ID NO: 3972091 - DNA, 25 bp, Homo sapien
aaagagaagcttttcgagggtcctg

SEQ ID NO: 3972092 - DNA, 25 bp, Homo sapien
tctgtgaatatctaagccttgcaca

SEQ ID NO: 3972093 - DNA, 25 bp, Homo sapien
gatctttagtatccgggaggctgca

SEQ ID NO: 3972094 - DNA, 25 bp, Homo sapien
tatcacttagggtgcattgagctcc

SEQ ID NO: 3972095 - DNA, 25 bp, Homo sapien
tgccatgcactggagttcaaacagc

SEQ ID NO: 3972096 - DNA, 25 bp, Homo sapien
caatgtaaggttgctcttcgctggg

SEQ ID NO: 3972097 - DNA, 25 bp, Homo sapien
ttgcaggtcattggttaccattatc

SEQ ID NO: 3972098 - DNA, 25 bp, Homo sapien
tgcaggtcattggttaccattatca

SEQ ID NO: 3972099 - DNA, 25 bp, Homo sapien
tagtcggtcctggaccaccattctt

SEQ ID NO: 3972100 - DNA, 25 bp, Homo sapien
agggaccacagtagtcggtcctgga

SEQ ID NO: 3972101 - DNA, 25 bp, Homo sapien
tgatgatgaaagggcacacgggcag

SEQ ID NO: 3972102 - DNA, 25 bp, Homo sapien
ggcacacgggcagcagaccctggag

SEQ ID NO: 3972103 - DNA, 25 bp, Homo sapien
ggttgccgctttgtctgttggtctt

SEQ ID NO: 3972104 - DNA, 25 bp, Homo sapien
aggttgccgctttgtctgttggtct

SEQ ID NO: 3972105 - DNA, 25 bp, Homo sapien
gttgccgctttgtctgttggtcttc

SEQ ID NO: 3972106 - DNA, 25 bp, Homo sapien
gattttgagggcactctgacagttt

SEQ ID NO: 3972107 - DNA, 25 bp, Homo sapien
caggatggattttgagggcactctg

SEQ ID NO: 3972108 - DNA, 25 bp, Homo sapien
gatggattttgagggcactctgaca

SEQ ID NO: 3972109 - DNA, 25 bp, Homo sapien
gagggcactctgacagttttcccag

SEQ ID NO: 3972110 - DNA, 25 bp, Homo sapien
ccttctggaagccaaccttcagaca

SEQ ID NO: 3972111 - DNA, 25 bp, Homo sapien
cagtctcaagcgactctgagtgcat

SEQ ID NO: 3972112 - DNA, 25 bp, Homo sapien
tgggaagcagtctcaagcgactctg

SEQ ID NO: 3972113 - DNA, 25 bp, Homo sapien
caagcgactctgagtgcatctcagc

SEQ ID NO: 3972114 - DNA, 25 bp, Homo sapien
ctgaggacacatagtgggtaaggaa

SEQ ID NO: 3972115 - DNA, 25 bp, Homo sapien
tatcatccaccccaggttctgaagg

SEQ ID NO: 3972116 - DNA, 25 bp, Homo sapien
ccaggttctgaagggtcatgtgtgc

SEQ ID NO: 3972117 - DNA, 25 bp, Homo sapien
ctttgaaaagggaccctatcatcca

SEQ ID NO: 3972118 - DNA, 25 bp, Homo sapien
cagaagttgggggcacaggtgtaca

SEQ ID NO: 3972119 - DNA, 25 bp, Homo sapien
ctgggcagggccagaagttgggggc

SEQ ID NO: 3972120 - DNA, 25 bp, Homo sapien
aagttgggggcacaggtgtacattt

SEQ ID NO: 3972121 - DNA, 25 bp, Homo sapien
gcagggccagaagttgggggcacag

SEQ ID NO: 3972122 - DNA, 25 bp, Homo sapien
gtgtatccagcaaatggcttccggg

SEQ ID NO: 3972123 - DNA, 25 bp, Homo sapien
ggctccctgactgcattttctagca

SEQ ID NO: 3972124 - DNA, 25 bp, Homo sapien
ctagattcgatagaaaaatccagag

SEQ ID NO: 3972125 - DNA, 25 bp, Homo sapien
tacccatgcccctagattcgataga

SEQ ID NO: 3972126 - DNA, 25 bp, Homo sapien
tgcagttccagggagtgagagcaga

SEQ ID NO: 3972127 - DNA, 25 bp, Homo sapien
ggctaaatgcacaaccatatggtcc

SEQ ID NO: 3972128 - DNA, 25 bp, Homo sapien
cagggctaaatgcacaaccatatgg

SEQ ID NO: 3972129 - DNA, 25 bp, Homo sapien
gccagggctaaatgcacaaccatat

SEQ ID NO: 3972130 - DNA, 25 bp, Homo sapien
cttgtctctaatggaattgggatgg

SEQ ID NO: 3972131 - DNA, 25 bp, Homo sapien
tgtttgaggcttgtctctaatggaa

SEQ ID NO: 3972132 - DNA, 25 bp, Homo sapien
ttgtctctaatggaattgggatggg

SEQ ID NO: 3972133 - DNA, 25 bp, Homo sapien
ttgaggcttgtctctaatggaattg

SEQ ID NO: 3972134 - DNA, 25 bp, Homo sapien
cccctggagctccacaggatagcac

SEQ ID NO: 3972135 - DNA, 25 bp, Homo sapien
ctggagctccacaggatagcactgt

SEQ ID NO: 3972136 - DNA, 25 bp, Homo sapien
tggaggggtaagtggacggatggaa

SEQ ID NO: 3972137 - DNA, 25 bp, Homo sapien
aagtggacggatggaagatttgagc

SEQ ID NO: 3972138 - DNA, 25 bp, Homo sapien
caggtagcatcataaacggtctaca

SEQ ID NO: 3972139 - DNA, 25 bp, Homo sapien
cataaacggtctacactctcttctt

SEQ ID NO: 3972140 - DNA, 25 bp, Homo sapien
gcatcataaacggtctacactctct

SEQ ID NO: 3972141 - DNA, 25 bp, Homo sapien
ggtagcatcataaacggtctacact

SEQ ID NO: 3972142 - DNA, 25 bp, Homo sapien
cagagcctttattgcttgtctcaaa

SEQ ID NO: 3972143 - DNA, 25 bp, Homo sapien
tccaaacacagtggggttgtacaag

SEQ ID NO: 3972144 - DNA, 25 bp, Homo sapien
acggcaggaacaaaccagtctttga

SEQ ID NO: 3972145 - DNA, 25 bp, Homo sapien
acagtggggttgtacaagtgtcaca

SEQ ID NO: 3972146 - DNA, 25 bp, Homo sapien
agtgtccagaacagccatgtgaggg

SEQ ID NO: 3972147 - DNA, 25 bp, Homo sapien
ctgctcagtgtccagaacagccatg

SEQ ID NO: 3972148 - DNA, 25 bp, Homo sapien
ccatgtgagggttgaaggaggattg

SEQ ID NO: 3972149 - DNA, 25 bp, Homo sapien
ttgaaggaggattgtgctgagtcag

SEQ ID NO: 3972150 - DNA, 25 bp, Homo sapien
tagacaacacattcctggattgaat

SEQ ID NO: 3972151 - DNA, 25 bp, Homo sapien
gacaacacattcctggattgaatta

SEQ ID NO: 3972152 - DNA, 25 bp, Homo sapien
gggatgtagacaacacattcctgga

SEQ ID NO: 3972153 - DNA, 25 bp, Homo sapien
atgtagacaacacattcctggattg

SEQ ID NO: 3972154 - DNA, 25 bp, Homo sapien
cctttcctgttgaaggaatgtccat

SEQ ID NO: 3972155 - DNA, 25 bp, Homo sapien
ccatcccacacggtgtgtggttctg

SEQ ID NO: 3972156 - DNA, 25 bp, Homo sapien
catttccatcccacacggtgtgtgg

SEQ ID NO: 3972157 - DNA, 25 bp, Homo sapien
ttctgggggattgatcacagcagct

SEQ ID NO: 3972158 - DNA, 25 bp, Homo sapien
tgaaaatccatcaaacttgcctctc

SEQ ID NO: 3972159 - DNA, 25 bp, Homo sapien
tgccctgaggaggtacggggaggtg

SEQ ID NO: 3972160 - DNA, 25 bp, Homo sapien
tgaggaggtacggggaggtgtccat

SEQ ID NO: 3972161 - DNA, 25 bp, Homo sapien
ctgaggaggtacggggaggtgtcca

SEQ ID NO: 3972162 - DNA, 25 bp, Homo sapien
tgtatcctgaatcacccatgggatt

SEQ ID NO: 3972163 - DNA, 25 bp, Homo sapien
cccttgcagctcatttggcttcatt

SEQ ID NO: 3972164 - DNA, 25 bp, Homo sapien
ttatgccttctcagacgctcccagg

SEQ ID NO: 3972165 - DNA, 25 bp, Homo sapien
tgactcttcgacattccccttgcag

SEQ ID NO: 3972166 - DNA, 25 bp, Homo sapien
gaaaatgaatttgaaggagcttggc

SEQ ID NO: 3972167 - DNA, 25 bp, Homo sapien
tgtctccagcataattggacatgtg

SEQ ID NO: 3972168 - DNA, 25 bp, Homo sapien
taattggacatgtgggaaaatgaat

SEQ ID NO: 3972169 - DNA, 25 bp, Homo sapien
cagcataattggacatgtgggaaaa

SEQ ID NO: 3972170 - DNA, 25 bp, Homo sapien
ttcctatttgtgcaactgcgatgga

SEQ ID NO: 3972171 - DNA, 25 bp, Homo sapien
ggtctgggtactgtgtgtctgccct

SEQ ID NO: 3972172 - DNA, 25 bp, Homo sapien
gcactggtctgggtactgtgtgtct

SEQ ID NO: 3972173 - DNA, 25 bp, Homo sapien
gcaactgcgatggattctgaaggag

SEQ ID NO: 3972174 - DNA, 25 bp, Homo sapien
gagtgaataaccagactgcagttta

SEQ ID NO: 3972175 - DNA, 25 bp, Homo sapien
tgggtgagtgaataaccagactgca

SEQ ID NO: 3972176 - DNA, 25 bp, Homo sapien
ggtgagtgaataaccagactgcagt

SEQ ID NO: 3972177 - DNA, 25 bp, Homo sapien
gtgaataaccagactgcagtttaga

SEQ ID NO: 3972178 - DNA, 25 bp, Homo sapien
tatacttgggcaactttaatttgta

SEQ ID NO: 3972179 - DNA, 25 bp, Homo sapien
gaaggaagtccggcttggacctgct

SEQ ID NO: 3972180 - DNA, 25 bp, Homo sapien
tgactataatgtgcaggaaacttta

SEQ ID NO: 3972181 - DNA, 25 bp, Homo sapien
gagatgatgcttccgcgagttttca

SEQ ID NO: 3972182 - DNA, 25 bp, Homo sapien
cactaactgtgccaggggtcccttg

SEQ ID NO: 3972183 - DNA, 25 bp, Homo sapien
cttaagatgccactaactgtgccag

SEQ ID NO: 3972184 - DNA, 25 bp, Homo sapien
ctaactgtgccaggggtcccttgcc

SEQ ID NO: 3972185 - DNA, 25 bp, Homo sapien
taagatgccactaactgtgccaggg

SEQ ID NO: 3972186 - DNA, 25 bp, Homo sapien
tggacatcctccttactccagttgg

SEQ ID NO: 3972187 - DNA, 25 bp, Homo sapien
tgcatggacgccttgctcaactgtc

SEQ ID NO: 3972188 - DNA, 25 bp, Homo sapien
taagccacctctgcacgtggaagct

SEQ ID NO: 3972189 - DNA, 25 bp, Homo sapien
ggtcctgaatccatgcacaaagctg

SEQ ID NO: 3972190 - DNA, 25 bp, Homo sapien
ctggaatgagggactgaaatggaag

SEQ ID NO: 3972191 - DNA, 25 bp, Homo sapien
tcctggcactcagatggcttgtcat

SEQ ID NO: 3972192 - DNA, 25 bp, Homo sapien
gggactgaaatggaagtgagtctca

SEQ ID NO: 3972193 - DNA, 25 bp, Homo sapien
cactcagatggcttgtcatatttct

SEQ ID NO: 3972194 - DNA, 25 bp, Homo sapien
taaggaacatcagcggactctcaga

SEQ ID NO: 3972195 - DNA, 25 bp, Homo sapien
catggccggtacctgacagctgtga

SEQ ID NO: 3972196 - DNA, 25 bp, Homo sapien
tatgtgccagcgaactgagaaggtc

SEQ ID NO: 3972197 - DNA, 25 bp, Homo sapien
tgccacgggcagatttaaagtcact

SEQ ID NO: 3972198 - DNA, 25 bp, Homo sapien
gatatgcgctcatagataactggca

SEQ ID NO: 3972199 - DNA, 25 bp, Homo sapien
tcagatccctatgaaattagtccag

SEQ ID NO: 3972200 - DNA, 25 bp, Homo sapien
tgttgtccctgaacaagatgcttcc

SEQ ID NO: 3972201 - DNA, 25 bp, Homo sapien
ggctgcccttgttagcgctgaaact

SEQ ID NO: 3972202 - DNA, 25 bp, Homo sapien
tatcttacaaggcaaacaccagcag

SEQ ID NO: 3972203 - DNA, 25 bp, Homo sapien
caaacagtggccaagacgttgcagt

SEQ ID NO: 3972204 - DNA, 25 bp, Homo sapien
gaaaagaactgtgcatcccagcatg

SEQ ID NO: 3972205 - DNA, 25 bp, Homo sapien
gaaaagtggccaccagtactcgatc

SEQ ID NO: 3972206 - DNA, 25 bp, Homo sapien
agtttgctttacagcccaagttaca

SEQ ID NO: 3972207 - DNA, 25 bp, Homo sapien
aaaatgttccagttgaatggaactg

SEQ ID NO: 3972208 - DNA, 25 bp, Homo sapien
tggagcactgcatcaggtttttcac

SEQ ID NO: 3972209 - DNA, 25 bp, Homo sapien
agaagccccaaaggatcacaagaag

SEQ ID NO: 3972210 - DNA, 25 bp, Homo sapien
ttttacatgtccatattgtattttt

SEQ ID NO: 3972211 - DNA, 25 bp, Homo sapien
gtctttttacatgtccatattgtat

SEQ ID NO: 3972212 - DNA, 25 bp, Homo sapien
tttgtctttttacatgtccatattg

SEQ ID NO: 3972213 - DNA, 25 bp, Homo sapien
tgtctttttacatgtccatattgta

SEQ ID NO: 3972214 - DNA, 25 bp, Homo sapien
ggaagcaccgagaccttctttttca

SEQ ID NO: 3972215 - DNA, 25 bp, Homo sapien
ttttgtggttatgtggctggaagca

SEQ ID NO: 3972216 - DNA, 25 bp, Homo sapien
aggagcagccattgattttgtggtt

SEQ ID NO: 3972217 - DNA, 25 bp, Homo sapien
ttaaagataatagggtggacagagc

SEQ ID NO: 3972218 - DNA, 25 bp, Homo sapien
aaatacagaggtgtgtattgcccga

SEQ ID NO: 3972219 - DNA, 25 bp, Homo sapien
tattgcccgacacattggatttcag

SEQ ID NO: 3972220 - DNA, 25 bp, Homo sapien
gaggtgtgtattgcccgacacattg

SEQ ID NO: 3972221 - DNA, 25 bp, Homo sapien
gcccgacacattggatttcagcttc

SEQ ID NO: 3972222 - DNA, 25 bp, Homo sapien
cccagtgattagcatttggaaagcc

SEQ ID NO: 3972223 - DNA, 25 bp, Homo sapien
gcttaattttgccaagccccacgga

SEQ ID NO: 3972224 - DNA, 25 bp, Homo sapien
tgagctcagcaatgaagggatccat

SEQ ID NO: 3972225 - DNA, 25 bp, Homo sapien
tcagctgcgtaaaacaagtggacac

SEQ ID NO: 3972226 - DNA, 25 bp, Homo sapien
ttatcgctggtctggtcccaagcag

SEQ ID NO: 3972227 - DNA, 25 bp, Homo sapien
ggcaggcacggacagccttacattg

SEQ ID NO: 3972228 - DNA, 25 bp, Homo sapien
tgactgaaacctgccaaaagatatc

SEQ ID NO: 3972229 - DNA, 25 bp, Homo sapien
ctgaagcccagagctaatgcctgtc

SEQ ID NO: 3972230 - DNA, 25 bp, Homo sapien
cagccttacattgttcccaaggaac

SEQ ID NO: 3972231 - DNA, 25 bp, Homo sapien
ttttttgaattaagtttgcagaagc

SEQ ID NO: 3972232 - DNA, 25 bp, Homo sapien
aagctggcaatatgataacagctgc

SEQ ID NO: 3972233 - DNA, 25 bp, Homo sapien
ttgaattaagtttgcagaagctggc

SEQ ID NO: 3972234 - DNA, 25 bp, Homo sapien
acagctgcttcagcaaggcagccca

SEQ ID NO: 3972235 - DNA, 25 bp, Homo sapien
tgggggggacagcttgtcctccatg

SEQ ID NO: 3972236 - DNA, 25 bp, Homo sapien
gggggggacagcttgtcctccatgg

SEQ ID NO: 3972237 - DNA, 25 bp, Homo sapien
ctgggggggacagcttgtcctccat

SEQ ID NO: 3972238 - DNA, 25 bp, Homo sapien
aaccacagaactaagagtcagcttc

SEQ ID NO: 3972239 - DNA, 25 bp, Homo sapien
ctgcaaccacagaactaagagtcag

SEQ ID NO: 3972240 - DNA, 25 bp, Homo sapien
tgcaaccacagaactaagagtcagc

SEQ ID NO: 3972241 - DNA, 25 bp, Homo sapien
gcaaccacagaactaagagtcagct

SEQ ID NO: 3972242 - DNA, 25 bp, Homo sapien
cagggtaatacccaattttgagctc

SEQ ID NO: 3972243 - DNA, 25 bp, Homo sapien
gtgtccatttccaatcgagttgaat

SEQ ID NO: 3972244 - DNA, 25 bp, Homo sapien
tttccaatcgagttgaatacacaat

SEQ ID NO: 3972245 - DNA, 25 bp, Homo sapien
gttgagcatgctggcttgtatggca

SEQ ID NO: 3972246 - DNA, 25 bp, Homo sapien
tccacaggccacgaagaccagaaag

SEQ ID NO: 3972247 - DNA, 25 bp, Homo sapien
ataacaagttccactccacacactg

SEQ ID NO: 3972248 - DNA, 25 bp, Homo sapien
ggaaaaaggccccataaagcaatgc

SEQ ID NO: 3972249 - DNA, 25 bp, Homo sapien
taacccagcctgatccttaagggca

SEQ ID NO: 3972250 - DNA, 25 bp, Homo sapien
ggtttcggtaatacagtgtagccat

SEQ ID NO: 3972251 - DNA, 25 bp, Homo sapien
ccagaaacgcaatgtttaaagtgct

SEQ ID NO: 3972252 - DNA, 25 bp, Homo sapien
ctggtttcggtaatacagtgtagcc

SEQ ID NO: 3972253 - DNA, 25 bp, Homo sapien
gtgctctggtttcggtaatacagtg

SEQ ID NO: 3972254 - DNA, 25 bp, Homo sapien
agccaggagtctggtgtggaaataa

SEQ ID NO: 3972255 - DNA, 25 bp, Homo sapien
cccccttcccggagccaggagtctg

SEQ ID NO: 3972256 - DNA, 25 bp, Homo sapien
ggagccaggagtctggtgtggaaat

SEQ ID NO: 3972257 - DNA, 25 bp, Homo sapien
ccaggagtctggtgtggaaataagc

SEQ ID NO: 3972258 - DNA, 25 bp, Homo sapien
ctggactggctctcaagcgcctctt

SEQ ID NO: 3972259 - DNA, 25 bp, Homo sapien
tctctggtggaagattaacgggccg

SEQ ID NO: 3972260 - DNA, 25 bp, Homo sapien
aacgggccgccaaagcatcccattg

SEQ ID NO: 3972261 - DNA, 25 bp, Homo sapien
tttcctcgcttctatcttcccaggc

SEQ ID NO: 3972262 - DNA, 25 bp, Homo sapien
gtgctccgtgctagaagattgaaat

SEQ ID NO: 3972263 - DNA, 25 bp, Homo sapien
gattgaaatttacctcctgtatttc

SEQ ID NO: 3972264 - DNA, 25 bp, Homo sapien
ttccaggattagctgacataatggg

SEQ ID NO: 3972265 - DNA, 25 bp, Homo sapien
agaatattgattaagtgctccgtgc

SEQ ID NO: 3972266 - DNA, 25 bp, Homo sapien
ttgccaaaggcttgaattgcatttt

SEQ ID NO: 3972267 - DNA, 25 bp, Homo sapien
ctggctgccacacggtcacatcgga

SEQ ID NO: 3972268 - DNA, 25 bp, Homo sapien
cttgttcttaacccggagggcagtg

SEQ ID NO: 3972269 - DNA, 25 bp, Homo sapien
taaatttgcacacggtggcaaaaca

SEQ ID NO: 3972270 - DNA, 25 bp, Homo sapien
ggctactggagtctatgtagttggg

SEQ ID NO: 3972271 - DNA, 25 bp, Homo sapien
aatttcaagcactcttctaggtcgt

SEQ ID NO: 3972272 - DNA, 25 bp, Homo sapien
accatggggccacactgaggctact

SEQ ID NO: 3972273 - DNA, 25 bp, Homo sapien
cgttcccactgttgctgcagtcaca

SEQ ID NO: 3972274 - DNA, 25 bp, Homo sapien
gatgctctggtgacaaagaatgtag

SEQ ID NO: 3972275 - DNA, 25 bp, Homo sapien
tctccgggagaggttcttcctagtg

SEQ ID NO: 3972276 - DNA, 25 bp, Homo sapien
tgacgtgtgtgaccctgacacagac

SEQ ID NO: 3972277 - DNA, 25 bp, Homo sapien
tctgtgctgtcattctccgggagag

SEQ ID NO: 3972278 - DNA, 25 bp, Homo sapien
caataagccccgagtaggcgaggag

SEQ ID NO: 3972279 - DNA, 25 bp, Homo sapien
tagacagctgctgacagaccttgac

SEQ ID NO: 3972280 - DNA, 25 bp, Homo sapien
tggtaaaaaaatccgcaaggcgaga

SEQ ID NO: 3972281 - DNA, 25 bp, Homo sapien
cgaggaggcagtcagcgtagttttc

SEQ ID NO: 3972282 - DNA, 25 bp, Homo sapien
gctgctgaacagctctctgacctgg

SEQ ID NO: 3972283 - DNA, 25 bp, Homo sapien
gacctggcagcccaatgctcccggc

SEQ ID NO: 3972284 - DNA, 25 bp, Homo sapien
tgacctggcagcccaatgctcccgg

SEQ ID NO: 3972285 - DNA, 25 bp, Homo sapien
cctggctgctgaacagctctctgac

SEQ ID NO: 3972286 - DNA, 25 bp, Homo sapien
agatatgcttcagacctactgtgtg

SEQ ID NO: 3972287 - DNA, 25 bp, Homo sapien
gaagagcaagaaatttgccaggagg

SEQ ID NO: 3972288 - DNA, 25 bp, Homo sapien
caatgggaagagcaagaaatttgcc

SEQ ID NO: 3972289 - DNA, 25 bp, Homo sapien
gccctcactgttccagcagcaatgg

SEQ ID NO: 3972290 - DNA, 25 bp, Homo sapien
ttgagttcctgatgctgtggacagc

SEQ ID NO: 3972291 - DNA, 25 bp, Homo sapien
acatgttgttagagctctggctgct

SEQ ID NO: 3972292 - DNA, 25 bp, Homo sapien
tcaccaactgcagcctgagcaccta

SEQ ID NO: 3972293 - DNA, 25 bp, Homo sapien
tgcttctgtccagtcaccaactgca

SEQ ID NO: 3972294 - DNA, 25 bp, Homo sapien
gagttccggcgatgcagatggaatc

SEQ ID NO: 3972295 - DNA, 25 bp, Homo sapien
ctgagaatggagttccggcgatgca

SEQ ID NO: 3972296 - DNA, 25 bp, Homo sapien
ttccggcgatgcagatggaatcccc

SEQ ID NO: 3972297 - DNA, 25 bp, Homo sapien
tggagttccggcgatgcagatggaa

SEQ ID NO: 3972298 - DNA, 25 bp, Homo sapien
tccctgcgtcctgccttgggtatct

SEQ ID NO: 3972299 - DNA, 25 bp, Homo sapien
cagtccctgcgtcctgccttgggta

SEQ ID NO: 3972300 - DNA, 25 bp, Homo sapien
tatttcagtccctgcgtcctgcctt

SEQ ID NO: 3972301 - DNA, 25 bp, Homo sapien
ttcagtccctgcgtcctgccttggg

SEQ ID NO: 3972302 - DNA, 25 bp, Homo sapien
tgtggaccctctactggtctggcaa

SEQ ID NO: 3972303 - DNA, 25 bp, Homo sapien
tctggcaattgaagcatcaagcctg

SEQ ID NO: 3972304 - DNA, 25 bp, Homo sapien
gaaggtgctgtctgtaccctcagaa

SEQ ID NO: 3972305 - DNA, 25 bp, Homo sapien
tgaggtaagtatcacagcatcttga

SEQ ID NO: 3972306 - DNA, 25 bp, Homo sapien
taggaattccgactgctgggtgctt

SEQ ID NO: 3972307 - DNA, 25 bp, Homo sapien
tgcttcccgggacctgaaacttcca

SEQ ID NO: 3972308 - DNA, 25 bp, Homo sapien
tctaagggttagcccagggacactg

SEQ ID NO: 3972309 - DNA, 25 bp, Homo sapien
gcttgccggcttttccgattctaag

SEQ ID NO: 3972310 - DNA, 25 bp, Homo sapien
aggggctccagcgcttggctggggc

SEQ ID NO: 3972311 - DNA, 25 bp, Homo sapien
ggggctccagcgcttggctggggca

SEQ ID NO: 3972312 - DNA, 25 bp, Homo sapien
gaggggctccagcgcttggctgggg

SEQ ID NO: 3972313 - DNA, 25 bp, Homo sapien
ggaggggctccagcgcttggctggg

SEQ ID NO: 3972314 - DNA, 25 bp, Homo sapien
ctggttgttgctctgcgacagcaaa

SEQ ID NO: 3972315 - DNA, 25 bp, Homo sapien
tctgcgacagcaaagaattcatctg

SEQ ID NO: 3972316 - DNA, 25 bp, Homo sapien
ctggatgaccccaaactggtgacac

SEQ ID NO: 3972317 - DNA, 25 bp, Homo sapien
gatgaccccaaactggtgacaccat

SEQ ID NO: 3972318 - DNA, 25 bp, Homo sapien
ggcctcctaggtggattccattcca

SEQ ID NO: 3972319 - DNA, 25 bp, Homo sapien
gagaccctctgctgtgacactgctt

SEQ ID NO: 3972320 - DNA, 25 bp, Homo sapien
tccaccaaggcctgatctgaacatg

SEQ ID NO: 3972321 - DNA, 25 bp, Homo sapien
cactcgaagacgataaaagatggtc

SEQ ID NO: 3972322 - DNA, 25 bp, Homo sapien
gctgagtggagctgaagggccacac

SEQ ID NO: 3972323 - DNA, 25 bp, Homo sapien
tctgagagcccgagctgatagagct

SEQ ID NO: 3972324 - DNA, 25 bp, Homo sapien
ctgagagcccgagctgatagagctc

SEQ ID NO: 3972325 - DNA, 25 bp, Homo sapien
ctctgagagcccgagctgatagagc

SEQ ID NO: 3972326 - DNA, 25 bp, Homo sapien
ggaagaacaagtgtatcatatctcc

SEQ ID NO: 3972327 - DNA, 25 bp, Homo sapien
gactgaggacatagagccgctgacc

SEQ ID NO: 3972328 - DNA, 25 bp, Homo sapien
agtgtatcatatctccagcagggtc

SEQ ID NO: 3972329 - DNA, 25 bp, Homo sapien
tagagccgctgaccaatttcctttt

SEQ ID NO: 3972330 - DNA, 25 bp, Homo sapien
gaaacatgagggagcatgcccaagg

SEQ ID NO: 3972331 - DNA, 25 bp, Homo sapien
ggaccgcctggtaatgaagaatagc

SEQ ID NO: 3972332 - DNA, 25 bp, Homo sapien
ttggcactggaagcagaaggcgttt

SEQ ID NO: 3972333 - DNA, 25 bp, Homo sapien
cctctgtggttcttcgatggaaaca

SEQ ID NO: 3972334 - DNA, 25 bp, Homo sapien
gcttttctgtagacaagcttggagg

SEQ ID NO: 3972335 - DNA, 25 bp, Homo sapien
ggaggcccaaacagtcaggctctga

SEQ ID NO: 3972336 - DNA, 25 bp, Homo sapien
tagacaagcttggaggcccaaacag

SEQ ID NO: 3972337 - DNA, 25 bp, Homo sapien
gcttggaggcccaaacagtcaggct

SEQ ID NO: 3972338 - DNA, 25 bp, Homo sapien
caaccctcaaaggatactctctttt

SEQ ID NO: 3972339 - DNA, 25 bp, Homo sapien
tctcaatatgtgtgggggaggtctc

SEQ ID NO: 3972340 - DNA, 25 bp, Homo sapien
caaaggatactctctttttagaaga

SEQ ID NO: 3972341 - DNA, 25 bp, Homo sapien
ttatctgctcaatatgggctttctc

SEQ ID NO: 3972342 - DNA, 25 bp, Homo sapien
taagacgcttggtcatccgagtcct

SEQ ID NO: 3972343 - DNA, 25 bp, Homo sapien
catacagcaggtcacttgcttccaa

SEQ ID NO: 3972344 - DNA, 25 bp, Homo sapien
tccgagtccttcctcatacagcagg

SEQ ID NO: 3972345 - DNA, 25 bp, Homo sapien
ttcccaagatgcaaactcagttcat

SEQ ID NO: 3972346 - DNA, 25 bp, Homo sapien
caaatgtcgtcgaggttgcaggcct

SEQ ID NO: 3972347 - DNA, 25 bp, Homo sapien
gtaattcgtcttgcaggagtcctgc

SEQ ID NO: 3972348 - DNA, 25 bp, Homo sapien
cggcggttgcagacatcgttggaca

SEQ ID NO: 3972349 - DNA, 25 bp, Homo sapien
ttgtcaaagaactgccggagggcct

SEQ ID NO: 3972350 - DNA, 25 bp, Homo sapien
ccttctgcccaagccctgtgcactc

SEQ ID NO: 3972351 - DNA, 25 bp, Homo sapien
ctgcccaagccctgtgcactcatac

SEQ ID NO: 3972352 - DNA, 25 bp, Homo sapien
agagcatatgctgccttctgcccaa

SEQ ID NO: 3972353 - DNA, 25 bp, Homo sapien
ttctgcccaagccctgtgcactcat

SEQ ID NO: 3972354 - DNA, 25 bp, Homo sapien
ggccaagcccaacagcaaggttaaa

SEQ ID NO: 3972355 - DNA, 25 bp, Homo sapien
gccctgtccccaatagaggaatgtt

SEQ ID NO: 3972356 - DNA, 25 bp, Homo sapien
aggcagggcccactcggtgcctggg

SEQ ID NO: 3972357 - DNA, 25 bp, Homo sapien
ctgtctgcagcgagagcatggtgga

SEQ ID NO: 3972358 - DNA, 25 bp, Homo sapien
tgggcttctgatatccacacggatc

SEQ ID NO: 3972359 - DNA, 25 bp, Homo sapien
ccttgtaactgatccttcaagagct

SEQ ID NO: 3972360 - DNA, 25 bp, Homo sapien
tgatcatacaggttgtgacccttgt

SEQ ID NO: 3972361 - DNA, 25 bp, Homo sapien
cacacggatcgtatggcaaatttga

SEQ ID NO: 3972362 - DNA, 25 bp, Homo sapien
cttgctgctgcgcaatgattaatag

SEQ ID NO: 3972363 - DNA, 25 bp, Homo sapien
caatgattaatagtgctgtcccaga

SEQ ID NO: 3972364 - DNA, 25 bp, Homo sapien
caggtgaggcgcctggtaaggtgta

SEQ ID NO: 3972365 - DNA, 25 bp, Homo sapien
caggagttgatgcttcaggtgaggc

SEQ ID NO: 3972366 - DNA, 25 bp, Homo sapien
gccacatctgactaaactgggctca

SEQ ID NO: 3972367 - DNA, 25 bp, Homo sapien
atcccctgggagtccttcccatgag

SEQ ID NO: 3972368 - DNA, 25 bp, Homo sapien
catgagccacatctgactaaactgg

SEQ ID NO: 3972369 - DNA, 25 bp, Homo sapien
gagtccttcccatgagccacatctg

SEQ ID NO: 3972370 - DNA, 25 bp, Homo sapien
caagcatctgtacaagctccaggca

SEQ ID NO: 3972371 - DNA, 25 bp, Homo sapien
cctggtactgctactctctgtggac

SEQ ID NO: 3972372 - DNA, 25 bp, Homo sapien
tctgtggactgcttactgttggaac

SEQ ID NO: 3972373 - DNA, 25 bp, Homo sapien
gttggaacagatatcaaggcaagca

SEQ ID NO: 3972374 - DNA, 25 bp, Homo sapien
cctctctgtgaatgaagcaagttgg

SEQ ID NO: 3972375 - DNA, 25 bp, Homo sapien
gacatgaggaaacccctggcagaga

SEQ ID NO: 3972376 - DNA, 25 bp, Homo sapien
cacacctgttagaaggccaaatggg

SEQ ID NO: 3972377 - DNA, 25 bp, Homo sapien
ggcaccaggaactgatggttaccaa

SEQ ID NO: 3972378 - DNA, 25 bp, Homo sapien
ccactttagggagagtaatcaggga

SEQ ID NO: 3972379 - DNA, 25 bp, Homo sapien
taagtgcaatgggaaatcacgattc

SEQ ID NO: 3972380 - DNA, 25 bp, Homo sapien
tgtggaatcacacatcaccgtcttc

SEQ ID NO: 3972381 - DNA, 25 bp, Homo sapien
aagccagtaccccacgctgtggaat

SEQ ID NO: 3972382 - DNA, 25 bp, Homo sapien
taaaccagttcccatgctgggtggc

SEQ ID NO: 3972383 - DNA, 25 bp, Homo sapien
tgaggacctgctaagtacaaggcac

SEQ ID NO: 3972384 - DNA, 25 bp, Homo sapien
cctgaagtttcccatgtgatcaaaa

SEQ ID NO: 3972385 - DNA, 25 bp, Homo sapien
cacaggaggaagtatcatgctggtc

SEQ ID NO: 3972386 - DNA, 25 bp, Homo sapien
cgacgtaggtacatgagatcaggct

SEQ ID NO: 3972387 - DNA, 25 bp, Homo sapien
taaactcggagcaactgtaccaaag

SEQ ID NO: 3972388 - DNA, 25 bp, Homo sapien
ctttaagagtgttagaggtcccagg

SEQ ID NO: 3972389 - DNA, 25 bp, Homo sapien
ttatcaaacagacgctaaactcgga

SEQ ID NO: 3972390 - DNA, 25 bp, Homo sapien
gaatacacgtcaagtccttccacgg

SEQ ID NO: 3972391 - DNA, 25 bp, Homo sapien
gatgagacccggttaaatgttccca

SEQ ID NO: 3972392 - DNA, 25 bp, Homo sapien
atgcttcccttgtccctagaataca

SEQ ID NO: 3972393 - DNA, 25 bp, Homo sapien
tccacggtgtttaccctcagccctg

SEQ ID NO: 3972394 - DNA, 25 bp, Homo sapien
ggctgaggcaacatgcccccttcta

SEQ ID NO: 3972395 - DNA, 25 bp, Homo sapien
ggcaacatgcccccttctaattttc

SEQ ID NO: 3972396 - DNA, 25 bp, Homo sapien
ctgaggcaacatgcccccttctaat

SEQ ID NO: 3972397 - DNA, 25 bp, Homo sapien
ggggctgaggcaacatgcccccttc

SEQ ID NO: 3972398 - DNA, 25 bp, Homo sapien
agcagagaagaaccggtctcctaag

SEQ ID NO: 3972399 - DNA, 25 bp, Homo sapien
gaaccggtctcctaagagacacaaa

SEQ ID NO: 3972400 - DNA, 25 bp, Homo sapien
gaagaaccggtctcctaagagacac

SEQ ID NO: 3972401 - DNA, 25 bp, Homo sapien
ccggtctcctaagagacacaaatcc

SEQ ID NO: 3972402 - DNA, 25 bp, Homo sapien
aatggatagagaggcccaggttgag

SEQ ID NO: 3972403 - DNA, 25 bp, Homo sapien
ctttcctgcaaagctactcgccgtg

SEQ ID NO: 3972404 - DNA, 25 bp, Homo sapien
agctactcgccgtgttttcctctct

SEQ ID NO: 3972405 - DNA, 25 bp, Homo sapien
tttattgtgggccacccaggttggc

SEQ ID NO: 3972406 - DNA, 25 bp, Homo sapien
cagctgtcttgcgagtcctcctgtg

SEQ ID NO: 3972407 - DNA, 25 bp, Homo sapien
gagacagctgtcttgcgagtcctcc

SEQ ID NO: 3972408 - DNA, 25 bp, Homo sapien
gacagctgtcttgcgagtcctcctg

SEQ ID NO: 3972409 - DNA, 25 bp, Homo sapien
gggagacagctgtcttgcgagtcct

SEQ ID NO: 3972410 - DNA, 25 bp, Homo sapien
tacttgttgagtacccacggcactc

SEQ ID NO: 3972411 - DNA, 25 bp, Homo sapien
gcaccaaaggattatggccaccgga

SEQ ID NO: 3972412 - DNA, 25 bp, Homo sapien
taccaagtggacacccggagtaatc

SEQ ID NO: 3972413 - DNA, 25 bp, Homo sapien
tgggctctccaaaggtgacaggatg

SEQ ID NO: 3972414 - DNA, 25 bp, Homo sapien
tctacctgggtttggatgtaggccg

SEQ ID NO: 3972415 - DNA, 25 bp, Homo sapien
tcctccaggcacaataaggttgctc

SEQ ID NO: 3972416 - DNA, 25 bp, Homo sapien
tgctcaaactgaacagagccccggt

SEQ ID NO: 3972417 - DNA, 25 bp, Homo sapien
gagccccggtgagccttggtaatag

SEQ ID NO: 3972418 - DNA, 25 bp, Homo sapien
ataaaaatgcgtggtctcagaagcc

SEQ ID NO: 3972419 - DNA, 25 bp, Homo sapien
cctgacataaaaatgcgtggtctca

SEQ ID NO: 3972420 - DNA, 25 bp, Homo sapien
ttccttcccaacatgagcatcctca

SEQ ID NO: 3972421 - DNA, 25 bp, Homo sapien
cacagttcgtgtgctgcttcgttca

SEQ ID NO: 3972422 - DNA, 25 bp, Homo sapien
ctgatccaagtggtagctcgatgag

SEQ ID NO: 3972423 - DNA, 25 bp, Homo sapien
cgatgagcattaatacatattgcca

SEQ ID NO: 3972424 - DNA, 25 bp, Homo sapien
ttgccacatgatgcagatgagtttg

SEQ ID NO: 3972425 - DNA, 25 bp, Homo sapien
gatccaagtggtagctcgatgagca

SEQ ID NO: 3972426 - DNA, 25 bp, Homo sapien
ctgataggatggtcaaattggatat

SEQ ID NO: 3972427 - DNA, 25 bp, Homo sapien
gataggatggtcaaattggatattt

SEQ ID NO: 3972428 - DNA, 25 bp, Homo sapien
aggatggtcaaattggatatttttc

SEQ ID NO: 3972429 - DNA, 25 bp, Homo sapien
tggtcaaattggatatttttctaaa

SEQ ID NO: 3972430 - DNA, 25 bp, Homo sapien
gggaaactgggcacgtgtctataag

SEQ ID NO: 3972431 - DNA, 25 bp, Homo sapien
tcaataacccaagaaggcatgtaga

SEQ ID NO: 3972432 - DNA, 25 bp, Homo sapien
tcttctggtcagtatggtaaccgga

SEQ ID NO: 3972433 - DNA, 25 bp, Homo sapien
tcaacctgggctgcacatttaaaat

SEQ ID NO: 3972434 - DNA, 25 bp, Homo sapien
tagatgactgcataaggttgcctta

SEQ ID NO: 3972435 - DNA, 25 bp, Homo sapien
cctccatggagtgaggaattaactt

SEQ ID NO: 3972436 - DNA, 25 bp, Homo sapien
gttgccttaaagaccctatgtagga

SEQ ID NO: 3972437 - DNA, 25 bp, Homo sapien
ggccctggtcaaggaaactctcaca

SEQ ID NO: 3972438 - DNA, 25 bp, Homo sapien
ttgacatgagaccaaaattccctgc

SEQ ID NO: 3972439 - DNA, 25 bp, Homo sapien
tggccccgaacttcttgcagaatgt

SEQ ID NO: 3972440 - DNA, 25 bp, Homo sapien
tgaatccgaccagatctgtggcccc

SEQ ID NO: 3972441 - DNA, 25 bp, Homo sapien
ctttctgggtatttgacatgagacc

SEQ ID NO: 3972442 - DNA, 25 bp, Homo sapien
caagtgaggtatacagctggcgcct

SEQ ID NO: 3972443 - DNA, 25 bp, Homo sapien
catggaggaacaggtcaattgccgc

SEQ ID NO: 3972444 - DNA, 25 bp, Homo sapien
gcagtgcaatgtctcgaggccagta

SEQ ID NO: 3972445 - DNA, 25 bp, Homo sapien
catctagggtaaatatttgccgggc

SEQ ID NO: 3972446 - DNA, 25 bp, Homo sapien
caattgattttcgaagaaattgctt

SEQ ID NO: 3972447 - DNA, 25 bp, Homo sapien
tcctcagctgtgtcacactcgcaca

SEQ ID NO: 3972448 - DNA, 25 bp, Homo sapien
aaattgcaattgattttcgaagaaa

SEQ ID NO: 3972449 - DNA, 25 bp, Homo sapien
ttttcgaagaaattgcttgttctct

SEQ ID NO: 3972450 - DNA, 25 bp, Homo sapien
tgaaacacgtgtcaaggaagatctt

SEQ ID NO: 3972451 - DNA, 25 bp, Homo sapien
ctgaaacacgtgtcaaggaagatct

SEQ ID NO: 3972452 - DNA, 25 bp, Homo sapien
attttatcatatccacacttaacac

SEQ ID NO: 3972453 - DNA, 25 bp, Homo sapien
aattgccaacaggttcatcatcctt

SEQ ID NO: 3972454 - DNA, 25 bp, Homo sapien
gccaacaggttcatcatcctttcaa

SEQ ID NO: 3972455 - DNA, 25 bp, Homo sapien
ttcaaatccctgtttacttctgtgt

SEQ ID NO: 3972456 - DNA, 25 bp, Homo sapien
atccctgtttacttctgtgtctcga

SEQ ID NO: 3972457 - DNA, 25 bp, Homo sapien
actgcttaaaccattgtcctggctg

SEQ ID NO: 3972458 - DNA, 25 bp, Homo sapien
ctgcttaaaccattgtcctggctgg

SEQ ID NO: 3972459 - DNA, 25 bp, Homo sapien
tgcttaaaccattgtcctggctgga

SEQ ID NO: 3972460 - DNA, 25 bp, Homo sapien
ccactgcttaaaccattgtcctggc

SEQ ID NO: 3972461 - DNA, 25 bp, Homo sapien
tctgacaatctgctgttaactggtt

SEQ ID NO: 3972462 - DNA, 25 bp, Homo sapien
tctgctgttaactggttcatatggg

SEQ ID NO: 3972463 - DNA, 25 bp, Homo sapien
gggaccacccggaatatatctgaca

SEQ ID NO: 3972464 - DNA, 25 bp, Homo sapien
ggaatatatctgacaatctgctgtt

SEQ ID NO: 3972465 - DNA, 25 bp, Homo sapien
tacatgctccagtaaatgcgcaggc

SEQ ID NO: 3972466 - DNA, 25 bp, Homo sapien
cagcggcagttgtagagcgacttct

SEQ ID NO: 3972467 - DNA, 25 bp, Homo sapien
ggctttcacgcaatccaggcggtct

SEQ ID NO: 3972468 - DNA, 25 bp, Homo sapien
cactgccttagcgtgcggtacttgg

SEQ ID NO: 3972469 - DNA, 25 bp, Homo sapien
cgaagtacagggtcgccaggaacat

SEQ ID NO: 3972470 - DNA, 25 bp, Homo sapien
gcgcgaagtacagggtcgccaggaa

SEQ ID NO: 3972471 - DNA, 25 bp, Homo sapien
gagcggcagcgcgaagtacagggtc

SEQ ID NO: 3972472 - DNA, 25 bp, Homo sapien
gcagcgcgaagtacagggtcgccag

SEQ ID NO: 3972473 - DNA, 25 bp, Homo sapien
tcttgccgagggagctcagcgtgca

SEQ ID NO: 3972474 - DNA, 25 bp, Homo sapien
aaatcccgagccgccgctgggtctt

SEQ ID NO: 3972475 - DNA, 25 bp, Homo sapien
tcagctccatccagtgaaagaggaa

SEQ ID NO: 3972476 - DNA, 25 bp, Homo sapien
gcgtgcagcgatccccggacagctg

SEQ ID NO: 3972477 - DNA, 25 bp, Homo sapien
gagtccgagccctcggtggcggcgg

SEQ ID NO: 3972478 - DNA, 25 bp, Homo sapien
agctgcctggagtccgagccctcgg

SEQ ID NO: 3972479 - DNA, 25 bp, Homo sapien
cgagcgtcgcgagcggagcctgcag

SEQ ID NO: 3972480 - DNA, 25 bp, Homo sapien
tttccgagcgtcgcgagcggagcct

SEQ ID NO: 3972481 - DNA, 25 bp, Homo sapien
ctctcgcccggtgcccaggactcgg

SEQ ID NO: 3972482 - DNA, 25 bp, Homo sapien
tcctctcacactctcgcccggtgcc

SEQ ID NO: 3972483 - DNA, 25 bp, Homo sapien
ggactcgggcgcttccgcaccccag

SEQ ID NO: 3972484 - DNA, 25 bp, Homo sapien
gcagtcccggcgtgccccggcaggt

SEQ ID NO: 3972485 - DNA, 25 bp, Homo sapien
ctttcagggcaatggtgtccccgcc

SEQ ID NO: 3972486 - DNA, 25 bp, Homo sapien
gcgaggagccagtttgtttatttac

SEQ ID NO: 3972487 - DNA, 25 bp, Homo sapien
tggactcaaccgaccgcgtccagct

SEQ ID NO: 3972488 - DNA, 25 bp, Homo sapien
ctgcggcgaggagccagtttgttta

SEQ ID NO: 3972489 - DNA, 25 bp, Homo sapien
ctcggctcggatgctcgttagggat

SEQ ID NO: 3972490 - DNA, 25 bp, Homo sapien
agaatggcgtgttccgaggccagat

SEQ ID NO: 3972491 - DNA, 25 bp, Homo sapien
aatagatgcggtaatcttcgagagc

SEQ ID NO: 3972492 - DNA, 25 bp, Homo sapien
cgagttgggccaggacgatttccga

SEQ ID NO: 3972493 - DNA, 25 bp, Homo sapien
tctacactgggtcgggagaccggtc

SEQ ID NO: 3972494 - DNA, 25 bp, Homo sapien
ggagaccggtctaggagccagccgg

SEQ ID NO: 3972495 - DNA, 25 bp, Homo sapien
cgaagtctacactgggtcgggagac

SEQ ID NO: 3972496 - DNA, 25 bp, Homo sapien
accggtctaggagccagccggcagt

SEQ ID NO: 3972497 - DNA, 25 bp, Homo sapien
gctttgtccagtaattagcctctct

SEQ ID NO: 3972498 - DNA, 25 bp, Homo sapien
gggcaagagggaagcttaatcccca

SEQ ID NO: 3972499 - DNA, 25 bp, Homo sapien
cctaaaccctgttccaatgggattg

SEQ ID NO: 3972500 - DNA, 25 bp, Homo sapien
gggaacgcctgcacggagaaaacat

SEQ ID NO: 3972501 - DNA, 25 bp, Homo sapien
atggggtcatactcgtctgcccaga

SEQ ID NO: 3972502 - DNA, 25 bp, Homo sapien
tggatttggtgagaatggcttcctc

SEQ ID NO: 3972503 - DNA, 25 bp, Homo sapien
cttcctcatggggtcatactcgtct

SEQ ID NO: 3972504 - DNA, 25 bp, Homo sapien
ctctggatttggtgagaatggcttc

SEQ ID NO: 3972505 - DNA, 25 bp, Homo sapien
catgactcggagatgccttgctggc

SEQ ID NO: 3972506 - DNA, 25 bp, Homo sapien
taaaagccatttgacacgtgggcca

SEQ ID NO: 3972507 - DNA, 25 bp, Homo sapien
tatttcagcagacttgccacagagg

SEQ ID NO: 3972508 - DNA, 25 bp, Homo sapien
tcagtgatccagacgatgacagtaa

SEQ ID NO: 3972509 - DNA, 25 bp, Homo sapien
ccatcaccctgagcttcttgacaga

SEQ ID NO: 3972510 - DNA, 25 bp, Homo sapien
ctttcaggctggtggcaatgtcagc

SEQ ID NO: 3972511 - DNA, 25 bp, Homo sapien
tgagcatccacagacatctgtcctg

SEQ ID NO: 3972512 - DNA, 25 bp, Homo sapien
gacagatcaattgtaaggacaccat

SEQ ID NO: 3972513 - DNA, 25 bp, Homo sapien
tgaagtaggcaaaataggcaacttc

SEQ ID NO: 3972514 - DNA, 25 bp, Homo sapien
tctgccacagccatttttcttgaag

SEQ ID NO: 3972515 - DNA, 25 bp, Homo sapien
aagatactgtatggattttttcctc

SEQ ID NO: 3972516 - DNA, 25 bp, Homo sapien
acttcaagggctctgagagtgacgg

SEQ ID NO: 3972517 - DNA, 25 bp, Homo sapien
cttgtccttgccacgatctatatcc

SEQ ID NO: 3972518 - DNA, 25 bp, Homo sapien
agtactgacataagattgggactta

SEQ ID NO: 3972519 - DNA, 25 bp, Homo sapien
cacgatctatatcctctatcctctt

SEQ ID NO: 3972520 - DNA, 25 bp, Homo sapien
gtactgacataagattgggacttac

SEQ ID NO: 3972521 - DNA, 25 bp, Homo sapien
ctgtcttgccccaactcgtttctct

SEQ ID NO: 3972522 - DNA, 25 bp, Homo sapien
caactcgtttctcttttgagctatt

SEQ ID NO: 3972523 - DNA, 25 bp, Homo sapien
ttctgtcttgccccaactcgtttct

SEQ ID NO: 3972524 - DNA, 25 bp, Homo sapien
tttatccatttggtactggtaacta

SEQ ID NO: 3972525 - DNA, 25 bp, Homo sapien
tatataaacatgttaaacatcatcc

SEQ ID NO: 3972526 - DNA, 25 bp, Homo sapien
gtagtcctccaacacatatataaac

SEQ ID NO: 3972527 - DNA, 25 bp, Homo sapien
catccaactgttgaccccatccaac

SEQ ID NO: 3972528 - DNA, 25 bp, Homo sapien
acatcatccaactgttgaccccatc

SEQ ID NO: 3972529 - DNA, 25 bp, Homo sapien
ctcttagaagattgtaactttggat

SEQ ID NO: 3972530 - DNA, 25 bp, Homo sapien
tcttagaagattgtaactttggatt

SEQ ID NO: 3972531 - DNA, 25 bp, Homo sapien
ggcatacacctagacacaaaagcta

SEQ ID NO: 3972532 - DNA, 25 bp, Homo sapien
taggcatataaatagctggaacaga

SEQ ID NO: 3972533 - DNA, 25 bp, Homo sapien
taggcttacacagagtcagtatcac

SEQ ID NO: 3972534 - DNA, 25 bp, Homo sapien
gtaatcaagataatgtgtcactgcc

SEQ ID NO: 3972535 - DNA, 25 bp, Homo sapien
attctgaacagaacaggaagaatcc

SEQ ID NO: 3972536 - DNA, 25 bp, Homo sapien
tgaacagaacaggaagaatccagac

SEQ ID NO: 3972537 - DNA, 25 bp, Homo sapien
ctaggcgcagaattctgaacagaac

SEQ ID NO: 3972538 - DNA, 25 bp, Homo sapien
tctgaacagaacaggaagaatccag

SEQ ID NO: 3972539 - DNA, 25 bp, Homo sapien
tcatagcgcactttaatcacctttg

SEQ ID NO: 3972540 - DNA, 25 bp, Homo sapien
catagcgcactttaatcacctttgc

SEQ ID NO: 3972541 - DNA, 25 bp, Homo sapien
cacatagacccaacggaatagagaa

SEQ ID NO: 3972542 - DNA, 25 bp, Homo sapien
gcatacctatagctatctgatctct

SEQ ID NO: 3972543 - DNA, 25 bp, Homo sapien
cacctggccaaactgctaaatttct

SEQ ID NO: 3972544 - DNA, 25 bp, Homo sapien
aataggctatctacgcccaaagcaa

SEQ ID NO: 3972545 - DNA, 25 bp, Homo sapien
tcagattatcttttctagaccattt

SEQ ID NO: 3972546 - DNA, 25 bp, Homo sapien
acggtggggtcgctgattcctcctc

SEQ ID NO: 3972547 - DNA, 25 bp, Homo sapien
tattgataactccatcagacggtgg

SEQ ID NO: 3972548 - DNA, 25 bp, Homo sapien
cttctatcaaacgtttccctttcag

SEQ ID NO: 3972549 - DNA, 25 bp, Homo sapien
acaggtaaggcatacaagtccaaat

SEQ ID NO: 3972550 - DNA, 25 bp, Homo sapien
cacaggtaaggcatacaagtccaaa

SEQ ID NO: 3972551 - DNA, 25 bp, Homo sapien
tcacaggtaaggcatacaagtccaa

SEQ ID NO: 3972552 - DNA, 25 bp, Homo sapien
agactctttcttaagagcagctgga

SEQ ID NO: 3972553 - DNA, 25 bp, Homo sapien
tcccctcgctgtctgctccagaaag

SEQ ID NO: 3972554 - DNA, 25 bp, Homo sapien
cgctgtctgctccagaaagactctt

SEQ ID NO: 3972555 - DNA, 25 bp, Homo sapien
ctttcttaagagcagctggatataa

SEQ ID NO: 3972556 - DNA, 25 bp, Homo sapien
cctggctcctgtgcgtaggtcgact

SEQ ID NO: 3972557 - DNA, 25 bp, Homo sapien
agctggtggcgatggactgaactcc

SEQ ID NO: 3972558 - DNA, 25 bp, Homo sapien
tcactgagtgactcgctgtccccgt

SEQ ID NO: 3972559 - DNA, 25 bp, Homo sapien
ggagcaggtagctgttcaaactcac

SEQ ID NO: 3972560 - DNA, 25 bp, Homo sapien
agaccaccccgagggatcgcggcag

SEQ ID NO: 3972561 - DNA, 25 bp, Homo sapien
gaggaggtagatttgagggtgaggg

SEQ ID NO: 3972562 - DNA, 25 bp, Homo sapien
cccgggaggaccagcctctctgagg

SEQ ID NO: 3972563 - DNA, 25 bp, Homo sapien
gagggatcgcggcaggcccgggagg

SEQ ID NO: 3972564 - DNA, 25 bp, Homo sapien
tatgatctggaactgaaaatgtgga

SEQ ID NO: 3972565 - DNA, 25 bp, Homo sapien
catatgggagctgttagtttgctgg

SEQ ID NO: 3972566 - DNA, 25 bp, Homo sapien
tatgtaggcagttatcagctgggaa

SEQ ID NO: 3972567 - DNA, 25 bp, Homo sapien
gaacagatgtccaatgtcacaggct

SEQ ID NO: 3972568 - DNA, 25 bp, Homo sapien
cacagtagacagctggcaccttggg

SEQ ID NO: 3972569 - DNA, 25 bp, Homo sapien
atgtggtcagcaaatgagttttccc

SEQ ID NO: 3972570 - DNA, 25 bp, Homo sapien
ggtgctgaccttcgcttccttccca

SEQ ID NO: 3972571 - DNA, 25 bp, Homo sapien
tggtcagcaaatgagttttcccaca

SEQ ID NO: 3972572 - DNA, 25 bp, Homo sapien
gaatctaaatatagatggaagctgg

SEQ ID NO: 3972573 - DNA, 25 bp, Homo sapien
gaagctggtgtatctccacactctt

SEQ ID NO: 3972574 - DNA, 25 bp, Homo sapien
cacatgccccatcagctgaaaataa

SEQ ID NO: 3972575 - DNA, 25 bp, Homo sapien
ttagtctttggagaatccagacaaa

SEQ ID NO: 3972576 - DNA, 25 bp, Homo sapien
gaccttctgacttctacccatggaa

SEQ ID NO: 3972577 - DNA, 25 bp, Homo sapien
acaggtcctgcagtggtttgttgcc

SEQ ID NO: 3972578 - DNA, 25 bp, Homo sapien
tgctctcaggccaaggtgacaggtc

SEQ ID NO: 3972579 - DNA, 25 bp, Homo sapien
gagccacgtgatacaaaaacatctg

SEQ ID NO: 3972580 - DNA, 25 bp, Homo sapien
tattcccacatgacaaaaaacggtc

SEQ ID NO: 3972581 - DNA, 25 bp, Homo sapien
caaaaaacggtctttatcattaatg

SEQ ID NO: 3972582 - DNA, 25 bp, Homo sapien
tatcattaatgacatgcaaccgtca

SEQ ID NO: 3972583 - DNA, 25 bp, Homo sapien
tgcaaccgtcaaccactcaggatgc

SEQ ID NO: 3972584 - DNA, 25 bp, Homo sapien
tgcatggtatacttggcctctgagc

SEQ ID NO: 3972585 - DNA, 25 bp, Homo sapien
cactgggcgtgattccaacatgaga

SEQ ID NO: 3972586 - DNA, 25 bp, Homo sapien
catactttgcggaggacagtggctc

SEQ ID NO: 3972587 - DNA, 25 bp, Homo sapien
gcacagccacatgtcagcggagttt

SEQ ID NO: 3972588 - DNA, 25 bp, Homo sapien
gaaccgtccgtgtgagttgcaggga

SEQ ID NO: 3972589 - DNA, 25 bp, Homo sapien
tccgtgtgagttgcagggagctggc

SEQ ID NO: 3972590 - DNA, 25 bp, Homo sapien
ctaggagaggaaccgtccgtgtgag

SEQ ID NO: 3972591 - DNA, 25 bp, Homo sapien
agaggaaccgtccgtgtgagttgca

SEQ ID NO: 3972592 - DNA, 25 bp, Homo sapien
gcaaaacttttggagacggagcaga

SEQ ID NO: 3972593 - DNA, 25 bp, Homo sapien
agaagtttttgtggagctaactcca

SEQ ID NO: 3972594 - DNA, 25 bp, Homo sapien
gaaaaatcgggatattttggcagca

SEQ ID NO: 3972595 - DNA, 25 bp, Homo sapien
gcagaagtttttgtggagctaactc

SEQ ID NO: 3972596 - DNA, 25 bp, Homo sapien
tgagtaaatatatgaacatggtatg

SEQ ID NO: 3972597 - DNA, 25 bp, Homo sapien
aatatgagtaaatatatgaacatgg

SEQ ID NO: 3972598 - DNA, 25 bp, Homo sapien
atgagtaaatatatgaacatggtat

SEQ ID NO: 3972599 - DNA, 25 bp, Homo sapien
tatgagtaaatatatgaacatggta

SEQ ID NO: 3972600 - DNA, 25 bp, Homo sapien
gatcaccctcctcatttcgcagaag

SEQ ID NO: 3972601 - DNA, 25 bp, Homo sapien
cttgggccttaagccactgccagga

SEQ ID NO: 3972602 - DNA, 25 bp, Homo sapien
caaatagtcctagtgctgggatggg

SEQ ID NO: 3972603 - DNA, 25 bp, Homo sapien
gggaagccctgaaactacaaatgag

SEQ ID NO: 3972604 - DNA, 25 bp, Homo sapien
tgtagcagtttttggccatgacagt

SEQ ID NO: 3972605 - DNA, 25 bp, Homo sapien
tcggcaggtagcctgcccagccagg

SEQ ID NO: 3972606 - DNA, 25 bp, Homo sapien
cagtgtatctcgtgccacagccaaa

SEQ ID NO: 3972607 - DNA, 25 bp, Homo sapien
tgaccttggctctcggcaggtagcc

SEQ ID NO: 3972608 - DNA, 25 bp, Homo sapien
gggtctcctagttctcagaccagca

SEQ ID NO: 3972609 - DNA, 25 bp, Homo sapien
tgtaaaaagacaccatggcacagag

SEQ ID NO: 3972610 - DNA, 25 bp, Homo sapien
tgacccctgggatttggaacggtgc

SEQ ID NO: 3972611 - DNA, 25 bp, Homo sapien
gaacggtgcgggattctgggtgcta

SEQ ID NO: 3972612 - DNA, 25 bp, Homo sapien
gaggggaaatggtttcagggcgctg

SEQ ID NO: 3972613 - DNA, 25 bp, Homo sapien
ggggaaatggtttcagggcgctgct

SEQ ID NO: 3972614 - DNA, 25 bp, Homo sapien
gggaaatggtttcagggcgctgcta

SEQ ID NO: 3972615 - DNA, 25 bp, Homo sapien
ggaaatggtttcagggcgctgctac

SEQ ID NO: 3972616 - DNA, 25 bp, Homo sapien
tgcgcagcacaattcccgcagctgt

SEQ ID NO: 3972617 - DNA, 25 bp, Homo sapien
tttatagcgctgtgttttctcctgg

SEQ ID NO: 3972618 - DNA, 25 bp, Homo sapien
cctgcaggaccgtctcctcggagtt

SEQ ID NO: 3972619 - DNA, 25 bp, Homo sapien
tactgcagattgtactggtgcaggg

SEQ ID NO: 3972620 - DNA, 25 bp, Homo sapien
tccttggcagctgaggaatggcaca

SEQ ID NO: 3972621 - DNA, 25 bp, Homo sapien
atcctccttggacattccttggcag

SEQ ID NO: 3972622 - DNA, 25 bp, Homo sapien
tggcagctgaggaatggcacaaagc

SEQ ID NO: 3972623 - DNA, 25 bp, Homo sapien
gtcatcctccttggacattccttgg

SEQ ID NO: 3972624 - DNA, 25 bp, Homo sapien
ggaaggcccatttcaacaaaggcga

SEQ ID NO: 3972625 - DNA, 25 bp, Homo sapien
aatactctttgaatagcaaagcccc

SEQ ID NO: 3972626 - DNA, 25 bp, Homo sapien
caaaggcgatgacagtaatactctt

SEQ ID NO: 3972627 - DNA, 25 bp, Homo sapien
cagcctgacggaaaatggggaaagc

SEQ ID NO: 3972628 - DNA, 25 bp, Homo sapien
gtgtgattggcaggtttctcatgaa

SEQ ID NO: 3972629 - DNA, 25 bp, Homo sapien
cgctatagcctggtgtgattggcag

SEQ ID NO: 3972630 - DNA, 25 bp, Homo sapien
gtgattggcaggtttctcatgaagg

SEQ ID NO: 3972631 - DNA, 25 bp, Homo sapien
gcctggtgtgattggcaggtttctc

SEQ ID NO: 3972632 - DNA, 25 bp, Homo sapien
actgtactcatactatggctgtgaa

SEQ ID NO: 3972633 - DNA, 25 bp, Homo sapien
catccaacaattgtgaactgtactc

SEQ ID NO: 3972634 - DNA, 25 bp, Homo sapien
gggaatgcaaagcttctgagcaagc

SEQ ID NO: 3972635 - DNA, 25 bp, Homo sapien
aatgcaaagcttctgagcaagccca

SEQ ID NO: 3972636 - DNA, 25 bp, Homo sapien
ggctggcgctatccggtgcccactt

SEQ ID NO: 3972637 - DNA, 25 bp, Homo sapien
ctatccggtgcccacttggcctctg

SEQ ID NO: 3972638 - DNA, 25 bp, Homo sapien
gcggggctggcgctatccggtgccc

SEQ ID NO: 3972639 - DNA, 25 bp, Homo sapien
tggcgctatccggtgcccacttggc

SEQ ID NO: 3972640 - DNA, 25 bp, Homo sapien
tctgcgcagtaaacatctggcctcg

SEQ ID NO: 3972641 - DNA, 25 bp, Homo sapien
agggctctaagtcaaagcgggcgtt

SEQ ID NO: 3972642 - DNA, 25 bp, Homo sapien
accccggtgtaaagtcgggcatctg

SEQ ID NO: 3972643 - DNA, 25 bp, Homo sapien
tttttgcgggtgtagacactgcggc

SEQ ID NO: 3972644 - DNA, 25 bp, Homo sapien
taccatttagcgtttgaagcagggc

SEQ ID NO: 3972645 - DNA, 25 bp, Homo sapien
tatgagaatctaaaacagtgcccag

SEQ ID NO: 3972646 - DNA, 25 bp, Homo sapien
tagtgaatgagaccccagtagctga

SEQ ID NO: 3972647 - DNA, 25 bp, Homo sapien
caagagagtttgcagacacagtccc

SEQ ID NO: 3972648 - DNA, 25 bp, Homo sapien
cataagggtctggatctccctccgg

SEQ ID NO: 3972649 - DNA, 25 bp, Homo sapien
tcggtgtccccgaactgcataaggg

SEQ ID NO: 3972650 - DNA, 25 bp, Homo sapien
ccacagactggtcggcagagatgaa

SEQ ID NO: 3972651 - DNA, 25 bp, Homo sapien
caaagaggacggcacccttgaggat

SEQ ID NO: 3972652 - DNA, 25 bp, Homo sapien
ctgcctcgccgagtggccgagcctg

SEQ ID NO: 3972653 - DNA, 25 bp, Homo sapien
cccctttctcagctctgcctcgccg

SEQ ID NO: 3972654 - DNA, 25 bp, Homo sapien
tttctcagctctgcctcgccgagtg

SEQ ID NO: 3972655 - DNA, 25 bp, Homo sapien
gctgggaaagcccatcccctttctc

SEQ ID NO: 3972656 - DNA, 25 bp, Homo sapien
atcgatggtcggcttaaaaagggcg

SEQ ID NO: 3972657 - DNA, 25 bp, Homo sapien
ggcgttcatggcatctggactcatc

SEQ ID NO: 3972658 - DNA, 25 bp, Homo sapien
gatgctcaatgatgctatcgatggt

SEQ ID NO: 3972659 - DNA, 25 bp, Homo sapien
tcatccgcagcatcccctgcgagga

SEQ ID NO: 3972660 - DNA, 25 bp, Homo sapien
gaatcctttccatggcgtaggccaa

SEQ ID NO: 3972661 - DNA, 25 bp, Homo sapien
atggcgcctctgtccctgatgcaaa

SEQ ID NO: 3972662 - DNA, 25 bp, Homo sapien
taattctactaggtggccctcacgg

SEQ ID NO: 3972663 - DNA, 25 bp, Homo sapien
gaagtcagggataactgcgcttgcc

SEQ ID NO: 3972664 - DNA, 25 bp, Homo sapien
tactcctaaagatccatagggtccg

SEQ ID NO: 3972665 - DNA, 25 bp, Homo sapien
tgcttttccgcaaggcgtgctccac

SEQ ID NO: 3972666 - DNA, 25 bp, Homo sapien
ggcagccgcccttttgcgagactca

SEQ ID NO: 3972667 - DNA, 25 bp, Homo sapien
gcgagactcaaacgcaatcattaag

SEQ ID NO: 3972668 - DNA, 25 bp, Homo sapien
tatggtattccaatccaagacatcc

SEQ ID NO: 3972669 - DNA, 25 bp, Homo sapien
cacggtcatgggcaacatcaagttg

SEQ ID NO: 3972670 - DNA, 25 bp, Homo sapien
gaaagttcaccttagcacggtcatg

SEQ ID NO: 3972671 - DNA, 25 bp, Homo sapien
aatcagcaggcctggtctagtccct

SEQ ID NO: 3972672 - DNA, 25 bp, Homo sapien
ggtaaccggatctgatggactgtca

SEQ ID NO: 3972673 - DNA, 25 bp, Homo sapien
actgtccacaaccacatacttatca

SEQ ID NO: 3972674 - DNA, 25 bp, Homo sapien
ggactgtcaggtctacggtgccacc

SEQ ID NO: 3972675 - DNA, 25 bp, Homo sapien
tatacagttccttaaggtgtccctc

SEQ ID NO: 3972676 - DNA, 25 bp, Homo sapien
ttctcctatgacattctccaccaaa

SEQ ID NO: 3972677 - DNA, 25 bp, Homo sapien
cgattacgccgtatgtgttccttag

SEQ ID NO: 3972678 - DNA, 25 bp, Homo sapien
tccagctcggaccagatttctccta

SEQ ID NO: 3972679 - DNA, 25 bp, Homo sapien
caaaaaggtccgactctgccgatta

SEQ ID NO: 3972680 - DNA, 25 bp, Homo sapien
gagcagagaggtgcttaaagcccac

SEQ ID NO: 3972681 - DNA, 25 bp, Homo sapien
cctcagattcttagagagaagctcc

SEQ ID NO: 3972682 - DNA, 25 bp, Homo sapien
tgaaccagggtaaccatgcctccat

SEQ ID NO: 3972683 - DNA, 25 bp, Homo sapien
caatgtgaggccaataaccgctctc

SEQ ID NO: 3972684 - DNA, 25 bp, Homo sapien
cattatggcactaagtgcctttaaa

SEQ ID NO: 3972685 - DNA, 25 bp, Homo sapien
gtatcctgattcttcattatggcac

SEQ ID NO: 3972686 - DNA, 25 bp, Homo sapien
ctcctcccggagtatcctgattctt

SEQ ID NO: 3972687 - DNA, 25 bp, Homo sapien
cccggagtatcctgattcttcatta

SEQ ID NO: 3972688 - DNA, 25 bp, Homo sapien
aaggaaggagagcaggagggggaga

SEQ ID NO: 3972689 - DNA, 25 bp, Homo sapien
gaaggagagcaggagggggagagag

SEQ ID NO: 3972690 - DNA, 25 bp, Homo sapien
cttgggaaggaaggagagcaggagg

SEQ ID NO: 3972691 - DNA, 25 bp, Homo sapien
ggaaggaaggagagcaggaggggga

SEQ ID NO: 3972692 - DNA, 25 bp, Homo sapien
tgatgagctgctccgagttctcggg

SEQ ID NO: 3972693 - DNA, 25 bp, Homo sapien
cgcagctttcggcagtagatagagg

SEQ ID NO: 3972694 - DNA, 25 bp, Homo sapien
tgtacccattgacggctgccttgct

SEQ ID NO: 3972695 - DNA, 25 bp, Homo sapien
tcaatcatctggtgtagccgcagct

SEQ ID NO: 3972696 - DNA, 25 bp, Homo sapien
gaaggcatggagttgcagagaccct

SEQ ID NO: 3972697 - DNA, 25 bp, Homo sapien
ctggactgacatccctaaggagggc

SEQ ID NO: 3972698 - DNA, 25 bp, Homo sapien
taatgtcagggtgcctcggtactgg

SEQ ID NO: 3972699 - DNA, 25 bp, Homo sapien
aaagaaaatgtataggcaccctggg

SEQ ID NO: 3972700 - DNA, 25 bp, Homo sapien
tctggaaaccattcaggtacacggg

SEQ ID NO: 3972701 - DNA, 25 bp, Homo sapien
actgccgtggtgctgactttttgcc

SEQ ID NO: 3972702 - DNA, 25 bp, Homo sapien
cagcccgatggaccacggaagaaca

SEQ ID NO: 3972703 - DNA, 25 bp, Homo sapien
acggaagaacacttcatccctgcca

SEQ ID NO: 3972704 - DNA, 25 bp, Homo sapien
cttctcatcaggcgaagtcggcctc

SEQ ID NO: 3972705 - DNA, 25 bp, Homo sapien
aacttctcatcaggcgaagtcggcc

SEQ ID NO: 3972706 - DNA, 25 bp, Homo sapien
tctcatcaggcgaagtcggcctcat

SEQ ID NO: 3972707 - DNA, 25 bp, Homo sapien
ataacttctcatcaggcgaagtcgg

SEQ ID NO: 3972708 - DNA, 25 bp, Homo sapien
cgatgaaactgcatctgtgcaccct

SEQ ID NO: 3972709 - DNA, 25 bp, Homo sapien
gcctttacgggcagtgagccatagc

SEQ ID NO: 3972710 - DNA, 25 bp, Homo sapien
ttcaacaagcactcaactcaaggcg

SEQ ID NO: 3972711 - DNA, 25 bp, Homo sapien
ttcactgaatgctcttaaagggtct

SEQ ID NO: 3972712 - DNA, 25 bp, Homo sapien
gagtcaagccttccgagtgagcgct

SEQ ID NO: 3972713 - DNA, 25 bp, Homo sapien
ccagggcttctgtgaatggctaaac

SEQ ID NO: 3972714 - DNA, 25 bp, Homo sapien
caaaatcagaggtacgtctcctggg

SEQ ID NO: 3972715 - DNA, 25 bp, Homo sapien
gccctgccggaaggctgacactatg

SEQ ID NO: 3972716 - DNA, 25 bp, Homo sapien
agcatggctcgccattcctgcctgg

SEQ ID NO: 3972717 - DNA, 25 bp, Homo sapien
taagtgcaacaggagccagctctgt

SEQ ID NO: 3972718 - DNA, 25 bp, Homo sapien
tgggaccataacaacaggtgagcat

SEQ ID NO: 3972719 - DNA, 25 bp, Homo sapien
aacaagcgcctgtgcctggtatgcc

SEQ ID NO: 3972720 - DNA, 25 bp, Homo sapien
tccacaccaagctgaaaatgcctgg

SEQ ID NO: 3972721 - DNA, 25 bp, Homo sapien
ggagactccgcagtagaaacatgac

SEQ ID NO: 3972722 - DNA, 25 bp, Homo sapien
aatgcctggttcgtggccaatggcc

SEQ ID NO: 3972723 - DNA, 25 bp, Homo sapien
gcggcagacatgcagttttcagcct

SEQ ID NO: 3972724 - DNA, 25 bp, Homo sapien
ttccacccgccctgactctaccctc

SEQ ID NO: 3972725 - DNA, 25 bp, Homo sapien
accaccctggacatcttgagtcctt

SEQ ID NO: 3972726 - DNA, 25 bp, Homo sapien
ctgggcggggctacagtcaccaccc

SEQ ID NO: 3972727 - DNA, 25 bp, Homo sapien
tcctccggcttccacccgccctgac

SEQ ID NO: 3972728 - DNA, 25 bp, Homo sapien
tcatgaactgcttggccggctgctt

SEQ ID NO: 3972729 - DNA, 25 bp, Homo sapien
gacccatctgacatcagagttctcg

SEQ ID NO: 3972730 - DNA, 25 bp, Homo sapien
gacatcagagttctcgaactccgaa

SEQ ID NO: 3972731 - DNA, 25 bp, Homo sapien
tggcaggcaccgtgatgacccatct

SEQ ID NO: 3972732 - DNA, 25 bp, Homo sapien
caaaggtctgagttgttacacgtgg

SEQ ID NO: 3972733 - DNA, 25 bp, Homo sapien
caacaggtcaagtggcagctggttc

SEQ ID NO: 3972734 - DNA, 25 bp, Homo sapien
tacacgtggtcccataggtaaacag

SEQ ID NO: 3972735 - DNA, 25 bp, Homo sapien
tgaatattctgcaagccgggagctc

SEQ ID NO: 3972736 - DNA, 25 bp, Homo sapien
gccggtggcagctgtcatcattgtc

SEQ ID NO: 3972737 - DNA, 25 bp, Homo sapien
tcatctaccttatgcaaggccagca

SEQ ID NO: 3972738 - DNA, 25 bp, Homo sapien
cagccggtggcagctgtcatcattg

SEQ ID NO: 3972739 - DNA, 25 bp, Homo sapien
tcattgtcatctaccttatgcaagg

SEQ ID NO: 3972740 - DNA, 25 bp, Homo sapien
cacagcattgctggcgagattaaat

SEQ ID NO: 3972741 - DNA, 25 bp, Homo sapien
aaacacatgagggaatgctggccca

SEQ ID NO: 3972742 - DNA, 25 bp, Homo sapien
aaacagttatcttgggtctggccca

SEQ ID NO: 3972743 - DNA, 25 bp, Homo sapien
tgccacgttcaccagacaaatctgt

SEQ ID NO: 3972744 - DNA, 25 bp, Homo sapien
ggaatttattcacggcatattccct

SEQ ID NO: 3972745 - DNA, 25 bp, Homo sapien
tcacggcatattccctgctgggagg

SEQ ID NO: 3972746 - DNA, 25 bp, Homo sapien
tttattcacggcatattccctgctg

SEQ ID NO: 3972747 - DNA, 25 bp, Homo sapien
ctggaatttattcacggcatattcc

SEQ ID NO: 3972748 - DNA, 25 bp, Homo sapien
ctttcctgttggcaaatttgaaacg

SEQ ID NO: 3972749 - DNA, 25 bp, Homo sapien
ttcctgttggcaaatttgaaacgca

SEQ ID NO: 3972750 - DNA, 25 bp, Homo sapien
tcctgttggcaaatttgaaacgcac

SEQ ID NO: 3972751 - DNA, 25 bp, Homo sapien
tcctttcctgttggcaaatttgaaa

SEQ ID NO: 3972752 - DNA, 25 bp, Homo sapien
gcccctgtgcgctctgcactctctg

SEQ ID NO: 3972753 - DNA, 25 bp, Homo sapien
tgagtcctaaattttgcccccgagc

SEQ ID NO: 3972754 - DNA, 25 bp, Homo sapien
actgtttgcccagaacccactcctt

SEQ ID NO: 3972755 - DNA, 25 bp, Homo sapien
gctccccaaatgaccctgtggctct

SEQ ID NO: 3972756 - DNA, 25 bp, Homo sapien
gtggaatactgtttgcccagaaccc

SEQ ID NO: 3972757 - DNA, 25 bp, Homo sapien
ggaatactgtttgcccagaacccac

SEQ ID NO: 3972758 - DNA, 25 bp, Homo sapien
ggctggcctcaactatcagtcctac

SEQ ID NO: 3972759 - DNA, 25 bp, Homo sapien
gtgcagcagcccgagacacggagct

SEQ ID NO: 3972760 - DNA, 25 bp, Homo sapien
ctgggtcctacggtaactctgtgct

SEQ ID NO: 3972761 - DNA, 25 bp, Homo sapien
ccaaagaggccgcaccattttactt

SEQ ID NO: 3972762 - DNA, 25 bp, Homo sapien
gcgcctgctccttaaagtactgcag

SEQ ID NO: 3972763 - DNA, 25 bp, Homo sapien
catttgctgccgtcaggtctgtatc

SEQ ID NO: 3972764 - DNA, 25 bp, Homo sapien
tgctgccgtcaggtctgtatccatg

SEQ ID NO: 3972765 - DNA, 25 bp, Homo sapien
ttcttgccatttgctgccgtcaggt

SEQ ID NO: 3972766 - DNA, 25 bp, Homo sapien
cttcactgctccctccttctctccc

SEQ ID NO: 3972767 - DNA, 25 bp, Homo sapien
ctccttctctccctctagctcctgg

SEQ ID NO: 3972768 - DNA, 25 bp, Homo sapien
tccttctctccctctagctcctgga

SEQ ID NO: 3972769 - DNA, 25 bp, Homo sapien
tccctccttctctccctctagctcc

SEQ ID NO: 3972770 - DNA, 25 bp, Homo sapien
ggttggagtcttctgattggacaca

SEQ ID NO: 3972771 - DNA, 25 bp, Homo sapien
gcggcatacccgaagctgtggaact

SEQ ID NO: 3972772 - DNA, 25 bp, Homo sapien
tcctctcgggagtcagcaagatggt

SEQ ID NO: 3972773 - DNA, 25 bp, Homo sapien
cactgcttggcctcattgggatcca

SEQ ID NO: 3972774 - DNA, 25 bp, Homo sapien
ctgatgacatgacacccaggagtgt

SEQ ID NO: 3972775 - DNA, 25 bp, Homo sapien
gagattcctggtggcaactgaacac

SEQ ID NO: 3972776 - DNA, 25 bp, Homo sapien
caccaagggcgatgctgtcaacaga

SEQ ID NO: 3972777 - DNA, 25 bp, Homo sapien
cagagttggctatagaaccggcttt

SEQ ID NO: 3972778 - DNA, 25 bp, Homo sapien
tctgagacgttggagtcagtgtcgt

SEQ ID NO: 3972779 - DNA, 25 bp, Homo sapien
catcacatggatgcattccggctcc

SEQ ID NO: 3972780 - DNA, 25 bp, Homo sapien
caccaccacgagaaatgactgctgt

SEQ ID NO: 3972781 - DNA, 25 bp, Homo sapien
ggatgtggtcccaaagtcgacggcc

SEQ ID NO: 3972782 - DNA, 25 bp, Homo sapien
ctgcagatatacagtgaggcatggg

SEQ ID NO: 3972783 - DNA, 25 bp, Homo sapien
ggggtctcaccttgcctagctgtga

SEQ ID NO: 3972784 - DNA, 25 bp, Homo sapien
tggctttcaggaagacacccctggg

SEQ ID NO: 3972785 - DNA, 25 bp, Homo sapien
gtctcaccttgcctagctgtgaacc

SEQ ID NO: 3972786 - DNA, 25 bp, Homo sapien
ccaggagcatttcgccagctgtgcc

SEQ ID NO: 3972787 - DNA, 25 bp, Homo sapien
gccactgccaggagcatttcgccag

SEQ ID NO: 3972788 - DNA, 25 bp, Homo sapien
cacccaggtgactgctccatctgtg

SEQ ID NO: 3972789 - DNA, 25 bp, Homo sapien
tctgtacacccaggtgactgctcca

SEQ ID NO: 3972790 - DNA, 25 bp, Homo sapien
agatgaatatgcagatgtgggagcc

SEQ ID NO: 3972791 - DNA, 25 bp, Homo sapien
gaatatgcagatgtgggagccgttt

SEQ ID NO: 3972792 - DNA, 25 bp, Homo sapien
tccccaagactccgggctggagatg

SEQ ID NO: 3972793 - DNA, 25 bp, Homo sapien
ccgggctggagatgaatatgcagat

SEQ ID NO: 3972794 - DNA, 25 bp, Homo sapien
cattggaacgcgctacagtgctctc

SEQ ID NO: 3972795 - DNA, 25 bp, Homo sapien
aaaacactctccctggccggcattg

SEQ ID NO: 3972796 - DNA, 25 bp, Homo sapien
ctgagtgaagactgcgtgctcccac

SEQ ID NO: 3972797 - DNA, 25 bp, Homo sapien
catcattcaggcctagcatttttct

SEQ ID NO: 3972798 - DNA, 25 bp, Homo sapien
tcatacagctaaagtcatctcaagg

SEQ ID NO: 3972799 - DNA, 25 bp, Homo sapien
gccaagacaggctcattcatgtcca

SEQ ID NO: 3972800 - DNA, 25 bp, Homo sapien
catctggcactagatgggccaagac

SEQ ID NO: 3972801 - DNA, 25 bp, Homo sapien
catgttcacctaggctgtcggtcgg

SEQ ID NO: 3972802 - DNA, 25 bp, Homo sapien
tcttgcggcctcgtctgggaatctg

SEQ ID NO: 3972803 - DNA, 25 bp, Homo sapien
ctgaatcttgcggcctcgtctggga

SEQ ID NO: 3972804 - DNA, 25 bp, Homo sapien
gaatcttgcggcctcgtctgggaat

SEQ ID NO: 3972805 - DNA, 25 bp, Homo sapien
ttgcggcctcgtctgggaatctgga

SEQ ID NO: 3972806 - DNA, 25 bp, Homo sapien
tggggcaggtttcaattctgagcac

SEQ ID NO: 3972807 - DNA, 25 bp, Homo sapien
cagcaaggatcagcagggcccgctt

SEQ ID NO: 3972808 - DNA, 25 bp, Homo sapien
ttccttggtcgtctcctcgctggcc

SEQ ID NO: 3972809 - DNA, 25 bp, Homo sapien
ttgcaatgacaggaacgcagcaagg

SEQ ID NO: 3972810 - DNA, 25 bp, Homo sapien
gggctataaccagcgccctgtcact

SEQ ID NO: 3972811 - DNA, 25 bp, Homo sapien
cttggtggctgaaggaagtagggca

SEQ ID NO: 3972812 - DNA, 25 bp, Homo sapien
gggggctataaccagcgccctgtca

SEQ ID NO: 3972813 - DNA, 25 bp, Homo sapien
ctacagcttggtggctgaaggaagt

SEQ ID NO: 3972814 - DNA, 25 bp, Homo sapien
tcgtggctgaatctcccttgcgtcc

SEQ ID NO: 3972815 - DNA, 25 bp, Homo sapien
cctgatccgcaggaacaatgggctg

SEQ ID NO: 3972816 - DNA, 25 bp, Homo sapien
taatatcatcctcgcaggcggcttg

SEQ ID NO: 3972817 - DNA, 25 bp, Homo sapien
ttgcctgtcgctcccgggaaagatg

SEQ ID NO: 3972818 - DNA, 25 bp, Homo sapien
tgggacccacaggaagactggaatc

SEQ ID NO: 3972819 - DNA, 25 bp, Homo sapien
ttgggacccacaggaagactggaat

SEQ ID NO: 3972820 - DNA, 25 bp, Homo sapien
cttgggacccacaggaagactggaa

SEQ ID NO: 3972821 - DNA, 25 bp, Homo sapien
tcgctgccgccggcctccttgtccg

SEQ ID NO: 3972822 - DNA, 25 bp, Homo sapien
tgccgccggcctccttgtccgccat

SEQ ID NO: 3972823 - DNA, 25 bp, Homo sapien
gcccgtcgctgccgccggcctcctt

SEQ ID NO: 3972824 - DNA, 25 bp, Homo sapien
ctcggggcccgtcgctgccgccggc

SEQ ID NO: 3972825 - DNA, 25 bp, Homo sapien
ccgtgcccgtgcgggtctctgtccg

SEQ ID NO: 3972826 - DNA, 25 bp, Homo sapien
tgcccgtgcgggtctctgtccgcgt

SEQ ID NO: 3972827 - DNA, 25 bp, Homo sapien
cgcccgtgcccgtgcgggtctctgt

SEQ ID NO: 3972828 - DNA, 25 bp, Homo sapien
gtgcccgtgcgggtctctgtccgcg

SEQ ID NO: 3972829 - DNA, 25 bp, Homo sapien
caaggacctgcgcgggggccgagcc

SEQ ID NO: 3972830 - DNA, 25 bp, Homo sapien
agagctgctgcgagagcgttatgga

SEQ ID NO: 3972831 - DNA, 25 bp, Homo sapien
tcgtacaatcccgttctggatgacg

SEQ ID NO: 3972832 - DNA, 25 bp, Homo sapien
acctaggggaggcttcatcgtacaa

SEQ ID NO: 3972833 - DNA, 25 bp, Homo sapien
ggcatttcccaaagatcacctaggg

SEQ ID NO: 3972834 - DNA, 25 bp, Homo sapien
cagctctccaaagtgggaccagcca

SEQ ID NO: 3972835 - DNA, 25 bp, Homo sapien
aggatggtgcctggcgcagagagca

SEQ ID NO: 3972836 - DNA, 25 bp, Homo sapien
gaccagccatgtccacatttagagc

SEQ ID NO: 3972837 - DNA, 25 bp, Homo sapien
tttctcatcctctccgggatcccgt

SEQ ID NO: 3972838 - DNA, 25 bp, Homo sapien
ccctgttgtttcacagcctggcgct

SEQ ID NO: 3972839 - DNA, 25 bp, Homo sapien
cagcggagcagggacaaagatgccc

SEQ ID NO: 3972840 - DNA, 25 bp, Homo sapien
cctggcgctggcatgctggtatgct

SEQ ID NO: 3972841 - DNA, 25 bp, Homo sapien
tgtgggaagtacaatctggtggtca

SEQ ID NO: 3972842 - DNA, 25 bp, Homo sapien
gggcacctgatctggttctagcagg

SEQ ID NO: 3972843 - DNA, 25 bp, Homo sapien
tcatgaccctgagatgggctagggt

SEQ ID NO: 3972844 - DNA, 25 bp, Homo sapien
ggaactgctgggtttgcgtccacca

SEQ ID NO: 3972845 - DNA, 25 bp, Homo sapien
caggttcctgatgagtctgcttcac

SEQ ID NO: 3972846 - DNA, 25 bp, Homo sapien
tacctctgtccttagaagtcccctg

SEQ ID NO: 3972847 - DNA, 25 bp, Homo sapien
gactggacgttgtgattcttgcccg

SEQ ID NO: 3972848 - DNA, 25 bp, Homo sapien
tcttgcccgctgcagactttcaaag

SEQ ID NO: 3972849 - DNA, 25 bp, Homo sapien
ccactaggatcttctgactgaccaa

SEQ ID NO: 3972850 - DNA, 25 bp, Homo sapien
tccagggccttcatcggcagttgct

SEQ ID NO: 3972851 - DNA, 25 bp, Homo sapien
gacacatcgtggctgaactccaagg

SEQ ID NO: 3972852 - DNA, 25 bp, Homo sapien
tgtaatgagtcactgccaacacgga

SEQ ID NO: 3972853 - DNA, 25 bp, Homo sapien
tagatcgaagctgatccgggtgccc

SEQ ID NO: 3972854 - DNA, 25 bp, Homo sapien
acagggactgcccagcaacaaggaa

SEQ ID NO: 3972855 - DNA, 25 bp, Homo sapien
caaagatcccgttcatccacaggga

SEQ ID NO: 3972856 - DNA, 25 bp, Homo sapien
agaccactaattccgccagagcaag

SEQ ID NO: 3972857 - DNA, 25 bp, Homo sapien
ttctcacgcgaagggcaaagatccc

SEQ ID NO: 3972858 - DNA, 25 bp, Homo sapien
ctccagtccaggtccctctttccac

SEQ ID NO: 3972859 - DNA, 25 bp, Homo sapien
ccagtccaggtccctctttccacac

SEQ ID NO: 3972860 - DNA, 25 bp, Homo sapien
tccagtccaggtccctctttccaca

SEQ ID NO: 3972861 - DNA, 25 bp, Homo sapien
gcagcagtatggctcggggcacagt

SEQ ID NO: 3972862 - DNA, 25 bp, Homo sapien
agaggagcctggatggcagaaggtg

SEQ ID NO: 3972863 - DNA, 25 bp, Homo sapien
cgttggagacatgtctggaagaatt

SEQ ID NO: 3972864 - DNA, 25 bp, Homo sapien
gctttgatgaggaggtgacgttgga

SEQ ID NO: 3972865 - DNA, 25 bp, Homo sapien
gggtctgcccacgattattgactgt

SEQ ID NO: 3972866 - DNA, 25 bp, Homo sapien
cgattattgactgtcaagcactgaa

SEQ ID NO: 3972867 - DNA, 25 bp, Homo sapien
tgactgtcaagcactgaatgaatga

SEQ ID NO: 3972868 - DNA, 25 bp, Homo sapien
tgcccacgattattgactgtcaagc

SEQ ID NO: 3972869 - DNA, 25 bp, Homo sapien
cttgggggaacgcacactcgggctc

SEQ ID NO: 3972870 - DNA, 25 bp, Homo sapien
gctctgctgcccaccgcatgctgct

SEQ ID NO: 3972871 - DNA, 25 bp, Homo sapien
ggaacgcacactcgggctctgctgc

SEQ ID NO: 3972872 - DNA, 25 bp, Homo sapien
ccagccttgggggaacgcacactcg

SEQ ID NO: 3972873 - DNA, 25 bp, Homo sapien
taagctctggcacgggcctttggga

SEQ ID NO: 3972874 - DNA, 25 bp, Homo sapien
gcttacaaaatgacccgaccaagtg

SEQ ID NO: 3972875 - DNA, 25 bp, Homo sapien
tattgtaccaaaggcaatctcctgg

SEQ ID NO: 3972876 - DNA, 25 bp, Homo sapien
tgtccagaaagtgtacaaccaatgg

SEQ ID NO: 3972877 - DNA, 25 bp, Homo sapien
gcttcggtatctaaccccgcaggca

SEQ ID NO: 3972878 - DNA, 25 bp, Homo sapien
tatacacgtacccaaacacgctggc

SEQ ID NO: 3972879 - DNA, 25 bp, Homo sapien
tctgagggtatgctgtgtgcaaaac

SEQ ID NO: 3972880 - DNA, 25 bp, Homo sapien
aaacataggtacactcgaggcaggg

SEQ ID NO: 3972881 - DNA, 25 bp, Homo sapien
tgtgtctcttgggaatgatcggagc

SEQ ID NO: 3972882 - DNA, 25 bp, Homo sapien
gatgcgctcttccaccagagaaggc

SEQ ID NO: 3972883 - DNA, 25 bp, Homo sapien
tcttgggaatgatcggagcgtgaac

SEQ ID NO: 3972884 - DNA, 25 bp, Homo sapien
ctgggagatgcgctcttccaccaga

SEQ ID NO: 3972885 - DNA, 25 bp, Homo sapien
catggctggttcttccagtcgcaca

SEQ ID NO: 3972886 - DNA, 25 bp, Homo sapien
tcatggctggttcttccagtcgcac

SEQ ID NO: 3972887 - DNA, 25 bp, Homo sapien
tggttcttccagtcgcacaggatcc

SEQ ID NO: 3972888 - DNA, 25 bp, Homo sapien
ggctggttcttccagtcgcacagga

SEQ ID NO: 3972889 - DNA, 25 bp, Homo sapien
gggactatgccctttacagctcaga

SEQ ID NO: 3972890 - DNA, 25 bp, Homo sapien
taatccaggcctaagaggaatccga

SEQ ID NO: 3972891 - DNA, 25 bp, Homo sapien
cataatgtgtagaactgtgctcagc

SEQ ID NO: 3972892 - DNA, 25 bp, Homo sapien
gagtggcacggcaagtcaccatcta

SEQ ID NO: 3972893 - DNA, 25 bp, Homo sapien
attaaagaagacataggtaatccag

SEQ ID NO: 3972894 - DNA, 25 bp, Homo sapien
acattaaagaagacataggtaatcc

SEQ ID NO: 3972895 - DNA, 25 bp, Homo sapien
cattaaagaagacataggtaatcca

SEQ ID NO: 3972896 - DNA, 25 bp, Homo sapien
ttaaagaagacataggtaatccagg

SEQ ID NO: 3972897 - DNA, 25 bp, Homo sapien
caacatgatccctgcattcacaaag

SEQ ID NO: 3972898 - DNA, 25 bp, Homo sapien
tcatgtaaaacaaggaaggtgaacc

SEQ ID NO: 3972899 - DNA, 25 bp, Homo sapien
aatacagatataagtctttgtggcc

SEQ ID NO: 3972900 - DNA, 25 bp, Homo sapien
gtgtggtacttgtatagggctagac

SEQ ID NO: 3972901 - DNA, 25 bp, Homo sapien
tctcctaaaacccaatgaggcggat

SEQ ID NO: 3972902 - DNA, 25 bp, Homo sapien
tagtaagtggcaagcccgattcaga

SEQ ID NO: 3972903 - DNA, 25 bp, Homo sapien
gaggaatcacgtcatttgctcgagg

SEQ ID NO: 3972904 - DNA, 25 bp, Homo sapien
tggagttgtccagagagctcgccct

SEQ ID NO: 3972905 - DNA, 25 bp, Homo sapien
gggtgatcagattgcatatgccaga

SEQ ID NO: 3972906 - DNA, 25 bp, Homo sapien
gatacaccatggcagaacttcaaga

SEQ ID NO: 3972907 - DNA, 25 bp, Homo sapien
gccatgggcataagcgtttctcaaa

SEQ ID NO: 3972908 - DNA, 25 bp, Homo sapien
gaacactattctagccaggcatcct

SEQ ID NO: 3972909 - DNA, 25 bp, Homo sapien
ttttagcactcaaaagggctgcatg

SEQ ID NO: 3972910 - DNA, 25 bp, Homo sapien
ggtcaatctaacttgggaggtgtca

SEQ ID NO: 3972911 - DNA, 25 bp, Homo sapien
taccgtgtccggaggacggtcagca

SEQ ID NO: 3972912 - DNA, 25 bp, Homo sapien
ggagtctatcaatgccacaaaacag

SEQ ID NO: 3972913 - DNA, 25 bp, Homo sapien
gaactgccagttcgtcaaatccaaa

SEQ ID NO: 3972914 - DNA, 25 bp, Homo sapien
ttcagacacaactagggagtaccgt

SEQ ID NO: 3972915 - DNA, 25 bp, Homo sapien
tcaagtgctggtgcgtccaattcag

SEQ ID NO: 3972916 - DNA, 25 bp, Homo sapien
ggagtaccgtcatccctgcaggaac

SEQ ID NO: 3972917 - DNA, 25 bp, Homo sapien
gctacccggatgctaggtccacaat

SEQ ID NO: 3972918 - DNA, 25 bp, Homo sapien
ccagagcagggcagtaagacagcac

SEQ ID NO: 3972919 - DNA, 25 bp, Homo sapien
cacgaggccggtaggctacccggat

SEQ ID NO: 3972920 - DNA, 25 bp, Homo sapien
taggtccacaatctgtgcgtgtgag

SEQ ID NO: 3972921 - DNA, 25 bp, Homo sapien
cccacagaatccgtacacgccaaca

SEQ ID NO: 3972922 - DNA, 25 bp, Homo sapien
tttgttctttgctttacacccacag

SEQ ID NO: 3972923 - DNA, 25 bp, Homo sapien
atccgtacacgccaacactctccat

SEQ ID NO: 3972924 - DNA, 25 bp, Homo sapien
agaatccgtacacgccaacactctc

SEQ ID NO: 3972925 - DNA, 25 bp, Homo sapien
tccatgttgctcttaagtcgcgtac

SEQ ID NO: 3972926 - DNA, 25 bp, Homo sapien
gtttccatgttgctcttaagtcgcg

SEQ ID NO: 3972927 - DNA, 25 bp, Homo sapien
aatgtcgatttgtttccatgttgct

SEQ ID NO: 3972928 - DNA, 25 bp, Homo sapien
gttgctcttaagtcgcgtactcgtg

SEQ ID NO: 3972929 - DNA, 25 bp, Homo sapien
gcaaggtgcttagccctgagtctca

SEQ ID NO: 3972930 - DNA, 25 bp, Homo sapien
ttgggcaaggtgcttagccctgagt

SEQ ID NO: 3972931 - DNA, 25 bp, Homo sapien
ggcaaggtgcttagccctgagtctc

SEQ ID NO: 3972932 - DNA, 25 bp, Homo sapien
aggtgcttagccctgagtctcagat

SEQ ID NO: 3972933 - DNA, 25 bp, Homo sapien
caggaagcgttgtgtgcacgtaagg

SEQ ID NO: 3972934 - DNA, 25 bp, Homo sapien
tgccaaaactgaggaacgaggcccg

SEQ ID NO: 3972935 - DNA, 25 bp, Homo sapien
ctgccaaaactgaggaacgaggccc

SEQ ID NO: 3972936 - DNA, 25 bp, Homo sapien
gtgcacgtaaggagtcgtggagaaa

SEQ ID NO: 3972937 - DNA, 25 bp, Homo sapien
ttgacagagccaatgtaccaccagc

SEQ ID NO: 3972938 - DNA, 25 bp, Homo sapien
atttgacagagccaatgtaccacca

SEQ ID NO: 3972939 - DNA, 25 bp, Homo sapien
cttggagagatgacgccgagactct

SEQ ID NO: 3972940 - DNA, 25 bp, Homo sapien
gatgacgccgagactctgtcctctg

SEQ ID NO: 3972941 - DNA, 25 bp, Homo sapien
tagcagattgcaatagattatgtcc

SEQ ID NO: 3972942 - DNA, 25 bp, Homo sapien
cttcctctatgaagggtcttcagtt

SEQ ID NO: 3972943 - DNA, 25 bp, Homo sapien
tgttaaaaggagacttcatattcga

SEQ ID NO: 3972944 - DNA, 25 bp, Homo sapien
tgcctctagaaacaccactaaattt

SEQ ID NO: 3972945 - DNA, 25 bp, Homo sapien
tgcctggccttgttaatgtaatttt

SEQ ID NO: 3972946 - DNA, 25 bp, Homo sapien
tttatgtaagtaattcattcattac

SEQ ID NO: 3972947 - DNA, 25 bp, Homo sapien
gtgcctggccttgttaatgtaattt

SEQ ID NO: 3972948 - DNA, 25 bp, Homo sapien
taagaggcctctccgtttgtgggcc

SEQ ID NO: 3972949 - DNA, 25 bp, Homo sapien
tctacgggcacctggtagggacctg

SEQ ID NO: 3972950 - DNA, 25 bp, Homo sapien
agcagcaggcgatggagtactaccg

SEQ ID NO: 3972951 - DNA, 25 bp, Homo sapien
taggcgtatttgacctgcagcggca

SEQ ID NO: 3972952 - DNA, 25 bp, Homo sapien
tttgctacaacttggcttcagccta

SEQ ID NO: 3972953 - DNA, 25 bp, Homo sapien
caccttggcgtttgctacaacttgg

SEQ ID NO: 3972954 - DNA, 25 bp, Homo sapien
acaggatgaacaccttggcgtttgc

SEQ ID NO: 3972955 - DNA, 25 bp, Homo sapien
agctcagctcaccgaccttaagcag

SEQ ID NO: 3972956 - DNA, 25 bp, Homo sapien
cattgtccccttgaaattggtggta

SEQ ID NO: 3972957 - DNA, 25 bp, Homo sapien
aatttttgccatagtctctggtagg

SEQ ID NO: 3972958 - DNA, 25 bp, Homo sapien
aggtagggaaagtgttgaacacatt

SEQ ID NO: 3972959 - DNA, 25 bp, Homo sapien
ccatagtgtttcaacagctataaaa

SEQ ID NO: 3972960 - DNA, 25 bp, Homo sapien
tttcccccttcatgtgctgttatca

SEQ ID NO: 3972961 - DNA, 25 bp, Homo sapien
gctctcagttacatcttgtatttta

SEQ ID NO: 3972962 - DNA, 25 bp, Homo sapien
ttttctcaagctctcagttacatct

SEQ ID NO: 3972963 - DNA, 25 bp, Homo sapien
tctcaagctctcagttacatcttgt

SEQ ID NO: 3972964 - DNA, 25 bp, Homo sapien
aagctgaaaaggctgcggaggcact

SEQ ID NO: 3972965 - DNA, 25 bp, Homo sapien
caccatcagtattagtagaccggga

SEQ ID NO: 3972966 - DNA, 25 bp, Homo sapien
tgaacttcgttttgcagccaccaca

SEQ ID NO: 3972967 - DNA, 25 bp, Homo sapien
tgtagaggaatcagccgaaacagga

SEQ ID NO: 3972968 - DNA, 25 bp, Homo sapien
ttctcaaggttattaaatgcccagt

SEQ ID NO: 3972969 - DNA, 25 bp, Homo sapien
gctcttttgtaagccagtgttggga

SEQ ID NO: 3972970 - DNA, 25 bp, Homo sapien
tgatgtgacatatccattgcctgaa

SEQ ID NO: 3972971 - DNA, 25 bp, Homo sapien
gtaaccaacctcacgtagaagtgtg

SEQ ID NO: 3972972 - DNA, 25 bp, Homo sapien
gagactgcactcaccaatggataat

SEQ ID NO: 3972973 - DNA, 25 bp, Homo sapien
aaatttcttagggtgctaggcactc

SEQ ID NO: 3972974 - DNA, 25 bp, Homo sapien
tattacaataaccaggtcagcagtg

SEQ ID NO: 3972975 - DNA, 25 bp, Homo sapien
aaaccactccaatccttatgcaggg

SEQ ID NO: 3972976 - DNA, 25 bp, Homo sapien
tcctccgtactcagggcaaactatg

SEQ ID NO: 3972977 - DNA, 25 bp, Homo sapien
taatagccctgttgatgcctgccag

SEQ ID NO: 3972978 - DNA, 25 bp, Homo sapien
ggtgagtagttagagccaaagcatc

SEQ ID NO: 3972979 - DNA, 25 bp, Homo sapien
aaactatgctgggtgctaatagccc

SEQ ID NO: 3972980 - DNA, 25 bp, Homo sapien
attggtgcctttttaataagttgtg

SEQ ID NO: 3972981 - DNA, 25 bp, Homo sapien
ggtgaggagagttcaaattacagca

SEQ ID NO: 3972982 - DNA, 25 bp, Homo sapien
cagcataacagaattcgtttcgtga

SEQ ID NO: 3972983 - DNA, 25 bp, Homo sapien
taatgcagtctgtagtaagcatatc

SEQ ID NO: 3972984 - DNA, 25 bp, Homo sapien
ttaacactgactatgggactacgag

SEQ ID NO: 3972985 - DNA, 25 bp, Homo sapien
gaggctttggacacaatcaatagca

SEQ ID NO: 3972986 - DNA, 25 bp, Homo sapien
gaaaaggacttccaaacatgtcagg

SEQ ID NO: 3972987 - DNA, 25 bp, Homo sapien
tggaaacagtcaagcataacgaact

SEQ ID NO: 3972988 - DNA, 25 bp, Homo sapien
catcctccttgtgttgagttggatc

SEQ ID NO: 3972989 - DNA, 25 bp, Homo sapien
ctctctcacgttttcaatgctgtct

SEQ ID NO: 3972990 - DNA, 25 bp, Homo sapien
tctggttgaatttcgccttcatcct

SEQ ID NO: 3972991 - DNA, 25 bp, Homo sapien
tggttcggcttgtttttcaccgtca

SEQ ID NO: 3972992 - DNA, 25 bp, Homo sapien
cagctgatactaggagcacaaggcc

SEQ ID NO: 3972993 - DNA, 25 bp, Homo sapien
tgagatgccagccatttaaaagaaa

SEQ ID NO: 3972994 - DNA, 25 bp, Homo sapien
cccaaaatgttctaagtctaatcaa

SEQ ID NO: 3972995 - DNA, 25 bp, Homo sapien
gaaagagcgattaactacagaagtg

SEQ ID NO: 3972996 - DNA, 25 bp, Homo sapien
gcttaattgcattctcttctcagga

SEQ ID NO: 3972997 - DNA, 25 bp, Homo sapien
tcttctcaggaagcgtaaagctcat

SEQ ID NO: 3972998 - DNA, 25 bp, Homo sapien
tgcttaattgcattctcttctcagg

SEQ ID NO: 3972999 - DNA, 25 bp, Homo sapien
tctcttctcaggaagcgtaaagctc

SEQ ID NO: 3973000 - DNA, 25 bp, Homo sapien
gacaaactgtgaacttctcacagcc

SEQ ID NO: 3973001 - DNA, 25 bp, Homo sapien
actgtgaacttctcacagcctgctg

SEQ ID NO: 3973002 - DNA, 25 bp, Homo sapien
ggacaaactgtgaacttctcacagc

SEQ ID NO: 3973003 - DNA, 25 bp, Homo sapien
aaactgtgaacttctcacagcctgc

SEQ ID NO: 3973004 - DNA, 25 bp, Homo sapien
tgtgtccctgggtatggctggttgc

SEQ ID NO: 3973005 - DNA, 25 bp, Homo sapien
ggatggagccagttaactcccttcc

SEQ ID NO: 3973006 - DNA, 25 bp, Homo sapien
gatggagccagttaactcccttccc

SEQ ID NO: 3973007 - DNA, 25 bp, Homo sapien
tggttgcagggtagtgctgaggagc

SEQ ID NO: 3973008 - DNA, 25 bp, Homo sapien
tgggaacagatatctctgaaacacc

SEQ ID NO: 3973009 - DNA, 25 bp, Homo sapien
tagaggagacctggtcagacttcag

SEQ ID NO: 3973010 - DNA, 25 bp, Homo sapien
tgaaacacccgaaggttcaggctgc

SEQ ID NO: 3973011 - DNA, 25 bp, Homo sapien
tgactgctgccattaccaactagag

SEQ ID NO: 3973012 - DNA, 25 bp, Homo sapien
tgggcctgggcccactcttatgtaa

SEQ ID NO: 3973013 - DNA, 25 bp, Homo sapien
cagcatgcaaaggaggtagtatttc

SEQ ID NO: 3973014 - DNA, 25 bp, Homo sapien
tctcattctaggtgagcaacttcca

SEQ ID NO: 3973015 - DNA, 25 bp, Homo sapien
gagtcaccagtacgaaggtttcacc

SEQ ID NO: 3973016 - DNA, 25 bp, Homo sapien
tctgtagaactaccatggatgtttc

SEQ ID NO: 3973017 - DNA, 25 bp, Homo sapien
cacttctgtagaactaccatggatg

SEQ ID NO: 3973018 - DNA, 25 bp, Homo sapien
tggatgtttccatgctcgtgtgtgt

SEQ ID NO: 3973019 - DNA, 25 bp, Homo sapien
cttcatcacttctgtagaactacca

SEQ ID NO: 3973020 - DNA, 25 bp, Homo sapien
cacagcagcaatacatggatgttga

SEQ ID NO: 3973021 - DNA, 25 bp, Homo sapien
aaagaacgatctccctgtcctgaag

SEQ ID NO: 3973022 - DNA, 25 bp, Homo sapien
taaacctagtattgtcaggctgaaa

SEQ ID NO: 3973023 - DNA, 25 bp, Homo sapien
tcagctcagggctaaaaatttccag

SEQ ID NO: 3973024 - DNA, 25 bp, Homo sapien
aagagccacagagccgcatcagtga

SEQ ID NO: 3973025 - DNA, 25 bp, Homo sapien
cccaagttctcactctagtagtcat

SEQ ID NO: 3973026 - DNA, 25 bp, Homo sapien
attcctatcgtatgggaagagccac

SEQ ID NO: 3973027 - DNA, 25 bp, Homo sapien
tgatggtgccaagaacccaagttct

SEQ ID NO: 3973028 - DNA, 25 bp, Homo sapien
tatgccactctatgaagcctggtgc

SEQ ID NO: 3973029 - DNA, 25 bp, Homo sapien
gaaagcagctattgtgcccctactg

SEQ ID NO: 3973030 - DNA, 25 bp, Homo sapien
gagccctaatagacgtggttctgag

SEQ ID NO: 3973031 - DNA, 25 bp, Homo sapien
ctactgcaagagagcccaaacgtgg

SEQ ID NO: 3973032 - DNA, 25 bp, Homo sapien
agccggacggtctgaactctgtttc

SEQ ID NO: 3973033 - DNA, 25 bp, Homo sapien
cagtagtggcattacagcagaggta

SEQ ID NO: 3973034 - DNA, 25 bp, Homo sapien
tctttcaaatcgcaacagctggact

SEQ ID NO: 3973035 - DNA, 25 bp, Homo sapien
caaccatatttaccgccttcaagga

SEQ ID NO: 3973036 - DNA, 25 bp, Homo sapien
gaactacgatttcagctcggccaaa

SEQ ID NO: 3973037 - DNA, 25 bp, Homo sapien
cacaatgcaatgctagggagccttg

SEQ ID NO: 3973038 - DNA, 25 bp, Homo sapien
tcaggaaaccggactattctcacag

SEQ ID NO: 3973039 - DNA, 25 bp, Homo sapien
ttaacataggtaacaatggctgggc

SEQ ID NO: 3973040 - DNA, 25 bp, Homo sapien
gatttactcaacagcagtttaacag

SEQ ID NO: 3973041 - DNA, 25 bp, Homo sapien
gaattgagaattactcagcagcatt

SEQ ID NO: 3973042 - DNA, 25 bp, Homo sapien
ctgtgtagactattgaaaaatggct

SEQ ID NO: 3973043 - DNA, 25 bp, Homo sapien
tacaatgtaccgaaagcaatttggt

SEQ ID NO: 3973044 - DNA, 25 bp, Homo sapien
gactggtcacaccaaccaagaaaca

SEQ ID NO: 3973045 - DNA, 25 bp, Homo sapien
tgaagtcttataattgccacatggg

SEQ ID NO: 3973046 - DNA, 25 bp, Homo sapien
cattaatggcccaaacaagatgaac

SEQ ID NO: 3973047 - DNA, 25 bp, Homo sapien
taaattcttctagggcagcatgtaa

SEQ ID NO: 3973048 - DNA, 25 bp, Homo sapien
aaccacactgttgaaatggaacagg

SEQ ID NO: 3973049 - DNA, 25 bp, Homo sapien
tatgaaagcactgcaaaccacactg

SEQ ID NO: 3973050 - DNA, 25 bp, Homo sapien
gaatctctggcaattaattgtggct

SEQ ID NO: 3973051 - DNA, 25 bp, Homo sapien
ttgagaatgaccaagacgacacagc

SEQ ID NO: 3973052 - DNA, 25 bp, Homo sapien
tacatacatctgcaatggtggcgaa

SEQ ID NO: 3973053 - DNA, 25 bp, Homo sapien
gaaggcaatttcacccacactgatg

SEQ ID NO: 3973054 - DNA, 25 bp, Homo sapien
taaatgtgggactagtcaacctagc

SEQ ID NO: 3973055 - DNA, 25 bp, Homo sapien
tggtggcgaactgatagctatgtcc

SEQ ID NO: 3973056 - DNA, 25 bp, Homo sapien
cccaggggtctagtatcttagcttt

SEQ ID NO: 3973057 - DNA, 25 bp, Homo sapien
agtatcttagctttggtccttgatg

SEQ ID NO: 3973058 - DNA, 25 bp, Homo sapien
gtccttgatgatccattatcccagc

SEQ ID NO: 3973059 - DNA, 25 bp, Homo sapien
tatcccagcaatataattgtaagat

SEQ ID NO: 3973060 - DNA, 25 bp, Homo sapien
actggatgctgcttgccaccctgtg

SEQ ID NO: 3973061 - DNA, 25 bp, Homo sapien
cattcttgtttttctgaccctgggc

SEQ ID NO: 3973062 - DNA, 25 bp, Homo sapien
tgtgcatatgtggacaggcaccggc

SEQ ID NO: 3973063 - DNA, 25 bp, Homo sapien
caagtcttggaaataactggatgct

SEQ ID NO: 3973064 - DNA, 25 bp, Homo sapien
gttaatacagcagtccacagtattt

SEQ ID NO: 3973065 - DNA, 25 bp, Homo sapien
tgtgtctgtcaacacatggatcctt

SEQ ID NO: 3973066 - DNA, 25 bp, Homo sapien
tgtgtctcttaagcagtcattgaac

SEQ ID NO: 3973067 - DNA, 25 bp, Homo sapien
gaatgtcaagaaccgaataatcgag

SEQ ID NO: 3973068 - DNA, 25 bp, Homo sapien
catttcctttcttggaaatgtaatt

SEQ ID NO: 3973069 - DNA, 25 bp, Homo sapien
ttcttggaaatgtaatttccactta

SEQ ID NO: 3973070 - DNA, 25 bp, Homo sapien
ttgggcctgcaattatttcatttcc

SEQ ID NO: 3973071 - DNA, 25 bp, Homo sapien
cttgggcctgcaattatttcatttc

SEQ ID NO: 3973072 - DNA, 25 bp, Homo sapien
ggaaggagttgcagtattttctgat

SEQ ID NO: 3973073 - DNA, 25 bp, Homo sapien
gtagccagattgttgatgtcaaatt

SEQ ID NO: 3973074 - DNA, 25 bp, Homo sapien
cagccaaattgcttttgtgtctgga

SEQ ID NO: 3973075 - DNA, 25 bp, Homo sapien
tctggatattggttcaaatgtagcc

SEQ ID NO: 3973076 - DNA, 25 bp, Homo sapien
tatcagaaactaacttgtctcagcc

SEQ ID NO: 3973077 - DNA, 25 bp, Homo sapien
tttgttacactggatacagaaccca

SEQ ID NO: 3973078 - DNA, 25 bp, Homo sapien
taaccttggaacttgtgcatccttc

SEQ ID NO: 3973079 - DNA, 25 bp, Homo sapien
aggctgtttttgttacactggatac

SEQ ID NO: 3973080 - DNA, 25 bp, Homo sapien
tgaaacgtaaccttggaacttgtgc

SEQ ID NO: 3973081 - DNA, 25 bp, Homo sapien
ggatttggactctgaggtggctaat

SEQ ID NO: 3973082 - DNA, 25 bp, Homo sapien
ggactctgaggtggctaatatccca

SEQ ID NO: 3973083 - DNA, 25 bp, Homo sapien
tctgaggtggctaatatcccagttg

SEQ ID NO: 3973084 - DNA, 25 bp, Homo sapien
gaggtggctaatatcccagttggac

SEQ ID NO: 3973085 - DNA, 25 bp, Homo sapien
cctctcatagagtatggctttctga

SEQ ID NO: 3973086 - DNA, 25 bp, Homo sapien
cagggtccttcgtaatactggaatt

SEQ ID NO: 3973087 - DNA, 25 bp, Homo sapien
ggctttctgacagccctactcgaac

SEQ ID NO: 3973088 - DNA, 25 bp, Homo sapien
gaaccatttcgcctctcaagagtta

SEQ ID NO: 3973089 - DNA, 25 bp, Homo sapien
ttgctctctacctcaccaatgagtt

SEQ ID NO: 3973090 - DNA, 25 bp, Homo sapien
catttattaacgattctactgaaaa

SEQ ID NO: 3973091 - DNA, 25 bp, Homo sapien
ctcccttagtgtgtgtttgctctct

SEQ ID NO: 3973092 - DNA, 25 bp, Homo sapien
aaatttctgctcaattacaagtcac

SEQ ID NO: 3973093 - DNA, 25 bp, Homo sapien
tggtcacaaggggaaacctcataaa

SEQ ID NO: 3973094 - DNA, 25 bp, Homo sapien
taattcccatgaccgagctgatgaa

SEQ ID NO: 3973095 - DNA, 25 bp, Homo sapien
tcccatgaccgagctgatgaaacca

SEQ ID NO: 3973096 - DNA, 25 bp, Homo sapien
tttccgttaattcccatgaccgagc

SEQ ID NO: 3973097 - DNA, 25 bp, Homo sapien
tctgctgtcacctttctgcgacgca

SEQ ID NO: 3973098 - DNA, 25 bp, Homo sapien
gaactagtggatttgttaagtgtcc

SEQ ID NO: 3973099 - DNA, 25 bp, Homo sapien
cagggtcaagggattttaagcttct

SEQ ID NO: 3973100 - DNA, 25 bp, Homo sapien
aatcctttctaactcagtttcactg

SEQ ID NO: 3973101 - DNA, 25 bp, Homo sapien
ttcatccactgcactttcgcagcct

SEQ ID NO: 3973102 - DNA, 25 bp, Homo sapien
cactttcgcagcctttcgaagattc

SEQ ID NO: 3973103 - DNA, 25 bp, Homo sapien
tttcgcagcctttcgaagattctgg

SEQ ID NO: 3973104 - DNA, 25 bp, Homo sapien
actgcactttcgcagcctttcgaag

SEQ ID NO: 3973105 - DNA, 25 bp, Homo sapien
ccttagatgtaaatttactcttgga

SEQ ID NO: 3973106 - DNA, 25 bp, Homo sapien
tcttggagttgagtattctttccct

SEQ ID NO: 3973107 - DNA, 25 bp, Homo sapien
cgccttgcctggctatcttgcctgg

SEQ ID NO: 3973108 - DNA, 25 bp, Homo sapien
atgtacagcccacactatagccact

SEQ ID NO: 3973109 - DNA, 25 bp, Homo sapien
gattaacgggtctaagatgaactcc

SEQ ID NO: 3973110 - DNA, 25 bp, Homo sapien
tctcttcaactgcttgcctctttag

SEQ ID NO: 3973111 - DNA, 25 bp, Homo sapien
taattctatccatcatctcttcaac

SEQ ID NO: 3973112 - DNA, 25 bp, Homo sapien
ctttgtcttcggtctggctgtctga

SEQ ID NO: 3973113 - DNA, 25 bp, Homo sapien
tgccttttctttcttagcaccactg

SEQ ID NO: 3973114 - DNA, 25 bp, Homo sapien
cttttctttcttagcaccactgcca

SEQ ID NO: 3973115 - DNA, 25 bp, Homo sapien
ttgtttctggttgagttgccttttc

SEQ ID NO: 3973116 - DNA, 25 bp, Homo sapien
tttctttcttagcaccactgccact

SEQ ID NO: 3973117 - DNA, 25 bp, Homo sapien
gtgggatcgtttccggatcatggac

SEQ ID NO: 3973118 - DNA, 25 bp, Homo sapien
ggatcgtttccggatcatggacatg

SEQ ID NO: 3973119 - DNA, 25 bp, Homo sapien
atcgtttccggatcatggacatgag

SEQ ID NO: 3973120 - DNA, 25 bp, Homo sapien
gggtgggatcgtttccggatcatgg

SEQ ID NO: 3973121 - DNA, 25 bp, Homo sapien
tattgtacataaagacgatgaagca

SEQ ID NO: 3973122 - DNA, 25 bp, Homo sapien
acattattgtacataaagacgatga

SEQ ID NO: 3973123 - DNA, 25 bp, Homo sapien
gacgatgaagcaggaatttatctgt

SEQ ID NO: 3973124 - DNA, 25 bp, Homo sapien
acataaagacgatgaagcaggaatt

SEQ ID NO: 3973125 - DNA, 25 bp, Homo sapien
aggtggtggaggtactgaattctca

SEQ ID NO: 3973126 - DNA, 25 bp, Homo sapien
gaggtggtggaggtactgaattctc

SEQ ID NO: 3973127 - DNA, 25 bp, Homo sapien
tggttcactcgtttctggagttcat

SEQ ID NO: 3973128 - DNA, 25 bp, Homo sapien
ggttcactcgtttctggagttcatc

SEQ ID NO: 3973129 - DNA, 25 bp, Homo sapien
gttcactcgtttctggagttcatca

SEQ ID NO: 3973130 - DNA, 25 bp, Homo sapien
ttcactcgtttctggagttcatcaa

SEQ ID NO: 3973131 - DNA, 25 bp, Homo sapien
atgatgttcacaagggctctaagtc

SEQ ID NO: 3973132 - DNA, 25 bp, Homo sapien
tgaaaagttggtcttcctaggctaa

SEQ ID NO: 3973133 - DNA, 25 bp, Homo sapien
ggctaacggtatctctgtgtctaaa

SEQ ID NO: 3973134 - DNA, 25 bp, Homo sapien
tacagcagctattctactgaattgc

SEQ ID NO: 3973135 - DNA, 25 bp, Homo sapien
ttgctgtttgaggttgtgtatttct

SEQ ID NO: 3973136 - DNA, 25 bp, Homo sapien
gctgtttgaggttgtgtatttcttt

SEQ ID NO: 3973137 - DNA, 25 bp, Homo sapien
tgctgtttgaggttgtgtatttctt

SEQ ID NO: 3973138 - DNA, 25 bp, Homo sapien
caaaagctgctgatcagggatggag

SEQ ID NO: 3973139 - DNA, 25 bp, Homo sapien
gagttttgcattttcgtctaaagct

SEQ ID NO: 3973140 - DNA, 25 bp, Homo sapien
tttgcattttcgtctaaagctttca

SEQ ID NO: 3973141 - DNA, 25 bp, Homo sapien
aagctttcaaaagctgctgatcagg

SEQ ID NO: 3973142 - DNA, 25 bp, Homo sapien
tttctttcgaaggtccttctccagc

SEQ ID NO: 3973143 - DNA, 25 bp, Homo sapien
ctgctttctttcgaaggtccttctc

SEQ ID NO: 3973144 - DNA, 25 bp, Homo sapien
tccaggtttacttgcatctcctcat

SEQ ID NO: 3973145 - DNA, 25 bp, Homo sapien
tcctcatactcttctacagctaaca

SEQ ID NO: 3973146 - DNA, 25 bp, Homo sapien
aatatggatgaaaaacagtgttgaa

SEQ ID NO: 3973147 - DNA, 25 bp, Homo sapien
ccagcatacaggtaccctcatgcat

SEQ ID NO: 3973148 - DNA, 25 bp, Homo sapien
catacaggtaccctcatgcattcct

SEQ ID NO: 3973149 - DNA, 25 bp, Homo sapien
caggtaccctcatgcattcctggtt

SEQ ID NO: 3973150 - DNA, 25 bp, Homo sapien
ctaagacttttctctgttcaagaac

SEQ ID NO: 3973151 - DNA, 25 bp, Homo sapien
ctctgttcaagaacttctgaattta

SEQ ID NO: 3973152 - DNA, 25 bp, Homo sapien
tttctaagacttttctctgttcaag

SEQ ID NO: 3973153 - DNA, 25 bp, Homo sapien
acttttctctgttcaagaacttctg

SEQ ID NO: 3973154 - DNA, 25 bp, Homo sapien
gaaaatgctaaagcccttgcctttc

SEQ ID NO: 3973155 - DNA, 25 bp, Homo sapien
aatgctaaagcccttgcctttcagg

SEQ ID NO: 3973156 - DNA, 25 bp, Homo sapien
ttgaaaatgctaaagcccttgcctt

SEQ ID NO: 3973157 - DNA, 25 bp, Homo sapien
cttgaaaatgctaaagcccttgcct

SEQ ID NO: 3973158 - DNA, 25 bp, Homo sapien
tacgagtttgctcttgagattttcc

SEQ ID NO: 3973159 - DNA, 25 bp, Homo sapien
ttccagctcaatggctaaaatcttc

SEQ ID NO: 3973160 - DNA, 25 bp, Homo sapien
cctgaacagatacaatttgatctcg

SEQ ID NO: 3973161 - DNA, 25 bp, Homo sapien
tcttcaattacttctacgagtttgc

SEQ ID NO: 3973162 - DNA, 25 bp, Homo sapien
tgcctaggcatcagtattttgaaag

SEQ ID NO: 3973163 - DNA, 25 bp, Homo sapien
tcaataattaagcaaagagttctac

SEQ ID NO: 3973164 - DNA, 25 bp, Homo sapien
tgatgtgcagtcagggttcagaagc

SEQ ID NO: 3973165 - DNA, 25 bp, Homo sapien
ggttcagaagcactatcataacggg

SEQ ID NO: 3973166 - DNA, 25 bp, Homo sapien
tgagacacaagtctcggcggcaccg

SEQ ID NO: 3973167 - DNA, 25 bp, Homo sapien
tcagttattacatctggtcccagct

SEQ ID NO: 3973168 - DNA, 25 bp, Homo sapien
gcttctgacactgtactgagacaca

SEQ ID NO: 3973169 - DNA, 25 bp, Homo sapien
ggcaccgtctgtgtctgtagtcgaa

SEQ ID NO: 3973170 - DNA, 25 bp, Homo sapien
aaagcagccaaatgagtatcttgga

SEQ ID NO: 3973171 - DNA, 25 bp, Homo sapien
aaaagcagccaaatgagtatcttgg

SEQ ID NO: 3973172 - DNA, 25 bp, Homo sapien
taaaagcagccaaatgagtatcttg

SEQ ID NO: 3973173 - DNA, 25 bp, Homo sapien
cttctctatttcaagatggttctgc

SEQ ID NO: 3973174 - DNA, 25 bp, Homo sapien
gtcttctctatttcaagatggttct

SEQ ID NO: 3973175 - DNA, 25 bp, Homo sapien
tctctatttcaagatggttctgcat

SEQ ID NO: 3973176 - DNA, 25 bp, Homo sapien
ttctctatttcaagatggttctgca

SEQ ID NO: 3973177 - DNA, 25 bp, Homo sapien
caaagattagtcagctattccagga

SEQ ID NO: 3973178 - DNA, 25 bp, Homo sapien
aagattagtcagctattccaggagc

SEQ ID NO: 3973179 - DNA, 25 bp, Homo sapien
gagcccacgcatcgtcccatgatta

SEQ ID NO: 3973180 - DNA, 25 bp, Homo sapien
ttccaggagcccacgcatcgtccca

SEQ ID NO: 3973181 - DNA, 25 bp, Homo sapien
acacattggaagtggcagccttaat

SEQ ID NO: 3973182 - DNA, 25 bp, Homo sapien
gaaaattgtaccaagtgcataagac

SEQ ID NO: 3973183 - DNA, 25 bp, Homo sapien
aatgacacgttaagcgtaattactg

SEQ ID NO: 3973184 - DNA, 25 bp, Homo sapien
gactgctcaagatcatttcaactgc

SEQ ID NO: 3973185 - DNA, 25 bp, Homo sapien
caccaatgatgttgcttctagagca

SEQ ID NO: 3973186 - DNA, 25 bp, Homo sapien
tcctataacgtagggatcatcacag

SEQ ID NO: 3973187 - DNA, 25 bp, Homo sapien
gaaggcctaagctcgcctgtgaaca

SEQ ID NO: 3973188 - DNA, 25 bp, Homo sapien
taccatcgccatttgttgagcctga

SEQ ID NO: 3973189 - DNA, 25 bp, Homo sapien
gagctggcgaggatcaaaaatgaca

SEQ ID NO: 3973190 - DNA, 25 bp, Homo sapien
tttgtgtgtaggaggaaggctcaga

SEQ ID NO: 3973191 - DNA, 25 bp, Homo sapien
gaatccggtctagggaatgcagctt

SEQ ID NO: 3973192 - DNA, 25 bp, Homo sapien
cagctttgctatgtagtggtgttct

SEQ ID NO: 3973193 - DNA, 25 bp, Homo sapien
gcttcatctcgttcttgcctaattt

SEQ ID NO: 3973194 - DNA, 25 bp, Homo sapien
catctcgttcttgcctaattttgtc

SEQ ID NO: 3973195 - DNA, 25 bp, Homo sapien
aacggcttcatctcgttcttgccta

SEQ ID NO: 3973196 - DNA, 25 bp, Homo sapien
ttttaacggcttcatctcgttcttg

SEQ ID NO: 3973197 - DNA, 25 bp, Homo sapien
caaaaaagaagtggtagctgccctc

SEQ ID NO: 3973198 - DNA, 25 bp, Homo sapien
aagaatccttggcatacaatgaaag

SEQ ID NO: 3973199 - DNA, 25 bp, Homo sapien
cctatgtaagtctggccagaactgt

SEQ ID NO: 3973200 - DNA, 25 bp, Homo sapien
cgacaattctactgctccacctatg

SEQ ID NO: 3973201 - DNA, 25 bp, Homo sapien
gaacaactggtttccctgaagagca

SEQ ID NO: 3973202 - DNA, 25 bp, Homo sapien
tcaacgcaagagagtccaaacaggg

SEQ ID NO: 3973203 - DNA, 25 bp, Homo sapien
tctgtgtaacactgggaacctcact

SEQ ID NO: 3973204 - DNA, 25 bp, Homo sapien
cattgttcctggcaagctgacagaa

SEQ ID NO: 3973205 - DNA, 25 bp, Homo sapien
tctaaggtcttcatattcgcctatt

SEQ ID NO: 3973206 - DNA, 25 bp, Homo sapien
gctctaaggtcttcatattcgccta

SEQ ID NO: 3973207 - DNA, 25 bp, Homo sapien
ctaaggtcttcatattcgcctattg

SEQ ID NO: 3973208 - DNA, 25 bp, Homo sapien
ctctaaggtcttcatattcgcctat

SEQ ID NO: 3973209 - DNA, 25 bp, Homo sapien
cttgctccttcagactggtaatgag

SEQ ID NO: 3973210 - DNA, 25 bp, Homo sapien
ttgctccttcagactggtaatgagc

SEQ ID NO: 3973211 - DNA, 25 bp, Homo sapien
ttcagactggtaatgagctgcagct

SEQ ID NO: 3973212 - DNA, 25 bp, Homo sapien
tgctccttcagactggtaatgagct

SEQ ID NO: 3973213 - DNA, 25 bp, Homo sapien
gcttgcggctccactacccggaagt

SEQ ID NO: 3973214 - DNA, 25 bp, Homo sapien
cactacccggaagttggatccgctc

SEQ ID NO: 3973215 - DNA, 25 bp, Homo sapien
gaagaaaaagcaagatgccggtggc

SEQ ID NO: 3973216 - DNA, 25 bp, Homo sapien
caagatgccggtggcttgcggctcc

SEQ ID NO: 3973217 - DNA, 25 bp, Homo sapien
gagcgcgcgagtgagatcatcccca

SEQ ID NO: 3973218 - DNA, 25 bp, Homo sapien
gcgcgcgagtgagatcatccccacg

SEQ ID NO: 3973219 - DNA, 25 bp, Homo sapien
cgcggagcgcgcgagtgagatcatc

SEQ ID NO: 3973220 - DNA, 25 bp, Homo sapien
cggagcgcgcgagtgagatcatccc

SEQ ID NO: 3973221 - DNA, 25 bp, Homo sapien
gggcgggcccagcagtcccgttcag

SEQ ID NO: 3973222 - DNA, 25 bp, Homo sapien
ttcgcagcgtgtgtgggaactccac

SEQ ID NO: 3973223 - DNA, 25 bp, Homo sapien
agaaaaccggctgtgggttcgcagc

SEQ ID NO: 3973224 - DNA, 25 bp, Homo sapien
gacgcaatgagccatgaacgcctgg

SEQ ID NO: 3973225 - DNA, 25 bp, Homo sapien
tcagggacgcgagttcagagaaaac

SEQ ID NO: 3973226 - DNA, 25 bp, Homo sapien
ctgcccacaggggcgggcccagggt

SEQ ID NO: 3973227 - DNA, 25 bp, Homo sapien
caggggcgggcccagggtggtacat

SEQ ID NO: 3973228 - DNA, 25 bp, Homo sapien
gcgggcccagggtggtacattttgc

SEQ ID NO: 3973229 - DNA, 25 bp, Homo sapien
gggcccagggtggtacattttgcac

SEQ ID NO: 3973230 - DNA, 25 bp, Homo sapien
ggtttgccaggtggtcagaacgtgg

SEQ ID NO: 3973231 - DNA, 25 bp, Homo sapien
tttgccaggtggtcagaacgtggac

SEQ ID NO: 3973232 - DNA, 25 bp, Homo sapien
gccaggtggtcagaacgtggaccct

SEQ ID NO: 3973233 - DNA, 25 bp, Homo sapien
aggtggtcagaacgtggaccctgct

SEQ ID NO: 3973234 - DNA, 25 bp, Homo sapien
ctgttttggtagcctgacctggcac

SEQ ID NO: 3973235 - DNA, 25 bp, Homo sapien
cctagaagctgttttggtagcctga

SEQ ID NO: 3973236 - DNA, 25 bp, Homo sapien
tagaagctgttttggtagcctgacc

SEQ ID NO: 3973237 - DNA, 25 bp, Homo sapien
caaagatgttaattggttctaatcc

SEQ ID NO: 3973238 - DNA, 25 bp, Homo sapien
tgttagaaaatccaaaccacgacat

SEQ ID NO: 3973239 - DNA, 25 bp, Homo sapien
aaatacctgaggaaatgggctgcca

SEQ ID NO: 3973240 - DNA, 25 bp, Homo sapien
agtgaaaagccctgcattgttagaa

SEQ ID NO: 3973241 - DNA, 25 bp, Homo sapien
ttccactcacttcaaatacctgagg

SEQ ID NO: 3973242 - DNA, 25 bp, Homo sapien
tccgttccgcaataggacccagaac

SEQ ID NO: 3973243 - DNA, 25 bp, Homo sapien
acatactccgttccgcaataggacc

SEQ ID NO: 3973244 - DNA, 25 bp, Homo sapien
tcacatactccgttccgcaatagga

SEQ ID NO: 3973245 - DNA, 25 bp, Homo sapien
tactccgttccgcaataggacccag

SEQ ID NO: 3973246 - DNA, 25 bp, Homo sapien
agatgctaacacaaattcggttttg

SEQ ID NO: 3973247 - DNA, 25 bp, Homo sapien
aaagatgctaacacaaattcggttt

SEQ ID NO: 3973248 - DNA, 25 bp, Homo sapien
gatgctaacacaaattcggttttgc

SEQ ID NO: 3973249 - DNA, 25 bp, Homo sapien
aagatgctaacacaaattcggtttt

SEQ ID NO: 3973250 - DNA, 25 bp, Homo sapien
tcatcagatgggactagggcttagg

SEQ ID NO: 3973251 - DNA, 25 bp, Homo sapien
tcagttccaaccaagaagggtgtgc

SEQ ID NO: 3973252 - DNA, 25 bp, Homo sapien
caaacttcttgatgagggcaccaag

SEQ ID NO: 3973253 - DNA, 25 bp, Homo sapien
caaactaccaggtctgtaagggagc

SEQ ID NO: 3973254 - DNA, 25 bp, Homo sapien
gcctgtgagtctccagttggaagcc

SEQ ID NO: 3973255 - DNA, 25 bp, Homo sapien
cctccagggaccaaggcagcttact

SEQ ID NO: 3973256 - DNA, 25 bp, Homo sapien
gagtctccagttggaagccagaagc

SEQ ID NO: 3973257 - DNA, 25 bp, Homo sapien
cagggaccaaggcagcttactggag

SEQ ID NO: 3973258 - DNA, 25 bp, Homo sapien
tccttaaaggaagcgcaggcgttta

SEQ ID NO: 3973259 - DNA, 25 bp, Homo sapien
tagaagagcgtgtccggaagtgtcc

SEQ ID NO: 3973260 - DNA, 25 bp, Homo sapien
taaaagtgaactgtctgtgggcggc

SEQ ID NO: 3973261 - DNA, 25 bp, Homo sapien
gaacaaatcgtcgtagccaggcgtc

SEQ ID NO: 3973262 - DNA, 25 bp, Homo sapien
ccacgccgagactcatcatttgctg

SEQ ID NO: 3973263 - DNA, 25 bp, Homo sapien
acgccgagactcatcatttgctggc

SEQ ID NO: 3973264 - DNA, 25 bp, Homo sapien
ccggagtccccacgccgagactcat

SEQ ID NO: 3973265 - DNA, 25 bp, Homo sapien
agtccccacgccgagactcatcatt

SEQ ID NO: 3973266 - DNA, 25 bp, Homo sapien
ccgcgtttgaatcgttcattatttt

SEQ ID NO: 3973267 - DNA, 25 bp, Homo sapien
cgcgtttgaatcgttcattattttc

SEQ ID NO: 3973268 - DNA, 25 bp, Homo sapien
atcgttcattattttcttcactatt

SEQ ID NO: 3973269 - DNA, 25 bp, Homo sapien
gttcattattttcttcactatttgc

SEQ ID NO: 3973270 - DNA, 25 bp, Homo sapien
caaaccgagcaattgtgcccgaagc

SEQ ID NO: 3973271 - DNA, 25 bp, Homo sapien
cacaagacgctatctggactccgag

SEQ ID NO: 3973272 - DNA, 25 bp, Homo sapien
gaatacattctagacactgcggcac

SEQ ID NO: 3973273 - DNA, 25 bp, Homo sapien
ggactccgagactactgctagagga

SEQ ID NO: 3973274 - DNA, 25 bp, Homo sapien
ggccaccgccccgaacaggctcgga

SEQ ID NO: 3973275 - DNA, 25 bp, Homo sapien
gccccgaacaggctcggagaaaaga

SEQ ID NO: 3973276 - DNA, 25 bp, Homo sapien
caccgccccgaacaggctcggagaa

SEQ ID NO: 3973277 - DNA, 25 bp, Homo sapien
cgaacaggctcggagaaaagattct

SEQ ID NO: 3973278 - DNA, 25 bp, Homo sapien
tcgttgcctactacgacgtttgtta

SEQ ID NO: 3973279 - DNA, 25 bp, Homo sapien
atttatcagtgtcgttgcctactac

SEQ ID NO: 3973280 - DNA, 25 bp, Homo sapien
cagtgtcgttgcctactacgacgtt

SEQ ID NO: 3973281 - DNA, 25 bp, Homo sapien
tgcctactacgacgtttgttactgt

SEQ ID NO: 3973282 - DNA, 25 bp, Homo sapien
tgttgtgtaccgactatcccgagag

SEQ ID NO: 3973283 - DNA, 25 bp, Homo sapien
tcagggcatcaggttgactaactcg

SEQ ID NO: 3973284 - DNA, 25 bp, Homo sapien
tattcctaggaatagtcggcagcgg

SEQ ID NO: 3973285 - DNA, 25 bp, Homo sapien
gagaaaaaccgcaggatttgcccgc

SEQ ID NO: 3973286 - DNA, 25 bp, Homo sapien
gatatcgggcggagagttcttgcaa

SEQ ID NO: 3973287 - DNA, 25 bp, Homo sapien
tcagtccagcgcttttttctcggcc

SEQ ID NO: 3973288 - DNA, 25 bp, Homo sapien
tcgaaggccgaggagctcagatatc

SEQ ID NO: 3973289 - DNA, 25 bp, Homo sapien
tgcaaattcccagctagcgaaccag

SEQ ID NO: 3973290 - DNA, 25 bp, Homo sapien
caccgagcgtagctccgagtccttg

SEQ ID NO: 3973291 - DNA, 25 bp, Homo sapien
cacgtggccgcggtctccgacacca

SEQ ID NO: 3973292 - DNA, 25 bp, Homo sapien
gtctccgacaccaccgagcgtagct

SEQ ID NO: 3973293 - DNA, 25 bp, Homo sapien
agcgtagctccgagtccttgccctg

SEQ ID NO: 3973294 - DNA, 25 bp, Homo sapien
agcgtcaaaggaagcgagctcccgg

SEQ ID NO: 3973295 - DNA, 25 bp, Homo sapien
gcagggaagaccagcgtcaaaggaa

SEQ ID NO: 3973296 - DNA, 25 bp, Homo sapien
ggaagaccagcgtcaaaggaagcga

SEQ ID NO: 3973297 - DNA, 25 bp, Homo sapien
accagcgtcaaaggaagcgagctcc

SEQ ID NO: 3973298 - DNA, 25 bp, Homo sapien
cagaacaaagtaataaaatgcccac

SEQ ID NO: 3973299 - DNA, 25 bp, Homo sapien
acagaacaaagtaataaaatgccca

SEQ ID NO: 3973300 - DNA, 25 bp, Homo sapien
cgcgctaccccgcagcggtgtttgg

SEQ ID NO: 3973301 - DNA, 25 bp, Homo sapien
agatgtgtgaatcagtgcagtccca

SEQ ID NO: 3973302 - DNA, 25 bp, Homo sapien
gaaagggtttcactggcttccgcgc

SEQ ID NO: 3973303 - DNA, 25 bp, Homo sapien
tgcagtcccaaagccggaatttccg

SEQ ID NO: 3973304 - DNA, 25 bp, Homo sapien
tgtgtgcggcctggtcgccgggtac

SEQ ID NO: 3973305 - DNA, 25 bp, Homo sapien
cagccgatagagctgctccgcggtg

SEQ ID NO: 3973306 - DNA, 25 bp, Homo sapien
gatgatctctcggatggaccccttg

SEQ ID NO: 3973307 - DNA, 25 bp, Homo sapien
tcttaggccggtccaagtccaggcc

SEQ ID NO: 3973308 - DNA, 25 bp, Homo sapien
agctgccgggcgagctcggtcctct

SEQ ID NO: 3973309 - DNA, 25 bp, Homo sapien
aaggggcctaactccataccgctga

SEQ ID NO: 3973310 - DNA, 25 bp, Homo sapien
gaccacaaccaggtagcaaagacac

SEQ ID NO: 3973311 - DNA, 25 bp, Homo sapien
ctccttggcccgagctggatttggg

SEQ ID NO: 3973312 - DNA, 25 bp, Homo sapien
cagtccccagaagcgtgcagttttg

SEQ ID NO: 3973313 - DNA, 25 bp, Homo sapien
ttcccaccggcctgtgtcggcggca

SEQ ID NO: 3973314 - DNA, 25 bp, Homo sapien
agtcgaccccaaagaacgcgcctgg

SEQ ID NO: 3973315 - DNA, 25 bp, Homo sapien
gcgcttgtccccagccggactcggg

SEQ ID NO: 3973316 - DNA, 25 bp, Homo sapien
ctggagagcgcaccggagagtccca

SEQ ID NO: 3973317 - DNA, 25 bp, Homo sapien
gactctccttgtgcgcgttcttcga

SEQ ID NO: 3973318 - DNA, 25 bp, Homo sapien
tttgttacaatcctcagcagcgccc

SEQ ID NO: 3973319 - DNA, 25 bp, Homo sapien
cagtaatccgggtccgctgcggaat

SEQ ID NO: 3973320 - DNA, 25 bp, Homo sapien
tcggaccaggatccggcggcagtaa

SEQ ID NO: 3973321 - DNA, 25 bp, Homo sapien
tcggcgtccgagtggcatcgaacgt

SEQ ID NO: 3973322 - DNA, 25 bp, Homo sapien
gcagcctcggcgtccgagtggcatc

SEQ ID NO: 3973323 - DNA, 25 bp, Homo sapien
gcctcggcgtccgagtggcatcgaa

SEQ ID NO: 3973324 - DNA, 25 bp, Homo sapien
cgtccgagtggcatcgaacgtccat

SEQ ID NO: 3973325 - DNA, 25 bp, Homo sapien
ccggcgacaggcaaggggcaagaat

SEQ ID NO: 3973326 - DNA, 25 bp, Homo sapien
cgctcgccgagaggcggccagtctg

SEQ ID NO: 3973327 - DNA, 25 bp, Homo sapien
aggggcaagaatgaatgtccccgcg

SEQ ID NO: 3973328 - DNA, 25 bp, Homo sapien
gagagtggcgcgctcgccgagaggc

SEQ ID NO: 3973329 - DNA, 25 bp, Homo sapien
tattttctcattgtccaggggctag

SEQ ID NO: 3973330 - DNA, 25 bp, Homo sapien
gccattagagttggtttctagtgag

SEQ ID NO: 3973331 - DNA, 25 bp, Homo sapien
gatcagggtgccattagagttggtt

SEQ ID NO: 3973332 - DNA, 25 bp, Homo sapien
tatagatggctgtctcctccttatg

SEQ ID NO: 3973333 - DNA, 25 bp, Homo sapien
ctctagagttagagccttccatggg

SEQ ID NO: 3973334 - DNA, 25 bp, Homo sapien
aagctcagagtggttagtaacttgc

SEQ ID NO: 3973335 - DNA, 25 bp, Homo sapien
gtgacaatcgctaatattgactgtg

SEQ ID NO: 3973336 - DNA, 25 bp, Homo sapien
cccaactcttaagcattttgccatt

SEQ ID NO: 3973337 - DNA, 25 bp, Homo sapien
tgaaagtacttagggctggaggcct

SEQ ID NO: 3973338 - DNA, 25 bp, Homo sapien
gctcagactctaccacacagatgga

SEQ ID NO: 3973339 - DNA, 25 bp, Homo sapien
gccaactggagcttctgtagaacac

SEQ ID NO: 3973340 - DNA, 25 bp, Homo sapien
tccctgctggatatcaagtgactgg

SEQ ID NO: 3973341 - DNA, 25 bp, Homo sapien
cctttcgtgtatttcagcaagagaa

SEQ ID NO: 3973342 - DNA, 25 bp, Homo sapien
tggaaatactaatatggctgctggg

SEQ ID NO: 3973343 - DNA, 25 bp, Homo sapien
gctgggactcctttcgtgtatttca

SEQ ID NO: 3973344 - DNA, 25 bp, Homo sapien
gggctgacacaggacgtggaaatac

SEQ ID NO: 3973345 - DNA, 25 bp, Homo sapien
ttatttcgtatcagtgctcagtgtc

SEQ ID NO: 3973346 - DNA, 25 bp, Homo sapien
ctccagtacgtaataaagggcatca

SEQ ID NO: 3973347 - DNA, 25 bp, Homo sapien
aaagggcatcagttacttttgaagg

SEQ ID NO: 3973348 - DNA, 25 bp, Homo sapien
gatgaggattccctggttaaacgca

SEQ ID NO: 3973349 - DNA, 25 bp, Homo sapien
tacttttgaaggtgctttggcaatg

SEQ ID NO: 3973350 - DNA, 25 bp, Homo sapien
gaagccatgactgctgtgtcccggg

SEQ ID NO: 3973351 - DNA, 25 bp, Homo sapien
tatttaatgaatggccactgggtgc

SEQ ID NO: 3973352 - DNA, 25 bp, Homo sapien
gagggtgacccaacactagtcggaa

SEQ ID NO: 3973353 - DNA, 25 bp, Homo sapien
caatctaaaaggaagccgtcgcggc

SEQ ID NO: 3973354 - DNA, 25 bp, Homo sapien
tgtgtgtgaagcaaaccccgctggc

SEQ ID NO: 3973355 - DNA, 25 bp, Homo sapien
aaacctgcattgtcagacctgctgg

SEQ ID NO: 3973356 - DNA, 25 bp, Homo sapien
cccaacaggcgagcggggaaacctg

SEQ ID NO: 3973357 - DNA, 25 bp, Homo sapien
gctcctccaaaccagaattaggagg

SEQ ID NO: 3973358 - DNA, 25 bp, Homo sapien
gcagcatctcccacataagggagga

SEQ ID NO: 3973359 - DNA, 25 bp, Homo sapien
aaagcggtcacccttgtgtgctcca

SEQ ID NO: 3973360 - DNA, 25 bp, Homo sapien
cgtttgctgcacacctactttgcgc

SEQ ID NO: 3973361 - DNA, 25 bp, Homo sapien
gagctgcccaaataaaatgatcgtg

SEQ ID NO: 3973362 - DNA, 25 bp, Homo sapien
caagctttgcgccagcaggtggcgc

SEQ ID NO: 3973363 - DNA, 25 bp, Homo sapien
aaacttgtcgcagcatgcccactag

SEQ ID NO: 3973364 - DNA, 25 bp, Homo sapien
cttccaccgtggactcctgagaggg

SEQ ID NO: 3973365 - DNA, 25 bp, Homo sapien
ggacgcctcggactcttgttctcac

SEQ ID NO: 3973366 - DNA, 25 bp, Homo sapien
ctgcctcggacgctcagtagccagg

SEQ ID NO: 3973367 - DNA, 25 bp, Homo sapien
tcagctggggtcgagaacccctgcc

SEQ ID NO: 3973368 - DNA, 25 bp, Homo sapien
ccaacactgcggtgattctcagctg

SEQ ID NO: 3973369 - DNA, 25 bp, Homo sapien
ggacgctcagtagccaggtccaaga

SEQ ID NO: 3973370 - DNA, 25 bp, Homo sapien
aatggccagtccagaagctttcccc

SEQ ID NO: 3973371 - DNA, 25 bp, Homo sapien
tgatgttgtgctgaccgggaagtgg

SEQ ID NO: 3973372 - DNA, 25 bp, Homo sapien
tccccacagcgtcttttgatgttgt

SEQ ID NO: 3973373 - DNA, 25 bp, Homo sapien
gtgttgtgccctggtggtcaagacc

SEQ ID NO: 3973374 - DNA, 25 bp, Homo sapien
taggaagacgatctgcctaagcaaa

SEQ ID NO: 3973375 - DNA, 25 bp, Homo sapien
gacatcctaggaagacgatctgcct

SEQ ID NO: 3973376 - DNA, 25 bp, Homo sapien
acagctgggaccgtgggatgacatc

SEQ ID NO: 3973377 - DNA, 25 bp, Homo sapien
gggcaggaacgacatcctaggaaga

SEQ ID NO: 3973378 - DNA, 25 bp, Homo sapien
tacccagtctgaagatgacgcaaac

SEQ ID NO: 3973379 - DNA, 25 bp, Homo sapien
aaatcctgtctaggtgtagccctcc

SEQ ID NO: 3973380 - DNA, 25 bp, Homo sapien
ctcaagccatgcagtaatcctccca

SEQ ID NO: 3973381 - DNA, 25 bp, Homo sapien
ccaaaaggcacttgctctacccagt

SEQ ID NO: 3973382 - DNA, 25 bp, Homo sapien
ccaggaaacacctacaccttccctg

SEQ ID NO: 3973383 - DNA, 25 bp, Homo sapien
caggaaacacctacaccttccctgt

SEQ ID NO: 3973384 - DNA, 25 bp, Homo sapien
gaaacacctacaccttccctgtatc

SEQ ID NO: 3973385 - DNA, 25 bp, Homo sapien
gagtgataccctcctgccatcttaa

SEQ ID NO: 3973386 - DNA, 25 bp, Homo sapien
gcacatcctgtgacatcctggagac

SEQ ID NO: 3973387 - DNA, 25 bp, Homo sapien
tcttctgctaagagactgtgacagg

SEQ ID NO: 3973388 - DNA, 25 bp, Homo sapien
tgcagagctccagcgatgtcagagg

SEQ ID NO: 3973389 - DNA, 25 bp, Homo sapien
agagccgccgctcgcggaagctcat

SEQ ID NO: 3973390 - DNA, 25 bp, Homo sapien
gccgctcgcggaagctcatcctgtt

SEQ ID NO: 3973391 - DNA, 25 bp, Homo sapien
cctgagcgagctggcgctggtccgc

SEQ ID NO: 3973392 - DNA, 25 bp, Homo sapien
gcggaagctcatcctgttcatcgtg

SEQ ID NO: 3973393 - DNA, 25 bp, Homo sapien
ggcggcaacatgagcctggttgtat

SEQ ID NO: 3973394 - DNA, 25 bp, Homo sapien
caggcacaggtgtgtccggtactga

SEQ ID NO: 3973395 - DNA, 25 bp, Homo sapien
cagctttctcatctaaggtgagggt

SEQ ID NO: 3973396 - DNA, 25 bp, Homo sapien
gcctgtgttgaaagtgcaggcacag

SEQ ID NO: 3973397 - DNA, 25 bp, Homo sapien
tacttctgtcggatgaaatcacaca

SEQ ID NO: 3973398 - DNA, 25 bp, Homo sapien
tttgtattggcccacgtgtgaagcc

SEQ ID NO: 3973399 - DNA, 25 bp, Homo sapien
cacataagattgcaggtgctgagct

SEQ ID NO: 3973400 - DNA, 25 bp, Homo sapien
catttctggagtgtctcagcagctt

SEQ ID NO: 3973401 - DNA, 25 bp, Homo sapien
gcagactaatgtgttgatgaccgcc

SEQ ID NO: 3973402 - DNA, 25 bp, Homo sapien
aaaggaatcccttgcacagagctca

SEQ ID NO: 3973403 - DNA, 25 bp, Homo sapien
ttgtggactcctccctatgagcagg

SEQ ID NO: 3973404 - DNA, 25 bp, Homo sapien
tcttcagaagggaacaggcatacca

SEQ ID NO: 3973405 - DNA, 25 bp, Homo sapien
cagaactgtcttagtcataccatcc

SEQ ID NO: 3973406 - DNA, 25 bp, Homo sapien
cataccatccatccctggtgaaaga

SEQ ID NO: 3973407 - DNA, 25 bp, Homo sapien
agtgacacaactcatccagaactgt

SEQ ID NO: 3973408 - DNA, 25 bp, Homo sapien
gttatggtcgattgccaacagcctt

SEQ ID NO: 3973409 - DNA, 25 bp, Homo sapien
ttgtataaatagtgttgaaacttta

SEQ ID NO: 3973410 - DNA, 25 bp, Homo sapien
taactatatcatccagtgtgcagtg

SEQ ID NO: 3973411 - DNA, 25 bp, Homo sapien
tattctctaggaaagtaacacttcg

SEQ ID NO: 3973412 - DNA, 25 bp, Homo sapien
tatgtaatcacctacctagagagag

SEQ ID NO: 3973413 - DNA, 25 bp, Homo sapien
tgtgttaacttcgacatcaaggagc

SEQ ID NO: 3973414 - DNA, 25 bp, Homo sapien
gcttgtaggcatcaggtaaaagcca

SEQ ID NO: 3973415 - DNA, 25 bp, Homo sapien
taaaagccaccccaggttagcttga

SEQ ID NO: 3973416 - DNA, 25 bp, Homo sapien
caaaggtatgcctgctgttggtccc

SEQ ID NO: 3973417 - DNA, 25 bp, Homo sapien
gttagcaagactggaaagaggtgtt

SEQ ID NO: 3973418 - DNA, 25 bp, Homo sapien
gataattccatagagatgcagcaat

SEQ ID NO: 3973419 - DNA, 25 bp, Homo sapien
tgctcagtttgtctaagccattcac

SEQ ID NO: 3973420 - DNA, 25 bp, Homo sapien
gcttgatatgaagaagtatagccta

SEQ ID NO: 3973421 - DNA, 25 bp, Homo sapien
tagaacttgatagtacccctcaaaa

SEQ ID NO: 3973422 - DNA, 25 bp, Homo sapien
ctctaggctatttggagtgttcccc

SEQ ID NO: 3973423 - DNA, 25 bp, Homo sapien
taaaataagatcacgtggccgggcg

SEQ ID NO: 3973424 - DNA, 25 bp, Homo sapien
tagcatggcagcaagattacatcag

SEQ ID NO: 3973425 - DNA, 25 bp, Homo sapien
caacatgcttgggtatcatgaaaac

SEQ ID NO: 3973426 - DNA, 25 bp, Homo sapien
tcacagaagcatcgaaagcaagcaa

SEQ ID NO: 3973427 - DNA, 25 bp, Homo sapien
gagtcctggagtctagacctgggcc

SEQ ID NO: 3973428 - DNA, 25 bp, Homo sapien
ttacaactgtaagacgccaaagcaa

SEQ ID NO: 3973429 - DNA, 25 bp, Homo sapien
caggccagagtgcatacgaggattt

SEQ ID NO: 3973430 - DNA, 25 bp, Homo sapien
taagaagtgttagagcttgtagcct

SEQ ID NO: 3973431 - DNA, 25 bp, Homo sapien
tacacagactcggatgggccaaata

SEQ ID NO: 3973432 - DNA, 25 bp, Homo sapien
tttggagtgctggtctaaagacaga

SEQ ID NO: 3973433 - DNA, 25 bp, Homo sapien
cacctgatttagctaaggcagcaga

SEQ ID NO: 3973434 - DNA, 25 bp, Homo sapien
tcactgccttcgttgtctgacgtgt

SEQ ID NO: 3973435 - DNA, 25 bp, Homo sapien
taggcaagcccctgtacagatcacg

SEQ ID NO: 3973436 - DNA, 25 bp, Homo sapien
gaaaggcgagttttagagacttgac

SEQ ID NO: 3973437 - DNA, 25 bp, Homo sapien
tacgagatcggttcctggttcagaa

SEQ ID NO: 3973438 - DNA, 25 bp, Homo sapien
taacccgattggcatgagcttgaca

SEQ ID NO: 3973439 - DNA, 25 bp, Homo sapien
tagcttcagcatcaacacgaggagg

SEQ ID NO: 3973440 - DNA, 25 bp, Homo sapien
tatctacaagaggaggtggcaccac

SEQ ID NO: 3973441 - DNA, 25 bp, Homo sapien
cgtccgaactgtccttagtagggca

SEQ ID NO: 3973442 - DNA, 25 bp, Homo sapien
tgataagcttcaacacttgcagtgt

SEQ ID NO: 3973443 - DNA, 25 bp, Homo sapien
gcttgataagcttcaacacttgcag

SEQ ID NO: 3973444 - DNA, 25 bp, Homo sapien
cttgcagtgttgatgtgattttcac

SEQ ID NO: 3973445 - DNA, 25 bp, Homo sapien
gcctgcttgataagcttcaacactt

SEQ ID NO: 3973446 - DNA, 25 bp, Homo sapien
ttttcaaaccagatgatgacacagg

SEQ ID NO: 3973447 - DNA, 25 bp, Homo sapien
taactcctaattgctttctatctct

SEQ ID NO: 3973448 - DNA, 25 bp, Homo sapien
tcttaggttagatgacatctctcag

SEQ ID NO: 3973449 - DNA, 25 bp, Homo sapien
ccagatgatgacacaggatcccaaa

SEQ ID NO: 3973450 - DNA, 25 bp, Homo sapien
tccctgaccttagtagcttctagtg

SEQ ID NO: 3973451 - DNA, 25 bp, Homo sapien
gactcggtcatcacttggaacttgt

SEQ ID NO: 3973452 - DNA, 25 bp, Homo sapien
tatccctttatgtagaacttagaga

SEQ ID NO: 3973453 - DNA, 25 bp, Homo sapien
tagggccatcctaaataaatctaag

SEQ ID NO: 3973454 - DNA, 25 bp, Homo sapien
ttgactccctagaaacattcagctg

SEQ ID NO: 3973455 - DNA, 25 bp, Homo sapien
tggtaaattacagccactccagtag

SEQ ID NO: 3973456 - DNA, 25 bp, Homo sapien
tcctttgggactaaatattcagcag

SEQ ID NO: 3973457 - DNA, 25 bp, Homo sapien
tgaatcctagggatatttgactccc

SEQ ID NO: 3973458 - DNA, 25 bp, Homo sapien
cagagctttctaatatggtgcttca

SEQ ID NO: 3973459 - DNA, 25 bp, Homo sapien
tacagtaggcaaaaacttcaactca

SEQ ID NO: 3973460 - DNA, 25 bp, Homo sapien
tttatgactaaaaatctgccctcgt

SEQ ID NO: 3973461 - DNA, 25 bp, Homo sapien
gtggagatggccattgcaactctct

SEQ ID NO: 3973462 - DNA, 25 bp, Homo sapien
agtttcaatgatgacgtgcccagca

SEQ ID NO: 3973463 - DNA, 25 bp, Homo sapien
tccccgctgaagatctgcaattgca

SEQ ID NO: 3973464 - DNA, 25 bp, Homo sapien
ggcgataagtcgatctccccgctga

SEQ ID NO: 3973465 - DNA, 25 bp, Homo sapien
tgcagcaggcgagtttggagccaca

SEQ ID NO: 3973466 - DNA, 25 bp, Homo sapien
aaaaatgaaaactgattcaatggat

SEQ ID NO: 3973467 - DNA, 25 bp, Homo sapien
aaaaaatgaaaactgattcaatgga

SEQ ID NO: 3973468 - DNA, 25 bp, Homo sapien
aaatgaaaactgattcaatggattc

SEQ ID NO: 3973469 - DNA, 25 bp, Homo sapien
gaaaaaaatgaaaactgattcaatg

SEQ ID NO: 3973470 - DNA, 25 bp, Homo sapien
tacacgggtttttgtagactggcca

SEQ ID NO: 3973471 - DNA, 25 bp, Homo sapien
ccaccacttagggtttgttctggct

SEQ ID NO: 3973472 - DNA, 25 bp, Homo sapien
cagggaacctatatgctagcacagg

SEQ ID NO: 3973473 - DNA, 25 bp, Homo sapien
tatttttgtttcgtggtcctctggc

SEQ ID NO: 3973474 - DNA, 25 bp, Homo sapien
tggcacttggcaattgaattctgaa

SEQ ID NO: 3973475 - DNA, 25 bp, Homo sapien
gcacttggcaattgaattctgaata

SEQ ID NO: 3973476 - DNA, 25 bp, Homo sapien
tttggcacttggcaattgaattctg

SEQ ID NO: 3973477 - DNA, 25 bp, Homo sapien
acttggcaattgaattctgaatatc

SEQ ID NO: 3973478 - DNA, 25 bp, Homo sapien
caatcatggtacctgctgatacgga

SEQ ID NO: 3973479 - DNA, 25 bp, Homo sapien
tggtacctgctgatacggaagatat

SEQ ID NO: 3973480 - DNA, 25 bp, Homo sapien
actgaatacccactgaatgccacgt

SEQ ID NO: 3973481 - DNA, 25 bp, Homo sapien
cgtgctatgagcaaaacaatcatgg

SEQ ID NO: 3973482 - DNA, 25 bp, Homo sapien
gaatcaggcttaatcttaggcaagt

SEQ ID NO: 3973483 - DNA, 25 bp, Homo sapien
ttgaaggcccttgtattcaaatccc

SEQ ID NO: 3973484 - DNA, 25 bp, Homo sapien
tgggctctataataagccagactgt

SEQ ID NO: 3973485 - DNA, 25 bp, Homo sapien
ggcaagtaaacatggctgatcgtat

SEQ ID NO: 3973486 - DNA, 25 bp, Homo sapien
tagttcttagaatataggtatcatc

SEQ ID NO: 3973487 - DNA, 25 bp, Homo sapien
caaatatctctttaattgtatgggc

SEQ ID NO: 3973488 - DNA, 25 bp, Homo sapien
agaatataggtatcatctcctcaaa

SEQ ID NO: 3973489 - DNA, 25 bp, Homo sapien
cctggcagtagttcttagaatatag

SEQ ID NO: 3973490 - DNA, 25 bp, Homo sapien
atttgcctctctgtcataggatcca

SEQ ID NO: 3973491 - DNA, 25 bp, Homo sapien
gcttaactcaagtgtgcaatgaaca

SEQ ID NO: 3973492 - DNA, 25 bp, Homo sapien
gcctctctgtcataggatccaaaaa

SEQ ID NO: 3973493 - DNA, 25 bp, Homo sapien
tttcttcccaaacactactgcttaa

SEQ ID NO: 3973494 - DNA, 25 bp, Homo sapien
tttgtggcgccattaacacctctgt

SEQ ID NO: 3973495 - DNA, 25 bp, Homo sapien
aatacaacagcccagccggtggtct

SEQ ID NO: 3973496 - DNA, 25 bp, Homo sapien
tataggtgacgtttaatggtgagcc

SEQ ID NO: 3973497 - DNA, 25 bp, Homo sapien
ggaaacactagtaccaagctttgac

SEQ ID NO: 3973498 - DNA, 25 bp, Homo sapien
cacaacacaaatactgcttaggaat

SEQ ID NO: 3973499 - DNA, 25 bp, Homo sapien
tgttcttcccgtaacttagtaatga

SEQ ID NO: 3973500 - DNA, 25 bp, Homo sapien
tgcactgttcttcccgtaacttagt

SEQ ID NO: 3973501 - DNA, 25 bp, Homo sapien
ctgttcttcccgtaacttagtaatg

SEQ ID NO: 3973502 - DNA, 25 bp, Homo sapien
tttaagacggccttcagtaagtgcc

SEQ ID NO: 3973503 - DNA, 25 bp, Homo sapien
ctgctacattctaacaacgtaactt

SEQ ID NO: 3973504 - DNA, 25 bp, Homo sapien
ccttgcaaggtctggtatggaaaaa

SEQ ID NO: 3973505 - DNA, 25 bp, Homo sapien
ccattgttgtatatggatatgctct

SEQ ID NO: 3973506 - DNA, 25 bp, Homo sapien
ctggcagcaaatggtgccttcgcta

SEQ ID NO: 3973507 - DNA, 25 bp, Homo sapien
tatggcacccataagtcttggtttt

SEQ ID NO: 3973508 - DNA, 25 bp, Homo sapien
tgccttcgctatggcacccataagt

SEQ ID NO: 3973509 - DNA, 25 bp, Homo sapien
ccccattgataaggcaagagagaac

SEQ ID NO: 3973510 - DNA, 25 bp, Homo sapien
ccctctttcgcactcggccatacat

SEQ ID NO: 3973511 - DNA, 25 bp, Homo sapien
gcagtcctctaaattgcgtgcattt

SEQ ID NO: 3973512 - DNA, 25 bp, Homo sapien
tatcttgcagtcctctaaattgcgt

SEQ ID NO: 3973513 - DNA, 25 bp, Homo sapien
tctctatcttgcagtcctctaaatt

SEQ ID NO: 3973514 - DNA, 25 bp, Homo sapien
tcttgcagtcctctaaattgcgtgc

SEQ ID NO: 3973515 - DNA, 25 bp, Homo sapien
tccaaactaggcatcagcacactgt

SEQ ID NO: 3973516 - DNA, 25 bp, Homo sapien
tctcagtaagagatctagtaaatgc

SEQ ID NO: 3973517 - DNA, 25 bp, Homo sapien
aatccgcgatggcttccataacaga

SEQ ID NO: 3973518 - DNA, 25 bp, Homo sapien
gagccaaaactggaacttgtgttaa

SEQ ID NO: 3973519 - DNA, 25 bp, Homo sapien
aatgtgcattattttactaacactt

SEQ ID NO: 3973520 - DNA, 25 bp, Homo sapien
gagtgagccactatacttggcgtgt

SEQ ID NO: 3973521 - DNA, 25 bp, Homo sapien
tcttctcctgtgtagatctgacaga

SEQ ID NO: 3973522 - DNA, 25 bp, Homo sapien
taaatttatacttacaagagaagcc

SEQ ID NO: 3973523 - DNA, 25 bp, Homo sapien
tctcagtatgtagtagcaagcctct

SEQ ID NO: 3973524 - DNA, 25 bp, Homo sapien
taactgcagttgagcgttcatgttc

SEQ ID NO: 3973525 - DNA, 25 bp, Homo sapien
ttagagctagtgaaaaaaggacatg

SEQ ID NO: 3973526 - DNA, 25 bp, Homo sapien
gctagagttttcagatcaatacgag

SEQ ID NO: 3973527 - DNA, 25 bp, Homo sapien
tcttcaaacttgcgcccttctctcc

SEQ ID NO: 3973528 - DNA, 25 bp, Homo sapien
ttcttcaaacttgcgcccttctctc

SEQ ID NO: 3973529 - DNA, 25 bp, Homo sapien
tttcttcaaacttgcgcccttctct

SEQ ID NO: 3973530 - DNA, 25 bp, Homo sapien
gcaccaccaatttcaaagacacctg

SEQ ID NO: 3973531 - DNA, 25 bp, Homo sapien
ttctcacaaccaattagttctatcc

SEQ ID NO: 3973532 - DNA, 25 bp, Homo sapien
tggcaccaccaatttcaaagacacc

SEQ ID NO: 3973533 - DNA, 25 bp, Homo sapien
ggcaccaccaatttcaaagacacct

SEQ ID NO: 3973534 - DNA, 25 bp, Homo sapien
gttacctcaaataccatctcacctg

SEQ ID NO: 3973535 - DNA, 25 bp, Homo sapien
tctgaagatcctacaaggccctcat

SEQ ID NO: 3973536 - DNA, 25 bp, Homo sapien
tgatttctcctacccacaatatgct

SEQ ID NO: 3973537 - DNA, 25 bp, Homo sapien
tagctgtctcactgaatctctgaag

SEQ ID NO: 3973538 - DNA, 25 bp, Homo sapien
caagaactattaatgctgagaagtg

SEQ ID NO: 3973539 - DNA, 25 bp, Homo sapien
acaagaactattaatgctgagaagt

SEQ ID NO: 3973540 - DNA, 25 bp, Homo sapien
ttttaaaattcaacattatattgac

SEQ ID NO: 3973541 - DNA, 25 bp, Homo sapien
ctttttaaaattcaacattatattg

SEQ ID NO: 3973542 - DNA, 25 bp, Homo sapien
ttaaaattcaacattatattgacaa

SEQ ID NO: 3973543 - DNA, 25 bp, Homo sapien
aaaattcaacattatattgacaatg

SEQ ID NO: 3973544 - DNA, 25 bp, Homo sapien
cactcttcacgcgtgtactgtgtcc

SEQ ID NO: 3973545 - DNA, 25 bp, Homo sapien
cgtgtactgtgtccaggaacaattt

SEQ ID NO: 3973546 - DNA, 25 bp, Homo sapien
aagcacactcttcacgcgtgtactg

SEQ ID NO: 3973547 - DNA, 25 bp, Homo sapien
caatttctcaaagcggccaagggga

SEQ ID NO: 3973548 - DNA, 25 bp, Homo sapien
tcacgactcgccttgatctggggcc

SEQ ID NO: 3973549 - DNA, 25 bp, Homo sapien
cacgcgggacagcttgacaaacaag

SEQ ID NO: 3973550 - DNA, 25 bp, Homo sapien
tcttcttggtgacccagcggcgggt

SEQ ID NO: 3973551 - DNA, 25 bp, Homo sapien
taattcggtagggtgtgcttgcgct

SEQ ID NO: 3973552 - DNA, 25 bp, Homo sapien
gatcagcgggtcttccacgaaggag

SEQ ID NO: 3973553 - DNA, 25 bp, Homo sapien
ccctactcccgcgcccacagcgccg

SEQ ID NO: 3973554 - DNA, 25 bp, Homo sapien
gcccctactcccgcgcccacagcgc

SEQ ID NO: 3973555 - DNA, 25 bp, Homo sapien
ggcccctactcccgcgcccacagcg

SEQ ID NO: 3973556 - DNA, 25 bp, Homo sapien
cccctactcccgcgcccacagcgcc

SEQ ID NO: 3973557 - DNA, 25 bp, Homo sapien
ccccgctgcctccattttgaggaca

SEQ ID NO: 3973558 - DNA, 25 bp, Homo sapien
cccgctgcctccattttgaggacat

SEQ ID NO: 3973559 - DNA, 25 bp, Homo sapien
ggcccgcgcctcctcagacgctccc

SEQ ID NO: 3973560 - DNA, 25 bp, Homo sapien
ctcctcagacgctcccgaagggccg

SEQ ID NO: 3973561 - DNA, 25 bp, Homo sapien
gcgcctcctcagacgctcccgaagg

SEQ ID NO: 3973562 - DNA, 25 bp, Homo sapien
tcagacgctcccgaagggccggtgt

SEQ ID NO: 3973563 - DNA, 25 bp, Homo sapien
cagacgatccgagcgggcctttcgg

SEQ ID NO: 3973564 - DNA, 25 bp, Homo sapien
gcgtcgctcatcctgcggtgtgctt

SEQ ID NO: 3973565 - DNA, 25 bp, Homo sapien
acccacgtggccgtcacttctggag

SEQ ID NO: 3973566 - DNA, 25 bp, Homo sapien
acttctggagctgcggtcgggatct

SEQ ID NO: 3973567 - DNA, 25 bp, Homo sapien
cgtccccccggcagacgctctgcgt

SEQ ID NO: 3973568 - DNA, 25 bp, Homo sapien
ggcagacgctctgcgtccgcggagg

SEQ ID NO: 3973569 - DNA, 25 bp, Homo sapien
ccccggcagacgctctgcgtccgcg

SEQ ID NO: 3973570 - DNA, 25 bp, Homo sapien
gacgctctgcgtccgcggagggtgg

SEQ ID NO: 3973571 - DNA, 25 bp, Homo sapien
ctggaggatgacatcctctccaaag

SEQ ID NO: 3973572 - DNA, 25 bp, Homo sapien
ggaggatgacatcctctccaaaggc

SEQ ID NO: 3973573 - DNA, 25 bp, Homo sapien
tccaaaggcttcaactcacacttct

SEQ ID NO: 3973574 - DNA, 25 bp, Homo sapien
ctctccaaaggcttcaactcacact

SEQ ID NO: 3973575 - DNA, 25 bp, Homo sapien
tggttaacttgctgccactcagagg

SEQ ID NO: 3973576 - DNA, 25 bp, Homo sapien
tttgtgtggagtcacctcagagctg

SEQ ID NO: 3973577 - DNA, 25 bp, Homo sapien
taaagcttgtgcataccagcctggc

SEQ ID NO: 3973578 - DNA, 25 bp, Homo sapien
catgtgtgttgtaagctcttcccga

SEQ ID NO: 3973579 - DNA, 25 bp, Homo sapien
tccattccacaatcatgtaagtcat

SEQ ID NO: 3973580 - DNA, 25 bp, Homo sapien
attccacaatcatgtaagtcattct

SEQ ID NO: 3973581 - DNA, 25 bp, Homo sapien
ctactccattccacaatcatgtaag

SEQ ID NO: 3973582 - DNA, 25 bp, Homo sapien
cacaatcatgtaagtcattcttctt

SEQ ID NO: 3973583 - DNA, 25 bp, Homo sapien
ggtgctttgtcaacttaagtttcca

SEQ ID NO: 3973584 - DNA, 25 bp, Homo sapien
gaagagcattccaattcaaggggtg

SEQ ID NO: 3973585 - DNA, 25 bp, Homo sapien
taagttattgggagtagatctgtag

SEQ ID NO: 3973586 - DNA, 25 bp, Homo sapien
caattgccattctgttgtccacatg

SEQ ID NO: 3973587 - DNA, 25 bp, Homo sapien
ggttagtgggatcggccttcctcta

SEQ ID NO: 3973588 - DNA, 25 bp, Homo sapien
cttggttagtgggatcggccttcct

SEQ ID NO: 3973589 - DNA, 25 bp, Homo sapien
tagtgggatcggccttcctctaatt

SEQ ID NO: 3973590 - DNA, 25 bp, Homo sapien
tggttagtgggatcggccttcctct

SEQ ID NO: 3973591 - DNA, 25 bp, Homo sapien
ctgaaagctacccatggaggtctgc

SEQ ID NO: 3973592 - DNA, 25 bp, Homo sapien
gcccatcaagatctgcttatctgaa

SEQ ID NO: 3973593 - DNA, 25 bp, Homo sapien
cccagctgagggttgcccatcaaga

SEQ ID NO: 3973594 - DNA, 25 bp, Homo sapien
gagctctacccattgaggtctgccc

SEQ ID NO: 3973595 - DNA, 25 bp, Homo sapien
actcacccatcagcatgggcagcca

SEQ ID NO: 3973596 - DNA, 25 bp, Homo sapien
agcatgggcagccatgcaaattttc

SEQ ID NO: 3973597 - DNA, 25 bp, Homo sapien
ttgggccacgtggataataaatctg

SEQ ID NO: 3973598 - DNA, 25 bp, Homo sapien
ctctgcttgggccacgtggataata

SEQ ID NO: 3973599 - DNA, 25 bp, Homo sapien
tctgacgaccctttcttgtgctttg

SEQ ID NO: 3973600 - DNA, 25 bp, Homo sapien
ccccggcggaggttttggctgcctg

SEQ ID NO: 3973601 - DNA, 25 bp, Homo sapien
ccctttcttgtgctttgtgtggtcc

SEQ ID NO: 3973602 - DNA, 25 bp, Homo sapien
gctgacatctctgacgaccctttct

SEQ ID NO: 3973603 - DNA, 25 bp, Homo sapien
gccttgaaactgctaccggccatct

SEQ ID NO: 3973604 - DNA, 25 bp, Homo sapien
tggatcttccaccttgtgtccttcc

SEQ ID NO: 3973605 - DNA, 25 bp, Homo sapien
aacatgaggttgatggccttgaaac

SEQ ID NO: 3973606 - DNA, 25 bp, Homo sapien
caccagcagctctaacatgaggttg

SEQ ID NO: 3973607 - DNA, 25 bp, Homo sapien
aggcagctttctactgttaagggag

SEQ ID NO: 3973608 - DNA, 25 bp, Homo sapien
gtcaggcagctttctactgttaagg

SEQ ID NO: 3973609 - DNA, 25 bp, Homo sapien
tcaggcagctttctactgttaaggg

SEQ ID NO: 3973610 - DNA, 25 bp, Homo sapien
tgctagtttgcattagagcagctgt

SEQ ID NO: 3973611 - DNA, 25 bp, Homo sapien
tgatggttaatgagccagctactct

SEQ ID NO: 3973612 - DNA, 25 bp, Homo sapien
ttcagtttagcaggtaactttctga

SEQ ID NO: 3973613 - DNA, 25 bp, Homo sapien
gagagggtgcagagcaccatttgct

SEQ ID NO: 3973614 - DNA, 25 bp, Homo sapien
taagctcaactaggaagactaaact

SEQ ID NO: 3973615 - DNA, 25 bp, Homo sapien
gagtcagaagtgtggtctctaagcc

SEQ ID NO: 3973616 - DNA, 25 bp, Homo sapien
tgttggcacaaattgaaagagtcag

SEQ ID NO: 3973617 - DNA, 25 bp, Homo sapien
gcgttcaaagctgtctgatccctta

SEQ ID NO: 3973618 - DNA, 25 bp, Homo sapien
cagagactaagtgttggggtttcct

SEQ ID NO: 3973619 - DNA, 25 bp, Homo sapien
tgtctaacatcacacaatgtttggg

SEQ ID NO: 3973620 - DNA, 25 bp, Homo sapien
ttcctgacggtctcaaatgttcttc

SEQ ID NO: 3973621 - DNA, 25 bp, Homo sapien
cttcacccacgtggtcttggtgact

SEQ ID NO: 3973622 - DNA, 25 bp, Homo sapien
gtgggtgagagtgattctgtggtct

SEQ ID NO: 3973623 - DNA, 25 bp, Homo sapien
tgggtgagagtgattctgtggtctc

SEQ ID NO: 3973624 - DNA, 25 bp, Homo sapien
gtggtctcagatggcagatgggtaa

SEQ ID NO: 3973625 - DNA, 25 bp, Homo sapien
gctgcatggcaagtaggatgagtgt

SEQ ID NO: 3973626 - DNA, 25 bp, Homo sapien
tgcatggcaagtaggatgagtgtca

SEQ ID NO: 3973627 - DNA, 25 bp, Homo sapien
aagctgcatggcaagtaggatgagt

SEQ ID NO: 3973628 - DNA, 25 bp, Homo sapien
catggcaagtaggatgagtgtcagg

SEQ ID NO: 3973629 - DNA, 25 bp, Homo sapien
tccaattttggagggtaatggtgtc

SEQ ID NO: 3973630 - DNA, 25 bp, Homo sapien
tttggagggtaatggtgtctgccat

SEQ ID NO: 3973631 - DNA, 25 bp, Homo sapien
ataaatccaattttggagggtaatg

SEQ ID NO: 3973632 - DNA, 25 bp, Homo sapien
attttggagggtaatggtgtctgcc

SEQ ID NO: 3973633 - DNA, 25 bp, Homo sapien
tgtgagctgccccatgacttctttg

SEQ ID NO: 3973634 - DNA, 25 bp, Homo sapien
ttatcaatgcactggcgggagcttc

SEQ ID NO: 3973635 - DNA, 25 bp, Homo sapien
tgctaagctcgccaaaacatccatt

SEQ ID NO: 3973636 - DNA, 25 bp, Homo sapien
gttctaggagtccatgactgggctc

SEQ ID NO: 3973637 - DNA, 25 bp, Homo sapien
ttgccttcacaaatggtgatccccc

SEQ ID NO: 3973638 - DNA, 25 bp, Homo sapien
gccttcacaaatggtgatcccccac

SEQ ID NO: 3973639 - DNA, 25 bp, Homo sapien
tgccttcacaaatggtgatccccca

SEQ ID NO: 3973640 - DNA, 25 bp, Homo sapien
cttgccttcacaaatggtgatcccc

SEQ ID NO: 3973641 - DNA, 25 bp, Homo sapien
ctgttgatcttagcacttcggcatc

SEQ ID NO: 3973642 - DNA, 25 bp, Homo sapien
gtagggagttgccaagtcctgttga

SEQ ID NO: 3973643 - DNA, 25 bp, Homo sapien
ttagcacttcggcatctttcccagc

SEQ ID NO: 3973644 - DNA, 25 bp, Homo sapien
tagggagttgccaagtcctgttgat

SEQ ID NO: 3973645 - DNA, 25 bp, Homo sapien
ctggtatttgggctcctctgagaga

SEQ ID NO: 3973646 - DNA, 25 bp, Homo sapien
ttgcagcccttgtctccctgtgggc

SEQ ID NO: 3973647 - DNA, 25 bp, Homo sapien
gggctcctctgagagattttgcagc

SEQ ID NO: 3973648 - DNA, 25 bp, Homo sapien
tctgagagattttgcagcccttgtc

SEQ ID NO: 3973649 - DNA, 25 bp, Homo sapien
ccccatgtaggctttgtcttcagct

SEQ ID NO: 3973650 - DNA, 25 bp, Homo sapien
cttcagctcatggtagccagatgcc

SEQ ID NO: 3973651 - DNA, 25 bp, Homo sapien
aaatgcagggatagggcggtcttca

SEQ ID NO: 3973652 - DNA, 25 bp, Homo sapien
cacaacagcatcagtgcgtggctcc

SEQ ID NO: 3973653 - DNA, 25 bp, Homo sapien
gaacagactaatgccatcctgaggg

SEQ ID NO: 3973654 - DNA, 25 bp, Homo sapien
ggcacagtcccaagtctaggttagt

SEQ ID NO: 3973655 - DNA, 25 bp, Homo sapien
tgtcctaagatgtgagtccttccag

SEQ ID NO: 3973656 - DNA, 25 bp, Homo sapien
gagtgcgttctcaatcttccaggaa

SEQ ID NO: 3973657 - DNA, 25 bp, Homo sapien
gattctttgctcagccacccaagaa

SEQ ID NO: 3973658 - DNA, 25 bp, Homo sapien
ttctcagggtcaaatcaggacatcc

SEQ ID NO: 3973659 - DNA, 25 bp, Homo sapien
gagctgccattccaagcagtgggaa

SEQ ID NO: 3973660 - DNA, 25 bp, Homo sapien
catcttctgcacaacagcgtgtgcg

SEQ ID NO: 3973661 - DNA, 25 bp, Homo sapien
cccctcatctcacacatcttaatcc

SEQ ID NO: 3973662 - DNA, 25 bp, Homo sapien
cctcatctcacacatcttaatccac

SEQ ID NO: 3973663 - DNA, 25 bp, Homo sapien
ctcacacatcttaatccacaaaacc

SEQ ID NO: 3973664 - DNA, 25 bp, Homo sapien
catctcacacatcttaatccacaaa

SEQ ID NO: 3973665 - DNA, 25 bp, Homo sapien
gtgggagaattgtgcccaggtggcc

SEQ ID NO: 3973666 - DNA, 25 bp, Homo sapien
tccgcagaacaacatcacttggcgt

SEQ ID NO: 3973667 - DNA, 25 bp, Homo sapien
ccccagtagagttggctcctttgtg

SEQ ID NO: 3973668 - DNA, 25 bp, Homo sapien
cacttggcgttttatcaatggatta

SEQ ID NO: 3973669 - DNA, 25 bp, Homo sapien
tgcagatggcaagggctttaacctg

SEQ ID NO: 3973670 - DNA, 25 bp, Homo sapien
catgcagatggcaagggctttaacc

SEQ ID NO: 3973671 - DNA, 25 bp, Homo sapien
aacctgagctaacccgtttgcctgt

SEQ ID NO: 3973672 - DNA, 25 bp, Homo sapien
agctaacccgtttgcctgtctggtg

SEQ ID NO: 3973673 - DNA, 25 bp, Homo sapien
tcaacctttagtgcgctcatggaca

SEQ ID NO: 3973674 - DNA, 25 bp, Homo sapien
tccagaatttatcccagggctgccc

SEQ ID NO: 3973675 - DNA, 25 bp, Homo sapien
cataagaagctaccacatggcccaa

SEQ ID NO: 3973676 - DNA, 25 bp, Homo sapien
tctgcagaggctattcaggtaaacg

SEQ ID NO: 3973677 - DNA, 25 bp, Homo sapien
tgcagccagtggtgaaaagcctcaa

SEQ ID NO: 3973678 - DNA, 25 bp, Homo sapien
ccatgtaccagggagtggatcgtga

SEQ ID NO: 3973679 - DNA, 25 bp, Homo sapien
cacaagaagccttagaagtggagca

SEQ ID NO: 3973680 - DNA, 25 bp, Homo sapien
aattggtcaccagaacacatagccc

SEQ ID NO: 3973681 - DNA, 25 bp, Homo sapien
ccttccctcactttacaaagaggca

SEQ ID NO: 3973682 - DNA, 25 bp, Homo sapien
ctgcccttccctcactttacaaaga

SEQ ID NO: 3973683 - DNA, 25 bp, Homo sapien
tgcccttccctcactttacaaagag

SEQ ID NO: 3973684 - DNA, 25 bp, Homo sapien
gaagggcctgtatccattcctgagg

SEQ ID NO: 3973685 - DNA, 25 bp, Homo sapien
gactgggtgccttcaaacaagggaa

SEQ ID NO: 3973686 - DNA, 25 bp, Homo sapien
tccttggcaaccaggcagtgaggca

SEQ ID NO: 3973687 - DNA, 25 bp, Homo sapien
aatagcacaaacagaggtacccgag

SEQ ID NO: 3973688 - DNA, 25 bp, Homo sapien
tatagccgcatcagccaggtctctg

SEQ ID NO: 3973689 - DNA, 25 bp, Homo sapien
caagtaatgtttctaggcccatagg

SEQ ID NO: 3973690 - DNA, 25 bp, Homo sapien
catggctcaacatgcggtaggcgga

SEQ ID NO: 3973691 - DNA, 25 bp, Homo sapien
tatacacttgcacttggcaactggg

SEQ ID NO: 3973692 - DNA, 25 bp, Homo sapien
ttcatggaccagcaaaatggacctc

SEQ ID NO: 3973693 - DNA, 25 bp, Homo sapien
ttgtccagggatgtacggtgctctt

SEQ ID NO: 3973694 - DNA, 25 bp, Homo sapien
cagcccctgacccattagaatgagg

SEQ ID NO: 3973695 - DNA, 25 bp, Homo sapien
tgaagctctttcactggtcagcaac

SEQ ID NO: 3973696 - DNA, 25 bp, Homo sapien
tctttcctcagctatccagctgtgc

SEQ ID NO: 3973697 - DNA, 25 bp, Homo sapien
tcaagggagttgttgttaaggcaag

SEQ ID NO: 3973698 - DNA, 25 bp, Homo sapien
agagctggcacacgggcatgccctg

SEQ ID NO: 3973699 - DNA, 25 bp, Homo sapien
gtctgtctgctgtgagttttatctc

SEQ ID NO: 3973700 - DNA, 25 bp, Homo sapien
ggatcttcagctgaggcatgcagcc

SEQ ID NO: 3973701 - DNA, 25 bp, Homo sapien
ttcagctgaggcatgcagccagcct

SEQ ID NO: 3973702 - DNA, 25 bp, Homo sapien
tggcattgacaggagctgggatctt

SEQ ID NO: 3973703 - DNA, 25 bp, Homo sapien
agacagtcaagcagagaggtggcat

SEQ ID NO: 3973704 - DNA, 25 bp, Homo sapien
tcatgcgttcatccttatttattga

SEQ ID NO: 3973705 - DNA, 25 bp, Homo sapien
actatttcaatcatgcgttcatcct

SEQ ID NO: 3973706 - DNA, 25 bp, Homo sapien
tcaatcatgcgttcatccttattta

SEQ ID NO: 3973707 - DNA, 25 bp, Homo sapien
tatttcaatcatgcgttcatcctta

SEQ ID NO: 3973708 - DNA, 25 bp, Homo sapien
gatgtggcttatccagatcaaggcg

SEQ ID NO: 3973709 - DNA, 25 bp, Homo sapien
tggctccagctaaatctttttctaa

SEQ ID NO: 3973710 - DNA, 25 bp, Homo sapien
tctaatgagatgtggcttatccaga

SEQ ID NO: 3973711 - DNA, 25 bp, Homo sapien
tgctttggctccagctaaatctttt

SEQ ID NO: 3973712 - DNA, 25 bp, Homo sapien
gaaaatgagtctcggacccttggaa

SEQ ID NO: 3973713 - DNA, 25 bp, Homo sapien
catctttaggcctgatatggaaacc

SEQ ID NO: 3973714 - DNA, 25 bp, Homo sapien
gaactgtaacgggtgctttctgcaa

SEQ ID NO: 3973715 - DNA, 25 bp, Homo sapien
aatcttcccgctgttacatctatgg

SEQ ID NO: 3973716 - DNA, 25 bp, Homo sapien
catcaccttctacttgacatcaagc

SEQ ID NO: 3973717 - DNA, 25 bp, Homo sapien
ttcaagctgctaaaggacaggaact

SEQ ID NO: 3973718 - DNA, 25 bp, Homo sapien
tctacttgacatcaagcctgacttc

SEQ ID NO: 3973719 - DNA, 25 bp, Homo sapien
ctgacttcaagctgctaaaggacag

SEQ ID NO: 3973720 - DNA, 25 bp, Homo sapien
gctgtaaagttaggacggttctcat

SEQ ID NO: 3973721 - DNA, 25 bp, Homo sapien
aagcttctgagttagcagcctcctg

SEQ ID NO: 3973722 - DNA, 25 bp, Homo sapien
gcctcctgtttattaagctgtaaag

SEQ ID NO: 3973723 - DNA, 25 bp, Homo sapien
agctgtaaagttaggacggttctca

SEQ ID NO: 3973724 - DNA, 25 bp, Homo sapien
tcagcgtctcctcatagtgatgcag

SEQ ID NO: 3973725 - DNA, 25 bp, Homo sapien
gaaatagcccaggtaccgatctgct

SEQ ID NO: 3973726 - DNA, 25 bp, Homo sapien
gaaaagatctcaaacgaccagctcc

SEQ ID NO: 3973727 - DNA, 25 bp, Homo sapien
agcgttttgcgtttggtgccccgag

SEQ ID NO: 3973728 - DNA, 25 bp, Homo sapien
ttttcacagatgagtcaaccgtggc

SEQ ID NO: 3973729 - DNA, 25 bp, Homo sapien
gcattctggttcaacgtgaggacca

SEQ ID NO: 3973730 - DNA, 25 bp, Homo sapien
ggccatggcctagcaataactaaaa

SEQ ID NO: 3973731 - DNA, 25 bp, Homo sapien
tattctcagttgcaggaggccatgc

SEQ ID NO: 3973732 - DNA, 25 bp, Homo sapien
tgtcctaccagcttgggcgaggcag

SEQ ID NO: 3973733 - DNA, 25 bp, Homo sapien
ctaggctagaggaatctgtctgtcc

SEQ ID NO: 3973734 - DNA, 25 bp, Homo sapien
tggggcgatcccagttctcccgacg

SEQ ID NO: 3973735 - DNA, 25 bp, Homo sapien
gcagcagcggcggagcgctaggcta

SEQ ID NO: 3973736 - DNA, 25 bp, Homo sapien
ggtgggcggcagaaggctcagccga

SEQ ID NO: 3973737 - DNA, 25 bp, Homo sapien
gtgggcggcagaaggctcagccgag

SEQ ID NO: 3973738 - DNA, 25 bp, Homo sapien
ggcggcggcgccgactccgttccac

SEQ ID NO: 3973739 - DNA, 25 bp, Homo sapien
gcggcgccgactccgttccactctc

SEQ ID NO: 3973740 - DNA, 25 bp, Homo sapien
tggtgcaagattctcgggatcctcg

SEQ ID NO: 3973741 - DNA, 25 bp, Homo sapien
ccctctcttcaggttgggcgcgttt

SEQ ID NO: 3973742 - DNA, 25 bp, Homo sapien
ccaatccacgcctgcaaattcttct

SEQ ID NO: 3973743 - DNA, 25 bp, Homo sapien
tctcttcaggttgggcgcgtttggt

SEQ ID NO: 3973744 - DNA, 25 bp, Homo sapien
cagcgggatccgtccaccttctacc

SEQ ID NO: 3973745 - DNA, 25 bp, Homo sapien
acaccccctattcgcctcgcagcag

SEQ ID NO: 3973746 - DNA, 25 bp, Homo sapien
tcgcactcgccacaccccctattcg

SEQ ID NO: 3973747 - DNA, 25 bp, Homo sapien
cctcctcgcactcgccacaccccct

SEQ ID NO: 3973748 - DNA, 25 bp, Homo sapien
cagccacagcgggaaggcaggttcg

SEQ ID NO: 3973749 - DNA, 25 bp, Homo sapien
ttaattggggcgccgagcagccaca

SEQ ID NO: 3973750 - DNA, 25 bp, Homo sapien
tgcttaattggggcgccgagcagcc

SEQ ID NO: 3973751 - DNA, 25 bp, Homo sapien
agcgggaaggcaggttcggtctggt

SEQ ID NO: 3973752 - DNA, 25 bp, Homo sapien
cctggcggtgtctgcaagtcggtaa

SEQ ID NO: 3973753 - DNA, 25 bp, Homo sapien
tcttctagttctcgggagccgggag

SEQ ID NO: 3973754 - DNA, 25 bp, Homo sapien
tcctgccggagcctagaatcgggta

SEQ ID NO: 3973755 - DNA, 25 bp, Homo sapien
tatcagtcatgcttatggtcccctc

SEQ ID NO: 3973756 - DNA, 25 bp, Homo sapien
acccggtgcgccagaaaactctagg

SEQ ID NO: 3973757 - DNA, 25 bp, Homo sapien
aagcgcaaggtccattcatcagccg

SEQ ID NO: 3973758 - DNA, 25 bp, Homo sapien
gtaactgcgcatttttctagaccag

SEQ ID NO: 3973759 - DNA, 25 bp, Homo sapien
caacagccgttttgtgtaactgcgc

SEQ ID NO: 3973760 - DNA, 25 bp, Homo sapien
cagtgttcaatctccacatcgagcc

SEQ ID NO: 3973761 - DNA, 25 bp, Homo sapien
cgatccctatctcccacccagtgtt

SEQ ID NO: 3973762 - DNA, 25 bp, Homo sapien
tatctcccacccagtgttcaatctc

SEQ ID NO: 3973763 - DNA, 25 bp, Homo sapien
acccagtgttcaatctccacatcga

SEQ ID NO: 3973764 - DNA, 25 bp, Homo sapien
acaaaggccaagatgcacctggggg

SEQ ID NO: 3973765 - DNA, 25 bp, Homo sapien
agacagtacagaagtaaggtctcca

SEQ ID NO: 3973766 - DNA, 25 bp, Homo sapien
aaggccaagatgcacctgggggtcc

SEQ ID NO: 3973767 - DNA, 25 bp, Homo sapien
agagacagtacagaagtaaggtctc

SEQ ID NO: 3973768 - DNA, 25 bp, Homo sapien
gaaggatgcctgagcaatcggctct

SEQ ID NO: 3973769 - DNA, 25 bp, Homo sapien
agaaggatgcctgagcaatcggctc

SEQ ID NO: 3973770 - DNA, 25 bp, Homo sapien
ttctggccccattcgcttggctctt

SEQ ID NO: 3973771 - DNA, 25 bp, Homo sapien
ggccccattcgcttggctcttgttc

SEQ ID NO: 3973772 - DNA, 25 bp, Homo sapien
actcacctaatgccaggggcttcct

SEQ ID NO: 3973773 - DNA, 25 bp, Homo sapien
ccactcacctaatgccaggggcttc

SEQ ID NO: 3973774 - DNA, 25 bp, Homo sapien
tcacctaatgccaggggcttcctcc

SEQ ID NO: 3973775 - DNA, 25 bp, Homo sapien
gctgcccactcacctaatgccaggg

SEQ ID NO: 3973776 - DNA, 25 bp, Homo sapien
gttcttggtcacctagcagagccca

SEQ ID NO: 3973777 - DNA, 25 bp, Homo sapien
ttcttggtcacctagcagagcccac

SEQ ID NO: 3973778 - DNA, 25 bp, Homo sapien
tccagcctttgtcctcaacaggggc

SEQ ID NO: 3973779 - DNA, 25 bp, Homo sapien
taagtcagttgttgggggacctgcc

SEQ ID NO: 3973780 - DNA, 25 bp, Homo sapien
ctgggtcaggtaagagagggcaggt

SEQ ID NO: 3973781 - DNA, 25 bp, Homo sapien
cagcctttgtcctcaacaggggcca

SEQ ID NO: 3973782 - DNA, 25 bp, Homo sapien
tgcctgtggtcatggtcctgtcccc

SEQ ID NO: 3973783 - DNA, 25 bp, Homo sapien
tcctgtcccccttgggtgccagcag

SEQ ID NO: 3973784 - DNA, 25 bp, Homo sapien
gggtgcctgtggtcatggtcctgtc

SEQ ID NO: 3973785 - DNA, 25 bp, Homo sapien
tgccagcagctttagccactatctc

SEQ ID NO: 3973786 - DNA, 25 bp, Homo sapien
ctatgtcgcagcacagattaaccat

SEQ ID NO: 3973787 - DNA, 25 bp, Homo sapien
ctggcagcccagagtaaccaggata

SEQ ID NO: 3973788 - DNA, 25 bp, Homo sapien
tggcagcccagagtaaccaggatag

SEQ ID NO: 3973789 - DNA, 25 bp, Homo sapien
gattaattatcccagacagttcctt

SEQ ID NO: 3973790 - DNA, 25 bp, Homo sapien
tctgatataaaacaatcccttggtg

SEQ ID NO: 3973791 - DNA, 25 bp, Homo sapien
aacctatcgagtttcctcaagtgcg

SEQ ID NO: 3973792 - DNA, 25 bp, Homo sapien
ctcaagtgcgttgtcattacctgtg

SEQ ID NO: 3973793 - DNA, 25 bp, Homo sapien
cctccagtcacgaagtccctggtga

SEQ ID NO: 3973794 - DNA, 25 bp, Homo sapien
tggtgacttgctgagcagactctcc

SEQ ID NO: 3973795 - DNA, 25 bp, Homo sapien
cctggtgacttgctgagcagactct

SEQ ID NO: 3973796 - DNA, 25 bp, Homo sapien
agactctcccatggccactccccat

SEQ ID NO: 3973797 - DNA, 25 bp, Homo sapien
tctgctacccttttctgcgtttctg

SEQ ID NO: 3973798 - DNA, 25 bp, Homo sapien
gcgtttctgagtcctcctgtgagcc

SEQ ID NO: 3973799 - DNA, 25 bp, Homo sapien
ttttctgcgtttctgagtcctcctg

SEQ ID NO: 3973800 - DNA, 25 bp, Homo sapien
cccctgagaggcatgccaaggtgag

SEQ ID NO: 3973801 - DNA, 25 bp, Homo sapien
accagcccagcattggatttcagga

SEQ ID NO: 3973802 - DNA, 25 bp, Homo sapien
caccagcccagcattggatttcagg

SEQ ID NO: 3973803 - DNA, 25 bp, Homo sapien
ttggatttcaggagcgccagataac

SEQ ID NO: 3973804 - DNA, 25 bp, Homo sapien
aggagcgccagataacataccaggg

SEQ ID NO: 3973805 - DNA, 25 bp, Homo sapien
tcctcagcatccgagggaggcttgg

SEQ ID NO: 3973806 - DNA, 25 bp, Homo sapien
ccggataggtccgtgatgaggcctc

SEQ ID NO: 3973807 - DNA, 25 bp, Homo sapien
caatggaacttctcagccggatagg

SEQ ID NO: 3973808 - DNA, 25 bp, Homo sapien
ggaggcttggcaggatgaatcctaa

SEQ ID NO: 3973809 - DNA, 25 bp, Homo sapien
ccgcttctgacctggacccaagaca

SEQ ID NO: 3973810 - DNA, 25 bp, Homo sapien
cttcaccgaaatttaagcttgaggg

SEQ ID NO: 3973811 - DNA, 25 bp, Homo sapien
tttcctctaaaggtccgcttctgac

SEQ ID NO: 3973812 - DNA, 25 bp, Homo sapien
ggagctccttcaccgaaatttaagc

SEQ ID NO: 3973813 - DNA, 25 bp, Homo sapien
ggactgtctgttgggatgtttccac

SEQ ID NO: 3973814 - DNA, 25 bp, Homo sapien
gactcagctgcgaggcatgtgggtg

SEQ ID NO: 3973815 - DNA, 25 bp, Homo sapien
gcacagagttccaccatcgctcatg

SEQ ID NO: 3973816 - DNA, 25 bp, Homo sapien
aggcatgtgggtggtgcagcacaga

SEQ ID NO: 3973817 - DNA, 25 bp, Homo sapien
ctgggatatcgcactgtccacccac

SEQ ID NO: 3973818 - DNA, 25 bp, Homo sapien
cctgggatatcgcactgtccaccca

SEQ ID NO: 3973819 - DNA, 25 bp, Homo sapien
gtgatatcaggcattcggtccatag

SEQ ID NO: 3973820 - DNA, 25 bp, Homo sapien
cattcggtccatagacaccgttggg

SEQ ID NO: 3973821 - DNA, 25 bp, Homo sapien
tcaggcattcggtccatagacaccg

SEQ ID NO: 3973822 - DNA, 25 bp, Homo sapien
gttgccatcaagtctccccttcaat

SEQ ID NO: 3973823 - DNA, 25 bp, Homo sapien
tccgatagccgtaatcaaatgcaaa

SEQ ID NO: 3973824 - DNA, 25 bp, Homo sapien
gcgccatgatataaaggcacttaaa

SEQ ID NO: 3973825 - DNA, 25 bp, Homo sapien
taatcaaatgcaaaagtgtgcgcca

SEQ ID NO: 3973826 - DNA, 25 bp, Homo sapien
gtgttttattccgatagccgtaatc

SEQ ID NO: 3973827 - DNA, 25 bp, Homo sapien
cgactcagcaacatggcggcatccg

SEQ ID NO: 3973828 - DNA, 25 bp, Homo sapien
cacagacttggtgccgactcagcaa

SEQ ID NO: 3973829 - DNA, 25 bp, Homo sapien
tgtaatgggaagagggcgaatatgg

SEQ ID NO: 3973830 - DNA, 25 bp, Homo sapien
catccggcacgaaccgtagtgaaag

SEQ ID NO: 3973831 - DNA, 25 bp, Homo sapien
ctactcctggctggggcaaacactg

SEQ ID NO: 3973832 - DNA, 25 bp, Homo sapien
ctgtgggtgagaggaacgcacttcc

SEQ ID NO: 3973833 - DNA, 25 bp, Homo sapien
taagatgggacaccataggacctca

SEQ ID NO: 3973834 - DNA, 25 bp, Homo sapien
tttctgggactactcctggctgggg

SEQ ID NO: 3973835 - DNA, 25 bp, Homo sapien
aaggatcatgatgcccgtaaaccag

SEQ ID NO: 3973836 - DNA, 25 bp, Homo sapien
gggaaggatcatgatgcccgtaaac

SEQ ID NO: 3973837 - DNA, 25 bp, Homo sapien
catgggcttcaaggctgatggggga

SEQ ID NO: 3973838 - DNA, 25 bp, Homo sapien
tcatgatgcccgtaaaccagacggg

SEQ ID NO: 3973839 - DNA, 25 bp, Homo sapien
acctcaggtggcttggagggggacg

SEQ ID NO: 3973840 - DNA, 25 bp, Homo sapien
ctcaggtggcttggagggggacgga

SEQ ID NO: 3973841 - DNA, 25 bp, Homo sapien
agcaacctcaggtggcttggagggg

SEQ ID NO: 3973842 - DNA, 25 bp, Homo sapien
caacctcaggtggcttggaggggga

SEQ ID NO: 3973843 - DNA, 25 bp, Homo sapien
tggtgatggcaattgcagccgtcgc

SEQ ID NO: 3973844 - DNA, 25 bp, Homo sapien
acagatttgctgtgacactggcagg

SEQ ID NO: 3973845 - DNA, 25 bp, Homo sapien
cagccgtcgcctgctcacagatttg

SEQ ID NO: 3973846 - DNA, 25 bp, Homo sapien
cctagggtgagtctatctcccaggc

SEQ ID NO: 3973847 - DNA, 25 bp, Homo sapien
gggagggctgacggctttcttgaac

SEQ ID NO: 3973848 - DNA, 25 bp, Homo sapien
ccagggagggctgacggctttcttg

SEQ ID NO: 3973849 - DNA, 25 bp, Homo sapien
cagggagggctgacggctttcttga

SEQ ID NO: 3973850 - DNA, 25 bp, Homo sapien
gccagggagggctgacggctttctt

SEQ ID NO: 3973851 - DNA, 25 bp, Homo sapien
caaagtgggcctgcaaatctgtgtt

SEQ ID NO: 3973852 - DNA, 25 bp, Homo sapien
aatctgtgttcttctgggtgaggct

SEQ ID NO: 3973853 - DNA, 25 bp, Homo sapien
gcaaatctgtgttcttctgggtgag

SEQ ID NO: 3973854 - DNA, 25 bp, Homo sapien
aaagtgggcctgcaaatctgtgttc

SEQ ID NO: 3973855 - DNA, 25 bp, Homo sapien
agcgagggttgcactgagcaggtcc

SEQ ID NO: 3973856 - DNA, 25 bp, Homo sapien
ggcaagaagacagaccctctgttgc

SEQ ID NO: 3973857 - DNA, 25 bp, Homo sapien
agcagcgttagaaagtgttggagat

SEQ ID NO: 3973858 - DNA, 25 bp, Homo sapien
gaagttttctgcataaaagcagcaa

SEQ ID NO: 3973859 - DNA, 25 bp, Homo sapien
tgaatttctcttccttttccctggc

SEQ ID NO: 3973860 - DNA, 25 bp, Homo sapien
tgtgaatttctcttccttttccctg

SEQ ID NO: 3973861 - DNA, 25 bp, Homo sapien
ctgtgaatttctcttccttttccct

SEQ ID NO: 3973862 - DNA, 25 bp, Homo sapien
atctttgtggactgggacctaggag

SEQ ID NO: 3973863 - DNA, 25 bp, Homo sapien
ggacctaggagttcttgtaatgtgc

SEQ ID NO: 3973864 - DNA, 25 bp, Homo sapien
gactgggacctaggagttcttgtaa

SEQ ID NO: 3973865 - DNA, 25 bp, Homo sapien
ttgtggactgggacctaggagttct

SEQ ID NO: 3973866 - DNA, 25 bp, Homo sapien
tcctgggaaggaattagttaccgca

SEQ ID NO: 3973867 - DNA, 25 bp, Homo sapien
caagcacgggtttgtgtgcctctct

SEQ ID NO: 3973868 - DNA, 25 bp, Homo sapien
taagatgctttgttgggtacctgga

SEQ ID NO: 3973869 - DNA, 25 bp, Homo sapien
taggaagacctagaattaaaacagc

SEQ ID NO: 3973870 - DNA, 25 bp, Homo sapien
aactccattggattggtgttggccg

SEQ ID NO: 3973871 - DNA, 25 bp, Homo sapien
tttcaaatgcaactccattggattg

SEQ ID NO: 3973872 - DNA, 25 bp, Homo sapien
tgttggccgccacagtcagtggata

SEQ ID NO: 3973873 - DNA, 25 bp, Homo sapien
ttggattggtgttggccgccacagt

SEQ ID NO: 3973874 - DNA, 25 bp, Homo sapien
tatggatattcatcaaaagcttcta

SEQ ID NO: 3973875 - DNA, 25 bp, Homo sapien
cctgtactattttccttgctcctga

SEQ ID NO: 3973876 - DNA, 25 bp, Homo sapien
cacatatggatattcatcaaaagct

SEQ ID NO: 3973877 - DNA, 25 bp, Homo sapien
cccctgtactattttccttgctcct

SEQ ID NO: 3973878 - DNA, 25 bp, Homo sapien
cacagtctgttgctcctggtctcgc

SEQ ID NO: 3973879 - DNA, 25 bp, Homo sapien
caaatcaaggagcttagcagcagta

SEQ ID NO: 3973880 - DNA, 25 bp, Homo sapien
tcagcaggcagatccgcttggtcca

SEQ ID NO: 3973881 - DNA, 25 bp, Homo sapien
cctacgggcactgggaatggctgca

SEQ ID NO: 3973882 - DNA, 25 bp, Homo sapien
ctctgcagtgagttgtgtcggattc

SEQ ID NO: 3973883 - DNA, 25 bp, Homo sapien
tgtcggattcgctaaagctgcacac

SEQ ID NO: 3973884 - DNA, 25 bp, Homo sapien
agcaagattgaaagcggcttgtggg

SEQ ID NO: 3973885 - DNA, 25 bp, Homo sapien
gctaaagctgcacacatccaagaca

SEQ ID NO: 3973886 - DNA, 25 bp, Homo sapien
agtgatgagaagaccataggctggc

SEQ ID NO: 3973887 - DNA, 25 bp, Homo sapien
agcatgaaagcttcagacctgctcc

SEQ ID NO: 3973888 - DNA, 25 bp, Homo sapien
tccagggagcatgaaagcttcagac

SEQ ID NO: 3973889 - DNA, 25 bp, Homo sapien
agaccataggctggcgccaggcttg

SEQ ID NO: 3973890 - DNA, 25 bp, Homo sapien
ggacagcccaatacctgctccccag

SEQ ID NO: 3973891 - DNA, 25 bp, Homo sapien
gctagggtcggggaagattgaggaa

SEQ ID NO: 3973892 - DNA, 25 bp, Homo sapien
ctggtgacgaaaaccaccagaccct

SEQ ID NO: 3973893 - DNA, 25 bp, Homo sapien
caccagaccctgctagggtcgggga

SEQ ID NO: 3973894 - DNA, 25 bp, Homo sapien
gatgtcagagtaatgcatcctctgt

SEQ ID NO: 3973895 - DNA, 25 bp, Homo sapien
cgagtaatggatgtcagagtaatgc

SEQ ID NO: 3973896 - DNA, 25 bp, Homo sapien
atgggagattggcatctgctgaaga

SEQ ID NO: 3973897 - DNA, 25 bp, Homo sapien
gctgaagagcagtcgagtaatggat

SEQ ID NO: 3973898 - DNA, 25 bp, Homo sapien
ctaacagcaacgaaccatgttatca

SEQ ID NO: 3973899 - DNA, 25 bp, Homo sapien
acagcaacgaaccatgttatcatgg

SEQ ID NO: 3973900 - DNA, 25 bp, Homo sapien
cgaaccatgttatcatggtgttcac

SEQ ID NO: 3973901 - DNA, 25 bp, Homo sapien
gcaacgaaccatgttatcatggtgt

SEQ ID NO: 3973902 - DNA, 25 bp, Homo sapien
catgcagcctaagatgttctcagcc

SEQ ID NO: 3973903 - DNA, 25 bp, Homo sapien
caagatccagggtgttgggatctgg

SEQ ID NO: 3973904 - DNA, 25 bp, Homo sapien
ttgggatctggataggcaggtccaa

SEQ ID NO: 3973905 - DNA, 25 bp, Homo sapien
ggaccagagtgtggacaagatccag

SEQ ID NO: 3973906 - DNA, 25 bp, Homo sapien
gccaagaacgcaaagtcctcattag

SEQ ID NO: 3973907 - DNA, 25 bp, Homo sapien
gggccaagaacgcaaagtcctcatt

SEQ ID NO: 3973908 - DNA, 25 bp, Homo sapien
agaacgcaaagtcctcattagcggg

SEQ ID NO: 3973909 - DNA, 25 bp, Homo sapien
gagcagggccaagaacgcaaagtcc

SEQ ID NO: 3973910 - DNA, 25 bp, Homo sapien
gggcaataaggatcgagtgtgggtt

SEQ ID NO: 3973911 - DNA, 25 bp, Homo sapien
ggcaataaggatcgagtgtgggttt

SEQ ID NO: 3973912 - DNA, 25 bp, Homo sapien
caacaggggcaataaggatcgagtg

SEQ ID NO: 3973913 - DNA, 25 bp, Homo sapien
taccaacaggggcaataaggatcga

SEQ ID NO: 3973914 - DNA, 25 bp, Homo sapien
tctgagtgaccccttccgcttagat

SEQ ID NO: 3973915 - DNA, 25 bp, Homo sapien
catgggccattccaggcaccacaaa

SEQ ID NO: 3973916 - DNA, 25 bp, Homo sapien
tccgcttagatgacatccatgggcc

SEQ ID NO: 3973917 - DNA, 25 bp, Homo sapien
taccagcaaagtgatggctcttggc

SEQ ID NO: 3973918 - DNA, 25 bp, Homo sapien
caaagctggagatattgaaagaggg

SEQ ID NO: 3973919 - DNA, 25 bp, Homo sapien
gattgcagctctccgtagaaacatc

SEQ ID NO: 3973920 - DNA, 25 bp, Homo sapien
tgcagaccaaccagatgaacaggat

SEQ ID NO: 3973921 - DNA, 25 bp, Homo sapien
gggaccacagatcctcttgattgca

SEQ ID NO: 3973922 - DNA, 25 bp, Homo sapien
aaaaagcaacatcctggaccctatc

SEQ ID NO: 3973923 - DNA, 25 bp, Homo sapien
catcctggaccctatctgtatcttc

SEQ ID NO: 3973924 - DNA, 25 bp, Homo sapien
gacctttgcttgtatgataaaaagc

SEQ ID NO: 3973925 - DNA, 25 bp, Homo sapien
tgtatcttcaacctcgtctcctgtc

SEQ ID NO: 3973926 - DNA, 25 bp, Homo sapien
caaatccctctctctctgttgttac

SEQ ID NO: 3973927 - DNA, 25 bp, Homo sapien
tggcaaatccctctctctctgttgt

SEQ ID NO: 3973928 - DNA, 25 bp, Homo sapien
gtggcaaatccctctctctctgttg

SEQ ID NO: 3973929 - DNA, 25 bp, Homo sapien
tcatccgtggcaaatccctctctct

SEQ ID NO: 3973930 - DNA, 25 bp, Homo sapien
cttcatctatcattggcttggcctg

SEQ ID NO: 3973931 - DNA, 25 bp, Homo sapien
gttctttagcatcactgtcgtagac

SEQ ID NO: 3973932 - DNA, 25 bp, Homo sapien
actgtcgtagacatcataaaatcct

SEQ ID NO: 3973933 - DNA, 25 bp, Homo sapien
cttggcctggggtttaagctgttct

SEQ ID NO: 3973934 - DNA, 25 bp, Homo sapien
ctgaaatttccttgcgtgtcccctg

SEQ ID NO: 3973935 - DNA, 25 bp, Homo sapien
cccctgtgccggcctctgcacctct

SEQ ID NO: 3973936 - DNA, 25 bp, Homo sapien
gcctgcagagtcacctgaaatttcc

SEQ ID NO: 3973937 - DNA, 25 bp, Homo sapien
gtcccctgtgccggcctctgcacct

SEQ ID NO: 3973938 - DNA, 25 bp, Homo sapien
cagtgaagacgacggctgtgctgct

SEQ ID NO: 3973939 - DNA, 25 bp, Homo sapien
tgaagacgacggctgtgctgctgtc

SEQ ID NO: 3973940 - DNA, 25 bp, Homo sapien
cagcagtgaagacgacggctgtgct

SEQ ID NO: 3973941 - DNA, 25 bp, Homo sapien
tgtcagcagtgaagacgacggctgt

SEQ ID NO: 3973942 - DNA, 25 bp, Homo sapien
aggccccagcaagcgtggctctctg

SEQ ID NO: 3973943 - DNA, 25 bp, Homo sapien
ctctctgggtgctagactgccaatc

SEQ ID NO: 3973944 - DNA, 25 bp, Homo sapien
tagactgccaatctgggtcttggca

SEQ ID NO: 3973945 - DNA, 25 bp, Homo sapien
gaggcagccaacttaagctcgccaa

SEQ ID NO: 3973946 - DNA, 25 bp, Homo sapien
ggcaaatggctgcagtcaatagtcc

SEQ ID NO: 3973947 - DNA, 25 bp, Homo sapien
tgccaaattcctgaggacctttccc

SEQ ID NO: 3973948 - DNA, 25 bp, Homo sapien
ttccttgaccagctgatttgccaaa

SEQ ID NO: 3973949 - DNA, 25 bp, Homo sapien
caattccttgaccagctgatttgcc

SEQ ID NO: 3973950 - DNA, 25 bp, Homo sapien
gaggggagggctccttatctcccag

SEQ ID NO: 3973951 - DNA, 25 bp, Homo sapien
cagaatgaggggagggctccttatc

SEQ ID NO: 3973952 - DNA, 25 bp, Homo sapien
ctattttggcagtggcaagtgcaga

SEQ ID NO: 3973953 - DNA, 25 bp, Homo sapien
ttttggcagtggcaagtgcagaatg

SEQ ID NO: 3973954 - DNA, 25 bp, Homo sapien
ccagagcttcataaaggatggtgat

SEQ ID NO: 3973955 - DNA, 25 bp, Homo sapien
agccagcactgtctctgagcaaagc

SEQ ID NO: 3973956 - DNA, 25 bp, Homo sapien
gccctgaaaggcttggacattcaaa

SEQ ID NO: 3973957 - DNA, 25 bp, Homo sapien
ggaaaggagtttgctggcctcagcc

SEQ ID NO: 3973958 - DNA, 25 bp, Homo sapien
tttgcctggctcagtctaggccagt

SEQ ID NO: 3973959 - DNA, 25 bp, Homo sapien
ttgcctggctcagtctaggccagtc

SEQ ID NO: 3973960 - DNA, 25 bp, Homo sapien
aactctgggtgtctagttccctcat

SEQ ID NO: 3973961 - DNA, 25 bp, Homo sapien
taactctgggtgtctagttccctca

SEQ ID NO: 3973962 - DNA, 25 bp, Homo sapien
gcaggagccagggtggtcaggctga

SEQ ID NO: 3973963 - DNA, 25 bp, Homo sapien
caggagccagggtggtcaggctgac

SEQ ID NO: 3973964 - DNA, 25 bp, Homo sapien
ttgtccatgggaggcaggagccagg

SEQ ID NO: 3973965 - DNA, 25 bp, Homo sapien
gaggcaggagccagggtggtcaggc

SEQ ID NO: 3973966 - DNA, 25 bp, Homo sapien
ttccaaagttgggatgtgtccactt

SEQ ID NO: 3973967 - DNA, 25 bp, Homo sapien
agttgggatgtgtccacttcctgtt

SEQ ID NO: 3973968 - DNA, 25 bp, Homo sapien
gatcatcaggccgtttagctgtgat

SEQ ID NO: 3973969 - DNA, 25 bp, Homo sapien
tgtgatgaccacccatgggaagatc

SEQ ID NO: 3973970 - DNA, 25 bp, Homo sapien
tggaccaaaagagggcagagcttgt

SEQ ID NO: 3973971 - DNA, 25 bp, Homo sapien
gtggaccaaaagagggcagagcttg

SEQ ID NO: 3973972 - DNA, 25 bp, Homo sapien
ggaccaaaagagggcagagcttgtc

SEQ ID NO: 3973973 - DNA, 25 bp, Homo sapien
gaccaaaagagggcagagcttgtct

SEQ ID NO: 3973974 - DNA, 25 bp, Homo sapien
tgtggagacgctatgcagttttctc

SEQ ID NO: 3973975 - DNA, 25 bp, Homo sapien
tgctgtggagacgctatgcagtttt

SEQ ID NO: 3973976 - DNA, 25 bp, Homo sapien
gccagggttgattgggggcttgccc

SEQ ID NO: 3973977 - DNA, 25 bp, Homo sapien
ttcagccagggttgattgggggctt

SEQ ID NO: 3973978 - DNA, 25 bp, Homo sapien
gacaccaccccacacacactgtatc

SEQ ID NO: 3973979 - DNA, 25 bp, Homo sapien
gcagacaccaccccacacacactgt

SEQ ID NO: 3973980 - DNA, 25 bp, Homo sapien
ctgcagacaccaccccacacacact

SEQ ID NO: 3973981 - DNA, 25 bp, Homo sapien
agacaccaccccacacacactgtat

SEQ ID NO: 3973982 - DNA, 25 bp, Homo sapien
tggtattggagctaccaggctgaga

SEQ ID NO: 3973983 - DNA, 25 bp, Homo sapien
tcttggtattggagctaccaggctg

SEQ ID NO: 3973984 - DNA, 25 bp, Homo sapien
actcttggtattggagctaccaggc

SEQ ID NO: 3973985 - DNA, 25 bp, Homo sapien
ccactcttggtattggagctaccag

SEQ ID NO: 3973986 - DNA, 25 bp, Homo sapien
gtcaaaatgtgacacatcaacaatg

SEQ ID NO: 3973987 - DNA, 25 bp, Homo sapien
atacatcaggtcaaaatgtgacaca

SEQ ID NO: 3973988 - DNA, 25 bp, Homo sapien
agattgatctattggtggtcagggc

SEQ ID NO: 3973989 - DNA, 25 bp, Homo sapien
catcacaggagattgatctattggt

SEQ ID NO: 3973990 - DNA, 25 bp, Homo sapien
caggatgatgtgtgtccttccgttt

SEQ ID NO: 3973991 - DNA, 25 bp, Homo sapien
ccactgcaggatgatgtgtgtcctt

SEQ ID NO: 3973992 - DNA, 25 bp, Homo sapien
tgatgtgtgtccttccgtttgggtg

SEQ ID NO: 3973993 - DNA, 25 bp, Homo sapien
actgcaggatgatgtgtgtccttcc

SEQ ID NO: 3973994 - DNA, 25 bp, Homo sapien
gggcagtcatttccacgagcccacg

SEQ ID NO: 3973995 - DNA, 25 bp, Homo sapien
ctgccagggtcatgggtgtggccca

SEQ ID NO: 3973996 - DNA, 25 bp, Homo sapien
gcactgtgtatggtttggctgcccc

SEQ ID NO: 3973997 - DNA, 25 bp, Homo sapien
gcccacggcccttggttcttaggca

SEQ ID NO: 3973998 - DNA, 25 bp, Homo sapien
caggtgaccagatagagctgctgtc

SEQ ID NO: 3973999 - DNA, 25 bp, Homo sapien
ctggcaggtgaccagatagagctgc

SEQ ID NO: 3974000 - DNA, 25 bp, Homo sapien
tacatgcacctttcttccagatata

SEQ ID NO: 3974001 - DNA, 25 bp, Homo sapien
cacctttcttccagatatacagctg

SEQ ID NO: 3974002 - DNA, 25 bp, Homo sapien
tgtgtctgacaatcggcctctgctt

SEQ ID NO: 3974003 - DNA, 25 bp, Homo sapien
caccctcatggctagagtggcagga

SEQ ID NO: 3974004 - DNA, 25 bp, Homo sapien
attggtcgacgctgggtatgatccc

SEQ ID NO: 3974005 - DNA, 25 bp, Homo sapien
gggacaggaccccacatgtgtctga

SEQ ID NO: 3974006 - DNA, 25 bp, Homo sapien
taggcacacggaattcgtaactttc

SEQ ID NO: 3974007 - DNA, 25 bp, Homo sapien
ctttccccgaaacagattgatattt

SEQ ID NO: 3974008 - DNA, 25 bp, Homo sapien
cagtcatatatcaagtattctaggc

SEQ ID NO: 3974009 - DNA, 25 bp, Homo sapien
tcacttgttgcgcaccaggctacag

SEQ ID NO: 3974010 - DNA, 25 bp, Homo sapien
ttgctgttgacagccagacacccag

SEQ ID NO: 3974011 - DNA, 25 bp, Homo sapien
cagcttgtcgccaaagatatttatc

SEQ ID NO: 3974012 - DNA, 25 bp, Homo sapien
cccaggaaagcgtgcaaacacagtt

SEQ ID NO: 3974013 - DNA, 25 bp, Homo sapien
cacttcttagcgctgtgcacagttc

SEQ ID NO: 3974014 - DNA, 25 bp, Homo sapien
cctcccaaatagaacacggtctgca

SEQ ID NO: 3974015 - DNA, 25 bp, Homo sapien
cccctcccaaatagaacacggtctg

SEQ ID NO: 3974016 - DNA, 25 bp, Homo sapien
ctcccaaatagaacacggtctgcat

SEQ ID NO: 3974017 - DNA, 25 bp, Homo sapien
tcagcaccgcctccaaagacccctc

SEQ ID NO: 3974018 - DNA, 25 bp, Homo sapien
cactagaggtcagtctggccaactt

SEQ ID NO: 3974019 - DNA, 25 bp, Homo sapien
aatacaaaaccacaagcaggctggg

SEQ ID NO: 3974020 - DNA, 25 bp, Homo sapien
agcaggctgggtgccgtgactcacg

SEQ ID NO: 3974021 - DNA, 25 bp, Homo sapien
atcactagaggtcagtctggccaac

SEQ ID NO: 3974022 - DNA, 25 bp, Homo sapien
atgctgagtttcctccatccaggac

SEQ ID NO: 3974023 - DNA, 25 bp, Homo sapien
ttccccatgctgagtttcctccatc

SEQ ID NO: 3974024 - DNA, 25 bp, Homo sapien
tcagccttccccatgctgagtttcc

SEQ ID NO: 3974025 - DNA, 25 bp, Homo sapien
ggtagccgtagcccaagcctcagcc

SEQ ID NO: 3974026 - DNA, 25 bp, Homo sapien
tgggccatgaacctttggcaggcag

SEQ ID NO: 3974027 - DNA, 25 bp, Homo sapien
tccatgcactttgggtcatcaactg

SEQ ID NO: 3974028 - DNA, 25 bp, Homo sapien
agcatttgctgatcccttggaacct

SEQ ID NO: 3974029 - DNA, 25 bp, Homo sapien
gcagtgcccactagcatttgctgat

SEQ ID NO: 3974030 - DNA, 25 bp, Homo sapien
cttatctggtgtcacgtcacttgga

SEQ ID NO: 3974031 - DNA, 25 bp, Homo sapien
tctggtgtcacgtcacttggagata

SEQ ID NO: 3974032 - DNA, 25 bp, Homo sapien
ctggtgtcacgtcacttggagatac

SEQ ID NO: 3974033 - DNA, 25 bp, Homo sapien
tatctggtgtcacgtcacttggaga

SEQ ID NO: 3974034 - DNA, 25 bp, Homo sapien
agagtccacagaatccactggcttg

SEQ ID NO: 3974035 - DNA, 25 bp, Homo sapien
atgtttgcagggtctatgaaaggct

SEQ ID NO: 3974036 - DNA, 25 bp, Homo sapien
gagtccacagaatccactggcttgt

SEQ ID NO: 3974037 - DNA, 25 bp, Homo sapien
tggttagtcactctaaatgggttta

SEQ ID NO: 3974038 - DNA, 25 bp, Homo sapien
gggtttacagacatcagagcctgag

SEQ ID NO: 3974039 - DNA, 25 bp, Homo sapien
cactctaaatgggtttacagacatc

SEQ ID NO: 3974040 - DNA, 25 bp, Homo sapien
aggaatgcttattgtggttagtcac

SEQ ID NO: 3974041 - DNA, 25 bp, Homo sapien
ctgttcctcggtggcagctttaaag

SEQ ID NO: 3974042 - DNA, 25 bp, Homo sapien
atctgttcctcggtggcagctttaa

SEQ ID NO: 3974043 - DNA, 25 bp, Homo sapien
tcctcggtggcagctttaaaggaat

SEQ ID NO: 3974044 - DNA, 25 bp, Homo sapien
gttcctcggtggcagctttaaagga

SEQ ID NO: 3974045 - DNA, 25 bp, Homo sapien
agttttcagtcctctgttaagctct

SEQ ID NO: 3974046 - DNA, 25 bp, Homo sapien
gctctctacgaccacaccagatggt

SEQ ID NO: 3974047 - DNA, 25 bp, Homo sapien
tctgtgtctctgaaaccctccactc

SEQ ID NO: 3974048 - DNA, 25 bp, Homo sapien
gtgagcaataggtagaaatctgcca

SEQ ID NO: 3974049 - DNA, 25 bp, Homo sapien
cccacagataaggatctttttgatg

SEQ ID NO: 3974050 - DNA, 25 bp, Homo sapien
tccccacagataaggatctttttga

SEQ ID NO: 3974051 - DNA, 25 bp, Homo sapien
cagataaggatctttttgatggaac

SEQ ID NO: 3974052 - DNA, 25 bp, Homo sapien
cacagataaggatctttttgatgga

SEQ ID NO: 3974053 - DNA, 25 bp, Homo sapien
gcaaggacgcggatgcgatgagtat

SEQ ID NO: 3974054 - DNA, 25 bp, Homo sapien
ggccgacttcaaggctggcaaggac

SEQ ID NO: 3974055 - DNA, 25 bp, Homo sapien
tcatcttttctcatatacgaataca

SEQ ID NO: 3974056 - DNA, 25 bp, Homo sapien
tacattgaggccgacttcaaggctg

SEQ ID NO: 3974057 - DNA, 25 bp, Homo sapien
gttccaagttgtgtgcattcatgtc

SEQ ID NO: 3974058 - DNA, 25 bp, Homo sapien
tccaagttgtgtgcattcatgtcaa

SEQ ID NO: 3974059 - DNA, 25 bp, Homo sapien
tgtgcattcatgtcaacatctggta

SEQ ID NO: 3974060 - DNA, 25 bp, Homo sapien
attcatgtcaacatctggtaccaac

SEQ ID NO: 3974061 - DNA, 25 bp, Homo sapien
tttatcctgcgagtcttctgaggct

SEQ ID NO: 3974062 - DNA, 25 bp, Homo sapien
tgagctgctctctgatgatgattag

SEQ ID NO: 3974063 - DNA, 25 bp, Homo sapien
gacacatttatcctgcgagtcttct

SEQ ID NO: 3974064 - DNA, 25 bp, Homo sapien
aggctgactggaggatggatttcct

SEQ ID NO: 3974065 - DNA, 25 bp, Homo sapien
gactcccttggcagactcaggccac

SEQ ID NO: 3974066 - DNA, 25 bp, Homo sapien
aacaggggcattcctgagacctcca

SEQ ID NO: 3974067 - DNA, 25 bp, Homo sapien
tggtcccttgtgacaacaggggcat

SEQ ID NO: 3974068 - DNA, 25 bp, Homo sapien
gacctccaagcatacactttcttct

SEQ ID NO: 3974069 - DNA, 25 bp, Homo sapien
ctctactgggccgtcagcgatttct

SEQ ID NO: 3974070 - DNA, 25 bp, Homo sapien
tcaaccctctactgggccgtcagcg

SEQ ID NO: 3974071 - DNA, 25 bp, Homo sapien
aaccctctactgggccgtcagcgat

SEQ ID NO: 3974072 - DNA, 25 bp, Homo sapien
ctactgggccgtcagcgatttcttc

SEQ ID NO: 3974073 - DNA, 25 bp, Homo sapien
gatgcaatgccgtcacctagaaagt

SEQ ID NO: 3974074 - DNA, 25 bp, Homo sapien
cctggcaatgcccatggatgcaatg

SEQ ID NO: 3974075 - DNA, 25 bp, Homo sapien
cacagagctccttgctaagggaact

SEQ ID NO: 3974076 - DNA, 25 bp, Homo sapien
tttctggacagaggcaaaccttgtc

SEQ ID NO: 3974077 - DNA, 25 bp, Homo sapien
ggtcccgtgtggcaatgatgtaaca

SEQ ID NO: 3974078 - DNA, 25 bp, Homo sapien
tgcaatgggtttcatcaaccagcag

SEQ ID NO: 3974079 - DNA, 25 bp, Homo sapien
cctgtgcttcgtggaggtcattgca

SEQ ID NO: 3974080 - DNA, 25 bp, Homo sapien
tttgagtaagagtcaggtcccgtgt

SEQ ID NO: 3974081 - DNA, 25 bp, Homo sapien
cagagcccccaaggcacctctgagg

SEQ ID NO: 3974082 - DNA, 25 bp, Homo sapien
tcctcctttccagagcccccaaggc

SEQ ID NO: 3974083 - DNA, 25 bp, Homo sapien
ctcctttccagagcccccaaggcac

SEQ ID NO: 3974084 - DNA, 25 bp, Homo sapien
agcccccaaggcacctctgaggcat

SEQ ID NO: 3974085 - DNA, 25 bp, Homo sapien
aaacctctgagggtggtcaatagta

SEQ ID NO: 3974086 - DNA, 25 bp, Homo sapien
tagctatctgagagtgtgagtacac

SEQ ID NO: 3974087 - DNA, 25 bp, Homo sapien
gacctgggacgctgatatcttgaca

SEQ ID NO: 3974088 - DNA, 25 bp, Homo sapien
tataacagtggccagaactccagct

SEQ ID NO: 3974089 - DNA, 25 bp, Homo sapien
tgggccagtgtcatcccgaagaata

SEQ ID NO: 3974090 - DNA, 25 bp, Homo sapien
gtgtcatcccgaagaatacattttg

SEQ ID NO: 3974091 - DNA, 25 bp, Homo sapien
cagtgtcatcccgaagaatacattt

SEQ ID NO: 3974092 - DNA, 25 bp, Homo sapien
ggccagtgtcatcccgaagaataca

SEQ ID NO: 3974093 - DNA, 25 bp, Homo sapien
gtttggcttgctgtgttatcactcc

SEQ ID NO: 3974094 - DNA, 25 bp, Homo sapien
tggtggtatcaaagatgaagtcaga

SEQ ID NO: 3974095 - DNA, 25 bp, Homo sapien
gagacagcttgagggatgtgacaca

SEQ ID NO: 3974096 - DNA, 25 bp, Homo sapien
gagtcagtatctgccacagtttggc

SEQ ID NO: 3974097 - DNA, 25 bp, Homo sapien
tcctgaggaacctgggttcctgctc

SEQ ID NO: 3974098 - DNA, 25 bp, Homo sapien
tggcctcctgaggaacctgggttcc

SEQ ID NO: 3974099 - DNA, 25 bp, Homo sapien
cctcctgaggaacctgggttcctgc

SEQ ID NO: 3974100 - DNA, 25 bp, Homo sapien
gcctcctgaggaacctgggttcctg

SEQ ID NO: 3974101 - DNA, 25 bp, Homo sapien
tgtgaatgtcagtgtcagtcctcct

SEQ ID NO: 3974102 - DNA, 25 bp, Homo sapien
cagtgcctgcacagttgcccagtgt

SEQ ID NO: 3974103 - DNA, 25 bp, Homo sapien
tcccagaaacgctgtctgtttctgt

SEQ ID NO: 3974104 - DNA, 25 bp, Homo sapien
acagttgcccagtgtatctgatcct

SEQ ID NO: 3974105 - DNA, 25 bp, Homo sapien
ctgttttggtagggcagaatttatg

SEQ ID NO: 3974106 - DNA, 25 bp, Homo sapien
cagtgacaatgggatagggaccatg

SEQ ID NO: 3974107 - DNA, 25 bp, Homo sapien
gggaccatgtgaatgccaccatcct

SEQ ID NO: 3974108 - DNA, 25 bp, Homo sapien
atagggaccatgtgaatgccaccat

SEQ ID NO: 3974109 - DNA, 25 bp, Homo sapien
ccatgtgaatgccaccatcctaaac

SEQ ID NO: 3974110 - DNA, 25 bp, Homo sapien
ctgacagtggtctatggatagggaa

SEQ ID NO: 3974111 - DNA, 25 bp, Homo sapien
catttctacactggccaagtccatt

SEQ ID NO: 3974112 - DNA, 25 bp, Homo sapien
ggccaagtccattcttgactttggt

SEQ ID NO: 3974113 - DNA, 25 bp, Homo sapien
ctctgcaagacccatgaggtaaact

SEQ ID NO: 3974114 - DNA, 25 bp, Homo sapien
gcttgatcacaatcaacaaccccag

SEQ ID NO: 3974115 - DNA, 25 bp, Homo sapien
ctgctcagcttgatcacaatcaaca

SEQ ID NO: 3974116 - DNA, 25 bp, Homo sapien
tcagcttgatcacaatcaacaaccc

SEQ ID NO: 3974117 - DNA, 25 bp, Homo sapien
gctcagcttgatcacaatcaacaac

SEQ ID NO: 3974118 - DNA, 25 bp, Homo sapien
cactcaaggacagccggcggctcag

SEQ ID NO: 3974119 - DNA, 25 bp, Homo sapien
gacagccggcggctcagaaggccac

SEQ ID NO: 3974120 - DNA, 25 bp, Homo sapien
tcaaggacagccggcggctcagaag

SEQ ID NO: 3974121 - DNA, 25 bp, Homo sapien
cacactcaaggacagccggcggctc

SEQ ID NO: 3974122 - DNA, 25 bp, Homo sapien
gtcagcgaatctgaatctacttcaa

SEQ ID NO: 3974123 - DNA, 25 bp, Homo sapien
ctgatggctctataagtcagcgaat

SEQ ID NO: 3974124 - DNA, 25 bp, Homo sapien
aagtcagcgaatctgaatctacttc

SEQ ID NO: 3974125 - DNA, 25 bp, Homo sapien
gctctataagtcagcgaatctgaat

SEQ ID NO: 3974126 - DNA, 25 bp, Homo sapien
gcagggtcccttacttggaaagtca

SEQ ID NO: 3974127 - DNA, 25 bp, Homo sapien
caagaggcagggtcccttacttgga

SEQ ID NO: 3974128 - DNA, 25 bp, Homo sapien
cggagctggtataggaaaaacaaat

SEQ ID NO: 3974129 - DNA, 25 bp, Homo sapien
ttcaactgctcaaattctccccgga

SEQ ID NO: 3974130 - DNA, 25 bp, Homo sapien
aagtctccccatgtacacccgatgt

SEQ ID NO: 3974131 - DNA, 25 bp, Homo sapien
gatgtacaatggagctgcattcctc

SEQ ID NO: 3974132 - DNA, 25 bp, Homo sapien
tggcctccaagtctccccatgtaca

SEQ ID NO: 3974133 - DNA, 25 bp, Homo sapien
catgtacacccgatgtacaatggag

SEQ ID NO: 3974134 - DNA, 25 bp, Homo sapien
ggcagctgttcccttcttcagtctc

SEQ ID NO: 3974135 - DNA, 25 bp, Homo sapien
cagaggagaaggctttgaaatcctc

SEQ ID NO: 3974136 - DNA, 25 bp, Homo sapien
gagaaggctttgaaatcctccggca

SEQ ID NO: 3974137 - DNA, 25 bp, Homo sapien
gctttgaaatcctccggcagctgtt

SEQ ID NO: 3974138 - DNA, 25 bp, Homo sapien
cagatttgggagctggtgaaatgtc

SEQ ID NO: 3974139 - DNA, 25 bp, Homo sapien
ttgggagctggtgaaatgtcgggct

SEQ ID NO: 3974140 - DNA, 25 bp, Homo sapien
gatttgggagctggtgaaatgtcgg

SEQ ID NO: 3974141 - DNA, 25 bp, Homo sapien
tttgggagctggtgaaatgtcgggc

SEQ ID NO: 3974142 - DNA, 25 bp, Homo sapien
tttcgcaagaaaccaagtgaggcgc

SEQ ID NO: 3974143 - DNA, 25 bp, Homo sapien
tcgcaagaaaccaagtgaggcgctg

SEQ ID NO: 3974144 - DNA, 25 bp, Homo sapien
agaaaccaagtgaggcgctgcctgc

SEQ ID NO: 3974145 - DNA, 25 bp, Homo sapien
caagaaaccaagtgaggcgctgcct

SEQ ID NO: 3974146 - DNA, 25 bp, Homo sapien
ccactttccgtggagagtctgtggc

SEQ ID NO: 3974147 - DNA, 25 bp, Homo sapien
ctgtcctacctctaaccactttccg

SEQ ID NO: 3974148 - DNA, 25 bp, Homo sapien
aagataggcatggcaaattgcacct

SEQ ID NO: 3974149 - DNA, 25 bp, Homo sapien
ggagcccagcggtgaaggagctgct

SEQ ID NO: 3974150 - DNA, 25 bp, Homo sapien
tgcagccccgcaaggtggccgtcat

SEQ ID NO: 3974151 - DNA, 25 bp, Homo sapien
catgctctttcacagattcacaagg

SEQ ID NO: 3974152 - DNA, 25 bp, Homo sapien
caaggtggccgtcatcatgctcttt

SEQ ID NO: 3974153 - DNA, 25 bp, Homo sapien
tatcgttgtttccttgctgcagccc

SEQ ID NO: 3974154 - DNA, 25 bp, Homo sapien
cttcaggaggtcatttgtctttcgt

SEQ ID NO: 3974155 - DNA, 25 bp, Homo sapien
tggaaggctatgaactccgggcctc

SEQ ID NO: 3974156 - DNA, 25 bp, Homo sapien
cagacctgctcggttggaagagctg

SEQ ID NO: 3974157 - DNA, 25 bp, Homo sapien
ctgtagcagacctgctcggttggaa

SEQ ID NO: 3974158 - DNA, 25 bp, Homo sapien
tattccatttgtttctaaagatatt

SEQ ID NO: 3974159 - DNA, 25 bp, Homo sapien
taaagatattttaatcccacatgac

SEQ ID NO: 3974160 - DNA, 25 bp, Homo sapien
tttctaaagatattttaatcccaca

SEQ ID NO: 3974161 - DNA, 25 bp, Homo sapien
tctaaagatattttaatcccacatg

SEQ ID NO: 3974162 - DNA, 25 bp, Homo sapien
gccgcccacggcctttgcaataaat

SEQ ID NO: 3974163 - DNA, 25 bp, Homo sapien
gcaataaatccgttgtcttccttct

SEQ ID NO: 3974164 - DNA, 25 bp, Homo sapien
aacccaggcccatagatcacccctc

SEQ ID NO: 3974165 - DNA, 25 bp, Homo sapien
caaacttcccgtgaaccagggcctg

SEQ ID NO: 3974166 - DNA, 25 bp, Homo sapien
gatgacgattattcccaaaggcggc

SEQ ID NO: 3974167 - DNA, 25 bp, Homo sapien
aaggcaaggctactccagtcgtcca

SEQ ID NO: 3974168 - DNA, 25 bp, Homo sapien
gcggcaaatgtcagaaaagttcccc

SEQ ID NO: 3974169 - DNA, 25 bp, Homo sapien
ctctggcctcgctggatgtgacatt

SEQ ID NO: 3974170 - DNA, 25 bp, Homo sapien
cctgaccgtgagtggtgtgtactca

SEQ ID NO: 3974171 - DNA, 25 bp, Homo sapien
gagctgcggagatgaaaggaccact

SEQ ID NO: 3974172 - DNA, 25 bp, Homo sapien
ggaccactcgctgccttcttgactt

SEQ ID NO: 3974173 - DNA, 25 bp, Homo sapien
tcttgacttgtaaagactcctgacc

SEQ ID NO: 3974174 - DNA, 25 bp, Homo sapien
ttaaactgcccctcagaaccgtctg

SEQ ID NO: 3974175 - DNA, 25 bp, Homo sapien
tggtctctgtcctaggatgctcaca

SEQ ID NO: 3974176 - DNA, 25 bp, Homo sapien
cccctcagaaccgtctgcatgaccg

SEQ ID NO: 3974177 - DNA, 25 bp, Homo sapien
gaaccgtctgcatgacccctcagaa

SEQ ID NO: 3974178 - DNA, 25 bp, Homo sapien
cccactccgactctcagcagcccat

SEQ ID NO: 3974179 - DNA, 25 bp, Homo sapien
tcactgcccactccgactctcagca

SEQ ID NO: 3974180 - DNA, 25 bp, Homo sapien
ctgcccactccgactctcagcagcc

SEQ ID NO: 3974181 - DNA, 25 bp, Homo sapien
ctcactgcccactccgactctcagc

SEQ ID NO: 3974182 - DNA, 25 bp, Homo sapien
aaccctcagtctggtttgctctgca

SEQ ID NO: 3974183 - DNA, 25 bp, Homo sapien
tgctctgcagtttagccccaactcc

SEQ ID NO: 3974184 - DNA, 25 bp, Homo sapien
actcccaacccctcatcacaaaaat

SEQ ID NO: 3974185 - DNA, 25 bp, Homo sapien
acgggtgccacaggtgggtatgcca

SEQ ID NO: 3974186 - DNA, 25 bp, Homo sapien
tatgggccacagtgtatgcaggaca

SEQ ID NO: 3974187 - DNA, 25 bp, Homo sapien
tattttctttgcacccatatgggcc

SEQ ID NO: 3974188 - DNA, 25 bp, Homo sapien
taacaacttcgcatggctgggtagc

SEQ ID NO: 3974189 - DNA, 25 bp, Homo sapien
ggtgttcactaaaccactggtgccc

SEQ ID NO: 3974190 - DNA, 25 bp, Homo sapien
caagcatgacatcaggtggctttcc

SEQ ID NO: 3974191 - DNA, 25 bp, Homo sapien
gcaagcatgacatcaggtggctttc

SEQ ID NO: 3974192 - DNA, 25 bp, Homo sapien
aagcatgacatcaggtggctttcca

SEQ ID NO: 3974193 - DNA, 25 bp, Homo sapien
tgggcccatggcttggcacagagct

SEQ ID NO: 3974194 - DNA, 25 bp, Homo sapien
gaagatgataaaagacccctgggcc

SEQ ID NO: 3974195 - DNA, 25 bp, Homo sapien
gagctcttcagatctaaaagtagga

SEQ ID NO: 3974196 - DNA, 25 bp, Homo sapien
aaaagtaggaagttgagagcaaaca

SEQ ID NO: 3974197 - DNA, 25 bp, Homo sapien
agaagtactagcagcctcacagagg

SEQ ID NO: 3974198 - DNA, 25 bp, Homo sapien
gctggagaagtactagcagcctcac

SEQ ID NO: 3974199 - DNA, 25 bp, Homo sapien
gaggaatcttctagctgagtatctt

SEQ ID NO: 3974200 - DNA, 25 bp, Homo sapien
tggagaagtactagcagcctcacag

SEQ ID NO: 3974201 - DNA, 25 bp, Homo sapien
tccacttccgctaaatgtagtgggc

SEQ ID NO: 3974202 - DNA, 25 bp, Homo sapien
ctaatttttcgcagaactgtttgga

SEQ ID NO: 3974203 - DNA, 25 bp, Homo sapien
aggctggtgggctgtccgctgggct

SEQ ID NO: 3974204 - DNA, 25 bp, Homo sapien
ttttcgcagaactgtttggaggctg

SEQ ID NO: 3974205 - DNA, 25 bp, Homo sapien
tctcccagtattagctgacgggcct

SEQ ID NO: 3974206 - DNA, 25 bp, Homo sapien
ggtacttagcagaaagcccagcttc

SEQ ID NO: 3974207 - DNA, 25 bp, Homo sapien
taaaggatttccaggtacttagcag

SEQ ID NO: 3974208 - DNA, 25 bp, Homo sapien
gctgacgggcctgttccctcatttt

SEQ ID NO: 3974209 - DNA, 25 bp, Homo sapien
cccgctgttggacgtcctccatgga

SEQ ID NO: 3974210 - DNA, 25 bp, Homo sapien
gcctcaggggcatagactcaagttc

SEQ ID NO: 3974211 - DNA, 25 bp, Homo sapien
catgaccagggtgagatgctcccgc

SEQ ID NO: 3974212 - DNA, 25 bp, Homo sapien
tttgccgtagagaccaggcctgagg

SEQ ID NO: 3974213 - DNA, 25 bp, Homo sapien
caaaaggcagtctctgtcaagggag

SEQ ID NO: 3974214 - DNA, 25 bp, Homo sapien
cattgtgattggctccaaaaggcag

SEQ ID NO: 3974215 - DNA, 25 bp, Homo sapien
gctgcagagtaaacctccattgtga

SEQ ID NO: 3974216 - DNA, 25 bp, Homo sapien
tacgaggctcggtcactgggtaaaa

SEQ ID NO: 3974217 - DNA, 25 bp, Homo sapien
acttctccttcggatcttagattcc

SEQ ID NO: 3974218 - DNA, 25 bp, Homo sapien
ttctccttcggatcttagattccag

SEQ ID NO: 3974219 - DNA, 25 bp, Homo sapien
agaaacttctccttcggatcttaga

SEQ ID NO: 3974220 - DNA, 25 bp, Homo sapien
aaacttctccttcggatcttagatt

SEQ ID NO: 3974221 - DNA, 25 bp, Homo sapien
ctccaaagaccagtgccactgtccc

SEQ ID NO: 3974222 - DNA, 25 bp, Homo sapien
tctctcctaagtgcagagatggtcc

SEQ ID NO: 3974223 - DNA, 25 bp, Homo sapien
tgctccaaagaccagtgccactgtc

SEQ ID NO: 3974224 - DNA, 25 bp, Homo sapien
ctctcctaagtgcagagatggtcct

SEQ ID NO: 3974225 - DNA, 25 bp, Homo sapien
ccagagttggcgcaatttgattgag

SEQ ID NO: 3974226 - DNA, 25 bp, Homo sapien
tcagagagttactacgtagtcctgg

SEQ ID NO: 3974227 - DNA, 25 bp, Homo sapien
acttccctaattttgcagtcttgga

SEQ ID NO: 3974228 - DNA, 25 bp, Homo sapien
tgggtccctgttagcttcttgaata

SEQ ID NO: 3974229 - DNA, 25 bp, Homo sapien
gctgattgacaaatatgcttggatg

SEQ ID NO: 3974230 - DNA, 25 bp, Homo sapien
tctttggaatgtgataagaatggct

SEQ ID NO: 3974231 - DNA, 25 bp, Homo sapien
tcggctttcagtatggctgtttggt

SEQ ID NO: 3974232 - DNA, 25 bp, Homo sapien
gaatgtgataagaatggctgtttcc

SEQ ID NO: 3974233 - DNA, 25 bp, Homo sapien
ttgccagttaatttgtagctgtgct

SEQ ID NO: 3974234 - DNA, 25 bp, Homo sapien
attgccagttaatttgtagctgtgc

SEQ ID NO: 3974235 - DNA, 25 bp, Homo sapien
aattgccagttaatttgtagctgtg

SEQ ID NO: 3974236 - DNA, 25 bp, Homo sapien
gtaatgccttacctctttgaaagag

SEQ ID NO: 3974237 - DNA, 25 bp, Homo sapien
gattttccacaataccacgaatgct

SEQ ID NO: 3974238 - DNA, 25 bp, Homo sapien
tcaatatatagaccagcaaaacggt

SEQ ID NO: 3974239 - DNA, 25 bp, Homo sapien
caaaacggtttgaagaaattcacag

SEQ ID NO: 3974240 - DNA, 25 bp, Homo sapien
taaccagagatgtagccccaaagaa

SEQ ID NO: 3974241 - DNA, 25 bp, Homo sapien
tccagtctacatccagagtgataag

SEQ ID NO: 3974242 - DNA, 25 bp, Homo sapien
cccaaagaaacggttgagtgtgcac

SEQ ID NO: 3974243 - DNA, 25 bp, Homo sapien
gggaattctgatcctgataacagcc

SEQ ID NO: 3974244 - DNA, 25 bp, Homo sapien
tttcattccgtctctcatcatcttt

SEQ ID NO: 3974245 - DNA, 25 bp, Homo sapien
tctttcattccgtctctcatcatct

SEQ ID NO: 3974246 - DNA, 25 bp, Homo sapien
ctttcattccgtctctcatcatctt

SEQ ID NO: 3974247 - DNA, 25 bp, Homo sapien
tccctagacaagtgtgtcacaatgc

SEQ ID NO: 3974248 - DNA, 25 bp, Homo sapien
gacaagtgtgtcacaatgcacaatg

SEQ ID NO: 3974249 - DNA, 25 bp, Homo sapien
tagacaagtgtgtcacaatgcacaa

SEQ ID NO: 3974250 - DNA, 25 bp, Homo sapien
catccctagacaagtgtgtcacaat

SEQ ID NO: 3974251 - DNA, 25 bp, Homo sapien
tttcctgaccgtctgccaaatgtcc

SEQ ID NO: 3974252 - DNA, 25 bp, Homo sapien
gaccgtctgccaaatgtcccatcct

SEQ ID NO: 3974253 - DNA, 25 bp, Homo sapien
ctccaaaacattgaattccctttct

SEQ ID NO: 3974254 - DNA, 25 bp, Homo sapien
atcctccagcaacatgtcacctcct

SEQ ID NO: 3974255 - DNA, 25 bp, Homo sapien
ttttgatgtattgcctgaacacaac

SEQ ID NO: 3974256 - DNA, 25 bp, Homo sapien
tctccttgatatttgcagaggccca

SEQ ID NO: 3974257 - DNA, 25 bp, Homo sapien
tggacaacggacaccagctgacata

SEQ ID NO: 3974258 - DNA, 25 bp, Homo sapien
tgaacaaagtgcaatcacagcaggg

SEQ ID NO: 3974259 - DNA, 25 bp, Homo sapien
gagctccgtgaaaagagtttaccca

SEQ ID NO: 3974260 - DNA, 25 bp, Homo sapien
gtctctcctggtagcgtgggcagct

SEQ ID NO: 3974261 - DNA, 25 bp, Homo sapien
cactgcttggtggttaatggaatgc

SEQ ID NO: 3974262 - DNA, 25 bp, Homo sapien
tgacatctaatgagggtctctcctg

SEQ ID NO: 3974263 - DNA, 25 bp, Homo sapien
gctttgagtcttacccagacaacta

SEQ ID NO: 3974264 - DNA, 25 bp, Homo sapien
ggcattgctccgtctccatgtctct

SEQ ID NO: 3974265 - DNA, 25 bp, Homo sapien
tcccacatggttggattagacggca

SEQ ID NO: 3974266 - DNA, 25 bp, Homo sapien
tgtctcttagactcacaaccagggt

SEQ ID NO: 3974267 - DNA, 25 bp, Homo sapien
gacttaaagcatctagtttggttca

SEQ ID NO: 3974268 - DNA, 25 bp, Homo sapien
tacaatcacacctctgactgttgac

SEQ ID NO: 3974269 - DNA, 25 bp, Homo sapien
gcatctagtttggttcaggctactg

SEQ ID NO: 3974270 - DNA, 25 bp, Homo sapien
gtcaatatttccgagtttacaatca

SEQ ID NO: 3974271 - DNA, 25 bp, Homo sapien
aatcatcaggccgtttgcaggtgga

SEQ ID NO: 3974272 - DNA, 25 bp, Homo sapien
aacttctgcaggatatcatatggca

SEQ ID NO: 3974273 - DNA, 25 bp, Homo sapien
caggtggatggtgagttccaagcct

SEQ ID NO: 3974274 - DNA, 25 bp, Homo sapien
tccaagcctagggaacgttctcgtg

SEQ ID NO: 3974275 - DNA, 25 bp, Homo sapien
taataatagtacaatccgcctgcag

SEQ ID NO: 3974276 - DNA, 25 bp, Homo sapien
ttaatacagctccttccacgaacag

SEQ ID NO: 3974277 - DNA, 25 bp, Homo sapien
tggccacatgatgcgctgagaaatc

SEQ ID NO: 3974278 - DNA, 25 bp, Homo sapien
ttttggcacaaagacgaactcccat

SEQ ID NO: 3974279 - DNA, 25 bp, Homo sapien
ttcaaccccattttcaggcagcatg

SEQ ID NO: 3974280 - DNA, 25 bp, Homo sapien
tttcaggcagcatgggctgtacaca

SEQ ID NO: 3974281 - DNA, 25 bp, Homo sapien
cttctgattcaaccccattttcagg

SEQ ID NO: 3974282 - DNA, 25 bp, Homo sapien
caggcagcatgggctgtacacaccc

SEQ ID NO: 3974283 - DNA, 25 bp, Homo sapien
tgtgtgtaatcaggcacagaccaca

SEQ ID NO: 3974284 - DNA, 25 bp, Homo sapien
gtaatcaggcacagaccacagcagt

SEQ ID NO: 3974285 - DNA, 25 bp, Homo sapien
tcataacaggatgatgtgatcccgg

SEQ ID NO: 3974286 - DNA, 25 bp, Homo sapien
cagcatttgcgaggtgcagctgcct

SEQ ID NO: 3974287 - DNA, 25 bp, Homo sapien
cgccccgtaagtcccatgagttcta

SEQ ID NO: 3974288 - DNA, 25 bp, Homo sapien
cccatgagttctatgtgttctcaag

SEQ ID NO: 3974289 - DNA, 25 bp, Homo sapien
cttggtcgccccgtaagtcccatga

SEQ ID NO: 3974290 - DNA, 25 bp, Homo sapien
ccgtaagtcccatgagttctatgtg

SEQ ID NO: 3974291 - DNA, 25 bp, Homo sapien
tcctttgaaccgctgaagggcagct

SEQ ID NO: 3974292 - DNA, 25 bp, Homo sapien
aaagtgaatgccctcccttgtcagg

SEQ ID NO: 3974293 - DNA, 25 bp, Homo sapien
cacgagctggctcccaatgaaagtg

SEQ ID NO: 3974294 - DNA, 25 bp, Homo sapien
caaatgccgtcttcacactgggaaa

SEQ ID NO: 3974295 - DNA, 25 bp, Homo sapien
cacaggaaaacccatgagtagcttt

SEQ ID NO: 3974296 - DNA, 25 bp, Homo sapien
gccaacttaactgcagttcctgctg

SEQ ID NO: 3974297 - DNA, 25 bp, Homo sapien
tagctttaccacaaacaggaggtag

SEQ ID NO: 3974298 - DNA, 25 bp, Homo sapien
catcccaaattagacctgccagaga

SEQ ID NO: 3974299 - DNA, 25 bp, Homo sapien
gaagtatcattgtggtaatgattct

SEQ ID NO: 3974300 - DNA, 25 bp, Homo sapien
cacagcaaaccgaagaggtacccta

SEQ ID NO: 3974301 - DNA, 25 bp, Homo sapien
aagaggtaccctaatgacagtataa

SEQ ID NO: 3974302 - DNA, 25 bp, Homo sapien
tatcattgtggtaatgattcttttc

SEQ ID NO: 3974303 - DNA, 25 bp, Homo sapien
acctgcaattacctctctgaataaa

SEQ ID NO: 3974304 - DNA, 25 bp, Homo sapien
ttgggtaaaccatacactcttttca

SEQ ID NO: 3974305 - DNA, 25 bp, Homo sapien
gaattgttgggtaaaccatacactc

SEQ ID NO: 3974306 - DNA, 25 bp, Homo sapien
attgttgggtaaaccatacactctt

SEQ ID NO: 3974307 - DNA, 25 bp, Homo sapien
gatgaacaatcctccacagtctcca

SEQ ID NO: 3974308 - DNA, 25 bp, Homo sapien
ctgctggccaacaggtctaagatga

SEQ ID NO: 3974309 - DNA, 25 bp, Homo sapien
ggcagaggaccctaggataacctgg

SEQ ID NO: 3974310 - DNA, 25 bp, Homo sapien
cagaggaccctaggataacctggtc

SEQ ID NO: 3974311 - DNA, 25 bp, Homo sapien
aggccttgctttgcggaaaactcgg

SEQ ID NO: 3974312 - DNA, 25 bp, Homo sapien
tggccagctggagattagataattc

SEQ ID NO: 3974313 - DNA, 25 bp, Homo sapien
atccatctggccagctggagattag

SEQ ID NO: 3974314 - DNA, 25 bp, Homo sapien
gcggaaaactcggtgctccatccat

SEQ ID NO: 3974315 - DNA, 25 bp, Homo sapien
tctgtaatcaattggctaaggccca

SEQ ID NO: 3974316 - DNA, 25 bp, Homo sapien
gattacaaaggctaagaagtctcag

SEQ ID NO: 3974317 - DNA, 25 bp, Homo sapien
tctcaggatctgaggttggcaagct

SEQ ID NO: 3974318 - DNA, 25 bp, Homo sapien
gatgatcaatgctccagctcaagga

SEQ ID NO: 3974319 - DNA, 25 bp, Homo sapien
tgttaaattctatgacttccaactc

SEQ ID NO: 3974320 - DNA, 25 bp, Homo sapien
ctgttaaattctatgacttccaact

SEQ ID NO: 3974321 - DNA, 25 bp, Homo sapien
ttagacttcaactccactgtgagag

SEQ ID NO: 3974322 - DNA, 25 bp, Homo sapien
ggcccacatgtatcatgtattagac

SEQ ID NO: 3974323 - DNA, 25 bp, Homo sapien
aatgcttgaagagcttctatacctc

SEQ ID NO: 3974324 - DNA, 25 bp, Homo sapien
ccatctggaagcttcgaagactaac

SEQ ID NO: 3974325 - DNA, 25 bp, Homo sapien
aaaggtcactcttgatagtccctgc

SEQ ID NO: 3974326 - DNA, 25 bp, Homo sapien
gaagatatttctgggcctatggcag

SEQ ID NO: 3974327 - DNA, 25 bp, Homo sapien
aagggaccaagtgaatgagcatgca

SEQ ID NO: 3974328 - DNA, 25 bp, Homo sapien
gcccgctgctttgggttatcagaca

SEQ ID NO: 3974329 - DNA, 25 bp, Homo sapien
ttaactgttagagaatttgccagct

SEQ ID NO: 3974330 - DNA, 25 bp, Homo sapien
taactgttagagaatttgccagctt

SEQ ID NO: 3974331 - DNA, 25 bp, Homo sapien
tgagaatactgggcgtttcttccat

SEQ ID NO: 3974332 - DNA, 25 bp, Homo sapien
agaatactgggcgtttcttccatta

SEQ ID NO: 3974333 - DNA, 25 bp, Homo sapien
gagaatactgggcgtttcttccatt

SEQ ID NO: 3974334 - DNA, 25 bp, Homo sapien
gttgtcgatgtagtcctcgagttcc

SEQ ID NO: 3974335 - DNA, 25 bp, Homo sapien
ctcgagttcccggatgtgggtgtct

SEQ ID NO: 3974336 - DNA, 25 bp, Homo sapien
tcgatgtagtcctcgagttcccgga

SEQ ID NO: 3974337 - DNA, 25 bp, Homo sapien
tcgagttcccggatgtgggtgtctt

SEQ ID NO: 3974338 - DNA, 25 bp, Homo sapien
gataccctgcagtggcatcaaaggg

SEQ ID NO: 3974339 - DNA, 25 bp, Homo sapien
gaacctcttcataggtcagactacg

SEQ ID NO: 3974340 - DNA, 25 bp, Homo sapien
cagactacgataccctgcagtggca

SEQ ID NO: 3974341 - DNA, 25 bp, Homo sapien
ttcaccagctcctgtagaacctctt

SEQ ID NO: 3974342 - DNA, 25 bp, Homo sapien
aaccctgatgaagtttttcgctagc

SEQ ID NO: 3974343 - DNA, 25 bp, Homo sapien
tgaaaactatacacttggacttgtg

SEQ ID NO: 3974344 - DNA, 25 bp, Homo sapien
ggaagcactcggaattaaatcaaag

SEQ ID NO: 3974345 - DNA, 25 bp, Homo sapien
acaaattggctagccagtcctgagg

SEQ ID NO: 3974346 - DNA, 25 bp, Homo sapien
taaagtgtcttacttcaactcgagt

SEQ ID NO: 3974347 - DNA, 25 bp, Homo sapien
cactctcatgcacgtagttactagt

SEQ ID NO: 3974348 - DNA, 25 bp, Homo sapien
gacatagtgtagagttcggtatact

SEQ ID NO: 3974349 - DNA, 25 bp, Homo sapien
gagagaaagcaacttgggtctcact

SEQ ID NO: 3974350 - DNA, 25 bp, Homo sapien
cttagcttcttctagccatgtcaca

SEQ ID NO: 3974351 - DNA, 25 bp, Homo sapien
tagcttcttctagccatgtcacatc

SEQ ID NO: 3974352 - DNA, 25 bp, Homo sapien
ttagcttcttctagccatgtcacat

SEQ ID NO: 3974353 - DNA, 25 bp, Homo sapien
tcttcattgcttgttggactcatat

SEQ ID NO: 3974354 - DNA, 25 bp, Homo sapien
tcattgcttgttggactcatatgaa

SEQ ID NO: 3974355 - DNA, 25 bp, Homo sapien
cttcattgcttgttggactcatatg

SEQ ID NO: 3974356 - DNA, 25 bp, Homo sapien
ttcattgcttgttggactcatatga

SEQ ID NO: 3974357 - DNA, 25 bp, Homo sapien
gaaacatgtccattagatgggactg

SEQ ID NO: 3974358 - DNA, 25 bp, Homo sapien
gatgggactgcaaccaaaagacgct

SEQ ID NO: 3974359 - DNA, 25 bp, Homo sapien
aaaccttcacaaagcattagtgtcc

SEQ ID NO: 3974360 - DNA, 25 bp, Homo sapien
tacccagcacttaaaggtattagcc

SEQ ID NO: 3974361 - DNA, 25 bp, Homo sapien
tttctgaccataagaccaaactgtc

SEQ ID NO: 3974362 - DNA, 25 bp, Homo sapien
ctttctgaccataagaccaaactgt

SEQ ID NO: 3974363 - DNA, 25 bp, Homo sapien
tctgctgacactactgcaacagcct

SEQ ID NO: 3974364 - DNA, 25 bp, Homo sapien
tgtcttctgctgacactactgcaac

SEQ ID NO: 3974365 - DNA, 25 bp, Homo sapien
ctacattctgtctcctgggactggg

SEQ ID NO: 3974366 - DNA, 25 bp, Homo sapien
caaagatcacggacagcaaattcag

SEQ ID NO: 3974367 - DNA, 25 bp, Homo sapien
gggactgggcatgtacaccaaaacc

SEQ ID NO: 3974368 - DNA, 25 bp, Homo sapien
cctcgatgacaaaacagaacctaat

SEQ ID NO: 3974369 - DNA, 25 bp, Homo sapien
aacagcaatggcactgttctctgag

SEQ ID NO: 3974370 - DNA, 25 bp, Homo sapien
tcatgtgcacctcttccgattccgg

SEQ ID NO: 3974371 - DNA, 25 bp, Homo sapien
tccgattccggcattattacgtata

SEQ ID NO: 3974372 - DNA, 25 bp, Homo sapien
tattacgtatataacagcaatggca

SEQ ID NO: 3974373 - DNA, 25 bp, Homo sapien
caagattcatacttcagaaatttca

SEQ ID NO: 3974374 - DNA, 25 bp, Homo sapien
aactggaccaaatatttgaagttgg

SEQ ID NO: 3974375 - DNA, 25 bp, Homo sapien
gcatgactggaggaacctgggcata

SEQ ID NO: 3974376 - DNA, 25 bp, Homo sapien
taaaatctcagacttgaaggtagca

SEQ ID NO: 3974377 - DNA, 25 bp, Homo sapien
atcatctgctaaaaaggagggaggc

SEQ ID NO: 3974378 - DNA, 25 bp, Homo sapien
aagaatttgctacatggcattcaca

SEQ ID NO: 3974379 - DNA, 25 bp, Homo sapien
ggcattcacaactaccacagtagag

SEQ ID NO: 3974380 - DNA, 25 bp, Homo sapien
ggagggaggctcttccaccaaacat

SEQ ID NO: 3974381 - DNA, 25 bp, Homo sapien
tgtgtttaacctattcagccatatc

SEQ ID NO: 3974382 - DNA, 25 bp, Homo sapien
caggttttacctcaatcctgagaaa

SEQ ID NO: 3974383 - DNA, 25 bp, Homo sapien
cattcatcactattgactctcaggt

SEQ ID NO: 3974384 - DNA, 25 bp, Homo sapien
tttctgcctggtcttcaatgctcac

SEQ ID NO: 3974385 - DNA, 25 bp, Homo sapien
aggagttttgcagcatgccagcatt

SEQ ID NO: 3974386 - DNA, 25 bp, Homo sapien
gtcataggagttttgcagcatgcca

SEQ ID NO: 3974387 - DNA, 25 bp, Homo sapien
tgtatatgtgtcataggagttttgc

SEQ ID NO: 3974388 - DNA, 25 bp, Homo sapien
atatgtgtcataggagttttgcagc

SEQ ID NO: 3974389 - DNA, 25 bp, Homo sapien
aagtcacaagggctatcagatcccc

SEQ ID NO: 3974390 - DNA, 25 bp, Homo sapien
cagtcactctttcaaacaggctaac

SEQ ID NO: 3974391 - DNA, 25 bp, Homo sapien
cttctgtgtggagatttgagacttc

SEQ ID NO: 3974392 - DNA, 25 bp, Homo sapien
gggtcattttgtcttccgaaacaca

SEQ ID NO: 3974393 - DNA, 25 bp, Homo sapien
tctaactggtgtccgagaagatgtg

SEQ ID NO: 3974394 - DNA, 25 bp, Homo sapien
cattgaatgcgctgacgagagtcgc

SEQ ID NO: 3974395 - DNA, 25 bp, Homo sapien
aaattcactattggcatcgggcatg

SEQ ID NO: 3974396 - DNA, 25 bp, Homo sapien
gaagatgtgtttgacctatggtgcc

SEQ ID NO: 3974397 - DNA, 25 bp, Homo sapien
gagattgattgccacctgccctaaa

SEQ ID NO: 3974398 - DNA, 25 bp, Homo sapien
cacttttgggcttgctcggacagca

SEQ ID NO: 3974399 - DNA, 25 bp, Homo sapien
cagaggtggagtacttttccttgcc

SEQ ID NO: 3974400 - DNA, 25 bp, Homo sapien
caatccaggtagctcgaaagaggcc

SEQ ID NO: 3974401 - DNA, 25 bp, Homo sapien
tgtcctgtttctctgcccccgagtt

SEQ ID NO: 3974402 - DNA, 25 bp, Homo sapien
ctgtcctgtttctctgcccccgagt

SEQ ID NO: 3974403 - DNA, 25 bp, Homo sapien
cctgtcctgtttctctgcccccgag

SEQ ID NO: 3974404 - DNA, 25 bp, Homo sapien
tcctgtttctctgcccccgagttcc

SEQ ID NO: 3974405 - DNA, 25 bp, Homo sapien
ggctgatgtcaaaacgcctcgcggg

SEQ ID NO: 3974406 - DNA, 25 bp, Homo sapien
gagagcctaattccttaatcactgc

SEQ ID NO: 3974407 - DNA, 25 bp, Homo sapien
tccccgacttccctatggctgatgt

SEQ ID NO: 3974408 - DNA, 25 bp, Homo sapien
cacttaacggaaacaggcaggctca

SEQ ID NO: 3974409 - DNA, 25 bp, Homo sapien
ctaactagggcgtctttgagggcag

SEQ ID NO: 3974410 - DNA, 25 bp, Homo sapien
gctggggaccgctcgtgagaggagg

SEQ ID NO: 3974411 - DNA, 25 bp, Homo sapien
gaggtcatcaaagacccggagacgc

SEQ ID NO: 3974412 - DNA, 25 bp, Homo sapien
cgcccctaactagggcgtctttgag

SEQ ID NO: 3974413 - DNA, 25 bp, Homo sapien
gacggtcttgttacaggcaactccc

SEQ ID NO: 3974414 - DNA, 25 bp, Homo sapien
ccttccatccgagaggtacctgaga

SEQ ID NO: 3974415 - DNA, 25 bp, Homo sapien
ccaagacggtcttgttacaggcaac

SEQ ID NO: 3974416 - DNA, 25 bp, Homo sapien
ctgagcctccttccatccgagaggt

SEQ ID NO: 3974417 - DNA, 25 bp, Homo sapien
gcaggacatatcatagcagctctgg

SEQ ID NO: 3974418 - DNA, 25 bp, Homo sapien
gctctggctccgtgacctgtggttg

SEQ ID NO: 3974419 - DNA, 25 bp, Homo sapien
tagccttaacttccatggttgagag

SEQ ID NO: 3974420 - DNA, 25 bp, Homo sapien
tctgagatctgcataggatttccct

SEQ ID NO: 3974421 - DNA, 25 bp, Homo sapien
tttatttccttcgtgctctgcagac

SEQ ID NO: 3974422 - DNA, 25 bp, Homo sapien
ttcccagcctccgttcttgtcagtt

SEQ ID NO: 3974423 - DNA, 25 bp, Homo sapien
tagaaaggtctagccagtgactccc

SEQ ID NO: 3974424 - DNA, 25 bp, Homo sapien
cagattcagcatggtaaaaagtttg

SEQ ID NO: 3974425 - DNA, 25 bp, Homo sapien
gcaggtatctgaataaatttccagc

SEQ ID NO: 3974426 - DNA, 25 bp, Homo sapien
ttgcaggtatctgaataaatttcca

SEQ ID NO: 3974427 - DNA, 25 bp, Homo sapien
gtttgcaggtatctgaataaatttc

SEQ ID NO: 3974428 - DNA, 25 bp, Homo sapien
aggtatctgaataaatttccagctc

SEQ ID NO: 3974429 - DNA, 25 bp, Homo sapien
aagtgtcagtgaacctgccaagcag

SEQ ID NO: 3974430 - DNA, 25 bp, Homo sapien
cactaggccgtgtttgcttctttgg

SEQ ID NO: 3974431 - DNA, 25 bp, Homo sapien
gggaaacataagaccagagtgggta

SEQ ID NO: 3974432 - DNA, 25 bp, Homo sapien
tctgcatttgtacctggatttctaa

SEQ ID NO: 3974433 - DNA, 25 bp, Homo sapien
tcttggggaatagcaacatcctgca

SEQ ID NO: 3974434 - DNA, 25 bp, Homo sapien
gtcatcttggggaatagcaacatcc

SEQ ID NO: 3974435 - DNA, 25 bp, Homo sapien
cagagagaatcatggtcatcttggg

SEQ ID NO: 3974436 - DNA, 25 bp, Homo sapien
tgcagagagaatcatggtcatcttg

SEQ ID NO: 3974437 - DNA, 25 bp, Homo sapien
cattgcaagttgtaggtcagagctg

SEQ ID NO: 3974438 - DNA, 25 bp, Homo sapien
caagatacgcgaggatgagaggctc

SEQ ID NO: 3974439 - DNA, 25 bp, Homo sapien
gcagattgggcccagaacacactga

SEQ ID NO: 3974440 - DNA, 25 bp, Homo sapien
gatccattgtccgttgaagagtcag

SEQ ID NO: 3974441 - DNA, 25 bp, Homo sapien
tgaaaagaggtacaagttcctccat

SEQ ID NO: 3974442 - DNA, 25 bp, Homo sapien
ttgaaaagaggtacaagttcctcca

SEQ ID NO: 3974443 - DNA, 25 bp, Homo sapien
ttctgtgagtataaattgccccgta

SEQ ID NO: 3974444 - DNA, 25 bp, Homo sapien
cttctgtgagtataaattgccccgt

SEQ ID NO: 3974445 - DNA, 25 bp, Homo sapien
tatttgctggacatcagccttctgt

SEQ ID NO: 3974446 - DNA, 25 bp, Homo sapien
cagctccggcggctgtatatttgct

SEQ ID NO: 3974447 - DNA, 25 bp, Homo sapien
gggcaagtaatgacttgcgttttca

SEQ ID NO: 3974448 - DNA, 25 bp, Homo sapien
cagagacttggctgcaagatgtagc

SEQ ID NO: 3974449 - DNA, 25 bp, Homo sapien
aagatgtagccgcttgtctgtgggc

SEQ ID NO: 3974450 - DNA, 25 bp, Homo sapien
gtctgtgggcaagtaatgacttgcg

SEQ ID NO: 3974451 - DNA, 25 bp, Homo sapien
aaacaggactcctgctgtcagggag

SEQ ID NO: 3974452 - DNA, 25 bp, Homo sapien
gaaacaggactcctgctgtcaggga

SEQ ID NO: 3974453 - DNA, 25 bp, Homo sapien
tgctgaaacaactaagcgcccttaa

SEQ ID NO: 3974454 - DNA, 25 bp, Homo sapien
cccttaaaggccaacgatcatgaaa

SEQ ID NO: 3974455 - DNA, 25 bp, Homo sapien
ttaaaggccaacgatcatgaaacat

SEQ ID NO: 3974456 - DNA, 25 bp, Homo sapien
gctgaaacaactaagcgcccttaaa

SEQ ID NO: 3974457 - DNA, 25 bp, Homo sapien
caatttggctgtcctcaaactgagg

SEQ ID NO: 3974458 - DNA, 25 bp, Homo sapien
ggaccgcccctgtgggagagactgt

SEQ ID NO: 3974459 - DNA, 25 bp, Homo sapien
ctgtgtgaaggtgtgcttcttcact

SEQ ID NO: 3974460 - DNA, 25 bp, Homo sapien
aaccgggcagcctttgcggagcagt

SEQ ID NO: 3974461 - DNA, 25 bp, Homo sapien
tctcagtagatttcaggctcagctg

SEQ ID NO: 3974462 - DNA, 25 bp, Homo sapien
tctctctcagtagatttcaggctca

SEQ ID NO: 3974463 - DNA, 25 bp, Homo sapien
ggctcagctgagctctgtgttccaa

SEQ ID NO: 3974464 - DNA, 25 bp, Homo sapien
ggtggtgccatgtgaatagcttttg

SEQ ID NO: 3974465 - DNA, 25 bp, Homo sapien
ccattctctttggaaaggactccca

SEQ ID NO: 3974466 - DNA, 25 bp, Homo sapien
ctccagagcttctttgctttccagc

SEQ ID NO: 3974467 - DNA, 25 bp, Homo sapien
ccagcttctgagaagcatctccatg

SEQ ID NO: 3974468 - DNA, 25 bp, Homo sapien
ctttgctttccagcttctgagaagc

SEQ ID NO: 3974469 - DNA, 25 bp, Homo sapien
tctgagaagcatctccatgctgcat

SEQ ID NO: 3974470 - DNA, 25 bp, Homo sapien
gaccacaggctgtcccgccaggtaa

SEQ ID NO: 3974471 - DNA, 25 bp, Homo sapien
aggtttaggatgtccccctgacagt

SEQ ID NO: 3974472 - DNA, 25 bp, Homo sapien
tcccgccaggtaaaggcaccctcag

SEQ ID NO: 3974473 - DNA, 25 bp, Homo sapien
ctggaggtttaggatgtccccctga

SEQ ID NO: 3974474 - DNA, 25 bp, Homo sapien
taacccctgattcgtcacctcgagg

SEQ ID NO: 3974475 - DNA, 25 bp, Homo sapien
tcccagtcaaccctctgagtgaagg

SEQ ID NO: 3974476 - DNA, 25 bp, Homo sapien
tgaaggagcagcacttctccgtggg

SEQ ID NO: 3974477 - DNA, 25 bp, Homo sapien
tgagggtgaactgcacccccaccaa

SEQ ID NO: 3974478 - DNA, 25 bp, Homo sapien
tcctcttggaccaaaatcttgggta

SEQ ID NO: 3974479 - DNA, 25 bp, Homo sapien
gattccttagaaggtatctgaagac

SEQ ID NO: 3974480 - DNA, 25 bp, Homo sapien
ccaaaatcttgggtaaccaaggcat

SEQ ID NO: 3974481 - DNA, 25 bp, Homo sapien
tccagatagaaagattccttagaag

SEQ ID NO: 3974482 - DNA, 25 bp, Homo sapien
tctggatccctgcaatacaagatga

SEQ ID NO: 3974483 - DNA, 25 bp, Homo sapien
ccatcgtgaatgtccagttccctta

SEQ ID NO: 3974484 - DNA, 25 bp, Homo sapien
tccacataggccaaaacaccatcgt

SEQ ID NO: 3974485 - DNA, 25 bp, Homo sapien
tgggtccaagaagtttctggatccc

SEQ ID NO: 3974486 - DNA, 25 bp, Homo sapien
attagaagtagaactagcaaattcc

SEQ ID NO: 3974487 - DNA, 25 bp, Homo sapien
gccagtttagctcttgattagaagt

SEQ ID NO: 3974488 - DNA, 25 bp, Homo sapien
cttgattagaagtagaactagcaaa

SEQ ID NO: 3974489 - DNA, 25 bp, Homo sapien
ttgccagtttagctcttgattagaa

SEQ ID NO: 3974490 - DNA, 25 bp, Homo sapien
actgtgctggcggtgactgtgctta

SEQ ID NO: 3974491 - DNA, 25 bp, Homo sapien
ctgtgctggcggtgactgtgcttac

SEQ ID NO: 3974492 - DNA, 25 bp, Homo sapien
ctgggactgtgctggcggtgactgt

SEQ ID NO: 3974493 - DNA, 25 bp, Homo sapien
ggactgtgctggcggtgactgtgct

SEQ ID NO: 3974494 - DNA, 25 bp, Homo sapien
gggcctcgtccactggcctgaagct

SEQ ID NO: 3974495 - DNA, 25 bp, Homo sapien
gtgctccatgggcctcgtccactgg

SEQ ID NO: 3974496 - DNA, 25 bp, Homo sapien
gtccactggcctgaagctccccatt

SEQ ID NO: 3974497 - DNA, 25 bp, Homo sapien
tggaacccatgtgctgtgctccatg

SEQ ID NO: 3974498 - DNA, 25 bp, Homo sapien
taggaggctccgttcttccactggc

SEQ ID NO: 3974499 - DNA, 25 bp, Homo sapien
ttcctaggaggctccgttcttccac

SEQ ID NO: 3974500 - DNA, 25 bp, Homo sapien
ggctccgttcttccactggcctgaa

SEQ ID NO: 3974501 - DNA, 25 bp, Homo sapien
tccgttcttccactggcctgaagcg

SEQ ID NO: 3974502 - DNA, 25 bp, Homo sapien
gccagatttcatggtctgagtcaga

SEQ ID NO: 3974503 - DNA, 25 bp, Homo sapien
tctctctaaatccttgtaagttgtg

SEQ ID NO: 3974504 - DNA, 25 bp, Homo sapien
gtttctgtgagccagatttcatggt

SEQ ID NO: 3974505 - DNA, 25 bp, Homo sapien
tgtgagccagatttcatggtctgag

SEQ ID NO: 3974506 - DNA, 25 bp, Homo sapien
gaatggaatgggaagagatttagct

SEQ ID NO: 3974507 - DNA, 25 bp, Homo sapien
tagcttttaggaattctgtggcctt

SEQ ID NO: 3974508 - DNA, 25 bp, Homo sapien
gaatctctgccatttggacttattt

SEQ ID NO: 3974509 - DNA, 25 bp, Homo sapien
caatgacagggtagttaaagatgaa

SEQ ID NO: 3974510 - DNA, 25 bp, Homo sapien
tgacaccctcaaatcgcccatgtgg

SEQ ID NO: 3974511 - DNA, 25 bp, Homo sapien
tcaaatagcacagcctctagacagt

SEQ ID NO: 3974512 - DNA, 25 bp, Homo sapien
tagacagtgctgaggaaactccacc

SEQ ID NO: 3974513 - DNA, 25 bp, Homo sapien
tccatactggacctgagcctttctc

SEQ ID NO: 3974514 - DNA, 25 bp, Homo sapien
tgccttttcggttgctcaatttgcc

SEQ ID NO: 3974515 - DNA, 25 bp, Homo sapien
gagacacacgcaagggaagctgtga

SEQ ID NO: 3974516 - DNA, 25 bp, Homo sapien
tcaatttgcctgaaacatgtcttct

SEQ ID NO: 3974517 - DNA, 25 bp, Homo sapien
gtgcttggcatcacagagacacacg

SEQ ID NO: 3974518 - DNA, 25 bp, Homo sapien
caataggaaggaactaaggcagcat

SEQ ID NO: 3974519 - DNA, 25 bp, Homo sapien
aattgcgagctcagacacaggcagc

SEQ ID NO: 3974520 - DNA, 25 bp, Homo sapien
tctagttggatccagctgtttgtcc

SEQ ID NO: 3974521 - DNA, 25 bp, Homo sapien
ccaagagtgaagcttcgagggagct

SEQ ID NO: 3974522 - DNA, 25 bp, Homo sapien
ggaaaaggaaaccacatgctcttag

SEQ ID NO: 3974523 - DNA, 25 bp, Homo sapien
aaaaggaaaccacatgctcttagaa

SEQ ID NO: 3974524 - DNA, 25 bp, Homo sapien
acatgctcttagaaaggggcaaagc

SEQ ID NO: 3974525 - DNA, 25 bp, Homo sapien
agaggaaaaggaaaccacatgctct

SEQ ID NO: 3974526 - DNA, 25 bp, Homo sapien
ggtagagagatgctgaagacaaatg

SEQ ID NO: 3974527 - DNA, 25 bp, Homo sapien
caggtacaggatgtttgtcagatga

SEQ ID NO: 3974528 - DNA, 25 bp, Homo sapien
cacaagcagctcaggtacaggatgt

SEQ ID NO: 3974529 - DNA, 25 bp, Homo sapien
tttgtcagatgagaggtagagagat

SEQ ID NO: 3974530 - DNA, 25 bp, Homo sapien
agggaaatgcaaagagcagtgaagg

SEQ ID NO: 3974531 - DNA, 25 bp, Homo sapien
caacagagtcaacccgggaatcaat

SEQ ID NO: 3974532 - DNA, 25 bp, Homo sapien
ttcaacagagtcaacccgggaatca

SEQ ID NO: 3974533 - DNA, 25 bp, Homo sapien
agtcaacccgggaatcaatgagatg

SEQ ID NO: 3974534 - DNA, 25 bp, Homo sapien
gttcatctgaatcattcatgctttt

SEQ ID NO: 3974535 - DNA, 25 bp, Homo sapien
ctcaagtcttcgtgaaaaaagttca

SEQ ID NO: 3974536 - DNA, 25 bp, Homo sapien
ggtgttcatctgaatcattcatgct

SEQ ID NO: 3974537 - DNA, 25 bp, Homo sapien
tcaagtcttcgtgaaaaaagttcaa

SEQ ID NO: 3974538 - DNA, 25 bp, Homo sapien
caaatagggaaggtgagaattctca

SEQ ID NO: 3974539 - DNA, 25 bp, Homo sapien
tcattaatcatagctcacattgagc

SEQ ID NO: 3974540 - DNA, 25 bp, Homo sapien
gaattagttcctgcttacaacagtg

SEQ ID NO: 3974541 - DNA, 25 bp, Homo sapien
tccactaatgtaatggctcggtgaa

SEQ ID NO: 3974542 - DNA, 25 bp, Homo sapien
gcagcttgccacatctctgatacag

SEQ ID NO: 3974543 - DNA, 25 bp, Homo sapien
ggagagcagcttgccacatctctga

SEQ ID NO: 3974544 - DNA, 25 bp, Homo sapien
cttgccacatctctgatacagagca

SEQ ID NO: 3974545 - DNA, 25 bp, Homo sapien
ttatggtttgtgactgggggagagc

SEQ ID NO: 3974546 - DNA, 25 bp, Homo sapien
tccttgccaactaaagtcctggtct

SEQ ID NO: 3974547 - DNA, 25 bp, Homo sapien
ttgccaactaaagtcctggtctcac

SEQ ID NO: 3974548 - DNA, 25 bp, Homo sapien
cctccttgccaactaaagtcctggt

SEQ ID NO: 3974549 - DNA, 25 bp, Homo sapien
gctctccctccttgccaactaaagt

SEQ ID NO: 3974550 - DNA, 25 bp, Homo sapien
ttctaaagccctcttattagtggtg

SEQ ID NO: 3974551 - DNA, 25 bp, Homo sapien
ttattagtggtgatcctagaggcat

SEQ ID NO: 3974552 - DNA, 25 bp, Homo sapien
gtggtgatcctagaggcatttccat

SEQ ID NO: 3974553 - DNA, 25 bp, Homo sapien
ccttctaaagccctcttattagtgg

SEQ ID NO: 3974554 - DNA, 25 bp, Homo sapien
gatgaggaagtacaaatgccgtgcc

SEQ ID NO: 3974555 - DNA, 25 bp, Homo sapien
catgatttctggcaagtgggcactt

SEQ ID NO: 3974556 - DNA, 25 bp, Homo sapien
catcgaaatgggctcacggcttggt

SEQ ID NO: 3974557 - DNA, 25 bp, Homo sapien
gacagggccatccaccgtataagaa

SEQ ID NO: 3974558 - DNA, 25 bp, Homo sapien
cttgccaccggtcccttgctgggtg

SEQ ID NO: 3974559 - DNA, 25 bp, Homo sapien
cggctccttgccaccggtcccttgc

SEQ ID NO: 3974560 - DNA, 25 bp, Homo sapien
tccttgccaccggtcccttgctggg

SEQ ID NO: 3974561 - DNA, 25 bp, Homo sapien
tcagcggctccttgccaccggtccc

SEQ ID NO: 3974562 - DNA, 25 bp, Homo sapien
gctgatctaattgcactctgcagcc

SEQ ID NO: 3974563 - DNA, 25 bp, Homo sapien
tacgagcagtgttgtcagacgggca

SEQ ID NO: 3974564 - DNA, 25 bp, Homo sapien
taaactgagtcctcctacgagcagt

SEQ ID NO: 3974565 - DNA, 25 bp, Homo sapien
gcctgctgttcgctgatctaattgc

SEQ ID NO: 3974566 - DNA, 25 bp, Homo sapien
ctccacttcttatccgtcactgatt

SEQ ID NO: 3974567 - DNA, 25 bp, Homo sapien
cacttcttatccgtcactgatttaa

SEQ ID NO: 3974568 - DNA, 25 bp, Homo sapien
ttgctgtctccacttcttatccgtc

SEQ ID NO: 3974569 - DNA, 25 bp, Homo sapien
tgtctccacttcttatccgtcactg

SEQ ID NO: 3974570 - DNA, 25 bp, Homo sapien
gactgaacagtttggtttgcaacca

SEQ ID NO: 3974571 - DNA, 25 bp, Homo sapien
agactgaacagtttggtttgcaacc

SEQ ID NO: 3974572 - DNA, 25 bp, Homo sapien
acagtttggtttgcaaccataagga

SEQ ID NO: 3974573 - DNA, 25 bp, Homo sapien
ttggtttgcaaccataaggattaca

SEQ ID NO: 3974574 - DNA, 25 bp, Homo sapien
gaataattaaatgggttgatgttca

SEQ ID NO: 3974575 - DNA, 25 bp, Homo sapien
ggaagaataattaaatgggttgatg

SEQ ID NO: 3974576 - DNA, 25 bp, Homo sapien
attaaatgggttgatgttcagttca

SEQ ID NO: 3974577 - DNA, 25 bp, Homo sapien
tgggaagaataattaaatgggttga

SEQ ID NO: 3974578 - DNA, 25 bp, Homo sapien
taaaagcaccatctaagtgtttacc

SEQ ID NO: 3974579 - DNA, 25 bp, Homo sapien
aagtaataaaagcaccatctaagtg

SEQ ID NO: 3974580 - DNA, 25 bp, Homo sapien
cactgggggtgcaacagtcctccgt

SEQ ID NO: 3974581 - DNA, 25 bp, Homo sapien
cagtcctccgttttagaaggcctgg

SEQ ID NO: 3974582 - DNA, 25 bp, Homo sapien
tcacataagcaaccttggagccaag

SEQ ID NO: 3974583 - DNA, 25 bp, Homo sapien
tcagagccagtctcgagcacatgca

SEQ ID NO: 3974584 - DNA, 25 bp, Homo sapien
tcttgaataatcaaccggaggttca

SEQ ID NO: 3974585 - DNA, 25 bp, Homo sapien
agcaaggtcgtggaagccccaggtt

SEQ ID NO: 3974586 - DNA, 25 bp, Homo sapien
aagaatgagcctccgccctttggaa

SEQ ID NO: 3974587 - DNA, 25 bp, Homo sapien
cttggagactgaaatataatgatcc

SEQ ID NO: 3974588 - DNA, 25 bp, Homo sapien
caagagttgtcacggtcttgctaca

SEQ ID NO: 3974589 - DNA, 25 bp, Homo sapien
gatcccatttattccatcagcaaga

SEQ ID NO: 3974590 - DNA, 25 bp, Homo sapien
tcccagttaattggacacgactgag

SEQ ID NO: 3974591 - DNA, 25 bp, Homo sapien
gacagggacagcacatgctagccca

SEQ ID NO: 3974592 - DNA, 25 bp, Homo sapien
gatgtccgcatgtgccaaataccga

SEQ ID NO: 3974593 - DNA, 25 bp, Homo sapien
ttctggctgagagagtctacggtca

SEQ ID NO: 3974594 - DNA, 25 bp, Homo sapien
gaagagagtgtcagctctgcatcct

SEQ ID NO: 3974595 - DNA, 25 bp, Homo sapien
tccatagtaaggaagggcgagccta

SEQ ID NO: 3974596 - DNA, 25 bp, Homo sapien
attagagtgttagcctgggaagaga

SEQ ID NO: 3974597 - DNA, 25 bp, Homo sapien
gaagagctggcgtaaatgtggaatt

SEQ ID NO: 3974598 - DNA, 25 bp, Homo sapien
gaatagctctctggtctagaagaag

SEQ ID NO: 3974599 - DNA, 25 bp, Homo sapien
caaaagcctctttatgtactgttgc

SEQ ID NO: 3974600 - DNA, 25 bp, Homo sapien
ctagaagaagcaaggtagcatcaac

SEQ ID NO: 3974601 - DNA, 25 bp, Homo sapien
gcatttgtgagtccatccagcaaca

SEQ ID NO: 3974602 - DNA, 25 bp, Homo sapien
tgtttctgtcactaaattgggcata

SEQ ID NO: 3974603 - DNA, 25 bp, Homo sapien
aaattagaggagttacccctgtcat

SEQ ID NO: 3974604 - DNA, 25 bp, Homo sapien
tggaaccaaactccaaatcagaatt

SEQ ID NO: 3974605 - DNA, 25 bp, Homo sapien
gaggtcaaacattgaatactacttg

SEQ ID NO: 3974606 - DNA, 25 bp, Homo sapien
ttaaatctatgctgcccggagagag

SEQ ID NO: 3974607 - DNA, 25 bp, Homo sapien
cagcctcgagcttagagaaattcca

SEQ ID NO: 3974608 - DNA, 25 bp, Homo sapien
gatgccgagcgtctccattcaagct

SEQ ID NO: 3974609 - DNA, 25 bp, Homo sapien
cccctggttaggaaaagcatccgat

SEQ ID NO: 3974610 - DNA, 25 bp, Homo sapien
cccagtggggttctgaggtgtccca

SEQ ID NO: 3974611 - DNA, 25 bp, Homo sapien
gctttataaaccagacactcatgtg

SEQ ID NO: 3974612 - DNA, 25 bp, Homo sapien
tgtgttcactgccacccacaggtat

SEQ ID NO: 3974613 - DNA, 25 bp, Homo sapien
cagagagatgcccaagtgtgcatcc

SEQ ID NO: 3974614 - DNA, 25 bp, Homo sapien
gcaggtactacttgaccgacttgag

SEQ ID NO: 3974615 - DNA, 25 bp, Homo sapien
tactacttgaccgacttgagcaggg

SEQ ID NO: 3974616 - DNA, 25 bp, Homo sapien
ggtactacttgaccgacttgagcag

SEQ ID NO: 3974617 - DNA, 25 bp, Homo sapien
acacagcaggtactacttgaccgac

SEQ ID NO: 3974618 - DNA, 25 bp, Homo sapien
caatggcaaatctgtcacgtacctc

SEQ ID NO: 3974619 - DNA, 25 bp, Homo sapien
ctgtcacgtacctctttatttctct

SEQ ID NO: 3974620 - DNA, 25 bp, Homo sapien
gcaaagagttgctcaatggcaaatc

SEQ ID NO: 3974621 - DNA, 25 bp, Homo sapien
gagttgctcaatggcaaatctgtca

SEQ ID NO: 3974622 - DNA, 25 bp, Homo sapien
aacccattccatgtagtgtcccagg

SEQ ID NO: 3974623 - DNA, 25 bp, Homo sapien
acagccttggcatcggcccagggag

SEQ ID NO: 3974624 - DNA, 25 bp, Homo sapien
gaagtgcatccaagagctttgaggc

SEQ ID NO: 3974625 - DNA, 25 bp, Homo sapien
ggtgggcagactcttgacccagaaa

SEQ ID NO: 3974626 - DNA, 25 bp, Homo sapien
tgcaccatgctgtactttctggggt

SEQ ID NO: 3974627 - DNA, 25 bp, Homo sapien
gatcagactagtgagtagaaccagt

SEQ ID NO: 3974628 - DNA, 25 bp, Homo sapien
tgagccagacaggaaatccactggt

SEQ ID NO: 3974629 - DNA, 25 bp, Homo sapien
gcatggtacatgacaggctagcagt

SEQ ID NO: 3974630 - DNA, 25 bp, Homo sapien
gttatctgcgtattccatcctctgg

SEQ ID NO: 3974631 - DNA, 25 bp, Homo sapien
caggtcgtagcagaggacagacatt

SEQ ID NO: 3974632 - DNA, 25 bp, Homo sapien
tctttgccgatagagaaacttgctt

SEQ ID NO: 3974633 - DNA, 25 bp, Homo sapien
caggacaagatctagcttggagcag

SEQ ID NO: 3974634 - DNA, 25 bp, Homo sapien
tacagagattattgttacgtccaca

SEQ ID NO: 3974635 - DNA, 25 bp, Homo sapien
tgataagccactgtagctgactgcc

SEQ ID NO: 3974636 - DNA, 25 bp, Homo sapien
gaaattcagcaacctgtacagtaag

SEQ ID NO: 3974637 - DNA, 25 bp, Homo sapien
tagcccgcctgaaaatggagttgtt

SEQ ID NO: 3974638 - DNA, 25 bp, Homo sapien
tgagcaagtatggatcagtcactaa

SEQ ID NO: 3974639 - DNA, 25 bp, Homo sapien
ccaatgtggcaggaagctactctga

SEQ ID NO: 3974640 - DNA, 25 bp, Homo sapien
gcttccttgagaaacctggtccgga

SEQ ID NO: 3974641 - DNA, 25 bp, Homo sapien
tgcagctattcagcgagaggcagcc

SEQ ID NO: 3974642 - DNA, 25 bp, Homo sapien
tgagatctgacataacatcggcttg

SEQ ID NO: 3974643 - DNA, 25 bp, Homo sapien
tactgatctaactcaggcattctgg

SEQ ID NO: 3974644 - DNA, 25 bp, Homo sapien
tgcacatattgaagttttaggaacc

SEQ ID NO: 3974645 - DNA, 25 bp, Homo sapien
cattctggtggtagtaaatgcacat

SEQ ID NO: 3974646 - DNA, 25 bp, Homo sapien
gaaccaaagttattactgatccaaa

SEQ ID NO: 3974647 - DNA, 25 bp, Homo sapien
tctgctacacataacgttttagagc

SEQ ID NO: 3974648 - DNA, 25 bp, Homo sapien
cctttgagcagcatgcgtactcaag

SEQ ID NO: 3974649 - DNA, 25 bp, Homo sapien
tggagtggacaaatgactacatcct

SEQ ID NO: 3974650 - DNA, 25 bp, Homo sapien
tgctctcaaatgacatgtcagcagg

SEQ ID NO: 3974651 - DNA, 25 bp, Homo sapien
tcccatctacatgagaaccccgagg

SEQ ID NO: 3974652 - DNA, 25 bp, Homo sapien
tggacaggatcccaagtcagaccct

SEQ ID NO: 3974653 - DNA, 25 bp, Homo sapien
gagcaggctgaagaagggcttcctt

SEQ ID NO: 3974654 - DNA, 25 bp, Homo sapien
gaaatgcctgccttccgcgtagtta

SEQ ID NO: 3974655 - DNA, 25 bp, Homo sapien
gcagtttgaaatgaatattgtaggt

SEQ ID NO: 3974656 - DNA, 25 bp, Homo sapien
tcaacccagagaaagtttatatcag

SEQ ID NO: 3974657 - DNA, 25 bp, Homo sapien
caacgacagaagaggtgaactgaca

SEQ ID NO: 3974658 - DNA, 25 bp, Homo sapien
tatatcagacaggtaggaaacctct

SEQ ID NO: 3974659 - DNA, 25 bp, Homo sapien
ccaacatttggtctggatactgaat

SEQ ID NO: 3974660 - DNA, 25 bp, Homo sapien
gagcccctttcctgtcagaaccagg

SEQ ID NO: 3974661 - DNA, 25 bp, Homo sapien
gaggtgccgacacacctggtcttgt

SEQ ID NO: 3974662 - DNA, 25 bp, Homo sapien
taatttaaagaatgacatggctgag

SEQ ID NO: 3974663 - DNA, 25 bp, Homo sapien
tgaaaacgatttcccatgttaccaa

SEQ ID NO: 3974664 - DNA, 25 bp, Homo sapien
cagttccagtaaacgtgtagttaca

SEQ ID NO: 3974665 - DNA, 25 bp, Homo sapien
gaaagtacgagaagctcactggctg

SEQ ID NO: 3974666 - DNA, 25 bp, Homo sapien
cgccaaaagtgattttataccaagg

SEQ ID NO: 3974667 - DNA, 25 bp, Homo sapien
taatccattataaacaactgtcagt

SEQ ID NO: 3974668 - DNA, 25 bp, Homo sapien
tctgacatattaacataggcaggaa

SEQ ID NO: 3974669 - DNA, 25 bp, Homo sapien
acatgtatcccatgttgcttttggt

SEQ ID NO: 3974670 - DNA, 25 bp, Homo sapien
gaacatacaaatctcaatttatttc

SEQ ID NO: 3974671 - DNA, 25 bp, Homo sapien
aacattaaacaggatgaagaaatgc

SEQ ID NO: 3974672 - DNA, 25 bp, Homo sapien
tttttcacatactccaatgattaca

SEQ ID NO: 3974673 - DNA, 25 bp, Homo sapien
taaacaggatgaagaaatgcctcta

SEQ ID NO: 3974674 - DNA, 25 bp, Homo sapien
ttcttcttttttcgggcagcctgtg

SEQ ID NO: 3974675 - DNA, 25 bp, Homo sapien
ttttacaaagttgtggcaggcaact

SEQ ID NO: 3974676 - DNA, 25 bp, Homo sapien
ttacaaagttgtggcaggcaactgc

SEQ ID NO: 3974677 - DNA, 25 bp, Homo sapien
tcgggcagcctgtgaattttcaacc

SEQ ID NO: 3974678 - DNA, 25 bp, Homo sapien
ggtaagaaagccatgtctagaaatt

SEQ ID NO: 3974679 - DNA, 25 bp, Homo sapien
gtaagaaagccatgtctagaaatta

SEQ ID NO: 3974680 - DNA, 25 bp, Homo sapien
attgagaacttgtgggtaagaaagc

SEQ ID NO: 3974681 - DNA, 25 bp, Homo sapien
ttgagaacttgtgggtaagaaagcc

SEQ ID NO: 3974682 - DNA, 25 bp, Homo sapien
ggaatttacccctgataaggctgca

SEQ ID NO: 3974683 - DNA, 25 bp, Homo sapien
tgcagtaggctgaacaggaatttac

SEQ ID NO: 3974684 - DNA, 25 bp, Homo sapien
ggctagaattacagcaactcagtat

SEQ ID NO: 3974685 - DNA, 25 bp, Homo sapien
gacagagacatcaagtttctttgct

SEQ ID NO: 3974686 - DNA, 25 bp, Homo sapien
aaatgcactctgtatgatcggtaac

SEQ ID NO: 3974687 - DNA, 25 bp, Homo sapien
ctgtatgatcggtaacagcttttaa

SEQ ID NO: 3974688 - DNA, 25 bp, Homo sapien
cataaatgcactctgtatgatcggt

SEQ ID NO: 3974689 - DNA, 25 bp, Homo sapien
cactctgtatgatcggtaacagctt

SEQ ID NO: 3974690 - DNA, 25 bp, Homo sapien
agcaagcatctccaggataagcatt

SEQ ID NO: 3974691 - DNA, 25 bp, Homo sapien
caagagtacccattaagaacccaga

SEQ ID NO: 3974692 - DNA, 25 bp, Homo sapien
ccaatgcggacagctcaagagtacc

SEQ ID NO: 3974693 - DNA, 25 bp, Homo sapien
gaccacagtacttaagtgtcccctg

SEQ ID NO: 3974694 - DNA, 25 bp, Homo sapien
gagcacacgtgtaaggaaagaagca

SEQ ID NO: 3974695 - DNA, 25 bp, Homo sapien
taaagcctaagttctagggatctgc

SEQ ID NO: 3974696 - DNA, 25 bp, Homo sapien
caatagtaaggcatggcaggaggtt

SEQ ID NO: 3974697 - DNA, 25 bp, Homo sapien
caaggtttggcacgcttgacatgtc

SEQ ID NO: 3974698 - DNA, 25 bp, Homo sapien
cagcggcagcttatttcatggatca

SEQ ID NO: 3974699 - DNA, 25 bp, Homo sapien
gaacgggtgacagctcctcattttg

SEQ ID NO: 3974700 - DNA, 25 bp, Homo sapien
tgagattctgggagccgaacatggt

SEQ ID NO: 3974701 - DNA, 25 bp, Homo sapien
caagcaagttacctaggagacgaaa

SEQ ID NO: 3974702 - DNA, 25 bp, Homo sapien
tccagacacaataacactccaggta

SEQ ID NO: 3974703 - DNA, 25 bp, Homo sapien
gaaaagtcctgaatactagagcaag

SEQ ID NO: 3974704 - DNA, 25 bp, Homo sapien
gaatgcctttagatgttctccacaa

SEQ ID NO: 3974705 - DNA, 25 bp, Homo sapien
gagcaagtgctacagcatccacagc

SEQ ID NO: 3974706 - DNA, 25 bp, Homo sapien
gccccattggtttcataggtttata

SEQ ID NO: 3974707 - DNA, 25 bp, Homo sapien
tcatttttctcaatactgatgctgc

SEQ ID NO: 3974708 - DNA, 25 bp, Homo sapien
tcacttattatggttggaaaaggct

SEQ ID NO: 3974709 - DNA, 25 bp, Homo sapien
aaggctttatcagcaggtcccagtc

SEQ ID NO: 3974710 - DNA, 25 bp, Homo sapien
tccaaaaggacacctatcatgcaca

SEQ ID NO: 3974711 - DNA, 25 bp, Homo sapien
tccatggttattggtaccaaggaga

SEQ ID NO: 3974712 - DNA, 25 bp, Homo sapien
gacacctatcatgcacatatacatt

SEQ ID NO: 3974713 - DNA, 25 bp, Homo sapien
catttaattcataaagggcttctgc

SEQ ID NO: 3974714 - DNA, 25 bp, Homo sapien
gaaacacacaacattactcccatga

SEQ ID NO: 3974715 - DNA, 25 bp, Homo sapien
gggacaaagagacagcacgagtctc

SEQ ID NO: 3974716 - DNA, 25 bp, Homo sapien
ttaatcgaagtaacaccatcaggaa

SEQ ID NO: 3974717 - DNA, 25 bp, Homo sapien
gacagcacgagtctctggatcgctg

SEQ ID NO: 3974718 - DNA, 25 bp, Homo sapien
tcttgtggccttctgtacttggcaa

SEQ ID NO: 3974719 - DNA, 25 bp, Homo sapien
tacttggcaaaagaatacccaatat

SEQ ID NO: 3974720 - DNA, 25 bp, Homo sapien
cacctccaggagtataattcagaat

SEQ ID NO: 3974721 - DNA, 25 bp, Homo sapien
gaatacccaatatatctattagttt

SEQ ID NO: 3974722 - DNA, 25 bp, Homo sapien
tggtctatcctcttttcaaggcctg

SEQ ID NO: 3974723 - DNA, 25 bp, Homo sapien
ggttgctgagttcctcagccttctc

SEQ ID NO: 3974724 - DNA, 25 bp, Homo sapien
ggtctatcctcttttcaaggcctga

SEQ ID NO: 3974725 - DNA, 25 bp, Homo sapien
ctcgagtagctagctggttgctgag

SEQ ID NO: 3974726 - DNA, 25 bp, Homo sapien
caaacatttgctagccaagaccatg

SEQ ID NO: 3974727 - DNA, 25 bp, Homo sapien
tttgctagccaagaccatgtcacag

SEQ ID NO: 3974728 - DNA, 25 bp, Homo sapien
ctagccaagaccatgtcacagaatt

SEQ ID NO: 3974729 - DNA, 25 bp, Homo sapien
catttgctagccaagaccatgtcac

SEQ ID NO: 3974730 - DNA, 25 bp, Homo sapien
tgagtaagctctttccactgggttt

SEQ ID NO: 3974731 - DNA, 25 bp, Homo sapien
ttaacaggcgggtcaaatctatcat

SEQ ID NO: 3974732 - DNA, 25 bp, Homo sapien
ctgggtttcatttgaggacggttca

SEQ ID NO: 3974733 - DNA, 25 bp, Homo sapien
cttttaacaggcgggtcaaatctat

SEQ ID NO: 3974734 - DNA, 25 bp, Homo sapien
ctatcagaaacaattagttcaacaa

SEQ ID NO: 3974735 - DNA, 25 bp, Homo sapien
ctacaatggcctaaaatagataact

SEQ ID NO: 3974736 - DNA, 25 bp, Homo sapien
ttagttcaacaatttctacaatggc

SEQ ID NO: 3974737 - DNA, 25 bp, Homo sapien
tactagttcatatgtttgattacta

SEQ ID NO: 3974738 - DNA, 25 bp, Homo sapien
tatgtaattctttttcattcttcaa

SEQ ID NO: 3974739 - DNA, 25 bp, Homo sapien
ctatgtaattctttttcattcttca

SEQ ID NO: 3974740 - DNA, 25 bp, Homo sapien
atgtaattctttttcattcttcaat

SEQ ID NO: 3974741 - DNA, 25 bp, Homo sapien
tgtaattctttttcattcttcaatt

SEQ ID NO: 3974742 - DNA, 25 bp, Homo sapien
gcacgacgaacaacctgagttaaaa

SEQ ID NO: 3974743 - DNA, 25 bp, Homo sapien
ctgaaaagaattcacaaagtgtcaa

SEQ ID NO: 3974744 - DNA, 25 bp, Homo sapien
agtgtcaatacctaacttcagtaat

SEQ ID NO: 3974745 - DNA, 25 bp, Homo sapien
tggttaaactcagtcacaacttagc

SEQ ID NO: 3974746 - DNA, 25 bp, Homo sapien
ttttccctctgaatcttgaggttgt

SEQ ID NO: 3974747 - DNA, 25 bp, Homo sapien
tctgttcagaatgttttttatgcaa

SEQ ID NO: 3974748 - DNA, 25 bp, Homo sapien
gaatcttgaggttgtgcttttctgt

SEQ ID NO: 3974749 - DNA, 25 bp, Homo sapien
ccctctgaatcttgaggttgtgctt

SEQ ID NO: 3974750 - DNA, 25 bp, Homo sapien
ttccgagtttgactcagcgtcactt

SEQ ID NO: 3974751 - DNA, 25 bp, Homo sapien
tcttccgagtttgactcagcgtcac

SEQ ID NO: 3974752 - DNA, 25 bp, Homo sapien
atcttccgagtttgactcagcgtca

SEQ ID NO: 3974753 - DNA, 25 bp, Homo sapien
catcttccgagtttgactcagcgtc

SEQ ID NO: 3974754 - DNA, 25 bp, Homo sapien
tggctctctgaaatatcctcaccaa

SEQ ID NO: 3974755 - DNA, 25 bp, Homo sapien
tgtggtgcactcacttagcaactga

SEQ ID NO: 3974756 - DNA, 25 bp, Homo sapien
taaagttgggacagcagtactcttg

SEQ ID NO: 3974757 - DNA, 25 bp, Homo sapien
gaagttatataagctccaggcccca

SEQ ID NO: 3974758 - DNA, 25 bp, Homo sapien
gatctatccctaaacctgtctgtgg

SEQ ID NO: 3974759 - DNA, 25 bp, Homo sapien
gaaggaagcagtaataagttccagt

SEQ ID NO: 3974760 - DNA, 25 bp, Homo sapien
tgtgccagacactcttcaagaccct

SEQ ID NO: 3974761 - DNA, 25 bp, Homo sapien
aatgacagctatacacatagcaagt

SEQ ID NO: 3974762 - DNA, 25 bp, Homo sapien
aatccctagcctcacgaaatgacag

SEQ ID NO: 3974763 - DNA, 25 bp, Homo sapien
gatttcttagcatcactggagtcta

SEQ ID NO: 3974764 - DNA, 25 bp, Homo sapien
aagtattccttgacctggactttag

SEQ ID NO: 3974765 - DNA, 25 bp, Homo sapien
agtattccttgacctggactttaga

SEQ ID NO: 3974766 - DNA, 25 bp, Homo sapien
aaaaccgttctagattgtgcactgg

SEQ ID NO: 3974767 - DNA, 25 bp, Homo sapien
tcagttgccccgaagaaggcatgct

SEQ ID NO: 3974768 - DNA, 25 bp, Homo sapien
tggagttgcccgtgtaagcagcagc

SEQ ID NO: 3974769 - DNA, 25 bp, Homo sapien
cataattaggagaaagccactgcat

SEQ ID NO: 3974770 - DNA, 25 bp, Homo sapien
tagttacaacaggaaacactagaac

SEQ ID NO: 3974771 - DNA, 25 bp, Homo sapien
ggaattactatctatatcagcccct

SEQ ID NO: 3974772 - DNA, 25 bp, Homo sapien
tctacctagcaactcagccaagagg

SEQ ID NO: 3974773 - DNA, 25 bp, Homo sapien
cagtatccagtagataaggtttctc

SEQ ID NO: 3974774 - DNA, 25 bp, Homo sapien
gacagctgcttataatcaaaaccca

SEQ ID NO: 3974775 - DNA, 25 bp, Homo sapien
tacagatgggataactgacttgcct

SEQ ID NO: 3974776 - DNA, 25 bp, Homo sapien
gcagctcgatgggtaaatgttttcc

SEQ ID NO: 3974777 - DNA, 25 bp, Homo sapien
tacaggcctgagagcgaatccagaa

SEQ ID NO: 3974778 - DNA, 25 bp, Homo sapien
ttaaagagagtgttcgtttacttga

SEQ ID NO: 3974779 - DNA, 25 bp, Homo sapien
attaaagagagtgttcgtttacttg

SEQ ID NO: 3974780 - DNA, 25 bp, Homo sapien
tgcatggaaagacaataaaccaagt

SEQ ID NO: 3974781 - DNA, 25 bp, Homo sapien
ctgcatggaaagacaataaaccaag

SEQ ID NO: 3974782 - DNA, 25 bp, Homo sapien
agtcgattccgctgtgagaatactt

SEQ ID NO: 3974783 - DNA, 25 bp, Homo sapien
gtcgattccgctgtgagaatactta

SEQ ID NO: 3974784 - DNA, 25 bp, Homo sapien
tctgcaggctttctggcggcaatgc

SEQ ID NO: 3974785 - DNA, 25 bp, Homo sapien
tccaagattgcaagaggatgggtct

SEQ ID NO: 3974786 - DNA, 25 bp, Homo sapien
tgcttggctgcacaacccggaattc

SEQ ID NO: 3974787 - DNA, 25 bp, Homo sapien
aactaagcgctgcacattccggcga

SEQ ID NO: 3974788 - DNA, 25 bp, Homo sapien
atacagcaactgtaaacgtgagcct

SEQ ID NO: 3974789 - DNA, 25 bp, Homo sapien
cggaatacagcaactgtaaacgtga

SEQ ID NO: 3974790 - DNA, 25 bp, Homo sapien
ttccggaatacagcaactgtaaacg

SEQ ID NO: 3974791 - DNA, 25 bp, Homo sapien
ctgttttccggaatacagcaactgt

SEQ ID NO: 3974792 - DNA, 25 bp, Homo sapien
cctctcactttgacctgggtgggac

SEQ ID NO: 3974793 - DNA, 25 bp, Homo sapien
ctcactttgacctgggtgggacgga

SEQ ID NO: 3974794 - DNA, 25 bp, Homo sapien
aatcccctctcactttgacctgggt

SEQ ID NO: 3974795 - DNA, 25 bp, Homo sapien
tcccctctcactttgacctgggtgg

SEQ ID NO: 3974796 - DNA, 25 bp, Homo sapien
ggaggctcggccgaggagctatgag

SEQ ID NO: 3974797 - DNA, 25 bp, Homo sapien
cagactcatcatgccggagcccgaa

SEQ ID NO: 3974798 - DNA, 25 bp, Homo sapien
accaaccctccataagccgtactca

SEQ ID NO: 3974799 - DNA, 25 bp, Homo sapien
gacgcccctttcgaggaaggctgag

SEQ ID NO: 3974800 - DNA, 25 bp, Homo sapien
ccagcagccatcttaggaccccgtc

SEQ ID NO: 3974801 - DNA, 25 bp, Homo sapien
tgtcaggaagtggtcgcccagcagc

SEQ ID NO: 3974802 - DNA, 25 bp, Homo sapien
agccatcttaggaccccgtcaacat

SEQ ID NO: 3974803 - DNA, 25 bp, Homo sapien
ccccgtcaacatcgcgccttctcat

SEQ ID NO: 3974804 - DNA, 25 bp, Homo sapien
tcatagtaaaacctgaatcagcaag

SEQ ID NO: 3974805 - DNA, 25 bp, Homo sapien
tataaccccagaatcatagtaaaac

SEQ ID NO: 3974806 - DNA, 25 bp, Homo sapien
gaatcagcaagtttggatcgccgag

SEQ ID NO: 3974807 - DNA, 25 bp, Homo sapien
gtttggatcgccgaggtccctcttc

SEQ ID NO: 3974808 - DNA, 25 bp, Homo sapien
gtgaacaacccgaagtactgaaatg

SEQ ID NO: 3974809 - DNA, 25 bp, Homo sapien
tgttctcagcatgaattaagtaatt

SEQ ID NO: 3974810 - DNA, 25 bp, Homo sapien
tgaaatgttctcagcatgaattaag

SEQ ID NO: 3974811 - DNA, 25 bp, Homo sapien
aacccgaagtactgaaatgttctca

SEQ ID NO: 3974812 - DNA, 25 bp, Homo sapien
gggagcctgagctcaactcacttga

SEQ ID NO: 3974813 - DNA, 25 bp, Homo sapien
tcaagaccatggtgagctgcaatca

SEQ ID NO: 3974814 - DNA, 25 bp, Homo sapien
taaaaattaacccagtgtgcaccag

SEQ ID NO: 3974815 - DNA, 25 bp, Homo sapien
gactagtagtgattacaattgcagc

SEQ ID NO: 3974816 - DNA, 25 bp, Homo sapien
agcagcacagcgctcttgtcttccc

SEQ ID NO: 3974817 - DNA, 25 bp, Homo sapien
tccagctatcactttgcactgtcat

SEQ ID NO: 3974818 - DNA, 25 bp, Homo sapien
tttttccagctatcactttgcactg

SEQ ID NO: 3974819 - DNA, 25 bp, Homo sapien
cagcacagcgctcttgtcttcccag

SEQ ID NO: 3974820 - DNA, 25 bp, Homo sapien
tcaaacccatgaacattgggtgtgc

SEQ ID NO: 3974821 - DNA, 25 bp, Homo sapien
atcttttagatgctatcgtaaatgg

SEQ ID NO: 3974822 - DNA, 25 bp, Homo sapien
tttttattgtacaagtcattcatct

SEQ ID NO: 3974823 - DNA, 25 bp, Homo sapien
gaacattgggtgtgctttcatttat

SEQ ID NO: 3974824 - DNA, 25 bp, Homo sapien
tttgctgccgagaggttgtaaacaa

SEQ ID NO: 3974825 - DNA, 25 bp, Homo sapien
caaagctggacaaggcctggagtca

SEQ ID NO: 3974826 - DNA, 25 bp, Homo sapien
cacagtgatcttcatttgcagagga

SEQ ID NO: 3974827 - DNA, 25 bp, Homo sapien
tgtaaacaaatcagggacccacagg

SEQ ID NO: 3974828 - DNA, 25 bp, Homo sapien
atcactgatgcagcagaccaaagag

SEQ ID NO: 3974829 - DNA, 25 bp, Homo sapien
tgatgcagcagaccaaagagcaatg

SEQ ID NO: 3974830 - DNA, 25 bp, Homo sapien
agcaccatcactgatgcagcagacc

SEQ ID NO: 3974831 - DNA, 25 bp, Homo sapien
cagaccaaagagcaatgcttgtttg

SEQ ID NO: 3974832 - DNA, 25 bp, Homo sapien
aacctggctgatagccagagacatc

SEQ ID NO: 3974833 - DNA, 25 bp, Homo sapien
aaacctggctgatagccagagacat

SEQ ID NO: 3974834 - DNA, 25 bp, Homo sapien
ctaaacctggctgatagccagagac

SEQ ID NO: 3974835 - DNA, 25 bp, Homo sapien
taaacctggctgatagccagagaca

SEQ ID NO: 3974836 - DNA, 25 bp, Homo sapien
gagcagcagggccattccacaacac

SEQ ID NO: 3974837 - DNA, 25 bp, Homo sapien
tccacaacacgagaagtgagaagca

SEQ ID NO: 3974838 - DNA, 25 bp, Homo sapien
gccattccacaacacgagaagtgag

SEQ ID NO: 3974839 - DNA, 25 bp, Homo sapien
agcagggccattccacaacacgaga

SEQ ID NO: 3974840 - DNA, 25 bp, Homo sapien
ttgaatagcaaagtctgtcaactgc

SEQ ID NO: 3974841 - DNA, 25 bp, Homo sapien
tgaatagcaaagtctgtcaactgca

SEQ ID NO: 3974842 - DNA, 25 bp, Homo sapien
atagcaaagtctgtcaactgcagaa

SEQ ID NO: 3974843 - DNA, 25 bp, Homo sapien
gaatagcaaagtctgtcaactgcag

SEQ ID NO: 3974844 - DNA, 25 bp, Homo sapien
gcgaaggcctcgctgacagatggct

SEQ ID NO: 3974845 - DNA, 25 bp, Homo sapien
ggaggagcgaaggcctcgctgacag

SEQ ID NO: 3974846 - DNA, 25 bp, Homo sapien
gaaggcctcgctgacagatggctgc

SEQ ID NO: 3974847 - DNA, 25 bp, Homo sapien
tcaacacgcctgttgcctggaggag

SEQ ID NO: 3974848 - DNA, 25 bp, Homo sapien
ggtgggggcacgggaacaagcgcag

SEQ ID NO: 3974849 - DNA, 25 bp, Homo sapien
gtggtgggggcacgggaacaagcgc

SEQ ID NO: 3974850 - DNA, 25 bp, Homo sapien
ctggtggtgggggcacgggaacaag

SEQ ID NO: 3974851 - DNA, 25 bp, Homo sapien
tgggggcacgggaacaagcgcaggg

SEQ ID NO: 3974852 - DNA, 25 bp, Homo sapien
atgtgagggtgagaactataccggg

SEQ ID NO: 3974853 - DNA, 25 bp, Homo sapien
catggtgtgtcggagccccagatgt

SEQ ID NO: 3974854 - DNA, 25 bp, Homo sapien
tataccggggaagcagcgtcttcat

SEQ ID NO: 3974855 - DNA, 25 bp, Homo sapien
tgagcctctcactggggcacatggt

SEQ ID NO: 3974856 - DNA, 25 bp, Homo sapien
gaggtgttcgggactttatctgagc

SEQ ID NO: 3974857 - DNA, 25 bp, Homo sapien
tcaccttcagttgaatctgatactt

SEQ ID NO: 3974858 - DNA, 25 bp, Homo sapien
tacttttgaatagactgtgaggtgt

SEQ ID NO: 3974859 - DNA, 25 bp, Homo sapien
aatagactgtgaggtgttcgggact

SEQ ID NO: 3974860 - DNA, 25 bp, Homo sapien
cttgcacagcatcctcagccggtgg

SEQ ID NO: 3974861 - DNA, 25 bp, Homo sapien
tcctcagccggtggctttgaagtct

SEQ ID NO: 3974862 - DNA, 25 bp, Homo sapien
tcttcctgtgctaacaccctggcgg

SEQ ID NO: 3974863 - DNA, 25 bp, Homo sapien
gaagtctccagagttgcctaagagc

SEQ ID NO: 3974864 - DNA, 25 bp, Homo sapien
agtggcccacaaacagccgaaaggt

SEQ ID NO: 3974865 - DNA, 25 bp, Homo sapien
ctggatggaccgacgtctgcttacg

SEQ ID NO: 3974866 - DNA, 25 bp, Homo sapien
ttgtcactaagccacgggaaatcat

SEQ ID NO: 3974867 - DNA, 25 bp, Homo sapien
gtctgcttacgaagtggcccacaaa

SEQ ID NO: 3974868 - DNA, 25 bp, Homo sapien
tcctggggtatgatctgacattaat

SEQ ID NO: 3974869 - DNA, 25 bp, Homo sapien
ggaagagaagctaatctataaaaca

SEQ ID NO: 3974870 - DNA, 25 bp, Homo sapien
aatctgcaattacattgtacggagg

SEQ ID NO: 3974871 - DNA, 25 bp, Homo sapien
tcattgtctcttccgcagtacagga

SEQ ID NO: 3974872 - DNA, 25 bp, Homo sapien
tatatttgcgggatttgattgcttt

SEQ ID NO: 3974873 - DNA, 25 bp, Homo sapien
tataaatcattcctttgacagagta

SEQ ID NO: 3974874 - DNA, 25 bp, Homo sapien
agccctagctggtgggcctctcttg

SEQ ID NO: 3974875 - DNA, 25 bp, Homo sapien
tgattgctttagatgatacagccct

SEQ ID NO: 3974876 - DNA, 25 bp, Homo sapien
cagaggggtagaattcagacccaca

SEQ ID NO: 3974877 - DNA, 25 bp, Homo sapien
caggcaatgtgcattgagctcttta

SEQ ID NO: 3974878 - DNA, 25 bp, Homo sapien
gcctgaatgcccatgacagccgtgg

SEQ ID NO: 3974879 - DNA, 25 bp, Homo sapien
ccatgacagccgtggatgcagatgc

SEQ ID NO: 3974880 - DNA, 25 bp, Homo sapien
cagaccatttagcataggcagtttt

SEQ ID NO: 3974881 - DNA, 25 bp, Homo sapien
agaccatttagcataggcagttttt

SEQ ID NO: 3974882 - DNA, 25 bp, Homo sapien
gaccatttagcataggcagtttttc

SEQ ID NO: 3974883 - DNA, 25 bp, Homo sapien
atacagctgaaacctgcccatgtta

SEQ ID NO: 3974884 - DNA, 25 bp, Homo sapien
tgaaacctgcccatgttaaatgtgc

SEQ ID NO: 3974885 - DNA, 25 bp, Homo sapien
catgagaagtagttccactgaatgg

SEQ ID NO: 3974886 - DNA, 25 bp, Homo sapien
ctgaatggggtttctagaatcttca

SEQ ID NO: 3974887 - DNA, 25 bp, Homo sapien
ctgaggtcccacacgatgaaaggac

SEQ ID NO: 3974888 - DNA, 25 bp, Homo sapien
ggtcccacacgatgaaaggacagac

SEQ ID NO: 3974889 - DNA, 25 bp, Homo sapien
cccacacgatgaaaggacagacagg

SEQ ID NO: 3974890 - DNA, 25 bp, Homo sapien
gaggtcccacacgatgaaaggacag

SEQ ID NO: 3974891 - DNA, 25 bp, Homo sapien
ggtgtgcggagaaggttcatggagg

SEQ ID NO: 3974892 - DNA, 25 bp, Homo sapien
gcctttctgtggactggggtgtgcg

SEQ ID NO: 3974893 - DNA, 25 bp, Homo sapien
ctttctgtggactggggtgtgcgga

SEQ ID NO: 3974894 - DNA, 25 bp, Homo sapien
tgtgcggagaaggttcatggaggtg

SEQ ID NO: 3974895 - DNA, 25 bp, Homo sapien
cacgtcggatgtaaagcgtagggtt

SEQ ID NO: 3974896 - DNA, 25 bp, Homo sapien
cccagtgagtgataacagcaagagg

SEQ ID NO: 3974897 - DNA, 25 bp, Homo sapien
aaagtcgaaaggagggtgcaagcac

SEQ ID NO: 3974898 - DNA, 25 bp, Homo sapien
gaggtgggaatgatcatgacagcac

SEQ ID NO: 3974899 - DNA, 25 bp, Homo sapien
tcacactgcctctaaacaatcattc

SEQ ID NO: 3974900 - DNA, 25 bp, Homo sapien
cacactgcctctaaacaatcattca

SEQ ID NO: 3974901 - DNA, 25 bp, Homo sapien
acactgcctctaaacaatcattcaa

SEQ ID NO: 3974902 - DNA, 25 bp, Homo sapien
cactgcctctaaacaatcattcaat

SEQ ID NO: 3974903 - DNA, 25 bp, Homo sapien
cattcacaatgtgatgctccagacg

SEQ ID NO: 3974904 - DNA, 25 bp, Homo sapien
cctggagggccccattgggacagct

SEQ ID NO: 3974905 - DNA, 25 bp, Homo sapien
gccccattgggacagctcattcaca

SEQ ID NO: 3974906 - DNA, 25 bp, Homo sapien
tgatgctccagacgaagctggatgc

SEQ ID NO: 3974907 - DNA, 25 bp, Homo sapien
ccagaaacataaaaggtagcgaatg

SEQ ID NO: 3974908 - DNA, 25 bp, Homo sapien
aatggacccagatttctagacaggc

SEQ ID NO: 3974909 - DNA, 25 bp, Homo sapien
ggtagcgaatggacccagatttcta

SEQ ID NO: 3974910 - DNA, 25 bp, Homo sapien
acataaaaggtagcgaatggaccca

SEQ ID NO: 3974911 - DNA, 25 bp, Homo sapien
ttaggatcagtgtcaagtaaaccat

SEQ ID NO: 3974912 - DNA, 25 bp, Homo sapien
gatcagtgtcaagtaaaccattacc

SEQ ID NO: 3974913 - DNA, 25 bp, Homo sapien
ggatcagtgtcaagtaaaccattac

SEQ ID NO: 3974914 - DNA, 25 bp, Homo sapien
cagtgtcaagtaaaccattacccct

SEQ ID NO: 3974915 - DNA, 25 bp, Homo sapien
aaacaatatcaccattattcttgcc

SEQ ID NO: 3974916 - DNA, 25 bp, Homo sapien
cttgcctctgcaaacaatatcacca

SEQ ID NO: 3974917 - DNA, 25 bp, Homo sapien
caatatcaccattattcttgcctta

SEQ ID NO: 3974918 - DNA, 25 bp, Homo sapien
aatatcaccattattcttgccttac

SEQ ID NO: 3974919 - DNA, 25 bp, Homo sapien
gtaagaccctcaacatacaaagccc

SEQ ID NO: 3974920 - DNA, 25 bp, Homo sapien
ccctcaacatacaaagcccccgact

SEQ ID NO: 3974921 - DNA, 25 bp, Homo sapien
ccagtaagaccctcaacatacaaag

SEQ ID NO: 3974922 - DNA, 25 bp, Homo sapien
gaccctcaacatacaaagcccccga

SEQ ID NO: 3974923 - DNA, 25 bp, Homo sapien
agatgaagtgcggtcgttgcaaagt

SEQ ID NO: 3974924 - DNA, 25 bp, Homo sapien
tgaagtgcggtcgttgcaaagtgcc

SEQ ID NO: 3974925 - DNA, 25 bp, Homo sapien
gtgcggtcgttgcaaagtgcctgaa

SEQ ID NO: 3974926 - DNA, 25 bp, Homo sapien
tttgcagatgaagtgcggtcgttgc

SEQ ID NO: 3974927 - DNA, 25 bp, Homo sapien
ctgatttatccccatttccccaaca

SEQ ID NO: 3974928 - DNA, 25 bp, Homo sapien
gcctgatttatccccatttccccaa

SEQ ID NO: 3974929 - DNA, 25 bp, Homo sapien
tgatttatccccatttccccaacac

SEQ ID NO: 3974930 - DNA, 25 bp, Homo sapien
atgcctgatttatccccatttcccc

SEQ ID NO: 3974931 - DNA, 25 bp, Homo sapien
tcgcctgggcataggtcctggtttt

SEQ ID NO: 3974932 - DNA, 25 bp, Homo sapien
acttgcaccgttctaattcgcctgg

SEQ ID NO: 3974933 - DNA, 25 bp, Homo sapien
tcctccaaatgacccgagtaagtgg

SEQ ID NO: 3974934 - DNA, 25 bp, Homo sapien
tccaaatgacccgagtaagtggtga

SEQ ID NO: 3974935 - DNA, 25 bp, Homo sapien
tctttaccacgaagccctaatatgg

SEQ ID NO: 3974936 - DNA, 25 bp, Homo sapien
tagatgtggcgacatcttgtcttat

SEQ ID NO: 3974937 - DNA, 25 bp, Homo sapien
gatgtggcgacatcttgtcttatga

SEQ ID NO: 3974938 - DNA, 25 bp, Homo sapien
gagctctaaaatgcccggagtagat

SEQ ID NO: 3974939 - DNA, 25 bp, Homo sapien
cacaagggccttggagaagctttcg

SEQ ID NO: 3974940 - DNA, 25 bp, Homo sapien
tgccgaagacacggaaaaaggtaca

SEQ ID NO: 3974941 - DNA, 25 bp, Homo sapien
ggtacaaagaccagtaggacacaag

SEQ ID NO: 3974942 - DNA, 25 bp, Homo sapien
aaggtacaaagaccagtaggacaca

SEQ ID NO: 3974943 - DNA, 25 bp, Homo sapien
cacccactgggtcaggactgacttc

SEQ ID NO: 3974944 - DNA, 25 bp, Homo sapien
tagcggtgcaatgaattccatgcat

SEQ ID NO: 3974945 - DNA, 25 bp, Homo sapien
ccagacacggaatctctagcggtgc

SEQ ID NO: 3974946 - DNA, 25 bp, Homo sapien
cccactgggtcaggactgacttcag

SEQ ID NO: 3974947 - DNA, 25 bp, Homo sapien
tccaggacaaaacttgaatctgtca

SEQ ID NO: 3974948 - DNA, 25 bp, Homo sapien
atttcaatcactcgtgctctccctg

SEQ ID NO: 3974949 - DNA, 25 bp, Homo sapien
ctgtcatttcaatcactcgtgctct

SEQ ID NO: 3974950 - DNA, 25 bp, Homo sapien
gtcatttcaatcactcgtgctctcc

SEQ ID NO: 3974951 - DNA, 25 bp, Homo sapien
cagctcatgacctttgttatcttca

SEQ ID NO: 3974952 - DNA, 25 bp, Homo sapien
aagggcccagctcatgacctttgtt

SEQ ID NO: 3974953 - DNA, 25 bp, Homo sapien
tcatgacctttgttatcttcagatg

SEQ ID NO: 3974954 - DNA, 25 bp, Homo sapien
gcccagctcatgacctttgttatct

SEQ ID NO: 3974955 - DNA, 25 bp, Homo sapien
gtgtttgtgccacaaacgcagccgc

SEQ ID NO: 3974956 - DNA, 25 bp, Homo sapien
aacacacctatatgtcgtacatgca

SEQ ID NO: 3974957 - DNA, 25 bp, Homo sapien
gtttgtgccacaaacgcagccgctg

SEQ ID NO: 3974958 - DNA, 25 bp, Homo sapien
cgctgcacaacacacctatatgtcg

SEQ ID NO: 3974959 - DNA, 25 bp, Homo sapien
gaatgaagcattcagtaaggttacc

SEQ ID NO: 3974960 - DNA, 25 bp, Homo sapien
ctaaaatgtaactggatcctgtttc

SEQ ID NO: 3974961 - DNA, 25 bp, Homo sapien
ggatcctgtttcaaagggctccttc

SEQ ID NO: 3974962 - DNA, 25 bp, Homo sapien
ccgtctactctgtgaagtaacattt

SEQ ID NO: 3974963 - DNA, 25 bp, Homo sapien
gcctctgtgtgcaagggagccagtc

SEQ ID NO: 3974964 - DNA, 25 bp, Homo sapien
gggcctgaccccatttgcctctgtg

SEQ ID NO: 3974965 - DNA, 25 bp, Homo sapien
agggagccagtcactgcctgaccca

SEQ ID NO: 3974966 - DNA, 25 bp, Homo sapien
cacagaccaacattgctgggcctga

SEQ ID NO: 3974967 - DNA, 25 bp, Homo sapien
tggctgtgatgccattgccttaggg

SEQ ID NO: 3974968 - DNA, 25 bp, Homo sapien
tgcaacttcatagggtatttgccct

SEQ ID NO: 3974969 - DNA, 25 bp, Homo sapien
caaacctaaattcaaagcccacaga

SEQ ID NO: 3974970 - DNA, 25 bp, Homo sapien
tatttggtccttctgggaatggctg

SEQ ID NO: 3974971 - DNA, 25 bp, Homo sapien
gggcatgctttatttccctctagct

SEQ ID NO: 3974972 - DNA, 25 bp, Homo sapien
ttatttccctctagctgaacactgc

SEQ ID NO: 3974973 - DNA, 25 bp, Homo sapien
gctttatttccctctagctgaacac

SEQ ID NO: 3974974 - DNA, 25 bp, Homo sapien
catgctttatttccctctagctgaa

SEQ ID NO: 3974975 - DNA, 25 bp, Homo sapien
tgaagtccacgtagttgccttgctt

SEQ ID NO: 3974976 - DNA, 25 bp, Homo sapien
caggcaaagccaaccttgaagtcca

SEQ ID NO: 3974977 - DNA, 25 bp, Homo sapien
ccttgaagtccacgtagttgccttg

SEQ ID NO: 3974978 - DNA, 25 bp, Homo sapien
aagtccacgtagttgccttgctttg

SEQ ID NO: 3974979 - DNA, 25 bp, Homo sapien
gactaccgtatattccctgtggagg

SEQ ID NO: 3974980 - DNA, 25 bp, Homo sapien
gaagttcaaagtgtaatgctgacta

SEQ ID NO: 3974981 - DNA, 25 bp, Homo sapien
tctgttgactaagaagaagttcaaa

SEQ ID NO: 3974982 - DNA, 25 bp, Homo sapien
ctggagagaacaattgactttctgt

SEQ ID NO: 3974983 - DNA, 25 bp, Homo sapien
ccgatgcaccatacctccggcacat

SEQ ID NO: 3974984 - DNA, 25 bp, Homo sapien
gtgtcttcccttacatcattattga

SEQ ID NO: 3974985 - DNA, 25 bp, Homo sapien
cggcacattagctgcctctctgaga

SEQ ID NO: 3974986 - DNA, 25 bp, Homo sapien
cacactttcccgatgcaccatacct

SEQ ID NO: 3974987 - DNA, 25 bp, Homo sapien
tctgacataactttaccctccattt

SEQ ID NO: 3974988 - DNA, 25 bp, Homo sapien
agttctgacataactttaccctcca

SEQ ID NO: 3974989 - DNA, 25 bp, Homo sapien
gacataactttaccctccatttcca

SEQ ID NO: 3974990 - DNA, 25 bp, Homo sapien
acaagttctgacataactttaccct

SEQ ID NO: 3974991 - DNA, 25 bp, Homo sapien
agtgaaacaaagctgaaaggctgtc

SEQ ID NO: 3974992 - DNA, 25 bp, Homo sapien
tggcatcgtggtgccaggacacact

SEQ ID NO: 3974993 - DNA, 25 bp, Homo sapien
cactgcttttcggaatctctgtgca

SEQ ID NO: 3974994 - DNA, 25 bp, Homo sapien
aggacacactgcttcgctgttcctc

SEQ ID NO: 3974995 - DNA, 25 bp, Homo sapien
cccctcctgttgtagattcagccca

SEQ ID NO: 3974996 - DNA, 25 bp, Homo sapien
ctcctgttgtagattcagcccagag

SEQ ID NO: 3974997 - DNA, 25 bp, Homo sapien
cctgttgtagattcagcccagagaa

SEQ ID NO: 3974998 - DNA, 25 bp, Homo sapien
tcctgttgtagattcagcccagaga

SEQ ID NO: 3974999 - DNA, 25 bp, Homo sapien
gcagctctaattttgctccccagtg

SEQ ID NO: 3975000 - DNA, 25 bp, Homo sapien
gccaaactccatcgcggctgactgt

SEQ ID NO: 3975001 - DNA, 25 bp, Homo sapien
gactgtactccaaggtgaccgtgtg

SEQ ID NO: 3975002 - DNA, 25 bp, Homo sapien
tggccatgtgattcagggtcggcac

SEQ ID NO: 3975003 - DNA, 25 bp, Homo sapien
tctgcgttgtggtttaaattgagaa

SEQ ID NO: 3975004 - DNA, 25 bp, Homo sapien
tggcaacgatttcaaatgtccgcat

SEQ ID NO: 3975005 - DNA, 25 bp, Homo sapien
ctggccaggtttatgatggcaacga

SEQ ID NO: 3975006 - DNA, 25 bp, Homo sapien
gcgttgtggtttaaattgagaagga

SEQ ID NO: 3975007 - DNA, 25 bp, Homo sapien
gtgggaggttcgcattccaggctgc

SEQ ID NO: 3975008 - DNA, 25 bp, Homo sapien
catctgtgggaggttcgcattccag

SEQ ID NO: 3975009 - DNA, 25 bp, Homo sapien
tctgtgggaggttcgcattccaggc

SEQ ID NO: 3975010 - DNA, 25 bp, Homo sapien
gcatctgtgggaggttcgcattcca

SEQ ID NO: 3975011 - DNA, 25 bp, Homo sapien
tggttacgttcttgccacagttgag

SEQ ID NO: 3975012 - DNA, 25 bp, Homo sapien
atggagtcccgctaggcccagtgct

SEQ ID NO: 3975013 - DNA, 25 bp, Homo sapien
ggttctccataggacaggccgtgca

SEQ ID NO: 3975014 - DNA, 25 bp, Homo sapien
gagcttgcatctgcggcctagcagg

SEQ ID NO: 3975015 - DNA, 25 bp, Homo sapien
tcattgccgggaaggtgctttgcac

SEQ ID NO: 3975016 - DNA, 25 bp, Homo sapien
taccaccctcattgccgggaaggtg

SEQ ID NO: 3975017 - DNA, 25 bp, Homo sapien
cctctaccaccctcattgccgggaa

SEQ ID NO: 3975018 - DNA, 25 bp, Homo sapien
cctcattgccgggaaggtgctttgc

SEQ ID NO: 3975019 - DNA, 25 bp, Homo sapien
tgtgacctggtgacaaagcttgcaa

SEQ ID NO: 3975020 - DNA, 25 bp, Homo sapien
tgggaaacaaaggtgctcctgacct

SEQ ID NO: 3975021 - DNA, 25 bp, Homo sapien
ttcattagaaagaggattcccgccc

SEQ ID NO: 3975022 - DNA, 25 bp, Homo sapien
tataaaccccagcatgtagagcttc

SEQ ID NO: 3975023 - DNA, 25 bp, Homo sapien
ccttccaacaaagagccgacgatga

SEQ ID NO: 3975024 - DNA, 25 bp, Homo sapien
tgagaaccagtgattcaaaccttcc

SEQ ID NO: 3975025 - DNA, 25 bp, Homo sapien
caaatcaactagactcttgggagga

SEQ ID NO: 3975026 - DNA, 25 bp, Homo sapien
tcccctgaagtgctttggaaaatgc

SEQ ID NO: 3975027 - DNA, 25 bp, Homo sapien
gttgaaccctacagatggtgactga

SEQ ID NO: 3975028 - DNA, 25 bp, Homo sapien
ggagacctttgtcccaaggcacttg

SEQ ID NO: 3975029 - DNA, 25 bp, Homo sapien
tatcagcctggtatcatgctccaca

SEQ ID NO: 3975030 - DNA, 25 bp, Homo sapien
gaacacagaggctgatctgacagct

SEQ ID NO: 3975031 - DNA, 25 bp, Homo sapien
ccaggaaggcaatcgtggttctgaa

SEQ ID NO: 3975032 - DNA, 25 bp, Homo sapien
gcaatatcatggtactctcagctgg

SEQ ID NO: 3975033 - DNA, 25 bp, Homo sapien
caagggttcaaatggactaagcaat

SEQ ID NO: 3975034 - DNA, 25 bp, Homo sapien
gaataagcaccagattgacctcgag

SEQ ID NO: 3975035 - DNA, 25 bp, Homo sapien
tgtagcaggccgaactcatggcgag

SEQ ID NO: 3975036 - DNA, 25 bp, Homo sapien
acgcggttgcggagcttcactgaca

SEQ ID NO: 3975037 - DNA, 25 bp, Homo sapien
tgcggcttgagctccacgtgatagg

SEQ ID NO: 3975038 - DNA, 25 bp, Homo sapien
gggccaagcgaccaacagtttgcgc

SEQ ID NO: 3975039 - DNA, 25 bp, Homo sapien
gcgggagttgtgaccgccggcggca

SEQ ID NO: 3975040 - DNA, 25 bp, Homo sapien
ctggttggcgggagttgtgaccgcc

SEQ ID NO: 3975041 - DNA, 25 bp, Homo sapien
ccggcggcagcccagaaaataagtc

SEQ ID NO: 3975042 - DNA, 25 bp, Homo sapien
ggccccgagtggtcgatgaggccat

SEQ ID NO: 3975043 - DNA, 25 bp, Homo sapien
gtcattgtccttacacaatccactg

SEQ ID NO: 3975044 - DNA, 25 bp, Homo sapien
cactgtcaaccagggcttcatggaa

SEQ ID NO: 3975045 - DNA, 25 bp, Homo sapien
cacagcaagctgtcattgtccttac

SEQ ID NO: 3975046 - DNA, 25 bp, Homo sapien
ttacacaatccactgtcaaccaggg

SEQ ID NO: 3975047 - DNA, 25 bp, Homo sapien
cagggccactgcttcaacttccagt

SEQ ID NO: 3975048 - DNA, 25 bp, Homo sapien
gcaagatgggcttctatttcccact

SEQ ID NO: 3975049 - DNA, 25 bp, Homo sapien
aacagcaagatgggcttctatttcc

SEQ ID NO: 3975050 - DNA, 25 bp, Homo sapien
agggccactgcttcaacttccagtt

SEQ ID NO: 3975051 - DNA, 25 bp, Homo sapien
tacatagacaaaatggtcatttggc

SEQ ID NO: 3975052 - DNA, 25 bp, Homo sapien
tgcatcaccctagctcttgagaaat

SEQ ID NO: 3975053 - DNA, 25 bp, Homo sapien
tattgtgcttaccaaatcaagcaag

SEQ ID NO: 3975054 - DNA, 25 bp, Homo sapien
tgagaagtgctaagttaaagcaatc

SEQ ID NO: 3975055 - DNA, 25 bp, Homo sapien
gagccaaaattctgtctgatccgat

SEQ ID NO: 3975056 - DNA, 25 bp, Homo sapien
gaacagcatatgatgattagccact

SEQ ID NO: 3975057 - DNA, 25 bp, Homo sapien
tcagtgacttaataatggcggagcc

SEQ ID NO: 3975058 - DNA, 25 bp, Homo sapien
caggatgagctctccctgcaatagc

SEQ ID NO: 3975059 - DNA, 25 bp, Homo sapien
tcggaccgtcagcaggatttacagc

SEQ ID NO: 3975060 - DNA, 25 bp, Homo sapien
ccctcgggctattagattgaaggcc

SEQ ID NO: 3975061 - DNA, 25 bp, Homo sapien
ccgctaggctgtgatcaaggtgtca

SEQ ID NO: 3975062 - DNA, 25 bp, Homo sapien
cacggttattccagagtttccctgg

SEQ ID NO: 3975063 - DNA, 25 bp, Homo sapien
tgcacactacggcattaaaggcagg

SEQ ID NO: 3975064 - DNA, 25 bp, Homo sapien
tatctgtttaccctggcataagtct

SEQ ID NO: 3975065 - DNA, 25 bp, Homo sapien
tggacagcatgatttcaaaaagccg

SEQ ID NO: 3975066 - DNA, 25 bp, Homo sapien
caaaaagccgcctttagtgtactct

SEQ ID NO: 3975067 - DNA, 25 bp, Homo sapien
tcctactgaagggtacaatgtgttt

SEQ ID NO: 3975068 - DNA, 25 bp, Homo sapien
gggtatgttgaaaatgcccattatg

SEQ ID NO: 3975069 - DNA, 25 bp, Homo sapien
tacactgttagacttggtttgcaaa

SEQ ID NO: 3975070 - DNA, 25 bp, Homo sapien
gccaatcttgtattcctgagaccaa

SEQ ID NO: 3975071 - DNA, 25 bp, Homo sapien
taactaggactaaaagcaggtacca

SEQ ID NO: 3975072 - DNA, 25 bp, Homo sapien
aggactaaaagcaggtaccaccacg

SEQ ID NO: 3975073 - DNA, 25 bp, Homo sapien
ctccaaataactaggactaaaagca

SEQ ID NO: 3975074 - DNA, 25 bp, Homo sapien
caaataactaggactaaaagcaggt

SEQ ID NO: 3975075 - DNA, 25 bp, Homo sapien
aacataacataacaaggccaacgac

SEQ ID NO: 3975076 - DNA, 25 bp, Homo sapien
acataacataacaaggccaacgaca

SEQ ID NO: 3975077 - DNA, 25 bp, Homo sapien
caggtcaataggagtttcatccgcc

SEQ ID NO: 3975078 - DNA, 25 bp, Homo sapien
tatatgccctaatacagaaggagtg

SEQ ID NO: 3975079 - DNA, 25 bp, Homo sapien
ttctgacatacaagcaccactagga

SEQ ID NO: 3975080 - DNA, 25 bp, Homo sapien
gaaggagtgattcagaacccaccaa

SEQ ID NO: 3975081 - DNA, 25 bp, Homo sapien
gaatgaagctcaaattagcatttcc

SEQ ID NO: 3975082 - DNA, 25 bp, Homo sapien
ttctaaacaatgcagtccagagatg

SEQ ID NO: 3975083 - DNA, 25 bp, Homo sapien
cagagccacacaataaagttctcag

SEQ ID NO: 3975084 - DNA, 25 bp, Homo sapien
gcaatatatagtaggttcccctatg

SEQ ID NO: 3975085 - DNA, 25 bp, Homo sapien
cccaaagggagggtaattgctgcaa

SEQ ID NO: 3975086 - DNA, 25 bp, Homo sapien
cctttgctagtatgcgtacagacca

SEQ ID NO: 3975087 - DNA, 25 bp, Homo sapien
taacagtttaactcaagggcaatgc

SEQ ID NO: 3975088 - DNA, 25 bp, Homo sapien
gctttcactctagaccccaaaggga

SEQ ID NO: 3975089 - DNA, 25 bp, Homo sapien
taagaaccattaggataaaagtcac

SEQ ID NO: 3975090 - DNA, 25 bp, Homo sapien
taaaagtcacaacaccaggttttgc

SEQ ID NO: 3975091 - DNA, 25 bp, Homo sapien
cattaggataaaagtcacaacacca

SEQ ID NO: 3975092 - DNA, 25 bp, Homo sapien
cttgcctaagaaccattaggataaa

SEQ ID NO: 3975093 - DNA, 25 bp, Homo sapien
tgtagcaacttaaactgtccaggtc

SEQ ID NO: 3975094 - DNA, 25 bp, Homo sapien
tgttactgaagcttaaggccaacct

SEQ ID NO: 3975095 - DNA, 25 bp, Homo sapien
gccaagatgattaacagccaggaca

SEQ ID NO: 3975096 - DNA, 25 bp, Homo sapien
tagactgggagactatgtacaacct

SEQ ID NO: 3975097 - DNA, 25 bp, Homo sapien
tcccacttctaactctcccacccac

SEQ ID NO: 3975098 - DNA, 25 bp, Homo sapien
cccacttctaactctcccacccaca

SEQ ID NO: 3975099 - DNA, 25 bp, Homo sapien
gacatcgtgttaagtggcacaggga

SEQ ID NO: 3975100 - DNA, 25 bp, Homo sapien
aatgctctaggagagttggtcccca

SEQ ID NO: 3975101 - DNA, 25 bp, Homo sapien
gaagcttccgtgctaaagtaccgcc

SEQ ID NO: 3975102 - DNA, 25 bp, Homo sapien
tatagcagctggtgacagacatcgt

SEQ ID NO: 3975103 - DNA, 25 bp, Homo sapien
cagtgtgtcctcttttcaggaagga

SEQ ID NO: 3975104 - DNA, 25 bp, Homo sapien
tcaatacattcactatctgtacccc

SEQ ID NO: 3975105 - DNA, 25 bp, Homo sapien
tatctgtaccccctggaacttgcac

SEQ ID NO: 3975106 - DNA, 25 bp, Homo sapien
gtgctctgaatacagtctctgcagc

SEQ ID NO: 3975107 - DNA, 25 bp, Homo sapien
ataagccaactcatccccagctctc

SEQ ID NO: 3975108 - DNA, 25 bp, Homo sapien
tataagccaactcatccccagctct

SEQ ID NO: 3975109 - DNA, 25 bp, Homo sapien
gggataagaagaggcagtcaacaaa

SEQ ID NO: 3975110 - DNA, 25 bp, Homo sapien
gaggcagtcaacaaaactgacttca

SEQ ID NO: 3975111 - DNA, 25 bp, Homo sapien
aaactgacttcacatcaaaacagga

SEQ ID NO: 3975112 - DNA, 25 bp, Homo sapien
tcaacaaaactgacttcacatcaaa

SEQ ID NO: 3975113 - DNA, 25 bp, Homo sapien
taggtaaggagcctcaactgaccgg

SEQ ID NO: 3975114 - DNA, 25 bp, Homo sapien
tgaatataaccaaactggccagtgg

SEQ ID NO: 3975115 - DNA, 25 bp, Homo sapien
gattaagtccggaacgctctctcaa

SEQ ID NO: 3975116 - DNA, 25 bp, Homo sapien
catatgagaacgtccactttggcgg

SEQ ID NO: 3975117 - DNA, 25 bp, Homo sapien
gaaatggacatatttgaccactaaa

SEQ ID NO: 3975118 - DNA, 25 bp, Homo sapien
agggaaatggacatatttgaccact

SEQ ID NO: 3975119 - DNA, 25 bp, Homo sapien
ctagggaaatggacatatttgacca

SEQ ID NO: 3975120 - DNA, 25 bp, Homo sapien
aatggacatatttgaccactaaagg

SEQ ID NO: 3975121 - DNA, 25 bp, Homo sapien
agttcagattccaccgccggaggga

SEQ ID NO: 3975122 - DNA, 25 bp, Homo sapien
agattccaccgccggagggagaatg

SEQ ID NO: 3975123 - DNA, 25 bp, Homo sapien
tttctgatcttgagcagcatattca

SEQ ID NO: 3975124 - DNA, 25 bp, Homo sapien
aatttctgatcttgagcagcatatt

SEQ ID NO: 3975125 - DNA, 25 bp, Homo sapien
gaattaacacccacctgtatcaagg

SEQ ID NO: 3975126 - DNA, 25 bp, Homo sapien
cacgccttgggagaaactcgtggca

SEQ ID NO: 3975127 - DNA, 25 bp, Homo sapien
taagagtctcaatacagtgctacag

SEQ ID NO: 3975128 - DNA, 25 bp, Homo sapien
gcactgcaaatgatacaaggaccaa

SEQ ID NO: 3975129 - DNA, 25 bp, Homo sapien
gtcacagctggcaaagtcaaaccca

SEQ ID NO: 3975130 - DNA, 25 bp, Homo sapien
agtcacagctggcaaagtcaaaccc

SEQ ID NO: 3975131 - DNA, 25 bp, Homo sapien
tcacagctggcaaagtcaaacccat

SEQ ID NO: 3975132 - DNA, 25 bp, Homo sapien
tcagtcacagctggcaaagtcaaac

SEQ ID NO: 3975133 - DNA, 25 bp, Homo sapien
tcagatgcagtcatacaaagaccag

SEQ ID NO: 3975134 - DNA, 25 bp, Homo sapien
gaacataatgggtactggcaaaaca

SEQ ID NO: 3975135 - DNA, 25 bp, Homo sapien
aaagaccagcacttgcgaactactg

SEQ ID NO: 3975136 - DNA, 25 bp, Homo sapien
tgaaaacgggcagaataggattgct

SEQ ID NO: 3975137 - DNA, 25 bp, Homo sapien
tcacactgctgtaaaattctgagaa

SEQ ID NO: 3975138 - DNA, 25 bp, Homo sapien
cacactgctgtaaaattctgagaaa

SEQ ID NO: 3975139 - DNA, 25 bp, Homo sapien
tcttggaaaaggctgtaacaaacag

SEQ ID NO: 3975140 - DNA, 25 bp, Homo sapien
gtttccactagcagagaacattcca

SEQ ID NO: 3975141 - DNA, 25 bp, Homo sapien
catttcacaatgatgagtatctact

SEQ ID NO: 3975142 - DNA, 25 bp, Homo sapien
tttttgctccagcaaatccaagtac

SEQ ID NO: 3975143 - DNA, 25 bp, Homo sapien
tctgagggtatacaggcctttcaca

SEQ ID NO: 3975144 - DNA, 25 bp, Homo sapien
tgacctgaaatggtgttgactgggc

SEQ ID NO: 3975145 - DNA, 25 bp, Homo sapien
cctgaaatggtgttgactgggcttc

SEQ ID NO: 3975146 - DNA, 25 bp, Homo sapien
gacctgaaatggtgttgactgggct

SEQ ID NO: 3975147 - DNA, 25 bp, Homo sapien
catgccttttatcaagaggtgggat

SEQ ID NO: 3975148 - DNA, 25 bp, Homo sapien
cgcccagccgacatgccttttatca

SEQ ID NO: 3975149 - DNA, 25 bp, Homo sapien
gccgacatgccttttatcaagaggt

SEQ ID NO: 3975150 - DNA, 25 bp, Homo sapien
ccttttatcaagaggtgggatacat

SEQ ID NO: 3975151 - DNA, 25 bp, Homo sapien
agcttggtttcgatgtaaaacttat

SEQ ID NO: 3975152 - DNA, 25 bp, Homo sapien
cttttctgcaacatgttccgtaaac

SEQ ID NO: 3975153 - DNA, 25 bp, Homo sapien
gtctctgttaagcttggtttcgatg

SEQ ID NO: 3975154 - DNA, 25 bp, Homo sapien
gcaacatgttccgtaaacagcttta

SEQ ID NO: 3975155 - DNA, 25 bp, Homo sapien
cagaaagcatgcaaaagagtatgca

SEQ ID NO: 3975156 - DNA, 25 bp, Homo sapien
attaaacactgcattgtaccctgct

SEQ ID NO: 3975157 - DNA, 25 bp, Homo sapien
caaaaggtcccattctacactggga

SEQ ID NO: 3975158 - DNA, 25 bp, Homo sapien
taggatgttccttgcatatacatgg

SEQ ID NO: 3975159 - DNA, 25 bp, Homo sapien
ctctgcaatgctcccatatattgtc

SEQ ID NO: 3975160 - DNA, 25 bp, Homo sapien
tttcaatatagagatctggagggct

SEQ ID NO: 3975161 - DNA, 25 bp, Homo sapien
taaatctttcaatatagagatctgg

SEQ ID NO: 3975162 - DNA, 25 bp, Homo sapien
tattgtccaagagctatattaaatc

SEQ ID NO: 3975163 - DNA, 25 bp, Homo sapien
tccaaaatctgctatgtaaaactga

SEQ ID NO: 3975164 - DNA, 25 bp, Homo sapien
caaaatctgctatgtaaaactgaag

SEQ ID NO: 3975165 - DNA, 25 bp, Homo sapien
ccaaaatctgctatgtaaaactgaa

SEQ ID NO: 3975166 - DNA, 25 bp, Homo sapien
aaaatctgctatgtaaaactgaagt

SEQ ID NO: 3975167 - DNA, 25 bp, Homo sapien
tctttttcttagtccttctaactgc

SEQ ID NO: 3975168 - DNA, 25 bp, Homo sapien
tagtccttctaactgcctataaatt

SEQ ID NO: 3975169 - DNA, 25 bp, Homo sapien
cacacccagcgcatttctttttctt

SEQ ID NO: 3975170 - DNA, 25 bp, Homo sapien
acccagcgcatttctttttcttagt

SEQ ID NO: 3975171 - DNA, 25 bp, Homo sapien
catttgtctaatgcttcaaaagaaa

SEQ ID NO: 3975172 - DNA, 25 bp, Homo sapien
tttctgaattaactacccatttgtc

SEQ ID NO: 3975173 - DNA, 25 bp, Homo sapien
ccatttgtctaatgcttcaaaagaa

SEQ ID NO: 3975174 - DNA, 25 bp, Homo sapien
caggttcaagggattgctctgtctc

SEQ ID NO: 3975175 - DNA, 25 bp, Homo sapien
caaacttacacattattgtcacgag

SEQ ID NO: 3975176 - DNA, 25 bp, Homo sapien
tcccctctatgtcttgttaactatg

SEQ ID NO: 3975177 - DNA, 25 bp, Homo sapien
gacatgctgaagttatcctattttc

SEQ ID NO: 3975178 - DNA, 25 bp, Homo sapien
tacagactgtatccttgtcacatta

SEQ ID NO: 3975179 - DNA, 25 bp, Homo sapien
cctggccgaatcaagaccatcttaa

SEQ ID NO: 3975180 - DNA, 25 bp, Homo sapien
aaatggctcaaatgttaggttcctc

SEQ ID NO: 3975181 - DNA, 25 bp, Homo sapien
gatttttgtaattgctctcagcagg

SEQ ID NO: 3975182 - DNA, 25 bp, Homo sapien
gctagtcctgggatgtggtacttca

SEQ ID NO: 3975183 - DNA, 25 bp, Homo sapien
gggtcctggtctctcacaaaaaata

SEQ ID NO: 3975184 - DNA, 25 bp, Homo sapien
gaatattccactagtgcaggcatga

SEQ ID NO: 3975185 - DNA, 25 bp, Homo sapien
tatgaaataccaagcctcagaaaga

SEQ ID NO: 3975186 - DNA, 25 bp, Homo sapien
tccaacaggcaagtgtaggtcctaa

SEQ ID NO: 3975187 - DNA, 25 bp, Homo sapien
gaaatgccaatagtctgttcggttt

SEQ ID NO: 3975188 - DNA, 25 bp, Homo sapien
ttgctgagatgctatggatccacag

SEQ ID NO: 3975189 - DNA, 25 bp, Homo sapien
ttattgctgagatgctatggatcca

SEQ ID NO: 3975190 - DNA, 25 bp, Homo sapien
tctgttcggttttgagaggagtgca

SEQ ID NO: 3975191 - DNA, 25 bp, Homo sapien
tacaggagtgtgcaattttagtaga

SEQ ID NO: 3975192 - DNA, 25 bp, Homo sapien
tgggatcaagccctggtataaagat

SEQ ID NO: 3975193 - DNA, 25 bp, Homo sapien
taaagattatttggttggtgcaaaa

SEQ ID NO: 3975194 - DNA, 25 bp, Homo sapien
tgcagcgacgcaatctcggccaact

SEQ ID NO: 3975195 - DNA, 25 bp, Homo sapien
ctgatcttcaagcactgaaggttta

SEQ ID NO: 3975196 - DNA, 25 bp, Homo sapien
aaaatcaatacaatcagttctttac

SEQ ID NO: 3975197 - DNA, 25 bp, Homo sapien
gcaaccagtcaggaaaacccaagga

SEQ ID NO: 3975198 - DNA, 25 bp, Homo sapien
ataatcaaattaacaagcttccaaa

SEQ ID NO: 3975199 - DNA, 25 bp, Homo sapien
aatgtgtattagaaaagctaactgc

SEQ ID NO: 3975200 - DNA, 25 bp, Homo sapien
ttttaatcagatcactatacatctg

SEQ ID NO: 3975201 - DNA, 25 bp, Homo sapien
actatacatctgttccgagtgctgc

SEQ ID NO: 3975202 - DNA, 25 bp, Homo sapien
cagatcactatacatctgttccgag

SEQ ID NO: 3975203 - DNA, 25 bp, Homo sapien
acatctgttccgagtgctgctggca

SEQ ID NO: 3975204 - DNA, 25 bp, Homo sapien
tgtatatctgttcataggatatggg

SEQ ID NO: 3975205 - DNA, 25 bp, Homo sapien
caggactctgagttaaaagttgatc

SEQ ID NO: 3975206 - DNA, 25 bp, Homo sapien
aaagttgatctatggcaccatccaa

SEQ ID NO: 3975207 - DNA, 25 bp, Homo sapien
tccaattttggccagtatgtgctct

SEQ ID NO: 3975208 - DNA, 25 bp, Homo sapien
gaatcccttatcagtgtaccaccta

SEQ ID NO: 3975209 - DNA, 25 bp, Homo sapien
tctgggctcctaaaatgcttagttc

SEQ ID NO: 3975210 - DNA, 25 bp, Homo sapien
tgaaatacctctctacaccgaaagt

SEQ ID NO: 3975211 - DNA, 25 bp, Homo sapien
ggttagataacacgctcaaaaagaa

SEQ ID NO: 3975212 - DNA, 25 bp, Homo sapien
agtctagagcaatatacagaaaggc

SEQ ID NO: 3975213 - DNA, 25 bp, Homo sapien
taaagtctagagcaatatacagaaa

SEQ ID NO: 3975214 - DNA, 25 bp, Homo sapien
gtctagagcaatatacagaaaggcc

SEQ ID NO: 3975215 - DNA, 25 bp, Homo sapien
aagtctagagcaatatacagaaagg

SEQ ID NO: 3975216 - DNA, 25 bp, Homo sapien
gatgaatcagcatacctgcaactac

SEQ ID NO: 3975217 - DNA, 25 bp, Homo sapien
cagatgatgaatcagcatacctgca

SEQ ID NO: 3975218 - DNA, 25 bp, Homo sapien
agaggttaataaccgaatgtccaca

SEQ ID NO: 3975219 - DNA, 25 bp, Homo sapien
tacacatctatccaactttatcttt

SEQ ID NO: 3975220 - DNA, 25 bp, Homo sapien
gaatacatatggtctacggtttaca

SEQ ID NO: 3975221 - DNA, 25 bp, Homo sapien
aaaaatagcaagacaagatccccaa

SEQ ID NO: 3975222 - DNA, 25 bp, Homo sapien
taagatcctgaagttcggccgggaa

SEQ ID NO: 3975223 - DNA, 25 bp, Homo sapien
tctttagagatttgggactgggcct

SEQ ID NO: 3975224 - DNA, 25 bp, Homo sapien
tgttgatgttgatggtggagctggc

SEQ ID NO: 3975225 - DNA, 25 bp, Homo sapien
gtggaggtgttgatgttgatggtgg

SEQ ID NO: 3975226 - DNA, 25 bp, Homo sapien
tggaggtgttgatgttgatggtgga

SEQ ID NO: 3975227 - DNA, 25 bp, Homo sapien
atgttgatggtggagctggcggtgg

SEQ ID NO: 3975228 - DNA, 25 bp, Homo sapien
atgatcaccccattagcctccggcg

SEQ ID NO: 3975229 - DNA, 25 bp, Homo sapien
tcaacatcatgatcaccccattagc

SEQ ID NO: 3975230 - DNA, 25 bp, Homo sapien
caccccattagcctccggcggtggc

SEQ ID NO: 3975231 - DNA, 25 bp, Homo sapien
aacatcatgatcaccccattagcct

SEQ ID NO: 3975232 - DNA, 25 bp, Homo sapien
ctgtccacggagaccgcgggcaccg

SEQ ID NO: 3975233 - DNA, 25 bp, Homo sapien
gtcgtccatcatcgcctcgtagctg

SEQ ID NO: 3975234 - DNA, 25 bp, Homo sapien
tgttgtggttctggtcgtccatcat

SEQ ID NO: 3975235 - DNA, 25 bp, Homo sapien
accgcagcctcccagttgttgtggt

SEQ ID NO: 3975236 - DNA, 25 bp, Homo sapien
tggcccccggcacccgcccgcctca

SEQ ID NO: 3975237 - DNA, 25 bp, Homo sapien
cacgacgttttacagcggcttccaa

SEQ ID NO: 3975238 - DNA, 25 bp, Homo sapien
gactagcttgaagacgcggctgacg

SEQ ID NO: 3975239 - DNA, 25 bp, Homo sapien
cccgagttacatcgccggcggcagg

SEQ ID NO: 3975240 - DNA, 25 bp, Homo sapien
gcagccgtaaagcagcggcgctcct

SEQ ID NO: 3975241 - DNA, 25 bp, Homo sapien
gcgacgggtcgggacgggcattcgc

SEQ ID NO: 3975242 - DNA, 25 bp, Homo sapien
aacagggcagaggttcgccccgcct

SEQ ID NO: 3975243 - DNA, 25 bp, Homo sapien
gtcactcccacgcaacagggcagag

SEQ ID NO: 3975244 - DNA, 25 bp, Homo sapien
cgcctcggctggcagggagctaaca

SEQ ID NO: 3975245 - DNA, 25 bp, Homo sapien
ttataaacggatgagaccgccctgg

SEQ ID NO: 3975246 - DNA, 25 bp, Homo sapien
gggccttcgcacctctgagtgcctg

SEQ ID NO: 3975247 - DNA, 25 bp, Homo sapien
tcacacatagcaggatggcgcaaaa

SEQ ID NO: 3975248 - DNA, 25 bp, Homo sapien
tgagtgcctgagagccccggctttt

SEQ ID NO: 3975249 - DNA, 25 bp, Homo sapien
gcctgtgaattctggtagctttcta

SEQ ID NO: 3975250 - DNA, 25 bp, Homo sapien
caggaaacttcctcacagtgtctca

SEQ ID NO: 3975251 - DNA, 25 bp, Homo sapien
cctcaggtctatggacaagaagtca

SEQ ID NO: 3975252 - DNA, 25 bp, Homo sapien
tgtgcatgtttcacccttaggctgc

SEQ ID NO: 3975253 - DNA, 25 bp, Homo sapien
tggaaagggtatggattcattcctg

SEQ ID NO: 3975254 - DNA, 25 bp, Homo sapien
ctggattccagagccctttactgga

SEQ ID NO: 3975255 - DNA, 25 bp, Homo sapien
tactggaaagggtatggattcattc

SEQ ID NO: 3975256 - DNA, 25 bp, Homo sapien
ctttactggaaagggtatggattca

SEQ ID NO: 3975257 - DNA, 25 bp, Homo sapien
tgctggtatggttgggttgtggtgg

SEQ ID NO: 3975258 - DNA, 25 bp, Homo sapien
cttgctatgttcttacatggtcctt

SEQ ID NO: 3975259 - DNA, 25 bp, Homo sapien
tcttgctatgttcttacatggtcct

SEQ ID NO: 3975260 - DNA, 25 bp, Homo sapien
ggtcaccaattcaattgattaggac

SEQ ID NO: 3975261 - DNA, 25 bp, Homo sapien
cttacaaggtcaccaattcaattga

SEQ ID NO: 3975262 - DNA, 25 bp, Homo sapien
agggagagagagcacaatatctctc

SEQ ID NO: 3975263 - DNA, 25 bp, Homo sapien
tctctcatccctctcttacaaggtc

SEQ ID NO: 3975264 - DNA, 25 bp, Homo sapien
aaacttttctagtaacaaatgatag

SEQ ID NO: 3975265 - DNA, 25 bp, Homo sapien
ctttttggtgttctacacattcaga

SEQ ID NO: 3975266 - DNA, 25 bp, Homo sapien
gaaatgatccttgaaagtatcatct

SEQ ID NO: 3975267 - DNA, 25 bp, Homo sapien
aacaaatgatagaaatgatccttga

SEQ ID NO: 3975268 - DNA, 25 bp, Homo sapien
tggataatcaggatgaccacttcat

SEQ ID NO: 3975269 - DNA, 25 bp, Homo sapien
tggatttcaggctcacttggataat

SEQ ID NO: 3975270 - DNA, 25 bp, Homo sapien
ctttatcaggacatgtgtcattgga

SEQ ID NO: 3975271 - DNA, 25 bp, Homo sapien
tccttggcttggacggctttgctct

SEQ ID NO: 3975272 - DNA, 25 bp, Homo sapien
ttgcttgagtctaatagttcaagac

SEQ ID NO: 3975273 - DNA, 25 bp, Homo sapien
caaaactccatgtctacaaaatata

SEQ ID NO: 3975274 - DNA, 25 bp, Homo sapien
cttgaggaggcagagattacagtga

SEQ ID NO: 3975275 - DNA, 25 bp, Homo sapien
attagctagggattgtggtgtgcac

SEQ ID NO: 3975276 - DNA, 25 bp, Homo sapien
caaaggcgaggccagatagcatgct

SEQ ID NO: 3975277 - DNA, 25 bp, Homo sapien
gggacacccctaggcaaatggctct

SEQ ID NO: 3975278 - DNA, 25 bp, Homo sapien
tagtaactcaacttccatcgctggc

SEQ ID NO: 3975279 - DNA, 25 bp, Homo sapien
ttcatgtggtgacctgcaaggcccg

SEQ ID NO: 3975280 - DNA, 25 bp, Homo sapien
ttgcttcctcgtactcgtgcggtcc

SEQ ID NO: 3975281 - DNA, 25 bp, Homo sapien
cattcccctgaatttccgcttccag

SEQ ID NO: 3975282 - DNA, 25 bp, Homo sapien
acagaccccgccatccactccaggc

SEQ ID NO: 3975283 - DNA, 25 bp, Homo sapien
ccagctccacgttctaggcttgctt

SEQ ID NO: 3975284 - DNA, 25 bp, Homo sapien
ctccgctcaggtggggctggggtgg

SEQ ID NO: 3975285 - DNA, 25 bp, Homo sapien
ctgcttctccgctcaggtggggctg

SEQ ID NO: 3975286 - DNA, 25 bp, Homo sapien
tctccgctcaggtggggctggggtg

SEQ ID NO: 3975287 - DNA, 25 bp, Homo sapien
tgcttctccgctcaggtggggctgg

SEQ ID NO: 3975288 - DNA, 25 bp, Homo sapien
tcagagggtacaggatgggccgaag

SEQ ID NO: 3975289 - DNA, 25 bp, Homo sapien
agttcgtggacctgtgacatcatcc

SEQ ID NO: 3975290 - DNA, 25 bp, Homo sapien
gaatgggaaaaggttgatccagcct

SEQ ID NO: 3975291 - DNA, 25 bp, Homo sapien
cggtcgttcactccagagaatggga

SEQ ID NO: 3975292 - DNA, 25 bp, Homo sapien
tttgccagtcctcagcaaatagaag

SEQ ID NO: 3975293 - DNA, 25 bp, Homo sapien
ctttgccagtcctcagcaaatagaa

SEQ ID NO: 3975294 - DNA, 25 bp, Homo sapien
catagccatggtcaagtgccttctg

SEQ ID NO: 3975295 - DNA, 25 bp, Homo sapien
agccatggtcaagtgccttctgttt

SEQ ID NO: 3975296 - DNA, 25 bp, Homo sapien
ttctgtttggctggcctctcctcac

SEQ ID NO: 3975297 - DNA, 25 bp, Homo sapien
tccccatagccatggtcaagtgcct

SEQ ID NO: 3975298 - DNA, 25 bp, Homo sapien
gagggacgtcgactctctcctgatt

SEQ ID NO: 3975299 - DNA, 25 bp, Homo sapien
gatggtagcggagattgctggcctg

SEQ ID NO: 3975300 - DNA, 25 bp, Homo sapien
tagccaccatctggcggtgtcattg

SEQ ID NO: 3975301 - DNA, 25 bp, Homo sapien
gctggcgcaggatggtagcggagat

SEQ ID NO: 3975302 - DNA, 25 bp, Homo sapien
aggtagaggttgtagtaatcaaaga

SEQ ID NO: 3975303 - DNA, 25 bp, Homo sapien
ggttgtagtaatcaaagatcacgcc

SEQ ID NO: 3975304 - DNA, 25 bp, Homo sapien
tagaggttgtagtaatcaaagatca

SEQ ID NO: 3975305 - DNA, 25 bp, Homo sapien
gtagaggttgtagtaatcaaagatc

SEQ ID NO: 3975306 - DNA, 25 bp, Homo sapien
atgggcgtgtcagggaaagccaatg

SEQ ID NO: 3975307 - DNA, 25 bp, Homo sapien
gtggttccaccagatctgtgtttgc

SEQ ID NO: 3975308 - DNA, 25 bp, Homo sapien
tggtggttccaccagatctgtgttt

SEQ ID NO: 3975309 - DNA, 25 bp, Homo sapien
gggcgtgtcagggaaagccaatggt

SEQ ID NO: 3975310 - DNA, 25 bp, Homo sapien
tgcacaaacttggaataatattttg

SEQ ID NO: 3975311 - DNA, 25 bp, Homo sapien
tcttgcacaaacttggaataatatt

SEQ ID NO: 3975312 - DNA, 25 bp, Homo sapien
taaacatttcttgcacaaacttgga

SEQ ID NO: 3975313 - DNA, 25 bp, Homo sapien
catttcttgcacaaacttggaataa

SEQ ID NO: 3975314 - DNA, 25 bp, Homo sapien
cctggcgatgcaatggaatcctcgt

SEQ ID NO: 3975315 - DNA, 25 bp, Homo sapien
cacaaagtgaatgatcctggcgatg

SEQ ID NO: 3975316 - DNA, 25 bp, Homo sapien
gcagtacttgtaccaaccaccacta

SEQ ID NO: 3975317 - DNA, 25 bp, Homo sapien
gaatcctcgtgttcagggcatgaaa

SEQ ID NO: 3975318 - DNA, 25 bp, Homo sapien
ggcacagcagaagtaccacctccac

SEQ ID NO: 3975319 - DNA, 25 bp, Homo sapien
ttctgagcaccgcaaacagcaggag

SEQ ID NO: 3975320 - DNA, 25 bp, Homo sapien
ctgtccctgaagataccactctgaa

SEQ ID NO: 3975321 - DNA, 25 bp, Homo sapien
ctccacgctcatcagccaaggtggg

SEQ ID NO: 3975322 - DNA, 25 bp, Homo sapien
tggaggagaccaggccagcctgtcc

SEQ ID NO: 3975323 - DNA, 25 bp, Homo sapien
ctggaggagaccaggccagcctgtc

SEQ ID NO: 3975324 - DNA, 25 bp, Homo sapien
aggccagcctgtcccacactgaaca

SEQ ID NO: 3975325 - DNA, 25 bp, Homo sapien
ccagcctgtcccacactgaacagcc

SEQ ID NO: 3975326 - DNA, 25 bp, Homo sapien
gggatatctttttcttctgggcaac

SEQ ID NO: 3975327 - DNA, 25 bp, Homo sapien
tcagtttcttctgggatatcttttt

SEQ ID NO: 3975328 - DNA, 25 bp, Homo sapien
ttactcctgtgccataagtttttgt

SEQ ID NO: 3975329 - DNA, 25 bp, Homo sapien
cttctgggatatctttttcttctgg

SEQ ID NO: 3975330 - DNA, 25 bp, Homo sapien
gtccggcggcgcatcttaggtgttt

SEQ ID NO: 3975331 - DNA, 25 bp, Homo sapien
ctctgtgggtccggcggcgcatctt

SEQ ID NO: 3975332 - DNA, 25 bp, Homo sapien
gaccatgagctctgtgggtccggcg

SEQ ID NO: 3975333 - DNA, 25 bp, Homo sapien
cggcggcgcatcttaggtgttttgt

SEQ ID NO: 3975334 - DNA, 25 bp, Homo sapien
cttggcctgcgtacacctgctaact

SEQ ID NO: 3975335 - DNA, 25 bp, Homo sapien
tgcttggcctgcgtacacctgctaa

SEQ ID NO: 3975336 - DNA, 25 bp, Homo sapien
tggcctgcgtacacctgctaactcc

SEQ ID NO: 3975337 - DNA, 25 bp, Homo sapien
tgcgtacacctgctaactccaccat

SEQ ID NO: 3975338 - DNA, 25 bp, Homo sapien
agtgacatctttcagatacttcttg

SEQ ID NO: 3975339 - DNA, 25 bp, Homo sapien
tgtaaagtgacatctttcagatact

SEQ ID NO: 3975340 - DNA, 25 bp, Homo sapien
gtgacatctttcagatacttcttgg

SEQ ID NO: 3975341 - DNA, 25 bp, Homo sapien
taaagtgacatctttcagatacttc

SEQ ID NO: 3975342 - DNA, 25 bp, Homo sapien
cctgagcagtttcatggtgttctta

SEQ ID NO: 3975343 - DNA, 25 bp, Homo sapien
tggcctgagcagtttcatggtgttc

SEQ ID NO: 3975344 - DNA, 25 bp, Homo sapien
tgcatcatttcgtggggttctccgg

SEQ ID NO: 3975345 - DNA, 25 bp, Homo sapien
tgagcagtttcatggtgttcttaaa

SEQ ID NO: 3975346 - DNA, 25 bp, Homo sapien
tctgccaagggcacgctgggtgaca

SEQ ID NO: 3975347 - DNA, 25 bp, Homo sapien
aagaccactgtttctgtagtgacca

SEQ ID NO: 3975348 - DNA, 25 bp, Homo sapien
gaccataaccttgggaatctgccaa

SEQ ID NO: 3975349 - DNA, 25 bp, Homo sapien
ccaagggcacgctgggtgacaaatg

SEQ ID NO: 3975350 - DNA, 25 bp, Homo sapien
tgcactgaagttgacagtgatcttc

SEQ ID NO: 3975351 - DNA, 25 bp, Homo sapien
atgcactgaagttgacagtgatctt

SEQ ID NO: 3975352 - DNA, 25 bp, Homo sapien
cactgaagttgacagtgatcttcat

SEQ ID NO: 3975353 - DNA, 25 bp, Homo sapien
gcactgaagttgacagtgatcttca

SEQ ID NO: 3975354 - DNA, 25 bp, Homo sapien
ttccaagcccttccgtcatttgctg

SEQ ID NO: 3975355 - DNA, 25 bp, Homo sapien
agcatcctggtgtaatgccctggaa

SEQ ID NO: 3975356 - DNA, 25 bp, Homo sapien
aatgccctggaaagattggctttgt

SEQ ID NO: 3975357 - DNA, 25 bp, Homo sapien
tccctgtattattatgcggacaaga

SEQ ID NO: 3975358 - DNA, 25 bp, Homo sapien
aacacccggagcttgaattcagaca

SEQ ID NO: 3975359 - DNA, 25 bp, Homo sapien
tgagtgcttcaacacccggagcttg

SEQ ID NO: 3975360 - DNA, 25 bp, Homo sapien
gacaggtagccccaatggtcttcct

SEQ ID NO: 3975361 - DNA, 25 bp, Homo sapien
tgtgcaggaactaggcttggctgcc

SEQ ID NO: 3975362 - DNA, 25 bp, Homo sapien
gagagctggatgggcgtggctaggt

SEQ ID NO: 3975363 - DNA, 25 bp, Homo sapien
gaaccagtcatggaagagagctgga

SEQ ID NO: 3975364 - DNA, 25 bp, Homo sapien
cgtggctaggtggagggtccggaag

SEQ ID NO: 3975365 - DNA, 25 bp, Homo sapien
tccggaagcccagcggggagttcac

SEQ ID NO: 3975366 - DNA, 25 bp, Homo sapien
tcaacatgcagtgacccgttccaga

SEQ ID NO: 3975367 - DNA, 25 bp, Homo sapien
tgccaatccctcatggaagcaggtg

SEQ ID NO: 3975368 - DNA, 25 bp, Homo sapien
ggtgagactcaccatcaagctgtgg

SEQ ID NO: 3975369 - DNA, 25 bp, Homo sapien
tgaaagagctgatgcccaagagatg

SEQ ID NO: 3975370 - DNA, 25 bp, Homo sapien
tcatgtttacttgctgtcaccccag

SEQ ID NO: 3975371 - DNA, 25 bp, Homo sapien
aagtgatcgccttggctatatccca

SEQ ID NO: 3975372 - DNA, 25 bp, Homo sapien
cccaggtaagtgatcgccttggcta

SEQ ID NO: 3975373 - DNA, 25 bp, Homo sapien
tttcatgtttacttgctgtcacccc

SEQ ID NO: 3975374 - DNA, 25 bp, Homo sapien
acatgcgatattggatttgtacact

SEQ ID NO: 3975375 - DNA, 25 bp, Homo sapien
gacatgcgatattggatttgtacac

SEQ ID NO: 3975376 - DNA, 25 bp, Homo sapien
catgcgatattggatttgtacactg

SEQ ID NO: 3975377 - DNA, 25 bp, Homo sapien
agacatgcgatattggatttgtaca

SEQ ID NO: 3975378 - DNA, 25 bp, Homo sapien
ccaactaaagtcctgttgtagcata

SEQ ID NO: 3975379 - DNA, 25 bp, Homo sapien
taaaaaggatatcaggcacaacctc

SEQ ID NO: 3975380 - DNA, 25 bp, Homo sapien
taaagtcctgttgtagcatagacag

SEQ ID NO: 3975381 - DNA, 25 bp, Homo sapien
aaaaaggatatcaggcacaacctcc

SEQ ID NO: 3975382 - DNA, 25 bp, Homo sapien
aaattgcagctcttttcggatcccc

SEQ ID NO: 3975383 - DNA, 25 bp, Homo sapien
gtgtctgcacgcttcttcaaacggg

SEQ ID NO: 3975384 - DNA, 25 bp, Homo sapien
tttcggatcccccaaagtgtgtctg

SEQ ID NO: 3975385 - DNA, 25 bp, Homo sapien
tcccccaaagtgtgtctgcacgctt

SEQ ID NO: 3975386 - DNA, 25 bp, Homo sapien
tcctttattccatagagacccttaa

SEQ ID NO: 3975387 - DNA, 25 bp, Homo sapien
tcatcctttattccatagagaccct

SEQ ID NO: 3975388 - DNA, 25 bp, Homo sapien
aaggaagacatcatcctttattcca

SEQ ID NO: 3975389 - DNA, 25 bp, Homo sapien
gacatcatcctttattccatagaga

SEQ ID NO: 3975390 - DNA, 25 bp, Homo sapien
cattatactctctaccaaatctgct

SEQ ID NO: 3975391 - DNA, 25 bp, Homo sapien
ttatactctctaccaaatctgctac

SEQ ID NO: 3975392 - DNA, 25 bp, Homo sapien
gggaattgggtgcacctgcctaaga

SEQ ID NO: 3975393 - DNA, 25 bp, Homo sapien
atactctctaccaaatctgctacag

SEQ ID NO: 3975394 - DNA, 25 bp, Homo sapien
actgtttcttatctgtatcagtgcc

SEQ ID NO: 3975395 - DNA, 25 bp, Homo sapien
cagtgcctaaatctgggtgcagaat

SEQ ID NO: 3975396 - DNA, 25 bp, Homo sapien
tcagtgcctaaatctgggtgcagaa

SEQ ID NO: 3975397 - DNA, 25 bp, Homo sapien
tcttatctgtatcagtgcctaaatc

SEQ ID NO: 3975398 - DNA, 25 bp, Homo sapien
ggaagacacaagcaacattcactcc

SEQ ID NO: 3975399 - DNA, 25 bp, Homo sapien
aggaagacacaagcaacattcactc

SEQ ID NO: 3975400 - DNA, 25 bp, Homo sapien
tggaatcgggccgaatccaggttgc

SEQ ID NO: 3975401 - DNA, 25 bp, Homo sapien
taatggaatcgggccgaatccaggt

SEQ ID NO: 3975402 - DNA, 25 bp, Homo sapien
tcgggtaatggaatcgggccgaatc

SEQ ID NO: 3975403 - DNA, 25 bp, Homo sapien
gggtaatggaatcgggccgaatcca

SEQ ID NO: 3975404 - DNA, 25 bp, Homo sapien
ctggatttcaaataataagcaactt

SEQ ID NO: 3975405 - DNA, 25 bp, Homo sapien
caaataataagcaacttgcagtttg

SEQ ID NO: 3975406 - DNA, 25 bp, Homo sapien
aataataagcaacttgcagtttggg

SEQ ID NO: 3975407 - DNA, 25 bp, Homo sapien
tttcaaataataagcaacttgcagt

SEQ ID NO: 3975408 - DNA, 25 bp, Homo sapien
gaattgatcccatgttcgtcctggc

SEQ ID NO: 3975409 - DNA, 25 bp, Homo sapien
ccataaagggttggtgatatcacca

SEQ ID NO: 3975410 - DNA, 25 bp, Homo sapien
tcgtcctggctccaaagattgtacc

SEQ ID NO: 3975411 - DNA, 25 bp, Homo sapien
gattgtacctcctacttctactcca

SEQ ID NO: 3975412 - DNA, 25 bp, Homo sapien
tggaagctcctctgcagatcagatt

SEQ ID NO: 3975413 - DNA, 25 bp, Homo sapien
tgtgatggaagctcctctgcagatc

SEQ ID NO: 3975414 - DNA, 25 bp, Homo sapien
gcagatcagatttggccctggagga

SEQ ID NO: 3975415 - DNA, 25 bp, Homo sapien
tgggaaggtgtgatggaagctcctc

SEQ ID NO: 3975416 - DNA, 25 bp, Homo sapien
tactgttaaacagtggcttgtgcac

SEQ ID NO: 3975417 - DNA, 25 bp, Homo sapien
ggtgtccctaattggaatcaaatat

SEQ ID NO: 3975418 - DNA, 25 bp, Homo sapien
ctgcatctttgacgctgcatgggtt

SEQ ID NO: 3975419 - DNA, 25 bp, Homo sapien
catgggtttcaatctggtgtcccta

SEQ ID NO: 3975420 - DNA, 25 bp, Homo sapien
catcctttgggtcccccaagacact

SEQ ID NO: 3975421 - DNA, 25 bp, Homo sapien
ccaagacacttgacccacggccccg

SEQ ID NO: 3975422 - DNA, 25 bp, Homo sapien
ttgacccacggccccgaatgctaaa

SEQ ID NO: 3975423 - DNA, 25 bp, Homo sapien
ggccccgaatgctaaattcccacat

SEQ ID NO: 3975424 - DNA, 25 bp, Homo sapien
acagataagcctcaggcctttcctc

SEQ ID NO: 3975425 - DNA, 25 bp, Homo sapien
tccttgaaggaggtccagtggggga

SEQ ID NO: 3975426 - DNA, 25 bp, Homo sapien
tagagctgcgattcagagtccctca

SEQ ID NO: 3975427 - DNA, 25 bp, Homo sapien
ctgttaaagggcagacagtgcagcc

SEQ ID NO: 3975428 - DNA, 25 bp, Homo sapien
cacaaggctagtgtttgctccaaca

SEQ ID NO: 3975429 - DNA, 25 bp, Homo sapien
gagtccctcattgccaagaagccac

SEQ ID NO: 3975430 - DNA, 25 bp, Homo sapien
tccagactggtagctttcaggtcag

SEQ ID NO: 3975431 - DNA, 25 bp, Homo sapien
gattgttaagcgacagctccagccc

SEQ ID NO: 3975432 - DNA, 25 bp, Homo sapien
ttgatcttggtgtgccctcggctct

SEQ ID NO: 3975433 - DNA, 25 bp, Homo sapien
gcttctgagcacctatcctttaaaa

SEQ ID NO: 3975434 - DNA, 25 bp, Homo sapien
tctcaggtcctgtagggttctcagg

SEQ ID NO: 3975435 - DNA, 25 bp, Homo sapien
tcactggcgaatggaaggtgacaga

SEQ ID NO: 3975436 - DNA, 25 bp, Homo sapien
agacagggagccacacccggttctc

SEQ ID NO: 3975437 - DNA, 25 bp, Homo sapien
gctccaggggcccaacaggatcact

SEQ ID NO: 3975438 - DNA, 25 bp, Homo sapien
cctagatggccaccagaggatgacc

SEQ ID NO: 3975439 - DNA, 25 bp, Homo sapien
tgacctctggtcgttcttgctgtac

SEQ ID NO: 3975440 - DNA, 25 bp, Homo sapien
ccaaaaccagagtgtcatagtgtca

SEQ ID NO: 3975441 - DNA, 25 bp, Homo sapien
tatatgctctaaaaatgggaggcct

SEQ ID NO: 3975442 - DNA, 25 bp, Homo sapien
tcagggaaacatgagcaacggcacg

SEQ ID NO: 3975443 - DNA, 25 bp, Homo sapien
aagcgaagcgtcactcgaggcagct

SEQ ID NO: 3975444 - DNA, 25 bp, Homo sapien
ttttattgcaattgcgtgaaggtcc

SEQ ID NO: 3975445 - DNA, 25 bp, Homo sapien
gaaggtccattagcaacggtcctgg

SEQ ID NO: 3975446 - DNA, 25 bp, Homo sapien
acagtgcctcccaagcaggttgagc

SEQ ID NO: 3975447 - DNA, 25 bp, Homo sapien
ggaacctgagggcagtcgctaaatg

SEQ ID NO: 3975448 - DNA, 25 bp, Homo sapien
tcccggccaagttcgtggaacctga

SEQ ID NO: 3975449 - DNA, 25 bp, Homo sapien
cagtgcctcccaagcaggttgagct

SEQ ID NO: 3975450 - DNA, 25 bp, Homo sapien
ggctgttgtgagcaccgagctgcac

SEQ ID NO: 3975451 - DNA, 25 bp, Homo sapien
taccctgtgcacaatgtggctcgga

SEQ ID NO: 3975452 - DNA, 25 bp, Homo sapien
tgtccatgctcagccgtactctggg

SEQ ID NO: 3975453 - DNA, 25 bp, Homo sapien
tattctgggtcacggccataccctg

SEQ ID NO: 3975454 - DNA, 25 bp, Homo sapien
ctggccgtcgttcatggaaggtggg

SEQ ID NO: 3975455 - DNA, 25 bp, Homo sapien
tggccgtcgttcatggaaggtgggg

SEQ ID NO: 3975456 - DNA, 25 bp, Homo sapien
aaatccacaattactccacttcact

SEQ ID NO: 3975457 - DNA, 25 bp, Homo sapien
tggagtcgttttccttacatgcact

SEQ ID NO: 3975458 - DNA, 25 bp, Homo sapien
ggactgaagtcagcactttggagtc

SEQ ID NO: 3975459 - DNA, 25 bp, Homo sapien
cttcatcctgcagcgagggagtccc

SEQ ID NO: 3975460 - DNA, 25 bp, Homo sapien
tatcgaagagggctcctttatcctc

SEQ ID NO: 3975461 - DNA, 25 bp, Homo sapien
ccatccctatcgaagagggctcctt

SEQ ID NO: 3975462 - DNA, 25 bp, Homo sapien
ccctatcgaagagggctcctttatc

SEQ ID NO: 3975463 - DNA, 25 bp, Homo sapien
tcgaagagggctcctttatcctcca

SEQ ID NO: 3975464 - DNA, 25 bp, Homo sapien
gctggtgcgatatgccttggacttc

SEQ ID NO: 3975465 - DNA, 25 bp, Homo sapien
gcgatatgccttggacttccccagc

SEQ ID NO: 3975466 - DNA, 25 bp, Homo sapien
ggtgcgatatgccttggacttcccc

SEQ ID NO: 3975467 - DNA, 25 bp, Homo sapien
gcagctggtgcgatatgccttggac

SEQ ID NO: 3975468 - DNA, 25 bp, Homo sapien
gctggttcaaccacaggccatgggt

SEQ ID NO: 3975469 - DNA, 25 bp, Homo sapien
gacaaggtgtggctggttcaaccac

SEQ ID NO: 3975470 - DNA, 25 bp, Homo sapien
caaggtgtggctggttcaaccacag

SEQ ID NO: 3975471 - DNA, 25 bp, Homo sapien
tgtggctggttcaaccacaggccat

SEQ ID NO: 3975472 - DNA, 25 bp, Homo sapien
cacaggggccctgacgatgaaaggc

SEQ ID NO: 3975473 - DNA, 25 bp, Homo sapien
gggccctgacgatgaaaggcatcct

SEQ ID NO: 3975474 - DNA, 25 bp, Homo sapien
ccctgacgatgaaaggcatcctgaa

SEQ ID NO: 3975475 - DNA, 25 bp, Homo sapien
gacacaggggccctgacgatgaaag

SEQ ID NO: 3975476 - DNA, 25 bp, Homo sapien
gtggtccagcaaggccgttaggcat

SEQ ID NO: 3975477 - DNA, 25 bp, Homo sapien
tcaccgaaggtgatggattcgagcc

SEQ ID NO: 3975478 - DNA, 25 bp, Homo sapien
tgcagagcccagtcagctgtgaaat

SEQ ID NO: 3975479 - DNA, 25 bp, Homo sapien
gattcgagcctggagcagcgattct

SEQ ID NO: 3975480 - DNA, 25 bp, Homo sapien
gcccatggctgacggagccaaagca

SEQ ID NO: 3975481 - DNA, 25 bp, Homo sapien
catggctgacggagccaaagcacct

SEQ ID NO: 3975482 - DNA, 25 bp, Homo sapien
tgacggagccaaagcacctcctgtc

SEQ ID NO: 3975483 - DNA, 25 bp, Homo sapien
ccaggcccatggctgacggagccaa

SEQ ID NO: 3975484 - DNA, 25 bp, Homo sapien
tgccggatacctgaagaaacgttca

SEQ ID NO: 3975485 - DNA, 25 bp, Homo sapien
tacctgaagaaacgttcacagactg

SEQ ID NO: 3975486 - DNA, 25 bp, Homo sapien
ctctgccggatacctgaagaaacgt

SEQ ID NO: 3975487 - DNA, 25 bp, Homo sapien
tgaagaaacgttcacagactggctg

SEQ ID NO: 3975488 - DNA, 25 bp, Homo sapien
tcgtatagcagtcaaggggagcagc

SEQ ID NO: 3975489 - DNA, 25 bp, Homo sapien
ctcgtatagcagtcaaggggagcag

SEQ ID NO: 3975490 - DNA, 25 bp, Homo sapien
cgtatagcagtcaaggggagcagcc

SEQ ID NO: 3975491 - DNA, 25 bp, Homo sapien
gaaggcttccgcttctgtgccatcg

SEQ ID NO: 3975492 - DNA, 25 bp, Homo sapien
ttgggaggcaagaaggcttccgctt

SEQ ID NO: 3975493 - DNA, 25 bp, Homo sapien
cacagcagctggcaattttaaactt

SEQ ID NO: 3975494 - DNA, 25 bp, Homo sapien
caagggccgaaaaccatgttgggag

SEQ ID NO: 3975495 - DNA, 25 bp, Homo sapien
gctgtgtgaaccgagcggaattttc

SEQ ID NO: 3975496 - DNA, 25 bp, Homo sapien
cagggctgtgtgaaccgagcggaat

SEQ ID NO: 3975497 - DNA, 25 bp, Homo sapien
gtgaaccgagcggaattttccattc

SEQ ID NO: 3975498 - DNA, 25 bp, Homo sapien
accgagcggaattttccattcatag

SEQ ID NO: 3975499 - DNA, 25 bp, Homo sapien
ctggggggctggcgttctcgtggta

SEQ ID NO: 3975500 - DNA, 25 bp, Homo sapien
tggggggctggcgttctcgtggtaa

SEQ ID NO: 3975501 - DNA, 25 bp, Homo sapien
cagggtcagcaaacctgccaggcgt

SEQ ID NO: 3975502 - DNA, 25 bp, Homo sapien
gtaaccggctatcggccacccattg

SEQ ID NO: 3975503 - DNA, 25 bp, Homo sapien
aaccggctatcggccacccattggc

SEQ ID NO: 3975504 - DNA, 25 bp, Homo sapien
taagtaaccggctatcggccaccca

SEQ ID NO: 3975505 - DNA, 25 bp, Homo sapien
aagtaaccggctatcggccacccat

SEQ ID NO: 3975506 - DNA, 25 bp, Homo sapien
tgcgtgcagccggaaagtcctgcgt

SEQ ID NO: 3975507 - DNA, 25 bp, Homo sapien
gggaggaaggctgctgcgtgcagcc

SEQ ID NO: 3975508 - DNA, 25 bp, Homo sapien
aaagtcctgcgtccctccgctctta

SEQ ID NO: 3975509 - DNA, 25 bp, Homo sapien
tgcagccggaaagtcctgcgtccct

SEQ ID NO: 3975510 - DNA, 25 bp, Homo sapien
cagggtttgtatggatttcgcccag

SEQ ID NO: 3975511 - DNA, 25 bp, Homo sapien
gattctcaggattagggcctagggc

SEQ ID NO: 3975512 - DNA, 25 bp, Homo sapien
gcggtgcaaacggaagccactggct

SEQ ID NO: 3975513 - DNA, 25 bp, Homo sapien
aaagcgctccaacgcgcggtgcaaa

SEQ ID NO: 3975514 - DNA, 25 bp, Homo sapien
aatcagcgtccggagcggcgcccga

SEQ ID NO: 3975515 - DNA, 25 bp, Homo sapien
tgcagccaatgagcgccacggctcg

SEQ ID NO: 3975516 - DNA, 25 bp, Homo sapien
ccaatgagcgccacggctcgaggcg

SEQ ID NO: 3975517 - DNA, 25 bp, Homo sapien
ctggtctgcagccaatgagcgccac

SEQ ID NO: 3975518 - DNA, 25 bp, Homo sapien
atggcgctcgtgcccagcgcccgct

SEQ ID NO: 3975519 - DNA, 25 bp, Homo sapien
gtgcccagcgcccgctacgtgagcg

SEQ ID NO: 3975520 - DNA, 25 bp, Homo sapien
cgctcgtgcccagcgcccgctacgt

SEQ ID NO: 3975521 - DNA, 25 bp, Homo sapien
tcgtgcccagcgcccgctacgtgag

SEQ ID NO: 3975522 - DNA, 25 bp, Homo sapien
tcagctcctggaacgactacctggg

SEQ ID NO: 3975523 - DNA, 25 bp, Homo sapien
gccacgctcatcaccaaagcggtgg

SEQ ID NO: 3975524 - DNA, 25 bp, Homo sapien
atcaccaaagcggtggacggcgagc

SEQ ID NO: 3975525 - DNA, 25 bp, Homo sapien
ttcagctcctggaacgactacctgg

SEQ ID NO: 3975526 - DNA, 25 bp, Homo sapien
ctgcgcccgcggtgggaacggcggc

SEQ ID NO: 3975527 - DNA, 25 bp, Homo sapien
cgtgttctgccggaacaacaaggag

SEQ ID NO: 3975528 - DNA, 25 bp, Homo sapien
cctggcaagaagctgcgctgaaggc

SEQ ID NO: 3975529 - DNA, 25 bp, Homo sapien
aacaaggaggcgatggcgctctaca

SEQ ID NO: 3975530 - DNA, 25 bp, Homo sapien
cccgagctgcaggtgtgcgtgttct

SEQ ID NO: 3975531 - DNA, 25 bp, Homo sapien
tcggctcgacatgggacgtcgtcct

SEQ ID NO: 3975532 - DNA, 25 bp, Homo sapien
tacttccgtgctgaacgattgggac

SEQ ID NO: 3975533 - DNA, 25 bp, Homo sapien
tgaaaagcagccgaccgtgtggagt

SEQ ID NO: 3975534 - DNA, 25 bp, Homo sapien
gattgggactagacgctgaaatccc

SEQ ID NO: 3975535 - DNA, 25 bp, Homo sapien
tcctagctggaggtgtaaaatgcac

SEQ ID NO: 3975536 - DNA, 25 bp, Homo sapien
cgaaggctgggtgtgtattccacta

SEQ ID NO: 3975537 - DNA, 25 bp, Homo sapien
caggtgaagcaagccgctggtagca

SEQ ID NO: 3975538 - DNA, 25 bp, Homo sapien
tagtttgcacatccagaacggcgaa

SEQ ID NO: 3975539 - DNA, 25 bp, Homo sapien
catggaagaccacctagcagatcgg

SEQ ID NO: 3975540 - DNA, 25 bp, Homo sapien
tctaacgtaggcagcagtaactcgt

SEQ ID NO: 3975541 - DNA, 25 bp, Homo sapien
ggtacttcaaacacgcacatgcaca

SEQ ID NO: 3975542 - DNA, 25 bp, Homo sapien
gatgggtttgctgactcgccttgaa

SEQ ID NO: 3975543 - DNA, 25 bp, Homo sapien
tccattaatggaaaagcagtttgct

SEQ ID NO: 3975544 - DNA, 25 bp, Homo sapien
tactgtttggattcacacttgcgca

SEQ ID NO: 3975545 - DNA, 25 bp, Homo sapien
tacgtatcaaccacttaagggtgtg

SEQ ID NO: 3975546 - DNA, 25 bp, Homo sapien
gctactgcgctccaaaattgaagtc

SEQ ID NO: 3975547 - DNA, 25 bp, Homo sapien
ccaatttagattggttgaagcacaa

SEQ ID NO: 3975548 - DNA, 25 bp, Homo sapien
ccaacctcctgtggatatggtgcat

SEQ ID NO: 3975549 - DNA, 25 bp, Homo sapien
gctttttgtgttatggtgaaacaac

SEQ ID NO: 3975550 - DNA, 25 bp, Homo sapien
tgatcaaacctatttaagacaccag

SEQ ID NO: 3975551 - DNA, 25 bp, Homo sapien
gtctcatttttagtacgacggagag

SEQ ID NO: 3975552 - DNA, 25 bp, Homo sapien
catttttagtacgacggagagattc

SEQ ID NO: 3975553 - DNA, 25 bp, Homo sapien
tttagtacgacggagagattcccta

SEQ ID NO: 3975554 - DNA, 25 bp, Homo sapien
gtacgacggagagattccctatctt

SEQ ID NO: 3975555 - DNA, 25 bp, Homo sapien
gaactcgacgaggagggtcccgctc

SEQ ID NO: 3975556 - DNA, 25 bp, Homo sapien
ctgtcatcagcacgtctccaagaac

SEQ ID NO: 3975557 - DNA, 25 bp, Homo sapien
gacgaggagggtcccgctcttccac

SEQ ID NO: 3975558 - DNA, 25 bp, Homo sapien
cccgctcttccacccggtcatcttt

SEQ ID NO: 3975559 - DNA, 25 bp, Homo sapien
aggtcctcttcggtccctgtcgtct

SEQ ID NO: 3975560 - DNA, 25 bp, Homo sapien
gatctgagtggaggtcctcttcggt

SEQ ID NO: 3975561 - DNA, 25 bp, Homo sapien
tcgtctcttagatctcgtctttctc

SEQ ID NO: 3975562 - DNA, 25 bp, Homo sapien
tctttctcttagatcacgccggtca

SEQ ID NO: 3975563 - DNA, 25 bp, Homo sapien
ggtcatccctatccctatcgtcccg

SEQ ID NO: 3975564 - DNA, 25 bp, Homo sapien
ggcgacggtcatccctatccctatc

SEQ ID NO: 3975565 - DNA, 25 bp, Homo sapien
gtcccggcgacttgagtctctccag

SEQ ID NO: 3975566 - DNA, 25 bp, Homo sapien
tatccctatcgtcccggcgacttga

SEQ ID NO: 3975567 - DNA, 25 bp, Homo sapien
taacagacagtttaaactcataacc

SEQ ID NO: 3975568 - DNA, 25 bp, Homo sapien
gaccaaatggataattataagtaca

SEQ ID NO: 3975569 - DNA, 25 bp, Homo sapien
tataagtacatccagtccaagctgg

SEQ ID NO: 3975570 - DNA, 25 bp, Homo sapien
aagctggggcttagagtttacaaat

SEQ ID NO: 3975571 - DNA, 25 bp, Homo sapien
tacaaggacactttggcagcgggaa

SEQ ID NO: 3975572 - DNA, 25 bp, Homo sapien
caaatgagaacacccagatctgtgc

SEQ ID NO: 3975573 - DNA, 25 bp, Homo sapien
tgactaccatactggccagcagaca

SEQ ID NO: 3975574 - DNA, 25 bp, Homo sapien
gcagcgggaacaagctagaacttct

SEQ ID NO: 3975575 - DNA, 25 bp, Homo sapien
ccacaggggtaaaagcaacggactg

SEQ ID NO: 3975576 - DNA, 25 bp, Homo sapien
cacaggggtaaaagcaacggactga

SEQ ID NO: 3975577 - DNA, 25 bp, Homo sapien
aaagatggctggactggttccaatg

SEQ ID NO: 3975578 - DNA, 25 bp, Homo sapien
gacagccacgaagtttgggcctcca

SEQ ID NO: 3975579 - DNA, 25 bp, Homo sapien
cctttggacagccacgaagtttggg

SEQ ID NO: 3975580 - DNA, 25 bp, Homo sapien
cccaacgggtcacacagcctttgga

SEQ ID NO: 3975581 - DNA, 25 bp, Homo sapien
cactgcgcccggcctctacaaataa

SEQ ID NO: 3975582 - DNA, 25 bp, Homo sapien
caaataatttaattagagcatcaca

SEQ ID NO: 3975583 - DNA, 25 bp, Homo sapien
aaataatttaattagagcatcacac

SEQ ID NO: 3975584 - DNA, 25 bp, Homo sapien
tgcgcccggcctctacaaataattt

SEQ ID NO: 3975585 - DNA, 25 bp, Homo sapien
tctgtcccattcacgttcttctgat

SEQ ID NO: 3975586 - DNA, 25 bp, Homo sapien
tgtcattctcctcccgatcttgatt

SEQ ID NO: 3975587 - DNA, 25 bp, Homo sapien
tcccattcacgttcttctgatggcc

SEQ ID NO: 3975588 - DNA, 25 bp, Homo sapien
tttctctgtcccattcacgttcttc

SEQ ID NO: 3975589 - DNA, 25 bp, Homo sapien
caaagagcacatcactaaagaagag

SEQ ID NO: 3975590 - DNA, 25 bp, Homo sapien
gagcacatcactaaagaagagaggg

SEQ ID NO: 3975591 - DNA, 25 bp, Homo sapien
ttatgttttggatggtggtattctg

SEQ ID NO: 3975592 - DNA, 25 bp, Homo sapien
tttgacagcgaagtcactgcaaatg

SEQ ID NO: 3975593 - DNA, 25 bp, Homo sapien
ggtcatcatcagcattacgccagga

SEQ ID NO: 3975594 - DNA, 25 bp, Homo sapien
tcatctgtgttacgccaggaaggcc

SEQ ID NO: 3975595 - DNA, 25 bp, Homo sapien
caattcgtctgggaggcctgtcatc

SEQ ID NO: 3975596 - DNA, 25 bp, Homo sapien
catcgtctggtctaagagagggctc

SEQ ID NO: 3975597 - DNA, 25 bp, Homo sapien
gggcctcttctccactcagaatctg

SEQ ID NO: 3975598 - DNA, 25 bp, Homo sapien
ctgcttcaggtccttttctccaggt

SEQ ID NO: 3975599 - DNA, 25 bp, Homo sapien
caggtccttttctccaggtgccttc

SEQ ID NO: 3975600 - DNA, 25 bp, Homo sapien
gccttctgaatctctatctccccaa

SEQ ID NO: 3975601 - DNA, 25 bp, Homo sapien
cagtgcctacgaagcaaagaaaggt

SEQ ID NO: 3975602 - DNA, 25 bp, Homo sapien
ggcaaaacttgcagttacccaacat

SEQ ID NO: 3975603 - DNA, 25 bp, Homo sapien
tcaaagtactctgatgggccgggcg

SEQ ID NO: 3975604 - DNA, 25 bp, Homo sapien
taagctacagtctcaaacaatgcgt

SEQ ID NO: 3975605 - DNA, 25 bp, Homo sapien
tctacagagtaagaccaaaatcctc

SEQ ID NO: 3975606 - DNA, 25 bp, Homo sapien
ggagactgaatccttagaccaaaag

SEQ ID NO: 3975607 - DNA, 25 bp, Homo sapien
tctaaacacagtcttagggacagtt

SEQ ID NO: 3975608 - DNA, 25 bp, Homo sapien
ccatttattgttcaacggtgagaga

SEQ ID NO: 3975609 - DNA, 25 bp, Homo sapien
gtagctcttcctcgcgttttgctcg

SEQ ID NO: 3975610 - DNA, 25 bp, Homo sapien
gctcctgatactctcgtagctcttc

SEQ ID NO: 3975611 - DNA, 25 bp, Homo sapien
gttttgctcgttcggcgcgctctct

SEQ ID NO: 3975612 - DNA, 25 bp, Homo sapien
ttctagaaagggaactatcgccaag

SEQ ID NO: 3975613 - DNA, 25 bp, Homo sapien
catatcttccccctagtgctagttc

SEQ ID NO: 3975614 - DNA, 25 bp, Homo sapien
accattgattaggttactaagtgtg

SEQ ID NO: 3975615 - DNA, 25 bp, Homo sapien
aggttactaagtgtgcctcccagcc

SEQ ID NO: 3975616 - DNA, 25 bp, Homo sapien
gattaggttactaagtgtgcctccc

SEQ ID NO: 3975617 - DNA, 25 bp, Homo sapien
ttctctatagtatgttatcctgcgt

SEQ ID NO: 3975618 - DNA, 25 bp, Homo sapien
tacgctgccttttccgttcttccaa

SEQ ID NO: 3975619 - DNA, 25 bp, Homo sapien
ccaatcgattatgcctttcttctgc

SEQ ID NO: 3975620 - DNA, 25 bp, Homo sapien
tatcctgcgttcttctttacgctgc

SEQ ID NO: 3975621 - DNA, 25 bp, Homo sapien
gtcgcattacgaataaatctctgtc

SEQ ID NO: 3975622 - DNA, 25 bp, Homo sapien
cattcgattcttatgttcaagagcc

SEQ ID NO: 3975623 - DNA, 25 bp, Homo sapien
gccgtgcagctttgagtcgcattac

SEQ ID NO: 3975624 - DNA, 25 bp, Homo sapien
tcacgttctagctgcattgtagtaa

SEQ ID NO: 3975625 - DNA, 25 bp, Homo sapien
cgtaagcgctctttatcaaaggaat

SEQ ID NO: 3975626 - DNA, 25 bp, Homo sapien
gctcccacagatccatgtctttaat

SEQ ID NO: 3975627 - DNA, 25 bp, Homo sapien
taattctctgttcctcgtaagcgct

SEQ ID NO: 3975628 - DNA, 25 bp, Homo sapien
tcttgttgctcccacagatccatgt

SEQ ID NO: 3975629 - DNA, 25 bp, Homo sapien
gattctttaggcgttcttgaagttc

SEQ ID NO: 3975630 - DNA, 25 bp, Homo sapien
agttgttcaacctgtttagccatga

SEQ ID NO: 3975631 - DNA, 25 bp, Homo sapien
aatctggatccaattcctcaaggtc

SEQ ID NO: 3975632 - DNA, 25 bp, Homo sapien
cttttcttgattctttaggcgttct

SEQ ID NO: 3975633 - DNA, 25 bp, Homo sapien
ttgatctgctccaaacgctctcgga

SEQ ID NO: 3975634 - DNA, 25 bp, Homo sapien
gatccgctggtgctcttttcgtgaa

SEQ ID NO: 3975635 - DNA, 25 bp, Homo sapien
tgaatattcagactctcaaggcgct

SEQ ID NO: 3975636 - DNA, 25 bp, Homo sapien
tttaaggtatgcagtgacagccaac

SEQ ID NO: 3975637 - DNA, 25 bp, Homo sapien
ttcttatctgctctgaaggcatgct

SEQ ID NO: 3975638 - DNA, 25 bp, Homo sapien
ttgcaaatgaggaccaatcggagca

SEQ ID NO: 3975639 - DNA, 25 bp, Homo sapien
gcatcttctcgagtagcataattca

SEQ ID NO: 3975640 - DNA, 25 bp, Homo sapien
tatgagctggtttaatgacttcaag

SEQ ID NO: 3975641 - DNA, 25 bp, Homo sapien
tccgagaagtgtgatcaatacgaac

SEQ ID NO: 3975642 - DNA, 25 bp, Homo sapien
gggtccgagaagtgtgatcaatacg

SEQ ID NO: 3975643 - DNA, 25 bp, Homo sapien
cagggtccgagaagtgtgatcaata

SEQ ID NO: 3975644 - DNA, 25 bp, Homo sapien
ctcagggtccgagaagtgtgatcaa

SEQ ID NO: 3975645 - DNA, 25 bp, Homo sapien
aatggtatcactgtaccaaaagctg

SEQ ID NO: 3975646 - DNA, 25 bp, Homo sapien
gctggaaaagttcactcagtaaact

SEQ ID NO: 3975647 - DNA, 25 bp, Homo sapien
ttatcaatggttaaatccacaagta

SEQ ID NO: 3975648 - DNA, 25 bp, Homo sapien
aagtaacagaagaatgtcatataca

SEQ ID NO: 3975649 - DNA, 25 bp, Homo sapien
ccgttccagttggaaagcatcaaca

SEQ ID NO: 3975650 - DNA, 25 bp, Homo sapien
gcctggctgcatctactatggcccg

SEQ ID NO: 3975651 - DNA, 25 bp, Homo sapien
tgcaagtcgcaatgcctggctgcat

SEQ ID NO: 3975652 - DNA, 25 bp, Homo sapien
gaagtcaaacgagaaaactcaatgc

SEQ ID NO: 3975653 - DNA, 25 bp, Homo sapien
aaaacctgctacttaccgaatatat

SEQ ID NO: 3975654 - DNA, 25 bp, Homo sapien
ctgctacttaccgaatatatttaaa

SEQ ID NO: 3975655 - DNA, 25 bp, Homo sapien
acctgctacttaccgaatatattta

SEQ ID NO: 3975656 - DNA, 25 bp, Homo sapien
aaacctgctacttaccgaatatatt

SEQ ID NO: 3975657 - DNA, 25 bp, Homo sapien
aagaaataacactactcacataaaa

SEQ ID NO: 3975658 - DNA, 25 bp, Homo sapien
gcagcattactatttatagttatac

SEQ ID NO: 3975659 - DNA, 25 bp, Homo sapien
gctaattagccttcaattatttgta

SEQ ID NO: 3975660 - DNA, 25 bp, Homo sapien
tttttgtctgaaggagactggcagc

SEQ ID NO: 3975661 - DNA, 25 bp, Homo sapien
tgaaagatgctcaatgctacaagat

SEQ ID NO: 3975662 - DNA, 25 bp, Homo sapien
caaaatgggagcacttactgactta

SEQ ID NO: 3975663 - DNA, 25 bp, Homo sapien
tatatgaaaaggctgtctcattcac

SEQ ID NO: 3975664 - DNA, 25 bp, Homo sapien
gactaattccacttcttatgccaca

SEQ ID NO: 3975665 - DNA, 25 bp, Homo sapien
ttgcagttgtggcacatactgctgc

SEQ ID NO: 3975666 - DNA, 25 bp, Homo sapien
gctgcaattccggttccttttcagg

SEQ ID NO: 3975667 - DNA, 25 bp, Homo sapien
tgttttgcagttgtggcacatactg

SEQ ID NO: 3975668 - DNA, 25 bp, Homo sapien
gcacatactgctgcaattccggttc

SEQ ID NO: 3975669 - DNA, 25 bp, Homo sapien
gaaagagaatcacactttctacata

SEQ ID NO: 3975670 - DNA, 25 bp, Homo sapien
aaatccattaaattgaaagagaatc

SEQ ID NO: 3975671 - DNA, 25 bp, Homo sapien
ctttctacataagagatactaaaac

SEQ ID NO: 3975672 - DNA, 25 bp, Homo sapien
ccattaaattgaaagagaatcacac

SEQ ID NO: 3975673 - DNA, 25 bp, Homo sapien
tagtcatgctgctaattaacctcca

SEQ ID NO: 3975674 - DNA, 25 bp, Homo sapien
caatggctaaattagtcatgctgct

SEQ ID NO: 3975675 - DNA, 25 bp, Homo sapien
tgctgagcacatcagatatatcttt

SEQ ID NO: 3975676 - DNA, 25 bp, Homo sapien
aggtgactggcagcaatggctaaat

SEQ ID NO: 3975677 - DNA, 25 bp, Homo sapien
caaccagaacttaaatacaaaggct

SEQ ID NO: 3975678 - DNA, 25 bp, Homo sapien
ctctgtggtaacaaccagaacttaa

SEQ ID NO: 3975679 - DNA, 25 bp, Homo sapien
caaaactgcaagaaggccaactctg

SEQ ID NO: 3975680 - DNA, 25 bp, Homo sapien
aattccaacacataggacaaaactt

SEQ ID NO: 3975681 - DNA, 25 bp, Homo sapien
taatgggttaaattctacttcaagc

SEQ ID NO: 3975682 - DNA, 25 bp, Homo sapien
tacttcaagccaattgtaaaggtct

SEQ ID NO: 3975683 - DNA, 25 bp, Homo sapien
tcacttctgggacaacatattgtag

SEQ ID NO: 3975684 - DNA, 25 bp, Homo sapien
tttgtgactcgctcacagagtttta

SEQ ID NO: 3975685 - DNA, 25 bp, Homo sapien
gggtacaaggctgaaatcctacaac

SEQ ID NO: 3975686 - DNA, 25 bp, Homo sapien
cacacatgggagcactcaggtctaa

SEQ ID NO: 3975687 - DNA, 25 bp, Homo sapien
cagaagtgtgtacccatagagagtg

SEQ ID NO: 3975688 - DNA, 25 bp, Homo sapien
caaaataactgctgggatagagcaa

SEQ ID NO: 3975689 - DNA, 25 bp, Homo sapien
cctagtagtgttgcaaggcgacgct

SEQ ID NO: 3975690 - DNA, 25 bp, Homo sapien
tccgtacgctcaggagtaataggga

SEQ ID NO: 3975691 - DNA, 25 bp, Homo sapien
taataaggccaattcgtgtcggtgg

SEQ ID NO: 3975692 - DNA, 25 bp, Homo sapien
cagaagtcgagcaatatccgtacgc

SEQ ID NO: 3975693 - DNA, 25 bp, Homo sapien
taaagacgatggagtgtagatgcat

SEQ ID NO: 3975694 - DNA, 25 bp, Homo sapien
gagactttgttatagtaatttgcca

SEQ ID NO: 3975695 - DNA, 25 bp, Homo sapien
ttttagacaaggagaatagcccgtg

SEQ ID NO: 3975696 - DNA, 25 bp, Homo sapien
tttgccatcaactgaggtttaggtg

SEQ ID NO: 3975697 - DNA, 25 bp, Homo sapien
agtttacggaattcagccttacgcg

SEQ ID NO: 3975698 - DNA, 25 bp, Homo sapien
ggcgctgaatctgcgataagtgcat

SEQ ID NO: 3975699 - DNA, 25 bp, Homo sapien
ccttacgcgtgtattggaggcagaa

SEQ ID NO: 3975700 - DNA, 25 bp, Homo sapien
cgtactttggttatggtggcgctga

SEQ ID NO: 3975701 - DNA, 25 bp, Homo sapien
aatatcatggtacaggcgctctact

SEQ ID NO: 3975702 - DNA, 25 bp, Homo sapien
tcaccacttacagcacttaggagaa

SEQ ID NO: 3975703 - DNA, 25 bp, Homo sapien
taatctgtcagtacgatcctgagtg

SEQ ID NO: 3975704 - DNA, 25 bp, Homo sapien
tcccacaggaatttaacccatggag

SEQ ID NO: 3975705 - DNA, 25 bp, Homo sapien
aatatgccctaacaacatcctccag

SEQ ID NO: 3975706 - DNA, 25 bp, Homo sapien
ccatctgctgagattcttctttagc

SEQ ID NO: 3975707 - DNA, 25 bp, Homo sapien
gtttgaatattatctagatcctcta

SEQ ID NO: 3975708 - DNA, 25 bp, Homo sapien
ctagatcctctatatctaagaccat

SEQ ID NO: 3975709 - DNA, 25 bp, Homo sapien
tcttcggcagattactaaaaacact

SEQ ID NO: 3975710 - DNA, 25 bp, Homo sapien
gttcttcggcagattactaaaaaca

SEQ ID NO: 3975711 - DNA, 25 bp, Homo sapien
ttcttcggcagattactaaaaacac

SEQ ID NO: 3975712 - DNA, 25 bp, Homo sapien
gccaagtggctcttgcgaagatcca

SEQ ID NO: 3975713 - DNA, 25 bp, Homo sapien
gaagatccacgcaaagttccaagta

SEQ ID NO: 3975714 - DNA, 25 bp, Homo sapien
ctggtataacccctcctttgccaag

SEQ ID NO: 3975715 - DNA, 25 bp, Homo sapien
taattggttcgtgtatcttttgcca

SEQ ID NO: 3975716 - DNA, 25 bp, Homo sapien
ctccagtccgggtaggggctgtctc

SEQ ID NO: 3975717 - DNA, 25 bp, Homo sapien
cagtcgatagagtgagaaggaaacc

SEQ ID NO: 3975718 - DNA, 25 bp, Homo sapien
gagtgagaaggaaacccatgcccaa

SEQ ID NO: 3975719 - DNA, 25 bp, Homo sapien
ctcccagaccccagtcgatagagtg

SEQ ID NO: 3975720 - DNA, 25 bp, Homo sapien
agggcattttccggcctctgaaaat

SEQ ID NO: 3975721 - DNA, 25 bp, Homo sapien
tgagggcattttccggcctctgaaa

SEQ ID NO: 3975722 - DNA, 25 bp, Homo sapien
ttccggcctctgaaaataggccggc

SEQ ID NO: 3975723 - DNA, 25 bp, Homo sapien
ccggcctctgaaaataggccggcat

SEQ ID NO: 3975724 - DNA, 25 bp, Homo sapien
gtcagcgaactctctagtggcccgg

SEQ ID NO: 3975725 - DNA, 25 bp, Homo sapien
gtcctaggcgcgcaaggtccagttc

SEQ ID NO: 3975726 - DNA, 25 bp, Homo sapien
tcctggatagcgttagggagacagt

SEQ ID NO: 3975727 - DNA, 25 bp, Homo sapien
tggcgtcacgcacgccgacagacgt

SEQ ID NO: 3975728 - DNA, 25 bp, Homo sapien
aagaagatttgggaagtatagacat

SEQ ID NO: 3975729 - DNA, 25 bp, Homo sapien
agatttgggaagtatagacatggac

SEQ ID NO: 3975730 - DNA, 25 bp, Homo sapien
tatctaaattgatcactataaagaa

SEQ ID NO: 3975731 - DNA, 25 bp, Homo sapien
atttgggaagtatagacatggaccc

SEQ ID NO: 3975732 - DNA, 25 bp, Homo sapien
cactgtgcctgagccagacggttct

SEQ ID NO: 3975733 - DNA, 25 bp, Homo sapien
cctttgaaggtcgtcactaggacag

SEQ ID NO: 3975734 - DNA, 25 bp, Homo sapien
ggtctgaaaccttacagccgtgcat

SEQ ID NO: 3975735 - DNA, 25 bp, Homo sapien
ttaatcatgaaagtgtccaaccggg

SEQ ID NO: 3975736 - DNA, 25 bp, Homo sapien
gtggtgtgcctgtaggtgggaggat

SEQ ID NO: 3975737 - DNA, 25 bp, Homo sapien
tggtgtgcctgtaggtgggaggatt

SEQ ID NO: 3975738 - DNA, 25 bp, Homo sapien
attgaggctgggagttgatcagcct

SEQ ID NO: 3975739 - DNA, 25 bp, Homo sapien
aattgaggctgggagttgatcagcc

SEQ ID NO: 3975740 - DNA, 25 bp, Homo sapien
tgcacctcaacgccgatgagctgga

SEQ ID NO: 3975741 - DNA, 25 bp, Homo sapien
gcacctcaacgccgatgagctggaa

SEQ ID NO: 3975742 - DNA, 25 bp, Homo sapien
gtgcacctcaacgccgatgagctgg

SEQ ID NO: 3975743 - DNA, 25 bp, Homo sapien
ctaccattgtaaatgtggtccctgg

SEQ ID NO: 3975744 - DNA, 25 bp, Homo sapien
gtgcatgactgtactcgtatggaaa

SEQ ID NO: 3975745 - DNA, 25 bp, Homo sapien
ggaaatatccatagcagtgttactc

SEQ ID NO: 3975746 - DNA, 25 bp, Homo sapien
gaaacgatactgtaaaaatatagca

SEQ ID NO: 3975747 - DNA, 25 bp, Homo sapien
tgtctcgctgtgtaggcataagcta

SEQ ID NO: 3975748 - DNA, 25 bp, Homo sapien
ttcaagagaccctgcagttgcactt

SEQ ID NO: 3975749 - DNA, 25 bp, Homo sapien
cattacagaacagctagaggtcctg

SEQ ID NO: 3975750 - DNA, 25 bp, Homo sapien
tcagaaagctgcctgaaacgttgct

SEQ ID NO: 3975751 - DNA, 25 bp, Homo sapien
aaagttcaagacggccaagggcgcg

SEQ ID NO: 3975752 - DNA, 25 bp, Homo sapien
tactgctcattccaaagaaaatggg

SEQ ID NO: 3975753 - DNA, 25 bp, Homo sapien
ctatattagctaatgatcaaagttg

SEQ ID NO: 3975754 - DNA, 25 bp, Homo sapien
gtgagggcgctagggaattattaaa

SEQ ID NO: 3975755 - DNA, 25 bp, Homo sapien
attagctggacgtggtggctggtac

SEQ ID NO: 3975756 - DNA, 25 bp, Homo sapien
gctggacgtggtggctggtacatgc

SEQ ID NO: 3975757 - DNA, 25 bp, Homo sapien
ctggacgtggtggctggtacatgcc

SEQ ID NO: 3975758 - DNA, 25 bp, Homo sapien
tagctggacgtggtggctggtacat

SEQ ID NO: 3975759 - DNA, 25 bp, Homo sapien
gttggagggcgtaaacagcgcccca

SEQ ID NO: 3975760 - DNA, 25 bp, Homo sapien
gcttgagacggcctatccatttaac

SEQ ID NO: 3975761 - DNA, 25 bp, Homo sapien
tccatttaacacctgtgtcctgggc

SEQ ID NO: 3975762 - DNA, 25 bp, Homo sapien
gtacgtgttccgcttgagacggcct

SEQ ID NO: 3975763 - DNA, 25 bp, Homo sapien
acttgagacaggtttattagttaat

SEQ ID NO: 3975764 - DNA, 25 bp, Homo sapien
gaagacctgtggcaaagttctctaa

SEQ ID NO: 3975765 - DNA, 25 bp, Homo sapien
tctcagtatggaatctgaagtcgcc

SEQ ID NO: 3975766 - DNA, 25 bp, Homo sapien
tgaagtcgccttgtcagcacagaca

SEQ ID NO: 3975767 - DNA, 25 bp, Homo sapien
gccagcctgggaacgatctcagtat

SEQ ID NO: 3975768 - DNA, 25 bp, Homo sapien
acataaattcacctaaaactcacgc

SEQ ID NO: 3975769 - DNA, 25 bp, Homo sapien
ccacataaattcacctaaaactcac

SEQ ID NO: 3975770 - DNA, 25 bp, Homo sapien
cacataaattcacctaaaactcacg

SEQ ID NO: 3975771 - DNA, 25 bp, Homo sapien
accacataaattcacctaaaactca

SEQ ID NO: 3975772 - DNA, 25 bp, Homo sapien
acccctctgtgataaaagatttctg

SEQ ID NO: 3975773 - DNA, 25 bp, Homo sapien
tctgtttcttctgttggagactgaa

SEQ ID NO: 3975774 - DNA, 25 bp, Homo sapien
ggagactgaattttctcttcaagac

SEQ ID NO: 3975775 - DNA, 25 bp, Homo sapien
tctcttcaagactacagtactgtat

SEQ ID NO: 3975776 - DNA, 25 bp, Homo sapien
gcagatctcatttcatcaagcacct

SEQ ID NO: 3975777 - DNA, 25 bp, Homo sapien
tcactcaggaatcactattaacaat

SEQ ID NO: 3975778 - DNA, 25 bp, Homo sapien
ccttgagtattttaaggcaattctc

SEQ ID NO: 3975779 - DNA, 25 bp, Homo sapien
tgtgctcactcaggaatcactatta

SEQ ID NO: 3975780 - DNA, 25 bp, Homo sapien
ctggctgtgcaggccctgccacctg

SEQ ID NO: 3975781 - DNA, 25 bp, Homo sapien
gcaggccctgccacctggcccccag

SEQ ID NO: 3975782 - DNA, 25 bp, Homo sapien
tccttggcctggctgtgcaggccct

SEQ ID NO: 3975783 - DNA, 25 bp, Homo sapien
ctgctgccctgctccttggcctggc

SEQ ID NO: 3975784 - DNA, 25 bp, Homo sapien
gagccacagcacccgacctaatttt

SEQ ID NO: 3975785 - DNA, 25 bp, Homo sapien
ctcccacttgggcttcccagagtgc

SEQ ID NO: 3975786 - DNA, 25 bp, Homo sapien
gatcctcccacttgggcttcccaga

SEQ ID NO: 3975787 - DNA, 25 bp, Homo sapien
gagatgaggttcagactggtctcga

SEQ ID NO: 3975788 - DNA, 25 bp, Homo sapien
gctgagattacagctaccgtggcta

SEQ ID NO: 3975789 - DNA, 25 bp, Homo sapien
tatggtattggtaagccttccggtc

SEQ ID NO: 3975790 - DNA, 25 bp, Homo sapien
tcagggagtcaaaggttatacttgg

SEQ ID NO: 3975791 - DNA, 25 bp, Homo sapien
aagctattaatggttaagttttcag

SEQ ID NO: 3975792 - DNA, 25 bp, Homo sapien
aagaaaatggcaccatcagtcccat

SEQ ID NO: 3975793 - DNA, 25 bp, Homo sapien
aaaagaaaatggcaccatcagtccc

SEQ ID NO: 3975794 - DNA, 25 bp, Homo sapien
aaagaaaatggcaccatcagtccca

SEQ ID NO: 3975795 - DNA, 25 bp, Homo sapien
ctaaaagaaaatggcaccatcagtc

SEQ ID NO: 3975796 - DNA, 25 bp, Homo sapien
ggacagtacaagacagtttcaaaat

SEQ ID NO: 3975797 - DNA, 25 bp, Homo sapien
tgccaggacagtacaagacagtttc

SEQ ID NO: 3975798 - DNA, 25 bp, Homo sapien
caggacagtacaagacagtttcaaa

SEQ ID NO: 3975799 - DNA, 25 bp, Homo sapien
acagtacaagacagtttcaaaatcc

SEQ ID NO: 3975800 - DNA, 25 bp, Homo sapien
tggcaggagagaaggactcgacacc

SEQ ID NO: 3975801 - DNA, 25 bp, Homo sapien
tatgaagaagccaatctggcaggag

SEQ ID NO: 3975802 - DNA, 25 bp, Homo sapien
caggagagaaggactcgacacccac

SEQ ID NO: 3975803 - DNA, 25 bp, Homo sapien
tgaagaagccaatctggcaggagag

SEQ ID NO: 3975804 - DNA, 25 bp, Homo sapien
tgttcaagctgccatggactgcaat

SEQ ID NO: 3975805 - DNA, 25 bp, Homo sapien
ggttaggtttctcatactggtggcc

SEQ ID NO: 3975806 - DNA, 25 bp, Homo sapien
tccgcctcgtaggccatttctggct

SEQ ID NO: 3975807 - DNA, 25 bp, Homo sapien
gcccagcaggggagcttctgttcaa

SEQ ID NO: 3975808 - DNA, 25 bp, Homo sapien
taggtgaagacttcaggaatcagag

SEQ ID NO: 3975809 - DNA, 25 bp, Homo sapien
tggatgctagcgtttctctaacagc

SEQ ID NO: 3975810 - DNA, 25 bp, Homo sapien
caggaatcagagctgaggtcccaaa

SEQ ID NO: 3975811 - DNA, 25 bp, Homo sapien
ctggatgctagcgtttctctaacag

SEQ ID NO: 3975812 - DNA, 25 bp, Homo sapien
tgtccatgaccgcaatccccttaat

SEQ ID NO: 3975813 - DNA, 25 bp, Homo sapien
tcaagacttcgggacatgtagacat

SEQ ID NO: 3975814 - DNA, 25 bp, Homo sapien
tcccagcaattctggaatgacccag

SEQ ID NO: 3975815 - DNA, 25 bp, Homo sapien
ccttaatggattcaagacttcggga

SEQ ID NO: 3975816 - DNA, 25 bp, Homo sapien
caagggccagtcaggccatacttca

SEQ ID NO: 3975817 - DNA, 25 bp, Homo sapien
atacttcatctggacaaactgaggg

SEQ ID NO: 3975818 - DNA, 25 bp, Homo sapien
cagtcaggccatacttcatctggac

SEQ ID NO: 3975819 - DNA, 25 bp, Homo sapien
ggccatacttcatctggacaaactg

SEQ ID NO: 3975820 - DNA, 25 bp, Homo sapien
agtaatgatctttctagtggcttac

SEQ ID NO: 3975821 - DNA, 25 bp, Homo sapien
gaaagttgaagaagcaacggctccc

SEQ ID NO: 3975822 - DNA, 25 bp, Homo sapien
acggctcccgccattagtaatgatc

SEQ ID NO: 3975823 - DNA, 25 bp, Homo sapien
aatgatctttctagtggcttacaag

SEQ ID NO: 3975824 - DNA, 25 bp, Homo sapien
tgtttccattgatgctgttgaacgc

SEQ ID NO: 3975825 - DNA, 25 bp, Homo sapien
ccattgatgctgttgaacgctgcca

SEQ ID NO: 3975826 - DNA, 25 bp, Homo sapien
cttctgtttccattgatgctgttga

SEQ ID NO: 3975827 - DNA, 25 bp, Homo sapien
tgctgttgaacgctgccatgtaggc

SEQ ID NO: 3975828 - DNA, 25 bp, Homo sapien
gggcaaatggatcgcattttcgttt

SEQ ID NO: 3975829 - DNA, 25 bp, Homo sapien
gcataacagaatttagtaatcgtga

SEQ ID NO: 3975830 - DNA, 25 bp, Homo sapien
cattttcgtttcaagcataacagaa

SEQ ID NO: 3975831 - DNA, 25 bp, Homo sapien
atcgtgaaacaggaagaatggctac

SEQ ID NO: 3975832 - DNA, 25 bp, Homo sapien
aaatcacggacttgatccctttcag

SEQ ID NO: 3975833 - DNA, 25 bp, Homo sapien
gacttgatccctttcagtggcgtca

SEQ ID NO: 3975834 - DNA, 25 bp, Homo sapien
cctttcagtggcgtcattgacaaaa

SEQ ID NO: 3975835 - DNA, 25 bp, Homo sapien
tgaggtaaaatcacggacttgatcc

SEQ ID NO: 3975836 - DNA, 25 bp, Homo sapien
tgctgctgtcgggatgcactgttgc

SEQ ID NO: 3975837 - DNA, 25 bp, Homo sapien
gggatcaggttgctgctgtcgggat

SEQ ID NO: 3975838 - DNA, 25 bp, Homo sapien
caggttgctgctgtcgggatgcact

SEQ ID NO: 3975839 - DNA, 25 bp, Homo sapien
tgcaggtcgaaaaagcttggggatc

SEQ ID NO: 3975840 - DNA, 25 bp, Homo sapien
caaggttagctggatgtctggtttt

SEQ ID NO: 3975841 - DNA, 25 bp, Homo sapien
aggagagatgcaaggttagctggat

SEQ ID NO: 3975842 - DNA, 25 bp, Homo sapien
gagatgcaaggttagctggatgtct

SEQ ID NO: 3975843 - DNA, 25 bp, Homo sapien
atgcaaggttagctggatgtctggt

SEQ ID NO: 3975844 - DNA, 25 bp, Homo sapien
aagactccgcttccaagcttcttgt

SEQ ID NO: 3975845 - DNA, 25 bp, Homo sapien
agactccgcttccaagcttcttgta

SEQ ID NO: 3975846 - DNA, 25 bp, Homo sapien
gactccgcttccaagcttcttgtat

SEQ ID NO: 3975847 - DNA, 25 bp, Homo sapien
taatgacaagcaaagagacgagcca

SEQ ID NO: 3975848 - DNA, 25 bp, Homo sapien
gaaagccccacatactgcaaggtag

SEQ ID NO: 3975849 - DNA, 25 bp, Homo sapien
tgcagaacagcctcgaactactggg

SEQ ID NO: 3975850 - DNA, 25 bp, Homo sapien
gaacagtccgtttgagcctatcggc

SEQ ID NO: 3975851 - DNA, 25 bp, Homo sapien
gttgcctcgagttttctatactttc

SEQ ID NO: 3975852 - DNA, 25 bp, Homo sapien
cctttggtccgccgaggcagggctg

SEQ ID NO: 3975853 - DNA, 25 bp, Homo sapien
ttcatttgtgcacaatagttgcctc

SEQ ID NO: 3975854 - DNA, 25 bp, Homo sapien
cacaatagttgcctcgagttttcta

SEQ ID NO: 3975855 - DNA, 25 bp, Homo sapien
cactggacttcgactgcatgcctga

SEQ ID NO: 3975856 - DNA, 25 bp, Homo sapien
cagcatgcactggacttcgactgca

SEQ ID NO: 3975857 - DNA, 25 bp, Homo sapien
ctggacttcgactgcatgcctgatt

SEQ ID NO: 3975858 - DNA, 25 bp, Homo sapien
catgcactggacttcgactgcatgc

SEQ ID NO: 3975859 - DNA, 25 bp, Homo sapien
tccatcacgtggaagatttgtttga

SEQ ID NO: 3975860 - DNA, 25 bp, Homo sapien
caggatgtgaccagtttagccagtc

SEQ ID NO: 3975861 - DNA, 25 bp, Homo sapien
ctggcctgggcctgatattacctgt

SEQ ID NO: 3975862 - DNA, 25 bp, Homo sapien
cctgttaaacagatgtacgcttttc

SEQ ID NO: 3975863 - DNA, 25 bp, Homo sapien
catttgtaggatctaataattctgt

SEQ ID NO: 3975864 - DNA, 25 bp, Homo sapien
ctgtccattgaagaaatcgtcgaat

SEQ ID NO: 3975865 - DNA, 25 bp, Homo sapien
acatttgtaggatctaataattctg

SEQ ID NO: 3975866 - DNA, 25 bp, Homo sapien
cattgaagaaatcgtcgaataaagg

SEQ ID NO: 3975867 - DNA, 25 bp, Homo sapien
gagggactcctgaatgtactcaagg

SEQ ID NO: 3975868 - DNA, 25 bp, Homo sapien
cattaagggctcaatggtgcagctg

SEQ ID NO: 3975869 - DNA, 25 bp, Homo sapien
tacgacctcgaagcaatggcctaga

SEQ ID NO: 3975870 - DNA, 25 bp, Homo sapien
tccagtgacaaaggatggacgcccc

SEQ ID NO: 3975871 - DNA, 25 bp, Homo sapien
tgagcttaccaaggtgcgagagcct

SEQ ID NO: 3975872 - DNA, 25 bp, Homo sapien
tgcggctgaacccagatgtgctgtg

SEQ ID NO: 3975873 - DNA, 25 bp, Homo sapien
taacagacgccggatttggaacact

SEQ ID NO: 3975874 - DNA, 25 bp, Homo sapien
ttaggagaggcctcaaagagaaccc

SEQ ID NO: 3975875 - DNA, 25 bp, Homo sapien
agccacagctcaggcagtagggagc

SEQ ID NO: 3975876 - DNA, 25 bp, Homo sapien
agctcaggcagtagggagcagccac

SEQ ID NO: 3975877 - DNA, 25 bp, Homo sapien
cagctcaggcagtagggagcagcca

SEQ ID NO: 3975878 - DNA, 25 bp, Homo sapien
cacagctcaggcagtagggagcagc

SEQ ID NO: 3975879 - DNA, 25 bp, Homo sapien
caatctggagggtgacgttgtggtc

SEQ ID NO: 3975880 - DNA, 25 bp, Homo sapien
tgggcatctggcagcttcgatttcc

SEQ ID NO: 3975881 - DNA, 25 bp, Homo sapien
acgttgtggtcgtgggcatctggca

SEQ ID NO: 3975882 - DNA, 25 bp, Homo sapien
tggcagcttcgatttcccctgcgtc

SEQ ID NO: 3975883 - DNA, 25 bp, Homo sapien
cacaactccgagaggaggaaacgga

SEQ ID NO: 3975884 - DNA, 25 bp, Homo sapien
gggtgaaggccggtggtgcgcgttc

SEQ ID NO: 3975885 - DNA, 25 bp, Homo sapien
ggtggtgcgcgttcccggcacaact

SEQ ID NO: 3975886 - DNA, 25 bp, Homo sapien
ggtcacccgggtcagcccgactcca

SEQ ID NO: 3975887 - DNA, 25 bp, Homo sapien
gaagcgcacgttgggctcaatgaag

SEQ ID NO: 3975888 - DNA, 25 bp, Homo sapien
tcggtgatccagaagcgcacgttgg

SEQ ID NO: 3975889 - DNA, 25 bp, Homo sapien
gatccagaagcgcacgttgggctca

SEQ ID NO: 3975890 - DNA, 25 bp, Homo sapien
gcgctcggtgatccagaagcgcacg

SEQ ID NO: 3975891 - DNA, 25 bp, Homo sapien
agccgcccaggttgcgtttcctcct

SEQ ID NO: 3975892 - DNA, 25 bp, Homo sapien
gccgcccaggttgcgtttcctcctc

SEQ ID NO: 3975893 - DNA, 25 bp, Homo sapien
ggagccgcccaggttgcgtttcctc

SEQ ID NO: 3975894 - DNA, 25 bp, Homo sapien
gagccgcccaggttgcgtttcctcc

SEQ ID NO: 3975895 - DNA, 25 bp, Homo sapien
cgccgccgccaggccgcgcgtggag

SEQ ID NO: 3975896 - DNA, 25 bp, Homo sapien
ccgccgccgccaggccgcgcgtgga

SEQ ID NO: 3975897 - DNA, 25 bp, Homo sapien
tggccgccgccgccaggccgcgcgt

SEQ ID NO: 3975898 - DNA, 25 bp, Homo sapien
ctggttagagtggccgccgccgcca

SEQ ID NO: 3975899 - DNA, 25 bp, Homo sapien
caatttcagggatgagggatcatgc

SEQ ID NO: 3975900 - DNA, 25 bp, Homo sapien
cgattacactaatcaatatctagaa

SEQ ID NO: 3975901 - DNA, 25 bp, Homo sapien
tcattgcaggagttacacggctaat

SEQ ID NO: 3975902 - DNA, 25 bp, Homo sapien
tatgttttacaatgaatacttcagc

SEQ ID NO: 3975903 - DNA, 25 bp, Homo sapien
gatgaaaatttcaggaccgttgatc

SEQ ID NO: 3975904 - DNA, 25 bp, Homo sapien
aatttcaggaccgttgatcagaagc

SEQ ID NO: 3975905 - DNA, 25 bp, Homo sapien
gaaaattcagtttaatacaaagaca

SEQ ID NO: 3975906 - DNA, 25 bp, Homo sapien
caggaccgttgatcagaagctttca

SEQ ID NO: 3975907 - DNA, 25 bp, Homo sapien
tattataggcaagattcaagtaagg

SEQ ID NO: 3975908 - DNA, 25 bp, Homo sapien
ttgccttctacaaataaccatcttg

SEQ ID NO: 3975909 - DNA, 25 bp, Homo sapien
gaagagtgtttccattgagacatga

SEQ ID NO: 3975910 - DNA, 25 bp, Homo sapien
tgagacatgatctaagaatagcctt

SEQ ID NO: 3975911 - DNA, 25 bp, Homo sapien
tctgaaagtactctttggaagcagc

SEQ ID NO: 3975912 - DNA, 25 bp, Homo sapien
tttggaagcagctggacttggcttg

SEQ ID NO: 3975913 - DNA, 25 bp, Homo sapien
cttctgaaagtactctttggaagca

SEQ ID NO: 3975914 - DNA, 25 bp, Homo sapien
tggaagcagctggacttggcttgat

SEQ ID NO: 3975915 - DNA, 25 bp, Homo sapien
tgaaagtttcattaaggcctgcctg

SEQ ID NO: 3975916 - DNA, 25 bp, Homo sapien
ggtaactgtgactttaccataataa

SEQ ID NO: 3975917 - DNA, 25 bp, Homo sapien
caaaagcttaattaggtaactgtga

SEQ ID NO: 3975918 - DNA, 25 bp, Homo sapien
tagtcccaaaagtgagtggcaatct

SEQ ID NO: 3975919 - DNA, 25 bp, Homo sapien
agatcgttgacgctcaaatgcttga

SEQ ID NO: 3975920 - DNA, 25 bp, Homo sapien
ggagatcgttgacgctcaaatgctt

SEQ ID NO: 3975921 - DNA, 25 bp, Homo sapien
tgggagatcgttgacgctcaaatgc

SEQ ID NO: 3975922 - DNA, 25 bp, Homo sapien
ctgggagatcgttgacgctcaaatg

SEQ ID NO: 3975923 - DNA, 25 bp, Homo sapien
attggggtcaattatgaagagacct

SEQ ID NO: 3975924 - DNA, 25 bp, Homo sapien
cattggggtcaattatgaagagacc

SEQ ID NO: 3975925 - DNA, 25 bp, Homo sapien
ctccattggggtcaattatgaagag

SEQ ID NO: 3975926 - DNA, 25 bp, Homo sapien
ccattggggtcaattatgaagagac

SEQ ID NO: 3975927 - DNA, 25 bp, Homo sapien
tcatcagtgcctcaacagtaccaga

SEQ ID NO: 3975928 - DNA, 25 bp, Homo sapien
tcaatcactcatggaaaaggcaggt

SEQ ID NO: 3975929 - DNA, 25 bp, Homo sapien
tgagatgaaccacgctaccacagtg

SEQ ID NO: 3975930 - DNA, 25 bp, Homo sapien
ccagctgaagtccaccaatagaagg

SEQ ID NO: 3975931 - DNA, 25 bp, Homo sapien
ggaggtcaagttctgccctatccct

SEQ ID NO: 3975932 - DNA, 25 bp, Homo sapien
gggctcaacaaggttaaatcaaatc

SEQ ID NO: 3975933 - DNA, 25 bp, Homo sapien
caagatgccaattctaagacccaag

SEQ ID NO: 3975934 - DNA, 25 bp, Homo sapien
caactgctgccagtaactatgctaa

SEQ ID NO: 3975935 - DNA, 25 bp, Homo sapien
aaataatcttaagttcatcagaaac

SEQ ID NO: 3975936 - DNA, 25 bp, Homo sapien
gcagaatgatactaaacatgaaaaa

SEQ ID NO: 3975937 - DNA, 25 bp, Homo sapien
tacataaatcccctaagaagcagaa

SEQ ID NO: 3975938 - DNA, 25 bp, Homo sapien
caaggtctacataaatcccctaaga

SEQ ID NO: 3975939 - DNA, 25 bp, Homo sapien
taagtctgacaagagtgcgatgttc

SEQ ID NO: 3975940 - DNA, 25 bp, Homo sapien
acaccgtagtctcgggaaatctgct

SEQ ID NO: 3975941 - DNA, 25 bp, Homo sapien
gcacaccgtagtctcgggaaatctg

SEQ ID NO: 3975942 - DNA, 25 bp, Homo sapien
ccgtagtctcgggaaatctgcttag

SEQ ID NO: 3975943 - DNA, 25 bp, Homo sapien
catgcaatcatcctaccccagtctc

SEQ ID NO: 3975944 - DNA, 25 bp, Homo sapien
ggactacagatgctttttctaattc

SEQ ID NO: 3975945 - DNA, 25 bp, Homo sapien
gggactacagatgctttttctaatt

SEQ ID NO: 3975946 - DNA, 25 bp, Homo sapien
gggctcatgcaatcatcctacccca

SEQ ID NO: 3975947 - DNA, 25 bp, Homo sapien
tgatcttgatagtccagcagcatag

SEQ ID NO: 3975948 - DNA, 25 bp, Homo sapien
aatttagattcttccaagcaagttt

SEQ ID NO: 3975949 - DNA, 25 bp, Homo sapien
cccaacccttgcgtaatttgatctt

SEQ ID NO: 3975950 - DNA, 25 bp, Homo sapien
caaaagctaggggtacaatgccata

SEQ ID NO: 3975951 - DNA, 25 bp, Homo sapien
acagttcacgtcgtgaaattcgtta

SEQ ID NO: 3975952 - DNA, 25 bp, Homo sapien
cacagttcacgtcgtgaaattcgtt

SEQ ID NO: 3975953 - DNA, 25 bp, Homo sapien
tcacagttcacgtcgtgaaattcgt

SEQ ID NO: 3975954 - DNA, 25 bp, Homo sapien
cagttcacgtcgtgaaattcgttag

SEQ ID NO: 3975955 - DNA, 25 bp, Homo sapien
ctccattgacaacggctgtaccctt

SEQ ID NO: 3975956 - DNA, 25 bp, Homo sapien
ttgaactctccattgacaacggctg

SEQ ID NO: 3975957 - DNA, 25 bp, Homo sapien
taaagtcatcaaggcttaggtcttt

SEQ ID NO: 3975958 - DNA, 25 bp, Homo sapien
tccccttaaagtcatcaaggcttag

SEQ ID NO: 3975959 - DNA, 25 bp, Homo sapien
acagcaggtgcatggcatgaggaac

SEQ ID NO: 3975960 - DNA, 25 bp, Homo sapien
ggtgacagcaggtgcatggcatgag

SEQ ID NO: 3975961 - DNA, 25 bp, Homo sapien
ctgggtgacagcaggtgcatggcat

SEQ ID NO: 3975962 - DNA, 25 bp, Homo sapien
tgacagcaggtgcatggcatgagga

SEQ ID NO: 3975963 - DNA, 25 bp, Homo sapien
tcggttcaactgtacatcttaggca

SEQ ID NO: 3975964 - DNA, 25 bp, Homo sapien
catatggagttcatcatttgctatg

SEQ ID NO: 3975965 - DNA, 25 bp, Homo sapien
gctatgtcaagcacctatgatttta

SEQ ID NO: 3975966 - DNA, 25 bp, Homo sapien
aaaaacccacactcatatggagttc

SEQ ID NO: 3975967 - DNA, 25 bp, Homo sapien
tgctacgtaaatagtcgttaagctg

SEQ ID NO: 3975968 - DNA, 25 bp, Homo sapien
ctcttacataaagtggtgatttgca

SEQ ID NO: 3975969 - DNA, 25 bp, Homo sapien
gggccaactgtaatttctccttcta

SEQ ID NO: 3975970 - DNA, 25 bp, Homo sapien
ggttctaggatatcgaaatctacag

SEQ ID NO: 3975971 - DNA, 25 bp, Homo sapien
agccaagacatgacataacacttac

SEQ ID NO: 3975972 - DNA, 25 bp, Homo sapien
gctccagccaagacatgacataaca

SEQ ID NO: 3975973 - DNA, 25 bp, Homo sapien
tccagccaagacatgacataacact

SEQ ID NO: 3975974 - DNA, 25 bp, Homo sapien
tggctccagccaagacatgacataa

SEQ ID NO: 3975975 - DNA, 25 bp, Homo sapien
agaacacaataaatttgtcaagctc

SEQ ID NO: 3975976 - DNA, 25 bp, Homo sapien
gaacacaataaatttgtcaagctcg

SEQ ID NO: 3975977 - DNA, 25 bp, Homo sapien
aacacaataaatttgtcaagctcgt

SEQ ID NO: 3975978 - DNA, 25 bp, Homo sapien
acacaataaatttgtcaagctcgtt

SEQ ID NO: 3975979 - DNA, 25 bp, Homo sapien
ttttcctggactggtgactgaaggc

SEQ ID NO: 3975980 - DNA, 25 bp, Homo sapien
aagttttcctggactggtgactgaa

SEQ ID NO: 3975981 - DNA, 25 bp, Homo sapien
agaaagttttcctggactggtgact

SEQ ID NO: 3975982 - DNA, 25 bp, Homo sapien
ttcctggactggtgactgaaggctg

SEQ ID NO: 3975983 - DNA, 25 bp, Homo sapien
ccaacggtggtttcagctgtccctg

SEQ ID NO: 3975984 - DNA, 25 bp, Homo sapien
acggtggtttcagctgtccctgttc

SEQ ID NO: 3975985 - DNA, 25 bp, Homo sapien
cgtgccaacggtggtttcagctgtc

SEQ ID NO: 3975986 - DNA, 25 bp, Homo sapien
tgccaacggtggtttcagctgtccc

SEQ ID NO: 3975987 - DNA, 25 bp, Homo sapien
tccaagaagggcgaatggccctcat

SEQ ID NO: 3975988 - DNA, 25 bp, Homo sapien
ctcatgcccagaagcgcggggtcct

SEQ ID NO: 3975989 - DNA, 25 bp, Homo sapien
tgtctgagaagcacgttcccggagc

SEQ ID NO: 3975990 - DNA, 25 bp, Homo sapien
cgttcccggagccaccagtgtctcc

SEQ ID NO: 3975991 - DNA, 25 bp, Homo sapien
tcggagcaaccgtcctacagcagcc

SEQ ID NO: 3975992 - DNA, 25 bp, Homo sapien
cgacgctcggagcaaccgtcctaca

SEQ ID NO: 3975993 - DNA, 25 bp, Homo sapien
gcaaccgtcctacagcagccgccat

SEQ ID NO: 3975994 - DNA, 25 bp, Homo sapien
gacgctcggagcaaccgtcctacag

SEQ ID NO: 3975995 - DNA, 25 bp, Homo sapien
gcgccacggggcgggcagagacgca

SEQ ID NO: 3975996 - DNA, 25 bp, Homo sapien
tcgggcgccacggggcgggcagaga

SEQ ID NO: 3975997 - DNA, 25 bp, Homo sapien
ctcgggcgccacggggcgggcagag

SEQ ID NO: 3975998 - DNA, 25 bp, Homo sapien
ccacggggcgggcagagacgcaggg

SEQ ID NO: 3975999 - DNA, 25 bp, Homo sapien
tctgtaacggtatgtggaactttat

SEQ ID NO: 3976000 - DNA, 25 bp, Homo sapien
catgagaaccagactaacaggtgtg

SEQ ID NO: 3976001 - DNA, 25 bp, Homo sapien
ctctctctgtaacggtatgtggaac

SEQ ID NO: 3976002 - DNA, 25 bp, Homo sapien
cagtctcatcagtctctctctgtaa

SEQ ID NO: 3976003 - DNA, 25 bp, Homo sapien
agcgccgggtcgcagccgacccgca

SEQ ID NO: 3976004 - DNA, 25 bp, Homo sapien
aagtgcatctttgtccgcggcccga

SEQ ID NO: 3976005 - DNA, 25 bp, Homo sapien
gccctccgaggaaacaaagtgcatc

SEQ ID NO: 3976006 - DNA, 25 bp, Homo sapien
aacaaagtgcatctttgtccgcggc

SEQ ID NO: 3976007 - DNA, 25 bp, Homo sapien
acacttcggagagcggctctgcaga

SEQ ID NO: 3976008 - DNA, 25 bp, Homo sapien
tcgcgagcaggacacttcggagagc

SEQ ID NO: 3976009 - DNA, 25 bp, Homo sapien
cgccgactgtcaatggagctggaaa

SEQ ID NO: 3976010 - DNA, 25 bp, Homo sapien
tggccaacacggtcttgctgaaagc

SEQ ID NO: 3976011 - DNA, 25 bp, Homo sapien
ggcaaagtgatatcaattccacccg

SEQ ID NO: 3976012 - DNA, 25 bp, Homo sapien
cactgggtctgatggtactggagcc

SEQ ID NO: 3976013 - DNA, 25 bp, Homo sapien
tactggagccttgcaagtttcgctg

SEQ ID NO: 3976014 - DNA, 25 bp, Homo sapien
cacggttgtgtatctcaggattcgg

SEQ ID NO: 3976015 - DNA, 25 bp, Homo sapien
gctggatcttcctgatcatcaagat

SEQ ID NO: 3976016 - DNA, 25 bp, Homo sapien
cttcctgatcatcaagattagcacc

SEQ ID NO: 3976017 - DNA, 25 bp, Homo sapien
ttttcaggtaactctgtgacttggc

SEQ ID NO: 3976018 - DNA, 25 bp, Homo sapien
cacaattgccaaacattagaataca

SEQ ID NO: 3976019 - DNA, 25 bp, Homo sapien
acctctgcctgacagtggtacctta

SEQ ID NO: 3976020 - DNA, 25 bp, Homo sapien
tggccgcttactgctccttaggagg

SEQ ID NO: 3976021 - DNA, 25 bp, Homo sapien
ttaggaggttctcgccctcagttac

SEQ ID NO: 3976022 - DNA, 25 bp, Homo sapien
ggcagcgggcatgccagttcctgct

SEQ ID NO: 3976023 - DNA, 25 bp, Homo sapien
agctctctccggatgaccccttgcc

SEQ ID NO: 3976024 - DNA, 25 bp, Homo sapien
ctctctccggatgaccccttgccat

SEQ ID NO: 3976025 - DNA, 25 bp, Homo sapien
gagagggtatgaagtggccttttcc

SEQ ID NO: 3976026 - DNA, 25 bp, Homo sapien
caaagagagggtatgaagtggcctt

SEQ ID NO: 3976027 - DNA, 25 bp, Homo sapien
agtaggaggagatgtttcatgccga

SEQ ID NO: 3976028 - DNA, 25 bp, Homo sapien
tcgaaggtaactttcgatgtgagct

SEQ ID NO: 3976029 - DNA, 25 bp, Homo sapien
ttcatgccgataacactcatccctt

SEQ ID NO: 3976030 - DNA, 25 bp, Homo sapien
taaatatttgcattagaccaaacat

SEQ ID NO: 3976031 - DNA, 25 bp, Homo sapien
tcttggaagtattgtgggggcttcc

SEQ ID NO: 3976032 - DNA, 25 bp, Homo sapien
cttgaagacaccagatctggcagca

SEQ ID NO: 3976033 - DNA, 25 bp, Homo sapien
ctgtacttgaagacaccagatctgg

SEQ ID NO: 3976034 - DNA, 25 bp, Homo sapien
tacttgaagacaccagatctggcag

SEQ ID NO: 3976035 - DNA, 25 bp, Homo sapien
caagggattgatacccagaacatac

SEQ ID NO: 3976036 - DNA, 25 bp, Homo sapien
cggtgagtggaaggacaacactgta

SEQ ID NO: 3976037 - DNA, 25 bp, Homo sapien
tatagcacttggcacctgataggac

SEQ ID NO: 3976038 - DNA, 25 bp, Homo sapien
gaagacatacacaccactaaagaac

SEQ ID NO: 3976039 - DNA, 25 bp, Homo sapien
cgttcctcacgttggtgttgacaaa

SEQ ID NO: 3976040 - DNA, 25 bp, Homo sapien
caagttccaccgtcagtaggaggca

SEQ ID NO: 3976041 - DNA, 25 bp, Homo sapien
tgaacccagcccgttgagtctgtgc

SEQ ID NO: 3976042 - DNA, 25 bp, Homo sapien
ggtgccacctcccattagccttggt

SEQ ID NO: 3976043 - DNA, 25 bp, Homo sapien
gaggtttacagccaagttccagatg

SEQ ID NO: 3976044 - DNA, 25 bp, Homo sapien
cattgagggccccttacaaggcaca

SEQ ID NO: 3976045 - DNA, 25 bp, Homo sapien
catttgaacgtgaaggtacagggac

SEQ ID NO: 3976046 - DNA, 25 bp, Homo sapien
ttaacggtgccaaatagtgccaggg

SEQ ID NO: 3976047 - DNA, 25 bp, Homo sapien
tggggagcccgatctagcttagtct

SEQ ID NO: 3976048 - DNA, 25 bp, Homo sapien
ttaaagaagaataacgactgagtga

SEQ ID NO: 3976049 - DNA, 25 bp, Homo sapien
gaccagagattgaatgctgagtgga

SEQ ID NO: 3976050 - DNA, 25 bp, Homo sapien
gaagaataacgactgagtgaccaga

SEQ ID NO: 3976051 - DNA, 25 bp, Homo sapien
ctgactggctgacagtgctctcctg

SEQ ID NO: 3976052 - DNA, 25 bp, Homo sapien
gacagtgctctcctgcatccaagag

SEQ ID NO: 3976053 - DNA, 25 bp, Homo sapien
tgactggctgacagtgctctcctgc

SEQ ID NO: 3976054 - DNA, 25 bp, Homo sapien
gctctcctgcatccaagagctgccc

SEQ ID NO: 3976055 - DNA, 25 bp, Homo sapien
tcttgggttctatccagatctgaga

SEQ ID NO: 3976056 - DNA, 25 bp, Homo sapien
cctggagctcggcatctgagtgact

SEQ ID NO: 3976057 - DNA, 25 bp, Homo sapien
ttttgtaccccgttgctttctgcag

SEQ ID NO: 3976058 - DNA, 25 bp, Homo sapien
gagtgactgtccgtcctagggcgtc

SEQ ID NO: 3976059 - DNA, 25 bp, Homo sapien
tggagttgtaattgtcatactccca

SEQ ID NO: 3976060 - DNA, 25 bp, Homo sapien
tctggagttgtaattgtcatactcc

SEQ ID NO: 3976061 - DNA, 25 bp, Homo sapien
tatctggagttgtaattgtcatact

SEQ ID NO: 3976062 - DNA, 25 bp, Homo sapien
ctggagttgtaattgtcatactccc

SEQ ID NO: 3976063 - DNA, 25 bp, Homo sapien
tcttctaaagcgatgatgaaagatg

SEQ ID NO: 3976064 - DNA, 25 bp, Homo sapien
cttctaaagcgatgatgaaagatgt

SEQ ID NO: 3976065 - DNA, 25 bp, Homo sapien
cagacatatgtcttcactctccctg

SEQ ID NO: 3976066 - DNA, 25 bp, Homo sapien
agtcagacatatgtcttcactctcc

SEQ ID NO: 3976067 - DNA, 25 bp, Homo sapien
agacatatgtcttcactctccctga

SEQ ID NO: 3976068 - DNA, 25 bp, Homo sapien
ctaagtcagacatatgtcttcactc

SEQ ID NO: 3976069 - DNA, 25 bp, Homo sapien
ctgctggcctgcgtggcgtgctcgt

SEQ ID NO: 3976070 - DNA, 25 bp, Homo sapien
ggcctgcgtggcgtgctcgtgccga

SEQ ID NO: 3976071 - DNA, 25 bp, Homo sapien
gctggcctgcgtggcgtgctcgtgc

SEQ ID NO: 3976072 - DNA, 25 bp, Homo sapien
cctgcgtggcgtgctcgtgccgata

SEQ ID NO: 3976073 - DNA, 25 bp, Homo sapien
ccaggcctgcgacgggcagagagct

SEQ ID NO: 3976074 - DNA, 25 bp, Homo sapien
cctgcgacgggcagagagctgtctt

SEQ ID NO: 3976075 - DNA, 25 bp, Homo sapien
gacgggcagagagctgtcttgtttc

SEQ ID NO: 3976076 - DNA, 25 bp, Homo sapien
gcagcccaggcctgcgacgggcaga

SEQ ID NO: 3976077 - DNA, 25 bp, Homo sapien
tggtgagttagccctcttgcttcga

SEQ ID NO: 3976078 - DNA, 25 bp, Homo sapien
tgagttagccctcttgcttcgagcc

SEQ ID NO: 3976079 - DNA, 25 bp, Homo sapien
agactccagagcctctggccgttcc

SEQ ID NO: 3976080 - DNA, 25 bp, Homo sapien
gagttagccctcttgcttcgagcca

SEQ ID NO: 3976081 - DNA, 25 bp, Homo sapien
tgtcatggactgagctgcctcggtt

SEQ ID NO: 3976082 - DNA, 25 bp, Homo sapien
taacagagaggttctctgaggaccc

SEQ ID NO: 3976083 - DNA, 25 bp, Homo sapien
ccctgggatctgcgttgggtcctgc

SEQ ID NO: 3976084 - DNA, 25 bp, Homo sapien
tggctgctcaggagtgggtccctgc

SEQ ID NO: 3976085 - DNA, 25 bp, Homo sapien
tctggggtgacttgtgagtagataa

SEQ ID NO: 3976086 - DNA, 25 bp, Homo sapien
tgccctcaccctgcagcggagtccc

SEQ ID NO: 3976087 - DNA, 25 bp, Homo sapien
ccctgcagcggagtccccatgggcc

SEQ ID NO: 3976088 - DNA, 25 bp, Homo sapien
cctcaccctgcagcggagtccccat

SEQ ID NO: 3976089 - DNA, 25 bp, Homo sapien
gagggacttttcacaggaagtttga

SEQ ID NO: 3976090 - DNA, 25 bp, Homo sapien
ctaaacaaagagggacttttcacag

SEQ ID NO: 3976091 - DNA, 25 bp, Homo sapien
gacttttcacaggaagtttgatgac

SEQ ID NO: 3976092 - DNA, 25 bp, Homo sapien
caaagagggacttttcacaggaagt

SEQ ID NO: 3976093 - DNA, 25 bp, Homo sapien
gacgcgttccccctgcttgttgaag

SEQ ID NO: 3976094 - DNA, 25 bp, Homo sapien
tgaagcacgagcctcttctctgaca

SEQ ID NO: 3976095 - DNA, 25 bp, Homo sapien
tgcttgttgaagcacgagcctcttc

SEQ ID NO: 3976096 - DNA, 25 bp, Homo sapien
cttctctgacagttagggtgacttg

SEQ ID NO: 3976097 - DNA, 25 bp, Homo sapien
ccctgttcagagagctttgcgtgct

SEQ ID NO: 3976098 - DNA, 25 bp, Homo sapien
tgggtaggccctgttcagagagctt

SEQ ID NO: 3976099 - DNA, 25 bp, Homo sapien
ggcttccgtgggtaggccctgttca

SEQ ID NO: 3976100 - DNA, 25 bp, Homo sapien
tcagagagctttgcgtgctctcatc

SEQ ID NO: 3976101 - DNA, 25 bp, Homo sapien
ccctttgggcgctggtcattcagag

SEQ ID NO: 3976102 - DNA, 25 bp, Homo sapien
gccacatcctccacgccctttgggc

SEQ ID NO: 3976103 - DNA, 25 bp, Homo sapien
ctttgggcgctggtcattcagagag

SEQ ID NO: 3976104 - DNA, 25 bp, Homo sapien
gaggccctctcagacacgcctggcc

SEQ ID NO: 3976105 - DNA, 25 bp, Homo sapien
tagctctagtaaacagacatttagc

SEQ ID NO: 3976106 - DNA, 25 bp, Homo sapien
atacagatctgcacacttgacaaag

SEQ ID NO: 3976107 - DNA, 25 bp, Homo sapien
gacttctttgtttagctctagtaaa

SEQ ID NO: 3976108 - DNA, 25 bp, Homo sapien
tctgcacacttgacaaagaggaatt

SEQ ID NO: 3976109 - DNA, 25 bp, Homo sapien
gaggtgtcatggtccttaaggcctg

SEQ ID NO: 3976110 - DNA, 25 bp, Homo sapien
ggtgtcatggtccttaaggcctgac

SEQ ID NO: 3976111 - DNA, 25 bp, Homo sapien
aggtgtcatggtccttaaggcctga

SEQ ID NO: 3976112 - DNA, 25 bp, Homo sapien
aggaggtgtcatggtccttaaggcc

SEQ ID NO: 3976113 - DNA, 25 bp, Homo sapien
tgtcacttgttctcgcattgataga

SEQ ID NO: 3976114 - DNA, 25 bp, Homo sapien
gtgtcacttgttctcgcattgatag

SEQ ID NO: 3976115 - DNA, 25 bp, Homo sapien
gtcacttgttctcgcattgatagac

SEQ ID NO: 3976116 - DNA, 25 bp, Homo sapien
tgtggtcatcacaggttgcattaaa

SEQ ID NO: 3976117 - DNA, 25 bp, Homo sapien
ttgtggtcatcacaggttgcattaa

SEQ ID NO: 3976118 - DNA, 25 bp, Homo sapien
tggtgtcgggggttgtggtcatcac

SEQ ID NO: 3976119 - DNA, 25 bp, Homo sapien
gctggtggtgtcgggggttgtggtc

SEQ ID NO: 3976120 - DNA, 25 bp, Homo sapien
ttcagaaggtgaccaaccagtgaac

SEQ ID NO: 3976121 - DNA, 25 bp, Homo sapien
ccttcagaaggtgaccaaccagtga

SEQ ID NO: 3976122 - DNA, 25 bp, Homo sapien
cagaaggtgaccaaccagtgaactc

SEQ ID NO: 3976123 - DNA, 25 bp, Homo sapien
ttccttcagaaggtgaccaaccagt

SEQ ID NO: 3976124 - DNA, 25 bp, Homo sapien
gccgacaccttgatcatttcggcca

SEQ ID NO: 3976125 - DNA, 25 bp, Homo sapien
cttgtgtgtcgggtgccgacacctt

SEQ ID NO: 3976126 - DNA, 25 bp, Homo sapien
tgtgtgtcgggtgccgacaccttga

SEQ ID NO: 3976127 - DNA, 25 bp, Homo sapien
tcatttcggccagacccccaagaga

SEQ ID NO: 3976128 - DNA, 25 bp, Homo sapien
ggccttagtacccttatctctggag

SEQ ID NO: 3976129 - DNA, 25 bp, Homo sapien
tataagcatcaggaagtcccctgct

SEQ ID NO: 3976130 - DNA, 25 bp, Homo sapien
tacaaacccagtgcccagagtattg

SEQ ID NO: 3976131 - DNA, 25 bp, Homo sapien
tagtgagtgctctccctcgaggagc

SEQ ID NO: 3976132 - DNA, 25 bp, Homo sapien
caggaacgtgaatgtcggctctcca

SEQ ID NO: 3976133 - DNA, 25 bp, Homo sapien
gaacgtgaatgtcggctctccagcc

SEQ ID NO: 3976134 - DNA, 25 bp, Homo sapien
tgcaggaacgtgaatgtcggctctc

SEQ ID NO: 3976135 - DNA, 25 bp, Homo sapien
ctgcaggaacgtgaatgtcggctct

SEQ ID NO: 3976136 - DNA, 25 bp, Homo sapien
acacatcagtacccggcaggagtgg

SEQ ID NO: 3976137 - DNA, 25 bp, Homo sapien
acacacatcagtacccggcaggagt

SEQ ID NO: 3976138 - DNA, 25 bp, Homo sapien
cgacacacatcagtacccggcagga

SEQ ID NO: 3976139 - DNA, 25 bp, Homo sapien
atcagtacccggcaggagtggcaga

SEQ ID NO: 3976140 - DNA, 25 bp, Homo sapien
gattgccaggtaccaagtatcaggc

SEQ ID NO: 3976141 - DNA, 25 bp, Homo sapien
tagtttatgttgactgcggattgcc

SEQ ID NO: 3976142 - DNA, 25 bp, Homo sapien
actctggtgacctttggccgtgggc

SEQ ID NO: 3976143 - DNA, 25 bp, Homo sapien
tccttccggatagaccttgggcctc

SEQ ID NO: 3976144 - DNA, 25 bp, Homo sapien
tttcatggtgtgaggagacgcatgt

SEQ ID NO: 3976145 - DNA, 25 bp, Homo sapien
gagacgcatgtgtatttgcctctga

SEQ ID NO: 3976146 - DNA, 25 bp, Homo sapien
tgtgaggagacgcatgtgtatttgc

SEQ ID NO: 3976147 - DNA, 25 bp, Homo sapien
gcatgtgtatttgcctctgacccct

SEQ ID NO: 3976148 - DNA, 25 bp, Homo sapien
gaggaccacatctcggttggttaga

SEQ ID NO: 3976149 - DNA, 25 bp, Homo sapien
gcaggtgctcttgcgggtgaggacc

SEQ ID NO: 3976150 - DNA, 25 bp, Homo sapien
catctcggttggttagacgtgtccc

SEQ ID NO: 3976151 - DNA, 25 bp, Homo sapien
acttttaatgggtccacaaggcctg

SEQ ID NO: 3976152 - DNA, 25 bp, Homo sapien
taagtaggaatcaggtgtgagccag

SEQ ID NO: 3976153 - DNA, 25 bp, Homo sapien
cccaggcacaagataagtaggaatc

SEQ ID NO: 3976154 - DNA, 25 bp, Homo sapien
tgtgagccagtggtcaggagatttg

SEQ ID NO: 3976155 - DNA, 25 bp, Homo sapien
gtcaggagatttgggtctagactct

SEQ ID NO: 3976156 - DNA, 25 bp, Homo sapien
tttggtgtcattaagggctccctcc

SEQ ID NO: 3976157 - DNA, 25 bp, Homo sapien
tggattctgtcctggtatctggtgg

SEQ ID NO: 3976158 - DNA, 25 bp, Homo sapien
caaagggatttggtgtcattaaggg

SEQ ID NO: 3976159 - DNA, 25 bp, Homo sapien
ctcacaccaagataggagccttctg

SEQ ID NO: 3976160 - DNA, 25 bp, Homo sapien
aggagtcgggagttgtatgggccca

SEQ ID NO: 3976161 - DNA, 25 bp, Homo sapien
ggaaggagtcgggagttgtatgggc

SEQ ID NO: 3976162 - DNA, 25 bp, Homo sapien
gagtcgggagttgtatgggcccaga

SEQ ID NO: 3976163 - DNA, 25 bp, Homo sapien
gtcgggagttgtatgggcccagacc

SEQ ID NO: 3976164 - DNA, 25 bp, Homo sapien
ggccgtgaatccctcacttccagtg

SEQ ID NO: 3976165 - DNA, 25 bp, Homo sapien
acttccagtgcacatatctctcttg

SEQ ID NO: 3976166 - DNA, 25 bp, Homo sapien
tagtgccgtgctcttgaatgctttg

SEQ ID NO: 3976167 - DNA, 25 bp, Homo sapien
ctttgtttctggtcccaccgatggc

SEQ ID NO: 3976168 - DNA, 25 bp, Homo sapien
ccagggtgttctcggcatctcaaac

SEQ ID NO: 3976169 - DNA, 25 bp, Homo sapien
gggtgttctcggcatctcaaactta

SEQ ID NO: 3976170 - DNA, 25 bp, Homo sapien
ctgccagggtgttctcggcatctca

SEQ ID NO: 3976171 - DNA, 25 bp, Homo sapien
gccagggtgttctcggcatctcaaa

SEQ ID NO: 3976172 - DNA, 25 bp, Homo sapien
agcagccccacgaagtacacagggt

SEQ ID NO: 3976173 - DNA, 25 bp, Homo sapien
gtacacagggtgtggactgttcctc

SEQ ID NO: 3976174 - DNA, 25 bp, Homo sapien
agccccacgaagtacacagggtgtg

SEQ ID NO: 3976175 - DNA, 25 bp, Homo sapien
cacgaagtacacagggtgtggactg

SEQ ID NO: 3976176 - DNA, 25 bp, Homo sapien
gtttatttccagagcagaaccttgg

SEQ ID NO: 3976177 - DNA, 25 bp, Homo sapien
gggcaggctcctcgtatctgggtgt

SEQ ID NO: 3976178 - DNA, 25 bp, Homo sapien
accttggggctcactggagcagtga

SEQ ID NO: 3976179 - DNA, 25 bp, Homo sapien
caggctcctcgtatctgggtgtggt

SEQ ID NO: 3976180 - DNA, 25 bp, Homo sapien
tgtccaggtgtttgatcagaggctg

SEQ ID NO: 3976181 - DNA, 25 bp, Homo sapien
ctctgccctactgctgtatatgcac

SEQ ID NO: 3976182 - DNA, 25 bp, Homo sapien
ctgtcactggggcaaaggtagtgct

SEQ ID NO: 3976183 - DNA, 25 bp, Homo sapien
gctgtatatgcacgctgtcactggg

SEQ ID NO: 3976184 - DNA, 25 bp, Homo sapien
ttctgtccccacgtgaccaacatca

SEQ ID NO: 3976185 - DNA, 25 bp, Homo sapien
gaaaaatcttgggtgtctggctgtg

SEQ ID NO: 3976186 - DNA, 25 bp, Homo sapien
tccagagtcccgtggtcctccaagg

SEQ ID NO: 3976187 - DNA, 25 bp, Homo sapien
ttgacctagagcctctgaccttcca

SEQ ID NO: 3976188 - DNA, 25 bp, Homo sapien
tggttggcagcgaggacttgaccta

SEQ ID NO: 3976189 - DNA, 25 bp, Homo sapien
cagagtcccgtggtcctccaaggct

SEQ ID NO: 3976190 - DNA, 25 bp, Homo sapien
ggcgcatgtgcgcttcttctaggat

SEQ ID NO: 3976191 - DNA, 25 bp, Homo sapien
tcagtgcctggatgagcaagcttcc

SEQ ID NO: 3976192 - DNA, 25 bp, Homo sapien
tgaaacttggtcaggggctcctgga

SEQ ID NO: 3976193 - DNA, 25 bp, Homo sapien
tcatgattgcagattgagagccact

SEQ ID NO: 3976194 - DNA, 25 bp, Homo sapien
aatttgtagtatttgtacttagaag

SEQ ID NO: 3976195 - DNA, 25 bp, Homo sapien
cttctaagtacaaatactacaaatt

SEQ ID NO: 3976196 - DNA, 25 bp, Homo sapien
ctctccaggcatcgtccttggtccc

SEQ ID NO: 3976197 - DNA, 25 bp, Homo sapien
gcatcgtccttggtcccctgggagt

SEQ ID NO: 3976198 - DNA, 25 bp, Homo sapien
caggcatcgtccttggtcccctggg

SEQ ID NO: 3976199 - DNA, 25 bp, Homo sapien
atcgtccttggtcccctgggagtgg

SEQ ID NO: 3976200 - DNA, 25 bp, Homo sapien
caggaacataagtgcccgggtttat

SEQ ID NO: 3976201 - DNA, 25 bp, Homo sapien
tcagagctgggtctaaggctgctcc

SEQ ID NO: 3976202 - DNA, 25 bp, Homo sapien
tgtatgcccagtgcgcctttgtagg

SEQ ID NO: 3976203 - DNA, 25 bp, Homo sapien
tctttgggcactagagctgtgccca

SEQ ID NO: 3976204 - DNA, 25 bp, Homo sapien
gattagagacaatggctgcacaggc

SEQ ID NO: 3976205 - DNA, 25 bp, Homo sapien
ctgaggattagagacaatggctgca

SEQ ID NO: 3976206 - DNA, 25 bp, Homo sapien
tagagacaatggctgcacaggcact

SEQ ID NO: 3976207 - DNA, 25 bp, Homo sapien
gacaatggctgcacaggcactgtgg

SEQ ID NO: 3976208 - DNA, 25 bp, Homo sapien
tcgggcctggatgaaaagagactta

SEQ ID NO: 3976209 - DNA, 25 bp, Homo sapien
taattgggatctcgccttgttcggg

SEQ ID NO: 3976210 - DNA, 25 bp, Homo sapien
aaaaggcttgagtcactcggtgacg

SEQ ID NO: 3976211 - DNA, 25 bp, Homo sapien
ctcggtgacgcagcccctgatcagg

SEQ ID NO: 3976212 - DNA, 25 bp, Homo sapien
ggatggagtctttagtcctgcagac

SEQ ID NO: 3976213 - DNA, 25 bp, Homo sapien
gacatcacaggcagaattgtgacac

SEQ ID NO: 3976214 - DNA, 25 bp, Homo sapien
tggagtctttagtcctgcagacatc

SEQ ID NO: 3976215 - DNA, 25 bp, Homo sapien
caggcagaattgtgacactgccttc

SEQ ID NO: 3976216 - DNA, 25 bp, Homo sapien
caaactctagagtcacctgtgacat

SEQ ID NO: 3976217 - DNA, 25 bp, Homo sapien
ctgaattgtttcaaactctagagtc

SEQ ID NO: 3976218 - DNA, 25 bp, Homo sapien
tcaaactctagagtcacctgtgaca

SEQ ID NO: 3976219 - DNA, 25 bp, Homo sapien
gaattgtttcaaactctagagtcac

SEQ ID NO: 3976220 - DNA, 25 bp, Homo sapien
gttctgcacgttacacgtgactgtt

SEQ ID NO: 3976221 - DNA, 25 bp, Homo sapien
catgttcatcatgtccacgtgctca

SEQ ID NO: 3976222 - DNA, 25 bp, Homo sapien
tagtgcacattcattgtgcgtgtgc

SEQ ID NO: 3976223 - DNA, 25 bp, Homo sapien
tacatgtgttcattactagtgcaca

SEQ ID NO: 3976224 - DNA, 25 bp, Homo sapien
ggaggaaagcgcaaagggaaaagca

SEQ ID NO: 3976225 - DNA, 25 bp, Homo sapien
agtgtgaagacctccgaaggaccat

SEQ ID NO: 3976226 - DNA, 25 bp, Homo sapien
ggaccataggtaagctgtcctgcct

SEQ ID NO: 3976227 - DNA, 25 bp, Homo sapien
gaagttccctcacattagccagtgt

SEQ ID NO: 3976228 - DNA, 25 bp, Homo sapien
gtgagtagcaggtgatccgccaagc

SEQ ID NO: 3976229 - DNA, 25 bp, Homo sapien
caagccgtttgtgcattaaggcaaa

SEQ ID NO: 3976230 - DNA, 25 bp, Homo sapien
gcaaatgggtgagccgccaagctgt

SEQ ID NO: 3976231 - DNA, 25 bp, Homo sapien
caggtgatccgccaagccgtttgtg

SEQ ID NO: 3976232 - DNA, 25 bp, Homo sapien
ctggtcccacgcaggacacggctgt

SEQ ID NO: 3976233 - DNA, 25 bp, Homo sapien
tgtgcctggtcccacgcaggacacg

SEQ ID NO: 3976234 - DNA, 25 bp, Homo sapien
gtcccacgcaggacacggctgtggt

SEQ ID NO: 3976235 - DNA, 25 bp, Homo sapien
cccacgcaggacacggctgtggtga

SEQ ID NO: 3976236 - DNA, 25 bp, Homo sapien
cagggaacgtcttgcactcatccac

SEQ ID NO: 3976237 - DNA, 25 bp, Homo sapien
cagcttccagtctgcctggccccac

SEQ ID NO: 3976238 - DNA, 25 bp, Homo sapien
tcactctaggcctcctccccataag

SEQ ID NO: 3976239 - DNA, 25 bp, Homo sapien
tccccataagcttccaggcattgcc

SEQ ID NO: 3976240 - DNA, 25 bp, Homo sapien
gggagcacctgagtgtccctcagct

SEQ ID NO: 3976241 - DNA, 25 bp, Homo sapien
ctaggtccataaactggcctcttgg

SEQ ID NO: 3976242 - DNA, 25 bp, Homo sapien
aacgtgcgtgctggcgtgtggaaat

SEQ ID NO: 3976243 - DNA, 25 bp, Homo sapien
ccttctaggtccataaactggcctc

SEQ ID NO: 3976244 - DNA, 25 bp, Homo sapien
tgggatggtgtgaggaacgtgcgtg

SEQ ID NO: 3976245 - DNA, 25 bp, Homo sapien
gagaaggctcttgatcagagctgag

SEQ ID NO: 3976246 - DNA, 25 bp, Homo sapien
gtgccatgagaaggctcttgatcag

SEQ ID NO: 3976247 - DNA, 25 bp, Homo sapien
aggaccccaggatgccgccatgtct

SEQ ID NO: 3976248 - DNA, 25 bp, Homo sapien
ccatgtctggatggccccgaacggt

SEQ ID NO: 3976249 - DNA, 25 bp, Homo sapien
gcactgaaaacatgctgtccacggg

SEQ ID NO: 3976250 - DNA, 25 bp, Homo sapien
catattgctgcataaacgtgtgggc

SEQ ID NO: 3976251 - DNA, 25 bp, Homo sapien
tgtaagtgtgtgcagcgagttcctc

SEQ ID NO: 3976252 - DNA, 25 bp, Homo sapien
cagccagtactcaaggcagggagac

SEQ ID NO: 3976253 - DNA, 25 bp, Homo sapien
aaggatctctctgcgagctccctga

SEQ ID NO: 3976254 - DNA, 25 bp, Homo sapien
aggaagtggcgtccctcctggctta

SEQ ID NO: 3976255 - DNA, 25 bp, Homo sapien
tcctggcttaaaggatctctctgcg

SEQ ID NO: 3976256 - DNA, 25 bp, Homo sapien
cctggaggaagtggcgtccctcctg

SEQ ID NO: 3976257 - DNA, 25 bp, Homo sapien
gggtggatggatgttgccttctctt

SEQ ID NO: 3976258 - DNA, 25 bp, Homo sapien
ctgggcgtctccattgctgtagcag

SEQ ID NO: 3976259 - DNA, 25 bp, Homo sapien
gctgtagcagcatgagtgggtggat

SEQ ID NO: 3976260 - DNA, 25 bp, Homo sapien
ctcttcaacctggaagccaggactg

SEQ ID NO: 3976261 - DNA, 25 bp, Homo sapien
tcgaattgccttgtgggagagcctc

SEQ ID NO: 3976262 - DNA, 25 bp, Homo sapien
catttatgaggaggctgttcacaga

SEQ ID NO: 3976263 - DNA, 25 bp, Homo sapien
aaagtagctgctgcgtctggcgtgc

SEQ ID NO: 3976264 - DNA, 25 bp, Homo sapien
caaagccttaactgtttccaggagc

SEQ ID NO: 3976265 - DNA, 25 bp, Homo sapien
cccagcctgcgcatgttctttaaac

SEQ ID NO: 3976266 - DNA, 25 bp, Homo sapien
cctgcgcatgttctttaaaccagac

SEQ ID NO: 3976267 - DNA, 25 bp, Homo sapien
cagcctgcgcatgttctttaaacca

SEQ ID NO: 3976268 - DNA, 25 bp, Homo sapien
gcctgcgcatgttctttaaaccaga

SEQ ID NO: 3976269 - DNA, 25 bp, Homo sapien
tcccagagaagctgaatcggctaca

SEQ ID NO: 3976270 - DNA, 25 bp, Homo sapien
gagtgttgcacacaggccatcattg

SEQ ID NO: 3976271 - DNA, 25 bp, Homo sapien
tgagggcagaggttgaggacccttt

SEQ ID NO: 3976272 - DNA, 25 bp, Homo sapien
catcctcacggcgatagtggtttga

SEQ ID NO: 3976273 - DNA, 25 bp, Homo sapien
tgattatctctgtagcaacgctctt

SEQ ID NO: 3976274 - DNA, 25 bp, Homo sapien
tcctgattcccaccgggtctgaggg

SEQ ID NO: 3976275 - DNA, 25 bp, Homo sapien
tcacgtgctcatgtggtctggtgga

SEQ ID NO: 3976276 - DNA, 25 bp, Homo sapien
tctgagggtggacactccttctctc

SEQ ID NO: 3976277 - DNA, 25 bp, Homo sapien
agcttcctctagctgcccagagctg

SEQ ID NO: 3976278 - DNA, 25 bp, Homo sapien
aaagctgttctgtctctgatcctgg

SEQ ID NO: 3976279 - DNA, 25 bp, Homo sapien
tgctgtgcaaattgctggccagttt

SEQ ID NO: 3976280 - DNA, 25 bp, Homo sapien
gcctttggttggacaaatggccaga

SEQ ID NO: 3976281 - DNA, 25 bp, Homo sapien
gaaggtgccttccaaagggcctgtg

SEQ ID NO: 3976282 - DNA, 25 bp, Homo sapien
gctgataatgagacgcgggtaaccc

SEQ ID NO: 3976283 - DNA, 25 bp, Homo sapien
acctgtggtaaagcccctcatggga

SEQ ID NO: 3976284 - DNA, 25 bp, Homo sapien
ggatatcgttccatcctggtgcgtg

SEQ ID NO: 3976285 - DNA, 25 bp, Homo sapien
ggtgggcagcgtctgctgagcagat

SEQ ID NO: 3976286 - DNA, 25 bp, Homo sapien
ctgagttttggacaaggtgcagcgg

SEQ ID NO: 3976287 - DNA, 25 bp, Homo sapien
cgcttcctgactcggatgccttgac

SEQ ID NO: 3976288 - DNA, 25 bp, Homo sapien
ttggccacgtagttaagtctccctc

SEQ ID NO: 3976289 - DNA, 25 bp, Homo sapien
cagctgtgggttgatgcagcaaagc

SEQ ID NO: 3976290 - DNA, 25 bp, Homo sapien
tcgagctgagcacccacgaagcctt

SEQ ID NO: 3976291 - DNA, 25 bp, Homo sapien
gtaatccacaccagtaactcagatg

SEQ ID NO: 3976292 - DNA, 25 bp, Homo sapien
aagccttcctcagagcaaagacctg

SEQ ID NO: 3976293 - DNA, 25 bp, Homo sapien
catccggtatctgtcccctctttgg

SEQ ID NO: 3976294 - DNA, 25 bp, Homo sapien
tctttggttcacaccctggatgcag

SEQ ID NO: 3976295 - DNA, 25 bp, Homo sapien
tgtataaattcgcttgccttcctca

SEQ ID NO: 3976296 - DNA, 25 bp, Homo sapien
agtggcctttgtataaattcgcttg

SEQ ID NO: 3976297 - DNA, 25 bp, Homo sapien
tcagtgattattggaggtgatgcta

SEQ ID NO: 3976298 - DNA, 25 bp, Homo sapien
ctcagtgattattggaggtgatgct

SEQ ID NO: 3976299 - DNA, 25 bp, Homo sapien
cccacctccatactcagtgattatt

SEQ ID NO: 3976300 - DNA, 25 bp, Homo sapien
actcagtgattattggaggtgatgc

SEQ ID NO: 3976301 - DNA, 25 bp, Homo sapien
gcagacaaggcactccgcttcctgt

SEQ ID NO: 3976302 - DNA, 25 bp, Homo sapien
agacaaggcactccgcttcctgtgt

SEQ ID NO: 3976303 - DNA, 25 bp, Homo sapien
gcactccgcttcctgtgtagcagtt

SEQ ID NO: 3976304 - DNA, 25 bp, Homo sapien
aaggcactccgcttcctgtgtagca

SEQ ID NO: 3976305 - DNA, 25 bp, Homo sapien
ggagtgtaaacaggatcctggtgaa

SEQ ID NO: 3976306 - DNA, 25 bp, Homo sapien
ttgcatatttattggtgacctcata

SEQ ID NO: 3976307 - DNA, 25 bp, Homo sapien
ggagcaacggatttgttttgacaaa

SEQ ID NO: 3976308 - DNA, 25 bp, Homo sapien
tcctggtgaatagctttctcatggc

SEQ ID NO: 3976309 - DNA, 25 bp, Homo sapien
gcactgagcggaagtaaagactccc

SEQ ID NO: 3976310 - DNA, 25 bp, Homo sapien
agccgtattgccacgtcgcaggtgc

SEQ ID NO: 3976311 - DNA, 25 bp, Homo sapien
aagactcccagatttcctgaaatga

SEQ ID NO: 3976312 - DNA, 25 bp, Homo sapien
tgctgcctttaaactcatgcttgtg

SEQ ID NO: 3976313 - DNA, 25 bp, Homo sapien
gttggctgacaacttggcaagtgtg

SEQ ID NO: 3976314 - DNA, 25 bp, Homo sapien
caggggccccttggcttgctgtgcc

SEQ ID NO: 3976315 - DNA, 25 bp, Homo sapien
gctgtgccctctgttggttgacgta

SEQ ID NO: 3976316 - DNA, 25 bp, Homo sapien
ggttgacgtaccctctgttggctga

SEQ ID NO: 3976317 - DNA, 25 bp, Homo sapien
ctgctcattcccatattctagtgtg
